United States Patent Application Publication US 2014/0004565 A1 - sequence listing, part 97

SEQ ID NO: 2407695 - RNA, 19 nt, Artificial Sequence
  Description of Artificial Sequence: Synthetic oligonucleotide
aggagcgagcggucuugug

SEQ ID NO: 2407696 - RNA, 19 nt, Artificial Sequence
  Description of Artificial Sequence: Synthetic oligonucleotide
auaccaccucacugacacu

SEQ ID NO: 2407697 - RNA, 19 nt, Artificial Sequence
  Description of Artificial Sequence: Synthetic oligonucleotide
gcgauauuggguggaagca

SEQ ID NO: 2407698 - RNA, 19 nt, Artificial Sequence
  Description of Artificial Sequence: Synthetic oligonucleotide
uggcggccaggucuggcuc

SEQ ID NO: 2407699 - RNA, 19 nt, Artificial Sequence
  Description of Artificial Sequence: Synthetic oligonucleotide
gucaaccucuacauucaaa

SEQ ID NO: 2407700 - RNA, 19 nt, Artificial Sequence
  Description of Artificial Sequence: Synthetic oligonucleotide
ugcugagaccuggcggcca

SEQ ID NO: 2407701 - RNA, 19 nt, Artificial Sequence
  Description of Artificial Sequence: Synthetic oligonucleotide
gccugagccccucccaacc

SEQ ID NO: 2407702 - RNA, 19 nt, Artificial Sequence
  Description of Artificial Sequence: Synthetic oligonucleotide
acucuaguacuggccuugu

SEQ ID NO: 2407703 - RNA, 19 nt, Artificial Sequence
  Description of Artificial Sequence: Synthetic oligonucleotide
cacacagcccaaacgggcu

SEQ ID NO: 2407704 - RNA, 19 nt, Artificial Sequence
  Description of Artificial Sequence: Synthetic oligonucleotide
gugggugggagggaacaca

SEQ ID NO: 2407705 - RNA, 19 nt, Artificial Sequence
  Description of Artificial Sequence: Synthetic oligonucleotide
ugcauaccugaagccuggu

SEQ ID NO: 2407706 - RNA, 19 nt, Artificial Sequence
  Description of Artificial Sequence: Synthetic oligonucleotide
gcggucuugugcugagacc

SEQ ID NO: 2407707 - RNA, 19 nt, Artificial Sequence
  Description of Artificial Sequence: Synthetic oligonucleotide
cucccgauacauucaugua

SEQ ID NO: 2407708 - RNA, 19 nt, Artificial Sequence
  Description of Artificial Sequence: Synthetic oligonucleotide
gagaccuggcggccagguc

SEQ ID NO: 2407709 - RNA, 19 nt, Artificial Sequence
  Description of Artificial Sequence: Synthetic oligonucleotide
gucugcgauauugggugga

SEQ ID NO: 2407710 - RNA, 19 nt, Artificial Sequence
  Description of Artificial Sequence: Synthetic oligonucleotide
gugggaggaacuuggcaau

SEQ ID NO: 2407711 - RNA, 19 nt, Artificial Sequence
  Description of Artificial Sequence: Synthetic oligonucleotide
ccucccgauacauucaugu

SEQ ID NO: 2407712 - RNA, 19 nt, Artificial Sequence
  Description of Artificial Sequence: Synthetic oligonucleotide
caggugggugggagggaac

SEQ ID NO: 2407713 - RNA, 19 nt, Artificial Sequence
  Description of Artificial Sequence: Synthetic oligonucleotide
cuguggcacuucgaguguc

SEQ ID NO: 2407714 - RNA, 19 nt, Artificial Sequence
  Description of Artificial Sequence: Synthetic oligonucleotide
caaggacugcccugagaaa

SEQ ID NO: 2407715 - RNA, 19 nt, Artificial Sequence
  Description of Artificial Sequence: Synthetic oligonucleotide
cccgauacauucauguagu

SEQ ID NO: 2407716 - RNA, 19 nt, Artificial Sequence
  Description of Artificial Sequence: Synthetic oligonucleotide
gcauaccugaagccugguc

SEQ ID NO: 2407717 - RNA, 19 nt, Artificial Sequence
  Description of Artificial Sequence: Synthetic oligonucleotide
caucugcaccuugcauacc

SEQ ID NO: 2407718 - RNA, 19 nt, Artificial Sequence
  Description of Artificial Sequence: Synthetic oligonucleotide
gguggggugcuggaaguca

SEQ ID NO: 2407719 - RNA, 19 nt, Artificial Sequence
  Description of Artificial Sequence: Synthetic oligonucleotide
ugccucuccccagcacaug

SEQ ID NO: 2407720 - RNA, 19 nt, Artificial Sequence
  Description of Artificial Sequence: Synthetic oligonucleotide
ccaccucacugacacugag

SEQ ID NO: 2407721 - RNA, 19 nt, Artificial Sequence
  Description of Artificial Sequence: Synthetic oligonucleotide
ggccaaaugucugcgauau

SEQ ID NO: 2407722 - RNA, 19 nt, Artificial Sequence
  Description of Artificial Sequence: Synthetic oligonucleotide
ccugagccccucccaaccc

SEQ ID NO: 2407723 - RNA, 19 nt, Artificial Sequence
  Description of Artificial Sequence: Synthetic oligonucleotide
cugacugcccacacccacu

SEQ ID NO: 2407724 - RNA, 19 nt, Artificial Sequence
  Description of Artificial Sequence: Synthetic oligonucleotide
ccgauacauucauguaguc

SEQ ID NO: 2407725 - RNA, 19 nt, Artificial Sequence
  Description of Artificial Sequence: Synthetic oligonucleotide
gccaggucuggcucgccac

SEQ ID NO: 2407726 - RNA, 19 nt, Artificial Sequence
  Description of Artificial Sequence: Synthetic oligonucleotide
guggcacuucgagugucca

SEQ ID NO: 2407727 - RNA, 19 nt, Artificial Sequence
  Description of Artificial Sequence: Synthetic oligonucleotide
ccauuuuaauguaguuuua

SEQ ID NO: 2407728 - RNA, 19 nt, Artificial Sequence
  Description of Artificial Sequence: Synthetic oligonucleotide
ccaccacuccucacucuag

SEQ ID NO: 2407729 - RNA, 19 nt, Artificial Sequence
  Description of Artificial Sequence: Synthetic oligonucleotide
ccucuacauucaaauggga

SEQ ID NO: 2407730 - RNA, 19 nt, Artificial Sequence
  Description of Artificial Sequence: Synthetic oligonucleotide
cacugacacugagcuuccc

SEQ ID NO: 2407731 - RNA, 19 nt, Artificial Sequence
  Description of Artificial Sequence: Synthetic oligonucleotide
ggagaaaggaagggccaaa

SEQ ID NO: 2407732 - RNA, 19 nt, Artificial Sequence
  Description of Artificial Sequence: Synthetic oligonucleotide
ggaaggccugagccccucc

SEQ ID NO: 2407733 - RNA, 19 nt, Artificial Sequence
  Description of Artificial Sequence: Synthetic oligonucleotide
acaaggcucgaagcucauu

SEQ ID NO: 2407734 - RNA, 19 nt, Artificial Sequence
  Description of Artificial Sequence: Synthetic oligonucleotide
aggcugaggcacaucuuua

SEQ ID NO: 2407735 - RNA, 19 nt, Artificial Sequence
  Description of Artificial Sequence: Synthetic oligonucleotide
cucccaaccccucccgaua

SEQ ID NO: 2407736 - RNA, 19 nt, Artificial Sequence
  Description of Artificial Sequence: Synthetic oligonucleotide
gccuuagcugugucauuca

SEQ ID NO: 2407737 - RNA, 19 nt, Artificial Sequence
  Description of Artificial Sequence: Synthetic oligonucleotide
ggucuugugcugagaccug

SEQ ID NO: 2407738 - RNA, 19 nt, Artificial Sequence
  Description of Artificial Sequence: Synthetic oligonucleotide
ggucuggcucgccacuuaa

SEQ ID NO: 2407739 - RNA, 19 nt, Artificial Sequence
  Description of Artificial Sequence: Synthetic oligonucleotide
caaaugggaaagggcccaa

SEQ ID NO: 2407740 - RNA, 19 nt, Artificial Sequence
  Description of Artificial Sequence: Synthetic oligonucleotide
gggagaaaggaagggccaa

SEQ ID NO: 2407741 - RNA, 19 nt, Artificial Sequence
  Description of Artificial Sequence: Synthetic oligonucleotide
gccuaaucuaccagauaaa

SEQ ID NO: 2407742 - RNA, 19 nt, Artificial Sequence
  Description of Artificial Sequence: Synthetic oligonucleotide
gggguuagugugugugugu

SEQ ID NO: 2407743 - RNA, 19 nt, Artificial Sequence
  Description of Artificial Sequence: Synthetic oligonucleotide
gcccacacccacuggcauc

SEQ ID NO: 2407744 - RNA, 19 nt, Artificial Sequence
  Description of Artificial Sequence: Synthetic oligonucleotide
ggcucgaagcucauucugu

SEQ ID NO: 2407745 - RNA, 19 nt, Artificial Sequence
  Description of Artificial Sequence: Synthetic oligonucleotide
cucuaguacuggccuugua

SEQ ID NO: 2407746 - RNA, 19 nt, Artificial Sequence
  Description of Artificial Sequence: Synthetic oligonucleotide
ggcucaacuguggcacuuc

SEQ ID NO: 2407747 - RNA, 19 nt, Artificial Sequence
  Description of Artificial Sequence: Synthetic oligonucleotide
caaaggagcgagcggucuu

SEQ ID NO: 2407748 - RNA, 19 nt, Artificial Sequence
  Description of Artificial Sequence: Synthetic oligonucleotide
gagcggucuugugcugaga

SEQ ID NO: 2407749 - RNA, 19 nt, Artificial Sequence
  Description of Artificial Sequence: Synthetic oligonucleotide
gucuggcucgccacuuaaa

SEQ ID NO: 2407750 - RNA, 19 nt, Artificial Sequence
  Description of Artificial Sequence: Synthetic oligonucleotide
cgagcggucuugugcugag

SEQ ID NO: 2407751 - RNA, 19 nt, Artificial Sequence
  Description of Artificial Sequence: Synthetic oligonucleotide
cagcccaaacgggcucaac

SEQ ID NO: 2407752 - RNA, 19 nt, Artificial Sequence
  Description of Artificial Sequence: Synthetic oligonucleotide
cccucccgauacauucaug

SEQ ID NO: 2407753 - RNA, 19 nt, Artificial Sequence
  Description of Artificial Sequence: Synthetic oligonucleotide
cgauacauucauguagucu

SEQ ID NO: 2407754 - RNA, 19 nt, Artificial Sequence
  Description of Artificial Sequence: Synthetic oligonucleotide
gcaaaggagcgagcggucu

SEQ ID NO: 2407755 - RNA, 19 nt, Artificial Sequence
  Description of Artificial Sequence: Synthetic oligonucleotide
gcaaugagaucaccaucuu

SEQ ID NO: 2407756 - RNA, 19 nt, Artificial Sequence
  Description of Artificial Sequence: Synthetic oligonucleotide
gggcccaaggggaaagaua

SEQ ID NO: 2407757 - RNA, 19 nt, Artificial Sequence
  Description of Artificial Sequence: Synthetic oligonucleotide
ggcucgccacuuaaagcaa

SEQ ID NO: 2407758 - RNA, 19 nt, Artificial Sequence
  Description of Artificial Sequence: Synthetic oligonucleotide
cacucugcaccugcugccu

SEQ ID NO: 2407759 - RNA, 19 nt, Artificial Sequence
  Description of Artificial Sequence: Synthetic oligonucleotide
cccaaacgggcucaacugu

SEQ ID NO: 2407760 - RNA, 19 nt, Artificial Sequence
  Description of Artificial Sequence: Synthetic oligonucleotide
gcucgccacuuaaagcaaa

SEQ ID NO: 2407761 - RNA, 19 nt, Artificial Sequence
  Description of Artificial Sequence: Synthetic oligonucleotide
cacacccacuggcauccau

SEQ ID NO: 2407762 - RNA, 19 nt, Artificial Sequence
  Description of Artificial Sequence: Synthetic oligonucleotide
caaccccucccgauacauu

SEQ ID NO: 2407763 - RNA, 19 nt, Artificial Sequence
  Description of Artificial Sequence: Synthetic oligonucleotide
gcggccaggucuggcucgc

SEQ ID NO: 2407764 - RNA, 19 nt, Artificial Sequence
  Description of Artificial Sequence: Synthetic oligonucleotide
caggaggugggaggaacuu

SEQ ID NO: 2407765 - RNA, 19 nt, Artificial Sequence
  Description of Artificial Sequence: Synthetic oligonucleotide
ccagaggcugaggcacauc

SEQ ID NO: 2407766 - RNA, 19 nt, Artificial Sequence
  Description of Artificial Sequence: Synthetic oligonucleotide
cgauauuggguggaagcau

SEQ ID NO: 2407767 - RNA, 19 nt, Artificial Sequence
  Description of Artificial Sequence: Synthetic oligonucleotide
cccaaccccucccgauaca

SEQ ID NO: 2407768 - RNA, 19 nt, Artificial Sequence
  Description of Artificial Sequence: Synthetic oligonucleotide
ccaggucuggcucgccacu

SEQ ID NO: 2407769 - RNA, 19 nt, Artificial Sequence
  Description of Artificial Sequence: Synthetic oligonucleotide
ccucccaaccccucccgau

SEQ ID NO: 2407770 - RNA, 19 nt, Artificial Sequence
  Description of Artificial Sequence: Synthetic oligonucleotide
ccaaccccucccgauacau

SEQ ID NO: 2407771 - RNA, 19 nt, Artificial Sequence
  Description of Artificial Sequence: Synthetic oligonucleotide
gccaaaugucugcgauauu

SEQ ID NO: 2407772 - RNA, 19 nt, Artificial Sequence
  Description of Artificial Sequence: Synthetic oligonucleotide
gggcucaacuguggcacuu

SEQ ID NO: 2407773 - RNA, 19 nt, Artificial Sequence
  Description of Artificial Sequence: Synthetic oligonucleotide
cccagcccacagugagaga

SEQ ID NO: 2407774 - RNA, 19 nt, Artificial Sequence
  Description of Artificial Sequence: Synthetic oligonucleotide
ccccucccgauacauucau

SEQ ID NO: 2407775 - RNA, 19 nt, Artificial Sequence
  Description of Artificial Sequence: Synthetic oligonucleotide
cgggcucaacuguggcacu

SEQ ID NO: 2407776 - RNA, 19 nt, Artificial Sequence
  Description of Artificial Sequence: Synthetic oligonucleotide
uuuacgauacccuuaaugu

SEQ ID NO: 2407777 - RNA, 19 nt, Artificial Sequence
  Description of Artificial Sequence: Synthetic oligonucleotide
agguuugucaauucuaccc

SEQ ID NO: 2407778 - RNA, 19 nt, Artificial Sequence
  Description of Artificial Sequence: Synthetic oligonucleotide
auugccgauauuuagcugg

SEQ ID NO: 2407779 - RNA, 19 nt, Artificial Sequence
  Description of Artificial Sequence: Synthetic oligonucleotide
aaugauauccuuuacgaua

SEQ ID NO: 2407780 - RNA, 19 nt, Artificial Sequence
  Description of Artificial Sequence: Synthetic oligonucleotide
ugaaugauauccuuuacga

SEQ ID NO: 2407781 - RNA, 19 nt, Artificial Sequence
  Description of Artificial Sequence: Synthetic oligonucleotide
uuuaagauagguuugucaa

SEQ ID NO: 2407782 - RNA, 19 nt, Artificial Sequence
  Description of Artificial Sequence: Synthetic oligonucleotide
uacgauacccuuaauguag

SEQ ID NO: 2407783 - RNA, 19 nt, Artificial Sequence
  Description of Artificial Sequence: Synthetic oligonucleotide
uuugguuccacguagucgc

SEQ ID NO: 2407784 - RNA, 19 nt, Artificial Sequence
  Description of Artificial Sequence: Synthetic oligonucleotide
aacauugccgauauuuagc

SEQ ID NO: 2407785 - RNA, 19 nt, Artificial Sequence
  Description of Artificial Sequence: Synthetic oligonucleotide
aaacauugccgauauuuag

SEQ ID NO: 2407786 - RNA, 19 nt, Artificial Sequence
  Description of Artificial Sequence: Synthetic oligonucleotide
augaaugauauccuuuacg

SEQ ID NO: 2407787 - RNA, 19 nt, Artificial Sequence
  Description of Artificial Sequence: Synthetic oligonucleotide
aaguccacagcacgcaggc

SEQ ID NO: 2407788 - RNA, 19 nt, Artificial Sequence
  Description of Artificial Sequence: Synthetic oligonucleotide
gaucacacggcccauggcg

SEQ ID NO: 2407789 - RNA, 19 nt, Artificial Sequence
  Description of Artificial Sequence: Synthetic oligonucleotide
aaagggaugcucuacggga

SEQ ID NO: 2407790 - RNA, 19 nt, Artificial Sequence
  Description of Artificial Sequence: Synthetic oligonucleotide
aaugagacccacuuugcga

SEQ ID NO: 2407791 - RNA, 19 nt, Artificial Sequence
  Description of Artificial Sequence: Synthetic oligonucleotide
agcaaugagacccacuuug

SEQ ID NO: 2407792 - RNA, 19 nt, Artificial Sequence
  Description of Artificial Sequence: Synthetic oligonucleotide
augagacccacuuugcgac

SEQ ID NO: 2407793 - RNA, 19 nt, Artificial Sequence
  Description of Artificial Sequence: Synthetic oligonucleotide
ucuuaaaucgguagggauc

SEQ ID NO: 2407794 - RNA, 19 nt, Artificial Sequence
  Description of Artificial Sequence: Synthetic oligonucleotide
cacgauaguacccucaggc

SEQ ID NO: 2407795 - RNA, 19 nt, Artificial Sequence
  Description of Artificial Sequence: Synthetic oligonucleotide
gugguuaccaccuccaaag

SEQ ID NO: 2407796 - RNA, 19 nt, Artificial Sequence
  Description of Artificial Sequence: Synthetic oligonucleotide
uguggauucccucugcggc

SEQ ID NO: 2407797 - RNA, 19 nt, Artificial Sequence
  Description of Artificial Sequence: Synthetic oligonucleotide
cuuuacgauacccuuaaug

SEQ ID NO: 2407798 - RNA, 19 nt, Artificial Sequence
  Description of Artificial Sequence: Synthetic oligonucleotide
cuuaauguagccgugccgc

SEQ ID NO: 2407799 - RNA, 19 nt, Artificial Sequence
  Description of Artificial Sequence: Synthetic oligonucleotide
cuuaaaucgguagggaucc

SEQ ID NO: 2407800 - RNA, 19 nt, Artificial Sequence
  Description of Artificial Sequence: Synthetic oligonucleotide
gaucuaauucuccuucucc

SEQ ID NO: 2407801 - RNA, 19 nt, Artificial Sequence
  Description of Artificial Sequence: Synthetic oligonucleotide
aagauagguuugucaauuc

SEQ ID NO: 2407802 - RNA, 19 nt, Artificial Sequence
  Description of Artificial Sequence: Synthetic oligonucleotide
uccaaagggaugcucuacg

SEQ ID NO: 2407803 - RNA, 19 nt, Artificial Sequence
  Description of Artificial Sequence: Synthetic oligonucleotide
augauauccuuuacgauac

SEQ ID NO: 2407804 - RNA, 19 nt, Artificial Sequence
  Description of Artificial Sequence: Synthetic oligonucleotide
cauaguucccggaugcucg

SEQ ID NO: 2407805 - RNA, 19 nt, Artificial Sequence
  Description of Artificial Sequence: Synthetic oligonucleotide
uuugcgaccagcaggggca

SEQ ID NO: 2407806 - RNA, 19 nt, Artificial Sequence
  Description of Artificial Sequence: Synthetic oligonucleotide
ugagaucuaauucuccuuc

SEQ ID NO: 2407807 - RNA, 19 nt, Artificial Sequence
  Description of Artificial Sequence: Synthetic oligonucleotide
gauucauggccacaccccg

SEQ ID NO: 2407808 - RNA, 19 nt, Artificial Sequence
  Description of Artificial Sequence: Synthetic oligonucleotide
uuuugguuccacguagucg

SEQ ID NO: 2407809 - RNA, 19 nt, Artificial Sequence
  Description of Artificial Sequence: Synthetic oligonucleotide
uuugccuuguacuuguggu

SEQ ID NO: 2407810 - RNA, 19 nt, Artificial Sequence
  Description of Artificial Sequence: Synthetic oligonucleotide
ucccgaaagaccacuuucg

SEQ ID NO: 2407811 - RNA, 19 nt, Artificial Sequence
  Description of Artificial Sequence: Synthetic oligonucleotide
ucugcggcgaugaacagcu

SEQ ID NO: 2407812 - RNA, 19 nt, Artificial Sequence
  Description of Artificial Sequence: Synthetic oligonucleotide
gauacccuuaauguagccg

SEQ ID NO: 2407813 - RNA, 19 nt, Artificial Sequence
  Description of Artificial Sequence: Synthetic oligonucleotide
agcuccugagaucuaauuc

SEQ ID NO: 2407814 - RNA, 19 nt, Artificial Sequence
  Description of Artificial Sequence: Synthetic oligonucleotide
auagguuugucaauucuac

SEQ ID NO: 2407815 - RNA, 19 nt, Artificial Sequence
  Description of Artificial Sequence: Synthetic oligonucleotide
cacauacuuuauuagcucc

SEQ ID NO: 2407816 - RNA, 19 nt, Artificial Sequence
  Description of Artificial Sequence: Synthetic oligonucleotide
auacccuuaauguagccgu

SEQ ID NO: 2407817 - RNA, 19 nt, Artificial Sequence
  Description of Artificial Sequence: Synthetic oligonucleotide
uucacucgagucuucuugg

SEQ ID NO: 2407818 - RNA, 19 nt, Artificial Sequence
  Description of Artificial Sequence: Synthetic oligonucleotide
gagcgcggaacacagaucc

SEQ ID NO: 2407819 - RNA, 19 nt, Artificial Sequence
  Description of Artificial Sequence: Synthetic oligonucleotide
ucgguagggaucccgaaag

SEQ ID NO: 2407820 - RNA, 19 nt, Artificial Sequence
  Description of Artificial Sequence: Synthetic oligonucleotide
accaacaacagcucuguug

SEQ ID NO: 2407821 - RNA, 19 nt, Artificial Sequence
  Description of Artificial Sequence: Synthetic oligonucleotide
cacguagucgcccaguccg

SEQ ID NO: 2407822 - RNA, 19 nt, Artificial Sequence
  Description of Artificial Sequence: Synthetic oligonucleotide
uuuauuagcuccugagauc

SEQ ID NO: 2407823 - RNA, 19 nt, Artificial Sequence
  Description of Artificial Sequence: Synthetic oligonucleotide
cacuuugcgaccagcaggg

SEQ ID NO: 2407824 - RNA, 19 nt, Artificial Sequence
  Description of Artificial Sequence: Synthetic oligonucleotide
uguguggauucccucugcg

SEQ ID NO: 2407825 - RNA, 19 nt, Artificial Sequence
  Description of Artificial Sequence: Synthetic oligonucleotide
ucuacgggauucauggcca

SEQ ID NO: 2407826 - RNA, 19 nt, Artificial Sequence
  Description of Artificial Sequence: Synthetic oligonucleotide
ugugcuggugguuaccacc

SEQ ID NO: 2407827 - RNA, 19 nt, Artificial Sequence
  Description of Artificial Sequence: Synthetic oligonucleotide
ccaacaacagcucuguugg

SEQ ID NO: 2407828 - RNA, 19 nt, Artificial Sequence
  Description of Artificial Sequence: Synthetic oligonucleotide
agaucuaauucuccuucuc

SEQ ID NO: 2407829 - RNA, 19 nt, Artificial Sequence
  Description of Artificial Sequence: Synthetic oligonucleotide
aucccgaaagaccacuuuc

SEQ ID NO: 2407830 - RNA, 19 nt, Artificial Sequence
  Description of Artificial Sequence: Synthetic oligonucleotide
acuuuauuagcuccugaga

SEQ ID NO: 2407831 - RNA, 19 nt, Artificial Sequence
  Description of Artificial Sequence: Synthetic oligonucleotide
gauauccuuuacgauaccc

SEQ ID NO: 2407832 - RNA, 19 nt, Artificial Sequence
  Description of Artificial Sequence: Synthetic oligonucleotide
acauugccgauauuuagcu

SEQ ID NO: 2407833 - RNA, 19 nt, Artificial Sequence
  Description of Artificial Sequence: Synthetic oligonucleotide
gagucugccggcaagcacg

SEQ ID NO: 2407834 - RNA, 19 nt, Artificial Sequence
  Description of Artificial Sequence: Synthetic oligonucleotide
cuugccgcaguacacaaac

SEQ ID NO: 2407835 - RNA, 19 nt, Artificial Sequence
  Description of Artificial Sequence: Synthetic oligonucleotide
cuuuaagauagguuuguca

SEQ ID NO: 2407836 - RNA, 19 nt, Artificial Sequence
  Description of Artificial Sequence: Synthetic oligonucleotide
cucuacgggauucauggcc

SEQ ID NO: 2407837 - RNA, 19 nt, Artificial Sequence
  Description of Artificial Sequence: Synthetic oligonucleotide
acacguggccagcaguucc

SEQ ID NO: 2407838 - RNA, 19 nt, Artificial Sequence
  Description of Artificial Sequence: Synthetic oligonucleotide
uaaaucgguagggaucccg

SEQ ID NO: 2407839 - RNA, 19 nt, Artificial Sequence
  Description of Artificial Sequence: Synthetic oligonucleotide
uccuuuacgauacccuuaa

SEQ ID NO: 2407840 - RNA, 19 nt, Artificial Sequence
  Description of Artificial Sequence: Synthetic oligonucleotide
agauagguuugucaauucu

SEQ ID NO: 2407841 - RNA, 19 nt, Artificial Sequence
  Description of Artificial Sequence: Synthetic oligonucleotide
aaagaccacuuucgcgagg

SEQ ID NO: 2407842 - RNA, 19 nt, Artificial Sequence
  Description of Artificial Sequence: Synthetic oligonucleotide
aguacccucaggcauggug

SEQ ID NO: 2407843 - RNA, 19 nt, Artificial Sequence
  Description of Artificial Sequence: Synthetic oligonucleotide
uucuuaaaucgguagggau

SEQ ID NO: 2407844 - RNA, 19 nt, Artificial Sequence
  Description of Artificial Sequence: Synthetic oligonucleotide
acgggcaaaacauugccga

SEQ ID NO: 2407845 - RNA, 19 nt, Artificial Sequence
  Description of Artificial Sequence: Synthetic oligonucleotide
guagccgugccgcucagcg

SEQ ID NO: 2407846 - RNA, 19 nt, Artificial Sequence
  Description of Artificial Sequence: Synthetic oligonucleotide
uaagauagguuugucaauu

SEQ ID NO: 2407847 - RNA, 19 nt, Artificial Sequence
  Description of Artificial Sequence: Synthetic oligonucleotide
auggcggcgagucugccgg

SEQ ID NO: 2407848 - RNA, 19 nt, Artificial Sequence
  Description of Artificial Sequence: Synthetic oligonucleotide
gauaguacccucaggcaug

SEQ ID NO: 2407849 - RNA, 19 nt, Artificial Sequence
  Description of Artificial Sequence: Synthetic oligonucleotide
uuaagauagguuugucaau

SEQ ID NO: 2407850 - RNA, 19 nt, Artificial Sequence
  Description of Artificial Sequence: Synthetic oligonucleotide
ggaggaaauaaccuucuug

SEQ ID NO: 2407851 - RNA, 19 nt, Artificial Sequence
  Description of Artificial Sequence: Synthetic oligonucleotide
caaugagacccacuuugcg

SEQ ID NO: 2407852 - RNA, 19 nt, Artificial Sequence
  Description of Artificial Sequence: Synthetic oligonucleotide
ugcggcgaugaacagcucc

SEQ ID NO: 2407853 - RNA, 19 nt, Artificial Sequence
  Description of Artificial Sequence: Synthetic oligonucleotide
uugccgauauuuagcuggg

SEQ ID NO: 2407854 - RNA, 19 nt, Artificial Sequence
  Description of Artificial Sequence: Synthetic oligonucleotide
agcacauacuuuauuagcu

SEQ ID NO: 2407855 - RNA, 19 nt, Artificial Sequence
  Description of Artificial Sequence: Synthetic oligonucleotide
aaaacauugccgauauuua

SEQ ID NO: 2407856 - RNA, 19 nt, Artificial Sequence
  Description of Artificial Sequence: Synthetic oligonucleotide
uucacgugagcgcggaaca

SEQ ID NO: 2407857 - RNA, 19 nt, Artificial Sequence
  Description of Artificial Sequence: Synthetic oligonucleotide
cuuugccuuguacuugugg

SEQ ID NO: 2407858 - RNA, 19 nt, Artificial Sequence
  Description of Artificial Sequence: Synthetic oligonucleotide
ugccuuguacuugugguag

SEQ ID NO: 2407859 - RNA, 19 nt, Artificial Sequence
  Description of Artificial Sequence: Synthetic oligonucleotide
uggaugguuugccaaugug

SEQ ID NO: 2407860 - RNA, 19 nt, Artificial Sequence
  Description of Artificial Sequence: Synthetic oligonucleotide
uuacgauacccuuaaugua

SEQ ID NO: 2407861 - RNA, 19 nt, Artificial Sequence
  Description of Artificial Sequence: Synthetic oligonucleotide
caguuuugguuccacguag

SEQ ID NO: 2407862 - RNA, 19 nt, Artificial Sequence
  Description of Artificial Sequence: Synthetic oligonucleotide
cugcccucggaucacacgg

SEQ ID NO: 2407863 - RNA, 19 nt, Artificial Sequence
  Description of Artificial Sequence: Synthetic oligonucleotide
acgguguuucacgugagcg

SEQ ID NO: 2407864 - RNA, 19 nt, Artificial Sequence
  Description of Artificial Sequence: Synthetic oligonucleotide
gacuguggcauaguucccg

SEQ ID NO: 2407865 - RNA, 19 nt, Artificial Sequence
  Description of Artificial Sequence: Synthetic oligonucleotide
cuuacgguguuucacguga

SEQ ID NO: 2407866 - RNA, 19 nt, Artificial Sequence
  Description of Artificial Sequence: Synthetic oligonucleotide
auggccacaccccguacac

SEQ ID NO: 2407867 - RNA, 19 nt, Artificial Sequence
  Description of Artificial Sequence: Synthetic oligonucleotide
ucggauaguggaugguuug

SEQ ID NO: 2407868 - RNA, 19 nt, Artificial Sequence
  Description of Artificial Sequence: Synthetic oligonucleotide
uguggcauaguucccggau

SEQ ID NO: 2407869 - RNA, 19 nt, Artificial Sequence
  Description of Artificial Sequence: Synthetic oligonucleotide
uauccuuuacgauacccuu

SEQ ID NO: 2407870 - RNA, 19 nt, Artificial Sequence
  Description of Artificial Sequence: Synthetic oligonucleotide
acagauccggcgccuuucc

SEQ ID NO: 2407871 - RNA, 19 nt, Artificial Sequence
  Description of Artificial Sequence: Synthetic oligonucleotide
guuggcggaggaaauaacc

SEQ ID NO: 2407872 - RNA, 19 nt, Artificial Sequence
  Description of Artificial Sequence: Synthetic oligonucleotide
gguuaccaccuccaaaggg

SEQ ID NO: 2407873 - RNA, 19 nt, Artificial Sequence
  Description of Artificial Sequence: Synthetic oligonucleotide
acuguggcauaguucccgg

SEQ ID NO: 2407874 - RNA, 19 nt, Artificial Sequence
  Description of Artificial Sequence: Synthetic oligonucleotide
ugugguaggcacgaccagc

SEQ ID NO: 2407875 - RNA, 19 nt, Artificial Sequence
  Description of Artificial Sequence: Synthetic oligonucleotide
guagggaucccgaaagacc

SEQ ID NO: 2407876 - RNA, 19 nt, Artificial Sequence
  Description of Artificial Sequence: Synthetic oligonucleotide
agcgaaguccacagcacgc

SEQ ID NO: 2407877 - RNA, 19 nt, Artificial Sequence
  Description of Artificial Sequence: Synthetic oligonucleotide
gguguuucacgugagcgcg

SEQ ID NO: 2407878 - RNA, 19 nt, Artificial Sequence
  Description of Artificial Sequence: Synthetic oligonucleotide
cucuucggauaguggaugg

SEQ ID NO: 2407879 - RNA, 19 nt, Artificial Sequence
  Description of Artificial Sequence: Synthetic oligonucleotide
uagucgcccaguccggcgg

SEQ ID NO: 2407880 - RNA, 19 nt, Artificial Sequence
  Description of Artificial Sequence: Synthetic oligonucleotide
cacaaacugcccugugugg

SEQ ID NO: 2407881 - RNA, 19 nt, Artificial Sequence
  Description of Artificial Sequence: Synthetic oligonucleotide
ucugcccucggaucacacg

SEQ ID NO: 2407882 - RNA, 19 nt, Artificial Sequence
  Description of Artificial Sequence: Synthetic oligonucleotide
auaguucccggaugcucgg

SEQ ID NO: 2407883 - RNA, 19 nt, Artificial Sequence
  Description of Artificial Sequence: Synthetic oligonucleotide
acgauacccuuaauguagc

SEQ ID NO: 2407884 - RNA, 19 nt, Artificial Sequence
  Description of Artificial Sequence: Synthetic oligonucleotide
acgggauucauggccacac

SEQ ID NO: 2407885 - RNA, 19 nt, Artificial Sequence
  Description of Artificial Sequence: Synthetic oligonucleotide
cuuuauuagcuccugagau

SEQ ID NO: 2407886 - RNA, 19 nt, Artificial Sequence
  Description of Artificial Sequence: Synthetic oligonucleotide
uuucacgugagcgcggaac

SEQ ID NO: 2407887 - RNA, 19 nt, Artificial Sequence
  Description of Artificial Sequence: Synthetic oligonucleotide
ucucuucggauaguggaug

SEQ ID NO: 2407888 - RNA, 19 nt, Artificial Sequence
  Description of Artificial Sequence: Synthetic oligonucleotide
ggcacgaccagccuuuaag

SEQ ID NO: 2407889 - RNA, 19 nt, Artificial Sequence
  Description of Artificial Sequence: Synthetic oligonucleotide
acgauaguacccucaggca

SEQ ID NO: 2407890 - RNA, 19 nt, Artificial Sequence
  Description of Artificial Sequence: Synthetic oligonucleotide
gauagguuugucaauucua

SEQ ID NO: 2407891 - RNA, 19 nt, Artificial Sequence
  Description of Artificial Sequence: Synthetic oligonucleotide
gcaagcacggccgaaagag

SEQ ID NO: 2407892 - RNA, 19 nt, Artificial Sequence
  Description of Artificial Sequence: Synthetic oligonucleotide
guacccucaggcauggugc

SEQ ID NO: 2407893 - RNA, 19 nt, Artificial Sequence
  Description of Artificial Sequence: Synthetic oligonucleotide
uuacgguguuucacgugag

SEQ ID NO: 2407894 - RNA, 19 nt, Artificial Sequence
  Description of Artificial Sequence: Synthetic oligonucleotide
agacagcacacgauaguac

SEQ ID NO: 2407895 - RNA, 19 nt, Artificial Sequence
  Description of Artificial Sequence: Synthetic oligonucleotide
uucggauaguggaugguuu

SEQ ID NO: 2407896 - RNA, 19 nt, Artificial Sequence
  Description of Artificial Sequence: Synthetic oligonucleotide
uacgguguuucacgugagc

SEQ ID NO: 2407897 - RNA, 19 nt, Artificial Sequence
  Description of Artificial Sequence: Synthetic oligonucleotide
aaaucgguagggaucccga

SEQ ID NO: 2407898 - RNA, 19 nt, Artificial Sequence
  Description of Artificial Sequence: Synthetic oligonucleotide
uuaauguagccgugccgcu

SEQ ID NO: 2407899 - RNA, 19 nt, Artificial Sequence
  Description of Artificial Sequence: Synthetic oligonucleotide
acacgauaguacccucagg

SEQ ID NO: 2407900 - RNA, 19 nt, Artificial Sequence
  Description of Artificial Sequence: Synthetic oligonucleotide
cagcgaaguccacagcacg

SEQ ID NO: 2407901 - RNA, 19 nt, Artificial Sequence
  Description of Artificial Sequence: Synthetic oligonucleotide
acaguuuugguuccacgua

SEQ ID NO: 2407902 - RNA, 19 nt, Artificial Sequence
  Description of Artificial Sequence: Synthetic oligonucleotide
aagcacggccgaaagagga

SEQ ID NO: 2407903 - RNA, 19 nt, Artificial Sequence
  Description of Artificial Sequence: Synthetic oligonucleotide
auaguacccucaggcaugg

SEQ ID NO: 2407904 - RNA, 19 nt, Artificial Sequence
  Description of Artificial Sequence: Synthetic oligonucleotide
ugauauccuuuacgauacc

SEQ ID NO: 2407905 - RNA, 19 nt, Artificial Sequence
  Description of Artificial Sequence: Synthetic oligonucleotide
uguuggcggaggaaauaac

SEQ ID NO: 2407906 - RNA, 19 nt, Artificial Sequence
  Description of Artificial Sequence: Synthetic oligonucleotide
ccgaaagaggaaauacacg

SEQ ID NO: 2407907 - RNA, 19 nt, Artificial Sequence
  Description of Artificial Sequence: Synthetic oligonucleotide
caagcacggccgaaagagg

SEQ ID NO: 2407908 - RNA, 19 nt, Artificial Sequence
  Description of Artificial Sequence: Synthetic oligonucleotide
ugcgcuucuuaaaucggua

SEQ ID NO: 2407909 - RNA, 19 nt, Artificial Sequence
  Description of Artificial Sequence: Synthetic oligonucleotide
aaucgguagggaucccgaa

SEQ ID NO: 2407910 - RNA, 19 nt, Artificial Sequence
  Description of Artificial Sequence: Synthetic oligonucleotide
acaaacugcccugugugga

SEQ ID NO: 2407911 - RNA, 19 nt, Artificial Sequence
  Description of Artificial Sequence: Synthetic oligonucleotide
acgaccagccuuuaagaua

SEQ ID NO: 2407912 - RNA, 19 nt, Artificial Sequence
  Description of Artificial Sequence: Synthetic oligonucleotide
agcacacgauaguacccuc

SEQ ID NO: 2407913 - RNA, 19 nt, Artificial Sequence
  Description of Artificial Sequence: Synthetic oligonucleotide
gggauucauggccacaccc

SEQ ID NO: 2407914 - RNA, 19 nt, Artificial Sequence
  Description of Artificial Sequence: Synthetic oligonucleotide
gcgaugaacagcuccgugc

SEQ ID NO: 2407915 - RNA, 19 nt, Artificial Sequence
  Description of Artificial Sequence: Synthetic oligonucleotide
acauacuuuauuagcuccu

SEQ ID NO: 2407916 - RNA, 19 nt, Artificial Sequence
  Description of Artificial Sequence: Synthetic oligonucleotide
ggccacaacaccaacaaca

SEQ ID NO: 2407917 - RNA, 19 nt, Artificial Sequence
  Description of Artificial Sequence: Synthetic oligonucleotide
uacccuuaauguagccgug

SEQ ID NO: 2407918 - RNA, 19 nt, Artificial Sequence
  Description of Artificial Sequence: Synthetic oligonucleotide
uucuuggaccccgaaggca

SEQ ID NO: 2407919 - RNA, 19 nt, Artificial Sequence
  Description of Artificial Sequence: Synthetic oligonucleotide
ggaugcucgggccagcuug

SEQ ID NO: 2407920 - RNA, 19 nt, Artificial Sequence
  Description of Artificial Sequence: Synthetic oligonucleotide
cuccugagaucuaauucuc

SEQ ID NO: 2407921 - RNA, 19 nt, Artificial Sequence
  Description of Artificial Sequence: Synthetic oligonucleotide
gaugaacagcuccgugcgc

SEQ ID NO: 2407922 - RNA, 19 nt, Artificial Sequence
  Description of Artificial Sequence: Synthetic oligonucleotide
ccacuuugcgaccagcagg

SEQ ID NO: 2407923 - RNA, 19 nt, Artificial Sequence
  Description of Artificial Sequence: Synthetic oligonucleotide
uaauucuccuucuccugua

SEQ ID NO: 2407924 - RNA, 19 nt, Artificial Sequence
  Description of Artificial Sequence: Synthetic oligonucleotide
auuagcuccugagaucuaa

SEQ ID NO: 2407925 - RNA, 19 nt, Artificial Sequence
  Description of Artificial Sequence: Synthetic oligonucleotide
uaguggaugguuugccaau

SEQ ID NO: 2407926 - RNA, 19 nt, Artificial Sequence
  Description of Artificial Sequence: Synthetic oligonucleotide
gaaugauauccuuuacgau

SEQ ID NO: 2407927 - RNA, 19 nt, Artificial Sequence
  Description of Artificial Sequence: Synthetic oligonucleotide
aucacacggcccauggcgg

SEQ ID NO: 2407928 - RNA, 19 nt, Artificial Sequence
  Description of Artificial Sequence: Synthetic oligonucleotide
ccgugcgcuucuuaaaucg

SEQ ID NO: 2407929 - RNA, 19 nt, Artificial Sequence
  Description of Artificial Sequence: Synthetic oligonucleotide
uguuucacgugagcgcgga

SEQ ID NO: 2407930 - RNA, 19 nt, Artificial Sequence
  Description of Artificial Sequence: Synthetic oligonucleotide
ccgaaagaccacuuucgcg

SEQ ID NO: 2407931 - RNA, 19 nt, Artificial Sequence
  Description of Artificial Sequence: Synthetic oligonucleotide
cagccuuuaagauagguuu

SEQ ID NO: 2407932 - RNA, 19 nt, Artificial Sequence
  Description of Artificial Sequence: Synthetic oligonucleotide
uccacguagucgcccaguc

SEQ ID NO: 2407933 - RNA, 19 nt, Artificial Sequence
  Description of Artificial Sequence: Synthetic oligonucleotide
cauugccgauauuuagcug

SEQ ID NO: 2407934 - RNA, 19 nt, Artificial Sequence
  Description of Artificial Sequence: Synthetic oligonucleotide
uucuugccgcaguacacaa

SEQ ID NO: 2407935 - RNA, 19 nt, Artificial Sequence
  Description of Artificial Sequence: Synthetic oligonucleotide
ugagacccacuuugcgacc

SEQ ID NO: 2407936 - RNA, 19 nt, Artificial Sequence
  Description of Artificial Sequence: Synthetic oligonucleotide
ggaacacagauccggcgcc

SEQ ID NO: 2407937 - RNA, 19 nt, Artificial Sequence
  Description of Artificial Sequence: Synthetic oligonucleotide
aucgguagggaucccgaaa

SEQ ID NO: 2407938 - RNA, 19 nt, Artificial Sequence
  Description of Artificial Sequence: Synthetic oligonucleotide
gccgaaagaggaaauacac

SEQ ID NO: 2407939 - RNA, 19 nt, Artificial Sequence
  Description of Artificial Sequence: Synthetic oligonucleotide
gcccuuacgguguuucacg

SEQ ID NO: 2407940 - RNA, 19 nt, Artificial Sequence
  Description of Artificial Sequence: Synthetic oligonucleotide
agccgugccgcucagcgaa

SEQ ID NO: 2407941 - RNA, 19 nt, Artificial Sequence
  Description of Artificial Sequence: Synthetic oligonucleotide
aggggcaucucuucggaua

SEQ ID NO: 2407942 - RNA, 19 nt, Artificial Sequence
  Description of Artificial Sequence: Synthetic oligonucleotide
cgaaagaccacuuucgcga

SEQ ID NO: 2407943 - RNA, 19 nt, Artificial Sequence
  Description of Artificial Sequence: Synthetic oligonucleotide
ccaaagggaugcucuacgg

SEQ ID NO: 2407944 - RNA, 19 nt, Artificial Sequence
  Description of Artificial Sequence: Synthetic oligonucleotide
ggggcaucucuucggauag

SEQ ID NO: 2407945 - RNA, 19 nt, Artificial Sequence
  Description of Artificial Sequence: Synthetic oligonucleotide
accccguacacguggccag

SEQ ID NO: 2407946 - RNA, 19 nt, Artificial Sequence
  Description of Artificial Sequence: Synthetic oligonucleotide
uugguuccacguagucgcc

SEQ ID NO: 2407947 - RNA, 19 nt, Artificial Sequence
  Description of Artificial Sequence: Synthetic oligonucleotide
ggauucauggccacacccc

SEQ ID NO: 2407948 - RNA, 19 nt, Artificial Sequence
  Description of Artificial Sequence: Synthetic oligonucleotide
ccuuaauguagccgugccg

SEQ ID NO: 2407949 - RNA, 19 nt, Artificial Sequence
  Description of Artificial Sequence: Synthetic oligonucleotide
gagaucuaauucuccuucu

SEQ ID NO: 2407950 - RNA, 19 nt, Artificial Sequence
  Description of Artificial Sequence: Synthetic oligonucleotide
uucccggaugcucgggcca

SEQ ID NO: 2407951 - RNA, 19 nt, Artificial Sequence
  Description of Artificial Sequence: Synthetic oligonucleotide
ugagcgcggaacacagauc

SEQ ID NO: 2407952 - RNA, 19 nt, Artificial Sequence
  Description of Artificial Sequence: Synthetic oligonucleotide
gcacauacuuuauuagcuc

SEQ ID NO: 2407953 - RNA, 19 nt, Artificial Sequence
  Description of Artificial Sequence: Synthetic oligonucleotide
aagggaugcucuacgggau

SEQ ID NO: 2407954 - RNA, 19 nt, Artificial Sequence
  Description of Artificial Sequence: Synthetic oligonucleotide
uccgugcgcuucuuaaauc

SEQ ID NO: 2407955 - RNA, 19 nt, Artificial Sequence
  Description of Artificial Sequence: Synthetic oligonucleotide
guucccggaugcucgggcc

SEQ ID NO: 2407956 - RNA, 19 nt, Artificial Sequence
  Description of Artificial Sequence: Synthetic oligonucleotide
agcuccgugcgcuucuuaa

SEQ ID NO: 2407957 - RNA, 19 nt, Artificial Sequence
  Description of Artificial Sequence: Synthetic oligonucleotide
ugcucgggccagcuugccc

SEQ ID NO: 2407958 - RNA, 19 nt, Artificial Sequence
  Description of Artificial Sequence: Synthetic oligonucleotide
uauuuagcugggccuucuu

SEQ ID NO: 2407959 - RNA, 19 nt, Artificial Sequence
  Description of Artificial Sequence: Synthetic oligonucleotide
guacacaaacugcccugug

SEQ ID NO: 2407960 - RNA, 19 nt, Artificial Sequence
  Description of Artificial Sequence: Synthetic oligonucleotide
ucuguuggcggaggaaaua

SEQ ID NO: 2407961 - RNA, 19 nt, Artificial Sequence
  Description of Artificial Sequence: Synthetic oligonucleotide
uccggcgggcagcaaugag

SEQ ID NO: 2407962 - RNA, 19 nt, Artificial Sequence
  Description of Artificial Sequence: Synthetic oligonucleotide
ucuucggauaguggauggu

SEQ ID NO: 2407963 - RNA, 19 nt, Artificial Sequence
  Description of Artificial Sequence: Synthetic oligonucleotide
cuaauucuccuucuccugu

SEQ ID NO: 2407964 - RNA, 19 nt, Artificial Sequence
  Description of Artificial Sequence: Synthetic oligonucleotide
cucgagucuucuuggucuc

SEQ ID NO: 2407965 - RNA, 19 nt, Artificial Sequence
  Description of Artificial Sequence: Synthetic oligonucleotide
gcgcuucuuaaaucgguag

SEQ ID NO: 2407966 - RNA, 19 nt, Artificial Sequence
  Description of Artificial Sequence: Synthetic oligonucleotide
gguagggaucccgaaagac

SEQ ID NO: 2407967 - RNA, 19 nt, Artificial Sequence
  Description of Artificial Sequence: Synthetic oligonucleotide
aguuuugguuccacguagu

SEQ ID NO: 2407968 - RNA, 19 nt, Artificial Sequence
  Description of Artificial Sequence: Synthetic oligonucleotide
uccggcgccuuuccucugc

SEQ ID NO: 2407969 - RNA, 19 nt, Artificial Sequence
  Description of Artificial Sequence: Synthetic oligonucleotide
guacuugugguaggcacga

SEQ ID NO: 2407970 - RNA, 19 nt, Artificial Sequence
  Description of Artificial Sequence: Synthetic oligonucleotide
gcucgggccagcuugcccc

SEQ ID NO: 2407971 - RNA, 19 nt, Artificial Sequence
  Description of Artificial Sequence: Synthetic oligonucleotide
cucugcggcgaugaacagc

SEQ ID NO: 2407972 - RNA, 19 nt, Artificial Sequence
  Description of Artificial Sequence: Synthetic oligonucleotide
acgugagcgcggaacacag

SEQ ID NO: 2407973 - RNA, 19 nt, Artificial Sequence
  Description of Artificial Sequence: Synthetic oligonucleotide
accagccuuuaagauaggu

SEQ ID NO: 2407974 - RNA, 19 nt, Artificial Sequence
  Description of Artificial Sequence: Synthetic oligonucleotide
caaugugcuggugguuacc

SEQ ID NO: 2407975 - RNA, 19 nt, Artificial Sequence
  Description of Artificial Sequence: Synthetic oligonucleotide
cgcuucuuaaaucgguagg

SEQ ID NO: 2407976 - RNA, 19 nt, Artificial Sequence
  Description of Artificial Sequence: Synthetic oligonucleotide
gugccgcucagcgaagucc

SEQ ID NO: 2407977 - RNA, 19 nt, Artificial Sequence
  Description of Artificial Sequence: Synthetic oligonucleotide
ccacgggcaaaacauugcc

SEQ ID NO: 2407978 - RNA, 19 nt, Artificial Sequence
  Description of Artificial Sequence: Synthetic oligonucleotide
cuucuugccgcaguacaca

SEQ ID NO: 2407979 - RNA, 19 nt, Artificial Sequence
  Description of Artificial Sequence: Synthetic oligonucleotide
ugguuccacguagucgccc

SEQ ID NO: 2407980 - RNA, 19 nt, Artificial Sequence
  Description of Artificial Sequence: Synthetic oligonucleotide
gauccggcgccuuuccucu

SEQ ID NO: 2407981 - RNA, 19 nt, Artificial Sequence
  Description of Artificial Sequence: Synthetic oligonucleotide
agucgcccaguccggcggg

SEQ ID NO: 2407982 - RNA, 19 nt, Artificial Sequence
  Description of Artificial Sequence: Synthetic oligonucleotide
ggcaucucuucggauagug

SEQ ID NO: 2407983 - RNA, 19 nt, Artificial Sequence
  Description of Artificial Sequence: Synthetic oligonucleotide
cuacgggauucauggccac

SEQ ID NO: 2407984 - RNA, 19 nt, Artificial Sequence
  Description of Artificial Sequence: Synthetic oligonucleotide
gccgcaguacacaaacugc

SEQ ID NO: 2407985 - RNA, 19 nt, Artificial Sequence
  Description of Artificial Sequence: Synthetic oligonucleotide
gugagcgcggaacacagau

SEQ ID NO: 2407986 - RNA, 19 nt, Artificial Sequence
  Description of Artificial Sequence: Synthetic oligonucleotide
gcaaugagacccacuuugc

SEQ ID NO: 2407987 - RNA, 19 nt, Artificial Sequence
  Description of Artificial Sequence: Synthetic oligonucleotide
ggcggaggaaauaaccuuc

SEQ ID NO: 2407988 - RNA, 19 nt, Artificial Sequence
  Description of Artificial Sequence: Synthetic oligonucleotide
gcggcgaugaacagcuccg

SEQ ID NO: 2407989 - RNA, 19 nt, Artificial Sequence
  Description of Artificial Sequence: Synthetic oligonucleotide
cucuuugccuuguacuugu

SEQ ID NO: 2407990 - RNA, 19 nt, Artificial Sequence
  Description of Artificial Sequence: Synthetic oligonucleotide
cccuuaauguagccgugcc

SEQ ID NO: 2407991 - RNA, 19 nt, Artificial Sequence
  Description of Artificial Sequence: Synthetic oligonucleotide
cauggccacaccccguaca

SEQ ID NO: 2407992 - RNA, 19 nt, Artificial Sequence
  Description of Artificial Sequence: Synthetic oligonucleotide
ccuucuugccgcaguacac

SEQ ID NO: 2407993 - RNA, 19 nt, Artificial Sequence
  Description of Artificial Sequence: Synthetic oligonucleotide
cccgaaagaccacuuucgc

SEQ ID NO: 2407994 - RNA, 19 nt, Artificial Sequence
  Description of Artificial Sequence: Synthetic oligonucleotide
uacgggauucauggccaca

SEQ ID NO: 2407995 - RNA, 19 nt, Artificial Sequence
  Description of Artificial Sequence: Synthetic oligonucleotide
gcgcggaacacagauccgg

SEQ ID NO: 2407996 - RNA, 19 nt, Artificial Sequence
  Description of Artificial Sequence: Synthetic oligonucleotide
ggcaaaacauugccgauau

SEQ ID NO: 2407997 - RNA, 19 nt, Artificial Sequence
  Description of Artificial Sequence: Synthetic oligonucleotide
cagacagcacacgauagua

SEQ ID NO: 2407998 - RNA, 19 nt, Artificial Sequence
  Description of Artificial Sequence: Synthetic oligonucleotide
ggugguuaccaccuccaaa

SEQ ID NO: 2407999 - RNA, 19 nt, Artificial Sequence
  Description of Artificial Sequence: Synthetic oligonucleotide
ucacgugagcgcggaacac

SEQ ID NO: 2408000 - RNA, 19 nt, Artificial Sequence
  Description of Artificial Sequence: Synthetic oligonucleotide
gcaucucuucggauagugg

SEQ ID NO: 2408001 - RNA, 19 nt, Artificial Sequence
  Description of Artificial Sequence: Synthetic oligonucleotide
agggaucccgaaagaccac

SEQ ID NO: 2408002 - RNA, 19 nt, Artificial Sequence
  Description of Artificial Sequence: Synthetic oligonucleotide
cccacgggcaaaacauugc

SEQ ID NO: 2408003 - RNA, 19 nt, Artificial Sequence
  Description of Artificial Sequence: Synthetic oligonucleotide
guguuucacgugagcgcgg

SEQ ID NO: 2408004 - RNA, 19 nt, Artificial Sequence
  Description of Artificial Sequence: Synthetic oligonucleotide
ggcgaugaacagcuccgug

SEQ ID NO: 2408005 - RNA, 19 nt, Artificial Sequence
  Description of Artificial Sequence: Synthetic oligonucleotide
cggaacacagauccggcgc

SEQ ID NO: 2408006 - RNA, 19 nt, Artificial Sequence
  Description of Artificial Sequence: Synthetic oligonucleotide
aguccacagcacgcaggcg

SEQ ID NO: 2408007 - RNA, 19 nt, Artificial Sequence
  Description of Artificial Sequence: Synthetic oligonucleotide
gcacgaccagccuuuaaga

SEQ ID NO: 2408008 - RNA, 19 nt, Artificial Sequence
  Description of Artificial Sequence: Synthetic oligonucleotide
ccagcuugccccugucucc

SEQ ID NO: 2408009 - RNA, 19 nt, Artificial Sequence
  Description of Artificial Sequence: Synthetic oligonucleotide
uuccacguagucgcccagu

SEQ ID NO: 2408010 - RNA, 19 nt, Artificial Sequence
  Description of Artificial Sequence: Synthetic oligonucleotide
cccucugcggcgaugaaca

SEQ ID NO: 2408011 - RNA, 19 nt, Artificial Sequence
  Description of Artificial Sequence: Synthetic oligonucleotide
ugccgauauuuagcugggc

SEQ ID NO: 2408012 - RNA, 19 nt, Artificial Sequence
  Description of Artificial Sequence: Synthetic oligonucleotide
gguuccacguagucgccca

SEQ ID NO: 2408013 - RNA, 19 nt, Artificial Sequence
  Description of Artificial Sequence: Synthetic oligonucleotide
gacccacuuugcgaccagc

SEQ ID NO: 2408014 - RNA, 19 nt, Artificial Sequence
  Description of Artificial Sequence: Synthetic oligonucleotide
auccuuuacgauacccuua

SEQ ID NO: 2408015 - RNA, 19 nt, Artificial Sequence
  Description of Artificial Sequence: Synthetic oligonucleotide
ugcccacgggcaaaacauu

SEQ ID NO: 2408016 - RNA, 19 nt, Artificial Sequence
  Description of Artificial Sequence: Synthetic oligonucleotide
aguccggcgggcagcaaug

SEQ ID NO: 2408017 - RNA, 19 nt, Artificial Sequence
  Description of Artificial Sequence: Synthetic oligonucleotide
acccacuuugcgaccagca

SEQ ID NO: 2408018 - RNA, 19 nt, Artificial Sequence
  Description of Artificial Sequence: Synthetic oligonucleotide
cacagauccggcgccuuuc

SEQ ID NO: 2408019 - RNA, 19 nt, Artificial Sequence
  Description of Artificial Sequence: Synthetic oligonucleotide
acuuugcgaccagcagggg

SEQ ID NO: 2408020 - RNA, 19 nt, Artificial Sequence
  Description of Artificial Sequence: Synthetic oligonucleotide
ggccgaaagaggaaauaca

SEQ ID NO: 2408021 - RNA, 19 nt, Artificial Sequence
  Description of Artificial Sequence: Synthetic oligonucleotide
agggaugcucuacgggauu

SEQ ID NO: 2408022 - RNA, 19 nt, Artificial Sequence
  Description of Artificial Sequence: Synthetic oligonucleotide
auucauggccacaccccgu

SEQ ID NO: 2408023 - RNA, 19 nt, Artificial Sequence
  Description of Artificial Sequence: Synthetic oligonucleotide
cacacggcccauggcggcg

SEQ ID NO: 2408024 - RNA, 19 nt, Artificial Sequence
  Description of Artificial Sequence: Synthetic oligonucleotide
cacgcaggcgcgcggcgcc

SEQ ID NO: 2408025 - RNA, 19 nt, Artificial Sequence
  Description of Artificial Sequence: Synthetic oligonucleotide
uagccgugccgcucagcga

SEQ ID NO: 2408026 - RNA, 19 nt, Artificial Sequence
  Description of Artificial Sequence: Synthetic oligonucleotide
ggaucacacggcccauggc

SEQ ID NO: 2408027 - RNA, 19 nt, Artificial Sequence
  Description of Artificial Sequence: Synthetic oligonucleotide
agcgcggaacacagauccg

SEQ ID NO: 2408028 - RNA, 19 nt, Artificial Sequence
  Description of Artificial Sequence: Synthetic oligonucleotide
cgguguuucacgugagcgc

SEQ ID NO: 2408029 - RNA, 19 nt, Artificial Sequence
  Description of Artificial Sequence: Synthetic oligonucleotide
cgugcgcuucuuaaaucgg

SEQ ID NO: 2408030 - RNA, 19 nt, Artificial Sequence
  Description of Artificial Sequence: Synthetic oligonucleotide
augcucgggccagcuugcc

SEQ ID NO: 2408031 - RNA, 19 nt, Artificial Sequence
  Description of Artificial Sequence: Synthetic oligonucleotide
gcggccggggucaugaaug

SEQ ID NO: 2408032 - RNA, 19 nt, Artificial Sequence
  Description of Artificial Sequence: Synthetic oligonucleotide
acacagauccggcgccuuu

SEQ ID NO: 2408033 - RNA, 19 nt, Artificial Sequence
  Description of Artificial Sequence: Synthetic oligonucleotide
ccaaugugcuggugguuac

SEQ ID NO: 2408034 - RNA, 19 nt, Artificial Sequence
  Description of Artificial Sequence: Synthetic oligonucleotide
gcauaguucccggaugcuc

SEQ ID NO: 2408035 - RNA, 19 nt, Artificial Sequence
  Description of Artificial Sequence: Synthetic oligonucleotide
ccuuacgguguuucacgug

SEQ ID NO: 2408036 - RNA, 19 nt, Artificial Sequence
  Description of Artificial Sequence: Synthetic oligonucleotide
cacgugagcgcggaacaca

SEQ ID NO: 2408037 - RNA, 19 nt, Artificial Sequence
  Description of Artificial Sequence: Synthetic oligonucleotide
ucuccggguugugggagau

SEQ ID NO: 2408038 - RNA, 19 nt, Artificial Sequence
  Description of Artificial Sequence: Synthetic oligonucleotide
cggaucacacggcccaugg

SEQ ID NO: 2408039 - RNA, 19 nt, Artificial Sequence
  Description of Artificial Sequence: Synthetic oligonucleotide
gugcccacgggcaaaacau

SEQ ID NO: 2408040 - RNA, 19 nt, Artificial Sequence
  Description of Artificial Sequence: Synthetic oligonucleotide
acggccgaaagaggaaaua

SEQ ID NO: 2408041 - RNA, 19 nt, Artificial Sequence
  Description of Artificial Sequence: Synthetic oligonucleotide
gcucuacgggauucauggc

SEQ ID NO: 2408042 - RNA, 19 nt, Artificial Sequence
  Description of Artificial Sequence: Synthetic oligonucleotide
ugccggcaagcacggccga

SEQ ID NO: 2408043 - RNA, 19 nt, Artificial Sequence
  Description of Artificial Sequence: Synthetic oligonucleotide
ggaccccgaaggcagcuuc

SEQ ID NO: 2408044 - RNA, 19 nt, Artificial Sequence
  Description of Artificial Sequence: Synthetic oligonucleotide
cacgaccagccuuuaagau

SEQ ID NO: 2408045 - RNA, 19 nt, Artificial Sequence
  Description of Artificial Sequence: Synthetic oligonucleotide
cccaccggccacaacacca

SEQ ID NO: 2408046 - RNA, 19 nt, Artificial Sequence
  Description of Artificial Sequence: Synthetic oligonucleotide
ccucuuugccuuguacuug

SEQ ID NO: 2408047 - RNA, 19 nt, Artificial Sequence
  Description of Artificial Sequence: Synthetic oligonucleotide
agcacggccgaaagaggaa

SEQ ID NO: 2408048 - RNA, 19 nt, Artificial Sequence
  Description of Artificial Sequence: Synthetic oligonucleotide
ccacguagucgcccagucc

SEQ ID NO: 2408049 - RNA, 19 nt, Artificial Sequence
  Description of Artificial Sequence: Synthetic oligonucleotide
cuguggcauaguucccgga

SEQ ID NO: 2408050 - RNA, 19 nt, Artificial Sequence
  Description of Artificial Sequence: Synthetic oligonucleotide
ccucggaucacacggccca

SEQ ID NO: 2408051 - RNA, 19 nt, Artificial Sequence
  Description of Artificial Sequence: Synthetic oligonucleotide
cgauacccuuaauguagcc

SEQ ID NO: 2408052 - RNA, 19 nt, Artificial Sequence
  Description of Artificial Sequence: Synthetic oligonucleotide
gcccucggaucacacggcc

SEQ ID NO: 2408053 - RNA, 19 nt, Artificial Sequence
  Description of Artificial Sequence: Synthetic oligonucleotide
gucuccggguugugggaga

SEQ ID NO: 2408054 - RNA, 19 nt, Artificial Sequence
  Description of Artificial Sequence: Synthetic oligonucleotide
gaccccgaaggcagcuuca

SEQ ID NO: 2408055 - RNA, 19 nt, Artificial Sequence
  Description of Artificial Sequence: Synthetic oligonucleotide
caccccguacacguggcca

SEQ ID NO: 2408056 - RNA, 19 nt, Artificial Sequence
  Description of Artificial Sequence: Synthetic oligonucleotide
cuccgugcgcuucuuaaau

SEQ ID NO: 2408057 - RNA, 19 nt, Artificial Sequence
  Description of Artificial Sequence: Synthetic oligonucleotide
cagcacgcaggcgcgcggc

SEQ ID NO: 2408058 - RNA, 19 nt, Artificial Sequence
  Description of Artificial Sequence: Synthetic oligonucleotide
uucccucugcggcgaugaa

SEQ ID NO: 2408059 - RNA, 19 nt, Artificial Sequence
  Description of Artificial Sequence: Synthetic oligonucleotide
ugccaaugugcuggugguu

SEQ ID NO: 2408060 - RNA, 19 nt, Artificial Sequence
  Description of Artificial Sequence: Synthetic oligonucleotide
gccaaugugcuggugguua

SEQ ID NO: 2408061 - RNA, 19 nt, Artificial Sequence
  Description of Artificial Sequence: Synthetic oligonucleotide
guaggcacgaccagccuuu

SEQ ID NO: 2408062 - RNA, 19 nt, Artificial Sequence
  Description of Artificial Sequence: Synthetic oligonucleotide
cgcggaacacagauccggc

SEQ ID NO: 2408063 - RNA, 19 nt, Artificial Sequence
  Description of Artificial Sequence: Synthetic oligonucleotide
gcccauggcggcgagucug

SEQ ID NO: 2408064 - RNA, 19 nt, Artificial Sequence
  Description of Artificial Sequence: Synthetic oligonucleotide
gaacacagauccggcgccu

SEQ ID NO: 2408065 - RNA, 19 nt, Artificial Sequence
  Description of Artificial Sequence: Synthetic oligonucleotide
cccucggaucacacggccc

SEQ ID NO: 2408066 - RNA, 19 nt, Artificial Sequence
  Description of Artificial Sequence: Synthetic oligonucleotide
gugcgcuucuuaaaucggu

SEQ ID NO: 2408067 - RNA, 19 nt, Artificial Sequence
  Description of Artificial Sequence: Synthetic oligonucleotide
cuucggauaguggaugguu

SEQ ID NO: 2408068 - RNA, 19 nt, Artificial Sequence
  Description of Artificial Sequence: Synthetic oligonucleotide
gggcaaaacauugccgaua

SEQ ID NO: 2408069 - RNA, 19 nt, Artificial Sequence
  Description of Artificial Sequence: Synthetic oligonucleotide
aggcacgaccagccuuuaa

SEQ ID NO: 2408070 - RNA, 19 nt, Artificial Sequence
  Description of Artificial Sequence: Synthetic oligonucleotide
guacacguggccagcaguu

SEQ ID NO: 2408071 - RNA, 19 nt, Artificial Sequence
  Description of Artificial Sequence: Synthetic oligonucleotide
cggauaguggaugguuugc

SEQ ID NO: 2408072 - RNA, 19 nt, Artificial Sequence
  Description of Artificial Sequence: Synthetic oligonucleotide
ggcgccuuuccucugcccu

SEQ ID NO: 2408073 - RNA, 19 nt, Artificial Sequence
  Description of Artificial Sequence: Synthetic oligonucleotide
cggccgaaagaggaaauac

SEQ ID NO: 2408074 - RNA, 19 nt, Artificial Sequence
  Description of Artificial Sequence: Synthetic oligonucleotide
cucuguuggcggaggaaau

SEQ ID NO: 2408075 - RNA, 19 nt, Artificial Sequence
  Description of Artificial Sequence: Synthetic oligonucleotide
gccuuuaagauagguuugu

SEQ ID NO: 2408076 - RNA, 19 nt, Artificial Sequence
  Description of Artificial Sequence: Synthetic oligonucleotide
auccggcgccuuuccucug

SEQ ID NO: 2408077 - RNA, 19 nt, Artificial Sequence
  Description of Artificial Sequence: Synthetic oligonucleotide
guuucacgugagcgcggaa

SEQ ID NO: 2408078 - RNA, 19 nt, Artificial Sequence
  Description of Artificial Sequence: Synthetic oligonucleotide
gguaggcacgaccagccuu

SEQ ID NO: 2408079 - RNA, 19 nt, Artificial Sequence
  Description of Artificial Sequence: Synthetic oligonucleotide
ucgcccaguccggcgggca

SEQ ID NO: 2408080 - RNA, 19 nt, Artificial Sequence
  Description of Artificial Sequence: Synthetic oligonucleotide
uugcgaccagcaggggcau

SEQ ID NO: 2408081 - RNA, 19 nt, Artificial Sequence
  Description of Artificial Sequence: Synthetic oligonucleotide
ggcgcccuuacgguguuuc

SEQ ID NO: 2408082 - RNA, 19 nt, Artificial Sequence
  Description of Artificial Sequence: Synthetic oligonucleotide
gcuccgugcgcuucuuaaa

SEQ ID NO: 2408083 - RNA, 19 nt, Artificial Sequence
  Description of Artificial Sequence: Synthetic oligonucleotide
acacggcccauggcggcga

SEQ ID NO: 2408084 - RNA, 19 nt, Artificial Sequence
  Description of Artificial Sequence: Synthetic oligonucleotide
gccggggucaugaaugaua

SEQ ID NO: 2408085 - RNA, 19 nt, Artificial Sequence
  Description of Artificial Sequence: Synthetic oligonucleotide
ccguacacguggccagcag

SEQ ID NO: 2408086 - RNA, 19 nt, Artificial Sequence
  Description of Artificial Sequence: Synthetic oligonucleotide
cgagucugccggcaagcac

SEQ ID NO: 2408087 - RNA, 19 nt, Artificial Sequence
  Description of Artificial Sequence: Synthetic oligonucleotide
ggcgggcagcaaugagacc

SEQ ID NO: 2408088 - RNA, 19 nt, Artificial Sequence
  Description of Artificial Sequence: Synthetic oligonucleotide
uaggcacgaccagccuuua

SEQ ID NO: 2408089 - RNA, 19 nt, Artificial Sequence
  Description of Artificial Sequence: Synthetic oligonucleotide
gcacggccgaaagaggaaa

SEQ ID NO: 2408090 - RNA, 19 nt, Artificial Sequence
  Description of Artificial Sequence: Synthetic oligonucleotide
gggagaugacuguggcaua

SEQ ID NO: 2408091 - RNA, 19 nt, Artificial Sequence
  Description of Artificial Sequence: Synthetic oligonucleotide
ggccuucuugccgcaguac

SEQ ID NO: 2408092 - RNA, 19 nt, Artificial Sequence
  Description of Artificial Sequence: Synthetic oligonucleotide
cgauaguacccucaggcau

SEQ ID NO: 2408093 - RNA, 19 nt, Artificial Sequence
  Description of Artificial Sequence: Synthetic oligonucleotide
ccucugcggcgaugaacag

SEQ ID NO: 2408094 - RNA, 19 nt, Artificial Sequence
  Description of Artificial Sequence: Synthetic oligonucleotide
cacggccgaaagaggaaau

SEQ ID NO: 2408095 - RNA, 19 nt, Artificial Sequence
  Description of Artificial Sequence: Synthetic oligonucleotide
ccggggucaugaaugauau

SEQ ID NO: 2408096 - RNA, 19 nt, Artificial Sequence
  Description of Artificial Sequence: Synthetic oligonucleotide
ccagacagcacacgauagu

SEQ ID NO: 2408097 - RNA, 19 nt, Artificial Sequence
  Description of Artificial Sequence: Synthetic oligonucleotide
gccccugucuccaggcuuc

SEQ ID NO: 2408098 - RNA, 19 nt, Artificial Sequence
  Description of Artificial Sequence: Synthetic oligonucleotide
cgggauucauggccacacc

SEQ ID NO: 2408099 - RNA, 19 nt, Artificial Sequence
  Description of Artificial Sequence: Synthetic oligonucleotide
cggcaagcacggccgaaag

SEQ ID NO: 2408100 - RNA, 19 nt, Artificial Sequence
  Description of Artificial Sequence: Synthetic oligonucleotide
gcggaggaaauaaccuucu

SEQ ID NO: 2408101 - RNA, 19 nt, Artificial Sequence
  Description of Artificial Sequence: Synthetic oligonucleotide
gucgcccaguccggcgggc

SEQ ID NO: 2408102 - RNA, 19 nt, Artificial Sequence
  Description of Artificial Sequence: Synthetic oligonucleotide
cugcggcgaugaacagcuc

SEQ ID NO: 2408103 - RNA, 19 nt, Artificial Sequence
  Description of Artificial Sequence: Synthetic oligonucleotide
cgcccuuacgguguuucac

SEQ ID NO: 2408104 - RNA, 19 nt, Artificial Sequence
  Description of Artificial Sequence: Synthetic oligonucleotide
caguccggcgggcagcaau

SEQ ID NO: 2408105 - RNA, 19 nt, Artificial Sequence
  Description of Artificial Sequence: Synthetic oligonucleotide
ugcgaccagcaggggcauc

SEQ ID NO: 2408106 - RNA, 19 nt, Artificial Sequence
  Description of Artificial Sequence: Synthetic oligonucleotide
gcgcggcgcccuuacggug

SEQ ID NO: 2408107 - RNA, 19 nt, Artificial Sequence
  Description of Artificial Sequence: Synthetic oligonucleotide
guccggcgggcagcaauga

SEQ ID NO: 2408108 - RNA, 19 nt, Artificial Sequence
  Description of Artificial Sequence: Synthetic oligonucleotide
gcgaccagcaggggcaucu

SEQ ID NO: 2408109 - RNA, 19 nt, Artificial Sequence
  Description of Artificial Sequence: Synthetic oligonucleotide
ccggguugugggagaugac

SEQ ID NO: 2408110 - RNA, 19 nt, Artificial Sequence
  Description of Artificial Sequence: Synthetic oligonucleotide
ccaccggccacaacaccaa

SEQ ID NO: 2408111 - RNA, 19 nt, Artificial Sequence
  Description of Artificial Sequence: Synthetic oligonucleotide
gccacaccccguacacgug

SEQ ID NO: 2408112 - RNA, 19 nt, Artificial Sequence
  Description of Artificial Sequence: Synthetic oligonucleotide
gcacgcaggcgcgcggcgc

SEQ ID NO: 2408113 - RNA, 19 nt, Artificial Sequence
  Description of Artificial Sequence: Synthetic oligonucleotide
gcgcccuuacgguguuuca

SEQ ID NO: 2408114 - RNA, 19 nt, Artificial Sequence
  Description of Artificial Sequence: Synthetic oligonucleotide
gucugccggcaagcacggc

SEQ ID NO: 2408115 - RNA, 19 nt, Artificial Sequence
  Description of Artificial Sequence: Synthetic oligonucleotide
cccuuacgguguuucacgu

SEQ ID NO: 2408116 - RNA, 19 nt, Artificial Sequence
  Description of Artificial Sequence: Synthetic oligonucleotide
cucgggccagcuugccccu

SEQ ID NO: 2408117 - RNA, 19 nt, Artificial Sequence
  Description of Artificial Sequence: Synthetic oligonucleotide
ccccguacacguggccagc

SEQ ID NO: 2408118 - RNA, 19 nt, Artificial Sequence
  Description of Artificial Sequence: Synthetic oligonucleotide
acggcccauggcggcgagu

SEQ ID NO: 2408119 - RNA, 19 nt, Artificial Sequence
  Description of Artificial Sequence: Synthetic oligonucleotide
ggcggcgagucugccggca

SEQ ID NO: 2408120 - RNA, 19 nt, Artificial Sequence
  Description of Artificial Sequence: Synthetic oligonucleotide
ccauggcggcgagucugcc

SEQ ID NO: 2408121 - RNA, 19 nt, Artificial Sequence
  Description of Artificial Sequence: Synthetic oligonucleotide
ccgcucagcgaaguccaca

SEQ ID NO: 2408122 - RNA, 19 nt, Artificial Sequence
  Description of Artificial Sequence: Synthetic oligonucleotide
gccgugccgcucagcgaag

SEQ ID NO: 2408123 - RNA, 19 nt, Artificial Sequence
  Description of Artificial Sequence: Synthetic oligonucleotide
cggggucaugaaugauauc

SEQ ID NO: 2408124 - RNA, 19 nt, Artificial Sequence
  Description of Artificial Sequence: Synthetic oligonucleotide
gcggcgagucugccggcaa

SEQ ID NO: 2408125 - RNA, 19 nt, Artificial Sequence
  Description of Artificial Sequence: Synthetic oligonucleotide
gcaaaacauugccgauauu

SEQ ID NO: 2408126 - RNA, 19 nt, Artificial Sequence
  Description of Artificial Sequence: Synthetic oligonucleotide
ccggcaagcacggccgaaa

SEQ ID NO: 2408127 - RNA, 19 nt, Artificial Sequence
  Description of Artificial Sequence: Synthetic oligonucleotide
cccguacacguggccagca

SEQ ID NO: 2408128 - RNA, 19 nt, Artificial Sequence
  Description of Artificial Sequence: Synthetic oligonucleotide
cgugagcgcggaacacaga

SEQ ID NO: 2408129 - RNA, 19 nt, Artificial Sequence
  Description of Artificial Sequence: Synthetic oligonucleotide
cccggaugcucgggccagc

SEQ ID NO: 2408130 - RNA, 19 nt, Artificial Sequence
  Description of Artificial Sequence: Synthetic oligonucleotide
cggccggggucaugaauga

SEQ ID NO: 2408131 - RNA, 19 nt, Artificial Sequence
  Description of Artificial Sequence: Synthetic oligonucleotide
ggcccauggcggcgagucu

SEQ ID NO: 2408132 - RNA, 19 nt, Artificial Sequence
  Description of Artificial Sequence: Synthetic oligonucleotide
cgggcaaaacauugccgau

SEQ ID NO: 2408133 - RNA, 19 nt, Artificial Sequence
  Description of Artificial Sequence: Synthetic oligonucleotide
gccggcaagcacggccgaa

SEQ ID NO: 2408134 - RNA, 19 nt, Artificial Sequence
  Description of Artificial Sequence: Synthetic oligonucleotide
ccuuuacgauacccuuaau

SEQ ID NO: 2408135 - RNA, 19 nt, Artificial Sequence
  Description of Artificial Sequence: Synthetic oligonucleotide
gggcaucucuucggauagu

SEQ ID NO: 2408136 - RNA, 19 nt, Artificial Sequence
  Description of Artificial Sequence: Synthetic oligonucleotide
cgcggcgcccuuacggugu

SEQ ID NO: 2408137 - RNA, 19 nt, Artificial Sequence
  Description of Artificial Sequence: Synthetic oligonucleotide
caggcgcgcggcgcccuua

SEQ ID NO: 2408138 - RNA, 19 nt, Artificial Sequence
  Description of Artificial Sequence: Synthetic oligonucleotide
ggccggggucaugaaugau

SEQ ID NO: 2408139 - RNA, 19 nt, Artificial Sequence
  Description of Artificial Sequence: Synthetic oligonucleotide
ccgugccgcucagcgaagu

SEQ ID NO: 2408140 - RNA, 19 nt, Artificial Sequence
  Description of Artificial Sequence: Synthetic oligonucleotide
ccaguccggcgggcagcaa

SEQ ID NO: 2408141 - RNA, 19 nt, Artificial Sequence
  Description of Artificial Sequence: Synthetic oligonucleotide
cggcgcccuuacgguguuu

SEQ ID NO: 2408142 - RNA, 19 nt, Artificial Sequence
  Description of Artificial Sequence: Synthetic oligonucleotide
uaaacaaagaaucggauau

SEQ ID NO: 2408143 - RNA, 19 nt, Artificial Sequence
  Description of Artificial Sequence: Synthetic oligonucleotide
uuuacaaaggacaacccug

SEQ ID NO: 2408144 - RNA, 19 nt, Artificial Sequence
  Description of Artificial Sequence: Synthetic oligonucleotide
ugguuaguuaccauguugg

SEQ ID NO: 2408145 - RNA, 19 nt, Artificial Sequence
  Description of Artificial Sequence: Synthetic oligonucleotide
uguuuauucacacacuccu

SEQ ID NO: 2408146 - RNA, 19 nt, Artificial Sequence
  Description of Artificial Sequence: Synthetic oligonucleotide
cugcagaccagauugaucg

SEQ ID NO: 2408147 - RNA, 19 nt, Artificial Sequence
  Description of Artificial Sequence: Synthetic oligonucleotide
guaaaaucagaucugggcc

SEQ ID NO: 2408148 - RNA, 19 nt, Artificial Sequence
  Description of Artificial Sequence: Synthetic oligonucleotide
ucuaaagugcaugagugcg

SEQ ID NO: 2408149 - RNA, 19 nt, Artificial Sequence
  Description of Artificial Sequence: Synthetic oligonucleotide
aagucccuuagaaagaggc

SEQ ID NO: 2408150 - RNA, 19 nt, Artificial Sequence
  Description of Artificial Sequence: Synthetic oligonucleotide
uuacaaaggacaacccugg

SEQ ID NO: 2408151 - RNA, 19 nt, Artificial Sequence
  Description of Artificial Sequence: Synthetic oligonucleotide
uuagaaagaggcuaggguc

SEQ ID NO: 2408152 - RNA, 19 nt, Artificial Sequence
  Description of Artificial Sequence: Synthetic oligonucleotide
uaaaagguaccuugggagg

SEQ ID NO: 2408153 - RNA, 19 nt, Artificial Sequence
  Description of Artificial Sequence: Synthetic oligonucleotide
aaauaugcagccaaaccuc

SEQ ID NO: 2408154 - RNA, 19 nt, Artificial Sequence
  Description of Artificial Sequence: Synthetic oligonucleotide
acuccuguuacauugagga

SEQ ID NO: 2408155 - RNA, 19 nt, Artificial Sequence
  Description of Artificial Sequence: Synthetic oligonucleotide
uggguuaagaacaucuuca

SEQ ID NO: 2408156 - RNA, 19 nt, Artificial Sequence
  Description of Artificial Sequence: Synthetic oligonucleotide
uguccuaucugccaggcgc

SEQ ID NO: 2408157 - RNA, 19 nt, Artificial Sequence
  Description of Artificial Sequence: Synthetic oligonucleotide
uacaguugaggaaaggccc

SEQ ID NO: 2408158 - RNA, 19 nt, Artificial Sequence
  Description of Artificial Sequence: Synthetic oligonucleotide
uuuuacucacacacggagg

SEQ ID NO: 2408159 - RNA, 19 nt, Artificial Sequence
  Description of Artificial Sequence: Synthetic oligonucleotide
uuuacucacacacggaggu

SEQ ID NO: 2408160 - RNA, 19 nt, Artificial Sequence
  Description of Artificial Sequence: Synthetic oligonucleotide
aaagaggcuagggucacgc

SEQ ID NO: 2408161 - RNA, 19 nt, Artificial Sequence
  Description of Artificial Sequence: Synthetic oligonucleotide
aagguaaaaucagaucugg

SEQ ID NO: 2408162 - RNA, 19 nt, Artificial Sequence
  Description of Artificial Sequence: Synthetic oligonucleotide
uaaaaucagaucugggccc

SEQ ID NO: 2408163 - RNA, 19 nt, Artificial Sequence
  Description of Artificial Sequence: Synthetic oligonucleotide
gaucugggcccuuaaaagg

SEQ ID NO: 2408164 - RNA, 19 nt, Artificial Sequence
  Description of Artificial Sequence: Synthetic oligonucleotide
uguguuuauucacacacuc

SEQ ID NO: 2408165 - RNA, 19 nt, Artificial Sequence
  Description of Artificial Sequence: Synthetic oligonucleotide
guuaagaacaucuucaggu

SEQ ID NO: 2408166 - RNA, 19 nt, Artificial Sequence
  Description of Artificial Sequence: Synthetic oligonucleotide
aaaagguaccuugggaggg

SEQ ID NO: 2408167 - RNA, 19 nt, Artificial Sequence
  Description of Artificial Sequence: Synthetic oligonucleotide
gguaaaaucagaucugggc

SEQ ID NO: 2408168 - RNA, 19 nt, Artificial Sequence
  Description of Artificial Sequence: Synthetic oligonucleotide
agcucaugcaaauaugcag

SEQ ID NO: 2408169 - RNA, 19 nt, Artificial Sequence
  Description of Artificial Sequence: Synthetic oligonucleotide
acaacccuggguuaagaac

SEQ ID NO: 2408170 - RNA, 19 nt, Artificial Sequence
  Description of Artificial Sequence: Synthetic oligonucleotide
aagcggacagcuccggagc

SEQ ID NO: 2408171 - RNA, 19 nt, Artificial Sequence
  Description of Artificial Sequence: Synthetic oligonucleotide
agccaguaaacaaagaauc

SEQ ID NO: 2408172 - RNA, 19 nt, Artificial Sequence
  Description of Artificial Sequence: Synthetic oligonucleotide
ugcugaagcggacagcucc

SEQ ID NO: 2408173 - RNA, 19 nt, Artificial Sequence
  Description of Artificial Sequence: Synthetic oligonucleotide
uguuacauugaggauggag

SEQ ID NO: 2408174 - RNA, 19 nt, Artificial Sequence
  Description of Artificial Sequence: Synthetic oligonucleotide
guuaguuaccauguugggg

SEQ ID NO: 2408175 - RNA, 19 nt, Artificial Sequence
  Description of Artificial Sequence: Synthetic oligonucleotide
guucuaaagugcaugagug

SEQ ID NO: 2408176 - RNA, 19 nt, Artificial Sequence
  Description of Artificial Sequence: Synthetic oligonucleotide
agccaaaccucccuggccg

SEQ ID NO: 2408177 - RNA, 19 nt, Artificial Sequence
  Description of Artificial Sequence: Synthetic oligonucleotide
aguccgacgccgcagcugc

SEQ ID NO: 2408178 - RNA, 19 nt, Artificial Sequence
  Description of Artificial Sequence: Synthetic oligonucleotide
guggguaggaagcucaugc

SEQ ID NO: 2408179 - RNA, 19 nt, Artificial Sequence
  Description of Artificial Sequence: Synthetic oligonucleotide
ucauccaaagguaccgagc

SEQ ID NO: 2408180 - RNA, 19 nt, Artificial Sequence
  Description of Artificial Sequence: Synthetic oligonucleotide
guuacauugaggauggaga

SEQ ID NO: 2408181 - RNA, 19 nt, Artificial Sequence
  Description of Artificial Sequence: Synthetic oligonucleotide
uucuaaagugcaugagugc

SEQ ID NO: 2408182 - RNA, 19 nt, Artificial Sequence
  Description of Artificial Sequence: Synthetic oligonucleotide
caagguaaaaucagaucug

SEQ ID NO: 2408183 - RNA, 19 nt, Artificial Sequence
  Description of Artificial Sequence: Synthetic oligonucleotide
cuagggucacgccagacag

SEQ ID NO: 2408184 - RNA, 19 nt, Artificial Sequence
  Description of Artificial Sequence: Synthetic oligonucleotide
agggguccaagguaaaauc

SEQ ID NO: 2408185 - RNA, 19 nt, Artificial Sequence
  Description of Artificial Sequence: Synthetic oligonucleotide
ucccuuagaaagaggcuag

SEQ ID NO: 2408186 - RNA, 19 nt, Artificial Sequence
  Description of Artificial Sequence: Synthetic oligonucleotide
gauugaucggaggaggggc

SEQ ID NO: 2408187 - RNA, 19 nt, Artificial Sequence
  Description of Artificial Sequence: Synthetic oligonucleotide
gaagcggacagcuccggag

SEQ ID NO: 2408188 - RNA, 19 nt, Artificial Sequence
  Description of Artificial Sequence: Synthetic oligonucleotide
aaagugcaugagugcgucg

SEQ ID NO: 2408189 - RNA, 19 nt, Artificial Sequence
  Description of Artificial Sequence: Synthetic oligonucleotide
ucugugucgguuccggugu

SEQ ID NO: 2408190 - RNA, 19 nt, Artificial Sequence
  Description of Artificial Sequence: Synthetic oligonucleotide
ucccaucccagucucaaca

SEQ ID NO: 2408191 - RNA, 19 nt, Artificial Sequence
  Description of Artificial Sequence: Synthetic oligonucleotide
uccaagguaaaaucagauc

SEQ ID NO: 2408192 - RNA, 19 nt, Artificial Sequence
  Description of Artificial Sequence: Synthetic oligonucleotide
cucaugcaaauaugcagcc

SEQ ID NO: 2408193 - RNA, 19 nt, Artificial Sequence
  Description of Artificial Sequence: Synthetic oligonucleotide
aggaagcucaugcaaauau

SEQ ID NO: 2408194 - RNA, 19 nt, Artificial Sequence
  Description of Artificial Sequence: Synthetic oligonucleotide
cuuaaaagguaccuuggga

SEQ ID NO: 2408195 - RNA, 19 nt, Artificial Sequence
  Description of Artificial Sequence: Synthetic oligonucleotide
gguagcaacaccgaccccg

SEQ ID NO: 2408196 - RNA, 19 nt, Artificial Sequence
  Description of Artificial Sequence: Synthetic oligonucleotide
caaauaugcagccaaaccu

SEQ ID NO: 2408197 - RNA, 19 nt, Artificial Sequence
  Description of Artificial Sequence: Synthetic oligonucleotide
agcaacaccgaccccgcgg

SEQ ID NO: 2408198 - RNA, 19 nt, Artificial Sequence
  Description of Artificial Sequence: Synthetic oligonucleotide
ugcaugagugcgucggcgg

SEQ ID NO: 2408199 - RNA, 19 nt, Artificial Sequence
  Description of Artificial Sequence: Synthetic oligonucleotide
acaaaggacaacccugggu

SEQ ID NO: 2408200 - RNA, 19 nt, Artificial Sequence
  Description of Artificial Sequence: Synthetic oligonucleotide
acagggguacaguugagga

SEQ ID NO: 2408201 - RNA, 19 nt, Artificial Sequence
  Description of Artificial Sequence: Synthetic oligonucleotide
gugguuaguuaccauguug

SEQ ID NO: 2408202 - RNA, 19 nt, Artificial Sequence
  Description of Artificial Sequence: Synthetic oligonucleotide
caguaaacaaagaaucgga

SEQ ID NO: 2408203 - RNA, 19 nt, Artificial Sequence
  Description of Artificial Sequence: Synthetic oligonucleotide
uauucacacacuccuguua

SEQ ID NO: 2408204 - RNA, 19 nt, Artificial Sequence
  Description of Artificial Sequence: Synthetic oligonucleotide
caacccuggguuaagaaca

SEQ ID NO: 2408205 - RNA, 19 nt, Artificial Sequence
  Description of Artificial Sequence: Synthetic oligonucleotide
aaaaucagaucugggcccu

SEQ ID NO: 2408206 - RNA, 19 nt, Artificial Sequence
  Description of Artificial Sequence: Synthetic oligonucleotide
uccaaagguaccgagcagu

SEQ ID NO: 2408207 - RNA, 19 nt, Artificial Sequence
  Description of Artificial Sequence: Synthetic oligonucleotide
uugaggauggagaaacauu

SEQ ID NO: 2408208 - RNA, 19 nt, Artificial Sequence
  Description of Artificial Sequence: Synthetic oligonucleotide
ugaggaagucccuuagaaa

SEQ ID NO: 2408209 - RNA, 19 nt, Artificial Sequence
  Description of Artificial Sequence: Synthetic oligonucleotide
cagauugaucggaggaggg

SEQ ID NO: 2408210 - RNA, 19 nt, Artificial Sequence
  Description of Artificial Sequence: Synthetic oligonucleotide
gaccagauugaucggagga

SEQ ID NO: 2408211 - RNA, 19 nt, Artificial Sequence
  Description of Artificial Sequence: Synthetic oligonucleotide
agaccagauugaucggagg

SEQ ID NO: 2408212 - RNA, 19 nt, Artificial Sequence
  Description of Artificial Sequence: Synthetic oligonucleotide
uggccaugugguuaguuac

SEQ ID NO: 2408213 - RNA, 19 nt, Artificial Sequence
  Description of Artificial Sequence: Synthetic oligonucleotide
ugagaggagccaguaaaca

SEQ ID NO: 2408214 - RNA, 19 nt, Artificial Sequence
  Description of Artificial Sequence: Synthetic oligonucleotide
agggucacgccagacaggg

SEQ ID NO: 2408215 - RNA, 19 nt, Artificial Sequence
  Description of Artificial Sequence: Synthetic oligonucleotide
caugagaggagccaguaaa

SEQ ID NO: 2408216 - RNA, 19 nt, Artificial Sequence
  Description of Artificial Sequence: Synthetic oligonucleotide
ugcaaauaugcagccaaac

SEQ ID NO: 2408217 - RNA, 19 nt, Artificial Sequence
  Description of Artificial Sequence: Synthetic oligonucleotide
gaggucuguguuuauucac

SEQ ID NO: 2408218 - RNA, 19 nt, Artificial Sequence
  Description of Artificial Sequence: Synthetic oligonucleotide
caacaccuguccuaucugc

SEQ ID NO: 2408219 - RNA, 19 nt, Artificial Sequence
  Description of Artificial Sequence: Synthetic oligonucleotide
ccaguaaacaaagaaucgg

SEQ ID NO: 2408220 - RNA, 19 nt, Artificial Sequence
  Description of Artificial Sequence: Synthetic oligonucleotide
cauccaaagguaccgagca

SEQ ID NO: 2408221 - RNA, 19 nt, Artificial Sequence
  Description of Artificial Sequence: Synthetic oligonucleotide
ugccaggcgcagaagagca

SEQ ID NO: 2408222 - RNA, 19 nt, Artificial Sequence
  Description of Artificial Sequence: Synthetic oligonucleotide
agauugaucggaggagggg

SEQ ID NO: 2408223 - RNA, 19 nt, Artificial Sequence
  Description of Artificial Sequence: Synthetic oligonucleotide
uacucacacacggaggucu

SEQ ID NO: 2408224 - RNA, 19 nt, Artificial Sequence
  Description of Artificial Sequence: Synthetic oligonucleotide
ucccuggccgcgcaguccg

SEQ ID NO: 2408225 - RNA, 19 nt, Artificial Sequence
  Description of Artificial Sequence: Synthetic oligonucleotide
aaugagccuccucggguca

SEQ ID NO: 2408226 - RNA, 19 nt, Artificial Sequence
  Description of Artificial Sequence: Synthetic oligonucleotide
ucccaaugagccuccucgg

SEQ ID NO: 2408227 - RNA, 19 nt, Artificial Sequence
  Description of Artificial Sequence: Synthetic oligonucleotide
gguuaguuaccauguuggg

SEQ ID NO: 2408228 - RNA, 19 nt, Artificial Sequence
  Description of Artificial Sequence: Synthetic oligonucleotide
guccgcaccaccacuaccg

SEQ ID NO: 2408229 - RNA, 19 nt, Artificial Sequence
  Description of Artificial Sequence: Synthetic oligonucleotide
aagguaccgagcagucccc

SEQ ID NO: 2408230 - RNA, 19 nt, Artificial Sequence
  Description of Artificial Sequence: Synthetic oligonucleotide
aguaaacaaagaaucggau

SEQ ID NO: 2408231 - RNA, 19 nt, Artificial Sequence
  Description of Artificial Sequence: Synthetic oligonucleotide
gagaggagccaguaaacaa

SEQ ID NO: 2408232 - RNA, 19 nt, Artificial Sequence
  Description of Artificial Sequence: Synthetic oligonucleotide
guugaggaaaggcccggag

SEQ ID NO: 2408233 - RNA, 19 nt, Artificial Sequence
  Description of Artificial Sequence: Synthetic oligonucleotide
acaguugaggaaaggcccg

SEQ ID NO: 2408234 - RNA, 19 nt, Artificial Sequence
  Description of Artificial Sequence: Synthetic oligonucleotide
aacaccgaccccgcggcgg

SEQ ID NO: 2408235 - RNA, 19 nt, Artificial Sequence
  Description of Artificial Sequence: Synthetic oligonucleotide
cacuccuguuacauugagg

SEQ ID NO: 2408236 - RNA, 19 nt, Artificial Sequence
  Description of Artificial Sequence: Synthetic oligonucleotide
ggaggagucucccaaugag

SEQ ID NO: 2408237 - RNA, 19 nt, Artificial Sequence
  Description of Artificial Sequence: Synthetic oligonucleotide
agggcacaagccaugagag

SEQ ID NO: 2408238 - RNA, 19 nt, Artificial Sequence
  Description of Artificial Sequence: Synthetic oligonucleotide
cagaccagauugaucggag

SEQ ID NO: 2408239 - RNA, 19 nt, Artificial Sequence
  Description of Artificial Sequence: Synthetic oligonucleotide
auaugcagccaaaccuccc

SEQ ID NO: 2408240 - RNA, 19 nt, Artificial Sequence
  Description of Artificial Sequence: Synthetic oligonucleotide
aagcucaugcaaauaugca

SEQ ID NO: 2408241 - RNA, 19 nt, Artificial Sequence
  Description of Artificial Sequence: Synthetic oligonucleotide
agcggcgguagcaacaccg

SEQ ID NO: 2408242 - RNA, 19 nt, Artificial Sequence
  Description of Artificial Sequence: Synthetic oligonucleotide
aaaggacaacccuggguua

SEQ ID NO: 2408243 - RNA, 19 nt, Artificial Sequence
  Description of Artificial Sequence: Synthetic oligonucleotide
cuuagaaagaggcuagggu

SEQ ID NO: 2408244 - RNA, 19 nt, Artificial Sequence
  Description of Artificial Sequence: Synthetic oligonucleotide
agguaaaaucagaucuggg

SEQ ID NO: 2408245 - RNA, 19 nt, Artificial Sequence
  Description of Artificial Sequence: Synthetic oligonucleotide
gaggagucucccaaugagc

SEQ ID NO: 2408246 - RNA, 19 nt, Artificial Sequence
  Description of Artificial Sequence: Synthetic oligonucleotide
gccaguaaacaaagaaucg

SEQ ID NO: 2408247 - RNA, 19 nt, Artificial Sequence
  Description of Artificial Sequence: Synthetic oligonucleotide
guguuuauucacacacucc

SEQ ID NO: 2408248 - RNA, 19 nt, Artificial Sequence
  Description of Artificial Sequence: Synthetic oligonucleotide
gucgguuccggugugcggg

SEQ ID NO: 2408249 - RNA, 19 nt, Artificial Sequence
  Description of Artificial Sequence: Synthetic oligonucleotide
aaacaaagaaucggauaua

SEQ ID NO: 2408250 - RNA, 19 nt, Artificial Sequence
  Description of Artificial Sequence: Synthetic oligonucleotide
auugaucggaggaggggcg

SEQ ID NO: 2408251 - RNA, 19 nt, Artificial Sequence
  Description of Artificial Sequence: Synthetic oligonucleotide
uccacaggugucauccaaa

SEQ ID NO: 2408252 - RNA, 19 nt, Artificial Sequence
  Description of Artificial Sequence: Synthetic oligonucleotide
gguuuggacagacuggcca

SEQ ID NO: 2408253 - RNA, 19 nt, Artificial Sequence
  Description of Artificial Sequence: Synthetic oligonucleotide
ccuuaaaagguaccuuggg

SEQ ID NO: 2408254 - RNA, 19 nt, Artificial Sequence
  Description of Artificial Sequence: Synthetic oligonucleotide
ugggcccuuaaaagguacc

SEQ ID NO: 2408255 - RNA, 19 nt, Artificial Sequence
  Description of Artificial Sequence: Synthetic oligonucleotide
ccaagguaaaaucagaucu

SEQ ID NO: 2408256 - RNA, 19 nt, Artificial Sequence
  Description of Artificial Sequence: Synthetic oligonucleotide
caaugagccuccucggguc

SEQ ID NO: 2408257 - RNA, 19 nt, Artificial Sequence
  Description of Artificial Sequence: Synthetic oligonucleotide
ggcgcagaagagcauggcg

SEQ ID NO: 2408258 - RNA, 19 nt, Artificial Sequence
  Description of Artificial Sequence: Synthetic oligonucleotide
agaggagccaguaaacaaa

SEQ ID NO: 2408259 - RNA, 19 nt, Artificial Sequence
  Description of Artificial Sequence: Synthetic oligonucleotide
aaagguaccuugggaggga

SEQ ID NO: 2408260 - RNA, 19 nt, Artificial Sequence
  Description of Artificial Sequence: Synthetic oligonucleotide
ucacacacuccuguuacau

SEQ ID NO: 2408261 - RNA, 19 nt, Artificial Sequence
  Description of Artificial Sequence: Synthetic oligonucleotide
agucucaacaccuguccua

SEQ ID NO: 2408262 - RNA, 19 nt, Artificial Sequence
  Description of Artificial Sequence: Synthetic oligonucleotide
acaccuguccuaucugcca

SEQ ID NO: 2408263 - RNA, 19 nt, Artificial Sequence
  Description of Artificial Sequence: Synthetic oligonucleotide
cucgggucagguuuggaca

SEQ ID NO: 2408264 - RNA, 19 nt, Artificial Sequence
  Description of Artificial Sequence: Synthetic oligonucleotide
agcggacagcuccggagcg

SEQ ID NO: 2408265 - RNA, 19 nt, Artificial Sequence
  Description of Artificial Sequence: Synthetic oligonucleotide
aaggcccggagggcuaggc

SEQ ID NO: 2408266 - RNA, 19 nt, Artificial Sequence
  Description of Artificial Sequence: Synthetic oligonucleotide
gcgguagcaacaccgaccc

SEQ ID NO: 2408267 - RNA, 19 nt, Artificial Sequence
  Description of Artificial Sequence: Synthetic oligonucleotide
uugaucggaggaggggcgg

SEQ ID NO: 2408268 - RNA, 19 nt, Artificial Sequence
  Description of Artificial Sequence: Synthetic oligonucleotide
ugugguuaguuaccauguu

SEQ ID NO: 2408269 - RNA, 19 nt, Artificial Sequence
  Description of Artificial Sequence: Synthetic oligonucleotide
uucacacacuccuguuaca

SEQ ID NO: 2408270 - RNA, 19 nt, Artificial Sequence
  Description of Artificial Sequence: Synthetic oligonucleotide
ugucgguuccggugugcgg

SEQ ID NO: 2408271 - RNA, 19 nt, Artificial Sequence
  Description of Artificial Sequence: Synthetic oligonucleotide
aaggacaacccuggguuaa

SEQ ID NO: 2408272 - RNA, 19 nt, Artificial Sequence
  Description of Artificial Sequence: Synthetic oligonucleotide
acaccgaccccgcggcggc

SEQ ID NO: 2408273 - RNA, 19 nt, Artificial Sequence
  Description of Artificial Sequence: Synthetic oligonucleotide
cuugucccaucccagucuc

SEQ ID NO: 2408274 - RNA, 19 nt, Artificial Sequence
  Description of Artificial Sequence: Synthetic oligonucleotide
ggcacaagccaugagagga

SEQ ID NO: 2408275 - RNA, 19 nt, Artificial Sequence
  Description of Artificial Sequence: Synthetic oligonucleotide
accuguccuaucugccagg

SEQ ID NO: 2408276 - RNA, 19 nt, Artificial Sequence
  Description of Artificial Sequence: Synthetic oligonucleotide
ucacacacggaggucugug

SEQ ID NO: 2408277 - RNA, 19 nt, Artificial Sequence
  Description of Artificial Sequence: Synthetic oligonucleotide
agguucuaaagugcaugag

SEQ ID NO: 2408278 - RNA, 19 nt, Artificial Sequence
  Description of Artificial Sequence: Synthetic oligonucleotide
cccauuuggguucccaggg

SEQ ID NO: 2408279 - RNA, 19 nt, Artificial Sequence
  Description of Artificial Sequence: Synthetic oligonucleotide
ugucauccaaagguaccga

SEQ ID NO: 2408280 - RNA, 19 nt, Artificial Sequence
  Description of Artificial Sequence: Synthetic oligonucleotide
gguucuaaagugcaugagu

SEQ ID NO: 2408281 - RNA, 19 nt, Artificial Sequence
  Description of Artificial Sequence: Synthetic oligonucleotide
ugcgucggcgggcuccggg

SEQ ID NO: 2408282 - RNA, 19 nt, Artificial Sequence
  Description of Artificial Sequence: Synthetic oligonucleotide
caaagguaccgagcagucc

SEQ ID NO: 2408283 - RNA, 19 nt, Artificial Sequence
  Description of Artificial Sequence: Synthetic oligonucleotide
gacaacccuggguuaagaa

SEQ ID NO: 2408284 - RNA, 19 nt, Artificial Sequence
  Description of Artificial Sequence: Synthetic oligonucleotide
ggcccgagguucuaaagug

SEQ ID NO: 2408285 - RNA, 19 nt, Artificial Sequence
  Description of Artificial Sequence: Synthetic oligonucleotide
agcaguccccauuuggguu

SEQ ID NO: 2408286 - RNA, 19 nt, Artificial Sequence
  Description of Artificial Sequence: Synthetic oligonucleotide
uggacagacuggccaugug

SEQ ID NO: 2408287 - RNA, 19 nt, Artificial Sequence
  Description of Artificial Sequence: Synthetic oligonucleotide
cugggcccuuaaaagguac

SEQ ID NO: 2408288 - RNA, 19 nt, Artificial Sequence
  Description of Artificial Sequence: Synthetic oligonucleotide
ugaucggaggaggggcggg

SEQ ID NO: 2408289 - RNA, 19 nt, Artificial Sequence
  Description of Artificial Sequence: Synthetic oligonucleotide
uaccgagcaguccccauuu

SEQ ID NO: 2408290 - RNA, 19 nt, Artificial Sequence
  Description of Artificial Sequence: Synthetic oligonucleotide
cacaagccaugagaggagc

SEQ ID NO: 2408291 - RNA, 19 nt, Artificial Sequence
  Description of Artificial Sequence: Synthetic oligonucleotide
augcagccaaaccucccug

SEQ ID NO: 2408292 - RNA, 19 nt, Artificial Sequence
  Description of Artificial Sequence: Synthetic oligonucleotide
uccggagcgccuggcagcg

SEQ ID NO: 2408293 - RNA, 19 nt, Artificial Sequence
  Description of Artificial Sequence: Synthetic oligonucleotide
ugugcgggguggagcugcg

SEQ ID NO: 2408294 - RNA, 19 nt, Artificial Sequence
  Description of Artificial Sequence: Synthetic oligonucleotide
agcugcccgggcugcagac

SEQ ID NO: 2408295 - RNA, 19 nt, Artificial Sequence
  Description of Artificial Sequence: Synthetic oligonucleotide
cagccaaaccucccuggcc

SEQ ID NO: 2408296 - RNA, 19 nt, Artificial Sequence
  Description of Artificial Sequence: Synthetic oligonucleotide
agguuuggacagacuggcc

SEQ ID NO: 2408297 - RNA, 19 nt, Artificial Sequence
  Description of Artificial Sequence: Synthetic oligonucleotide
cuaggcugagguggguagg

SEQ ID NO: 2408298 - RNA, 19 nt, Artificial Sequence
  Description of Artificial Sequence: Synthetic oligonucleotide
ccuuagaaagaggcuaggg

SEQ ID NO: 2408299 - RNA, 19 nt, Artificial Sequence
  Description of Artificial Sequence: Synthetic oligonucleotide
ugugcugaggaagucccuu

SEQ ID NO: 2408300 - RNA, 19 nt, Artificial Sequence
  Description of Artificial Sequence: Synthetic oligonucleotide
ucgguuccggugugcgggg

SEQ ID NO: 2408301 - RNA, 19 nt, Artificial Sequence
  Description of Artificial Sequence: Synthetic oligonucleotide
aaaccucccuggccgcgca

SEQ ID NO: 2408302 - RNA, 19 nt, Artificial Sequence
  Description of Artificial Sequence: Synthetic oligonucleotide
uagcaacaccgaccccgcg

SEQ ID NO: 2408303 - RNA, 19 nt, Artificial Sequence
  Description of Artificial Sequence: Synthetic oligonucleotide
cucaacaccuguccuaucu

SEQ ID NO: 2408304 - RNA, 19 nt, Artificial Sequence
  Description of Artificial Sequence: Synthetic oligonucleotide
aggaagucccuuagaaaga

SEQ ID NO: 2408305 - RNA, 19 nt, Artificial Sequence
  Description of Artificial Sequence: Synthetic oligonucleotide
gaucggaggaggggcgggg

SEQ ID NO: 2408306 - RNA, 19 nt, Artificial Sequence
  Description of Artificial Sequence: Synthetic oligonucleotide
aggcgcagaagagcauggc

SEQ ID NO: 2408307 - RNA, 19 nt, Artificial Sequence
  Description of Artificial Sequence: Synthetic oligonucleotide
uuggacagacuggccaugu

SEQ ID NO: 2408308 - RNA, 19 nt, Artificial Sequence
  Description of Artificial Sequence: Synthetic oligonucleotide
guuccggugugcggggugg

SEQ ID NO: 2408309 - RNA, 19 nt, Artificial Sequence
  Description of Artificial Sequence: Synthetic oligonucleotide
gccgccguggugcugaagc

SEQ ID NO: 2408310 - RNA, 19 nt, Artificial Sequence
  Description of Artificial Sequence: Synthetic oligonucleotide
guagcaacaccgaccccgc

SEQ ID NO: 2408311 - RNA, 19 nt, Artificial Sequence
  Description of Artificial Sequence: Synthetic oligonucleotide
gaaaggcccggagggcuag

SEQ ID NO: 2408312 - RNA, 19 nt, Artificial Sequence
  Description of Artificial Sequence: Synthetic oligonucleotide
agucccuuagaaagaggcu

SEQ ID NO: 2408313 - RNA, 19 nt, Artificial Sequence
  Description of Artificial Sequence: Synthetic oligonucleotide
gugucgguuccggugugcg

SEQ ID NO: 2408314 - RNA, 19 nt, Artificial Sequence
  Description of Artificial Sequence: Synthetic oligonucleotide
caucccagucucaacaccu

SEQ ID NO: 2408315 - RNA, 19 nt, Artificial Sequence
  Description of Artificial Sequence: Synthetic oligonucleotide
gguaccuugggagggagga

SEQ ID NO: 2408316 - RNA, 19 nt, Artificial Sequence
  Description of Artificial Sequence: Synthetic oligonucleotide
ggcgguagcaacaccgacc

SEQ ID NO: 2408317 - RNA, 19 nt, Artificial Sequence
  Description of Artificial Sequence: Synthetic oligonucleotide
caagccaugagaggagcca

SEQ ID NO: 2408318 - RNA, 19 nt, Artificial Sequence
  Description of Artificial Sequence: Synthetic oligonucleotide
caugagugcgucggcgggc

SEQ ID NO: 2408319 - RNA, 19 nt, Artificial Sequence
  Description of Artificial Sequence: Synthetic oligonucleotide
cuguccuaucugccaggcg

SEQ ID NO: 2408320 - RNA, 19 nt, Artificial Sequence
  Description of Artificial Sequence: Synthetic oligonucleotide
aucagaucugggcccuuaa

SEQ ID NO: 2408321 - RNA, 19 nt, Artificial Sequence
  Description of Artificial Sequence: Synthetic oligonucleotide
gcaugagugcgucggcggg

SEQ ID NO: 2408322 - RNA, 19 nt, Artificial Sequence
  Description of Artificial Sequence: Synthetic oligonucleotide
guaggaagcucaugcaaau

SEQ ID NO: 2408323 - RNA, 19 nt, Artificial Sequence
  Description of Artificial Sequence: Synthetic oligonucleotide
cuaaagugcaugagugcgu

SEQ ID NO: 2408324 - RNA, 19 nt, Artificial Sequence
  Description of Artificial Sequence: Synthetic oligonucleotide
gagugcgucggcgggcucc

SEQ ID NO: 2408325 - RNA, 19 nt, Artificial Sequence
  Description of Artificial Sequence: Synthetic oligonucleotide
ugguccgcaccaccacuac

SEQ ID NO: 2408326 - RNA, 19 nt, Artificial Sequence
  Description of Artificial Sequence: Synthetic oligonucleotide
uaggaagcucaugcaaaua

SEQ ID NO: 2408327 - RNA, 19 nt, Artificial Sequence
  Description of Artificial Sequence: Synthetic oligonucleotide
gacgccgcagcugcccggg

SEQ ID NO: 2408328 - RNA, 19 nt, Artificial Sequence
  Description of Artificial Sequence: Synthetic oligonucleotide
ccccauuuggguucccagg

SEQ ID NO: 2408329 - RNA, 19 nt, Artificial Sequence
  Description of Artificial Sequence: Synthetic oligonucleotide
uuacucacacacggagguc

SEQ ID NO: 2408330 - RNA, 19 nt, Artificial Sequence
  Description of Artificial Sequence: Synthetic oligonucleotide
gguaggaagcucaugcaaa

SEQ ID NO: 2408331 - RNA, 19 nt, Artificial Sequence
  Description of Artificial Sequence: Synthetic oligonucleotide
caggugucauccaaaggua

SEQ ID NO: 2408332 - RNA, 19 nt, Artificial Sequence
  Description of Artificial Sequence: Synthetic oligonucleotide
cuggccaugugguuaguua

SEQ ID NO: 2408333 - RNA, 19 nt, Artificial Sequence
  Description of Artificial Sequence: Synthetic oligonucleotide
uccuaucugccaggcgcag

SEQ ID NO: 2408334 - RNA, 19 nt, Artificial Sequence
  Description of Artificial Sequence: Synthetic oligonucleotide
ccgagcaguccccauuugg

SEQ ID NO: 2408335 - RNA, 19 nt, Artificial Sequence
  Description of Artificial Sequence: Synthetic oligonucleotide
aaaggcccggagggcuagg

SEQ ID NO: 2408336 - RNA, 19 nt, Artificial Sequence
  Description of Artificial Sequence: Synthetic oligonucleotide
aggacaacccuggguuaag

SEQ ID NO: 2408337 - RNA, 19 nt, Artificial Sequence
  Description of Artificial Sequence: Synthetic oligonucleotide
gagcaguccccauuugggu

SEQ ID NO: 2408338 - RNA, 19 nt, Artificial Sequence
  Description of Artificial Sequence: Synthetic oligonucleotide
guuuggacagacuggccau

SEQ ID NO: 2408339 - RNA, 19 nt, Artificial Sequence
  Description of Artificial Sequence: Synthetic oligonucleotide
cacacuccuguuacauuga

SEQ ID NO: 2408340 - RNA, 19 nt, Artificial Sequence
  Description of Artificial Sequence: Synthetic oligonucleotide
gcugaagcggacagcuccg

SEQ ID NO: 2408341 - RNA, 19 nt, Artificial Sequence
  Description of Artificial Sequence: Synthetic oligonucleotide
ggucacgccagacaggggu

SEQ ID NO: 2408342 - RNA, 19 nt, Artificial Sequence
  Description of Artificial Sequence: Synthetic oligonucleotide
acagacuggccaugugguu

SEQ ID NO: 2408343 - RNA, 19 nt, Artificial Sequence
  Description of Artificial Sequence: Synthetic oligonucleotide
cuggccgcgcaguccgacg

SEQ ID NO: 2408344 - RNA, 19 nt, Artificial Sequence
  Description of Artificial Sequence: Synthetic oligonucleotide
ggguaggaagcucaugcaa

SEQ ID NO: 2408345 - RNA, 19 nt, Artificial Sequence
  Description of Artificial Sequence: Synthetic oligonucleotide
cugaagcggacagcuccgg

SEQ ID NO: 2408346 - RNA, 19 nt, Artificial Sequence
  Description of Artificial Sequence: Synthetic oligonucleotide
agugcgucggcgggcuccg

SEQ ID NO: 2408347 - RNA, 19 nt, Artificial Sequence
  Description of Artificial Sequence: Synthetic oligonucleotide
gguccaagguaaaaucaga

SEQ ID NO: 2408348 - RNA, 19 nt, Artificial Sequence
  Description of Artificial Sequence: Synthetic oligonucleotide
acgccagacagggguacag

SEQ ID NO: 2408349 - RNA, 19 nt, Artificial Sequence
  Description of Artificial Sequence: Synthetic oligonucleotide
caaaccucccuggccgcgc

SEQ ID NO: 2408350 - RNA, 19 nt, Artificial Sequence
  Description of Artificial Sequence: Synthetic oligonucleotide
ggagggaggagucucccaa

SEQ ID NO: 2408351 - RNA, 19 nt, Artificial Sequence
  Description of Artificial Sequence: Synthetic oligonucleotide
gcaguccccauuuggguuc

SEQ ID NO: 2408352 - RNA, 19 nt, Artificial Sequence
  Description of Artificial Sequence: Synthetic oligonucleotide
cagggguacaguugaggaa

SEQ ID NO: 2408353 - RNA, 19 nt, Artificial Sequence
  Description of Artificial Sequence: Synthetic oligonucleotide
guaccuugggagggaggag

SEQ ID NO: 2408354 - RNA, 19 nt, Artificial Sequence
  Description of Artificial Sequence: Synthetic oligonucleotide
gugugcgggguggagcugc

SEQ ID NO: 2408355 - RNA, 19 nt, Artificial Sequence
  Description of Artificial Sequence: Synthetic oligonucleotide
augagugcgucggcgggcu

SEQ ID NO: 2408356 - RNA, 19 nt, Artificial Sequence
  Description of Artificial Sequence: Synthetic oligonucleotide
cuguguuuauucacacacu

SEQ ID NO: 2408357 - RNA, 19 nt, Artificial Sequence
  Description of Artificial Sequence: Synthetic oligonucleotide
ugcggcccgagguucuaaa

SEQ ID NO: 2408358 - RNA, 19 nt, Artificial Sequence
  Description of Artificial Sequence: Synthetic oligonucleotide
acacggaggucuguguuua

SEQ ID NO: 2408359 - RNA, 19 nt, Artificial Sequence
  Description of Artificial Sequence: Synthetic oligonucleotide
accgagcaguccccauuug

SEQ ID NO: 2408360 - RNA, 19 nt, Artificial Sequence
  Description of Artificial Sequence: Synthetic oligonucleotide
ggguacaguugaggaaagg

SEQ ID NO: 2408361 - RNA, 19 nt, Artificial Sequence
  Description of Artificial Sequence: Synthetic oligonucleotide
agguaccuugggagggagg

SEQ ID NO: 2408362 - RNA, 19 nt, Artificial Sequence
  Description of Artificial Sequence: Synthetic oligonucleotide
auuuggguucccagggaua

SEQ ID NO: 2408363 - RNA, 19 nt, Artificial Sequence
  Description of Artificial Sequence: Synthetic oligonucleotide
acucacacacggaggucug

SEQ ID NO: 2408364 - RNA, 19 nt, Artificial Sequence
  Description of Artificial Sequence: Synthetic oligonucleotide
cauuuggguucccagggau

SEQ ID NO: 2408365 - RNA, 19 nt, Artificial Sequence
  Description of Artificial Sequence: Synthetic oligonucleotide
cagacuggccaugugguua

SEQ ID NO: 2408366 - RNA, 19 nt, Artificial Sequence
  Description of Artificial Sequence: Synthetic oligonucleotide
gggaggagucucccaauga

SEQ ID NO: 2408367 - RNA, 19 nt, Artificial Sequence
  Description of Artificial Sequence: Synthetic oligonucleotide
gguccgcaccaccacuacc

SEQ ID NO: 2408368 - RNA, 19 nt, Artificial Sequence
  Description of Artificial Sequence: Synthetic oligonucleotide
gucccaucccagucucaac

SEQ ID NO: 2408369 - RNA, 19 nt, Artificial Sequence
  Description of Artificial Sequence: Synthetic oligonucleotide
ggggcaggggagccgugcg

SEQ ID NO: 2408370 - RNA, 19 nt, Artificial Sequence
  Description of Artificial Sequence: Synthetic oligonucleotide
agacagggguacaguugag

SEQ ID NO: 2408371 - RNA, 19 nt, Artificial Sequence
  Description of Artificial Sequence: Synthetic oligonucleotide
guccuaucugccaggcgca

SEQ ID NO: 2408372 - RNA, 19 nt, Artificial Sequence
  Description of Artificial Sequence: Synthetic oligonucleotide
caggggagccgugcgggag

SEQ ID NO: 2408373 - RNA, 19 nt, Artificial Sequence
  Description of Artificial Sequence: Synthetic oligonucleotide
gcagaccagauugaucgga

SEQ ID NO: 2408374 - RNA, 19 nt, Artificial Sequence
  Description of Artificial Sequence: Synthetic oligonucleotide
ggggcuugucccaucccag

SEQ ID NO: 2408375 - RNA, 19 nt, Artificial Sequence
  Description of Artificial Sequence: Synthetic oligonucleotide
gagcauggcggaggcugug

SEQ ID NO: 2408376 - RNA, 19 nt, Artificial Sequence
  Description of Artificial Sequence: Synthetic oligonucleotide
cccgagguucuaaagugca

SEQ ID NO: 2408377 - RNA, 19 nt, Artificial Sequence
  Description of Artificial Sequence: Synthetic oligonucleotide
gucucaacaccuguccuau

SEQ ID NO: 2408378 - RNA, 19 nt, Artificial Sequence
  Description of Artificial Sequence: Synthetic oligonucleotide
cugugucgguuccggugug

SEQ ID NO: 2408379 - RNA, 19 nt, Artificial Sequence
  Description of Artificial Sequence: Synthetic oligonucleotide
ggaagggcacaagccauga

SEQ ID NO: 2408380 - RNA, 19 nt, Artificial Sequence
  Description of Artificial Sequence: Synthetic oligonucleotide
cccuggguuaagaacaucu

SEQ ID NO: 2408381 - RNA, 19 nt, Artificial Sequence
  Description of Artificial Sequence: Synthetic oligonucleotide
acggaggucuguguuuauu

SEQ ID NO: 2408382 - RNA, 19 nt, Artificial Sequence
  Description of Artificial Sequence: Synthetic oligonucleotide
gguggguaggaagcucaug

SEQ ID NO: 2408383 - RNA, 19 nt, Artificial Sequence
  Description of Artificial Sequence: Synthetic oligonucleotide
cccuuagaaagaggcuagg

SEQ ID NO: 2408384 - RNA, 19 nt, Artificial Sequence
  Description of Artificial Sequence: Synthetic oligonucleotide
cugguccgcaccaccacua

SEQ ID NO: 2408385 - RNA, 19 nt, Artificial Sequence
  Description of Artificial Sequence: Synthetic oligonucleotide
gggguacaguugaggaaag

SEQ ID NO: 2408386 - RNA, 19 nt, Artificial Sequence
  Description of Artificial Sequence: Synthetic oligonucleotide
caguccgacgccgcagcug

SEQ ID NO: 2408387 - RNA, 19 nt, Artificial Sequence
  Description of Artificial Sequence: Synthetic oligonucleotide
gcugcagaccagauugauc

SEQ ID NO: 2408388 - RNA, 19 nt, Artificial Sequence
  Description of Artificial Sequence: Synthetic oligonucleotide
acuggccaugugguuaguu

SEQ ID NO: 2408389 - RNA, 19 nt, Artificial Sequence
  Description of Artificial Sequence: Synthetic oligonucleotide
gggcaggggagccgugcgg

SEQ ID NO: 2408390 - RNA, 19 nt, Artificial Sequence
  Description of Artificial Sequence: Synthetic oligonucleotide
gggucagguuuggacagac

SEQ ID NO: 2408391 - RNA, 19 nt, Artificial Sequence
  Description of Artificial Sequence: Synthetic oligonucleotide
gcggcccgagguucuaaag

SEQ ID NO: 2408392 - RNA, 19 nt, Artificial Sequence
  Description of Artificial Sequence: Synthetic oligonucleotide
gcccgagguucuaaagugc

SEQ ID NO: 2408393 - RNA, 19 nt, Artificial Sequence
  Description of Artificial Sequence: Synthetic oligonucleotide
gagcugcggcccgagguuc

SEQ ID NO: 2408394 - RNA, 19 nt, Artificial Sequence
  Description of Artificial Sequence: Synthetic oligonucleotide
aggcuagggucacgccaga

SEQ ID NO: 2408395 - RNA, 19 nt, Artificial Sequence
  Description of Artificial Sequence: Synthetic oligonucleotide
agguaccgagcagucccca

SEQ ID NO: 2408396 - RNA, 19 nt, Artificial Sequence
  Description of Artificial Sequence: Synthetic oligonucleotide
gaggauggagaaacauuuu

SEQ ID NO: 2408397 - RNA, 19 nt, Artificial Sequence
  Description of Artificial Sequence: Synthetic oligonucleotide
uccucgggucagguuugga

SEQ ID NO: 2408398 - RNA, 19 nt, Artificial Sequence
  Description of Artificial Sequence: Synthetic oligonucleotide
acgccgcagcugcccgggc

SEQ ID NO: 2408399 - RNA, 19 nt, Artificial Sequence
  Description of Artificial Sequence: Synthetic oligonucleotide
gagggaggagucucccaau

SEQ ID NO: 2408400 - RNA, 19 nt, Artificial Sequence
  Description of Artificial Sequence: Synthetic oligonucleotide
gcgggguggagcugcggcc

SEQ ID NO: 2408401 - RNA, 19 nt, Artificial Sequence
  Description of Artificial Sequence: Synthetic oligonucleotide
gcuugucccaucccagucu

SEQ ID NO: 2408402 - RNA, 19 nt, Artificial Sequence
  Description of Artificial Sequence: Synthetic oligonucleotide
gaccccgcggcggcguggc

SEQ ID NO: 2408403 - RNA, 19 nt, Artificial Sequence
  Description of Artificial Sequence: Synthetic oligonucleotide
guaccgagcaguccccauu

SEQ ID NO: 2408404 - RNA, 19 nt, Artificial Sequence
  Description of Artificial Sequence: Synthetic oligonucleotide
ugagugcgucggcgggcuc

SEQ ID NO: 2408405 - RNA, 19 nt, Artificial Sequence
  Description of Artificial Sequence: Synthetic oligonucleotide
ccgccguggugcugaagcg

SEQ ID NO: 2408406 - RNA, 19 nt, Artificial Sequence
  Description of Artificial Sequence: Synthetic oligonucleotide
ccuccucgggucagguuug

SEQ ID NO: 2408407 - RNA, 19 nt, Artificial Sequence
  Description of Artificial Sequence: Synthetic oligonucleotide
cagcggcgguagcaacacc

SEQ ID NO: 2408408 - RNA, 19 nt, Artificial Sequence
  Description of Artificial Sequence: Synthetic oligonucleotide
uuccggugugcggggugga

SEQ ID NO: 2408409 - RNA, 19 nt, Artificial Sequence
  Description of Artificial Sequence: Synthetic oligonucleotide
cuccuguuacauugaggau

SEQ ID NO: 2408410 - RNA, 19 nt, Artificial Sequence
  Description of Artificial Sequence: Synthetic oligonucleotide
ccgcaccaccacuaccgcc

SEQ ID NO: 2408411 - RNA, 19 nt, Artificial Sequence
  Description of Artificial Sequence: Synthetic oligonucleotide
ggacaacccuggguuaaga

SEQ ID NO: 2408412 - RNA, 19 nt, Artificial Sequence
  Description of Artificial Sequence: Synthetic oligonucleotide
gcgucggcgggcuccgggc

SEQ ID NO: 2408413 - RNA, 19 nt, Artificial Sequence
  Description of Artificial Sequence: Synthetic oligonucleotide
gccuccucgggucagguuu

SEQ ID NO: 2408414 - RNA, 19 nt, Artificial Sequence
  Description of Artificial Sequence: Synthetic oligonucleotide
gccgcgcaguccgacgccg

SEQ ID NO: 2408415 - RNA, 19 nt, Artificial Sequence
  Description of Artificial Sequence: Synthetic oligonucleotide
agccuccucgggucagguu

SEQ ID NO: 2408416 - RNA, 19 nt, Artificial Sequence
  Description of Artificial Sequence: Synthetic oligonucleotide
cacacacuccuguuacauu

SEQ ID NO: 2408417 - RNA, 19 nt, Artificial Sequence
  Description of Artificial Sequence: Synthetic oligonucleotide
gggcccuuaaaagguaccu

SEQ ID NO: 2408418 - RNA, 19 nt, Artificial Sequence
  Description of Artificial Sequence: Synthetic oligonucleotide
agcugcggcccgagguucu

SEQ ID NO: 2408419 - RNA, 19 nt, Artificial Sequence
  Description of Artificial Sequence: Synthetic oligonucleotide
cgcaguccgacgccgcagc

SEQ ID NO: 2408420 - RNA, 19 nt, Artificial Sequence
  Description of Artificial Sequence: Synthetic oligonucleotide
ccggugugcgggguggagc

SEQ ID NO: 2408421 - RNA, 19 nt, Artificial Sequence
  Description of Artificial Sequence: Synthetic oligonucleotide
gccaugagaggagccagua

SEQ ID NO: 2408422 - RNA, 19 nt, Artificial Sequence
  Description of Artificial Sequence: Synthetic oligonucleotide
ggcuagggucacgccagac

SEQ ID NO: 2408423 - RNA, 19 nt, Artificial Sequence
  Description of Artificial Sequence: Synthetic oligonucleotide
cggagcgccuggcagcggc

SEQ ID NO: 2408424 - RNA, 19 nt, Artificial Sequence
  Description of Artificial Sequence: Synthetic oligonucleotide
ggccgcgcaguccgacgcc

SEQ ID NO: 2408425 - RNA, 19 nt, Artificial Sequence
  Description of Artificial Sequence: Synthetic oligonucleotide
cacgccagacagggguaca

SEQ ID NO: 2408426 - RNA, 19 nt, Artificial Sequence
  Description of Artificial Sequence: Synthetic oligonucleotide
ccaugagaggagccaguaa

SEQ ID NO: 2408427 - RNA, 19 nt, Artificial Sequence
  Description of Artificial Sequence: Synthetic oligonucleotide
cacuaccgccgccgccgug

SEQ ID NO: 2408428 - RNA, 19 nt, Artificial Sequence
  Description of Artificial Sequence: Synthetic oligonucleotide
gggucacgccagacagggg

SEQ ID NO: 2408429 - RNA, 19 nt, Artificial Sequence
  Description of Artificial Sequence: Synthetic oligonucleotide
ggcuaggcugaggugggua

SEQ ID NO: 2408430 - RNA, 19 nt, Artificial Sequence
  Description of Artificial Sequence: Synthetic oligonucleotide
ggagcugcggcccgagguu

SEQ ID NO: 2408431 - RNA, 19 nt, Artificial Sequence
  Description of Artificial Sequence: Synthetic oligonucleotide
caccgaccccgcggcggcg

SEQ ID NO: 2408432 - RNA, 19 nt, Artificial Sequence
  Description of Artificial Sequence: Synthetic oligonucleotide
cuguuacauugaggaugga

SEQ ID NO: 2408433 - RNA, 19 nt, Artificial Sequence
  Description of Artificial Sequence: Synthetic oligonucleotide
gguaccgagcaguccccau

SEQ ID NO: 2408434 - RNA, 19 nt, Artificial Sequence
  Description of Artificial Sequence: Synthetic oligonucleotide
gcggcgguagcaacaccga

SEQ ID NO: 2408435 - RNA, 19 nt, Artificial Sequence
  Description of Artificial Sequence: Synthetic oligonucleotide
gccgccgccguggugcuga

SEQ ID NO: 2408436 - RNA, 19 nt, Artificial Sequence
  Description of Artificial Sequence: Synthetic oligonucleotide
gggccgugggucucugugu

SEQ ID NO: 2408437 - RNA, 19 nt, Artificial Sequence
  Description of Artificial Sequence: Synthetic oligonucleotide
gugggucucugugucgguu

SEQ ID NO: 2408438 - RNA, 19 nt, Artificial Sequence
  Description of Artificial Sequence: Synthetic oligonucleotide
gcuccgggcugguccgcac

SEQ ID NO: 2408439 - RNA, 19 nt, Artificial Sequence
  Description of Artificial Sequence: Synthetic oligonucleotide
cggcgguagcaacaccgac

SEQ ID NO: 2408440 - RNA, 19 nt, Artificial Sequence
  Description of Artificial Sequence: Synthetic oligonucleotide
ggcccuuaaaagguaccuu

SEQ ID NO: 2408441 - RNA, 19 nt, Artificial Sequence
  Description of Artificial Sequence: Synthetic oligonucleotide
ggcugcagaccagauugau

SEQ ID NO: 2408442 - RNA, 19 nt, Artificial Sequence
  Description of Artificial Sequence: Synthetic oligonucleotide
ccgcgcaguccgacgccgc

SEQ ID NO: 2408443 - RNA, 19 nt, Artificial Sequence
  Description of Artificial Sequence: Synthetic oligonucleotide
ccuggccgcgcaguccgac

SEQ ID NO: 2408444 - RNA, 19 nt, Artificial Sequence
  Description of Artificial Sequence: Synthetic oligonucleotide
ccggagggcuaggcugagg

SEQ ID NO: 2408445 - RNA, 19 nt, Artificial Sequence
  Description of Artificial Sequence: Synthetic oligonucleotide
gggagccgugcgggagggg

SEQ ID NO: 2408446 - RNA, 19 nt, Artificial Sequence
  Description of Artificial Sequence: Synthetic oligonucleotide
gugcgucggcgggcuccgg

SEQ ID NO: 2408447 - RNA, 19 nt, Artificial Sequence
  Description of Artificial Sequence: Synthetic oligonucleotide
cacggaggucuguguuuau

SEQ ID NO: 2408448 - RNA, 19 nt, Artificial Sequence
  Description of Artificial Sequence: Synthetic oligonucleotide
ccgagguucuaaagugcau

SEQ ID NO: 2408449 - RNA, 19 nt, Artificial Sequence
  Description of Artificial Sequence: Synthetic oligonucleotide
cgguagcaacaccgacccc

SEQ ID NO: 2408450 - RNA, 19 nt, Artificial Sequence
  Description of Artificial Sequence: Synthetic oligonucleotide
gcaguccgacgccgcagcu

SEQ ID NO: 2408451 - RNA, 19 nt, Artificial Sequence
  Description of Artificial Sequence: Synthetic oligonucleotide
cugcggcccgagguucuaa

SEQ ID NO: 2408452 - RNA, 19 nt, Artificial Sequence
  Description of Artificial Sequence: Synthetic oligonucleotide
cggcccgagguucuaaagu

SEQ ID NO: 2408453 - RNA, 19 nt, Artificial Sequence
  Description of Artificial Sequence: Synthetic oligonucleotide
cgccuggcagcggcgguag

SEQ ID NO: 2408454 - RNA, 19 nt, Artificial Sequence
  Description of Artificial Sequence: Synthetic oligonucleotide
cggugugcgggguggagcu

SEQ ID NO: 2408455 - RNA, 19 nt, Artificial Sequence
  Description of Artificial Sequence: Synthetic oligonucleotide
cuaccgccgccgccguggu

SEQ ID NO: 2408456 - RNA, 19 nt, Artificial Sequence
  Description of Artificial Sequence: Synthetic oligonucleotide
ccgggcugguccgcaccac

SEQ ID NO: 2408457 - RNA, 19 nt, Artificial Sequence
  Description of Artificial Sequence: Synthetic oligonucleotide
cgcgcaguccgacgccgca

SEQ ID NO: 2408458 - RNA, 19 nt, Artificial Sequence
  Description of Artificial Sequence: Synthetic oligonucleotide
ccgaccccgcggcggcgug

SEQ ID NO: 2408459 - RNA, 19 nt, Artificial Sequence
  Description of Artificial Sequence: Synthetic oligonucleotide
ccggagcgccuggcagcgg

SEQ ID NO: 2408460 - RNA, 19 nt, Artificial Sequence
  Description of Artificial Sequence: Synthetic oligonucleotide
cgaccccgcggcggcgugg

SEQ ID NO: 2408461 - RNA, 19 nt, Artificial Sequence
  Description of Artificial Sequence: Synthetic oligonucleotide
cccuggccgcgcaguccga

SEQ ID NO: 2408462 - RNA, 19 nt, Artificial Sequence
  Description of Artificial Sequence: Synthetic oligonucleotide
cgucggcgggcuccgggcu

SEQ ID NO: 2408463 - RNA, 19 nt, Artificial Sequence
  Description of Artificial Sequence: Synthetic oligonucleotide
cgccgccguggugcugaag

SEQ ID NO: 2408464 - RNA, 19 nt, Artificial Sequence
  Description of Artificial Sequence: Synthetic oligonucleotide
ccgccgccguggugcugaa

SEQ ID NO: 2408465 - RNA, 19 nt, Artificial Sequence
  Description of Artificial Sequence: Synthetic oligonucleotide
ccgcggcggcguggcccug

SEQ ID NO: 2408466 - RNA, 19 nt, Artificial Sequence
  Description of Artificial Sequence: Synthetic oligonucleotide
ugaaugauaaauaucuugg

SEQ ID NO: 2408467 - RNA, 19 nt, Artificial Sequence
  Description of Artificial Sequence: Synthetic oligonucleotide
aaaccuucgaaucagguug

SEQ ID NO: 2408468 - RNA, 19 nt, Artificial Sequence
  Description of Artificial Sequence: Synthetic oligonucleotide
cugaauuucaauuuuggcg

SEQ ID NO: 2408469 - RNA, 19 nt, Artificial Sequence
  Description of Artificial Sequence: Synthetic oligonucleotide
aagcauuucacuucaaauc

SEQ ID NO: 2408470 - RNA, 19 nt, Artificial Sequence
  Description of Artificial Sequence: Synthetic oligonucleotide
uuuuagucagcauugaggc

SEQ ID NO: 2408471 - RNA, 19 nt, Artificial Sequence
  Description of Artificial Sequence: Synthetic oligonucleotide
ugaauuucaauuuuggcgu

SEQ ID NO: 2408472 - RNA, 19 nt, Artificial Sequence
  Description of Artificial Sequence: Synthetic oligonucleotide
aaugauaaauaucuugggu

SEQ ID NO: 2408473 - RNA, 19 nt, Artificial Sequence
  Description of Artificial Sequence: Synthetic oligonucleotide
aaagcagggaaccugcuuc

SEQ ID NO: 2408474 - RNA, 19 nt, Artificial Sequence
  Description of Artificial Sequence: Synthetic oligonucleotide
acuuacuagauuugggacc

SEQ ID NO: 2408475 - RNA, 19 nt, Artificial Sequence
  Description of Artificial Sequence: Synthetic oligonucleotide
agaguaauacccuucggcg

SEQ ID NO: 2408476 - RNA, 19 nt, Artificial Sequence
  Description of Artificial Sequence: Synthetic oligonucleotide
ucagcauugaggcaaagca

SEQ ID NO: 2408477 - RNA, 19 nt, Artificial Sequence
  Description of Artificial Sequence: Synthetic oligonucleotide
gcaaucagcaucuauaugg

SEQ ID NO: 2408478 - RNA, 19 nt, Artificial Sequence
  Description of Artificial Sequence: Synthetic oligonucleotide
uguaccaugagccauucac

SEQ ID NO: 2408479 - RNA, 19 nt, Artificial Sequence
  Description of Artificial Sequence: Synthetic oligonucleotide
agauuugggaccgaaacgc

SEQ ID NO: 2408480 - RNA, 19 nt, Artificial Sequence
  Description of Artificial Sequence: Synthetic oligonucleotide
ucuauauggcuugaggucg

SEQ ID NO: 2408481 - RNA, 19 nt, Artificial Sequence
  Description of Artificial Sequence: Synthetic oligonucleotide
gacggaguaacacaugagg

SEQ ID NO: 2408482 - RNA, 19 nt, Artificial Sequence
  Description of Artificial Sequence: Synthetic oligonucleotide
ugaauuuugagcaggaguu

SEQ ID NO: 2408483 - RNA, 19 nt, Artificial Sequence
  Description of Artificial Sequence: Synthetic oligonucleotide
uguguagacaggaccaacg

SEQ ID NO: 2408484 - RNA, 19 nt, Artificial Sequence
  Description of Artificial Sequence: Synthetic oligonucleotide
aaagcauuucacuucaaau

SEQ ID NO: 2408485 - RNA, 19 nt, Artificial Sequence
  Description of Artificial Sequence: Synthetic oligonucleotide
auaucuuggguuuuccaac

SEQ ID NO: 2408486 - RNA, 19 nt, Artificial Sequence
  Description of Artificial Sequence: Synthetic oligonucleotide
aguaauacccuucggcgac

SEQ ID NO: 2408487 - RNA, 19 nt, Artificial Sequence
  Description of Artificial Sequence: Synthetic oligonucleotide
aaaugugguugccuucgcc

SEQ ID NO: 2408488 - RNA, 19 nt, Artificial Sequence
  Description of Artificial Sequence: Synthetic oligonucleotide
aaugucugaauuucaauuu

SEQ ID NO: 2408489 - RNA, 19 nt, Artificial Sequence
  Description of Artificial Sequence: Synthetic oligonucleotide
uagauuugggaccgaaacg

SEQ ID NO: 2408490 - RNA, 19 nt, Artificial Sequence
  Description of Artificial Sequence: Synthetic oligonucleotide
aucuauauggcuugagguc

SEQ ID NO: 2408491 - RNA, 19 nt, Artificial Sequence
  Description of Artificial Sequence: Synthetic oligonucleotide
aacacaugaggaaauccgc

SEQ ID NO: 2408492 - RNA, 19 nt, Artificial Sequence
  Description of Artificial Sequence: Synthetic oligonucleotide
cuucgaaucagguuguccc

SEQ ID NO: 2408493 - RNA, 19 nt, Artificial Sequence
  Description of Artificial Sequence: Synthetic oligonucleotide
cugaaugauaaauaucuug

SEQ ID NO: 2408494 - RNA, 19 nt, Artificial Sequence
  Description of Artificial Sequence: Synthetic oligonucleotide
gagaguaauacccuucggc

SEQ ID NO: 2408495 - RNA, 19 nt, Artificial Sequence
  Description of Artificial Sequence: Synthetic oligonucleotide
ugauccaccacgucuagag

SEQ ID NO: 2408496 - RNA, 19 nt, Artificial Sequence
  Description of Artificial Sequence: Synthetic oligonucleotide
uagaggaaccacuggaacg

SEQ ID NO: 2408497 - RNA, 19 nt, Artificial Sequence
  Description of Artificial Sequence: Synthetic oligonucleotide
caauuuuggcgucauaugc

SEQ ID NO: 2408498 - RNA, 19 nt, Artificial Sequence
  Description of Artificial Sequence: Synthetic oligonucleotide
ugagagaccuuucuguuca

SEQ ID NO: 2408499 - RNA, 19 nt, Artificial Sequence
  Description of Artificial Sequence: Synthetic oligonucleotide
uucacuucaaauccuagau

SEQ ID NO: 2408500 - RNA, 19 nt, Artificial Sequence
  Description of Artificial Sequence: Synthetic oligonucleotide
agugucaagugccagaaga

SEQ ID NO: 2408501 - RNA, 19 nt, Artificial Sequence
  Description of Artificial Sequence: Synthetic oligonucleotide
uucgccguggcucaggaag

SEQ ID NO: 2408502 - RNA, 19 nt, Artificial Sequence
  Description of Artificial Sequence: Synthetic oligonucleotide
augaauuuugagcaggagu

SEQ ID NO: 2408503 - RNA, 19 nt, Artificial Sequence
  Description of Artificial Sequence: Synthetic oligonucleotide
acacuugucuccuuugaac

SEQ ID NO: 2408504 - RNA, 19 nt, Artificial Sequence
  Description of Artificial Sequence: Synthetic oligonucleotide
cuagauuugggaccgaaac

SEQ ID NO: 2408505 - RNA, 19 nt, Artificial Sequence
  Description of Artificial Sequence: Synthetic oligonucleotide
acaugaggaaauccgcccc

SEQ ID NO: 2408506 - RNA, 19 nt, Artificial Sequence
  Description of Artificial Sequence: Synthetic oligonucleotide
uguagaagccaucuguuuc

SEQ ID NO: 2408507 - RNA, 19 nt, Artificial Sequence
  Description of Artificial Sequence: Synthetic oligonucleotide
cuagaucugaaaaccuucg

SEQ ID NO: 2408508 - RNA, 19 nt, Artificial Sequence
  Description of Artificial Sequence: Synthetic oligonucleotide
cuuacuagauuugggaccg

SEQ ID NO: 2408509 - RNA, 19 nt, Artificial Sequence
  Description of Artificial Sequence: Synthetic oligonucleotide
agaucguuaaagcauuuca

SEQ ID NO: 2408510 - RNA, 19 nt, Artificial Sequence
  Description of Artificial Sequence: Synthetic oligonucleotide
auaaaugugguugccuucg

SEQ ID NO: 2408511 - RNA, 19 nt, Artificial Sequence
  Description of Artificial Sequence: Synthetic oligonucleotide
aaccacuggaacgucgugc

SEQ ID NO: 2408512 - RNA, 19 nt, Artificial Sequence
  Description of Artificial Sequence: Synthetic oligonucleotide
uauggcuugaggucgacac

SEQ ID NO: 2408513 - RNA, 19 nt, Artificial Sequence
  Description of Artificial Sequence: Synthetic oligonucleotide
aucguuaaagcauuucacu

SEQ ID NO: 2408514 - RNA, 19 nt, Artificial Sequence
  Description of Artificial Sequence: Synthetic oligonucleotide
ugagcaggaguucuugugc

SEQ ID NO: 2408515 - RNA, 19 nt, Artificial Sequence
  Description of Artificial Sequence: Synthetic oligonucleotide
ugauaaauaucuuggguuu

SEQ ID NO: 2408516 - RNA, 19 nt, Artificial Sequence
  Description of Artificial Sequence: Synthetic oligonucleotide
accuguguuacauuguucu

SEQ ID NO: 2408517 - RNA, 19 nt, Artificial Sequence
  Description of Artificial Sequence: Synthetic oligonucleotide
ugucugaauuucaauuuug

SEQ ID NO: 2408518 - RNA, 19 nt, Artificial Sequence
  Description of Artificial Sequence: Synthetic oligonucleotide
uuagucagcauugaggcaa

SEQ ID NO: 2408519 - RNA, 19 nt, Artificial Sequence
  Description of Artificial Sequence: Synthetic oligonucleotide
uuuggcgucauaugcauaa

SEQ ID NO: 2408520 - RNA, 19 nt, Artificial Sequence
  Description of Artificial Sequence: Synthetic oligonucleotide
ugaaaaccuucgaaucagg

SEQ ID NO: 2408521 - RNA, 19 nt, Artificial Sequence
  Description of Artificial Sequence: Synthetic oligonucleotide
uuucacuucaaauccuaga

SEQ ID NO: 2408522 - RNA, 19 nt, Artificial Sequence
  Description of Artificial Sequence: Synthetic oligonucleotide
uaccaugagccauucacag

SEQ ID NO: 2408523 - RNA, 19 nt, Artificial Sequence
  Description of Artificial Sequence: Synthetic oligonucleotide
guagacaggaccaacgacc

SEQ ID NO: 2408524 - RNA, 19 nt, Artificial Sequence
  Description of Artificial Sequence: Synthetic oligonucleotide
uucaauuuuggcgucauau

SEQ ID NO: 2408525 - RNA, 19 nt, Artificial Sequence
  Description of Artificial Sequence: Synthetic oligonucleotide
uggaacgucgugcugguug

SEQ ID NO: 2408526 - RNA, 19 nt, Artificial Sequence
  Description of Artificial Sequence: Synthetic oligonucleotide
gugagaguaauacccuucg

SEQ ID NO: 2408527 - RNA, 19 nt, Artificial Sequence
  Description of Artificial Sequence: Synthetic oligonucleotide
ugauugaagaugagggcga

SEQ ID NO: 2408528 - RNA, 19 nt, Artificial Sequence
  Description of Artificial Sequence: Synthetic oligonucleotide
aagcaaucagcaucuauau

SEQ ID NO: 2408529 - RNA, 19 nt, Artificial Sequence
  Description of Artificial Sequence: Synthetic oligonucleotide
augagggcgauuccucucc

SEQ ID NO: 2408530 - RNA, 19 nt, Artificial Sequence
  Description of Artificial Sequence: Synthetic oligonucleotide
guuaaagcauuucacuuca

SEQ ID NO: 2408531 - RNA, 19 nt, Artificial Sequence
  Description of Artificial Sequence: Synthetic oligonucleotide
uccuggauguaccaugagc

SEQ ID NO: 2408532 - RNA, 19 nt, Artificial Sequence
  Description of Artificial Sequence: Synthetic oligonucleotide
ugaacaagccagucaaugu

SEQ ID NO: 2408533 - RNA, 19 nt, Artificial Sequence
  Description of Artificial Sequence: Synthetic oligonucleotide
cacacaggaagcaaucagc

SEQ ID NO: 2408534 - RNA, 19 nt, Artificial Sequence
  Description of Artificial Sequence: Synthetic oligonucleotide
uagacaggaccaacgaccc

SEQ ID NO: 2408535 - RNA, 19 nt, Artificial Sequence
  Description of Artificial Sequence: Synthetic oligonucleotide
cuuucuguucaccagugug

SEQ ID NO: 2408536 - RNA, 19 nt, Artificial Sequence
  Description of Artificial Sequence: Synthetic oligonucleotide
aacacuucccugcuuuugu

SEQ ID NO: 2408537 - RNA, 19 nt, Artificial Sequence
  Description of Artificial Sequence: Synthetic oligonucleotide
ugagaguaauacccuucgg

SEQ ID NO: 2408538 - RNA, 19 nt, Artificial Sequence
  Description of Artificial Sequence: Synthetic oligonucleotide
uguacuguucugcuggauc

SEQ ID NO: 2408539 - RNA, 19 nt, Artificial Sequence
  Description of Artificial Sequence: Synthetic oligonucleotide
gaacaagccagucaauguc

SEQ ID NO: 2408540 - RNA, 19 nt, Artificial Sequence
  Description of Artificial Sequence: Synthetic oligonucleotide
aacgacccuacuuacuaga

SEQ ID NO: 2408541 - RNA, 19 nt, Artificial Sequence
  Description of Artificial Sequence: Synthetic oligonucleotide
aaauguguguagacaggac

SEQ ID NO: 2408542 - RNA, 19 nt, Artificial Sequence
  Description of Artificial Sequence: Synthetic oligonucleotide
ucuuggguuuuccaaccag

SEQ ID NO: 2408543 - RNA, 19 nt, Artificial Sequence
  Description of Artificial Sequence: Synthetic oligonucleotide
ucaugaauuuugagcagga

SEQ ID NO: 2408544 - RNA, 19 nt, Artificial Sequence
  Description of Artificial Sequence: Synthetic oligonucleotide
agaagaaccucucaugauu

SEQ ID NO: 2408545 - RNA, 19 nt, Artificial Sequence
  Description of Artificial Sequence: Synthetic oligonucleotide
aaucagguugucccugucu

SEQ ID NO: 2408546 - RNA, 19 nt, Artificial Sequence
  Description of Artificial Sequence: Synthetic oligonucleotide
uuugggaccgaaacgcaac

SEQ ID NO: 2408547 - RNA, 19 nt, Artificial Sequence
  Description of Artificial Sequence: Synthetic oligonucleotide
ucuagaggaaccacuggaa

SEQ ID NO: 2408548 - RNA, 19 nt, Artificial Sequence
  Description of Artificial Sequence: Synthetic oligonucleotide
gaagaaccucucaugauug

SEQ ID NO: 2408549 - RNA, 19 nt, Artificial Sequence
  Description of Artificial Sequence: Synthetic oligonucleotide
cucaugaauuuugagcagg

SEQ ID NO: 2408550 - RNA, 19 nt, Artificial Sequence
  Description of Artificial Sequence: Synthetic oligonucleotide
ccuggauguaccaugagcc

SEQ ID NO: 2408551 - RNA, 19 nt, Artificial Sequence
  Description of Artificial Sequence: Synthetic oligonucleotide
cuacuuacuagauuuggga

SEQ ID NO: 2408552 - RNA, 19 nt, Artificial Sequence
  Description of Artificial Sequence: Synthetic oligonucleotide
uguagacaggaccaacgac

SEQ ID NO: 2408553 - RNA, 19 nt, Artificial Sequence
  Description of Artificial Sequence: Synthetic oligonucleotide
cacaugaggaaauccgccc

SEQ ID NO: 2408554 - RNA, 19 nt, Artificial Sequence
  Description of Artificial Sequence: Synthetic oligonucleotide
ucguuaaagcauuucacuu

SEQ ID NO: 2408555 - RNA, 19 nt, Artificial Sequence
  Description of Artificial Sequence: Synthetic oligonucleotide
ugaugauccaccacgucua

SEQ ID NO: 2408556 - RNA, 19 nt, Artificial Sequence
  Description of Artificial Sequence: Synthetic oligonucleotide
ugaggcaaagcagggaacc

SEQ ID NO: 2408557 - RNA, 19 nt, Artificial Sequence
  Description of Artificial Sequence: Synthetic oligonucleotide
aucagguugucccugucug

SEQ ID NO: 2408558 - RNA, 19 nt, Artificial Sequence
  Description of Artificial Sequence: Synthetic oligonucleotide
uugagcaggaguucuugug

SEQ ID NO: 2408559 - RNA, 19 nt, Artificial Sequence
  Description of Artificial Sequence: Synthetic oligonucleotide
cuguguuacauuguucugc

SEQ ID NO: 2408560 - RNA, 19 nt, Artificial Sequence
  Description of Artificial Sequence: Synthetic oligonucleotide
aguaacacaugaggaaauc

SEQ ID NO: 2408561 - RNA, 19 nt, Artificial Sequence
  Description of Artificial Sequence: Synthetic oligonucleotide
uucaaauccuagaucugaa

SEQ ID NO: 2408562 - RNA, 19 nt, Artificial Sequence
  Description of Artificial Sequence: Synthetic oligonucleotide
cuugugguccaucuuguac

SEQ ID NO: 2408563 - RNA, 19 nt, Artificial Sequence
  Description of Artificial Sequence: Synthetic oligonucleotide
ugcuucuugccuauugcac

SEQ ID NO: 2408564 - RNA, 19 nt, Artificial Sequence
  Description of Artificial Sequence: Synthetic oligonucleotide
gaagcaaucagcaucuaua

SEQ ID NO: 2408565 - RNA, 19 nt, Artificial Sequence
  Description of Artificial Sequence: Synthetic oligonucleotide
uaaauaucuuggguuuucc

SEQ ID NO: 2408566 - RNA, 19 nt, Artificial Sequence
  Description of Artificial Sequence: Synthetic oligonucleotide
aacuccaaggagcugccau

SEQ ID NO: 2408567 - RNA, 19 nt, Artificial Sequence
  Description of Artificial Sequence: Synthetic oligonucleotide
gucaagugccagaagaacc

SEQ ID NO: 2408568 - RNA, 19 nt, Artificial Sequence
  Description of Artificial Sequence: Synthetic oligonucleotide
ucccugucugcauuggugc

SEQ ID NO: 2408569 - RNA, 19 nt, Artificial Sequence
  Description of Artificial Sequence: Synthetic oligonucleotide
guaacacaugaggaaaucc

SEQ ID NO: 2408570 - RNA, 19 nt, Artificial Sequence
  Description of Artificial Sequence: Synthetic oligonucleotide
ugaggucgacaccucauga

SEQ ID NO: 2408571 - RNA, 19 nt, Artificial Sequence
  Description of Artificial Sequence: Synthetic oligonucleotide
uucuguucaccagugugag

SEQ ID NO: 2408572 - RNA, 19 nt, Artificial Sequence
  Description of Artificial Sequence: Synthetic oligonucleotide
uugaggucgacaccucaug

SEQ ID NO: 2408573 - RNA, 19 nt, Artificial Sequence
  Description of Artificial Sequence: Synthetic oligonucleotide
ucuaccuguguuacauugu

SEQ ID NO: 2408574 - RNA, 19 nt, Artificial Sequence
  Description of Artificial Sequence: Synthetic oligonucleotide
aauuucaauuuuggcguca

SEQ ID NO: 2408575 - RNA, 19 nt, Artificial Sequence
  Description of Artificial Sequence: Synthetic oligonucleotide
auuuuggcgucauaugcau

SEQ ID NO: 2408576 - RNA, 19 nt, Artificial Sequence
  Description of Artificial Sequence: Synthetic oligonucleotide
gcaucuauauggcuugagg

SEQ ID NO: 2408577 - RNA, 19 nt, Artificial Sequence
  Description of Artificial Sequence: Synthetic oligonucleotide
cagcauugaggcaaagcag

SEQ ID NO: 2408578 - RNA, 19 nt, Artificial Sequence
  Description of Artificial Sequence: Synthetic oligonucleotide
uuuagucagcauugaggca

SEQ ID NO: 2408579 - RNA, 19 nt, Artificial Sequence
  Description of Artificial Sequence: Synthetic oligonucleotide
gaguaauacccuucggcga

SEQ ID NO: 2408580 - RNA, 19 nt, Artificial Sequence
  Description of Artificial Sequence: Synthetic oligonucleotide
auugcaccugggucuuugc

SEQ ID NO: 2408581 - RNA, 19 nt, Artificial Sequence
  Description of Artificial Sequence: Synthetic oligonucleotide
ugcagaaguccacgcggcg

SEQ ID NO: 2408582 - RNA, 19 nt, Artificial Sequence
  Description of Artificial Sequence: Synthetic oligonucleotide
auuccucuccucuuguggu

SEQ ID NO: 2408583 - RNA, 19 nt, Artificial Sequence
  Description of Artificial Sequence: Synthetic oligonucleotide
gauccaccacgucuagagg

SEQ ID NO: 2408584 - RNA, 19 nt, Artificial Sequence
  Description of Artificial Sequence: Synthetic oligonucleotide
uugccuauugcaccugggu

SEQ ID NO: 2408585 - RNA, 19 nt, Artificial Sequence
  Description of Artificial Sequence: Synthetic oligonucleotide
cuguucaccagugugagca

SEQ ID NO: 2408586 - RNA, 19 nt, Artificial Sequence
  Description of Artificial Sequence: Synthetic oligonucleotide
ugccuauugcaccuggguc

SEQ ID NO: 2408587 - RNA, 19 nt, Artificial Sequence
  Description of Artificial Sequence: Synthetic oligonucleotide
cauaaaugugguugccuuc

SEQ ID NO: 2408588 - RNA, 19 nt, Artificial Sequence
  Description of Artificial Sequence: Synthetic oligonucleotide
aaacacuucccugcuuuug

SEQ ID NO: 2408589 - RNA, 19 nt, Artificial Sequence
  Description of Artificial Sequence: Synthetic oligonucleotide
cccggugagaguaauaccc

SEQ ID NO: 2408590 - RNA, 19 nt, Artificial Sequence
  Description of Artificial Sequence: Synthetic oligonucleotide
uccuagaucugaaaaccuu

SEQ ID NO: 2408591 - RNA, 19 nt, Artificial Sequence
  Description of Artificial Sequence: Synthetic oligonucleotide
gucuagaggaaccacugga

SEQ ID NO: 2408592 - RNA, 19 nt, Artificial Sequence
  Description of Artificial Sequence: Synthetic oligonucleotide
guacuguucugcuggauca

SEQ ID NO: 2408593 - RNA, 19 nt, Artificial Sequence
  Description of Artificial Sequence: Synthetic oligonucleotide
gaguucuugugcuuugaga

SEQ ID NO: 2408594 - RNA, 19 nt, Artificial Sequence
  Description of Artificial Sequence: Synthetic oligonucleotide
agcguguacacggaggcag

SEQ ID NO: 2408595 - RNA, 19 nt, Artificial Sequence
  Description of Artificial Sequence: Synthetic oligonucleotide
aauccuggauguaccauga

SEQ ID NO: 2408596 - RNA, 19 nt, Artificial Sequence
  Description of Artificial Sequence: Synthetic oligonucleotide
ugucaagugccagaagaac

SEQ ID NO: 2408597 - RNA, 19 nt, Artificial Sequence
  Description of Artificial Sequence: Synthetic oligonucleotide
ggguuuuccaaccaggcuc

SEQ ID NO: 2408598 - RNA, 19 nt, Artificial Sequence
  Description of Artificial Sequence: Synthetic oligonucleotide
ucucaugauugaagaugag

SEQ ID NO: 2408599 - RNA, 19 nt, Artificial Sequence
  Description of Artificial Sequence: Synthetic oligonucleotide
cacuugucuccuuugaaca

SEQ ID NO: 2408600 - RNA, 19 nt, Artificial Sequence
  Description of Artificial Sequence: Synthetic oligonucleotide
guuacauuguucugcaagu

SEQ ID NO: 2408601 - RNA, 19 nt, Artificial Sequence
  Description of Artificial Sequence: Synthetic oligonucleotide
acgucgugcugguugcccc

SEQ ID NO: 2408602 - RNA, 19 nt, Artificial Sequence
  Description of Artificial Sequence: Synthetic oligonucleotide
ccuacuuacuagauuuggg

SEQ ID NO: 2408603 - RNA, 19 nt, Artificial Sequence
  Description of Artificial Sequence: Synthetic oligonucleotide
gcuuugagaucguuaaagc

SEQ ID NO: 2408604 - RNA, 19 nt, Artificial Sequence
  Description of Artificial Sequence: Synthetic oligonucleotide
ucugacacuugucuccuuu

SEQ ID NO: 2408605 - RNA, 19 nt, Artificial Sequence
  Description of Artificial Sequence: Synthetic oligonucleotide
uucgaaucagguugucccu

SEQ ID NO: 2408606 - RNA, 19 nt, Artificial Sequence
  Description of Artificial Sequence: Synthetic oligonucleotide
uaaaugugguugccuucgc

SEQ ID NO: 2408607 - RNA, 19 nt, Artificial Sequence
  Description of Artificial Sequence: Synthetic oligonucleotide
auacccuucggcgacggag

SEQ ID NO: 2408608 - RNA, 19 nt, Artificial Sequence
  Description of Artificial Sequence: Synthetic oligonucleotide
agcaaucagcaucuauaug

SEQ ID NO: 2408609 - RNA, 19 nt, Artificial Sequence
  Description of Artificial Sequence: Synthetic oligonucleotide
acaccucaugaauuuugag

SEQ ID NO: 2408610 - RNA, 19 nt, Artificial Sequence
  Description of Artificial Sequence: Synthetic oligonucleotide
gacccuacuuacuagauuu

SEQ ID NO: 2408611 - RNA, 19 nt, Artificial Sequence
  Description of Artificial Sequence: Synthetic oligonucleotide
ucggcgacggaguaacaca

SEQ ID NO: 2408612 - RNA, 19 nt, Artificial Sequence
  Description of Artificial Sequence: Synthetic oligonucleotide
gaauuucaauuuuggcguc

SEQ ID NO: 2408613 - RNA, 19 nt, Artificial Sequence
  Description of Artificial Sequence: Synthetic oligonucleotide
gaugauccaccacgucuag

SEQ ID NO: 2408614 - RNA, 19 nt, Artificial Sequence
  Description of Artificial Sequence: Synthetic oligonucleotide
cuuuuguagaagccaucug

SEQ ID NO: 2408615 - RNA, 19 nt, Artificial Sequence
  Description of Artificial Sequence: Synthetic oligonucleotide
acuucccugcuuuuguaga

SEQ ID NO: 2408616 - RNA, 19 nt, Artificial Sequence
  Description of Artificial Sequence: Synthetic oligonucleotide
aagccagucaaugucugaa

SEQ ID NO: 2408617 - RNA, 19 nt, Artificial Sequence
  Description of Artificial Sequence: Synthetic oligonucleotide
cagucaaugucugaauuuc

SEQ ID NO: 2408618 - RNA, 19 nt, Artificial Sequence
  Description of Artificial Sequence: Synthetic oligonucleotide
caucuauauggcuugaggu

SEQ ID NO: 2408619 - RNA, 19 nt, Artificial Sequence
  Description of Artificial Sequence: Synthetic oligonucleotide
cuugccuauugcaccuggg

SEQ ID NO: 2408620 - RNA, 19 nt, Artificial Sequence
  Description of Artificial Sequence: Synthetic oligonucleotide
caaggagcugccauaccug

SEQ ID NO: 2408621 - RNA, 19 nt, Artificial Sequence
  Description of Artificial Sequence: Synthetic oligonucleotide
uugaggcaaagcagggaac

SEQ ID NO: 2408622 - RNA, 19 nt, Artificial Sequence
  Description of Artificial Sequence: Synthetic oligonucleotide
ugccccgccucucugggag

SEQ ID NO: 2408623 - RNA, 19 nt, Artificial Sequence
  Description of Artificial Sequence: Synthetic oligonucleotide
aucuuguacuguucugcug

SEQ ID NO: 2408624 - RNA, 19 nt, Artificial Sequence
  Description of Artificial Sequence: Synthetic oligonucleotide
aggcucugacacuugucuc

SEQ ID NO: 2408625 - RNA, 19 nt, Artificial Sequence
  Description of Artificial Sequence: Synthetic oligonucleotide
uuugaacaagccagucaau

SEQ ID NO: 2408626 - RNA, 19 nt, Artificial Sequence
  Description of Artificial Sequence: Synthetic oligonucleotide
ccaugagccauucacaguc

SEQ ID NO: 2408627 - RNA, 19 nt, Artificial Sequence
  Description of Artificial Sequence: Synthetic oligonucleotide
uugggaccgaaacgcaacu

SEQ ID NO: 2408628 - RNA, 19 nt, Artificial Sequence
  Description of Artificial Sequence: Synthetic oligonucleotide
guccacgcggcgcugagag

SEQ ID NO: 2408629 - RNA, 19 nt, Artificial Sequence
  Description of Artificial Sequence: Synthetic oligonucleotide
agugccagaagaaccucuc

SEQ ID NO: 2408630 - RNA, 19 nt, Artificial Sequence
  Description of Artificial Sequence: Synthetic oligonucleotide
agggcgauuccucuccucu

SEQ ID NO: 2408631 - RNA, 19 nt, Artificial Sequence
  Description of Artificial Sequence: Synthetic oligonucleotide
uauugcaccugggucuuug

SEQ ID NO: 2408632 - RNA, 19 nt, Artificial Sequence
  Description of Artificial Sequence: Synthetic oligonucleotide
gugaugauccaccacgucu

SEQ ID NO: 2408633 - RNA, 19 nt, Artificial Sequence
  Description of Artificial Sequence: Synthetic oligonucleotide
agaugagggcgauuccucu

SEQ ID NO: 2408634 - RNA, 19 nt, Artificial Sequence
  Description of Artificial Sequence: Synthetic oligonucleotide
cacuucccugcuuuuguag

SEQ ID NO: 2408635 - RNA, 19 nt, Artificial Sequence
  Description of Artificial Sequence: Synthetic oligonucleotide
ucugcaagucugugugaug

SEQ ID NO: 2408636 - RNA, 19 nt, Artificial Sequence
  Description of Artificial Sequence: Synthetic oligonucleotide
acggaguaacacaugagga

SEQ ID NO: 2408637 - RNA, 19 nt, Artificial Sequence
  Description of Artificial Sequence: Synthetic oligonucleotide
aggucgacaccucaugaau

SEQ ID NO: 2408638 - RNA, 19 nt, Artificial Sequence
  Description of Artificial Sequence: Synthetic oligonucleotide
cucccggugagaguaauac

SEQ ID NO: 2408639 - RNA, 19 nt, Artificial Sequence
  Description of Artificial Sequence: Synthetic oligonucleotide
ugcugguugccccgacagg

SEQ ID NO: 2408640 - RNA, 19 nt, Artificial Sequence
  Description of Artificial Sequence: Synthetic oligonucleotide
guugccuucgccguggcuc

SEQ ID NO: 2408641 - RNA, 19 nt, Artificial Sequence
  Description of Artificial Sequence: Synthetic oligonucleotide
uaauacccuucggcgacgg

SEQ ID NO: 2408642 - RNA, 19 nt, Artificial Sequence
  Description of Artificial Sequence: Synthetic oligonucleotide
caccacgucuagaggaacc

SEQ ID NO: 2408643 - RNA, 19 nt, Artificial Sequence
  Description of Artificial Sequence: Synthetic oligonucleotide
gaugagggcgauuccucuc

SEQ ID NO: 2408644 - RNA, 19 nt, Artificial Sequence
  Description of Artificial Sequence: Synthetic oligonucleotide
cugagagaccuuucuguuc

SEQ ID NO: 2408645 - RNA, 19 nt, Artificial Sequence
  Description of Artificial Sequence: Synthetic oligonucleotide
agccauucacagucucccg

SEQ ID NO: 2408646 - RNA, 19 nt, Artificial Sequence
  Description of Artificial Sequence: Synthetic oligonucleotide
uacccuucggcgacggagu

SEQ ID NO: 2408647 - RNA, 19 nt, Artificial Sequence
  Description of Artificial Sequence: Synthetic oligonucleotide
ugcuuuuguagaagccauc

SEQ ID NO: 2408648 - RNA, 19 nt, Artificial Sequence
  Description of Artificial Sequence: Synthetic oligonucleotide
uggcgucauaugcauaaau

SEQ ID NO: 2408649 - RNA, 19 nt, Artificial Sequence
  Description of Artificial Sequence: Synthetic oligonucleotide
gugcugguugccccgacag

SEQ ID NO: 2408650 - RNA, 19 nt, Artificial Sequence
  Description of Artificial Sequence: Synthetic oligonucleotide
guugucccugucugcauug

SEQ ID NO: 2408651 - RNA, 19 nt, Artificial Sequence
  Description of Artificial Sequence: Synthetic oligonucleotide
ggcgucauaugcauaaaug

SEQ ID NO: 2408652 - RNA, 19 nt, Artificial Sequence
  Description of Artificial Sequence: Synthetic oligonucleotide
uucugcaagucugugugau

SEQ ID NO: 2408653 - RNA, 19 nt, Artificial Sequence
  Description of Artificial Sequence: Synthetic oligonucleotide
cacagucucccggugagag

SEQ ID NO: 2408654 - RNA, 19 nt, Artificial Sequence
  Description of Artificial Sequence: Synthetic oligonucleotide
gccauucacagucucccgg

SEQ ID NO: 2408655 - RNA, 19 nt, Artificial Sequence
  Description of Artificial Sequence: Synthetic oligonucleotide
guagaagccaucuguuucu

SEQ ID NO: 2408656 - RNA, 19 nt, Artificial Sequence
  Description of Artificial Sequence: Synthetic oligonucleotide
gccugaaugauaaauaucu

SEQ ID NO: 2408657 - RNA, 19 nt, Artificial Sequence
  Description of Artificial Sequence: Synthetic oligonucleotide
guguagacaggaccaacga

SEQ ID NO: 2408658 - RNA, 19 nt, Artificial Sequence
  Description of Artificial Sequence: Synthetic oligonucleotide
ucgaaucagguugucccug

SEQ ID NO: 2408659 - RNA, 19 nt, Artificial Sequence
  Description of Artificial Sequence: Synthetic oligonucleotide
ucccggugagaguaauacc

SEQ ID NO: 2408660 - RNA, 19 nt, Artificial Sequence
  Description of Artificial Sequence: Synthetic oligonucleotide
cgucauaugcauaaaugug

SEQ ID NO: 2408661 - RNA, 19 nt, Artificial Sequence
  Description of Artificial Sequence: Synthetic oligonucleotide
guucuugugcuuugagauc

SEQ ID NO: 2408662 - RNA, 19 nt, Artificial Sequence
  Description of Artificial Sequence: Synthetic oligonucleotide
caacgacccuacuuacuag

SEQ ID NO: 2408663 - RNA, 19 nt, Artificial Sequence
  Description of Artificial Sequence: Synthetic oligonucleotide
cugacacuugucuccuuug

SEQ ID NO: 2408664 - RNA, 19 nt, Artificial Sequence
  Description of Artificial Sequence: Synthetic oligonucleotide
ucuguucaccagugugagc

SEQ ID NO: 2408665 - RNA, 19 nt, Artificial Sequence
  Description of Artificial Sequence: Synthetic oligonucleotide
gacaccucaugaauuuuga

SEQ ID NO: 2408666 - RNA, 19 nt, Artificial Sequence
  Description of Artificial Sequence: Synthetic oligonucleotide
uucggcgacggaguaacac

SEQ ID NO: 2408667 - RNA, 19 nt, Artificial Sequence
  Description of Artificial Sequence: Synthetic oligonucleotide
cagugugagcagcucagug

SEQ ID NO: 2408668 - RNA, 19 nt, Artificial Sequence
  Description of Artificial Sequence: Synthetic oligonucleotide
uuuuccaaccaggcucuga

SEQ ID NO: 2408669 - RNA, 19 nt, Artificial Sequence
  Description of Artificial Sequence: Synthetic oligonucleotide
accaugagccauucacagu

SEQ ID NO: 2408670 - RNA, 19 nt, Artificial Sequence
  Description of Artificial Sequence: Synthetic oligonucleotide
cauuucacuucaaauccua

SEQ ID NO: 2408671 - RNA, 19 nt, Artificial Sequence
  Description of Artificial Sequence: Synthetic oligonucleotide
uccaaggagcugccauacc

SEQ ID NO: 2408672 - RNA, 19 nt, Artificial Sequence
  Description of Artificial Sequence: Synthetic oligonucleotide
agcaucucacacaaauccu

SEQ ID NO: 2408673 - RNA, 19 nt, Artificial Sequence
  Description of Artificial Sequence: Synthetic oligonucleotide
ugagaucguuaaagcauuu

SEQ ID NO: 2408674 - RNA, 19 nt, Artificial Sequence
  Description of Artificial Sequence: Synthetic oligonucleotide
uggcucaggaagacacaca

SEQ ID NO: 2408675 - RNA, 19 nt, Artificial Sequence
  Description of Artificial Sequence: Synthetic oligonucleotide
gaagacacacaggaagcaa

SEQ ID NO: 2408676 - RNA, 19 nt, Artificial Sequence
  Description of Artificial Sequence: Synthetic oligonucleotide
gacaggaccaacgacccua

SEQ ID NO: 2408677 - RNA, 19 nt, Artificial Sequence
  Description of Artificial Sequence: Synthetic oligonucleotide
ggaacgucgugcugguugc

SEQ ID NO: 2408678 - RNA, 19 nt, Artificial Sequence
  Description of Artificial Sequence: Synthetic oligonucleotide
gaggucgacaccucaugaa

SEQ ID NO: 2408679 - RNA, 19 nt, Artificial Sequence
  Description of Artificial Sequence: Synthetic oligonucleotide
gcagcguguacacggaggc

SEQ ID NO: 2408680 - RNA, 19 nt, Artificial Sequence
  Description of Artificial Sequence: Synthetic oligonucleotide
uguguguagacaggaccaa

SEQ ID NO: 2408681 - RNA, 19 nt, Artificial Sequence
  Description of Artificial Sequence: Synthetic oligonucleotide
gaucaaacacuucccugcu

SEQ ID NO: 2408682 - RNA, 19 nt, Artificial Sequence
  Description of Artificial Sequence: Synthetic oligonucleotide
acuggaacgucgugcuggu

SEQ ID NO: 2408683 - RNA, 19 nt, Artificial Sequence
  Description of Artificial Sequence: Synthetic oligonucleotide
uuuuggcgucauaugcaua

SEQ ID NO: 2408684 - RNA, 19 nt, Artificial Sequence
  Description of Artificial Sequence: Synthetic oligonucleotide
uacuagauuugggaccgaa

SEQ ID NO: 2408685 - RNA, 19 nt, Artificial Sequence
  Description of Artificial Sequence: Synthetic oligonucleotide
ccaucuuguacuguucugc

SEQ ID NO: 2408686 - RNA, 19 nt, Artificial Sequence
  Description of Artificial Sequence: Synthetic oligonucleotide
auuggugccccgccucucu

SEQ ID NO: 2408687 - RNA, 19 nt, Artificial Sequence
  Description of Artificial Sequence: Synthetic oligonucleotide
guaauacccuucggcgacg

SEQ ID NO: 2408688 - RNA, 19 nt, Artificial Sequence
  Description of Artificial Sequence: Synthetic oligonucleotide
gauuugggaccgaaacgca

SEQ ID NO: 2408689 - RNA, 19 nt, Artificial Sequence
  Description of Artificial Sequence: Synthetic oligonucleotide
gaaccacuggaacgucgug

SEQ ID NO: 2408690 - RNA, 19 nt, Artificial Sequence
  Description of Artificial Sequence: Synthetic oligonucleotide
gaaaaccuucgaaucaggu

SEQ ID NO: 2408691 - RNA, 19 nt, Artificial Sequence
  Description of Artificial Sequence: Synthetic oligonucleotide
ugucccugucugcauuggu

SEQ ID NO: 2408692 - RNA, 19 nt, Artificial Sequence
  Description of Artificial Sequence: Synthetic oligonucleotide
guaccaugagccauucaca

SEQ ID NO: 2408693 - RNA, 19 nt, Artificial Sequence
  Description of Artificial Sequence: Synthetic oligonucleotide
agucaaugucugaauuuca

SEQ ID NO: 2408694 - RNA, 19 nt, Artificial Sequence
  Description of Artificial Sequence: Synthetic oligonucleotide
uccuuugaacaagccaguc

SEQ ID NO: 2408695 - RNA, 19 nt, Artificial Sequence
  Description of Artificial Sequence: Synthetic oligonucleotide
uggugccccgccucucugg

SEQ ID NO: 2408696 - RNA, 19 nt, Artificial Sequence
  Description of Artificial Sequence: Synthetic oligonucleotide
uugucccugucugcauugg

SEQ ID NO: 2408697 - RNA, 19 nt, Artificial Sequence
  Description of Artificial Sequence: Synthetic oligonucleotide
ugggagugucaagugccag

SEQ ID NO: 2408698 - RNA, 19 nt, Artificial Sequence
  Description of Artificial Sequence: Synthetic oligonucleotide
aauacccuucggcgacgga

SEQ ID NO: 2408699 - RNA, 19 nt, Artificial Sequence
  Description of Artificial Sequence: Synthetic oligonucleotide
cuggauguaccaugagcca

SEQ ID NO: 2408700 - RNA, 19 nt, Artificial Sequence
  Description of Artificial Sequence: Synthetic oligonucleotide
gauguaccaugagccauuc

SEQ ID NO: 2408701 - RNA, 19 nt, Artificial Sequence
  Description of Artificial Sequence: Synthetic oligonucleotide
auccuagaucugaaaaccu

SEQ ID NO: 2408702 - RNA, 19 nt, Artificial Sequence
  Description of Artificial Sequence: Synthetic oligonucleotide
cauucacagucucccggug

SEQ ID NO: 2408703 - RNA, 19 nt, Artificial Sequence
  Description of Artificial Sequence: Synthetic oligonucleotide
ggcaaagcagggaaccugc

SEQ ID NO: 2408704 - RNA, 19 nt, Artificial Sequence
  Description of Artificial Sequence: Synthetic oligonucleotide
ggaccaacgacccuacuua

SEQ ID NO: 2408705 - RNA, 19 nt, Artificial Sequence
  Description of Artificial Sequence: Synthetic oligonucleotide
gcgucauaugcauaaaugu

SEQ ID NO: 2408706 - RNA, 19 nt, Artificial Sequence
  Description of Artificial Sequence: Synthetic oligonucleotide
auccuggauguaccaugag

SEQ ID NO: 2408707 - RNA, 19 nt, Artificial Sequence
  Description of Artificial Sequence: Synthetic oligonucleotide
acaagccagucaaugucug

SEQ ID NO: 2408708 - RNA, 19 nt, Artificial Sequence
  Description of Artificial Sequence: Synthetic oligonucleotide
gaaucagguugucccuguc

SEQ ID NO: 2408709 - RNA, 19 nt, Artificial Sequence
  Description of Artificial Sequence: Synthetic oligonucleotide
gccccgacaggccugaaug

SEQ ID NO: 2408710 - RNA, 19 nt, Artificial Sequence
  Description of Artificial Sequence: Synthetic oligonucleotide
accacgucuagaggaacca

SEQ ID NO: 2408711 - RNA, 19 nt, Artificial Sequence
  Description of Artificial Sequence: Synthetic oligonucleotide
agccagucaaugucugaau

SEQ ID NO: 2408712 - RNA, 19 nt, Artificial Sequence
  Description of Artificial Sequence: Synthetic oligonucleotide
cuauauggcuugaggucga

SEQ ID NO: 2408713 - RNA, 19 nt, Artificial Sequence
  Description of Artificial Sequence: Synthetic oligonucleotide
guucaccagugugagcagc

SEQ ID NO: 2408714 - RNA, 19 nt, Artificial Sequence
  Description of Artificial Sequence: Synthetic oligonucleotide
ugcaagucugugugaugau

SEQ ID NO: 2408715 - RNA, 19 nt, Artificial Sequence
  Description of Artificial Sequence: Synthetic oligonucleotide
ggcgauuccucuccucuug

SEQ ID NO: 2408716 - RNA, 19 nt, Artificial Sequence
  Description of Artificial Sequence: Synthetic oligonucleotide
gcgacggaguaacacauga

SEQ ID NO: 2408717 - RNA, 19 nt, Artificial Sequence
  Description of Artificial Sequence: Synthetic oligonucleotide
cccuacuuacuagauuugg

SEQ ID NO: 2408718 - RNA, 19 nt, Artificial Sequence
  Description of Artificial Sequence: Synthetic oligonucleotide
acuagauuugggaccgaaa

SEQ ID NO: 2408719 - RNA, 19 nt, Artificial Sequence
  Description of Artificial Sequence: Synthetic oligonucleotide
ugccauaccuggccagcau

SEQ ID NO: 2408720 - RNA, 19 nt, Artificial Sequence
  Description of Artificial Sequence: Synthetic oligonucleotide
uuggugccccgccucucug

SEQ ID NO: 2408721 - RNA, 19 nt, Artificial Sequence
  Description of Artificial Sequence: Synthetic oligonucleotide
cuuguacuguucugcugga

SEQ ID NO: 2408722 - RNA, 19 nt, Artificial Sequence
  Description of Artificial Sequence: Synthetic oligonucleotide
gaggcagcgucuaccugug

SEQ ID NO: 2408723 - RNA, 19 nt, Artificial Sequence
  Description of Artificial Sequence: Synthetic oligonucleotide
acagucucccggugagagu

SEQ ID NO: 2408724 - RNA, 19 nt, Artificial Sequence
  Description of Artificial Sequence: Synthetic oligonucleotide
caggcucugacacuugucu

SEQ ID NO: 2408725 - RNA, 19 nt, Artificial Sequence
  Description of Artificial Sequence: Synthetic oligonucleotide
guguguagacaggaccaac

SEQ ID NO: 2408726 - RNA, 19 nt, Artificial Sequence
  Description of Artificial Sequence: Synthetic oligonucleotide
uucuugccuauugcaccug

SEQ ID NO: 2408727 - RNA, 19 nt, Artificial Sequence
  Description of Artificial Sequence: Synthetic oligonucleotide
gugucaagugccagaagaa

SEQ ID NO: 2408728 - RNA, 19 nt, Artificial Sequence
  Description of Artificial Sequence: Synthetic oligonucleotide
cauugaggcaaagcaggga

SEQ ID NO: 2408729 - RNA, 19 nt, Artificial Sequence
  Description of Artificial Sequence: Synthetic oligonucleotide
ggaaccugcuucuugccua

SEQ ID NO: 2408730 - RNA, 19 nt, Artificial Sequence
  Description of Artificial Sequence: Synthetic oligonucleotide
acacuucccugcuuuugua

SEQ ID NO: 2408731 - RNA, 19 nt, Artificial Sequence
  Description of Artificial Sequence: Synthetic oligonucleotide
ucucccggugagaguaaua

SEQ ID NO: 2408732 - RNA, 19 nt, Artificial Sequence
  Description of Artificial Sequence: Synthetic oligonucleotide
agcgucuaccuguguuaca

SEQ ID NO: 2408733 - RNA, 19 nt, Artificial Sequence
  Description of Artificial Sequence: Synthetic oligonucleotide
cacgucuagaggaaccacu

SEQ ID NO: 2408734 - RNA, 19 nt, Artificial Sequence
  Description of Artificial Sequence: Synthetic oligonucleotide
auauggcuugaggucgaca

SEQ ID NO: 2408735 - RNA, 19 nt, Artificial Sequence
  Description of Artificial Sequence: Synthetic oligonucleotide
caagccagucaaugucuga

SEQ ID NO: 2408736 - RNA, 19 nt, Artificial Sequence
  Description of Artificial Sequence: Synthetic oligonucleotide
gccuauugcaccugggucu

SEQ ID NO: 2408737 - RNA, 19 nt, Artificial Sequence
  Description of Artificial Sequence: Synthetic oligonucleotide
agcaggaguucuugugcuu

SEQ ID NO: 2408738 - RNA, 19 nt, Artificial Sequence
  Description of Artificial Sequence: Synthetic oligonucleotide
cagcgucuaccuguguuac

SEQ ID NO: 2408739 - RNA, 19 nt, Artificial Sequence
  Description of Artificial Sequence: Synthetic oligonucleotide
uacacggaggcagcgucua

SEQ ID NO: 2408740 - RNA, 19 nt, Artificial Sequence
  Description of Artificial Sequence: Synthetic oligonucleotide
gggagugucaagugccaga

SEQ ID NO: 2408741 - RNA, 19 nt, Artificial Sequence
  Description of Artificial Sequence: Synthetic oligonucleotide
aggaguucuugugcuuuga

SEQ ID NO: 2408742 - RNA, 19 nt, Artificial Sequence
  Description of Artificial Sequence: Synthetic oligonucleotide
ggugccccgccucucuggg

SEQ ID NO: 2408743 - RNA, 19 nt, Artificial Sequence
  Description of Artificial Sequence: Synthetic oligonucleotide
caagugccagaagaaccuc

SEQ ID NO: 2408744 - RNA, 19 nt, Artificial Sequence
  Description of Artificial Sequence: Synthetic oligonucleotide
cccugcuuuuguagaagcc

SEQ ID NO: 2408745 - RNA, 19 nt, Artificial Sequence
  Description of Artificial Sequence: Synthetic oligonucleotide
gugccagaagaaccucuca

SEQ ID NO: 2408746 - RNA, 19 nt, Artificial Sequence
  Description of Artificial Sequence: Synthetic oligonucleotide
cugggagugucaagugcca

SEQ ID NO: 2408747 - RNA, 19 nt, Artificial Sequence
  Description of Artificial Sequence: Synthetic oligonucleotide
acccuacuuacuagauuug

SEQ ID NO: 2408748 - RNA, 19 nt, Artificial Sequence
  Description of Artificial Sequence: Synthetic oligonucleotide
accaacgacccuacuuacu

SEQ ID NO: 2408749 - RNA, 19 nt, Artificial Sequence
  Description of Artificial Sequence: Synthetic oligonucleotide
gaguaacacaugaggaaau

SEQ ID NO: 2408750 - RNA, 19 nt, Artificial Sequence
  Description of Artificial Sequence: Synthetic oligonucleotide
auguaccaugagccauuca

SEQ ID NO: 2408751 - RNA, 19 nt, Artificial Sequence
  Description of Artificial Sequence: Synthetic oligonucleotide
gucgacaccucaugaauuu

SEQ ID NO: 2408752 - RNA, 19 nt, Artificial Sequence
  Description of Artificial Sequence: Synthetic oligonucleotide
gcaccugggucuuugcaga

SEQ ID NO: 2408753 - RNA, 19 nt, Artificial Sequence
  Description of Artificial Sequence: Synthetic oligonucleotide
ggagugucaagugccagaa

SEQ ID NO: 2408754 - RNA, 19 nt, Artificial Sequence
  Description of Artificial Sequence: Synthetic oligonucleotide
accuucgaaucagguuguc

SEQ ID NO: 2408755 - RNA, 19 nt, Artificial Sequence
  Description of Artificial Sequence: Synthetic oligonucleotide
ccuucgaaucagguugucc

SEQ ID NO: 2408756 - RNA, 19 nt, Artificial Sequence
  Description of Artificial Sequence: Synthetic oligonucleotide
uuguacuguucugcuggau

SEQ ID NO: 2408757 - RNA, 19 nt, Artificial Sequence
  Description of Artificial Sequence: Synthetic oligonucleotide
ggccugaaugauaaauauc

SEQ ID NO: 2408758 - RNA, 19 nt, Artificial Sequence
  Description of Artificial Sequence: Synthetic oligonucleotide
ucgacaccucaugaauuuu

SEQ ID NO: 2408759 - RNA, 19 nt, Artificial Sequence
  Description of Artificial Sequence: Synthetic oligonucleotide
ugccccgacaggccugaau

SEQ ID NO: 2408760 - RNA, 19 nt, Artificial Sequence
  Description of Artificial Sequence: Synthetic oligonucleotide
cagucucccggugagagua

SEQ ID NO: 2408761 - RNA, 19 nt, Artificial Sequence
  Description of Artificial Sequence: Synthetic oligonucleotide
ccuucggcgacggaguaac

SEQ ID NO: 2408762 - RNA, 19 nt, Artificial Sequence
  Description of Artificial Sequence: Synthetic oligonucleotide
uuacuagauuugggaccga

SEQ ID NO: 2408763 - RNA, 19 nt, Artificial Sequence
  Description of Artificial Sequence: Synthetic oligonucleotide
agguugucccugucugcau

SEQ ID NO: 2408764 - RNA, 19 nt, Artificial Sequence
  Description of Artificial Sequence: Synthetic oligonucleotide
augauccaccacgucuaga

SEQ ID NO: 2408765 - RNA, 19 nt, Artificial Sequence
  Description of Artificial Sequence: Synthetic oligonucleotide
cuugaggucgacaccucau

SEQ ID NO: 2408766 - RNA, 19 nt, Artificial Sequence
  Description of Artificial Sequence: Synthetic oligonucleotide
cuaccuguguuacauuguu

SEQ ID NO: 2408767 - RNA, 19 nt, Artificial Sequence
  Description of Artificial Sequence: Synthetic oligonucleotide
ccaacgacccuacuuacua

SEQ ID NO: 2408768 - RNA, 19 nt, Artificial Sequence
  Description of Artificial Sequence: Synthetic oligonucleotide
gaaccugcuucuugccuau

SEQ ID NO: 2408769 - RNA, 19 nt, Artificial Sequence
  Description of Artificial Sequence: Synthetic oligonucleotide
cacgcggcgcugagagacc

SEQ ID NO: 2408770 - RNA, 19 nt, Artificial Sequence
  Description of Artificial Sequence: Synthetic oligonucleotide
gaacgucgugcugguugcc

SEQ ID NO: 2408771 - RNA, 19 nt, Artificial Sequence
  Description of Artificial Sequence: Synthetic oligonucleotide
gaaguccacgcggcgcuga

SEQ ID NO: 2408772 - RNA, 19 nt, Artificial Sequence
  Description of Artificial Sequence: Synthetic oligonucleotide
acgacccuacuuacuagau

SEQ ID NO: 2408773 - RNA, 19 nt, Artificial Sequence
  Description of Artificial Sequence: Synthetic oligonucleotide
gcgcugagagaccuuucug

SEQ ID NO: 2408774 - RNA, 19 nt, Artificial Sequence
  Description of Artificial Sequence: Synthetic oligonucleotide
cuccuuugaacaagccagu

SEQ ID NO: 2408775 - RNA, 19 nt, Artificial Sequence
  Description of Artificial Sequence: Synthetic oligonucleotide
cgucuagaggaaccacugg

SEQ ID NO: 2408776 - RNA, 19 nt, Artificial Sequence
  Description of Artificial Sequence: Synthetic oligonucleotide
gcuugaggucgacaccuca

SEQ ID NO: 2408777 - RNA, 19 nt, Artificial Sequence
  Description of Artificial Sequence: Synthetic oligonucleotide
ugggaccgaaacgcaacuu

SEQ ID NO: 2408778 - RNA, 19 nt, Artificial Sequence
  Description of Artificial Sequence: Synthetic oligonucleotide
cagaagaaccucucaugau

SEQ ID NO: 2408779 - RNA, 19 nt, Artificial Sequence
  Description of Artificial Sequence: Synthetic oligonucleotide
gauugaagaugagggcgau

SEQ ID NO: 2408780 - RNA, 19 nt, Artificial Sequence
  Description of Artificial Sequence: Synthetic oligonucleotide
gacaggccugaaugauaaa

SEQ ID NO: 2408781 - RNA, 19 nt, Artificial Sequence
  Description of Artificial Sequence: Synthetic oligonucleotide
ggaagcaaucagcaucuau

SEQ ID NO: 2408782 - RNA, 19 nt, Artificial Sequence
  Description of Artificial Sequence: Synthetic oligonucleotide
gcagcgucuaccuguguua

SEQ ID NO: 2408783 - RNA, 19 nt, Artificial Sequence
  Description of Artificial Sequence: Synthetic oligonucleotide
cauaugcauaaaugugguu

SEQ ID NO: 2408784 - RNA, 19 nt, Artificial Sequence
  Description of Artificial Sequence: Synthetic oligonucleotide
caugagccauucacagucu

SEQ ID NO: 2408785 - RNA, 19 nt, Artificial Sequence
  Description of Artificial Sequence: Synthetic oligonucleotide
ccaaggagcugccauaccu

SEQ ID NO: 2408786 - RNA, 19 nt, Artificial Sequence
  Description of Artificial Sequence: Synthetic oligonucleotide
cgacggaguaacacaugag

SEQ ID NO: 2408787 - RNA, 19 nt, Artificial Sequence
  Description of Artificial Sequence: Synthetic oligonucleotide
gaacuccaaggagcugcca

SEQ ID NO: 2408788 - RNA, 19 nt, Artificial Sequence
  Description of Artificial Sequence: Synthetic oligonucleotide
gggcagcguguacacggag

SEQ ID NO: 2408789 - RNA, 19 nt, Artificial Sequence
  Description of Artificial Sequence: Synthetic oligonucleotide
ggcgcugagagaccuuucu

SEQ ID NO: 2408790 - RNA, 19 nt, Artificial Sequence
  Description of Artificial Sequence: Synthetic oligonucleotide
guugccccgacaggccuga

SEQ ID NO: 2408791 - RNA, 19 nt, Artificial Sequence
  Description of Artificial Sequence: Synthetic oligonucleotide
cauuggugccccgccucuc

SEQ ID NO: 2408792 - RNA, 19 nt, Artificial Sequence
  Description of Artificial Sequence: Synthetic oligonucleotide
gggaccgaaacgcaacuuu

SEQ ID NO: 2408793 - RNA, 19 nt, Artificial Sequence
  Description of Artificial Sequence: Synthetic oligonucleotide
cgacaggccugaaugauaa

SEQ ID NO: 2408794 - RNA, 19 nt, Artificial Sequence
  Description of Artificial Sequence: Synthetic oligonucleotide
ggaaccacuggaacgucgu

SEQ ID NO: 2408795 - RNA, 19 nt, Artificial Sequence
  Description of Artificial Sequence: Synthetic oligonucleotide
acgcggcgcugagagaccu

SEQ ID NO: 2408796 - RNA, 19 nt, Artificial Sequence
  Description of Artificial Sequence: Synthetic oligonucleotide
acccuucggcgacggagua

SEQ ID NO: 2408797 - RNA, 19 nt, Artificial Sequence
  Description of Artificial Sequence: Synthetic oligonucleotide
gcauuucacuucaaauccu

SEQ ID NO: 2408798 - RNA, 19 nt, Artificial Sequence
  Description of Artificial Sequence: Synthetic oligonucleotide
cguguacacggaggcagcg

SEQ ID NO: 2408799 - RNA, 19 nt, Artificial Sequence
  Description of Artificial Sequence: Synthetic oligonucleotide
ggcgacggaguaacacaug

SEQ ID NO: 2408800 - RNA, 19 nt, Artificial Sequence
  Description of Artificial Sequence: Synthetic oligonucleotide
aguccacgcggcgcugaga

SEQ ID NO: 2408801 - RNA, 19 nt, Artificial Sequence
  Description of Artificial Sequence: Synthetic oligonucleotide
caccugggucuuugcagaa

SEQ ID NO: 2408802 - RNA, 19 nt, Artificial Sequence
  Description of Artificial Sequence: Synthetic oligonucleotide
gcguguacacggaggcagc

SEQ ID NO: 2408803 - RNA, 19 nt, Artificial Sequence
  Description of Artificial Sequence: Synthetic oligonucleotide
ccagucaaugucugaauuu

SEQ ID NO: 2408804 - RNA, 19 nt, Artificial Sequence
  Description of Artificial Sequence: Synthetic oligonucleotide
aggcagcgucuaccugugu

SEQ ID NO: 2408805 - RNA, 19 nt, Artificial Sequence
  Description of Artificial Sequence: Synthetic oligonucleotide
gcgucuaccuguguuacau

SEQ ID NO: 2408806 - RNA, 19 nt, Artificial Sequence
  Description of Artificial Sequence: Synthetic oligonucleotide
cuucggcgacggaguaaca

SEQ ID NO: 2408807 - RNA, 19 nt, Artificial Sequence
  Description of Artificial Sequence: Synthetic oligonucleotide
ccauaccuggccagcaucu

SEQ ID NO: 2408808 - RNA, 19 nt, Artificial Sequence
  Description of Artificial Sequence: Synthetic oligonucleotide
guacacggaggcagcgucu

SEQ ID NO: 2408809 - RNA, 19 nt, Artificial Sequence
  Description of Artificial Sequence: Synthetic oligonucleotide
ccacgucuagaggaaccac

SEQ ID NO: 2408810 - RNA, 19 nt, Artificial Sequence
  Description of Artificial Sequence: Synthetic oligonucleotide
cagcguguacacggaggca

SEQ ID NO: 2408811 - RNA, 19 nt, Artificial Sequence
  Description of Artificial Sequence: Synthetic oligonucleotide
gguugucccugucugcauu

SEQ ID NO: 2408812 - RNA, 19 nt, Artificial Sequence
  Description of Artificial Sequence: Synthetic oligonucleotide
ccugaaugauaaauaucuu

SEQ ID NO: 2408813 - RNA, 19 nt, Artificial Sequence
  Description of Artificial Sequence: Synthetic oligonucleotide
agucucccggugagaguaa

SEQ ID NO: 2408814 - RNA, 19 nt, Artificial Sequence
  Description of Artificial Sequence: Synthetic oligonucleotide
ggaccgaaacgcaacuuuu

SEQ ID NO: 2408815 - RNA, 19 nt, Artificial Sequence
  Description of Artificial Sequence: Synthetic oligonucleotide
cuucgccguggcucaggaa

SEQ ID NO: 2408816 - RNA, 19 nt, Artificial Sequence
  Description of Artificial Sequence: Synthetic oligonucleotide
ggucgacaccucaugaauu

SEQ ID NO: 2408817 - RNA, 19 nt, Artificial Sequence
  Description of Artificial Sequence: Synthetic oligonucleotide
ccaccacgucuagaggaac

SEQ ID NO: 2408818 - RNA, 19 nt, Artificial Sequence
  Description of Artificial Sequence: Synthetic oligonucleotide
ccggugagaguaauacccu

SEQ ID NO: 2408819 - RNA, 19 nt, Artificial Sequence
  Description of Artificial Sequence: Synthetic oligonucleotide
gcucugacacuugucuccu

SEQ ID NO: 2408820 - RNA, 19 nt, Artificial Sequence
  Description of Artificial Sequence: Synthetic oligonucleotide
ccgacaggccugaaugaua

SEQ ID NO: 2408821 - RNA, 19 nt, Artificial Sequence
  Description of Artificial Sequence: Synthetic oligonucleotide
gcaggaguucuugugcuuu

SEQ ID NO: 2408822 - RNA, 19 nt, Artificial Sequence
  Description of Artificial Sequence: Synthetic oligonucleotide
ggcuugaggucgacaccuc

SEQ ID NO: 2408823 - RNA, 19 nt, Artificial Sequence
  Description of Artificial Sequence: Synthetic oligonucleotide
gugccccgccucucuggga

SEQ ID NO: 2408824 - RNA, 19 nt, Artificial Sequence
  Description of Artificial Sequence: Synthetic oligonucleotide
ccuucgccguggcucagga

SEQ ID NO: 2408825 - RNA, 19 nt, Artificial Sequence
  Description of Artificial Sequence: Synthetic oligonucleotide
ccgcgggcagcguguacac

SEQ ID NO: 2408826 - RNA, 19 nt, Artificial Sequence
  Description of Artificial Sequence: Synthetic oligonucleotide
ccccgacaggccugaauga

SEQ ID NO: 2408827 - RNA, 19 nt, Artificial Sequence
  Description of Artificial Sequence: Synthetic oligonucleotide
cccgcgggcagcguguaca

SEQ ID NO: 2408828 - RNA, 19 nt, Artificial Sequence
  Description of Artificial Sequence: Synthetic oligonucleotide
gcaaagcagggaaccugcu

SEQ ID NO: 2408829 - RNA, 19 nt, Artificial Sequence
  Description of Artificial Sequence: Synthetic oligonucleotide
gucucccggugagaguaau

SEQ ID NO: 2408830 - RNA, 19 nt, Artificial Sequence
  Description of Artificial Sequence: Synthetic oligonucleotide
ccgccucucugggaguguc

SEQ ID NO: 2408831 - RNA, 19 nt, Artificial Sequence
  Description of Artificial Sequence: Synthetic oligonucleotide
cgugcugguugccccgaca

SEQ ID NO: 2408832 - RNA, 19 nt, Artificial Sequence
  Description of Artificial Sequence: Synthetic oligonucleotide
ccccgccucucugggagug

SEQ ID NO: 2408833 - RNA, 19 nt, Artificial Sequence
  Description of Artificial Sequence: Synthetic oligonucleotide
gggcgauuccucuccucuu

SEQ ID NO: 2408834 - RNA, 19 nt, Artificial Sequence
  Description of Artificial Sequence: Synthetic oligonucleotide
uugccccgacaggccugaa

SEQ ID NO: 2408835 - RNA, 19 nt, Artificial Sequence
  Description of Artificial Sequence: Synthetic oligonucleotide
cgggcagcguguacacgga

SEQ ID NO: 2408836 - RNA, 19 nt, Artificial Sequence
  Description of Artificial Sequence: Synthetic oligonucleotide
cggcgacggaguaacacau

SEQ ID NO: 2408837 - RNA, 19 nt, Artificial Sequence
  Description of Artificial Sequence: Synthetic oligonucleotide
gcggcgcugagagaccuuu

SEQ ID NO: 2408838 - RNA, 19 nt, Artificial Sequence
  Description of Artificial Sequence: Synthetic oligonucleotide
cgacccuacuuacuagauu

SEQ ID NO: 2408839 - RNA, 19 nt, Artificial Sequence
  Description of Artificial Sequence: Synthetic oligonucleotide
ccccgcgggcagcguguac

SEQ ID NO: 2408840 - RNA, 19 nt, Artificial Sequence
  Description of Artificial Sequence: Synthetic oligonucleotide
cuggaacgucgugcugguu

SEQ ID NO: 2408841 - RNA, 19 nt, Artificial Sequence
  Description of Artificial Sequence: Synthetic oligonucleotide
gccccgccucucugggagu

SEQ ID NO: 2408842 - RNA, 19 nt, Artificial Sequence
  Description of Artificial Sequence: Synthetic oligonucleotide
cccgccucucugggagugu

SEQ ID NO: 2408843 - RNA, 19 nt, Artificial Sequence
  Description of Artificial Sequence: Synthetic oligonucleotide
cgcggcgcugagagaccuu

SEQ ID NO: 2408844 - RNA, 19 nt, Artificial Sequence
  Description of Artificial Sequence: Synthetic oligonucleotide
uucuaaauaaacaggagcg

SEQ ID NO: 2408845 - RNA, 19 nt, Artificial Sequence
  Description of Artificial Sequence: Synthetic oligonucleotide
aaauaucucaucuacuuuc

SEQ ID NO: 2408846 - RNA, 19 nt, Artificial Sequence
  Description of Artificial Sequence: Synthetic oligonucleotide
aacgaugucaucuucacag

SEQ ID NO: 2408847 - RNA, 19 nt, Artificial Sequence
  Description of Artificial Sequence: Synthetic oligonucleotide
ucuuuaagcacccacagag

SEQ ID NO: 2408848 - RNA, 19 nt, Artificial Sequence
  Description of Artificial Sequence: Synthetic oligonucleotide
aauggaucuauauaaaacu

SEQ ID NO: 2408849 - RNA, 19 nt, Artificial Sequence
  Description of Artificial Sequence: Synthetic oligonucleotide
aauuuauuaaaaccuccac

SEQ ID NO: 2408850 - RNA, 19 nt, Artificial Sequence
  Description of Artificial Sequence: Synthetic oligonucleotide
aaagcaggguucuucaugc

SEQ ID NO: 2408851 - RNA, 19 nt, Artificial Sequence
  Description of Artificial Sequence: Synthetic oligonucleotide
auuuauuaaaaccuccacg

SEQ ID NO: 2408852 - RNA, 19 nt, Artificial Sequence
  Description of Artificial Sequence: Synthetic oligonucleotide
uuucuaaauaaacaggagc

SEQ ID NO: 2408853 - RNA, 19 nt, Artificial Sequence
  Description of Artificial Sequence: Synthetic oligonucleotide
uuuucugacaacuuaacug

SEQ ID NO: 2408854 - RNA, 19 nt, Artificial Sequence
  Description of Artificial Sequence: Synthetic oligonucleotide
aauaagacgacacguuccg

SEQ ID NO: 2408855 - RNA, 19 nt, Artificial Sequence
  Description of Artificial Sequence: Synthetic oligonucleotide
uuuguuuucuaaauaaaca

SEQ ID NO: 2408856 - RNA, 19 nt, Artificial Sequence
  Description of Artificial Sequence: Synthetic oligonucleotide
cuuggaauuuauuaaaacc

SEQ ID NO: 2408857 - RNA, 19 nt, Artificial Sequence
  Description of Artificial Sequence: Synthetic oligonucleotide
aaauggaucuauauaaaac

SEQ ID NO: 2408858 - RNA, 19 nt, Artificial Sequence
  Description of Artificial Sequence: Synthetic oligonucleotide
aaaaccuccacguccgccc

SEQ ID NO: 2408859 - RNA, 19 nt, Artificial Sequence
  Description of Artificial Sequence: Synthetic oligonucleotide
ucuaauguccucuuccucg

SEQ ID NO: 2408860 - RNA, 19 nt, Artificial Sequence
  Description of Artificial Sequence: Synthetic oligonucleotide
ugugguacauuuacaaacg

SEQ ID NO: 2408861 - RNA, 19 nt, Artificial Sequence
  Description of Artificial Sequence: Synthetic oligonucleotide
uuuacaaacgaugucaucu

SEQ ID NO: 2408862 - RNA, 19 nt, Artificial Sequence
  Description of Artificial Sequence: Synthetic oligonucleotide
acuuguuucuacccaaugc

SEQ ID NO: 2408863 - RNA, 19 nt, Artificial Sequence
  Description of Artificial Sequence: Synthetic oligonucleotide
augcugacgauucagcucc

SEQ ID NO: 2408864 - RNA, 19 nt, Artificial Sequence
  Description of Artificial Sequence: Synthetic oligonucleotide
uuucugacaacuuaacuga

SEQ ID NO: 2408865 - RNA, 19 nt, Artificial Sequence
  Description of Artificial Sequence: Synthetic oligonucleotide
aacauugccuguucugccc

SEQ ID NO: 2408866 - RNA, 19 nt, Artificial Sequence
  Description of Artificial Sequence: Synthetic oligonucleotide
aaugcugacgauucagcuc

SEQ ID NO: 2408867 - RNA, 19 nt, Artificial Sequence
  Description of Artificial Sequence: Synthetic oligonucleotide
uuuaagcacccacagagug

SEQ ID NO: 2408868 - RNA, 19 nt, Artificial Sequence
  Description of Artificial Sequence: Synthetic oligonucleotide
uuuucuaaauaaacaggag

SEQ ID NO: 2408869 - RNA, 19 nt, Artificial Sequence
  Description of Artificial Sequence: Synthetic oligonucleotide
aauaucucaucuacuuucc

SEQ ID NO: 2408870 - RNA, 19 nt, Artificial Sequence
  Description of Artificial Sequence: Synthetic oligonucleotide
uaaauaaacaggagcguug

SEQ ID NO: 2408871 - RNA, 19 nt, Artificial Sequence
  Description of Artificial Sequence: Synthetic oligonucleotide
ugugcuucaaaugaaaagu

SEQ ID NO: 2408872 - RNA, 19 nt, Artificial Sequence
  Description of Artificial Sequence: Synthetic oligonucleotide
uaucucaucuacuuucccg

SEQ ID NO: 2408873 - RNA, 19 nt, Artificial Sequence
  Description of Artificial Sequence: Synthetic oligonucleotide
aaguaaggcaccuuauucu

SEQ ID NO: 2408874 - RNA, 19 nt, Artificial Sequence
  Description of Artificial Sequence: Synthetic oligonucleotide
uaauaagacgacacguucc

SEQ ID NO: 2408875 - RNA, 19 nt, Artificial Sequence
  Description of Artificial Sequence: Synthetic oligonucleotide
uaaacaggagcguugaagu

SEQ ID NO: 2408876 - RNA, 19 nt, Artificial Sequence
  Description of Artificial Sequence: Synthetic oligonucleotide
gaacucuccuaauaagacg

SEQ ID NO: 2408877 - RNA, 19 nt, Artificial Sequence
  Description of Artificial Sequence: Synthetic oligonucleotide
ucaucuacuuucccgaucu

SEQ ID NO: 2408878 - RNA, 19 nt, Artificial Sequence
  Description of Artificial Sequence: Synthetic oligonucleotide
uguucuuuaagcacccaca

SEQ ID NO: 2408879 - RNA, 19 nt, Artificial Sequence
  Description of Artificial Sequence: Synthetic oligonucleotide
ucuccuaauaagacgacac

SEQ ID NO: 2408880 - RNA, 19 nt, Artificial Sequence
  Description of Artificial Sequence: Synthetic oligonucleotide
uuguccaaauaucucaucu

SEQ ID NO: 2408881 - RNA, 19 nt, Artificial Sequence
  Description of Artificial Sequence: Synthetic oligonucleotide
acugccacaucuaaugucc

SEQ ID NO: 2408882 - RNA, 19 nt, Artificial Sequence
  Description of Artificial Sequence: Synthetic oligonucleotide
uuuuaaaggaagaugccuu

SEQ ID NO: 2408883 - RNA, 19 nt, Artificial Sequence
  Description of Artificial Sequence: Synthetic oligonucleotide
acauuuacaaacgauguca

SEQ ID NO: 2408884 - RNA, 19 nt, Artificial Sequence
  Description of Artificial Sequence: Synthetic oligonucleotide
ucuuccaccucuaaagcca

SEQ ID NO: 2408885 - RNA, 19 nt, Artificial Sequence
  Description of Artificial Sequence: Synthetic oligonucleotide
ugaacucuccuaauaagac

SEQ ID NO: 2408886 - RNA, 19 nt, Artificial Sequence
  Description of Artificial Sequence: Synthetic oligonucleotide
aacugccacaucuaauguc

SEQ ID NO: 2408887 - RNA, 19 nt, Artificial Sequence
  Description of Artificial Sequence: Synthetic oligonucleotide
ugcuucaaaugaaaagucc

SEQ ID NO: 2408888 - RNA, 19 nt, Artificial Sequence
  Description of Artificial Sequence: Synthetic oligonucleotide
gaugccuucauguuuucug

SEQ ID NO: 2408889 - RNA, 19 nt, Artificial Sequence
  Description of Artificial Sequence: Synthetic oligonucleotide
auuaaaaccuccacguccg

SEQ ID NO: 2408890 - RNA, 19 nt, Artificial Sequence
  Description of Artificial Sequence: Synthetic oligonucleotide
agacacagacuucaauccc

SEQ ID NO: 2408891 - RNA, 19 nt, Artificial Sequence
  Description of Artificial Sequence: Synthetic oligonucleotide
aacacaaguggugaggucu

SEQ ID NO: 2408892 - RNA, 19 nt, Artificial Sequence
  Description of Artificial Sequence: Synthetic oligonucleotide
uaaauggaucuauauaaaa

SEQ ID NO: 2408893 - RNA, 19 nt, Artificial Sequence
  Description of Artificial Sequence: Synthetic oligonucleotide
gaaguaaggcaccuuauuc

SEQ ID NO: 2408894 - RNA, 19 nt, Artificial Sequence
  Description of Artificial Sequence: Synthetic oligonucleotide
uggaauuuauuaaaaccuc

SEQ ID NO: 2408895 - RNA, 19 nt, Artificial Sequence
  Description of Artificial Sequence: Synthetic oligonucleotide
cuucaaucccagcagaagc

SEQ ID NO: 2408896 - RNA, 19 nt, Artificial Sequence
  Description of Artificial Sequence: Synthetic oligonucleotide
aacucuccuaauaagacga

SEQ ID NO: 2408897 - RNA, 19 nt, Artificial Sequence
  Description of Artificial Sequence: Synthetic oligonucleotide
cuguuguucuuuaagcacc

SEQ ID NO: 2408898 - RNA, 19 nt, Artificial Sequence
  Description of Artificial Sequence: Synthetic oligonucleotide
ugacgauucagcuccacug

SEQ ID NO: 2408899 - RNA, 19 nt, Artificial Sequence
  Description of Artificial Sequence: Synthetic oligonucleotide
uguucuuuguuuucuaaau

SEQ ID NO: 2408900 - RNA, 19 nt, Artificial Sequence
  Description of Artificial Sequence: Synthetic oligonucleotide
uacuguacaaagcaggguu

SEQ ID NO: 2408901 - RNA, 19 nt, Artificial Sequence
  Description of Artificial Sequence: Synthetic oligonucleotide
aaagugccaagugugcuuc

SEQ ID NO: 2408902 - RNA, 19 nt, Artificial Sequence
  Description of Artificial Sequence: Synthetic oligonucleotide
cagacacagacuucaaucc

SEQ ID NO: 2408903 - RNA, 19 nt, Artificial Sequence
  Description of Artificial Sequence: Synthetic oligonucleotide
uucaaucccagcagaagca

SEQ ID NO: 2408904 - RNA, 19 nt, Artificial Sequence
  Description of Artificial Sequence: Synthetic oligonucleotide
gaaaccucugcagugguag

SEQ ID NO: 2408905 - RNA, 19 nt, Artificial Sequence
  Description of Artificial Sequence: Synthetic oligonucleotide
aaaacacaaguggugaggu

SEQ ID NO: 2408906 - RNA, 19 nt, Artificial Sequence
  Description of Artificial Sequence: Synthetic oligonucleotide
accuuauucuccucugugg

SEQ ID NO: 2408907 - RNA, 19 nt, Artificial Sequence
  Description of Artificial Sequence: Synthetic oligonucleotide
cuucaaaugaaaaguccug

SEQ ID NO: 2408908 - RNA, 19 nt, Artificial Sequence
  Description of Artificial Sequence: Synthetic oligonucleotide
aagacgacacguuccggag

SEQ ID NO: 2408909 - RNA, 19 nt, Artificial Sequence
  Description of Artificial Sequence: Synthetic oligonucleotide
uccucugugguacauuuac

SEQ ID NO: 2408910 - RNA, 19 nt, Artificial Sequence
  Description of Artificial Sequence: Synthetic oligonucleotide
uguuguucuuuaagcaccc

SEQ ID NO: 2408911 - RNA, 19 nt, Artificial Sequence
  Description of Artificial Sequence: Synthetic oligonucleotide
auaucucaucuacuuuccc

SEQ ID NO: 2408912 - RNA, 19 nt, Artificial Sequence
  Description of Artificial Sequence: Synthetic oligonucleotide
uucacagggaugcaugaac

SEQ ID NO: 2408913 - RNA, 19 nt, Artificial Sequence
  Description of Artificial Sequence: Synthetic oligonucleotide
cuaauaagacgacacguuc

SEQ ID NO: 2408914 - RNA, 19 nt, Artificial Sequence
  Description of Artificial Sequence: Synthetic oligonucleotide
gguacauuuacaaacgaug

SEQ ID NO: 2408915 - RNA, 19 nt, Artificial Sequence
  Description of Artificial Sequence: Synthetic oligonucleotide
guucuuuaagcacccacag

SEQ ID NO: 2408916 - RNA, 19 nt, Artificial Sequence
  Description of Artificial Sequence: Synthetic oligonucleotide
gaucuuggaauuuauuaaa

SEQ ID NO: 2408917 - RNA, 19 nt, Artificial Sequence
  Description of Artificial Sequence: Synthetic oligonucleotide
uguuuucugacaacuuaac

SEQ ID NO: 2408918 - RNA, 19 nt, Artificial Sequence
  Description of Artificial Sequence: Synthetic oligonucleotide
gugugcuucaaaugaaaag

SEQ ID NO: 2408919 - RNA, 19 nt, Artificial Sequence
  Description of Artificial Sequence: Synthetic oligonucleotide
auuuacaaacgaugucauc

SEQ ID NO: 2408920 - RNA, 19 nt, Artificial Sequence
  Description of Artificial Sequence: Synthetic oligonucleotide
ggaacugccacaucuaaug

SEQ ID NO: 2408921 - RNA, 19 nt, Artificial Sequence
  Description of Artificial Sequence: Synthetic oligonucleotide
gaugcaugaacucuccuaa

SEQ ID NO: 2408922 - RNA, 19 nt, Artificial Sequence
  Description of Artificial Sequence: Synthetic oligonucleotide
aguccuguuguucuuuaag

SEQ ID NO: 2408923 - RNA, 19 nt, Artificial Sequence
  Description of Artificial Sequence: Synthetic oligonucleotide
aaacacaaguggugagguc

SEQ ID NO: 2408924 - RNA, 19 nt, Artificial Sequence
  Description of Artificial Sequence: Synthetic oligonucleotide
uccuaauaagacgacacgu

SEQ ID NO: 2408925 - RNA, 19 nt, Artificial Sequence
  Description of Artificial Sequence: Synthetic oligonucleotide
uaagcacccacagagugcc

SEQ ID NO: 2408926 - RNA, 19 nt, Artificial Sequence
  Description of Artificial Sequence: Synthetic oligonucleotide
uacaaagcaggguucuuca

SEQ ID NO: 2408927 - RNA, 19 nt, Artificial Sequence
  Description of Artificial Sequence: Synthetic oligonucleotide
aucucaucuacuuucccga

SEQ ID NO: 2408928 - RNA, 19 nt, Artificial Sequence
  Description of Artificial Sequence: Synthetic oligonucleotide
cuaauguccucuuccucgg

SEQ ID NO: 2408929 - RNA, 19 nt, Artificial Sequence
  Description of Artificial Sequence: Synthetic oligonucleotide
aaaccuccacguccgcccc

SEQ ID NO: 2408930 - RNA, 19 nt, Artificial Sequence
  Description of Artificial Sequence: Synthetic oligonucleotide
uggaucuauauaaaacuuu

SEQ ID NO: 2408931 - RNA, 19 nt, Artificial Sequence
  Description of Artificial Sequence: Synthetic oligonucleotide
aggagcguugaaguaaggc

SEQ ID NO: 2408932 - RNA, 19 nt, Artificial Sequence
  Description of Artificial Sequence: Synthetic oligonucleotide
acauugccuguucugcccc

SEQ ID NO: 2408933 - RNA, 19 nt, Artificial Sequence
  Description of Artificial Sequence: Synthetic oligonucleotide
uacuuucccgaucuguucu

SEQ ID NO: 2408934 - RNA, 19 nt, Artificial Sequence
  Description of Artificial Sequence: Synthetic oligonucleotide
uccaaauaucucaucuacu

SEQ ID NO: 2408935 - RNA, 19 nt, Artificial Sequence
  Description of Artificial Sequence: Synthetic oligonucleotide
ucucaguuguccaaauauc

SEQ ID NO: 2408936 - RNA, 19 nt, Artificial Sequence
  Description of Artificial Sequence: Synthetic oligonucleotide
uuucucaccgggaggacga

SEQ ID NO: 2408937 - RNA, 19 nt, Artificial Sequence
  Description of Artificial Sequence: Synthetic oligonucleotide
ugccagguacuguacaaag

SEQ ID NO: 2408938 - RNA, 19 nt, Artificial Sequence
  Description of Artificial Sequence: Synthetic oligonucleotide
aagcagaucacgaagcaaa

SEQ ID NO: 2408939 - RNA, 19 nt, Artificial Sequence
  Description of Artificial Sequence: Synthetic oligonucleotide
ucuacuuucccgaucuguu

SEQ ID NO: 2408940 - RNA, 19 nt, Artificial Sequence
  Description of Artificial Sequence: Synthetic oligonucleotide
cuccuaauaagacgacacg

SEQ ID NO: 2408941 - RNA, 19 nt, Artificial Sequence
  Description of Artificial Sequence: Synthetic oligonucleotide
uaaggcaccuuauucuccu

SEQ ID NO: 2408942 - RNA, 19 nt, Artificial Sequence
  Description of Artificial Sequence: Synthetic oligonucleotide
gacgacacguuccggaggc

SEQ ID NO: 2408943 - RNA, 19 nt, Artificial Sequence
  Description of Artificial Sequence: Synthetic oligonucleotide
caaacgaugucaucuucac

SEQ ID NO: 2408944 - RNA, 19 nt, Artificial Sequence
  Description of Artificial Sequence: Synthetic oligonucleotide
cagacuucaaucccagcag

SEQ ID NO: 2408945 - RNA, 19 nt, Artificial Sequence
  Description of Artificial Sequence: Synthetic oligonucleotide
aucuaauguccucuuccuc

SEQ ID NO: 2408946 - RNA, 19 nt, Artificial Sequence
  Description of Artificial Sequence: Synthetic oligonucleotide
ugguacauuuacaaacgau

SEQ ID NO: 2408947 - RNA, 19 nt, Artificial Sequence
  Description of Artificial Sequence: Synthetic oligonucleotide
agcuuaaauggaucuauau

SEQ ID NO: 2408948 - RNA, 19 nt, Artificial Sequence
  Description of Artificial Sequence: Synthetic oligonucleotide
aacaggagcguugaaguaa

SEQ ID NO: 2408949 - RNA, 19 nt, Artificial Sequence
  Description of Artificial Sequence: Synthetic oligonucleotide
cucuuccaccucuaaagcc

SEQ ID NO: 2408950 - RNA, 19 nt, Artificial Sequence
  Description of Artificial Sequence: Synthetic oligonucleotide
ucugacaacuuaacugaaa

SEQ ID NO: 2408951 - RNA, 19 nt, Artificial Sequence
  Description of Artificial Sequence: Synthetic oligonucleotide
uacccaaugcugacgauuc

SEQ ID NO: 2408952 - RNA, 19 nt, Artificial Sequence
  Description of Artificial Sequence: Synthetic oligonucleotide
ugaaguaaggcaccuuauu

SEQ ID NO: 2408953 - RNA, 19 nt, Artificial Sequence
  Description of Artificial Sequence: Synthetic oligonucleotide
uucuuuaagcacccacaga

SEQ ID NO: 2408954 - RNA, 19 nt, Artificial Sequence
  Description of Artificial Sequence: Synthetic oligonucleotide
aaacgaugucaucuucaca

SEQ ID NO: 2408955 - RNA, 19 nt, Artificial Sequence
  Description of Artificial Sequence: Synthetic oligonucleotide
agcaggguucuucaugcuc

SEQ ID NO: 2408956 - RNA, 19 nt, Artificial Sequence
  Description of Artificial Sequence: Synthetic oligonucleotide
ugcaugaacucuccuaaua

SEQ ID NO: 2408957 - RNA, 19 nt, Artificial Sequence
  Description of Artificial Sequence: Synthetic oligonucleotide
gaggucuuggaacugccac

SEQ ID NO: 2408958 - RNA, 19 nt, Artificial Sequence
  Description of Artificial Sequence: Synthetic oligonucleotide
ggaauuuauuaaaaccucc

SEQ ID NO: 2408959 - RNA, 19 nt, Artificial Sequence
  Description of Artificial Sequence: Synthetic oligonucleotide
ucugugguacauuuacaaa

SEQ ID NO: 2408960 - RNA, 19 nt, Artificial Sequence
  Description of Artificial Sequence: Synthetic oligonucleotide
uuaaaggaagaugccuuca

SEQ ID NO: 2408961 - RNA, 19 nt, Artificial Sequence
  Description of Artificial Sequence: Synthetic oligonucleotide
uuucuacccaaugcugacg

SEQ ID NO: 2408962 - RNA, 19 nt, Artificial Sequence
  Description of Artificial Sequence: Synthetic oligonucleotide
agcaacauugccuguucug

SEQ ID NO: 2408963 - RNA, 19 nt, Artificial Sequence
  Description of Artificial Sequence: Synthetic oligonucleotide
acgauucagcuccacugac

SEQ ID NO: 2408964 - RNA, 19 nt, Artificial Sequence
  Description of Artificial Sequence: Synthetic oligonucleotide
gagcguugaaguaaggcac

SEQ ID NO: 2408965 - RNA, 19 nt, Artificial Sequence
  Description of Artificial Sequence: Synthetic oligonucleotide
aauguccucuuccucggaa

SEQ ID NO: 2408966 - RNA, 19 nt, Artificial Sequence
  Description of Artificial Sequence: Synthetic oligonucleotide
ugaaauugccgccgccgcc

SEQ ID NO: 2408967 - RNA, 19 nt, Artificial Sequence
  Description of Artificial Sequence: Synthetic oligonucleotide
acgaugucaucuucacagg

SEQ ID NO: 2408968 - RNA, 19 nt, Artificial Sequence
  Description of Artificial Sequence: Synthetic oligonucleotide
caguuguccaaauaucuca

SEQ ID NO: 2408969 - RNA, 19 nt, Artificial Sequence
  Description of Artificial Sequence: Synthetic oligonucleotide
uagcagcuuaaauggaucu

SEQ ID NO: 2408970 - RNA, 19 nt, Artificial Sequence
  Description of Artificial Sequence: Synthetic oligonucleotide
ucguccaaauccuccucgg

SEQ ID NO: 2408971 - RNA, 19 nt, Artificial Sequence
  Description of Artificial Sequence: Synthetic oligonucleotide
ucuucacagggaugcauga

SEQ ID NO: 2408972 - RNA, 19 nt, Artificial Sequence
  Description of Artificial Sequence: Synthetic oligonucleotide
augaacucuccuaauaaga

SEQ ID NO: 2408973 - RNA, 19 nt, Artificial Sequence
  Description of Artificial Sequence: Synthetic oligonucleotide
gguacuguacaaagcaggg

SEQ ID NO: 2408974 - RNA, 19 nt, Artificial Sequence
  Description of Artificial Sequence: Synthetic oligonucleotide
uguucugccccacuuguuu

SEQ ID NO: 2408975 - RNA, 19 nt, Artificial Sequence
  Description of Artificial Sequence: Synthetic oligonucleotide
guugaaguaaggcaccuua

SEQ ID NO: 2408976 - RNA, 19 nt, Artificial Sequence
  Description of Artificial Sequence: Synthetic oligonucleotide
aggcccuugaucuuggaau

SEQ ID NO: 2408977 - RNA, 19 nt, Artificial Sequence
  Description of Artificial Sequence: Synthetic oligonucleotide
cucaccgggaggacgaggc

SEQ ID NO: 2408978 - RNA, 19 nt, Artificial Sequence
  Description of Artificial Sequence: Synthetic oligonucleotide
cucguccaaauccuccucg

SEQ ID NO: 2408979 - RNA, 19 nt, Artificial Sequence
  Description of Artificial Sequence: Synthetic oligonucleotide
uugaaguaaggcaccuuau

SEQ ID NO: 2408980 - RNA, 19 nt, Artificial Sequence
  Description of Artificial Sequence: Synthetic oligonucleotide
caacauugccuguucugcc

SEQ ID NO: 2408981 - RNA, 19 nt, Artificial Sequence
  Description of Artificial Sequence: Synthetic oligonucleotide
cuucaugcucuuucugagc

SEQ ID NO: 2408982 - RNA, 19 nt, Artificial Sequence
  Description of Artificial Sequence: Synthetic oligonucleotide
gggaggacgaggcagaaac

SEQ ID NO: 2408983 - RNA, 19 nt, Artificial Sequence
  Description of Artificial Sequence: Synthetic oligonucleotide
cacugacacagcagcaucc

SEQ ID NO: 2408984 - RNA, 19 nt, Artificial Sequence
  Description of Artificial Sequence: Synthetic oligonucleotide
ugccaagugugcuucaaau

SEQ ID NO: 2408985 - RNA, 19 nt, Artificial Sequence
  Description of Artificial Sequence: Synthetic oligonucleotide
uacaaacgaugucaucuuc

SEQ ID NO: 2408986 - RNA, 19 nt, Artificial Sequence
  Description of Artificial Sequence: Synthetic oligonucleotide
uuggaacugccacaucuaa

SEQ ID NO: 2408987 - RNA, 19 nt, Artificial Sequence
  Description of Artificial Sequence: Synthetic oligonucleotide
acuguacaaagcaggguuc

SEQ ID NO: 2408988 - RNA, 19 nt, Artificial Sequence
  Description of Artificial Sequence: Synthetic oligonucleotide
acgaggcagaaaccucugc

SEQ ID NO: 2408989 - RNA, 19 nt, Artificial Sequence
  Description of Artificial Sequence: Synthetic oligonucleotide
gacgauucagcuccacuga

SEQ ID NO: 2408990 - RNA, 19 nt, Artificial Sequence
  Description of Artificial Sequence: Synthetic oligonucleotide
cuuguuucuacccaaugcu

SEQ ID NO: 2408991 - RNA, 19 nt, Artificial Sequence
  Description of Artificial Sequence: Synthetic oligonucleotide
gagguccuuucucaccggg

SEQ ID NO: 2408992 - RNA, 19 nt, Artificial Sequence
  Description of Artificial Sequence: Synthetic oligonucleotide
ggagcguugaaguaaggca

SEQ ID NO: 2408993 - RNA, 19 nt, Artificial Sequence
  Description of Artificial Sequence: Synthetic oligonucleotide
agacuucaaucccagcaga

SEQ ID NO: 2408994 - RNA, 19 nt, Artificial Sequence
  Description of Artificial Sequence: Synthetic oligonucleotide
aaacaggagcguugaagua

SEQ ID NO: 2408995 - RNA, 19 nt, Artificial Sequence
  Description of Artificial Sequence: Synthetic oligonucleotide
agacgacacguuccggagg

SEQ ID NO: 2408996 - RNA, 19 nt, Artificial Sequence
  Description of Artificial Sequence: Synthetic oligonucleotide
cugaaauugccgccgccgc

SEQ ID NO: 2408997 - RNA, 19 nt, Artificial Sequence
  Description of Artificial Sequence: Synthetic oligonucleotide
cucugugguacauuuacaa

SEQ ID NO: 2408998 - RNA, 19 nt, Artificial Sequence
  Description of Artificial Sequence: Synthetic oligonucleotide
uuaaaaccuccacguccgc

SEQ ID NO: 2408999 - RNA, 19 nt, Artificial Sequence
  Description of Artificial Sequence: Synthetic oligonucleotide
acaaguggugaggucuugg

SEQ ID NO: 2409000 - RNA, 19 nt, Artificial Sequence
  Description of Artificial Sequence: Synthetic oligonucleotide
agcagaagcagaucacgaa

SEQ ID NO: 2409001 - RNA, 19 nt, Artificial Sequence
  Description of Artificial Sequence: Synthetic oligonucleotide
acaaacgaugucaucuuca

SEQ ID NO: 2409002 - RNA, 19 nt, Artificial Sequence
  Description of Artificial Sequence: Synthetic oligonucleotide
cuuucucaccgggaggacg

SEQ ID NO: 2409003 - RNA, 19 nt, Artificial Sequence
  Description of Artificial Sequence: Synthetic oligonucleotide
gacacagacuucaauccca

SEQ ID NO: 2409004 - RNA, 19 nt, Artificial Sequence
  Description of Artificial Sequence: Synthetic oligonucleotide
accucuaaagccaccaccu

SEQ ID NO: 2409005 - RNA, 19 nt, Artificial Sequence
  Description of Artificial Sequence: Synthetic oligonucleotide
ucgaccuccccugccaccg

SEQ ID NO: 2409006 - RNA, 19 nt, Artificial Sequence
  Description of Artificial Sequence: Synthetic oligonucleotide
cauguuuucugacaacuua

SEQ ID NO: 2409007 - RNA, 19 nt, Artificial Sequence
  Description of Artificial Sequence: Synthetic oligonucleotide
aggcagaaaccucugcagu

SEQ ID NO: 2409008 - RNA, 19 nt, Artificial Sequence
  Description of Artificial Sequence: Synthetic oligonucleotide
ugaggucuuggaacugcca

SEQ ID NO: 2409009 - RNA, 19 nt, Artificial Sequence
  Description of Artificial Sequence: Synthetic oligonucleotide
uucccgaucuguucuuugu

SEQ ID NO: 2409010 - RNA, 19 nt, Artificial Sequence
  Description of Artificial Sequence: Synthetic oligonucleotide
uguccucuuccucggaauc

SEQ ID NO: 2409011 - RNA, 19 nt, Artificial Sequence
  Description of Artificial Sequence: Synthetic oligonucleotide
uccuccucgaccuccccug

SEQ ID NO: 2409012 - RNA, 19 nt, Artificial Sequence
  Description of Artificial Sequence: Synthetic oligonucleotide
uccagacacagacuucaau

SEQ ID NO: 2409013 - RNA, 19 nt, Artificial Sequence
  Description of Artificial Sequence: Synthetic oligonucleotide
cucaguuguccaaauaucu

SEQ ID NO: 2409014 - RNA, 19 nt, Artificial Sequence
  Description of Artificial Sequence: Synthetic oligonucleotide
agugccagguacuguacaa

SEQ ID NO: 2409015 - RNA, 19 nt, Artificial Sequence
  Description of Artificial Sequence: Synthetic oligonucleotide
gguccuuucucaccgggag

SEQ ID NO: 2409016 - RNA, 19 nt, Artificial Sequence
  Description of Artificial Sequence: Synthetic oligonucleotide
caccuuauucuccucugug

SEQ ID NO: 2409017 - RNA, 19 nt, Artificial Sequence
  Description of Artificial Sequence: Synthetic oligonucleotide
ccuguuguucuuuaagcac

SEQ ID NO: 2409018 - RNA, 19 nt, Artificial Sequence
  Description of Artificial Sequence: Synthetic oligonucleotide
ugccccacuuguuucuacc

SEQ ID NO: 2409019 - RNA, 19 nt, Artificial Sequence
  Description of Artificial Sequence: Synthetic oligonucleotide
ugguagcagcuuaaaugga

SEQ ID NO: 2409020 - RNA, 19 nt, Artificial Sequence
  Description of Artificial Sequence: Synthetic oligonucleotide
caugcucuuucugagcaac

SEQ ID NO: 2409021 - RNA, 19 nt, Artificial Sequence
  Description of Artificial Sequence: Synthetic oligonucleotide
uggaacugccacaucuaau

SEQ ID NO: 2409022 - RNA, 19 nt, Artificial Sequence
  Description of Artificial Sequence: Synthetic oligonucleotide
cuacuuucccgaucuguuc

SEQ ID NO: 2409023 - RNA, 19 nt, Artificial Sequence
  Description of Artificial Sequence: Synthetic oligonucleotide
aaccucugcagugguagca

SEQ ID NO: 2409024 - RNA, 19 nt, Artificial Sequence
  Description of Artificial Sequence: Synthetic oligonucleotide
guacauuuacaaacgaugu

SEQ ID NO: 2409025 - RNA, 19 nt, Artificial Sequence
  Description of Artificial Sequence: Synthetic oligonucleotide
auguuuucugacaacuuaa

SEQ ID NO: 2409026 - RNA, 19 nt, Artificial Sequence
  Description of Artificial Sequence: Synthetic oligonucleotide
cagggaugcaugaacucuc

SEQ ID NO: 2409027 - RNA, 19 nt, Artificial Sequence
  Description of Artificial Sequence: Synthetic oligonucleotide
ccaagugugcuucaaauga

SEQ ID NO: 2409028 - RNA, 19 nt, Artificial Sequence
  Description of Artificial Sequence: Synthetic oligonucleotide
guuuucugacaacuuaacu

SEQ ID NO: 2409029 - RNA, 19 nt, Artificial Sequence
  Description of Artificial Sequence: Synthetic oligonucleotide
acaggagcguugaaguaag

SEQ ID NO: 2409030 - RNA, 19 nt, Artificial Sequence
  Description of Artificial Sequence: Synthetic oligonucleotide
ugcagugguagcagcuuaa

SEQ ID NO: 2409031 - RNA, 19 nt, Artificial Sequence
  Description of Artificial Sequence: Synthetic oligonucleotide
aucuucacagggaugcaug

SEQ ID NO: 2409032 - RNA, 19 nt, Artificial Sequence
  Description of Artificial Sequence: Synthetic oligonucleotide
aucuacuuucccgaucugu

SEQ ID NO: 2409033 - RNA, 19 nt, Artificial Sequence
  Description of Artificial Sequence: Synthetic oligonucleotide
gcuuaaauggaucuauaua

SEQ ID NO: 2409034 - RNA, 19 nt, Artificial Sequence
  Description of Artificial Sequence: Synthetic oligonucleotide
auggaucuauauaaaacuu

SEQ ID NO: 2409035 - RNA, 19 nt, Artificial Sequence
  Description of Artificial Sequence: Synthetic oligonucleotide
auaagacgacacguuccgg

SEQ ID NO: 2409036 - RNA, 19 nt, Artificial Sequence
  Description of Artificial Sequence: Synthetic oligonucleotide
cuuccaccucuaaagccac

SEQ ID NO: 2409037 - RNA, 19 nt, Artificial Sequence
  Description of Artificial Sequence: Synthetic oligonucleotide
cacuuguuucuacccaaug

SEQ ID NO: 2409038 - RNA, 19 nt, Artificial Sequence
  Description of Artificial Sequence: Synthetic oligonucleotide
gcaacauugccuguucugc

SEQ ID NO: 2409039 - RNA, 19 nt, Artificial Sequence
  Description of Artificial Sequence: Synthetic oligonucleotide
guagcagcuuaaauggauc

SEQ ID NO: 2409040 - RNA, 19 nt, Artificial Sequence
  Description of Artificial Sequence: Synthetic oligonucleotide
guaaggcaccuuauucucc

SEQ ID NO: 2409041 - RNA, 19 nt, Artificial Sequence
  Description of Artificial Sequence: Synthetic oligonucleotide
aaguccuguuguucuuuaa

SEQ ID NO: 2409042 - RNA, 19 nt, Artificial Sequence
  Description of Artificial Sequence: Synthetic oligonucleotide
aggcaccuuauucuccucu

SEQ ID NO: 2409043 - RNA, 19 nt, Artificial Sequence
  Description of Artificial Sequence: Synthetic oligonucleotide
uccacugacacagcagcau

SEQ ID NO: 2409044 - RNA, 19 nt, Artificial Sequence
  Description of Artificial Sequence: Synthetic oligonucleotide
cuguucuuuguuuucuaaa

SEQ ID NO: 2409045 - RNA, 19 nt, Artificial Sequence
  Description of Artificial Sequence: Synthetic oligonucleotide
uauucuccucugugguaca

SEQ ID NO: 2409046 - RNA, 19 nt, Artificial Sequence
  Description of Artificial Sequence: Synthetic oligonucleotide
aguuguccaaauaucucau

SEQ ID NO: 2409047 - RNA, 19 nt, Artificial Sequence
  Description of Artificial Sequence: Synthetic oligonucleotide
ccagguacuguacaaagca

SEQ ID NO: 2409048 - RNA, 19 nt, Artificial Sequence
  Description of Artificial Sequence: Synthetic oligonucleotide
cacagggaugcaugaacuc

SEQ ID NO: 2409049 - RNA, 19 nt, Artificial Sequence
  Description of Artificial Sequence: Synthetic oligonucleotide
cucaucuacuuucccgauc

SEQ ID NO: 2409050 - RNA, 19 nt, Artificial Sequence
  Description of Artificial Sequence: Synthetic oligonucleotide
uaauguccucuuccucgga

SEQ ID NO: 2409051 - RNA, 19 nt, Artificial Sequence
  Description of Artificial Sequence: Synthetic oligonucleotide
gugguacauuuacaaacga

SEQ ID NO: 2409052 - RNA, 19 nt, Artificial Sequence
  Description of Artificial Sequence: Synthetic oligonucleotide
aagcaggguucuucaugcu

SEQ ID NO: 2409053 - RNA, 19 nt, Artificial Sequence
  Description of Artificial Sequence: Synthetic oligonucleotide
agcacccacagagugccag

SEQ ID NO: 2409054 - RNA, 19 nt, Artificial Sequence
  Description of Artificial Sequence: Synthetic oligonucleotide
cucucaguuguccaaauau

SEQ ID NO: 2409055 - RNA, 19 nt, Artificial Sequence
  Description of Artificial Sequence: Synthetic oligonucleotide
ccaaugcugacgauucagc

SEQ ID NO: 2409056 - RNA, 19 nt, Artificial Sequence
  Description of Artificial Sequence: Synthetic oligonucleotide
acucuccuaauaagacgac

SEQ ID NO: 2409057 - RNA, 19 nt, Artificial Sequence
  Description of Artificial Sequence: Synthetic oligonucleotide
gccaagugugcuucaaaug

SEQ ID NO: 2409058 - RNA, 19 nt, Artificial Sequence
  Description of Artificial Sequence: Synthetic oligonucleotide
guuccggaggcccuugauc

SEQ ID NO: 2409059 - RNA, 19 nt, Artificial Sequence
  Description of Artificial Sequence: Synthetic oligonucleotide
ucucaucuacuuucccgau

SEQ ID NO: 2409060 - RNA, 19 nt, Artificial Sequence
  Description of Artificial Sequence: Synthetic oligonucleotide
gcaugaacucuccuaauaa

SEQ ID NO: 2409061 - RNA, 19 nt, Artificial Sequence
  Description of Artificial Sequence: Synthetic oligonucleotide
aggacgaggcagaaaccuc

SEQ ID NO: 2409062 - RNA, 19 nt, Artificial Sequence
  Description of Artificial Sequence: Synthetic oligonucleotide
gaagcagaucacgaagcaa

SEQ ID NO: 2409063 - RNA, 19 nt, Artificial Sequence
  Description of Artificial Sequence: Synthetic oligonucleotide
caaguggugaggucuugga

SEQ ID NO: 2409064 - RNA, 19 nt, Artificial Sequence
  Description of Artificial Sequence: Synthetic oligonucleotide
auugccuguucugccccac

SEQ ID NO: 2409065 - RNA, 19 nt, Artificial Sequence
  Description of Artificial Sequence: Synthetic oligonucleotide
ucaugcucuuucugagcaa

SEQ ID NO: 2409066 - RNA, 19 nt, Artificial Sequence
  Description of Artificial Sequence: Synthetic oligonucleotide
ucucaccgggaggacgagg

SEQ ID NO: 2409067 - RNA, 19 nt, Artificial Sequence
  Description of Artificial Sequence: Synthetic oligonucleotide
ccugaaauugccgccgccg

SEQ ID NO: 2409068 - RNA, 19 nt, Artificial Sequence
  Description of Artificial Sequence: Synthetic oligonucleotide
aagugccaagugugcuuca

SEQ ID NO: 2409069 - RNA, 19 nt, Artificial Sequence
  Description of Artificial Sequence: Synthetic oligonucleotide
guucugccccacuuguuuc

SEQ ID NO: 2409070 - RNA, 19 nt, Artificial Sequence
  Description of Artificial Sequence: Synthetic oligonucleotide
cacagacuucaaucccagc

SEQ ID NO: 2409071 - RNA, 19 nt, Artificial Sequence
  Description of Artificial Sequence: Synthetic oligonucleotide
gagugccagguacuguaca

SEQ ID NO: 2409072 - RNA, 19 nt, Artificial Sequence
  Description of Artificial Sequence: Synthetic oligonucleotide
cagagugccagguacugua

SEQ ID NO: 2409073 - RNA, 19 nt, Artificial Sequence
  Description of Artificial Sequence: Synthetic oligonucleotide
gaggacgaggcagaaaccu

SEQ ID NO: 2409074 - RNA, 19 nt, Artificial Sequence
  Description of Artificial Sequence: Synthetic oligonucleotide
cugggagguccuuucucac

SEQ ID NO: 2409075 - RNA, 19 nt, Artificial Sequence
  Description of Artificial Sequence: Synthetic oligonucleotide
gaacugccacaucuaaugu

SEQ ID NO: 2409076 - RNA, 19 nt, Artificial Sequence
  Description of Artificial Sequence: Synthetic oligonucleotide
cagcagaagcagaucacga

SEQ ID NO: 2409077 - RNA, 19 nt, Artificial Sequence
  Description of Artificial Sequence: Synthetic oligonucleotide
ccagcagaagcagaucacg

SEQ ID NO: 2409078 - RNA, 19 nt, Artificial Sequence
  Description of Artificial Sequence: Synthetic oligonucleotide
ucccgaucuguucuuuguu

SEQ ID NO: 2409079 - RNA, 19 nt, Artificial Sequence
  Description of Artificial Sequence: Synthetic oligonucleotide
uuccaccucuaaagccacc

SEQ ID NO: 2409080 - RNA, 19 nt, Artificial Sequence
  Description of Artificial Sequence: Synthetic oligonucleotide
cauuuacaaacgaugucau

SEQ ID NO: 2409081 - RNA, 19 nt, Artificial Sequence
  Description of Artificial Sequence: Synthetic oligonucleotide
cucuaaagccaccaccucu

SEQ ID NO: 2409082 - RNA, 19 nt, Artificial Sequence
  Description of Artificial Sequence: Synthetic oligonucleotide
aucucucaguuguccaaau

SEQ ID NO: 2409083 - RNA, 19 nt, Artificial Sequence
  Description of Artificial Sequence: Synthetic oligonucleotide
gacgaggcagaaaccucug

SEQ ID NO: 2409084 - RNA, 19 nt, Artificial Sequence
  Description of Artificial Sequence: Synthetic oligonucleotide
ggugaggucuuggaacugc

SEQ ID NO: 2409085 - RNA, 19 nt, Artificial Sequence
  Description of Artificial Sequence: Synthetic oligonucleotide
caaugcugacgauucagcu

SEQ ID NO: 2409086 - RNA, 19 nt, Artificial Sequence
  Description of Artificial Sequence: Synthetic oligonucleotide
ggcaccuuauucuccucug

SEQ ID NO: 2409087 - RNA, 19 nt, Artificial Sequence
  Description of Artificial Sequence: Synthetic oligonucleotide
augcaugaacucuccuaau

SEQ ID NO: 2409088 - RNA, 19 nt, Artificial Sequence
  Description of Artificial Sequence: Synthetic oligonucleotide
ucaccgggaggacgaggca

SEQ ID NO: 2409089 - RNA, 19 nt, Artificial Sequence
  Description of Artificial Sequence: Synthetic oligonucleotide
gugaggucuuggaacugcc

SEQ ID NO: 2409090 - RNA, 19 nt, Artificial Sequence
  Description of Artificial Sequence: Synthetic oligonucleotide
cuuuaagcacccacagagu

SEQ ID NO: 2409091 - RNA, 19 nt, Artificial Sequence
  Description of Artificial Sequence: Synthetic oligonucleotide
gaggcccuugaucuuggaa

SEQ ID NO: 2409092 - RNA, 19 nt, Artificial Sequence
  Description of Artificial Sequence: Synthetic oligonucleotide
cucuccuaauaagacgaca

SEQ ID NO: 2409093 - RNA, 19 nt, Artificial Sequence
  Description of Artificial Sequence: Synthetic oligonucleotide
caggagcguugaaguaagg

SEQ ID NO: 2409094 - RNA, 19 nt, Artificial Sequence
  Description of Artificial Sequence: Synthetic oligonucleotide
caccgggaggacgaggcag

SEQ ID NO: 2409095 - RNA, 19 nt, Artificial Sequence
  Description of Artificial Sequence: Synthetic oligonucleotide
ucuacccaaugcugacgau

SEQ ID NO: 2409096 - RNA, 19 nt, Artificial Sequence
  Description of Artificial Sequence: Synthetic oligonucleotide
uguacaaagcaggguucuu

SEQ ID NO: 2409097 - RNA, 19 nt, Artificial Sequence
  Description of Artificial Sequence: Synthetic oligonucleotide
ggaucuauauaaaacuuuu

SEQ ID NO: 2409098 - RNA, 19 nt, Artificial Sequence
  Description of Artificial Sequence: Synthetic oligonucleotide
gaaaaguccuguuguucuu

SEQ ID NO: 2409099 - RNA, 19 nt, Artificial Sequence
  Description of Artificial Sequence: Synthetic oligonucleotide
gcuccagacacagacuuca

SEQ ID NO: 2409100 - RNA, 19 nt, Artificial Sequence
  Description of Artificial Sequence: Synthetic oligonucleotide
accaccgccucugggaggu

SEQ ID NO: 2409101 - RNA, 19 nt, Artificial Sequence
  Description of Artificial Sequence: Synthetic oligonucleotide
agcagcuuaaauggaucua

SEQ ID NO: 2409102 - RNA, 19 nt, Artificial Sequence
  Description of Artificial Sequence: Synthetic oligonucleotide
cugacacagcagcauccuc

SEQ ID NO: 2409103 - RNA, 19 nt, Artificial Sequence
  Description of Artificial Sequence: Synthetic oligonucleotide
ucggccgccgccccugaaa

SEQ ID NO: 2409104 - RNA, 19 nt, Artificial Sequence
  Description of Artificial Sequence: Synthetic oligonucleotide
acccaaugcugacgauuca

SEQ ID NO: 2409105 - RNA, 19 nt, Artificial Sequence
  Description of Artificial Sequence: Synthetic oligonucleotide
agcagaucacgaagcaaaa

SEQ ID NO: 2409106 - RNA, 19 nt, Artificial Sequence
  Description of Artificial Sequence: Synthetic oligonucleotide
uggugaggucuuggaacug

SEQ ID NO: 2409107 - RNA, 19 nt, Artificial Sequence
  Description of Artificial Sequence: Synthetic oligonucleotide
cccaaugcugacgauucag

SEQ ID NO: 2409108 - RNA, 19 nt, Artificial Sequence
  Description of Artificial Sequence: Synthetic oligonucleotide
ggagguccuuucucaccgg

SEQ ID NO: 2409109 - RNA, 19 nt, Artificial Sequence
  Description of Artificial Sequence: Synthetic oligonucleotide
caucuacuuucccgaucug

SEQ ID NO: 2409110 - RNA, 19 nt, Artificial Sequence
  Description of Artificial Sequence: Synthetic oligonucleotide
cuccacugacacagcagca

SEQ ID NO: 2409111 - RNA, 19 nt, Artificial Sequence
  Description of Artificial Sequence: Synthetic oligonucleotide
acgacacguuccggaggcc

SEQ ID NO: 2409112 - RNA, 19 nt, Artificial Sequence
  Description of Artificial Sequence: Synthetic oligonucleotide
ugcugacgauucagcucca

SEQ ID NO: 2409113 - RNA, 19 nt, Artificial Sequence
  Description of Artificial Sequence: Synthetic oligonucleotide
agugccaagugugcuucaa

SEQ ID NO: 2409114 - RNA, 19 nt, Artificial Sequence
  Description of Artificial Sequence: Synthetic oligonucleotide
ggaagaugccuucauguuu

SEQ ID NO: 2409115 - RNA, 19 nt, Artificial Sequence
  Description of Artificial Sequence: Synthetic oligonucleotide
gccccacuuguuucuaccc

SEQ ID NO: 2409116 - RNA, 19 nt, Artificial Sequence
  Description of Artificial Sequence: Synthetic oligonucleotide
uucucaccgggaggacgag

SEQ ID NO: 2409117 - RNA, 19 nt, Artificial Sequence
  Description of Artificial Sequence: Synthetic oligonucleotide
gagcaacauugccuguucu

SEQ ID NO: 2409118 - RNA, 19 nt, Artificial Sequence
  Description of Artificial Sequence: Synthetic oligonucleotide
gccccugaaauugccgccg

SEQ ID NO: 2409119 - RNA, 19 nt, Artificial Sequence
  Description of Artificial Sequence: Synthetic oligonucleotide
caccaccgccucugggagg

SEQ ID NO: 2409120 - RNA, 19 nt, Artificial Sequence
  Description of Artificial Sequence: Synthetic oligonucleotide
gccaccaccgccucuggga

SEQ ID NO: 2409121 - RNA, 19 nt, Artificial Sequence
  Description of Artificial Sequence: Synthetic oligonucleotide
cugccccacuuguuucuac

SEQ ID NO: 2409122 - RNA, 19 nt, Artificial Sequence
  Description of Artificial Sequence: Synthetic oligonucleotide
ccgccccugaaauugccgc

SEQ ID NO: 2409123 - RNA, 19 nt, Artificial Sequence
  Description of Artificial Sequence: Synthetic oligonucleotide
gccgccgccccugaaauug

SEQ ID NO: 2409124 - RNA, 19 nt, Artificial Sequence
  Description of Artificial Sequence: Synthetic oligonucleotide
guuguucuuuaagcaccca

SEQ ID NO: 2409125 - RNA, 19 nt, Artificial Sequence
  Description of Artificial Sequence: Synthetic oligonucleotide
gccuguucugccccacuug

SEQ ID NO: 2409126 - RNA, 19 nt, Artificial Sequence
  Description of Artificial Sequence: Synthetic oligonucleotide
cagcuccacugacacagca

SEQ ID NO: 2409127 - RNA, 19 nt, Artificial Sequence
  Description of Artificial Sequence: Synthetic oligonucleotide
cccagcagaagcagaucac

SEQ ID NO: 2409128 - RNA, 19 nt, Artificial Sequence
  Description of Artificial Sequence: Synthetic oligonucleotide
guacuguacaaagcagggu

SEQ ID NO: 2409129 - RNA, 19 nt, Artificial Sequence
  Description of Artificial Sequence: Synthetic oligonucleotide
gugccaagugugcuucaaa

SEQ ID NO: 2409130 - RNA, 19 nt, Artificial Sequence
  Description of Artificial Sequence: Synthetic oligonucleotide
augcucuuucugagcaaca

SEQ ID NO: 2409131 - RNA, 19 nt, Artificial Sequence
  Description of Artificial Sequence: Synthetic oligonucleotide
cugacgauucagcuccacu

SEQ ID NO: 2409132 - RNA, 19 nt, Artificial Sequence
  Description of Artificial Sequence: Synthetic oligonucleotide
caccgccucugggaggucc

SEQ ID NO: 2409133 - RNA, 19 nt, Artificial Sequence
  Description of Artificial Sequence: Synthetic oligonucleotide
agguccuuucucaccggga

SEQ ID NO: 2409134 - RNA, 19 nt, Artificial Sequence
  Description of Artificial Sequence: Synthetic oligonucleotide
ccaaauccuccucggccgc

SEQ ID NO: 2409135 - RNA, 19 nt, Artificial Sequence
  Description of Artificial Sequence: Synthetic oligonucleotide
ccacugacacagcagcauc

SEQ ID NO: 2409136 - RNA, 19 nt, Artificial Sequence
  Description of Artificial Sequence: Synthetic oligonucleotide
cuguacaaagcaggguucu

SEQ ID NO: 2409137 - RNA, 19 nt, Artificial Sequence
  Description of Artificial Sequence: Synthetic oligonucleotide
gguagcagcuuaaauggau

SEQ ID NO: 2409138 - RNA, 19 nt, Artificial Sequence
  Description of Artificial Sequence: Synthetic oligonucleotide
cauugccuguucugcccca

SEQ ID NO: 2409139 - RNA, 19 nt, Artificial Sequence
  Description of Artificial Sequence: Synthetic oligonucleotide
accgggaggacgaggcaga

SEQ ID NO: 2409140 - RNA, 19 nt, Artificial Sequence
  Description of Artificial Sequence: Synthetic oligonucleotide
gcagcuuaaauggaucuau

SEQ ID NO: 2409141 - RNA, 19 nt, Artificial Sequence
  Description of Artificial Sequence: Synthetic oligonucleotide
cccacccuccaccucuucc

SEQ ID NO: 2409142 - RNA, 19 nt, Artificial Sequence
  Description of Artificial Sequence: Synthetic oligonucleotide
ccuaauaagacgacacguu

SEQ ID NO: 2409143 - RNA, 19 nt, Artificial Sequence
  Description of Artificial Sequence: Synthetic oligonucleotide
guugcuccagacacagacu

SEQ ID NO: 2409144 - RNA, 19 nt, Artificial Sequence
  Description of Artificial Sequence: Synthetic oligonucleotide
uccucggccgccgccccug

SEQ ID NO: 2409145 - RNA, 19 nt, Artificial Sequence
  Description of Artificial Sequence: Synthetic oligonucleotide
uccggaggcccuugaucuu

SEQ ID NO: 2409146 - RNA, 19 nt, Artificial Sequence
  Description of Artificial Sequence: Synthetic oligonucleotide
acccacagagugccaggua

SEQ ID NO: 2409147 - RNA, 19 nt, Artificial Sequence
  Description of Artificial Sequence: Synthetic oligonucleotide
gccacaucuaauguccucu

SEQ ID NO: 2409148 - RNA, 19 nt, Artificial Sequence
  Description of Artificial Sequence: Synthetic oligonucleotide
ccaccaccgccucugggag

SEQ ID NO: 2409149 - RNA, 19 nt, Artificial Sequence
  Description of Artificial Sequence: Synthetic oligonucleotide
ccuccagguugcuccagac

SEQ ID NO: 2409150 - RNA, 19 nt, Artificial Sequence
  Description of Artificial Sequence: Synthetic oligonucleotide
cugcagugguagcagcuua

SEQ ID NO: 2409151 - RNA, 19 nt, Artificial Sequence
  Description of Artificial Sequence: Synthetic oligonucleotide
acguuccggaggcccuuga

SEQ ID NO: 2409152 - RNA, 19 nt, Artificial Sequence
  Description of Artificial Sequence: Synthetic oligonucleotide
ggacgaggcagaaaccucu

SEQ ID NO: 2409153 - RNA, 19 nt, Artificial Sequence
  Description of Artificial Sequence: Synthetic oligonucleotide
cuacccaaugcugacgauu

SEQ ID NO: 2409154 - RNA, 19 nt, Artificial Sequence
  Description of Artificial Sequence: Synthetic oligonucleotide
gacacguuccggaggcccu

SEQ ID NO: 2409155 - RNA, 19 nt, Artificial Sequence
  Description of Artificial Sequence: Synthetic oligonucleotide
cagaaaccucugcaguggu

SEQ ID NO: 2409156 - RNA, 19 nt, Artificial Sequence
  Description of Artificial Sequence: Synthetic oligonucleotide
cuccagacacagacuucaa

SEQ ID NO: 2409157 - RNA, 19 nt, Artificial Sequence
  Description of Artificial Sequence: Synthetic oligonucleotide
ccucugugguacauuuaca

SEQ ID NO: 2409158 - RNA, 19 nt, Artificial Sequence
  Description of Artificial Sequence: Synthetic oligonucleotide
gccgccccugaaauugccg

SEQ ID NO: 2409159 - RNA, 19 nt, Artificial Sequence
  Description of Artificial Sequence: Synthetic oligonucleotide
cagugguagcagcuuaaau

SEQ ID NO: 2409160 - RNA, 19 nt, Artificial Sequence
  Description of Artificial Sequence: Synthetic oligonucleotide
cccugaaauugccgccgcc

SEQ ID NO: 2409161 - RNA, 19 nt, Artificial Sequence
  Description of Artificial Sequence: Synthetic oligonucleotide
uugccgccgccgccgccgc

SEQ ID NO: 2409162 - RNA, 19 nt, Artificial Sequence
  Description of Artificial Sequence: Synthetic oligonucleotide
cacguuccggaggcccuug

SEQ ID NO: 2409163 - RNA, 19 nt, Artificial Sequence
  Description of Artificial Sequence: Synthetic oligonucleotide
aagcacccacagagugcca

SEQ ID NO: 2409164 - RNA, 19 nt, Artificial Sequence
  Description of Artificial Sequence: Synthetic oligonucleotide
cgauucagcuccacugaca

SEQ ID NO: 2409165 - RNA, 19 nt, Artificial Sequence
  Description of Artificial Sequence: Synthetic oligonucleotide
cugccacaucuaauguccu

SEQ ID NO: 2409166 - RNA, 19 nt, Artificial Sequence
  Description of Artificial Sequence: Synthetic oligonucleotide
ccucuuccucggaauccac

SEQ ID NO: 2409167 - RNA, 19 nt, Artificial Sequence
  Description of Artificial Sequence: Synthetic oligonucleotide
ggcccuugaucuuggaauu

SEQ ID NO: 2409168 - RNA, 19 nt, Artificial Sequence
  Description of Artificial Sequence: Synthetic oligonucleotide
aggguucuucaugcucuuu

SEQ ID NO: 2409169 - RNA, 19 nt, Artificial Sequence
  Description of Artificial Sequence: Synthetic oligonucleotide
ccccugaaauugccgccgc

SEQ ID NO: 2409170 - RNA, 19 nt, Artificial Sequence
  Description of Artificial Sequence: Synthetic oligonucleotide
cgccccugaaauugccgcc

SEQ ID NO: 2409171 - RNA, 19 nt, Artificial Sequence
  Description of Artificial Sequence: Synthetic oligonucleotide
ccccacuuguuucuaccca

SEQ ID NO: 2409172 - RNA, 19 nt, Artificial Sequence
  Description of Artificial Sequence: Synthetic oligonucleotide
gcaccuuauucuccucugu

SEQ ID NO: 2409173 - RNA, 19 nt, Artificial Sequence
  Description of Artificial Sequence: Synthetic oligonucleotide
ccggaggcccuugaucuug

SEQ ID NO: 2409174 - RNA, 19 nt, Artificial Sequence
  Description of Artificial Sequence: Synthetic oligonucleotide
acacguuccggaggcccuu

SEQ ID NO: 2409175 - RNA, 19 nt, Artificial Sequence
  Description of Artificial Sequence: Synthetic oligonucleotide
gcucuuucugagcaacauu

SEQ ID NO: 2409176 - RNA, 19 nt, Artificial Sequence
  Description of Artificial Sequence: Synthetic oligonucleotide
gcugacgauucagcuccac

SEQ ID NO: 2409177 - RNA, 19 nt, Artificial Sequence
  Description of Artificial Sequence: Synthetic oligonucleotide
ggaggcccuugaucuugga

SEQ ID NO: 2409178 - RNA, 19 nt, Artificial Sequence
  Description of Artificial Sequence: Synthetic oligonucleotide
ccgaucuguucuuuguuuu

SEQ ID NO: 2409179 - RNA, 19 nt, Artificial Sequence
  Description of Artificial Sequence: Synthetic oligonucleotide
ccgccgccccugaaauugc

SEQ ID NO: 2409180 - RNA, 19 nt, Artificial Sequence
  Description of Artificial Sequence: Synthetic oligonucleotide
ugccgccgccgccgccgcc

SEQ ID NO: 2409181 - RNA, 19 nt, Artificial Sequence
  Description of Artificial Sequence: Synthetic oligonucleotide
gcguugaaguaaggcaccu

SEQ ID NO: 2409182 - RNA, 19 nt, Artificial Sequence
  Description of Artificial Sequence: Synthetic oligonucleotide
cccgaucuguucuuuguuu

SEQ ID NO: 2409183 - RNA, 19 nt, Artificial Sequence
  Description of Artificial Sequence: Synthetic oligonucleotide
cgccgccccugaaauugcc

SEQ ID NO: 2409184 - RNA, 19 nt, Artificial Sequence
  Description of Artificial Sequence: Synthetic oligonucleotide
ccacuuguuucuacccaau

SEQ ID NO: 2409185 - RNA, 19 nt, Artificial Sequence
  Description of Artificial Sequence: Synthetic oligonucleotide
ccacaucuaauguccucuu

SEQ ID NO: 2409186 - RNA, 19 nt, Artificial Sequence
  Description of Artificial Sequence: Synthetic oligonucleotide
ccucugggagguccuuucu

SEQ ID NO: 2409187 - RNA, 19 nt, Artificial Sequence
  Description of Artificial Sequence: Synthetic oligonucleotide
cgaccuccccugccaccgc

SEQ ID NO: 2409188 - RNA, 19 nt, Artificial Sequence
  Description of Artificial Sequence: Synthetic oligonucleotide
cucggccgccgccccugaa

SEQ ID NO: 2409189 - RNA, 19 nt, Artificial Sequence
  Description of Artificial Sequence: Synthetic oligonucleotide
ccccacccuccaccucuuc

SEQ ID NO: 2409190 - RNA, 19 nt, Artificial Sequence
  Description of Artificial Sequence: Synthetic oligonucleotide
cuccucggccgccgccccu

SEQ ID NO: 2409191 - RNA, 19 nt, Artificial Sequence
  Description of Artificial Sequence: Synthetic oligonucleotide
cagcagcauccuccagguu

SEQ ID NO: 2409192 - RNA, 19 nt, Artificial Sequence
  Description of Artificial Sequence: Synthetic oligonucleotide
caccgccaccaccgccucu

SEQ ID NO: 2409193 - RNA, 19 nt, Artificial Sequence
  Description of Artificial Sequence: Synthetic oligonucleotide
gccgccgccgccgccgccu

SEQ ID NO: 2409194 - RNA, 19 nt, Artificial Sequence
  Description of Artificial Sequence: Synthetic oligonucleotide
cguuccggaggcccuugau

SEQ ID NO: 2409195 - RNA, 19 nt, Artificial Sequence
  Description of Artificial Sequence: Synthetic oligonucleotide
ggccgccgccccugaaauu

SEQ ID NO: 2409196 - RNA, 19 nt, Artificial Sequence
  Description of Artificial Sequence: Synthetic oligonucleotide
cgggaggacgaggcagaaa

SEQ ID NO: 2409197 - RNA, 19 nt, Artificial Sequence
  Description of Artificial Sequence: Synthetic oligonucleotide
ccucggccgccgccccuga

SEQ ID NO: 2409198 - RNA, 19 nt, Artificial Sequence
  Description of Artificial Sequence: Synthetic oligonucleotide
cggccgccgccccugaaau

SEQ ID NO: 2409199 - RNA, 19 nt, Artificial Sequence
  Description of Artificial Sequence: Synthetic oligonucleotide
ccaccgccucugggagguc

SEQ ID NO: 2409200 - RNA, 19 nt, Artificial Sequence
  Description of Artificial Sequence: Synthetic oligonucleotide
ccgccgccgccgccgccuc

SEQ ID NO: 2409201 - RNA, 19 nt, Artificial Sequence
  Description of Artificial Sequence: Synthetic oligonucleotide
ccgccucugggagguccuu

SEQ ID NO: 2409202 - RNA, 19 nt, Artificial Sequence
  Description of Artificial Sequence: Synthetic oligonucleotide
aauaucagaacacacaaca

SEQ ID NO: 2409203 - RNA, 19 nt, Artificial Sequence
  Description of Artificial Sequence: Synthetic oligonucleotide
aacuaaauggacccaaggc

SEQ ID NO: 2409204 - RNA, 19 nt, Artificial Sequence
  Description of Artificial Sequence: Synthetic oligonucleotide
uauugaaucagaaaggaca

SEQ ID NO: 2409205 - RNA, 19 nt, Artificial Sequence
  Description of Artificial Sequence: Synthetic oligonucleotide
aaggguugcauuuuaaagg

SEQ ID NO: 2409206 - RNA, 19 nt, Artificial Sequence
  Description of Artificial Sequence: Synthetic oligonucleotide
ugggcauuuaacuaaaugg

SEQ ID NO: 2409207 - RNA, 19 nt, Artificial Sequence
  Description of Artificial Sequence: Synthetic oligonucleotide
aaagugcacacacacaugg

SEQ ID NO: 2409208 - RNA, 19 nt, Artificial Sequence
  Description of Artificial Sequence: Synthetic oligonucleotide
uuauguuaauauaaaacag

SEQ ID NO: 2409209 - RNA, 19 nt, Artificial Sequence
  Description of Artificial Sequence: Synthetic oligonucleotide
ucacuuaccacaaaggacc

SEQ ID NO: 2409210 - RNA, 19 nt, Artificial Sequence
  Description of Artificial Sequence: Synthetic oligonucleotide
uuaaaucaagccaagguug

SEQ ID NO: 2409211 - RNA, 19 nt, Artificial Sequence
  Description of Artificial Sequence: Synthetic oligonucleotide
aguacaguuccccaaauac

SEQ ID NO: 2409212 - RNA, 19 nt, Artificial Sequence
  Description of Artificial Sequence: Synthetic oligonucleotide
uauguuaauauaaaacaga

SEQ ID NO: 2409213 - RNA, 19 nt, Artificial Sequence
  Description of Artificial Sequence: Synthetic oligonucleotide
aguuauguuaauauaaaac

SEQ ID NO: 2409214 - RNA, 19 nt, Artificial Sequence
  Description of Artificial Sequence: Synthetic oligonucleotide
uuuuaaaucaagccaaggu

SEQ ID NO: 2409215 - RNA, 19 nt, Artificial Sequence
  Description of Artificial Sequence: Synthetic oligonucleotide
agagucacaguauugaauc

SEQ ID NO: 2409216 - RNA, 19 nt, Artificial Sequence
  Description of Artificial Sequence: Synthetic oligonucleotide
cauuuaacuaaauggaccc

SEQ ID NO: 2409217 - RNA, 19 nt, Artificial Sequence
  Description of Artificial Sequence: Synthetic oligonucleotide
aaacagacaaaauaucaga

SEQ ID NO: 2409218 - RNA, 19 nt, Artificial Sequence
  Description of Artificial Sequence: Synthetic oligonucleotide
aaucagaaaggacagacau

SEQ ID NO: 2409219 - RNA, 19 nt, Artificial Sequence
  Description of Artificial Sequence: Synthetic oligonucleotide
aaguccaacagcaaacugc

SEQ ID NO: 2409220 - RNA, 19 nt, Artificial Sequence
  Description of Artificial Sequence: Synthetic oligonucleotide
aaaacagacaaaauaucag

SEQ ID NO: 2409221 - RNA, 19 nt, Artificial Sequence
  Description of Artificial Sequence: Synthetic oligonucleotide
aacacacaaagaucagcgc

SEQ ID NO: 2409222 - RNA, 19 nt, Artificial Sequence
  Description of Artificial Sequence: Synthetic oligonucleotide
uuuucaaacaggaaaguua

SEQ ID NO: 2409223 - RNA, 19 nt, Artificial Sequence
  Description of Artificial Sequence: Synthetic oligonucleotide
gaaggguugcauuuuaaag

SEQ ID NO: 2409224 - RNA, 19 nt, Artificial Sequence
  Description of Artificial Sequence: Synthetic oligonucleotide
acuaaauggacccaaggca

SEQ ID NO: 2409225 - RNA, 19 nt, Artificial Sequence
  Description of Artificial Sequence: Synthetic oligonucleotide
acauuguaaguccaacagc

SEQ ID NO: 2409226 - RNA, 19 nt, Artificial Sequence
  Description of Artificial Sequence: Synthetic oligonucleotide
gucaagaaagcccacgugg

SEQ ID NO: 2409227 - RNA, 19 nt, Artificial Sequence
  Description of Artificial Sequence: Synthetic oligonucleotide
uuucaaacaggaaaguuau

SEQ ID NO: 2409228 - RNA, 19 nt, Artificial Sequence
  Description of Artificial Sequence: Synthetic oligonucleotide
uuccccaaauacuagacag

SEQ ID NO: 2409229 - RNA, 19 nt, Artificial Sequence
  Description of Artificial Sequence: Synthetic oligonucleotide
agaauggucaagaaagccc

SEQ ID NO: 2409230 - RNA, 19 nt, Artificial Sequence
  Description of Artificial Sequence: Synthetic oligonucleotide
uaacuaaauggacccaagg

SEQ ID NO: 2409231 - RNA, 19 nt, Artificial Sequence
  Description of Artificial Sequence: Synthetic oligonucleotide
uguaaguccaacagcaaac

SEQ ID NO: 2409232 - RNA, 19 nt, Artificial Sequence
  Description of Artificial Sequence: Synthetic oligonucleotide
ugucuuacccugcugauga

SEQ ID NO: 2409233 - RNA, 19 nt, Artificial Sequence
  Description of Artificial Sequence: Synthetic oligonucleotide
aaagggucuguacacaggu

SEQ ID NO: 2409234 - RNA, 19 nt, Artificial Sequence
  Description of Artificial Sequence: Synthetic oligonucleotide
uguugagugacuuugugua

SEQ ID NO: 2409235 - RNA, 19 nt, Artificial Sequence
  Description of Artificial Sequence: Synthetic oligonucleotide
aaauacuagacaggacugg

SEQ ID NO: 2409236 - RNA, 19 nt, Artificial Sequence
  Description of Artificial Sequence: Synthetic oligonucleotide
caguauugaaucagaaagg

SEQ ID NO: 2409237 - RNA, 19 nt, Artificial Sequence
  Description of Artificial Sequence: Synthetic oligonucleotide
ugacuuuguguacagguca

SEQ ID NO: 2409238 - RNA, 19 nt, Artificial Sequence
  Description of Artificial Sequence: Synthetic oligonucleotide
uggccauucggcaagagcu

SEQ ID NO: 2409239 - RNA, 19 nt, Artificial Sequence
  Description of Artificial Sequence: Synthetic oligonucleotide
uguuuguugagugacuuug

SEQ ID NO: 2409240 - RNA, 19 nt, Artificial Sequence
  Description of Artificial Sequence: Synthetic oligonucleotide
uuaacuaaauggacccaag

SEQ ID NO: 2409241 - RNA, 19 nt, Artificial Sequence
  Description of Artificial Sequence: Synthetic oligonucleotide
uguacaggucaccaggagc

SEQ ID NO: 2409242 - RNA, 19 nt, Artificial Sequence
  Description of Artificial Sequence: Synthetic oligonucleotide
uuugugggcauuuaacuaa

SEQ ID NO: 2409243 - RNA, 19 nt, Artificial Sequence
  Description of Artificial Sequence: Synthetic oligonucleotide
cagacaaaauaucagaaca

SEQ ID NO: 2409244 - RNA, 19 nt, Artificial Sequence
  Description of Artificial Sequence: Synthetic oligonucleotide
uacuagacaggacuggaga

SEQ ID NO: 2409245 - RNA, 19 nt, Artificial Sequence
  Description of Artificial Sequence: Synthetic oligonucleotide
ucugcuaguuucuugucca

SEQ ID NO: 2409246 - RNA, 19 nt, Artificial Sequence
  Description of Artificial Sequence: Synthetic oligonucleotide
uuuguugagugacuuugug

SEQ ID NO: 2409247 - RNA, 19 nt, Artificial Sequence
  Description of Artificial Sequence: Synthetic oligonucleotide
uuuaguacaguuccccaaa

SEQ ID NO: 2409248 - RNA, 19 nt, Artificial Sequence
  Description of Artificial Sequence: Synthetic oligonucleotide
agcaaauguuuguugagug

SEQ ID NO: 2409249 - RNA, 19 nt, Artificial Sequence
  Description of Artificial Sequence: Synthetic oligonucleotide
uacaguuccccaaauacua

SEQ ID NO: 2409250 - RNA, 19 nt, Artificial Sequence
  Description of Artificial Sequence: Synthetic oligonucleotide
aggucuaggacuucagcuc

SEQ ID NO: 2409251 - RNA, 19 nt, Artificial Sequence
  Description of Artificial Sequence: Synthetic oligonucleotide
aacccuuccccgcucacuc

SEQ ID NO: 2409252 - RNA, 19 nt, Artificial Sequence
  Description of Artificial Sequence: Synthetic oligonucleotide
cucacuuaccacaaaggac

SEQ ID NO: 2409253 - RNA, 19 nt, Artificial Sequence
  Description of Artificial Sequence: Synthetic oligonucleotide
ucagcaaauguuuguugag

SEQ ID NO: 2409254 - RNA, 19 nt, Artificial Sequence
  Description of Artificial Sequence: Synthetic oligonucleotide
uguuaauauaaaacagaua

SEQ ID NO: 2409255 - RNA, 19 nt, Artificial Sequence
  Description of Artificial Sequence: Synthetic oligonucleotide
aguucauauccugagagca

SEQ ID NO: 2409256 - RNA, 19 nt, Artificial Sequence
  Description of Artificial Sequence: Synthetic oligonucleotide
aauacuagacaggacugga

SEQ ID NO: 2409257 - RNA, 19 nt, Artificial Sequence
  Description of Artificial Sequence: Synthetic oligonucleotide
aucagcgcaaacccuuccc

SEQ ID NO: 2409258 - RNA, 19 nt, Artificial Sequence
  Description of Artificial Sequence: Synthetic oligonucleotide
uccccaaauacuagacagg

SEQ ID NO: 2409259 - RNA, 19 nt, Artificial Sequence
  Description of Artificial Sequence: Synthetic oligonucleotide
uggucauuaccugaugcgg

SEQ ID NO: 2409260 - RNA, 19 nt, Artificial Sequence
  Description of Artificial Sequence: Synthetic oligonucleotide
acacaacacacaaagauca

SEQ ID NO: 2409261 - RNA, 19 nt, Artificial Sequence
  Description of Artificial Sequence: Synthetic oligonucleotide
uuuaacuaaauggacccaa

SEQ ID NO: 2409262 - RNA, 19 nt, Artificial Sequence
  Description of Artificial Sequence: Synthetic oligonucleotide
ucggcaagagcucacuuac

SEQ ID NO: 2409263 - RNA, 19 nt, Artificial Sequence
  Description of Artificial Sequence: Synthetic oligonucleotide
caaauguuuguugagugac

SEQ ID NO: 2409264 - RNA, 19 nt, Artificial Sequence
  Description of Artificial Sequence: Synthetic oligonucleotide
uauccugagagcacucagc

SEQ ID NO: 2409265 - RNA, 19 nt, Artificial Sequence
  Description of Artificial Sequence: Synthetic oligonucleotide
uaaugugggagugggaagc

SEQ ID NO: 2409266 - RNA, 19 nt, Artificial Sequence
  Description of Artificial Sequence: Synthetic oligonucleotide
agaaaggacagacaugguu

SEQ ID NO: 2409267 - RNA, 19 nt, Artificial Sequence
  Description of Artificial Sequence: Synthetic oligonucleotide
ucuagggcuuuuaguacag

SEQ ID NO: 2409268 - RNA, 19 nt, Artificial Sequence
  Description of Artificial Sequence: Synthetic oligonucleotide
gaugacaccacucuggcau

SEQ ID NO: 2409269 - RNA, 19 nt, Artificial Sequence
  Description of Artificial Sequence: Synthetic oligonucleotide
agcucuagggcuuuuagua

SEQ ID NO: 2409270 - RNA, 19 nt, Artificial Sequence
  Description of Artificial Sequence: Synthetic oligonucleotide
agcgcaaacccuuccccgc

SEQ ID NO: 2409271 - RNA, 19 nt, Artificial Sequence
  Description of Artificial Sequence: Synthetic oligonucleotide
aauguuuguugagugacuu

SEQ ID NO: 2409272 - RNA, 19 nt, Artificial Sequence
  Description of Artificial Sequence: Synthetic oligonucleotide
aagccaagguuguauuugu

SEQ ID NO: 2409273 - RNA, 19 nt, Artificial Sequence
  Description of Artificial Sequence: Synthetic oligonucleotide
cuuacccugcugaugacac

SEQ ID NO: 2409274 - RNA, 19 nt, Artificial Sequence
  Description of Artificial Sequence: Synthetic oligonucleotide
ggaugaacauuguaagucc

SEQ ID NO: 2409275 - RNA, 19 nt, Artificial Sequence
  Description of Artificial Sequence: Synthetic oligonucleotide
cauagcaguucauauccug

SEQ ID NO: 2409276 - RNA, 19 nt, Artificial Sequence
  Description of Artificial Sequence: Synthetic oligonucleotide
auauccugagagcacucag

SEQ ID NO: 2409277 - RNA, 19 nt, Artificial Sequence
  Description of Artificial Sequence: Synthetic oligonucleotide
ggagugggaagcuuugugg

SEQ ID NO: 2409278 - RNA, 19 nt, Artificial Sequence
  Description of Artificial Sequence: Synthetic oligonucleotide
ugaaggguugcauuuuaaa

SEQ ID NO: 2409279 - RNA, 19 nt, Artificial Sequence
  Description of Artificial Sequence: Synthetic oligonucleotide
cuaaauggacccaaggcaa

SEQ ID NO: 2409280 - RNA, 19 nt, Artificial Sequence
  Description of Artificial Sequence: Synthetic oligonucleotide
ugagugacuuuguguacag

SEQ ID NO: 2409281 - RNA, 19 nt, Artificial Sequence
  Description of Artificial Sequence: Synthetic oligonucleotide
aaucaagccaagguuguau

SEQ ID NO: 2409282 - RNA, 19 nt, Artificial Sequence
  Description of Artificial Sequence: Synthetic oligonucleotide
ucagcgcaaacccuucccc

SEQ ID NO: 2409283 - RNA, 19 nt, Artificial Sequence
  Description of Artificial Sequence: Synthetic oligonucleotide
guucaaagggucuguacac

SEQ ID NO: 2409284 - RNA, 19 nt, Artificial Sequence
  Description of Artificial Sequence: Synthetic oligonucleotide
ugaacauuguaaguccaac

SEQ ID NO: 2409285 - RNA, 19 nt, Artificial Sequence
  Description of Artificial Sequence: Synthetic oligonucleotide
acacacauggucauuaccu

SEQ ID NO: 2409286 - RNA, 19 nt, Artificial Sequence
  Description of Artificial Sequence: Synthetic oligonucleotide
uucauauccugagagcacu

SEQ ID NO: 2409287 - RNA, 19 nt, Artificial Sequence
  Description of Artificial Sequence: Synthetic oligonucleotide
acuccccaagcucuagggc

SEQ ID NO: 2409288 - RNA, 19 nt, Artificial Sequence
  Description of Artificial Sequence: Synthetic oligonucleotide
ucacaguauugaaucagaa

SEQ ID NO: 2409289 - RNA, 19 nt, Artificial Sequence
  Description of Artificial Sequence: Synthetic oligonucleotide
aagcccacguggucugccc

SEQ ID NO: 2409290 - RNA, 19 nt, Artificial Sequence
  Description of Artificial Sequence: Synthetic oligonucleotide
uaaauggacccaaggcaac

SEQ ID NO: 2409291 - RNA, 19 nt, Artificial Sequence
  Description of Artificial Sequence: Synthetic oligonucleotide
aagcucuagggcuuuuagu

SEQ ID NO: 2409292 - RNA, 19 nt, Artificial Sequence
  Description of Artificial Sequence: Synthetic oligonucleotide
agcuuugugggcauuuaac

SEQ ID NO: 2409293 - RNA, 19 nt, Artificial Sequence
  Description of Artificial Sequence: Synthetic oligonucleotide
aggaaaggaaaggaaagga

SEQ ID NO: 2409294 - RNA, 19 nt, Artificial Sequence
  Description of Artificial Sequence: Synthetic oligonucleotide
aauggacccaaggcaacag

SEQ ID NO: 2409295 - RNA, 19 nt, Artificial Sequence
  Description of Artificial Sequence: Synthetic oligonucleotide
gcauuuaacuaaauggacc

SEQ ID NO: 2409296 - RNA, 19 nt, Artificial Sequence
  Description of Artificial Sequence: Synthetic oligonucleotide
uuugaaggguugcauuuua

SEQ ID NO: 2409297 - RNA, 19 nt, Artificial Sequence
  Description of Artificial Sequence: Synthetic oligonucleotide
caggucaccaggagcaugc

SEQ ID NO: 2409298 - RNA, 19 nt, Artificial Sequence
  Description of Artificial Sequence: Synthetic oligonucleotide
caaagggucuguacacagg

SEQ ID NO: 2409299 - RNA, 19 nt, Artificial Sequence
  Description of Artificial Sequence: Synthetic oligonucleotide
agggcuuuuaguacaguuc

SEQ ID NO: 2409300 - RNA, 19 nt, Artificial Sequence
  Description of Artificial Sequence: Synthetic oligonucleotide
agcaugccuaguccacucc

SEQ ID NO: 2409301 - RNA, 19 nt, Artificial Sequence
  Description of Artificial Sequence: Synthetic oligonucleotide
uccucauagcaguucauau

SEQ ID NO: 2409302 - RNA, 19 nt, Artificial Sequence
  Description of Artificial Sequence: Synthetic oligonucleotide
accugaugcgguccuggcc

SEQ ID NO: 2409303 - RNA, 19 nt, Artificial Sequence
  Description of Artificial Sequence: Synthetic oligonucleotide
acucagcaaauguuuguug

SEQ ID NO: 2409304 - RNA, 19 nt, Artificial Sequence
  Description of Artificial Sequence: Synthetic oligonucleotide
agacaugguucaaaggguc

SEQ ID NO: 2409305 - RNA, 19 nt, Artificial Sequence
  Description of Artificial Sequence: Synthetic oligonucleotide
cucugcuaguuucuugucc

SEQ ID NO: 2409306 - RNA, 19 nt, Artificial Sequence
  Description of Artificial Sequence: Synthetic oligonucleotide
aaaagugcacacacacaug

SEQ ID NO: 2409307 - RNA, 19 nt, Artificial Sequence
  Description of Artificial Sequence: Synthetic oligonucleotide
caguucauauccugagagc

SEQ ID NO: 2409308 - RNA, 19 nt, Artificial Sequence
  Description of Artificial Sequence: Synthetic oligonucleotide
uuaccugaugcgguccugg

SEQ ID NO: 2409309 - RNA, 19 nt, Artificial Sequence
  Description of Artificial Sequence: Synthetic oligonucleotide
uccugguaguggcuguggg

SEQ ID NO: 2409310 - RNA, 19 nt, Artificial Sequence
  Description of Artificial Sequence: Synthetic oligonucleotide
ucugcccugucuuacccug

SEQ ID NO: 2409311 - RNA, 19 nt, Artificial Sequence
  Description of Artificial Sequence: Synthetic oligonucleotide
auuuggacccuaccaccuc

SEQ ID NO: 2409312 - RNA, 19 nt, Artificial Sequence
  Description of Artificial Sequence: Synthetic oligonucleotide
ucacuccccaagcucuagg

SEQ ID NO: 2409313 - RNA, 19 nt, Artificial Sequence
  Description of Artificial Sequence: Synthetic oligonucleotide
gguucaaagggucuguaca

SEQ ID NO: 2409314 - RNA, 19 nt, Artificial Sequence
  Description of Artificial Sequence: Synthetic oligonucleotide
cuaggucuaggacuucagc

SEQ ID NO: 2409315 - RNA, 19 nt, Artificial Sequence
  Description of Artificial Sequence: Synthetic oligonucleotide
gguagugggaguagggugg

SEQ ID NO: 2409316 - RNA, 19 nt, Artificial Sequence
  Description of Artificial Sequence: Synthetic oligonucleotide
aaauggacccaaggcaaca

SEQ ID NO: 2409317 - RNA, 19 nt, Artificial Sequence
  Description of Artificial Sequence: Synthetic oligonucleotide
acuuuguguacaggucacc

SEQ ID NO: 2409318 - RNA, 19 nt, Artificial Sequence
  Description of Artificial Sequence: Synthetic oligonucleotide
aaagaucagcgcaaacccu

SEQ ID NO: 2409319 - RNA, 19 nt, Artificial Sequence
  Description of Artificial Sequence: Synthetic oligonucleotide
agcucacuuaccacaaagg

SEQ ID NO: 2409320 - RNA, 19 nt, Artificial Sequence
  Description of Artificial Sequence: Synthetic oligonucleotide
acacauggucauuaccuga

SEQ ID NO: 2409321 - RNA, 19 nt, Artificial Sequence
  Description of Artificial Sequence: Synthetic oligonucleotide
uacccugcugaugacacca

SEQ ID NO: 2409322 - RNA, 19 nt, Artificial Sequence
  Description of Artificial Sequence: Synthetic oligonucleotide
cacacauggucauuaccug

SEQ ID NO: 2409323 - RNA, 19 nt, Artificial Sequence
  Description of Artificial Sequence: Synthetic oligonucleotide
cucagggacucccugccgg

SEQ ID NO: 2409324 - RNA, 19 nt, Artificial Sequence
  Description of Artificial Sequence: Synthetic oligonucleotide
guacaggucaccaggagca

SEQ ID NO: 2409325 - RNA, 19 nt, Artificial Sequence
  Description of Artificial Sequence: Synthetic oligonucleotide
ggacagacaugguucaaag

SEQ ID NO: 2409326 - RNA, 19 nt, Artificial Sequence
  Description of Artificial Sequence: Synthetic oligonucleotide
caagcucuagggcuuuuag

SEQ ID NO: 2409327 - RNA, 19 nt, Artificial Sequence
  Description of Artificial Sequence: Synthetic oligonucleotide
cacacacauggucauuacc

SEQ ID NO: 2409328 - RNA, 19 nt, Artificial Sequence
  Description of Artificial Sequence: Synthetic oligonucleotide
gguacacccucucuguucc

SEQ ID NO: 2409329 - RNA, 19 nt, Artificial Sequence
  Description of Artificial Sequence: Synthetic oligonucleotide
gaugaacauuguaagucca

SEQ ID NO: 2409330 - RNA, 19 nt, Artificial Sequence
  Description of Artificial Sequence: Synthetic oligonucleotide
ugccuaguccacuccuagg

SEQ ID NO: 2409331 - RNA, 19 nt, Artificial Sequence
  Description of Artificial Sequence: Synthetic oligonucleotide
aagcuuugugggcauuuaa

SEQ ID NO: 2409332 - RNA, 19 nt, Artificial Sequence
  Description of Artificial Sequence: Synthetic oligonucleotide
uuaguacaguuccccaaau

SEQ ID NO: 2409333 - RNA, 19 nt, Artificial Sequence
  Description of Artificial Sequence: Synthetic oligonucleotide
ucauagcaguucauauccu

SEQ ID NO: 2409334 - RNA, 19 nt, Artificial Sequence
  Description of Artificial Sequence: Synthetic oligonucleotide
ugcgguccuggccauucgg

SEQ ID NO: 2409335 - RNA, 19 nt, Artificial Sequence
  Description of Artificial Sequence: Synthetic oligonucleotide
augccuaguccacuccuag

SEQ ID NO: 2409336 - RNA, 19 nt, Artificial Sequence
  Description of Artificial Sequence: Synthetic oligonucleotide
ugugggagugggaagcuuu

SEQ ID NO: 2409337 - RNA, 19 nt, Artificial Sequence
  Description of Artificial Sequence: Synthetic oligonucleotide
cuuuuaguacaguucccca

SEQ ID NO: 2409338 - RNA, 19 nt, Artificial Sequence
  Description of Artificial Sequence: Synthetic oligonucleotide
acccaaggcaacagaaugg

SEQ ID NO: 2409339 - RNA, 19 nt, Artificial Sequence
  Description of Artificial Sequence: Synthetic oligonucleotide
cuuaccacaaaggacccca

SEQ ID NO: 2409340 - RNA, 19 nt, Artificial Sequence
  Description of Artificial Sequence: Synthetic oligonucleotide
aagaucagcgcaaacccuu

SEQ ID NO: 2409341 - RNA, 19 nt, Artificial Sequence
  Description of Artificial Sequence: Synthetic oligonucleotide
uugugggcauuuaacuaaa

SEQ ID NO: 2409342 - RNA, 19 nt, Artificial Sequence
  Description of Artificial Sequence: Synthetic oligonucleotide
ugguucaaagggucuguac

SEQ ID NO: 2409343 - RNA, 19 nt, Artificial Sequence
  Description of Artificial Sequence: Synthetic oligonucleotide
uagacaggacuggagaguc

SEQ ID NO: 2409344 - RNA, 19 nt, Artificial Sequence
  Description of Artificial Sequence: Synthetic oligonucleotide
guauugaaucagaaaggac

SEQ ID NO: 2409345 - RNA, 19 nt, Artificial Sequence
  Description of Artificial Sequence: Synthetic oligonucleotide
uccacuuugaaggguugca

SEQ ID NO: 2409346 - RNA, 19 nt, Artificial Sequence
  Description of Artificial Sequence: Synthetic oligonucleotide
uagggcuuuuaguacaguu

SEQ ID NO: 2409347 - RNA, 19 nt, Artificial Sequence
  Description of Artificial Sequence: Synthetic oligonucleotide
aucucuaaugugggagugg

SEQ ID NO: 2409348 - RNA, 19 nt, Artificial Sequence
  Description of Artificial Sequence: Synthetic oligonucleotide
aaggaccccacaucucuaa

SEQ ID NO: 2409349 - RNA, 19 nt, Artificial Sequence
  Description of Artificial Sequence: Synthetic oligonucleotide
guugagugacuuuguguac

SEQ ID NO: 2409350 - RNA, 19 nt, Artificial Sequence
  Description of Artificial Sequence: Synthetic oligonucleotide
uucggcaagagcucacuua

SEQ ID NO: 2409351 - RNA, 19 nt, Artificial Sequence
  Description of Artificial Sequence: Synthetic oligonucleotide
acuuaccacaaaggacccc

SEQ ID NO: 2409352 - RNA, 19 nt, Artificial Sequence
  Description of Artificial Sequence: Synthetic oligonucleotide
ucauuaccugaugcggucc

SEQ ID NO: 2409353 - RNA, 19 nt, Artificial Sequence
  Description of Artificial Sequence: Synthetic oligonucleotide
auuuaacuaaauggaccca

SEQ ID NO: 2409354 - RNA, 19 nt, Artificial Sequence
  Description of Artificial Sequence: Synthetic oligonucleotide
agccccugaacaaaccaac

SEQ ID NO: 2409355 - RNA, 19 nt, Artificial Sequence
  Description of Artificial Sequence: Synthetic oligonucleotide
ggucuaggacuucagcucc

SEQ ID NO: 2409356 - RNA, 19 nt, Artificial Sequence
  Description of Artificial Sequence: Synthetic oligonucleotide
ucuuacccugcugaugaca

SEQ ID NO: 2409357 - RNA, 19 nt, Artificial Sequence
  Description of Artificial Sequence: Synthetic oligonucleotide
ggcauuuggacccuaccac

SEQ ID NO: 2409358 - RNA, 19 nt, Artificial Sequence
  Description of Artificial Sequence: Synthetic oligonucleotide
uguccacuuugaaggguug

SEQ ID NO: 2409359 - RNA, 19 nt, Artificial Sequence
  Description of Artificial Sequence: Synthetic oligonucleotide
uaguacaguuccccaaaua

SEQ ID NO: 2409360 - RNA, 19 nt, Artificial Sequence
  Description of Artificial Sequence: Synthetic oligonucleotide
gaucagcgcaaacccuucc

SEQ ID NO: 2409361 - RNA, 19 nt, Artificial Sequence
  Description of Artificial Sequence: Synthetic oligonucleotide
cuuugugggcauuuaacua

SEQ ID NO: 2409362 - RNA, 19 nt, Artificial Sequence
  Description of Artificial Sequence: Synthetic oligonucleotide
acaugguucaaagggucug

SEQ ID NO: 2409363 - RNA, 19 nt, Artificial Sequence
  Description of Artificial Sequence: Synthetic oligonucleotide
gcuuuuaguacaguucccc

SEQ ID NO: 2409364 - RNA, 19 nt, Artificial Sequence
  Description of Artificial Sequence: Synthetic oligonucleotide
cacaguauugaaucagaaa

SEQ ID NO: 2409365 - RNA, 19 nt, Artificial Sequence
  Description of Artificial Sequence: Synthetic oligonucleotide
cagcgcaaacccuuccccg

SEQ ID NO: 2409366 - RNA, 19 nt, Artificial Sequence
  Description of Artificial Sequence: Synthetic oligonucleotide
cuggccauucggcaagagc

SEQ ID NO: 2409367 - RNA, 19 nt, Artificial Sequence
  Description of Artificial Sequence: Synthetic oligonucleotide
cucuagggcuuuuaguaca

SEQ ID NO: 2409368 - RNA, 19 nt, Artificial Sequence
  Description of Artificial Sequence: Synthetic oligonucleotide
gagucacaguauugaauca

SEQ ID NO: 2409369 - RNA, 19 nt, Artificial Sequence
  Description of Artificial Sequence: Synthetic oligonucleotide
aaugugggagugggaagcu

SEQ ID NO: 2409370 - RNA, 19 nt, Artificial Sequence
  Description of Artificial Sequence: Synthetic oligonucleotide
guggggaugaacauuguaa

SEQ ID NO: 2409371 - RNA, 19 nt, Artificial Sequence
  Description of Artificial Sequence: Synthetic oligonucleotide
ucauauccugagagcacuc

SEQ ID NO: 2409372 - RNA, 19 nt, Artificial Sequence
  Description of Artificial Sequence: Synthetic oligonucleotide
gcauuuggacccuaccacc

SEQ ID NO: 2409373 - RNA, 19 nt, Artificial Sequence
  Description of Artificial Sequence: Synthetic oligonucleotide
ggcauuuaacuaaauggac

SEQ ID NO: 2409374 - RNA, 19 nt, Artificial Sequence
  Description of Artificial Sequence: Synthetic oligonucleotide
gggcauuuaacuaaaugga

SEQ ID NO: 2409375 - RNA, 19 nt, Artificial Sequence
  Description of Artificial Sequence: Synthetic oligonucleotide
gagagcacucagcaaaugu

SEQ ID NO: 2409376 - RNA, 19 nt, Artificial Sequence
  Description of Artificial Sequence: Synthetic oligonucleotide
gaccccacaucucuaaugu

SEQ ID NO: 2409377 - RNA, 19 nt, Artificial Sequence
  Description of Artificial Sequence: Synthetic oligonucleotide
ugguaguggcuguggguag

SEQ ID NO: 2409378 - RNA, 19 nt, Artificial Sequence
  Description of Artificial Sequence: Synthetic oligonucleotide
gacccuaccaccucugcua

SEQ ID NO: 2409379 - RNA, 19 nt, Artificial Sequence
  Description of Artificial Sequence: Synthetic oligonucleotide
uccugauuuccugguagug

SEQ ID NO: 2409380 - RNA, 19 nt, Artificial Sequence
  Description of Artificial Sequence: Synthetic oligonucleotide
aucaagccaagguuguauu

SEQ ID NO: 2409381 - RNA, 19 nt, Artificial Sequence
  Description of Artificial Sequence: Synthetic oligonucleotide
ggcaagagcucacuuacca

SEQ ID NO: 2409382 - RNA, 19 nt, Artificial Sequence
  Description of Artificial Sequence: Synthetic oligonucleotide
gcucacuuaccacaaagga

SEQ ID NO: 2409383 - RNA, 19 nt, Artificial Sequence
  Description of Artificial Sequence: Synthetic oligonucleotide
gcuccugauuuccugguag

SEQ ID NO: 2409384 - RNA, 19 nt, Artificial Sequence
  Description of Artificial Sequence: Synthetic oligonucleotide
ccaaauacuagacaggacu

SEQ ID NO: 2409385 - RNA, 19 nt, Artificial Sequence
  Description of Artificial Sequence: Synthetic oligonucleotide
acccuaccaccucugcuag

SEQ ID NO: 2409386 - RNA, 19 nt, Artificial Sequence
  Description of Artificial Sequence: Synthetic oligonucleotide
cugaacaaaccaacacaca

SEQ ID NO: 2409387 - RNA, 19 nt, Artificial Sequence
  Description of Artificial Sequence: Synthetic oligonucleotide
gagggucucagggacuccc

SEQ ID NO: 2409388 - RNA, 19 nt, Artificial Sequence
  Description of Artificial Sequence: Synthetic oligonucleotide
ugcuaguuucuuguccacu

SEQ ID NO: 2409389 - RNA, 19 nt, Artificial Sequence
  Description of Artificial Sequence: Synthetic oligonucleotide
caucucuaaugugggagug

SEQ ID NO: 2409390 - RNA, 19 nt, Artificial Sequence
  Description of Artificial Sequence: Synthetic oligonucleotide
ccugauuuccugguagugg

SEQ ID NO: 2409391 - RNA, 19 nt, Artificial Sequence
  Description of Artificial Sequence: Synthetic oligonucleotide
cacaaagaucagcgcaaac

SEQ ID NO: 2409392 - RNA, 19 nt, Artificial Sequence
  Description of Artificial Sequence: Synthetic oligonucleotide
guucauauccugagagcac

SEQ ID NO: 2409393 - RNA, 19 nt, Artificial Sequence
  Description of Artificial Sequence: Synthetic oligonucleotide
ugagagcacucagcaaaug

SEQ ID NO: 2409394 - RNA, 19 nt, Artificial Sequence
  Description of Artificial Sequence: Synthetic oligonucleotide
uggacccuaccaccucugc

SEQ ID NO: 2409395 - RNA, 19 nt, Artificial Sequence
  Description of Artificial Sequence: Synthetic oligonucleotide
uuuccugguaguggcugug

SEQ ID NO: 2409396 - RNA, 19 nt, Artificial Sequence
  Description of Artificial Sequence: Synthetic oligonucleotide
agagcacucagcaaauguu

SEQ ID NO: 2409397 - RNA, 19 nt, Artificial Sequence
  Description of Artificial Sequence: Synthetic oligonucleotide
cacuccuaggucuaggacu

SEQ ID NO: 2409398 - RNA, 19 nt, Artificial Sequence
  Description of Artificial Sequence: Synthetic oligonucleotide
aaacccuuccccgcucacu

SEQ ID NO: 2409399 - RNA, 19 nt, Artificial Sequence
  Description of Artificial Sequence: Synthetic oligonucleotide
agaucagcgcaaacccuuc

SEQ ID NO: 2409400 - RNA, 19 nt, Artificial Sequence
  Description of Artificial Sequence: Synthetic oligonucleotide
auggacccaaggcaacaga

SEQ ID NO: 2409401 - RNA, 19 nt, Artificial Sequence
  Description of Artificial Sequence: Synthetic oligonucleotide
acccuuccccgcucacucc

SEQ ID NO: 2409402 - RNA, 19 nt, Artificial Sequence
  Description of Artificial Sequence: Synthetic oligonucleotide
gagcaugccuaguccacuc

SEQ ID NO: 2409403 - RNA, 19 nt, Artificial Sequence
  Description of Artificial Sequence: Synthetic oligonucleotide
aaaucaagccaagguugua

SEQ ID NO: 2409404 - RNA, 19 nt, Artificial Sequence
  Description of Artificial Sequence: Synthetic oligonucleotide
ugcccugucuuacccugcu

SEQ ID NO: 2409405 - RNA, 19 nt, Artificial Sequence
  Description of Artificial Sequence: Synthetic oligonucleotide
caguuccccaaauacuaga

SEQ ID NO: 2409406 - RNA, 19 nt, Artificial Sequence
  Description of Artificial Sequence: Synthetic oligonucleotide
guucccuccucauagcagu

SEQ ID NO: 2409407 - RNA, 19 nt, Artificial Sequence
  Description of Artificial Sequence: Synthetic oligonucleotide
ugggaguaggguggggaug

SEQ ID NO: 2409408 - RNA, 19 nt, Artificial Sequence
  Description of Artificial Sequence: Synthetic oligonucleotide
ccugagagcacucagcaaa

SEQ ID NO: 2409409 - RNA, 19 nt, Artificial Sequence
  Description of Artificial Sequence: Synthetic oligonucleotide
ggaccccacaucucuaaug

SEQ ID NO: 2409410 - RNA, 19 nt, Artificial Sequence
  Description of Artificial Sequence: Synthetic oligonucleotide
auguuuguugagugacuuu

SEQ ID NO: 2409411 - RNA, 19 nt, Artificial Sequence
  Description of Artificial Sequence: Synthetic oligonucleotide
cuguggguagccccugaac

SEQ ID NO: 2409412 - RNA, 19 nt, Artificial Sequence
  Description of Artificial Sequence: Synthetic oligonucleotide
gugggaagcuuugugggca

SEQ ID NO: 2409413 - RNA, 19 nt, Artificial Sequence
  Description of Artificial Sequence: Synthetic oligonucleotide
gaugcgguccuggccauuc

SEQ ID NO: 2409414 - RNA, 19 nt, Artificial Sequence
  Description of Artificial Sequence: Synthetic oligonucleotide
gcuuugugggcauuuaacu

SEQ ID NO: 2409415 - RNA, 19 nt, Artificial Sequence
  Description of Artificial Sequence: Synthetic oligonucleotide
augaacauuguaaguccaa

SEQ ID NO: 2409416 - RNA, 19 nt, Artificial Sequence
  Description of Artificial Sequence: Synthetic oligonucleotide
uggguagccccugaacaaa

SEQ ID NO: 2409417 - RNA, 19 nt, Artificial Sequence
  Description of Artificial Sequence: Synthetic oligonucleotide
caggagcaugccuagucca

SEQ ID NO: 2409418 - RNA, 19 nt, Artificial Sequence
  Description of Artificial Sequence: Synthetic oligonucleotide
cugcuaguuucuuguccac

SEQ ID NO: 2409419 - RNA, 19 nt, Artificial Sequence
  Description of Artificial Sequence: Synthetic oligonucleotide
cacccucucuguucccucc

SEQ ID NO: 2409420 - RNA, 19 nt, Artificial Sequence
  Description of Artificial Sequence: Synthetic oligonucleotide
guaaguccaacagcaaacu

SEQ ID NO: 2409421 - RNA, 19 nt, Artificial Sequence
  Description of Artificial Sequence: Synthetic oligonucleotide
cagacaugguucaaagggu

SEQ ID NO: 2409422 - RNA, 19 nt, Artificial Sequence
  Description of Artificial Sequence: Synthetic oligonucleotide
gcucuagggcuuuuaguac

SEQ ID NO: 2409423 - RNA, 19 nt, Artificial Sequence
  Description of Artificial Sequence: Synthetic oligonucleotide
guacaguuccccaaauacu

SEQ ID NO: 2409424 - RNA, 19 nt, Artificial Sequence
  Description of Artificial Sequence: Synthetic oligonucleotide
cauuuggacccuaccaccu

SEQ ID NO: 2409425 - RNA, 19 nt, Artificial Sequence
  Description of Artificial Sequence: Synthetic oligonucleotide
guccacuuugaaggguugc

SEQ ID NO: 2409426 - RNA, 19 nt, Artificial Sequence
  Description of Artificial Sequence: Synthetic oligonucleotide
auucggcaagagcucacuu

SEQ ID NO: 2409427 - RNA, 19 nt, Artificial Sequence
  Description of Artificial Sequence: Synthetic oligonucleotide
ggucugcccugucuuaccc

SEQ ID NO: 2409428 - RNA, 19 nt, Artificial Sequence
  Description of Artificial Sequence: Synthetic oligonucleotide
auuaccugaugcgguccug

SEQ ID NO: 2409429 - RNA, 19 nt, Artificial Sequence
  Description of Artificial Sequence: Synthetic oligonucleotide
aggucaccaggagcaugcc

SEQ ID NO: 2409430 - RNA, 19 nt, Artificial Sequence
  Description of Artificial Sequence: Synthetic oligonucleotide
guaguggcuguggguagcc

SEQ ID NO: 2409431 - RNA, 19 nt, Artificial Sequence
  Description of Artificial Sequence: Synthetic oligonucleotide
augcgguccuggccauucg

SEQ ID NO: 2409432 - RNA, 19 nt, Artificial Sequence
  Description of Artificial Sequence: Synthetic oligonucleotide
cuccccaagcucuagggcu

SEQ ID NO: 2409433 - RNA, 19 nt, Artificial Sequence
  Description of Artificial Sequence: Synthetic oligonucleotide
cauauccugagagcacuca

SEQ ID NO: 2409434 - RNA, 19 nt, Artificial Sequence
  Description of Artificial Sequence: Synthetic oligonucleotide
uggguacacccucucuguu

SEQ ID NO: 2409435 - RNA, 19 nt, Artificial Sequence
  Description of Artificial Sequence: Synthetic oligonucleotide
acguggucugcccugucuu

SEQ ID NO: 2409436 - RNA, 19 nt, Artificial Sequence
  Description of Artificial Sequence: Synthetic oligonucleotide
aaggacagacaugguucaa

SEQ ID NO: 2409437 - RNA, 19 nt, Artificial Sequence
  Description of Artificial Sequence: Synthetic oligonucleotide
acacaaagaucagcgcaaa

SEQ ID NO: 2409438 - RNA, 19 nt, Artificial Sequence
  Description of Artificial Sequence: Synthetic oligonucleotide
ccugaugcgguccuggcca

SEQ ID NO: 2409439 - RNA, 19 nt, Artificial Sequence
  Description of Artificial Sequence: Synthetic oligonucleotide
ccccugaacaaaccaacac

SEQ ID NO: 2409440 - RNA, 19 nt, Artificial Sequence
  Description of Artificial Sequence: Synthetic oligonucleotide
gacaugguucaaagggucu

SEQ ID NO: 2409441 - RNA, 19 nt, Artificial Sequence
  Description of Artificial Sequence: Synthetic oligonucleotide
ccuaggucuaggacuucag

SEQ ID NO: 2409442 - RNA, 19 nt, Artificial Sequence
  Description of Artificial Sequence: Synthetic oligonucleotide
gugggagugggaagcuuug

SEQ ID NO: 2409443 - RNA, 19 nt, Artificial Sequence
  Description of Artificial Sequence: Synthetic oligonucleotide
cacauggucauuaccugau

SEQ ID NO: 2409444 - RNA, 19 nt, Artificial Sequence
  Description of Artificial Sequence: Synthetic oligonucleotide
ggguacacccucucuguuc

SEQ ID NO: 2409445 - RNA, 19 nt, Artificial Sequence
  Description of Artificial Sequence: Synthetic oligonucleotide
cccaaauacuagacaggac

SEQ ID NO: 2409446 - RNA, 19 nt, Artificial Sequence
  Description of Artificial Sequence: Synthetic oligonucleotide
cugcccugucuuacccugc

SEQ ID NO: 2409447 - RNA, 19 nt, Artificial Sequence
  Description of Artificial Sequence: Synthetic oligonucleotide
aggaccccacaucucuaau

SEQ ID NO: 2409448 - RNA, 19 nt, Artificial Sequence
  Description of Artificial Sequence: Synthetic oligonucleotide
ggcuuuuaguacaguuccc

SEQ ID NO: 2409449 - RNA, 19 nt, Artificial Sequence
  Description of Artificial Sequence: Synthetic oligonucleotide
aggcaacagaauggucaag

SEQ ID NO: 2409450 - RNA, 19 nt, Artificial Sequence
  Description of Artificial Sequence: Synthetic oligonucleotide
cugcugaugacaccacucu

SEQ ID NO: 2409451 - RNA, 19 nt, Artificial Sequence
  Description of Artificial Sequence: Synthetic oligonucleotide
uucccuccucauagcaguu

SEQ ID NO: 2409452 - RNA, 19 nt, Artificial Sequence
  Description of Artificial Sequence: Synthetic oligonucleotide
caaacccuuccccgcucac

SEQ ID NO: 2409453 - RNA, 19 nt, Artificial Sequence
  Description of Artificial Sequence: Synthetic oligonucleotide
cucacuccccaagcucuag

SEQ ID NO: 2409454 - RNA, 19 nt, Artificial Sequence
  Description of Artificial Sequence: Synthetic oligonucleotide
gguaguggcuguggguagc

SEQ ID NO: 2409455 - RNA, 19 nt, Artificial Sequence
  Description of Artificial Sequence: Synthetic oligonucleotide
agcccacguggucugcccu

SEQ ID NO: 2409456 - RNA, 19 nt, Artificial Sequence
  Description of Artificial Sequence: Synthetic oligonucleotide
agcuccugauuuccuggua

SEQ ID NO: 2409457 - RNA, 19 nt, Artificial Sequence
  Description of Artificial Sequence: Synthetic oligonucleotide
gagcuggguacacccucuc

SEQ ID NO: 2409458 - RNA, 19 nt, Artificial Sequence
  Description of Artificial Sequence: Synthetic oligonucleotide
cuagacaggacuggagagu

SEQ ID NO: 2409459 - RNA, 19 nt, Artificial Sequence
  Description of Artificial Sequence: Synthetic oligonucleotide
uaguggcuguggguagccc

SEQ ID NO: 2409460 - RNA, 19 nt, Artificial Sequence
  Description of Artificial Sequence: Synthetic oligonucleotide
gggaguaggguggggauga

SEQ ID NO: 2409461 - RNA, 19 nt, Artificial Sequence
  Description of Artificial Sequence: Synthetic oligonucleotide
gucuuacccugcugaugac

SEQ ID NO: 2409462 - RNA, 19 nt, Artificial Sequence
  Description of Artificial Sequence: Synthetic oligonucleotide
guacacccucucuguuccc

SEQ ID NO: 2409463 - RNA, 19 nt, Artificial Sequence
  Description of Artificial Sequence: Synthetic oligonucleotide
cuggguacacccucucugu

SEQ ID NO: 2409464 - RNA, 19 nt, Artificial Sequence
  Description of Artificial Sequence: Synthetic oligonucleotide
caugccuaguccacuccua

SEQ ID NO: 2409465 - RNA, 19 nt, Artificial Sequence
  Description of Artificial Sequence: Synthetic oligonucleotide
ccccaaauacuagacagga

SEQ ID NO: 2409466 - RNA, 19 nt, Artificial Sequence
  Description of Artificial Sequence: Synthetic oligonucleotide
uacaggucaccaggagcau

SEQ ID NO: 2409467 - RNA, 19 nt, Artificial Sequence
  Description of Artificial Sequence: Synthetic oligonucleotide
augguucaaagggucugua

SEQ ID NO: 2409468 - RNA, 19 nt, Artificial Sequence
  Description of Artificial Sequence: Synthetic oligonucleotide
cacuuugaaggguugcauu

SEQ ID NO: 2409469 - RNA, 19 nt, Artificial Sequence
  Description of Artificial Sequence: Synthetic oligonucleotide
gguggggaugaacauugua

SEQ ID NO: 2409470 - RNA, 19 nt, Artificial Sequence
  Description of Artificial Sequence: Synthetic oligonucleotide
acccugcugaugacaccac

SEQ ID NO: 2409471 - RNA, 19 nt, Artificial Sequence
  Description of Artificial Sequence: Synthetic oligonucleotide
ccuaguccacuccuagguc

SEQ ID NO: 2409472 - RNA, 19 nt, Artificial Sequence
  Description of Artificial Sequence: Synthetic oligonucleotide
cuccucauagcaguucaua

SEQ ID NO: 2409473 - RNA, 19 nt, Artificial Sequence
  Description of Artificial Sequence: Synthetic oligonucleotide
gggucucagggacucccug

SEQ ID NO: 2409474 - RNA, 19 nt, Artificial Sequence
  Description of Artificial Sequence: Synthetic oligonucleotide
cauuaccugaugcgguccu

SEQ ID NO: 2409475 - RNA, 19 nt, Artificial Sequence
  Description of Artificial Sequence: Synthetic oligonucleotide
cccugucuuacccugcuga

SEQ ID NO: 2409476 - RNA, 19 nt, Artificial Sequence
  Description of Artificial Sequence: Synthetic oligonucleotide
cuccugauuuccugguagu

SEQ ID NO: 2409477 - RNA, 19 nt, Artificial Sequence
  Description of Artificial Sequence: Synthetic oligonucleotide
ccggcauuuggacccuacc

SEQ ID NO: 2409478 - RNA, 19 nt, Artificial Sequence
  Description of Artificial Sequence: Synthetic oligonucleotide
cugagagcacucagcaaau

SEQ ID NO: 2409479 - RNA, 19 nt, Artificial Sequence
  Description of Artificial Sequence: Synthetic oligonucleotide
ccacuccuaggucuaggac

SEQ ID NO: 2409480 - RNA, 19 nt, Artificial Sequence
  Description of Artificial Sequence: Synthetic oligonucleotide
ccaagguuguauuuguuuu

SEQ ID NO: 2409481 - RNA, 19 nt, Artificial Sequence
  Description of Artificial Sequence: Synthetic oligonucleotide
cucuggcaucagagcuggg

SEQ ID NO: 2409482 - RNA, 19 nt, Artificial Sequence
  Description of Artificial Sequence: Synthetic oligonucleotide
uuccccgcucacuccccaa

SEQ ID NO: 2409483 - RNA, 19 nt, Artificial Sequence
  Description of Artificial Sequence: Synthetic oligonucleotide
caugguucaaagggucugu

SEQ ID NO: 2409484 - RNA, 19 nt, Artificial Sequence
  Description of Artificial Sequence: Synthetic oligonucleotide
ggucauuaccugaugcggu

SEQ ID NO: 2409485 - RNA, 19 nt, Artificial Sequence
  Description of Artificial Sequence: Synthetic oligonucleotide
ccauucggcaagagcucac

SEQ ID NO: 2409486 - RNA, 19 nt, Artificial Sequence
  Description of Artificial Sequence: Synthetic oligonucleotide
ggguagccccugaacaaac

SEQ ID NO: 2409487 - RNA, 19 nt, Artificial Sequence
  Description of Artificial Sequence: Synthetic oligonucleotide
cuuugaaggguugcauuuu

SEQ ID NO: 2409488 - RNA, 19 nt, Artificial Sequence
  Description of Artificial Sequence: Synthetic oligonucleotide
ccucugcuaguuucuuguc

SEQ ID NO: 2409489 - RNA, 19 nt, Artificial Sequence
  Description of Artificial Sequence: Synthetic oligonucleotide
agccaagguuguauuuguu

SEQ ID NO: 2409490 - RNA, 19 nt, Artificial Sequence
  Description of Artificial Sequence: Synthetic oligonucleotide
cauucggcaagagcucacu

SEQ ID NO: 2409491 - RNA, 19 nt, Artificial Sequence
  Description of Artificial Sequence: Synthetic oligonucleotide
ggccauucggcaagagcuc

SEQ ID NO: 2409492 - RNA, 19 nt, Artificial Sequence
  Description of Artificial Sequence: Synthetic oligonucleotide
cggcauuuggacccuacca

SEQ ID NO: 2409493 - RNA, 19 nt, Artificial Sequence
  Description of Artificial Sequence: Synthetic oligonucleotide
gcaugccuaguccacuccu

SEQ ID NO: 2409494 - RNA, 19 nt, Artificial Sequence
  Description of Artificial Sequence: Synthetic oligonucleotide
gucugcccugucuuacccu

SEQ ID NO: 2409495 - RNA, 19 nt, Artificial Sequence
  Description of Artificial Sequence: Synthetic oligonucleotide
cacguggucugcccugucu

SEQ ID NO: 2409496 - RNA, 19 nt, Artificial Sequence
  Description of Artificial Sequence: Synthetic oligonucleotide
ggacccuaccaccucugcu

SEQ ID NO: 2409497 - RNA, 19 nt, Artificial Sequence
  Description of Artificial Sequence: Synthetic oligonucleotide
cagcuccugauuuccuggu

SEQ ID NO: 2409498 - RNA, 19 nt, Artificial Sequence
  Description of Artificial Sequence: Synthetic oligonucleotide
ccacaucucuaauguggga

SEQ ID NO: 2409499 - RNA, 19 nt, Artificial Sequence
  Description of Artificial Sequence: Synthetic oligonucleotide
ccccgcucacuccccaagc

SEQ ID NO: 2409500 - RNA, 19 nt, Artificial Sequence
  Description of Artificial Sequence: Synthetic oligonucleotide
ccuuccccgcucacucccc

SEQ ID NO: 2409501 - RNA, 19 nt, Artificial Sequence
  Description of Artificial Sequence: Synthetic oligonucleotide
ccucucuguucccuccuca

SEQ ID NO: 2409502 - RNA, 19 nt, Artificial Sequence
  Description of Artificial Sequence: Synthetic oligonucleotide
gcccugucuuacccugcug

SEQ ID NO: 2409503 - RNA, 19 nt, Artificial Sequence
  Description of Artificial Sequence: Synthetic oligonucleotide
ggagcaugccuaguccacu

SEQ ID NO: 2409504 - RNA, 19 nt, Artificial Sequence
  Description of Artificial Sequence: Synthetic oligonucleotide
caggagggucucagggacu

SEQ ID NO: 2409505 - RNA, 19 nt, Artificial Sequence
  Description of Artificial Sequence: Synthetic oligonucleotide
gggucuguacacagguagu

SEQ ID NO: 2409506 - RNA, 19 nt, Artificial Sequence
  Description of Artificial Sequence: Synthetic oligonucleotide
cuagggcuuuuaguacagu

SEQ ID NO: 2409507 - RNA, 19 nt, Artificial Sequence
  Description of Artificial Sequence: Synthetic oligonucleotide
gccggcauuuggacccuac

SEQ ID NO: 2409508 - RNA, 19 nt, Artificial Sequence
  Description of Artificial Sequence: Synthetic oligonucleotide
cugaugcgguccuggccau

SEQ ID NO: 2409509 - RNA, 19 nt, Artificial Sequence
  Description of Artificial Sequence: Synthetic oligonucleotide
cgcaaacccuuccccgcuc

SEQ ID NO: 2409510 - RNA, 19 nt, Artificial Sequence
  Description of Artificial Sequence: Synthetic oligonucleotide
ccaagcucuagggcuuuua

SEQ ID NO: 2409511 - RNA, 19 nt, Artificial Sequence
  Description of Artificial Sequence: Synthetic oligonucleotide
gcucacuccccaagcucua

SEQ ID NO: 2409512 - RNA, 19 nt, Artificial Sequence
  Description of Artificial Sequence: Synthetic oligonucleotide
cccgcucacuccccaagcu

SEQ ID NO: 2409513 - RNA, 19 nt, Artificial Sequence
  Description of Artificial Sequence: Synthetic oligonucleotide
gggacucccugccggcauu

SEQ ID NO: 2409514 - RNA, 19 nt, Artificial Sequence
  Description of Artificial Sequence: Synthetic oligonucleotide
cccuaccaccucugcuagu

SEQ ID NO: 2409515 - RNA, 19 nt, Artificial Sequence
  Description of Artificial Sequence: Synthetic oligonucleotide
ccccaagcucuagggcuuu

SEQ ID NO: 2409516 - RNA, 19 nt, Artificial Sequence
  Description of Artificial Sequence: Synthetic oligonucleotide
cccaagcucuagggcuuuu

SEQ ID NO: 2409517 - RNA, 19 nt, Artificial Sequence
  Description of Artificial Sequence: Synthetic oligonucleotide
uauucuaacacuuuauuag

SEQ ID NO: 2409518 - RNA, 19 nt, Artificial Sequence
  Description of Artificial Sequence: Synthetic oligonucleotide
aauaggacggucugggugg

SEQ ID NO: 2409519 - RNA, 19 nt, Artificial Sequence
  Description of Artificial Sequence: Synthetic oligonucleotide
agaguuaucuuucuucagc

SEQ ID NO: 2409520 - RNA, 19 nt, Artificial Sequence
  Description of Artificial Sequence: Synthetic oligonucleotide
ugucacagggcccagaggg

SEQ ID NO: 2409521 - RNA, 19 nt, Artificial Sequence
  Description of Artificial Sequence: Synthetic oligonucleotide
aagugcaagaaauucacug

SEQ ID NO: 2409522 - RNA, 19 nt, Artificial Sequence
  Description of Artificial Sequence: Synthetic oligonucleotide
aaugcgguggucuccauuc

SEQ ID NO: 2409523 - RNA, 19 nt, Artificial Sequence
  Description of Artificial Sequence: Synthetic oligonucleotide
agaagaguuaucuuucuuc

SEQ ID NO: 2409524 - RNA, 19 nt, Artificial Sequence
  Description of Artificial Sequence: Synthetic oligonucleotide
auaagugacuccuugacug

SEQ ID NO: 2409525 - RNA, 19 nt, Artificial Sequence
  Description of Artificial Sequence: Synthetic oligonucleotide
uuuaucauagacuuucccu

SEQ ID NO: 2409526 - RNA, 19 nt, Artificial Sequence
  Description of Artificial Sequence: Synthetic oligonucleotide
auuuaucauagacuuuccc

SEQ ID NO: 2409527 - RNA, 19 nt, Artificial Sequence
  Description of Artificial Sequence: Synthetic oligonucleotide
cacuuuauuagguaagagg

SEQ ID NO: 2409528 - RNA, 19 nt, Artificial Sequence
  Description of Artificial Sequence: Synthetic oligonucleotide
uuuauuagguaagagguca

SEQ ID NO: 2409529 - RNA, 19 nt, Artificial Sequence
  Description of Artificial Sequence: Synthetic oligonucleotide
aggguugguaguuauacac

SEQ ID NO: 2409530 - RNA, 19 nt, Artificial Sequence
  Description of Artificial Sequence: Synthetic oligonucleotide
aaagccuggcuauugagca

SEQ ID NO: 2409531 - RNA, 19 nt, Artificial Sequence
  Description of Artificial Sequence: Synthetic oligonucleotide
uuuaaagugcaagaaauuc

SEQ ID NO: 2409532 - RNA, 19 nt, Artificial Sequence
  Description of Artificial Sequence: Synthetic oligonucleotide
aaagaucccaaugcggugg

SEQ ID NO: 2409533 - RNA, 19 nt, Artificial Sequence
  Description of Artificial Sequence: Synthetic oligonucleotide
uaccuauagucaaagaaga

SEQ ID NO: 2409534 - RNA, 19 nt, Artificial Sequence
  Description of Artificial Sequence: Synthetic oligonucleotide
uaguuauacaccuguguag

SEQ ID NO: 2409535 - RNA, 19 nt, Artificial Sequence
  Description of Artificial Sequence: Synthetic oligonucleotide
ucuuacacgagguggagca

SEQ ID NO: 2409536 - RNA, 19 nt, Artificial Sequence
  Description of Artificial Sequence: Synthetic oligonucleotide
guuugcaugucuuuguccc

SEQ ID NO: 2409537 - RNA, 19 nt, Artificial Sequence
  Description of Artificial Sequence: Synthetic oligonucleotide
acuuuggcauaacaguugg

SEQ ID NO: 2409538 - RNA, 19 nt, Artificial Sequence
  Description of Artificial Sequence: Synthetic oligonucleotide
ucuguguccaucaucuuac

SEQ ID NO: 2409539 - RNA, 19 nt, Artificial Sequence
  Description of Artificial Sequence: Synthetic oligonucleotide
uuagguaagaggucacaag

SEQ ID NO: 2409540 - RNA, 19 nt, Artificial Sequence
  Description of Artificial Sequence: Synthetic oligonucleotide
aucaucuuacacgaggugg

SEQ ID NO: 2409541 - RNA, 19 nt, Artificial Sequence
  Description of Artificial Sequence: Synthetic oligonucleotide
uugguaguuauacaccugu

SEQ ID NO: 2409542 - RNA, 19 nt, Artificial Sequence
  Description of Artificial Sequence: Synthetic oligonucleotide
guaccuauagucaaagaag

SEQ ID NO: 2409543 - RNA, 19 nt, Artificial Sequence
  Description of Artificial Sequence: Synthetic oligonucleotide
cuuggcuguaccuauaguc

SEQ ID NO: 2409544 - RNA, 19 nt, Artificial Sequence
  Description of Artificial Sequence: Synthetic oligonucleotide
uggcgauaaagccacaugu

SEQ ID NO: 2409545 - RNA, 19 nt, Artificial Sequence
  Description of Artificial Sequence: Synthetic oligonucleotide
uggcaaagaucccaaugcg

SEQ ID NO: 2409546 - RNA, 19 nt, Artificial Sequence
  Description of Artificial Sequence: Synthetic oligonucleotide
gaugagcucaccacaauag

SEQ ID NO: 2409547 - RNA, 19 nt, Artificial Sequence
  Description of Artificial Sequence: Synthetic oligonucleotide
aagccacaggacuuuaaag

SEQ ID NO: 2409548 - RNA, 19 nt, Artificial Sequence
  Description of Artificial Sequence: Synthetic oligonucleotide
uaacaguugggguucacug

SEQ ID NO: 2409549 - RNA, 19 nt, Artificial Sequence
  Description of Artificial Sequence: Synthetic oligonucleotide
accacuuuggcauaacagu

SEQ ID NO: 2409550 - RNA, 19 nt, Artificial Sequence
  Description of Artificial Sequence: Synthetic oligonucleotide
aagaguuaucuuucuucag

SEQ ID NO: 2409551 - RNA, 19 nt, Artificial Sequence
  Description of Artificial Sequence: Synthetic oligonucleotide
guuguugagguugaagagg

SEQ ID NO: 2409552 - RNA, 19 nt, Artificial Sequence
  Description of Artificial Sequence: Synthetic oligonucleotide
ugagcucaccacaauagga

SEQ ID NO: 2409553 - RNA, 19 nt, Artificial Sequence
  Description of Artificial Sequence: Synthetic oligonucleotide
ucaucuuacacgaggugga

SEQ ID NO: 2409554 - RNA, 19 nt, Artificial Sequence
  Description of Artificial Sequence: Synthetic oligonucleotide
aggacuuuaaagugcaaga

SEQ ID NO: 2409555 - RNA, 19 nt, Artificial Sequence
  Description of Artificial Sequence: Synthetic oligonucleotide
aaaauagagggcagcgggg

SEQ ID NO: 2409556 - RNA, 19 nt, Artificial Sequence
  Description of Artificial Sequence: Synthetic oligonucleotide
uggaagaccuguuugcaug

SEQ ID NO: 2409557 - RNA, 19 nt, Artificial Sequence
  Description of Artificial Sequence: Synthetic oligonucleotide
uuuugguauucuaacacuu

SEQ ID NO: 2409558 - RNA, 19 nt, Artificial Sequence
  Description of Artificial Sequence: Synthetic oligonucleotide
uuuuguuuccuuuccgggu

SEQ ID NO: 2409559 - RNA, 19 nt, Artificial Sequence
  Description of Artificial Sequence: Synthetic oligonucleotide
ugagagaugagcucaccac

SEQ ID NO: 2409560 - RNA, 19 nt, Artificial Sequence
  Description of Artificial Sequence: Synthetic oligonucleotide
uucuaacacuuuauuaggu

SEQ ID NO: 2409561 - RNA, 19 nt, Artificial Sequence
  Description of Artificial Sequence: Synthetic oligonucleotide
aucauagacuuucccucgc

SEQ ID NO: 2409562 - RNA, 19 nt, Artificial Sequence
  Description of Artificial Sequence: Synthetic oligonucleotide
aagcuggacauauauuuau

SEQ ID NO: 2409563 - RNA, 19 nt, Artificial Sequence
  Description of Artificial Sequence: Synthetic oligonucleotide
ucacuggcgauaaagccac

SEQ ID NO: 2409564 - RNA, 19 nt, Artificial Sequence
  Description of Artificial Sequence: Synthetic oligonucleotide
uuuguccccaaaagccugg

SEQ ID NO: 2409565 - RNA, 19 nt, Artificial Sequence
  Description of Artificial Sequence: Synthetic oligonucleotide
aacaguugggguucacuga

SEQ ID NO: 2409566 - RNA, 19 nt, Artificial Sequence
  Description of Artificial Sequence: Synthetic oligonucleotide
ucuaacacuuuauuaggua

SEQ ID NO: 2409567 - RNA, 19 nt, Artificial Sequence
  Description of Artificial Sequence: Synthetic oligonucleotide
agcucaccacaauaggacg

SEQ ID NO: 2409568 - RNA, 19 nt, Artificial Sequence
  Description of Artificial Sequence: Synthetic oligonucleotide
ugagcagaaguuguugaag

SEQ ID NO: 2409569 - RNA, 19 nt, Artificial Sequence
  Description of Artificial Sequence: Synthetic oligonucleotide
aguuauacaccuguguaga

SEQ ID NO: 2409570 - RNA, 19 nt, Artificial Sequence
  Description of Artificial Sequence: Synthetic oligonucleotide
uauugagcagaaguuguug

SEQ ID NO: 2409571 - RNA, 19 nt, Artificial Sequence
  Description of Artificial Sequence: Synthetic oligonucleotide
agagggcuagaagacaucg

SEQ ID NO: 2409572 - RNA, 19 nt, Artificial Sequence
  Description of Artificial Sequence: Synthetic oligonucleotide
ucacugaaugauuugcaaa

SEQ ID NO: 2409573 - RNA, 19 nt, Artificial Sequence
  Description of Artificial Sequence: Synthetic oligonucleotide
acugcaaacuggaagaccu

SEQ ID NO: 2409574 - RNA, 19 nt, Artificial Sequence
  Description of Artificial Sequence: Synthetic oligonucleotide
ugauuugcaaagcgaauuu

SEQ ID NO: 2409575 - RNA, 19 nt, Artificial Sequence
  Description of Artificial Sequence: Synthetic oligonucleotide
cagugugcggcccacaacc

SEQ ID NO: 2409576 - RNA, 19 nt, Artificial Sequence
  Description of Artificial Sequence: Synthetic oligonucleotide
cacaauaggacggucuggg

SEQ ID NO: 2409577 - RNA, 19 nt, Artificial Sequence
  Description of Artificial Sequence: Synthetic oligonucleotide
agcagaaguggagaggagg

SEQ ID NO: 2409578 - RNA, 19 nt, Artificial Sequence
  Description of Artificial Sequence: Synthetic oligonucleotide
aagaccuguuugcaugucu

SEQ ID NO: 2409579 - RNA, 19 nt, Artificial Sequence
  Description of Artificial Sequence: Synthetic oligonucleotide
auuugcaaagcgaauuuug

SEQ ID NO: 2409580 - RNA, 19 nt, Artificial Sequence
  Description of Artificial Sequence: Synthetic oligonucleotide
caauaggacggucugggug

SEQ ID NO: 2409581 - RNA, 19 nt, Artificial Sequence
  Description of Artificial Sequence: Synthetic oligonucleotide
uuauuagguaagaggucac

SEQ ID NO: 2409582 - RNA, 19 nt, Artificial Sequence
  Description of Artificial Sequence: Synthetic oligonucleotide
aguugggguucacugaaug

SEQ ID NO: 2409583 - RNA, 19 nt, Artificial Sequence
  Description of Artificial Sequence: Synthetic oligonucleotide
uccucaccaguccacacca

SEQ ID NO: 2409584 - RNA, 19 nt, Artificial Sequence
  Description of Artificial Sequence: Synthetic oligonucleotide
ugaaggguucaugagcuca

SEQ ID NO: 2409585 - RNA, 19 nt, Artificial Sequence
  Description of Artificial Sequence: Synthetic oligonucleotide
cucuucgccagccugaauc

SEQ ID NO: 2409586 - RNA, 19 nt, Artificial Sequence
  Description of Artificial Sequence: Synthetic oligonucleotide
aagaaauucacuggcgaua

SEQ ID NO: 2409587 - RNA, 19 nt, Artificial Sequence
  Description of Artificial Sequence: Synthetic oligonucleotide
ucaucuguuggcagcuuca

SEQ ID NO: 2409588 - RNA, 19 nt, Artificial Sequence
  Description of Artificial Sequence: Synthetic oligonucleotide
accacaauaggacggucug

SEQ ID NO: 2409589 - RNA, 19 nt, Artificial Sequence
  Description of Artificial Sequence: Synthetic oligonucleotide
uaagugacuccuugacugc

SEQ ID NO: 2409590 - RNA, 19 nt, Artificial Sequence
  Description of Artificial Sequence: Synthetic oligonucleotide
gucuccauucaccaugacc

SEQ ID NO: 2409591 - RNA, 19 nt, Artificial Sequence
  Description of Artificial Sequence: Synthetic oligonucleotide
guaguuauacaccugugua

SEQ ID NO: 2409592 - RNA, 19 nt, Artificial Sequence
  Description of Artificial Sequence: Synthetic oligonucleotide
aaagcgaauuuuguuuccu

SEQ ID NO: 2409593 - RNA, 19 nt, Artificial Sequence
  Description of Artificial Sequence: Synthetic oligonucleotide
ucccucgccgaccucaucc

SEQ ID NO: 2409594 - RNA, 19 nt, Artificial Sequence
  Description of Artificial Sequence: Synthetic oligonucleotide
acuccuugacugcaaacug

SEQ ID NO: 2409595 - RNA, 19 nt, Artificial Sequence
  Description of Artificial Sequence: Synthetic oligonucleotide
ucauagacuuucccucgcc

SEQ ID NO: 2409596 - RNA, 19 nt, Artificial Sequence
  Description of Artificial Sequence: Synthetic oligonucleotide
gguagcauccacuacaaaa

SEQ ID NO: 2409597 - RNA, 19 nt, Artificial Sequence
  Description of Artificial Sequence: Synthetic oligonucleotide
ugaaucgcucucuuggcaa

SEQ ID NO: 2409598 - RNA, 19 nt, Artificial Sequence
  Description of Artificial Sequence: Synthetic oligonucleotide
uuugguauucuaacacuuu

SEQ ID NO: 2409599 - RNA, 19 nt, Artificial Sequence
  Description of Artificial Sequence: Synthetic oligonucleotide
aguuaucuuucuucagcug

SEQ ID NO: 2409600 - RNA, 19 nt, Artificial Sequence
  Description of Artificial Sequence: Synthetic oligonucleotide
caaagcgaauuuuguuucc

SEQ ID NO: 2409601 - RNA, 19 nt, Artificial Sequence
  Description of Artificial Sequence: Synthetic oligonucleotide
ucagcugaauuuuccugca

SEQ ID NO: 2409602 - RNA, 19 nt, Artificial Sequence
  Description of Artificial Sequence: Synthetic oligonucleotide
ucaccaugaccacuuuggc

SEQ ID NO: 2409603 - RNA, 19 nt, Artificial Sequence
  Description of Artificial Sequence: Synthetic oligonucleotide
gccugaaucgcucucuugg

SEQ ID NO: 2409604 - RNA, 19 nt, Artificial Sequence
  Description of Artificial Sequence: Synthetic oligonucleotide
aaugauuugcaaagcgaau

SEQ ID NO: 2409605 - RNA, 19 nt, Artificial Sequence
  Description of Artificial Sequence: Synthetic oligonucleotide
auagacuuucccucgccga

SEQ ID NO: 2409606 - RNA, 19 nt, Artificial Sequence
  Description of Artificial Sequence: Synthetic oligonucleotide
cacuuuggcauaacaguug

SEQ ID NO: 2409607 - RNA, 19 nt, Artificial Sequence
  Description of Artificial Sequence: Synthetic oligonucleotide
agcaaugacagagcuccac

SEQ ID NO: 2409608 - RNA, 19 nt, Artificial Sequence
  Description of Artificial Sequence: Synthetic oligonucleotide
cuagaagacaucggucucc

SEQ ID NO: 2409609 - RNA, 19 nt, Artificial Sequence
  Description of Artificial Sequence: Synthetic oligonucleotide
uagacuuucccucgccgac

SEQ ID NO: 2409610 - RNA, 19 nt, Artificial Sequence
  Description of Artificial Sequence: Synthetic oligonucleotide
uuugcaugucuuugucccc

SEQ ID NO: 2409611 - RNA, 19 nt, Artificial Sequence
  Description of Artificial Sequence: Synthetic oligonucleotide
uggcauaacaguugggguu

SEQ ID NO: 2409612 - RNA, 19 nt, Artificial Sequence
  Description of Artificial Sequence: Synthetic oligonucleotide
uuccuuuccggguagcauc

SEQ ID NO: 2409613 - RNA, 19 nt, Artificial Sequence
  Description of Artificial Sequence: Synthetic oligonucleotide
aucuuacacgagguggagc

SEQ ID NO: 2409614 - RNA, 19 nt, Artificial Sequence
  Description of Artificial Sequence: Synthetic oligonucleotide
ugaccacuuuggcauaaca

SEQ ID NO: 2409615 - RNA, 19 nt, Artificial Sequence
  Description of Artificial Sequence: Synthetic oligonucleotide
ugguaguuauacaccugug

SEQ ID NO: 2409616 - RNA, 19 nt, Artificial Sequence
  Description of Artificial Sequence: Synthetic oligonucleotide
uauuagguaagaggucaca

SEQ ID NO: 2409617 - RNA, 19 nt, Artificial Sequence
  Description of Artificial Sequence: Synthetic oligonucleotide
gagcucaccacaauaggac

SEQ ID NO: 2409618 - RNA, 19 nt, Artificial Sequence
  Description of Artificial Sequence: Synthetic oligonucleotide
uugggacccgucauuaaaa

SEQ ID NO: 2409619 - RNA, 19 nt, Artificial Sequence
  Description of Artificial Sequence: Synthetic oligonucleotide
uuuccggguagcauccacu

SEQ ID NO: 2409620 - RNA, 19 nt, Artificial Sequence
  Description of Artificial Sequence: Synthetic oligonucleotide
uucuucuucugugaagggu

SEQ ID NO: 2409621 - RNA, 19 nt, Artificial Sequence
  Description of Artificial Sequence: Synthetic oligonucleotide
augauuugcaaagcgaauu

SEQ ID NO: 2409622 - RNA, 19 nt, Artificial Sequence
  Description of Artificial Sequence: Synthetic oligonucleotide
agaaauucacuggcgauaa

SEQ ID NO: 2409623 - RNA, 19 nt, Artificial Sequence
  Description of Artificial Sequence: Synthetic oligonucleotide
agcuuggcuguaccuauag

SEQ ID NO: 2409624 - RNA, 19 nt, Artificial Sequence
  Description of Artificial Sequence: Synthetic oligonucleotide
aagccuggcuauugagcag

SEQ ID NO: 2409625 - RNA, 19 nt, Artificial Sequence
  Description of Artificial Sequence: Synthetic oligonucleotide
uugggguucacugaaugau

SEQ ID NO: 2409626 - RNA, 19 nt, Artificial Sequence
  Description of Artificial Sequence: Synthetic oligonucleotide
uguguagaagaguuaucuu

SEQ ID NO: 2409627 - RNA, 19 nt, Artificial Sequence
  Description of Artificial Sequence: Synthetic oligonucleotide
ggauaagugacuccuugac

SEQ ID NO: 2409628 - RNA, 19 nt, Artificial Sequence
  Description of Artificial Sequence: Synthetic oligonucleotide
cacaccaccucucuguguc

SEQ ID NO: 2409629 - RNA, 19 nt, Artificial Sequence
  Description of Artificial Sequence: Synthetic oligonucleotide
agaggucacaagccacagg

SEQ ID NO: 2409630 - RNA, 19 nt, Artificial Sequence
  Description of Artificial Sequence: Synthetic oligonucleotide
caaagaucccaaugcggug

SEQ ID NO: 2409631 - RNA, 19 nt, Artificial Sequence
  Description of Artificial Sequence: Synthetic oligonucleotide
gaaguggagaggaggguug

SEQ ID NO: 2409632 - RNA, 19 nt, Artificial Sequence
  Description of Artificial Sequence: Synthetic oligonucleotide
gguucacugaaugauuugc

SEQ ID NO: 2409633 - RNA, 19 nt, Artificial Sequence
  Description of Artificial Sequence: Synthetic oligonucleotide
gauaagugacuccuugacu

SEQ ID NO: 2409634 - RNA, 19 nt, Artificial Sequence
  Description of Artificial Sequence: Synthetic oligonucleotide
agaugagcucaccacaaua

SEQ ID NO: 2409635 - RNA, 19 nt, Artificial Sequence
  Description of Artificial Sequence: Synthetic oligonucleotide
uugcaaagcgaauuuuguu

SEQ ID NO: 2409636 - RNA, 19 nt, Artificial Sequence
  Description of Artificial Sequence: Synthetic oligonucleotide
ucagcuuggcuguaccuau

SEQ ID NO: 2409637 - RNA, 19 nt, Artificial Sequence
  Description of Artificial Sequence: Synthetic oligonucleotide
ugcaaacuggaagaccugu

SEQ ID NO: 2409638 - RNA, 19 nt, Artificial Sequence
  Description of Artificial Sequence: Synthetic oligonucleotide
ucuggguggucacaggguu

SEQ ID NO: 2409639 - RNA, 19 nt, Artificial Sequence
  Description of Artificial Sequence: Synthetic oligonucleotide
uagaagaguuaucuuucuu

SEQ ID NO: 2409640 - RNA, 19 nt, Artificial Sequence
  Description of Artificial Sequence: Synthetic oligonucleotide
gccgaccucauccugagag

SEQ ID NO: 2409641 - RNA, 19 nt, Artificial Sequence
  Description of Artificial Sequence: Synthetic oligonucleotide
cacaggacuuuaaagugca

SEQ ID NO: 2409642 - RNA, 19 nt, Artificial Sequence
  Description of Artificial Sequence: Synthetic oligonucleotide
agcgaauuuuguuuccuuu

SEQ ID NO: 2409643 - RNA, 19 nt, Artificial Sequence
  Description of Artificial Sequence: Synthetic oligonucleotide
gccacaggacuuuaaagug

SEQ ID NO: 2409644 - RNA, 19 nt, Artificial Sequence
  Description of Artificial Sequence: Synthetic oligonucleotide
uucgccagccugaaucgcu

SEQ ID NO: 2409645 - RNA, 19 nt, Artificial Sequence
  Description of Artificial Sequence: Synthetic oligonucleotide
aagaucccaaugcgguggu

SEQ ID NO: 2409646 - RNA, 19 nt, Artificial Sequence
  Description of Artificial Sequence: Synthetic oligonucleotide
uccacaccaccucucugug

SEQ ID NO: 2409647 - RNA, 19 nt, Artificial Sequence
  Description of Artificial Sequence: Synthetic oligonucleotide
ccacauguacaccagcucc

SEQ ID NO: 2409648 - RNA, 19 nt, Artificial Sequence
  Description of Artificial Sequence: Synthetic oligonucleotide
gcgauaaagccacauguac

SEQ ID NO: 2409649 - RNA, 19 nt, Artificial Sequence
  Description of Artificial Sequence: Synthetic oligonucleotide
uagagggcagcggggaccg

SEQ ID NO: 2409650 - RNA, 19 nt, Artificial Sequence
  Description of Artificial Sequence: Synthetic oligonucleotide
aaucgcucucuuggcaaag

SEQ ID NO: 2409651 - RNA, 19 nt, Artificial Sequence
  Description of Artificial Sequence: Synthetic oligonucleotide
uuacacgagguggagcaga

SEQ ID NO: 2409652 - RNA, 19 nt, Artificial Sequence
  Description of Artificial Sequence: Synthetic oligonucleotide
aucccaaugcgguggucuc

SEQ ID NO: 2409653 - RNA, 19 nt, Artificial Sequence
  Description of Artificial Sequence: Synthetic oligonucleotide
aagcgaauuuuguuuccuu

SEQ ID NO: 2409654 - RNA, 19 nt, Artificial Sequence
  Description of Artificial Sequence: Synthetic oligonucleotide
acaucggucucccucucga

SEQ ID NO: 2409655 - RNA, 19 nt, Artificial Sequence
  Description of Artificial Sequence: Synthetic oligonucleotide
aggguucaugagcucaucu

SEQ ID NO: 2409656 - RNA, 19 nt, Artificial Sequence
  Description of Artificial Sequence: Synthetic oligonucleotide
gacaucggucucccucucg

SEQ ID NO: 2409657 - RNA, 19 nt, Artificial Sequence
  Description of Artificial Sequence: Synthetic oligonucleotide
gacugcaaacuggaagacc

SEQ ID NO: 2409658 - RNA, 19 nt, Artificial Sequence
  Description of Artificial Sequence: Synthetic oligonucleotide
gcuggacauauauuuauca

SEQ ID NO: 2409659 - RNA, 19 nt, Artificial Sequence
  Description of Artificial Sequence: Synthetic oligonucleotide
aucggucucccucucgaug

SEQ ID NO: 2409660 - RNA, 19 nt, Artificial Sequence
  Description of Artificial Sequence: Synthetic oligonucleotide
auaacaguugggguucacu

SEQ ID NO: 2409661 - RNA, 19 nt, Artificial Sequence
  Description of Artificial Sequence: Synthetic oligonucleotide
aauggcggcuggagguggc

SEQ ID NO: 2409662 - RNA, 19 nt, Artificial Sequence
  Description of Artificial Sequence: Synthetic oligonucleotide
uggcuguaccuauagucaa

SEQ ID NO: 2409663 - RNA, 19 nt, Artificial Sequence
  Description of Artificial Sequence: Synthetic oligonucleotide
gcaaagcgaauuuuguuuc

SEQ ID NO: 2409664 - RNA, 19 nt, Artificial Sequence
  Description of Artificial Sequence: Synthetic oligonucleotide
aaggguucaugagcucauc

SEQ ID NO: 2409665 - RNA, 19 nt, Artificial Sequence
  Description of Artificial Sequence: Synthetic oligonucleotide
accuauagucaaagaagag

SEQ ID NO: 2409666 - RNA, 19 nt, Artificial Sequence
  Description of Artificial Sequence: Synthetic oligonucleotide
gaagagcucuucgccagcc

SEQ ID NO: 2409667 - RNA, 19 nt, Artificial Sequence
  Description of Artificial Sequence: Synthetic oligonucleotide
gcaagaaauucacuggcga

SEQ ID NO: 2409668 - RNA, 19 nt, Artificial Sequence
  Description of Artificial Sequence: Synthetic oligonucleotide
guguagaagaguuaucuuu

SEQ ID NO: 2409669 - RNA, 19 nt, Artificial Sequence
  Description of Artificial Sequence: Synthetic oligonucleotide
cuggcgauaaagccacaug

SEQ ID NO: 2409670 - RNA, 19 nt, Artificial Sequence
  Description of Artificial Sequence: Synthetic oligonucleotide
gagggcuagaagacaucgg

SEQ ID NO: 2409671 - RNA, 19 nt, Artificial Sequence
  Description of Artificial Sequence: Synthetic oligonucleotide
ggaagcuggacauauauuu

SEQ ID NO: 2409672 - RNA, 19 nt, Artificial Sequence
  Description of Artificial Sequence: Synthetic oligonucleotide
uacacgagguggagcagaa

SEQ ID NO: 2409673 - RNA, 19 nt, Artificial Sequence
  Description of Artificial Sequence: Synthetic oligonucleotide
acaccuguguagaagaguu

SEQ ID NO: 2409674 - RNA, 19 nt, Artificial Sequence
  Description of Artificial Sequence: Synthetic oligonucleotide
cucucuuggcaaagauccc

SEQ ID NO: 2409675 - RNA, 19 nt, Artificial Sequence
  Description of Artificial Sequence: Synthetic oligonucleotide
ugggguucacugaaugauu

SEQ ID NO: 2409676 - RNA, 19 nt, Artificial Sequence
  Description of Artificial Sequence: Synthetic oligonucleotide
ccacaggacuuuaaagugc

SEQ ID NO: 2409677 - RNA, 19 nt, Artificial Sequence
  Description of Artificial Sequence: Synthetic oligonucleotide
caugucuuuguccccaaaa

SEQ ID NO: 2409678 - RNA, 19 nt, Artificial Sequence
  Description of Artificial Sequence: Synthetic oligonucleotide
guugggacccgucauuaaa

SEQ ID NO: 2409679 - RNA, 19 nt, Artificial Sequence
  Description of Artificial Sequence: Synthetic oligonucleotide
cugagagaugagcucacca

SEQ ID NO: 2409680 - RNA, 19 nt, Artificial Sequence
  Description of Artificial Sequence: Synthetic oligonucleotide
acaauaggacggucugggu

SEQ ID NO: 2409681 - RNA, 19 nt, Artificial Sequence
  Description of Artificial Sequence: Synthetic oligonucleotide
cgaauuuuguuuccuuucc

SEQ ID NO: 2409682 - RNA, 19 nt, Artificial Sequence
  Description of Artificial Sequence: Synthetic oligonucleotide
agaaguggagaggaggguu

SEQ ID NO: 2409683 - RNA, 19 nt, Artificial Sequence
  Description of Artificial Sequence: Synthetic oligonucleotide
guugguaguuauacaccug

SEQ ID NO: 2409684 - RNA, 19 nt, Artificial Sequence
  Description of Artificial Sequence: Synthetic oligonucleotide
augagcucaucuguuggca

SEQ ID NO: 2409685 - RNA, 19 nt, Artificial Sequence
  Description of Artificial Sequence: Synthetic oligonucleotide
cuguguagaagaguuaucu

SEQ ID NO: 2409686 - RNA, 19 nt, Artificial Sequence
  Description of Artificial Sequence: Synthetic oligonucleotide
uuccggguagcauccacua

SEQ ID NO: 2409687 - RNA, 19 nt, Artificial Sequence
  Description of Artificial Sequence: Synthetic oligonucleotide
gcuguaccuauagucaaag

SEQ ID NO: 2409688 - RNA, 19 nt, Artificial Sequence
  Description of Artificial Sequence: Synthetic oligonucleotide
ggagcagaaguggagagga

SEQ ID NO: 2409689 - RNA, 19 nt, Artificial Sequence
  Description of Artificial Sequence: Synthetic oligonucleotide
ucgccgaccucauccugag

SEQ ID NO: 2409690 - RNA, 19 nt, Artificial Sequence
  Description of Artificial Sequence: Synthetic oligonucleotide
caccaugaccacuuuggca

SEQ ID NO: 2409691 - RNA, 19 nt, Artificial Sequence
  Description of Artificial Sequence: Synthetic oligonucleotide
gguugguaguuauacaccu

SEQ ID NO: 2409692 - RNA, 19 nt, Artificial Sequence
  Description of Artificial Sequence: Synthetic oligonucleotide
guuauacaccuguguagaa

SEQ ID NO: 2409693 - RNA, 19 nt, Artificial Sequence
  Description of Artificial Sequence: Synthetic oligonucleotide
caagccacaggacuuuaaa

SEQ ID NO: 2409694 - RNA, 19 nt, Artificial Sequence
  Description of Artificial Sequence: Synthetic oligonucleotide
caucuuacacgagguggag

SEQ ID NO: 2409695 - RNA, 19 nt, Artificial Sequence
  Description of Artificial Sequence: Synthetic oligonucleotide
guagaagaguuaucuuucu

SEQ ID NO: 2409696 - RNA, 19 nt, Artificial Sequence
  Description of Artificial Sequence: Synthetic oligonucleotide
gaaucgcucucuuggcaaa

SEQ ID NO: 2409697 - RNA, 19 nt, Artificial Sequence
  Description of Artificial Sequence: Synthetic oligonucleotide
uccggguagcauccacuac

SEQ ID NO: 2409698 - RNA, 19 nt, Artificial Sequence
  Description of Artificial Sequence: Synthetic oligonucleotide
augaccacuuuggcauaac

SEQ ID NO: 2409699 - RNA, 19 nt, Artificial Sequence
  Description of Artificial Sequence: Synthetic oligonucleotide
acgagguggagcagaagug

SEQ ID NO: 2409700 - RNA, 19 nt, Artificial Sequence
  Description of Artificial Sequence: Synthetic oligonucleotide
cugaaucgcucucuuggca

SEQ ID NO: 2409701 - RNA, 19 nt, Artificial Sequence
  Description of Artificial Sequence: Synthetic oligonucleotide
cugcaaacuggaagaccug

SEQ ID NO: 2409702 - RNA, 19 nt, Artificial Sequence
  Description of Artificial Sequence: Synthetic oligonucleotide
cacgagguggagcagaagu

SEQ ID NO: 2409703 - RNA, 19 nt, Artificial Sequence
  Description of Artificial Sequence: Synthetic oligonucleotide
ggguugguaguuauacacc

SEQ ID NO: 2409704 - RNA, 19 nt, Artificial Sequence
  Description of Artificial Sequence: Synthetic oligonucleotide
cugucacagggcccagagg

SEQ ID NO: 2409705 - RNA, 19 nt, Artificial Sequence
  Description of Artificial Sequence: Synthetic oligonucleotide
guacaccagcuccucacca

SEQ ID NO: 2409706 - RNA, 19 nt, Artificial Sequence
  Description of Artificial Sequence: Synthetic oligonucleotide
acggucuggguggucacag

SEQ ID NO: 2409707 - RNA, 19 nt, Artificial Sequence
  Description of Artificial Sequence: Synthetic oligonucleotide
gaucccaaugcgguggucu

SEQ ID NO: 2409708 - RNA, 19 nt, Artificial Sequence
  Description of Artificial Sequence: Synthetic oligonucleotide
aucagcuuggcuguaccua

SEQ ID NO: 2409709 - RNA, 19 nt, Artificial Sequence
  Description of Artificial Sequence: Synthetic oligonucleotide
ccugaaucgcucucuuggc

SEQ ID NO: 2409710 - RNA, 19 nt, Artificial Sequence
  Description of Artificial Sequence: Synthetic oligonucleotide
ggcauaacaguugggguuc

SEQ ID NO: 2409711 - RNA, 19 nt, Artificial Sequence
  Description of Artificial Sequence: Synthetic oligonucleotide
ucgccagccugaaucgcuc

SEQ ID NO: 2409712 - RNA, 19 nt, Artificial Sequence
  Description of Artificial Sequence: Synthetic oligonucleotide
acuggcgauaaagccacau

SEQ ID NO: 2409713 - RNA, 19 nt, Artificial Sequence
  Description of Artificial Sequence: Synthetic oligonucleotide
caagaaauucacuggcgau

SEQ ID NO: 2409714 - RNA, 19 nt, Artificial Sequence
  Description of Artificial Sequence: Synthetic oligonucleotide
cuuacacgagguggagcag

SEQ ID NO: 2409715 - RNA, 19 nt, Artificial Sequence
  Description of Artificial Sequence: Synthetic oligonucleotide
gagguggagcagaagugga

SEQ ID NO: 2409716 - RNA, 19 nt, Artificial Sequence
  Description of Artificial Sequence: Synthetic oligonucleotide
ggguucacugaaugauuug

SEQ ID NO: 2409717 - RNA, 19 nt, Artificial Sequence
  Description of Artificial Sequence: Synthetic oligonucleotide
agcggggaccgggaauggc

SEQ ID NO: 2409718 - RNA, 19 nt, Artificial Sequence
  Description of Artificial Sequence: Synthetic oligonucleotide
caggguugguaguuauaca

SEQ ID NO: 2409719 - RNA, 19 nt, Artificial Sequence
  Description of Artificial Sequence: Synthetic oligonucleotide
cuguaccuauagucaaaga

SEQ ID NO: 2409720 - RNA, 19 nt, Artificial Sequence
  Description of Artificial Sequence: Synthetic oligonucleotide
cagagggcuagaagacauc

SEQ ID NO: 2409721 - RNA, 19 nt, Artificial Sequence
  Description of Artificial Sequence: Synthetic oligonucleotide
gaaauucacuggcgauaaa

SEQ ID NO: 2409722 - RNA, 19 nt, Artificial Sequence
  Description of Artificial Sequence: Synthetic oligonucleotide
gguggagcagaaguggaga

SEQ ID NO: 2409723 - RNA, 19 nt, Artificial Sequence
  Description of Artificial Sequence: Synthetic oligonucleotide
gugugcggcccacaaccug

SEQ ID NO: 2409724 - RNA, 19 nt, Artificial Sequence
  Description of Artificial Sequence: Synthetic oligonucleotide
agaccuguuugcaugucuu

SEQ ID NO: 2409725 - RNA, 19 nt, Artificial Sequence
  Description of Artificial Sequence: Synthetic oligonucleotide
cucgccgaccucauccuga

SEQ ID NO: 2409726 - RNA, 19 nt, Artificial Sequence
  Description of Artificial Sequence: Synthetic oligonucleotide
uuucccucgccgaccucau

SEQ ID NO: 2409727 - RNA, 19 nt, Artificial Sequence
  Description of Artificial Sequence: Synthetic oligonucleotide
aggguugggacccgucauu

SEQ ID NO: 2409728 - RNA, 19 nt, Artificial Sequence
  Description of Artificial Sequence: Synthetic oligonucleotide
cuucgccagccugaaucgc

SEQ ID NO: 2409729 - RNA, 19 nt, Artificial Sequence
  Description of Artificial Sequence: Synthetic oligonucleotide
cauaacaguugggguucac

SEQ ID NO: 2409730 - RNA, 19 nt, Artificial Sequence
  Description of Artificial Sequence: Synthetic oligonucleotide
gcuauugagcagaaguugu

SEQ ID NO: 2409731 - RNA, 19 nt, Artificial Sequence
  Description of Artificial Sequence: Synthetic oligonucleotide
gugacuccuugacugcaaa

SEQ ID NO: 2409732 - RNA, 19 nt, Artificial Sequence
  Description of Artificial Sequence: Synthetic oligonucleotide
caccacaauaggacggucu

SEQ ID NO: 2409733 - RNA, 19 nt, Artificial Sequence
  Description of Artificial Sequence: Synthetic oligonucleotide
ucaccacaauaggacgguc

SEQ ID NO: 2409734 - RNA, 19 nt, Artificial Sequence
  Description of Artificial Sequence: Synthetic oligonucleotide
aucgcucucuuggcaaaga

SEQ ID NO: 2409735 - RNA, 19 nt, Artificial Sequence
  Description of Artificial Sequence: Synthetic oligonucleotide
gcggggaccgggaauggcg

SEQ ID NO: 2409736 - RNA, 19 nt, Artificial Sequence
  Description of Artificial Sequence: Synthetic oligonucleotide
ccggguagcauccacuaca

SEQ ID NO: 2409737 - RNA, 19 nt, Artificial Sequence
  Description of Artificial Sequence: Synthetic oligonucleotide
ccuguguagaagaguuauc

SEQ ID NO: 2409738 - RNA, 19 nt, Artificial Sequence
  Description of Artificial Sequence: Synthetic oligonucleotide
cuauugagcagaaguuguu

SEQ ID NO: 2409739 - RNA, 19 nt, Artificial Sequence
  Description of Artificial Sequence: Synthetic oligonucleotide
gcagcggggaccgggaaug

SEQ ID NO: 2409740 - RNA, 19 nt, Artificial Sequence
  Description of Artificial Sequence: Synthetic oligonucleotide
ggaauggcggcuggaggug

SEQ ID NO: 2409741 - RNA, 19 nt, Artificial Sequence
  Description of Artificial Sequence: Synthetic oligonucleotide
agugacuccuugacugcaa

SEQ ID NO: 2409742 - RNA, 19 nt, Artificial Sequence
  Description of Artificial Sequence: Synthetic oligonucleotide
ggaagaccuguuugcaugu

SEQ ID NO: 2409743 - RNA, 19 nt, Artificial Sequence
  Description of Artificial Sequence: Synthetic oligonucleotide
ugcggcccacaaccugugu

SEQ ID NO: 2409744 - RNA, 19 nt, Artificial Sequence
  Description of Artificial Sequence: Synthetic oligonucleotide
ccacaauaggacggucugg

SEQ ID NO: 2409745 - RNA, 19 nt, Artificial Sequence
  Description of Artificial Sequence: Synthetic oligonucleotide
acacgagguggagcagaag

SEQ ID NO: 2409746 - RNA, 19 nt, Artificial Sequence
  Description of Artificial Sequence: Synthetic oligonucleotide
gaaggguucaugagcucau

SEQ ID NO: 2409747 - RNA, 19 nt, Artificial Sequence
  Description of Artificial Sequence: Synthetic oligonucleotide
agugugcggcccacaaccu

SEQ ID NO: 2409748 - RNA, 19 nt, Artificial Sequence
  Description of Artificial Sequence: Synthetic oligonucleotide
gaggguugggacccgucau

SEQ ID NO: 2409749 - RNA, 19 nt, Artificial Sequence
  Description of Artificial Sequence: Synthetic oligonucleotide
gucacaagccacaggacuu

SEQ ID NO: 2409750 - RNA, 19 nt, Artificial Sequence
  Description of Artificial Sequence: Synthetic oligonucleotide
gcgguggucuccauucacc

SEQ ID NO: 2409751 - RNA, 19 nt, Artificial Sequence
  Description of Artificial Sequence: Synthetic oligonucleotide
cccaaaagccuggcuauug

SEQ ID NO: 2409752 - RNA, 19 nt, Artificial Sequence
  Description of Artificial Sequence: Synthetic oligonucleotide
ggcgauaaagccacaugua

SEQ ID NO: 2409753 - RNA, 19 nt, Artificial Sequence
  Description of Artificial Sequence: Synthetic oligonucleotide
auaggacggucuggguggu

SEQ ID NO: 2409754 - RNA, 19 nt, Artificial Sequence
  Description of Artificial Sequence: Synthetic oligonucleotide
caucagcuuggcuguaccu

SEQ ID NO: 2409755 - RNA, 19 nt, Artificial Sequence
  Description of Artificial Sequence: Synthetic oligonucleotide
caugaccacuuuggcauaa

SEQ ID NO: 2409756 - RNA, 19 nt, Artificial Sequence
  Description of Artificial Sequence: Synthetic oligonucleotide
gaccuguuugcaugucuuu

SEQ ID NO: 2409757 - RNA, 19 nt, Artificial Sequence
  Description of Artificial Sequence: Synthetic oligonucleotide
gacggucuggguggucaca

SEQ ID NO: 2409758 - RNA, 19 nt, Artificial Sequence
  Description of Artificial Sequence: Synthetic oligonucleotide
cucaccacaauaggacggu

SEQ ID NO: 2409759 - RNA, 19 nt, Artificial Sequence
  Description of Artificial Sequence: Synthetic oligonucleotide
gcagugugcggcccacaac

SEQ ID NO: 2409760 - RNA, 19 nt, Artificial Sequence
  Description of Artificial Sequence: Synthetic oligonucleotide
agaggaagcuggacauaua

SEQ ID NO: 2409761 - RNA, 19 nt, Artificial Sequence
  Description of Artificial Sequence: Synthetic oligonucleotide
cuguuggcagcuucaggau

SEQ ID NO: 2409762 - RNA, 19 nt, Artificial Sequence
  Description of Artificial Sequence: Synthetic oligonucleotide
gcuccucaccaguccacac

SEQ ID NO: 2409763 - RNA, 19 nt, Artificial Sequence
  Description of Artificial Sequence: Synthetic oligonucleotide
caccuguguagaagaguua

SEQ ID NO: 2409764 - RNA, 19 nt, Artificial Sequence
  Description of Artificial Sequence: Synthetic oligonucleotide
uucccucgccgaccucauc

SEQ ID NO: 2409765 - RNA, 19 nt, Artificial Sequence
  Description of Artificial Sequence: Synthetic oligonucleotide
ccaguccacaccaccucuc

SEQ ID NO: 2409766 - RNA, 19 nt, Artificial Sequence
  Description of Artificial Sequence: Synthetic oligonucleotide
cggggaccgggaauggcgg

SEQ ID NO: 2409767 - RNA, 19 nt, Artificial Sequence
  Description of Artificial Sequence: Synthetic oligonucleotide
cagcaaugacagagcucca

SEQ ID NO: 2409768 - RNA, 19 nt, Artificial Sequence
  Description of Artificial Sequence: Synthetic oligonucleotide
cagcggggaccgggaaugg

SEQ ID NO: 2409769 - RNA, 19 nt, Artificial Sequence
  Description of Artificial Sequence: Synthetic oligonucleotide
accgggaauggcggcugga

SEQ ID NO: 2409770 - RNA, 19 nt, Artificial Sequence
  Description of Artificial Sequence: Synthetic oligonucleotide
ggucucccucucgaugccc

SEQ ID NO: 2409771 - RNA, 19 nt, Artificial Sequence
  Description of Artificial Sequence: Synthetic oligonucleotide
ggaccgggaauggcggcug

SEQ ID NO: 2409772 - RNA, 19 nt, Artificial Sequence
  Description of Artificial Sequence: Synthetic oligonucleotide
gccagccugaaucgcucuc

SEQ ID NO: 2409773 - RNA, 19 nt, Artificial Sequence
  Description of Artificial Sequence: Synthetic oligonucleotide
gguggucacaggguuggua

SEQ ID NO: 2409774 - RNA, 19 nt, Artificial Sequence
  Description of Artificial Sequence: Synthetic oligonucleotide
cucccucucgaugcccaca

SEQ ID NO: 2409775 - RNA, 19 nt, Artificial Sequence
  Description of Artificial Sequence: Synthetic oligonucleotide
ggucuccauucaccaugac

SEQ ID NO: 2409776 - RNA, 19 nt, Artificial Sequence
  Description of Artificial Sequence: Synthetic oligonucleotide
cagcuuggcuguaccuaua

SEQ ID NO: 2409777 - RNA, 19 nt, Artificial Sequence
  Description of Artificial Sequence: Synthetic oligonucleotide
ccuggcuauugagcagaag

SEQ ID NO: 2409778 - RNA, 19 nt, Artificial Sequence
  Description of Artificial Sequence: Synthetic oligonucleotide
ccgaccucauccugagaga

SEQ ID NO: 2409779 - RNA, 19 nt, Artificial Sequence
  Description of Artificial Sequence: Synthetic oligonucleotide
ggguugggacccgucauua

SEQ ID NO: 2409780 - RNA, 19 nt, Artificial Sequence
  Description of Artificial Sequence: Synthetic oligonucleotide
agagggcagcggggaccgg

SEQ ID NO: 2409781 - RNA, 19 nt, Artificial Sequence
  Description of Artificial Sequence: Synthetic oligonucleotide
uaggacggucugggugguc

SEQ ID NO: 2409782 - RNA, 19 nt, Artificial Sequence
  Description of Artificial Sequence: Synthetic oligonucleotide
gcuuggcuguaccuauagu

SEQ ID NO: 2409783 - RNA, 19 nt, Artificial Sequence
  Description of Artificial Sequence: Synthetic oligonucleotide
cacaagccacaggacuuua

SEQ ID NO: 2409784 - RNA, 19 nt, Artificial Sequence
  Description of Artificial Sequence: Synthetic oligonucleotide
caaugcgguggucuccauu

SEQ ID NO: 2409785 - RNA, 19 nt, Artificial Sequence
  Description of Artificial Sequence: Synthetic oligonucleotide
gcauaacaguugggguuca

SEQ ID NO: 2409786 - RNA, 19 nt, Artificial Sequence
  Description of Artificial Sequence: Synthetic oligonucleotide
cccaaugcgguggucucca

SEQ ID NO: 2409787 - RNA, 19 nt, Artificial Sequence
  Description of Artificial Sequence: Synthetic oligonucleotide
ggguagcauccacuacaaa

SEQ ID NO: 2409788 - RNA, 19 nt, Artificial Sequence
  Description of Artificial Sequence: Synthetic oligonucleotide
cacuggcgauaaagccaca

SEQ ID NO: 2409789 - RNA, 19 nt, Artificial Sequence
  Description of Artificial Sequence: Synthetic oligonucleotide
cccagagggcuagaagaca

SEQ ID NO: 2409790 - RNA, 19 nt, Artificial Sequence
  Description of Artificial Sequence: Synthetic oligonucleotide
caguugggguucacugaau

SEQ ID NO: 2409791 - RNA, 19 nt, Artificial Sequence
  Description of Artificial Sequence: Synthetic oligonucleotide
cggucuggguggucacagg

SEQ ID NO: 2409792 - RNA, 19 nt, Artificial Sequence
  Description of Artificial Sequence: Synthetic oligonucleotide
caucggucucccucucgau

SEQ ID NO: 2409793 - RNA, 19 nt, Artificial Sequence
  Description of Artificial Sequence: Synthetic oligonucleotide
ccucgccgaccucauccug

SEQ ID NO: 2409794 - RNA, 19 nt, Artificial Sequence
  Description of Artificial Sequence: Synthetic oligonucleotide
cggguagcauccacuacaa

SEQ ID NO: 2409795 - RNA, 19 nt, Artificial Sequence
  Description of Artificial Sequence: Synthetic oligonucleotide
gcaaacuggaagaccuguu

SEQ ID NO: 2409796 - RNA, 19 nt, Artificial Sequence
  Description of Artificial Sequence: Synthetic oligonucleotide
cagccugaaucgcucucuu

SEQ ID NO: 2409797 - RNA, 19 nt, Artificial Sequence
  Description of Artificial Sequence: Synthetic oligonucleotide
gcggcccacaaccuguguu

SEQ ID NO: 2409798 - RNA, 19 nt, Artificial Sequence
  Description of Artificial Sequence: Synthetic oligonucleotide
gggaccgggaauggcggcu

SEQ ID NO: 2409799 - RNA, 19 nt, Artificial Sequence
  Description of Artificial Sequence: Synthetic oligonucleotide
ggcagcggggaccgggaau

SEQ ID NO: 2409800 - RNA, 19 nt, Artificial Sequence
  Description of Artificial Sequence: Synthetic oligonucleotide
ccagccugaaucgcucucu

SEQ ID NO: 2409801 - RNA, 19 nt, Artificial Sequence
  Description of Artificial Sequence: Synthetic oligonucleotide
gcggcuggagguggcugca

SEQ ID NO: 2409802 - RNA, 19 nt, Artificial Sequence
  Description of Artificial Sequence: Synthetic oligonucleotide
ccuuuccggguagcaucca

SEQ ID NO: 2409803 - RNA, 19 nt, Artificial Sequence
  Description of Artificial Sequence: Synthetic oligonucleotide
gcucuucgccagccugaau

SEQ ID NO: 2409804 - RNA, 19 nt, Artificial Sequence
  Description of Artificial Sequence: Synthetic oligonucleotide
cccucucgaugcccacaua

SEQ ID NO: 2409805 - RNA, 19 nt, Artificial Sequence
  Description of Artificial Sequence: Synthetic oligonucleotide
cgccagccugaaucgcucu

SEQ ID NO: 2409806 - RNA, 19 nt, Artificial Sequence
  Description of Artificial Sequence: Synthetic oligonucleotide
ccccaaaagccuggcuauu

SEQ ID NO: 2409807 - RNA, 19 nt, Artificial Sequence
  Description of Artificial Sequence: Synthetic oligonucleotide
cgccgaccucauccugaga

SEQ ID NO: 2409808 - RNA, 19 nt, Artificial Sequence
  Description of Artificial Sequence: Synthetic oligonucleotide
  modified_base (4)..(4): a, c, u, g, unknown or other
  modified_base (9)..(9): a, c, u, g, unknown or other
uuunuuuanaauaaaaccc

SEQ ID NO: 2409809 - RNA, 19 nt, Artificial Sequence
  Description of Artificial Sequence: Synthetic oligonucleotide
  modified_base (5)..(5): a, c, u, g, unknown or other
  modified_base (10)..(10): a, c, u, g, unknown or other
uuuunuuuanaauaaaacc

SEQ ID NO: 2409810 - RNA, 19 nt, Artificial Sequence
  Description of Artificial Sequence: Synthetic oligonucleotide
  modified_base (3)..(3): a, c, u, g, unknown or other
  modified_base (8)..(8): a, c, u, g, unknown or other
uunuuuanaauaaaacccc

SEQ ID NO: 2409811 - RNA, 19 nt, Artificial Sequence
  Description of Artificial Sequence: Synthetic oligonucleotide
gaggacuuggacuugaagg

SEQ ID NO: 2409812 - RNA, 19 nt, Artificial Sequence
  Description of Artificial Sequence: Synthetic oligonucleotide
uauguaaggguacugguug

SEQ ID NO: 2409813 - RNA, 19 nt, Artificial Sequence
  Description of Artificial Sequence: Synthetic oligonucleotide
aauggugacugguacuaac

SEQ ID NO: 2409814 - RNA, 19 nt, Artificial Sequence
  Description of Artificial Sequence: Synthetic oligonucleotide
uuauauguaaggguacugg

SEQ ID NO: 2409815 - RNA, 19 nt, Artificial Sequence
  Description of Artificial Sequence: Synthetic oligonucleotide
uaggcugucacauucuacc

SEQ ID NO: 2409816 - RNA, 19 nt, Artificial Sequence
  Description of Artificial Sequence: Synthetic oligonucleotide
uggauauccaguguagacg

SEQ ID NO: 2409817 - RNA, 19 nt, Artificial Sequence
  Description of Artificial Sequence: Synthetic oligonucleotide
cauucuaccaacacuucgc

SEQ ID NO: 2409818 - RNA, 19 nt, Artificial Sequence
  Description of Artificial Sequence: Synthetic oligonucleotide
acauucuaccaacacuucg

SEQ ID NO: 2409819 - RNA, 19 nt, Artificial Sequence
  Description of Artificial Sequence: Synthetic oligonucleotide
cuugaaggaggaugaaugg

SEQ ID NO: 2409820 - RNA, 19 nt, Artificial Sequence
  Description of Artificial Sequence: Synthetic oligonucleotide
agugauguaggccugcugu

SEQ ID NO: 2409821 - RNA, 19 nt, Artificial Sequence
  Description of Artificial Sequence: Synthetic oligonucleotide
uuugcauuguuggugugcg

SEQ ID NO: 2409822 - RNA, 19 nt, Artificial Sequence
  Description of Artificial Sequence: Synthetic oligonucleotide
ugguggacgaugcuggccg

SEQ ID NO: 2409823 - RNA, 19 nt, Artificial Sequence
  Description of Artificial Sequence: Synthetic oligonucleotide
ugcuguauagguguagagg

SEQ ID NO: 2409824 - RNA, 19 nt, Artificial Sequence
  Description of Artificial Sequence: Synthetic oligonucleotide
uguuuauauguaaggguac

SEQ ID NO: 2409825 - RNA, 19 nt, Artificial Sequence
  Description of Artificial Sequence: Synthetic oligonucleotide
uggacuugaaggaggauga

SEQ ID NO: 2409826 - RNA, 19 nt, Artificial Sequence
  Description of Artificial Sequence: Synthetic oligonucleotide
uauauguaaggguacuggu

SEQ ID NO: 2409827 - RNA, 19 nt, Artificial Sequence
  Description of Artificial Sequence: Synthetic oligonucleotide
gaugaauggugacugguac

SEQ ID NO: 2409828 - RNA, 19 nt, Artificial Sequence
  Description of Artificial Sequence: Synthetic oligonucleotide
aaggaggaugaauggugac

SEQ ID NO: 2409829 - RNA, 19 nt, Artificial Sequence
  Description of Artificial Sequence: Synthetic oligonucleotide
ggauauccaguguagacgg

SEQ ID NO: 2409830 - RNA, 19 nt, Artificial Sequence
  Description of Artificial Sequence: Synthetic oligonucleotide
uggugacugguacuaacgg

SEQ ID NO: 2409831 - RNA, 19 nt, Artificial Sequence
  Description of Artificial Sequence: Synthetic oligonucleotide
cuguguuuauauguaaggg

SEQ ID NO: 2409832 - RNA, 19 nt, Artificial Sequence
  Description of Artificial Sequence: Synthetic oligonucleotide
uguauagguguagagguga

SEQ ID NO: 2409833 - RNA, 19 nt, Artificial Sequence
  Description of Artificial Sequence: Synthetic oligonucleotide
ugugcgggaagguguaugg

SEQ ID NO: 2409834 - RNA, 19 nt, Artificial Sequence
  Description of Artificial Sequence: Synthetic oligonucleotide
gacggugauucccaguccg

SEQ ID NO: 2409835 - RNA, 19 nt, Artificial Sequence
  Description of Artificial Sequence: Synthetic oligonucleotide
acuugaaggaggaugaaug

SEQ ID NO: 2409836 - RNA, 19 nt, Artificial Sequence
  Description of Artificial Sequence: Synthetic oligonucleotide
uuggacuugaaggaggaug

SEQ ID NO: 2409837 - RNA, 19 nt, Artificial Sequence
  Description of Artificial Sequence: Synthetic oligonucleotide
uaaggguacugguugaccu

SEQ ID NO: 2409838 - RNA, 19 nt, Artificial Sequence
  Description of Artificial Sequence: Synthetic oligonucleotide
agguguauggagccugggc

SEQ ID NO: 2409839 - RNA, 19 nt, Artificial Sequence
  Description of Artificial Sequence: Synthetic oligonucleotide
gaggucacggugcuggagg

SEQ ID NO: 2409840 - RNA, 19 nt, Artificial Sequence
  Description of Artificial Sequence: Synthetic oligonucleotide
uuuauauguaaggguacug

SEQ ID NO: 2409841 - RNA, 19 nt, Artificial Sequence
  Description of Artificial Sequence: Synthetic oligonucleotide
ugggcuacggugccggugg

SEQ ID NO: 2409842 - RNA, 19 nt, Artificial Sequence
  Description of Artificial Sequence: Synthetic oligonucleotide
gcugauguacgucuggugg

SEQ ID NO: 2409843 - RNA, 19 nt, Artificial Sequence
  Description of Artificial Sequence: Synthetic oligonucleotide
ucaguggauauccagugua

SEQ ID NO: 2409844 - RNA, 19 nt, Artificial Sequence
  Description of Artificial Sequence: Synthetic oligonucleotide
gacgaugcuggccggauag

SEQ ID NO: 2409845 - RNA, 19 nt, Artificial Sequence
  Description of Artificial Sequence: Synthetic oligonucleotide
ugcgggaagguguauggag

SEQ ID NO: 2409846 - RNA, 19 nt, Artificial Sequence
  Description of Artificial Sequence: Synthetic oligonucleotide
ucgacggugauucccaguc

SEQ ID NO: 2409847 - RNA, 19 nt, Artificial Sequence
  Description of Artificial Sequence: Synthetic oligonucleotide
gguguauggagccugggcc

SEQ ID NO: 2409848 - RNA, 19 nt, Artificial Sequence
  Description of Artificial Sequence: Synthetic oligonucleotide
uaggcgauggcuccugaug

SEQ ID NO: 2409849 - RNA, 19 nt, Artificial Sequence
  Description of Artificial Sequence: Synthetic oligonucleotide
gacuuggacuugaaggagg

SEQ ID NO: 2409850 - RNA, 19 nt, Artificial Sequence
  Description of Artificial Sequence: Synthetic oligonucleotide
gcucacagggacuuggugg

SEQ ID NO: 2409851 - RNA, 19 nt, Artificial Sequence
  Description of Artificial Sequence: Synthetic oligonucleotide
ugggcguugcugccgauag

SEQ ID NO: 2409852 - RNA, 19 nt, Artificial Sequence
  Description of Artificial Sequence: Synthetic oligonucleotide
ucuguugggagcuccucca

SEQ ID NO: 2409853 - RNA, 19 nt, Artificial Sequence
  Description of Artificial Sequence: Synthetic oligonucleotide
uauagguguagaggugagg

SEQ ID NO: 2409854 - RNA, 19 nt, Artificial Sequence
  Description of Artificial Sequence: Synthetic oligonucleotide
ccuguguuuauauguaagg

SEQ ID NO: 2409855 - RNA, 19 nt, Artificial Sequence
  Description of Artificial Sequence: Synthetic oligonucleotide
ugccccauuugcauuguug

SEQ ID NO: 2409856 - RNA, 19 nt, Artificial Sequence
  Description of Artificial Sequence: Synthetic oligonucleotide
guaggagugauguaggccu

SEQ ID NO: 2409857 - RNA, 19 nt, Artificial Sequence
  Description of Artificial Sequence: Synthetic oligonucleotide
guggauauccaguguagac

SEQ ID NO: 2409858 - RNA, 19 nt, Artificial Sequence
  Description of Artificial Sequence: Synthetic oligonucleotide
guugggagcuccuccaccc

SEQ ID NO: 2409859 - RNA, 19 nt, Artificial Sequence
  Description of Artificial Sequence: Synthetic oligonucleotide
ucccaguccggucuguagc

SEQ ID NO: 2409860 - RNA, 19 nt, Artificial Sequence
  Description of Artificial Sequence: Synthetic oligonucleotide
ugaauggugacugguacua

SEQ ID NO: 2409861 - RNA, 19 nt, Artificial Sequence
  Description of Artificial Sequence: Synthetic oligonucleotide
caguguggcgugcugagcc

SEQ ID NO: 2409862 - RNA, 19 nt, Artificial Sequence
  Description of Artificial Sequence: Synthetic oligonucleotide
uggagccuagggcuguagg

SEQ ID NO: 2409863 - RNA, 19 nt, Artificial Sequence
  Description of Artificial Sequence: Synthetic oligonucleotide
gacugguacuaacggcugg

SEQ ID NO: 2409864 - RNA, 19 nt, Artificial Sequence
  Description of Artificial Sequence: Synthetic oligonucleotide
auggugacugguacuaacg

SEQ ID NO: 2409865 - RNA, 19 nt, Artificial Sequence
  Description of Artificial Sequence: Synthetic oligonucleotide
uguugggagcuccuccacc

SEQ ID NO: 2409866 - RNA, 19 nt, Artificial Sequence
  Description of Artificial Sequence: Synthetic oligonucleotide
ugacugguacuaacggcug

SEQ ID NO: 2409867 - RNA, 19 nt, Artificial Sequence
  Description of Artificial Sequence: Synthetic oligonucleotide
cuaacggcuggcccuaggc

SEQ ID NO: 2409868 - RNA, 19 nt, Artificial Sequence
  Description of Artificial Sequence: Synthetic oligonucleotide
augaauggugacugguacu

SEQ ID NO: 2409869 - RNA, 19 nt, Artificial Sequence
  Description of Artificial Sequence: Synthetic oligonucleotide
uguagccaugugcugcuga

SEQ ID NO: 2409870 - RNA, 19 nt, Artificial Sequence
  Description of Artificial Sequence: Synthetic oligonucleotide
guguuuauauguaagggua

SEQ ID NO: 2409871 - RNA, 19 nt, Artificial Sequence
  Description of Artificial Sequence: Synthetic oligonucleotide
accaacacuucgcuggccu

SEQ ID NO: 2409872 - RNA, 19 nt, Artificial Sequence
  Description of Artificial Sequence: Synthetic oligonucleotide
uguaggccugcugucgacg

SEQ ID NO: 2409873 - RNA, 19 nt, Artificial Sequence
  Description of Artificial Sequence: Synthetic oligonucleotide
guagccaugugcugcugag

SEQ ID NO: 2409874 - RNA, 19 nt, Artificial Sequence
  Description of Artificial Sequence: Synthetic oligonucleotide
gccccauuugcauuguugg

SEQ ID NO: 2409875 - RNA, 19 nt, Artificial Sequence
  Description of Artificial Sequence: Synthetic oligonucleotide
accaggugggcuacggugc

SEQ ID NO: 2409876 - RNA, 19 nt, Artificial Sequence
  Description of Artificial Sequence: Synthetic oligonucleotide
guaggugcuguauaggugu

SEQ ID NO: 2409877 - RNA, 19 nt, Artificial Sequence
  Description of Artificial Sequence: Synthetic oligonucleotide
caguggauauccaguguag

SEQ ID NO: 2409878 - RNA, 19 nt, Artificial Sequence
  Description of Artificial Sequence: Synthetic oligonucleotide
ugauguacgucuggugggc

SEQ ID NO: 2409879 - RNA, 19 nt, Artificial Sequence
  Description of Artificial Sequence: Synthetic oligonucleotide
aacacuucgcuggccuggg

SEQ ID NO: 2409880 - RNA, 19 nt, Artificial Sequence
  Description of Artificial Sequence: Synthetic oligonucleotide
uguagacgguggaggcugg

SEQ ID NO: 2409881 - RNA, 19 nt, Artificial Sequence
  Description of Artificial Sequence: Synthetic oligonucleotide
gaagguguauggagccugg

SEQ ID NO: 2409882 - RNA, 19 nt, Artificial Sequence
  Description of Artificial Sequence: Synthetic oligonucleotide
uccaguguagacgguggag

SEQ ID NO: 2409883 - RNA, 19 nt, Artificial Sequence
  Description of Artificial Sequence: Synthetic oligonucleotide
cuguauagguguagaggug

SEQ ID NO: 2409884 - RNA, 19 nt, Artificial Sequence
  Description of Artificial Sequence: Synthetic oligonucleotide
uggugugcggcaccugcag

SEQ ID NO: 2409885 - RNA, 19 nt, Artificial Sequence
  Description of Artificial Sequence: Synthetic oligonucleotide
ugcucacagggacuuggug

SEQ ID NO: 2409886 - RNA, 19 nt, Artificial Sequence
  Description of Artificial Sequence: Synthetic oligonucleotide
gacgguggaggcuggugag

SEQ ID NO: 2409887 - RNA, 19 nt, Artificial Sequence
  Description of Artificial Sequence: Synthetic oligonucleotide
guaggccugcugucgacgg

SEQ ID NO: 2409888 - RNA, 19 nt, Artificial Sequence
  Description of Artificial Sequence: Synthetic oligonucleotide
ggugacugguacuaacggc

SEQ ID NO: 2409889 - RNA, 19 nt, Artificial Sequence
  Description of Artificial Sequence: Synthetic oligonucleotide
ggauacuggacuggggugg

SEQ ID NO: 2409890 - RNA, 19 nt, Artificial Sequence
  Description of Artificial Sequence: Synthetic oligonucleotide
aggacccggggccccaugc

SEQ ID NO: 2409891 - RNA, 19 nt, Artificial Sequence
  Description of Artificial Sequence: Synthetic oligonucleotide
cuugggaugccaccaggug

SEQ ID NO: 2409892 - RNA, 19 nt, Artificial Sequence
  Description of Artificial Sequence: Synthetic oligonucleotide
uggccggauaggcagugug

SEQ ID NO: 2409893 - RNA, 19 nt, Artificial Sequence
  Description of Artificial Sequence: Synthetic oligonucleotide
acuucgcuggccugggucu

SEQ ID NO: 2409894 - RNA, 19 nt, Artificial Sequence
  Description of Artificial Sequence: Synthetic oligonucleotide
auguaaggguacugguuga

SEQ ID NO: 2409895 - RNA, 19 nt, Artificial Sequence
  Description of Artificial Sequence: Synthetic oligonucleotide
guagaggugaggcugggua

SEQ ID NO: 2409896 - RNA, 19 nt, Artificial Sequence
  Description of Artificial Sequence: Synthetic oligonucleotide
uguugugcgggaaggugua

SEQ ID NO: 2409897 - RNA, 19 nt, Artificial Sequence
  Description of Artificial Sequence: Synthetic oligonucleotide
aagguguauggagccuggg

SEQ ID NO: 2409898 - RNA, 19 nt, Artificial Sequence
  Description of Artificial Sequence: Synthetic oligonucleotide
aaacugggccggauacugg

SEQ ID NO: 2409899 - RNA, 19 nt, Artificial Sequence
  Description of Artificial Sequence: Synthetic oligonucleotide
gagccuagggcuguaggug

SEQ ID NO: 2409900 - RNA, 19 nt, Artificial Sequence
  Description of Artificial Sequence: Synthetic oligonucleotide
gucuguugggagcuccucc

SEQ ID NO: 2409901 - RNA, 19 nt, Artificial Sequence
  Description of Artificial Sequence: Synthetic oligonucleotide
gugaggguaggacccgggg

SEQ ID NO: 2409902 - RNA, 19 nt, Artificial Sequence
  Description of Artificial Sequence: Synthetic oligonucleotide
aaggguacugguugaccuu

SEQ ID NO: 2409903 - RNA, 19 nt, Artificial Sequence
  Description of Artificial Sequence: Synthetic oligonucleotide
gugcuguauagguguagag

SEQ ID NO: 2409904 - RNA, 19 nt, Artificial Sequence
  Description of Artificial Sequence: Synthetic oligonucleotide
cuaccaacacuucgcuggc

SEQ ID NO: 2409905 - RNA, 19 nt, Artificial Sequence
  Description of Artificial Sequence: Synthetic oligonucleotide
gauguacgucuggugggcg

SEQ ID NO: 2409906 - RNA, 19 nt, Artificial Sequence
  Description of Artificial Sequence: Synthetic oligonucleotide
auguaggccugcugucgac

SEQ ID NO: 2409907 - RNA, 19 nt, Artificial Sequence
  Description of Artificial Sequence: Synthetic oligonucleotide
gcuguauagguguagaggu

SEQ ID NO: 2409908 - RNA, 19 nt, Artificial Sequence
  Description of Artificial Sequence: Synthetic oligonucleotide
gguggggaugcacagugcc

SEQ ID NO: 2409909 - RNA, 19 nt, Artificial Sequence
  Description of Artificial Sequence: Synthetic oligonucleotide
cacaguguggcgugcugag

SEQ ID NO: 2409910 - RNA, 19 nt, Artificial Sequence
  Description of Artificial Sequence: Synthetic oligonucleotide
aggaggaugaauggugacu

SEQ ID NO: 2409911 - RNA, 19 nt, Artificial Sequence
  Description of Artificial Sequence: Synthetic oligonucleotide
guguagacgguggaggcug

SEQ ID NO: 2409912 - RNA, 19 nt, Artificial Sequence
  Description of Artificial Sequence: Synthetic oligonucleotide
aggagugauguaggccugc

SEQ ID NO: 2409913 - RNA, 19 nt, Artificial Sequence
  Description of Artificial Sequence: Synthetic oligonucleotide
ggcuguaggugcuguauag

SEQ ID NO: 2409914 - RNA, 19 nt, Artificial Sequence
  Description of Artificial Sequence: Synthetic oligonucleotide
acuaacggcuggcccuagg

SEQ ID NO: 2409915 - RNA, 19 nt, Artificial Sequence
  Description of Artificial Sequence: Synthetic oligonucleotide
aguggauauccaguguaga

SEQ ID NO: 2409916 - RNA, 19 nt, Artificial Sequence
  Description of Artificial Sequence: Synthetic oligonucleotide
ugggccggauacuggacug

SEQ ID NO: 2409917 - RNA, 19 nt, Artificial Sequence
  Description of Artificial Sequence: Synthetic oligonucleotide
cugcugucgacggugauuc

SEQ ID NO: 2409918 - RNA, 19 nt, Artificial Sequence
  Description of Artificial Sequence: Synthetic oligonucleotide
ugcugcacaguguggcgug

SEQ ID NO: 2409919 - RNA, 19 nt, Artificial Sequence
  Description of Artificial Sequence: Synthetic oligonucleotide
ggacucaguggauauccag

SEQ ID NO: 2409920 - RNA, 19 nt, Artificial Sequence
  Description of Artificial Sequence: Synthetic oligonucleotide
gacugggguggaugguggg

SEQ ID NO: 2409921 - RNA, 19 nt, Artificial Sequence
  Description of Artificial Sequence: Synthetic oligonucleotide
gucuggugggcgaaacugg

SEQ ID NO: 2409922 - RNA, 19 nt, Artificial Sequence
  Description of Artificial Sequence: Synthetic oligonucleotide
uacuggacugggguggaug

SEQ ID NO: 2409923 - RNA, 19 nt, Artificial Sequence
  Description of Artificial Sequence: Synthetic oligonucleotide
ugcacaguguggcgugcug

SEQ ID NO: 2409924 - RNA, 19 nt, Artificial Sequence
  Description of Artificial Sequence: Synthetic oligonucleotide
uuggugugcggcaccugca

SEQ ID NO: 2409925 - RNA, 19 nt, Artificial Sequence
  Description of Artificial Sequence: Synthetic oligonucleotide
auauguaaggguacugguu

SEQ ID NO: 2409926 - RNA, 19 nt, Artificial Sequence
  Description of Artificial Sequence: Synthetic oligonucleotide
guauagguguagaggugag

SEQ ID NO: 2409927 - RNA, 19 nt, Artificial Sequence
  Description of Artificial Sequence: Synthetic oligonucleotide
gguggauggugggugaggg

SEQ ID NO: 2409928 - RNA, 19 nt, Artificial Sequence
  Description of Artificial Sequence: Synthetic oligonucleotide
gguaggagugauguaggcc

SEQ ID NO: 2409929 - RNA, 19 nt, Artificial Sequence
  Description of Artificial Sequence: Synthetic oligonucleotide
ugagauugaggggcugcug

SEQ ID NO: 2409930 - RNA, 19 nt, Artificial Sequence
  Description of Artificial Sequence: Synthetic oligonucleotide
guguauggagccugggcca

SEQ ID NO: 2409931 - RNA, 19 nt, Artificial Sequence
  Description of Artificial Sequence: Synthetic oligonucleotide
uugugcgggaagguguaug

SEQ ID NO: 2409932 - RNA, 19 nt, Artificial Sequence
  Description of Artificial Sequence: Synthetic oligonucleotide
cuccugaugagcucccuga

SEQ ID NO: 2409933 - RNA, 19 nt, Artificial Sequence
  Description of Artificial Sequence: Synthetic oligonucleotide
cuacggugccgguggagcc

SEQ ID NO: 2409934 - RNA, 19 nt, Artificial Sequence
  Description of Artificial Sequence: Synthetic oligonucleotide
guuuauauguaaggguacu

SEQ ID NO: 2409935 - RNA, 19 nt, Artificial Sequence
  Description of Artificial Sequence: Synthetic oligonucleotide
ggcguugcugccgauaggc

SEQ ID NO: 2409936 - RNA, 19 nt, Artificial Sequence
  Description of Artificial Sequence: Synthetic oligonucleotide
ugucgacggugauucccag

SEQ ID NO: 2409937 - RNA, 19 nt, Artificial Sequence
  Description of Artificial Sequence: Synthetic oligonucleotide
ggugggcgaaacugggccg

SEQ ID NO: 2409938 - RNA, 19 nt, Artificial Sequence
  Description of Artificial Sequence: Synthetic oligonucleotide
gguguagaggugaggcugg

SEQ ID NO: 2409939 - RNA, 19 nt, Artificial Sequence
  Description of Artificial Sequence: Synthetic oligonucleotide
gaggcgcugauguacgucu

SEQ ID NO: 2409940 - RNA, 19 nt, Artificial Sequence
  Description of Artificial Sequence: Synthetic oligonucleotide
cauuguuggugugcggcac

SEQ ID NO: 2409941 - RNA, 19 nt, Artificial Sequence
  Description of Artificial Sequence: Synthetic oligonucleotide
ggugaggcgcugauguacg

SEQ ID NO: 2409942 - RNA, 19 nt, Artificial Sequence
  Description of Artificial Sequence: Synthetic oligonucleotide
gaugcuggccggauaggca

SEQ ID NO: 2409943 - RNA, 19 nt, Artificial Sequence
  Description of Artificial Sequence: Synthetic oligonucleotide
ugguggaggucacggugcu

SEQ ID NO: 2409944 - RNA, 19 nt, Artificial Sequence
  Description of Artificial Sequence: Synthetic oligonucleotide
gguacuaacggcuggcccu

SEQ ID NO: 2409945 - RNA, 19 nt, Artificial Sequence
  Description of Artificial Sequence: Synthetic oligonucleotide
aguguagacgguggaggcu

SEQ ID NO: 2409946 - RNA, 19 nt, Artificial Sequence
  Description of Artificial Sequence: Synthetic oligonucleotide
aguguggcgugcugagccu

SEQ ID NO: 2409947 - RNA, 19 nt, Artificial Sequence
  Description of Artificial Sequence: Synthetic oligonucleotide
uggcgugcugagccuuggg

SEQ ID NO: 2409948 - RNA, 19 nt, Artificial Sequence
  Description of Artificial Sequence: Synthetic oligonucleotide
cacuucgcuggccuggguc

SEQ ID NO: 2409949 - RNA, 19 nt, Artificial Sequence
  Description of Artificial Sequence: Synthetic oligonucleotide
gacucaguggauauccagu

SEQ ID NO: 2409950 - RNA, 19 nt, Artificial Sequence
  Description of Artificial Sequence: Synthetic oligonucleotide
gugauucccaguccggucu

SEQ ID NO: 2409951 - RNA, 19 nt, Artificial Sequence
  Description of Artificial Sequence: Synthetic oligonucleotide
agccuugggaugccaccag

SEQ ID NO: 2409952 - RNA, 19 nt, Artificial Sequence
  Description of Artificial Sequence: Synthetic oligonucleotide
gagccuggcugagauugag

SEQ ID NO: 2409953 - RNA, 19 nt, Artificial Sequence
  Description of Artificial Sequence: Synthetic oligonucleotide
cccauuugcauuguuggug

SEQ ID NO: 2409954 - RNA, 19 nt, Artificial Sequence
  Description of Artificial Sequence: Synthetic oligonucleotide
uagacgguggaggcuggug

SEQ ID NO: 2409955 - RNA, 19 nt, Artificial Sequence
  Description of Artificial Sequence: Synthetic oligonucleotide
cugucgacggugauuccca

SEQ ID NO: 2409956 - RNA, 19 nt, Artificial Sequence
  Description of Artificial Sequence: Synthetic oligonucleotide
uuguuggugugcggcaccu

SEQ ID NO: 2409957 - RNA, 19 nt, Artificial Sequence
  Description of Artificial Sequence: Synthetic oligonucleotide
ggacuuggacuugaaggag

SEQ ID NO: 2409958 - RNA, 19 nt, Artificial Sequence
  Description of Artificial Sequence: Synthetic oligonucleotide
auaggcgauggcuccugau

SEQ ID NO: 2409959 - RNA, 19 nt, Artificial Sequence
  Description of Artificial Sequence: Synthetic oligonucleotide
gcgaaacugggccggauac

SEQ ID NO: 2409960 - RNA, 19 nt, Artificial Sequence
  Description of Artificial Sequence: Synthetic oligonucleotide
uguauggagccugggccau

SEQ ID NO: 2409961 - RNA, 19 nt, Artificial Sequence
  Description of Artificial Sequence: Synthetic oligonucleotide
uguagaggugaggcugggu

SEQ ID NO: 2409962 - RNA, 19 nt, Artificial Sequence
  Description of Artificial Sequence: Synthetic oligonucleotide
ccggucuguagccaugugc

SEQ ID NO: 2409963 - RNA, 19 nt, Artificial Sequence
  Description of Artificial Sequence: Synthetic oligonucleotide
uagccaugugcugcugagc

SEQ ID NO: 2409964 - RNA, 19 nt, Artificial Sequence
  Description of Artificial Sequence: Synthetic oligonucleotide
ugaggcgcugauguacguc

SEQ ID NO: 2409965 - RNA, 19 nt, Artificial Sequence
  Description of Artificial Sequence: Synthetic oligonucleotide
acugggccggauacuggac

SEQ ID NO: 2409966 - RNA, 19 nt, Artificial Sequence
  Description of Artificial Sequence: Synthetic oligonucleotide
acggugauucccaguccgg

SEQ ID NO: 2409967 - RNA, 19 nt, Artificial Sequence
  Description of Artificial Sequence: Synthetic oligonucleotide
gccgauaggcgauggcucc

SEQ ID NO: 2409968 - RNA, 19 nt, Artificial Sequence
  Description of Artificial Sequence: Synthetic oligonucleotide
uaggugcuguauaggugua

SEQ ID NO: 2409969 - RNA, 19 nt, Artificial Sequence
  Description of Artificial Sequence: Synthetic oligonucleotide
uacgucuggugggcgaaac

SEQ ID NO: 2409970 - RNA, 19 nt, Artificial Sequence
  Description of Artificial Sequence: Synthetic oligonucleotide
uccggucuguagccaugug

SEQ ID NO: 2409971 - RNA, 19 nt, Artificial Sequence
  Description of Artificial Sequence: Synthetic oligonucleotide
ggugauucccaguccgguc

SEQ ID NO: 2409972 - RNA, 19 nt, Artificial Sequence
  Description of Artificial Sequence: Synthetic oligonucleotide
acgucuggugggcgaaacu

SEQ ID NO: 2409973 - RNA, 19 nt, Artificial Sequence
  Description of Artificial Sequence: Synthetic oligonucleotide
gcugucgacggugauuccc

SEQ ID NO: 2409974 - RNA, 19 nt, Artificial Sequence
  Description of Artificial Sequence: Synthetic oligonucleotide
agccuggcugagauugagg

SEQ ID NO: 2409975 - RNA, 19 nt, Artificial Sequence
  Description of Artificial Sequence: Synthetic oligonucleotide
ggugcuguauagguguaga

SEQ ID NO: 2409976 - RNA, 19 nt, Artificial Sequence
  Description of Artificial Sequence: Synthetic oligonucleotide
uaggccugcugucgacggu

SEQ ID NO: 2409977 - RNA, 19 nt, Artificial Sequence
  Description of Artificial Sequence: Synthetic oligonucleotide
ugugcggcaccugcaguau

SEQ ID NO: 2409978 - RNA, 19 nt, Artificial Sequence
  Description of Artificial Sequence: Synthetic oligonucleotide
ggcgauggcuccugaugag

SEQ ID NO: 2409979 - RNA, 19 nt, Artificial Sequence
  Description of Artificial Sequence: Synthetic oligonucleotide
acgaugcuggccggauagg

SEQ ID NO: 2409980 - RNA, 19 nt, Artificial Sequence
  Description of Artificial Sequence: Synthetic oligonucleotide
ucgcuggccugggucuucg

SEQ ID NO: 2409981 - RNA, 19 nt, Artificial Sequence
  Description of Artificial Sequence: Synthetic oligonucleotide
gcuacggugccgguggagc

SEQ ID NO: 2409982 - RNA, 19 nt, Artificial Sequence
  Description of Artificial Sequence: Synthetic oligonucleotide
gacuugaaggaggaugaau

SEQ ID NO: 2409983 - RNA, 19 nt, Artificial Sequence
  Description of Artificial Sequence: Synthetic oligonucleotide
uaccaacacuucgcuggcc

SEQ ID NO: 2409984 - RNA, 19 nt, Artificial Sequence
  Description of Artificial Sequence: Synthetic oligonucleotide
gcgggaagguguauggagc

SEQ ID NO: 2409985 - RNA, 19 nt, Artificial Sequence
  Description of Artificial Sequence: Synthetic oligonucleotide
gauaggcagugugcugcac

SEQ ID NO: 2409986 - RNA, 19 nt, Artificial Sequence
  Description of Artificial Sequence: Synthetic oligonucleotide
uacggugccgguggagccu

SEQ ID NO: 2409987 - RNA, 19 nt, Artificial Sequence
  Description of Artificial Sequence: Synthetic oligonucleotide
gugugcggcaccugcagua

SEQ ID NO: 2409988 - RNA, 19 nt, Artificial Sequence
  Description of Artificial Sequence: Synthetic oligonucleotide
gccuugggaugccaccagg

SEQ ID NO: 2409989 - RNA, 19 nt, Artificial Sequence
  Description of Artificial Sequence: Synthetic oligonucleotide
gacccggggccccaugcuc

SEQ ID NO: 2409990 - RNA, 19 nt, Artificial Sequence
  Description of Artificial Sequence: Synthetic oligonucleotide
gccccaugcucacagggac

SEQ ID NO: 2409991 - RNA, 19 nt, Artificial Sequence
  Description of Artificial Sequence: Synthetic oligonucleotide
gcucccugggucuguuggg

SEQ ID NO: 2409992 - RNA, 19 nt, Artificial Sequence
  Description of Artificial Sequence: Synthetic oligonucleotide
gguggacgaugcuggccgg

SEQ ID NO: 2409993 - RNA, 19 nt, Artificial Sequence
  Description of Artificial Sequence: Synthetic oligonucleotide
gaauggugacugguacuaa

SEQ ID NO: 2409994 - RNA, 19 nt, Artificial Sequence
  Description of Artificial Sequence: Synthetic oligonucleotide
gcccuaggcugucacauuc

SEQ ID NO: 2409995 - RNA, 19 nt, Artificial Sequence
  Description of Artificial Sequence: Synthetic oligonucleotide
uguuggugugcggcaccug

SEQ ID NO: 2409996 - RNA, 19 nt, Artificial Sequence
  Description of Artificial Sequence: Synthetic oligonucleotide
ugcugucgacggugauucc

SEQ ID NO: 2409997 - RNA, 19 nt, Artificial Sequence
  Description of Artificial Sequence: Synthetic oligonucleotide
gguaggaaggugggcagca

SEQ ID NO: 2409998 - RNA, 19 nt, Artificial Sequence
  Description of Artificial Sequence: Synthetic oligonucleotide
ccugaagaguggccacugg

SEQ ID NO: 2409999 - RNA, 19 nt, Artificial Sequence
  Description of Artificial Sequence: Synthetic oligonucleotide
uggacgaugcuggccggau

SEQ ID NO: 2410000 - RNA, 19 nt, Artificial Sequence
  Description of Artificial Sequence: Synthetic oligonucleotide
ggugaggguaggacccggg

SEQ ID NO: 2410001 - RNA, 19 nt, Artificial Sequence
  Description of Artificial Sequence: Synthetic oligonucleotide
cugguugaccuuggcagga

SEQ ID NO: 2410002 - RNA, 19 nt, Artificial Sequence
  Description of Artificial Sequence: Synthetic oligonucleotide
gcuccugaugagcucccug

SEQ ID NO: 2410003 - RNA, 19 nt, Artificial Sequence
  Description of Artificial Sequence: Synthetic oligonucleotide
ggcugucacauucuaccaa

SEQ ID NO: 2410004 - RNA, 19 nt, Artificial Sequence
  Description of Artificial Sequence: Synthetic oligonucleotide
ggcgugcugagccuuggga

SEQ ID NO: 2410005 - RNA, 19 nt, Artificial Sequence
  Description of Artificial Sequence: Synthetic oligonucleotide
ggccggauacuggacuggg

SEQ ID NO: 2410006 - RNA, 19 nt, Artificial Sequence
  Description of Artificial Sequence: Synthetic oligonucleotide
cgugcugagccuugggaug

SEQ ID NO: 2410007 - RNA, 19 nt, Artificial Sequence
  Description of Artificial Sequence: Synthetic oligonucleotide
guggcgugcugagccuugg

SEQ ID NO: 2410008 - RNA, 19 nt, Artificial Sequence
  Description of Artificial Sequence: Synthetic oligonucleotide
uacuaacggcuggcccuag

SEQ ID NO: 2410009 - RNA, 19 nt, Artificial Sequence
  Description of Artificial Sequence: Synthetic oligonucleotide
guugcugccgauaggcgau

SEQ ID NO: 2410010 - RNA, 19 nt, Artificial Sequence
  Description of Artificial Sequence: Synthetic oligonucleotide
ccauuugcauuguuggugu

SEQ ID NO: 2410011 - RNA, 19 nt, Artificial Sequence
  Description of Artificial Sequence: Synthetic oligonucleotide
gcucccugaagaguggcca

SEQ ID NO: 2410012 - RNA, 19 nt, Artificial Sequence
  Description of Artificial Sequence: Synthetic oligonucleotide
ugcgggccccuccuguguu

SEQ ID NO: 2410013 - RNA, 19 nt, Artificial Sequence
  Description of Artificial Sequence: Synthetic oligonucleotide
ggaugaauggugacuggua

SEQ ID NO: 2410014 - RNA, 19 nt, Artificial Sequence
  Description of Artificial Sequence: Synthetic oligonucleotide
cccugggucuguugggagc

SEQ ID NO: 2410015 - RNA, 19 nt, Artificial Sequence
  Description of Artificial Sequence: Synthetic oligonucleotide
ggccggauaggcagugugc

SEQ ID NO: 2410016 - RNA, 19 nt, Artificial Sequence
  Description of Artificial Sequence: Synthetic oligonucleotide
gcugccgauaggcgauggc

SEQ ID NO: 2410017 - RNA, 19 nt, Artificial Sequence
  Description of Artificial Sequence: Synthetic oligonucleotide
cugccgauaggcgauggcu

SEQ ID NO: 2410018 - RNA, 19 nt, Artificial Sequence
  Description of Artificial Sequence: Synthetic oligonucleotide
cgucuggugggcgaaacug

SEQ ID NO: 2410019 - RNA, 19 nt, Artificial Sequence
  Description of Artificial Sequence: Synthetic oligonucleotide
guggagccuagggcuguag

SEQ ID NO: 2410020 - RNA, 19 nt, Artificial Sequence
  Description of Artificial Sequence: Synthetic oligonucleotide
cccguccugccccauuugc

SEQ ID NO: 2410021 - RNA, 19 nt, Artificial Sequence
  Description of Artificial Sequence: Synthetic oligonucleotide
ccaacacuucgcuggccug

SEQ ID NO: 2410022 - RNA, 19 nt, Artificial Sequence
  Description of Artificial Sequence: Synthetic oligonucleotide
guacuaacggcuggcccua

SEQ ID NO: 2410023 - RNA, 19 nt, Artificial Sequence
  Description of Artificial Sequence: Synthetic oligonucleotide
acacuucgcuggccugggu

SEQ ID NO: 2410024 - RNA, 19 nt, Artificial Sequence
  Description of Artificial Sequence: Synthetic oligonucleotide
ggggaugcacagugccaug

SEQ ID NO: 2410025 - RNA, 19 nt, Artificial Sequence
  Description of Artificial Sequence: Synthetic oligonucleotide
gauauccaguguagacggu

SEQ ID NO: 2410026 - RNA, 19 nt, Artificial Sequence
  Description of Artificial Sequence: Synthetic oligonucleotide
guauggagccugggccaug

SEQ ID NO: 2410027 - RNA, 19 nt, Artificial Sequence
  Description of Artificial Sequence: Synthetic oligonucleotide
ugggcgaaacugggccgga

SEQ ID NO: 2410028 - RNA, 19 nt, Artificial Sequence
  Description of Artificial Sequence: Synthetic oligonucleotide
gggcguugcugccgauagg

SEQ ID NO: 2410029 - RNA, 19 nt, Artificial Sequence
  Description of Artificial Sequence: Synthetic oligonucleotide
cacggugcuggaggacuug

SEQ ID NO: 2410030 - RNA, 19 nt, Artificial Sequence
  Description of Artificial Sequence: Synthetic oligonucleotide
ucccugcgggccccuccug

SEQ ID NO: 2410031 - RNA, 19 nt, Artificial Sequence
  Description of Artificial Sequence: Synthetic oligonucleotide
ccaggugggcuacggugcc

SEQ ID NO: 2410032 - RNA, 19 nt, Artificial Sequence
  Description of Artificial Sequence: Synthetic oligonucleotide
gggccggauacuggacugg

SEQ ID NO: 2410033 - RNA, 19 nt, Artificial Sequence
  Description of Artificial Sequence: Synthetic oligonucleotide
ugccaccaggugggcuacg

SEQ ID NO: 2410034 - RNA, 19 nt, Artificial Sequence
  Description of Artificial Sequence: Synthetic oligonucleotide
gggugaggguaggacccgg

SEQ ID NO: 2410035 - RNA, 19 nt, Artificial Sequence
  Description of Artificial Sequence: Synthetic oligonucleotide
gcguugcugccgauaggcg

SEQ ID NO: 2410036 - RNA, 19 nt, Artificial Sequence
  Description of Artificial Sequence: Synthetic oligonucleotide
gccggauacuggacugggg

SEQ ID NO: 2410037 - RNA, 19 nt, Artificial Sequence
  Description of Artificial Sequence: Synthetic oligonucleotide
ggcgaaacugggccggaua

SEQ ID NO: 2410038 - RNA, 19 nt, Artificial Sequence
  Description of Artificial Sequence: Synthetic oligonucleotide
cugggccggauacuggacu

SEQ ID NO: 2410039 - RNA, 19 nt, Artificial Sequence
  Description of Artificial Sequence: Synthetic oligonucleotide
uucgcuggccugggucuuc

SEQ ID NO: 2410040 - RNA, 19 nt, Artificial Sequence
  Description of Artificial Sequence: Synthetic oligonucleotide
cguugcugccgauaggcga

SEQ ID NO: 2410041 - RNA, 19 nt, Artificial Sequence
  Description of Artificial Sequence: Synthetic oligonucleotide
gugcgggaagguguaugga

SEQ ID NO: 2410042 - RNA, 19 nt, Artificial Sequence
  Description of Artificial Sequence: Synthetic oligonucleotide
ggugccgguggagccuagg

SEQ ID NO: 2410043 - RNA, 19 nt, Artificial Sequence
  Description of Artificial Sequence: Synthetic oligonucleotide
gucgacggugauucccagu

SEQ ID NO: 2410044 - RNA, 19 nt, Artificial Sequence
  Description of Artificial Sequence: Synthetic oligonucleotide
aggcagugugcugcacagu

SEQ ID NO: 2410045 - RNA, 19 nt, Artificial Sequence
  Description of Artificial Sequence: Synthetic oligonucleotide
ccggauacuggacuggggu

SEQ ID NO: 2410046 - RNA, 19 nt, Artificial Sequence
  Description of Artificial Sequence: Synthetic oligonucleotide
gggguggauggugggugag

SEQ ID NO: 2410047 - RNA, 19 nt, Artificial Sequence
  Description of Artificial Sequence: Synthetic oligonucleotide
guggauggugggugagggu

SEQ ID NO: 2410048 - RNA, 19 nt, Artificial Sequence
  Description of Artificial Sequence: Synthetic oligonucleotide
gcacagugccauggcuggg

SEQ ID NO: 2410049 - RNA, 19 nt, Artificial Sequence
  Description of Artificial Sequence: Synthetic oligonucleotide
guggacgaugcuggccgga

SEQ ID NO: 2410050 - RNA, 19 nt, Artificial Sequence
  Description of Artificial Sequence: Synthetic oligonucleotide
gugcugcacaguguggcgu

SEQ ID NO: 2410051 - RNA, 19 nt, Artificial Sequence
  Description of Artificial Sequence: Synthetic oligonucleotide
ccaccccgcucccugcggg

SEQ ID NO: 2410052 - RNA, 19 nt, Artificial Sequence
  Description of Artificial Sequence: Synthetic oligonucleotide
auacuggacugggguggau

SEQ ID NO: 2410053 - RNA, 19 nt, Artificial Sequence
  Description of Artificial Sequence: Synthetic oligonucleotide
gcgugcugagccuugggau

SEQ ID NO: 2410054 - RNA, 19 nt, Artificial Sequence
  Description of Artificial Sequence: Synthetic oligonucleotide
ggcuacggugccgguggag

SEQ ID NO: 2410055 - RNA, 19 nt, Artificial Sequence
  Description of Artificial Sequence: Synthetic oligonucleotide
cacugguggaggucacggu

SEQ ID NO: 2410056 - RNA, 19 nt, Artificial Sequence
  Description of Artificial Sequence: Synthetic oligonucleotide
ccugcgggccccuccugug

SEQ ID NO: 2410057 - RNA, 19 nt, Artificial Sequence
  Description of Artificial Sequence: Synthetic oligonucleotide
gugaggcgcugauguacgu

SEQ ID NO: 2410058 - RNA, 19 nt, Artificial Sequence
  Description of Artificial Sequence: Synthetic oligonucleotide
gccggauaggcagugugcu

SEQ ID NO: 2410059 - RNA, 19 nt, Artificial Sequence
  Description of Artificial Sequence: Synthetic oligonucleotide
gguggaggucacggugcug

SEQ ID NO: 2410060 - RNA, 19 nt, Artificial Sequence
  Description of Artificial Sequence: Synthetic oligonucleotide
ggccccaugcucacaggga

SEQ ID NO: 2410061 - RNA, 19 nt, Artificial Sequence
  Description of Artificial Sequence: Synthetic oligonucleotide
ggucacggugcuggaggac

SEQ ID NO: 2410062 - RNA, 19 nt, Artificial Sequence
  Description of Artificial Sequence: Synthetic oligonucleotide
ccguccugccccauuugca

SEQ ID NO: 2410063 - RNA, 19 nt, Artificial Sequence
  Description of Artificial Sequence: Synthetic oligonucleotide
cggggccccaugcucacag

SEQ ID NO: 2410064 - RNA, 19 nt, Artificial Sequence
  Description of Artificial Sequence: Synthetic oligonucleotide
ccuaggcugucacauucua

SEQ ID NO: 2410065 - RNA, 19 nt, Artificial Sequence
  Description of Artificial Sequence: Synthetic oligonucleotide
ggacuugaaggaggaugaa

SEQ ID NO: 2410066 - RNA, 19 nt, Artificial Sequence
  Description of Artificial Sequence: Synthetic oligonucleotide
ccuugggaugccaccaggu

SEQ ID NO: 2410067 - RNA, 19 nt, Artificial Sequence
  Description of Artificial Sequence: Synthetic oligonucleotide
guccggucuguagccaugu

SEQ ID NO: 2410068 - RNA, 19 nt, Artificial Sequence
  Description of Artificial Sequence: Synthetic oligonucleotide
acggugccgguggagccua

SEQ ID NO: 2410069 - RNA, 19 nt, Artificial Sequence
  Description of Artificial Sequence: Synthetic oligonucleotide
caguccggucuguagccau

SEQ ID NO: 2410070 - RNA, 19 nt, Artificial Sequence
  Description of Artificial Sequence: Synthetic oligonucleotide
guacgucuggugggcgaaa

SEQ ID NO: 2410071 - RNA, 19 nt, Artificial Sequence
  Description of Artificial Sequence: Synthetic oligonucleotide
gugcggcaccugcaguaua

SEQ ID NO: 2410072 - RNA, 19 nt, Artificial Sequence
  Description of Artificial Sequence: Synthetic oligonucleotide
ggacgaugcuggccggaua

SEQ ID NO: 2410073 - RNA, 19 nt, Artificial Sequence
  Description of Artificial Sequence: Synthetic oligonucleotide
cuuggacuugaaggaggau

SEQ ID NO: 2410074 - RNA, 19 nt, Artificial Sequence
  Description of Artificial Sequence: Synthetic oligonucleotide
guagacgguggaggcuggu

SEQ ID NO: 2410075 - RNA, 19 nt, Artificial Sequence
  Description of Artificial Sequence: Synthetic oligonucleotide
cgauaggcgauggcuccug

SEQ ID NO: 2410076 - RNA, 19 nt, Artificial Sequence
  Description of Artificial Sequence: Synthetic oligonucleotide
ccaugguaggagugaugua

SEQ ID NO: 2410077 - RNA, 19 nt, Artificial Sequence
  Description of Artificial Sequence: Synthetic oligonucleotide
guugugcgggaagguguau

SEQ ID NO: 2410078 - RNA, 19 nt, Artificial Sequence
  Description of Artificial Sequence: Synthetic oligonucleotide
ccaugcucacagggacuug

SEQ ID NO: 2410079 - RNA, 19 nt, Artificial Sequence
  Description of Artificial Sequence: Synthetic oligonucleotide
cugcgggccccuccugugu

SEQ ID NO: 2410080 - RNA, 19 nt, Artificial Sequence
  Description of Artificial Sequence: Synthetic oligonucleotide
cugcacaguguggcgugcu

SEQ ID NO: 2410081 - RNA, 19 nt, Artificial Sequence
  Description of Artificial Sequence: Synthetic oligonucleotide
ggcuguugugcgggaaggu

SEQ ID NO: 2410082 - RNA, 19 nt, Artificial Sequence
  Description of Artificial Sequence: Synthetic oligonucleotide
cccggggccccaugcucac

SEQ ID NO: 2410083 - RNA, 19 nt, Artificial Sequence
  Description of Artificial Sequence: Synthetic oligonucleotide
ggagcuccuccaccccgcu

SEQ ID NO: 2410084 - RNA, 19 nt, Artificial Sequence
  Description of Artificial Sequence: Synthetic oligonucleotide
ggacccggggccccaugcu

SEQ ID NO: 2410085 - RNA, 19 nt, Artificial Sequence
  Description of Artificial Sequence: Synthetic oligonucleotide
cggcaccugcaguauaaaa

SEQ ID NO: 2410086 - RNA, 19 nt, Artificial Sequence
  Description of Artificial Sequence: Synthetic oligonucleotide
gcggcaccugcaguauaaa

SEQ ID NO: 2410087 - RNA, 19 nt, Artificial Sequence
  Description of Artificial Sequence: Synthetic oligonucleotide
gggcuacggugccggugga

SEQ ID NO: 2410088 - RNA, 19 nt, Artificial Sequence
  Description of Artificial Sequence: Synthetic oligonucleotide
gggccaugguaggagugau

SEQ ID NO: 2410089 - RNA, 19 nt, Artificial Sequence
  Description of Artificial Sequence: Synthetic oligonucleotide
ccccaugcucacagggacu

SEQ ID NO: 2410090 - RNA, 19 nt, Artificial Sequence
  Description of Artificial Sequence: Synthetic oligonucleotide
gguggagccuagggcugua

SEQ ID NO: 2410091 - RNA, 19 nt, Artificial Sequence
  Description of Artificial Sequence: Synthetic oligonucleotide
cuggccggauaggcagugu

SEQ ID NO: 2410092 - RNA, 19 nt, Artificial Sequence
  Description of Artificial Sequence: Synthetic oligonucleotide
ggcccuaggcugucacauu

SEQ ID NO: 2410093 - RNA, 19 nt, Artificial Sequence
  Description of Artificial Sequence: Synthetic oligonucleotide
cuucgcuggccugggucuu

SEQ ID NO: 2410094 - RNA, 19 nt, Artificial Sequence
  Description of Artificial Sequence: Synthetic oligonucleotide
ggcuccugaugagcucccu

SEQ ID NO: 2410095 - RNA, 19 nt, Artificial Sequence
  Description of Artificial Sequence: Synthetic oligonucleotide
cgaaacugggccggauacu

SEQ ID NO: 2410096 - RNA, 19 nt, Artificial Sequence
  Description of Artificial Sequence: Synthetic oligonucleotide
cagggacuugguggacgau

SEQ ID NO: 2410097 - RNA, 19 nt, Artificial Sequence
  Description of Artificial Sequence: Synthetic oligonucleotide
cggugauucccaguccggu

SEQ ID NO: 2410098 - RNA, 19 nt, Artificial Sequence
  Description of Artificial Sequence: Synthetic oligonucleotide
ccgauaggcgauggcuccu

SEQ ID NO: 2410099 - RNA, 19 nt, Artificial Sequence
  Description of Artificial Sequence: Synthetic oligonucleotide
gccugcugucgacggugau

SEQ ID NO: 2410100 - RNA, 19 nt, Artificial Sequence
  Description of Artificial Sequence: Synthetic oligonucleotide
cccugcgggccccuccugu

SEQ ID NO: 2410101 - RNA, 19 nt, Artificial Sequence
  Description of Artificial Sequence: Synthetic oligonucleotide
gggcgaaacugggccggau

SEQ ID NO: 2410102 - RNA, 19 nt, Artificial Sequence
  Description of Artificial Sequence: Synthetic oligonucleotide
gggccccuccuguguuuau

SEQ ID NO: 2410103 - RNA, 19 nt, Artificial Sequence
  Description of Artificial Sequence: Synthetic oligonucleotide
cggugccgguggagccuag

SEQ ID NO: 2410104 - RNA, 19 nt, Artificial Sequence
  Description of Artificial Sequence: Synthetic oligonucleotide
gcgggccccuccuguguuu

SEQ ID NO: 2410105 - RNA, 19 nt, Artificial Sequence
  Description of Artificial Sequence: Synthetic oligonucleotide
cgcuggccugggucuucga

SEQ ID NO: 2410106 - RNA, 19 nt, Artificial Sequence
  Description of Artificial Sequence: Synthetic oligonucleotide
ccggggccccaugcucaca

SEQ ID NO: 2410107 - RNA, 19 nt, Artificial Sequence
  Description of Artificial Sequence: Synthetic oligonucleotide
cgguggagccuagggcugu

SEQ ID NO: 2410108 - RNA, 19 nt, Artificial Sequence
  Description of Artificial Sequence: Synthetic oligonucleotide
aaagaaggggugcaaaagc

SEQ ID NO: 2410109 - RNA, 19 nt, Artificial Sequence
  Description of Artificial Sequence: Synthetic oligonucleotide
uuuuccuaaacacacacag

SEQ ID NO: 2410110 - RNA, 19 nt, Artificial Sequence
  Description of Artificial Sequence: Synthetic oligonucleotide
gugacaguaacauugaagg

SEQ ID NO: 2410111 - RNA, 19 nt, Artificial Sequence
  Description of Artificial Sequence: Synthetic oligonucleotide
uguguguauggaaagaagg

SEQ ID NO: 2410112 - RNA, 19 nt, Artificial Sequence
  Description of Artificial Sequence: Synthetic oligonucleotide
aaauuccccauccugcagc

SEQ ID NO: 2410113 - RNA, 19 nt, Artificial Sequence
  Description of Artificial Sequence: Synthetic oligonucleotide
gaucacagaacauuucugg

SEQ ID NO: 2410114 - RNA, 19 nt, Artificial Sequence
  Description of Artificial Sequence: Synthetic oligonucleotide
uuccuaaacacacacagga

SEQ ID NO: 2410115 - RNA, 19 nt, Artificial Sequence
  Description of Artificial Sequence: Synthetic oligonucleotide
cauuucauaacauuucuug

SEQ ID NO: 2410116 - RNA, 19 nt, Artificial Sequence
  Description of Artificial Sequence: Synthetic oligonucleotide
uuuggcagcaauaagggaa

SEQ ID NO: 2410117 - RNA, 19 nt, Artificial Sequence
  Description of Artificial Sequence: Synthetic oligonucleotide
uucauaacauuucuuguug

SEQ ID NO: 2410118 - RNA, 19 nt, Artificial Sequence
  Description of Artificial Sequence: Synthetic oligonucleotide
auuucuuguugaucaaacc

SEQ ID NO: 2410119 - RNA, 19 nt, Artificial Sequence
  Description of Artificial Sequence: Synthetic oligonucleotide
uguugaucaaaccaccgug

SEQ ID NO: 2410120 - RNA, 19 nt, Artificial Sequence
  Description of Artificial Sequence: Synthetic oligonucleotide
uguguauggaaagaagggg

SEQ ID NO: 2410121 - RNA, 19 nt, Artificial Sequence
  Description of Artificial Sequence: Synthetic oligonucleotide
aucacagaacauuucuggc

SEQ ID NO: 2410122 - RNA, 19 nt, Artificial Sequence
  Description of Artificial Sequence: Synthetic oligonucleotide
aggacuagcguuuuggcag

SEQ ID NO: 2410123 - RNA, 19 nt, Artificial Sequence
  Description of Artificial Sequence: Synthetic oligonucleotide
gacaguaacauugaaggug

SEQ ID NO: 2410124 - RNA, 19 nt, Artificial Sequence
  Description of Artificial Sequence: Synthetic oligonucleotide
cuaacgaaggucuucccgg

SEQ ID NO: 2410125 - RNA, 19 nt, Artificial Sequence
  Description of Artificial Sequence: Synthetic oligonucleotide
aaagcugaagggguggugg

SEQ ID NO: 2410126 - RNA, 19 nt, Artificial Sequence
  Description of Artificial Sequence: Synthetic oligonucleotide
uucuuguugaucaaaccac

SEQ ID NO: 2410127 - RNA, 19 nt, Artificial Sequence
  Description of Artificial Sequence: Synthetic oligonucleotide
uccuuguagccuacgaugg

SEQ ID NO: 2410128 - RNA, 19 nt, Artificial Sequence
  Description of Artificial Sequence: Synthetic oligonucleotide
agauccauuguaaauuccc

SEQ ID NO: 2410129 - RNA, 19 nt, Artificial Sequence
  Description of Artificial Sequence: Synthetic oligonucleotide
agcaauaagggaaaugggg

SEQ ID NO: 2410130 - RNA, 19 nt, Artificial Sequence
  Description of Artificial Sequence: Synthetic oligonucleotide
uuuccuaaacacacacagg

SEQ ID NO: 2410131 - RNA, 19 nt, Artificial Sequence
  Description of Artificial Sequence: Synthetic oligonucleotide
cauuguaaauuccccaucc

SEQ ID NO: 2410132 - RNA, 19 nt, Artificial Sequence
  Description of Artificial Sequence: Synthetic oligonucleotide
uguauggaaagaaggggug

SEQ ID NO: 2410133 - RNA, 19 nt, Artificial Sequence
  Description of Artificial Sequence: Synthetic oligonucleotide
aaacuugaccggucuuugc

SEQ ID NO: 2410134 - RNA, 19 nt, Artificial Sequence
  Description of Artificial Sequence: Synthetic oligonucleotide
ucuuguugaucaaaccacc

SEQ ID NO: 2410135 - RNA, 19 nt, Artificial Sequence
  Description of Artificial Sequence: Synthetic oligonucleotide
uuuguuaguagaaucuuuu

SEQ ID NO: 2410136 - RNA, 19 nt, Artificial Sequence
  Description of Artificial Sequence: Synthetic oligonucleotide
aaugcuaacgaaggucuuc

SEQ ID NO: 2410137 - RNA, 19 nt, Artificial Sequence
  Description of Artificial Sequence: Synthetic oligonucleotide
agcguuuuggcagucaugg

SEQ ID NO: 2410138 - RNA, 19 nt, Artificial Sequence
  Description of Artificial Sequence: Synthetic oligonucleotide
auuucauaacauuucuugu

SEQ ID NO: 2410139 - RNA, 19 nt, Artificial Sequence
  Description of Artificial Sequence: Synthetic oligonucleotide
acaguaacauugaaggugg

SEQ ID NO: 2410140 - RNA, 19 nt, Artificial Sequence
  Description of Artificial Sequence: Synthetic oligonucleotide
gguuuuggcagcaauaagg

SEQ ID NO: 2410141 - RNA, 19 nt, Artificial Sequence
  Description of Artificial Sequence: Synthetic oligonucleotide
uggcguaaugcuaacgaag

SEQ ID NO: 2410142 - RNA, 19 nt, Artificial Sequence
  Description of Artificial Sequence: Synthetic oligonucleotide
aauaauggugugugugugu

SEQ ID NO: 2410143 - RNA, 19 nt, Artificial Sequence
  Description of Artificial Sequence: Synthetic oligonucleotide
cuuguugaucaaaccaccg

SEQ ID NO: 2410144 - RNA, 19 nt, Artificial Sequence
  Description of Artificial Sequence: Synthetic oligonucleotide
uaucugucuguccagcccc

SEQ ID NO: 2410145 - RNA, 19 nt, Artificial Sequence
  Description of Artificial Sequence: Synthetic oligonucleotide
gcagcaauaagggaaaugg

SEQ ID NO: 2410146 - RNA, 19 nt, Artificial Sequence
  Description of Artificial Sequence: Synthetic oligonucleotide
uuucauaacauuucuuguu

SEQ ID NO: 2410147 - RNA, 19 nt, Artificial Sequence
  Description of Artificial Sequence: Synthetic oligonucleotide
gaucaaaccaccguggaca

SEQ ID NO: 2410148 - RNA, 19 nt, Artificial Sequence
  Description of Artificial Sequence: Synthetic oligonucleotide
cacagaacauuucuggccc

SEQ ID NO: 2410149 - RNA, 19 nt, Artificial Sequence
  Description of Artificial Sequence: Synthetic oligonucleotide
aaugguguguguguguaug

SEQ ID NO: 2410150 - RNA, 19 nt, Artificial Sequence
  Description of Artificial Sequence: Synthetic oligonucleotide
gaagauccauuguaaauuc

SEQ ID NO: 2410151 - RNA, 19 nt, Artificial Sequence
  Description of Artificial Sequence: Synthetic oligonucleotide
uuagcugugcagcagcccu

SEQ ID NO: 2410152 - RNA, 19 nt, Artificial Sequence
  Description of Artificial Sequence: Synthetic oligonucleotide
uuguagccuacgauggccg

SEQ ID NO: 2410153 - RNA, 19 nt, Artificial Sequence
  Description of Artificial Sequence: Synthetic oligonucleotide
aagauccauuguaaauucc

SEQ ID NO: 2410154 - RNA, 19 nt, Artificial Sequence
  Description of Artificial Sequence: Synthetic oligonucleotide
uaccaggacaccaaccuca

SEQ ID NO: 2410155 - RNA, 19 nt, Artificial Sequence
  Description of Artificial Sequence: Synthetic oligonucleotide
uccuaaacacacacaggag

SEQ ID NO: 2410156 - RNA, 19 nt, Artificial Sequence
  Description of Artificial Sequence: Synthetic oligonucleotide
aauaagggaaaugggguaa

SEQ ID NO: 2410157 - RNA, 19 nt, Artificial Sequence
  Description of Artificial Sequence: Synthetic oligonucleotide
augcuaacgaaggucuucc

SEQ ID NO: 2410158 - RNA, 19 nt, Artificial Sequence
  Description of Artificial Sequence: Synthetic oligonucleotide
guguguauggaaagaaggg

SEQ ID NO: 2410159 - RNA, 19 nt, Artificial Sequence
  Description of Artificial Sequence: Synthetic oligonucleotide
gaggcugucgauguaggcg

SEQ ID NO: 2410160 - RNA, 19 nt, Artificial Sequence
  Description of Artificial Sequence: Synthetic oligonucleotide
uuguugaucaaaccaccgu

SEQ ID NO: 2410161 - RNA, 19 nt, Artificial Sequence
  Description of Artificial Sequence: Synthetic oligonucleotide
aguaacauugaaggugggg

SEQ ID NO: 2410162 - RNA, 19 nt, Artificial Sequence
  Description of Artificial Sequence: Synthetic oligonucleotide
aaaacuugaccggucuuug

SEQ ID NO: 2410163 - RNA, 19 nt, Artificial Sequence
  Description of Artificial Sequence: Synthetic oligonucleotide
guugaucaaaccaccgugg

SEQ ID NO: 2410164 - RNA, 19 nt, Artificial Sequence
  Description of Artificial Sequence: Synthetic oligonucleotide
uuuuguuaguagaaucuuu

SEQ ID NO: 2410165 - RNA, 19 nt, Artificial Sequence
  Description of Artificial Sequence: Synthetic oligonucleotide
gauguaggcguuccacccg

SEQ ID NO: 2410166 - RNA, 19 nt, Artificial Sequence
  Description of Artificial Sequence: Synthetic oligonucleotide
ugcaaaagcugaaggggug

SEQ ID NO: 2410167 - RNA, 19 nt, Artificial Sequence
  Description of Artificial Sequence: Synthetic oligonucleotide
uaaauuccccauccugcag

SEQ ID NO: 2410168 - RNA, 19 nt, Artificial Sequence
  Description of Artificial Sequence: Synthetic oligonucleotide
aacgccgcaggugggaggc

SEQ ID NO: 2410169 - RNA, 19 nt, Artificial Sequence
  Description of Artificial Sequence: Synthetic oligonucleotide
uccauuguaaauuccccau

SEQ ID NO: 2410170 - RNA, 19 nt, Artificial Sequence
  Description of Artificial Sequence: Synthetic oligonucleotide
uugaucaaaccaccgugga

SEQ ID NO: 2410171 - RNA, 19 nt, Artificial Sequence
  Description of Artificial Sequence: Synthetic oligonucleotide
uccgccaugaggcugucga

SEQ ID NO: 2410172 - RNA, 19 nt, Artificial Sequence
  Description of Artificial Sequence: Synthetic oligonucleotide
aucaaaccaccguggacac

SEQ ID NO: 2410173 - RNA, 19 nt, Artificial Sequence
  Description of Artificial Sequence: Synthetic oligonucleotide
guccuuguagccuacgaug

SEQ ID NO: 2410174 - RNA, 19 nt, Artificial Sequence
  Description of Artificial Sequence: Synthetic oligonucleotide
uaacgaaggucuucccggg

SEQ ID NO: 2410175 - RNA, 19 nt, Artificial Sequence
  Description of Artificial Sequence: Synthetic oligonucleotide
gauccauuguaaauucccc

SEQ ID NO: 2410176 - RNA, 19 nt, Artificial Sequence
  Description of Artificial Sequence: Synthetic oligonucleotide
gauggccgcguccugacag

SEQ ID NO: 2410177 - RNA, 19 nt, Artificial Sequence
  Description of Artificial Sequence: Synthetic oligonucleotide
aagcugaaggggugguggg

SEQ ID NO: 2410178 - RNA, 19 nt, Artificial Sequence
  Description of Artificial Sequence: Synthetic oligonucleotide
agggcgaguccuuguagcc

SEQ ID NO: 2410179 - RNA, 19 nt, Artificial Sequence
  Description of Artificial Sequence: Synthetic oligonucleotide
ucuuugccuaccaggacac

SEQ ID NO: 2410180 - RNA, 19 nt, Artificial Sequence
  Description of Artificial Sequence: Synthetic oligonucleotide
aagaaggggugcaaaagcu

SEQ ID NO: 2410181 - RNA, 19 nt, Artificial Sequence
  Description of Artificial Sequence: Synthetic oligonucleotide
aacgaaggucuucccgggg

SEQ ID NO: 2410182 - RNA, 19 nt, Artificial Sequence
  Description of Artificial Sequence: Synthetic oligonucleotide
uugguacgaagauccauug

SEQ ID NO: 2410183 - RNA, 19 nt, Artificial Sequence
  Description of Artificial Sequence: Synthetic oligonucleotide
cugggaacgccgcaggugg

SEQ ID NO: 2410184 - RNA, 19 nt, Artificial Sequence
  Description of Artificial Sequence: Synthetic oligonucleotide
ugugguuuuggcagcaaua

SEQ ID NO: 2410185 - RNA, 19 nt, Artificial Sequence
  Description of Artificial Sequence: Synthetic oligonucleotide
uugcccaucagcaggacua

SEQ ID NO: 2410186 - RNA, 19 nt, Artificial Sequence
  Description of Artificial Sequence: Synthetic oligonucleotide
acagaacauuucuggcccc

SEQ ID NO: 2410187 - RNA, 19 nt, Artificial Sequence
  Description of Artificial Sequence: Synthetic oligonucleotide
ugagucccggaucacagaa

SEQ ID NO: 2410188 - RNA, 19 nt, Artificial Sequence
  Description of Artificial Sequence: Synthetic oligonucleotide
cagcaauaagggaaauggg

SEQ ID NO: 2410189 - RNA, 19 nt, Artificial Sequence
  Description of Artificial Sequence: Synthetic oligonucleotide
ugaucaaaccaccguggac

SEQ ID NO: 2410190 - RNA, 19 nt, Artificial Sequence
  Description of Artificial Sequence: Synthetic oligonucleotide
ucuuugcccaucagcagga

SEQ ID NO: 2410191 - RNA, 19 nt, Artificial Sequence
  Description of Artificial Sequence: Synthetic oligonucleotide
auccauuguaaauucccca

SEQ ID NO: 2410192 - RNA, 19 nt, Artificial Sequence
  Description of Artificial Sequence: Synthetic oligonucleotide
aauuccccauccugcagca

SEQ ID NO: 2410193 - RNA, 19 nt, Artificial Sequence
  Description of Artificial Sequence: Synthetic oligonucleotide
ugguuuuggcagcaauaag

SEQ ID NO: 2410194 - RNA, 19 nt, Artificial Sequence
  Description of Artificial Sequence: Synthetic oligonucleotide
agucccggaucacagaaca

SEQ ID NO: 2410195 - RNA, 19 nt, Artificial Sequence
  Description of Artificial Sequence: Synthetic oligonucleotide
auuguaaauuccccauccu

SEQ ID NO: 2410196 - RNA, 19 nt, Artificial Sequence
  Description of Artificial Sequence: Synthetic oligonucleotide
agcaggacuagcguuuugg

SEQ ID NO: 2410197 - RNA, 19 nt, Artificial Sequence
  Description of Artificial Sequence: Synthetic oligonucleotide
uauggaaagaaggggugca

SEQ ID NO: 2410198 - RNA, 19 nt, Artificial Sequence
  Description of Artificial Sequence: Synthetic oligonucleotide
uuugccuaccaggacacca

SEQ ID NO: 2410199 - RNA, 19 nt, Artificial Sequence
  Description of Artificial Sequence: Synthetic oligonucleotide
uguuagcugugcagcagcc

SEQ ID NO: 2410200 - RNA, 19 nt, Artificial Sequence
  Description of Artificial Sequence: Synthetic oligonucleotide
acgaagauccauuguaaau

SEQ ID NO: 2410201 - RNA, 19 nt, Artificial Sequence
  Description of Artificial Sequence: Synthetic oligonucleotide
ugacaguaacauugaaggu

SEQ ID NO: 2410202 - RNA, 19 nt, Artificial Sequence
  Description of Artificial Sequence: Synthetic oligonucleotide
aacauuucuuguugaucaa

SEQ ID NO: 2410203 - RNA, 19 nt, Artificial Sequence
  Description of Artificial Sequence: Synthetic oligonucleotide
uacgaagauccauuguaaa

SEQ ID NO: 2410204 - RNA, 19 nt, Artificial Sequence
  Description of Artificial Sequence: Synthetic oligonucleotide
gggugcaaaagcugaaggg

SEQ ID NO: 2410205 - RNA, 19 nt, Artificial Sequence
  Description of Artificial Sequence: Synthetic oligonucleotide
auguaggcguuccacccgg

SEQ ID NO: 2410206 - RNA, 19 nt, Artificial Sequence
  Description of Artificial Sequence: Synthetic oligonucleotide
augguguguguguguaugg

SEQ ID NO: 2410207 - RNA, 19 nt, Artificial Sequence
  Description of Artificial Sequence: Synthetic oligonucleotide
guaucugucuguccagccc

SEQ ID NO: 2410208 - RNA, 19 nt, Artificial Sequence
  Description of Artificial Sequence: Synthetic oligonucleotide
ucaguacugggaacgccgc

SEQ ID NO: 2410209 - RNA, 19 nt, Artificial Sequence
  Description of Artificial Sequence: Synthetic oligonucleotide
guaaauuccccauccugca

SEQ ID NO: 2410210 - RNA, 19 nt, Artificial Sequence
  Description of Artificial Sequence: Synthetic oligonucleotide
gggacggcggcccagacgg

SEQ ID NO: 2410211 - RNA, 19 nt, Artificial Sequence
  Description of Artificial Sequence: Synthetic oligonucleotide
ggaaaugggguaauggccc

SEQ ID NO: 2410212 - RNA, 19 nt, Artificial Sequence
  Description of Artificial Sequence: Synthetic oligonucleotide
gcuaacgaaggucuucccg

SEQ ID NO: 2410213 - RNA, 19 nt, Artificial Sequence
  Description of Artificial Sequence: Synthetic oligonucleotide
ggcguaaugcuaacgaagg

SEQ ID NO: 2410214 - RNA, 19 nt, Artificial Sequence
  Description of Artificial Sequence: Synthetic oligonucleotide
ucuguuagcugugcagcag

SEQ ID NO: 2410215 - RNA, 19 nt, Artificial Sequence
  Description of Artificial Sequence: Synthetic oligonucleotide
gucuuugccuaccaggaca

SEQ ID NO: 2410216 - RNA, 19 nt, Artificial Sequence
  Description of Artificial Sequence: Synthetic oligonucleotide
uuccccauccugcagcagu

SEQ ID NO: 2410217 - RNA, 19 nt, Artificial Sequence
  Description of Artificial Sequence: Synthetic oligonucleotide
gcucuugguacgaagaucc

SEQ ID NO: 2410218 - RNA, 19 nt, Artificial Sequence
  Description of Artificial Sequence: Synthetic oligonucleotide
gagggcgaguccuuguagc

SEQ ID NO: 2410219 - RNA, 19 nt, Artificial Sequence
  Description of Artificial Sequence: Synthetic oligonucleotide
guuccacccggccauggcg

SEQ ID NO: 2410220 - RNA, 19 nt, Artificial Sequence
  Description of Artificial Sequence: Synthetic oligonucleotide
gaggggacagaugagguca

SEQ ID NO: 2410221 - RNA, 19 nt, Artificial Sequence
  Description of Artificial Sequence: Synthetic oligonucleotide
aggcugucgauguaggcgu

SEQ ID NO: 2410222 - RNA, 19 nt, Artificial Sequence
  Description of Artificial Sequence: Synthetic oligonucleotide
caugaggcugucgauguag

SEQ ID NO: 2410223 - RNA, 19 nt, Artificial Sequence
  Description of Artificial Sequence: Synthetic oligonucleotide
cuguuagcugugcagcagc

SEQ ID NO: 2410224 - RNA, 19 nt, Artificial Sequence
  Description of Artificial Sequence: Synthetic oligonucleotide
cuucuuugcccaucagcag

SEQ ID NO: 2410225 - RNA, 19 nt, Artificial Sequence
  Description of Artificial Sequence: Synthetic oligonucleotide
guuuuggcagucaugguga

SEQ ID NO: 2410226 - RNA, 19 nt, Artificial Sequence
  Description of Artificial Sequence: Synthetic oligonucleotide
gaaggggugcaaaagcuga

SEQ ID NO: 2410227 - RNA, 19 nt, Artificial Sequence
  Description of Artificial Sequence: Synthetic oligonucleotide
aaaagcugaagggguggug

SEQ ID NO: 2410228 - RNA, 19 nt, Artificial Sequence
  Description of Artificial Sequence: Synthetic oligonucleotide
guauggaaagaaggggugc

SEQ ID NO: 2410229 - RNA, 19 nt, Artificial Sequence
  Description of Artificial Sequence: Synthetic oligonucleotide
aaccaccguggacaccuuc

SEQ ID NO: 2410230 - RNA, 19 nt, Artificial Sequence
  Description of Artificial Sequence: Synthetic oligonucleotide
acuugaccggucuuugccu

SEQ ID NO: 2410231 - RNA, 19 nt, Artificial Sequence
  Description of Artificial Sequence: Synthetic oligonucleotide
gguacgaagauccauugua

SEQ ID NO: 2410232 - RNA, 19 nt, Artificial Sequence
  Description of Artificial Sequence: Synthetic oligonucleotide
uccugacaggucccguccg

SEQ ID NO: 2410233 - RNA, 19 nt, Artificial Sequence
  Description of Artificial Sequence: Synthetic oligonucleotide
uaggcguuccacccggcca

SEQ ID NO: 2410234 - RNA, 19 nt, Artificial Sequence
  Description of Artificial Sequence: Synthetic oligonucleotide
ggggugcaaaagcugaagg

SEQ ID NO: 2410235 - RNA, 19 nt, Artificial Sequence
  Description of Artificial Sequence: Synthetic oligonucleotide
ugggaggccauuucauaac

SEQ ID NO: 2410236 - RNA, 19 nt, Artificial Sequence
  Description of Artificial Sequence: Synthetic oligonucleotide
aguccuuguagccuacgau

SEQ ID NO: 2410237 - RNA, 19 nt, Artificial Sequence
  Description of Artificial Sequence: Synthetic oligonucleotide
ugguacgaagauccauugu

SEQ ID NO: 2410238 - RNA, 19 nt, Artificial Sequence
  Description of Artificial Sequence: Synthetic oligonucleotide
gagagcucggggcacgcgc

SEQ ID NO: 2410239 - RNA, 19 nt, Artificial Sequence
  Description of Artificial Sequence: Synthetic oligonucleotide
aacgcggcucuguuagcug

SEQ ID NO: 2410240 - RNA, 19 nt, Artificial Sequence
  Description of Artificial Sequence: Synthetic oligonucleotide
agugagucccggaucacag

SEQ ID NO: 2410241 - RNA, 19 nt, Artificial Sequence
  Description of Artificial Sequence: Synthetic oligonucleotide
gucccguccgccaugaggc

SEQ ID NO: 2410242 - RNA, 19 nt, Artificial Sequence
  Description of Artificial Sequence: Synthetic oligonucleotide
cagucauggugacaguaac

SEQ ID NO: 2410243 - RNA, 19 nt, Artificial Sequence
  Description of Artificial Sequence: Synthetic oligonucleotide
guguguguauggaaagaag

SEQ ID NO: 2410244 - RNA, 19 nt, Artificial Sequence
  Description of Artificial Sequence: Synthetic oligonucleotide
gggaaaugggguaauggcc

SEQ ID NO: 2410245 - RNA, 19 nt, Artificial Sequence
  Description of Artificial Sequence: Synthetic oligonucleotide
guacugggaacgccgcagg

SEQ ID NO: 2410246 - RNA, 19 nt, Artificial Sequence
  Description of Artificial Sequence: Synthetic oligonucleotide
uguagccuacgauggccgc

SEQ ID NO: 2410247 - RNA, 19 nt, Artificial Sequence
  Description of Artificial Sequence: Synthetic oligonucleotide
uagcguuuuggcagucaug

SEQ ID NO: 2410248 - RNA, 19 nt, Artificial Sequence
  Description of Artificial Sequence: Synthetic oligonucleotide
acgaaggucuucccgggga

SEQ ID NO: 2410249 - RNA, 19 nt, Artificial Sequence
  Description of Artificial Sequence: Synthetic oligonucleotide
gagugucagcccauucacg

SEQ ID NO: 2410250 - RNA, 19 nt, Artificial Sequence
  Description of Artificial Sequence: Synthetic oligonucleotide
uaagggaaaugggguaaug

SEQ ID NO: 2410251 - RNA, 19 nt, Artificial Sequence
  Description of Artificial Sequence: Synthetic oligonucleotide
uugccuaccaggacaccaa

SEQ ID NO: 2410252 - RNA, 19 nt, Artificial Sequence
  Description of Artificial Sequence: Synthetic oligonucleotide
ucuugguacgaagauccau

SEQ ID NO: 2410253 - RNA, 19 nt, Artificial Sequence
  Description of Artificial Sequence: Synthetic oligonucleotide
ugaggucaguacugggaac

SEQ ID NO: 2410254 - RNA, 19 nt, Artificial Sequence
  Description of Artificial Sequence: Synthetic oligonucleotide
ggacagaugaggucaguac

SEQ ID NO: 2410255 - RNA, 19 nt, Artificial Sequence
  Description of Artificial Sequence: Synthetic oligonucleotide
aggucaguacugggaacgc

SEQ ID NO: 2410256 - RNA, 19 nt, Artificial Sequence
  Description of Artificial Sequence: Synthetic oligonucleotide
acaccaaccucagcuggcg

SEQ ID NO: 2410257 - RNA, 19 nt, Artificial Sequence
  Description of Artificial Sequence: Synthetic oligonucleotide
agaaggggugcaaaagcug

SEQ ID NO: 2410258 - RNA, 19 nt, Artificial Sequence
  Description of Artificial Sequence: Synthetic oligonucleotide
auaauggugugugugugua

SEQ ID NO: 2410259 - RNA, 19 nt, Artificial Sequence
  Description of Artificial Sequence: Synthetic oligonucleotide
gaaggucuucccggggacg

SEQ ID NO: 2410260 - RNA, 19 nt, Artificial Sequence
  Description of Artificial Sequence: Synthetic oligonucleotide
caggacaccaaccucagcu

SEQ ID NO: 2410261 - RNA, 19 nt, Artificial Sequence
  Description of Artificial Sequence: Synthetic oligonucleotide
caauaagggaaauggggua

SEQ ID NO: 2410262 - RNA, 19 nt, Artificial Sequence
  Description of Artificial Sequence: Synthetic oligonucleotide
uggguaaggggagguaucu

SEQ ID NO: 2410263 - RNA, 19 nt, Artificial Sequence
  Description of Artificial Sequence: Synthetic oligonucleotide
uggaaagaaggggugcaaa

SEQ ID NO: 2410264 - RNA, 19 nt, Artificial Sequence
  Description of Artificial Sequence: Synthetic oligonucleotide
ucugcgggcugcugcuggg

SEQ ID NO: 2410265 - RNA, 19 nt, Artificial Sequence
  Description of Artificial Sequence: Synthetic oligonucleotide
cagcccaugugguuuuggc

SEQ ID NO: 2410266 - RNA, 19 nt, Artificial Sequence
  Description of Artificial Sequence: Synthetic oligonucleotide
uuuuggcagucauggugac

SEQ ID NO: 2410267 - RNA, 19 nt, Artificial Sequence
  Description of Artificial Sequence: Synthetic oligonucleotide
ugcuaacgaaggucuuccc

SEQ ID NO: 2410268 - RNA, 19 nt, Artificial Sequence
  Description of Artificial Sequence: Synthetic oligonucleotide
gacaccaaccucagcuggc

SEQ ID NO: 2410269 - RNA, 19 nt, Artificial Sequence
  Description of Artificial Sequence: Synthetic oligonucleotide
aaugggguaauggcccaaa

SEQ ID NO: 2410270 - RNA, 19 nt, Artificial Sequence
  Description of Artificial Sequence: Synthetic oligonucleotide
ggucccguccgccaugagg

SEQ ID NO: 2410271 - RNA, 19 nt, Artificial Sequence
  Description of Artificial Sequence: Synthetic oligonucleotide
ugcucuugguacgaagauc

SEQ ID NO: 2410272 - RNA, 19 nt, Artificial Sequence
  Description of Artificial Sequence: Synthetic oligonucleotide
gguaucugucuguccagcc

SEQ ID NO: 2410273 - RNA, 19 nt, Artificial Sequence
  Description of Artificial Sequence: Synthetic oligonucleotide
guccugacaggucccgucc

SEQ ID NO: 2410274 - RNA, 19 nt, Artificial Sequence
  Description of Artificial Sequence: Synthetic oligonucleotide
guagccuacgauggccgcg

SEQ ID NO: 2410275 - RNA, 19 nt, Artificial Sequence
  Description of Artificial Sequence: Synthetic oligonucleotide
gaacgccgcaggugggagg

SEQ ID NO: 2410276 - RNA, 19 nt, Artificial Sequence
  Description of Artificial Sequence: Synthetic oligonucleotide
ugguguguguguguaugga

SEQ ID NO: 2410277 - RNA, 19 nt, Artificial Sequence
  Description of Artificial Sequence: Synthetic oligonucleotide
gcaaaagcugaaggggugg

SEQ ID NO: 2410278 - RNA, 19 nt, Artificial Sequence
  Description of Artificial Sequence: Synthetic oligonucleotide
auggguaaggggagguauc

SEQ ID NO: 2410279 - RNA, 19 nt, Artificial Sequence
  Description of Artificial Sequence: Synthetic oligonucleotide
aggggugcaaaagcugaag

SEQ ID NO: 2410280 - RNA, 19 nt, Artificial Sequence
  Description of Artificial Sequence: Synthetic oligonucleotide
gucgauguaggcguuccac

SEQ ID NO: 2410281 - RNA, 19 nt, Artificial Sequence
  Description of Artificial Sequence: Synthetic oligonucleotide
gugguuuuggcagcaauaa

SEQ ID NO: 2410282 - RNA, 19 nt, Artificial Sequence
  Description of Artificial Sequence: Synthetic oligonucleotide
caguaacauugaagguggg

SEQ ID NO: 2410283 - RNA, 19 nt, Artificial Sequence
  Description of Artificial Sequence: Synthetic oligonucleotide
ccggucuuugccuaccagg

SEQ ID NO: 2410284 - RNA, 19 nt, Artificial Sequence
  Description of Artificial Sequence: Synthetic oligonucleotide
augugguuuuggcagcaau

SEQ ID NO: 2410285 - RNA, 19 nt, Artificial Sequence
  Description of Artificial Sequence: Synthetic oligonucleotide
guguauggaaagaaggggu

SEQ ID NO: 2410286 - RNA, 19 nt, Artificial Sequence
  Description of Artificial Sequence: Synthetic oligonucleotide
ucccggaucacagaacauu

SEQ ID NO: 2410287 - RNA, 19 nt, Artificial Sequence
  Description of Artificial Sequence: Synthetic oligonucleotide
ugggaacgccgcagguggg

SEQ ID NO: 2410288 - RNA, 19 nt, Artificial Sequence
  Description of Artificial Sequence: Synthetic oligonucleotide
caggacuagcguuuuggca

SEQ ID NO: 2410289 - RNA, 19 nt, Artificial Sequence
  Description of Artificial Sequence: Synthetic oligonucleotide
cugucgauguaggcguucc

SEQ ID NO: 2410290 - RNA, 19 nt, Artificial Sequence
  Description of Artificial Sequence: Synthetic oligonucleotide
auggccgcguccugacagg

SEQ ID NO: 2410291 - RNA, 19 nt, Artificial Sequence
  Description of Artificial Sequence: Synthetic oligonucleotide
agcugugcagcagcccucg

SEQ ID NO: 2410292 - RNA, 19 nt, Artificial Sequence
  Description of Artificial Sequence: Synthetic oligonucleotide
ugacaggucccguccgcca

SEQ ID NO: 2410293 - RNA, 19 nt, Artificial Sequence
  Description of Artificial Sequence: Synthetic oligonucleotide
cuccggugcucuugguacg

SEQ ID NO: 2410294 - RNA, 19 nt, Artificial Sequence
  Description of Artificial Sequence: Synthetic oligonucleotide
uacugggaacgccgcaggu

SEQ ID NO: 2410295 - RNA, 19 nt, Artificial Sequence
  Description of Artificial Sequence: Synthetic oligonucleotide
ggaucacagaacauuucug

SEQ ID NO: 2410296 - RNA, 19 nt, Artificial Sequence
  Description of Artificial Sequence: Synthetic oligonucleotide
cugggcucgggcuggcggg

SEQ ID NO: 2410297 - RNA, 19 nt, Artificial Sequence
  Description of Artificial Sequence: Synthetic oligonucleotide
acugggaacgccgcaggug

SEQ ID NO: 2410298 - RNA, 19 nt, Artificial Sequence
  Description of Artificial Sequence: Synthetic oligonucleotide
ugccuaccaggacaccaac

SEQ ID NO: 2410299 - RNA, 19 nt, Artificial Sequence
  Description of Artificial Sequence: Synthetic oligonucleotide
uaaugguguguguguguau

SEQ ID NO: 2410300 - RNA, 19 nt, Artificial Sequence
  Description of Artificial Sequence: Synthetic oligonucleotide
cuaccaggacaccaaccuc

SEQ ID NO: 2410301 - RNA, 19 nt, Artificial Sequence
  Description of Artificial Sequence: Synthetic oligonucleotide
guacgaagauccauuguaa

SEQ ID NO: 2410302 - RNA, 19 nt, Artificial Sequence
  Description of Artificial Sequence: Synthetic oligonucleotide
guaggcguuccacccggcc

SEQ ID NO: 2410303 - RNA, 19 nt, Artificial Sequence
  Description of Artificial Sequence: Synthetic oligonucleotide
guuagcugugcagcagccc

SEQ ID NO: 2410304 - RNA, 19 nt, Artificial Sequence
  Description of Artificial Sequence: Synthetic oligonucleotide
cuugguacgaagauccauu

SEQ ID NO: 2410305 - RNA, 19 nt, Artificial Sequence
  Description of Artificial Sequence: Synthetic oligonucleotide
accggucuuugccuaccag

SEQ ID NO: 2410306 - RNA, 19 nt, Artificial Sequence
  Description of Artificial Sequence: Synthetic oligonucleotide
ugcagcagugagucccgga

SEQ ID NO: 2410307 - RNA, 19 nt, Artificial Sequence
  Description of Artificial Sequence: Synthetic oligonucleotide
guguguguguguauggaaa

SEQ ID NO: 2410308 - RNA, 19 nt, Artificial Sequence
  Description of Artificial Sequence: Synthetic oligonucleotide
agcuggcguaaugcuaacg

SEQ ID NO: 2410309 - RNA, 19 nt, Artificial Sequence
  Description of Artificial Sequence: Synthetic oligonucleotide
caaaccaccguggacaccu

SEQ ID NO: 2410310 - RNA, 19 nt, Artificial Sequence
  Description of Artificial Sequence: Synthetic oligonucleotide
auaagggaaaugggguaau

SEQ ID NO: 2410311 - RNA, 19 nt, Artificial Sequence
  Description of Artificial Sequence: Synthetic oligonucleotide
cauaacauuucuuguugau

SEQ ID NO: 2410312 - RNA, 19 nt, Artificial Sequence
  Description of Artificial Sequence: Synthetic oligonucleotide
accaaccucagcuggcgua

SEQ ID NO: 2410313 - RNA, 19 nt, Artificial Sequence
  Description of Artificial Sequence: Synthetic oligonucleotide
uguaggcguuccacccggc

SEQ ID NO: 2410314 - RNA, 19 nt, Artificial Sequence
  Description of Artificial Sequence: Synthetic oligonucleotide
uugaccggucuuugccuac

SEQ ID NO: 2410315 - RNA, 19 nt, Artificial Sequence
  Description of Artificial Sequence: Synthetic oligonucleotide
ugcccaucagcaggacuag

SEQ ID NO: 2410316 - RNA, 19 nt, Artificial Sequence
  Description of Artificial Sequence: Synthetic oligonucleotide
gccgcguccugacaggucc

SEQ ID NO: 2410317 - RNA, 19 nt, Artificial Sequence
  Description of Artificial Sequence: Synthetic oligonucleotide
aaaugggguaauggcccaa

SEQ ID NO: 2410318 - RNA, 19 nt, Artificial Sequence
  Description of Artificial Sequence: Synthetic oligonucleotide
cugccguccggaacgcggc

SEQ ID NO: 2410319 - RNA, 19 nt, Artificial Sequence
  Description of Artificial Sequence: Synthetic oligonucleotide
cguaaugcuaacgaagguc

SEQ ID NO: 2410320 - RNA, 19 nt, Artificial Sequence
  Description of Artificial Sequence: Synthetic oligonucleotide
uagccuacgauggccgcgu

SEQ ID NO: 2410321 - RNA, 19 nt, Artificial Sequence
  Description of Artificial Sequence: Synthetic oligonucleotide
ugaccggucuuugccuacc

SEQ ID NO: 2410322 - RNA, 19 nt, Artificial Sequence
  Description of Artificial Sequence: Synthetic oligonucleotide
gcaauaagggaaauggggu

SEQ ID NO: 2410323 - RNA, 19 nt, Artificial Sequence
  Description of Artificial Sequence: Synthetic oligonucleotide
gcaggacuagcguuuuggc

SEQ ID NO: 2410324 - RNA, 19 nt, Artificial Sequence
  Description of Artificial Sequence: Synthetic oligonucleotide
gacaccuucuuugcccauc

SEQ ID NO: 2410325 - RNA, 19 nt, Artificial Sequence
  Description of Artificial Sequence: Synthetic oligonucleotide
aggcguuccacccggccau

SEQ ID NO: 2410326 - RNA, 19 nt, Artificial Sequence
  Description of Artificial Sequence: Synthetic oligonucleotide
cuggcguaaugcuaacgaa

SEQ ID NO: 2410327 - RNA, 19 nt, Artificial Sequence
  Description of Artificial Sequence: Synthetic oligonucleotide
ccuccggugcucuugguac

SEQ ID NO: 2410328 - RNA, 19 nt, Artificial Sequence
  Description of Artificial Sequence: Synthetic oligonucleotide
gucuguccagccccagccc

SEQ ID NO: 2410329 - RNA, 19 nt, Artificial Sequence
  Description of Artificial Sequence: Synthetic oligonucleotide
acgcgcugccguccggaac

SEQ ID NO: 2410330 - RNA, 19 nt, Artificial Sequence
  Description of Artificial Sequence: Synthetic oligonucleotide
cugacaggucccguccgcc

SEQ ID NO: 2410331 - RNA, 19 nt, Artificial Sequence
  Description of Artificial Sequence: Synthetic oligonucleotide
gacggcggcccagacggag

SEQ ID NO: 2410332 - RNA, 19 nt, Artificial Sequence
  Description of Artificial Sequence: Synthetic oligonucleotide
ucaaaccaccguggacacc

SEQ ID NO: 2410333 - RNA, 19 nt, Artificial Sequence
  Description of Artificial Sequence: Synthetic oligonucleotide
aaggggugcaaaagcugaa

SEQ ID NO: 2410334 - RNA, 19 nt, Artificial Sequence
  Description of Artificial Sequence: Synthetic oligonucleotide
ggugcucuugguacgaaga

SEQ ID NO: 2410335 - RNA, 19 nt, Artificial Sequence
  Description of Artificial Sequence: Synthetic oligonucleotide
ggagggcgaguccuuguag

SEQ ID NO: 2410336 - RNA, 19 nt, Artificial Sequence
  Description of Artificial Sequence: Synthetic oligonucleotide
gccauuucauaacauuucu

SEQ ID NO: 2410337 - RNA, 19 nt, Artificial Sequence
  Description of Artificial Sequence: Synthetic oligonucleotide
accaccguggacaccuucu

SEQ ID NO: 2410338 - RNA, 19 nt, Artificial Sequence
  Description of Artificial Sequence: Synthetic oligonucleotide
ggcagcaauaagggaaaug

SEQ ID NO: 2410339 - RNA, 19 nt, Artificial Sequence
  Description of Artificial Sequence: Synthetic oligonucleotide
gguguguguguguauggaa

SEQ ID NO: 2410340 - RNA, 19 nt, Artificial Sequence
  Description of Artificial Sequence: Synthetic oligonucleotide
acaggucccguccgccaug

SEQ ID NO: 2410341 - RNA, 19 nt, Artificial Sequence
  Description of Artificial Sequence: Synthetic oligonucleotide
caggugggaggccauuuca

SEQ ID NO: 2410342 - RNA, 19 nt, Artificial Sequence
  Description of Artificial Sequence: Synthetic oligonucleotide
augggguaauggcccaaaa

SEQ ID NO: 2410343 - RNA, 19 nt, Artificial Sequence
  Description of Artificial Sequence: Synthetic oligonucleotide
uccggaacgcggcucuguu

SEQ ID NO: 2410344 - RNA, 19 nt, Artificial Sequence
  Description of Artificial Sequence: Synthetic oligonucleotide
acuagcguuuuggcaguca

SEQ ID NO: 2410345 - RNA, 19 nt, Artificial Sequence
  Description of Artificial Sequence: Synthetic oligonucleotide
gggaggccauuucauaaca

SEQ ID NO: 2410346 - RNA, 19 nt, Artificial Sequence
  Description of Artificial Sequence: Synthetic oligonucleotide
uccggugcucuugguacga

SEQ ID NO: 2410347 - RNA, 19 nt, Artificial Sequence
  Description of Artificial Sequence: Synthetic oligonucleotide
gcugggcucgggcuggcgg

SEQ ID NO: 2410348 - RNA, 19 nt, Artificial Sequence
  Description of Artificial Sequence: Synthetic oligonucleotide
agagagcucggggcacgcg

SEQ ID NO: 2410349 - RNA, 19 nt, Artificial Sequence
  Description of Artificial Sequence: Synthetic oligonucleotide
cggaacgcggcucuguuag

SEQ ID NO: 2410350 - RNA, 19 nt, Artificial Sequence
  Description of Artificial Sequence: Synthetic oligonucleotide
cuugaccggucuuugccua

SEQ ID NO: 2410351 - RNA, 19 nt, Artificial Sequence
  Description of Artificial Sequence: Synthetic oligonucleotide
gugcaaaagcugaaggggu

SEQ ID NO: 2410352 - RNA, 19 nt, Artificial Sequence
  Description of Artificial Sequence: Synthetic oligonucleotide
gcugccguccggaacgcgg

SEQ ID NO: 2410353 - RNA, 19 nt, Artificial Sequence
  Description of Artificial Sequence: Synthetic oligonucleotide
gacggagggcgaguccuug

SEQ ID NO: 2410354 - RNA, 19 nt, Artificial Sequence
  Description of Artificial Sequence: Synthetic oligonucleotide
gggguauggguaaggggag

SEQ ID NO: 2410355 - RNA, 19 nt, Artificial Sequence
  Description of Artificial Sequence: Synthetic oligonucleotide
ggucuuugccuaccaggac

SEQ ID NO: 2410356 - RNA, 19 nt, Artificial Sequence
  Description of Artificial Sequence: Synthetic oligonucleotide
gagucccggaucacagaac

SEQ ID NO: 2410357 - RNA, 19 nt, Artificial Sequence
  Description of Artificial Sequence: Synthetic oligonucleotide
acggagggcgaguccuugu

SEQ ID NO: 2410358 - RNA, 19 nt, Artificial Sequence
  Description of Artificial Sequence: Synthetic oligonucleotide
uucccggggacggcggccc

SEQ ID NO: 2410359 - RNA, 19 nt, Artificial Sequence
  Description of Artificial Sequence: Synthetic oligonucleotide
cgagugucagcccauucac

SEQ ID NO: 2410360 - RNA, 19 nt, Artificial Sequence
  Description of Artificial Sequence: Synthetic oligonucleotide
gugagucccggaucacaga

SEQ ID NO: 2410361 - RNA, 19 nt, Artificial Sequence
  Description of Artificial Sequence: Synthetic oligonucleotide
cuuugccuaccaggacacc

SEQ ID NO: 2410362 - RNA, 19 nt, Artificial Sequence
  Description of Artificial Sequence: Synthetic oligonucleotide
ggucuucccggggacggcg

SEQ ID NO: 2410363 - RNA, 19 nt, Artificial Sequence
  Description of Artificial Sequence: Synthetic oligonucleotide
ccugcagcagugagucccg

SEQ ID NO: 2410364 - RNA, 19 nt, Artificial Sequence
  Description of Artificial Sequence: Synthetic oligonucleotide
gaacgcggcucuguuagcu

SEQ ID NO: 2410365 - RNA, 19 nt, Artificial Sequence
  Description of Artificial Sequence: Synthetic oligonucleotide
cucuugguacgaagaucca

SEQ ID NO: 2410366 - RNA, 19 nt, Artificial Sequence
  Description of Artificial Sequence: Synthetic oligonucleotide
ggucaguacugggaacgcc

SEQ ID NO: 2410367 - RNA, 19 nt, Artificial Sequence
  Description of Artificial Sequence: Synthetic oligonucleotide
gugucagcccauucacgaa

SEQ ID NO: 2410368 - RNA, 19 nt, Artificial Sequence
  Description of Artificial Sequence: Synthetic oligonucleotide
gaccggucuuugccuacca

SEQ ID NO: 2410369 - RNA, 19 nt, Artificial Sequence
  Description of Artificial Sequence: Synthetic oligonucleotide
cgcgcugccguccggaacg

SEQ ID NO: 2410370 - RNA, 19 nt, Artificial Sequence
  Description of Artificial Sequence: Synthetic oligonucleotide
aggggacagaugaggucag

SEQ ID NO: 2410371 - RNA, 19 nt, Artificial Sequence
  Description of Artificial Sequence: Synthetic oligonucleotide
uccacccggccauggcgcu

SEQ ID NO: 2410372 - RNA, 19 nt, Artificial Sequence
  Description of Artificial Sequence: Synthetic oligonucleotide
gagcucggggcacgcgcug

SEQ ID NO: 2410373 - RNA, 19 nt, Artificial Sequence
  Description of Artificial Sequence: Synthetic oligonucleotide
ggggacggcggcccagacg

SEQ ID NO: 2410374 - RNA, 19 nt, Artificial Sequence
  Description of Artificial Sequence: Synthetic oligonucleotide
cuagcguuuuggcagucau

SEQ ID NO: 2410375 - RNA, 19 nt, Artificial Sequence
  Description of Artificial Sequence: Synthetic oligonucleotide
ccuaccaggacaccaaccu

SEQ ID NO: 2410376 - RNA, 19 nt, Artificial Sequence
  Description of Artificial Sequence: Synthetic oligonucleotide
uggcagucauggugacagu

SEQ ID NO: 2410377 - RNA, 19 nt, Artificial Sequence
  Description of Artificial Sequence: Synthetic oligonucleotide
ugccguccggaacgcggcu

SEQ ID NO: 2410378 - RNA, 19 nt, Artificial Sequence
  Description of Artificial Sequence: Synthetic oligonucleotide
gucuucccggggacggcgg

SEQ ID NO: 2410379 - RNA, 19 nt, Artificial Sequence
  Description of Artificial Sequence: Synthetic oligonucleotide
aggugggaggccauuucau

SEQ ID NO: 2410380 - RNA, 19 nt, Artificial Sequence
  Description of Artificial Sequence: Synthetic oligonucleotide
cacccggccauggcgcugc

SEQ ID NO: 2410381 - RNA, 19 nt, Artificial Sequence
  Description of Artificial Sequence: Synthetic oligonucleotide
gcggcccagacggagggcg

SEQ ID NO: 2410382 - RNA, 19 nt, Artificial Sequence
  Description of Artificial Sequence: Synthetic oligonucleotide
ccgagugucagcccauuca

SEQ ID NO: 2410383 - RNA, 19 nt, Artificial Sequence
  Description of Artificial Sequence: Synthetic oligonucleotide
cagcuggcguaaugcuaac

SEQ ID NO: 2410384 - RNA, 19 nt, Artificial Sequence
  Description of Artificial Sequence: Synthetic oligonucleotide
cuuugcccaucagcaggac

SEQ ID NO: 2410385 - RNA, 19 nt, Artificial Sequence
  Description of Artificial Sequence: Synthetic oligonucleotide
agccuacgauggccgcguc

SEQ ID NO: 2410386 - RNA, 19 nt, Artificial Sequence
  Description of Artificial Sequence: Synthetic oligonucleotide
cagugagucccggaucaca

SEQ ID NO: 2410387 - RNA, 19 nt, Artificial Sequence
  Description of Artificial Sequence: Synthetic oligonucleotide
cccauccugcagcagugag

SEQ ID NO: 2410388 - RNA, 19 nt, Artificial Sequence
  Description of Artificial Sequence: Synthetic oligonucleotide
cuucccggggacggcggcc

SEQ ID NO: 2410389 - RNA, 19 nt, Artificial Sequence
  Description of Artificial Sequence: Synthetic oligonucleotide
auuccccauccugcagcag

SEQ ID NO: 2410390 - RNA, 19 nt, Artificial Sequence
  Description of Artificial Sequence: Synthetic oligonucleotide
caucagcaggacuagcguu

SEQ ID NO: 2410391 - RNA, 19 nt, Artificial Sequence
  Description of Artificial Sequence: Synthetic oligonucleotide
ggcgaguccuuguagccua

SEQ ID NO: 2410392 - RNA, 19 nt, Artificial Sequence
  Description of Artificial Sequence: Synthetic oligonucleotide
ggaacgccgcaggugggag

SEQ ID NO: 2410393 - RNA, 19 nt, Artificial Sequence
  Description of Artificial Sequence: Synthetic oligonucleotide
ccggaucacagaacauuuc

SEQ ID NO: 2410394 - RNA, 19 nt, Artificial Sequence
  Description of Artificial Sequence: Synthetic oligonucleotide
cagagagcucggggcacgc

SEQ ID NO: 2410395 - RNA, 19 nt, Artificial Sequence
  Description of Artificial Sequence: Synthetic oligonucleotide
gugcucuugguacgaagau

SEQ ID NO: 2410396 - RNA, 19 nt, Artificial Sequence
  Description of Artificial Sequence: Synthetic oligonucleotide
cuacgauggccgcguccug

SEQ ID NO: 2410397 - RNA, 19 nt, Artificial Sequence
  Description of Artificial Sequence: Synthetic oligonucleotide
ccugacaggucccguccgc

SEQ ID NO: 2410398 - RNA, 19 nt, Artificial Sequence
  Description of Artificial Sequence: Synthetic oligonucleotide
ucccguccgccaugaggcu

SEQ ID NO: 2410399 - RNA, 19 nt, Artificial Sequence
  Description of Artificial Sequence: Synthetic oligonucleotide
gcagucauggugacaguaa

SEQ ID NO: 2410400 - RNA, 19 nt, Artificial Sequence
  Description of Artificial Sequence: Synthetic oligonucleotide
uggcagcaauaagggaaau

SEQ ID NO: 2410401 - RNA, 19 nt, Artificial Sequence
  Description of Artificial Sequence: Synthetic oligonucleotide
ggaacgcggcucuguuagc

SEQ ID NO: 2410402 - RNA, 19 nt, Artificial Sequence
  Description of Artificial Sequence: Synthetic oligonucleotide
gccuacgauggccgcgucc

SEQ ID NO: 2410403 - RNA, 19 nt, Artificial Sequence
  Description of Artificial Sequence: Synthetic oligonucleotide
gccuaccaggacaccaacc

SEQ ID NO: 2410404 - RNA, 19 nt, Artificial Sequence
  Description of Artificial Sequence: Synthetic oligonucleotide
cagcaggacuagcguuuug

SEQ ID NO: 2410405 - RNA, 19 nt, Artificial Sequence
  Description of Artificial Sequence: Synthetic oligonucleotide
cugcgggcugcugcugggg

SEQ ID NO: 2410406 - RNA, 19 nt, Artificial Sequence
  Description of Artificial Sequence: Synthetic oligonucleotide
uggccgcguccugacaggu

SEQ ID NO: 2410407 - RNA, 19 nt, Artificial Sequence
  Description of Artificial Sequence: Synthetic oligonucleotide
gacaggucccguccgccau

SEQ ID NO: 2410408 - RNA, 19 nt, Artificial Sequence
  Description of Artificial Sequence: Synthetic oligonucleotide
gcaggugggaggccauuuc

SEQ ID NO: 2410409 - RNA, 19 nt, Artificial Sequence
  Description of Artificial Sequence: Synthetic oligonucleotide
cucggggcacgcgcugccg

SEQ ID NO: 2410410 - RNA, 19 nt, Artificial Sequence
  Description of Artificial Sequence: Synthetic oligonucleotide
gacuagcguuuuggcaguc

SEQ ID NO: 2410411 - RNA, 19 nt, Artificial Sequence
  Description of Artificial Sequence: Synthetic oligonucleotide
guauggguaaggggaggua

SEQ ID NO: 2410412 - RNA, 19 nt, Artificial Sequence
  Description of Artificial Sequence: Synthetic oligonucleotide
cugcagcagugagucccgg

SEQ ID NO: 2410413 - RNA, 19 nt, Artificial Sequence
  Description of Artificial Sequence: Synthetic oligonucleotide
ggguaaggggagguaucug

SEQ ID NO: 2410414 - RNA, 19 nt, Artificial Sequence
  Description of Artificial Sequence: Synthetic oligonucleotide
cggucuuugccuaccagga

SEQ ID NO: 2410415 - RNA, 19 nt, Artificial Sequence
  Description of Artificial Sequence: Synthetic oligonucleotide
cagacggagggcgaguccu

SEQ ID NO: 2410416 - RNA, 19 nt, Artificial Sequence
  Description of Artificial Sequence: Synthetic oligonucleotide
gguauggguaaggggaggu

SEQ ID NO: 2410417 - RNA, 19 nt, Artificial Sequence
  Description of Artificial Sequence: Synthetic oligonucleotide
caaaagcugaagggguggu

SEQ ID NO: 2410418 - RNA, 19 nt, Artificial Sequence
  Description of Artificial Sequence: Synthetic oligonucleotide
gggacagaugaggucagua

SEQ ID NO: 2410419 - RNA, 19 nt, Artificial Sequence
  Description of Artificial Sequence: Synthetic oligonucleotide
ccagacggagggcgagucc

SEQ ID NO: 2410420 - RNA, 19 nt, Artificial Sequence
  Description of Artificial Sequence: Synthetic oligonucleotide
ggacuagcguuuuggcagu

SEQ ID NO: 2410421 - RNA, 19 nt, Artificial Sequence
  Description of Artificial Sequence: Synthetic oligonucleotide
gcgggcugcugcuggggcc

SEQ ID NO: 2410422 - RNA, 19 nt, Artificial Sequence
  Description of Artificial Sequence: Synthetic oligonucleotide
gggcacgcgcugccguccg

SEQ ID NO: 2410423 - RNA, 19 nt, Artificial Sequence
  Description of Artificial Sequence: Synthetic oligonucleotide
cgaaggucuucccggggac

SEQ ID NO: 2410424 - RNA, 19 nt, Artificial Sequence
  Description of Artificial Sequence: Synthetic oligonucleotide
gcguaaugcuaacgaaggu

SEQ ID NO: 2410425 - RNA, 19 nt, Artificial Sequence
  Description of Artificial Sequence: Synthetic oligonucleotide
cggaucacagaacauuucu

SEQ ID NO: 2410426 - RNA, 19 nt, Artificial Sequence
  Description of Artificial Sequence: Synthetic oligonucleotide
ggcucgggcuggcgggcgg

SEQ ID NO: 2410427 - RNA, 19 nt, Artificial Sequence
  Description of Artificial Sequence: Synthetic oligonucleotide
aggucccguccgccaugag

SEQ ID NO: 2410428 - RNA, 19 nt, Artificial Sequence
  Description of Artificial Sequence: Synthetic oligonucleotide
acgccgcaggugggaggcc

SEQ ID NO: 2410429 - RNA, 19 nt, Artificial Sequence
  Description of Artificial Sequence: Synthetic oligonucleotide
cgaagauccauuguaaauu

SEQ ID NO: 2410430 - RNA, 19 nt, Artificial Sequence
  Description of Artificial Sequence: Synthetic oligonucleotide
ccagcccaugugguuuugg

SEQ ID NO: 2410431 - RNA, 19 nt, Artificial Sequence
  Description of Artificial Sequence: Synthetic oligonucleotide
cggugcucuugguacgaag

SEQ ID NO: 2410432 - RNA, 19 nt, Artificial Sequence
  Description of Artificial Sequence: Synthetic oligonucleotide
aaaccaccguggacaccuu

SEQ ID NO: 2410433 - RNA, 19 nt, Artificial Sequence
  Description of Artificial Sequence: Synthetic oligonucleotide
cguccugacaggucccguc

SEQ ID NO: 2410434 - RNA, 19 nt, Artificial Sequence
  Description of Artificial Sequence: Synthetic oligonucleotide
ucccggggacggcggccca

SEQ ID NO: 2410435 - RNA, 19 nt, Artificial Sequence
  Description of Artificial Sequence: Synthetic oligonucleotide
ggcccagacggagggcgag

SEQ ID NO: 2410436 - RNA, 19 nt, Artificial Sequence
  Description of Artificial Sequence: Synthetic oligonucleotide
ccaucagcaggacuagcgu

SEQ ID NO: 2410437 - RNA, 19 nt, Artificial Sequence
  Description of Artificial Sequence: Synthetic oligonucleotide
gcugucgauguaggcguuc

SEQ ID NO: 2410438 - RNA, 19 nt, Artificial Sequence
  Description of Artificial Sequence: Synthetic oligonucleotide
ccauuucauaacauuucuu

SEQ ID NO: 2410439 - RNA, 19 nt, Artificial Sequence
  Description of Artificial Sequence: Synthetic oligonucleotide
cgccaugaggcugucgaug

SEQ ID NO: 2410440 - RNA, 19 nt, Artificial Sequence
  Description of Artificial Sequence: Synthetic oligonucleotide
ccuacgauggccgcguccu

SEQ ID NO: 2410441 - RNA, 19 nt, Artificial Sequence
  Description of Artificial Sequence: Synthetic oligonucleotide
gggaacgccgcagguggga

SEQ ID NO: 2410442 - RNA, 19 nt, Artificial Sequence
  Description of Artificial Sequence: Synthetic oligonucleotide
caggucccguccgccauga

SEQ ID NO: 2410443 - RNA, 19 nt, Artificial Sequence
  Description of Artificial Sequence: Synthetic oligonucleotide
ggcacgcgcugccguccgg

SEQ ID NO: 2410444 - RNA, 19 nt, Artificial Sequence
  Description of Artificial Sequence: Synthetic oligonucleotide
ggggcacgcgcugccgucc

SEQ ID NO: 2410445 - RNA, 19 nt, Artificial Sequence
  Description of Artificial Sequence: Synthetic oligonucleotide
cccgagugucagcccauuc

SEQ ID NO: 2410446 - RNA, 19 nt, Artificial Sequence
  Description of Artificial Sequence: Synthetic oligonucleotide
ccaaccucagcuggcguaa

SEQ ID NO: 2410447 - RNA, 19 nt, Artificial Sequence
  Description of Artificial Sequence: Synthetic oligonucleotide
gcuggggccgcgggcuggg

SEQ ID NO: 2410448 - RNA, 19 nt, Artificial Sequence
  Description of Artificial Sequence: Synthetic oligonucleotide
agacggagggcgaguccuu

SEQ ID NO: 2410449 - RNA, 19 nt, Artificial Sequence
  Description of Artificial Sequence: Synthetic oligonucleotide
ccgcguccugacagguccc

SEQ ID NO: 2410450 - RNA, 19 nt, Artificial Sequence
  Description of Artificial Sequence: Synthetic oligonucleotide
gcucgggcuggcgggcggg

SEQ ID NO: 2410451 - RNA, 19 nt, Artificial Sequence
  Description of Artificial Sequence: Synthetic oligonucleotide
cgaguccuuguagccuacg

SEQ ID NO: 2410452 - RNA, 19 nt, Artificial Sequence
  Description of Artificial Sequence: Synthetic oligonucleotide
cccagacggagggcgaguc

SEQ ID NO: 2410453 - RNA, 19 nt, Artificial Sequence
  Description of Artificial Sequence: Synthetic oligonucleotide
cacgcgcugccguccggaa

SEQ ID NO: 2410454 - RNA, 19 nt, Artificial Sequence
  Description of Artificial Sequence: Synthetic oligonucleotide
cggcggcccagacggaggg

SEQ ID NO: 2410455 - RNA, 19 nt, Artificial Sequence
  Description of Artificial Sequence: Synthetic oligonucleotide
caccaaccucagcuggcgu

SEQ ID NO: 2410456 - RNA, 19 nt, Artificial Sequence
  Description of Artificial Sequence: Synthetic oligonucleotide
caccguggacaccuucuuu

SEQ ID NO: 2410457 - RNA, 19 nt, Artificial Sequence
  Description of Artificial Sequence: Synthetic oligonucleotide
cccguccgccaugaggcug

SEQ ID NO: 2410458 - RNA, 19 nt, Artificial Sequence
  Description of Artificial Sequence: Synthetic oligonucleotide
gcguuuuggcagucauggu

SEQ ID NO: 2410459 - RNA, 19 nt, Artificial Sequence
  Description of Artificial Sequence: Synthetic oligonucleotide
gggcucgggcuggcgggcg

SEQ ID NO: 2410460 - RNA, 19 nt, Artificial Sequence
  Description of Artificial Sequence: Synthetic oligonucleotide
gggcgaguccuuguagccu

SEQ ID NO: 2410461 - RNA, 19 nt, Artificial Sequence
  Description of Artificial Sequence: Synthetic oligonucleotide
guccggaacgcggcucugu

SEQ ID NO: 2410462 - RNA, 19 nt, Artificial Sequence
  Description of Artificial Sequence: Synthetic oligonucleotide
gcgaguccuuguagccuac

SEQ ID NO: 2410463 - RNA, 19 nt, Artificial Sequence
  Description of Artificial Sequence: Synthetic oligonucleotide
ggcguuccacccggccaug

SEQ ID NO: 2410464 - RNA, 19 nt, Artificial Sequence
  Description of Artificial Sequence: Synthetic oligonucleotide
gcacgcgcugccguccgga

SEQ ID NO: 2410465 - RNA, 19 nt, Artificial Sequence
  Description of Artificial Sequence: Synthetic oligonucleotide
gucccggaucacagaacau

SEQ ID NO: 2410466 - RNA, 19 nt, Artificial Sequence
  Description of Artificial Sequence: Synthetic oligonucleotide
cuggggccgcgggcugggc

SEQ ID NO: 2410467 - RNA, 19 nt, Artificial Sequence
  Description of Artificial Sequence: Synthetic oligonucleotide
gccguccggaacgcggcuc

SEQ ID NO: 2410468 - RNA, 19 nt, Artificial Sequence
  Description of Artificial Sequence: Synthetic oligonucleotide
ccguccgccaugaggcugu

SEQ ID NO: 2410469 - RNA, 19 nt, Artificial Sequence
  Description of Artificial Sequence: Synthetic oligonucleotide
ggccgcguccugacagguc

SEQ ID NO: 2410470 - RNA, 19 nt, Artificial Sequence
  Description of Artificial Sequence: Synthetic oligonucleotide
ccggaacgcggcucuguua

SEQ ID NO: 2410471 - RNA, 19 nt, Artificial Sequence
  Description of Artificial Sequence: Synthetic oligonucleotide
cuccuccggugcucuuggu

SEQ ID NO: 2410472 - RNA, 19 nt, Artificial Sequence
  Description of Artificial Sequence: Synthetic oligonucleotide
cccagcccaugugguuuug

SEQ ID NO: 2410473 - RNA, 19 nt, Artificial Sequence
  Description of Artificial Sequence: Synthetic oligonucleotide
ggggacagaugaggucagu

SEQ ID NO: 2410474 - RNA, 19 nt, Artificial Sequence
  Description of Artificial Sequence: Synthetic oligonucleotide
cggggcacgcgcugccguc

SEQ ID NO: 2410475 - RNA, 19 nt, Artificial Sequence
  Description of Artificial Sequence: Synthetic oligonucleotide
cggagggcgaguccuugua

SEQ ID NO: 2410476 - RNA, 19 nt, Artificial Sequence
  Description of Artificial Sequence: Synthetic oligonucleotide
ccguccggaacgcggcucu

SEQ ID NO: 2410477 - RNA, 19 nt, Artificial Sequence
  Description of Artificial Sequence: Synthetic oligonucleotide
ccacccggccauggcgcug

SEQ ID NO: 2410478 - RNA, 19 nt, Artificial Sequence
  Description of Artificial Sequence: Synthetic oligonucleotide
cccggggacggcggcccag

SEQ ID NO: 2410479 - RNA, 19 nt, Artificial Sequence
  Description of Artificial Sequence: Synthetic oligonucleotide
ggccgcgggcugggcucgg

SEQ ID NO: 2410480 - RNA, 19 nt, Artificial Sequence
  Description of Artificial Sequence: Synthetic oligonucleotide
cgauggccgcguccugaca

SEQ ID NO: 2410481 - RNA, 19 nt, Artificial Sequence
  Description of Artificial Sequence: Synthetic oligonucleotide
ggacggcggcccagacgga

SEQ ID NO: 2410482 - RNA, 19 nt, Artificial Sequence
  Description of Artificial Sequence: Synthetic oligonucleotide
cguccggaacgcggcucug

SEQ ID NO: 2410483 - RNA, 19 nt, Artificial Sequence
  Description of Artificial Sequence: Synthetic oligonucleotide
gcguccugacaggucccgu

SEQ ID NO: 2410484 - RNA, 19 nt, Artificial Sequence
  Description of Artificial Sequence: Synthetic oligonucleotide
gcccagacggagggcgagu

SEQ ID NO: 2410485 - RNA, 19 nt, Artificial Sequence
  Description of Artificial Sequence: Synthetic oligonucleotide
cggggacggcggcccagac

SEQ ID NO: 2410486 - RNA, 19 nt, Artificial Sequence
  Description of Artificial Sequence: Synthetic oligonucleotide
ccgccaugaggcugucgau

SEQ ID NO: 2410487 - RNA, 19 nt, Artificial Sequence
  Description of Artificial Sequence: Synthetic oligonucleotide
ggcugucgauguaggcguu

SEQ ID NO: 2410488 - RNA, 19 nt, Artificial Sequence
  Description of Artificial Sequence: Synthetic oligonucleotide
ccggggacggcggcccaga

SEQ ID NO: 2410489 - RNA, 19 nt, Artificial Sequence
  Description of Artificial Sequence: Synthetic oligonucleotide
ccggugcucuugguacgaa

SEQ ID NO: 2410490 - RNA, 19 nt, Artificial Sequence
  Description of Artificial Sequence: Synthetic oligonucleotide
gccgcaggugggaggccau

SEQ ID NO: 2410491 - RNA, 19 nt, Artificial Sequence
  Description of Artificial Sequence: Synthetic oligonucleotide
gggcuccuccggugcucuu

SEQ ID NO: 2410492 - RNA, 19 nt, Artificial Sequence
  Description of Artificial Sequence: Synthetic oligonucleotide
ccccgagugucagcccauu

SEQ ID NO: 2410493 - RNA, 19 nt, Artificial Sequence
  Description of Artificial Sequence: Synthetic oligonucleotide
  modified_base (10)..(10): a, c, u, g, unknown or other
acaauaaaanacuauuugg

SEQ ID NO: 2410494 - RNA, 19 nt, Artificial Sequence
  Description of Artificial Sequence: Synthetic oligonucleotide
aauguuuaaugccagagug

SEQ ID NO: 2410495 - RNA, 19 nt, Artificial Sequence
  Description of Artificial Sequence: Synthetic oligonucleotide
agguuuauacaucaggucc

SEQ ID NO: 2410496 - RNA, 19 nt, Artificial Sequence
  Description of Artificial Sequence: Synthetic oligonucleotide
  modified_base (6)..(6): a, c, u, g, unknown or other
uaaaanacuauuugguaag

SEQ ID NO: 2410497 - RNA, 19 nt, Artificial Sequence
  Description of Artificial Sequence: Synthetic oligonucleotide
uuuaaugccagagugggcg

SEQ ID NO: 2410498 - RNA, 19 nt, Artificial Sequence
  Description of Artificial Sequence: Synthetic oligonucleotide
aaagaaucagcgcaucaac

SEQ ID NO: 2410499 - RNA, 19 nt, Artificial Sequence
  Description of Artificial Sequence: Synthetic oligonucleotide
  modified_base (2)..(2): a, c, u, g, unknown or other
anacuauuugguaagaaag

SEQ ID NO: 2410500 - RNA, 19 nt, Artificial Sequence
  Description of Artificial Sequence: Synthetic oligonucleotide
  modified_base (16)..(16): a, c, u, g, unknown or other
uccuguacaauaaaanacu

SEQ ID NO: 2410501 - RNA, 19 nt, Artificial Sequence
  Description of Artificial Sequence: Synthetic oligonucleotide
  modified_base (7)..(7): a, c, u, g, unknown or other
auaaaanacuauuugguaa

SEQ ID NO: 2410502 - RNA, 19 nt, Artificial Sequence
  Description of Artificial Sequence: Synthetic oligonucleotide
  modified_base (13)..(13): a, c, u, g, unknown or other
uguacaauaaaanacuauu

SEQ ID NO: 2410503 - RNA, 19 nt, Artificial Sequence
  Description of Artificial Sequence: Synthetic oligonucleotide
  modified_base (8)..(8): a, c, u, g, unknown or other
aauaaaanacuauuuggua

SEQ ID NO: 2410504 - RNA, 19 nt, Artificial Sequence
  Description of Artificial Sequence: Synthetic oligonucleotide
  modified_base (3)..(3): a, c, u, g, unknown or other
aanacuauuugguaagaaa

SEQ ID NO: 2410505 - RNA, 19 nt, Artificial Sequence
  Description of Artificial Sequence: Synthetic oligonucleotide
ugaagaaagggacaccucc

SEQ ID NO: 2410506 - RNA, 19 nt, Artificial Sequence
  Description of Artificial Sequence: Synthetic oligonucleotide
uguuuaaugccagaguggg

SEQ ID NO: 2410507 - RNA, 19 nt, Artificial Sequence
  Description of Artificial Sequence: Synthetic oligonucleotide
uauaucaggaggcggggcg

SEQ ID NO: 2410508 - RNA, 19 nt, Artificial Sequence
  Description of Artificial Sequence: Synthetic oligonucleotide
agcgcaucaaccuggaggg

SEQ ID NO: 2410509 - RNA, 19 nt, Artificial Sequence
  Description of Artificial Sequence: Synthetic oligonucleotide
uugguaagaaagaaucagc

SEQ ID NO: 2410510 - RNA, 19 nt, Artificial Sequence
  Description of Artificial Sequence: Synthetic oligonucleotide
aagaaucagcgcaucaacc

SEQ ID NO: 2410511 - RNA, 19 nt, Artificial Sequence
  Description of Artificial Sequence: Synthetic oligonucleotide
cuuccauucgaucugcucc

SEQ ID NO: 2410512 - RNA, 19 nt, Artificial Sequence
  Description of Artificial Sequence: Synthetic oligonucleotide
gacaccuccaucucguagg

SEQ ID NO: 2410513 - RNA, 19 nt, Artificial Sequence
  Description of Artificial Sequence: Synthetic oligonucleotide
  modified_base (17)..(17): a, c, u, g, unknown or other
cuccuguacaauaaaanac

SEQ ID NO: 2410514 - RNA, 19 nt, Artificial Sequence
  Description of Artificial Sequence: Synthetic oligonucleotide
auccgggugaaucuuggcc

SEQ ID NO: 2410515 - RNA, 19 nt, Artificial Sequence
  Description of Artificial Sequence: Synthetic oligonucleotide
ucaugggacacacacuggc

SEQ ID NO: 2410516 - RNA, 19 nt, Artificial Sequence
  Description of Artificial Sequence: Synthetic oligonucleotide
aaauccucgaugagggugg

SEQ ID NO: 2410517 - RNA, 19 nt, Artificial Sequence
  Description of Artificial Sequence: Synthetic oligonucleotide
aaaguuccaccccagcaca

SEQ ID NO: 2410518 - RNA, 19 nt, Artificial Sequence
  Description of Artificial Sequence: Synthetic oligonucleotide
aauguggcggaaguaguuc

SEQ ID NO: 2410519 - RNA, 19 nt, Artificial Sequence
  Description of Artificial Sequence: Synthetic oligonucleotide
uucgaucugcuccacacug

SEQ ID NO: 2410520 - RNA, 19 nt, Artificial Sequence
  Description of Artificial Sequence: Synthetic oligonucleotide
ucgguugaugaagaaaggg

SEQ ID NO: 2410521 - RNA, 19 nt, Artificial Sequence
  Description of Artificial Sequence: Synthetic oligonucleotide
gugaaucuuggccacaugc

SEQ ID NO: 2410522 - RNA, 19 nt, Artificial Sequence
  Description of Artificial Sequence: Synthetic oligonucleotide
ucuugagacgcaugucucg

SEQ ID NO: 2410523 - RNA, 19 nt, Artificial Sequence
  Description of Artificial Sequence: Synthetic oligonucleotide
cuugccaaucuugagacgc

SEQ ID NO: 2410524 - RNA, 19 nt, Artificial Sequence
  Description of Artificial Sequence: Synthetic oligonucleotide
caaauguuuaaugccagag

SEQ ID NO: 2410525 - RNA, 19 nt, Artificial Sequence
  Description of Artificial Sequence: Synthetic oligonucleotide
uaaauccucgaugagggug

SEQ ID NO: 2410526 - RNA, 19 nt, Artificial Sequence
  Description of Artificial Sequence: Synthetic oligonucleotide
aucccuaaauccucgauga

SEQ ID NO: 2410527 - RNA, 19 nt, Artificial Sequence
  Description of Artificial Sequence: Synthetic oligonucleotide
ucguaguccagcacgagcu

SEQ ID NO: 2410528 - RNA, 19 nt, Artificial Sequence
  Description of Artificial Sequence: Synthetic oligonucleotide
ggaaacauccuucuuccgg

SEQ ID NO: 2410529 - RNA, 19 nt, Artificial Sequence
  Description of Artificial Sequence: Synthetic oligonucleotide
gggaggauauaucaggagg

SEQ ID NO: 2410530 - RNA, 19 nt, Artificial Sequence
  Description of Artificial Sequence: Synthetic oligonucleotide
cagcgcaucaaccuggagg

SEQ ID NO: 2410531 - RNA, 19 nt, Artificial Sequence
  Description of Artificial Sequence: Synthetic oligonucleotide
aaucagcgcaucaaccugg

SEQ ID NO: 2410532 - RNA, 19 nt, Artificial Sequence
  Description of Artificial Sequence: Synthetic oligonucleotide
ggugggaggauauaucagg

SEQ ID NO: 2410533 - RNA, 19 nt, Artificial Sequence
  Description of Artificial Sequence: Synthetic oligonucleotide
  modified_base (5)..(5): a, c, u, g, unknown or other
aaaanacuauuugguaaga

SEQ ID NO: 2410534 - RNA, 19 nt, Artificial Sequence
  Description of Artificial Sequence: Synthetic oligonucleotide
  modified_base (9)..(9): a, c, u, g, unknown or other
caauaaaanacuauuuggu

SEQ ID NO: 2410535 - RNA, 19 nt, Artificial Sequence
  Description of Artificial Sequence: Synthetic oligonucleotide
  modified_base (4)..(4): a, c, u, g, unknown or other
aaanacuauuugguaagaa

SEQ ID NO: 2410536 - RNA, 19 nt, Artificial Sequence
  Description of Artificial Sequence: Synthetic oligonucleotide
ucagcacaugccagcagcg

SEQ ID NO: 2410537 - RNA, 19 nt, Artificial Sequence
  Description of Artificial Sequence: Synthetic oligonucleotide
ugagugugcggaaggcugg

SEQ ID NO: 2410538 - RNA, 19 nt, Artificial Sequence
  Description of Artificial Sequence: Synthetic oligonucleotide
uucgcuggucuccaaaugu

SEQ ID NO: 2410539 - RNA, 19 nt, Artificial Sequence
  Description of Artificial Sequence: Synthetic oligonucleotide
cauucgaucugcuccacac

SEQ ID NO: 2410540 - RNA, 19 nt, Artificial Sequence
  Description of Artificial Sequence: Synthetic oligonucleotide
gauauaucaggaggcgggg

SEQ ID NO: 2410541 - RNA, 19 nt, Artificial Sequence
  Description of Artificial Sequence: Synthetic oligonucleotide
caaaguuccaccccagcac

SEQ ID NO: 2410542 - RNA, 19 nt, Artificial Sequence
  Description of Artificial Sequence: Synthetic oligonucleotide
agugcuuccauucgaucug

SEQ ID NO: 2410543 - RNA, 19 nt, Artificial Sequence
  Description of Artificial Sequence: Synthetic oligonucleotide
gaggauauaucaggaggcg

SEQ ID NO: 2410544 - RNA, 19 nt, Artificial Sequence
  Description of Artificial Sequence: Synthetic oligonucleotide
uuccacauccuuucccagg

SEQ ID NO: 2410545 - RNA, 19 nt, Artificial Sequence
  Description of Artificial Sequence: Synthetic oligonucleotide
uccgggugaaucuuggcca

SEQ ID NO: 2410546 - RNA, 19 nt, Artificial Sequence
  Description of Artificial Sequence: Synthetic oligonucleotide
gaaagggacaccuccaucu

SEQ ID NO: 2410547 - RNA, 19 nt, Artificial Sequence
  Description of Artificial Sequence: Synthetic oligonucleotide
cuguggggaggaaacaucc

SEQ ID NO: 2410548 - RNA, 19 nt, Artificial Sequence
  Description of Artificial Sequence: Synthetic oligonucleotide
uuaaugccagagugggcgg

SEQ ID NO: 2410549 - RNA, 19 nt, Artificial Sequence
  Description of Artificial Sequence: Synthetic oligonucleotide
ucgggcaugacguuccagc

SEQ ID NO: 2410550 - RNA, 19 nt, Artificial Sequence
  Description of Artificial Sequence: Synthetic oligonucleotide
uccucgaugagggugggag

SEQ ID NO: 2410551 - RNA, 19 nt, Artificial Sequence
  Description of Artificial Sequence: Synthetic oligonucleotide
ugagacgcaugucucgggc

SEQ ID NO: 2410552 - RNA, 19 nt, Artificial Sequence
  Description of Artificial Sequence: Synthetic oligonucleotide
gguaagaaagaaucagcgc

SEQ ID NO: 2410553 - RNA, 19 nt, Artificial Sequence
  Description of Artificial Sequence: Synthetic oligonucleotide
gagguuuauacaucagguc

SEQ ID NO: 2410554 - RNA, 19 nt, Artificial Sequence
  Description of Artificial Sequence: Synthetic oligonucleotide
cacauccuuucccaggugg

SEQ ID NO: 2410555 - RNA, 19 nt, Artificial Sequence
  Description of Artificial Sequence: Synthetic oligonucleotide
agaaagggacaccuccauc

SEQ ID NO: 2410556 - RNA, 19 nt, Artificial Sequence
  Description of Artificial Sequence: Synthetic oligonucleotide
ggauauaucaggaggcggg

SEQ ID NO: 2410557 - RNA, 19 nt, Artificial Sequence
  Description of Artificial Sequence: Synthetic oligonucleotide
acuauuugguaagaaagaa

SEQ ID NO: 2410558 - RNA, 19 nt, Artificial Sequence
  Description of Artificial Sequence: Synthetic oligonucleotide
uccacauccuuucccaggu

SEQ ID NO: 2410559 - RNA, 19 nt, Artificial Sequence
  Description of Artificial Sequence: Synthetic oligonucleotide
agggugggaggauauauca

SEQ ID NO: 2410560 - RNA, 19 nt, Artificial Sequence
  Description of Artificial Sequence: Synthetic oligonucleotide
aagaaagggacaccuccau

SEQ ID NO: 2410561 - RNA, 19 nt, Artificial Sequence
  Description of Artificial Sequence: Synthetic oligonucleotide
auguuuaaugccagagugg

SEQ ID NO: 2410562 - RNA, 19 nt, Artificial Sequence
  Description of Artificial Sequence: Synthetic oligonucleotide
ucaaccuggagggauggcc

SEQ ID NO: 2410563 - RNA, 19 nt, Artificial Sequence
  Description of Artificial Sequence: Synthetic oligonucleotide
uggcaguccaccucgguug

SEQ ID NO: 2410564 - RNA, 19 nt, Artificial Sequence
  Description of Artificial Sequence: Synthetic oligonucleotide
caucccuaaauccucgaug

SEQ ID NO: 2410565 - RNA, 19 nt, Artificial Sequence
  Description of Artificial Sequence: Synthetic oligonucleotide
ugugcggaaggcuggaggu

SEQ ID NO: 2410566 - RNA, 19 nt, Artificial Sequence
  Description of Artificial Sequence: Synthetic oligonucleotide
ugugcugaggccccuucgc

SEQ ID NO: 2410567 - RNA, 19 nt, Artificial Sequence
  Description of Artificial Sequence: Synthetic oligonucleotide
auacaucagguccucccuc

SEQ ID NO: 2410568 - RNA, 19 nt, Artificial Sequence
  Description of Artificial Sequence: Synthetic oligonucleotide
ccucgguugaugaagaaag

SEQ ID NO: 2410569 - RNA, 19 nt, Artificial Sequence
  Description of Artificial Sequence: Synthetic oligonucleotide
ucgacguccagcacggagu

SEQ ID NO: 2410570 - RNA, 19 nt, Artificial Sequence
  Description of Artificial Sequence: Synthetic oligonucleotide
ugggaggauauaucaggag

SEQ ID NO: 2410571 - RNA, 19 nt, Artificial Sequence
  Description of Artificial Sequence: Synthetic oligonucleotide
uccguagccggccccaaag

SEQ ID NO: 2410572 - RNA, 19 nt, Artificial Sequence
  Description of Artificial Sequence: Synthetic oligonucleotide
uuccauucgaucugcucca

SEQ ID NO: 2410573 - RNA, 19 nt, Artificial Sequence
  Description of Artificial Sequence: Synthetic oligonucleotide
auauaucaggaggcggggc

SEQ ID NO: 2410574 - RNA, 19 nt, Artificial Sequence
  Description of Artificial Sequence: Synthetic oligonucleotide
aggauauaucaggaggcgg

SEQ ID NO: 2410575 - RNA, 19 nt, Artificial Sequence
  Description of Artificial Sequence: Synthetic oligonucleotide
uguccccuugccaaucuug

SEQ ID NO: 2410576 - RNA, 19 nt, Artificial Sequence
  Description of Artificial Sequence: Synthetic oligonucleotide
uuccucgucucucugugcu

SEQ ID NO: 2410577 - RNA, 19 nt, Artificial Sequence
  Description of Artificial Sequence: Synthetic oligonucleotide
uggcaucccuaaauccucg

SEQ ID NO: 2410578 - RNA, 19 nt, Artificial Sequence
  Description of Artificial Sequence: Synthetic oligonucleotide
cuugagacgcaugucucgg

SEQ ID NO: 2410579 - RNA, 19 nt, Artificial Sequence
  Description of Artificial Sequence: Synthetic oligonucleotide
uagccggccccaaaguucc

SEQ ID NO: 2410580 - RNA, 19 nt, Artificial Sequence
  Description of Artificial Sequence: Synthetic oligonucleotide
cucgguugaugaagaaagg

SEQ ID NO: 2410581 - RNA, 19 nt, Artificial Sequence
  Description of Artificial Sequence: Synthetic oligonucleotide
aauaggucuugaagccaac

SEQ ID NO: 2410582 - RNA, 19 nt, Artificial Sequence
  Description of Artificial Sequence: Synthetic oligonucleotide
ggaggaaacauccuucuuc

SEQ ID NO: 2410583 - RNA, 19 nt, Artificial Sequence
  Description of Artificial Sequence: Synthetic oligonucleotide
cucucgacguccagcacgg

SEQ ID NO: 2410584 - RNA, 19 nt, Artificial Sequence
  Description of Artificial Sequence: Synthetic oligonucleotide
ggcaugacguuccagcucc

SEQ ID NO: 2410585 - RNA, 19 nt, Artificial Sequence
  Description of Artificial Sequence: Synthetic oligonucleotide
ucuccauccgggugaaucu

SEQ ID NO: 2410586 - RNA, 19 nt, Artificial Sequence
  Description of Artificial Sequence: Synthetic oligonucleotide
uggggaggaaacauccuuc

SEQ ID NO: 2410587 - RNA, 19 nt, Artificial Sequence
  Description of Artificial Sequence: Synthetic oligonucleotide
ucgcugagugugcggaagg

SEQ ID NO: 2410588 - RNA, 19 nt, Artificial Sequence
  Description of Artificial Sequence: Synthetic oligonucleotide
uugagacgcaugucucggg

SEQ ID NO: 2410589 - RNA, 19 nt, Artificial Sequence
  Description of Artificial Sequence: Synthetic oligonucleotide
ggaggauauaucaggaggc

SEQ ID NO: 2410590 - RNA, 19 nt, Artificial Sequence
  Description of Artificial Sequence: Synthetic oligonucleotide
acauccuuucccagguggc

SEQ ID NO: 2410591 - RNA, 19 nt, Artificial Sequence
  Description of Artificial Sequence: Synthetic oligonucleotide
gugugcggaaggcuggagg

SEQ ID NO: 2410592 - RNA, 19 nt, Artificial Sequence
  Description of Artificial Sequence: Synthetic oligonucleotide
aggcuggagguuuauacau

SEQ ID NO: 2410593 - RNA, 19 nt, Artificial Sequence
  Description of Artificial Sequence: Synthetic oligonucleotide
uucggggaggcaccgcugc

SEQ ID NO: 2410594 - RNA, 19 nt, Artificial Sequence
  Description of Artificial Sequence: Synthetic oligonucleotide
ggggucaugggacacacac

SEQ ID NO: 2410595 - RNA, 19 nt, Artificial Sequence
  Description of Artificial Sequence: Synthetic oligonucleotide
ucccuaaauccucgaugag

SEQ ID NO: 2410596 - RNA, 19 nt, Artificial Sequence
  Description of Artificial Sequence: Synthetic oligonucleotide
uggcuccuguacaauaaaa

SEQ ID NO: 2410597 - RNA, 19 nt, Artificial Sequence
  Description of Artificial Sequence: Synthetic oligonucleotide
uccauccgggugaaucuug

SEQ ID NO: 2410598 - RNA, 19 nt, Artificial Sequence
  Description of Artificial Sequence: Synthetic oligonucleotide
uguggggaggaaacauccu

SEQ ID NO: 2410599 - RNA, 19 nt, Artificial Sequence
  Description of Artificial Sequence: Synthetic oligonucleotide
acaucagguccucccuccg

SEQ ID NO: 2410600 - RNA, 19 nt, Artificial Sequence
  Description of Artificial Sequence: Synthetic oligonucleotide
caugucucgggcaugacgu

SEQ ID NO: 2410601 - RNA, 19 nt, Artificial Sequence
  Description of Artificial Sequence: Synthetic oligonucleotide
ggucuccaaauguuuaaug

SEQ ID NO: 2410602 - RNA, 19 nt, Artificial Sequence
  Description of Artificial Sequence: Synthetic oligonucleotide
cuggcaucccuaaauccuc

SEQ ID NO: 2410603 - RNA, 19 nt, Artificial Sequence
  Description of Artificial Sequence: Synthetic oligonucleotide
cacggagugcuuccauucg

SEQ ID NO: 2410604 - RNA, 19 nt, Artificial Sequence
  Description of Artificial Sequence: Synthetic oligonucleotide
auucgaucugcuccacacu

SEQ ID NO: 2410605 - RNA, 19 nt, Artificial Sequence
  Description of Artificial Sequence: Synthetic oligonucleotide
agagugggcggcggcagcc

SEQ ID NO: 2410606 - RNA, 19 nt, Artificial Sequence
  Description of Artificial Sequence: Synthetic oligonucleotide
ugagggugggaggauauau

SEQ ID NO: 2410607 - RNA, 19 nt, Artificial Sequence
  Description of Artificial Sequence: Synthetic oligonucleotide
cucgacguccagcacggag

SEQ ID NO: 2410608 - RNA, 19 nt, Artificial Sequence
  Description of Artificial Sequence: Synthetic oligonucleotide
ccaacuucucuccauccgg

SEQ ID NO: 2410609 - RNA, 19 nt, Artificial Sequence
  Description of Artificial Sequence: Synthetic oligonucleotide
ugaguucggggaggcaccg

SEQ ID NO: 2410610 - RNA, 19 nt, Artificial Sequence
  Description of Artificial Sequence: Synthetic oligonucleotide
  modified_base (18)..(18): a, c, u, g, unknown or other
gcuccuguacaauaaaana

SEQ ID NO: 2410611 - RNA, 19 nt, Artificial Sequence
  Description of Artificial Sequence: Synthetic oligonucleotide
gguccuuggugggagaggg

SEQ ID NO: 2410612 - RNA, 19 nt, Artificial Sequence
  Description of Artificial Sequence: Synthetic oligonucleotide
guuccaccccagcacaaug

SEQ ID NO: 2410613 - RNA, 19 nt, Artificial Sequence
  Description of Artificial Sequence: Synthetic oligonucleotide
cuggagguuuauacaucag

SEQ ID NO: 2410614 - RNA, 19 nt, Artificial Sequence
  Description of Artificial Sequence: Synthetic oligonucleotide
cucuccauccgggugaauc

SEQ ID NO: 2410615 - RNA, 19 nt, Artificial Sequence
  Description of Artificial Sequence: Synthetic oligonucleotide
gcaugucucgggcaugacg

SEQ ID NO: 2410616 - RNA, 19 nt, Artificial Sequence
  Description of Artificial Sequence: Synthetic oligonucleotide
cucucugugcugaggcccc

SEQ ID NO: 2410617 - RNA, 19 nt, Artificial Sequence
  Description of Artificial Sequence: Synthetic oligonucleotide
caucaaccuggagggaugg

SEQ ID NO: 2410618 - RNA, 19 nt, Artificial Sequence
  Description of Artificial Sequence: Synthetic oligonucleotide
aauccucgaugaggguggg

SEQ ID NO: 2410619 - RNA, 19 nt, Artificial Sequence
  Description of Artificial Sequence: Synthetic oligonucleotide
gccaacuucucuccauccg

SEQ ID NO: 2410620 - RNA, 19 nt, Artificial Sequence
  Description of Artificial Sequence: Synthetic oligonucleotide
acguccagcacggagugcu

SEQ ID NO: 2410621 - RNA, 19 nt, Artificial Sequence
  Description of Artificial Sequence: Synthetic oligonucleotide
cuucgcuggucuccaaaug

SEQ ID NO: 2410622 - RNA, 19 nt, Artificial Sequence
  Description of Artificial Sequence: Synthetic oligonucleotide
agugggcggcggcagccgc

SEQ ID NO: 2410623 - RNA, 19 nt, Artificial Sequence
  Description of Artificial Sequence: Synthetic oligonucleotide
cuccuugcggaagucuucc

SEQ ID NO: 2410624 - RNA, 19 nt, Artificial Sequence
  Description of Artificial Sequence: Synthetic oligonucleotide
cuauuugguaagaaagaau

SEQ ID NO: 2410625 - RNA, 19 nt, Artificial Sequence
  Description of Artificial Sequence: Synthetic oligonucleotide
acggagugcuuccauucga

SEQ ID NO: 2410626 - RNA, 19 nt, Artificial Sequence
  Description of Artificial Sequence: Synthetic oligonucleotide
  modified_base (12)..(12): a, c, u, g, unknown or other
guacaauaaaanacuauuu

SEQ ID NO: 2410627 - RNA, 19 nt, Artificial Sequence
  Description of Artificial Sequence: Synthetic oligonucleotide
agacgcaugucucgggcau

SEQ ID NO: 2410628 - RNA, 19 nt, Artificial Sequence
  Description of Artificial Sequence: Synthetic oligonucleotide
accccagcacaauguggcg

SEQ ID NO: 2410629 - RNA, 19 nt, Artificial Sequence
  Description of Artificial Sequence: Synthetic oligonucleotide
guuuauacaucagguccuc

SEQ ID NO: 2410630 - RNA, 19 nt, Artificial Sequence
  Description of Artificial Sequence: Synthetic oligonucleotide
guuuaaugccagagugggc

SEQ ID NO: 2410631 - RNA, 19 nt, Artificial Sequence
  Description of Artificial Sequence: Synthetic oligonucleotide
uaaugccagagugggcggc

SEQ ID NO: 2410632 - RNA, 19 nt, Artificial Sequence
  Description of Artificial Sequence: Synthetic oligonucleotide
ccucucgacguccagcacg

SEQ ID NO: 2410633 - RNA, 19 nt, Artificial Sequence
  Description of Artificial Sequence: Synthetic oligonucleotide
ucgcuggucuccaaauguu

SEQ ID NO: 2410634 - RNA, 19 nt, Artificial Sequence
  Description of Artificial Sequence: Synthetic oligonucleotide
cugugcugaggccccuucg

SEQ ID NO: 2410635 - RNA, 19 nt, Artificial Sequence
  Description of Artificial Sequence: Synthetic oligonucleotide
ucgucucucugugcugagg

SEQ ID NO: 2410636 - RNA, 19 nt, Artificial Sequence
  Description of Artificial Sequence: Synthetic oligonucleotide
caucucguagguccucuuc

SEQ ID NO: 2410637 - RNA, 19 nt, Artificial Sequence
  Description of Artificial Sequence: Synthetic oligonucleotide
aucaaccuggagggauggc

SEQ ID NO: 2410638 - RNA, 19 nt, Artificial Sequence
  Description of Artificial Sequence: Synthetic oligonucleotide
gagacgcaugucucgggca

SEQ ID NO: 2410639 - RNA, 19 nt, Artificial Sequence
  Description of Artificial Sequence: Synthetic oligonucleotide
uggcggaaguaguucccug

SEQ ID NO: 2410640 - RNA, 19 nt, Artificial Sequence
  Description of Artificial Sequence: Synthetic oligonucleotide
uggucuccaaauguuuaau

SEQ ID NO: 2410641 - RNA, 19 nt, Artificial Sequence
  Description of Artificial Sequence: Synthetic oligonucleotide
gucaugggacacacacugg

SEQ ID NO: 2410642 - RNA, 19 nt, Artificial Sequence
  Description of Artificial Sequence: Synthetic oligonucleotide
ucgggaccaccuucuuucc

SEQ ID NO: 2410643 - RNA, 19 nt, Artificial Sequence
  Description of Artificial Sequence: Synthetic oligonucleotide
cauccgggugaaucuuggc

SEQ ID NO: 2410644 - RNA, 19 nt, Artificial Sequence
  Description of Artificial Sequence: Synthetic oligonucleotide
uuccgguccuuggugggag

SEQ ID NO: 2410645 - RNA, 19 nt, Artificial Sequence
  Description of Artificial Sequence: Synthetic oligonucleotide
gugggaggauauaucagga

SEQ ID NO: 2410646 - RNA, 19 nt, Artificial Sequence
  Description of Artificial Sequence: Synthetic oligonucleotide
gaagucuucccggcccagc

SEQ ID NO: 2410647 - RNA, 19 nt, Artificial Sequence
  Description of Artificial Sequence: Synthetic oligonucleotide
caaucuugagacgcauguc

SEQ ID NO: 2410648 - RNA, 19 nt, Artificial Sequence
  Description of Artificial Sequence: Synthetic oligonucleotide
guagccggccccaaaguuc

SEQ ID NO: 2410649 - RNA, 19 nt, Artificial Sequence
  Description of Artificial Sequence: Synthetic oligonucleotide
uccucgucucucugugcug

SEQ ID NO: 2410650 - RNA, 19 nt, Artificial Sequence
  Description of Artificial Sequence: Synthetic oligonucleotide
cucgcugagugugcggaag

SEQ ID NO: 2410651 - RNA, 19 nt, Artificial Sequence
  Description of Artificial Sequence: Synthetic oligonucleotide
gucucgggcaugacguucc

SEQ ID NO: 2410652 - RNA, 19 nt, Artificial Sequence
  Description of Artificial Sequence: Synthetic oligonucleotide
gagggugggaggauauauc

SEQ ID NO: 2410653 - RNA, 19 nt, Artificial Sequence
  Description of Artificial Sequence: Synthetic oligonucleotide
ugucucgggcaugacguuc

SEQ ID NO: 2410654 - RNA, 19 nt, Artificial Sequence
  Description of Artificial Sequence: Synthetic oligonucleotide
cuggucuccaaauguuuaa

SEQ ID NO: 2410655 - RNA, 19 nt, Artificial Sequence
  Description of Artificial Sequence: Synthetic oligonucleotide
auaucaggaggcggggcgu

SEQ ID NO: 2410656 - RNA, 19 nt, Artificial Sequence
  Description of Artificial Sequence: Synthetic oligonucleotide
cucgaugagggugggagga

SEQ ID NO: 2410657 - RNA, 19 nt, Artificial Sequence
  Description of Artificial Sequence: Synthetic oligonucleotide
uccuugcggaagucuuccc

SEQ ID NO: 2410658 - RNA, 19 nt, Artificial Sequence
  Description of Artificial Sequence: Synthetic oligonucleotide
ccacuggcaguccaccucg

SEQ ID NO: 2410659 - RNA, 19 nt, Artificial Sequence
  Description of Artificial Sequence: Synthetic oligonucleotide
agcucgcugagugugcgga

SEQ ID NO: 2410660 - RNA, 19 nt, Artificial Sequence
  Description of Artificial Sequence: Synthetic oligonucleotide
gcggaaguaguucccugag

SEQ ID NO: 2410661 - RNA, 19 nt, Artificial Sequence
  Description of Artificial Sequence: Synthetic oligonucleotide
accucgguugaugaagaaa

SEQ ID NO: 2410662 - RNA, 19 nt, Artificial Sequence
  Description of Artificial Sequence: Synthetic oligonucleotide
acgagcucgcugagugugc

SEQ ID NO: 2410663 - RNA, 19 nt, Artificial Sequence
  Description of Artificial Sequence: Synthetic oligonucleotide
gaagccaacuucucuccau

SEQ ID NO: 2410664 - RNA, 19 nt, Artificial Sequence
  Description of Artificial Sequence: Synthetic oligonucleotide
cagcagcggccguaggccg

SEQ ID NO: 2410665 - RNA, 19 nt, Artificial Sequence
  Description of Artificial Sequence: Synthetic oligonucleotide
ugcggaaggcuggagguuu

SEQ ID NO: 2410666 - RNA, 19 nt, Artificial Sequence
  Description of Artificial Sequence: Synthetic oligonucleotide
ugcuuccauucgaucugcu

SEQ ID NO: 2410667 - RNA, 19 nt, Artificial Sequence
  Description of Artificial Sequence: Synthetic oligonucleotide
gcugaguucggggaggcac

SEQ ID NO: 2410668 - RNA, 19 nt, Artificial Sequence
  Description of Artificial Sequence: Synthetic oligonucleotide
cagcacaugccagcagcgg

SEQ ID NO: 2410669 - RNA, 19 nt, Artificial Sequence
  Description of Artificial Sequence: Synthetic oligonucleotide
caccgcugcugccacucgg

SEQ ID NO: 2410670 - RNA, 19 nt, Artificial Sequence
  Description of Artificial Sequence: Synthetic oligonucleotide
agggccuguccccuugcca

SEQ ID NO: 2410671 - RNA, 19 nt, Artificial Sequence
  Description of Artificial Sequence: Synthetic oligonucleotide
uuucccagguggccucguc

SEQ ID NO: 2410672 - RNA, 19 nt, Artificial Sequence
  Description of Artificial Sequence: Synthetic oligonucleotide
ccauccgggugaaucuugg

SEQ ID NO: 2410673 - RNA, 19 nt, Artificial Sequence
  Description of Artificial Sequence: Synthetic oligonucleotide
gcggaagucuucccggccc

SEQ ID NO: 2410674 - RNA, 19 nt, Artificial Sequence
  Description of Artificial Sequence: Synthetic oligonucleotide
  modified_base (19)..(19): a, c, u, g, unknown or other
ggcuccuguacaauaaaan

SEQ ID NO: 2410675 - RNA, 19 nt, Artificial Sequence
  Description of Artificial Sequence: Synthetic oligonucleotide
cccuggcaucccuaaaucc

SEQ ID NO: 2410676 - RNA, 19 nt, Artificial Sequence
  Description of Artificial Sequence: Synthetic oligonucleotide
caguccaccucgguugaug

SEQ ID NO: 2410677 - RNA, 19 nt, Artificial Sequence
  Description of Artificial Sequence: Synthetic oligonucleotide
ggcggaaguaguucccuga

SEQ ID NO: 2410678 - RNA, 19 nt, Artificial Sequence
  Description of Artificial Sequence: Synthetic oligonucleotide
cccucuguggggaggaaac

SEQ ID NO: 2410679 - RNA, 19 nt, Artificial Sequence
  Description of Artificial Sequence: Synthetic oligonucleotide
ugggcccucuguggggagg

SEQ ID NO: 2410680 - RNA, 19 nt, Artificial Sequence
  Description of Artificial Sequence: Synthetic oligonucleotide
gcacggagugcuuccauuc

SEQ ID NO: 2410681 - RNA, 19 nt, Artificial Sequence
  Description of Artificial Sequence: Synthetic oligonucleotide
cagcacaauguggcggaag

SEQ ID NO: 2410682 - RNA, 19 nt, Artificial Sequence
  Description of Artificial Sequence: Synthetic oligonucleotide
gcagcugaguucggggagg

SEQ ID NO: 2410683 - RNA, 19 nt, Artificial Sequence
  Description of Artificial Sequence: Synthetic oligonucleotide
cgguugaugaagaaaggga

SEQ ID NO: 2410684 - RNA, 19 nt, Artificial Sequence
  Description of Artificial Sequence: Synthetic oligonucleotide
gcuuccauucgaucugcuc

SEQ ID NO: 2410685 - RNA, 19 nt, Artificial Sequence
  Description of Artificial Sequence: Synthetic oligonucleotide
ccaccccagcacaaugugg

SEQ ID NO: 2410686 - RNA, 19 nt, Artificial Sequence
  Description of Artificial Sequence: Synthetic oligonucleotide
ggugaaucuuggccacaug

SEQ ID NO: 2410687 - RNA, 19 nt, Artificial Sequence
  Description of Artificial Sequence: Synthetic oligonucleotide
gggugggaggauauaucag

SEQ ID NO: 2410688 - RNA, 19 nt, Artificial Sequence
  Description of Artificial Sequence: Synthetic oligonucleotide
cacuggcaguccaccucgg

SEQ ID NO: 2410689 - RNA, 19 nt, Artificial Sequence
  Description of Artificial Sequence: Synthetic oligonucleotide
guggcuccuguacaauaaa

SEQ ID NO: 2410690 - RNA, 19 nt, Artificial Sequence
  Description of Artificial Sequence: Synthetic oligonucleotide
gacgcaugucucgggcaug

SEQ ID NO: 2410691 - RNA, 19 nt, Artificial Sequence
  Description of Artificial Sequence: Synthetic oligonucleotide
aaguuccaccccagcacaa

SEQ ID NO: 2410692 - RNA, 19 nt, Artificial Sequence
  Description of Artificial Sequence: Synthetic oligonucleotide
cgccucguaguccagcacg

SEQ ID NO: 2410693 - RNA, 19 nt, Artificial Sequence
  Description of Artificial Sequence: Synthetic oligonucleotide
gagugggcggcggcagccg

SEQ ID NO: 2410694 - RNA, 19 nt, Artificial Sequence
  Description of Artificial Sequence: Synthetic oligonucleotide
acgcaugucucgggcauga

SEQ ID NO: 2410695 - RNA, 19 nt, Artificial Sequence
  Description of Artificial Sequence: Synthetic oligonucleotide
aguuccaccccagcacaau

SEQ ID NO: 2410696 - RNA, 19 nt, Artificial Sequence
  Description of Artificial Sequence: Synthetic oligonucleotide
  modified_base (15)..(15): a, c, u, g, unknown or other
ccuguacaauaaaanacua

SEQ ID NO: 2410697 - RNA, 19 nt, Artificial Sequence
  Description of Artificial Sequence: Synthetic oligonucleotide
ggccccaaaguuccacccc

SEQ ID NO: 2410698 - RNA, 19 nt, Artificial Sequence
  Description of Artificial Sequence: Synthetic oligonucleotide
uccauucgaucugcuccac

SEQ ID NO: 2410699 - RNA, 19 nt, Artificial Sequence
  Description of Artificial Sequence: Synthetic oligonucleotide
ccucgaugagggugggagg

SEQ ID NO: 2410700 - RNA, 19 nt, Artificial Sequence
  Description of Artificial Sequence: Synthetic oligonucleotide
augccagcagcggccguag

SEQ ID NO: 2410701 - RNA, 19 nt, Artificial Sequence
  Description of Artificial Sequence: Synthetic oligonucleotide
gcaucaaccuggagggaug

SEQ ID NO: 2410702 - RNA, 19 nt, Artificial Sequence
  Description of Artificial Sequence: Synthetic oligonucleotide
gaugagggugggaggauau

SEQ ID NO: 2410703 - RNA, 19 nt, Artificial Sequence
  Description of Artificial Sequence: Synthetic oligonucleotide
agcuccuugcggaagucuu

SEQ ID NO: 2410704 - RNA, 19 nt, Artificial Sequence
  Description of Artificial Sequence: Synthetic oligonucleotide
cagggcuccguagccggcc

SEQ ID NO: 2410705 - RNA, 19 nt, Artificial Sequence
  Description of Artificial Sequence: Synthetic oligonucleotide
uccgguccuuggugggaga

SEQ ID NO: 2410706 - RNA, 19 nt, Artificial Sequence
  Description of Artificial Sequence: Synthetic oligonucleotide
ucgaugagggugggaggau

SEQ ID NO: 2410707 - RNA, 19 nt, Artificial Sequence
  Description of Artificial Sequence: Synthetic oligonucleotide
ccuggcaucccuaaauccu

SEQ ID NO: 2410708 - RNA, 19 nt, Artificial Sequence
  Description of Artificial Sequence: Synthetic oligonucleotide
cuaaauccucgaugagggu

SEQ ID NO: 2410709 - RNA, 19 nt, Artificial Sequence
  Description of Artificial Sequence: Synthetic oligonucleotide
gagugugcggaaggcugga

SEQ ID NO: 2410710 - RNA, 19 nt, Artificial Sequence
  Description of Artificial Sequence: Synthetic oligonucleotide
gccacucgggaccaccuuc

SEQ ID NO: 2410711 - RNA, 19 nt, Artificial Sequence
  Description of Artificial Sequence: Synthetic oligonucleotide
gggcaugacguuccagcuc

SEQ ID NO: 2410712 - RNA, 19 nt, Artificial Sequence
  Description of Artificial Sequence: Synthetic oligonucleotide
cucguccacuggcagucca

SEQ ID NO: 2410713 - RNA, 19 nt, Artificial Sequence
  Description of Artificial Sequence: Synthetic oligonucleotide
cucgggcaugacguuccag

SEQ ID NO: 2410714 - RNA, 19 nt, Artificial Sequence
  Description of Artificial Sequence: Synthetic oligonucleotide
acacacuggcccagcuuca

SEQ ID NO: 2410715 - RNA, 19 nt, Artificial Sequence
  Description of Artificial Sequence: Synthetic oligonucleotide
gccaaucuugagacgcaug

SEQ ID NO: 2410716 - RNA, 19 nt, Artificial Sequence
  Description of Artificial Sequence: Synthetic oligonucleotide
ggccacaugcuuccacauc

SEQ ID NO: 2410717 - RNA, 19 nt, Artificial Sequence
  Description of Artificial Sequence: Synthetic oligonucleotide
ggcaucccuaaauccucga

SEQ ID NO: 2410718 - RNA, 19 nt, Artificial Sequence
  Description of Artificial Sequence: Synthetic oligonucleotide
ccgggugaaucuuggccac

SEQ ID NO: 2410719 - RNA, 19 nt, Artificial Sequence
  Description of Artificial Sequence: Synthetic oligonucleotide
ggggcguggcuccuguaca

SEQ ID NO: 2410720 - RNA, 19 nt, Artificial Sequence
  Description of Artificial Sequence: Synthetic oligonucleotide
ggcuggagguuuauacauc

SEQ ID NO: 2410721 - RNA, 19 nt, Artificial Sequence
  Description of Artificial Sequence: Synthetic oligonucleotide
ucucugugcugaggccccu

SEQ ID NO: 2410722 - RNA, 19 nt, Artificial Sequence
  Description of Artificial Sequence: Synthetic oligonucleotide
ggaggcaccgcugcugcca

SEQ ID NO: 2410723 - RNA, 19 nt, Artificial Sequence
  Description of Artificial Sequence: Synthetic oligonucleotide
ccggccccaaaguuccacc

SEQ ID NO: 2410724 - RNA, 19 nt, Artificial Sequence
  Description of Artificial Sequence: Synthetic oligonucleotide
gcuggucuccaaauguuua

SEQ ID NO: 2410725 - RNA, 19 nt, Artificial Sequence
  Description of Artificial Sequence: Synthetic oligonucleotide
gaggccccuucgcuggucu

SEQ ID NO: 2410726 - RNA, 19 nt, Artificial Sequence
  Description of Artificial Sequence: Synthetic oligonucleotide
cugggcccucuguggggag

SEQ ID NO: 2410727 - RNA, 19 nt, Artificial Sequence
  Description of Artificial Sequence: Synthetic oligonucleotide
ccccuggcaucccuaaauc

SEQ ID NO: 2410728 - RNA, 19 nt, Artificial Sequence
  Description of Artificial Sequence: Synthetic oligonucleotide
augagggugggaggauaua

SEQ ID NO: 2410729 - RNA, 19 nt, Artificial Sequence
  Description of Artificial Sequence: Synthetic oligonucleotide
cuccaucucguagguccuc

SEQ ID NO: 2410730 - RNA, 19 nt, Artificial Sequence
  Description of Artificial Sequence: Synthetic oligonucleotide
ggagggccuguccccuugc

SEQ ID NO: 2410731 - RNA, 19 nt, Artificial Sequence
  Description of Artificial Sequence: Synthetic oligonucleotide
ggccccuucgcuggucucc

SEQ ID NO: 2410732 - RNA, 19 nt, Artificial Sequence
  Description of Artificial Sequence: Synthetic oligonucleotide
ccaccucgguugaugaaga

SEQ ID NO: 2410733 - RNA, 19 nt, Artificial Sequence
  Description of Artificial Sequence: Synthetic oligonucleotide
ugaggccccuucgcugguc

SEQ ID NO: 2410734 - RNA, 19 nt, Artificial Sequence
  Description of Artificial Sequence: Synthetic oligonucleotide
cuggcaguccaccucgguu

SEQ ID NO: 2410735 - RNA, 19 nt, Artificial Sequence
  Description of Artificial Sequence: Synthetic oligonucleotide
caugccagcagcggccgua

SEQ ID NO: 2410736 - RNA, 19 nt, Artificial Sequence
  Description of Artificial Sequence: Synthetic oligonucleotide
ggacacacacuggcccagc

SEQ ID NO: 2410737 - RNA, 19 nt, Artificial Sequence
  Description of Artificial Sequence: Synthetic oligonucleotide
caccucgguugaugaagaa

SEQ ID NO: 2410738 - RNA, 19 nt, Artificial Sequence
  Description of Artificial Sequence: Synthetic oligonucleotide
ccggcccagccucucgacg

SEQ ID NO: 2410739 - RNA, 19 nt, Artificial Sequence
  Description of Artificial Sequence: Synthetic oligonucleotide
gcaccgcugcugccacucg

SEQ ID NO: 2410740 - RNA, 19 nt, Artificial Sequence
  Description of Artificial Sequence: Synthetic oligonucleotide
ucucgacguccagcacgga

SEQ ID NO: 2410741 - RNA, 19 nt, Artificial Sequence
  Description of Artificial Sequence: Synthetic oligonucleotide
gccucguaguccagcacga

SEQ ID NO: 2410742 - RNA, 19 nt, Artificial Sequence
  Description of Artificial Sequence: Synthetic oligonucleotide
gggcguggcuccuguacaa

SEQ ID NO: 2410743 - RNA, 19 nt, Artificial Sequence
  Description of Artificial Sequence: Synthetic oligonucleotide
gcguggcuccuguacaaua

SEQ ID NO: 2410744 - RNA, 19 nt, Artificial Sequence
  Description of Artificial Sequence: Synthetic oligonucleotide
aggcaccgcugcugccacu

SEQ ID NO: 2410745 - RNA, 19 nt, Artificial Sequence
  Description of Artificial Sequence: Synthetic oligonucleotide
ccucgucucucugugcuga

SEQ ID NO: 2410746 - RNA, 19 nt, Artificial Sequence
  Description of Artificial Sequence: Synthetic oligonucleotide
gcaucccuaaauccucgau

SEQ ID NO: 2410747 - RNA, 19 nt, Artificial Sequence
  Description of Artificial Sequence: Synthetic oligonucleotide
ccacauccuuucccaggug

SEQ ID NO: 2410748 - RNA, 19 nt, Artificial Sequence
  Description of Artificial Sequence: Synthetic oligonucleotide
ccucguaguccagcacgag

SEQ ID NO: 2410749 - RNA, 19 nt, Artificial Sequence
  Description of Artificial Sequence: Synthetic oligonucleotide
ccgguccuuggugggagag

SEQ ID NO: 2410750 - RNA, 19 nt, Artificial Sequence
  Description of Artificial Sequence: Synthetic oligonucleotide
guccuuggugggagaggga

SEQ ID NO: 2410751 - RNA, 19 nt, Artificial Sequence
  Description of Artificial Sequence: Synthetic oligonucleotide
ccauucgaucugcuccaca

SEQ ID NO: 2410752 - RNA, 19 nt, Artificial Sequence
  Description of Artificial Sequence: Synthetic oligonucleotide
gcagcggccguaggccgcc

SEQ ID NO: 2410753 - RNA, 19 nt, Artificial Sequence
  Description of Artificial Sequence: Synthetic oligonucleotide
gggcuccguagccggcccc

SEQ ID NO: 2410754 - RNA, 19 nt, Artificial Sequence
  Description of Artificial Sequence: Synthetic oligonucleotide
gccucucgacguccagcac

SEQ ID NO: 2410755 - RNA, 19 nt, Artificial Sequence
  Description of Artificial Sequence: Synthetic oligonucleotide
cuccguagccggccccaaa

SEQ ID NO: 2410756 - RNA, 19 nt, Artificial Sequence
  Description of Artificial Sequence: Synthetic oligonucleotide
ucucuccauccgggugaau

SEQ ID NO: 2410757 - RNA, 19 nt, Artificial Sequence
  Description of Artificial Sequence: Synthetic oligonucleotide
cggaaguaguucccugaga

SEQ ID NO: 2410758 - RNA, 19 nt, Artificial Sequence
  Description of Artificial Sequence: Synthetic oligonucleotide
ccuucgcuggucuccaaau

SEQ ID NO: 2410759 - RNA, 19 nt, Artificial Sequence
  Description of Artificial Sequence: Synthetic oligonucleotide
ggcuccguagccggcccca

SEQ ID NO: 2410760 - RNA, 19 nt, Artificial Sequence
  Description of Artificial Sequence: Synthetic oligonucleotide
gcucgcugagugugcggaa

SEQ ID NO: 2410761 - RNA, 19 nt, Artificial Sequence
  Description of Artificial Sequence: Synthetic oligonucleotide
cgguccuuggugggagagg

SEQ ID NO: 2410762 - RNA, 19 nt, Artificial Sequence
  Description of Artificial Sequence: Synthetic oligonucleotide
ccacucgggaccaccuucu

SEQ ID NO: 2410763 - RNA, 19 nt, Artificial Sequence
  Description of Artificial Sequence: Synthetic oligonucleotide
ccucuguggggaggaaaca

SEQ ID NO: 2410764 - RNA, 19 nt, Artificial Sequence
  Description of Artificial Sequence: Synthetic oligonucleotide
gggcccucuguggggagga

SEQ ID NO: 2410765 - RNA, 19 nt, Artificial Sequence
  Description of Artificial Sequence: Synthetic oligonucleotide
ccucguccacuggcagucc

SEQ ID NO: 2410766 - RNA, 19 nt, Artificial Sequence
  Description of Artificial Sequence: Synthetic oligonucleotide
ccguaggccgccucguagu

SEQ ID NO: 2410767 - RNA, 19 nt, Artificial Sequence
  Description of Artificial Sequence: Synthetic oligonucleotide
caugacguuccagcuccuu

SEQ ID NO: 2410768 - RNA, 19 nt, Artificial Sequence
  Description of Artificial Sequence: Synthetic oligonucleotide
cuccauccgggugaaucuu

SEQ ID NO: 2410769 - RNA, 19 nt, Artificial Sequence
  Description of Artificial Sequence: Synthetic oligonucleotide
aggcggggcguggcuccug

SEQ ID NO: 2410770 - RNA, 19 nt, Artificial Sequence
  Description of Artificial Sequence: Synthetic oligonucleotide
cagcacggagugcuuccau

SEQ ID NO: 2410771 - RNA, 19 nt, Artificial Sequence
  Description of Artificial Sequence: Synthetic oligonucleotide
caggaggcggggcguggcu

SEQ ID NO: 2410772 - RNA, 19 nt, Artificial Sequence
  Description of Artificial Sequence: Synthetic oligonucleotide
gccccuucgcuggucucca

SEQ ID NO: 2410773 - RNA, 19 nt, Artificial Sequence
  Description of Artificial Sequence: Synthetic oligonucleotide
gugcggaaggcuggagguu

SEQ ID NO: 2410774 - RNA, 19 nt, Artificial Sequence
  Description of Artificial Sequence: Synthetic oligonucleotide
agccggccccaaaguucca

SEQ ID NO: 2410775 - RNA, 19 nt, Artificial Sequence
  Description of Artificial Sequence: Synthetic oligonucleotide
cuuucccagguggccucgu

SEQ ID NO: 2410776 - RNA, 19 nt, Artificial Sequence
  Description of Artificial Sequence: Synthetic oligonucleotide
cugaggccccuucgcuggu

SEQ ID NO: 2410777 - RNA, 19 nt, Artificial Sequence
  Description of Artificial Sequence: Synthetic oligonucleotide
cgggcaugacguuccagcu

SEQ ID NO: 2410778 - RNA, 19 nt, Artificial Sequence
  Description of Artificial Sequence: Synthetic oligonucleotide
ggccguaggccgccucgua

SEQ ID NO: 2410779 - RNA, 19 nt, Artificial Sequence
  Description of Artificial Sequence: Synthetic oligonucleotide
ccuguccccuugccaaucu

SEQ ID NO: 2410780 - RNA, 19 nt, Artificial Sequence
  Description of Artificial Sequence: Synthetic oligonucleotide
ggcggggcguggcuccugu

SEQ ID NO: 2410781 - RNA, 19 nt, Artificial Sequence
  Description of Artificial Sequence: Synthetic oligonucleotide
ggccuguccccuugccaau

SEQ ID NO: 2410782 - RNA, 19 nt, Artificial Sequence
  Description of Artificial Sequence: Synthetic oligonucleotide
gcgcaucaaccuggaggga

SEQ ID NO: 2410783 - RNA, 19 nt, Artificial Sequence
  Description of Artificial Sequence: Synthetic oligonucleotide
cgcaucaaccuggagggau

SEQ ID NO: 2410784 - RNA, 19 nt, Artificial Sequence
  Description of Artificial Sequence: Synthetic oligonucleotide
gcggaaggcuggagguuua

SEQ ID NO: 2410785 - RNA, 19 nt, Artificial Sequence
  Description of Artificial Sequence: Synthetic oligonucleotide
ggcguggcuccuguacaau

SEQ ID NO: 2410786 - RNA, 19 nt, Artificial Sequence
  Description of Artificial Sequence: Synthetic oligonucleotide
cgaugagggugggaggaua

SEQ ID NO: 2410787 - RNA, 19 nt, Artificial Sequence
  Description of Artificial Sequence: Synthetic oligonucleotide
cgcuggucuccaaauguuu

SEQ ID NO: 2410788 - RNA, 19 nt, Artificial Sequence
  Description of Artificial Sequence: Synthetic oligonucleotide
cguagccggccccaaaguu

SEQ ID NO: 2410789 - RNA, 19 nt, Artificial Sequence
  Description of Artificial Sequence: Synthetic oligonucleotide
gcuccguagccggccccaa

SEQ ID NO: 2410790 - RNA, 19 nt, Artificial Sequence
  Description of Artificial Sequence: Synthetic oligonucleotide
gcaugacguuccagcuccu

SEQ ID NO: 2410791 - RNA, 19 nt, Artificial Sequence
  Description of Artificial Sequence: Synthetic oligonucleotide
cgggugaaucuuggccaca

SEQ ID NO: 2410792 - RNA, 19 nt, Artificial Sequence
  Description of Artificial Sequence: Synthetic oligonucleotide
gcaguccaccucgguugau

SEQ ID NO: 2410793 - RNA, 19 nt, Artificial Sequence
  Description of Artificial Sequence: Synthetic oligonucleotide
ccccuucgcuggucuccaa

SEQ ID NO: 2410794 - RNA, 19 nt, Artificial Sequence
  Description of Artificial Sequence: Synthetic oligonucleotide
cggccguaggccgccucgu

SEQ ID NO: 2410795 - RNA, 19 nt, Artificial Sequence
  Description of Artificial Sequence: Synthetic oligonucleotide
  modified_base (1)..(1): a, c, u, g, unknown or other
nacuauuugguaagaaaga

SEQ ID NO: 2410796 - RNA, 19 nt, Artificial Sequence
  Description of Artificial Sequence: Synthetic oligonucleotide
aauaauauaggugaguggu

SEQ ID NO: 2410797 - RNA, 19 nt, Artificial Sequence
  Description of Artificial Sequence: Synthetic oligonucleotide
uguaaagaagcauuagugg

SEQ ID NO: 2410798 - RNA, 19 nt, Artificial Sequence
  Description of Artificial Sequence: Synthetic oligonucleotide
aagggaagcagcuacugcc

SEQ ID NO: 2410799 - RNA, 19 nt, Artificial Sequence
  Description of Artificial Sequence: Synthetic oligonucleotide
ucuauuauugucuuacucc

SEQ ID NO: 2410800 - RNA, 19 nt, Artificial Sequence
  Description of Artificial Sequence: Synthetic oligonucleotide
cacugaacgaccaagaccc

SEQ ID NO: 2410801 - RNA, 19 nt, Artificial Sequence
  Description of Artificial Sequence: Synthetic oligonucleotide
aaggcuucaucucauauug

SEQ ID NO: 2410802 - RNA, 19 nt, Artificial Sequence
  Description of Artificial Sequence: Synthetic oligonucleotide
uauguaaagaagcauuagu

SEQ ID NO: 2410803 - RNA, 19 nt, Artificial Sequence
  Description of Artificial Sequence: Synthetic oligonucleotide
cuauuauugucuuacuccc

SEQ ID NO: 2410804 - RNA, 19 nt, Artificial Sequence
  Description of Artificial Sequence: Synthetic oligonucleotide
ugcuguuuuaggcucacgg

SEQ ID NO: 2410805 - RNA, 19 nt, Artificial Sequence
  Description of Artificial Sequence: Synthetic oligonucleotide
agcauuagugguuucaaag

SEQ ID NO: 2410806 - RNA, 19 nt, Artificial Sequence
  Description of Artificial Sequence: Synthetic oligonucleotide
ugucuuacuccccacacag

SEQ ID NO: 2410807 - RNA, 19 nt, Artificial Sequence
  Description of Artificial Sequence: Synthetic oligonucleotide
gucucugaaacccagagug

SEQ ID NO: 2410808 - RNA, 19 nt, Artificial Sequence
  Description of Artificial Sequence: Synthetic oligonucleotide
uugaggaauaauauaggug

SEQ ID NO: 2410809 - RNA, 19 nt, Artificial Sequence
  Description of Artificial Sequence: Synthetic oligonucleotide
gaauaauauaggugagugg

SEQ ID NO: 2410810 - RNA, 19 nt, Artificial Sequence
  Description of Artificial Sequence: Synthetic oligonucleotide
agcucuuugggaaugaccc

SEQ ID NO: 2410811 - RNA, 19 nt, Artificial Sequence
  Description of Artificial Sequence: Synthetic oligonucleotide
uuucaaaguaccuguaucu

SEQ ID NO: 2410812 - RNA, 19 nt, Artificial Sequence
  Description of Artificial Sequence: Synthetic oligonucleotide
uuagugguuucaaaguacc

SEQ ID NO: 2410813 - RNA, 19 nt, Artificial Sequence
  Description of Artificial Sequence: Synthetic oligonucleotide
ugcuuaagaacucggacug

SEQ ID NO: 2410814 - RNA, 19 nt, Artificial Sequence
  Description of Artificial Sequence: Synthetic oligonucleotide
aauggaaacgagaccagac

SEQ ID NO: 2410815 - RNA, 19 nt, Artificial Sequence
  Description of Artificial Sequence: Synthetic oligonucleotide
uaugugguacuccugagcu

SEQ ID NO: 2410816 - RNA, 19 nt, Artificial Sequence
  Description of Artificial Sequence: Synthetic oligonucleotide
auggaaacgagaccagacc

SEQ ID NO: 2410817 - RNA, 19 nt, Artificial Sequence
  Description of Artificial Sequence: Synthetic oligonucleotide
agugcuagucucugaaacc

SEQ ID NO: 2410818 - RNA, 19 nt, Artificial Sequence
  Description of Artificial Sequence: Synthetic oligonucleotide
uugggaaugacccauucac

SEQ ID NO: 2410819 - RNA, 19 nt, Artificial Sequence
  Description of Artificial Sequence: Synthetic oligonucleotide
accuguaucuauuauuguc

SEQ ID NO: 2410820 - RNA, 19 nt, Artificial Sequence
  Description of Artificial Sequence: Synthetic oligonucleotide
ucuuacuccccacacagug

SEQ ID NO: 2410821 - RNA, 19 nt, Artificial Sequence
  Description of Artificial Sequence: Synthetic oligonucleotide
aucuauuauugucuuacuc

SEQ ID NO: 2410822 - RNA, 19 nt, Artificial Sequence
  Description of Artificial Sequence: Synthetic oligonucleotide
aagagugggcucccuaagc

SEQ ID NO: 2410823 - RNA, 19 nt, Artificial Sequence
  Description of Artificial Sequence: Synthetic oligonucleotide
ugagcuuggagccagaguu

SEQ ID NO: 2410824 - RNA, 19 nt, Artificial Sequence
  Description of Artificial Sequence: Synthetic oligonucleotide
gauacaggggcucucuggg

SEQ ID NO: 2410825 - RNA, 19 nt, Artificial Sequence
  Description of Artificial Sequence: Synthetic oligonucleotide
augccuugagcacugaacg

SEQ ID NO: 2410826 - RNA, 19 nt, Artificial Sequence
  Description of Artificial Sequence: Synthetic oligonucleotide
accagaccagaccaaaacc

SEQ ID NO: 2410827 - RNA, 19 nt, Artificial Sequence
  Description of Artificial Sequence: Synthetic oligonucleotide
caguauucuguacaaaugc

SEQ ID NO: 2410828 - RNA, 19 nt, Artificial Sequence
  Description of Artificial Sequence: Synthetic oligonucleotide
auugucuuacuccccacac

SEQ ID NO: 2410829 - RNA, 19 nt, Artificial Sequence
  Description of Artificial Sequence: Synthetic oligonucleotide
ugaugcuauuaccugcugg

SEQ ID NO: 2410830 - RNA, 19 nt, Artificial Sequence
  Description of Artificial Sequence: Synthetic oligonucleotide
aguauucuguacaaaugcc

SEQ ID NO: 2410831 - RNA, 19 nt, Artificial Sequence
  Description of Artificial Sequence: Synthetic oligonucleotide
agcugaugcuauuaccugc

SEQ ID NO: 2410832 - RNA, 19 nt, Artificial Sequence
  Description of Artificial Sequence: Synthetic oligonucleotide
agcuccaccgcucagacug

SEQ ID NO: 2410833 - RNA, 19 nt, Artificial Sequence
  Description of Artificial Sequence: Synthetic oligonucleotide
ucugcuuaagaacucggac

SEQ ID NO: 2410834 - RNA, 19 nt, Artificial Sequence
  Description of Artificial Sequence: Synthetic oligonucleotide
uggaaacgagaccagacca

SEQ ID NO: 2410835 - RNA, 19 nt, Artificial Sequence
  Description of Artificial Sequence: Synthetic oligonucleotide
ugggaagucaagcuggugu

SEQ ID NO: 2410836 - RNA, 19 nt, Artificial Sequence
  Description of Artificial Sequence: Synthetic oligonucleotide
auuauugucuuacucccca

SEQ ID NO: 2410837 - RNA, 19 nt, Artificial Sequence
  Description of Artificial Sequence: Synthetic oligonucleotide
aacucggacuggccuaucc

SEQ ID NO: 2410838 - RNA, 19 nt, Artificial Sequence
  Description of Artificial Sequence: Synthetic oligonucleotide
auguaaagaagcauuagug

SEQ ID NO: 2410839 - RNA, 19 nt, Artificial Sequence
  Description of Artificial Sequence: Synthetic oligonucleotide
uaaggcaauggaaacgaga

SEQ ID NO: 2410840 - RNA, 19 nt, Artificial Sequence
  Description of Artificial Sequence: Synthetic oligonucleotide
cuuuggugcagcuccaccg

SEQ ID NO: 2410841 - RNA, 19 nt, Artificial Sequence
  Description of Artificial Sequence: Synthetic oligonucleotide
ugaacaccaggguggaugg

SEQ ID NO: 2410842 - RNA, 19 nt, Artificial Sequence
  Description of Artificial Sequence: Synthetic oligonucleotide
acccauagcugcuaugugg

SEQ ID NO: 2410843 - RNA, 19 nt, Artificial Sequence
  Description of Artificial Sequence: Synthetic oligonucleotide
auuagugguuucaaaguac

SEQ ID NO: 2410844 - RNA, 19 nt, Artificial Sequence
  Description of Artificial Sequence: Synthetic oligonucleotide
aaugccccuggucugaaca

SEQ ID NO: 2410845 - RNA, 19 nt, Artificial Sequence
  Description of Artificial Sequence: Synthetic oligonucleotide
aauauaggugaguggucug

SEQ ID NO: 2410846 - RNA, 19 nt, Artificial Sequence
  Description of Artificial Sequence: Synthetic oligonucleotide
uaauauaggugaguggucu

SEQ ID NO: 2410847 - RNA, 19 nt, Artificial Sequence
  Description of Artificial Sequence: Synthetic oligonucleotide
uaagaacucggacuggccu

SEQ ID NO: 2410848 - RNA, 19 nt, Artificial Sequence
  Description of Artificial Sequence: Synthetic oligonucleotide
cuguuuuaggcucacgggc

SEQ ID NO: 2410849 - RNA, 19 nt, Artificial Sequence
  Description of Artificial Sequence: Synthetic oligonucleotide
aaaaggcucuuggacuugc

SEQ ID NO: 2410850 - RNA, 19 nt, Artificial Sequence
  Description of Artificial Sequence: Synthetic oligonucleotide
ugcccuuguaaacacagac

SEQ ID NO: 2410851 - RNA, 19 nt, Artificial Sequence
  Description of Artificial Sequence: Synthetic oligonucleotide
acugaagagacccaguauu

SEQ ID NO: 2410852 - RNA, 19 nt, Artificial Sequence
  Description of Artificial Sequence: Synthetic oligonucleotide
ugcuaugugguacuccuga

SEQ ID NO: 2410853 - RNA, 19 nt, Artificial Sequence
  Description of Artificial Sequence: Synthetic oligonucleotide
uaaagaagcauuagugguu

SEQ ID NO: 2410854 - RNA, 19 nt, Artificial Sequence
  Description of Artificial Sequence: Synthetic oligonucleotide
cauuaaggcaauggaaacg

SEQ ID NO: 2410855 - RNA, 19 nt, Artificial Sequence
  Description of Artificial Sequence: Synthetic oligonucleotide
gaagagacccaguauucug

SEQ ID NO: 2410856 - RNA, 19 nt, Artificial Sequence
  Description of Artificial Sequence: Synthetic oligonucleotide
ucucugaaacccagagugg

SEQ ID NO: 2410857 - RNA, 19 nt, Artificial Sequence
  Description of Artificial Sequence: Synthetic oligonucleotide
uauuauugucuuacucccc

SEQ ID NO: 2410858 - RNA, 19 nt, Artificial Sequence
  Description of Artificial Sequence: Synthetic oligonucleotide
accaugaggggccagcuag

SEQ ID NO: 2410859 - RNA, 19 nt, Artificial Sequence
  Description of Artificial Sequence: Synthetic oligonucleotide
uguacaaaugccccugguc

SEQ ID NO: 2410860 - RNA, 19 nt, Artificial Sequence
  Description of Artificial Sequence: Synthetic oligonucleotide
ugguaagggaagcagcuac

SEQ ID NO: 2410861 - RNA, 19 nt, Artificial Sequence
  Description of Artificial Sequence: Synthetic oligonucleotide
ucaucugcuuaagaacucg

SEQ ID NO: 2410862 - RNA, 19 nt, Artificial Sequence
  Description of Artificial Sequence: Synthetic oligonucleotide
agcacugaacgaccaagac

SEQ ID NO: 2410863 - RNA, 19 nt, Artificial Sequence
  Description of Artificial Sequence: Synthetic oligonucleotide
cucauauugaggaauaaua

SEQ ID NO: 2410864 - RNA, 19 nt, Artificial Sequence
  Description of Artificial Sequence: Synthetic oligonucleotide
ugaacgaccaagaccccug

SEQ ID NO: 2410865 - RNA, 19 nt, Artificial Sequence
  Description of Artificial Sequence: Synthetic oligonucleotide
ggaauaauauaggugagug

SEQ ID NO: 2410866 - RNA, 19 nt, Artificial Sequence
  Description of Artificial Sequence: Synthetic oligonucleotide
ucuguacaaaugccccugg

SEQ ID NO: 2410867 - RNA, 19 nt, Artificial Sequence
  Description of Artificial Sequence: Synthetic oligonucleotide
uuacuccccacacagugga

SEQ ID NO: 2410868 - RNA, 19 nt, Artificial Sequence
  Description of Artificial Sequence: Synthetic oligonucleotide
uuaagaacucggacuggcc

SEQ ID NO: 2410869 - RNA, 19 nt, Artificial Sequence
  Description of Artificial Sequence: Synthetic oligonucleotide
uuugggaaugacccauuca

SEQ ID NO: 2410870 - RNA, 19 nt, Artificial Sequence
  Description of Artificial Sequence: Synthetic oligonucleotide
agugguuucaaaguaccug

SEQ ID NO: 2410871 - RNA, 19 nt, Artificial Sequence
  Description of Artificial Sequence: Synthetic oligonucleotide
aagucaagcuggugugagg

SEQ ID NO: 2410872 - RNA, 19 nt, Artificial Sequence
  Description of Artificial Sequence: Synthetic oligonucleotide
cuauccacccuauguaaag

SEQ ID NO: 2410873 - RNA, 19 nt, Artificial Sequence
  Description of Artificial Sequence: Synthetic oligonucleotide
uauugucuuacuccccaca

SEQ ID NO: 2410874 - RNA, 19 nt, Artificial Sequence
  Description of Artificial Sequence: Synthetic oligonucleotide
guugugggaagucaagcug

SEQ ID NO: 2410875 - RNA, 19 nt, Artificial Sequence
  Description of Artificial Sequence: Synthetic oligonucleotide
agcuacugccaugucaugc

SEQ ID NO: 2410876 - RNA, 19 nt, Artificial Sequence
  Description of Artificial Sequence: Synthetic oligonucleotide
cucagcauuaaggcaaugg

SEQ ID NO: 2410877 - RNA, 19 nt, Artificial Sequence
  Description of Artificial Sequence: Synthetic oligonucleotide
uccacccuauguaaagaag

SEQ ID NO: 2410878 - RNA, 19 nt, Artificial Sequence
  Description of Artificial Sequence: Synthetic oligonucleotide
ugcuauuaccugcugggcu

SEQ ID NO: 2410879 - RNA, 19 nt, Artificial Sequence
  Description of Artificial Sequence: Synthetic oligonucleotide
aguugugggaagucaagcu

SEQ ID NO: 2410880 - RNA, 19 nt, Artificial Sequence
  Description of Artificial Sequence: Synthetic oligonucleotide
guaaagaagcauuaguggu

SEQ ID NO: 2410881 - RNA, 19 nt, Artificial Sequence
  Description of Artificial Sequence: Synthetic oligonucleotide
uuuggugcagcuccaccgc

SEQ ID NO: 2410882 - RNA, 19 nt, Artificial Sequence
  Description of Artificial Sequence: Synthetic oligonucleotide
uagugguaagggaagcagc

SEQ ID NO: 2410883 - RNA, 19 nt, Artificial Sequence
  Description of Artificial Sequence: Synthetic oligonucleotide
ccgcaaacuaccaugaggg

SEQ ID NO: 2410884 - RNA, 19 nt, Artificial Sequence
  Description of Artificial Sequence: Synthetic oligonucleotide
aguaccuguaucuauuauu

SEQ ID NO: 2410885 - RNA, 19 nt, Artificial Sequence
  Description of Artificial Sequence: Synthetic oligonucleotide
cuuaagaacucggacuggc

SEQ ID NO: 2410886 - RNA, 19 nt, Artificial Sequence
  Description of Artificial Sequence: Synthetic oligonucleotide
agacccaguauucuguaca

SEQ ID NO: 2410887 - RNA, 19 nt, Artificial Sequence
  Description of Artificial Sequence: Synthetic oligonucleotide
acgaccaagaccccuggag

SEQ ID NO: 2410888 - RNA, 19 nt, Artificial Sequence
  Description of Artificial Sequence: Synthetic oligonucleotide
cacccauacccauagcugc

SEQ ID NO: 2410889 - RNA, 19 nt, Artificial Sequence
  Description of Artificial Sequence: Synthetic oligonucleotide
cuacucagcauuaaggcaa

SEQ ID NO: 2410890 - RNA, 19 nt, Artificial Sequence
  Description of Artificial Sequence: Synthetic oligonucleotide
cuuacuccccacacagugg

SEQ ID NO: 2410891 - RNA, 19 nt, Artificial Sequence
  Description of Artificial Sequence: Synthetic oligonucleotide
guacuccugagcuuggagc

SEQ ID NO: 2410892 - RNA, 19 nt, Artificial Sequence
  Description of Artificial Sequence: Synthetic oligonucleotide
ugggcuacucagcauuaag

SEQ ID NO: 2410893 - RNA, 19 nt, Artificial Sequence
  Description of Artificial Sequence: Synthetic oligonucleotide
uggccuauccacccuaugu

SEQ ID NO: 2410894 - RNA, 19 nt, Artificial Sequence
  Description of Artificial Sequence: Synthetic oligonucleotide
acuaccaugaggggccagc

SEQ ID NO: 2410895 - RNA, 19 nt, Artificial Sequence
  Description of Artificial Sequence: Synthetic oligonucleotide
agucaucugcuuaagaacu

SEQ ID NO: 2410896 - RNA, 19 nt, Artificial Sequence
  Description of Artificial Sequence: Synthetic oligonucleotide
agcauuaaggcaauggaaa

SEQ ID NO: 2410897 - RNA, 19 nt, Artificial Sequence
  Description of Artificial Sequence: Synthetic oligonucleotide
ugaguggucugacugcccu

SEQ ID NO: 2410898 - RNA, 19 nt, Artificial Sequence
  Description of Artificial Sequence: Synthetic oligonucleotide
gaccagaccagaccaaaac

SEQ ID NO: 2410899 - RNA, 19 nt, Artificial Sequence
  Description of Artificial Sequence: Synthetic oligonucleotide
uacaaaugccccuggucug

SEQ ID NO: 2410900 - RNA, 19 nt, Artificial Sequence
  Description of Artificial Sequence: Synthetic oligonucleotide
cuauguaaagaagcauuag

SEQ ID NO: 2410901 - RNA, 19 nt, Artificial Sequence
  Description of Artificial Sequence: Synthetic oligonucleotide
uccagcugaugcuauuacc

SEQ ID NO: 2410902 - RNA, 19 nt, Artificial Sequence
  Description of Artificial Sequence: Synthetic oligonucleotide
ugccaugucaugccuugag

SEQ ID NO: 2410903 - RNA, 19 nt, Artificial Sequence
  Description of Artificial Sequence: Synthetic oligonucleotide
agaccaaaaccagugcuag

SEQ ID NO: 2410904 - RNA, 19 nt, Artificial Sequence
  Description of Artificial Sequence: Synthetic oligonucleotide
agugagaggcuguuggggu

SEQ ID NO: 2410905 - RNA, 19 nt, Artificial Sequence
  Description of Artificial Sequence: Synthetic oligonucleotide
acagugagaggcuguuggg

SEQ ID NO: 2410906 - RNA, 19 nt, Artificial Sequence
  Description of Artificial Sequence: Synthetic oligonucleotide
ucuuuggugcagcuccacc

SEQ ID NO: 2410907 - RNA, 19 nt, Artificial Sequence
  Description of Artificial Sequence: Synthetic oligonucleotide
ggcuacucagcauuaaggc

SEQ ID NO: 2410908 - RNA, 19 nt, Artificial Sequence
  Description of Artificial Sequence: Synthetic oligonucleotide
ugacccauucacuuguguc

SEQ ID NO: 2410909 - RNA, 19 nt, Artificial Sequence
  Description of Artificial Sequence: Synthetic oligonucleotide
ggcuucaucucauauugag

SEQ ID NO: 2410910 - RNA, 19 nt, Artificial Sequence
  Description of Artificial Sequence: Synthetic oligonucleotide
gaagagugggcucccuaag

SEQ ID NO: 2410911 - RNA, 19 nt, Artificial Sequence
  Description of Artificial Sequence: Synthetic oligonucleotide
aaaaccagugcuagucucu

SEQ ID NO: 2410912 - RNA, 19 nt, Artificial Sequence
  Description of Artificial Sequence: Synthetic oligonucleotide
aagaagcauuagugguuuc

SEQ ID NO: 2410913 - RNA, 19 nt, Artificial Sequence
  Description of Artificial Sequence: Synthetic oligonucleotide
auagcugcuaugugguacu

SEQ ID NO: 2410914 - RNA, 19 nt, Artificial Sequence
  Description of Artificial Sequence: Synthetic oligonucleotide
cagugcuagucucugaaac

SEQ ID NO: 2410915 - RNA, 19 nt, Artificial Sequence
  Description of Artificial Sequence: Synthetic oligonucleotide
caucugcuuaagaacucgg

SEQ ID NO: 2410916 - RNA, 19 nt, Artificial Sequence
  Description of Artificial Sequence: Synthetic oligonucleotide
ucccuaagcucuuugggaa

SEQ ID NO: 2410917 - RNA, 19 nt, Artificial Sequence
  Description of Artificial Sequence: Synthetic oligonucleotide
caugucaugccuugagcac

SEQ ID NO: 2410918 - RNA, 19 nt, Artificial Sequence
  Description of Artificial Sequence: Synthetic oligonucleotide
cuagugguaagggaagcag

SEQ ID NO: 2410919 - RNA, 19 nt, Artificial Sequence
  Description of Artificial Sequence: Synthetic oligonucleotide
uucuguacaaaugccccug

SEQ ID NO: 2410920 - RNA, 19 nt, Artificial Sequence
  Description of Artificial Sequence: Synthetic oligonucleotide
uaccccaugaagagugggc

SEQ ID NO: 2410921 - RNA, 19 nt, Artificial Sequence
  Description of Artificial Sequence: Synthetic oligonucleotide
auacccauagcugcuaugu

SEQ ID NO: 2410922 - RNA, 19 nt, Artificial Sequence
  Description of Artificial Sequence: Synthetic oligonucleotide
uaucuauuauugucuuacu

SEQ ID NO: 2410923 - RNA, 19 nt, Artificial Sequence
  Description of Artificial Sequence: Synthetic oligonucleotide
ugccaagccaucagcaccu

SEQ ID NO: 2410924 - RNA, 19 nt, Artificial Sequence
  Description of Artificial Sequence: Synthetic oligonucleotide
cucugaaacccagaguggc

SEQ ID NO: 2410925 - RNA, 19 nt, Artificial Sequence
  Description of Artificial Sequence: Synthetic oligonucleotide
agagugggcucccuaagcu

SEQ ID NO: 2410926 - RNA, 19 nt, Artificial Sequence
  Description of Artificial Sequence: Synthetic oligonucleotide
agcagcuacugccauguca

SEQ ID NO: 2410927 - RNA, 19 nt, Artificial Sequence
  Description of Artificial Sequence: Synthetic oligonucleotide
gcuguuuuaggcucacggg

SEQ ID NO: 2410928 - RNA, 19 nt, Artificial Sequence
  Description of Artificial Sequence: Synthetic oligonucleotide
ugcaguugugggaagucaa

SEQ ID NO: 2410929 - RNA, 19 nt, Artificial Sequence
  Description of Artificial Sequence: Synthetic oligonucleotide
guacaaaugccccuggucu

SEQ ID NO: 2410930 - RNA, 19 nt, Artificial Sequence
  Description of Artificial Sequence: Synthetic oligonucleotide
cugaagagacccaguauuc

SEQ ID NO: 2410931 - RNA, 19 nt, Artificial Sequence
  Description of Artificial Sequence: Synthetic oligonucleotide
cugccaagccaucagcacc

SEQ ID NO: 2410932 - RNA, 19 nt, Artificial Sequence
  Description of Artificial Sequence: Synthetic oligonucleotide
cugaacaccaggguggaug

SEQ ID NO: 2410933 - RNA, 19 nt, Artificial Sequence
  Description of Artificial Sequence: Synthetic oligonucleotide
ugggaaugacccauucacu

SEQ ID NO: 2410934 - RNA, 19 nt, Artificial Sequence
  Description of Artificial Sequence: Synthetic oligonucleotide
ucaagacugaagagaccca

SEQ ID NO: 2410935 - RNA, 19 nt, Artificial Sequence
  Description of Artificial Sequence: Synthetic oligonucleotide
aagaacucggacuggccua

SEQ ID NO: 2410936 - RNA, 19 nt, Artificial Sequence
  Description of Artificial Sequence: Synthetic oligonucleotide
caaaaccagugcuagucuc

SEQ ID NO: 2410937 - RNA, 19 nt, Artificial Sequence
  Description of Artificial Sequence: Synthetic oligonucleotide
aaaugccccuggucugaac

SEQ ID NO: 2410938 - RNA, 19 nt, Artificial Sequence
  Description of Artificial Sequence: Synthetic oligonucleotide
ggucugaacaccagggugg

SEQ ID NO: 2410939 - RNA, 19 nt, Artificial Sequence
  Description of Artificial Sequence: Synthetic oligonucleotide
ugaagagacccaguauucu

SEQ ID NO: 2410940 - RNA, 19 nt, Artificial Sequence
  Description of Artificial Sequence: Synthetic oligonucleotide
ucacgggcccucuagcacc

SEQ ID NO: 2410941 - RNA, 19 nt, Artificial Sequence
  Description of Artificial Sequence: Synthetic oligonucleotide
agcuagugguaagggaagc

SEQ ID NO: 2410942 - RNA, 19 nt, Artificial Sequence
  Description of Artificial Sequence: Synthetic oligonucleotide
gugugaggaggccucgugg

SEQ ID NO: 2410943 - RNA, 19 nt, Artificial Sequence
  Description of Artificial Sequence: Synthetic oligonucleotide
agaagcauuagugguuuca

SEQ ID NO: 2410944 - RNA, 19 nt, Artificial Sequence
  Description of Artificial Sequence: Synthetic oligonucleotide
ccacccuauguaaagaagc

SEQ ID NO: 2410945 - RNA, 19 nt, Artificial Sequence
  Description of Artificial Sequence: Synthetic oligonucleotide
augcuauuaccugcugggc

SEQ ID NO: 2410946 - RNA, 19 nt, Artificial Sequence
  Description of Artificial Sequence: Synthetic oligonucleotide
ucuagcacccauccucaaa

SEQ ID NO: 2410947 - RNA, 19 nt, Artificial Sequence
  Description of Artificial Sequence: Synthetic oligonucleotide
gaacgaccaagaccccugg

SEQ ID NO: 2410948 - RNA, 19 nt, Artificial Sequence
  Description of Artificial Sequence: Synthetic oligonucleotide
ucggacuggccuauccacc

SEQ ID NO: 2410949 - RNA, 19 nt, Artificial Sequence
  Description of Artificial Sequence: Synthetic oligonucleotide
gaaugacccauucacuugu

SEQ ID NO: 2410950 - RNA, 19 nt, Artificial Sequence
  Description of Artificial Sequence: Synthetic oligonucleotide
guuuuaggcucacgggccc

SEQ ID NO: 2410951 - RNA, 19 nt, Artificial Sequence
  Description of Artificial Sequence: Synthetic oligonucleotide
ggauacaggggcucucugg

SEQ ID NO: 2410952 - RNA, 19 nt, Artificial Sequence
  Description of Artificial Sequence: Synthetic oligonucleotide
uuauugucuuacuccccac

SEQ ID NO: 2410953 - RNA, 19 nt, Artificial Sequence
  Description of Artificial Sequence: Synthetic oligonucleotide
ggagcgaggggacagugag

SEQ ID NO: 2410954 - RNA, 19 nt, Artificial Sequence
  Description of Artificial Sequence: Synthetic oligonucleotide
uucaaaguaccuguaucua

SEQ ID NO: 2410955 - RNA, 19 nt, Artificial Sequence
  Description of Artificial Sequence: Synthetic oligonucleotide
augaggggccagcuagugg

SEQ ID NO: 2410956 - RNA, 19 nt, Artificial Sequence
  Description of Artificial Sequence: Synthetic oligonucleotide
ggaaugacccauucacuug

SEQ ID NO: 2410957 - RNA, 19 nt, Artificial Sequence
  Description of Artificial Sequence: Synthetic oligonucleotide
gaaacgagaccagaccaga

SEQ ID NO: 2410958 - RNA, 19 nt, Artificial Sequence
  Description of Artificial Sequence: Synthetic oligonucleotide
cauuagugguuucaaagua

SEQ ID NO: 2410959 - RNA, 19 nt, Artificial Sequence
  Description of Artificial Sequence: Synthetic oligonucleotide
gcacugaacgaccaagacc

SEQ ID NO: 2410960 - RNA, 19 nt, Artificial Sequence
  Description of Artificial Sequence: Synthetic oligonucleotide
cucaaaaggcucuuggacu

SEQ ID NO: 2410961 - RNA, 19 nt, Artificial Sequence
  Description of Artificial Sequence: Synthetic oligonucleotide
cacagaccaccucuggccc

SEQ ID NO: 2410962 - RNA, 19 nt, Artificial Sequence
  Description of Artificial Sequence: Synthetic oligonucleotide
cagcuagugguaagggaag

SEQ ID NO: 2410963 - RNA, 19 nt, Artificial Sequence
  Description of Artificial Sequence: Synthetic oligonucleotide
gcaaacuaccaugaggggc

SEQ ID NO: 2410964 - RNA, 19 nt, Artificial Sequence
  Description of Artificial Sequence: Synthetic oligonucleotide
auauaggugaguggucuga

SEQ ID NO: 2410965 - RNA, 19 nt, Artificial Sequence
  Description of Artificial Sequence: Synthetic oligonucleotide
uacccauagcugcuaugug

SEQ ID NO: 2410966 - RNA, 19 nt, Artificial Sequence
  Description of Artificial Sequence: Synthetic oligonucleotide
cuagcacccauccucaaaa

SEQ ID NO: 2410967 - RNA, 19 nt, Artificial Sequence
  Description of Artificial Sequence: Synthetic oligonucleotide
cucggacuggccuauccac

SEQ ID NO: 2410968 - RNA, 19 nt, Artificial Sequence
  Description of Artificial Sequence: Synthetic oligonucleotide
augccccuggucugaacac

SEQ ID NO: 2410969 - RNA, 19 nt, Artificial Sequence
  Description of Artificial Sequence: Synthetic oligonucleotide
uaccuguaucuauuauugu

SEQ ID NO: 2410970 - RNA, 19 nt, Artificial Sequence
  Description of Artificial Sequence: Synthetic oligonucleotide
agcugcuaugugguacucc

SEQ ID NO: 2410971 - RNA, 19 nt, Artificial Sequence
  Description of Artificial Sequence: Synthetic oligonucleotide
ugacugcccuuguaaacac

SEQ ID NO: 2410972 - RNA, 19 nt, Artificial Sequence
  Description of Artificial Sequence: Synthetic oligonucleotide
ggcauugccuuucuucaag

SEQ ID NO: 2410973 - RNA, 19 nt, Artificial Sequence
  Description of Artificial Sequence: Synthetic oligonucleotide
accgcucagacugcuggcc

SEQ ID NO: 2410974 - RNA, 19 nt, Artificial Sequence
  Description of Artificial Sequence: Synthetic oligonucleotide
caguugugggaagucaagc

SEQ ID NO: 2410975 - RNA, 19 nt, Artificial Sequence
  Description of Artificial Sequence: Synthetic oligonucleotide
caguggaaacugaagucuc

SEQ ID NO: 2410976 - RNA, 19 nt, Artificial Sequence
  Description of Artificial Sequence: Synthetic oligonucleotide
gaagucucaaccagcucca

SEQ ID NO: 2410977 - RNA, 19 nt, Artificial Sequence
  Description of Artificial Sequence: Synthetic oligonucleotide
cuuugggaaugacccauuc

SEQ ID NO: 2410978 - RNA, 19 nt, Artificial Sequence
  Description of Artificial Sequence: Synthetic oligonucleotide
gggcuacucagcauuaagg

SEQ ID NO: 2410979 - RNA, 19 nt, Artificial Sequence
  Description of Artificial Sequence: Synthetic oligonucleotide
cacccuauguaaagaagca

SEQ ID NO: 2410980 - RNA, 19 nt, Artificial Sequence
  Description of Artificial Sequence: Synthetic oligonucleotide
gcucccuaagcucuuuggg

SEQ ID NO: 2410981 - RNA, 19 nt, Artificial Sequence
  Description of Artificial Sequence: Synthetic oligonucleotide
auccacccuauguaaagaa

SEQ ID NO: 2410982 - RNA, 19 nt, Artificial Sequence
  Description of Artificial Sequence: Synthetic oligonucleotide
auaggugaguggucugacu

SEQ ID NO: 2410983 - RNA, 19 nt, Artificial Sequence
  Description of Artificial Sequence: Synthetic oligonucleotide
aaaggcucuuggacuugcg

SEQ ID NO: 2410984 - RNA, 19 nt, Artificial Sequence
  Description of Artificial Sequence: Synthetic oligonucleotide
gcacccauccucaaaaggc

SEQ ID NO: 2410985 - RNA, 19 nt, Artificial Sequence
  Description of Artificial Sequence: Synthetic oligonucleotide
ccucaaaaggcucuuggac

SEQ ID NO: 2410986 - RNA, 19 nt, Artificial Sequence
  Description of Artificial Sequence: Synthetic oligonucleotide
gggaagucaagcuggugug

SEQ ID NO: 2410987 - RNA, 19 nt, Artificial Sequence
  Description of Artificial Sequence: Synthetic oligonucleotide
gaagcauuagugguuucaa

SEQ ID NO: 2410988 - RNA, 19 nt, Artificial Sequence
  Description of Artificial Sequence: Synthetic oligonucleotide
augccagucaucugcuuaa

SEQ ID NO: 2410989 - RNA, 19 nt, Artificial Sequence
  Description of Artificial Sequence: Synthetic oligonucleotide
cucccuaagcucuuuggga

SEQ ID NO: 2410990 - RNA, 19 nt, Artificial Sequence
  Description of Artificial Sequence: Synthetic oligonucleotide
cucuggcccgcaaacuacc

SEQ ID NO: 2410991 - RNA, 19 nt, Artificial Sequence
  Description of Artificial Sequence: Synthetic oligonucleotide
augucaugccuugagcacu

SEQ ID NO: 2410992 - RNA, 19 nt, Artificial Sequence
  Description of Artificial Sequence: Synthetic oligonucleotide
cccgcaaacuaccaugagg

SEQ ID NO: 2410993 - RNA, 19 nt, Artificial Sequence
  Description of Artificial Sequence: Synthetic oligonucleotide
aguggucugacugcccuug

SEQ ID NO: 2410994 - RNA, 19 nt, Artificial Sequence
  Description of Artificial Sequence: Synthetic oligonucleotide
cugcuuaagaacucggacu

SEQ ID NO: 2410995 - RNA, 19 nt, Artificial Sequence
  Description of Artificial Sequence: Synthetic oligonucleotide
cauacccauagcugcuaug

SEQ ID NO: 2410996 - RNA, 19 nt, Artificial Sequence
  Description of Artificial Sequence: Synthetic oligonucleotide
gcuauuaccugcugggcuc

SEQ ID NO: 2410997 - RNA, 19 nt, Artificial Sequence
  Description of Artificial Sequence: Synthetic oligonucleotide
acuugcggggcagaugcag

SEQ ID NO: 2410998 - RNA, 19 nt, Artificial Sequence
  Description of Artificial Sequence: Synthetic oligonucleotide
aacgaccaagaccccugga

SEQ ID NO: 2410999 - RNA, 19 nt, Artificial Sequence
  Description of Artificial Sequence: Synthetic oligonucleotide
acucggacuggccuaucca

SEQ ID NO: 2411000 - RNA, 19 nt, Artificial Sequence
  Description of Artificial Sequence: Synthetic oligonucleotide
gagacccaguauucuguac

SEQ ID NO: 2411001 - RNA, 19 nt, Artificial Sequence
  Description of Artificial Sequence: Synthetic oligonucleotide
uacucagcauuaaggcaau

SEQ ID NO: 2411002 - RNA, 19 nt, Artificial Sequence
  Description of Artificial Sequence: Synthetic oligonucleotide
gaugcaguugugggaaguc

SEQ ID NO: 2411003 - RNA, 19 nt, Artificial Sequence
  Description of Artificial Sequence: Synthetic oligonucleotide
cuugagcacugaacgacca

SEQ ID NO: 2411004 - RNA, 19 nt, Artificial Sequence
  Description of Artificial Sequence: Synthetic oligonucleotide
augacccauucacuugugu

SEQ ID NO: 2411005 - RNA, 19 nt, Artificial Sequence
  Description of Artificial Sequence: Synthetic oligonucleotide
gcuacucagcauuaaggca

SEQ ID NO: 2411006 - RNA, 19 nt, Artificial Sequence
  Description of Artificial Sequence: Synthetic oligonucleotide
agugggcucccuaagcucu

SEQ ID NO: 2411007 - RNA, 19 nt, Artificial Sequence
  Description of Artificial Sequence: Synthetic oligonucleotide
gacccaguauucuguacaa

SEQ ID NO: 2411008 - RNA, 19 nt, Artificial Sequence
  Description of Artificial Sequence: Synthetic oligonucleotide
ggaaacgagaccagaccag

SEQ ID NO: 2411009 - RNA, 19 nt, Artificial Sequence
  Description of Artificial Sequence: Synthetic oligonucleotide
guaccccaugaagaguggg

SEQ ID NO: 2411010 - RNA, 19 nt, Artificial Sequence
  Description of Artificial Sequence: Synthetic oligonucleotide
aggcuguugggguacccca

SEQ ID NO: 2411011 - RNA, 19 nt, Artificial Sequence
  Description of Artificial Sequence: Synthetic oligonucleotide
caucucauauugaggaaua

SEQ ID NO: 2411012 - RNA, 19 nt, Artificial Sequence
  Description of Artificial Sequence: Synthetic oligonucleotide
uggagcgaggggacaguga

SEQ ID NO: 2411013 - RNA, 19 nt, Artificial Sequence
  Description of Artificial Sequence: Synthetic oligonucleotide
gaggccucguggauacagg

SEQ ID NO: 2411014 - RNA, 19 nt, Artificial Sequence
  Description of Artificial Sequence: Synthetic oligonucleotide
ggcucccuaagcucuuugg

SEQ ID NO: 2411015 - RNA, 19 nt, Artificial Sequence
  Description of Artificial Sequence: Synthetic oligonucleotide
aagcagcuacugccauguc

SEQ ID NO: 2411016 - RNA, 19 nt, Artificial Sequence
  Description of Artificial Sequence: Synthetic oligonucleotide
uuggugcagcuccaccgcu

SEQ ID NO: 2411017 - RNA, 19 nt, Artificial Sequence
  Description of Artificial Sequence: Synthetic oligonucleotide
cuccagcugaugcuauuac

SEQ ID NO: 2411018 - RNA, 19 nt, Artificial Sequence
  Description of Artificial Sequence: Synthetic oligonucleotide
ggguaccccaugaagagug

SEQ ID NO: 2411019 - RNA, 19 nt, Artificial Sequence
  Description of Artificial Sequence: Synthetic oligonucleotide
agagacccaguauucugua

SEQ ID NO: 2411020 - RNA, 19 nt, Artificial Sequence
  Description of Artificial Sequence: Synthetic oligonucleotide
aucugcuuaagaacucgga

SEQ ID NO: 2411021 - RNA, 19 nt, Artificial Sequence
  Description of Artificial Sequence: Synthetic oligonucleotide
aggcucacgggcccucuag

SEQ ID NO: 2411022 - RNA, 19 nt, Artificial Sequence
  Description of Artificial Sequence: Synthetic oligonucleotide
ugacauuggcauugccuuu

SEQ ID NO: 2411023 - RNA, 19 nt, Artificial Sequence
  Description of Artificial Sequence: Synthetic oligonucleotide
agaugcaguugugggaagu

SEQ ID NO: 2411024 - RNA, 19 nt, Artificial Sequence
  Description of Artificial Sequence: Synthetic oligonucleotide
ccuugagcacugaacgacc

SEQ ID NO: 2411025 - RNA, 19 nt, Artificial Sequence
  Description of Artificial Sequence: Synthetic oligonucleotide
acugaacgaccaagacccc

SEQ ID NO: 2411026 - RNA, 19 nt, Artificial Sequence
  Description of Artificial Sequence: Synthetic oligonucleotide
accucuggcccgcaaacua

SEQ ID NO: 2411027 - RNA, 19 nt, Artificial Sequence
  Description of Artificial Sequence: Synthetic oligonucleotide
agaggcuguugggguaccc

SEQ ID NO: 2411028 - RNA, 19 nt, Artificial Sequence
  Description of Artificial Sequence: Synthetic oligonucleotide
gcauuagugguuucaaagu

SEQ ID NO: 2411029 - RNA, 19 nt, Artificial Sequence
  Description of Artificial Sequence: Synthetic oligonucleotide
acccauccucaaaaggcuc

SEQ ID NO: 2411030 - RNA, 19 nt, Artificial Sequence
  Description of Artificial Sequence: Synthetic oligonucleotide
ggugaguggucugacugcc

SEQ ID NO: 2411031 - RNA, 19 nt, Artificial Sequence
  Description of Artificial Sequence: Synthetic oligonucleotide
gcuagucucugaaacccag

SEQ ID NO: 2411032 - RNA, 19 nt, Artificial Sequence
  Description of Artificial Sequence: Synthetic oligonucleotide
uuuuaggcucacgggcccu

SEQ ID NO: 2411033 - RNA, 19 nt, Artificial Sequence
  Description of Artificial Sequence: Synthetic oligonucleotide
ccaugucaugccuugagca

SEQ ID NO: 2411034 - RNA, 19 nt, Artificial Sequence
  Description of Artificial Sequence: Synthetic oligonucleotide
ggggcagaugcaguugugg

SEQ ID NO: 2411035 - RNA, 19 nt, Artificial Sequence
  Description of Artificial Sequence: Synthetic oligonucleotide
ccagcuagugguaagggaa

SEQ ID NO: 2411036 - RNA, 19 nt, Artificial Sequence
  Description of Artificial Sequence: Synthetic oligonucleotide
aggguggaugggacgcugc

SEQ ID NO: 2411037 - RNA, 19 nt, Artificial Sequence
  Description of Artificial Sequence: Synthetic oligonucleotide
gccaugucaugccuugagc

SEQ ID NO: 2411038 - RNA, 19 nt, Artificial Sequence
  Description of Artificial Sequence: Synthetic oligonucleotide
aaacuaccaugaggggcca

SEQ ID NO: 2411039 - RNA, 19 nt, Artificial Sequence
  Description of Artificial Sequence: Synthetic oligonucleotide
uggacuugcggggcagaug

SEQ ID NO: 2411040 - RNA, 19 nt, Artificial Sequence
  Description of Artificial Sequence: Synthetic oligonucleotide
cugaugcuauuaccugcug

SEQ ID NO: 2411041 - RNA, 19 nt, Artificial Sequence
  Description of Artificial Sequence: Synthetic oligonucleotide
gagaccagaccagaccaaa

SEQ ID NO: 2411042 - RNA, 19 nt, Artificial Sequence
  Description of Artificial Sequence: Synthetic oligonucleotide
cugugacauuggcauugcc

SEQ ID NO: 2411043 - RNA, 19 nt, Artificial Sequence
  Description of Artificial Sequence: Synthetic oligonucleotide
ggcagaugcaguuguggga

SEQ ID NO: 2411044 - RNA, 19 nt, Artificial Sequence
  Description of Artificial Sequence: Synthetic oligonucleotide
ugccagucaucugcuuaag

SEQ ID NO: 2411045 - RNA, 19 nt, Artificial Sequence
  Description of Artificial Sequence: Synthetic oligonucleotide
aucucauauugaggaauaa

SEQ ID NO: 2411046 - RNA, 19 nt, Artificial Sequence
  Description of Artificial Sequence: Synthetic oligonucleotide
caugaggggccagcuagug

SEQ ID NO: 2411047 - RNA, 19 nt, Artificial Sequence
  Description of Artificial Sequence: Synthetic oligonucleotide
ggucugacugcccuuguaa

SEQ ID NO: 2411048 - RNA, 19 nt, Artificial Sequence
  Description of Artificial Sequence: Synthetic oligonucleotide
uggucugacugcccuugua

SEQ ID NO: 2411049 - RNA, 19 nt, Artificial Sequence
  Description of Artificial Sequence: Synthetic oligonucleotide
caauggaaacgagaccaga

SEQ ID NO: 2411050 - RNA, 19 nt, Artificial Sequence
  Description of Artificial Sequence: Synthetic oligonucleotide
ggugugaggaggccucgug

SEQ ID NO: 2411051 - RNA, 19 nt, Artificial Sequence
  Description of Artificial Sequence: Synthetic oligonucleotide
aacuaccaugaggggccag

SEQ ID NO: 2411052 - RNA, 19 nt, Artificial Sequence
  Description of Artificial Sequence: Synthetic oligonucleotide
ugcggggcagaugcaguug

SEQ ID NO: 2411053 - RNA, 19 nt, Artificial Sequence
  Description of Artificial Sequence: Synthetic oligonucleotide
uccccacacaguggaaacu

SEQ ID NO: 2411054 - RNA, 19 nt, Artificial Sequence
  Description of Artificial Sequence: Synthetic oligonucleotide
uaccaugaggggccagcua

SEQ ID NO: 2411055 - RNA, 19 nt, Artificial Sequence
  Description of Artificial Sequence: Synthetic oligonucleotide
gcuuaagaacucggacugg

SEQ ID NO: 2411056 - RNA, 19 nt, Artificial Sequence
  Description of Artificial Sequence: Synthetic oligonucleotide
gcugcuaugugguacuccu

SEQ ID NO: 2411057 - RNA, 19 nt, Artificial Sequence
  Description of Artificial Sequence: Synthetic oligonucleotide
agaacucggacuggccuau

SEQ ID NO: 2411058 - RNA, 19 nt, Artificial Sequence
  Description of Artificial Sequence: Synthetic oligonucleotide
uuuaggcucacgggcccuc

SEQ ID NO: 2411059 - RNA, 19 nt, Artificial Sequence
  Description of Artificial Sequence: Synthetic oligonucleotide
uugcggggcagaugcaguu

SEQ ID NO: 2411060 - RNA, 19 nt, Artificial Sequence
  Description of Artificial Sequence: Synthetic oligonucleotide
ucguggauacaggggcucu

SEQ ID NO: 2411061 - RNA, 19 nt, Artificial Sequence
  Description of Artificial Sequence: Synthetic oligonucleotide
gcagaugcaguugugggaa

SEQ ID NO: 2411062 - RNA, 19 nt, Artificial Sequence
  Description of Artificial Sequence: Synthetic oligonucleotide
gcaguugugggaagucaag

SEQ ID NO: 2411063 - RNA, 19 nt, Artificial Sequence
  Description of Artificial Sequence: Synthetic oligonucleotide
augugguacuccugagcuu

SEQ ID NO: 2411064 - RNA, 19 nt, Artificial Sequence
  Description of Artificial Sequence: Synthetic oligonucleotide
auuaccugcugggcucugu

SEQ ID NO: 2411065 - RNA, 19 nt, Artificial Sequence
  Description of Artificial Sequence: Synthetic oligonucleotide
cacccauccucaaaaggcu

SEQ ID NO: 2411066 - RNA, 19 nt, Artificial Sequence
  Description of Artificial Sequence: Synthetic oligonucleotide
cagaccaccucuggcccgc

SEQ ID NO: 2411067 - RNA, 19 nt, Artificial Sequence
  Description of Artificial Sequence: Synthetic oligonucleotide
cucguggauacaggggcuc

SEQ ID NO: 2411068 - RNA, 19 nt, Artificial Sequence
  Description of Artificial Sequence: Synthetic oligonucleotide
ggggcccugggcuacucag

SEQ ID NO: 2411069 - RNA, 19 nt, Artificial Sequence
  Description of Artificial Sequence: Synthetic oligonucleotide
gacgcugccugcuguuuua

SEQ ID NO: 2411070 - RNA, 19 nt, Artificial Sequence
  Description of Artificial Sequence: Synthetic oligonucleotide
acccauucacuugugucuu

SEQ ID NO: 2411071 - RNA, 19 nt, Artificial Sequence
  Description of Artificial Sequence: Synthetic oligonucleotide
caaggcuucaucucauauu

SEQ ID NO: 2411072 - RNA, 19 nt, Artificial Sequence
  Description of Artificial Sequence: Synthetic oligonucleotide
gcauugccuuucuucaaga

SEQ ID NO: 2411073 - RNA, 19 nt, Artificial Sequence
  Description of Artificial Sequence: Synthetic oligonucleotide
gggccagcuagugguaagg

SEQ ID NO: 2411074 - RNA, 19 nt, Artificial Sequence
  Description of Artificial Sequence: Synthetic oligonucleotide
gacuggccuauccacccua

SEQ ID NO: 2411075 - RNA, 19 nt, Artificial Sequence
  Description of Artificial Sequence: Synthetic oligonucleotide
gguaccccaugaagagugg

SEQ ID NO: 2411076 - RNA, 19 nt, Artificial Sequence
  Description of Artificial Sequence: Synthetic oligonucleotide
cacuugugucuuuggugca

SEQ ID NO: 2411077 - RNA, 19 nt, Artificial Sequence
  Description of Artificial Sequence: Synthetic oligonucleotide
uauuaccugcugggcucug

SEQ ID NO: 2411078 - RNA, 19 nt, Artificial Sequence
  Description of Artificial Sequence: Synthetic oligonucleotide
ggccagcuagugguaaggg

SEQ ID NO: 2411079 - RNA, 19 nt, Artificial Sequence
  Description of Artificial Sequence: Synthetic oligonucleotide
cuggccuauccacccuaug

SEQ ID NO: 2411080 - RNA, 19 nt, Artificial Sequence
  Description of Artificial Sequence: Synthetic oligonucleotide
ggccucguggauacagggg

SEQ ID NO: 2411081 - RNA, 19 nt, Artificial Sequence
  Description of Artificial Sequence: Synthetic oligonucleotide
uuaggcucacgggcccucu

SEQ ID NO: 2411082 - RNA, 19 nt, Artificial Sequence
  Description of Artificial Sequence: Synthetic oligonucleotide
ggguggaugggacgcugcc

SEQ ID NO: 2411083 - RNA, 19 nt, Artificial Sequence
  Description of Artificial Sequence: Synthetic oligonucleotide
ggccuauccacccuaugua

SEQ ID NO: 2411084 - RNA, 19 nt, Artificial Sequence
  Description of Artificial Sequence: Synthetic oligonucleotide
cuggagcgaggggacagug

SEQ ID NO: 2411085 - RNA, 19 nt, Artificial Sequence
  Description of Artificial Sequence: Synthetic oligonucleotide
gaccaaaaccagugcuagu

SEQ ID NO: 2411086 - RNA, 19 nt, Artificial Sequence
  Description of Artificial Sequence: Synthetic oligonucleotide
aggggcucucuggggaguc

SEQ ID NO: 2411087 - RNA, 19 nt, Artificial Sequence
  Description of Artificial Sequence: Synthetic oligonucleotide
gccuauccacccuauguaa

SEQ ID NO: 2411088 - RNA, 19 nt, Artificial Sequence
  Description of Artificial Sequence: Synthetic oligonucleotide
uggggcccugggcuacuca

SEQ ID NO: 2411089 - RNA, 19 nt, Artificial Sequence
  Description of Artificial Sequence: Synthetic oligonucleotide
cugcuguuuuaggcucacg

SEQ ID NO: 2411090 - RNA, 19 nt, Artificial Sequence
  Description of Artificial Sequence: Synthetic oligonucleotide
gccagcuagugguaaggga

SEQ ID NO: 2411091 - RNA, 19 nt, Artificial Sequence
  Description of Artificial Sequence: Synthetic oligonucleotide
gacugcccuuguaaacaca

SEQ ID NO: 2411092 - RNA, 19 nt, Artificial Sequence
  Description of Artificial Sequence: Synthetic oligonucleotide
gcuagugguaagggaagca

SEQ ID NO: 2411093 - RNA, 19 nt, Artificial Sequence
  Description of Artificial Sequence: Synthetic oligonucleotide
cgcaaacuaccaugagggg

SEQ ID NO: 2411094 - RNA, 19 nt, Artificial Sequence
  Description of Artificial Sequence: Synthetic oligonucleotide
cggacuggccuauccaccc

SEQ ID NO: 2411095 - RNA, 19 nt, Artificial Sequence
  Description of Artificial Sequence: Synthetic oligonucleotide
ugggacgcugccugcuguu

SEQ ID NO: 2411096 - RNA, 19 nt, Artificial Sequence
  Description of Artificial Sequence: Synthetic oligonucleotide
ggcucacgggcccucuagc

SEQ ID NO: 2411097 - RNA, 19 nt, Artificial Sequence
  Description of Artificial Sequence: Synthetic oligonucleotide
caaccagcuccagcugaug

SEQ ID NO: 2411098 - RNA, 19 nt, Artificial Sequence
  Description of Artificial Sequence: Synthetic oligonucleotide
caggguggaugggacgcug

SEQ ID NO: 2411099 - RNA, 19 nt, Artificial Sequence
  Description of Artificial Sequence: Synthetic oligonucleotide
acccaguauucuguacaaa

SEQ ID NO: 2411100 - RNA, 19 nt, Artificial Sequence
  Description of Artificial Sequence: Synthetic oligonucleotide
ccucuagcacccauccuca

SEQ ID NO: 2411101 - RNA, 19 nt, Artificial Sequence
  Description of Artificial Sequence: Synthetic oligonucleotide
uaggcucacgggcccucua

SEQ ID NO: 2411102 - RNA, 19 nt, Artificial Sequence
  Description of Artificial Sequence: Synthetic oligonucleotide
ccuauccacccuauguaaa

SEQ ID NO: 2411103 - RNA, 19 nt, Artificial Sequence
  Description of Artificial Sequence: Synthetic oligonucleotide
gcagcuacugccaugucau

SEQ ID NO: 2411104 - RNA, 19 nt, Artificial Sequence
  Description of Artificial Sequence: Synthetic oligonucleotide
cuugcggggcagaugcagu

SEQ ID NO: 2411105 - RNA, 19 nt, Artificial Sequence
  Description of Artificial Sequence: Synthetic oligonucleotide
gcucacgggcccucuagca

SEQ ID NO: 2411106 - RNA, 19 nt, Artificial Sequence
  Description of Artificial Sequence: Synthetic oligonucleotide
uagcugcuaugugguacuc

SEQ ID NO: 2411107 - RNA, 19 nt, Artificial Sequence
  Description of Artificial Sequence: Synthetic oligonucleotide
gcugaugcuauuaccugcu

SEQ ID NO: 2411108 - RNA, 19 nt, Artificial Sequence
  Description of Artificial Sequence: Synthetic oligonucleotide
cccauagcugcuauguggu

SEQ ID NO: 2411109 - RNA, 19 nt, Artificial Sequence
  Description of Artificial Sequence: Synthetic oligonucleotide
gugguaagggaagcagcua

SEQ ID NO: 2411110 - RNA, 19 nt, Artificial Sequence
  Description of Artificial Sequence: Synthetic oligonucleotide
gacugcuggccaggccaug

SEQ ID NO: 2411111 - RNA, 19 nt, Artificial Sequence
  Description of Artificial Sequence: Synthetic oligonucleotide
guggauacaggggcucucu

SEQ ID NO: 2411112 - RNA, 19 nt, Artificial Sequence
  Description of Artificial Sequence: Synthetic oligonucleotide
cuacugccaugucaugccu

SEQ ID NO: 2411113 - RNA, 19 nt, Artificial Sequence
  Description of Artificial Sequence: Synthetic oligonucleotide
acuggccuauccacccuau

SEQ ID NO: 2411114 - RNA, 19 nt, Artificial Sequence
  Description of Artificial Sequence: Synthetic oligonucleotide
cugaacgaccaagaccccu

SEQ ID NO: 2411115 - RNA, 19 nt, Artificial Sequence
  Description of Artificial Sequence: Synthetic oligonucleotide
gcccgcaaacuaccaugag

SEQ ID NO: 2411116 - RNA, 19 nt, Artificial Sequence
  Description of Artificial Sequence: Synthetic oligonucleotide
ggcccgcaaacuaccauga

SEQ ID NO: 2411117 - RNA, 19 nt, Artificial Sequence
  Description of Artificial Sequence: Synthetic oligonucleotide
cuuggagccagaguuccuu

SEQ ID NO: 2411118 - RNA, 19 nt, Artificial Sequence
  Description of Artificial Sequence: Synthetic oligonucleotide
gggcucccuaagcucuuug

SEQ ID NO: 2411119 - RNA, 19 nt, Artificial Sequence
  Description of Artificial Sequence: Synthetic oligonucleotide
ccaagaccccuggagcgag

SEQ ID NO: 2411120 - RNA, 19 nt, Artificial Sequence
  Description of Artificial Sequence: Synthetic oligonucleotide
ccccaugaagagugggcuc

SEQ ID NO: 2411121 - RNA, 19 nt, Artificial Sequence
  Description of Artificial Sequence: Synthetic oligonucleotide
agacugcuggccaggccau

SEQ ID NO: 2411122 - RNA, 19 nt, Artificial Sequence
  Description of Artificial Sequence: Synthetic oligonucleotide
cuuggacuugcggggcaga

SEQ ID NO: 2411123 - RNA, 19 nt, Artificial Sequence
  Description of Artificial Sequence: Synthetic oligonucleotide
cuauuaccugcugggcucu

SEQ ID NO: 2411124 - RNA, 19 nt, Artificial Sequence
  Description of Artificial Sequence: Synthetic oligonucleotide
cucuagcacccauccucaa

SEQ ID NO: 2411125 - RNA, 19 nt, Artificial Sequence
  Description of Artificial Sequence: Synthetic oligonucleotide
ccaaaaccagugcuagucu

SEQ ID NO: 2411126 - RNA, 19 nt, Artificial Sequence
  Description of Artificial Sequence: Synthetic oligonucleotide
gaacucggacuggccuauc

SEQ ID NO: 2411127 - RNA, 19 nt, Artificial Sequence
  Description of Artificial Sequence: Synthetic oligonucleotide
cuaccaugaggggccagcu

SEQ ID NO: 2411128 - RNA, 19 nt, Artificial Sequence
  Description of Artificial Sequence: Synthetic oligonucleotide
gaguggcugccaagccauc

SEQ ID NO: 2411129 - RNA, 19 nt, Artificial Sequence
  Description of Artificial Sequence: Synthetic oligonucleotide
ugggcucccuaagcucuuu

SEQ ID NO: 2411130 - RNA, 19 nt, Artificial Sequence
  Description of Artificial Sequence: Synthetic oligonucleotide
gaguggucugacugcccuu

SEQ ID NO: 2411131 - RNA, 19 nt, Artificial Sequence
  Description of Artificial Sequence: Synthetic oligonucleotide
cugggcuacucagcauuaa

SEQ ID NO: 2411132 - RNA, 19 nt, Artificial Sequence
  Description of Artificial Sequence: Synthetic oligonucleotide
ccagugcuagucucugaaa

SEQ ID NO: 2411133 - RNA, 19 nt, Artificial Sequence
  Description of Artificial Sequence: Synthetic oligonucleotide
gucuuacuccccacacagu

SEQ ID NO: 2411134 - RNA, 19 nt, Artificial Sequence
  Description of Artificial Sequence: Synthetic oligonucleotide
uuggggcccugggcuacuc

SEQ ID NO: 2411135 - RNA, 19 nt, Artificial Sequence
  Description of Artificial Sequence: Synthetic oligonucleotide
gccccuggucugaacacca

SEQ ID NO: 2411136 - RNA, 19 nt, Artificial Sequence
  Description of Artificial Sequence: Synthetic oligonucleotide
ccaaggcuucaucucauau

SEQ ID NO: 2411137 - RNA, 19 nt, Artificial Sequence
  Description of Artificial Sequence: Synthetic oligonucleotide
gcggggcagaugcaguugu

SEQ ID NO: 2411138 - RNA, 19 nt, Artificial Sequence
  Description of Artificial Sequence: Synthetic oligonucleotide
gguggaugggacgcugccu

SEQ ID NO: 2411139 - RNA, 19 nt, Artificial Sequence
  Description of Artificial Sequence: Synthetic oligonucleotide
gccuuucuucaagacugaa

SEQ ID NO: 2411140 - RNA, 19 nt, Artificial Sequence
  Description of Artificial Sequence: Synthetic oligonucleotide
gggaagcagcuacugccau

SEQ ID NO: 2411141 - RNA, 19 nt, Artificial Sequence
  Description of Artificial Sequence: Synthetic oligonucleotide
gcuccaccgcucagacugc

SEQ ID NO: 2411142 - RNA, 19 nt, Artificial Sequence
  Description of Artificial Sequence: Synthetic oligonucleotide
ccugggcuacucagcauua

SEQ ID NO: 2411143 - RNA, 19 nt, Artificial Sequence
  Description of Artificial Sequence: Synthetic oligonucleotide
gggcccucuagcacccauc

SEQ ID NO: 2411144 - RNA, 19 nt, Artificial Sequence
  Description of Artificial Sequence: Synthetic oligonucleotide
ggacuggccuauccacccu

SEQ ID NO: 2411145 - RNA, 19 nt, Artificial Sequence
  Description of Artificial Sequence: Synthetic oligonucleotide
ccgcucagacugcuggcca

SEQ ID NO: 2411146 - RNA, 19 nt, Artificial Sequence
  Description of Artificial Sequence: Synthetic oligonucleotide
cguggauacaggggcucuc

SEQ ID NO: 2411147 - RNA, 19 nt, Artificial Sequence
  Description of Artificial Sequence: Synthetic oligonucleotide
caccucuggcccgcaaacu

SEQ ID NO: 2411148 - RNA, 19 nt, Artificial Sequence
  Description of Artificial Sequence: Synthetic oligonucleotide
ccauagcugcuauguggua

SEQ ID NO: 2411149 - RNA, 19 nt, Artificial Sequence
  Description of Artificial Sequence: Synthetic oligonucleotide
ggacgcugccugcuguuuu

SEQ ID NO: 2411150 - RNA, 19 nt, Artificial Sequence
  Description of Artificial Sequence: Synthetic oligonucleotide
cgagaccagaccagaccaa

SEQ ID NO: 2411151 - RNA, 19 nt, Artificial Sequence
  Description of Artificial Sequence: Synthetic oligonucleotide
ccaugaggggccagcuagu

SEQ ID NO: 2411152 - RNA, 19 nt, Artificial Sequence
  Description of Artificial Sequence: Synthetic oligonucleotide
cuccaccgcucagacugcu

SEQ ID NO: 2411153 - RNA, 19 nt, Artificial Sequence
  Description of Artificial Sequence: Synthetic oligonucleotide
ccauacccauagcugcuau

SEQ ID NO: 2411154 - RNA, 19 nt, Artificial Sequence
  Description of Artificial Sequence: Synthetic oligonucleotide
acgggcccucuagcaccca

SEQ ID NO: 2411155 - RNA, 19 nt, Artificial Sequence
  Description of Artificial Sequence: Synthetic oligonucleotide
gcuuggagccagaguuccu

SEQ ID NO: 2411156 - RNA, 19 nt, Artificial Sequence
  Description of Artificial Sequence: Synthetic oligonucleotide
gggacgcugccugcuguuu

SEQ ID NO: 2411157 - RNA, 19 nt, Artificial Sequence
  Description of Artificial Sequence: Synthetic oligonucleotide
cccauucacuugugucuuu

SEQ ID NO: 2411158 - RNA, 19 nt, Artificial Sequence
  Description of Artificial Sequence: Synthetic oligonucleotide
ccuggagcgaggggacagu

SEQ ID NO: 2411159 - RNA, 19 nt, Artificial Sequence
  Description of Artificial Sequence: Synthetic oligonucleotide
auuagaauuaaccagaugu

SEQ ID NO: 2411160 - RNA, 19 nt, Artificial Sequence
  Description of Artificial Sequence: Synthetic oligonucleotide
aauauuucuugccucagac

SEQ ID NO: 2411161 - RNA, 19 nt, Artificial Sequence
  Description of Artificial Sequence: Synthetic oligonucleotide
aaacauaugagaaaauggc

SEQ ID NO: 2411162 - RNA, 19 nt, Artificial Sequence
  Description of Artificial Sequence: Synthetic oligonucleotide
uuuaugaacccauagaggc

SEQ ID NO: 2411163 - RNA, 19 nt, Artificial Sequence
  Description of Artificial Sequence: Synthetic oligonucleotide
aauguuauccgucagcuug

SEQ ID NO: 2411164 - RNA, 19 nt, Artificial Sequence
  Description of Artificial Sequence: Synthetic oligonucleotide
uguaaucuugucuugaccg

SEQ ID NO: 2411165 - RNA, 19 nt, Artificial Sequence
  Description of Artificial Sequence: Synthetic oligonucleotide
aaauacugaacuucuuccc

SEQ ID NO: 2411166 - RNA, 19 nt, Artificial Sequence
  Description of Artificial Sequence: Synthetic oligonucleotide
aaacaauacagguacucac

SEQ ID NO: 2411167 - RNA, 19 nt, Artificial Sequence
  Description of Artificial Sequence: Synthetic oligonucleotide
uuguaaacaauacagguac

SEQ ID NO: 2411168 - RNA, 19 nt, Artificial Sequence
  Description of Artificial Sequence: Synthetic oligonucleotide
aauacuuguauagauuacg

SEQ ID NO: 2411169 - RNA, 19 nt, Artificial Sequence
  Description of Artificial Sequence: Synthetic oligonucleotide
caaacauaugagaaaaugg

SEQ ID NO: 2411170 - RNA, 19 nt, Artificial Sequence
  Description of Artificial Sequence: Synthetic oligonucleotide
agaguauaaaauuuccagg

SEQ ID NO: 2411171 - RNA, 19 nt, Artificial Sequence
  Description of Artificial Sequence: Synthetic oligonucleotide
aacauaugagaaaauggcc

SEQ ID NO: 2411172 - RNA, 19 nt, Artificial Sequence
  Description of Artificial Sequence: Synthetic oligonucleotide
uuuacccuugauaacaucc

SEQ ID NO: 2411173 - RNA, 19 nt, Artificial Sequence
  Description of Artificial Sequence: Synthetic oligonucleotide
uguucaaacaucuuagcug

SEQ ID NO: 2411174 - RNA, 19 nt, Artificial Sequence
  Description of Artificial Sequence: Synthetic oligonucleotide
gagaaaauggcccaugacc

SEQ ID NO: 2411175 - RNA, 19 nt, Artificial Sequence
  Description of Artificial Sequence: Synthetic oligonucleotide
uuaacaaugucucgggaag

SEQ ID NO: 2411176 - RNA, 19 nt, Artificial Sequence
  Description of Artificial Sequence: Synthetic oligonucleotide
uguuccuuaaaauauuucu

SEQ ID NO: 2411177 - RNA, 19 nt, Artificial Sequence
  Description of Artificial Sequence: Synthetic oligonucleotide
cacuaugaaaucuucagcc

SEQ ID NO: 2411178 - RNA, 19 nt, Artificial Sequence
  Description of Artificial Sequence: Synthetic oligonucleotide
acuuguauagauuacggca

SEQ ID NO: 2411179 - RNA, 19 nt, Artificial Sequence
  Description of Artificial Sequence: Synthetic oligonucleotide
ucugugaucauuauaucga

SEQ ID NO: 2411180 - RNA, 19 nt, Artificial Sequence
  Description of Artificial Sequence: Synthetic oligonucleotide
aaaucuucagccuucaguu

SEQ ID NO: 2411181 - RNA, 19 nt, Artificial Sequence
  Description of Artificial Sequence: Synthetic oligonucleotide
cuugauaacauccacuaug

SEQ ID NO: 2411182 - RNA, 19 nt, Artificial Sequence
  Description of Artificial Sequence: Synthetic oligonucleotide
cauuauaucgaugagguug

SEQ ID NO: 2411183 - RNA, 19 nt, Artificial Sequence
  Description of Artificial Sequence: Synthetic oligonucleotide
uuauccgucagcuugguga

SEQ ID NO: 2411184 - RNA, 19 nt, Artificial Sequence
  Description of Artificial Sequence: Synthetic oligonucleotide
aaugaaagaggcacguggc

SEQ ID NO: 2411185 - RNA, 19 nt, Artificial Sequence
  Description of Artificial Sequence: Synthetic oligonucleotide
uaaaucuuccaucaaacau

SEQ ID NO: 2411186 - RNA, 19 nt, Artificial Sequence
  Description of Artificial Sequence: Synthetic oligonucleotide
aaacaucuuagcugauccc

SEQ ID NO: 2411187 - RNA, 19 nt, Artificial Sequence
  Description of Artificial Sequence: Synthetic oligonucleotide
gaucauuauaucgaugagg

SEQ ID NO: 2411188 - RNA, 19 nt, Artificial Sequence
  Description of Artificial Sequence: Synthetic oligonucleotide
aguagaguauaaaauuucc

SEQ ID NO: 2411189 - RNA, 19 nt, Artificial Sequence
  Description of Artificial Sequence: Synthetic oligonucleotide
uacucuuuacccuugauaa

SEQ ID NO: 2411190 - RNA, 19 nt, Artificial Sequence
  Description of Artificial Sequence: Synthetic oligonucleotide
acaccaaguacucuuuacc

SEQ ID NO: 2411191 - RNA, 19 nt, Artificial Sequence
  Description of Artificial Sequence: Synthetic oligonucleotide
aaaauguuauccgucagcu

SEQ ID NO: 2411192 - RNA, 19 nt, Artificial Sequence
  Description of Artificial Sequence: Synthetic oligonucleotide
uagauuacggcauucgaug

SEQ ID NO: 2411193 - RNA, 19 nt, Artificial Sequence
  Description of Artificial Sequence: Synthetic oligonucleotide
uugauaacauccacuauga

SEQ ID NO: 2411194 - RNA, 19 nt, Artificial Sequence
  Description of Artificial Sequence: Synthetic oligonucleotide
uauguugguaagcucugcg

SEQ ID NO: 2411195 - RNA, 19 nt, Artificial Sequence
  Description of Artificial Sequence: Synthetic oligonucleotide
agaaucuccauguaggggu

SEQ ID NO: 2411196 - RNA, 19 nt, Artificial Sequence
  Description of Artificial Sequence: Synthetic oligonucleotide
uggcccaugaccaagguca

SEQ ID NO: 2411197 - RNA, 19 nt, Artificial Sequence
  Description of Artificial Sequence: Synthetic oligonucleotide
auuauaucgaugagguugc

SEQ ID NO: 2411198 - RNA, 19 nt, Artificial Sequence
  Description of Artificial Sequence: Synthetic oligonucleotide
uccaggaaaauguuauccg

SEQ ID NO: 2411199 - RNA, 19 nt, Artificial Sequence
  Description of Artificial Sequence: Synthetic oligonucleotide
auaucgaugagguugcuga

SEQ ID NO: 2411200 - RNA, 19 nt, Artificial Sequence
  Description of Artificial Sequence: Synthetic oligonucleotide
caaacaucuuagcugaucc

SEQ ID NO: 2411201 - RNA, 19 nt, Artificial Sequence
  Description of Artificial Sequence: Synthetic oligonucleotide
auuuuaugcaguuuuguaa

SEQ ID NO: 2411202 - RNA, 19 nt, Artificial Sequence
  Description of Artificial Sequence: Synthetic oligonucleotide
uuaaaauauuucuugccuc

SEQ ID NO: 2411203 - RNA, 19 nt, Artificial Sequence
  Description of Artificial Sequence: Synthetic oligonucleotide
gaaaauguuauccgucagc

SEQ ID NO: 2411204 - RNA, 19 nt, Artificial Sequence
  Description of Artificial Sequence: Synthetic oligonucleotide
ugggauaaaucuuccauca

SEQ ID NO: 2411205 - RNA, 19 nt, Artificial Sequence
  Description of Artificial Sequence: Synthetic oligonucleotide
gugaucauuauaucgauga

SEQ ID NO: 2411206 - RNA, 19 nt, Artificial Sequence
  Description of Artificial Sequence: Synthetic oligonucleotide
augggauaaaucuuccauc

SEQ ID NO: 2411207 - RNA, 19 nt, Artificial Sequence
  Description of Artificial Sequence: Synthetic oligonucleotide
agcugaucccuguucaugc

SEQ ID NO: 2411208 - RNA, 19 nt, Artificial Sequence
  Description of Artificial Sequence: Synthetic oligonucleotide
caugcuuccacguuucacc

SEQ ID NO: 2411209 - RNA, 19 nt, Artificial Sequence
  Description of Artificial Sequence: Synthetic oligonucleotide
uuaaccagauguucaaaca

SEQ ID NO: 2411210 - RNA, 19 nt, Artificial Sequence
  Description of Artificial Sequence: Synthetic oligonucleotide
aaauacuuguauagauuac

SEQ ID NO: 2411211 - RNA, 19 nt, Artificial Sequence
  Description of Artificial Sequence: Synthetic oligonucleotide
aacacagagcauaucucgc

SEQ ID NO: 2411212 - RNA, 19 nt, Artificial Sequence
  Description of Artificial Sequence: Synthetic oligonucleotide
aucaguagaguauaaaauu

SEQ ID NO: 2411213 - RNA, 19 nt, Artificial Sequence
  Description of Artificial Sequence: Synthetic oligonucleotide
uacucacaaugaaagaggc

SEQ ID NO: 2411214 - RNA, 19 nt, Artificial Sequence
  Description of Artificial Sequence: Synthetic oligonucleotide
uauagauuacggcauucga

SEQ ID NO: 2411215 - RNA, 19 nt, Artificial Sequence
  Description of Artificial Sequence: Synthetic oligonucleotide
aucauuauaucgaugaggu

SEQ ID NO: 2411216 - RNA, 19 nt, Artificial Sequence
  Description of Artificial Sequence: Synthetic oligonucleotide
ugcguuuaugaacccauag

SEQ ID NO: 2411217 - RNA, 19 nt, Artificial Sequence
  Description of Artificial Sequence: Synthetic oligonucleotide
uuuauguugguaagcucug

SEQ ID NO: 2411218 - RNA, 19 nt, Artificial Sequence
  Description of Artificial Sequence: Synthetic oligonucleotide
ugucucgggaagcugauca

SEQ ID NO: 2411219 - RNA, 19 nt, Artificial Sequence
  Description of Artificial Sequence: Synthetic oligonucleotide
uucaugauagguccgaguu

SEQ ID NO: 2411220 - RNA, 19 nt, Artificial Sequence
  Description of Artificial Sequence: Synthetic oligonucleotide
uguuaaaaucuccauuuua

SEQ ID NO: 2411221 - RNA, 19 nt, Artificial Sequence
  Description of Artificial Sequence: Synthetic oligonucleotide
aacgagguagccugcuagg

SEQ ID NO: 2411222 - RNA, 19 nt, Artificial Sequence
  Description of Artificial Sequence: Synthetic oligonucleotide
uuugcagaaggccucugug

SEQ ID NO: 2411223 - RNA, 19 nt, Artificial Sequence
  Description of Artificial Sequence: Synthetic oligonucleotide
uuagaauuaaccagauguu

SEQ ID NO: 2411224 - RNA, 19 nt, Artificial Sequence
  Description of Artificial Sequence: Synthetic oligonucleotide
ugaucauuauaucgaugag

SEQ ID NO: 2411225 - RNA, 19 nt, Artificial Sequence
  Description of Artificial Sequence: Synthetic oligonucleotide
agauguucaaacaucuuag

SEQ ID NO: 2411226 - RNA, 19 nt, Artificial Sequence
  Description of Artificial Sequence: Synthetic oligonucleotide
aacaucuuagcugaucccu

SEQ ID NO: 2411227 - RNA, 19 nt, Artificial Sequence
  Description of Artificial Sequence: Synthetic oligonucleotide
uccacguuucaccucggcg

SEQ ID NO: 2411228 - RNA, 19 nt, Artificial Sequence
  Description of Artificial Sequence: Synthetic oligonucleotide
uaaacaauacagguacuca

SEQ ID NO: 2411229 - RNA, 19 nt, Artificial Sequence
  Description of Artificial Sequence: Synthetic oligonucleotide
uacuuguauagauuacggc

SEQ ID NO: 2411230 - RNA, 19 nt, Artificial Sequence
  Description of Artificial Sequence: Synthetic oligonucleotide
aaaauauuucuugccucag

SEQ ID NO: 2411231 - RNA, 19 nt, Artificial Sequence
  Description of Artificial Sequence: Synthetic oligonucleotide
gagcauaucucgcucacug

SEQ ID NO: 2411232 - RNA, 19 nt, Artificial Sequence
  Description of Artificial Sequence: Synthetic oligonucleotide
uaaccagauguucaaacau

SEQ ID NO: 2411233 - RNA, 19 nt, Artificial Sequence
  Description of Artificial Sequence: Synthetic oligonucleotide
ugcgguguaagcaguugcg

SEQ ID NO: 2411234 - RNA, 19 nt, Artificial Sequence
  Description of Artificial Sequence: Synthetic oligonucleotide
cugggucucacccaaauac

SEQ ID NO: 2411235 - RNA, 19 nt, Artificial Sequence
  Description of Artificial Sequence: Synthetic oligonucleotide
aaucugaacacagagcaua

SEQ ID NO: 2411236 - RNA, 19 nt, Artificial Sequence
  Description of Artificial Sequence: Synthetic oligonucleotide
auaucucgcucacugaucu

SEQ ID NO: 2411237 - RNA, 19 nt, Artificial Sequence
  Description of Artificial Sequence: Synthetic oligonucleotide
auguugguaagcucugcgg

SEQ ID NO: 2411238 - RNA, 19 nt, Artificial Sequence
  Description of Artificial Sequence: Synthetic oligonucleotide
auacuuguauagauuacgg

SEQ ID NO: 2411239 - RNA, 19 nt, Artificial Sequence
  Description of Artificial Sequence: Synthetic oligonucleotide
cugauuuuauguugguaag

SEQ ID NO: 2411240 - RNA, 19 nt, Artificial Sequence
  Description of Artificial Sequence: Synthetic oligonucleotide
ugucuugaccguuuggcug

SEQ ID NO: 2411241 - RNA, 19 nt, Artificial Sequence
  Description of Artificial Sequence: Synthetic oligonucleotide
aaccagauguucaaacauc

SEQ ID NO: 2411242 - RNA, 19 nt, Artificial Sequence
  Description of Artificial Sequence: Synthetic oligonucleotide
guucgaacgagguagccug

SEQ ID NO: 2411243 - RNA, 19 nt, Artificial Sequence
  Description of Artificial Sequence: Synthetic oligonucleotide
gguguuaacaaugucucgg

SEQ ID NO: 2411244 - RNA, 19 nt, Artificial Sequence
  Description of Artificial Sequence: Synthetic oligonucleotide
uuaugaacccauagaggca

SEQ ID NO: 2411245 - RNA, 19 nt, Artificial Sequence
  Description of Artificial Sequence: Synthetic oligonucleotide
caccaaguacucuuuaccc

SEQ ID NO: 2411246 - RNA, 19 nt, Artificial Sequence
  Description of Artificial Sequence: Synthetic oligonucleotide
ugcaaguguucgaacgagg

SEQ ID NO: 2411247 - RNA, 19 nt, Artificial Sequence
  Description of Artificial Sequence: Synthetic oligonucleotide
agaaaauggcccaugacca

SEQ ID NO: 2411248 - RNA, 19 nt, Artificial Sequence
  Description of Artificial Sequence: Synthetic oligonucleotide
uccgaguucauuagaauua

SEQ ID NO: 2411249 - RNA, 19 nt, Artificial Sequence
  Description of Artificial Sequence: Synthetic oligonucleotide
ucugcaaguguucgaacga

SEQ ID NO: 2411250 - RNA, 19 nt, Artificial Sequence
  Description of Artificial Sequence: Synthetic oligonucleotide
acuaugaaaucuucagccu

SEQ ID NO: 2411251 - RNA, 19 nt, Artificial Sequence
  Description of Artificial Sequence: Synthetic oligonucleotide
ucuugccucagacaaauuu

SEQ ID NO: 2411252 - RNA, 19 nt, Artificial Sequence
  Description of Artificial Sequence: Synthetic oligonucleotide
ugugaucauuauaucgaug

SEQ ID NO: 2411253 - RNA, 19 nt, Artificial Sequence
  Description of Artificial Sequence: Synthetic oligonucleotide
caaauacuuguauagauua

SEQ ID NO: 2411254 - RNA, 19 nt, Artificial Sequence
  Description of Artificial Sequence: Synthetic oligonucleotide
caagcuagcaccucccuug

SEQ ID NO: 2411255 - RNA, 19 nt, Artificial Sequence
  Description of Artificial Sequence: Synthetic oligonucleotide
uccauuuuaugcaguuuug

SEQ ID NO: 2411256 - RNA, 19 nt, Artificial Sequence
  Description of Artificial Sequence: Synthetic oligonucleotide
guguuaacaaugucucggg

SEQ ID NO: 2411257 - RNA, 19 nt, Artificial Sequence
  Description of Artificial Sequence: Synthetic oligonucleotide
gguacucacaaugaaagag

SEQ ID NO: 2411258 - RNA, 19 nt, Artificial Sequence
  Description of Artificial Sequence: Synthetic oligonucleotide
gaguccggcaaucugaaca

SEQ ID NO: 2411259 - RNA, 19 nt, Artificial Sequence
  Description of Artificial Sequence: Synthetic oligonucleotide
gaacgagguagccugcuag

SEQ ID NO: 2411260 - RNA, 19 nt, Artificial Sequence
  Description of Artificial Sequence: Synthetic oligonucleotide
ucaucaauggcuguagaaa

SEQ ID NO: 2411261 - RNA, 19 nt, Artificial Sequence
  Description of Artificial Sequence: Synthetic oligonucleotide
ucaguugggcauacagggg

SEQ ID NO: 2411262 - RNA, 19 nt, Artificial Sequence
  Description of Artificial Sequence: Synthetic oligonucleotide
aggcagacacaccaaguac

SEQ ID NO: 2411263 - RNA, 19 nt, Artificial Sequence
  Description of Artificial Sequence: Synthetic oligonucleotide
agaauuaaccagauguuca

SEQ ID NO: 2411264 - RNA, 19 nt, Artificial Sequence
  Description of Artificial Sequence: Synthetic oligonucleotide
ugauuuuauguugguaagc

SEQ ID NO: 2411265 - RNA, 19 nt, Artificial Sequence
  Description of Artificial Sequence: Synthetic oligonucleotide
aacaauacagguacucaca

SEQ ID NO: 2411266 - RNA, 19 nt, Artificial Sequence
  Description of Artificial Sequence: Synthetic oligonucleotide
auuacggcauucgauguuc

SEQ ID NO: 2411267 - RNA, 19 nt, Artificial Sequence
  Description of Artificial Sequence: Synthetic oligonucleotide
guauagauuacggcauucg

SEQ ID NO: 2411268 - RNA, 19 nt, Artificial Sequence
  Description of Artificial Sequence: Synthetic oligonucleotide
aacauccacuaugaaaucu

SEQ ID NO: 2411269 - RNA, 19 nt, Artificial Sequence
  Description of Artificial Sequence: Synthetic oligonucleotide
uucaggguugagcccauag

SEQ ID NO: 2411270 - RNA, 19 nt, Artificial Sequence
  Description of Artificial Sequence: Synthetic oligonucleotide
acucuuuacccuugauaac

SEQ ID NO: 2411271 - RNA, 19 nt, Artificial Sequence
  Description of Artificial Sequence: Synthetic oligonucleotide
uagaauuaaccagauguuc

SEQ ID NO: 2411272 - RNA, 19 nt, Artificial Sequence
  Description of Artificial Sequence: Synthetic oligonucleotide
uccggcaaucugaacacag

SEQ ID NO: 2411273 - RNA, 19 nt, Artificial Sequence
  Description of Artificial Sequence: Synthetic oligonucleotide
ugaacacagagcauaucuc

SEQ ID NO: 2411274 - RNA, 19 nt, Artificial Sequence
  Description of Artificial Sequence: Synthetic oligonucleotide
ugugcguuuaugaacccau

SEQ ID NO: 2411275 - RNA, 19 nt, Artificial Sequence
  Description of Artificial Sequence: Synthetic oligonucleotide
gauagguccgaguucauua

SEQ ID NO: 2411276 - RNA, 19 nt, Artificial Sequence
  Description of Artificial Sequence: Synthetic oligonucleotide
gaaaucuucagccuucagu

SEQ ID NO: 2411277 - RNA, 19 nt, Artificial Sequence
  Description of Artificial Sequence: Synthetic oligonucleotide
ucuugucuugaccguuugg

SEQ ID NO: 2411278 - RNA, 19 nt, Artificial Sequence
  Description of Artificial Sequence: Synthetic oligonucleotide
ugagaaaauggcccaugac

SEQ ID NO: 2411279 - RNA, 19 nt, Artificial Sequence
  Description of Artificial Sequence: Synthetic oligonucleotide
augaccaaggucauggcag

SEQ ID NO: 2411280 - RNA, 19 nt, Artificial Sequence
  Description of Artificial Sequence: Synthetic oligonucleotide
gagcagaugggauaaaucu

SEQ ID NO: 2411281 - RNA, 19 nt, Artificial Sequence
  Description of Artificial Sequence: Synthetic oligonucleotide
uuaugcaguuuuguaaaca

SEQ ID NO: 2411282 - RNA, 19 nt, Artificial Sequence
  Description of Artificial Sequence: Synthetic oligonucleotide
auagguccgaguucauuag

SEQ ID NO: 2411283 - RNA, 19 nt, Artificial Sequence
  Description of Artificial Sequence: Synthetic oligonucleotide
ugguguuaacaaugucucg

SEQ ID NO: 2411284 - RNA, 19 nt, Artificial Sequence
  Description of Artificial Sequence: Synthetic oligonucleotide
uuuaugcaguuuuguaaac

SEQ ID NO: 2411285 - RNA, 19 nt, Artificial Sequence
  Description of Artificial Sequence: Synthetic oligonucleotide
caguugggcauacaggggc

SEQ ID NO: 2411286 - RNA, 19 nt, Artificial Sequence
  Description of Artificial Sequence: Synthetic oligonucleotide
uggaacauaauaucuucuu

SEQ ID NO: 2411287 - RNA, 19 nt, Artificial Sequence
  Description of Artificial Sequence: Synthetic oligonucleotide
uguucaugcuuccacguuu

SEQ ID NO: 2411288 - RNA, 19 nt, Artificial Sequence
  Description of Artificial Sequence: Synthetic oligonucleotide
guuaacaaugucucgggaa

SEQ ID NO: 2411289 - RNA, 19 nt, Artificial Sequence
  Description of Artificial Sequence: Synthetic oligonucleotide
cauaugagaaaauggccca

SEQ ID NO: 2411290 - RNA, 19 nt, Artificial Sequence
  Description of Artificial Sequence: Synthetic oligonucleotide
agcucugcgguguaagcag

SEQ ID NO: 2411291 - RNA, 19 nt, Artificial Sequence
  Description of Artificial Sequence: Synthetic oligonucleotide
aaauggcccaugaccaagg

SEQ ID NO: 2411292 - RNA, 19 nt, Artificial Sequence
  Description of Artificial Sequence: Synthetic oligonucleotide
uccgucagcuuggugaagg

SEQ ID NO: 2411293 - RNA, 19 nt, Artificial Sequence
  Description of Artificial Sequence: Synthetic oligonucleotide
ccuugugcguuuaugaacc

SEQ ID NO: 2411294 - RNA, 19 nt, Artificial Sequence
  Description of Artificial Sequence: Synthetic oligonucleotide
auacugaacuucuuccccu

SEQ ID NO: 2411295 - RNA, 19 nt, Artificial Sequence
  Description of Artificial Sequence: Synthetic oligonucleotide
gauuuuauguugguaagcu

SEQ ID NO: 2411296 - RNA, 19 nt, Artificial Sequence
  Description of Artificial Sequence: Synthetic oligonucleotide
uuuggaucaguagaguaua

SEQ ID NO: 2411297 - RNA, 19 nt, Artificial Sequence
  Description of Artificial Sequence: Synthetic oligonucleotide
uugcguguguggaacauaa

SEQ ID NO: 2411298 - RNA, 19 nt, Artificial Sequence
  Description of Artificial Sequence: Synthetic oligonucleotide
guaaacaauacagguacuc

SEQ ID NO: 2411299 - RNA, 19 nt, Artificial Sequence
  Description of Artificial Sequence: Synthetic oligonucleotide
caggaaaauguuauccguc

SEQ ID NO: 2411300 - RNA, 19 nt, Artificial Sequence
  Description of Artificial Sequence: Synthetic oligonucleotide
ucgaugagguugcugauuu

SEQ ID NO: 2411301 - RNA, 19 nt, Artificial Sequence
  Description of Artificial Sequence: Synthetic oligonucleotide
ugaucauauucuucccugu

SEQ ID NO: 2411302 - RNA, 19 nt, Artificial Sequence
  Description of Artificial Sequence: Synthetic oligonucleotide
ucuuagcugaucccuguuc

SEQ ID NO: 2411303 - RNA, 19 nt, Artificial Sequence
  Description of Artificial Sequence: Synthetic oligonucleotide
guuuggcugggucucaccc

SEQ ID NO: 2411304 - RNA, 19 nt, Artificial Sequence
  Description of Artificial Sequence: Synthetic oligonucleotide
uaugagaaaauggcccaug

SEQ ID NO: 2411305 - RNA, 19 nt, Artificial Sequence
  Description of Artificial Sequence: Synthetic oligonucleotide
augagaaaauggcccauga

SEQ ID NO: 2411306 - RNA, 19 nt, Artificial Sequence
  Description of Artificial Sequence: Synthetic oligonucleotide
gaugggauaaaucuuccau

SEQ ID NO: 2411307 - RNA, 19 nt, Artificial Sequence
  Description of Artificial Sequence: Synthetic oligonucleotide
aggcacguggcuugcaggg

SEQ ID NO: 2411308 - RNA, 19 nt, Artificial Sequence
  Description of Artificial Sequence: Synthetic oligonucleotide
agauuacggcauucgaugu

SEQ ID NO: 2411309 - RNA, 19 nt, Artificial Sequence
  Description of Artificial Sequence: Synthetic oligonucleotide
gcuuccacguuucaccucg

SEQ ID NO: 2411310 - RNA, 19 nt, Artificial Sequence
  Description of Artificial Sequence: Synthetic oligonucleotide
cauucgauguuccuuaaaa

SEQ ID NO: 2411311 - RNA, 19 nt, Artificial Sequence
  Description of Artificial Sequence: Synthetic oligonucleotide
ucaugauagguccgaguuc

SEQ ID NO: 2411312 - RNA, 19 nt, Artificial Sequence
  Description of Artificial Sequence: Synthetic oligonucleotide
ucacccaaauacuuguaua

SEQ ID NO: 2411313 - RNA, 19 nt, Artificial Sequence
  Description of Artificial Sequence: Synthetic oligonucleotide
caugauagguccgaguuca

SEQ ID NO: 2411314 - RNA, 19 nt, Artificial Sequence
  Description of Artificial Sequence: Synthetic oligonucleotide
uuuucaugauagguccgag

SEQ ID NO: 2411315 - RNA, 19 nt, Artificial Sequence
  Description of Artificial Sequence: Synthetic oligonucleotide
uauaucgaugagguugcug

SEQ ID NO: 2411316 - RNA, 19 nt, Artificial Sequence
  Description of Artificial Sequence: Synthetic oligonucleotide
caccucggcgagcagaugg

SEQ ID NO: 2411317 - RNA, 19 nt, Artificial Sequence
  Description of Artificial Sequence: Synthetic oligonucleotide
cagaugggauaaaucuucc

SEQ ID NO: 2411318 - RNA, 19 nt, Artificial Sequence
  Description of Artificial Sequence: Synthetic oligonucleotide
agacacaccaaguacucuu

SEQ ID NO: 2411319 - RNA, 19 nt, Artificial Sequence
  Description of Artificial Sequence: Synthetic oligonucleotide
ucgcucacugaucuuuagc

SEQ ID NO: 2411320 - RNA, 19 nt, Artificial Sequence
  Description of Artificial Sequence: Synthetic oligonucleotide
ugaucccuguucaugcuuc

SEQ ID NO: 2411321 - RNA, 19 nt, Artificial Sequence
  Description of Artificial Sequence: Synthetic oligonucleotide
cucuuuacccuugauaaca

SEQ ID NO: 2411322 - RNA, 19 nt, Artificial Sequence
  Description of Artificial Sequence: Synthetic oligonucleotide
agguuugguguuaacaaug

SEQ ID NO: 2411323 - RNA, 19 nt, Artificial Sequence
  Description of Artificial Sequence: Synthetic oligonucleotide
guuaaaaucuccauuuuau

SEQ ID NO: 2411324 - RNA, 19 nt, Artificial Sequence
  Description of Artificial Sequence: Synthetic oligonucleotide
ccucagacaaauuuggauc

SEQ ID NO: 2411325 - RNA, 19 nt, Artificial Sequence
  Description of Artificial Sequence: Synthetic oligonucleotide
acacagagcauaucucgcu

SEQ ID NO: 2411326 - RNA, 19 nt, Artificial Sequence
  Description of Artificial Sequence: Synthetic oligonucleotide
ucaaacaucuuagcugauc

SEQ ID NO: 2411327 - RNA, 19 nt, Artificial Sequence
  Description of Artificial Sequence: Synthetic oligonucleotide
auuuggaucaguagaguau

SEQ ID NO: 2411328 - RNA, 19 nt, Artificial Sequence
  Description of Artificial Sequence: Synthetic oligonucleotide
cauuagaauuaaccagaug

SEQ ID NO: 2411329 - RNA, 19 nt, Artificial Sequence
  Description of Artificial Sequence: Synthetic oligonucleotide
cuuagcugaucccuguuca

SEQ ID NO: 2411330 - RNA, 19 nt, Artificial Sequence
  Description of Artificial Sequence: Synthetic oligonucleotide
aaauguuauccgucagcuu

SEQ ID NO: 2411331 - RNA, 19 nt, Artificial Sequence
  Description of Artificial Sequence: Synthetic oligonucleotide
ggaacauaauaucuucuuc

SEQ ID NO: 2411332 - RNA, 19 nt, Artificial Sequence
  Description of Artificial Sequence: Synthetic oligonucleotide
auagauuacggcauucgau

SEQ ID NO: 2411333 - RNA, 19 nt, Artificial Sequence
  Description of Artificial Sequence: Synthetic oligonucleotide
cacaccaaguacucuuuac

SEQ ID NO: 2411334 - RNA, 19 nt, Artificial Sequence
  Description of Artificial Sequence: Synthetic oligonucleotide
ugaccguuuggcugggucu

SEQ ID NO: 2411335 - RNA, 19 nt, Artificial Sequence
  Description of Artificial Sequence: Synthetic oligonucleotide
uguucgaacgagguagccu

SEQ ID NO: 2411336 - RNA, 19 nt, Artificial Sequence
  Description of Artificial Sequence: Synthetic oligonucleotide
gaggcacguggcuugcagg

SEQ ID NO: 2411337 - RNA, 19 nt, Artificial Sequence
  Description of Artificial Sequence: Synthetic oligonucleotide
uguauagauuacggcauuc

SEQ ID NO: 2411338 - RNA, 19 nt, Artificial Sequence
  Description of Artificial Sequence: Synthetic oligonucleotide
cagaaucuccauguagggg

SEQ ID NO: 2411339 - RNA, 19 nt, Artificial Sequence
  Description of Artificial Sequence: Synthetic oligonucleotide
ucagacaaauuuggaucag

SEQ ID NO: 2411340 - RNA, 19 nt, Artificial Sequence
  Description of Artificial Sequence: Synthetic oligonucleotide
uaacaaugucucgggaagc

SEQ ID NO: 2411341 - RNA, 19 nt, Artificial Sequence
  Description of Artificial Sequence: Synthetic oligonucleotide
gaucaguagaguauaaaau

SEQ ID NO: 2411342 - RNA, 19 nt, Artificial Sequence
  Description of Artificial Sequence: Synthetic oligonucleotide
agaugggauaaaucuucca

SEQ ID NO: 2411343 - RNA, 19 nt, Artificial Sequence
  Description of Artificial Sequence: Synthetic oligonucleotide
uauccgucagcuuggugaa

SEQ ID NO: 2411344 - RNA, 19 nt, Artificial Sequence
  Description of Artificial Sequence: Synthetic oligonucleotide
aauggcccaugaccaaggu

SEQ ID NO: 2411345 - RNA, 19 nt, Artificial Sequence
  Description of Artificial Sequence: Synthetic oligonucleotide
aagcucugcgguguaagca

SEQ ID NO: 2411346 - RNA, 19 nt, Artificial Sequence
  Description of Artificial Sequence: Synthetic oligonucleotide
agaggcacguggcuugcag

SEQ ID NO: 2411347 - RNA, 19 nt, Artificial Sequence
  Description of Artificial Sequence: Synthetic oligonucleotide
ugaccaaggucauggcaga

SEQ ID NO: 2411348 - RNA, 19 nt, Artificial Sequence
  Description of Artificial Sequence: Synthetic oligonucleotide
uuuggcugggucucaccca

SEQ ID NO: 2411349 - RNA, 19 nt, Artificial Sequence
  Description of Artificial Sequence: Synthetic oligonucleotide
uuauguugguaagcucugc

SEQ ID NO: 2411350 - RNA, 19 nt, Artificial Sequence
  Description of Artificial Sequence: Synthetic oligonucleotide
gcuagcaccucccuugugc

SEQ ID NO: 2411351 - RNA, 19 nt, Artificial Sequence
  Description of Artificial Sequence: Synthetic oligonucleotide
uugaccguuuggcuggguc

SEQ ID NO: 2411352 - RNA, 19 nt, Artificial Sequence
  Description of Artificial Sequence: Synthetic oligonucleotide
cauaucucgcucacugauc

SEQ ID NO: 2411353 - RNA, 19 nt, Artificial Sequence
  Description of Artificial Sequence: Synthetic oligonucleotide
uuacggcauucgauguucc

SEQ ID NO: 2411354 - RNA, 19 nt, Artificial Sequence
  Description of Artificial Sequence: Synthetic oligonucleotide
gcaggggcaagcuagcacc

SEQ ID NO: 2411355 - RNA, 19 nt, Artificial Sequence
  Description of Artificial Sequence: Synthetic oligonucleotide
uuguauagauuacggcauu

SEQ ID NO: 2411356 - RNA, 19 nt, Artificial Sequence
  Description of Artificial Sequence: Synthetic oligonucleotide
auguuauccgucagcuugg

SEQ ID NO: 2411357 - RNA, 19 nt, Artificial Sequence
  Description of Artificial Sequence: Synthetic oligonucleotide
auggcccaugaccaagguc

SEQ ID NO: 2411358 - RNA, 19 nt, Artificial Sequence
  Description of Artificial Sequence: Synthetic oligonucleotide
cuugcaggggcaagcuagc

SEQ ID NO: 2411359 - RNA, 19 nt, Artificial Sequence
  Description of Artificial Sequence: Synthetic oligonucleotide
caaugucucgggaagcuga

SEQ ID NO: 2411360 - RNA, 19 nt, Artificial Sequence
  Description of Artificial Sequence: Synthetic oligonucleotide
uuucaccucggcgagcaga

SEQ ID NO: 2411361 - RNA, 19 nt, Artificial Sequence
  Description of Artificial Sequence: Synthetic oligonucleotide
guaagcucugcgguguaag

SEQ ID NO: 2411362 - RNA, 19 nt, Artificial Sequence
  Description of Artificial Sequence: Synthetic oligonucleotide
uuggcugggucucacccaa

SEQ ID NO: 2411363 - RNA, 19 nt, Artificial Sequence
  Description of Artificial Sequence: Synthetic oligonucleotide
agguacucacaaugaaaga

SEQ ID NO: 2411364 - RNA, 19 nt, Artificial Sequence
  Description of Artificial Sequence: Synthetic oligonucleotide
uucaccucggcgagcagau

SEQ ID NO: 2411365 - RNA, 19 nt, Artificial Sequence
  Description of Artificial Sequence: Synthetic oligonucleotide
cauguaggggucugcuuug

SEQ ID NO: 2411366 - RNA, 19 nt, Artificial Sequence
  Description of Artificial Sequence: Synthetic oligonucleotide
ugaaagaggcacguggcuu

SEQ ID NO: 2411367 - RNA, 19 nt, Artificial Sequence
  Description of Artificial Sequence: Synthetic oligonucleotide
gaggcagacacaccaagua

SEQ ID NO: 2411368 - RNA, 19 nt, Artificial Sequence
  Description of Artificial Sequence: Synthetic oligonucleotide
guagaaauacugaacuucu

SEQ ID NO: 2411369 - RNA, 19 nt, Artificial Sequence
  Description of Artificial Sequence: Synthetic oligonucleotide
aagcaguugcgugugugga

SEQ ID NO: 2411370 - RNA, 19 nt, Artificial Sequence
  Description of Artificial Sequence: Synthetic oligonucleotide
caaguacucuuuacccuug

SEQ ID NO: 2411371 - RNA, 19 nt, Artificial Sequence
  Description of Artificial Sequence: Synthetic oligonucleotide
cugcgguguaagcaguugc

SEQ ID NO: 2411372 - RNA, 19 nt, Artificial Sequence
  Description of Artificial Sequence: Synthetic oligonucleotide
cccaugaccaaggucaugg

SEQ ID NO: 2411373 - RNA, 19 nt, Artificial Sequence
  Description of Artificial Sequence: Synthetic oligonucleotide
aagcuagcaccucccuugu

SEQ ID NO: 2411374 - RNA, 19 nt, Artificial Sequence
  Description of Artificial Sequence: Synthetic oligonucleotide
gaucauauucuucccugua

SEQ ID NO: 2411375 - RNA, 19 nt, Artificial Sequence
  Description of Artificial Sequence: Synthetic oligonucleotide
augcuuccacguuucaccu

SEQ ID NO: 2411376 - RNA, 19 nt, Artificial Sequence
  Description of Artificial Sequence: Synthetic oligonucleotide
ucccuugugcguuuaugaa

SEQ ID NO: 2411377 - RNA, 19 nt, Artificial Sequence
  Description of Artificial Sequence: Synthetic oligonucleotide
uagcugaucccuguucaug

SEQ ID NO: 2411378 - RNA, 19 nt, Artificial Sequence
  Description of Artificial Sequence: Synthetic oligonucleotide
uggaucaguagaguauaaa

SEQ ID NO: 2411379 - RNA, 19 nt, Artificial Sequence
  Description of Artificial Sequence: Synthetic oligonucleotide
uuggaucaguagaguauaa

SEQ ID NO: 2411380 - RNA, 19 nt, Artificial Sequence
  Description of Artificial Sequence: Synthetic oligonucleotide
ucaugcuuccacguuucac

SEQ ID NO: 2411381 - RNA, 19 nt, Artificial Sequence
  Description of Artificial Sequence: Synthetic oligonucleotide
gggcacaucagguuuggug

SEQ ID NO: 2411382 - RNA, 19 nt, Artificial Sequence
  Description of Artificial Sequence: Synthetic oligonucleotide
cagaaggccucugugauca

SEQ ID NO: 2411383 - RNA, 19 nt, Artificial Sequence
  Description of Artificial Sequence: Synthetic oligonucleotide
auacagguacucacaauga

SEQ ID NO: 2411384 - RNA, 19 nt, Artificial Sequence
  Description of Artificial Sequence: Synthetic oligonucleotide
aucuugucuugaccguuug

SEQ ID NO: 2411385 - RNA, 19 nt, Artificial Sequence
  Description of Artificial Sequence: Synthetic oligonucleotide
agcauaucucgcucacuga

SEQ ID NO: 2411386 - RNA, 19 nt, Artificial Sequence
  Description of Artificial Sequence: Synthetic oligonucleotide
uucgaacgagguagccugc

SEQ ID NO: 2411387 - RNA, 19 nt, Artificial Sequence
  Description of Artificial Sequence: Synthetic oligonucleotide
cacguuucaccucggcgag

SEQ ID NO: 2411388 - RNA, 19 nt, Artificial Sequence
  Description of Artificial Sequence: Synthetic oligonucleotide
acagguacucacaaugaaa

SEQ ID NO: 2411389 - RNA, 19 nt, Artificial Sequence
  Description of Artificial Sequence: Synthetic oligonucleotide
cuugugcguuuaugaaccc

SEQ ID NO: 2411390 - RNA, 19 nt, Artificial Sequence
  Description of Artificial Sequence: Synthetic oligonucleotide
cuuuacccuugauaacauc

SEQ ID NO: 2411391 - RNA, 19 nt, Artificial Sequence
  Description of Artificial Sequence: Synthetic oligonucleotide
ccacuaugaaaucuucagc

SEQ ID NO: 2411392 - RNA, 19 nt, Artificial Sequence
  Description of Artificial Sequence: Synthetic oligonucleotide
agaguccggcaaucugaac

SEQ ID NO: 2411393 - RNA, 19 nt, Artificial Sequence
  Description of Artificial Sequence: Synthetic oligonucleotide
uuagcugaucccuguucau

SEQ ID NO: 2411394 - RNA, 19 nt, Artificial Sequence
  Description of Artificial Sequence: Synthetic oligonucleotide
gaucuuuagcucuggcugu

SEQ ID NO: 2411395 - RNA, 19 nt, Artificial Sequence
  Description of Artificial Sequence: Synthetic oligonucleotide
ucugcgguguaagcaguug

SEQ ID NO: 2411396 - RNA, 19 nt, Artificial Sequence
  Description of Artificial Sequence: Synthetic oligonucleotide
gcuugcaggggcaagcuag

SEQ ID NO: 2411397 - RNA, 19 nt, Artificial Sequence
  Description of Artificial Sequence: Synthetic oligonucleotide
agacaaauuuggaucagua

SEQ ID NO: 2411398 - RNA, 19 nt, Artificial Sequence
  Description of Artificial Sequence: Synthetic oligonucleotide
uugugcguuuaugaaccca

SEQ ID NO: 2411399 - RNA, 19 nt, Artificial Sequence
  Description of Artificial Sequence: Synthetic oligonucleotide
aaggccucugugaucauua

SEQ ID NO: 2411400 - RNA, 19 nt, Artificial Sequence
  Description of Artificial Sequence: Synthetic oligonucleotide
auguaggggucugcuuugc

SEQ ID NO: 2411401 - RNA, 19 nt, Artificial Sequence
  Description of Artificial Sequence: Synthetic oligonucleotide
uuccacguuucaccucggc

SEQ ID NO: 2411402 - RNA, 19 nt, Artificial Sequence
  Description of Artificial Sequence: Synthetic oligonucleotide
uucaugcuuccacguuuca

SEQ ID NO: 2411403 - RNA, 19 nt, Artificial Sequence
  Description of Artificial Sequence: Synthetic oligonucleotide
uugcugauuuuauguuggu

SEQ ID NO: 2411404 - RNA, 19 nt, Artificial Sequence
  Description of Artificial Sequence: Synthetic oligonucleotide
uguaagcaguugcgugugu

SEQ ID NO: 2411405 - RNA, 19 nt, Artificial Sequence
  Description of Artificial Sequence: Synthetic oligonucleotide
ucauuauaucgaugagguu

SEQ ID NO: 2411406 - RNA, 19 nt, Artificial Sequence
  Description of Artificial Sequence: Synthetic oligonucleotide
ucggcgagcagaugggaua

SEQ ID NO: 2411407 - RNA, 19 nt, Artificial Sequence
  Description of Artificial Sequence: Synthetic oligonucleotide
cagagcauaucucgcucac

SEQ ID NO: 2411408 - RNA, 19 nt, Artificial Sequence
  Description of Artificial Sequence: Synthetic oligonucleotide
uacaggggcacaucagguu

SEQ ID NO: 2411409 - RNA, 19 nt, Artificial Sequence
  Description of Artificial Sequence: Synthetic oligonucleotide
cugcaaguguucgaacgag

SEQ ID NO: 2411410 - RNA, 19 nt, Artificial Sequence
  Description of Artificial Sequence: Synthetic oligonucleotide
aaucuugucuugaccguuu

SEQ ID NO: 2411411 - RNA, 19 nt, Artificial Sequence
  Description of Artificial Sequence: Synthetic oligonucleotide
gcagaugggauaaaucuuc

SEQ ID NO: 2411412 - RNA, 19 nt, Artificial Sequence
  Description of Artificial Sequence: Synthetic oligonucleotide
ucucacccaaauacuugua

SEQ ID NO: 2411413 - RNA, 19 nt, Artificial Sequence
  Description of Artificial Sequence: Synthetic oligonucleotide
acaucuuagcugaucccug

SEQ ID NO: 2411414 - RNA, 19 nt, Artificial Sequence
  Description of Artificial Sequence: Synthetic oligonucleotide
ggcaaucugaacacagagc

SEQ ID NO: 2411415 - RNA, 19 nt, Artificial Sequence
  Description of Artificial Sequence: Synthetic oligonucleotide
uacggcauucgauguuccu

SEQ ID NO: 2411416 - RNA, 19 nt, Artificial Sequence
  Description of Artificial Sequence: Synthetic oligonucleotide
auacaggggcacaucaggu

SEQ ID NO: 2411417 - RNA, 19 nt, Artificial Sequence
  Description of Artificial Sequence: Synthetic oligonucleotide
gucucacccaaauacuugu

SEQ ID NO: 2411418 - RNA, 19 nt, Artificial Sequence
  Description of Artificial Sequence: Synthetic oligonucleotide
gcguuuaugaacccauaga

SEQ ID NO: 2411419 - RNA, 19 nt, Artificial Sequence
  Description of Artificial Sequence: Synthetic oligonucleotide
guguaagcaguugcgugug

SEQ ID NO: 2411420 - RNA, 19 nt, Artificial Sequence
  Description of Artificial Sequence: Synthetic oligonucleotide
cucgcucacugaucuuuag

SEQ ID NO: 2411421 - RNA, 19 nt, Artificial Sequence
  Description of Artificial Sequence: Synthetic oligonucleotide
aaucuccauguaggggucu

SEQ ID NO: 2411422 - RNA, 19 nt, Artificial Sequence
  Description of Artificial Sequence: Synthetic oligonucleotide
auaugagaaaauggcccau

SEQ ID NO: 2411423 - RNA, 19 nt, Artificial Sequence
  Description of Artificial Sequence: Synthetic oligonucleotide
uacugaacuucuuccccuu

SEQ ID NO: 2411424 - RNA, 19 nt, Artificial Sequence
  Description of Artificial Sequence: Synthetic oligonucleotide
ucucgcucacugaucuuua

SEQ ID NO: 2411425 - RNA, 19 nt, Artificial Sequence
  Description of Artificial Sequence: Synthetic oligonucleotide
ggcuguagaaauacugaac

SEQ ID NO: 2411426 - RNA, 19 nt, Artificial Sequence
  Description of Artificial Sequence: Synthetic oligonucleotide
agaggcagacacaccaagu

SEQ ID NO: 2411427 - RNA, 19 nt, Artificial Sequence
  Description of Artificial Sequence: Synthetic oligonucleotide
gguguaagcaguugcgugu

SEQ ID NO: 2411428 - RNA, 19 nt, Artificial Sequence
  Description of Artificial Sequence: Synthetic oligonucleotide
guuauccgucagcuuggug

SEQ ID NO: 2411429 - RNA, 19 nt, Artificial Sequence
  Description of Artificial Sequence: Synthetic oligonucleotide
cccuguucaugcuuccacg

SEQ ID NO: 2411430 - RNA, 19 nt, Artificial Sequence
  Description of Artificial Sequence: Synthetic oligonucleotide
aucucgcucacugaucuuu

SEQ ID NO: 2411431 - RNA, 19 nt, Artificial Sequence
  Description of Artificial Sequence: Synthetic oligonucleotide
acucacaaugaaagaggca

SEQ ID NO: 2411432 - RNA, 19 nt, Artificial Sequence
  Description of Artificial Sequence: Synthetic oligonucleotide
ucuugaccguuuggcuggg

SEQ ID NO: 2411433 - RNA, 19 nt, Artificial Sequence
  Description of Artificial Sequence: Synthetic oligonucleotide
accaaggucauggcagagu

SEQ ID NO: 2411434 - RNA, 19 nt, Artificial Sequence
  Description of Artificial Sequence: Synthetic oligonucleotide
caggggcacaucagguuug

SEQ ID NO: 2411435 - RNA, 19 nt, Artificial Sequence
  Description of Artificial Sequence: Synthetic oligonucleotide
ucucgggaagcugaucaua

SEQ ID NO: 2411436 - RNA, 19 nt, Artificial Sequence
  Description of Artificial Sequence: Synthetic oligonucleotide
guccgaguucauuagaauu

SEQ ID NO: 2411437 - RNA, 19 nt, Artificial Sequence
  Description of Artificial Sequence: Synthetic oligonucleotide
ugauagguccgaguucauu

SEQ ID NO: 2411438 - RNA, 19 nt, Artificial Sequence
  Description of Artificial Sequence: Synthetic oligonucleotide
ggucucacccaaauacuug

SEQ ID NO: 2411439 - RNA, 19 nt, Artificial Sequence
  Description of Artificial Sequence: Synthetic oligonucleotide
ucuccauguaggggucugc

SEQ ID NO: 2411440 - RNA, 19 nt, Artificial Sequence
  Description of Artificial Sequence: Synthetic oligonucleotide
cuaugaaaucuucagccuu

SEQ ID NO: 2411441 - RNA, 19 nt, Artificial Sequence
  Description of Artificial Sequence: Synthetic oligonucleotide
uguuauccgucagcuuggu

SEQ ID NO: 2411442 - RNA, 19 nt, Artificial Sequence
  Description of Artificial Sequence: Synthetic oligonucleotide
ggucauggcagaguccggc

SEQ ID NO: 2411443 - RNA, 19 nt, Artificial Sequence
  Description of Artificial Sequence: Synthetic oligonucleotide
cuuccacguuucaccucgg

SEQ ID NO: 2411444 - RNA, 19 nt, Artificial Sequence
  Description of Artificial Sequence: Synthetic oligonucleotide
aucuuagcugaucccuguu

SEQ ID NO: 2411445 - RNA, 19 nt, Artificial Sequence
  Description of Artificial Sequence: Synthetic oligonucleotide
aggggucugcuuugcagaa

SEQ ID NO: 2411446 - RNA, 19 nt, Artificial Sequence
  Description of Artificial Sequence: Synthetic oligonucleotide
ugggcauacaggggcacau

SEQ ID NO: 2411447 - RNA, 19 nt, Artificial Sequence
  Description of Artificial Sequence: Synthetic oligonucleotide
ccacguuucaccucggcga

SEQ ID NO: 2411448 - RNA, 19 nt, Artificial Sequence
  Description of Artificial Sequence: Synthetic oligonucleotide
gcguguguggaacauaaua

SEQ ID NO: 2411449 - RNA, 19 nt, Artificial Sequence
  Description of Artificial Sequence: Synthetic oligonucleotide
agguccgaguucauuagaa

SEQ ID NO: 2411450 - RNA, 19 nt, Artificial Sequence
  Description of Artificial Sequence: Synthetic oligonucleotide
ggcagaguccggcaaucug

SEQ ID NO: 2411451 - RNA, 19 nt, Artificial Sequence
  Description of Artificial Sequence: Synthetic oligonucleotide
ucgaacgagguagccugcu

SEQ ID NO: 2411452 - RNA, 19 nt, Artificial Sequence
  Description of Artificial Sequence: Synthetic oligonucleotide
gaccguuuggcugggucuc

SEQ ID NO: 2411453 - RNA, 19 nt, Artificial Sequence
  Description of Artificial Sequence: Synthetic oligonucleotide
uuauaucgaugagguugcu

SEQ ID NO: 2411454 - RNA, 19 nt, Artificial Sequence
  Description of Artificial Sequence: Synthetic oligonucleotide
caucagguuugguguuaac

SEQ ID NO: 2411455 - RNA, 19 nt, Artificial Sequence
  Description of Artificial Sequence: Synthetic oligonucleotide
acgagguagccugcuaggu

SEQ ID NO: 2411456 - RNA, 19 nt, Artificial Sequence
  Description of Artificial Sequence: Synthetic oligonucleotide
acggcauucgauguuccuu

SEQ ID NO: 2411457 - RNA, 19 nt, Artificial Sequence
  Description of Artificial Sequence: Synthetic oligonucleotide
accucggcgagcagauggg

SEQ ID NO: 2411458 - RNA, 19 nt, Artificial Sequence
  Description of Artificial Sequence: Synthetic oligonucleotide
acguuucaccucggcgagc

SEQ ID NO: 2411459 - RNA, 19 nt, Artificial Sequence
  Description of Artificial Sequence: Synthetic oligonucleotide
ugcguguguggaacauaau

SEQ ID NO: 2411460 - RNA, 19 nt, Artificial Sequence
  Description of Artificial Sequence: Synthetic oligonucleotide
gauuacggcauucgauguu

SEQ ID NO: 2411461 - RNA, 19 nt, Artificial Sequence
  Description of Artificial Sequence: Synthetic oligonucleotide
agagcauaucucgcucacu

SEQ ID NO: 2411462 - RNA, 19 nt, Artificial Sequence
  Description of Artificial Sequence: Synthetic oligonucleotide
ugcuuccacguuucaccuc

SEQ ID NO: 2411463 - RNA, 19 nt, Artificial Sequence
  Description of Artificial Sequence: Synthetic oligonucleotide
auagaggcagacacaccaa

SEQ ID NO: 2411464 - RNA, 19 nt, Artificial Sequence
  Description of Artificial Sequence: Synthetic oligonucleotide
guguucgaacgagguagcc

SEQ ID NO: 2411465 - RNA, 19 nt, Artificial Sequence
  Description of Artificial Sequence: Synthetic oligonucleotide
gccucugugaucauuauau

SEQ ID NO: 2411466 - RNA, 19 nt, Artificial Sequence
  Description of Artificial Sequence: Synthetic oligonucleotide
guggaacauaauaucuucu

SEQ ID NO: 2411467 - RNA, 19 nt, Artificial Sequence
  Description of Artificial Sequence: Synthetic oligonucleotide
ucgggaagcugaucauauu

SEQ ID NO: 2411468 - RNA, 19 nt, Artificial Sequence
  Description of Artificial Sequence: Synthetic oligonucleotide
acaucagguuugguguuaa

SEQ ID NO: 2411469 - RNA, 19 nt, Artificial Sequence
  Description of Artificial Sequence: Synthetic oligonucleotide
ccccagaaucuccauguag

SEQ ID NO: 2411470 - RNA, 19 nt, Artificial Sequence
  Description of Artificial Sequence: Synthetic oligonucleotide
augucucgggaagcugauc

SEQ ID NO: 2411471 - RNA, 19 nt, Artificial Sequence
  Description of Artificial Sequence: Synthetic oligonucleotide
cacaaugaaagaggcacgu

SEQ ID NO: 2411472 - RNA, 19 nt, Artificial Sequence
  Description of Artificial Sequence: Synthetic oligonucleotide
gcaguugcguguguggaac

SEQ ID NO: 2411473 - RNA, 19 nt, Artificial Sequence
  Description of Artificial Sequence: Synthetic oligonucleotide
uggcuugcaggggcaagcu

SEQ ID NO: 2411474 - RNA, 19 nt, Artificial Sequence
  Description of Artificial Sequence: Synthetic oligonucleotide
uagcaccucccuugugcgu

SEQ ID NO: 2411475 - RNA, 19 nt, Artificial Sequence
  Description of Artificial Sequence: Synthetic oligonucleotide
cagaguccggcaaucugaa

SEQ ID NO: 2411476 - RNA, 19 nt, Artificial Sequence
  Description of Artificial Sequence: Synthetic oligonucleotide
cugugaucauuauaucgau

SEQ ID NO: 2411477 - RNA, 19 nt, Artificial Sequence
  Description of Artificial Sequence: Synthetic oligonucleotide
agcaccucccuugugcguu

SEQ ID NO: 2411478 - RNA, 19 nt, Artificial Sequence
  Description of Artificial Sequence: Synthetic oligonucleotide
agcuagcaccucccuugug

SEQ ID NO: 2411479 - RNA, 19 nt, Artificial Sequence
  Description of Artificial Sequence: Synthetic oligonucleotide
caucuuagcugaucccugu

SEQ ID NO: 2411480 - RNA, 19 nt, Artificial Sequence
  Description of Artificial Sequence: Synthetic oligonucleotide
cucgggaagcugaucauau

SEQ ID NO: 2411481 - RNA, 19 nt, Artificial Sequence
  Description of Artificial Sequence: Synthetic oligonucleotide
cucacccaaauacuuguau

SEQ ID NO: 2411482 - RNA, 19 nt, Artificial Sequence
  Description of Artificial Sequence: Synthetic oligonucleotide
cgagcagaugggauaaauc

SEQ ID NO: 2411483 - RNA, 19 nt, Artificial Sequence
  Description of Artificial Sequence: Synthetic oligonucleotide
uggcagaguccggcaaucu

SEQ ID NO: 2411484 - RNA, 19 nt, Artificial Sequence
  Description of Artificial Sequence: Synthetic oligonucleotide
guuucaccucggcgagcag

SEQ ID NO: 2411485 - RNA, 19 nt, Artificial Sequence
  Description of Artificial Sequence: Synthetic oligonucleotide
aucuuuagcucuggcuguu

SEQ ID NO: 2411486 - RNA, 19 nt, Artificial Sequence
  Description of Artificial Sequence: Synthetic oligonucleotide
ccauagaggcagacacacc

SEQ ID NO: 2411487 - RNA, 19 nt, Artificial Sequence
  Description of Artificial Sequence: Synthetic oligonucleotide
aagaggcacguggcuugca

SEQ ID NO: 2411488 - RNA, 19 nt, Artificial Sequence
  Description of Artificial Sequence: Synthetic oligonucleotide
ucuuuagcucuggcuguuu

SEQ ID NO: 2411489 - RNA, 19 nt, Artificial Sequence
  Description of Artificial Sequence: Synthetic oligonucleotide
gggauaaaucuuccaucaa

SEQ ID NO: 2411490 - RNA, 19 nt, Artificial Sequence
  Description of Artificial Sequence: Synthetic oligonucleotide
gcauaucucgcucacugau

SEQ ID NO: 2411491 - RNA, 19 nt, Artificial Sequence
  Description of Artificial Sequence: Synthetic oligonucleotide
gccucagacaaauuuggau

SEQ ID NO: 2411492 - RNA, 19 nt, Artificial Sequence
  Description of Artificial Sequence: Synthetic oligonucleotide
gguuugguguuaacaaugu

SEQ ID NO: 2411493 - RNA, 19 nt, Artificial Sequence
  Description of Artificial Sequence: Synthetic oligonucleotide
aucccuguucaugcuucca

SEQ ID NO: 2411494 - RNA, 19 nt, Artificial Sequence
  Description of Artificial Sequence: Synthetic oligonucleotide
aggccucugugaucauuau

SEQ ID NO: 2411495 - RNA, 19 nt, Artificial Sequence
  Description of Artificial Sequence: Synthetic oligonucleotide
cgguguaagcaguugcgug

SEQ ID NO: 2411496 - RNA, 19 nt, Artificial Sequence
  Description of Artificial Sequence: Synthetic oligonucleotide
gguagccugcuagguaccc

SEQ ID NO: 2411497 - RNA, 19 nt, Artificial Sequence
  Description of Artificial Sequence: Synthetic oligonucleotide
aggucauggcagaguccgg

SEQ ID NO: 2411498 - RNA, 19 nt, Artificial Sequence
  Description of Artificial Sequence: Synthetic oligonucleotide
ccaggaaaauguuauccgu

SEQ ID NO: 2411499 - RNA, 19 nt, Artificial Sequence
  Description of Artificial Sequence: Synthetic oligonucleotide
caaucugaacacagagcau

SEQ ID NO: 2411500 - RNA, 19 nt, Artificial Sequence
  Description of Artificial Sequence: Synthetic oligonucleotide
gcaaguguucgaacgaggu

SEQ ID NO: 2411501 - RNA, 19 nt, Artificial Sequence
  Description of Artificial Sequence: Synthetic oligonucleotide
gcagaaggccucugugauc

SEQ ID NO: 2411502 - RNA, 19 nt, Artificial Sequence
  Description of Artificial Sequence: Synthetic oligonucleotide
caguugcguguguggaaca

SEQ ID NO: 2411503 - RNA, 19 nt, Artificial Sequence
  Description of Artificial Sequence: Synthetic oligonucleotide
ggguugagcccauaguuuu

SEQ ID NO: 2411504 - RNA, 19 nt, Artificial Sequence
  Description of Artificial Sequence: Synthetic oligonucleotide
cgaguucauuagaauuaac

SEQ ID NO: 2411505 - RNA, 19 nt, Artificial Sequence
  Description of Artificial Sequence: Synthetic oligonucleotide
guugcguguguggaacaua

SEQ ID NO: 2411506 - RNA, 19 nt, Artificial Sequence
  Description of Artificial Sequence: Synthetic oligonucleotide
auccgucagcuuggugaag

SEQ ID NO: 2411507 - RNA, 19 nt, Artificial Sequence
  Description of Artificial Sequence: Synthetic oligonucleotide
ucaccucggcgagcagaug

SEQ ID NO: 2411508 - RNA, 19 nt, Artificial Sequence
  Description of Artificial Sequence: Synthetic oligonucleotide
augaacccauagaggcaga

SEQ ID NO: 2411509 - RNA, 19 nt, Artificial Sequence
  Description of Artificial Sequence: Synthetic oligonucleotide
ccgucagcuuggugaaggc

SEQ ID NO: 2411510 - RNA, 19 nt, Artificial Sequence
  Description of Artificial Sequence: Synthetic oligonucleotide
gcauucgauguuccuuaaa

SEQ ID NO: 2411511 - RNA, 19 nt, Artificial Sequence
  Description of Artificial Sequence: Synthetic oligonucleotide
uggcugggucucacccaaa

SEQ ID NO: 2411512 - RNA, 19 nt, Artificial Sequence
  Description of Artificial Sequence: Synthetic oligonucleotide
ccaaguacucuuuacccuu

SEQ ID NO: 2411513 - RNA, 19 nt, Artificial Sequence
  Description of Artificial Sequence: Synthetic oligonucleotide
gguccgaguucauuagaau

SEQ ID NO: 2411514 - RNA, 19 nt, Artificial Sequence
  Description of Artificial Sequence: Synthetic oligonucleotide
ggcauucgauguuccuuaa

SEQ ID NO: 2411515 - RNA, 19 nt, Artificial Sequence
  Description of Artificial Sequence: Synthetic oligonucleotide
accucccuugugcguuuau

SEQ ID NO: 2411516 - RNA, 19 nt, Artificial Sequence
  Description of Artificial Sequence: Synthetic oligonucleotide
ccggcaaucugaacacaga

SEQ ID NO: 2411517 - RNA, 19 nt, Artificial Sequence
  Description of Artificial Sequence: Synthetic oligonucleotide
ccucccuugugcguuuaug

SEQ ID NO: 2411518 - RNA, 19 nt, Artificial Sequence
  Description of Artificial Sequence: Synthetic oligonucleotide
ggccucugugaucauuaua

SEQ ID NO: 2411519 - RNA, 19 nt, Artificial Sequence
  Description of Artificial Sequence: Synthetic oligonucleotide
gucucgggaagcugaucau

SEQ ID NO: 2411520 - RNA, 19 nt, Artificial Sequence
  Description of Artificial Sequence: Synthetic oligonucleotide
augauagguccgaguucau

SEQ ID NO: 2411521 - RNA, 19 nt, Artificial Sequence
  Description of Artificial Sequence: Synthetic oligonucleotide
cuccauguaggggucugcu

SEQ ID NO: 2411522 - RNA, 19 nt, Artificial Sequence
  Description of Artificial Sequence: Synthetic oligonucleotide
cguuuggcugggucucacc

SEQ ID NO: 2411523 - RNA, 19 nt, Artificial Sequence
  Description of Artificial Sequence: Synthetic oligonucleotide
ccgaguucauuagaauuaa

SEQ ID NO: 2411524 - RNA, 19 nt, Artificial Sequence
  Description of Artificial Sequence: Synthetic oligonucleotide
ccuguucaugcuuccacgu

SEQ ID NO: 2411525 - RNA, 19 nt, Artificial Sequence
  Description of Artificial Sequence: Synthetic oligonucleotide
cugaucccuguucaugcuu

SEQ ID NO: 2411526 - RNA, 19 nt, Artificial Sequence
  Description of Artificial Sequence: Synthetic oligonucleotide
cucggcgagcagaugggau

SEQ ID NO: 2411527 - RNA, 19 nt, Artificial Sequence
  Description of Artificial Sequence: Synthetic oligonucleotide
gugcguuuaugaacccaua

SEQ ID NO: 2411528 - RNA, 19 nt, Artificial Sequence
  Description of Artificial Sequence: Synthetic oligonucleotide
gcugaucccuguucaugcu

SEQ ID NO: 2411529 - RNA, 19 nt, Artificial Sequence
  Description of Artificial Sequence: Synthetic oligonucleotide
cggcauucgauguuccuua

SEQ ID NO: 2411530 - RNA, 19 nt, Artificial Sequence
  Description of Artificial Sequence: Synthetic oligonucleotide
gggcauacaggggcacauc

SEQ ID NO: 2411531 - RNA, 19 nt, Artificial Sequence
  Description of Artificial Sequence: Synthetic oligonucleotide
gcaagcuagcaccucccuu

SEQ ID NO: 2411532 - RNA, 19 nt, Artificial Sequence
  Description of Artificial Sequence: Synthetic oligonucleotide
cucugcgguguaagcaguu

SEQ ID NO: 2411533 - RNA, 19 nt, Artificial Sequence
  Description of Artificial Sequence: Synthetic oligonucleotide
cgauguuccuuaaaauauu

SEQ ID NO: 2411534 - RNA, 19 nt, Artificial Sequence
  Description of Artificial Sequence: Synthetic oligonucleotide
gcgguguaagcaguugcgu

SEQ ID NO: 2411535 - RNA, 19 nt, Artificial Sequence
  Description of Artificial Sequence: Synthetic oligonucleotide
gcccaugaccaaggucaug

SEQ ID NO: 2411536 - RNA, 19 nt, Artificial Sequence
  Description of Artificial Sequence: Synthetic oligonucleotide
ccuugauaacauccacuau

SEQ ID NO: 2411537 - RNA, 19 nt, Artificial Sequence
  Description of Artificial Sequence: Synthetic oligonucleotide
gcacaucagguuugguguu

SEQ ID NO: 2411538 - RNA, 19 nt, Artificial Sequence
  Description of Artificial Sequence: Synthetic oligonucleotide
gcgagcagaugggauaaau

SEQ ID NO: 2411539 - RNA, 19 nt, Artificial Sequence
  Description of Artificial Sequence: Synthetic oligonucleotide
ccguuuggcugggucucac

SEQ ID NO: 2411540 - RNA, 19 nt, Artificial Sequence
  Description of Artificial Sequence: Synthetic oligonucleotide
ccagauguucaaacaucuu

SEQ ID NO: 2411541 - RNA, 19 nt, Artificial Sequence
  Description of Artificial Sequence: Synthetic oligonucleotide
gcucugcgguguaagcagu

SEQ ID NO: 2411542 - RNA, 19 nt, Artificial Sequence
  Description of Artificial Sequence: Synthetic oligonucleotide
ccucggcgagcagauggga

SEQ ID NO: 2411543 - RNA, 19 nt, Artificial Sequence
  Description of Artificial Sequence: Synthetic oligonucleotide
ggcgagcagaugggauaaa

SEQ ID NO: 2411544 - RNA, 19 nt, Artificial Sequence
  Description of Artificial Sequence: Synthetic oligonucleotide
cgaacgagguagccugcua

SEQ ID NO: 2411545 - RNA, 19 nt, Artificial Sequence
  Description of Artificial Sequence: Synthetic oligonucleotide
cuugaccguuuggcugggu

SEQ ID NO: 2411546 - RNA, 19 nt, Artificial Sequence
  Description of Artificial Sequence: Synthetic oligonucleotide
cggcgagcagaugggauaa

SEQ ID NO: 2411547 - RNA, 19 nt, Artificial Sequence
  Description of Artificial Sequence: Synthetic oligonucleotide
caccucccuugugcguuua

SEQ ID NO: 2411548 - RNA, 19 nt, Artificial Sequence
  Description of Artificial Sequence: Synthetic oligonucleotide
ggcccaugaccaaggucau

SEQ ID NO: 2411549 - RNA, 19 nt, Artificial Sequence
  Description of Artificial Sequence: Synthetic oligonucleotide
gcaccucccuugugcguuu

SEQ ID NO: 2411550 - RNA, 19 nt, Artificial Sequence
  Description of Artificial Sequence: Synthetic oligonucleotide
ggggcacaucagguuuggu

SEQ ID NO: 2411551 - RNA, 19 nt, Artificial Sequence
  Description of Artificial Sequence: Synthetic oligonucleotide
aaauuaacuaacuugaguc

SEQ ID NO: 2411552 - RNA, 19 nt, Artificial Sequence
  Description of Artificial Sequence: Synthetic oligonucleotide
ugguaaauaacaaugaccc

SEQ ID NO: 2411553 - RNA, 19 nt, Artificial Sequence
  Description of Artificial Sequence: Synthetic oligonucleotide
ugucauaacaaucugaaca

SEQ ID NO: 2411554 - RNA, 19 nt, Artificial Sequence
  Description of Artificial Sequence: Synthetic oligonucleotide
ucagauauaauuugaagca

SEQ ID NO: 2411555 - RNA, 19 nt, Artificial Sequence
  Description of Artificial Sequence: Synthetic oligonucleotide
ugaaauauuucauugcuca

SEQ ID NO: 2411556 - RNA, 19 nt, Artificial Sequence
  Description of Artificial Sequence: Synthetic oligonucleotide
uguauggacaguauucucg

SEQ ID NO: 2411557 - RNA, 19 nt, Artificial Sequence
  Description of Artificial Sequence: Synthetic oligonucleotide
aaaaguguggucauguaac

SEQ ID NO: 2411558 - RNA, 19 nt, Artificial Sequence
  Description of Artificial Sequence: Synthetic oligonucleotide
aauauagguguauggacag

SEQ ID NO: 2411559 - RNA, 19 nt, Artificial Sequence
  Description of Artificial Sequence: Synthetic oligonucleotide
caaagaguaaugcaaaugc

SEQ ID NO: 2411560 - RNA, 19 nt, Artificial Sequence
  Description of Artificial Sequence: Synthetic oligonucleotide
aaaguguggucauguaacc

SEQ ID NO: 2411561 - RNA, 19 nt, Artificial Sequence
  Description of Artificial Sequence: Synthetic oligonucleotide
ucucaugugguaaauaaca

SEQ ID NO: 2411562 - RNA, 19 nt, Artificial Sequence
  Description of Artificial Sequence: Synthetic oligonucleotide
gauacaaagaaguacccac

SEQ ID NO: 2411563 - RNA, 19 nt, Artificial Sequence
  Description of Artificial Sequence: Synthetic oligonucleotide
caugugguaaauaacaaug

SEQ ID NO: 2411564 - RNA, 19 nt, Artificial Sequence
  Description of Artificial Sequence: Synthetic oligonucleotide
aaagaaguacccacgacac

SEQ ID NO: 2411565 - RNA, 19 nt, Artificial Sequence
  Description of Artificial Sequence: Synthetic oligonucleotide
aauagcugggaaugucugc

SEQ ID NO: 2411566 - RNA, 19 nt, Artificial Sequence
  Description of Artificial Sequence: Synthetic oligonucleotide
uauuucauugcucaucugu

SEQ ID NO: 2411567 - RNA, 19 nt, Artificial Sequence
  Description of Artificial Sequence: Synthetic oligonucleotide
uagcaaauuaacuaacuug

SEQ ID NO: 2411568 - RNA, 19 nt, Artificial Sequence
  Description of Artificial Sequence: Synthetic oligonucleotide
acaaaaugucucuuugggc

SEQ ID NO: 2411569 - RNA, 19 nt, Artificial Sequence
  Description of Artificial Sequence: Synthetic oligonucleotide
uuguguauguauccguugg

SEQ ID NO: 2411570 - RNA, 19 nt, Artificial Sequence
  Description of Artificial Sequence: Synthetic oligonucleotide
gucauaacaaucugaacag

SEQ ID NO: 2411571 - RNA, 19 nt, Artificial Sequence
  Description of Artificial Sequence: Synthetic oligonucleotide
aaugcaaaugcugacuuug

SEQ ID NO: 2411572 - RNA, 19 nt, Artificial Sequence
  Description of Artificial Sequence: Synthetic oligonucleotide
gggaaagacaaauagcugg

SEQ ID NO: 2411573 - RNA, 19 nt, Artificial Sequence
  Description of Artificial Sequence: Synthetic oligonucleotide
ugguuugugggaaaggcag

SEQ ID NO: 2411574 - RNA, 19 nt, Artificial Sequence
  Description of Artificial Sequence: Synthetic oligonucleotide
ugagguagcaaauuaacua

SEQ ID NO: 2411575 - RNA, 19 nt, Artificial Sequence
  Description of Artificial Sequence: Synthetic oligonucleotide
aaugucugcaggcaaauua

SEQ ID NO: 2411576 - RNA, 19 nt, Artificial Sequence
  Description of Artificial Sequence: Synthetic oligonucleotide
uaaauaacaaugacccaga

SEQ ID NO: 2411577 - RNA, 19 nt, Artificial Sequence
  Description of Artificial Sequence: Synthetic oligonucleotide
ucuaaaacauccuccucag

SEQ ID NO: 2411578 - RNA, 19 nt, Artificial Sequence
  Description of Artificial Sequence: Synthetic oligonucleotide
acuaacuugagucucugcu

SEQ ID NO: 2411579 - RNA, 19 nt, Artificial Sequence
  Description of Artificial Sequence: Synthetic oligonucleotide
ugugguaaauaacaaugac

SEQ ID NO: 2411580 - RNA, 19 nt, Artificial Sequence
  Description of Artificial Sequence: Synthetic oligonucleotide
uugcucaucugugagaagg

SEQ ID NO: 2411581 - RNA, 19 nt, Artificial Sequence
  Description of Artificial Sequence: Synthetic oligonucleotide
aucugaacagaucacccgg

SEQ ID NO: 2411582 - RNA, 19 nt, Artificial Sequence
  Description of Artificial Sequence: Synthetic oligonucleotide
ugcaggcaaauuaaguucc

SEQ ID NO: 2411583 - RNA, 19 nt, Artificial Sequence
  Description of Artificial Sequence: Synthetic oligonucleotide
caaaaugucucuuugggca

SEQ ID NO: 2411584 - RNA, 19 nt, Artificial Sequence
  Description of Artificial Sequence: Synthetic oligonucleotide
uucauugcucaucugugag

SEQ ID NO: 2411585 - RNA, 19 nt, Artificial Sequence
  Description of Artificial Sequence: Synthetic oligonucleotide
aucuugaauguuccgaguc

SEQ ID NO: 2411586 - RNA, 19 nt, Artificial Sequence
  Description of Artificial Sequence: Synthetic oligonucleotide
aaagacaaauagcugggaa

SEQ ID NO: 2411587 - RNA, 19 nt, Artificial Sequence
  Description of Artificial Sequence: Synthetic oligonucleotide
auuaacuaacuugagucuc

SEQ ID NO: 2411588 - RNA, 19 nt, Artificial Sequence
  Description of Artificial Sequence: Synthetic oligonucleotide
ugaagcaaagaguaaugca

SEQ ID NO: 2411589 - RNA, 19 nt, Artificial Sequence
  Description of Artificial Sequence: Synthetic oligonucleotide
uguggucagauauaauuug

SEQ ID NO: 2411590 - RNA, 19 nt, Artificial Sequence
  Description of Artificial Sequence: Synthetic oligonucleotide
aauuaaguuccucuguauu

SEQ ID NO: 2411591 - RNA, 19 nt, Artificial Sequence
  Description of Artificial Sequence: Synthetic oligonucleotide
ucugagguagcaaauuaac

SEQ ID NO: 2411592 - RNA, 19 nt, Artificial Sequence
  Description of Artificial Sequence: Synthetic oligonucleotide
auaaguugcugaugacugc

SEQ ID NO: 2411593 - RNA, 19 nt, Artificial Sequence
  Description of Artificial Sequence: Synthetic oligonucleotide
agcaaauuaacuaacuuga

SEQ ID NO: 2411594 - RNA, 19 nt, Artificial Sequence
  Description of Artificial Sequence: Synthetic oligonucleotide
uguggugacucaaggacag

SEQ ID NO: 2411595 - RNA, 19 nt, Artificial Sequence
  Description of Artificial Sequence: Synthetic oligonucleotide
caaugacccagauacaaag

SEQ ID NO: 2411596 - RNA, 19 nt, Artificial Sequence
  Description of Artificial Sequence: Synthetic oligonucleotide
aacuaacuugagucucugc

SEQ ID NO: 2411597 - RNA, 19 nt, Artificial Sequence
  Description of Artificial Sequence: Synthetic oligonucleotide
uguauguauccguuggcag

SEQ ID NO: 2411598 - RNA, 19 nt, Artificial Sequence
  Description of Artificial Sequence: Synthetic oligonucleotide
gaacagaucacccggguac

SEQ ID NO: 2411599 - RNA, 19 nt, Artificial Sequence
  Description of Artificial Sequence: Synthetic oligonucleotide
agaaguacccacgacacag

SEQ ID NO: 2411600 - RNA, 19 nt, Artificial Sequence
  Description of Artificial Sequence: Synthetic oligonucleotide
uaucagacuuuccagagua

SEQ ID NO: 2411601 - RNA, 19 nt, Artificial Sequence
  Description of Artificial Sequence: Synthetic oligonucleotide
ucuugaauguuccgagucc

SEQ ID NO: 2411602 - RNA, 19 nt, Artificial Sequence
  Description of Artificial Sequence: Synthetic oligonucleotide
guauguauccguuggcagg

SEQ ID NO: 2411603 - RNA, 19 nt, Artificial Sequence
  Description of Artificial Sequence: Synthetic oligonucleotide
guauggacaguauucucgg

SEQ ID NO: 2411604 - RNA, 19 nt, Artificial Sequence
  Description of Artificial Sequence: Synthetic oligonucleotide
uacaaagaaguacccacga

SEQ ID NO: 2411605 - RNA, 19 nt, Artificial Sequence
  Description of Artificial Sequence: Synthetic oligonucleotide
uguugaugguaucagacuu

SEQ ID NO: 2411606 - RNA, 19 nt, Artificial Sequence
  Description of Artificial Sequence: Synthetic oligonucleotide
uguagucuucauuucuucc

SEQ ID NO: 2411607 - RNA, 19 nt, Artificial Sequence
  Description of Artificial Sequence: Synthetic oligonucleotide
aaauuaaguuccucuguau

SEQ ID NO: 2411608 - RNA, 19 nt, Artificial Sequence
  Description of Artificial Sequence: Synthetic oligonucleotide
uguucauguuccaccagag

SEQ ID NO: 2411609 - RNA, 19 nt, Artificial Sequence
  Description of Artificial Sequence: Synthetic oligonucleotide
cuggucuaaaacauccucc

SEQ ID NO: 2411610 - RNA, 19 nt, Artificial Sequence
  Description of Artificial Sequence: Synthetic oligonucleotide
aauaacaaugacccagaua

SEQ ID NO: 2411611 - RNA, 19 nt, Artificial Sequence
  Description of Artificial Sequence: Synthetic oligonucleotide
aaaucaaaaguguggucau

SEQ ID NO: 2411612 - RNA, 19 nt, Artificial Sequence
  Description of Artificial Sequence: Synthetic oligonucleotide
ucaacucugagguagcaaa

SEQ ID NO: 2411613 - RNA, 19 nt, Artificial Sequence
  Description of Artificial Sequence: Synthetic oligonucleotide
ucucuguucauguuccacc

SEQ ID NO: 2411614 - RNA, 19 nt, Artificial Sequence
  Description of Artificial Sequence: Synthetic oligonucleotide
gugguaaauaacaaugacc

SEQ ID NO: 2411615 - RNA, 19 nt, Artificial Sequence
  Description of Artificial Sequence: Synthetic oligonucleotide
ucugaacagaucacccggg

SEQ ID NO: 2411616 - RNA, 19 nt, Artificial Sequence
  Description of Artificial Sequence: Synthetic oligonucleotide
ugacccagauacaaagaag

SEQ ID NO: 2411617 - RNA, 19 nt, Artificial Sequence
  Description of Artificial Sequence: Synthetic oligonucleotide
uuaacuaacuugagucucu

SEQ ID NO: 2411618 - RNA, 19 nt, Artificial Sequence
  Description of Artificial Sequence: Synthetic oligonucleotide
ucugcaggcaaauuaaguu

SEQ ID NO: 2411619 - RNA, 19 nt, Artificial Sequence
  Description of Artificial Sequence: Synthetic oligonucleotide
ugugcccucacuaccaucu

SEQ ID NO: 2411620 - RNA, 19 nt, Artificial Sequence
  Description of Artificial Sequence: Synthetic oligonucleotide
aacaaugacccagauacaa

SEQ ID NO: 2411621 - RNA, 19 nt, Artificial Sequence
  Description of Artificial Sequence: Synthetic oligonucleotide
gaagcaaagaguaaugcaa

SEQ ID NO: 2411622 - RNA, 19 nt, Artificial Sequence
  Description of Artificial Sequence: Synthetic oligonucleotide
ucauguaaccuguggcagg

SEQ ID NO: 2411623 - RNA, 19 nt, Artificial Sequence
  Description of Artificial Sequence: Synthetic oligonucleotide
cucuuugggcaucugaacc

SEQ ID NO: 2411624 - RNA, 19 nt, Artificial Sequence
  Description of Artificial Sequence: Synthetic oligonucleotide
uucaugugcccucacuacc

SEQ ID NO: 2411625 - RNA, 19 nt, Artificial Sequence
  Description of Artificial Sequence: Synthetic oligonucleotide
uccucuguauuugugauac

SEQ ID NO: 2411626 - RNA, 19 nt, Artificial Sequence
  Description of Artificial Sequence: Synthetic oligonucleotide
ugugauacuguagucuuca

SEQ ID NO: 2411627 - RNA, 19 nt, Artificial Sequence
  Description of Artificial Sequence: Synthetic oligonucleotide
auaacaaucugaacagauc

SEQ ID NO: 2411628 - RNA, 19 nt, Artificial Sequence
  Description of Artificial Sequence: Synthetic oligonucleotide
aacagaucacccggguacc

SEQ ID NO: 2411629 - RNA, 19 nt, Artificial Sequence
  Description of Artificial Sequence: Synthetic oligonucleotide
agacaaauagcugggaaug

SEQ ID NO: 2411630 - RNA, 19 nt, Artificial Sequence
  Description of Artificial Sequence: Synthetic oligonucleotide
agaguagcagcaucuuggg

SEQ ID NO: 2411631 - RNA, 19 nt, Artificial Sequence
  Description of Artificial Sequence: Synthetic oligonucleotide
caauauagguguauggaca

SEQ ID NO: 2411632 - RNA, 19 nt, Artificial Sequence
  Description of Artificial Sequence: Synthetic oligonucleotide
aaggcagacagcucucucu

SEQ ID NO: 2411633 - RNA, 19 nt, Artificial Sequence
  Description of Artificial Sequence: Synthetic oligonucleotide
ucuuugggcaucugaacca

SEQ ID NO: 2411634 - RNA, 19 nt, Artificial Sequence
  Description of Artificial Sequence: Synthetic oligonucleotide
ggcaucugaaccaugacgg

SEQ ID NO: 2411635 - RNA, 19 nt, Artificial Sequence
  Description of Artificial Sequence: Synthetic oligonucleotide
aaagaguaaugcaaaugcu

SEQ ID NO: 2411636 - RNA, 19 nt, Artificial Sequence
  Description of Artificial Sequence: Synthetic oligonucleotide
cuucucaacucugagguag

SEQ ID NO: 2411637 - RNA, 19 nt, Artificial Sequence
  Description of Artificial Sequence: Synthetic oligonucleotide
caaagaaguacccacgaca

SEQ ID NO: 2411638 - RNA, 19 nt, Artificial Sequence
  Description of Artificial Sequence: Synthetic oligonucleotide
uacuguagucuucauuucu

SEQ ID NO: 2411639 - RNA, 19 nt, Artificial Sequence
  Description of Artificial Sequence: Synthetic oligonucleotide
aauguuccgaguccuacua

SEQ ID NO: 2411640 - RNA, 19 nt, Artificial Sequence
  Description of Artificial Sequence: Synthetic oligonucleotide
auuugaagcaaagaguaau

SEQ ID NO: 2411641 - RNA, 19 nt, Artificial Sequence
  Description of Artificial Sequence: Synthetic oligonucleotide
aggcauaaguugcugauga

SEQ ID NO: 2411642 - RNA, 19 nt, Artificial Sequence
  Description of Artificial Sequence: Synthetic oligonucleotide
cuaccaucuugaauguucc

SEQ ID NO: 2411643 - RNA, 19 nt, Artificial Sequence
  Description of Artificial Sequence: Synthetic oligonucleotide
uguguauguauccguuggc

SEQ ID NO: 2411644 - RNA, 19 nt, Artificial Sequence
  Description of Artificial Sequence: Synthetic oligonucleotide
aggcaaauuaaguuccucu

SEQ ID NO: 2411645 - RNA, 19 nt, Artificial Sequence
  Description of Artificial Sequence: Synthetic oligonucleotide
uuucauugcucaucuguga

SEQ ID NO: 2411646 - RNA, 19 nt, Artificial Sequence
  Description of Artificial Sequence: Synthetic oligonucleotide
auugucauaacaaucugaa

SEQ ID NO: 2411647 - RNA, 19 nt, Artificial Sequence
  Description of Artificial Sequence: Synthetic oligonucleotide
aguuccucuguauuuguga

SEQ ID NO: 2411648 - RNA, 19 nt, Artificial Sequence
  Description of Artificial Sequence: Synthetic oligonucleotide
auacaaagaaguacccacg

SEQ ID NO: 2411649 - RNA, 19 nt, Artificial Sequence
  Description of Artificial Sequence: Synthetic oligonucleotide
aaguaggccuacuucucug

SEQ ID NO: 2411650 - RNA, 19 nt, Artificial Sequence
  Description of Artificial Sequence: Synthetic oligonucleotide
ucaugugguaaauaacaau

SEQ ID NO: 2411651 - RNA, 19 nt, Artificial Sequence
  Description of Artificial Sequence: Synthetic oligonucleotide
aaaagggaaguaggccuac

SEQ ID NO: 2411652 - RNA, 19 nt, Artificial Sequence
  Description of Artificial Sequence: Synthetic oligonucleotide
uccgaguccuacuaaaauc

SEQ ID NO: 2411653 - RNA, 19 nt, Artificial Sequence
  Description of Artificial Sequence: Synthetic oligonucleotide
agaguaaugcaaaugcuga

SEQ ID NO: 2411654 - RNA, 19 nt, Artificial Sequence
  Description of Artificial Sequence: Synthetic oligonucleotide
agguguauggacaguauuc

SEQ ID NO: 2411655 - RNA, 19 nt, Artificial Sequence
  Description of Artificial Sequence: Synthetic oligonucleotide
agcaauauagguguaugga

SEQ ID NO: 2411656 - RNA, 19 nt, Artificial Sequence
  Description of Artificial Sequence: Synthetic oligonucleotide
caugguuugugggaaaggc

SEQ ID NO: 2411657 - RNA, 19 nt, Artificial Sequence
  Description of Artificial Sequence: Synthetic oligonucleotide
cagcaauauagguguaugg

SEQ ID NO: 2411658 - RNA, 19 nt, Artificial Sequence
  Description of Artificial Sequence: Synthetic oligonucleotide
uaaaaucaaaagugugguc

SEQ ID NO: 2411659 - RNA, 19 nt, Artificial Sequence
  Description of Artificial Sequence: Synthetic oligonucleotide
uguauccguuggcaggagg

SEQ ID NO: 2411660 - RNA, 19 nt, Artificial Sequence
  Description of Artificial Sequence: Synthetic oligonucleotide
cagauacaaagaaguaccc

SEQ ID NO: 2411661 - RNA, 19 nt, Artificial Sequence
  Description of Artificial Sequence: Synthetic oligonucleotide
acaaauagcugggaauguc

SEQ ID NO: 2411662 - RNA, 19 nt, Artificial Sequence
  Description of Artificial Sequence: Synthetic oligonucleotide
auauaauuugaagcaaaga

SEQ ID NO: 2411663 - RNA, 19 nt, Artificial Sequence
  Description of Artificial Sequence: Synthetic oligonucleotide
ucaugugcccucacuacca

SEQ ID NO: 2411664 - RNA, 19 nt, Artificial Sequence
  Description of Artificial Sequence: Synthetic oligonucleotide
ggucagauauaauuugaag

SEQ ID NO: 2411665 - RNA, 19 nt, Artificial Sequence
  Description of Artificial Sequence: Synthetic oligonucleotide
guauuugugauacuguagu

SEQ ID NO: 2411666 - RNA, 19 nt, Artificial Sequence
  Description of Artificial Sequence: Synthetic oligonucleotide
uuggcauugucauaacaau

SEQ ID NO: 2411667 - RNA, 19 nt, Artificial Sequence
  Description of Artificial Sequence: Synthetic oligonucleotide
uauguauccguuggcagga

SEQ ID NO: 2411668 - RNA, 19 nt, Artificial Sequence
  Description of Artificial Sequence: Synthetic oligonucleotide
aguccuacuaaaaucaaaa

SEQ ID NO: 2411669 - RNA, 19 nt, Artificial Sequence
  Description of Artificial Sequence: Synthetic oligonucleotide
guuacuguagccuuccugu

SEQ ID NO: 2411670 - RNA, 19 nt, Artificial Sequence
  Description of Artificial Sequence: Synthetic oligonucleotide
uggcauugucauaacaauc

SEQ ID NO: 2411671 - RNA, 19 nt, Artificial Sequence
  Description of Artificial Sequence: Synthetic oligonucleotide
uggucagauauaauuugaa

SEQ ID NO: 2411672 - RNA, 19 nt, Artificial Sequence
  Description of Artificial Sequence: Synthetic oligonucleotide
uauuugugauacuguaguc

SEQ ID NO: 2411673 - RNA, 19 nt, Artificial Sequence
  Description of Artificial Sequence: Synthetic oligonucleotide
agacuuuccagaguagcag

SEQ ID NO: 2411674 - RNA, 19 nt, Artificial Sequence
  Description of Artificial Sequence: Synthetic oligonucleotide
ucugaaccaugacggcugg

SEQ ID NO: 2411675 - RNA, 19 nt, Artificial Sequence
  Description of Artificial Sequence: Synthetic oligonucleotide
acagcucucucucuguuga

SEQ ID NO: 2411676 - RNA, 19 nt, Artificial Sequence
  Description of Artificial Sequence: Synthetic oligonucleotide
ugccuuuguguauguaucc

SEQ ID NO: 2411677 - RNA, 19 nt, Artificial Sequence
  Description of Artificial Sequence: Synthetic oligonucleotide
gaguaaugcaaaugcugac

SEQ ID NO: 2411678 - RNA, 19 nt, Artificial Sequence
  Description of Artificial Sequence: Synthetic oligonucleotide
cucaugcauccucucaugg

SEQ ID NO: 2411679 - RNA, 19 nt, Artificial Sequence
  Description of Artificial Sequence: Synthetic oligonucleotide
uauucucggguccuugagu

SEQ ID NO: 2411680 - RNA, 19 nt, Artificial Sequence
  Description of Artificial Sequence: Synthetic oligonucleotide
uauagguguauggacagua

SEQ ID NO: 2411681 - RNA, 19 nt, Artificial Sequence
  Description of Artificial Sequence: Synthetic oligonucleotide
ggcaaauuaaguuccucug

SEQ ID NO: 2411682 - RNA, 19 nt, Artificial Sequence
  Description of Artificial Sequence: Synthetic oligonucleotide
cuucucaugugguaaauaa

SEQ ID NO: 2411683 - RNA, 19 nt, Artificial Sequence
  Description of Artificial Sequence: Synthetic oligonucleotide
ugccucagaguuacuguag

SEQ ID NO: 2411684 - RNA, 19 nt, Artificial Sequence
  Description of Artificial Sequence: Synthetic oligonucleotide
agaagggaagcuucucaug

SEQ ID NO: 2411685 - RNA, 19 nt, Artificial Sequence
  Description of Artificial Sequence: Synthetic oligonucleotide
uguuccgaguccuacuaaa

SEQ ID NO: 2411686 - RNA, 19 nt, Artificial Sequence
  Description of Artificial Sequence: Synthetic oligonucleotide
ugauacuguagucuucauu

SEQ ID NO: 2411687 - RNA, 19 nt, Artificial Sequence
  Description of Artificial Sequence: Synthetic oligonucleotide
cauugucauaacaaucuga

SEQ ID NO: 2411688 - RNA, 19 nt, Artificial Sequence
  Description of Artificial Sequence: Synthetic oligonucleotide
gaugugacaaaaugucucu

SEQ ID NO: 2411689 - RNA, 19 nt, Artificial Sequence
  Description of Artificial Sequence: Synthetic oligonucleotide
ucauugcucaucugugaga

SEQ ID NO: 2411690 - RNA, 19 nt, Artificial Sequence
  Description of Artificial Sequence: Synthetic oligonucleotide
gugacucaaggacaggcug

SEQ ID NO: 2411691 - RNA, 19 nt, Artificial Sequence
  Description of Artificial Sequence: Synthetic oligonucleotide
agguagcaaauuaacuaac

SEQ ID NO: 2411692 - RNA, 19 nt, Artificial Sequence
  Description of Artificial Sequence: Synthetic oligonucleotide
aagaaguacccacgacaca

SEQ ID NO: 2411693 - RNA, 19 nt, Artificial Sequence
  Description of Artificial Sequence: Synthetic oligonucleotide
caugacggcuggacgaggg

SEQ ID NO: 2411694 - RNA, 19 nt, Artificial Sequence
  Description of Artificial Sequence: Synthetic oligonucleotide
gcaauauagguguauggac

SEQ ID NO: 2411695 - RNA, 19 nt, Artificial Sequence
  Description of Artificial Sequence: Synthetic oligonucleotide
aaugacccagauacaaaga

SEQ ID NO: 2411696 - RNA, 19 nt, Artificial Sequence
  Description of Artificial Sequence: Synthetic oligonucleotide
uggugacucaaggacaggc

SEQ ID NO: 2411697 - RNA, 19 nt, Artificial Sequence
  Description of Artificial Sequence: Synthetic oligonucleotide
aacuugagucucugcucag

SEQ ID NO: 2411698 - RNA, 19 nt, Artificial Sequence
  Description of Artificial Sequence: Synthetic oligonucleotide
uggacaguauucucggguc

SEQ ID NO: 2411699 - RNA, 19 nt, Artificial Sequence
  Description of Artificial Sequence: Synthetic oligonucleotide
cuucaugugcccucacuac

SEQ ID NO: 2411700 - RNA, 19 nt, Artificial Sequence
  Description of Artificial Sequence: Synthetic oligonucleotide
cauguuccaccagaggccg

SEQ ID NO: 2411701 - RNA, 19 nt, Artificial Sequence
  Description of Artificial Sequence: Synthetic oligonucleotide
gggaggaugugacaaaaug

SEQ ID NO: 2411702 - RNA, 19 nt, Artificial Sequence
  Description of Artificial Sequence: Synthetic oligonucleotide
acaguguuccuugggaaag

SEQ ID NO: 2411703 - RNA, 19 nt, Artificial Sequence
  Description of Artificial Sequence: Synthetic oligonucleotide
uugucauaacaaucugaac

SEQ ID NO: 2411704 - RNA, 19 nt, Artificial Sequence
  Description of Artificial Sequence: Synthetic oligonucleotide
agauacaaagaaguaccca

SEQ ID NO: 2411705 - RNA, 19 nt, Artificial Sequence
  Description of Artificial Sequence: Synthetic oligonucleotide
ugaauguuccgaguccuac

SEQ ID NO: 2411706 - RNA, 19 nt, Artificial Sequence
  Description of Artificial Sequence: Synthetic oligonucleotide
uuccgaguccuacuaaaau

SEQ ID NO: 2411707 - RNA, 19 nt, Artificial Sequence
  Description of Artificial Sequence: Synthetic oligonucleotide
ucacccggguaccagugcc

SEQ ID NO: 2411708 - RNA, 19 nt, Artificial Sequence
  Description of Artificial Sequence: Synthetic oligonucleotide
agauauaauuugaagcaaa

SEQ ID NO: 2411709 - RNA, 19 nt, Artificial Sequence
  Description of Artificial Sequence: Synthetic oligonucleotide
gggcaucugaaccaugacg

SEQ ID NO: 2411710 - RNA, 19 nt, Artificial Sequence
  Description of Artificial Sequence: Synthetic oligonucleotide
uuggcaggaggcauaaguu

SEQ ID NO: 2411711 - RNA, 19 nt, Artificial Sequence
  Description of Artificial Sequence: Synthetic oligonucleotide
ggcugaaauauuucauugc

SEQ ID NO: 2411712 - RNA, 19 nt, Artificial Sequence
  Description of Artificial Sequence: Synthetic oligonucleotide
uaacaaugacccagauaca

SEQ ID NO: 2411713 - RNA, 19 nt, Artificial Sequence
  Description of Artificial Sequence: Synthetic oligonucleotide
auucucggguccuugagua

SEQ ID NO: 2411714 - RNA, 19 nt, Artificial Sequence
  Description of Artificial Sequence: Synthetic oligonucleotide
uaaguuccucuguauuugu

SEQ ID NO: 2411715 - RNA, 19 nt, Artificial Sequence
  Description of Artificial Sequence: Synthetic oligonucleotide
aguguuccuugggaaagac

SEQ ID NO: 2411716 - RNA, 19 nt, Artificial Sequence
  Description of Artificial Sequence: Synthetic oligonucleotide
guuggcauugucauaacaa

SEQ ID NO: 2411717 - RNA, 19 nt, Artificial Sequence
  Description of Artificial Sequence: Synthetic oligonucleotide
aguugcugaugacugccug

SEQ ID NO: 2411718 - RNA, 19 nt, Artificial Sequence
  Description of Artificial Sequence: Synthetic oligonucleotide
aguauucucggguccuuga

SEQ ID NO: 2411719 - RNA, 19 nt, Artificial Sequence
  Description of Artificial Sequence: Synthetic oligonucleotide
caaauuaacuaacuugagu

SEQ ID NO: 2411720 - RNA, 19 nt, Artificial Sequence
  Description of Artificial Sequence: Synthetic oligonucleotide
ucauaacaaucugaacaga

SEQ ID NO: 2411721 - RNA, 19 nt, Artificial Sequence
  Description of Artificial Sequence: Synthetic oligonucleotide
uugcugaugacugccugcc

SEQ ID NO: 2411722 - RNA, 19 nt, Artificial Sequence
  Description of Artificial Sequence: Synthetic oligonucleotide
guauucucggguccuugag

SEQ ID NO: 2411723 - RNA, 19 nt, Artificial Sequence
  Description of Artificial Sequence: Synthetic oligonucleotide
ugaacagaucacccgggua

SEQ ID NO: 2411724 - RNA, 19 nt, Artificial Sequence
  Description of Artificial Sequence: Synthetic oligonucleotide
augugguaaauaacaauga

SEQ ID NO: 2411725 - RNA, 19 nt, Artificial Sequence
  Description of Artificial Sequence: Synthetic oligonucleotide
gacccagauacaaagaagu

SEQ ID NO: 2411726 - RNA, 19 nt, Artificial Sequence
  Description of Artificial Sequence: Synthetic oligonucleotide
gugguucagacaguguucc

SEQ ID NO: 2411727 - RNA, 19 nt, Artificial Sequence
  Description of Artificial Sequence: Synthetic oligonucleotide
guauccguuggcaggaggc

SEQ ID NO: 2411728 - RNA, 19 nt, Artificial Sequence
  Description of Artificial Sequence: Synthetic oligonucleotide
uucggugccuuuguguaug

SEQ ID NO: 2411729 - RNA, 19 nt, Artificial Sequence
  Description of Artificial Sequence: Synthetic oligonucleotide
caaaaguguggucauguaa

SEQ ID NO: 2411730 - RNA, 19 nt, Artificial Sequence
  Description of Artificial Sequence: Synthetic oligonucleotide
gacagcucucucucuguug

SEQ ID NO: 2411731 - RNA, 19 nt, Artificial Sequence
  Description of Artificial Sequence: Synthetic oligonucleotide
aguaggccuacuucucugu

SEQ ID NO: 2411732 - RNA, 19 nt, Artificial Sequence
  Description of Artificial Sequence: Synthetic oligonucleotide
ugcauccucucaugguuug

SEQ ID NO: 2411733 - RNA, 19 nt, Artificial Sequence
  Description of Artificial Sequence: Synthetic oligonucleotide
guccuugaguagauguugg

SEQ ID NO: 2411734 - RNA, 19 nt, Artificial Sequence
  Description of Artificial Sequence: Synthetic oligonucleotide
ggaaaagggaaguaggccu

SEQ ID NO: 2411735 - RNA, 19 nt, Artificial Sequence
  Description of Artificial Sequence: Synthetic oligonucleotide
cuaaaacauccuccucagc

SEQ ID NO: 2411736 - RNA, 19 nt, Artificial Sequence
  Description of Artificial Sequence: Synthetic oligonucleotide
guuggcaggaggcauaagu

SEQ ID NO: 2411737 - RNA, 19 nt, Artificial Sequence
  Description of Artificial Sequence: Synthetic oligonucleotide
ucaaaaguguggucaugua

SEQ ID NO: 2411738 - RNA, 19 nt, Artificial Sequence
  Description of Artificial Sequence: Synthetic oligonucleotide
uguggucauguaaccugug

SEQ ID NO: 2411739 - RNA, 19 nt, Artificial Sequence
  Description of Artificial Sequence: Synthetic oligonucleotide
cuguagucuucauuucuuc

SEQ ID NO: 2411740 - RNA, 19 nt, Artificial Sequence
  Description of Artificial Sequence: Synthetic oligonucleotide
agacaguguuccuugggaa

SEQ ID NO: 2411741 - RNA, 19 nt, Artificial Sequence
  Description of Artificial Sequence: Synthetic oligonucleotide
cauaacaaucugaacagau

SEQ ID NO: 2411742 - RNA, 19 nt, Artificial Sequence
  Description of Artificial Sequence: Synthetic oligonucleotide
uugaguagauguuggcauu

SEQ ID NO: 2411743 - RNA, 19 nt, Artificial Sequence
  Description of Artificial Sequence: Synthetic oligonucleotide
guaccagugccaccuucgg

SEQ ID NO: 2411744 - RNA, 19 nt, Artificial Sequence
  Description of Artificial Sequence: Synthetic oligonucleotide
agcuguggugacucaagga

SEQ ID NO: 2411745 - RNA, 19 nt, Artificial Sequence
  Description of Artificial Sequence: Synthetic oligonucleotide
auguuggcauugucauaac

SEQ ID NO: 2411746 - RNA, 19 nt, Artificial Sequence
  Description of Artificial Sequence: Synthetic oligonucleotide
ccaucuugaauguuccgag

SEQ ID NO: 2411747 - RNA, 19 nt, Artificial Sequence
  Description of Artificial Sequence: Synthetic oligonucleotide
guuugugggaaaggcagac

SEQ ID NO: 2411748 - RNA, 19 nt, Artificial Sequence
  Description of Artificial Sequence: Synthetic oligonucleotide
cuguauuugugauacugua

SEQ ID NO: 2411749 - RNA, 19 nt, Artificial Sequence
  Description of Artificial Sequence: Synthetic oligonucleotide
ucucggguccuugaguaga

SEQ ID NO: 2411750 - RNA, 19 nt, Artificial Sequence
  Description of Artificial Sequence: Synthetic oligonucleotide
cagacuuuccagaguagca

SEQ ID NO: 2411751 - RNA, 19 nt, Artificial Sequence
  Description of Artificial Sequence: Synthetic oligonucleotide
uccuugggaaagacaaaua

SEQ ID NO: 2411752 - RNA, 19 nt, Artificial Sequence
  Description of Artificial Sequence: Synthetic oligonucleotide
uuugggcaucugaaccaug

SEQ ID NO: 2411753 - RNA, 19 nt, Artificial Sequence
  Description of Artificial Sequence: Synthetic oligonucleotide
accuucggugccuuugugu

SEQ ID NO: 2411754 - RNA, 19 nt, Artificial Sequence
  Description of Artificial Sequence: Synthetic oligonucleotide
guaaccuguggcaggacac

SEQ ID NO: 2411755 - RNA, 19 nt, Artificial Sequence
  Description of Artificial Sequence: Synthetic oligonucleotide
gaggcauaaguugcugaug

SEQ ID NO: 2411756 - RNA, 19 nt, Artificial Sequence
  Description of Artificial Sequence: Synthetic oligonucleotide
cucuguucauguuccacca

SEQ ID NO: 2411757 - RNA, 19 nt, Artificial Sequence
  Description of Artificial Sequence: Synthetic oligonucleotide
uuugugggaaaggcagaca

SEQ ID NO: 2411758 - RNA, 19 nt, Artificial Sequence
  Description of Artificial Sequence: Synthetic oligonucleotide
gcucagauuucuuccuggg

SEQ ID NO: 2411759 - RNA, 19 nt, Artificial Sequence
  Description of Artificial Sequence: Synthetic oligonucleotide
aaguuccucuguauuugug

SEQ ID NO: 2411760 - RNA, 19 nt, Artificial Sequence
  Description of Artificial Sequence: Synthetic oligonucleotide
uguagccuuccugugguuc

SEQ ID NO: 2411761 - RNA, 19 nt, Artificial Sequence
  Description of Artificial Sequence: Synthetic oligonucleotide
uucucggguccuugaguag

SEQ ID NO: 2411762 - RNA, 19 nt, Artificial Sequence
  Description of Artificial Sequence: Synthetic oligonucleotide
caaauagcugggaaugucu

SEQ ID NO: 2411763 - RNA, 19 nt, Artificial Sequence
  Description of Artificial Sequence: Synthetic oligonucleotide
uaggccuacuucucuguuc

SEQ ID NO: 2411764 - RNA, 19 nt, Artificial Sequence
  Description of Artificial Sequence: Synthetic oligonucleotide
auugcucaucugugagaag

SEQ ID NO: 2411765 - RNA, 19 nt, Artificial Sequence
  Description of Artificial Sequence: Synthetic oligonucleotide
guguauguauccguuggca

SEQ ID NO: 2411766 - RNA, 19 nt, Artificial Sequence
  Description of Artificial Sequence: Synthetic oligonucleotide
gcugggaaugucugcaggc

SEQ ID NO: 2411767 - RNA, 19 nt, Artificial Sequence
  Description of Artificial Sequence: Synthetic oligonucleotide
aucugugagaagggaagcu

SEQ ID NO: 2411768 - RNA, 19 nt, Artificial Sequence
  Description of Artificial Sequence: Synthetic oligonucleotide
guagccuuccugugguuca

SEQ ID NO: 2411769 - RNA, 19 nt, Artificial Sequence
  Description of Artificial Sequence: Synthetic oligonucleotide
augucugcaggcaaauuaa

SEQ ID NO: 2411770 - RNA, 19 nt, Artificial Sequence
  Description of Artificial Sequence: Synthetic oligonucleotide
gaaguaggccuacuucucu

SEQ ID NO: 2411771 - RNA, 19 nt, Artificial Sequence
  Description of Artificial Sequence: Synthetic oligonucleotide
cccagauacaaagaaguac

SEQ ID NO: 2411772 - RNA, 19 nt, Artificial Sequence
  Description of Artificial Sequence: Synthetic oligonucleotide
gguccuugaguagauguug

SEQ ID NO: 2411773 - RNA, 19 nt, Artificial Sequence
  Description of Artificial Sequence: Synthetic oligonucleotide
uugaauguuccgaguccua

SEQ ID NO: 2411774 - RNA, 19 nt, Artificial Sequence
  Description of Artificial Sequence: Synthetic oligonucleotide
gaaaagggaaguaggccua

SEQ ID NO: 2411775 - RNA, 19 nt, Artificial Sequence
  Description of Artificial Sequence: Synthetic oligonucleotide
augugcccucacuaccauc

SEQ ID NO: 2411776 - RNA, 19 nt, Artificial Sequence
  Description of Artificial Sequence: Synthetic oligonucleotide
cuucucaugcauccucuca

SEQ ID NO: 2411777 - RNA, 19 nt, Artificial Sequence
  Description of Artificial Sequence: Synthetic oligonucleotide
cuuggggaggaugugacaa

SEQ ID NO: 2411778 - RNA, 19 nt, Artificial Sequence
  Description of Artificial Sequence: Synthetic oligonucleotide
gaauguuccgaguccuacu

SEQ ID NO: 2411779 - RNA, 19 nt, Artificial Sequence
  Description of Artificial Sequence: Synthetic oligonucleotide
uggacgagggucuggucua

SEQ ID NO: 2411780 - RNA, 19 nt, Artificial Sequence
  Description of Artificial Sequence: Synthetic oligonucleotide
agucucugcucagauuucu

SEQ ID NO: 2411781 - RNA, 19 nt, Artificial Sequence
  Description of Artificial Sequence: Synthetic oligonucleotide
ccgaguccuacuaaaauca

SEQ ID NO: 2411782 - RNA, 19 nt, Artificial Sequence
  Description of Artificial Sequence: Synthetic oligonucleotide
gaucacccggguaccagug

SEQ ID NO: 2411783 - RNA, 19 nt, Artificial Sequence
  Description of Artificial Sequence: Synthetic oligonucleotide
uggggaggaugugacaaaa

SEQ ID NO: 2411784 - RNA, 19 nt, Artificial Sequence
  Description of Artificial Sequence: Synthetic oligonucleotide
cauccucucaugguuugug

SEQ ID NO: 2411785 - RNA, 19 nt, Artificial Sequence
  Description of Artificial Sequence: Synthetic oligonucleotide
ucucaacucugagguagca

SEQ ID NO: 2411786 - RNA, 19 nt, Artificial Sequence
  Description of Artificial Sequence: Synthetic oligonucleotide
ucucaugguuugugggaaa

SEQ ID NO: 2411787 - RNA, 19 nt, Artificial Sequence
  Description of Artificial Sequence: Synthetic oligonucleotide
cagauauaauuugaagcaa

SEQ ID NO: 2411788 - RNA, 19 nt, Artificial Sequence
  Description of Artificial Sequence: Synthetic oligonucleotide
aaguugcugaugacugccu

SEQ ID NO: 2411789 - RNA, 19 nt, Artificial Sequence
  Description of Artificial Sequence: Synthetic oligonucleotide
cauguaaccuguggcagga

SEQ ID NO: 2411790 - RNA, 19 nt, Artificial Sequence
  Description of Artificial Sequence: Synthetic oligonucleotide
gauuucuuccugggccagc

SEQ ID NO: 2411791 - RNA, 19 nt, Artificial Sequence
  Description of Artificial Sequence: Synthetic oligonucleotide
gucucuuugggcaucugaa

SEQ ID NO: 2411792 - RNA, 19 nt, Artificial Sequence
  Description of Artificial Sequence: Synthetic oligonucleotide
ucuucucaacucugaggua

SEQ ID NO: 2411793 - RNA, 19 nt, Artificial Sequence
  Description of Artificial Sequence: Synthetic oligonucleotide
uuggggaggaugugacaaa

SEQ ID NO: 2411794 - RNA, 19 nt, Artificial Sequence
  Description of Artificial Sequence: Synthetic oligonucleotide
gaguccuacuaaaaucaaa

SEQ ID NO: 2411795 - RNA, 19 nt, Artificial Sequence
  Description of Artificial Sequence: Synthetic oligonucleotide
acaaugacccagauacaaa

SEQ ID NO: 2411796 - RNA, 19 nt, Artificial Sequence
  Description of Artificial Sequence: Synthetic oligonucleotide
uccguuggcaggaggcaua

SEQ ID NO: 2411797 - RNA, 19 nt, Artificial Sequence
  Description of Artificial Sequence: Synthetic oligonucleotide
uugagucucugcucagauu

SEQ ID NO: 2411798 - RNA, 19 nt, Artificial Sequence
  Description of Artificial Sequence: Synthetic oligonucleotide
auauagguguauggacagu

SEQ ID NO: 2411799 - RNA, 19 nt, Artificial Sequence
  Description of Artificial Sequence: Synthetic oligonucleotide
gaucucucucugccagcug

SEQ ID NO: 2411800 - RNA, 19 nt, Artificial Sequence
  Description of Artificial Sequence: Synthetic oligonucleotide
agauguuggcauugucaua

SEQ ID NO: 2411801 - RNA, 19 nt, Artificial Sequence
  Description of Artificial Sequence: Synthetic oligonucleotide
aucagacuuuccagaguag

SEQ ID NO: 2411802 - RNA, 19 nt, Artificial Sequence
  Description of Artificial Sequence: Synthetic oligonucleotide
acgagggucuggucuaaaa

SEQ ID NO: 2411803 - RNA, 19 nt, Artificial Sequence
  Description of Artificial Sequence: Synthetic oligonucleotide
cuguugaugguaucagacu

SEQ ID NO: 2411804 - RNA, 19 nt, Artificial Sequence
  Description of Artificial Sequence: Synthetic oligonucleotide
gcaaauuaaguuccucugu

SEQ ID NO: 2411805 - RNA, 19 nt, Artificial Sequence
  Description of Artificial Sequence: Synthetic oligonucleotide
agcuucucaugcauccucu

SEQ ID NO: 2411806 - RNA, 19 nt, Artificial Sequence
  Description of Artificial Sequence: Synthetic oligonucleotide
aacauccuccucagcaaua

SEQ ID NO: 2411807 - RNA, 19 nt, Artificial Sequence
  Description of Artificial Sequence: Synthetic oligonucleotide
acccggguaccagugccac

SEQ ID NO: 2411808 - RNA, 19 nt, Artificial Sequence
  Description of Artificial Sequence: Synthetic oligonucleotide
ggaggaugugacaaaaugu

SEQ ID NO: 2411809 - RNA, 19 nt, Artificial Sequence
  Description of Artificial Sequence: Synthetic oligonucleotide
auagguguauggacaguau

SEQ ID NO: 2411810 - RNA, 19 nt, Artificial Sequence
  Description of Artificial Sequence: Synthetic oligonucleotide
cggcugaaauauuucauug

SEQ ID NO: 2411811 - RNA, 19 nt, Artificial Sequence
  Description of Artificial Sequence: Synthetic oligonucleotide
caggcaaauuaaguuccuc

SEQ ID NO: 2411812 - RNA, 19 nt, Artificial Sequence
  Description of Artificial Sequence: Synthetic oligonucleotide
auguuccgaguccuacuaa

SEQ ID NO: 2411813 - RNA, 19 nt, Artificial Sequence
  Description of Artificial Sequence: Synthetic oligonucleotide
cuuuguguauguauccguu

SEQ ID NO: 2411814 - RNA, 19 nt, Artificial Sequence
  Description of Artificial Sequence: Synthetic oligonucleotide
cuugaauguuccgaguccu

SEQ ID NO: 2411815 - RNA, 19 nt, Artificial Sequence
  Description of Artificial Sequence: Synthetic oligonucleotide
augacggcuggacgagggu

SEQ ID NO: 2411816 - RNA, 19 nt, Artificial Sequence
  Description of Artificial Sequence: Synthetic oligonucleotide
aggccggcugaaauauuuc

SEQ ID NO: 2411817 - RNA, 19 nt, Artificial Sequence
  Description of Artificial Sequence: Synthetic oligonucleotide
cagaucacccggguaccag

SEQ ID NO: 2411818 - RNA, 19 nt, Artificial Sequence
  Description of Artificial Sequence: Synthetic oligonucleotide
ggucuaaaacauccuccuc

SEQ ID NO: 2411819 - RNA, 19 nt, Artificial Sequence
  Description of Artificial Sequence: Synthetic oligonucleotide
gcuucaugugcccucacua

SEQ ID NO: 2411820 - RNA, 19 nt, Artificial Sequence
  Description of Artificial Sequence: Synthetic oligonucleotide
uccuucucaugugguaaau

SEQ ID NO: 2411821 - RNA, 19 nt, Artificial Sequence
  Description of Artificial Sequence: Synthetic oligonucleotide
cuggacgagggucuggucu

SEQ ID NO: 2411822 - RNA, 19 nt, Artificial Sequence
  Description of Artificial Sequence: Synthetic oligonucleotide
gacaguauucucggguccu

SEQ ID NO: 2411823 - RNA, 19 nt, Artificial Sequence
  Description of Artificial Sequence: Synthetic oligonucleotide
ggcauaaguugcugaugac

SEQ ID NO: 2411824 - RNA, 19 nt, Artificial Sequence
  Description of Artificial Sequence: Synthetic oligonucleotide
gguguauggacaguauucu

SEQ ID NO: 2411825 - RNA, 19 nt, Artificial Sequence
  Description of Artificial Sequence: Synthetic oligonucleotide
ggugccuuuguguauguau

SEQ ID NO: 2411826 - RNA, 19 nt, Artificial Sequence
  Description of Artificial Sequence: Synthetic oligonucleotide
cugccucagaguuacugua

SEQ ID NO: 2411827 - RNA, 19 nt, Artificial Sequence
  Description of Artificial Sequence: Synthetic oligonucleotide
ggccggcugaaauauuuca

SEQ ID NO: 2411828 - RNA, 19 nt, Artificial Sequence
  Description of Artificial Sequence: Synthetic oligonucleotide
ugcugggaaaagggaagua

SEQ ID NO: 2411829 - RNA, 19 nt, Artificial Sequence
  Description of Artificial Sequence: Synthetic oligonucleotide
cucucaugguuugugggaa

SEQ ID NO: 2411830 - RNA, 19 nt, Artificial Sequence
  Description of Artificial Sequence: Synthetic oligonucleotide
guuccgaguccuacuaaaa

SEQ ID NO: 2411831 - RNA, 19 nt, Artificial Sequence
  Description of Artificial Sequence: Synthetic oligonucleotide
guggugacucaaggacagg

SEQ ID NO: 2411832 - RNA, 19 nt, Artificial Sequence
  Description of Artificial Sequence: Synthetic oligonucleotide
gucugcaggcaaauuaagu

SEQ ID NO: 2411833 - RNA, 19 nt, Artificial Sequence
  Description of Artificial Sequence: Synthetic oligonucleotide
acagaucacccggguacca

SEQ ID NO: 2411834 - RNA, 19 nt, Artificial Sequence
  Description of Artificial Sequence: Synthetic oligonucleotide
ucggugccuuuguguaugu

SEQ ID NO: 2411835 - RNA, 19 nt, Artificial Sequence
  Description of Artificial Sequence: Synthetic oligonucleotide
caucuugaauguuccgagu

SEQ ID NO: 2411836 - RNA, 19 nt, Artificial Sequence
  Description of Artificial Sequence: Synthetic oligonucleotide
ggaggcauaaguugcugau

SEQ ID NO: 2411837 - RNA, 19 nt, Artificial Sequence
  Description of Artificial Sequence: Synthetic oligonucleotide
ucggguccuugaguagaug

SEQ ID NO: 2411838 - RNA, 19 nt, Artificial Sequence
  Description of Artificial Sequence: Synthetic oligonucleotide
auguauccguuggcaggag

SEQ ID NO: 2411839 - RNA, 19 nt, Artificial Sequence
  Description of Artificial Sequence: Synthetic oligonucleotide
cucucucuguugaugguau

SEQ ID NO: 2411840 - RNA, 19 nt, Artificial Sequence
  Description of Artificial Sequence: Synthetic oligonucleotide
auccguuggcaggaggcau

SEQ ID NO: 2411841 - RNA, 19 nt, Artificial Sequence
  Description of Artificial Sequence: Synthetic oligonucleotide
ccucucaugguuuguggga

SEQ ID NO: 2411842 - RNA, 19 nt, Artificial Sequence
  Description of Artificial Sequence: Synthetic oligonucleotide
cagugccaccuucggugcc

SEQ ID NO: 2411843 - RNA, 19 nt, Artificial Sequence
  Description of Artificial Sequence: Synthetic oligonucleotide
cucaacucugagguagcaa

SEQ ID NO: 2411844 - RNA, 19 nt, Artificial Sequence
  Description of Artificial Sequence: Synthetic oligonucleotide
caccuucggugccuuugug

SEQ ID NO: 2411845 - RNA, 19 nt, Artificial Sequence
  Description of Artificial Sequence: Synthetic oligonucleotide
gaggccggcugaaauauuu

SEQ ID NO: 2411846 - RNA, 19 nt, Artificial Sequence
  Description of Artificial Sequence: Synthetic oligonucleotide
cugaacagaucacccgggu

SEQ ID NO: 2411847 - RNA, 19 nt, Artificial Sequence
  Description of Artificial Sequence: Synthetic oligonucleotide
ggaaaggcagacagcucuc

SEQ ID NO: 2411848 - RNA, 19 nt, Artificial Sequence
  Description of Artificial Sequence: Synthetic oligonucleotide
guugaugguaucagacuuu

SEQ ID NO: 2411849 - RNA, 19 nt, Artificial Sequence
  Description of Artificial Sequence: Synthetic oligonucleotide
gguuugugggaaaggcaga

SEQ ID NO: 2411850 - RNA, 19 nt, Artificial Sequence
  Description of Artificial Sequence: Synthetic oligonucleotide
gacggcuggacgagggucu

SEQ ID NO: 2411851 - RNA, 19 nt, Artificial Sequence
  Description of Artificial Sequence: Synthetic oligonucleotide
ugccagcuguggugacuca

SEQ ID NO: 2411852 - RNA, 19 nt, Artificial Sequence
  Description of Artificial Sequence: Synthetic oligonucleotide
acaguauucucggguccuu

SEQ ID NO: 2411853 - RNA, 19 nt, Artificial Sequence
  Description of Artificial Sequence: Synthetic oligonucleotide
ccuucggugccuuugugua

SEQ ID NO: 2411854 - RNA, 19 nt, Artificial Sequence
  Description of Artificial Sequence: Synthetic oligonucleotide
auguuccaccagaggccgg

SEQ ID NO: 2411855 - RNA, 19 nt, Artificial Sequence
  Description of Artificial Sequence: Synthetic oligonucleotide
caacucugagguagcaaau

SEQ ID NO: 2411856 - RNA, 19 nt, Artificial Sequence
  Description of Artificial Sequence: Synthetic oligonucleotide
gcuucucaugcauccucuc

SEQ ID NO: 2411857 - RNA, 19 nt, Artificial Sequence
  Description of Artificial Sequence: Synthetic oligonucleotide
gcucaucugugagaaggga

SEQ ID NO: 2411858 - RNA, 19 nt, Artificial Sequence
  Description of Artificial Sequence: Synthetic oligonucleotide
cacccggguaccagugcca

SEQ ID NO: 2411859 - RNA, 19 nt, Artificial Sequence
  Description of Artificial Sequence: Synthetic oligonucleotide
gaguuacuguagccuuccu

SEQ ID NO: 2411860 - RNA, 19 nt, Artificial Sequence
  Description of Artificial Sequence: Synthetic oligonucleotide
ggugacucaaggacaggcu

SEQ ID NO: 2411861 - RNA, 19 nt, Artificial Sequence
  Description of Artificial Sequence: Synthetic oligonucleotide
acggcuggacgagggucug

SEQ ID NO: 2411862 - RNA, 19 nt, Artificial Sequence
  Description of Artificial Sequence: Synthetic oligonucleotide
cagaggccggcugaaauau

SEQ ID NO: 2411863 - RNA, 19 nt, Artificial Sequence
  Description of Artificial Sequence: Synthetic oligonucleotide
ggaucucucucugccagcu

SEQ ID NO: 2411864 - RNA, 19 nt, Artificial Sequence
  Description of Artificial Sequence: Synthetic oligonucleotide
cagcuucaugugcccucac

SEQ ID NO: 2411865 - RNA, 19 nt, Artificial Sequence
  Description of Artificial Sequence: Synthetic oligonucleotide
ccuccucagcaauauaggu

SEQ ID NO: 2411866 - RNA, 19 nt, Artificial Sequence
  Description of Artificial Sequence: Synthetic oligonucleotide
gaaugucugcaggcaaauu

SEQ ID NO: 2411867 - RNA, 19 nt, Artificial Sequence
  Description of Artificial Sequence: Synthetic oligonucleotide
guaggccuacuucucuguu

SEQ ID NO: 2411868 - RNA, 19 nt, Artificial Sequence
  Description of Artificial Sequence: Synthetic oligonucleotide
agccuuccugugguucaga

SEQ ID NO: 2411869 - RNA, 19 nt, Artificial Sequence
  Description of Artificial Sequence: Synthetic oligonucleotide
ggugaagagcagucuggau

SEQ ID NO: 2411870 - RNA, 19 nt, Artificial Sequence
  Description of Artificial Sequence: Synthetic oligonucleotide
cauccuccucagcaauaua

SEQ ID NO: 2411871 - RNA, 19 nt, Artificial Sequence
  Description of Artificial Sequence: Synthetic oligonucleotide
cugcugggaaaagggaagu

SEQ ID NO: 2411872 - RNA, 19 nt, Artificial Sequence
  Description of Artificial Sequence: Synthetic oligonucleotide
cuucggugccuuuguguau

SEQ ID NO: 2411873 - RNA, 19 nt, Artificial Sequence
  Description of Artificial Sequence: Synthetic oligonucleotide
gacgagggucuggucuaaa

SEQ ID NO: 2411874 - RNA, 19 nt, Artificial Sequence
  Description of Artificial Sequence: Synthetic oligonucleotide
ccagaggccggcugaaaua

SEQ ID NO: 2411875 - RNA, 19 nt, Artificial Sequence
  Description of Artificial Sequence: Synthetic oligonucleotide
ccaugacggcuggacgagg

SEQ ID NO: 2411876 - RNA, 19 nt, Artificial Sequence
  Description of Artificial Sequence: Synthetic oligonucleotide
ccggcugaaauauuucauu

SEQ ID NO: 2411877 - RNA, 19 nt, Artificial Sequence
  Description of Artificial Sequence: Synthetic oligonucleotide
cugaaccaugacggcugga

SEQ ID NO: 2411878 - RNA, 19 nt, Artificial Sequence
  Description of Artificial Sequence: Synthetic oligonucleotide
gcuggacgagggucugguc

SEQ ID NO: 2411879 - RNA, 19 nt, Artificial Sequence
  Description of Artificial Sequence: Synthetic oligonucleotide
agaggccggcugaaauauu

SEQ ID NO: 2411880 - RNA, 19 nt, Artificial Sequence
  Description of Artificial Sequence: Synthetic oligonucleotide
cccggguaccagugccacc

SEQ ID NO: 2411881 - RNA, 19 nt, Artificial Sequence
  Description of Artificial Sequence: Synthetic oligonucleotide
cgaguccuacuaaaaucaa

SEQ ID NO: 2411882 - RNA, 19 nt, Artificial Sequence
  Description of Artificial Sequence: Synthetic oligonucleotide
ugccaccuucggugccuuu

SEQ ID NO: 2411883 - RNA, 19 nt, Artificial Sequence
  Description of Artificial Sequence: Synthetic oligonucleotide
gccagcuguggugacucaa

SEQ ID NO: 2411884 - RNA, 19 nt, Artificial Sequence
  Description of Artificial Sequence: Synthetic oligonucleotide
gccggcugaaauauuucau

SEQ ID NO: 2411885 - RNA, 19 nt, Artificial Sequence
  Description of Artificial Sequence: Synthetic oligonucleotide
ccuucucaugugguaaaua

SEQ ID NO: 2411886 - RNA, 19 nt, Artificial Sequence
  Description of Artificial Sequence: Synthetic oligonucleotide
ccggguaccagugccaccu

SEQ ID NO: 2411887 - RNA, 19 nt, Artificial Sequence
  Description of Artificial Sequence: Synthetic oligonucleotide
gcaggcaaauuaaguuccu

SEQ ID NO: 2411888 - RNA, 19 nt, Artificial Sequence
  Description of Artificial Sequence: Synthetic oligonucleotide
gugcccucacuaccaucuu

SEQ ID NO: 2411889 - RNA, 19 nt, Artificial Sequence
  Description of Artificial Sequence: Synthetic oligonucleotide
ccaccuucggugccuuugu

SEQ ID NO: 2411890 - RNA, 19 nt, Artificial Sequence
  Description of Artificial Sequence: Synthetic oligonucleotide
ccguuggcaggaggcauaa

SEQ ID NO: 2411891 - RNA, 19 nt, Artificial Sequence
  Description of Artificial Sequence: Synthetic oligonucleotide
cguuggcaggaggcauaag

SEQ ID NO: 2411892 - RNA, 19 nt, Artificial Sequence
  Description of Artificial Sequence: Synthetic oligonucleotide
gcagcaucuuggggaggau

SEQ ID NO: 2411893 - RNA, 19 nt, Artificial Sequence
  Description of Artificial Sequence: Synthetic oligonucleotide
cggugccuuuguguaugua

SEQ ID NO: 2411894 - RNA, 19 nt, Artificial Sequence
  Description of Artificial Sequence: Synthetic oligonucleotide
aauaaaauaagccagcaac

SEQ ID NO: 2411895 - RNA, 19 nt, Artificial Sequence
  Description of Artificial Sequence: Synthetic oligonucleotide
uauaauauaaucaauugga

SEQ ID NO: 2411896 - RNA, 19 nt, Artificial Sequence
  Description of Artificial Sequence: Synthetic oligonucleotide
uuauaauauaaucaauugg

SEQ ID NO: 2411897 - RNA, 19 nt, Artificial Sequence
  Description of Artificial Sequence: Synthetic oligonucleotide
aacggaauaguuuccaacc

SEQ ID NO: 2411898 - RNA, 19 nt, Artificial Sequence
  Description of Artificial Sequence: Synthetic oligonucleotide
aaagguguuuaucugaaac

SEQ ID NO: 2411899 - RNA, 19 nt, Artificial Sequence
  Description of Artificial Sequence: Synthetic oligonucleotide
cauauuaauaaguuuaagg

SEQ ID NO: 2411900 - RNA, 19 nt, Artificial Sequence
  Description of Artificial Sequence: Synthetic oligonucleotide
cucauauccaguaugaugg

SEQ ID NO: 2411901 - RNA, 19 nt, Artificial Sequence
  Description of Artificial Sequence: Synthetic oligonucleotide
uauaagaacuuccaagagg

SEQ ID NO: 2411902 - RNA, 19 nt, Artificial Sequence
  Description of Artificial Sequence: Synthetic oligonucleotide
gaucaaagaacacugacag

SEQ ID NO: 2411903 - RNA, 19 nt, Artificial Sequence
  Description of Artificial Sequence: Synthetic oligonucleotide
aaagguugcaccuuuaggu

SEQ ID NO: 2411904 - RNA, 19 nt, Artificial Sequence
  Description of Artificial Sequence: Synthetic oligonucleotide
uaaucaauuggauugcagg

SEQ ID NO: 2411905 - RNA, 19 nt, Artificial Sequence
  Description of Artificial Sequence: Synthetic oligonucleotide
uguauuuuauaauauaauc

SEQ ID NO: 2411906 - RNA, 19 nt, Artificial Sequence
  Description of Artificial Sequence: Synthetic oligonucleotide
uuuuauaauggucauauua

SEQ ID NO: 2411907 - RNA, 19 nt, Artificial Sequence
  Description of Artificial Sequence: Synthetic oligonucleotide
uauuaauaaguuuaaggca

SEQ ID NO: 2411908 - RNA, 19 nt, Artificial Sequence
  Description of Artificial Sequence: Synthetic oligonucleotide
aaguugagcaguuugagga

SEQ ID NO: 2411909 - RNA, 19 nt, Artificial Sequence
  Description of Artificial Sequence: Synthetic oligonucleotide
uuuauuaauuccaggaaga

SEQ ID NO: 2411910 - RNA, 19 nt, Artificial Sequence
  Description of Artificial Sequence: Synthetic oligonucleotide
ucugaaacguucuagacac

SEQ ID NO: 2411911 - RNA, 19 nt, Artificial Sequence
  Description of Artificial Sequence: Synthetic oligonucleotide
aagguguuuaucugaaacg

SEQ ID NO: 2411912 - RNA, 19 nt, Artificial Sequence
  Description of Artificial Sequence: Synthetic oligonucleotide
aagauacuuaauuuggcug

SEQ ID NO: 2411913 - RNA, 19 nt, Artificial Sequence
  Description of Artificial Sequence: Synthetic oligonucleotide
aagaacuuccaagaggggc

SEQ ID NO: 2411914 - RNA, 19 nt, Artificial Sequence
  Description of Artificial Sequence: Synthetic oligonucleotide
uuaagcugaucaaagaaca

SEQ ID NO: 2411915 - RNA, 19 nt, Artificial Sequence
  Description of Artificial Sequence: Synthetic oligonucleotide
auaagaacuuccaagaggg

SEQ ID NO: 2411916 - RNA, 19 nt, Artificial Sequence
  Description of Artificial Sequence: Synthetic oligonucleotide
auaauggucauauuaauaa

SEQ ID NO: 2411917 - RNA, 19 nt, Artificial Sequence
  Description of Artificial Sequence: Synthetic oligonucleotide
uguugcacauauaagaacu

SEQ ID NO: 2411918 - RNA, 19 nt, Artificial Sequence
  Description of Artificial Sequence: Synthetic oligonucleotide
aaaagguugcaccuuuagg

SEQ ID NO: 2411919 - RNA, 19 nt, Artificial Sequence
  Description of Artificial Sequence: Synthetic oligonucleotide
uuaagacagaccuuaauac

SEQ ID NO: 2411920 - RNA, 19 nt, Artificial Sequence
  Description of Artificial Sequence: Synthetic oligonucleotide
uuugcaacacugaaaacug

SEQ ID NO: 2411921 - RNA, 19 nt, Artificial Sequence
  Description of Artificial Sequence: Synthetic oligonucleotide
acguucuagacacugaaac

SEQ ID NO: 2411922 - RNA, 19 nt, Artificial Sequence
  Description of Artificial Sequence: Synthetic oligonucleotide
cuuucgucacauuaaaagg

SEQ ID NO: 2411923 - RNA, 19 nt, Artificial Sequence
  Description of Artificial Sequence: Synthetic oligonucleotide
uuuaagcugaucaaagaac

SEQ ID NO: 2411924 - RNA, 19 nt, Artificial Sequence
  Description of Artificial Sequence: Synthetic oligonucleotide
ugcaccuuuagguuaaagg

SEQ ID NO: 2411925 - RNA, 19 nt, Artificial Sequence
  Description of Artificial Sequence: Synthetic oligonucleotide
uuuuaagcugaucaaagaa

SEQ ID NO: 2411926 - RNA, 19 nt, Artificial Sequence
  Description of Artificial Sequence: Synthetic oligonucleotide
uguuguucagccuaaguug

SEQ ID NO: 2411927 - RNA, 19 nt, Artificial Sequence
  Description of Artificial Sequence: Synthetic oligonucleotide
aagacagaccuuaauacac

SEQ ID NO: 2411928 - RNA, 19 nt, Artificial Sequence
  Description of Artificial Sequence: Synthetic oligonucleotide
cacauuaaaagguugcacc

SEQ ID NO: 2411929 - RNA, 19 nt, Artificial Sequence
  Description of Artificial Sequence: Synthetic oligonucleotide
ugaaaacugagccauuagc

SEQ ID NO: 2411930 - RNA, 19 nt, Artificial Sequence
  Description of Artificial Sequence: Synthetic oligonucleotide
uuagccauauacaugcuga

SEQ ID NO: 2411931 - RNA, 19 nt, Artificial Sequence
  Description of Artificial Sequence: Synthetic oligonucleotide
aguaugauggcgcuugagg

SEQ ID NO: 2411932 - RNA, 19 nt, Artificial Sequence
  Description of Artificial Sequence: Synthetic oligonucleotide
uaaguuuaaggcaucucag

SEQ ID NO: 2411933 - RNA, 19 nt, Artificial Sequence
  Description of Artificial Sequence: Synthetic oligonucleotide
agaggggcaucccagaagc

SEQ ID NO: 2411934 - RNA, 19 nt, Artificial Sequence
  Description of Artificial Sequence: Synthetic oligonucleotide
aagguuguuauuugcaaca

SEQ ID NO: 2411935 - RNA, 19 nt, Artificial Sequence
  Description of Artificial Sequence: Synthetic oligonucleotide
ugaaguuaguuguacuggg

SEQ ID NO: 2411936 - RNA, 19 nt, Artificial Sequence
  Description of Artificial Sequence: Synthetic oligonucleotide
ucaauuggauugcaggucc

SEQ ID NO: 2411937 - RNA, 19 nt, Artificial Sequence
  Description of Artificial Sequence: Synthetic oligonucleotide
uuucgucacauuaaaaggu

SEQ ID NO: 2411938 - RNA, 19 nt, Artificial Sequence
  Description of Artificial Sequence: Synthetic oligonucleotide
aaguacuccugccagagcu

SEQ ID NO: 2411939 - RNA, 19 nt, Artificial Sequence
  Description of Artificial Sequence: Synthetic oligonucleotide
uuacuaacggaauaguuuc

SEQ ID NO: 2411940 - RNA, 19 nt, Artificial Sequence
  Description of Artificial Sequence: Synthetic oligonucleotide
auaaagucaagauacuuaa

SEQ ID NO: 2411941 - RNA, 19 nt, Artificial Sequence
  Description of Artificial Sequence: Synthetic oligonucleotide
cuuuguugcacauauaaga

SEQ ID NO: 2411942 - RNA, 19 nt, Artificial Sequence
  Description of Artificial Sequence: Synthetic oligonucleotide
uaaaacugcucauauccag

SEQ ID NO: 2411943 - RNA, 19 nt, Artificial Sequence
  Description of Artificial Sequence: Synthetic oligonucleotide
guagccagcagacagguag

SEQ ID NO: 2411944 - RNA, 19 nt, Artificial Sequence
  Description of Artificial Sequence: Synthetic oligonucleotide
uuuaucugaaacguucuag

SEQ ID NO: 2411945 - RNA, 19 nt, Artificial Sequence
  Description of Artificial Sequence: Synthetic oligonucleotide
uuaauuuggcuguuguuca

SEQ ID NO: 2411946 - RNA, 19 nt, Artificial Sequence
  Description of Artificial Sequence: Synthetic oligonucleotide
ucuagacacugaaacaacc

SEQ ID NO: 2411947 - RNA, 19 nt, Artificial Sequence
  Description of Artificial Sequence: Synthetic oligonucleotide
ucaagauacuuaauuuggc

SEQ ID NO: 2411948 - RNA, 19 nt, Artificial Sequence
  Description of Artificial Sequence: Synthetic oligonucleotide
aacacugaaaacugagcca

SEQ ID NO: 2411949 - RNA, 19 nt, Artificial Sequence
  Description of Artificial Sequence: Synthetic oligonucleotide
auggcuuucacuuuucaca

SEQ ID NO: 2411950 - RNA, 19 nt, Artificial Sequence
  Description of Artificial Sequence: Synthetic oligonucleotide
auuaauaaguuuaaggcau

SEQ ID NO: 2411951 - RNA, 19 nt, Artificial Sequence
  Description of Artificial Sequence: Synthetic oligonucleotide
aaguuaguuguacuggggu

SEQ ID NO: 2411952 - RNA, 19 nt, Artificial Sequence
  Description of Artificial Sequence: Synthetic oligonucleotide
uaauggucauauuaauaag

SEQ ID NO: 2411953 - RNA, 19 nt, Artificial Sequence
  Description of Artificial Sequence: Synthetic oligonucleotide
aacacuagagcaaguacuc

SEQ ID NO: 2411954 - RNA, 19 nt, Artificial Sequence
  Description of Artificial Sequence: Synthetic oligonucleotide
ucuuuguugcacauauaag

SEQ ID NO: 2411955 - RNA, 19 nt, Artificial Sequence
  Description of Artificial Sequence: Synthetic oligonucleotide
agauacuuaauuuggcugu

SEQ ID NO: 2411956 - RNA, 19 nt, Artificial Sequence
  Description of Artificial Sequence: Synthetic oligonucleotide
uguuauuugcaacacugaa

SEQ ID NO: 2411957 - RNA, 19 nt, Artificial Sequence
  Description of Artificial Sequence: Synthetic oligonucleotide
uaaaagguugcaccuuuag

SEQ ID NO: 2411958 - RNA, 19 nt, Artificial Sequence
  Description of Artificial Sequence: Synthetic oligonucleotide
aaaccucguucuuugaaug

SEQ ID NO: 2411959 - RNA, 19 nt, Artificial Sequence
  Description of Artificial Sequence: Synthetic oligonucleotide
auauaagaacuuccaagag

SEQ ID NO: 2411960 - RNA, 19 nt, Artificial Sequence
  Description of Artificial Sequence: Synthetic oligonucleotide
uuugaauguauuuuauaau

SEQ ID NO: 2411961 - RNA, 19 nt, Artificial Sequence
  Description of Artificial Sequence: Synthetic oligonucleotide
aauaaguuuaaggcaucuc

SEQ ID NO: 2411962 - RNA, 19 nt, Artificial Sequence
  Description of Artificial Sequence: Synthetic oligonucleotide
cuuugaauguauuuuauaa

SEQ ID NO: 2411963 - RNA, 19 nt, Artificial Sequence
  Description of Artificial Sequence: Synthetic oligonucleotide
cuuaauuuggcuguuguuc

SEQ ID NO: 2411964 - RNA, 19 nt, Artificial Sequence
  Description of Artificial Sequence: Synthetic oligonucleotide
uuuaaaguccaguaugcau

SEQ ID NO: 2411965 - RNA, 19 nt, Artificial Sequence
  Description of Artificial Sequence: Synthetic oligonucleotide
auauccaguaugauggcgc

SEQ ID NO: 2411966 - RNA, 19 nt, Artificial Sequence
  Description of Artificial Sequence: Synthetic oligonucleotide
aacacugacaggcaagaaa

SEQ ID NO: 2411967 - RNA, 19 nt, Artificial Sequence
  Description of Artificial Sequence: Synthetic oligonucleotide
gaggccaauaaaauaagcc

SEQ ID NO: 2411968 - RNA, 19 nt, Artificial Sequence
  Description of Artificial Sequence: Synthetic oligonucleotide
agcaguuugaggaugacag

SEQ ID NO: 2411969 - RNA, 19 nt, Artificial Sequence
  Description of Artificial Sequence: Synthetic oligonucleotide
aaaaccucguucuuugaau

SEQ ID NO: 2411970 - RNA, 19 nt, Artificial Sequence
  Description of Artificial Sequence: Synthetic oligonucleotide
uuaggaucccaauuuggcc

SEQ ID NO: 2411971 - RNA, 19 nt, Artificial Sequence
  Description of Artificial Sequence: Synthetic oligonucleotide
ugaaacaaccugcucuuug

SEQ ID NO: 2411972 - RNA, 19 nt, Artificial Sequence
  Description of Artificial Sequence: Synthetic oligonucleotide
agcauugccauuacuaacg

SEQ ID NO: 2411973 - RNA, 19 nt, Artificial Sequence
  Description of Artificial Sequence: Synthetic oligonucleotide
auacacugcacauacugug

SEQ ID NO: 2411974 - RNA, 19 nt, Artificial Sequence
  Description of Artificial Sequence: Synthetic oligonucleotide
uaggaucccaauuuggcca

SEQ ID NO: 2411975 - RNA, 19 nt, Artificial Sequence
  Description of Artificial Sequence: Synthetic oligonucleotide
cauacuuuccuuucgucac

SEQ ID NO: 2411976 - RNA, 19 nt, Artificial Sequence
  Description of Artificial Sequence: Synthetic oligonucleotide
caugguagccagcagacag

SEQ ID NO: 2411977 - RNA, 19 nt, Artificial Sequence
  Description of Artificial Sequence: Synthetic oligonucleotide
ucccaauuuggccaaagcu

SEQ ID NO: 2411978 - RNA, 19 nt, Artificial Sequence
  Description of Artificial Sequence: Synthetic oligonucleotide
guaugauggcgcuugaggc

SEQ ID NO: 2411979 - RNA, 19 nt, Artificial Sequence
  Description of Artificial Sequence: Synthetic oligonucleotide
aaacguucuagacacugaa

SEQ ID NO: 2411980 - RNA, 19 nt, Artificial Sequence
  Description of Artificial Sequence: Synthetic oligonucleotide
aaacugagccauuagccau

SEQ ID NO: 2411981 - RNA, 19 nt, Artificial Sequence
  Description of Artificial Sequence: Synthetic oligonucleotide
uggcuuucacuuuucacag

SEQ ID NO: 2411982 - RNA, 19 nt, Artificial Sequence
  Description of Artificial Sequence: Synthetic oligonucleotide
aggcaagaaaaccucguuc

SEQ ID NO: 2411983 - RNA, 19 nt, Artificial Sequence
  Description of Artificial Sequence: Synthetic oligonucleotide
ucauauuaauaaguuuaag

SEQ ID NO: 2411984 - RNA, 19 nt, Artificial Sequence
  Description of Artificial Sequence: Synthetic oligonucleotide
uugaggaugacagcugccg

SEQ ID NO: 2411985 - RNA, 19 nt, Artificial Sequence
  Description of Artificial Sequence: Synthetic oligonucleotide
uaugauggcgcuugaggcc

SEQ ID NO: 2411986 - RNA, 19 nt, Artificial Sequence
  Description of Artificial Sequence: Synthetic oligonucleotide
guuaaagguguuuaucuga

SEQ ID NO: 2411987 - RNA, 19 nt, Artificial Sequence
  Description of Artificial Sequence: Synthetic oligonucleotide
aaaggcaccuucuccucag

SEQ ID NO: 2411988 - RNA, 19 nt, Artificial Sequence
  Description of Artificial Sequence: Synthetic oligonucleotide
acugcucauauccaguaug

SEQ ID NO: 2411989 - RNA, 19 nt, Artificial Sequence
  Description of Artificial Sequence: Synthetic oligonucleotide
uacuuaauuuggcuguugu

SEQ ID NO: 2411990 - RNA, 19 nt, Artificial Sequence
  Description of Artificial Sequence: Synthetic oligonucleotide
gaccuuaauacacugcaca

SEQ ID NO: 2411991 - RNA, 19 nt, Artificial Sequence
  Description of Artificial Sequence: Synthetic oligonucleotide
ugaaacguucuagacacug

SEQ ID NO: 2411992 - RNA, 19 nt, Artificial Sequence
  Description of Artificial Sequence: Synthetic oligonucleotide
ugcucuuuguugcacauau

SEQ ID NO: 2411993 - RNA, 19 nt, Artificial Sequence
  Description of Artificial Sequence: Synthetic oligonucleotide
uaagguuguuauuugcaac

SEQ ID NO: 2411994 - RNA, 19 nt, Artificial Sequence
  Description of Artificial Sequence: Synthetic oligonucleotide
auuagccauauacaugcug

SEQ ID NO: 2411995 - RNA, 19 nt, Artificial Sequence
  Description of Artificial Sequence: Synthetic oligonucleotide
ccuuucgucacauuaaaag

SEQ ID NO: 2411996 - RNA, 19 nt, Artificial Sequence
  Description of Artificial Sequence: Synthetic oligonucleotide
aagcugaucaaagaacacu

SEQ ID NO: 2411997 - RNA, 19 nt, Artificial Sequence
  Description of Artificial Sequence: Synthetic oligonucleotide
uuuccuuucgucacauuaa

SEQ ID NO: 2411998 - RNA, 19 nt, Artificial Sequence
  Description of Artificial Sequence: Synthetic oligonucleotide
auugccauuacuaacggaa

SEQ ID NO: 2411999 - RNA, 19 nt, Artificial Sequence
  Description of Artificial Sequence: Synthetic oligonucleotide
gugaaguuaguuguacugg

SEQ ID NO: 2412000 - RNA, 19 nt, Artificial Sequence
  Description of Artificial Sequence: Synthetic oligonucleotide
uaucugaaacguucuagac

SEQ ID NO: 2412001 - RNA, 19 nt, Artificial Sequence
  Description of Artificial Sequence: Synthetic oligonucleotide
uuaauaaguuuaaggcauc

SEQ ID NO: 2412002 - RNA, 19 nt, Artificial Sequence
  Description of Artificial Sequence: Synthetic oligonucleotide
aucccaauuuggccaaagc

SEQ ID NO: 2412003 - RNA, 19 nt, Artificial Sequence
  Description of Artificial Sequence: Synthetic oligonucleotide
cuuccuucagauagaaaug

SEQ ID NO: 2412004 - RNA, 19 nt, Artificial Sequence
  Description of Artificial Sequence: Synthetic oligonucleotide
uggccaaagcuucuuaaga

SEQ ID NO: 2412005 - RNA, 19 nt, Artificial Sequence
  Description of Artificial Sequence: Synthetic oligonucleotide
ugcauuuuaagcugaucaa

SEQ ID NO: 2412006 - RNA, 19 nt, Artificial Sequence
  Description of Artificial Sequence: Synthetic oligonucleotide
cugaucaaagaacacugac

SEQ ID NO: 2412007 - RNA, 19 nt, Artificial Sequence
  Description of Artificial Sequence: Synthetic oligonucleotide
gauaaagucaagauacuua

SEQ ID NO: 2412008 - RNA, 19 nt, Artificial Sequence
  Description of Artificial Sequence: Synthetic oligonucleotide
gaagauacaacuccauaua

SEQ ID NO: 2412009 - RNA, 19 nt, Artificial Sequence
  Description of Artificial Sequence: Synthetic oligonucleotide
acaugcugacguuaacuuc

SEQ ID NO: 2412010 - RNA, 19 nt, Artificial Sequence
  Description of Artificial Sequence: Synthetic oligonucleotide
uuggccaaagcuucuuaag

SEQ ID NO: 2412011 - RNA, 19 nt, Artificial Sequence
  Description of Artificial Sequence: Synthetic oligonucleotide
gaaguuaguuguacugggg

SEQ ID NO: 2412012 - RNA, 19 nt, Artificial Sequence
  Description of Artificial Sequence: Synthetic oligonucleotide
aucaauuggauugcagguc

SEQ ID NO: 2412013 - RNA, 19 nt, Artificial Sequence
  Description of Artificial Sequence: Synthetic oligonucleotide
gugacauucagcugcaguc

SEQ ID NO: 2412014 - RNA, 19 nt, Artificial Sequence
  Description of Artificial Sequence: Synthetic oligonucleotide
auuaaaagguugcaccuuu

SEQ ID NO: 2412015 - RNA, 19 nt, Artificial Sequence
  Description of Artificial Sequence: Synthetic oligonucleotide
uuguugcacauauaagaac

SEQ ID NO: 2412016 - RNA, 19 nt, Artificial Sequence
  Description of Artificial Sequence: Synthetic oligonucleotide
guuaggaucccaauuuggc

SEQ ID NO: 2412017 - RNA, 19 nt, Artificial Sequence
  Description of Artificial Sequence: Synthetic oligonucleotide
gauugcagguccuaaaacu

SEQ ID NO: 2412018 - RNA, 19 nt, Artificial Sequence
  Description of Artificial Sequence: Synthetic oligonucleotide
caguaugcauuuuaagcug

SEQ ID NO: 2412019 - RNA, 19 nt, Artificial Sequence
  Description of Artificial Sequence: Synthetic oligonucleotide
caccuuuagguuaaaggug

SEQ ID NO: 2412020 - RNA, 19 nt, Artificial Sequence
  Description of Artificial Sequence: Synthetic oligonucleotide
ggugaaguuaguuguacug

SEQ ID NO: 2412021 - RNA, 19 nt, Artificial Sequence
  Description of Artificial Sequence: Synthetic oligonucleotide
uuggcuguuguucagccua

SEQ ID NO: 2412022 - RNA, 19 nt, Artificial Sequence
  Description of Artificial Sequence: Synthetic oligonucleotide
aagaacacugacaggcaag

SEQ ID NO: 2412023 - RNA, 19 nt, Artificial Sequence
  Description of Artificial Sequence: Synthetic oligonucleotide
aaacugcucauauccagua

SEQ ID NO: 2412024 - RNA, 19 nt, Artificial Sequence
  Description of Artificial Sequence: Synthetic oligonucleotide
ucuuaagacagaccuuaau

SEQ ID NO: 2412025 - RNA, 19 nt, Artificial Sequence
  Description of Artificial Sequence: Synthetic oligonucleotide
uggauugcagguccuaaaa

SEQ ID NO: 2412026 - RNA, 19 nt, Artificial Sequence
  Description of Artificial Sequence: Synthetic oligonucleotide
ucgucacauuaaaagguug

SEQ ID NO: 2412027 - RNA, 19 nt, Artificial Sequence
  Description of Artificial Sequence: Synthetic oligonucleotide
aagguugcaccuuuagguu

SEQ ID NO: 2412028 - RNA, 19 nt, Artificial Sequence
  Description of Artificial Sequence: Synthetic oligonucleotide
guuaguuguacugggguug

SEQ ID NO: 2412029 - RNA, 19 nt, Artificial Sequence
  Description of Artificial Sequence: Synthetic oligonucleotide
acguuaacuuccuucagau

SEQ ID NO: 2412030 - RNA, 19 nt, Artificial Sequence
  Description of Artificial Sequence: Synthetic oligonucleotide
uaauuuggcuguuguucag

SEQ ID NO: 2412031 - RNA, 19 nt, Artificial Sequence
  Description of Artificial Sequence: Synthetic oligonucleotide
agugacauucagcugcagu

SEQ ID NO: 2412032 - RNA, 19 nt, Artificial Sequence
  Description of Artificial Sequence: Synthetic oligonucleotide
ucccaugguagccagcaga

SEQ ID NO: 2412033 - RNA, 19 nt, Artificial Sequence
  Description of Artificial Sequence: Synthetic oligonucleotide
aauaagccagcaacacuag

SEQ ID NO: 2412034 - RNA, 19 nt, Artificial Sequence
  Description of Artificial Sequence: Synthetic oligonucleotide
agcugaucaaagaacacug

SEQ ID NO: 2412035 - RNA, 19 nt, Artificial Sequence
  Description of Artificial Sequence: Synthetic oligonucleotide
uacuaacggaauaguuucc

SEQ ID NO: 2412036 - RNA, 19 nt, Artificial Sequence
  Description of Artificial Sequence: Synthetic oligonucleotide
ucagguuaggaucccaauu

SEQ ID NO: 2412037 - RNA, 19 nt, Artificial Sequence
  Description of Artificial Sequence: Synthetic oligonucleotide
ugccggugaaguuaguugu

SEQ ID NO: 2412038 - RNA, 19 nt, Artificial Sequence
  Description of Artificial Sequence: Synthetic oligonucleotide
uucagccuaaguugagcag

SEQ ID NO: 2412039 - RNA, 19 nt, Artificial Sequence
  Description of Artificial Sequence: Synthetic oligonucleotide
gacguuaacuuccuucaga

SEQ ID NO: 2412040 - RNA, 19 nt, Artificial Sequence
  Description of Artificial Sequence: Synthetic oligonucleotide
agguguuuaucugaaacgu

SEQ ID NO: 2412041 - RNA, 19 nt, Artificial Sequence
  Description of Artificial Sequence: Synthetic oligonucleotide
ugacauucagcugcagucc

SEQ ID NO: 2412042 - RNA, 19 nt, Artificial Sequence
  Description of Artificial Sequence: Synthetic oligonucleotide
uauaaucaauuggauugca

SEQ ID NO: 2412043 - RNA, 19 nt, Artificial Sequence
  Description of Artificial Sequence: Synthetic oligonucleotide
auugcagguccuaaaacug

SEQ ID NO: 2412044 - RNA, 19 nt, Artificial Sequence
  Description of Artificial Sequence: Synthetic oligonucleotide
aaccucguucuuugaaugu

SEQ ID NO: 2412045 - RNA, 19 nt, Artificial Sequence
  Description of Artificial Sequence: Synthetic oligonucleotide
uuuggccaaagcuucuuaa

SEQ ID NO: 2412046 - RNA, 19 nt, Artificial Sequence
  Description of Artificial Sequence: Synthetic oligonucleotide
uacaugcugacguuaacuu

SEQ ID NO: 2412047 - RNA, 19 nt, Artificial Sequence
  Description of Artificial Sequence: Synthetic oligonucleotide
uuauuaauuccaggaagau

SEQ ID NO: 2412048 - RNA, 19 nt, Artificial Sequence
  Description of Artificial Sequence: Synthetic oligonucleotide
acagaccuuaauacacugc

SEQ ID NO: 2412049 - RNA, 19 nt, Artificial Sequence
  Description of Artificial Sequence: Synthetic oligonucleotide
auaaucaauuggauugcag

SEQ ID NO: 2412050 - RNA, 19 nt, Artificial Sequence
  Description of Artificial Sequence: Synthetic oligonucleotide
guguuuaucugaaacguuc

SEQ ID NO: 2412051 - RNA, 19 nt, Artificial Sequence
  Description of Artificial Sequence: Synthetic oligonucleotide
ugacguuaacuuccuucag

SEQ ID NO: 2412052 - RNA, 19 nt, Artificial Sequence
  Description of Artificial Sequence: Synthetic oligonucleotide
cugacguuaacuuccuuca

SEQ ID NO: 2412053 - RNA, 19 nt, Artificial Sequence
  Description of Artificial Sequence: Synthetic oligonucleotide
cagaccuuaauacacugca

SEQ ID NO: 2412054 - RNA, 19 nt, Artificial Sequence
  Description of Artificial Sequence: Synthetic oligonucleotide
uauacaugcugacguuaac

SEQ ID NO: 2412055 - RNA, 19 nt, Artificial Sequence
  Description of Artificial Sequence: Synthetic oligonucleotide
guucuagacacugaaacaa

SEQ ID NO: 2412056 - RNA, 19 nt, Artificial Sequence
  Description of Artificial Sequence: Synthetic oligonucleotide
uguggcauacuuuccuuuc

SEQ ID NO: 2412057 - RNA, 19 nt, Artificial Sequence
  Description of Artificial Sequence: Synthetic oligonucleotide
ggccaauaaaauaagccag

SEQ ID NO: 2412058 - RNA, 19 nt, Artificial Sequence
  Description of Artificial Sequence: Synthetic oligonucleotide
gguuaaagguguuuaucug

SEQ ID NO: 2412059 - RNA, 19 nt, Artificial Sequence
  Description of Artificial Sequence: Synthetic oligonucleotide
uuccuuucgucacauuaaa

SEQ ID NO: 2412060 - RNA, 19 nt, Artificial Sequence
  Description of Artificial Sequence: Synthetic oligonucleotide
auacaugcugacguuaacu

SEQ ID NO: 2412061 - RNA, 19 nt, Artificial Sequence
  Description of Artificial Sequence: Synthetic oligonucleotide
aagauaaagucaagauacu

SEQ ID NO: 2412062 - RNA, 19 nt, Artificial Sequence
  Description of Artificial Sequence: Synthetic oligonucleotide
agacagguagcauugccau

SEQ ID NO: 2412063 - RNA, 19 nt, Artificial Sequence
  Description of Artificial Sequence: Synthetic oligonucleotide
acacuagagcaaguacucc

SEQ ID NO: 2412064 - RNA, 19 nt, Artificial Sequence
  Description of Artificial Sequence: Synthetic oligonucleotide
uuaauacacugcacauacu

SEQ ID NO: 2412065 - RNA, 19 nt, Artificial Sequence
  Description of Artificial Sequence: Synthetic oligonucleotide
uguucagccuaaguugagc

SEQ ID NO: 2412066 - RNA, 19 nt, Artificial Sequence
  Description of Artificial Sequence: Synthetic oligonucleotide
accuuaauacacugcacau

SEQ ID NO: 2412067 - RNA, 19 nt, Artificial Sequence
  Description of Artificial Sequence: Synthetic oligonucleotide
guggcauacuuuccuuucg

SEQ ID NO: 2412068 - RNA, 19 nt, Artificial Sequence
  Description of Artificial Sequence: Synthetic oligonucleotide
ucauauccaguaugauggc

SEQ ID NO: 2412069 - RNA, 19 nt, Artificial Sequence
  Description of Artificial Sequence: Synthetic oligonucleotide
uuaaggcaucucagguuag

SEQ ID NO: 2412070 - RNA, 19 nt, Artificial Sequence
  Description of Artificial Sequence: Synthetic oligonucleotide
agguuaggaucccaauuug

SEQ ID NO: 2412071 - RNA, 19 nt, Artificial Sequence
  Description of Artificial Sequence: Synthetic oligonucleotide
agaacuuccaagaggggca

SEQ ID NO: 2412072 - RNA, 19 nt, Artificial Sequence
  Description of Artificial Sequence: Synthetic oligonucleotide
agguuguuauuugcaacac

SEQ ID NO: 2412073 - RNA, 19 nt, Artificial Sequence
  Description of Artificial Sequence: Synthetic oligonucleotide
gcucauauccaguaugaug

SEQ ID NO: 2412074 - RNA, 19 nt, Artificial Sequence
  Description of Artificial Sequence: Synthetic oligonucleotide
guagcauugccauuacuaa

SEQ ID NO: 2412075 - RNA, 19 nt, Artificial Sequence
  Description of Artificial Sequence: Synthetic oligonucleotide
acacugaaaacugagccau

SEQ ID NO: 2412076 - RNA, 19 nt, Artificial Sequence
  Description of Artificial Sequence: Synthetic oligonucleotide
uggucauauuaauaaguuu

SEQ ID NO: 2412077 - RNA, 19 nt, Artificial Sequence
  Description of Artificial Sequence: Synthetic oligonucleotide
agccauauacaugcugacg

SEQ ID NO: 2412078 - RNA, 19 nt, Artificial Sequence
  Description of Artificial Sequence: Synthetic oligonucleotide
acggaauaguuuccaaccu

SEQ ID NO: 2412079 - RNA, 19 nt, Artificial Sequence
  Description of Artificial Sequence: Synthetic oligonucleotide
uauccaguaugauggcgcu

SEQ ID NO: 2412080 - RNA, 19 nt, Artificial Sequence
  Description of Artificial Sequence: Synthetic oligonucleotide
cuagagcaaguacuccugc

SEQ ID NO: 2412081 - RNA, 19 nt, Artificial Sequence
  Description of Artificial Sequence: Synthetic oligonucleotide
guucagccuaaguugagca

SEQ ID NO: 2412082 - RNA, 19 nt, Artificial Sequence
  Description of Artificial Sequence: Synthetic oligonucleotide
gaagcuaagguuguuauuu

SEQ ID NO: 2412083 - RNA, 19 nt, Artificial Sequence
  Description of Artificial Sequence: Synthetic oligonucleotide
uaauuccaggaagauacaa

SEQ ID NO: 2412084 - RNA, 19 nt, Artificial Sequence
  Description of Artificial Sequence: Synthetic oligonucleotide
acuaacggaauaguuucca

SEQ ID NO: 2412085 - RNA, 19 nt, Artificial Sequence
  Description of Artificial Sequence: Synthetic oligonucleotide
cuaaaacugcucauaucca

SEQ ID NO: 2412086 - RNA, 19 nt, Artificial Sequence
  Description of Artificial Sequence: Synthetic oligonucleotide
uuguucagccuaaguugag

SEQ ID NO: 2412087 - RNA, 19 nt, Artificial Sequence
  Description of Artificial Sequence: Synthetic oligonucleotide
acacugaaacaaccugcuc

SEQ ID NO: 2412088 - RNA, 19 nt, Artificial Sequence
  Description of Artificial Sequence: Synthetic oligonucleotide
aguuaguuguacugggguu

SEQ ID NO: 2412089 - RNA, 19 nt, Artificial Sequence
  Description of Artificial Sequence: Synthetic oligonucleotide
gaaacaaccugcucuuugu

SEQ ID NO: 2412090 - RNA, 19 nt, Artificial Sequence
  Description of Artificial Sequence: Synthetic oligonucleotide
uggcauacuuuccuuucgu

SEQ ID NO: 2412091 - RNA, 19 nt, Artificial Sequence
  Description of Artificial Sequence: Synthetic oligonucleotide
cuaagguuguuauuugcaa

SEQ ID NO: 2412092 - RNA, 19 nt, Artificial Sequence
  Description of Artificial Sequence: Synthetic oligonucleotide
ugccauuacuaacggaaua

SEQ ID NO: 2412093 - RNA, 19 nt, Artificial Sequence
  Description of Artificial Sequence: Synthetic oligonucleotide
ggugaagcaguauuuauua

SEQ ID NO: 2412094 - RNA, 19 nt, Artificial Sequence
  Description of Artificial Sequence: Synthetic oligonucleotide
ucucagguuaggaucccaa

SEQ ID NO: 2412095 - RNA, 19 nt, Artificial Sequence
  Description of Artificial Sequence: Synthetic oligonucleotide
uuccaagaggggcauccca

SEQ ID NO: 2412096 - RNA, 19 nt, Artificial Sequence
  Description of Artificial Sequence: Synthetic oligonucleotide
guuguacugggguugaugu

SEQ ID NO: 2412097 - RNA, 19 nt, Artificial Sequence
  Description of Artificial Sequence: Synthetic oligonucleotide
cuuuccuuucgucacauua

SEQ ID NO: 2412098 - RNA, 19 nt, Artificial Sequence
  Description of Artificial Sequence: Synthetic oligonucleotide
uugcaacacugaaaacuga

SEQ ID NO: 2412099 - RNA, 19 nt, Artificial Sequence
  Description of Artificial Sequence: Synthetic oligonucleotide
uccuaaaacugcucauauc

SEQ ID NO: 2412100 - RNA, 19 nt, Artificial Sequence
  Description of Artificial Sequence: Synthetic oligonucleotide
aaacaaccugcucuuuguu

SEQ ID NO: 2412101 - RNA, 19 nt, Artificial Sequence
  Description of Artificial Sequence: Synthetic oligonucleotide
agaccuuaauacacugcac

SEQ ID NO: 2412102 - RNA, 19 nt, Artificial Sequence
  Description of Artificial Sequence: Synthetic oligonucleotide
ggcaucucagguuaggauc

SEQ ID NO: 2412103 - RNA, 19 nt, Artificial Sequence
  Description of Artificial Sequence: Synthetic oligonucleotide
aggaagauacaacuccaua

SEQ ID NO: 2412104 - RNA, 19 nt, Artificial Sequence
  Description of Artificial Sequence: Synthetic oligonucleotide
acagguagcauugccauua

SEQ ID NO: 2412105 - RNA, 19 nt, Artificial Sequence
  Description of Artificial Sequence: Synthetic oligonucleotide
gccauuacuaacggaauag

SEQ ID NO: 2412106 - RNA, 19 nt, Artificial Sequence
  Description of Artificial Sequence: Synthetic oligonucleotide
gguuaggaucccaauuugg

SEQ ID NO: 2412107 - RNA, 19 nt, Artificial Sequence
  Description of Artificial Sequence: Synthetic oligonucleotide
caagauacuuaauuuggcu

SEQ ID NO: 2412108 - RNA, 19 nt, Artificial Sequence
  Description of Artificial Sequence: Synthetic oligonucleotide
uugccauuacuaacggaau

SEQ ID NO: 2412109 - RNA, 19 nt, Artificial Sequence
  Description of Artificial Sequence: Synthetic oligonucleotide
ucguucuuugaauguauuu

SEQ ID NO: 2412110 - RNA, 19 nt, Artificial Sequence
  Description of Artificial Sequence: Synthetic oligonucleotide
gcuuucacuuuucacagca

SEQ ID NO: 2412111 - RNA, 19 nt, Artificial Sequence
  Description of Artificial Sequence: Synthetic oligonucleotide
guuguucagccuaaguuga

SEQ ID NO: 2412112 - RNA, 19 nt, Artificial Sequence
  Description of Artificial Sequence: Synthetic oligonucleotide
ccaauuuggccaaagcuuc

SEQ ID NO: 2412113 - RNA, 19 nt, Artificial Sequence
  Description of Artificial Sequence: Synthetic oligonucleotide
uuggauugcagguccuaaa

SEQ ID NO: 2412114 - RNA, 19 nt, Artificial Sequence
  Description of Artificial Sequence: Synthetic oligonucleotide
cuucuuaagacagaccuua

SEQ ID NO: 2412115 - RNA, 19 nt, Artificial Sequence
  Description of Artificial Sequence: Synthetic oligonucleotide
aguuguacugggguugaug

SEQ ID NO: 2412116 - RNA, 19 nt, Artificial Sequence
  Description of Artificial Sequence: Synthetic oligonucleotide
gcaguauuuauuaauucca

SEQ ID NO: 2412117 - RNA, 19 nt, Artificial Sequence
  Description of Artificial Sequence: Synthetic oligonucleotide
caacacuagagcaaguacu

SEQ ID NO: 2412118 - RNA, 19 nt, Artificial Sequence
  Description of Artificial Sequence: Synthetic oligonucleotide
acuagagcaaguacuccug

SEQ ID NO: 2412119 - RNA, 19 nt, Artificial Sequence
  Description of Artificial Sequence: Synthetic oligonucleotide
cugacaggcaagaaaaccu

SEQ ID NO: 2412120 - RNA, 19 nt, Artificial Sequence
  Description of Artificial Sequence: Synthetic oligonucleotide
aguaugcauuuuaagcuga

SEQ ID NO: 2412121 - RNA, 19 nt, Artificial Sequence
  Description of Artificial Sequence: Synthetic oligonucleotide
uaaagguguuuaucugaaa

SEQ ID NO: 2412122 - RNA, 19 nt, Artificial Sequence
  Description of Artificial Sequence: Synthetic oligonucleotide
uccuuucgucacauuaaaa

SEQ ID NO: 2412123 - RNA, 19 nt, Artificial Sequence
  Description of Artificial Sequence: Synthetic oligonucleotide
ggccaaagcuucuuaagac

SEQ ID NO: 2412124 - RNA, 19 nt, Artificial Sequence
  Description of Artificial Sequence: Synthetic oligonucleotide
gcugacguuaacuuccuuc

SEQ ID NO: 2412125 - RNA, 19 nt, Artificial Sequence
  Description of Artificial Sequence: Synthetic oligonucleotide
accgcuaugggcacaagga

SEQ ID NO: 2412126 - RNA, 19 nt, Artificial Sequence
  Description of Artificial Sequence: Synthetic oligonucleotide
ggaagauacaacuccauau

SEQ ID NO: 2412127 - RNA, 19 nt, Artificial Sequence
  Description of Artificial Sequence: Synthetic oligonucleotide
caccgcuaugggcacaagg

SEQ ID NO: 2412128 - RNA, 19 nt, Artificial Sequence
  Description of Artificial Sequence: Synthetic oligonucleotide
uagaaauggcuuucacuuu

SEQ ID NO: 2412129 - RNA, 19 nt, Artificial Sequence
  Description of Artificial Sequence: Synthetic oligonucleotide
cagacagguagcauugcca

SEQ ID NO: 2412130 - RNA, 19 nt, Artificial Sequence
  Description of Artificial Sequence: Synthetic oligonucleotide
uggcgcuugaggccaauaa

SEQ ID NO: 2412131 - RNA, 19 nt, Artificial Sequence
  Description of Artificial Sequence: Synthetic oligonucleotide
agucccaugguagccagca

SEQ ID NO: 2412132 - RNA, 19 nt, Artificial Sequence
  Description of Artificial Sequence: Synthetic oligonucleotide
aauuuggccaaagcuucuu

SEQ ID NO: 2412133 - RNA, 19 nt, Artificial Sequence
  Description of Artificial Sequence: Synthetic oligonucleotide
caaagaacacugacaggca

SEQ ID NO: 2412134 - RNA, 19 nt, Artificial Sequence
  Description of Artificial Sequence: Synthetic oligonucleotide
gcauacuuuccuuucguca

SEQ ID NO: 2412135 - RNA, 19 nt, Artificial Sequence
  Description of Artificial Sequence: Synthetic oligonucleotide
gcaccuuuagguuaaaggu

SEQ ID NO: 2412136 - RNA, 19 nt, Artificial Sequence
  Description of Artificial Sequence: Synthetic oligonucleotide
gccuaaguugagcaguuug

SEQ ID NO: 2412137 - RNA, 19 nt, Artificial Sequence
  Description of Artificial Sequence: Synthetic oligonucleotide
gccaauaaaauaagccagc

SEQ ID NO: 2412138 - RNA, 19 nt, Artificial Sequence
  Description of Artificial Sequence: Synthetic oligonucleotide
cugcucauauccaguauga

SEQ ID NO: 2412139 - RNA, 19 nt, Artificial Sequence
  Description of Artificial Sequence: Synthetic oligonucleotide
gaaacguucuagacacuga

SEQ ID NO: 2412140 - RNA, 19 nt, Artificial Sequence
  Description of Artificial Sequence: Synthetic oligonucleotide
uugagcuguggcauacuuu

SEQ ID NO: 2412141 - RNA, 19 nt, Artificial Sequence
  Description of Artificial Sequence: Synthetic oligonucleotide
ggcaagaaaaccucguucu

SEQ ID NO: 2412142 - RNA, 19 nt, Artificial Sequence
  Description of Artificial Sequence: Synthetic oligonucleotide
gucacauuaaaagguugca

SEQ ID NO: 2412143 - RNA, 19 nt, Artificial Sequence
  Description of Artificial Sequence: Synthetic oligonucleotide
augauggcgcuugaggcca

SEQ ID NO: 2412144 - RNA, 19 nt, Artificial Sequence
  Description of Artificial Sequence: Synthetic oligonucleotide
auauacaugcugacguuaa

SEQ ID NO: 2412145 - RNA, 19 nt, Artificial Sequence
  Description of Artificial Sequence: Synthetic oligonucleotide
cuagacacugaaacaaccu

SEQ ID NO: 2412146 - RNA, 19 nt, Artificial Sequence
  Description of Artificial Sequence: Synthetic oligonucleotide
agaagcuaagguuguuauu

SEQ ID NO: 2412147 - RNA, 19 nt, Artificial Sequence
  Description of Artificial Sequence: Synthetic oligonucleotide
aauuggauugcagguccua

SEQ ID NO: 2412148 - RNA, 19 nt, Artificial Sequence
  Description of Artificial Sequence: Synthetic oligonucleotide
gccauauacaugcugacgu

SEQ ID NO: 2412149 - RNA, 19 nt, Artificial Sequence
  Description of Artificial Sequence: Synthetic oligonucleotide
cagcaaagauaaagucaag

SEQ ID NO: 2412150 - RNA, 19 nt, Artificial Sequence
  Description of Artificial Sequence: Synthetic oligonucleotide
aacguucuagacacugaaa

SEQ ID NO: 2412151 - RNA, 19 nt, Artificial Sequence
  Description of Artificial Sequence: Synthetic oligonucleotide
agacagaccuuaauacacu

SEQ ID NO: 2412152 - RNA, 19 nt, Artificial Sequence
  Description of Artificial Sequence: Synthetic oligonucleotide
agguugcaccuuuagguua

SEQ ID NO: 2412153 - RNA, 19 nt, Artificial Sequence
  Description of Artificial Sequence: Synthetic oligonucleotide
agcaacacuagagcaagua

SEQ ID NO: 2412154 - RNA, 19 nt, Artificial Sequence
  Description of Artificial Sequence: Synthetic oligonucleotide
aggaugacagcugccggug

SEQ ID NO: 2412155 - RNA, 19 nt, Artificial Sequence
  Description of Artificial Sequence: Synthetic oligonucleotide
acagcugccggugaaguua

SEQ ID NO: 2412156 - RNA, 19 nt, Artificial Sequence
  Description of Artificial Sequence: Synthetic oligonucleotide
gccaaagcuucuuaagaca

SEQ ID NO: 2412157 - RNA, 19 nt, Artificial Sequence
  Description of Artificial Sequence: Synthetic oligonucleotide
gacacugaaacaaccugcu

SEQ ID NO: 2412158 - RNA, 19 nt, Artificial Sequence
  Description of Artificial Sequence: Synthetic oligonucleotide
caaagcuucuuaagacaga

SEQ ID NO: 2412159 - RNA, 19 nt, Artificial Sequence
  Description of Artificial Sequence: Synthetic oligonucleotide
gcaucucagguuaggaucc

SEQ ID NO: 2412160 - RNA, 19 nt, Artificial Sequence
  Description of Artificial Sequence: Synthetic oligonucleotide
guuuaucugaaacguucua

SEQ ID NO: 2412161 - RNA, 19 nt, Artificial Sequence
  Description of Artificial Sequence: Synthetic oligonucleotide
auuggauugcagguccuaa

SEQ ID NO: 2412162 - RNA, 19 nt, Artificial Sequence
  Description of Artificial Sequence: Synthetic oligonucleotide
uugcaccuuuagguuaaag

SEQ ID NO: 2412163 - RNA, 19 nt, Artificial Sequence
  Description of Artificial Sequence: Synthetic oligonucleotide
cuaacggaauaguuuccaa

SEQ ID NO: 2412164 - RNA, 19 nt, Artificial Sequence
  Description of Artificial Sequence: Synthetic oligonucleotide
cacuagagcaaguacuccu

SEQ ID NO: 2412165 - RNA, 19 nt, Artificial Sequence
  Description of Artificial Sequence: Synthetic oligonucleotide
gcaacacugaaaacugagc

SEQ ID NO: 2412166 - RNA, 19 nt, Artificial Sequence
  Description of Artificial Sequence: Synthetic oligonucleotide
caaguacuccugccagagc

SEQ ID NO: 2412167 - RNA, 19 nt, Artificial Sequence
  Description of Artificial Sequence: Synthetic oligonucleotide
aguccaguaugcauuuuaa

SEQ ID NO: 2412168 - RNA, 19 nt, Artificial Sequence
  Description of Artificial Sequence: Synthetic oligonucleotide
guacuccugccagagcugc

SEQ ID NO: 2412169 - RNA, 19 nt, Artificial Sequence
  Description of Artificial Sequence: Synthetic oligonucleotide
ccuaaguugagcaguuuga

SEQ ID NO: 2412170 - RNA, 19 nt, Artificial Sequence
  Description of Artificial Sequence: Synthetic oligonucleotide
guuuaaggcaucucagguu

SEQ ID NO: 2412171 - RNA, 19 nt, Artificial Sequence
  Description of Artificial Sequence: Synthetic oligonucleotide
gcacauauaagaacuucca

SEQ ID NO: 2412172 - RNA, 19 nt, Artificial Sequence
  Description of Artificial Sequence: Synthetic oligonucleotide
aacugagccauuagccaua

SEQ ID NO: 2412173 - RNA, 19 nt, Artificial Sequence
  Description of Artificial Sequence: Synthetic oligonucleotide
cauuacuaacggaauaguu

SEQ ID NO: 2412174 - RNA, 19 nt, Artificial Sequence
  Description of Artificial Sequence: Synthetic oligonucleotide
gagcaguuugaggaugaca

SEQ ID NO: 2412175 - RNA, 19 nt, Artificial Sequence
  Description of Artificial Sequence: Synthetic oligonucleotide
uacuuuccuuucgucacau

SEQ ID NO: 2412176 - RNA, 19 nt, Artificial Sequence
  Description of Artificial Sequence: Synthetic oligonucleotide
gcaguuugaggaugacagc

SEQ ID NO: 2412177 - RNA, 19 nt, Artificial Sequence
  Description of Artificial Sequence: Synthetic oligonucleotide
caguuugaggaugacagcu

SEQ ID NO: 2412178 - RNA, 19 nt, Artificial Sequence
  Description of Artificial Sequence: Synthetic oligonucleotide
aguacuccugccagagcug

SEQ ID NO: 2412179 - RNA, 19 nt, Artificial Sequence
  Description of Artificial Sequence: Synthetic oligonucleotide
cauugccauuacuaacgga

SEQ ID NO: 2412180 - RNA, 19 nt, Artificial Sequence
  Description of Artificial Sequence: Synthetic oligonucleotide
ugcucauauccaguaugau

SEQ ID NO: 2412181 - RNA, 19 nt, Artificial Sequence
  Description of Artificial Sequence: Synthetic oligonucleotide
uuguacugggguugauguu

SEQ ID NO: 2412182 - RNA, 19 nt, Artificial Sequence
  Description of Artificial Sequence: Synthetic oligonucleotide
uggcuguuguucagccuaa

SEQ ID NO: 2412183 - RNA, 19 nt, Artificial Sequence
  Description of Artificial Sequence: Synthetic oligonucleotide
gcuugaggccaauaaaaua

SEQ ID NO: 2412184 - RNA, 19 nt, Artificial Sequence
  Description of Artificial Sequence: Synthetic oligonucleotide
guccuaaaacugcucauau

SEQ ID NO: 2412185 - RNA, 19 nt, Artificial Sequence
  Description of Artificial Sequence: Synthetic oligonucleotide
cugcagucccaugguagcc

SEQ ID NO: 2412186 - RNA, 19 nt, Artificial Sequence
  Description of Artificial Sequence: Synthetic oligonucleotide
cgcuaugggcacaaggaag

SEQ ID NO: 2412187 - RNA, 19 nt, Artificial Sequence
  Description of Artificial Sequence: Synthetic oligonucleotide
cagauagaaauggcuuuca

SEQ ID NO: 2412188 - RNA, 19 nt, Artificial Sequence
  Description of Artificial Sequence: Synthetic oligonucleotide
cagguuaggaucccaauuu

SEQ ID NO: 2412189 - RNA, 19 nt, Artificial Sequence
  Description of Artificial Sequence: Synthetic oligonucleotide
ggcauacuuuccuuucguc

SEQ ID NO: 2412190 - RNA, 19 nt, Artificial Sequence
  Description of Artificial Sequence: Synthetic oligonucleotide
accucguucuuugaaugua

SEQ ID NO: 2412191 - RNA, 19 nt, Artificial Sequence
  Description of Artificial Sequence: Synthetic oligonucleotide
gcucccaccgcuaugggca

SEQ ID NO: 2412192 - RNA, 19 nt, Artificial Sequence
  Description of Artificial Sequence: Synthetic oligonucleotide
agucuugagcuguggcaua

SEQ ID NO: 2412193 - RNA, 19 nt, Artificial Sequence
  Description of Artificial Sequence: Synthetic oligonucleotide
cagguagcauugccauuac

SEQ ID NO: 2412194 - RNA, 19 nt, Artificial Sequence
  Description of Artificial Sequence: Synthetic oligonucleotide
caucucagguuaggauccc

SEQ ID NO: 2412195 - RNA, 19 nt, Artificial Sequence
  Description of Artificial Sequence: Synthetic oligonucleotide
caagaggggcaucccagaa

SEQ ID NO: 2412196 - RNA, 19 nt, Artificial Sequence
  Description of Artificial Sequence: Synthetic oligonucleotide
ggcgcuugaggccaauaaa

SEQ ID NO: 2412197 - RNA, 19 nt, Artificial Sequence
  Description of Artificial Sequence: Synthetic oligonucleotide
cugcagucuugagcugugg

SEQ ID NO: 2412198 - RNA, 19 nt, Artificial Sequence
  Description of Artificial Sequence: Synthetic oligonucleotide
gguuguuauuugcaacacu

SEQ ID NO: 2412199 - RNA, 19 nt, Artificial Sequence
  Description of Artificial Sequence: Synthetic oligonucleotide
acugagccauuagccauau

SEQ ID NO: 2412200 - RNA, 19 nt, Artificial Sequence
  Description of Artificial Sequence: Synthetic oligonucleotide
gcuaugggcacaaggaagu

SEQ ID NO: 2412201 - RNA, 19 nt, Artificial Sequence
  Description of Artificial Sequence: Synthetic oligonucleotide
gguccuaaaacugcucaua

SEQ ID NO: 2412202 - RNA, 19 nt, Artificial Sequence
  Description of Artificial Sequence: Synthetic oligonucleotide
gcugaucaaagaacacuga

SEQ ID NO: 2412203 - RNA, 19 nt, Artificial Sequence
  Description of Artificial Sequence: Synthetic oligonucleotide
gcgcuugaggccaauaaaa

SEQ ID NO: 2412204 - RNA, 19 nt, Artificial Sequence
  Description of Artificial Sequence: Synthetic oligonucleotide
cagucccaugguagccagc

SEQ ID NO: 2412205 - RNA, 19 nt, Artificial Sequence
  Description of Artificial Sequence: Synthetic oligonucleotide
ggaauaguuuccaaccuuu

SEQ ID NO: 2412206 - RNA, 19 nt, Artificial Sequence
  Description of Artificial Sequence: Synthetic oligonucleotide
cccaauuuggccaaagcuu

SEQ ID NO: 2412207 - RNA, 19 nt, Artificial Sequence
  Description of Artificial Sequence: Synthetic oligonucleotide
augcugacguuaacuuccu

SEQ ID NO: 2412208 - RNA, 19 nt, Artificial Sequence
  Description of Artificial Sequence: Synthetic oligonucleotide
cucccaccgcuaugggcac

SEQ ID NO: 2412209 - RNA, 19 nt, Artificial Sequence
  Description of Artificial Sequence: Synthetic oligonucleotide
guacugggguugauguuaa

SEQ ID NO: 2412210 - RNA, 19 nt, Artificial Sequence
  Description of Artificial Sequence: Synthetic oligonucleotide
ugauggcgcuugaggccaa

SEQ ID NO: 2412211 - RNA, 19 nt, Artificial Sequence
  Description of Artificial Sequence: Synthetic oligonucleotide
caggaagauacaacuccau

SEQ ID NO: 2412212 - RNA, 19 nt, Artificial Sequence
  Description of Artificial Sequence: Synthetic oligonucleotide
ccucagugacauucagcug

SEQ ID NO: 2412213 - RNA, 19 nt, Artificial Sequence
  Description of Artificial Sequence: Synthetic oligonucleotide
cauuagccauauacaugcu

SEQ ID NO: 2412214 - RNA, 19 nt, Artificial Sequence
  Description of Artificial Sequence: Synthetic oligonucleotide
cagucuugagcuguggcau

SEQ ID NO: 2412215 - RNA, 19 nt, Artificial Sequence
  Description of Artificial Sequence: Synthetic oligonucleotide
gcuguuguucagccuaagu

SEQ ID NO: 2412216 - RNA, 19 nt, Artificial Sequence
  Description of Artificial Sequence: Synthetic oligonucleotide
ggggcaucccagaagcuaa

SEQ ID NO: 2412217 - RNA, 19 nt, Artificial Sequence
  Description of Artificial Sequence: Synthetic oligonucleotide
agagcugcucccaccgcua

SEQ ID NO: 2412218 - RNA, 19 nt, Artificial Sequence
  Description of Artificial Sequence: Synthetic oligonucleotide
gaacuuccaagaggggcau

SEQ ID NO: 2412219 - RNA, 19 nt, Artificial Sequence
  Description of Artificial Sequence: Synthetic oligonucleotide
uaguuguacugggguugau

SEQ ID NO: 2412220 - RNA, 19 nt, Artificial Sequence
  Description of Artificial Sequence: Synthetic oligonucleotide
caggcaagaaaaccucguu

SEQ ID NO: 2412221 - RNA, 19 nt, Artificial Sequence
  Description of Artificial Sequence: Synthetic oligonucleotide
gacagcugccggugaaguu

SEQ ID NO: 2412222 - RNA, 19 nt, Artificial Sequence
  Description of Artificial Sequence: Synthetic oligonucleotide
cuguggcauacuuuccuuu

SEQ ID NO: 2412223 - RNA, 19 nt, Artificial Sequence
  Description of Artificial Sequence: Synthetic oligonucleotide
ggcuguuguucagccuaag

SEQ ID NO: 2412224 - RNA, 19 nt, Artificial Sequence
  Description of Artificial Sequence: Synthetic oligonucleotide
gggcaucccagaagcuaag

SEQ ID NO: 2412225 - RNA, 19 nt, Artificial Sequence
  Description of Artificial Sequence: Synthetic oligonucleotide
auccaguaugauggcgcuu

SEQ ID NO: 2412226 - RNA, 19 nt, Artificial Sequence
  Description of Artificial Sequence: Synthetic oligonucleotide
ccagcagacagguagcauu

SEQ ID NO: 2412227 - RNA, 19 nt, Artificial Sequence
  Description of Artificial Sequence: Synthetic oligonucleotide
agccuaaguugagcaguuu

SEQ ID NO: 2412228 - RNA, 19 nt, Artificial Sequence
  Description of Artificial Sequence: Synthetic oligonucleotide
gcacugcagucuugagcug

SEQ ID NO: 2412229 - RNA, 19 nt, Artificial Sequence
  Description of Artificial Sequence: Synthetic oligonucleotide
cugaaacguucuagacacu

SEQ ID NO: 2412230 - RNA, 19 nt, Artificial Sequence
  Description of Artificial Sequence: Synthetic oligonucleotide
gguguuuaucugaaacguu

SEQ ID NO: 2412231 - RNA, 19 nt, Artificial Sequence
  Description of Artificial Sequence: Synthetic oligonucleotide
cagccuaaguugagcaguu

SEQ ID NO: 2412232 - RNA, 19 nt, Artificial Sequence
  Description of Artificial Sequence: Synthetic oligonucleotide
ccagaagcuaagguuguua

SEQ ID NO: 2412233 - RNA, 19 nt, Artificial Sequence
  Description of Artificial Sequence: Synthetic oligonucleotide
ucccaccgcuaugggcaca

SEQ ID NO: 2412234 - RNA, 19 nt, Artificial Sequence
  Description of Artificial Sequence: Synthetic oligonucleotide
auggcgcuugaggccaaua

SEQ ID NO: 2412235 - RNA, 19 nt, Artificial Sequence
  Description of Artificial Sequence: Synthetic oligonucleotide
ccgcuaugggcacaaggaa

SEQ ID NO: 2412236 - RNA, 19 nt, Artificial Sequence
  Description of Artificial Sequence: Synthetic oligonucleotide
ccauuacuaacggaauagu

SEQ ID NO: 2412237 - RNA, 19 nt, Artificial Sequence
  Description of Artificial Sequence: Synthetic oligonucleotide
gcuguggcauacuuuccuu

SEQ ID NO: 2412238 - RNA, 19 nt, Artificial Sequence
  Description of Artificial Sequence: Synthetic oligonucleotide
cagcaacacuagagcaagu

SEQ ID NO: 2412239 - RNA, 19 nt, Artificial Sequence
  Description of Artificial Sequence: Synthetic oligonucleotide
cugcucuuuguugcacaua

SEQ ID NO: 2412240 - RNA, 19 nt, Artificial Sequence
  Description of Artificial Sequence: Synthetic oligonucleotide
ccaguaugauggcgcuuga

SEQ ID NO: 2412241 - RNA, 19 nt, Artificial Sequence
  Description of Artificial Sequence: Synthetic oligonucleotide
cguuaacuuccuucagaua

SEQ ID NO: 2412242 - RNA, 19 nt, Artificial Sequence
  Description of Artificial Sequence: Synthetic oligonucleotide
cuaugggcacaaggaaguu

SEQ ID NO: 2412243 - RNA, 19 nt, Artificial Sequence
  Description of Artificial Sequence: Synthetic oligonucleotide
cgcuugaggccaauaaaau

SEQ ID NO: 2412244 - RNA, 19 nt, Artificial Sequence
  Description of Artificial Sequence: Synthetic oligonucleotide
gccggugaaguuaguugua

SEQ ID NO: 2412245 - RNA, 19 nt, Artificial Sequence
  Description of Artificial Sequence: Synthetic oligonucleotide
cugaaacaaccugcucuuu

SEQ ID NO: 2412246 - RNA, 19 nt, Artificial Sequence
  Description of Artificial Sequence: Synthetic oligonucleotide
gcucuuuguugcacauaua

SEQ ID NO: 2412247 - RNA, 19 nt, Artificial Sequence
  Description of Artificial Sequence: Synthetic oligonucleotide
ccaugguagccagcagaca

SEQ ID NO: 2412248 - RNA, 19 nt, Artificial Sequence
  Description of Artificial Sequence: Synthetic oligonucleotide
gauggcgcuugaggccaau

SEQ ID NO: 2412249 - RNA, 19 nt, Artificial Sequence
  Description of Artificial Sequence: Synthetic oligonucleotide
cugagccauuagccauaua

SEQ ID NO: 2412250 - RNA, 19 nt, Artificial Sequence
  Description of Artificial Sequence: Synthetic oligonucleotide
ggaucccaauuuggccaaa

SEQ ID NO: 2412251 - RNA, 19 nt, Artificial Sequence
  Description of Artificial Sequence: Synthetic oligonucleotide
cccaccgcuaugggcacaa

SEQ ID NO: 2412252 - RNA, 19 nt, Artificial Sequence
  Description of Artificial Sequence: Synthetic oligonucleotide
ccaccgcuaugggcacaag

SEQ ID NO: 2412253 - RNA, 19 nt, Artificial Sequence
  Description of Artificial Sequence: Synthetic oligonucleotide
cccagaagcuaagguuguu

SEQ ID NO: 2412254 - RNA, 19 nt, Artificial Sequence
  Description of Artificial Sequence: Synthetic oligonucleotide
  modified_base (9)..(9): a, c, u, g, unknown or other
agucuuuanacccaaagcc

SEQ ID NO: 2412255 - RNA, 19 nt, Artificial Sequence
  Description of Artificial Sequence: Synthetic oligonucleotide
aacgccaagagccaagagc

SEQ ID NO: 2412256 - RNA, 19 nt, Artificial Sequence
  Description of Artificial Sequence: Synthetic oligonucleotide
agagacuucaggcugagac

SEQ ID NO: 2412257 - RNA, 19 nt, Artificial Sequence
  Description of Artificial Sequence: Synthetic oligonucleotide
agauguguagcgcucaucc

SEQ ID NO: 2412258 - RNA, 19 nt, Artificial Sequence
  Description of Artificial Sequence: Synthetic oligonucleotide
aguacuaugggcugggugg

SEQ ID NO: 2412259 - RNA, 19 nt, Artificial Sequence
  Description of Artificial Sequence: Synthetic oligonucleotide
ugagcagugcaacauaggg

SEQ ID NO: 2412260 - RNA, 19 nt, Artificial Sequence
  Description of Artificial Sequence: Synthetic oligonucleotide
aaggccagaaacuggggcc

SEQ ID NO: 2412261 - RNA, 19 nt, Artificial Sequence
  Description of Artificial Sequence: Synthetic oligonucleotide
aaagucuccacagugacug

SEQ ID NO: 2412262 - RNA, 19 nt, Artificial Sequence
  Description of Artificial Sequence: Synthetic oligonucleotide
cuagguguaagauguaugg

SEQ ID NO: 2412263 - RNA, 19 nt, Artificial Sequence
  Description of Artificial Sequence: Synthetic oligonucleotide
agcagugcaacauagggag

SEQ ID NO: 2412264 - RNA, 19 nt, Artificial Sequence
  Description of Artificial Sequence: Synthetic oligonucleotide
gaggacacgguucauauag

SEQ ID NO: 2412265 - RNA, 19 nt, Artificial Sequence
  Description of Artificial Sequence: Synthetic oligonucleotide
  modified_base (7)..(7): a, c, u, g, unknown or other
ucuuuanacccaaagccac

SEQ ID NO: 2412266 - RNA, 19 nt, Artificial Sequence
  Description of Artificial Sequence: Synthetic oligonucleotide
agugacugcucuuagacug

SEQ ID NO: 2412267 - RNA, 19 nt, Artificial Sequence
  Description of Artificial Sequence: Synthetic oligonucleotide
aacauagggagacuguuga

SEQ ID NO: 2412268 - RNA, 19 nt, Artificial Sequence
  Description of Artificial Sequence: Synthetic oligonucleotide
ucuaccuuggucuugggcu

SEQ ID NO: 2412269 - RNA, 19 nt, Artificial Sequence
  Description of Artificial Sequence: Synthetic oligonucleotide
gagagcaacgccaagagcc

SEQ ID NO: 2412270 - RNA, 19 nt, Artificial Sequence
  Description of Artificial Sequence: Synthetic oligonucleotide
auagggagacuguugagcg

SEQ ID NO: 2412271 - RNA, 19 nt, Artificial Sequence
  Description of Artificial Sequence: Synthetic oligonucleotide
ucuuagacugcucagccca

SEQ ID NO: 2412272 - RNA, 19 nt, Artificial Sequence
  Description of Artificial Sequence: Synthetic oligonucleotide
uccgguaagagacuucagg

SEQ ID NO: 2412273 - RNA, 19 nt, Artificial Sequence
  Description of Artificial Sequence: Synthetic oligonucleotide
aucuucagaagugagugcc

SEQ ID NO: 2412274 - RNA, 19 nt, Artificial Sequence
  Description of Artificial Sequence: Synthetic oligonucleotide
aagauguauggcuccuggc

SEQ ID NO: 2412275 - RNA, 19 nt, Artificial Sequence
  Description of Artificial Sequence: Synthetic oligonucleotide
cuucacuccgguaagagac

SEQ ID NO: 2412276 - RNA, 19 nt, Artificial Sequence
  Description of Artificial Sequence: Synthetic oligonucleotide
cacagugugggguagaaag

SEQ ID NO: 2412277 - RNA, 19 nt, Artificial Sequence
  Description of Artificial Sequence: Synthetic oligonucleotide
auagcagugcuuccggggc

SEQ ID NO: 2412278 - RNA, 19 nt, Artificial Sequence
  Description of Artificial Sequence: Synthetic oligonucleotide
  modified_base (10)..(10): a, c, u, g, unknown or other
cagucuuuanacccaaagc

SEQ ID NO: 2412279 - RNA, 19 nt, Artificial Sequence
  Description of Artificial Sequence: Synthetic oligonucleotide
  modified_base (3)..(3): a, c, u, g, unknown or other
uanacccaaagccacagau

SEQ ID NO: 2412280 - RNA, 19 nt, Artificial Sequence
  Description of Artificial Sequence: Synthetic oligonucleotide
acacaugcccaguaguagc

SEQ ID NO: 2412281 - RNA, 19 nt, Artificial Sequence
  Description of Artificial Sequence: Synthetic oligonucleotide
guuaacuagguguaagaug

SEQ ID NO: 2412282 - RNA, 19 nt, Artificial Sequence
  Description of Artificial Sequence: Synthetic oligonucleotide
ugcggcuugguuaacuagg

SEQ ID NO: 2412283 - RNA, 19 nt, Artificial Sequence
  Description of Artificial Sequence: Synthetic oligonucleotide
acggugucugaccaggugc

SEQ ID NO: 2412284 - RNA, 19 nt, Artificial Sequence
  Description of Artificial Sequence: Synthetic oligonucleotide
guagcgcucauccagcugg

SEQ ID NO: 2412285 - RNA, 19 nt, Artificial Sequence
  Description of Artificial Sequence: Synthetic oligonucleotide
  modified_base (5)..(5): a, c, u, g, unknown or other
uuuanacccaaagccacag

SEQ ID NO: 2412286 - RNA, 19 nt, Artificial Sequence
  Description of Artificial Sequence: Synthetic oligonucleotide
ucauauagcagugcuuccg

SEQ ID NO: 2412287 - RNA, 19 nt, Artificial Sequence
  Description of Artificial Sequence: Synthetic oligonucleotide
aaagaugguuuguagccgu

SEQ ID NO: 2412288 - RNA, 19 nt, Artificial Sequence
  Description of Artificial Sequence: Synthetic oligonucleotide
ucgaaagaugguuuguagc

SEQ ID NO: 2412289 - RNA, 19 nt, Artificial Sequence
  Description of Artificial Sequence: Synthetic oligonucleotide
acaguguugcuccaggaag

SEQ ID NO: 2412290 - RNA, 19 nt, Artificial Sequence
  Description of Artificial Sequence: Synthetic oligonucleotide
guagaaagucuccacagug

SEQ ID NO: 2412291 - RNA, 19 nt, Artificial Sequence
  Description of Artificial Sequence: Synthetic oligonucleotide
gaaggcauggccuggggag

SEQ ID NO: 2412292 - RNA, 19 nt, Artificial Sequence
  Description of Artificial Sequence: Synthetic oligonucleotide
cucaaaacaccacagugug

SEQ ID NO: 2412293 - RNA, 19 nt, Artificial Sequence
  Description of Artificial Sequence: Synthetic oligonucleotide
agguguaagauguauggcu

SEQ ID NO: 2412294 - RNA, 19 nt, Artificial Sequence
  Description of Artificial Sequence: Synthetic oligonucleotide
uugagcggccugcagaggg

SEQ ID NO: 2412295 - RNA, 19 nt, Artificial Sequence
  Description of Artificial Sequence: Synthetic oligonucleotide
ucuggaggacuucacuccg

SEQ ID NO: 2412296 - RNA, 19 nt, Artificial Sequence
  Description of Artificial Sequence: Synthetic oligonucleotide
agaagugagugccccaagg

SEQ ID NO: 2412297 - RNA, 19 nt, Artificial Sequence
  Description of Artificial Sequence: Synthetic oligonucleotide
acacgguucauauagcagu

SEQ ID NO: 2412298 - RNA, 19 nt, Artificial Sequence
  Description of Artificial Sequence: Synthetic oligonucleotide
guagugacugcucuuagac

SEQ ID NO: 2412299 - RNA, 19 nt, Artificial Sequence
  Description of Artificial Sequence: Synthetic oligonucleotide
auguguagcgcucauccag

SEQ ID NO: 2412300 - RNA, 19 nt, Artificial Sequence
  Description of Artificial Sequence: Synthetic oligonucleotide
gaaagaugguuuguagccg

SEQ ID NO: 2412301 - RNA, 19 nt, Artificial Sequence
  Description of Artificial Sequence: Synthetic oligonucleotide
uagaaagucuccacaguga

SEQ ID NO: 2412302 - RNA, 19 nt, Artificial Sequence
  Description of Artificial Sequence: Synthetic oligonucleotide
aucuugguuauguaggggu

SEQ ID NO: 2412303 - RNA, 19 nt, Artificial Sequence
  Description of Artificial Sequence: Synthetic oligonucleotide
agcaucuugguuauguagg

SEQ ID NO: 2412304 - RNA, 19 nt, Artificial Sequence
  Description of Artificial Sequence: Synthetic oligonucleotide
agauguauggcuccuggcu

SEQ ID NO: 2412305 - RNA, 19 nt, Artificial Sequence
  Description of Artificial Sequence: Synthetic oligonucleotide
ucuagaaggaacuggccuc

SEQ ID NO: 2412306 - RNA, 19 nt, Artificial Sequence
  Description of Artificial Sequence: Synthetic oligonucleotide
uuauguagggguauuccau

SEQ ID NO: 2412307 - RNA, 19 nt, Artificial Sequence
  Description of Artificial Sequence: Synthetic oligonucleotide
gacgaacucagcaucuugg

SEQ ID NO: 2412308 - RNA, 19 nt, Artificial Sequence
  Description of Artificial Sequence: Synthetic oligonucleotide
cagucuagaaggaacuggc

SEQ ID NO: 2412309 - RNA, 19 nt, Artificial Sequence
  Description of Artificial Sequence: Synthetic oligonucleotide
aagccacagauguguagcg

SEQ ID NO: 2412310 - RNA, 19 nt, Artificial Sequence
  Description of Artificial Sequence: Synthetic oligonucleotide
gaacucagcaucuugguua

SEQ ID NO: 2412311 - RNA, 19 nt, Artificial Sequence
  Description of Artificial Sequence: Synthetic oligonucleotide
guacugauggaggacacgg

SEQ ID NO: 2412312 - RNA, 19 nt, Artificial Sequence
  Description of Artificial Sequence: Synthetic oligonucleotide
gaugagcagugcaacauag

SEQ ID NO: 2412313 - RNA, 19 nt, Artificial Sequence
  Description of Artificial Sequence: Synthetic oligonucleotide
uugggcguacugauggagg

SEQ ID NO: 2412314 - RNA, 19 nt, Artificial Sequence
  Description of Artificial Sequence: Synthetic oligonucleotide
agagagcaacgccaagagc

SEQ ID NO: 2412315 - RNA, 19 nt, Artificial Sequence
  Description of Artificial Sequence: Synthetic oligonucleotide
agggagacuguugagcggc

SEQ ID NO: 2412316 - RNA, 19 nt, Artificial Sequence
  Description of Artificial Sequence: Synthetic oligonucleotide
auugaggcaaaggacuggg

SEQ ID NO: 2412317 - RNA, 19 nt, Artificial Sequence
  Description of Artificial Sequence: Synthetic oligonucleotide
aacaguacuaugggcuggg

SEQ ID NO: 2412318 - RNA, 19 nt, Artificial Sequence
  Description of Artificial Sequence: Synthetic oligonucleotide
guucauauagcagugcuuc

SEQ ID NO: 2412319 - RNA, 19 nt, Artificial Sequence
  Description of Artificial Sequence: Synthetic oligonucleotide
auguauggcuccuggcuac

SEQ ID NO: 2412320 - RNA, 19 nt, Artificial Sequence
  Description of Artificial Sequence: Synthetic oligonucleotide
  modified_base (15)..(15): a, c, u, g, unknown or other
cagcacagucuuuanaccc

SEQ ID NO: 2412321 - RNA, 19 nt, Artificial Sequence
  Description of Artificial Sequence: Synthetic oligonucleotide
uguguagcgcucauccagc

SEQ ID NO: 2412322 - RNA, 19 nt, Artificial Sequence
  Description of Artificial Sequence: Synthetic oligonucleotide
gaugguuuguagccguccc

SEQ ID NO: 2412323 - RNA, 19 nt, Artificial Sequence
  Description of Artificial Sequence: Synthetic oligonucleotide
uugguuaacuagguguaag

SEQ ID NO: 2412324 - RNA, 19 nt, Artificial Sequence
  Description of Artificial Sequence: Synthetic oligonucleotide
ugguuaacuagguguaaga

SEQ ID NO: 2412325 - RNA, 19 nt, Artificial Sequence
  Description of Artificial Sequence: Synthetic oligonucleotide
uccaucuucagaagugagu

SEQ ID NO: 2412326 - RNA, 19 nt, Artificial Sequence
  Description of Artificial Sequence: Synthetic oligonucleotide
guagggguauuccauuucc

SEQ ID NO: 2412327 - RNA, 19 nt, Artificial Sequence
  Description of Artificial Sequence: Synthetic oligonucleotide
cucgaaagaugguuuguag

SEQ ID NO: 2412328 - RNA, 19 nt, Artificial Sequence
  Description of Artificial Sequence: Synthetic oligonucleotide
cuugaggccugguaauagg

SEQ ID NO: 2412329 - RNA, 19 nt, Artificial Sequence
  Description of Artificial Sequence: Synthetic oligonucleotide
guagccgucccucaaaaca

SEQ ID NO: 2412330 - RNA, 19 nt, Artificial Sequence
  Description of Artificial Sequence: Synthetic oligonucleotide
ugugaugagcagugcaaca

SEQ ID NO: 2412331 - RNA, 19 nt, Artificial Sequence
  Description of Artificial Sequence: Synthetic oligonucleotide
caguguugcuccaggaagg

SEQ ID NO: 2412332 - RNA, 19 nt, Artificial Sequence
  Description of Artificial Sequence: Synthetic oligonucleotide
ugugggguagaaagucucc

SEQ ID NO: 2412333 - RNA, 19 nt, Artificial Sequence
  Description of Artificial Sequence: Synthetic oligonucleotide
ugagacugcaggaggacuc

SEQ ID NO: 2412334 - RNA, 19 nt, Artificial Sequence
  Description of Artificial Sequence: Synthetic oligonucleotide
guuauguagggguauucca

SEQ ID NO: 2412335 - RNA, 19 nt, Artificial Sequence
  Description of Artificial Sequence: Synthetic oligonucleotide
uggggagaagggaucaucu

SEQ ID NO: 2412336 - RNA, 19 nt, Artificial Sequence
  Description of Artificial Sequence: Synthetic oligonucleotide
ucuucagaagugagugccc

SEQ ID NO: 2412337 - RNA, 19 nt, Artificial Sequence
  Description of Artificial Sequence: Synthetic oligonucleotide
  modified_base (2)..(2): a, c, u, g, unknown or other
anacccaaagccacagaug

SEQ ID NO: 2412338 - RNA, 19 nt, Artificial Sequence
  Description of Artificial Sequence: Synthetic oligonucleotide
uucauauagcagugcuucc

SEQ ID NO: 2412339 - RNA, 19 nt, Artificial Sequence
  Description of Artificial Sequence: Synthetic oligonucleotide
agaugguuuguagccgucc

SEQ ID NO: 2412340 - RNA, 19 nt, Artificial Sequence
  Description of Artificial Sequence: Synthetic oligonucleotide
  modified_base (4)..(4): a, c, u, g, unknown or other
uuanacccaaagccacaga

SEQ ID NO: 2412341 - RNA, 19 nt, Artificial Sequence
  Description of Artificial Sequence: Synthetic oligonucleotide
aggaagccaauguggcccc

SEQ ID NO: 2412342 - RNA, 19 nt, Artificial Sequence
  Description of Artificial Sequence: Synthetic oligonucleotide
  modified_base (17)..(17): a, c, u, g, unknown or other
ggcagcacagucuuuanac

SEQ ID NO: 2412343 - RNA, 19 nt, Artificial Sequence
  Description of Artificial Sequence: Synthetic oligonucleotide
aaacaccacaguguggggu

SEQ ID NO: 2412344 - RNA, 19 nt, Artificial Sequence
  Description of Artificial Sequence: Synthetic oligonucleotide
agcccaaguagagagcaac

SEQ ID NO: 2412345 - RNA, 19 nt, Artificial Sequence
  Description of Artificial Sequence: Synthetic oligonucleotide
cagcaucuugguuauguag

SEQ ID NO: 2412346 - RNA, 19 nt, Artificial Sequence
  Description of Artificial Sequence: Synthetic oligonucleotide
gagacggugucugaccagg

SEQ ID NO: 2412347 - RNA, 19 nt, Artificial Sequence
  Description of Artificial Sequence: Synthetic oligonucleotide
uagccgucccucaaaacac

SEQ ID NO: 2412348 - RNA, 19 nt, Artificial Sequence
  Description of Artificial Sequence: Synthetic oligonucleotide
agcucuuuccaucuucaga

SEQ ID NO: 2412349 - RNA, 19 nt, Artificial Sequence
  Description of Artificial Sequence: Synthetic oligonucleotide
uucugcgagcucagggacg

SEQ ID NO: 2412350 - RNA, 19 nt, Artificial Sequence
  Description of Artificial Sequence: Synthetic oligonucleotide
ugcaacauagggagacugu

SEQ ID NO: 2412351 - RNA, 19 nt, Artificial Sequence
  Description of Artificial Sequence: Synthetic oligonucleotide
aacaccacaguguggggua

SEQ ID NO: 2412352 - RNA, 19 nt, Artificial Sequence
  Description of Artificial Sequence: Synthetic oligonucleotide
agucuagaaggaacuggcc

SEQ ID NO: 2412353 - RNA, 19 nt, Artificial Sequence
  Description of Artificial Sequence: Synthetic oligonucleotide
gaaggaacuggccuccauc

SEQ ID NO: 2412354 - RNA, 19 nt, Artificial Sequence
  Description of Artificial Sequence: Synthetic oligonucleotide
aacuagguguaagauguau

SEQ ID NO: 2412355 - RNA, 19 nt, Artificial Sequence
  Description of Artificial Sequence: Synthetic oligonucleotide
  modified_base (8)..(8): a, c, u, g, unknown or other
gucuuuanacccaaagcca

SEQ ID NO: 2412356 - RNA, 19 nt, Artificial Sequence
  Description of Artificial Sequence: Synthetic oligonucleotide
gacacgguucauauagcag

SEQ ID NO: 2412357 - RNA, 19 nt, Artificial Sequence
  Description of Artificial Sequence: Synthetic oligonucleotide
ugggguauggauggcaucu

SEQ ID NO: 2412358 - RNA, 19 nt, Artificial Sequence
  Description of Artificial Sequence: Synthetic oligonucleotide
uggcuacugccgcugaugc

SEQ ID NO: 2412359 - RNA, 19 nt, Artificial Sequence
  Description of Artificial Sequence: Synthetic oligonucleotide
uugaggcaaaggacugggg

SEQ ID NO: 2412360 - RNA, 19 nt, Artificial Sequence
  Description of Artificial Sequence: Synthetic oligonucleotide
aggucaggcagcuccaugu

SEQ ID NO: 2412361 - RNA, 19 nt, Artificial Sequence
  Description of Artificial Sequence: Synthetic oligonucleotide
cagacgaggccucuggggc

SEQ ID NO: 2412362 - RNA, 19 nt, Artificial Sequence
  Description of Artificial Sequence: Synthetic oligonucleotide
guguaagauguauggcucc

SEQ ID NO: 2412363 - RNA, 19 nt, Artificial Sequence
  Description of Artificial Sequence: Synthetic oligonucleotide
ucagggacgaacucagcau

SEQ ID NO: 2412364 - RNA, 19 nt, Artificial Sequence
  Description of Artificial Sequence: Synthetic oligonucleotide
uguagggguauuccauuuc

SEQ ID NO: 2412365 - RNA, 19 nt, Artificial Sequence
  Description of Artificial Sequence: Synthetic oligonucleotide
agugagugccccaagguca

SEQ ID NO: 2412366 - RNA, 19 nt, Artificial Sequence
  Description of Artificial Sequence: Synthetic oligonucleotide
caacauagggagacuguug

SEQ ID NO: 2412367 - RNA, 19 nt, Artificial Sequence
  Description of Artificial Sequence: Synthetic oligonucleotide
uguaagauguauggcuccu

SEQ ID NO: 2412368 - RNA, 19 nt, Artificial Sequence
  Description of Artificial Sequence: Synthetic oligonucleotide
ugcucuuagacugcucagc

SEQ ID NO: 2412369 - RNA, 19 nt, Artificial Sequence
  Description of Artificial Sequence: Synthetic oligonucleotide
acgccaagagccaagagca

SEQ ID NO: 2412370 - RNA, 19 nt, Artificial Sequence
  Description of Artificial Sequence: Synthetic oligonucleotide
uagguguaagauguauggc

SEQ ID NO: 2412371 - RNA, 19 nt, Artificial Sequence
  Description of Artificial Sequence: Synthetic oligonucleotide
agacuguugagcggccugc

SEQ ID NO: 2412372 - RNA, 19 nt, Artificial Sequence
  Description of Artificial Sequence: Synthetic oligonucleotide
uauguagggguauuccauu

SEQ ID NO: 2412373 - RNA, 19 nt, Artificial Sequence
  Description of Artificial Sequence: Synthetic oligonucleotide
gaccaggugccguucugcg

SEQ ID NO: 2412374 - RNA, 19 nt, Artificial Sequence
  Description of Artificial Sequence: Synthetic oligonucleotide
cuagaaggaacuggccucc

SEQ ID NO: 2412375 - RNA, 19 nt, Artificial Sequence
  Description of Artificial Sequence: Synthetic oligonucleotide
acagugacuggacaguguu

SEQ ID NO: 2412376 - RNA, 19 nt, Artificial Sequence
  Description of Artificial Sequence: Synthetic oligonucleotide
caucuucagaagugagugc

SEQ ID NO: 2412377 - RNA, 19 nt, Artificial Sequence
  Description of Artificial Sequence: Synthetic oligonucleotide
acuagguguaagauguaug

SEQ ID NO: 2412378 - RNA, 19 nt, Artificial Sequence
  Description of Artificial Sequence: Synthetic oligonucleotide
acugauggaggacacgguu

SEQ ID NO: 2412379 - RNA, 19 nt, Artificial Sequence
  Description of Artificial Sequence: Synthetic oligonucleotide
cuucagaagugagugcccc

SEQ ID NO: 2412380 - RNA, 19 nt, Artificial Sequence
  Description of Artificial Sequence: Synthetic oligonucleotide
aggccagaaacuggggccc

SEQ ID NO: 2412381 - RNA, 19 nt, Artificial Sequence
  Description of Artificial Sequence: Synthetic oligonucleotide
acauagggagacuguugag

SEQ ID NO: 2412382 - RNA, 19 nt, Artificial Sequence
  Description of Artificial Sequence: Synthetic oligonucleotide
ugaugagcagugcaacaua

SEQ ID NO: 2412383 - RNA, 19 nt, Artificial Sequence
  Description of Artificial Sequence: Synthetic oligonucleotide
ccgguaagagacuucaggc

SEQ ID NO: 2412384 - RNA, 19 nt, Artificial Sequence
  Description of Artificial Sequence: Synthetic oligonucleotide
aguagagagcaacgccaag

SEQ ID NO: 2412385 - RNA, 19 nt, Artificial Sequence
  Description of Artificial Sequence: Synthetic oligonucleotide
cucuuagacugcucagccc

SEQ ID NO: 2412386 - RNA, 19 nt, Artificial Sequence
  Description of Artificial Sequence: Synthetic oligonucleotide
  modified_base (6)..(6): a, c, u, g, unknown or other
cuuuanacccaaagccaca

SEQ ID NO: 2412387 - RNA, 19 nt, Artificial Sequence
  Description of Artificial Sequence: Synthetic oligonucleotide
acuucacuccgguaagaga

SEQ ID NO: 2412388 - RNA, 19 nt, Artificial Sequence
  Description of Artificial Sequence: Synthetic oligonucleotide
  modified_base (16)..(16): a, c, u, g, unknown or other
gcagcacagucuuuanacc

SEQ ID NO: 2412389 - RNA, 19 nt, Artificial Sequence
  Description of Artificial Sequence: Synthetic oligonucleotide
uauggauggcaucuaccuu

SEQ ID NO: 2412390 - RNA, 19 nt, Artificial Sequence
  Description of Artificial Sequence: Synthetic oligonucleotide
gagacuguugagcggccug

SEQ ID NO: 2412391 - RNA, 19 nt, Artificial Sequence
  Description of Artificial Sequence: Synthetic oligonucleotide
agaaacuggggcccagcca

SEQ ID NO: 2412392 - RNA, 19 nt, Artificial Sequence
  Description of Artificial Sequence: Synthetic oligonucleotide
uagugcuggaagauggcuu

SEQ ID NO: 2412393 - RNA, 19 nt, Artificial Sequence
  Description of Artificial Sequence: Synthetic oligonucleotide
gagagacggugucugacca

SEQ ID NO: 2412394 - RNA, 19 nt, Artificial Sequence
  Description of Artificial Sequence: Synthetic oligonucleotide
acgaacucagcaucuuggu

SEQ ID NO: 2412395 - RNA, 19 nt, Artificial Sequence
  Description of Artificial Sequence: Synthetic oligonucleotide
cauugaggcaaaggacugg

SEQ ID NO: 2412396 - RNA, 19 nt, Artificial Sequence
  Description of Artificial Sequence: Synthetic oligonucleotide
uucacuccgguaagagacu

SEQ ID NO: 2412397 - RNA, 19 nt, Artificial Sequence
  Description of Artificial Sequence: Synthetic oligonucleotide
acgguucauauagcagugc

SEQ ID NO: 2412398 - RNA, 19 nt, Artificial Sequence
  Description of Artificial Sequence: Synthetic oligonucleotide
aagaugguuuguagccguc

SEQ ID NO: 2412399 - RNA, 19 nt, Artificial Sequence
  Description of Artificial Sequence: Synthetic oligonucleotide
ucugcgagcucagggacga

SEQ ID NO: 2412400 - RNA, 19 nt, Artificial Sequence
  Description of Artificial Sequence: Synthetic oligonucleotide
gguuauguagggguauucc

SEQ ID NO: 2412401 - RNA, 19 nt, Artificial Sequence
  Description of Artificial Sequence: Synthetic oligonucleotide
ucagaagugagugccccaa

SEQ ID NO: 2412402 - RNA, 19 nt, Artificial Sequence
  Description of Artificial Sequence: Synthetic oligonucleotide
uggaagcaacaguacuaug

SEQ ID NO: 2412403 - RNA, 19 nt, Artificial Sequence
  Description of Artificial Sequence: Synthetic oligonucleotide
uucagaagugagugcccca

SEQ ID NO: 2412404 - RNA, 19 nt, Artificial Sequence
  Description of Artificial Sequence: Synthetic oligonucleotide
uaagagacuucaggcugag

SEQ ID NO: 2412405 - RNA, 19 nt, Artificial Sequence
  Description of Artificial Sequence: Synthetic oligonucleotide
cucagggacgaacucagca

SEQ ID NO: 2412406 - RNA, 19 nt, Artificial Sequence
  Description of Artificial Sequence: Synthetic oligonucleotide
auggcuugggcguacugau

SEQ ID NO: 2412407 - RNA, 19 nt, Artificial Sequence
  Description of Artificial Sequence: Synthetic oligonucleotide
cacacaugcccaguaguag

SEQ ID NO: 2412408 - RNA, 19 nt, Artificial Sequence
  Description of Artificial Sequence: Synthetic oligonucleotide
cagaaacuggggcccagcc

SEQ ID NO: 2412409 - RNA, 19 nt, Artificial Sequence
  Description of Artificial Sequence: Synthetic oligonucleotide
acuaugggcugggugguag

SEQ ID NO: 2412410 - RNA, 19 nt, Artificial Sequence
  Description of Artificial Sequence: Synthetic oligonucleotide
gccucuggggcacacaugc

SEQ ID NO: 2412411 - RNA, 19 nt, Artificial Sequence
  Description of Artificial Sequence: Synthetic oligonucleotide
gauguguagcgcucaucca

SEQ ID NO: 2412412 - RNA, 19 nt, Artificial Sequence
  Description of Artificial Sequence: Synthetic oligonucleotide
guagcccaaguagagagca

SEQ ID NO: 2412413 - RNA, 19 nt, Artificial Sequence
  Description of Artificial Sequence: Synthetic oligonucleotide
agguagugacugcucuuag

SEQ ID NO: 2412414 - RNA, 19 nt, Artificial Sequence
  Description of Artificial Sequence: Synthetic oligonucleotide
uggcuccuggcuacugccg

SEQ ID NO: 2412415 - RNA, 19 nt, Artificial Sequence
  Description of Artificial Sequence: Synthetic oligonucleotide
guucugcgagcucagggac

SEQ ID NO: 2412416 - RNA, 19 nt, Artificial Sequence
  Description of Artificial Sequence: Synthetic oligonucleotide
cuuagacugcucagcccag

SEQ ID NO: 2412417 - RNA, 19 nt, Artificial Sequence
  Description of Artificial Sequence: Synthetic oligonucleotide
aaacuggggcccagccacc

SEQ ID NO: 2412418 - RNA, 19 nt, Artificial Sequence
  Description of Artificial Sequence: Synthetic oligonucleotide
caguacuaugggcugggug

SEQ ID NO: 2412419 - RNA, 19 nt, Artificial Sequence
  Description of Artificial Sequence: Synthetic oligonucleotide
uagacugcucagcccaguc

SEQ ID NO: 2412420 - RNA, 19 nt, Artificial Sequence
  Description of Artificial Sequence: Synthetic oligonucleotide
gaagugagugccccaaggu

SEQ ID NO: 2412421 - RNA, 19 nt, Artificial Sequence
  Description of Artificial Sequence: Synthetic oligonucleotide
ucugaccaggugccguucu

SEQ ID NO: 2412422 - RNA, 19 nt, Artificial Sequence
  Description of Artificial Sequence: Synthetic oligonucleotide
caacaguacuaugggcugg

SEQ ID NO: 2412423 - RNA, 19 nt, Artificial Sequence
  Description of Artificial Sequence: Synthetic oligonucleotide
aggccugguaauaggcagc

SEQ ID NO: 2412424 - RNA, 19 nt, Artificial Sequence
  Description of Artificial Sequence: Synthetic oligonucleotide
ucuugucagcucuuuccau

SEQ ID NO: 2412425 - RNA, 19 nt, Artificial Sequence
  Description of Artificial Sequence: Synthetic oligonucleotide
cuaugggcugggugguagg

SEQ ID NO: 2412426 - RNA, 19 nt, Artificial Sequence
  Description of Artificial Sequence: Synthetic oligonucleotide
ugugcggcuugguuaacua

SEQ ID NO: 2412427 - RNA, 19 nt, Artificial Sequence
  Description of Artificial Sequence: Synthetic oligonucleotide
ugguuuguagccgucccuc

SEQ ID NO: 2412428 - RNA, 19 nt, Artificial Sequence
  Description of Artificial Sequence: Synthetic oligonucleotide
gagcagugcaacauaggga

SEQ ID NO: 2412429 - RNA, 19 nt, Artificial Sequence
  Description of Artificial Sequence: Synthetic oligonucleotide
augagcagugcaacauagg

SEQ ID NO: 2412430 - RNA, 19 nt, Artificial Sequence
  Description of Artificial Sequence: Synthetic oligonucleotide
cuugggcguacugauggag

SEQ ID NO: 2412431 - RNA, 19 nt, Artificial Sequence
  Description of Artificial Sequence: Synthetic oligonucleotide
uguagccgucccucaaaac

SEQ ID NO: 2412432 - RNA, 19 nt, Artificial Sequence
  Description of Artificial Sequence: Synthetic oligonucleotide
gguguaagauguauggcuc

SEQ ID NO: 2412433 - RNA, 19 nt, Artificial Sequence
  Description of Artificial Sequence: Synthetic oligonucleotide
cagggacgaacucagcauc

SEQ ID NO: 2412434 - RNA, 19 nt, Artificial Sequence
  Description of Artificial Sequence: Synthetic oligonucleotide
cuggaggacuucacuccgg

SEQ ID NO: 2412435 - RNA, 19 nt, Artificial Sequence
  Description of Artificial Sequence: Synthetic oligonucleotide
ggcuugguuaacuaggugu

SEQ ID NO: 2412436 - RNA, 19 nt, Artificial Sequence
  Description of Artificial Sequence: Synthetic oligonucleotide
ggacucgaaagaugguuug

SEQ ID NO: 2412437 - RNA, 19 nt, Artificial Sequence
  Description of Artificial Sequence: Synthetic oligonucleotide
cagugugggguagaaaguc

SEQ ID NO: 2412438 - RNA, 19 nt, Artificial Sequence
  Description of Artificial Sequence: Synthetic oligonucleotide
aggcagcuccauguagugc

SEQ ID NO: 2412439 - RNA, 19 nt, Artificial Sequence
  Description of Artificial Sequence: Synthetic oligonucleotide
auguagggguauuccauuu

SEQ ID NO: 2412440 - RNA, 19 nt, Artificial Sequence
  Description of Artificial Sequence: Synthetic oligonucleotide
gguauggauggcaucuacc

SEQ ID NO: 2412441 - RNA, 19 nt, Artificial Sequence
  Description of Artificial Sequence: Synthetic oligonucleotide
gcagagggaaggcauggcc

SEQ ID NO: 2412442 - RNA, 19 nt, Artificial Sequence
  Description of Artificial Sequence: Synthetic oligonucleotide
uugggcuugaggccuggua

SEQ ID NO: 2412443 - RNA, 19 nt, Artificial Sequence
  Description of Artificial Sequence: Synthetic oligonucleotide
ccagucuagaaggaacugg

SEQ ID NO: 2412444 - RNA, 19 nt, Artificial Sequence
  Description of Artificial Sequence: Synthetic oligonucleotide
gugcggcuugguuaacuag

SEQ ID NO: 2412445 - RNA, 19 nt, Artificial Sequence
  Description of Artificial Sequence: Synthetic oligonucleotide
gugccccaaggucaggcag

SEQ ID NO: 2412446 - RNA, 19 nt, Artificial Sequence
  Description of Artificial Sequence: Synthetic oligonucleotide
agccgucccucaaaacacc

SEQ ID NO: 2412447 - RNA, 19 nt, Artificial Sequence
  Description of Artificial Sequence: Synthetic oligonucleotide
gagugccccaaggucaggc

SEQ ID NO: 2412448 - RNA, 19 nt, Artificial Sequence
  Description of Artificial Sequence: Synthetic oligonucleotide
guaauaggcagcacagucu

SEQ ID NO: 2412449 - RNA, 19 nt, Artificial Sequence
  Description of Artificial Sequence: Synthetic oligonucleotide
ggacacgguucauauagca

SEQ ID NO: 2412450 - RNA, 19 nt, Artificial Sequence
  Description of Artificial Sequence: Synthetic oligonucleotide
guaagauguauggcuccug

SEQ ID NO: 2412451 - RNA, 19 nt, Artificial Sequence
  Description of Artificial Sequence: Synthetic oligonucleotide
cagagagacggugucugac

SEQ ID NO: 2412452 - RNA, 19 nt, Artificial Sequence
  Description of Artificial Sequence: Synthetic oligonucleotide
ugguuauguagggguauuc

SEQ ID NO: 2412453 - RNA, 19 nt, Artificial Sequence
  Description of Artificial Sequence: Synthetic oligonucleotide
ccaggugccguucugcgag

SEQ ID NO: 2412454 - RNA, 19 nt, Artificial Sequence
  Description of Artificial Sequence: Synthetic oligonucleotide
ccugguaauaggcagcaca

SEQ ID NO: 2412455 - RNA, 19 nt, Artificial Sequence
  Description of Artificial Sequence: Synthetic oligonucleotide
agugccccaaggucaggca

SEQ ID NO: 2412456 - RNA, 19 nt, Artificial Sequence
  Description of Artificial Sequence: Synthetic oligonucleotide
aggcaaaggacugggguau

SEQ ID NO: 2412457 - RNA, 19 nt, Artificial Sequence
  Description of Artificial Sequence: Synthetic oligonucleotide
uaacuagguguaagaugua

SEQ ID NO: 2412458 - RNA, 19 nt, Artificial Sequence
  Description of Artificial Sequence: Synthetic oligonucleotide
ugcgagcucagggacgaac

SEQ ID NO: 2412459 - RNA, 19 nt, Artificial Sequence
  Description of Artificial Sequence: Synthetic oligonucleotide
acucgaaagaugguuugua

SEQ ID NO: 2412460 - RNA, 19 nt, Artificial Sequence
  Description of Artificial Sequence: Synthetic oligonucleotide
aagggaucaucugcugcau

SEQ ID NO: 2412461 - RNA, 19 nt, Artificial Sequence
  Description of Artificial Sequence: Synthetic oligonucleotide
  modified_base (19)..(19): a, c, u, g, unknown or other
uaggcagcacagucuuuan

SEQ ID NO: 2412462 - RNA, 19 nt, Artificial Sequence
  Description of Artificial Sequence: Synthetic oligonucleotide
ugccguucugcgagcucag

SEQ ID NO: 2412463 - RNA, 19 nt, Artificial Sequence
  Description of Artificial Sequence: Synthetic oligonucleotide
ggacgaacucagcaucuug

SEQ ID NO: 2412464 - RNA, 19 nt, Artificial Sequence
  Description of Artificial Sequence: Synthetic oligonucleotide
agagcaacgccaagagcca

SEQ ID NO: 2412465 - RNA, 19 nt, Artificial Sequence
  Description of Artificial Sequence: Synthetic oligonucleotide
ugucugaccaggugccguu

SEQ ID NO: 2412466 - RNA, 19 nt, Artificial Sequence
  Description of Artificial Sequence: Synthetic oligonucleotide
agacgaggccucuggggca

SEQ ID NO: 2412467 - RNA, 19 nt, Artificial Sequence
  Description of Artificial Sequence: Synthetic oligonucleotide
acagauguguagcgcucau

SEQ ID NO: 2412468 - RNA, 19 nt, Artificial Sequence
  Description of Artificial Sequence: Synthetic oligonucleotide
ccagacgaggccucugggg

SEQ ID NO: 2412469 - RNA, 19 nt, Artificial Sequence
  Description of Artificial Sequence: Synthetic oligonucleotide
gcucagcccagucuagaag

SEQ ID NO: 2412470 - RNA, 19 nt, Artificial Sequence
  Description of Artificial Sequence: Synthetic oligonucleotide
agcaacgccaagagccaag

SEQ ID NO: 2412471 - RNA, 19 nt, Artificial Sequence
  Description of Artificial Sequence: Synthetic oligonucleotide
gguagugacugcucuuaga

SEQ ID NO: 2412472 - RNA, 19 nt, Artificial Sequence
  Description of Artificial Sequence: Synthetic oligonucleotide
ugacugcucuuagacugcu

SEQ ID NO: 2412473 - RNA, 19 nt, Artificial Sequence
  Description of Artificial Sequence: Synthetic oligonucleotide
aggacucgaaagaugguuu

SEQ ID NO: 2412474 - RNA, 19 nt, Artificial Sequence
  Description of Artificial Sequence: Synthetic oligonucleotide
uugguuauguagggguauu

SEQ ID NO: 2412475 - RNA, 19 nt, Artificial Sequence
  Description of Artificial Sequence: Synthetic oligonucleotide
gaagauggcuugggcguac

SEQ ID NO: 2412476 - RNA, 19 nt, Artificial Sequence
  Description of Artificial Sequence: Synthetic oligonucleotide
caugcccaguaguagccca

SEQ ID NO: 2412477 - RNA, 19 nt, Artificial Sequence
  Description of Artificial Sequence: Synthetic oligonucleotide
gugacugcucuuagacugc

SEQ ID NO: 2412478 - RNA, 19 nt, Artificial Sequence
  Description of Artificial Sequence: Synthetic oligonucleotide
ggaugugcggcuugguuaa

SEQ ID NO: 2412479 - RNA, 19 nt, Artificial Sequence
  Description of Artificial Sequence: Synthetic oligonucleotide
gugugggguagaaagucuc

SEQ ID NO: 2412480 - RNA, 19 nt, Artificial Sequence
  Description of Artificial Sequence: Synthetic oligonucleotide
uccuuccaggaagccaaug

SEQ ID NO: 2412481 - RNA, 19 nt, Artificial Sequence
  Description of Artificial Sequence: Synthetic oligonucleotide
agcagugcuuccggggcag

SEQ ID NO: 2412482 - RNA, 19 nt, Artificial Sequence
  Description of Artificial Sequence: Synthetic oligonucleotide
uguauggcuccuggcuacu

SEQ ID NO: 2412483 - RNA, 19 nt, Artificial Sequence
  Description of Artificial Sequence: Synthetic oligonucleotide
cuccgguaagagacuucag

SEQ ID NO: 2412484 - RNA, 19 nt, Artificial Sequence
  Description of Artificial Sequence: Synthetic oligonucleotide
caucuaccuuggucuuggg

SEQ ID NO: 2412485 - RNA, 19 nt, Artificial Sequence
  Description of Artificial Sequence: Synthetic oligonucleotide
accaggugccguucugcga

SEQ ID NO: 2412486 - RNA, 19 nt, Artificial Sequence
  Description of Artificial Sequence: Synthetic oligonucleotide
gcauugaggcaaaggacug

SEQ ID NO: 2412487 - RNA, 19 nt, Artificial Sequence
  Description of Artificial Sequence: Synthetic oligonucleotide
caacgccaagagccaagag

SEQ ID NO: 2412488 - RNA, 19 nt, Artificial Sequence
  Description of Artificial Sequence: Synthetic oligonucleotide
gacuucaggcugagacugc

SEQ ID NO: 2412489 - RNA, 19 nt, Artificial Sequence
  Description of Artificial Sequence: Synthetic oligonucleotide
uggcggaugugcggcuugg

SEQ ID NO: 2412490 - RNA, 19 nt, Artificial Sequence
  Description of Artificial Sequence: Synthetic oligonucleotide
aagauggcuugggcguacu

SEQ ID NO: 2412491 - RNA, 19 nt, Artificial Sequence
  Description of Artificial Sequence: Synthetic oligonucleotide
gcugaugccuggaagcaac

SEQ ID NO: 2412492 - RNA, 19 nt, Artificial Sequence
  Description of Artificial Sequence: Synthetic oligonucleotide
gcuugaggccugguaauag

SEQ ID NO: 2412493 - RNA, 19 nt, Artificial Sequence
  Description of Artificial Sequence: Synthetic oligonucleotide
ccguucugcgagcucaggg

SEQ ID NO: 2412494 - RNA, 19 nt, Artificial Sequence
  Description of Artificial Sequence: Synthetic oligonucleotide
cugggguauggauggcauc

SEQ ID NO: 2412495 - RNA, 19 nt, Artificial Sequence
  Description of Artificial Sequence: Synthetic oligonucleotide
agggacgaacucagcaucu

SEQ ID NO: 2412496 - RNA, 19 nt, Artificial Sequence
  Description of Artificial Sequence: Synthetic oligonucleotide
gcccaaguagagagcaacg

SEQ ID NO: 2412497 - RNA, 19 nt, Artificial Sequence
  Description of Artificial Sequence: Synthetic oligonucleotide
cagagggaaggcauggccu

SEQ ID NO: 2412498 - RNA, 19 nt, Artificial Sequence
  Description of Artificial Sequence: Synthetic oligonucleotide
ggguauggauggcaucuac

SEQ ID NO: 2412499 - RNA, 19 nt, Artificial Sequence
  Description of Artificial Sequence: Synthetic oligonucleotide
ucacuccgguaagagacuu

SEQ ID NO: 2412500 - RNA, 19 nt, Artificial Sequence
  Description of Artificial Sequence: Synthetic oligonucleotide
gugccguucugcgagcuca

SEQ ID NO: 2412501 - RNA, 19 nt, Artificial Sequence
  Description of Artificial Sequence: Synthetic oligonucleotide
gggcccagccaccagacga

SEQ ID NO: 2412502 - RNA, 19 nt, Artificial Sequence
  Description of Artificial Sequence: Synthetic oligonucleotide
gaaagucuccacagugacu

SEQ ID NO: 2412503 - RNA, 19 nt, Artificial Sequence
  Description of Artificial Sequence: Synthetic oligonucleotide
aagagacuucaggcugaga

SEQ ID NO: 2412504 - RNA, 19 nt, Artificial Sequence
  Description of Artificial Sequence: Synthetic oligonucleotide
augugcggcuugguuaacu

SEQ ID NO: 2412505 - RNA, 19 nt, Artificial Sequence
  Description of Artificial Sequence: Synthetic oligonucleotide
uggcaucuaccuuggucuu

SEQ ID NO: 2412506 - RNA, 19 nt, Artificial Sequence
  Description of Artificial Sequence: Synthetic oligonucleotide
guugagcggccugcagagg

SEQ ID NO: 2412507 - RNA, 19 nt, Artificial Sequence
  Description of Artificial Sequence: Synthetic oligonucleotide
ugagugccccaaggucagg

SEQ ID NO: 2412508 - RNA, 19 nt, Artificial Sequence
  Description of Artificial Sequence: Synthetic oligonucleotide
guagggguccagguaguga

SEQ ID NO: 2412509 - RNA, 19 nt, Artificial Sequence
  Description of Artificial Sequence: Synthetic oligonucleotide
gacgaggccucuggggcac

SEQ ID NO: 2412510 - RNA, 19 nt, Artificial Sequence
  Description of Artificial Sequence: Synthetic oligonucleotide
auggaggacacgguucaua

SEQ ID NO: 2412511 - RNA, 19 nt, Artificial Sequence
  Description of Artificial Sequence: Synthetic oligonucleotide
gggcacacaugcccaguag

SEQ ID NO: 2412512 - RNA, 19 nt, Artificial Sequence
  Description of Artificial Sequence: Synthetic oligonucleotide
ccucaaaacaccacagugu

SEQ ID NO: 2412513 - RNA, 19 nt, Artificial Sequence
  Description of Artificial Sequence: Synthetic oligonucleotide
guguugcuccaggaaggcc

SEQ ID NO: 2412514 - RNA, 19 nt, Artificial Sequence
  Description of Artificial Sequence: Synthetic oligonucleotide
ggcuccuggcuacugccgc

SEQ ID NO: 2412515 - RNA, 19 nt, Artificial Sequence
  Description of Artificial Sequence: Synthetic oligonucleotide
cuugguuaacuagguguaa

SEQ ID NO: 2412516 - RNA, 19 nt, Artificial Sequence
  Description of Artificial Sequence: Synthetic oligonucleotide
cacuccgguaagagacuuc

SEQ ID NO: 2412517 - RNA, 19 nt, Artificial Sequence
  Description of Artificial Sequence: Synthetic oligonucleotide
uccggggcagcaguccuuc

SEQ ID NO: 2412518 - RNA, 19 nt, Artificial Sequence
  Description of Artificial Sequence: Synthetic oligonucleotide
gguuuguagccgucccuca

SEQ ID NO: 2412519 - RNA, 19 nt, Artificial Sequence
  Description of Artificial Sequence: Synthetic oligonucleotide
gacucgaaagaugguuugu

SEQ ID NO: 2412520 - RNA, 19 nt, Artificial Sequence
  Description of Artificial Sequence: Synthetic oligonucleotide
guagugcuggaagauggcu

SEQ ID NO: 2412521 - RNA, 19 nt, Artificial Sequence
  Description of Artificial Sequence: Synthetic oligonucleotide
ggugucugaccaggugccg

SEQ ID NO: 2412522 - RNA, 19 nt, Artificial Sequence
  Description of Artificial Sequence: Synthetic oligonucleotide
gguuaacuagguguaagau

SEQ ID NO: 2412523 - RNA, 19 nt, Artificial Sequence
  Description of Artificial Sequence: Synthetic oligonucleotide
gcuugguuaacuaggugua

SEQ ID NO: 2412524 - RNA, 19 nt, Artificial Sequence
  Description of Artificial Sequence: Synthetic oligonucleotide
gacuguugagcggccugca

SEQ ID NO: 2412525 - RNA, 19 nt, Artificial Sequence
  Description of Artificial Sequence: Synthetic oligonucleotide
ggaucaucugcugcauuga

SEQ ID NO: 2412526 - RNA, 19 nt, Artificial Sequence
  Description of Artificial Sequence: Synthetic oligonucleotide
caggugccguucugcgagc

SEQ ID NO: 2412527 - RNA, 19 nt, Artificial Sequence
  Description of Artificial Sequence: Synthetic oligonucleotide
ggacaguguugcuccagga

SEQ ID NO: 2412528 - RNA, 19 nt, Artificial Sequence
  Description of Artificial Sequence: Synthetic oligonucleotide
guauggcuccuggcuacug

SEQ ID NO: 2412529 - RNA, 19 nt, Artificial Sequence
  Description of Artificial Sequence: Synthetic oligonucleotide
cagguagugacugcucuua

SEQ ID NO: 2412530 - RNA, 19 nt, Artificial Sequence
  Description of Artificial Sequence: Synthetic oligonucleotide
cuggaagcaacaguacuau

SEQ ID NO: 2412531 - RNA, 19 nt, Artificial Sequence
  Description of Artificial Sequence: Synthetic oligonucleotide
gccacagauguguagcgcu

SEQ ID NO: 2412532 - RNA, 19 nt, Artificial Sequence
  Description of Artificial Sequence: Synthetic oligonucleotide
uggccuccaucuggggucu

SEQ ID NO: 2412533 - RNA, 19 nt, Artificial Sequence
  Description of Artificial Sequence: Synthetic oligonucleotide
cggugucugaccaggugcc

SEQ ID NO: 2412534 - RNA, 19 nt, Artificial Sequence
  Description of Artificial Sequence: Synthetic oligonucleotide
acaguacuaugggcugggu

SEQ ID NO: 2412535 - RNA, 19 nt, Artificial Sequence
  Description of Artificial Sequence: Synthetic oligonucleotide
ccacagauguguagcgcuc

SEQ ID NO: 2412536 - RNA, 19 nt, Artificial Sequence
  Description of Artificial Sequence: Synthetic oligonucleotide
cuugguuauguagggguau

SEQ ID NO: 2412537 - RNA, 19 nt, Artificial Sequence
  Description of Artificial Sequence: Synthetic oligonucleotide
caagagccaagagcagaga

SEQ ID NO: 2412538 - RNA, 19 nt, Artificial Sequence
  Description of Artificial Sequence: Synthetic oligonucleotide
agccaccagacgaggccuc

SEQ ID NO: 2412539 - RNA, 19 nt, Artificial Sequence
  Description of Artificial Sequence: Synthetic oligonucleotide
ggcaucuaccuuggucuug

SEQ ID NO: 2412540 - RNA, 19 nt, Artificial Sequence
  Description of Artificial Sequence: Synthetic oligonucleotide
cguucugcgagcucaggga

SEQ ID NO: 2412541 - RNA, 19 nt, Artificial Sequence
  Description of Artificial Sequence: Synthetic oligonucleotide
gaugugcggcuugguuaac

SEQ ID NO: 2412542 - RNA, 19 nt, Artificial Sequence
  Description of Artificial Sequence: Synthetic oligonucleotide
ggccugguaauaggcagca

SEQ ID NO: 2412543 - RNA, 19 nt, Artificial Sequence
  Description of Artificial Sequence: Synthetic oligonucleotide
caucuggggucuggaggac

SEQ ID NO: 2412544 - RNA, 19 nt, Artificial Sequence
  Description of Artificial Sequence: Synthetic oligonucleotide
cuaccuuggucuugggcuu

SEQ ID NO: 2412545 - RNA, 19 nt, Artificial Sequence
  Description of Artificial Sequence: Synthetic oligonucleotide
uacuaugggcuggguggua

SEQ ID NO: 2412546 - RNA, 19 nt, Artificial Sequence
  Description of Artificial Sequence: Synthetic oligonucleotide
gagcaacgccaagagccaa

SEQ ID NO: 2412547 - RNA, 19 nt, Artificial Sequence
  Description of Artificial Sequence: Synthetic oligonucleotide
guacuaugggcuggguggu

SEQ ID NO: 2412548 - RNA, 19 nt, Artificial Sequence
  Description of Artificial Sequence: Synthetic oligonucleotide
cguacugauggaggacacg

SEQ ID NO: 2412549 - RNA, 19 nt, Artificial Sequence
  Description of Artificial Sequence: Synthetic oligonucleotide
guguagcgcucauccagcu

SEQ ID NO: 2412550 - RNA, 19 nt, Artificial Sequence
  Description of Artificial Sequence: Synthetic oligonucleotide
gcuuccggggcagcagucc

SEQ ID NO: 2412551 - RNA, 19 nt, Artificial Sequence
  Description of Artificial Sequence: Synthetic oligonucleotide
cugggugguagggguccag

SEQ ID NO: 2412552 - RNA, 19 nt, Artificial Sequence
  Description of Artificial Sequence: Synthetic oligonucleotide
gcaacgccaagagccaaga

SEQ ID NO: 2412553 - RNA, 19 nt, Artificial Sequence
  Description of Artificial Sequence: Synthetic oligonucleotide
agacggugucugaccaggu

SEQ ID NO: 2412554 - RNA, 19 nt, Artificial Sequence
  Description of Artificial Sequence: Synthetic oligonucleotide
aggugccguucugcgagcu

SEQ ID NO: 2412555 - RNA, 19 nt, Artificial Sequence
  Description of Artificial Sequence: Synthetic oligonucleotide
ccccgagcugugaugagca

SEQ ID NO: 2412556 - RNA, 19 nt, Artificial Sequence
  Description of Artificial Sequence: Synthetic oligonucleotide
augcccaguaguagcccaa

SEQ ID NO: 2412557 - RNA, 19 nt, Artificial Sequence
  Description of Artificial Sequence: Synthetic oligonucleotide
ccagaaacuggggcccagc

SEQ ID NO: 2412558 - RNA, 19 nt, Artificial Sequence
  Description of Artificial Sequence: Synthetic oligonucleotide
ccgucccucaaaacaccac

SEQ ID NO: 2412559 - RNA, 19 nt, Artificial Sequence
  Description of Artificial Sequence: Synthetic oligonucleotide
cccagucuagaaggaacug

SEQ ID NO: 2412560 - RNA, 19 nt, Artificial Sequence
  Description of Artificial Sequence: Synthetic oligonucleotide
ggggcccagccaccagacg

SEQ ID NO: 2412561 - RNA, 19 nt, Artificial Sequence
  Description of Artificial Sequence: Synthetic oligonucleotide
gccuccaucuggggucugg

SEQ ID NO: 2412562 - RNA, 19 nt, Artificial Sequence
  Description of Artificial Sequence: Synthetic oligonucleotide
gcuugggcguacugaugga

SEQ ID NO: 2412563 - RNA, 19 nt, Artificial Sequence
  Description of Artificial Sequence: Synthetic oligonucleotide
gugucugaccaggugccgu

SEQ ID NO: 2412564 - RNA, 19 nt, Artificial Sequence
  Description of Artificial Sequence: Synthetic oligonucleotide
ggacuucacuccgguaaga

SEQ ID NO: 2412565 - RNA, 19 nt, Artificial Sequence
  Description of Artificial Sequence: Synthetic oligonucleotide
gcguacugauggaggacac

SEQ ID NO: 2412566 - RNA, 19 nt, Artificial Sequence
  Description of Artificial Sequence: Synthetic oligonucleotide
cugcugcauugaggcaaag

SEQ ID NO: 2412567 - RNA, 19 nt, Artificial Sequence
  Description of Artificial Sequence: Synthetic oligonucleotide
gguucauauagcagugcuu

SEQ ID NO: 2412568 - RNA, 19 nt, Artificial Sequence
  Description of Artificial Sequence: Synthetic oligonucleotide
cuggggucuggaggacuuc

SEQ ID NO: 2412569 - RNA, 19 nt, Artificial Sequence
  Description of Artificial Sequence: Synthetic oligonucleotide
ggugccguucugcgagcuc

SEQ ID NO: 2412570 - RNA, 19 nt, Artificial Sequence
  Description of Artificial Sequence: Synthetic oligonucleotide
gggagacuguugagcggcc

SEQ ID NO: 2412571 - RNA, 19 nt, Artificial Sequence
  Description of Artificial Sequence: Synthetic oligonucleotide
gccagaaacuggggcccag

SEQ ID NO: 2412572 - RNA, 19 nt, Artificial Sequence
  Description of Artificial Sequence: Synthetic oligonucleotide
ggaggacuucacuccggua

SEQ ID NO: 2412573 - RNA, 19 nt, Artificial Sequence
  Description of Artificial Sequence: Synthetic oligonucleotide
gccgucccucaaaacacca

SEQ ID NO: 2412574 - RNA, 19 nt, Artificial Sequence
  Description of Artificial Sequence: Synthetic oligonucleotide
cccgagcugugaugagcag

SEQ ID NO: 2412575 - RNA, 19 nt, Artificial Sequence
  Description of Artificial Sequence: Synthetic oligonucleotide
cgguaagagacuucaggcu

SEQ ID NO: 2412576 - RNA, 19 nt, Artificial Sequence
  Description of Artificial Sequence: Synthetic oligonucleotide
gccguucugcgagcucagg

SEQ ID NO: 2412577 - RNA, 19 nt, Artificial Sequence
  Description of Artificial Sequence: Synthetic oligonucleotide
gcagugcaacauagggaga

SEQ ID NO: 2412578 - RNA, 19 nt, Artificial Sequence
  Description of Artificial Sequence: Synthetic oligonucleotide
cugccgcugaugccuggaa

SEQ ID NO: 2412579 - RNA, 19 nt, Artificial Sequence
  Description of Artificial Sequence: Synthetic oligonucleotide
ggacugggguauggauggc

SEQ ID NO: 2412580 - RNA, 19 nt, Artificial Sequence
  Description of Artificial Sequence: Synthetic oligonucleotide
gggcuugaggccugguaau

SEQ ID NO: 2412581 - RNA, 19 nt, Artificial Sequence
  Description of Artificial Sequence: Synthetic oligonucleotide
caccacagugugggguaga

SEQ ID NO: 2412582 - RNA, 19 nt, Artificial Sequence
  Description of Artificial Sequence: Synthetic oligonucleotide
ggcuugaggccugguaaua

SEQ ID NO: 2412583 - RNA, 19 nt, Artificial Sequence
  Description of Artificial Sequence: Synthetic oligonucleotide
gcgagcucagggacgaacu

SEQ ID NO: 2412584 - RNA, 19 nt, Artificial Sequence
  Description of Artificial Sequence: Synthetic oligonucleotide
gcggcuugguuaacuaggu

SEQ ID NO: 2412585 - RNA, 19 nt, Artificial Sequence
  Description of Artificial Sequence: Synthetic oligonucleotide
ggaggacucgaaagauggu

SEQ ID NO: 2412586 - RNA, 19 nt, Artificial Sequence
  Description of Artificial Sequence: Synthetic oligonucleotide
ggagacuguugagcggccu

SEQ ID NO: 2412587 - RNA, 19 nt, Artificial Sequence
  Description of Artificial Sequence: Synthetic oligonucleotide
ccgcugaugccuggaagca

SEQ ID NO: 2412588 - RNA, 19 nt, Artificial Sequence
  Description of Artificial Sequence: Synthetic oligonucleotide
gcuccuggcuacugccgcu

SEQ ID NO: 2412589 - RNA, 19 nt, Artificial Sequence
  Description of Artificial Sequence: Synthetic oligonucleotide
ggccagaaacuggggccca

SEQ ID NO: 2412590 - RNA, 19 nt, Artificial Sequence
  Description of Artificial Sequence: Synthetic oligonucleotide
gcccaguaguagcccaagu

SEQ ID NO: 2412591 - RNA, 19 nt, Artificial Sequence
  Description of Artificial Sequence: Synthetic oligonucleotide
gcggaugugcggcuugguu

SEQ ID NO: 2412592 - RNA, 19 nt, Artificial Sequence
  Description of Artificial Sequence: Synthetic oligonucleotide
gcagugcuuccggggcagc

SEQ ID NO: 2412593 - RNA, 19 nt, Artificial Sequence
  Description of Artificial Sequence: Synthetic oligonucleotide
ccggggcagcaguccuucc

SEQ ID NO: 2412594 - RNA, 19 nt, Artificial Sequence
  Description of Artificial Sequence: Synthetic oligonucleotide
ccgagcugugaugagcagu

SEQ ID NO: 2412595 - RNA, 19 nt, Artificial Sequence
  Description of Artificial Sequence: Synthetic oligonucleotide
ccagguagugacugcucuu

SEQ ID NO: 2412596 - RNA, 19 nt, Artificial Sequence
  Description of Artificial Sequence: Synthetic oligonucleotide
gggacgaacucagcaucuu

SEQ ID NO: 2412597 - RNA, 19 nt, Artificial Sequence
  Description of Artificial Sequence: Synthetic oligonucleotide
cgaacucagcaucuugguu

SEQ ID NO: 2412598 - RNA, 19 nt, Artificial Sequence
  Description of Artificial Sequence: Synthetic oligonucleotide
gcucauccagcuggcggau

SEQ ID NO: 2412599 - RNA, 19 nt, Artificial Sequence
  Description of Artificial Sequence: Synthetic oligonucleotide
cgaggccucuggggcacac

SEQ ID NO: 2412600 - RNA, 19 nt, Artificial Sequence
  Description of Artificial Sequence: Synthetic oligonucleotide
cugcgagcucagggacgaa

SEQ ID NO: 2412601 - RNA, 19 nt, Artificial Sequence
  Description of Artificial Sequence: Synthetic oligonucleotide
cgcugaugccuggaagcaa

SEQ ID NO: 2412602 - RNA, 19 nt, Artificial Sequence
  Description of Artificial Sequence: Synthetic oligonucleotide
aaaacaaaagaacugaucc

SEQ ID NO: 2412603 - RNA, 19 nt, Artificial Sequence
  Description of Artificial Sequence: Synthetic oligonucleotide
aacaaaagaacugaucccc

SEQ ID NO: 2412604 - RNA, 19 nt, Artificial Sequence
  Description of Artificial Sequence: Synthetic oligonucleotide
aaacaaaagaacugauccc

SEQ ID NO: 2412605 - RNA, 19 nt, Artificial Sequence
  Description of Artificial Sequence: Synthetic oligonucleotide
aaagaacugauccccaggc

SEQ ID NO: 2412606 - RNA, 19 nt, Artificial Sequence
  Description of Artificial Sequence: Synthetic oligonucleotide
aacaaugggaacaucaaac

SEQ ID NO: 2412607 - RNA, 19 nt, Artificial Sequence
  Description of Artificial Sequence: Synthetic oligonucleotide
agaacugauccccaggcag

SEQ ID NO: 2412608 - RNA, 19 nt, Artificial Sequence
  Description of Artificial Sequence: Synthetic oligonucleotide
aacaucaaacaaaugaaaa

SEQ ID NO: 2412609 - RNA, 19 nt, Artificial Sequence
  Description of Artificial Sequence: Synthetic oligonucleotide
gggaacaucaaacaaauga

SEQ ID NO: 2412610 - RNA, 19 nt, Artificial Sequence
  Description of Artificial Sequence: Synthetic oligonucleotide
acaaugggaacaucaaaca

SEQ ID NO: 2412611 - RNA, 19 nt, Artificial Sequence
  Description of Artificial Sequence: Synthetic oligonucleotide
uuuuguccagucuccagac

SEQ ID NO: 2412612 - RNA, 19 nt, Artificial Sequence
  Description of Artificial Sequence: Synthetic oligonucleotide
uuguccagucuccagacau

SEQ ID NO: 2412613 - RNA, 19 nt, Artificial Sequence
  Description of Artificial Sequence: Synthetic oligonucleotide
uguuuuguccagucuccag

SEQ ID NO: 2412614 - RNA, 19 nt, Artificial Sequence
  Description of Artificial Sequence: Synthetic oligonucleotide
caaaagaacugauccccag

SEQ ID NO: 2412615 - RNA, 19 nt, Artificial Sequence
  Description of Artificial Sequence: Synthetic oligonucleotide
aagaacugauccccaggca

SEQ ID NO: 2412616 - RNA, 19 nt, Artificial Sequence
  Description of Artificial Sequence: Synthetic oligonucleotide
gaacaaugggaacaucaaa

SEQ ID NO: 2412617 - RNA, 19 nt, Artificial Sequence
  Description of Artificial Sequence: Synthetic oligonucleotide
uuuguccagucuccagaca

SEQ ID NO: 2412618 - RNA, 19 nt, Artificial Sequence
  Description of Artificial Sequence: Synthetic oligonucleotide
ugggaacaucaaacaaaug

SEQ ID NO: 2412619 - RNA, 19 nt, Artificial Sequence
  Description of Artificial Sequence: Synthetic oligonucleotide
acaaaagaacugaucccca

SEQ ID NO: 2412620 - RNA, 19 nt, Artificial Sequence
  Description of Artificial Sequence: Synthetic oligonucleotide
guccagucuccagacaugc

SEQ ID NO: 2412621 - RNA, 19 nt, Artificial Sequence
  Description of Artificial Sequence: Synthetic oligonucleotide
uccagucuccagacaugca

SEQ ID NO: 2412622 - RNA, 19 nt, Artificial Sequence
  Description of Artificial Sequence: Synthetic oligonucleotide
cagucuccagacaugcaaa

SEQ ID NO: 2412623 - RNA, 19 nt, Artificial Sequence
  Description of Artificial Sequence: Synthetic oligonucleotide
gaacugauccccaggcagu

SEQ ID NO: 2412624 - RNA, 19 nt, Artificial Sequence
  Description of Artificial Sequence: Synthetic oligonucleotide
ccagucuccagacaugcaa

SEQ ID NO: 2412625 - RNA, 19 nt, Artificial Sequence
  Description of Artificial Sequence: Synthetic oligonucleotide
ucuacaacaagucugauca

SEQ ID NO: 2412626 - RNA, 19 nt, Artificial Sequence
  Description of Artificial Sequence: Synthetic oligonucleotide
ucuaucagaaccuuuacag

SEQ ID NO: 2412627 - RNA, 19 nt, Artificial Sequence
  Description of Artificial Sequence: Synthetic oligonucleotide
aauaacacuggguuguaac

SEQ ID NO: 2412628 - RNA, 19 nt, Artificial Sequence
  Description of Artificial Sequence: Synthetic oligonucleotide
gauuugaucguucauaggc

SEQ ID NO: 2412629 - RNA, 19 nt, Artificial Sequence
  Description of Artificial Sequence: Synthetic oligonucleotide
acuacuaucacugugguuc

SEQ ID NO: 2412630 - RNA, 19 nt, Artificial Sequence
  Description of Artificial Sequence: Synthetic oligonucleotide
aucagaaggacuuuucugc

SEQ ID NO: 2412631 - RNA, 19 nt, Artificial Sequence
  Description of Artificial Sequence: Synthetic oligonucleotide
aauuacaguauuuccagug

SEQ ID NO: 2412632 - RNA, 19 nt, Artificial Sequence
  Description of Artificial Sequence: Synthetic oligonucleotide
cuuguaaugauugauuugg

SEQ ID NO: 2412633 - RNA, 19 nt, Artificial Sequence
  Description of Artificial Sequence: Synthetic oligonucleotide
ugauugauuuggcacaugg

SEQ ID NO: 2412634 - RNA, 19 nt, Artificial Sequence
  Description of Artificial Sequence: Synthetic oligonucleotide
ucaauuacaguauuuccag

SEQ ID NO: 2412635 - RNA, 19 nt, Artificial Sequence
  Description of Artificial Sequence: Synthetic oligonucleotide
uucaauuacaguauuucca

SEQ ID NO: 2412636 - RNA, 19 nt, Artificial Sequence
  Description of Artificial Sequence: Synthetic oligonucleotide
aacacuggguuguaacucc

SEQ ID NO: 2412637 - RNA, 19 nt, Artificial Sequence
  Description of Artificial Sequence: Synthetic oligonucleotide
aauucguauggaucgacag

SEQ ID NO: 2412638 - RNA, 19 nt, Artificial Sequence
  Description of Artificial Sequence: Synthetic oligonucleotide
aacaagucugaucaaacga

SEQ ID NO: 2412639 - RNA, 19 nt, Artificial Sequence
  Description of Artificial Sequence: Synthetic oligonucleotide
ucccaauucguauggaucg

SEQ ID NO: 2412640 - RNA, 19 nt, Artificial Sequence
  Description of Artificial Sequence: Synthetic oligonucleotide
cuucucauuaugcugaccc

SEQ ID NO: 2412641 - RNA, 19 nt, Artificial Sequence
  Description of Artificial Sequence: Synthetic oligonucleotide
cugaguaggauaauaacac

SEQ ID NO: 2412642 - RNA, 19 nt, Artificial Sequence
  Description of Artificial Sequence: Synthetic oligonucleotide
uccgcagaaaacaugaagu

SEQ ID NO: 2412643 - RNA, 19 nt, Artificial Sequence
  Description of Artificial Sequence: Synthetic oligonucleotide
agauuagugccacagcagg

SEQ ID NO: 2412644 - RNA, 19 nt, Artificial Sequence
  Description of Artificial Sequence: Synthetic oligonucleotide
aacaugaaguccccucuac

SEQ ID NO: 2412645 - RNA, 19 nt, Artificial Sequence
  Description of Artificial Sequence: Synthetic oligonucleotide
ucaggaucuucccaauucg

SEQ ID NO: 2412646 - RNA, 19 nt, Artificial Sequence
  Description of Artificial Sequence: Synthetic oligonucleotide
agcagcguuauuuucuucg

SEQ ID NO: 2412647 - RNA, 19 nt, Artificial Sequence
  Description of Artificial Sequence: Synthetic oligonucleotide
acaggugccucguaguugc

SEQ ID NO: 2412648 - RNA, 19 nt, Artificial Sequence
  Description of Artificial Sequence: Synthetic oligonucleotide
ucuucuacaacaagucuga

SEQ ID NO: 2412649 - RNA, 19 nt, Artificial Sequence
  Description of Artificial Sequence: Synthetic oligonucleotide
ugagaauuggauacaucag

SEQ ID NO: 2412650 - RNA, 19 nt, Artificial Sequence
  Description of Artificial Sequence: Synthetic oligonucleotide
auauuuguguccugucggc

SEQ ID NO: 2412651 - RNA, 19 nt, Artificial Sequence
  Description of Artificial Sequence: Synthetic oligonucleotide
gaugauagucugcagcucc

SEQ ID NO: 2412652 - RNA, 19 nt, Artificial Sequence
  Description of Artificial Sequence: Synthetic oligonucleotide
cauauuuguguccugucgg

SEQ ID NO: 2412653 - RNA, 19 nt, Artificial Sequence
  Description of Artificial Sequence: Synthetic oligonucleotide
gaagauuagugccacagca

SEQ ID NO: 2412654 - RNA, 19 nt, Artificial Sequence
  Description of Artificial Sequence: Synthetic oligonucleotide
uucggcaugauccaggauc

SEQ ID NO: 2412655 - RNA, 19 nt, Artificial Sequence
  Description of Artificial Sequence: Synthetic oligonucleotide
auucguauggaucgacagc

SEQ ID NO: 2412656 - RNA, 19 nt, Artificial Sequence
  Description of Artificial Sequence: Synthetic oligonucleotide
aaguagaguuuacuugccg

SEQ ID NO: 2412657 - RNA, 19 nt, Artificial Sequence
  Description of Artificial Sequence: Synthetic oligonucleotide
acuuuucugcgauagaugu

SEQ ID NO: 2412658 - RNA, 19 nt, Artificial Sequence
  Description of Artificial Sequence: Synthetic oligonucleotide
gcauaauacacuuuggccc

SEQ ID NO: 2412659 - RNA, 19 nt, Artificial Sequence
  Description of Artificial Sequence: Synthetic oligonucleotide
uguaaugauugauuuggca

SEQ ID NO: 2412660 - RNA, 19 nt, Artificial Sequence
  Description of Artificial Sequence: Synthetic oligonucleotide
ucuacuggcugucuugucc

SEQ ID NO: 2412661 - RNA, 19 nt, Artificial Sequence
  Description of Artificial Sequence: Synthetic oligonucleotide
cucagagugaagauuagug

SEQ ID NO: 2412662 - RNA, 19 nt, Artificial Sequence
  Description of Artificial Sequence: Synthetic oligonucleotide
uuuucugcgauagaugucu

SEQ ID NO: 2412663 - RNA, 19 nt, Artificial Sequence
  Description of Artificial Sequence: Synthetic oligonucleotide
caugcauucuuuauauggc

SEQ ID NO: 2412664 - RNA, 19 nt, Artificial Sequence
  Description of Artificial Sequence: Synthetic oligonucleotide
auuagugccacagcaggcc

SEQ ID NO: 2412665 - RNA, 19 nt, Artificial Sequence
  Description of Artificial Sequence: Synthetic oligonucleotide
agcagcuuaagcugugccc

SEQ ID NO: 2412666 - RNA, 19 nt, Artificial Sequence
  Description of Artificial Sequence: Synthetic oligonucleotide
uuugaucguucauaggcag

SEQ ID NO: 2412667 - RNA, 19 nt, Artificial Sequence
  Description of Artificial Sequence: Synthetic oligonucleotide
cugagaauuggauacauca

SEQ ID NO: 2412668 - RNA, 19 nt, Artificial Sequence
  Description of Artificial Sequence: Synthetic oligonucleotide
uggcauaauacacuuuggc

SEQ ID NO: 2412669 - RNA, 19 nt, Artificial Sequence
  Description of Artificial Sequence: Synthetic oligonucleotide
uguucuaucagaaccuuua

SEQ ID NO: 2412670 - RNA, 19 nt, Artificial Sequence
  Description of Artificial Sequence: Synthetic oligonucleotide
gagagucccgaucugagag

SEQ ID NO: 2412671 - RNA, 19 nt, Artificial Sequence
  Description of Artificial Sequence: Synthetic oligonucleotide
agucucguaaaccuugcuc

SEQ ID NO: 2412672 - RNA, 19 nt, Artificial Sequence
  Description of Artificial Sequence: Synthetic oligonucleotide
ucugcgauagaugucuggg

SEQ ID NO: 2412673 - RNA, 19 nt, Artificial Sequence
  Description of Artificial Sequence: Synthetic oligonucleotide
ugaucaaacgauccgcaga

SEQ ID NO: 2412674 - RNA, 19 nt, Artificial Sequence
  Description of Artificial Sequence: Synthetic oligonucleotide
cucuucuacaacaagucug

SEQ ID NO: 2412675 - RNA, 19 nt, Artificial Sequence
  Description of Artificial Sequence: Synthetic oligonucleotide
uaggauaauaacacugggu

SEQ ID NO: 2412676 - RNA, 19 nt, Artificial Sequence
  Description of Artificial Sequence: Synthetic oligonucleotide
ugagagcacgcuagaaugg

SEQ ID NO: 2412677 - RNA, 19 nt, Artificial Sequence
  Description of Artificial Sequence: Synthetic oligonucleotide
guaggauaauaacacuggg

SEQ ID NO: 2412678 - RNA, 19 nt, Artificial Sequence
  Description of Artificial Sequence: Synthetic oligonucleotide
aacuccguggccauacacc

SEQ ID NO: 2412679 - RNA, 19 nt, Artificial Sequence
  Description of Artificial Sequence: Synthetic oligonucleotide
ucacaguccccuaggaggg

SEQ ID NO: 2412680 - RNA, 19 nt, Artificial Sequence
  Description of Artificial Sequence: Synthetic oligonucleotide
aaacgauccgcagaaaaca

SEQ ID NO: 2412681 - RNA, 19 nt, Artificial Sequence
  Description of Artificial Sequence: Synthetic oligonucleotide
gagaauuggauacaucaga

SEQ ID NO: 2412682 - RNA, 19 nt, Artificial Sequence
  Description of Artificial Sequence: Synthetic oligonucleotide
gaguaggauaauaacacug

SEQ ID NO: 2412683 - RNA, 19 nt, Artificial Sequence
  Description of Artificial Sequence: Synthetic oligonucleotide
uuauauggcagcugauuca

SEQ ID NO: 2412684 - RNA, 19 nt, Artificial Sequence
  Description of Artificial Sequence: Synthetic oligonucleotide
agucugaucaaacgauccg

SEQ ID NO: 2412685 - RNA, 19 nt, Artificial Sequence
  Description of Artificial Sequence: Synthetic oligonucleotide
uucguauggaucgacagca

SEQ ID NO: 2412686 - RNA, 19 nt, Artificial Sequence
  Description of Artificial Sequence: Synthetic oligonucleotide
aucacuacuaucacugugg

SEQ ID NO: 2412687 - RNA, 19 nt, Artificial Sequence
  Description of Artificial Sequence: Synthetic oligonucleotide
cuuucucaaauuucacucc

SEQ ID NO: 2412688 - RNA, 19 nt, Artificial Sequence
  Description of Artificial Sequence: Synthetic oligonucleotide
ucaaacgauccgcagaaaa

SEQ ID NO: 2412689 - RNA, 19 nt, Artificial Sequence
  Description of Artificial Sequence: Synthetic oligonucleotide
uauauggcagcugauucag

SEQ ID NO: 2412690 - RNA, 19 nt, Artificial Sequence
  Description of Artificial Sequence: Synthetic oligonucleotide
gacgcuguaacuccguggc

SEQ ID NO: 2412691 - RNA, 19 nt, Artificial Sequence
  Description of Artificial Sequence: Synthetic oligonucleotide
caacaagucugaucaaacg

SEQ ID NO: 2412692 - RNA, 19 nt, Artificial Sequence
  Description of Artificial Sequence: Synthetic oligonucleotide
uuggcauaauacacuuugg

SEQ ID NO: 2412693 - RNA, 19 nt, Artificial Sequence
  Description of Artificial Sequence: Synthetic oligonucleotide
uuucacuccuucauauuug

SEQ ID NO: 2412694 - RNA, 19 nt, Artificial Sequence
  Description of Artificial Sequence: Synthetic oligonucleotide
uucuaucagaaccuuuaca

SEQ ID NO: 2412695 - RNA, 19 nt, Artificial Sequence
  Description of Artificial Sequence: Synthetic oligonucleotide
cugagagcacgcuagaaug

SEQ ID NO: 2412696 - RNA, 19 nt, Artificial Sequence
  Description of Artificial Sequence: Synthetic oligonucleotide
uccguggccauacaccggg

SEQ ID NO: 2412697 - RNA, 19 nt, Artificial Sequence
  Description of Artificial Sequence: Synthetic oligonucleotide
ucugaucaaacgauccgca

SEQ ID NO: 2412698 - RNA, 19 nt, Artificial Sequence
  Description of Artificial Sequence: Synthetic oligonucleotide
acuccguggccauacaccg

SEQ ID NO: 2412699 - RNA, 19 nt, Artificial Sequence
  Description of Artificial Sequence: Synthetic oligonucleotide
uggaucgacagcagucucg

SEQ ID NO: 2412700 - RNA, 19 nt, Artificial Sequence
  Description of Artificial Sequence: Synthetic oligonucleotide
ccaugcauucuuuauaugg

SEQ ID NO: 2412701 - RNA, 19 nt, Artificial Sequence
  Description of Artificial Sequence: Synthetic oligonucleotide
uacaguauuuccagugcug

SEQ ID NO: 2412702 - RNA, 19 nt, Artificial Sequence
  Description of Artificial Sequence: Synthetic oligonucleotide
ugaagauuagugccacagc

SEQ ID NO: 2412703 - RNA, 19 nt, Artificial Sequence
  Description of Artificial Sequence: Synthetic oligonucleotide
uucuucggcaugauccagg

SEQ ID NO: 2412704 - RNA, 19 nt, Artificial Sequence
  Description of Artificial Sequence: Synthetic oligonucleotide
agcguuauuuucuucggca

SEQ ID NO: 2412705 - RNA, 19 nt, Artificial Sequence
  Description of Artificial Sequence: Synthetic oligonucleotide
caugaaguccccucuacug

SEQ ID NO: 2412706 - RNA, 19 nt, Artificial Sequence
  Description of Artificial Sequence: Synthetic oligonucleotide
auaacacuggguuguaacu

SEQ ID NO: 2412707 - RNA, 19 nt, Artificial Sequence
  Description of Artificial Sequence: Synthetic oligonucleotide
gauaauaacacuggguugu

SEQ ID NO: 2412708 - RNA, 19 nt, Artificial Sequence
  Description of Artificial Sequence: Synthetic oligonucleotide
acaacaagucugaucaaac

SEQ ID NO: 2412709 - RNA, 19 nt, Artificial Sequence
  Description of Artificial Sequence: Synthetic oligonucleotide
gacugaguaggauaauaac

SEQ ID NO: 2412710 - RNA, 19 nt, Artificial Sequence
  Description of Artificial Sequence: Synthetic oligonucleotide
uuuucuucggcaugaucca

SEQ ID NO: 2412711 - RNA, 19 nt, Artificial Sequence
  Description of Artificial Sequence: Synthetic oligonucleotide
ggcauaauacacuuuggcc

SEQ ID NO: 2412712 - RNA, 19 nt, Artificial Sequence
  Description of Artificial Sequence: Synthetic oligonucleotide
caaacgauccgcagaaaac

SEQ ID NO: 2412713 - RNA, 19 nt, Artificial Sequence
  Description of Artificial Sequence: Synthetic oligonucleotide
guugugacagggcauggag

SEQ ID NO: 2412714 - RNA, 19 nt, Artificial Sequence
  Description of Artificial Sequence: Synthetic oligonucleotide
uagggguagaaguagaguu

SEQ ID NO: 2412715 - RNA, 19 nt, Artificial Sequence
  Description of Artificial Sequence: Synthetic oligonucleotide
ucugagagcacgcuagaau

SEQ ID NO: 2412716 - RNA, 19 nt, Artificial Sequence
  Description of Artificial Sequence: Synthetic oligonucleotide
aagauuagugccacagcag

SEQ ID NO: 2412717 - RNA, 19 nt, Artificial Sequence
  Description of Artificial Sequence: Synthetic oligonucleotide
uauggcagcugauucaguc

SEQ ID NO: 2412718 - RNA, 19 nt, Artificial Sequence
  Description of Artificial Sequence: Synthetic oligonucleotide
uucaucgcucugaaucagg

SEQ ID NO: 2412719 - RNA, 19 nt, Artificial Sequence
  Description of Artificial Sequence: Synthetic oligonucleotide
gaucaaacgauccgcagaa

SEQ ID NO: 2412720 - RNA, 19 nt, Artificial Sequence
  Description of Artificial Sequence: Synthetic oligonucleotide
aguccugacgcuguaacuc

SEQ ID NO: 2412721 - RNA, 19 nt, Artificial Sequence
  Description of Artificial Sequence: Synthetic oligonucleotide
uuguaaugauugauuuggc

SEQ ID NO: 2412722 - RNA, 19 nt, Artificial Sequence
  Description of Artificial Sequence: Synthetic oligonucleotide
ugaguaggauaauaacacu

SEQ ID NO: 2412723 - RNA, 19 nt, Artificial Sequence
  Description of Artificial Sequence: Synthetic oligonucleotide
ugaucguucauaggcagca

SEQ ID NO: 2412724 - RNA, 19 nt, Artificial Sequence
  Description of Artificial Sequence: Synthetic oligonucleotide
agagucccgaucugagagc

SEQ ID NO: 2412725 - RNA, 19 nt, Artificial Sequence
  Description of Artificial Sequence: Synthetic oligonucleotide
uauuuguguccugucggcg

SEQ ID NO: 2412726 - RNA, 19 nt, Artificial Sequence
  Description of Artificial Sequence: Synthetic oligonucleotide
gaagagacugaguaggaua

SEQ ID NO: 2412727 - RNA, 19 nt, Artificial Sequence
  Description of Artificial Sequence: Synthetic oligonucleotide
ugacgcuguaacuccgugg

SEQ ID NO: 2412728 - RNA, 19 nt, Artificial Sequence
  Description of Artificial Sequence: Synthetic oligonucleotide
agaguuuacuugccgguug

SEQ ID NO: 2412729 - RNA, 19 nt, Artificial Sequence
  Description of Artificial Sequence: Synthetic oligonucleotide
ucaucgcucugaaucagga

SEQ ID NO: 2412730 - RNA, 19 nt, Artificial Sequence
  Description of Artificial Sequence: Synthetic oligonucleotide
auuggauacaucagaagga

SEQ ID NO: 2412731 - RNA, 19 nt, Artificial Sequence
  Description of Artificial Sequence: Synthetic oligonucleotide
uucuacaacaagucugauc

SEQ ID NO: 2412732 - RNA, 19 nt, Artificial Sequence
  Description of Artificial Sequence: Synthetic oligonucleotide
aguugcuacuaucacuacu

SEQ ID NO: 2412733 - RNA, 19 nt, Artificial Sequence
  Description of Artificial Sequence: Synthetic oligonucleotide
cagcucccggauuugaucg

SEQ ID NO: 2412734 - RNA, 19 nt, Artificial Sequence
  Description of Artificial Sequence: Synthetic oligonucleotide
aucgacagcagucucguaa

SEQ ID NO: 2412735 - RNA, 19 nt, Artificial Sequence
  Description of Artificial Sequence: Synthetic oligonucleotide
ucgcucugaaucaggaucu

SEQ ID NO: 2412736 - RNA, 19 nt, Artificial Sequence
  Description of Artificial Sequence: Synthetic oligonucleotide
augcugaccccacaauuuc

SEQ ID NO: 2412737 - RNA, 19 nt, Artificial Sequence
  Description of Artificial Sequence: Synthetic oligonucleotide
ucucauuaugcugacccca

SEQ ID NO: 2412738 - RNA, 19 nt, Artificial Sequence
  Description of Artificial Sequence: Synthetic oligonucleotide
aauuucacuccuucauauu

SEQ ID NO: 2412739 - RNA, 19 nt, Artificial Sequence
  Description of Artificial Sequence: Synthetic oligonucleotide
aguauuuccagugcugaga

SEQ ID NO: 2412740 - RNA, 19 nt, Artificial Sequence
  Description of Artificial Sequence: Synthetic oligonucleotide
augcauucuuuauauggca

SEQ ID NO: 2412741 - RNA, 19 nt, Artificial Sequence
  Description of Artificial Sequence: Synthetic oligonucleotide
uucugcgauagaugucugg

SEQ ID NO: 2412742 - RNA, 19 nt, Artificial Sequence
  Description of Artificial Sequence: Synthetic oligonucleotide
gagcacgcuagaaugggcg

SEQ ID NO: 2412743 - RNA, 19 nt, Artificial Sequence
  Description of Artificial Sequence: Synthetic oligonucleotide
ucggcaugauccaggaucu

SEQ ID NO: 2412744 - RNA, 19 nt, Artificial Sequence
  Description of Artificial Sequence: Synthetic oligonucleotide
ucaccgcuucucauuaugc

SEQ ID NO: 2412745 - RNA, 19 nt, Artificial Sequence
  Description of Artificial Sequence: Synthetic oligonucleotide
uauggaucgacagcagucu

SEQ ID NO: 2412746 - RNA, 19 nt, Artificial Sequence
  Description of Artificial Sequence: Synthetic oligonucleotide
aaugauugauuuggcacau

SEQ ID NO: 2412747 - RNA, 19 nt, Artificial Sequence
  Description of Artificial Sequence: Synthetic oligonucleotide
uugaucguucauaggcagc

SEQ ID NO: 2412748 - RNA, 19 nt, Artificial Sequence
  Description of Artificial Sequence: Synthetic oligonucleotide
accgcuucucauuaugcug

SEQ ID NO: 2412749 - RNA, 19 nt, Artificial Sequence
  Description of Artificial Sequence: Synthetic oligonucleotide
aauacacuuuggcccuuug

SEQ ID NO: 2412750 - RNA, 19 nt, Artificial Sequence
  Description of Artificial Sequence: Synthetic oligonucleotide
gaggagagucagcuuagcc

SEQ ID NO: 2412751 - RNA, 19 nt, Artificial Sequence
  Description of Artificial Sequence: Synthetic oligonucleotide
uucucauuaugcugacccc

SEQ ID NO: 2412752 - RNA, 19 nt, Artificial Sequence
  Description of Artificial Sequence: Synthetic oligonucleotide
gucagcuuagccauagcag

SEQ ID NO: 2412753 - RNA, 19 nt, Artificial Sequence
  Description of Artificial Sequence: Synthetic oligonucleotide
uuacuugccgguugugaca

SEQ ID NO: 2412754 - RNA, 19 nt, Artificial Sequence
  Description of Artificial Sequence: Synthetic oligonucleotide
cagcuuagccauagcagcg

SEQ ID NO: 2412755 - RNA, 19 nt, Artificial Sequence
  Description of Artificial Sequence: Synthetic oligonucleotide
gagagcacgcuagaauggg

SEQ ID NO: 2412756 - RNA, 19 nt, Artificial Sequence
  Description of Artificial Sequence: Synthetic oligonucleotide
uacaacaagucugaucaaa

SEQ ID NO: 2412757 - RNA, 19 nt, Artificial Sequence
  Description of Artificial Sequence: Synthetic oligonucleotide
auuuguguccugucggcgu

SEQ ID NO: 2412758 - RNA, 19 nt, Artificial Sequence
  Description of Artificial Sequence: Synthetic oligonucleotide
ucacuacuaucacuguggu

SEQ ID NO: 2412759 - RNA, 19 nt, Artificial Sequence
  Description of Artificial Sequence: Synthetic oligonucleotide
gcuagaaugggcgugcccg

SEQ ID NO: 2412760 - RNA, 19 nt, Artificial Sequence
  Description of Artificial Sequence: Synthetic oligonucleotide
uccuucauauuuguguccu

SEQ ID NO: 2412761 - RNA, 19 nt, Artificial Sequence
  Description of Artificial Sequence: Synthetic oligonucleotide
uguaacuccguggccauac

SEQ ID NO: 2412762 - RNA, 19 nt, Artificial Sequence
  Description of Artificial Sequence: Synthetic oligonucleotide
uuagccauagcagcguuau

SEQ ID NO: 2412763 - RNA, 19 nt, Artificial Sequence
  Description of Artificial Sequence: Synthetic oligonucleotide
ggauaauaacacuggguug

SEQ ID NO: 2412764 - RNA, 19 nt, Artificial Sequence
  Description of Artificial Sequence: Synthetic oligonucleotide
cucguaguugcuacuauca

SEQ ID NO: 2412765 - RNA, 19 nt, Artificial Sequence
  Description of Artificial Sequence: Synthetic oligonucleotide
agaauuggauacaucagaa

SEQ ID NO: 2412766 - RNA, 19 nt, Artificial Sequence
  Description of Artificial Sequence: Synthetic oligonucleotide
agacgcucgggacuagggg

SEQ ID NO: 2412767 - RNA, 19 nt, Artificial Sequence
  Description of Artificial Sequence: Synthetic oligonucleotide
uacuugccgguugugacag

SEQ ID NO: 2412768 - RNA, 19 nt, Artificial Sequence
  Description of Artificial Sequence: Synthetic oligonucleotide
gauuagugccacagcaggc

SEQ ID NO: 2412769 - RNA, 19 nt, Artificial Sequence
  Description of Artificial Sequence: Synthetic oligonucleotide
gaaguagaguuuacuugcc

SEQ ID NO: 2412770 - RNA, 19 nt, Artificial Sequence
  Description of Artificial Sequence: Synthetic oligonucleotide
ucuucggcaugauccagga

SEQ ID NO: 2412771 - RNA, 19 nt, Artificial Sequence
  Description of Artificial Sequence: Synthetic oligonucleotide
gacagcagucucguaaacc

SEQ ID NO: 2412772 - RNA, 19 nt, Artificial Sequence
  Description of Artificial Sequence: Synthetic oligonucleotide
ucguaguugcuacuaucac

SEQ ID NO: 2412773 - RNA, 19 nt, Artificial Sequence
  Description of Artificial Sequence: Synthetic oligonucleotide
gucgucugcucgcagacgc

SEQ ID NO: 2412774 - RNA, 19 nt, Artificial Sequence
  Description of Artificial Sequence: Synthetic oligonucleotide
uggauacaucagaaggacu

SEQ ID NO: 2412775 - RNA, 19 nt, Artificial Sequence
  Description of Artificial Sequence: Synthetic oligonucleotide
guaguugcuacuaucacua

SEQ ID NO: 2412776 - RNA, 19 nt, Artificial Sequence
  Description of Artificial Sequence: Synthetic oligonucleotide
ugcugaccccacaauuucc

SEQ ID NO: 2412777 - RNA, 19 nt, Artificial Sequence
  Description of Artificial Sequence: Synthetic oligonucleotide
gucugaucaaacgauccgc

SEQ ID NO: 2412778 - RNA, 19 nt, Artificial Sequence
  Description of Artificial Sequence: Synthetic oligonucleotide
uuccuuucucaaauuucac

SEQ ID NO: 2412779 - RNA, 19 nt, Artificial Sequence
  Description of Artificial Sequence: Synthetic oligonucleotide
ugugguucucagagugaag

SEQ ID NO: 2412780 - RNA, 19 nt, Artificial Sequence
  Description of Artificial Sequence: Synthetic oligonucleotide
ugccgguugugacagggca

SEQ ID NO: 2412781 - RNA, 19 nt, Artificial Sequence
  Description of Artificial Sequence: Synthetic oligonucleotide
cugaucaaacgauccgcag

SEQ ID NO: 2412782 - RNA, 19 nt, Artificial Sequence
  Description of Artificial Sequence: Synthetic oligonucleotide
uccugacgcuguaacuccg

SEQ ID NO: 2412783 - RNA, 19 nt, Artificial Sequence
  Description of Artificial Sequence: Synthetic oligonucleotide
auuugaucguucauaggca

SEQ ID NO: 2412784 - RNA, 19 nt, Artificial Sequence
  Description of Artificial Sequence: Synthetic oligonucleotide
cucauuaugcugaccccac

SEQ ID NO: 2412785 - RNA, 19 nt, Artificial Sequence
  Description of Artificial Sequence: Synthetic oligonucleotide
ccuuugugucucuucaucg

SEQ ID NO: 2412786 - RNA, 19 nt, Artificial Sequence
  Description of Artificial Sequence: Synthetic oligonucleotide
ugugccccgaucugucggg

SEQ ID NO: 2412787 - RNA, 19 nt, Artificial Sequence
  Description of Artificial Sequence: Synthetic oligonucleotide
cugagagucccgaucugag

SEQ ID NO: 2412788 - RNA, 19 nt, Artificial Sequence
  Description of Artificial Sequence: Synthetic oligonucleotide
cuagaaugggcgugcccgg

SEQ ID NO: 2412789 - RNA, 19 nt, Artificial Sequence
  Description of Artificial Sequence: Synthetic oligonucleotide
uugcuccauugccucaccg

SEQ ID NO: 2412790 - RNA, 19 nt, Artificial Sequence
  Description of Artificial Sequence: Synthetic oligonucleotide
uaacacuggguuguaacuc

SEQ ID NO: 2412791 - RNA, 19 nt, Artificial Sequence
  Description of Artificial Sequence: Synthetic oligonucleotide
cugcgauagaugucugggg

SEQ ID NO: 2412792 - RNA, 19 nt, Artificial Sequence
  Description of Artificial Sequence: Synthetic oligonucleotide
cuugccgguugugacaggg

SEQ ID NO: 2412793 - RNA, 19 nt, Artificial Sequence
  Description of Artificial Sequence: Synthetic oligonucleotide
uccauugccucaccgcuuc

SEQ ID NO: 2412794 - RNA, 19 nt, Artificial Sequence
  Description of Artificial Sequence: Synthetic oligonucleotide
ugcuacuaucacuacuauc

SEQ ID NO: 2412795 - RNA, 19 nt, Artificial Sequence
  Description of Artificial Sequence: Synthetic oligonucleotide
acaugaaguccccucuacu

SEQ ID NO: 2412796 - RNA, 19 nt, Artificial Sequence
  Description of Artificial Sequence: Synthetic oligonucleotide
guauuuccagugcugagaa

SEQ ID NO: 2412797 - RNA, 19 nt, Artificial Sequence
  Description of Artificial Sequence: Synthetic oligonucleotide
ucauuaugcugaccccaca

SEQ ID NO: 2412798 - RNA, 19 nt, Artificial Sequence
  Description of Artificial Sequence: Synthetic oligonucleotide
cugucgggagaguucacag

SEQ ID NO: 2412799 - RNA, 19 nt, Artificial Sequence
  Description of Artificial Sequence: Synthetic oligonucleotide
auugccucaccgcuucuca

SEQ ID NO: 2412800 - RNA, 19 nt, Artificial Sequence
  Description of Artificial Sequence: Synthetic oligonucleotide
acaagucugaucaaacgau

SEQ ID NO: 2412801 - RNA, 19 nt, Artificial Sequence
  Description of Artificial Sequence: Synthetic oligonucleotide
cacuuuggcccuuuguguc

SEQ ID NO: 2412802 - RNA, 19 nt, Artificial Sequence
  Description of Artificial Sequence: Synthetic oligonucleotide
guugcuacuaucacuacua

SEQ ID NO: 2412803 - RNA, 19 nt, Artificial Sequence
  Description of Artificial Sequence: Synthetic oligonucleotide
uaacuccguggccauacac

SEQ ID NO: 2412804 - RNA, 19 nt, Artificial Sequence
  Description of Artificial Sequence: Synthetic oligonucleotide
guucuaucagaaccuuuac

SEQ ID NO: 2412805 - RNA, 19 nt, Artificial Sequence
  Description of Artificial Sequence: Synthetic oligonucleotide
ucgacagcagucucguaaa

SEQ ID NO: 2412806 - RNA, 19 nt, Artificial Sequence
  Description of Artificial Sequence: Synthetic oligonucleotide
auggaucgacagcagucuc

SEQ ID NO: 2412807 - RNA, 19 nt, Artificial Sequence
  Description of Artificial Sequence: Synthetic oligonucleotide
agaaugggcgugcccgggg

SEQ ID NO: 2412808 - RNA, 19 nt, Artificial Sequence
  Description of Artificial Sequence: Synthetic oligonucleotide
cauaggcagcagcuuaagc

SEQ ID NO: 2412809 - RNA, 19 nt, Artificial Sequence
  Description of Artificial Sequence: Synthetic oligonucleotide
ucgggagaguucacagucc

SEQ ID NO: 2412810 - RNA, 19 nt, Artificial Sequence
  Description of Artificial Sequence: Synthetic oligonucleotide
ugagagucccgaucugaga

SEQ ID NO: 2412811 - RNA, 19 nt, Artificial Sequence
  Description of Artificial Sequence: Synthetic oligonucleotide
gaucugucgggagaguuca

SEQ ID NO: 2412812 - RNA, 19 nt, Artificial Sequence
  Description of Artificial Sequence: Synthetic oligonucleotide
gugguucucagagugaaga

SEQ ID NO: 2412813 - RNA, 19 nt, Artificial Sequence
  Description of Artificial Sequence: Synthetic oligonucleotide
guauggaucgacagcaguc

SEQ ID NO: 2412814 - RNA, 19 nt, Artificial Sequence
  Description of Artificial Sequence: Synthetic oligonucleotide
cauaauacacuuuggcccu

SEQ ID NO: 2412815 - RNA, 19 nt, Artificial Sequence
  Description of Artificial Sequence: Synthetic oligonucleotide
ucguauggaucgacagcag

SEQ ID NO: 2412816 - RNA, 19 nt, Artificial Sequence
  Description of Artificial Sequence: Synthetic oligonucleotide
agccauagcagcguuauuu

SEQ ID NO: 2412817 - RNA, 19 nt, Artificial Sequence
  Description of Artificial Sequence: Synthetic oligonucleotide
ucacuccuucauauuugug

SEQ ID NO: 2412818 - RNA, 19 nt, Artificial Sequence
  Description of Artificial Sequence: Synthetic oligonucleotide
aaguccccucuacuggcug

SEQ ID NO: 2412819 - RNA, 19 nt, Artificial Sequence
  Description of Artificial Sequence: Synthetic oligonucleotide
guagaaguagaguuuacuu

SEQ ID NO: 2412820 - RNA, 19 nt, Artificial Sequence
  Description of Artificial Sequence: Synthetic oligonucleotide
auagcagcguuauuuucuu

SEQ ID NO: 2412821 - RNA, 19 nt, Artificial Sequence
  Description of Artificial Sequence: Synthetic oligonucleotide
ucucagagugaagauuagu

SEQ ID NO: 2412822 - RNA, 19 nt, Artificial Sequence
  Description of Artificial Sequence: Synthetic oligonucleotide
cuuuucugcgauagauguc

SEQ ID NO: 2412823 - RNA, 19 nt, Artificial Sequence
  Description of Artificial Sequence: Synthetic oligonucleotide
ggauuugaucguucauagg

SEQ ID NO: 2412824 - RNA, 19 nt, Artificial Sequence
  Description of Artificial Sequence: Synthetic oligonucleotide
agagcacgcuagaaugggc

SEQ ID NO: 2412825 - RNA, 19 nt, Artificial Sequence
  Description of Artificial Sequence: Synthetic oligonucleotide
agcagucucguaaaccuug

SEQ ID NO: 2412826 - RNA, 19 nt, Artificial Sequence
  Description of Artificial Sequence: Synthetic oligonucleotide
ucugucgggagaguucaca

SEQ ID NO: 2412827 - RNA, 19 nt, Artificial Sequence
  Description of Artificial Sequence: Synthetic oligonucleotide
ucccggaugauagucugca

SEQ ID NO: 2412828 - RNA, 19 nt, Artificial Sequence
  Description of Artificial Sequence: Synthetic oligonucleotide
auucuuuauauggcagcug

SEQ ID NO: 2412829 - RNA, 19 nt, Artificial Sequence
  Description of Artificial Sequence: Synthetic oligonucleotide
uggucgucugcucgcagac

SEQ ID NO: 2412830 - RNA, 19 nt, Artificial Sequence
  Description of Artificial Sequence: Synthetic oligonucleotide
guccugacgcuguaacucc

SEQ ID NO: 2412831 - RNA, 19 nt, Artificial Sequence
  Description of Artificial Sequence: Synthetic oligonucleotide
uuucugcgauagaugucug

SEQ ID NO: 2412832 - RNA, 19 nt, Artificial Sequence
  Description of Artificial Sequence: Synthetic oligonucleotide
cucaccgcuucucauuaug

SEQ ID NO: 2412833 - RNA, 19 nt, Artificial Sequence
  Description of Artificial Sequence: Synthetic oligonucleotide
uuucuucggcaugauccag

SEQ ID NO: 2412834 - RNA, 19 nt, Artificial Sequence
  Description of Artificial Sequence: Synthetic oligonucleotide
cuugucccggaugauaguc

SEQ ID NO: 2412835 - RNA, 19 nt, Artificial Sequence
  Description of Artificial Sequence: Synthetic oligonucleotide
gggcauggaguccugacgc

SEQ ID NO: 2412836 - RNA, 19 nt, Artificial Sequence
  Description of Artificial Sequence: Synthetic oligonucleotide
cagacgcucgggacuaggg

SEQ ID NO: 2412837 - RNA, 19 nt, Artificial Sequence
  Description of Artificial Sequence: Synthetic oligonucleotide
agacugaguaggauaauaa

SEQ ID NO: 2412838 - RNA, 19 nt, Artificial Sequence
  Description of Artificial Sequence: Synthetic oligonucleotide
aacgauccgcagaaaacau

SEQ ID NO: 2412839 - RNA, 19 nt, Artificial Sequence
  Description of Artificial Sequence: Synthetic oligonucleotide
ggcaugauccaggaucugg

SEQ ID NO: 2412840 - RNA, 19 nt, Artificial Sequence
  Description of Artificial Sequence: Synthetic oligonucleotide
accaugcauucuuuauaug

SEQ ID NO: 2412841 - RNA, 19 nt, Artificial Sequence
  Description of Artificial Sequence: Synthetic oligonucleotide
ucccggauuugaucguuca

SEQ ID NO: 2412842 - RNA, 19 nt, Artificial Sequence
  Description of Artificial Sequence: Synthetic oligonucleotide
acgcuguaacuccguggcc

SEQ ID NO: 2412843 - RNA, 19 nt, Artificial Sequence
  Description of Artificial Sequence: Synthetic oligonucleotide
gcagcguuauuuucuucgg

SEQ ID NO: 2412844 - RNA, 19 nt, Artificial Sequence
  Description of Artificial Sequence: Synthetic oligonucleotide
ucguaaaccuugcuccauu

SEQ ID NO: 2412845 - RNA, 19 nt, Artificial Sequence
  Description of Artificial Sequence: Synthetic oligonucleotide
gcagcuuaagcugugcccc

SEQ ID NO: 2412846 - RNA, 19 nt, Artificial Sequence
  Description of Artificial Sequence: Synthetic oligonucleotide
cagcguuauuuucuucggc

SEQ ID NO: 2412847 - RNA, 19 nt, Artificial Sequence
  Description of Artificial Sequence: Synthetic oligonucleotide
caauucguauggaucgaca

SEQ ID NO: 2412848 - RNA, 19 nt, Artificial Sequence
  Description of Artificial Sequence: Synthetic oligonucleotide
cauuaugcugaccccacaa

SEQ ID NO: 2412849 - RNA, 19 nt, Artificial Sequence
  Description of Artificial Sequence: Synthetic oligonucleotide
uugcuacuaucacuacuau

SEQ ID NO: 2412850 - RNA, 19 nt, Artificial Sequence
  Description of Artificial Sequence: Synthetic oligonucleotide
gucgccgacaggugccucg

SEQ ID NO: 2412851 - RNA, 19 nt, Artificial Sequence
  Description of Artificial Sequence: Synthetic oligonucleotide
ugguucucagagugaagau

SEQ ID NO: 2412852 - RNA, 19 nt, Artificial Sequence
  Description of Artificial Sequence: Synthetic oligonucleotide
cugugccccgaucugucgg

SEQ ID NO: 2412853 - RNA, 19 nt, Artificial Sequence
  Description of Artificial Sequence: Synthetic oligonucleotide
gacaggugccucguaguug

SEQ ID NO: 2412854 - RNA, 19 nt, Artificial Sequence
  Description of Artificial Sequence: Synthetic oligonucleotide
ugcucgcagacgcucggga

SEQ ID NO: 2412855 - RNA, 19 nt, Artificial Sequence
  Description of Artificial Sequence: Synthetic oligonucleotide
guuuacuugccgguuguga

SEQ ID NO: 2412856 - RNA, 19 nt, Artificial Sequence
  Description of Artificial Sequence: Synthetic oligonucleotide
agaaaacaugaaguccccu

SEQ ID NO: 2412857 - RNA, 19 nt, Artificial Sequence
  Description of Artificial Sequence: Synthetic oligonucleotide
ucuggucgucugcucgcag

SEQ ID NO: 2412858 - RNA, 19 nt, Artificial Sequence
  Description of Artificial Sequence: Synthetic oligonucleotide
ucccgaucugagagcacgc

SEQ ID NO: 2412859 - RNA, 19 nt, Artificial Sequence
  Description of Artificial Sequence: Synthetic oligonucleotide
cagcagcuuaagcugugcc

SEQ ID NO: 2412860 - RNA, 19 nt, Artificial Sequence
  Description of Artificial Sequence: Synthetic oligonucleotide
gagacugaguaggauaaua

SEQ ID NO: 2412861 - RNA, 19 nt, Artificial Sequence
  Description of Artificial Sequence: Synthetic oligonucleotide
agcacgcuagaaugggcgu

SEQ ID NO: 2412862 - RNA, 19 nt, Artificial Sequence
  Description of Artificial Sequence: Synthetic oligonucleotide
gucggcguggucaccaugc

SEQ ID NO: 2412863 - RNA, 19 nt, Artificial Sequence
  Description of Artificial Sequence: Synthetic oligonucleotide
cacgcuagaaugggcgugc

SEQ ID NO: 2412864 - RNA, 19 nt, Artificial Sequence
  Description of Artificial Sequence: Synthetic oligonucleotide
gaucugagagcacgcuaga

SEQ ID NO: 2412865 - RNA, 19 nt, Artificial Sequence
  Description of Artificial Sequence: Synthetic oligonucleotide
ucagucccucuucuacaac

SEQ ID NO: 2412866 - RNA, 19 nt, Artificial Sequence
  Description of Artificial Sequence: Synthetic oligonucleotide
cggauuugaucguucauag

SEQ ID NO: 2412867 - RNA, 19 nt, Artificial Sequence
  Description of Artificial Sequence: Synthetic oligonucleotide
ggugccucguaguugcuac

SEQ ID NO: 2412868 - RNA, 19 nt, Artificial Sequence
  Description of Artificial Sequence: Synthetic oligonucleotide
cagcuuaagcugugccccg

SEQ ID NO: 2412869 - RNA, 19 nt, Artificial Sequence
  Description of Artificial Sequence: Synthetic oligonucleotide
gaucguucauaggcagcag

SEQ ID NO: 2412870 - RNA, 19 nt, Artificial Sequence
  Description of Artificial Sequence: Synthetic oligonucleotide
uugccgguugugacagggc

SEQ ID NO: 2412871 - RNA, 19 nt, Artificial Sequence
  Description of Artificial Sequence: Synthetic oligonucleotide
ggaguccugacgcuguaac

SEQ ID NO: 2412872 - RNA, 19 nt, Artificial Sequence
  Description of Artificial Sequence: Synthetic oligonucleotide
cgaucugagagcacgcuag

SEQ ID NO: 2412873 - RNA, 19 nt, Artificial Sequence
  Description of Artificial Sequence: Synthetic oligonucleotide
aguccccuaggagggaguc

SEQ ID NO: 2412874 - RNA, 19 nt, Artificial Sequence
  Description of Artificial Sequence: Synthetic oligonucleotide
gacgcucgggacuaggggu

SEQ ID NO: 2412875 - RNA, 19 nt, Artificial Sequence
  Description of Artificial Sequence: Synthetic oligonucleotide
aggacuuuucugcgauaga

SEQ ID NO: 2412876 - RNA, 19 nt, Artificial Sequence
  Description of Artificial Sequence: Synthetic oligonucleotide
uagaguuuacuugccgguu

SEQ ID NO: 2412877 - RNA, 19 nt, Artificial Sequence
  Description of Artificial Sequence: Synthetic oligonucleotide
ggacuagggguagaaguag

SEQ ID NO: 2412878 - RNA, 19 nt, Artificial Sequence
  Description of Artificial Sequence: Synthetic oligonucleotide
gacuagggguagaaguaga

SEQ ID NO: 2412879 - RNA, 19 nt, Artificial Sequence
  Description of Artificial Sequence: Synthetic oligonucleotide
gaaugggcgugcccgggga

SEQ ID NO: 2412880 - RNA, 19 nt, Artificial Sequence
  Description of Artificial Sequence: Synthetic oligonucleotide
gcugauucagucccucuuc

SEQ ID NO: 2412881 - RNA, 19 nt, Artificial Sequence
  Description of Artificial Sequence: Synthetic oligonucleotide
ggguuguaacuccauguuc

SEQ ID NO: 2412882 - RNA, 19 nt, Artificial Sequence
  Description of Artificial Sequence: Synthetic oligonucleotide
gagucagcuuagccauagc

SEQ ID NO: 2412883 - RNA, 19 nt, Artificial Sequence
  Description of Artificial Sequence: Synthetic oligonucleotide
ggagagucagcuuagccau

SEQ ID NO: 2412884 - RNA, 19 nt, Artificial Sequence
  Description of Artificial Sequence: Synthetic oligonucleotide
cugacgcuguaacuccgug

SEQ ID NO: 2412885 - RNA, 19 nt, Artificial Sequence
  Description of Artificial Sequence: Synthetic oligonucleotide
acgauccgcagaaaacaug

SEQ ID NO: 2412886 - RNA, 19 nt, Artificial Sequence
  Description of Artificial Sequence: Synthetic oligonucleotide
ucgggacuagggguagaag

SEQ ID NO: 2412887 - RNA, 19 nt, Artificial Sequence
  Description of Artificial Sequence: Synthetic oligonucleotide
cuccguggccauacaccgg

SEQ ID NO: 2412888 - RNA, 19 nt, Artificial Sequence
  Description of Artificial Sequence: Synthetic oligonucleotide
ccgcagaaaacaugaaguc

SEQ ID NO: 2412889 - RNA, 19 nt, Artificial Sequence
  Description of Artificial Sequence: Synthetic oligonucleotide
cagugcugagaauuggaua

SEQ ID NO: 2412890 - RNA, 19 nt, Artificial Sequence
  Description of Artificial Sequence: Synthetic oligonucleotide
gggagucgccgacaggugc

SEQ ID NO: 2412891 - RNA, 19 nt, Artificial Sequence
  Description of Artificial Sequence: Synthetic oligonucleotide
ucggcguggucaccaugca

SEQ ID NO: 2412892 - RNA, 19 nt, Artificial Sequence
  Description of Artificial Sequence: Synthetic oligonucleotide
auaauaacacuggguugua

SEQ ID NO: 2412893 - RNA, 19 nt, Artificial Sequence
  Description of Artificial Sequence: Synthetic oligonucleotide
gccgacaggugccucguag

SEQ ID NO: 2412894 - RNA, 19 nt, Artificial Sequence
  Description of Artificial Sequence: Synthetic oligonucleotide
aggaucuucccaauucgua

SEQ ID NO: 2412895 - RNA, 19 nt, Artificial Sequence
  Description of Artificial Sequence: Synthetic oligonucleotide
acgcuagaaugggcgugcc

SEQ ID NO: 2412896 - RNA, 19 nt, Artificial Sequence
  Description of Artificial Sequence: Synthetic oligonucleotide
ggauacaucagaaggacuu

SEQ ID NO: 2412897 - RNA, 19 nt, Artificial Sequence
  Description of Artificial Sequence: Synthetic oligonucleotide
ugccccgaucugucgggag

SEQ ID NO: 2412898 - RNA, 19 nt, Artificial Sequence
  Description of Artificial Sequence: Synthetic oligonucleotide
ucgucugcucgcagacgcu

SEQ ID NO: 2412899 - RNA, 19 nt, Artificial Sequence
  Description of Artificial Sequence: Synthetic oligonucleotide
augggcgugcccggggagg

SEQ ID NO: 2412900 - RNA, 19 nt, Artificial Sequence
  Description of Artificial Sequence: Synthetic oligonucleotide
ggaucuucccaauucguau

SEQ ID NO: 2412901 - RNA, 19 nt, Artificial Sequence
  Description of Artificial Sequence: Synthetic oligonucleotide
agcuucaauuacaguauuu

SEQ ID NO: 2412902 - RNA, 19 nt, Artificial Sequence
  Description of Artificial Sequence: Synthetic oligonucleotide
augauugauuuggcacaug

SEQ ID NO: 2412903 - RNA, 19 nt, Artificial Sequence
  Description of Artificial Sequence: Synthetic oligonucleotide
ugccucguaguugcuacua

SEQ ID NO: 2412904 - RNA, 19 nt, Artificial Sequence
  Description of Artificial Sequence: Synthetic oligonucleotide
gugacagggcauggagucc

SEQ ID NO: 2412905 - RNA, 19 nt, Artificial Sequence
  Description of Artificial Sequence: Synthetic oligonucleotide
uagcagcguuauuuucuuc

SEQ ID NO: 2412906 - RNA, 19 nt, Artificial Sequence
  Description of Artificial Sequence: Synthetic oligonucleotide
cugugguucucagagugaa

SEQ ID NO: 2412907 - RNA, 19 nt, Artificial Sequence
  Description of Artificial Sequence: Synthetic oligonucleotide
cuggucgucugcucgcaga

SEQ ID NO: 2412908 - RNA, 19 nt, Artificial Sequence
  Description of Artificial Sequence: Synthetic oligonucleotide
aucugagagcacgcuagaa

SEQ ID NO: 2412909 - RNA, 19 nt, Artificial Sequence
  Description of Artificial Sequence: Synthetic oligonucleotide
gaaggacuuuucugcgaua

SEQ ID NO: 2412910 - RNA, 19 nt, Artificial Sequence
  Description of Artificial Sequence: Synthetic oligonucleotide
uuuggcccuuugugucucu

SEQ ID NO: 2412911 - RNA, 19 nt, Artificial Sequence
  Description of Artificial Sequence: Synthetic oligonucleotide
cuuagccauagcagcguua

SEQ ID NO: 2412912 - RNA, 19 nt, Artificial Sequence
  Description of Artificial Sequence: Synthetic oligonucleotide
cauugccucaccgcuucuc

SEQ ID NO: 2412913 - RNA, 19 nt, Artificial Sequence
  Description of Artificial Sequence: Synthetic oligonucleotide
ccucguaguugcuacuauc

SEQ ID NO: 2412914 - RNA, 19 nt, Artificial Sequence
  Description of Artificial Sequence: Synthetic oligonucleotide
cucuacuggcugucuuguc

SEQ ID NO: 2412915 - RNA, 19 nt, Artificial Sequence
  Description of Artificial Sequence: Synthetic oligonucleotide
ggagaguucacaguccccu

SEQ ID NO: 2412916 - RNA, 19 nt, Artificial Sequence
  Description of Artificial Sequence: Synthetic oligonucleotide
ggagucgccgacaggugcc

SEQ ID NO: 2412917 - RNA, 19 nt, Artificial Sequence
  Description of Artificial Sequence: Synthetic oligonucleotide
gggaggagagucagcuuag

SEQ ID NO: 2412918 - RNA, 19 nt, Artificial Sequence
  Description of Artificial Sequence: Synthetic oligonucleotide
guccccuaggagggagucg

SEQ ID NO: 2412919 - RNA, 19 nt, Artificial Sequence
  Description of Artificial Sequence: Synthetic oligonucleotide
cuacuaucacugugguucu

SEQ ID NO: 2412920 - RNA, 19 nt, Artificial Sequence
  Description of Artificial Sequence: Synthetic oligonucleotide
cugauucagucccucuucu

SEQ ID NO: 2412921 - RNA, 19 nt, Artificial Sequence
  Description of Artificial Sequence: Synthetic oligonucleotide
agagacugaguaggauaau

SEQ ID NO: 2412922 - RNA, 19 nt, Artificial Sequence
  Description of Artificial Sequence: Synthetic oligonucleotide
cuacaacaagucugaucaa

SEQ ID NO: 2412923 - RNA, 19 nt, Artificial Sequence
  Description of Artificial Sequence: Synthetic oligonucleotide
agcuuaagcugugccccga

SEQ ID NO: 2412924 - RNA, 19 nt, Artificial Sequence
  Description of Artificial Sequence: Synthetic oligonucleotide
gauccgcagaaaacaugaa

SEQ ID NO: 2412925 - RNA, 19 nt, Artificial Sequence
  Description of Artificial Sequence: Synthetic oligonucleotide
uggaguccugacgcuguaa

SEQ ID NO: 2412926 - RNA, 19 nt, Artificial Sequence
  Description of Artificial Sequence: Synthetic oligonucleotide
ucgcagacgcucgggacua

SEQ ID NO: 2412927 - RNA, 19 nt, Artificial Sequence
  Description of Artificial Sequence: Synthetic oligonucleotide
agucccgaucugagagcac

SEQ ID NO: 2412928 - RNA, 19 nt, Artificial Sequence
  Description of Artificial Sequence: Synthetic oligonucleotide
aucugucgggagaguucac

SEQ ID NO: 2412929 - RNA, 19 nt, Artificial Sequence
  Description of Artificial Sequence: Synthetic oligonucleotide
gcagucucguaaaccuugc

SEQ ID NO: 2412930 - RNA, 19 nt, Artificial Sequence
  Description of Artificial Sequence: Synthetic oligonucleotide
gugcccggggaggagaguc

SEQ ID NO: 2412931 - RNA, 19 nt, Artificial Sequence
  Description of Artificial Sequence: Synthetic oligonucleotide
ccaauucguauggaucgac

SEQ ID NO: 2412932 - RNA, 19 nt, Artificial Sequence
  Description of Artificial Sequence: Synthetic oligonucleotide
cugcucgcagacgcucggg

SEQ ID NO: 2412933 - RNA, 19 nt, Artificial Sequence
  Description of Artificial Sequence: Synthetic oligonucleotide
gggacuagggguagaagua

SEQ ID NO: 2412934 - RNA, 19 nt, Artificial Sequence
  Description of Artificial Sequence: Synthetic oligonucleotide
cucgcagacgcucgggacu

SEQ ID NO: 2412935 - RNA, 19 nt, Artificial Sequence
  Description of Artificial Sequence: Synthetic oligonucleotide
aucaaacgauccgcagaaa

SEQ ID NO: 2412936 - RNA, 19 nt, Artificial Sequence
  Description of Artificial Sequence: Synthetic oligonucleotide
auauggcagcugauucagu

SEQ ID NO: 2412937 - RNA, 19 nt, Artificial Sequence
  Description of Artificial Sequence: Synthetic oligonucleotide
ggaugauagucugcagcuc

SEQ ID NO: 2412938 - RNA, 19 nt, Artificial Sequence
  Description of Artificial Sequence: Synthetic oligonucleotide
uagccauagcagcguuauu

SEQ ID NO: 2412939 - RNA, 19 nt, Artificial Sequence
  Description of Artificial Sequence: Synthetic oligonucleotide
ggaggagagucagcuuagc

SEQ ID NO: 2412940 - RNA, 19 nt, Artificial Sequence
  Description of Artificial Sequence: Synthetic oligonucleotide
ucgccgacaggugccucgu

SEQ ID NO: 2412941 - RNA, 19 nt, Artificial Sequence
  Description of Artificial Sequence: Synthetic oligonucleotide
ggucgucugcucgcagacg

SEQ ID NO: 2412942 - RNA, 19 nt, Artificial Sequence
  Description of Artificial Sequence: Synthetic oligonucleotide
gcguggucaccaugcauuc

SEQ ID NO: 2412943 - RNA, 19 nt, Artificial Sequence
  Description of Artificial Sequence: Synthetic oligonucleotide
gcacgcuagaaugggcgug

SEQ ID NO: 2412944 - RNA, 19 nt, Artificial Sequence
  Description of Artificial Sequence: Synthetic oligonucleotide
agggagucgccgacaggug

SEQ ID NO: 2412945 - RNA, 19 nt, Artificial Sequence
  Description of Artificial Sequence: Synthetic oligonucleotide
ccgguugugacagggcaug

SEQ ID NO: 2412946 - RNA, 19 nt, Artificial Sequence
  Description of Artificial Sequence: Synthetic oligonucleotide
gggagaguucacagucccc

SEQ ID NO: 2412947 - RNA, 19 nt, Artificial Sequence
  Description of Artificial Sequence: Synthetic oligonucleotide
gcagacgcucgggacuagg

SEQ ID NO: 2412948 - RNA, 19 nt, Artificial Sequence
  Description of Artificial Sequence: Synthetic oligonucleotide
gcuucucauuaugcugacc

SEQ ID NO: 2412949 - RNA, 19 nt, Artificial Sequence
  Description of Artificial Sequence: Synthetic oligonucleotide
ggucaccaugcauucuuua

SEQ ID NO: 2412950 - RNA, 19 nt, Artificial Sequence
  Description of Artificial Sequence: Synthetic oligonucleotide
ggguagaaguagaguuuac

SEQ ID NO: 2412951 - RNA, 19 nt, Artificial Sequence
  Description of Artificial Sequence: Synthetic oligonucleotide
cguaguugcuacuaucacu

SEQ ID NO: 2412952 - RNA, 19 nt, Artificial Sequence
  Description of Artificial Sequence: Synthetic oligonucleotide
ccuaggagggagucgccga

SEQ ID NO: 2412953 - RNA, 19 nt, Artificial Sequence
  Description of Artificial Sequence: Synthetic oligonucleotide
ggaucgacagcagucucgu

SEQ ID NO: 2412954 - RNA, 19 nt, Artificial Sequence
  Description of Artificial Sequence: Synthetic oligonucleotide
cucgggacuagggguagaa

SEQ ID NO: 2412955 - RNA, 19 nt, Artificial Sequence
  Description of Artificial Sequence: Synthetic oligonucleotide
gcguuauuuucuucggcau

SEQ ID NO: 2412956 - RNA, 19 nt, Artificial Sequence
  Description of Artificial Sequence: Synthetic oligonucleotide
gaucgacagcagucucgua

SEQ ID NO: 2412957 - RNA, 19 nt, Artificial Sequence
  Description of Artificial Sequence: Synthetic oligonucleotide
gcagcugauucagucccuc

SEQ ID NO: 2412958 - RNA, 19 nt, Artificial Sequence
  Description of Artificial Sequence: Synthetic oligonucleotide
aggugccucguaguugcua

SEQ ID NO: 2412959 - RNA, 19 nt, Artificial Sequence
  Description of Artificial Sequence: Synthetic oligonucleotide
agcaggccugagagucccg

SEQ ID NO: 2412960 - RNA, 19 nt, Artificial Sequence
  Description of Artificial Sequence: Synthetic oligonucleotide
cccggaugauagucugcag

SEQ ID NO: 2412961 - RNA, 19 nt, Artificial Sequence
  Description of Artificial Sequence: Synthetic oligonucleotide
ccggauuugaucguucaua

SEQ ID NO: 2412962 - RNA, 19 nt, Artificial Sequence
  Description of Artificial Sequence: Synthetic oligonucleotide
ggcguggucaccaugcauu

SEQ ID NO: 2412963 - RNA, 19 nt, Artificial Sequence
  Description of Artificial Sequence: Synthetic oligonucleotide
gccauagcagcguuauuuu

SEQ ID NO: 2412964 - RNA, 19 nt, Artificial Sequence
  Description of Artificial Sequence: Synthetic oligonucleotide
caucgcucugaaucaggau

SEQ ID NO: 2412965 - RNA, 19 nt, Artificial Sequence
  Description of Artificial Sequence: Synthetic oligonucleotide
gccccgaucugucgggaga

SEQ ID NO: 2412966 - RNA, 19 nt, Artificial Sequence
  Description of Artificial Sequence: Synthetic oligonucleotide
acgcucgggacuaggggua

SEQ ID NO: 2412967 - RNA, 19 nt, Artificial Sequence
  Description of Artificial Sequence: Synthetic oligonucleotide
ccucuucuacaacaagucu

SEQ ID NO: 2412968 - RNA, 19 nt, Artificial Sequence
  Description of Artificial Sequence: Synthetic oligonucleotide
ccccgaucugucgggagag

SEQ ID NO: 2412969 - RNA, 19 nt, Artificial Sequence
  Description of Artificial Sequence: Synthetic oligonucleotide
cgggacuagggguagaagu

SEQ ID NO: 2412970 - RNA, 19 nt, Artificial Sequence
  Description of Artificial Sequence: Synthetic oligonucleotide
cgcuguaacuccguggcca

SEQ ID NO: 2412971 - RNA, 19 nt, Artificial Sequence
  Description of Artificial Sequence: Synthetic oligonucleotide
gguggagaagagacugagu

SEQ ID NO: 2412972 - RNA, 19 nt, Artificial Sequence
  Description of Artificial Sequence: Synthetic oligonucleotide
cacuacuaucacugugguu

SEQ ID NO: 2412973 - RNA, 19 nt, Artificial Sequence
  Description of Artificial Sequence: Synthetic oligonucleotide
cgcuagaaugggcgugccc

SEQ ID NO: 2412974 - RNA, 19 nt, Artificial Sequence
  Description of Artificial Sequence: Synthetic oligonucleotide
cgcuucucauuaugcugac

SEQ ID NO: 2412975 - RNA, 19 nt, Artificial Sequence
  Description of Artificial Sequence: Synthetic oligonucleotide
cacuggguuguaacuccau

SEQ ID NO: 2412976 - RNA, 19 nt, Artificial Sequence
  Description of Artificial Sequence: Synthetic oligonucleotide
cugaccccacaauuuccuu

SEQ ID NO: 2412977 - RNA, 19 nt, Artificial Sequence
  Description of Artificial Sequence: Synthetic oligonucleotide
cgacagcagucucguaaac

SEQ ID NO: 2412978 - RNA, 19 nt, Artificial Sequence
  Description of Artificial Sequence: Synthetic oligonucleotide
ccgaucugagagcacgcua

SEQ ID NO: 2412979 - RNA, 19 nt, Artificial Sequence
  Description of Artificial Sequence: Synthetic oligonucleotide
cuucuacaacaagucugau

SEQ ID NO: 2412980 - RNA, 19 nt, Artificial Sequence
  Description of Artificial Sequence: Synthetic oligonucleotide
cccaauucguauggaucga

SEQ ID NO: 2412981 - RNA, 19 nt, Artificial Sequence
  Description of Artificial Sequence: Synthetic oligonucleotide
cguauggaucgacagcagu

SEQ ID NO: 2412982 - RNA, 19 nt, Artificial Sequence
  Description of Artificial Sequence: Synthetic oligonucleotide
caguccccuaggagggagu

SEQ ID NO: 2412983 - RNA, 19 nt, Artificial Sequence
  Description of Artificial Sequence: Synthetic oligonucleotide
gugccccgaucugucggga

SEQ ID NO: 2412984 - RNA, 19 nt, Artificial Sequence
  Description of Artificial Sequence: Synthetic oligonucleotide
ggcgugcccggggaggaga

SEQ ID NO: 2412985 - RNA, 19 nt, Artificial Sequence
  Description of Artificial Sequence: Synthetic oligonucleotide
gcgugcccggggaggagag

SEQ ID NO: 2412986 - RNA, 19 nt, Artificial Sequence
  Description of Artificial Sequence: Synthetic oligonucleotide
cgucugcucgcagacgcuc

SEQ ID NO: 2412987 - RNA, 19 nt, Artificial Sequence
  Description of Artificial Sequence: Synthetic oligonucleotide
cuucggcaugauccaggau

SEQ ID NO: 2412988 - RNA, 19 nt, Artificial Sequence
  Description of Artificial Sequence: Synthetic oligonucleotide
gccucguaguugcuacuau

SEQ ID NO: 2412989 - RNA, 19 nt, Artificial Sequence
  Description of Artificial Sequence: Synthetic oligonucleotide
ccggggaggagagucagcu

SEQ ID NO: 2412990 - RNA, 19 nt, Artificial Sequence
  Description of Artificial Sequence: Synthetic oligonucleotide
cuguaacuccguggccaua

SEQ ID NO: 2412991 - RNA, 19 nt, Artificial Sequence
  Description of Artificial Sequence: Synthetic oligonucleotide
ccucuacuggcugucuugu

SEQ ID NO: 2412992 - RNA, 19 nt, Artificial Sequence
  Description of Artificial Sequence: Synthetic oligonucleotide
ggcagcugauucagucccu

SEQ ID NO: 2412993 - RNA, 19 nt, Artificial Sequence
  Description of Artificial Sequence: Synthetic oligonucleotide
cugucggcguggucaccau

SEQ ID NO: 2412994 - RNA, 19 nt, Artificial Sequence
  Description of Artificial Sequence: Synthetic oligonucleotide
cgcucgggacuagggguag

SEQ ID NO: 2412995 - RNA, 19 nt, Artificial Sequence
  Description of Artificial Sequence: Synthetic oligonucleotide
gggcgugcccggggaggag

SEQ ID NO: 2412996 - RNA, 19 nt, Artificial Sequence
  Description of Artificial Sequence: Synthetic oligonucleotide
gcucgggacuagggguaga

SEQ ID NO: 2412997 - RNA, 19 nt, Artificial Sequence
  Description of Artificial Sequence: Synthetic oligonucleotide
gccgguugugacagggcau

SEQ ID NO: 2412998 - RNA, 19 nt, Artificial Sequence
  Description of Artificial Sequence: Synthetic oligonucleotide
cccggauuugaucguucau

SEQ ID NO: 2412999 - RNA, 19 nt, Artificial Sequence
  Description of Artificial Sequence: Synthetic oligonucleotide
gcucccggauuugaucguu

SEQ ID NO: 2413000 - RNA, 19 nt, Artificial Sequence
  Description of Artificial Sequence: Synthetic oligonucleotide
cccgaucugagagcacgcu

SEQ ID NO: 2413001 - RNA, 19 nt, Artificial Sequence
  Description of Artificial Sequence: Synthetic oligonucleotide
ccgaucugucgggagaguu

SEQ ID NO: 2413002 - RNA, 19 nt, Artificial Sequence
  Description of Artificial Sequence: Synthetic oligonucleotide
cgacaggugccucguaguu

SEQ ID NO: 2413003 - RNA, 19 nt, Artificial Sequence
  Description of Artificial Sequence: Synthetic oligonucleotide
ccucaccgcuucucauuau

SEQ ID NO: 2413004 - RNA, 19 nt, Artificial Sequence
  Description of Artificial Sequence: Synthetic oligonucleotide
cgcagacgcucgggacuag

SEQ ID NO: 2413005 - RNA, 19 nt, Artificial Sequence
  Description of Artificial Sequence: Synthetic oligonucleotide
ccauugccucaccgcuucu

SEQ ID NO: 2413006 - RNA, 19 nt, Artificial Sequence
  Description of Artificial Sequence: Synthetic oligonucleotide
ccccucuacuggcugucuu

SEQ ID NO: 2413007 - RNA, 19 nt, Artificial Sequence
  Description of Artificial Sequence: Synthetic oligonucleotide
cccgaucugucgggagagu

SEQ ID NO: 2413008 - RNA, 19 nt, Artificial Sequence
  Description of Artificial Sequence: Synthetic oligonucleotide
cgccgacaggugccucgua

SEQ ID NO: 2413009 - RNA, 19 nt, Artificial Sequence
  Description of Artificial Sequence: Synthetic oligonucleotide
cacaguagaagucagcucg

SEQ ID NO: 2413010 - RNA, 19 nt, Artificial Sequence
  Description of Artificial Sequence: Synthetic oligonucleotide
aaaccguuggugcaugcgg

SEQ ID NO: 2413011 - RNA, 19 nt, Artificial Sequence
  Description of Artificial Sequence: Synthetic oligonucleotide
gaaguacucaccuccuugg

SEQ ID NO: 2413012 - RNA, 19 nt, Artificial Sequence
  Description of Artificial Sequence: Synthetic oligonucleotide
gagagagagagggagaggg

SEQ ID NO: 2413013 - RNA, 19 nt, Artificial Sequence
  Description of Artificial Sequence: Synthetic oligonucleotide
ugaaguacucaccuccuug

SEQ ID NO: 2413014 - RNA, 19 nt, Artificial Sequence
  Description of Artificial Sequence: Synthetic oligonucleotide
cauaacgccgguuacgcag

SEQ ID NO: 2413015 - RNA, 19 nt, Artificial Sequence
  Description of Artificial Sequence: Synthetic oligonucleotide
aagacgucuggguucccac

SEQ ID NO: 2413016 - RNA, 19 nt, Artificial Sequence
  Description of Artificial Sequence: Synthetic oligonucleotide
aaccgcaucugcucaucgc

SEQ ID NO: 2413017 - RNA, 19 nt, Artificial Sequence
  Description of Artificial Sequence: Synthetic oligonucleotide
uuugccauccagaaaccgu

SEQ ID NO: 2413018 - RNA, 19 nt, Artificial Sequence
  Description of Artificial Sequence: Synthetic oligonucleotide
agcauaacgccgguuacgc

SEQ ID NO: 2413019 - RNA, 19 nt, Artificial Sequence
  Description of Artificial Sequence: Synthetic oligonucleotide
ucuucacaguagcaggucc

SEQ ID NO: 2413020 - RNA, 19 nt, Artificial Sequence
  Description of Artificial Sequence: Synthetic oligonucleotide
uccugugugagguacugcc

SEQ ID NO: 2413021 - RNA, 19 nt, Artificial Sequence
  Description of Artificial Sequence: Synthetic oligonucleotide
ugaggcaugggaagguaag

SEQ ID NO: 2413022 - RNA, 19 nt, Artificial Sequence
  Description of Artificial Sequence: Synthetic oligonucleotide
ucucauuagcccagggcag

SEQ ID NO: 2413023 - RNA, 19 nt, Artificial Sequence
  Description of Artificial Sequence: Synthetic oligonucleotide
uuccugguaggacuggaag

SEQ ID NO: 2413024 - RNA, 19 nt, Artificial Sequence
  Description of Artificial Sequence: Synthetic oligonucleotide
agguaagacgucuggguuc

SEQ ID NO: 2413025 - RNA, 19 nt, Artificial Sequence
  Description of Artificial Sequence: Synthetic oligonucleotide
cuaggccccaucuucacag

SEQ ID NO: 2413026 - RNA, 19 nt, Artificial Sequence
  Description of Artificial Sequence: Synthetic oligonucleotide
cacaggcugagucacaggc

SEQ ID NO: 2413027 - RNA, 19 nt, Artificial Sequence
  Description of Artificial Sequence: Synthetic oligonucleotide
guacucaccuccuuggaug

SEQ ID NO: 2413028 - RNA, 19 nt, Artificial Sequence
  Description of Artificial Sequence: Synthetic oligonucleotide
aucuggcucucauuagccc

SEQ ID NO: 2413029 - RNA, 19 nt, Artificial Sequence
  Description of Artificial Sequence: Synthetic oligonucleotide
uacugcucguacagcagcg

SEQ ID NO: 2413030 - RNA, 19 nt, Artificial Sequence
  Description of Artificial Sequence: Synthetic oligonucleotide
aagguaagacgucuggguu

SEQ ID NO: 2413031 - RNA, 19 nt, Artificial Sequence
  Description of Artificial Sequence: Synthetic oligonucleotide
gugugugugugugagagag

SEQ ID NO: 2413032 - RNA, 19 nt, Artificial Sequence
  Description of Artificial Sequence: Synthetic oligonucleotide
ucgggcagugccuugucgg

SEQ ID NO: 2413033 - RNA, 19 nt, Artificial Sequence
  Description of Artificial Sequence: Synthetic oligonucleotide
cucucauuagcccagggca

SEQ ID NO: 2413034 - RNA, 19 nt, Artificial Sequence
  Description of Artificial Sequence: Synthetic oligonucleotide
aaccguuggugcaugcggc

SEQ ID NO: 2413035 - RNA, 19 nt, Artificial Sequence
  Description of Artificial Sequence: Synthetic oligonucleotide
aggacuccgagucuuuguc

SEQ ID NO: 2413036 - RNA, 19 nt, Artificial Sequence
  Description of Artificial Sequence: Synthetic oligonucleotide
ucggagaguggguaggcag

SEQ ID NO: 2413037 - RNA, 19 nt, Artificial Sequence
  Description of Artificial Sequence: Synthetic oligonucleotide
uuagcccagggcagcaggg

SEQ ID NO: 2413038 - RNA, 19 nt, Artificial Sequence
  Description of Artificial Sequence: Synthetic oligonucleotide
cuucacaguagcagguccc

SEQ ID NO: 2413039 - RNA, 19 nt, Artificial Sequence
  Description of Artificial Sequence: Synthetic oligonucleotide
uucggggucgggcagugcc

SEQ ID NO: 2413040 - RNA, 19 nt, Artificial Sequence
  Description of Artificial Sequence: Synthetic oligonucleotide
gaagucagcucgguggucc

SEQ ID NO: 2413041 - RNA, 19 nt, Artificial Sequence
  Description of Artificial Sequence: Synthetic oligonucleotide
agcagcuuggauccucggg

SEQ ID NO: 2413042 - RNA, 19 nt, Artificial Sequence
  Description of Artificial Sequence: Synthetic oligonucleotide
gagguacugcccuauguac

SEQ ID NO: 2413043 - RNA, 19 nt, Artificial Sequence
  Description of Artificial Sequence: Synthetic oligonucleotide
uccagaaaccguuggugca

SEQ ID NO: 2413044 - RNA, 19 nt, Artificial Sequence
  Description of Artificial Sequence: Synthetic oligonucleotide
gacuggaagagcaggucgg

SEQ ID NO: 2413045 - RNA, 19 nt, Artificial Sequence
  Description of Artificial Sequence: Synthetic oligonucleotide
ugcucaucgcugaaguacu

SEQ ID NO: 2413046 - RNA, 19 nt, Artificial Sequence
  Description of Artificial Sequence: Synthetic oligonucleotide
ucaucgcugaaguacucac

SEQ ID NO: 2413047 - RNA, 19 nt, Artificial Sequence
  Description of Artificial Sequence: Synthetic oligonucleotide
caugcuaggccccaucuuc

SEQ ID NO: 2413048 - RNA, 19 nt, Artificial Sequence
  Description of Artificial Sequence: Synthetic oligonucleotide
cuuugucugaccucugguc

SEQ ID NO: 2413049 - RNA, 19 nt, Artificial Sequence
  Description of Artificial Sequence: Synthetic oligonucleotide
agaaaccguuggugcaugc

SEQ ID NO: 2413050 - RNA, 19 nt, Artificial Sequence
  Description of Artificial Sequence: Synthetic oligonucleotide
gaaaccguuggugcaugcg

SEQ ID NO: 2413051 - RNA, 19 nt, Artificial Sequence
  Description of Artificial Sequence: Synthetic oligonucleotide
uguggggcgggaccugugg

SEQ ID NO: 2413052 - RNA, 19 nt, Artificial Sequence
  Description of Artificial Sequence: Synthetic oligonucleotide
acgccgguuacgcaggcgg

SEQ ID NO: 2413053 - RNA, 19 nt, Artificial Sequence
  Description of Artificial Sequence: Synthetic oligonucleotide
gggagcuguagucaaagcc

SEQ ID NO: 2413054 - RNA, 19 nt, Artificial Sequence
  Description of Artificial Sequence: Synthetic oligonucleotide
ggcaugggaagguaagacg

SEQ ID NO: 2413055 - RNA, 19 nt, Artificial Sequence
  Description of Artificial Sequence: Synthetic oligonucleotide
aggcaugggaagguaagac

SEQ ID NO: 2413056 - RNA, 19 nt, Artificial Sequence
  Description of Artificial Sequence: Synthetic oligonucleotide
uggugcaugcggcugguga

SEQ ID NO: 2413057 - RNA, 19 nt, Artificial Sequence
  Description of Artificial Sequence: Synthetic oligonucleotide
ggagcuguagucaaagccc

SEQ ID NO: 2413058 - RNA, 19 nt, Artificial Sequence
  Description of Artificial Sequence: Synthetic oligonucleotide
aaguacucaccuccuugga

SEQ ID NO: 2413059 - RNA, 19 nt, Artificial Sequence
  Description of Artificial Sequence: Synthetic oligonucleotide
uaggacuggaagagcaggu

SEQ ID NO: 2413060 - RNA, 19 nt, Artificial Sequence
  Description of Artificial Sequence: Synthetic oligonucleotide
acgcagggcagcauaacgc

SEQ ID NO: 2413061 - RNA, 19 nt, Artificial Sequence
  Description of Artificial Sequence: Synthetic oligonucleotide
gugagagagagagggagag

SEQ ID NO: 2413062 - RNA, 19 nt, Artificial Sequence
  Description of Artificial Sequence: Synthetic oligonucleotide
cugcccuauguacugcucg

SEQ ID NO: 2413063 - RNA, 19 nt, Artificial Sequence
  Description of Artificial Sequence: Synthetic oligonucleotide
gaaccgcaucugcucaucg

SEQ ID NO: 2413064 - RNA, 19 nt, Artificial Sequence
  Description of Artificial Sequence: Synthetic oligonucleotide
uugccauccagaaaccguu

SEQ ID NO: 2413065 - RNA, 19 nt, Artificial Sequence
  Description of Artificial Sequence: Synthetic oligonucleotide
cacgcagggcagcauaacg

SEQ ID NO: 2413066 - RNA, 19 nt, Artificial Sequence
  Description of Artificial Sequence: Synthetic oligonucleotide
accucggcacaguagaagu

SEQ ID NO: 2413067 - RNA, 19 nt, Artificial Sequence
  Description of Artificial Sequence: Synthetic oligonucleotide
ucggugguccccucgcagg

SEQ ID NO: 2413068 - RNA, 19 nt, Artificial Sequence
  Description of Artificial Sequence: Synthetic oligonucleotide
acgggugugaggcauggga

SEQ ID NO: 2413069 - RNA, 19 nt, Artificial Sequence
  Description of Artificial Sequence: Synthetic oligonucleotide
cugcucaucgcugaaguac

SEQ ID NO: 2413070 - RNA, 19 nt, Artificial Sequence
  Description of Artificial Sequence: Synthetic oligonucleotide
agcaggucccuucugucug

SEQ ID NO: 2413071 - RNA, 19 nt, Artificial Sequence
  Description of Artificial Sequence: Synthetic oligonucleotide
cauccagaaaccguuggug

SEQ ID NO: 2413072 - RNA, 19 nt, Artificial Sequence
  Description of Artificial Sequence: Synthetic oligonucleotide
accgcaucugcucaucgcu

SEQ ID NO: 2413073 - RNA, 19 nt, Artificial Sequence
  Description of Artificial Sequence: Synthetic oligonucleotide
cuucccggaggccugugcg

SEQ ID NO: 2413074 - RNA, 19 nt, Artificial Sequence
  Description of Artificial Sequence: Synthetic oligonucleotide
ugggaagguaagacgucug

SEQ ID NO: 2413075 - RNA, 19 nt, Artificial Sequence
  Description of Artificial Sequence: Synthetic oligonucleotide
ucggcacaguagaagucag

SEQ ID NO: 2413076 - RNA, 19 nt, Artificial Sequence
  Description of Artificial Sequence: Synthetic oligonucleotide
agcucggugguccccucgc

SEQ ID NO: 2413077 - RNA, 19 nt, Artificial Sequence
  Description of Artificial Sequence: Synthetic oligonucleotide
uacucaccuccuuggauga

SEQ ID NO: 2413078 - RNA, 19 nt, Artificial Sequence
  Description of Artificial Sequence: Synthetic oligonucleotide
uggugaacuccucccgcag

SEQ ID NO: 2413079 - RNA, 19 nt, Artificial Sequence
  Description of Artificial Sequence: Synthetic oligonucleotide
caucgcugaaguacucacc

SEQ ID NO: 2413080 - RNA, 19 nt, Artificial Sequence
  Description of Artificial Sequence: Synthetic oligonucleotide
uggggugugugugugugag

SEQ ID NO: 2413081 - RNA, 19 nt, Artificial Sequence
  Description of Artificial Sequence: Synthetic oligonucleotide
caggggacgggugugaggc

SEQ ID NO: 2413082 - RNA, 19 nt, Artificial Sequence
  Description of Artificial Sequence: Synthetic oligonucleotide
uccucgggcucugacaugc

SEQ ID NO: 2413083 - RNA, 19 nt, Artificial Sequence
  Description of Artificial Sequence: Synthetic oligonucleotide
uauguacugcucguacagc

SEQ ID NO: 2413084 - RNA, 19 nt, Artificial Sequence
  Description of Artificial Sequence: Synthetic oligonucleotide
ugucgggccaccucggcac

SEQ ID NO: 2413085 - RNA, 19 nt, Artificial Sequence
  Description of Artificial Sequence: Synthetic oligonucleotide
cuuugccauccagaaaccg

SEQ ID NO: 2413086 - RNA, 19 nt, Artificial Sequence
  Description of Artificial Sequence: Synthetic oligonucleotide
gagcuguagucaaagcccc

SEQ ID NO: 2413087 - RNA, 19 nt, Artificial Sequence
  Description of Artificial Sequence: Synthetic oligonucleotide
ugagagagagagggagagg

SEQ ID NO: 2413088 - RNA, 19 nt, Artificial Sequence
  Description of Artificial Sequence: Synthetic oligonucleotide
gcucugacaugcuaggccc

SEQ ID NO: 2413089 - RNA, 19 nt, Artificial Sequence
  Description of Artificial Sequence: Synthetic oligonucleotide
gggaagguaagacgucugg

SEQ ID NO: 2413090 - RNA, 19 nt, Artificial Sequence
  Description of Artificial Sequence: Synthetic oligonucleotide
ugugagguacugcccuaug

SEQ ID NO: 2413091 - RNA, 19 nt, Artificial Sequence
  Description of Artificial Sequence: Synthetic oligonucleotide
ugagucacaggcagccauc

SEQ ID NO: 2413092 - RNA, 19 nt, Artificial Sequence
  Description of Artificial Sequence: Synthetic oligonucleotide
aguggguaggcaggcgagc

SEQ ID NO: 2413093 - RNA, 19 nt, Artificial Sequence
  Description of Artificial Sequence: Synthetic oligonucleotide
ggaagguaagacgucuggg

SEQ ID NO: 2413094 - RNA, 19 nt, Artificial Sequence
  Description of Artificial Sequence: Synthetic oligonucleotide
auaacgccgguuacgcagg

SEQ ID NO: 2413095 - RNA, 19 nt, Artificial Sequence
  Description of Artificial Sequence: Synthetic oligonucleotide
acaguagaagucagcucgg

SEQ ID NO: 2413096 - RNA, 19 nt, Artificial Sequence
  Description of Artificial Sequence: Synthetic oligonucleotide
caugcggcuggugaacucc

SEQ ID NO: 2413097 - RNA, 19 nt, Artificial Sequence
  Description of Artificial Sequence: Synthetic oligonucleotide
ucguacagcagcggggccc

SEQ ID NO: 2413098 - RNA, 19 nt, Artificial Sequence
  Description of Artificial Sequence: Synthetic oligonucleotide
cugcucguacagcagcggg

SEQ ID NO: 2413099 - RNA, 19 nt, Artificial Sequence
  Description of Artificial Sequence: Synthetic oligonucleotide
uagcaggucccuucugucu

SEQ ID NO: 2413100 - RNA, 19 nt, Artificial Sequence
  Description of Artificial Sequence: Synthetic oligonucleotide
gagucgggcauccaggacu

SEQ ID NO: 2413101 - RNA, 19 nt, Artificial Sequence
  Description of Artificial Sequence: Synthetic oligonucleotide
ugugugugugugagagaga

SEQ ID NO: 2413102 - RNA, 19 nt, Artificial Sequence
  Description of Artificial Sequence: Synthetic oligonucleotide
augggaagguaagacgucu

SEQ ID NO: 2413103 - RNA, 19 nt, Artificial Sequence
  Description of Artificial Sequence: Synthetic oligonucleotide
uugucgggccaccucggca

SEQ ID NO: 2413104 - RNA, 19 nt, Artificial Sequence
  Description of Artificial Sequence: Synthetic oligonucleotide
cuggucuuccucgucacug

SEQ ID NO: 2413105 - RNA, 19 nt, Artificial Sequence
  Description of Artificial Sequence: Synthetic oligonucleotide
gggugugugugugugagag

SEQ ID NO: 2413106 - RNA, 19 nt, Artificial Sequence
  Description of Artificial Sequence: Synthetic oligonucleotide
ugcccuauguacugcucgu

SEQ ID NO: 2413107 - RNA, 19 nt, Artificial Sequence
  Description of Artificial Sequence: Synthetic oligonucleotide
cucauuagcccagggcagc

SEQ ID NO: 2413108 - RNA, 19 nt, Artificial Sequence
  Description of Artificial Sequence: Synthetic oligonucleotide
uucacaguagcaggucccu

SEQ ID NO: 2413109 - RNA, 19 nt, Artificial Sequence
  Description of Artificial Sequence: Synthetic oligonucleotide
gguaagacgucuggguucc

SEQ ID NO: 2413110 - RNA, 19 nt, Artificial Sequence
  Description of Artificial Sequence: Synthetic oligonucleotide
uaagacgucuggguuccca

SEQ ID NO: 2413111 - RNA, 19 nt, Artificial Sequence
  Description of Artificial Sequence: Synthetic oligonucleotide
uacugcccuauguacugcu

SEQ ID NO: 2413112 - RNA, 19 nt, Artificial Sequence
  Description of Artificial Sequence: Synthetic oligonucleotide
agagcagcuuggauccucg

SEQ ID NO: 2413113 - RNA, 19 nt, Artificial Sequence
  Description of Artificial Sequence: Synthetic oligonucleotide
gggaccuguggccugcugg

SEQ ID NO: 2413114 - RNA, 19 nt, Artificial Sequence
  Description of Artificial Sequence: Synthetic oligonucleotide
cagcauaacgccgguuacg

SEQ ID NO: 2413115 - RNA, 19 nt, Artificial Sequence
  Description of Artificial Sequence: Synthetic oligonucleotide
ucuucccggaggccugugc

SEQ ID NO: 2413116 - RNA, 19 nt, Artificial Sequence
  Description of Artificial Sequence: Synthetic oligonucleotide
cucaccuccuuggaugagc

SEQ ID NO: 2413117 - RNA, 19 nt, Artificial Sequence
  Description of Artificial Sequence: Synthetic oligonucleotide
guucccacaggcugaguca

SEQ ID NO: 2413118 - RNA, 19 nt, Artificial Sequence
  Description of Artificial Sequence: Synthetic oligonucleotide
ucugacaugcuaggcccca

SEQ ID NO: 2413119 - RNA, 19 nt, Artificial Sequence
  Description of Artificial Sequence: Synthetic oligonucleotide
gagucuuugucugaccucu

SEQ ID NO: 2413120 - RNA, 19 nt, Artificial Sequence
  Description of Artificial Sequence: Synthetic oligonucleotide
ugcucuucccggaggccug

SEQ ID NO: 2413121 - RNA, 19 nt, Artificial Sequence
  Description of Artificial Sequence: Synthetic oligonucleotide
guagcaggucccuucuguc

SEQ ID NO: 2413122 - RNA, 19 nt, Artificial Sequence
  Description of Artificial Sequence: Synthetic oligonucleotide
uggauccucgggcucugac

SEQ ID NO: 2413123 - RNA, 19 nt, Artificial Sequence
  Description of Artificial Sequence: Synthetic oligonucleotide
uggggcgggaccuguggcc

SEQ ID NO: 2413124 - RNA, 19 nt, Artificial Sequence
  Description of Artificial Sequence: Synthetic oligonucleotide
gcucucauuagcccagggc

SEQ ID NO: 2413125 - RNA, 19 nt, Artificial Sequence
  Description of Artificial Sequence: Synthetic oligonucleotide
ugcgcaggguucggggucg

SEQ ID NO: 2413126 - RNA, 19 nt, Artificial Sequence
  Description of Artificial Sequence: Synthetic oligonucleotide
aggucggagaguggguagg

SEQ ID NO: 2413127 - RNA, 19 nt, Artificial Sequence
  Description of Artificial Sequence: Synthetic oligonucleotide
cucugacaugcuaggcccc

SEQ ID NO: 2413128 - RNA, 19 nt, Artificial Sequence
  Description of Artificial Sequence: Synthetic oligonucleotide
acugcucguacagcagcgg

SEQ ID NO: 2413129 - RNA, 19 nt, Artificial Sequence
  Description of Artificial Sequence: Synthetic oligonucleotide
ucuggucuuccucgucacu

SEQ ID NO: 2413130 - RNA, 19 nt, Artificial Sequence
  Description of Artificial Sequence: Synthetic oligonucleotide
gguucccacaggcugaguc

SEQ ID NO: 2413131 - RNA, 19 nt, Artificial Sequence
  Description of Artificial Sequence: Synthetic oligonucleotide
ucauuagcccagggcagca

SEQ ID NO: 2413132 - RNA, 19 nt, Artificial Sequence
  Description of Artificial Sequence: Synthetic oligonucleotide
cugaccucuggucuuccuc

SEQ ID NO: 2413133 - RNA, 19 nt, Artificial Sequence
  Description of Artificial Sequence: Synthetic oligonucleotide
gauccucgggcucugacau

SEQ ID NO: 2413134 - RNA, 19 nt, Artificial Sequence
  Description of Artificial Sequence: Synthetic oligonucleotide
gaguggguaggcaggcgag

SEQ ID NO: 2413135 - RNA, 19 nt, Artificial Sequence
  Description of Artificial Sequence: Synthetic oligonucleotide
cuccgagucgggcauccag

SEQ ID NO: 2413136 - RNA, 19 nt, Artificial Sequence
  Description of Artificial Sequence: Synthetic oligonucleotide
ccugguaggacuggaagag

SEQ ID NO: 2413137 - RNA, 19 nt, Artificial Sequence
  Description of Artificial Sequence: Synthetic oligonucleotide
agucgggcauccaggacuc

SEQ ID NO: 2413138 - RNA, 19 nt, Artificial Sequence
  Description of Artificial Sequence: Synthetic oligonucleotide
gggugugaggcaugggaag

SEQ ID NO: 2413139 - RNA, 19 nt, Artificial Sequence
  Description of Artificial Sequence: Synthetic oligonucleotide
ccaucuggcucucauuagc

SEQ ID NO: 2413140 - RNA, 19 nt, Artificial Sequence
  Description of Artificial Sequence: Synthetic oligonucleotide
gucgggcagugccuugucg

SEQ ID NO: 2413141 - RNA, 19 nt, Artificial Sequence
  Description of Artificial Sequence: Synthetic oligonucleotide
aacgccgguuacgcaggcg

SEQ ID NO: 2413142 - RNA, 19 nt, Artificial Sequence
  Description of Artificial Sequence: Synthetic oligonucleotide
uugucugaccucuggucuu

SEQ ID NO: 2413143 - RNA, 19 nt, Artificial Sequence
  Description of Artificial Sequence: Synthetic oligonucleotide
caggucggagaguggguag

SEQ ID NO: 2413144 - RNA, 19 nt, Artificial Sequence
  Description of Artificial Sequence: Synthetic oligonucleotide
agguacugcccuauguacu

SEQ ID NO: 2413145 - RNA, 19 nt, Artificial Sequence
  Description of Artificial Sequence: Synthetic oligonucleotide
gagcagcuuggauccucgg

SEQ ID NO: 2413146 - RNA, 19 nt, Artificial Sequence
  Description of Artificial Sequence: Synthetic oligonucleotide
ucugcucaucgcugaagua

SEQ ID NO: 2413147 - RNA, 19 nt, Artificial Sequence
  Description of Artificial Sequence: Synthetic oligonucleotide
cucggcacaguagaaguca

SEQ ID NO: 2413148 - RNA, 19 nt, Artificial Sequence
  Description of Artificial Sequence: Synthetic oligonucleotide
cucuggucuuccucgucac

SEQ ID NO: 2413149 - RNA, 19 nt, Artificial Sequence
  Description of Artificial Sequence: Synthetic oligonucleotide
gacaugcuaggccccaucu

SEQ ID NO: 2413150 - RNA, 19 nt, Artificial Sequence
  Description of Artificial Sequence: Synthetic oligonucleotide
gagaguggguaggcaggcg

SEQ ID NO: 2413151 - RNA, 19 nt, Artificial Sequence
  Description of Artificial Sequence: Synthetic oligonucleotide
uacgcaggcgggugcgcag

SEQ ID NO: 2413152 - RNA, 19 nt, Artificial Sequence
  Description of Artificial Sequence: Synthetic oligonucleotide
ugugugagguacugcccua

SEQ ID NO: 2413153 - RNA, 19 nt, Artificial Sequence
  Description of Artificial Sequence: Synthetic oligonucleotide
aucagccucuccuccgagu

SEQ ID NO: 2413154 - RNA, 19 nt, Artificial Sequence
  Description of Artificial Sequence: Synthetic oligonucleotide
ugcuaggccccaucuucac

SEQ ID NO: 2413155 - RNA, 19 nt, Artificial Sequence
  Description of Artificial Sequence: Synthetic oligonucleotide
ggcugagucacaggcagcc

SEQ ID NO: 2413156 - RNA, 19 nt, Artificial Sequence
  Description of Artificial Sequence: Synthetic oligonucleotide
cucggugguccccucgcag

SEQ ID NO: 2413157 - RNA, 19 nt, Artificial Sequence
  Description of Artificial Sequence: Synthetic oligonucleotide
agucagcucgguggucccc

SEQ ID NO: 2413158 - RNA, 19 nt, Artificial Sequence
  Description of Artificial Sequence: Synthetic oligonucleotide
gagggaagggagcuguagu

SEQ ID NO: 2413159 - RNA, 19 nt, Artificial Sequence
  Description of Artificial Sequence: Synthetic oligonucleotide
accguuggugcaugcggcu

SEQ ID NO: 2413160 - RNA, 19 nt, Artificial Sequence
  Description of Artificial Sequence: Synthetic oligonucleotide
ucgucacuguccucuuccu

SEQ ID NO: 2413161 - RNA, 19 nt, Artificial Sequence
  Description of Artificial Sequence: Synthetic oligonucleotide
caggccaggugcucuuccc

SEQ ID NO: 2413162 - RNA, 19 nt, Artificial Sequence
  Description of Artificial Sequence: Synthetic oligonucleotide
acuccgagucuuugucuga

SEQ ID NO: 2413163 - RNA, 19 nt, Artificial Sequence
  Description of Artificial Sequence: Synthetic oligonucleotide
cuugucgggccaccucggc

SEQ ID NO: 2413164 - RNA, 19 nt, Artificial Sequence
  Description of Artificial Sequence: Synthetic oligonucleotide
caccucggcacaguagaag

SEQ ID NO: 2413165 - RNA, 19 nt, Artificial Sequence
  Description of Artificial Sequence: Synthetic oligonucleotide
uaacgccgguuacgcaggc

SEQ ID NO: 2413166 - RNA, 19 nt, Artificial Sequence
  Description of Artificial Sequence: Synthetic oligonucleotide
gggacacuggggcaggcug

SEQ ID NO: 2413167 - RNA, 19 nt, Artificial Sequence
  Description of Artificial Sequence: Synthetic oligonucleotide
aggguucggggucgggcag

SEQ ID NO: 2413168 - RNA, 19 nt, Artificial Sequence
  Description of Artificial Sequence: Synthetic oligonucleotide
gaggcaugggaagguaaga

SEQ ID NO: 2413169 - RNA, 19 nt, Artificial Sequence
  Description of Artificial Sequence: Synthetic oligonucleotide
ggcagugccuugucgggcc

SEQ ID NO: 2413170 - RNA, 19 nt, Artificial Sequence
  Description of Artificial Sequence: Synthetic oligonucleotide
ggcagcauaacgccgguua

SEQ ID NO: 2413171 - RNA, 19 nt, Artificial Sequence
  Description of Artificial Sequence: Synthetic oligonucleotide
gguaggacuggaagagcag

SEQ ID NO: 2413172 - RNA, 19 nt, Artificial Sequence
  Description of Artificial Sequence: Synthetic oligonucleotide
uuacgcaggcgggugcgca

SEQ ID NO: 2413173 - RNA, 19 nt, Artificial Sequence
  Description of Artificial Sequence: Synthetic oligonucleotide
gccaccucggcacaguaga

SEQ ID NO: 2413174 - RNA, 19 nt, Artificial Sequence
  Description of Artificial Sequence: Synthetic oligonucleotide
cucuccuccgagucgggca

SEQ ID NO: 2413175 - RNA, 19 nt, Artificial Sequence
  Description of Artificial Sequence: Synthetic oligonucleotide
acaugcuaggccccaucuu

SEQ ID NO: 2413176 - RNA, 19 nt, Artificial Sequence
  Description of Artificial Sequence: Synthetic oligonucleotide
ugcaugcggcuggugaacu

SEQ ID NO: 2413177 - RNA, 19 nt, Artificial Sequence
  Description of Artificial Sequence: Synthetic oligonucleotide
ucgcugaaguacucaccuc

SEQ ID NO: 2413178 - RNA, 19 nt, Artificial Sequence
  Description of Artificial Sequence: Synthetic oligonucleotide
gguuacgcaggcgggugcg

SEQ ID NO: 2413179 - RNA, 19 nt, Artificial Sequence
  Description of Artificial Sequence: Synthetic oligonucleotide
ccugugugagguacugccc

SEQ ID NO: 2413180 - RNA, 19 nt, Artificial Sequence
  Description of Artificial Sequence: Synthetic oligonucleotide
agcucccguuccugguagg

SEQ ID NO: 2413181 - RNA, 19 nt, Artificial Sequence
  Description of Artificial Sequence: Synthetic oligonucleotide
cuccgagucuuugucugac

SEQ ID NO: 2413182 - RNA, 19 nt, Artificial Sequence
  Description of Artificial Sequence: Synthetic oligonucleotide
uccuccgagucgggcaucc

SEQ ID NO: 2413183 - RNA, 19 nt, Artificial Sequence
  Description of Artificial Sequence: Synthetic oligonucleotide
gggugcgcaggguucgggg

SEQ ID NO: 2413184 - RNA, 19 nt, Artificial Sequence
  Description of Artificial Sequence: Synthetic oligonucleotide
cucaucgcugaaguacuca

SEQ ID NO: 2413185 - RNA, 19 nt, Artificial Sequence
  Description of Artificial Sequence: Synthetic oligonucleotide
cugccggagcagcuuuugc

SEQ ID NO: 2413186 - RNA, 19 nt, Artificial Sequence
  Description of Artificial Sequence: Synthetic oligonucleotide
gcagcauaacgccgguuac

SEQ ID NO: 2413187 - RNA, 19 nt, Artificial Sequence
  Description of Artificial Sequence: Synthetic oligonucleotide
cccuauguacugcucguac

SEQ ID NO: 2413188 - RNA, 19 nt, Artificial Sequence
  Description of Artificial Sequence: Synthetic oligonucleotide
ggcacaguagaagucagcu

SEQ ID NO: 2413189 - RNA, 19 nt, Artificial Sequence
  Description of Artificial Sequence: Synthetic oligonucleotide
ggauccucgggcucugaca

SEQ ID NO: 2413190 - RNA, 19 nt, Artificial Sequence
  Description of Artificial Sequence: Synthetic oligonucleotide
cauuagcccagggcagcag

SEQ ID NO: 2413191 - RNA, 19 nt, Artificial Sequence
  Description of Artificial Sequence: Synthetic oligonucleotide
cucccgcaggaucagccuc

SEQ ID NO: 2413192 - RNA, 19 nt, Artificial Sequence
  Description of Artificial Sequence: Synthetic oligonucleotide
guccccucgcagguggccg

SEQ ID NO: 2413193 - RNA, 19 nt, Artificial Sequence
  Description of Artificial Sequence: Synthetic oligonucleotide
cagaaaccguuggugcaug

SEQ ID NO: 2413194 - RNA, 19 nt, Artificial Sequence
  Description of Artificial Sequence: Synthetic oligonucleotide
cucguacagcagcggggcc

SEQ ID NO: 2413195 - RNA, 19 nt, Artificial Sequence
  Description of Artificial Sequence: Synthetic oligonucleotide
ucacgcagggcagcauaac

SEQ ID NO: 2413196 - RNA, 19 nt, Artificial Sequence
  Description of Artificial Sequence: Synthetic oligonucleotide
augcuaggccccaucuuca

SEQ ID NO: 2413197 - RNA, 19 nt, Artificial Sequence
  Description of Artificial Sequence: Synthetic oligonucleotide
cugugugagguacugcccu

SEQ ID NO: 2413198 - RNA, 19 nt, Artificial Sequence
  Description of Artificial Sequence: Synthetic oligonucleotide
uaggccccaucuucacagu

SEQ ID NO: 2413199 - RNA, 19 nt, Artificial Sequence
  Description of Artificial Sequence: Synthetic oligonucleotide
guggggcgggaccuguggc

SEQ ID NO: 2413200 - RNA, 19 nt, Artificial Sequence
  Description of Artificial Sequence: Synthetic oligonucleotide
ggcucucauuagcccaggg

SEQ ID NO: 2413201 - RNA, 19 nt, Artificial Sequence
  Description of Artificial Sequence: Synthetic oligonucleotide
ccuauguacugcucguaca

SEQ ID NO: 2413202 - RNA, 19 nt, Artificial Sequence
  Description of Artificial Sequence: Synthetic oligonucleotide
acagcagcggggcccggaa

SEQ ID NO: 2413203 - RNA, 19 nt, Artificial Sequence
  Description of Artificial Sequence: Synthetic oligonucleotide
uccaggacuccgagucuuu

SEQ ID NO: 2413204 - RNA, 19 nt, Artificial Sequence
  Description of Artificial Sequence: Synthetic oligonucleotide
ggccccaucuucacaguag

SEQ ID NO: 2413205 - RNA, 19 nt, Artificial Sequence
  Description of Artificial Sequence: Synthetic oligonucleotide
gcggcuggugaacuccucc

SEQ ID NO: 2413206 - RNA, 19 nt, Artificial Sequence
  Description of Artificial Sequence: Synthetic oligonucleotide
gacgggugugaggcauggg

SEQ ID NO: 2413207 - RNA, 19 nt, Artificial Sequence
  Description of Artificial Sequence: Synthetic oligonucleotide
ggugcaugcggcuggugaa

SEQ ID NO: 2413208 - RNA, 19 nt, Artificial Sequence
  Description of Artificial Sequence: Synthetic oligonucleotide
agcaggggacgggugugag

SEQ ID NO: 2413209 - RNA, 19 nt, Artificial Sequence
  Description of Artificial Sequence: Synthetic oligonucleotide
cucacgcagggcagcauaa

SEQ ID NO: 2413210 - RNA, 19 nt, Artificial Sequence
  Description of Artificial Sequence: Synthetic oligonucleotide
gaagggagcuguagucaaa

SEQ ID NO: 2413211 - RNA, 19 nt, Artificial Sequence
  Description of Artificial Sequence: Synthetic oligonucleotide
cccaucuuugccauccaga

SEQ ID NO: 2413212 - RNA, 19 nt, Artificial Sequence
  Description of Artificial Sequence: Synthetic oligonucleotide
ggacgggugugaggcaugg

SEQ ID NO: 2413213 - RNA, 19 nt, Artificial Sequence
  Description of Artificial Sequence: Synthetic oligonucleotide
gcuggggugugugugugug

SEQ ID NO: 2413214 - RNA, 19 nt, Artificial Sequence
  Description of Artificial Sequence: Synthetic oligonucleotide
cucccguuccugguaggac

SEQ ID NO: 2413215 - RNA, 19 nt, Artificial Sequence
  Description of Artificial Sequence: Synthetic oligonucleotide
cuuggauccucgggcucug

SEQ ID NO: 2413216 - RNA, 19 nt, Artificial Sequence
  Description of Artificial Sequence: Synthetic oligonucleotide
auccucgggcucugacaug

SEQ ID NO: 2413217 - RNA, 19 nt, Artificial Sequence
  Description of Artificial Sequence: Synthetic oligonucleotide
ugguccccucgcagguggc

SEQ ID NO: 2413218 - RNA, 19 nt, Artificial Sequence
  Description of Artificial Sequence: Synthetic oligonucleotide
ucccggaggccugugcgaa

SEQ ID NO: 2413219 - RNA, 19 nt, Artificial Sequence
  Description of Artificial Sequence: Synthetic oligonucleotide
ggugugcgggcacugagcu

SEQ ID NO: 2413220 - RNA, 19 nt, Artificial Sequence
  Description of Artificial Sequence: Synthetic oligonucleotide
aggccccaucuucacagua

SEQ ID NO: 2413221 - RNA, 19 nt, Artificial Sequence
  Description of Artificial Sequence: Synthetic oligonucleotide
gcgggcacugagcucuucc

SEQ ID NO: 2413222 - RNA, 19 nt, Artificial Sequence
  Description of Artificial Sequence: Synthetic oligonucleotide
acucaccuccuuggaugag

SEQ ID NO: 2413223 - RNA, 19 nt, Artificial Sequence
  Description of Artificial Sequence: Synthetic oligonucleotide
gugcaugcggcuggugaac

SEQ ID NO: 2413224 - RNA, 19 nt, Artificial Sequence
  Description of Artificial Sequence: Synthetic oligonucleotide
cguuggugcaugcggcugg

SEQ ID NO: 2413225 - RNA, 19 nt, Artificial Sequence
  Description of Artificial Sequence: Synthetic oligonucleotide
guuacgcaggcgggugcgc

SEQ ID NO: 2413226 - RNA, 19 nt, Artificial Sequence
  Description of Artificial Sequence: Synthetic oligonucleotide
uggccgaagcaggccaggu

SEQ ID NO: 2413227 - RNA, 19 nt, Artificial Sequence
  Description of Artificial Sequence: Synthetic oligonucleotide
gagucacaggcagccaucu

SEQ ID NO: 2413228 - RNA, 19 nt, Artificial Sequence
  Description of Artificial Sequence: Synthetic oligonucleotide
gugaggcaugggaagguaa

SEQ ID NO: 2413229 - RNA, 19 nt, Artificial Sequence
  Description of Artificial Sequence: Synthetic oligonucleotide
ggccgaagcaggccaggug

SEQ ID NO: 2413230 - RNA, 19 nt, Artificial Sequence
  Description of Artificial Sequence: Synthetic oligonucleotide
ccuugucgggccaccucgg

SEQ ID NO: 2413231 - RNA, 19 nt, Artificial Sequence
  Description of Artificial Sequence: Synthetic oligonucleotide
cccggaaccgcaucugcuc

SEQ ID NO: 2413232 - RNA, 19 nt, Artificial Sequence
  Description of Artificial Sequence: Synthetic oligonucleotide
ucacaguagcaggucccuu

SEQ ID NO: 2413233 - RNA, 19 nt, Artificial Sequence
  Description of Artificial Sequence: Synthetic oligonucleotide
gcaggucccuucugucugc

SEQ ID NO: 2413234 - RNA, 19 nt, Artificial Sequence
  Description of Artificial Sequence: Synthetic oligonucleotide
guuccugguaggacuggaa

SEQ ID NO: 2413235 - RNA, 19 nt, Artificial Sequence
  Description of Artificial Sequence: Synthetic oligonucleotide
ggugugugugugugagaga

SEQ ID NO: 2413236 - RNA, 19 nt, Artificial Sequence
  Description of Artificial Sequence: Synthetic oligonucleotide
cccguuccugguaggacug

SEQ ID NO: 2413237 - RNA, 19 nt, Artificial Sequence
  Description of Artificial Sequence: Synthetic oligonucleotide
gcaggccaggugcucuucc

SEQ ID NO: 2413238 - RNA, 19 nt, Artificial Sequence
  Description of Artificial Sequence: Synthetic oligonucleotide
ggcccggaaccgcaucugc

SEQ ID NO: 2413239 - RNA, 19 nt, Artificial Sequence
  Description of Artificial Sequence: Synthetic oligonucleotide
ggucggagaguggguaggc

SEQ ID NO: 2413240 - RNA, 19 nt, Artificial Sequence
  Description of Artificial Sequence: Synthetic oligonucleotide
ggcgggugcgcaggguucg

SEQ ID NO: 2413241 - RNA, 19 nt, Artificial Sequence
  Description of Artificial Sequence: Synthetic oligonucleotide
ugcugccggagcagcuuuu

SEQ ID NO: 2413242 - RNA, 19 nt, Artificial Sequence
  Description of Artificial Sequence: Synthetic oligonucleotide
cuguggggcgggaccugug

SEQ ID NO: 2413243 - RNA, 19 nt, Artificial Sequence
  Description of Artificial Sequence: Synthetic oligonucleotide
ucgggccaccucggcacag

SEQ ID NO: 2413244 - RNA, 19 nt, Artificial Sequence
  Description of Artificial Sequence: Synthetic oligonucleotide
ccuccaagcaggccucuuc

SEQ ID NO: 2413245 - RNA, 19 nt, Artificial Sequence
  Description of Artificial Sequence: Synthetic oligonucleotide
gucggagaguggguaggca

SEQ ID NO: 2413246 - RNA, 19 nt, Artificial Sequence
  Description of Artificial Sequence: Synthetic oligonucleotide
ggagagggaagggagcugu

SEQ ID NO: 2413247 - RNA, 19 nt, Artificial Sequence
  Description of Artificial Sequence: Synthetic oligonucleotide
gcuaggccccaucuucaca

SEQ ID NO: 2413248 - RNA, 19 nt, Artificial Sequence
  Description of Artificial Sequence: Synthetic oligonucleotide
cugggguguguguguguga

SEQ ID NO: 2413249 - RNA, 19 nt, Artificial Sequence
  Description of Artificial Sequence: Synthetic oligonucleotide
ggaugagcucacgcagggc

SEQ ID NO: 2413250 - RNA, 19 nt, Artificial Sequence
  Description of Artificial Sequence: Synthetic oligonucleotide
gaccucuggucuuccucgu

SEQ ID NO: 2413251 - RNA, 19 nt, Artificial Sequence
  Description of Artificial Sequence: Synthetic oligonucleotide
caggacuccgagucuuugu

SEQ ID NO: 2413252 - RNA, 19 nt, Artificial Sequence
  Description of Artificial Sequence: Synthetic oligonucleotide
cugggccagcaggggacgg

SEQ ID NO: 2413253 - RNA, 19 nt, Artificial Sequence
  Description of Artificial Sequence: Synthetic oligonucleotide
uuggauccucgggcucuga

SEQ ID NO: 2413254 - RNA, 19 nt, Artificial Sequence
  Description of Artificial Sequence: Synthetic oligonucleotide
augcggcuggugaacuccu

SEQ ID NO: 2413255 - RNA, 19 nt, Artificial Sequence
  Description of Artificial Sequence: Synthetic oligonucleotide
ccgcaucugcucaucgcug

SEQ ID NO: 2413256 - RNA, 19 nt, Artificial Sequence
  Description of Artificial Sequence: Synthetic oligonucleotide
ccccaucuuugccauccag

SEQ ID NO: 2413257 - RNA, 19 nt, Artificial Sequence
  Description of Artificial Sequence: Synthetic oligonucleotide
gcauaacgccgguuacgca

SEQ ID NO: 2413258 - RNA, 19 nt, Artificial Sequence
  Description of Artificial Sequence: Synthetic oligonucleotide
ggaaccgcaucugcucauc

SEQ ID NO: 2413259 - RNA, 19 nt, Artificial Sequence
  Description of Artificial Sequence: Synthetic oligonucleotide
ggacuccgagucuuugucu

SEQ ID NO: 2413260 - RNA, 19 nt, Artificial Sequence
  Description of Artificial Sequence: Synthetic oligonucleotide
ccggugugcgggcacugag

SEQ ID NO: 2413261 - RNA, 19 nt, Artificial Sequence
  Description of Artificial Sequence: Synthetic oligonucleotide
gaagagcaggucggagagu

SEQ ID NO: 2413262 - RNA, 19 nt, Artificial Sequence
  Description of Artificial Sequence: Synthetic oligonucleotide
guaagacgucuggguuccc

SEQ ID NO: 2413263 - RNA, 19 nt, Artificial Sequence
  Description of Artificial Sequence: Synthetic oligonucleotide
cucgggcucugacaugcua

SEQ ID NO: 2413264 - RNA, 19 nt, Artificial Sequence
  Description of Artificial Sequence: Synthetic oligonucleotide
cagcagcggggcccggaac

SEQ ID NO: 2413265 - RNA, 19 nt, Artificial Sequence
  Description of Artificial Sequence: Synthetic oligonucleotide
gcucacgcagggcagcaua

SEQ ID NO: 2413266 - RNA, 19 nt, Artificial Sequence
  Description of Artificial Sequence: Synthetic oligonucleotide
ccggaggccugugcgaagc

SEQ ID NO: 2413267 - RNA, 19 nt, Artificial Sequence
  Description of Artificial Sequence: Synthetic oligonucleotide
gcugccggagcagcuuuug

SEQ ID NO: 2413268 - RNA, 19 nt, Artificial Sequence
  Description of Artificial Sequence: Synthetic oligonucleotide
ggagccggugugcgggcac

SEQ ID NO: 2413269 - RNA, 19 nt, Artificial Sequence
  Description of Artificial Sequence: Synthetic oligonucleotide
agcggggcccggaaccgca

SEQ ID NO: 2413270 - RNA, 19 nt, Artificial Sequence
  Description of Artificial Sequence: Synthetic oligonucleotide
cggugugcgggcacugagc

SEQ ID NO: 2413271 - RNA, 19 nt, Artificial Sequence
  Description of Artificial Sequence: Synthetic oligonucleotide
cauccaggacuccgagucu

SEQ ID NO: 2413272 - RNA, 19 nt, Artificial Sequence
  Description of Artificial Sequence: Synthetic oligonucleotide
uccuccaagcaggccucuu

SEQ ID NO: 2413273 - RNA, 19 nt, Artificial Sequence
  Description of Artificial Sequence: Synthetic oligonucleotide
gguucggggucgggcagug

SEQ ID NO: 2413274 - RNA, 19 nt, Artificial Sequence
  Description of Artificial Sequence: Synthetic oligonucleotide
gagagggaagggagcugua

SEQ ID NO: 2413275 - RNA, 19 nt, Artificial Sequence
  Description of Artificial Sequence: Synthetic oligonucleotide
gcaugcggcuggugaacuc

SEQ ID NO: 2413276 - RNA, 19 nt, Artificial Sequence
  Description of Artificial Sequence: Synthetic oligonucleotide
ggugcgcaggguucggggu

SEQ ID NO: 2413277 - RNA, 19 nt, Artificial Sequence
  Description of Artificial Sequence: Synthetic oligonucleotide
cacugagcucuuccugugu

SEQ ID NO: 2413278 - RNA, 19 nt, Artificial Sequence
  Description of Artificial Sequence: Synthetic oligonucleotide
cagugccuugucgggccac

SEQ ID NO: 2413279 - RNA, 19 nt, Artificial Sequence
  Description of Artificial Sequence: Synthetic oligonucleotide
gucgggccaccucggcaca

SEQ ID NO: 2413280 - RNA, 19 nt, Artificial Sequence
  Description of Artificial Sequence: Synthetic oligonucleotide
gcugaaguacucaccuccu

SEQ ID NO: 2413281 - RNA, 19 nt, Artificial Sequence
  Description of Artificial Sequence: Synthetic oligonucleotide
gcaucugcucaucgcugaa

SEQ ID NO: 2413282 - RNA, 19 nt, Artificial Sequence
  Description of Artificial Sequence: Synthetic oligonucleotide
ccaggacuccgagucuuug

SEQ ID NO: 2413283 - RNA, 19 nt, Artificial Sequence
  Description of Artificial Sequence: Synthetic oligonucleotide
agccggugugcgggcacug

SEQ ID NO: 2413284 - RNA, 19 nt, Artificial Sequence
  Description of Artificial Sequence: Synthetic oligonucleotide
ggugguccccucgcaggug

SEQ ID NO: 2413285 - RNA, 19 nt, Artificial Sequence
  Description of Artificial Sequence: Synthetic oligonucleotide
gguccccucgcagguggcc

SEQ ID NO: 2413286 - RNA, 19 nt, Artificial Sequence
  Description of Artificial Sequence: Synthetic oligonucleotide
ccgagucgggcauccagga

SEQ ID NO: 2413287 - RNA, 19 nt, Artificial Sequence
  Description of Artificial Sequence: Synthetic oligonucleotide
ggggugugugugugugaga

SEQ ID NO: 2413288 - RNA, 19 nt, Artificial Sequence
  Description of Artificial Sequence: Synthetic oligonucleotide
ccggaaccgcaucugcuca

SEQ ID NO: 2413289 - RNA, 19 nt, Artificial Sequence
  Description of Artificial Sequence: Synthetic oligonucleotide
gcaggucggagagugggua

SEQ ID NO: 2413290 - RNA, 19 nt, Artificial Sequence
  Description of Artificial Sequence: Synthetic oligonucleotide
guuggugcaugcggcuggu

SEQ ID NO: 2413291 - RNA, 19 nt, Artificial Sequence
  Description of Artificial Sequence: Synthetic oligonucleotide
gcagcucccguuccuggua

SEQ ID NO: 2413292 - RNA, 19 nt, Artificial Sequence
  Description of Artificial Sequence: Synthetic oligonucleotide
cagcggggcccggaaccgc

SEQ ID NO: 2413293 - RNA, 19 nt, Artificial Sequence
  Description of Artificial Sequence: Synthetic oligonucleotide
caguagaagucagcucggu

SEQ ID NO: 2413294 - RNA, 19 nt, Artificial Sequence
  Description of Artificial Sequence: Synthetic oligonucleotide
ggcgggaccuguggccugc

SEQ ID NO: 2413295 - RNA, 19 nt, Artificial Sequence
  Description of Artificial Sequence: Synthetic oligonucleotide
ccagcaggggacgggugug

SEQ ID NO: 2413296 - RNA, 19 nt, Artificial Sequence
  Description of Artificial Sequence: Synthetic oligonucleotide
ccgguuacgcaggcgggug

SEQ ID NO: 2413297 - RNA, 19 nt, Artificial Sequence
  Description of Artificial Sequence: Synthetic oligonucleotide
ggucgggcagugccuuguc

SEQ ID NO: 2413298 - RNA, 19 nt, Artificial Sequence
  Description of Artificial Sequence: Synthetic oligonucleotide
gcaggccucuuccucuucu

SEQ ID NO: 2413299 - RNA, 19 nt, Artificial Sequence
  Description of Artificial Sequence: Synthetic oligonucleotide
cucuucccggaggccugug

SEQ ID NO: 2413300 - RNA, 19 nt, Artificial Sequence
  Description of Artificial Sequence: Synthetic oligonucleotide
ggggagccggugugcgggc

SEQ ID NO: 2413301 - RNA, 19 nt, Artificial Sequence
  Description of Artificial Sequence: Synthetic oligonucleotide
gugugagguacugcccuau

SEQ ID NO: 2413302 - RNA, 19 nt, Artificial Sequence
  Description of Artificial Sequence: Synthetic oligonucleotide
ccauccagaaaccguuggu

SEQ ID NO: 2413303 - RNA, 19 nt, Artificial Sequence
  Description of Artificial Sequence: Synthetic oligonucleotide
ggcauccaggacuccgagu

SEQ ID NO: 2413304 - RNA, 19 nt, Artificial Sequence
  Description of Artificial Sequence: Synthetic oligonucleotide
gcucaucgcugaaguacuc

SEQ ID NO: 2413305 - RNA, 19 nt, Artificial Sequence
  Description of Artificial Sequence: Synthetic oligonucleotide
gggacgggugugaggcaug

SEQ ID NO: 2413306 - RNA, 19 nt, Artificial Sequence
  Description of Artificial Sequence: Synthetic oligonucleotide
gcucccguuccugguagga

SEQ ID NO: 2413307 - RNA, 19 nt, Artificial Sequence
  Description of Artificial Sequence: Synthetic oligonucleotide
guacagcagcggggcccgg

SEQ ID NO: 2413308 - RNA, 19 nt, Artificial Sequence
  Description of Artificial Sequence: Synthetic oligonucleotide
ccguuggugcaugcggcug

SEQ ID NO: 2413309 - RNA, 19 nt, Artificial Sequence
  Description of Artificial Sequence: Synthetic oligonucleotide
ccucuccuccgagucgggc

SEQ ID NO: 2413310 - RNA, 19 nt, Artificial Sequence
  Description of Artificial Sequence: Synthetic oligonucleotide
cgccgguuacgcaggcggg

SEQ ID NO: 2413311 - RNA, 19 nt, Artificial Sequence
  Description of Artificial Sequence: Synthetic oligonucleotide
ggggucgggcagugccuug

SEQ ID NO: 2413312 - RNA, 19 nt, Artificial Sequence
  Description of Artificial Sequence: Synthetic oligonucleotide
gucgggcauccaggacucc

SEQ ID NO: 2413313 - RNA, 19 nt, Artificial Sequence
  Description of Artificial Sequence: Synthetic oligonucleotide
cgguuacgcaggcgggugc

SEQ ID NO: 2413314 - RNA, 19 nt, Artificial Sequence
  Description of Artificial Sequence: Synthetic oligonucleotide
cuugcugccggagcagcuu

SEQ ID NO: 2413315 - RNA, 19 nt, Artificial Sequence
  Description of Artificial Sequence: Synthetic oligonucleotide
cagcaggggacggguguga

SEQ ID NO: 2413316 - RNA, 19 nt, Artificial Sequence
  Description of Artificial Sequence: Synthetic oligonucleotide
ccguuccugguaggacugg

SEQ ID NO: 2413317 - RNA, 19 nt, Artificial Sequence
  Description of Artificial Sequence: Synthetic oligonucleotide
cgagucgggcauccaggac

SEQ ID NO: 2413318 - RNA, 19 nt, Artificial Sequence
  Description of Artificial Sequence: Synthetic oligonucleotide
gcucggugguccccucgca

SEQ ID NO: 2413319 - RNA, 19 nt, Artificial Sequence
  Description of Artificial Sequence: Synthetic oligonucleotide
ggggcccggaaccgcaucu

SEQ ID NO: 2413320 - RNA, 19 nt, Artificial Sequence
  Description of Artificial Sequence: Synthetic oligonucleotide
cccggaggccugugcgaag

SEQ ID NO: 2413321 - RNA, 19 nt, Artificial Sequence
  Description of Artificial Sequence: Synthetic oligonucleotide
cuccuccgagucgggcauc

SEQ ID NO: 2413322 - RNA, 19 nt, Artificial Sequence
  Description of Artificial Sequence: Synthetic oligonucleotide
gggcgggaccuguggccug

SEQ ID NO: 2413323 - RNA, 19 nt, Artificial Sequence
  Description of Artificial Sequence: Synthetic oligonucleotide
gagccggugugcgggcacu

SEQ ID NO: 2413324 - RNA, 19 nt, Artificial Sequence
  Description of Artificial Sequence: Synthetic oligonucleotide
cggaggccugugcgaagcg

SEQ ID NO: 2413325 - RNA, 19 nt, Artificial Sequence
  Description of Artificial Sequence: Synthetic oligonucleotide
cggagcagcuuuugcugca

SEQ ID NO: 2413326 - RNA, 19 nt, Artificial Sequence
  Description of Artificial Sequence: Synthetic oligonucleotide
ccgcaggaucagccucucc

SEQ ID NO: 2413327 - RNA, 19 nt, Artificial Sequence
  Description of Artificial Sequence: Synthetic oligonucleotide
gcucuguggggcgggaccu

SEQ ID NO: 2413328 - RNA, 19 nt, Artificial Sequence
  Description of Artificial Sequence: Synthetic oligonucleotide
gcgggugcgcaggguucgg

SEQ ID NO: 2413329 - RNA, 19 nt, Artificial Sequence
  Description of Artificial Sequence: Synthetic oligonucleotide
ccagaaaccguuggugcau

SEQ ID NO: 2413330 - RNA, 19 nt, Artificial Sequence
  Description of Artificial Sequence: Synthetic oligonucleotide
gggccaccucggcacagua

SEQ ID NO: 2413331 - RNA, 19 nt, Artificial Sequence
  Description of Artificial Sequence: Synthetic oligonucleotide
ccaccucggcacaguagaa

SEQ ID NO: 2413332 - RNA, 19 nt, Artificial Sequence
  Description of Artificial Sequence: Synthetic oligonucleotide
ggggacgggugugaggcau

SEQ ID NO: 2413333 - RNA, 19 nt, Artificial Sequence
  Description of Artificial Sequence: Synthetic oligonucleotide
gcccuauguacugcucgua

SEQ ID NO: 2413334 - RNA, 19 nt, Artificial Sequence
  Description of Artificial Sequence: Synthetic oligonucleotide
ggggcgggaccuguggccu

SEQ ID NO: 2413335 - RNA, 19 nt, Artificial Sequence
  Description of Artificial Sequence: Synthetic oligonucleotide
gugccuugucgggccaccu

SEQ ID NO: 2413336 - RNA, 19 nt, Artificial Sequence
  Description of Artificial Sequence: Synthetic oligonucleotide
ggcuggggugugugugugu

SEQ ID NO: 2413337 - RNA, 19 nt, Artificial Sequence
  Description of Artificial Sequence: Synthetic oligonucleotide
cguuccugguaggacugga

SEQ ID NO: 2413338 - RNA, 19 nt, Artificial Sequence
  Description of Artificial Sequence: Synthetic oligonucleotide
caggucccuucugucugcu

SEQ ID NO: 2413339 - RNA, 19 nt, Artificial Sequence
  Description of Artificial Sequence: Synthetic oligonucleotide
gggucgggcagugccuugu

SEQ ID NO: 2413340 - RNA, 19 nt, Artificial Sequence
  Description of Artificial Sequence: Synthetic oligonucleotide
gccgguuacgcaggcgggu

SEQ ID NO: 2413341 - RNA, 19 nt, Artificial Sequence
  Description of Artificial Sequence: Synthetic oligonucleotide
gcccggaaccgcaucugcu

SEQ ID NO: 2413342 - RNA, 19 nt, Artificial Sequence
  Description of Artificial Sequence: Synthetic oligonucleotide
cgggugcgcaggguucggg

SEQ ID NO: 2413343 - RNA, 19 nt, Artificial Sequence
  Description of Artificial Sequence: Synthetic oligonucleotide
cccgcaggaucagccucuc

SEQ ID NO: 2413344 - RNA, 19 nt, Artificial Sequence
  Description of Artificial Sequence: Synthetic oligonucleotide
cccucgcagguggccgaag

SEQ ID NO: 2413345 - RNA, 19 nt, Artificial Sequence
  Description of Artificial Sequence: Synthetic oligonucleotide
cgggcacugagcucuuccu

SEQ ID NO: 2413346 - RNA, 19 nt, Artificial Sequence
  Description of Artificial Sequence: Synthetic oligonucleotide
ggguucggggucgggcagu

SEQ ID NO: 2413347 - RNA, 19 nt, Artificial Sequence
  Description of Artificial Sequence: Synthetic oligonucleotide
cgggaccuguggccugcug

SEQ ID NO: 2413348 - RNA, 19 nt, Artificial Sequence
  Description of Artificial Sequence: Synthetic oligonucleotide
gcucuucccggaggccugu

SEQ ID NO: 2413349 - RNA, 19 nt, Artificial Sequence
  Description of Artificial Sequence: Synthetic oligonucleotide
cggggcccggaaccgcauc

SEQ ID NO: 2413350 - RNA, 19 nt, Artificial Sequence
  Description of Artificial Sequence: Synthetic oligonucleotide
gcaggcgggugcgcagggu

SEQ ID NO: 2413351 - RNA, 19 nt, Artificial Sequence
  Description of Artificial Sequence: Synthetic oligonucleotide
ccuccgagucgggcaucca

SEQ ID NO: 2413352 - RNA, 19 nt, Artificial Sequence
  Description of Artificial Sequence: Synthetic oligonucleotide
cggaaccgcaucugcucau

SEQ ID NO: 2413353 - RNA, 19 nt, Artificial Sequence
  Description of Artificial Sequence: Synthetic oligonucleotide
gggcagcauaacgccgguu

SEQ ID NO: 2413354 - RNA, 19 nt, Artificial Sequence
  Description of Artificial Sequence: Synthetic oligonucleotide
ggguucccacaggcugagu

SEQ ID NO: 2413355 - RNA, 19 nt, Artificial Sequence
  Description of Artificial Sequence: Synthetic oligonucleotide
ccccucgcagguggccgaa

SEQ ID NO: 2413356 - RNA, 19 nt, Artificial Sequence
  Description of Artificial Sequence: Synthetic oligonucleotide
gcgggaccuguggccugcu

SEQ ID NO: 2413357 - RNA, 19 nt, Artificial Sequence
  Description of Artificial Sequence: Synthetic oligonucleotide
gcggggcccggaaccgcau

SEQ ID NO: 2413358 - RNA, 19 nt, Artificial Sequence
  Description of Artificial Sequence: Synthetic oligonucleotide
aaacauauccaucuugucc

SEQ ID NO: 2413359 - RNA, 19 nt, Artificial Sequence
  Description of Artificial Sequence: Synthetic oligonucleotide
ucaacuaaagcuaucuggg

SEQ ID NO: 2413360 - RNA, 19 nt, Artificial Sequence
  Description of Artificial Sequence: Synthetic oligonucleotide
aaauauacacuuuggaugu

SEQ ID NO: 2413361 - RNA, 19 nt, Artificial Sequence
  Description of Artificial Sequence: Synthetic oligonucleotide
auaguggauggcuugaugc

SEQ ID NO: 2413362 - RNA, 19 nt, Artificial Sequence
  Description of Artificial Sequence: Synthetic oligonucleotide
cauguuucuaaacauaucc

SEQ ID NO: 2413363 - RNA, 19 nt, Artificial Sequence
  Description of Artificial Sequence: Synthetic oligonucleotide
aacauaacugauccugggc

SEQ ID NO: 2413364 - RNA, 19 nt, Artificial Sequence
  Description of Artificial Sequence: Synthetic oligonucleotide
aucaacuaaagcuaucugg

SEQ ID NO: 2413365 - RNA, 19 nt, Artificial Sequence
  Description of Artificial Sequence: Synthetic oligonucleotide
agucacaacaaccucuucc

SEQ ID NO: 2413366 - RNA, 19 nt, Artificial Sequence
  Description of Artificial Sequence: Synthetic oligonucleotide
auuuguauaaaaccuuggg

SEQ ID NO: 2413367 - RNA, 19 nt, Artificial Sequence
  Description of Artificial Sequence: Synthetic oligonucleotide
aaauuccccuucuacagcg

SEQ ID NO: 2413368 - RNA, 19 nt, Artificial Sequence
  Description of Artificial Sequence: Synthetic oligonucleotide
aaaauuccccuucuacagc

SEQ ID NO: 2413369 - RNA, 19 nt, Artificial Sequence
  Description of Artificial Sequence: Synthetic oligonucleotide
ucuaaauauacacuuugga

SEQ ID NO: 2413370 - RNA, 19 nt, Artificial Sequence
  Description of Artificial Sequence: Synthetic oligonucleotide
uuacaguucagccacacga

SEQ ID NO: 2413371 - RNA, 19 nt, Artificial Sequence
  Description of Artificial Sequence: Synthetic oligonucleotide
uggaaguaaucccacaggg

SEQ ID NO: 2413372 - RNA, 19 nt, Artificial Sequence
  Description of Artificial Sequence: Synthetic oligonucleotide
aaccuugggucacagaacg

SEQ ID NO: 2413373 - RNA, 19 nt, Artificial Sequence
  Description of Artificial Sequence: Synthetic oligonucleotide
uuuggaaguaaucccacag

SEQ ID NO: 2413374 - RNA, 19 nt, Artificial Sequence
  Description of Artificial Sequence: Synthetic oligonucleotide
aaaaucuguauuucgggcu

SEQ ID NO: 2413375 - RNA, 19 nt, Artificial Sequence
  Description of Artificial Sequence: Synthetic oligonucleotide
guuaacaacagcuccuugg

SEQ ID NO: 2413376 - RNA, 19 nt, Artificial Sequence
  Description of Artificial Sequence: Synthetic oligonucleotide
aagacgguuccauuacugc

SEQ ID NO: 2413377 - RNA, 19 nt, Artificial Sequence
  Description of Artificial Sequence: Synthetic oligonucleotide
ugucuaaauauacacuuug

SEQ ID NO: 2413378 - RNA, 19 nt, Artificial Sequence
  Description of Artificial Sequence: Synthetic oligonucleotide
aaacauaacugauccuggg

SEQ ID NO: 2413379 - RNA, 19 nt, Artificial Sequence
  Description of Artificial Sequence: Synthetic oligonucleotide
uguauaaaaccuuggguca

SEQ ID NO: 2413380 - RNA, 19 nt, Artificial Sequence
  Description of Artificial Sequence: Synthetic oligonucleotide
ugccucaucaacuaaagcu

SEQ ID NO: 2413381 - RNA, 19 nt, Artificial Sequence
  Description of Artificial Sequence: Synthetic oligonucleotide
ucuaaacauauccaucuug

SEQ ID NO: 2413382 - RNA, 19 nt, Artificial Sequence
  Description of Artificial Sequence: Synthetic oligonucleotide
agaacaguacaggaaaacc

SEQ ID NO: 2413383 - RNA, 19 nt, Artificial Sequence
  Description of Artificial Sequence: Synthetic oligonucleotide
acuaaagcuaucuggguag

SEQ ID NO: 2413384 - RNA, 19 nt, Artificial Sequence
  Description of Artificial Sequence: Synthetic oligonucleotide
ugagagagucacaacaacc

SEQ ID NO: 2413385 - RNA, 19 nt, Artificial Sequence
  Description of Artificial Sequence: Synthetic oligonucleotide
accaaaauuccccuucuac

SEQ ID NO: 2413386 - RNA, 19 nt, Artificial Sequence
  Description of Artificial Sequence: Synthetic oligonucleotide
ucaggcauguuucuaaaca

SEQ ID NO: 2413387 - RNA, 19 nt, Artificial Sequence
  Description of Artificial Sequence: Synthetic oligonucleotide
aacaacagcuccuugguaa

SEQ ID NO: 2413388 - RNA, 19 nt, Artificial Sequence
  Description of Artificial Sequence: Synthetic oligonucleotide
aaaucuguauuucgggcug

SEQ ID NO: 2413389 - RNA, 19 nt, Artificial Sequence
  Description of Artificial Sequence: Synthetic oligonucleotide
ugcuuuacaguucagccac

SEQ ID NO: 2413390 - RNA, 19 nt, Artificial Sequence
  Description of Artificial Sequence: Synthetic oligonucleotide
aauuuguauaaaaccuugg

SEQ ID NO: 2413391 - RNA, 19 nt, Artificial Sequence
  Description of Artificial Sequence: Synthetic oligonucleotide
uuggaaguaaucccacagg

SEQ ID NO: 2413392 - RNA, 19 nt, Artificial Sequence
  Description of Artificial Sequence: Synthetic oligonucleotide
caaaccacauaguggaugg

SEQ ID NO: 2413393 - RNA, 19 nt, Artificial Sequence
  Description of Artificial Sequence: Synthetic oligonucleotide
agacgguuccauuacugcc

SEQ ID NO: 2413394 - RNA, 19 nt, Artificial Sequence
  Description of Artificial Sequence: Synthetic oligonucleotide
aauugcuuuaacucguuuu

SEQ ID NO: 2413395 - RNA, 19 nt, Artificial Sequence
  Description of Artificial Sequence: Synthetic oligonucleotide
uauaagacgguuccauuac

SEQ ID NO: 2413396 - RNA, 19 nt, Artificial Sequence
  Description of Artificial Sequence: Synthetic oligonucleotide
caaaaucuguauuucgggc

SEQ ID NO: 2413397 - RNA, 19 nt, Artificial Sequence
  Description of Artificial Sequence: Synthetic oligonucleotide
gaauuuguauaaaaccuug

SEQ ID NO: 2413398 - RNA, 19 nt, Artificial Sequence
  Description of Artificial Sequence: Synthetic oligonucleotide
cucgguaugaacucucucc

SEQ ID NO: 2413399 - RNA, 19 nt, Artificial Sequence
  Description of Artificial Sequence: Synthetic oligonucleotide
uggagaacaguacaggaaa

SEQ ID NO: 2413400 - RNA, 19 nt, Artificial Sequence
  Description of Artificial Sequence: Synthetic oligonucleotide
uucaauugcuuuaacucgu

SEQ ID NO: 2413401 - RNA, 19 nt, Artificial Sequence
  Description of Artificial Sequence: Synthetic oligonucleotide
ugaaaauacucuucugccu

SEQ ID NO: 2413402 - RNA, 19 nt, Artificial Sequence
  Description of Artificial Sequence: Synthetic oligonucleotide
aacuaaagcuaucugggua

SEQ ID NO: 2413403 - RNA, 19 nt, Artificial Sequence
  Description of Artificial Sequence: Synthetic oligonucleotide
cuguguauaagacgguucc

SEQ ID NO: 2413404 - RNA, 19 nt, Artificial Sequence
  Description of Artificial Sequence: Synthetic oligonucleotide
cugauugugugaagcaugg

SEQ ID NO: 2413405 - RNA, 19 nt, Artificial Sequence
  Description of Artificial Sequence: Synthetic oligonucleotide
gaaguaaucccacagggua

SEQ ID NO: 2413406 - RNA, 19 nt, Artificial Sequence
  Description of Artificial Sequence: Synthetic oligonucleotide
uuuacaguucagccacacg

SEQ ID NO: 2413407 - RNA, 19 nt, Artificial Sequence
  Description of Artificial Sequence: Synthetic oligonucleotide
aggguaauuuauuccauug

SEQ ID NO: 2413408 - RNA, 19 nt, Artificial Sequence
  Description of Artificial Sequence: Synthetic oligonucleotide
ucccaaaaucuguauuucg

SEQ ID NO: 2413409 - RNA, 19 nt, Artificial Sequence
  Description of Artificial Sequence: Synthetic oligonucleotide
ucgguaugaacucucuccc

SEQ ID NO: 2413410 - RNA, 19 nt, Artificial Sequence
  Description of Artificial Sequence: Synthetic oligonucleotide
uaagacgguuccauuacug

SEQ ID NO: 2413411 - RNA, 19 nt, Artificial Sequence
  Description of Artificial Sequence: Synthetic oligonucleotide
gaugcugauugugugaagc

SEQ ID NO: 2413412 - RNA, 19 nt, Artificial Sequence
  Description of Artificial Sequence: Synthetic oligonucleotide
ggugaacaaauacucauag

SEQ ID NO: 2413413 - RNA, 19 nt, Artificial Sequence
  Description of Artificial Sequence: Synthetic oligonucleotide
gaaccagcuaccaaaauuc

SEQ ID NO: 2413414 - RNA, 19 nt, Artificial Sequence
  Description of Artificial Sequence: Synthetic oligonucleotide
guggugucuaaauauacac

SEQ ID NO: 2413415 - RNA, 19 nt, Artificial Sequence
  Description of Artificial Sequence: Synthetic oligonucleotide
uguauuucgggcugguuaa

SEQ ID NO: 2413416 - RNA, 19 nt, Artificial Sequence
  Description of Artificial Sequence: Synthetic oligonucleotide
acaagcucgguaugaacuc

SEQ ID NO: 2413417 - RNA, 19 nt, Artificial Sequence
  Description of Artificial Sequence: Synthetic oligonucleotide
ucggucuguggugagaugg

SEQ ID NO: 2413418 - RNA, 19 nt, Artificial Sequence
  Description of Artificial Sequence: Synthetic oligonucleotide
uucuacagcgcacuccuca

SEQ ID NO: 2413419 - RNA, 19 nt, Artificial Sequence
  Description of Artificial Sequence: Synthetic oligonucleotide
auacucuucugccuuuggg

SEQ ID NO: 2413420 - RNA, 19 nt, Artificial Sequence
  Description of Artificial Sequence: Synthetic oligonucleotide
augguggaggauaucaggc

SEQ ID NO: 2413421 - RNA, 19 nt, Artificial Sequence
  Description of Artificial Sequence: Synthetic oligonucleotide
ggaaucucacuguaggagg

SEQ ID NO: 2413422 - RNA, 19 nt, Artificial Sequence
  Description of Artificial Sequence: Synthetic oligonucleotide
cuugggucacagaacgugg

SEQ ID NO: 2413423 - RNA, 19 nt, Artificial Sequence
  Description of Artificial Sequence: Synthetic oligonucleotide
uuuggaugucuuuuacucu

SEQ ID NO: 2413424 - RNA, 19 nt, Artificial Sequence
  Description of Artificial Sequence: Synthetic oligonucleotide
gucuaaauauacacuuugg

SEQ ID NO: 2413425 - RNA, 19 nt, Artificial Sequence
  Description of Artificial Sequence: Synthetic oligonucleotide
uguggacuccuagugaucc

SEQ ID NO: 2413426 - RNA, 19 nt, Artificial Sequence
  Description of Artificial Sequence: Synthetic oligonucleotide
uggugucuaaauauacacu

SEQ ID NO: 2413427 - RNA, 19 nt, Artificial Sequence
  Description of Artificial Sequence: Synthetic oligonucleotide
aaaccuugggucacagaac

SEQ ID NO: 2413428 - RNA, 19 nt, Artificial Sequence
  Description of Artificial Sequence: Synthetic oligonucleotide
augaaccuggacuccuagc

SEQ ID NO: 2413429 - RNA, 19 nt, Artificial Sequence
  Description of Artificial Sequence: Synthetic oligonucleotide
acgacuuggaauuuguaua

SEQ ID NO: 2413430 - RNA, 19 nt, Artificial Sequence
  Description of Artificial Sequence: Synthetic oligonucleotide
cauaacugauccugggcag

SEQ ID NO: 2413431 - RNA, 19 nt, Artificial Sequence
  Description of Artificial Sequence: Synthetic oligonucleotide
gaacaaauacucauagcca

SEQ ID NO: 2413432 - RNA, 19 nt, Artificial Sequence
  Description of Artificial Sequence: Synthetic oligonucleotide
gaugccucaucaacuaaag

SEQ ID NO: 2413433 - RNA, 19 nt, Artificial Sequence
  Description of Artificial Sequence: Synthetic oligonucleotide
ugauccugggcagugacca

SEQ ID NO: 2413434 - RNA, 19 nt, Artificial Sequence
  Description of Artificial Sequence: Synthetic oligonucleotide
augccucaucaacuaaagc

SEQ ID NO: 2413435 - RNA, 19 nt, Artificial Sequence
  Description of Artificial Sequence: Synthetic oligonucleotide
caggaaaaccuucaagcug

SEQ ID NO: 2413436 - RNA, 19 nt, Artificial Sequence
  Description of Artificial Sequence: Synthetic oligonucleotide
uacaguucagccacacgac

SEQ ID NO: 2413437 - RNA, 19 nt, Artificial Sequence
  Description of Artificial Sequence: Synthetic oligonucleotide
gcugcuuuacaguucagcc

SEQ ID NO: 2413438 - RNA, 19 nt, Artificial Sequence
  Description of Artificial Sequence: Synthetic oligonucleotide
ccagcuaccaaaauucccc

SEQ ID NO: 2413439 - RNA, 19 nt, Artificial Sequence
  Description of Artificial Sequence: Synthetic oligonucleotide
aaccacauaguggauggcu

SEQ ID NO: 2413440 - RNA, 19 nt, Artificial Sequence
  Description of Artificial Sequence: Synthetic oligonucleotide
uacagcgcacuccucacga

SEQ ID NO: 2413441 - RNA, 19 nt, Artificial Sequence
  Description of Artificial Sequence: Synthetic oligonucleotide
aacaguacaggaaaaccuu

SEQ ID NO: 2413442 - RNA, 19 nt, Artificial Sequence
  Description of Artificial Sequence: Synthetic oligonucleotide
gacuccuagugauccagcc

SEQ ID NO: 2413443 - RNA, 19 nt, Artificial Sequence
  Description of Artificial Sequence: Synthetic oligonucleotide
gguaauuuauuccauugaa

SEQ ID NO: 2413444 - RNA, 19 nt, Artificial Sequence
  Description of Artificial Sequence: Synthetic oligonucleotide
gacgguuccauuacugccc

SEQ ID NO: 2413445 - RNA, 19 nt, Artificial Sequence
  Description of Artificial Sequence: Synthetic oligonucleotide
aaucuguauuucgggcugg

SEQ ID NO: 2413446 - RNA, 19 nt, Artificial Sequence
  Description of Artificial Sequence: Synthetic oligonucleotide
aaaccacauaguggauggc

SEQ ID NO: 2413447 - RNA, 19 nt, Artificial Sequence
  Description of Artificial Sequence: Synthetic oligonucleotide
gccauaagcugcuuuacag

SEQ ID NO: 2413448 - RNA, 19 nt, Artificial Sequence
  Description of Artificial Sequence: Synthetic oligonucleotide
gagaugguggaggauauca

SEQ ID NO: 2413449 - RNA, 19 nt, Artificial Sequence
  Description of Artificial Sequence: Synthetic oligonucleotide
auuacugcccugaauaaaa

SEQ ID NO: 2413450 - RNA, 19 nt, Artificial Sequence
  Description of Artificial Sequence: Synthetic oligonucleotide
aguucagccacacgacgug

SEQ ID NO: 2413451 - RNA, 19 nt, Artificial Sequence
  Description of Artificial Sequence: Synthetic oligonucleotide
uggugaacaaauacucaua

SEQ ID NO: 2413452 - RNA, 19 nt, Artificial Sequence
  Description of Artificial Sequence: Synthetic oligonucleotide
gaggauaucaggcauguuu

SEQ ID NO: 2413453 - RNA, 19 nt, Artificial Sequence
  Description of Artificial Sequence: Synthetic oligonucleotide
guauaagacgguuccauua

SEQ ID NO: 2413454 - RNA, 19 nt, Artificial Sequence
  Description of Artificial Sequence: Synthetic oligonucleotide
uggaugucuuuuacucugc

SEQ ID NO: 2413455 - RNA, 19 nt, Artificial Sequence
  Description of Artificial Sequence: Synthetic oligonucleotide
uugacacaguggaaucuca

SEQ ID NO: 2413456 - RNA, 19 nt, Artificial Sequence
  Description of Artificial Sequence: Synthetic oligonucleotide
uguauaagacgguuccauu

SEQ ID NO: 2413457 - RNA, 19 nt, Artificial Sequence
  Description of Artificial Sequence: Synthetic oligonucleotide
uaguggauggcuugaugcu

SEQ ID NO: 2413458 - RNA, 19 nt, Artificial Sequence
  Description of Artificial Sequence: Synthetic oligonucleotide
aguacaggaaaaccuucaa

SEQ ID NO: 2413459 - RNA, 19 nt, Artificial Sequence
  Description of Artificial Sequence: Synthetic oligonucleotide
uuccuucucacccgaugcc

SEQ ID NO: 2413460 - RNA, 19 nt, Artificial Sequence
  Description of Artificial Sequence: Synthetic oligonucleotide
aaucucacuguaggaggag

SEQ ID NO: 2413461 - RNA, 19 nt, Artificial Sequence
  Description of Artificial Sequence: Synthetic oligonucleotide
agaacguggugucuaaaua

SEQ ID NO: 2413462 - RNA, 19 nt, Artificial Sequence
  Description of Artificial Sequence: Synthetic oligonucleotide
uuucgggcugguuaacaac

SEQ ID NO: 2413463 - RNA, 19 nt, Artificial Sequence
  Description of Artificial Sequence: Synthetic oligonucleotide
uggacuuggguguuucggu

SEQ ID NO: 2413464 - RNA, 19 nt, Artificial Sequence
  Description of Artificial Sequence: Synthetic oligonucleotide
auaagacgguuccauuacu

SEQ ID NO: 2413465 - RNA, 19 nt, Artificial Sequence
  Description of Artificial Sequence: Synthetic oligonucleotide
caucaacuaaagcuaucug

SEQ ID NO: 2413466 - RNA, 19 nt, Artificial Sequence
  Description of Artificial Sequence: Synthetic oligonucleotide
auaagcugcuuuacaguuc

SEQ ID NO: 2413467 - RNA, 19 nt, Artificial Sequence
  Description of Artificial Sequence: Synthetic oligonucleotide
gaacaguacaggaaaaccu

SEQ ID NO: 2413468 - RNA, 19 nt, Artificial Sequence
  Description of Artificial Sequence: Synthetic oligonucleotide
uggacuccuagugauccag

SEQ ID NO: 2413469 - RNA, 19 nt, Artificial Sequence
  Description of Artificial Sequence: Synthetic oligonucleotide
ugguguggacuccuaguga

SEQ ID NO: 2413470 - RNA, 19 nt, Artificial Sequence
  Description of Artificial Sequence: Synthetic oligonucleotide
acguggugucuaaauauac

SEQ ID NO: 2413471 - RNA, 19 nt, Artificial Sequence
  Description of Artificial Sequence: Synthetic oligonucleotide
ucacucagguuggugaaca

SEQ ID NO: 2413472 - RNA, 19 nt, Artificial Sequence
  Description of Artificial Sequence: Synthetic oligonucleotide
ucuacagcgcacuccucac

SEQ ID NO: 2413473 - RNA, 19 nt, Artificial Sequence
  Description of Artificial Sequence: Synthetic oligonucleotide
uaucaggcauguuucuaaa

SEQ ID NO: 2413474 - RNA, 19 nt, Artificial Sequence
  Description of Artificial Sequence: Synthetic oligonucleotide
cucgcuaucacauuuguuu

SEQ ID NO: 2413475 - RNA, 19 nt, Artificial Sequence
  Description of Artificial Sequence: Synthetic oligonucleotide
aggaggagugaaaagaaaa

SEQ ID NO: 2413476 - RNA, 19 nt, Artificial Sequence
  Description of Artificial Sequence: Synthetic oligonucleotide
uauccaucuuguccacaug

SEQ ID NO: 2413477 - RNA, 19 nt, Artificial Sequence
  Description of Artificial Sequence: Synthetic oligonucleotide
ucugccuuuggguggcggc

SEQ ID NO: 2413478 - RNA, 19 nt, Artificial Sequence
  Description of Artificial Sequence: Synthetic oligonucleotide
acuccuagcuccucacuca

SEQ ID NO: 2413479 - RNA, 19 nt, Artificial Sequence
  Description of Artificial Sequence: Synthetic oligonucleotide
guccacaugaaccuggacu

SEQ ID NO: 2413480 - RNA, 19 nt, Artificial Sequence
  Description of Artificial Sequence: Synthetic oligonucleotide
gguuggugaacaaauacuc

SEQ ID NO: 2413481 - RNA, 19 nt, Artificial Sequence
  Description of Artificial Sequence: Synthetic oligonucleotide
acuguaggaggagugaaaa

SEQ ID NO: 2413482 - RNA, 19 nt, Artificial Sequence
  Description of Artificial Sequence: Synthetic oligonucleotide
gaacguggugucuaaauau

SEQ ID NO: 2413483 - RNA, 19 nt, Artificial Sequence
  Description of Artificial Sequence: Synthetic oligonucleotide
acuccucacgacuuggaau

SEQ ID NO: 2413484 - RNA, 19 nt, Artificial Sequence
  Description of Artificial Sequence: Synthetic oligonucleotide
uguguauaagacgguucca

SEQ ID NO: 2413485 - RNA, 19 nt, Artificial Sequence
  Description of Artificial Sequence: Synthetic oligonucleotide
cauaguggauggcuugaug

SEQ ID NO: 2413486 - RNA, 19 nt, Artificial Sequence
  Description of Artificial Sequence: Synthetic oligonucleotide
auuucgggcugguuaacaa

SEQ ID NO: 2413487 - RNA, 19 nt, Artificial Sequence
  Description of Artificial Sequence: Synthetic oligonucleotide
gugagagagucacaacaac

SEQ ID NO: 2413488 - RNA, 19 nt, Artificial Sequence
  Description of Artificial Sequence: Synthetic oligonucleotide
uauuucgggcugguuaaca

SEQ ID NO: 2413489 - RNA, 19 nt, Artificial Sequence
  Description of Artificial Sequence: Synthetic oligonucleotide
uccgaaccagcuaccaaaa

SEQ ID NO: 2413490 - RNA, 19 nt, Artificial Sequence
  Description of Artificial Sequence: Synthetic oligonucleotide
gagagagucacaacaaccu

SEQ ID NO: 2413491 - RNA, 19 nt, Artificial Sequence
  Description of Artificial Sequence: Synthetic oligonucleotide
caugaaccuggacuccuag

SEQ ID NO: 2413492 - RNA, 19 nt, Artificial Sequence
  Description of Artificial Sequence: Synthetic oligonucleotide
uggaggauaucaggcaugu

SEQ ID NO: 2413493 - RNA, 19 nt, Artificial Sequence
  Description of Artificial Sequence: Synthetic oligonucleotide
uccucgcuaucacauuugu

SEQ ID NO: 2413494 - RNA, 19 nt, Artificial Sequence
  Description of Artificial Sequence: Synthetic oligonucleotide
acuccuagugauccagccu

SEQ ID NO: 2413495 - RNA, 19 nt, Artificial Sequence
  Description of Artificial Sequence: Synthetic oligonucleotide
aaguaaucccacaggguaa

SEQ ID NO: 2413496 - RNA, 19 nt, Artificial Sequence
  Description of Artificial Sequence: Synthetic oligonucleotide
uucccaaaaucuguauuuc

SEQ ID NO: 2413497 - RNA, 19 nt, Artificial Sequence
  Description of Artificial Sequence: Synthetic oligonucleotide
ucgcuaucacauuuguuuu

SEQ ID NO: 2413498 - RNA, 19 nt, Artificial Sequence
  Description of Artificial Sequence: Synthetic oligonucleotide
cacuuuggaugucuuuuac

SEQ ID NO: 2413499 - RNA, 19 nt, Artificial Sequence
  Description of Artificial Sequence: Synthetic oligonucleotide
aagcucgguaugaacucuc

SEQ ID NO: 2413500 - RNA, 19 nt, Artificial Sequence
  Description of Artificial Sequence: Synthetic oligonucleotide
uccuagugauccagccucc

SEQ ID NO: 2413501 - RNA, 19 nt, Artificial Sequence
  Description of Artificial Sequence: Synthetic oligonucleotide
ucaauugcuuuaacucguu

SEQ ID NO: 2413502 - RNA, 19 nt, Artificial Sequence
  Description of Artificial Sequence: Synthetic oligonucleotide
agccacacgacguggugug

SEQ ID NO: 2413503 - RNA, 19 nt, Artificial Sequence
  Description of Artificial Sequence: Synthetic oligonucleotide
agccauaagcugcuuuaca

SEQ ID NO: 2413504 - RNA, 19 nt, Artificial Sequence
  Description of Artificial Sequence: Synthetic oligonucleotide
gaaucucacuguaggagga

SEQ ID NO: 2413505 - RNA, 19 nt, Artificial Sequence
  Description of Artificial Sequence: Synthetic oligonucleotide
gugauccagccuccgaacc

SEQ ID NO: 2413506 - RNA, 19 nt, Artificial Sequence
  Description of Artificial Sequence: Synthetic oligonucleotide
acuuggguguuucggucug

SEQ ID NO: 2413507 - RNA, 19 nt, Artificial Sequence
  Description of Artificial Sequence: Synthetic oligonucleotide
gguguuucggucuguggug

SEQ ID NO: 2413508 - RNA, 19 nt, Artificial Sequence
  Description of Artificial Sequence: Synthetic oligonucleotide
uucgggaagcuucuccuuu

SEQ ID NO: 2413509 - RNA, 19 nt, Artificial Sequence
  Description of Artificial Sequence: Synthetic oligonucleotide
ugugaagcauggcuuuauu

SEQ ID NO: 2413510 - RNA, 19 nt, Artificial Sequence
  Description of Artificial Sequence: Synthetic oligonucleotide
cugcuuuacaguucagcca

SEQ ID NO: 2413511 - RNA, 19 nt, Artificial Sequence
  Description of Artificial Sequence: Synthetic oligonucleotide
cucaucaacuaaagcuauc

SEQ ID NO: 2413512 - RNA, 19 nt, Artificial Sequence
  Description of Artificial Sequence: Synthetic oligonucleotide
cuguauuucgggcugguua

SEQ ID NO: 2413513 - RNA, 19 nt, Artificial Sequence
  Description of Artificial Sequence: Synthetic oligonucleotide
caaauacucauagccauaa

SEQ ID NO: 2413514 - RNA, 19 nt, Artificial Sequence
  Description of Artificial Sequence: Synthetic oligonucleotide
cagucugaagucuccugug

SEQ ID NO: 2413515 - RNA, 19 nt, Artificial Sequence
  Description of Artificial Sequence: Synthetic oligonucleotide
acaguggaaucucacugua

SEQ ID NO: 2413516 - RNA, 19 nt, Artificial Sequence
  Description of Artificial Sequence: Synthetic oligonucleotide
cacccgaugccucaucaac

SEQ ID NO: 2413517 - RNA, 19 nt, Artificial Sequence
  Description of Artificial Sequence: Synthetic oligonucleotide
caguggaaucucacuguag

SEQ ID NO: 2413518 - RNA, 19 nt, Artificial Sequence
  Description of Artificial Sequence: Synthetic oligonucleotide
uuucggucuguggugagau

SEQ ID NO: 2413519 - RNA, 19 nt, Artificial Sequence
  Description of Artificial Sequence: Synthetic oligonucleotide
uuccauuacugcccugaau

SEQ ID NO: 2413520 - RNA, 19 nt, Artificial Sequence
  Description of Artificial Sequence: Synthetic oligonucleotide
cacgacgugguguggacuc

SEQ ID NO: 2413521 - RNA, 19 nt, Artificial Sequence
  Description of Artificial Sequence: Synthetic oligonucleotide
cuccgaaccagcuaccaaa

SEQ ID NO: 2413522 - RNA, 19 nt, Artificial Sequence
  Description of Artificial Sequence: Synthetic oligonucleotide
agaugguggaggauaucag

SEQ ID NO: 2413523 - RNA, 19 nt, Artificial Sequence
  Description of Artificial Sequence: Synthetic oligonucleotide
cuaucuggguaggaguuuc

SEQ ID NO: 2413524 - RNA, 19 nt, Artificial Sequence
  Description of Artificial Sequence: Synthetic oligonucleotide
cuacagcgcacuccucacg

SEQ ID NO: 2413525 - RNA, 19 nt, Artificial Sequence
  Description of Artificial Sequence: Synthetic oligonucleotide
ccaaaauuccccuucuaca

SEQ ID NO: 2413526 - RNA, 19 nt, Artificial Sequence
  Description of Artificial Sequence: Synthetic oligonucleotide
acagcgcacuccucacgac

SEQ ID NO: 2413527 - RNA, 19 nt, Artificial Sequence
  Description of Artificial Sequence: Synthetic oligonucleotide
gagagucacaacaaccucu

SEQ ID NO: 2413528 - RNA, 19 nt, Artificial Sequence
  Description of Artificial Sequence: Synthetic oligonucleotide
ccacaggguaauuuauucc

SEQ ID NO: 2413529 - RNA, 19 nt, Artificial Sequence
  Description of Artificial Sequence: Synthetic oligonucleotide
gguaacuggagaacaguac

SEQ ID NO: 2413530 - RNA, 19 nt, Artificial Sequence
  Description of Artificial Sequence: Synthetic oligonucleotide
guaggaggagugaaaagaa

SEQ ID NO: 2413531 - RNA, 19 nt, Artificial Sequence
  Description of Artificial Sequence: Synthetic oligonucleotide
cugauccugggcagugacc

SEQ ID NO: 2413532 - RNA, 19 nt, Artificial Sequence
  Description of Artificial Sequence: Synthetic oligonucleotide
auaacugauccugggcagu

SEQ ID NO: 2413533 - RNA, 19 nt, Artificial Sequence
  Description of Artificial Sequence: Synthetic oligonucleotide
acacuuuggaugucuuuua

SEQ ID NO: 2413534 - RNA, 19 nt, Artificial Sequence
  Description of Artificial Sequence: Synthetic oligonucleotide
auggcuugaugcugauugu

SEQ ID NO: 2413535 - RNA, 19 nt, Artificial Sequence
  Description of Artificial Sequence: Synthetic oligonucleotide
gauaucaggcauguuucua

SEQ ID NO: 2413536 - RNA, 19 nt, Artificial Sequence
  Description of Artificial Sequence: Synthetic oligonucleotide
ucccacaggguaauuuauu

SEQ ID NO: 2413537 - RNA, 19 nt, Artificial Sequence
  Description of Artificial Sequence: Synthetic oligonucleotide
acgugguguggacuccuag

SEQ ID NO: 2413538 - RNA, 19 nt, Artificial Sequence
  Description of Artificial Sequence: Synthetic oligonucleotide
ugauugugugaagcauggc

SEQ ID NO: 2413539 - RNA, 19 nt, Artificial Sequence
  Description of Artificial Sequence: Synthetic oligonucleotide
ucacagaacguggugucua

SEQ ID NO: 2413540 - RNA, 19 nt, Artificial Sequence
  Description of Artificial Sequence: Synthetic oligonucleotide
cauaagcugcuuuacaguu

SEQ ID NO: 2413541 - RNA, 19 nt, Artificial Sequence
  Description of Artificial Sequence: Synthetic oligonucleotide
ucacgacuuggaauuugua

SEQ ID NO: 2413542 - RNA, 19 nt, Artificial Sequence
  Description of Artificial Sequence: Synthetic oligonucleotide
ugguuaacaacagcuccuu

SEQ ID NO: 2413543 - RNA, 19 nt, Artificial Sequence
  Description of Artificial Sequence: Synthetic oligonucleotide
uuggguguuucggucugug

SEQ ID NO: 2413544 - RNA, 19 nt, Artificial Sequence
  Description of Artificial Sequence: Synthetic oligonucleotide
cugguuaacaacagcuccu

SEQ ID NO: 2413545 - RNA, 19 nt, Artificial Sequence
  Description of Artificial Sequence: Synthetic oligonucleotide
gguaggaguuucaauuuca

SEQ ID NO: 2413546 - RNA, 19 nt, Artificial Sequence
  Description of Artificial Sequence: Synthetic oligonucleotide
cccacaggguaauuuauuc

SEQ ID NO: 2413547 - RNA, 19 nt, Artificial Sequence
  Description of Artificial Sequence: Synthetic oligonucleotide
uucugccuuuggguggcgg

SEQ ID NO: 2413548 - RNA, 19 nt, Artificial Sequence
  Description of Artificial Sequence: Synthetic oligonucleotide
aacugauccugggcaguga

SEQ ID NO: 2413549 - RNA, 19 nt, Artificial Sequence
  Description of Artificial Sequence: Synthetic oligonucleotide
acgacgugguguggacucc

SEQ ID NO: 2413550 - RNA, 19 nt, Artificial Sequence
  Description of Artificial Sequence: Synthetic oligonucleotide
cacgacuuggaauuuguau

SEQ ID NO: 2413551 - RNA, 19 nt, Artificial Sequence
  Description of Artificial Sequence: Synthetic oligonucleotide
cacacgacgugguguggac

SEQ ID NO: 2413552 - RNA, 19 nt, Artificial Sequence
  Description of Artificial Sequence: Synthetic oligonucleotide
gguuaacaacagcuccuug

SEQ ID NO: 2413553 - RNA, 19 nt, Artificial Sequence
  Description of Artificial Sequence: Synthetic oligonucleotide
acaaauacucauagccaua

SEQ ID NO: 2413554 - RNA, 19 nt, Artificial Sequence
  Description of Artificial Sequence: Synthetic oligonucleotide
uucggucuguggugagaug

SEQ ID NO: 2413555 - RNA, 19 nt, Artificial Sequence
  Description of Artificial Sequence: Synthetic oligonucleotide
gguaugaacucucucccgu

SEQ ID NO: 2413556 - RNA, 19 nt, Artificial Sequence
  Description of Artificial Sequence: Synthetic oligonucleotide
cauucgggaagcuucuccu

SEQ ID NO: 2413557 - RNA, 19 nt, Artificial Sequence
  Description of Artificial Sequence: Synthetic oligonucleotide
guaggaguuucaauuucaa

SEQ ID NO: 2413558 - RNA, 19 nt, Artificial Sequence
  Description of Artificial Sequence: Synthetic oligonucleotide
ccauucgggaagcuucucc

SEQ ID NO: 2413559 - RNA, 19 nt, Artificial Sequence
  Description of Artificial Sequence: Synthetic oligonucleotide
ucacccgaugccucaucaa

SEQ ID NO: 2413560 - RNA, 19 nt, Artificial Sequence
  Description of Artificial Sequence: Synthetic oligonucleotide
ccaaaccacauaguggaug

SEQ ID NO: 2413561 - RNA, 19 nt, Artificial Sequence
  Description of Artificial Sequence: Synthetic oligonucleotide
ugccuuuggguggcggcag

SEQ ID NO: 2413562 - RNA, 19 nt, Artificial Sequence
  Description of Artificial Sequence: Synthetic oligonucleotide
ucgggaagcuucuccuuuu

SEQ ID NO: 2413563 - RNA, 19 nt, Artificial Sequence
  Description of Artificial Sequence: Synthetic oligonucleotide
ggugagaugguggaggaua

SEQ ID NO: 2413564 - RNA, 19 nt, Artificial Sequence
  Description of Artificial Sequence: Synthetic oligonucleotide
ggguaggaguuucaauuuc

SEQ ID NO: 2413565 - RNA, 19 nt, Artificial Sequence
  Description of Artificial Sequence: Synthetic oligonucleotide
cucauagccauaagcugcu

SEQ ID NO: 2413566 - RNA, 19 nt, Artificial Sequence
  Description of Artificial Sequence: Synthetic oligonucleotide
ggcagugaccagcugguga

SEQ ID NO: 2413567 - RNA, 19 nt, Artificial Sequence
  Description of Artificial Sequence: Synthetic oligonucleotide
agcuaucuggguaggaguu

SEQ ID NO: 2413568 - RNA, 19 nt, Artificial Sequence
  Description of Artificial Sequence: Synthetic oligonucleotide
gcuccauucgggaagcuuc

SEQ ID NO: 2413569 - RNA, 19 nt, Artificial Sequence
  Description of Artificial Sequence: Synthetic oligonucleotide
cuucucacccgaugccuca

SEQ ID NO: 2413570 - RNA, 19 nt, Artificial Sequence
  Description of Artificial Sequence: Synthetic oligonucleotide
cucacccgaugccucauca

SEQ ID NO: 2413571 - RNA, 19 nt, Artificial Sequence
  Description of Artificial Sequence: Synthetic oligonucleotide
cuagugauccagccuccga

SEQ ID NO: 2413572 - RNA, 19 nt, Artificial Sequence
  Description of Artificial Sequence: Synthetic oligonucleotide
cacaguggaaucucacugu

SEQ ID NO: 2413573 - RNA, 19 nt, Artificial Sequence
  Description of Artificial Sequence: Synthetic oligonucleotide
cuccucacgacuuggaauu

SEQ ID NO: 2413574 - RNA, 19 nt, Artificial Sequence
  Description of Artificial Sequence: Synthetic oligonucleotide
acccgaugccucaucaacu

SEQ ID NO: 2413575 - RNA, 19 nt, Artificial Sequence
  Description of Artificial Sequence: Synthetic oligonucleotide
gacuuggaauuuguauaaa

SEQ ID NO: 2413576 - RNA, 19 nt, Artificial Sequence
  Description of Artificial Sequence: Synthetic oligonucleotide
caacuaaagcuaucugggu

SEQ ID NO: 2413577 - RNA, 19 nt, Artificial Sequence
  Description of Artificial Sequence: Synthetic oligonucleotide
gagucacaacaaccucuuc

SEQ ID NO: 2413578 - RNA, 19 nt, Artificial Sequence
  Description of Artificial Sequence: Synthetic oligonucleotide
cacauaguggauggcuuga

SEQ ID NO: 2413579 - RNA, 19 nt, Artificial Sequence
  Description of Artificial Sequence: Synthetic oligonucleotide
cucacgacuuggaauuugu

SEQ ID NO: 2413580 - RNA, 19 nt, Artificial Sequence
  Description of Artificial Sequence: Synthetic oligonucleotide
caggcauguuucuaaacau

SEQ ID NO: 2413581 - RNA, 19 nt, Artificial Sequence
  Description of Artificial Sequence: Synthetic oligonucleotide
aggcauguuucuaaacaua

SEQ ID NO: 2413582 - RNA, 19 nt, Artificial Sequence
  Description of Artificial Sequence: Synthetic oligonucleotide
gcuggugagagagucacaa

SEQ ID NO: 2413583 - RNA, 19 nt, Artificial Sequence
  Description of Artificial Sequence: Synthetic oligonucleotide
cacuguaggaggagugaaa

SEQ ID NO: 2413584 - RNA, 19 nt, Artificial Sequence
  Description of Artificial Sequence: Synthetic oligonucleotide
guguauaagacgguuccau

SEQ ID NO: 2413585 - RNA, 19 nt, Artificial Sequence
  Description of Artificial Sequence: Synthetic oligonucleotide
ggguguuucggucuguggu

SEQ ID NO: 2413586 - RNA, 19 nt, Artificial Sequence
  Description of Artificial Sequence: Synthetic oligonucleotide
guccucgcuaucacauuug

SEQ ID NO: 2413587 - RNA, 19 nt, Artificial Sequence
  Description of Artificial Sequence: Synthetic oligonucleotide
gugaagcauggcuuuauuu

SEQ ID NO: 2413588 - RNA, 19 nt, Artificial Sequence
  Description of Artificial Sequence: Synthetic oligonucleotide
guguuucggucugugguga

SEQ ID NO: 2413589 - RNA, 19 nt, Artificial Sequence
  Description of Artificial Sequence: Synthetic oligonucleotide
ggaauuuguauaaaaccuu

SEQ ID NO: 2413590 - RNA, 19 nt, Artificial Sequence
  Description of Artificial Sequence: Synthetic oligonucleotide
gcggcaggcauggacuugg

SEQ ID NO: 2413591 - RNA, 19 nt, Artificial Sequence
  Description of Artificial Sequence: Synthetic oligonucleotide
cuaccaaaauuccccuucu

SEQ ID NO: 2413592 - RNA, 19 nt, Artificial Sequence
  Description of Artificial Sequence: Synthetic oligonucleotide
gguguggacuccuagugau

SEQ ID NO: 2413593 - RNA, 19 nt, Artificial Sequence
  Description of Artificial Sequence: Synthetic oligonucleotide
caguucagccacacgacgu

SEQ ID NO: 2413594 - RNA, 19 nt, Artificial Sequence
  Description of Artificial Sequence: Synthetic oligonucleotide
agccuccgaaccagcuacc

SEQ ID NO: 2413595 - RNA, 19 nt, Artificial Sequence
  Description of Artificial Sequence: Synthetic oligonucleotide
guuccauuacugcccugaa

SEQ ID NO: 2413596 - RNA, 19 nt, Artificial Sequence
  Description of Artificial Sequence: Synthetic oligonucleotide
aucccacaggguaauuuau

SEQ ID NO: 2413597 - RNA, 19 nt, Artificial Sequence
  Description of Artificial Sequence: Synthetic oligonucleotide
cucccguccucgcuaucac

SEQ ID NO: 2413598 - RNA, 19 nt, Artificial Sequence
  Description of Artificial Sequence: Synthetic oligonucleotide
ggcugguuaacaacagcuc

SEQ ID NO: 2413599 - RNA, 19 nt, Artificial Sequence
  Description of Artificial Sequence: Synthetic oligonucleotide
aagcugcuuuacaguucag

SEQ ID NO: 2413600 - RNA, 19 nt, Artificial Sequence
  Description of Artificial Sequence: Synthetic oligonucleotide
guauuucgggcugguuaac

SEQ ID NO: 2413601 - RNA, 19 nt, Artificial Sequence
  Description of Artificial Sequence: Synthetic oligonucleotide
cacagaacguggugucuaa

SEQ ID NO: 2413602 - RNA, 19 nt, Artificial Sequence
  Description of Artificial Sequence: Synthetic oligonucleotide
agcucgguaugaacucucu

SEQ ID NO: 2413603 - RNA, 19 nt, Artificial Sequence
  Description of Artificial Sequence: Synthetic oligonucleotide
gguggaggauaucaggcau

SEQ ID NO: 2413604 - RNA, 19 nt, Artificial Sequence
  Description of Artificial Sequence: Synthetic oligonucleotide
acacgacgugguguggacu

SEQ ID NO: 2413605 - RNA, 19 nt, Artificial Sequence
  Description of Artificial Sequence: Synthetic oligonucleotide
guggacuccuagugaucca

SEQ ID NO: 2413606 - RNA, 19 nt, Artificial Sequence
  Description of Artificial Sequence: Synthetic oligonucleotide
cacuccucacgacuuggaa

SEQ ID NO: 2413607 - RNA, 19 nt, Artificial Sequence
  Description of Artificial Sequence: Synthetic oligonucleotide
acagaacguggugucuaaa

SEQ ID NO: 2413608 - RNA, 19 nt, Artificial Sequence
  Description of Artificial Sequence: Synthetic oligonucleotide
cguggugucuaaauauaca

SEQ ID NO: 2413609 - RNA, 19 nt, Artificial Sequence
  Description of Artificial Sequence: Synthetic oligonucleotide
caacaaccucuuccuucuc

SEQ ID NO: 2413610 - RNA, 19 nt, Artificial Sequence
  Description of Artificial Sequence: Synthetic oligonucleotide
agcgcacuccucacgacuu

SEQ ID NO: 2413611 - RNA, 19 nt, Artificial Sequence
  Description of Artificial Sequence: Synthetic oligonucleotide
uggcggcaggcauggacuu

SEQ ID NO: 2413612 - RNA, 19 nt, Artificial Sequence
  Description of Artificial Sequence: Synthetic oligonucleotide
cagcuaccaaaauuccccu

SEQ ID NO: 2413613 - RNA, 19 nt, Artificial Sequence
  Description of Artificial Sequence: Synthetic oligonucleotide
ccuagugauccagccuccg

SEQ ID NO: 2413614 - RNA, 19 nt, Artificial Sequence
  Description of Artificial Sequence: Synthetic oligonucleotide
ccuucucacccgaugccuc

SEQ ID NO: 2413615 - RNA, 19 nt, Artificial Sequence
  Description of Artificial Sequence: Synthetic oligonucleotide
uucucacccgaugccucau

SEQ ID NO: 2413616 - RNA, 19 nt, Artificial Sequence
  Description of Artificial Sequence: Synthetic oligonucleotide
uggugagaugguggaggau

SEQ ID NO: 2413617 - RNA, 19 nt, Artificial Sequence
  Description of Artificial Sequence: Synthetic oligonucleotide
caggguaauuuauuccauu

SEQ ID NO: 2413618 - RNA, 19 nt, Artificial Sequence
  Description of Artificial Sequence: Synthetic oligonucleotide
cuccauucgggaagcuucu

SEQ ID NO: 2413619 - RNA, 19 nt, Artificial Sequence
  Description of Artificial Sequence: Synthetic oligonucleotide
gcucgguaugaacucucuc

SEQ ID NO: 2413620 - RNA, 19 nt, Artificial Sequence
  Description of Artificial Sequence: Synthetic oligonucleotide
gugucuaaauauacacuuu

SEQ ID NO: 2413621 - RNA, 19 nt, Artificial Sequence
  Description of Artificial Sequence: Synthetic oligonucleotide
guguggacuccuagugauc

SEQ ID NO: 2413622 - RNA, 19 nt, Artificial Sequence
  Description of Artificial Sequence: Synthetic oligonucleotide
guggcggcaggcauggacu

SEQ ID NO: 2413623 - RNA, 19 nt, Artificial Sequence
  Description of Artificial Sequence: Synthetic oligonucleotide
ccauaagcugcuuuacagu

SEQ ID NO: 2413624 - RNA, 19 nt, Artificial Sequence
  Description of Artificial Sequence: Synthetic oligonucleotide
acaugaaccuggacuccua

SEQ ID NO: 2413625 - RNA, 19 nt, Artificial Sequence
  Description of Artificial Sequence: Synthetic oligonucleotide
cugccuuuggguggcggca

SEQ ID NO: 2413626 - RNA, 19 nt, Artificial Sequence
  Description of Artificial Sequence: Synthetic oligonucleotide
uccucacgacuuggaauuu

SEQ ID NO: 2413627 - RNA, 19 nt, Artificial Sequence
  Description of Artificial Sequence: Synthetic oligonucleotide
ccuagcuccucacucaggu

SEQ ID NO: 2413628 - RNA, 19 nt, Artificial Sequence
  Description of Artificial Sequence: Synthetic oligonucleotide
gccuuuggguggcggcagg

SEQ ID NO: 2413629 - RNA, 19 nt, Artificial Sequence
  Description of Artificial Sequence: Synthetic oligonucleotide
accuggacuccuagcuccu

SEQ ID NO: 2413630 - RNA, 19 nt, Artificial Sequence
  Description of Artificial Sequence: Synthetic oligonucleotide
caagcucgguaugaacucu

SEQ ID NO: 2413631 - RNA, 19 nt, Artificial Sequence
  Description of Artificial Sequence: Synthetic oligonucleotide
gugagaugguggaggauau

SEQ ID NO: 2413632 - RNA, 19 nt, Artificial Sequence
  Description of Artificial Sequence: Synthetic oligonucleotide
caauugcuuuaacucguuu

SEQ ID NO: 2413633 - RNA, 19 nt, Artificial Sequence
  Description of Artificial Sequence: Synthetic oligonucleotide
ccucacgacuuggaauuug

SEQ ID NO: 2413634 - RNA, 19 nt, Artificial Sequence
  Description of Artificial Sequence: Synthetic oligonucleotide
cagcgcacuccucacgacu

SEQ ID NO: 2413635 - RNA, 19 nt, Artificial Sequence
  Description of Artificial Sequence: Synthetic oligonucleotide
agcuggugagagagucaca

SEQ ID NO: 2413636 - RNA, 19 nt, Artificial Sequence
  Description of Artificial Sequence: Synthetic oligonucleotide
gugugaagcauggcuuuau

SEQ ID NO: 2413637 - RNA, 19 nt, Artificial Sequence
  Description of Artificial Sequence: Synthetic oligonucleotide
cccgaugccucaucaacua

SEQ ID NO: 2413638 - RNA, 19 nt, Artificial Sequence
  Description of Artificial Sequence: Synthetic oligonucleotide
cgcacuccucacgacuugg

SEQ ID NO: 2413639 - RNA, 19 nt, Artificial Sequence
  Description of Artificial Sequence: Synthetic oligonucleotide
gcgcacuccucacgacuug

SEQ ID NO: 2413640 - RNA, 19 nt, Artificial Sequence
  Description of Artificial Sequence: Synthetic oligonucleotide
ccagcuggugagagaguca

SEQ ID NO: 2413641 - RNA, 19 nt, Artificial Sequence
  Description of Artificial Sequence: Synthetic oligonucleotide
aggcauggacuuggguguu

SEQ ID NO: 2413642 - RNA, 19 nt, Artificial Sequence
  Description of Artificial Sequence: Synthetic oligonucleotide
gacgugguguggacuccua

SEQ ID NO: 2413643 - RNA, 19 nt, Artificial Sequence
  Description of Artificial Sequence: Synthetic oligonucleotide
gccacacgacguggugugg

SEQ ID NO: 2413644 - RNA, 19 nt, Artificial Sequence
  Description of Artificial Sequence: Synthetic oligonucleotide
cagugaccagcuggugaga

SEQ ID NO: 2413645 - RNA, 19 nt, Artificial Sequence
  Description of Artificial Sequence: Synthetic oligonucleotide
ggcggcaggcauggacuug

SEQ ID NO: 2413646 - RNA, 19 nt, Artificial Sequence
  Description of Artificial Sequence: Synthetic oligonucleotide
ggacuccuagcuccucacu

SEQ ID NO: 2413647 - RNA, 19 nt, Artificial Sequence
  Description of Artificial Sequence: Synthetic oligonucleotide
gccuccgaaccagcuacca

SEQ ID NO: 2413648 - RNA, 19 nt, Artificial Sequence
  Description of Artificial Sequence: Synthetic oligonucleotide
gcacuccucacgacuugga

SEQ ID NO: 2413649 - RNA, 19 nt, Artificial Sequence
  Description of Artificial Sequence: Synthetic oligonucleotide
cccguccucgcuaucacau

SEQ ID NO: 2413650 - RNA, 19 nt, Artificial Sequence
  Description of Artificial Sequence: Synthetic oligonucleotide
ccacacgacguggugugga

SEQ ID NO: 2413651 - RNA, 19 nt, Artificial Sequence
  Description of Artificial Sequence: Synthetic oligonucleotide
ccuccgaaccagcuaccaa

SEQ ID NO: 2413652 - RNA, 19 nt, Artificial Sequence
  Description of Artificial Sequence: Synthetic oligonucleotide
cuuggguguuucggucugu

SEQ ID NO: 2413653 - RNA, 19 nt, Artificial Sequence
  Description of Artificial Sequence: Synthetic oligonucleotide
ccgaugccucaucaacuaa

SEQ ID NO: 2413654 - RNA, 19 nt, Artificial Sequence
  Description of Artificial Sequence: Synthetic oligonucleotide
gcuaucuggguaggaguuu

SEQ ID NO: 2413655 - RNA, 19 nt, Artificial Sequence
  Description of Artificial Sequence: Synthetic oligonucleotide
cguccucgcuaucacauuu

SEQ ID NO: 2413656 - RNA, 19 nt, Artificial Sequence
  Description of Artificial Sequence: Synthetic oligonucleotide
ccucgcuaucacauuuguu

SEQ ID NO: 2413657 - RNA, 19 nt, Artificial Sequence
  Description of Artificial Sequence: Synthetic oligonucleotide
cgguuccauuacugcccug

SEQ ID NO: 2413658 - RNA, 19 nt, Artificial Sequence
  Description of Artificial Sequence: Synthetic oligonucleotide
ggauggcuugaugcugauu

SEQ ID NO: 2413659 - RNA, 19 nt, Artificial Sequence
  Description of Artificial Sequence: Synthetic oligonucleotide
ccgaaccagcuaccaaaau

SEQ ID NO: 2413660 - RNA, 19 nt, Artificial Sequence
  Description of Artificial Sequence: Synthetic oligonucleotide
ggaggauaucaggcauguu

SEQ ID NO: 2413661 - RNA, 19 nt, Artificial Sequence
  Description of Artificial Sequence: Synthetic oligonucleotide
ggcauggacuuggguguuu

SEQ ID NO: 2413662 - RNA, 19 nt, Artificial Sequence
  Description of Artificial Sequence: Synthetic oligonucleotide
cagcuccauucgggaagcu

SEQ ID NO: 2413663 - RNA, 19 nt, Artificial Sequence
  Description of Artificial Sequence: Synthetic oligonucleotide
ccguccucgcuaucacauu

SEQ ID NO: 2413664 - RNA, 19 nt, Artificial Sequence
  Description of Artificial Sequence: Synthetic oligonucleotide
cgacgugguguggacuccu

SEQ ID NO: 2413665 - RNA, 19 nt, Artificial Sequence
  Description of Artificial Sequence: Synthetic oligonucleotide
aauuucuuuacauaguuga

SEQ ID NO: 2413666 - RNA, 19 nt, Artificial Sequence
  Description of Artificial Sequence: Synthetic oligonucleotide
uuacauucuaauaaaacag

SEQ ID NO: 2413667 - RNA, 19 nt, Artificial Sequence
  Description of Artificial Sequence: Synthetic oligonucleotide
auuugaagccaauaaagcc

SEQ ID NO: 2413668 - RNA, 19 nt, Artificial Sequence
  Description of Artificial Sequence: Synthetic oligonucleotide
uuuacaaaggaguauucgg

SEQ ID NO: 2413669 - RNA, 19 nt, Artificial Sequence
  Description of Artificial Sequence: Synthetic oligonucleotide
ugaauuuauaccaagguau

SEQ ID NO: 2413670 - RNA, 19 nt, Artificial Sequence
  Description of Artificial Sequence: Synthetic oligonucleotide
auuacauucuaauaaaaca

SEQ ID NO: 2413671 - RNA, 19 nt, Artificial Sequence
  Description of Artificial Sequence: Synthetic oligonucleotide
uugagcacgaguuuggugg

SEQ ID NO: 2413672 - RNA, 19 nt, Artificial Sequence
  Description of Artificial Sequence: Synthetic oligonucleotide
uucuauaucaccuugcuuc

SEQ ID NO: 2413673 - RNA, 19 nt, Artificial Sequence
  Description of Artificial Sequence: Synthetic oligonucleotide
gauauaggcuccuuuaucc

SEQ ID NO: 2413674 - RNA, 19 nt, Artificial Sequence
  Description of Artificial Sequence: Synthetic oligonucleotide
cuauuugaagccaauaaag

SEQ ID NO: 2413675 - RNA, 19 nt, Artificial Sequence
  Description of Artificial Sequence: Synthetic oligonucleotide
aauaaagccauuuucccau

SEQ ID NO: 2413676 - RNA, 19 nt, Artificial Sequence
  Description of Artificial Sequence: Synthetic oligonucleotide
agugcauggauauaggcuc

SEQ ID NO: 2413677 - RNA, 19 nt, Artificial Sequence
  Description of Artificial Sequence: Synthetic oligonucleotide
ucccacaauaucaaguugg

SEQ ID NO: 2413678 - RNA, 19 nt, Artificial Sequence
  Description of Artificial Sequence: Synthetic oligonucleotide
ucagcuuucaauuuggcuc

SEQ ID NO: 2413679 - RNA, 19 nt, Artificial Sequence
  Description of Artificial Sequence: Synthetic oligonucleotide
gaaucggacaguuucacag

SEQ ID NO: 2413680 - RNA, 19 nt, Artificial Sequence
  Description of Artificial Sequence: Synthetic oligonucleotide
aguccaucugaauuuauac

SEQ ID NO: 2413681 - RNA, 19 nt, Artificial Sequence
  Description of Artificial Sequence: Synthetic oligonucleotide
acaacacaaaacuagucuc

SEQ ID NO: 2413682 - RNA, 19 nt, Artificial Sequence
  Description of Artificial Sequence: Synthetic oligonucleotide
uccuuuauccauuucaaug

SEQ ID NO: 2413683 - RNA, 19 nt, Artificial Sequence
  Description of Artificial Sequence: Synthetic oligonucleotide
aaugguucccgaaaucucc

SEQ ID NO: 2413684 - RNA, 19 nt, Artificial Sequence
  Description of Artificial Sequence: Synthetic oligonucleotide
aagaauuuuacuaucuucu

SEQ ID NO: 2413685 - RNA, 19 nt, Artificial Sequence
  Description of Artificial Sequence: Synthetic oligonucleotide
uuugguggacuuuacaaag

SEQ ID NO: 2413686 - RNA, 19 nt, Artificial Sequence
  Description of Artificial Sequence: Synthetic oligonucleotide
uacauucuaauaaaacagc

SEQ ID NO: 2413687 - RNA, 19 nt, Artificial Sequence
  Description of Artificial Sequence: Synthetic oligonucleotide
uuacaaaggaguauucggc

SEQ ID NO: 2413688 - RNA, 19 nt, Artificial Sequence
  Description of Artificial Sequence: Synthetic oligonucleotide
aaucggacaguuucacagc

SEQ ID NO: 2413689 - RNA, 19 nt, Artificial Sequence
  Description of Artificial Sequence: Synthetic oligonucleotide
ucugaauuuauaccaaggu

SEQ ID NO: 2413690 - RNA, 19 nt, Artificial Sequence
  Description of Artificial Sequence: Synthetic oligonucleotide
gagagagagagagagaggg

SEQ ID NO: 2413691 - RNA, 19 nt, Artificial Sequence
  Description of Artificial Sequence: Synthetic oligonucleotide
cauuuucccaucuugaaac

SEQ ID NO: 2413692 - RNA, 19 nt, Artificial Sequence
  Description of Artificial Sequence: Synthetic oligonucleotide
gaaaucuccccaaaguugg

SEQ ID NO: 2413693 - RNA, 19 nt, Artificial Sequence
  Description of Artificial Sequence: Synthetic oligonucleotide
uuaucauuucuucuucucc

SEQ ID NO: 2413694 - RNA, 19 nt, Artificial Sequence
  Description of Artificial Sequence: Synthetic oligonucleotide
gaguuuguggucuuggaag

SEQ ID NO: 2413695 - RNA, 19 nt, Artificial Sequence
  Description of Artificial Sequence: Synthetic oligonucleotide
acuagucuccaucacuugc

SEQ ID NO: 2413696 - RNA, 19 nt, Artificial Sequence
  Description of Artificial Sequence: Synthetic oligonucleotide
uacauaguugauuucacac

SEQ ID NO: 2413697 - RNA, 19 nt, Artificial Sequence
  Description of Artificial Sequence: Synthetic oligonucleotide
aguuuguggucuuggaagc

SEQ ID NO: 2413698 - RNA, 19 nt, Artificial Sequence
  Description of Artificial Sequence: Synthetic oligonucleotide
ucuggaaucggacaguuuc

SEQ ID NO: 2413699 - RNA, 19 nt, Artificial Sequence
  Description of Artificial Sequence: Synthetic oligonucleotide
uauaccaagguauuuucca

SEQ ID NO: 2413700 - RNA, 19 nt, Artificial Sequence
  Description of Artificial Sequence: Synthetic oligonucleotide
gagagagagagagagagag

SEQ ID NO: 2413701 - RNA, 19 nt, Artificial Sequence
  Description of Artificial Sequence: Synthetic oligonucleotide
aaggccauuguccagugca

SEQ ID NO: 2413702 - RNA, 19 nt, Artificial Sequence
  Description of Artificial Sequence: Synthetic oligonucleotide
aaaauccaucuuuccgagc

SEQ ID NO: 2413703 - RNA, 19 nt, Artificial Sequence
  Description of Artificial Sequence: Synthetic oligonucleotide
aaguuggaaacaguccacc

SEQ ID NO: 2413704 - RNA, 19 nt, Artificial Sequence
  Description of Artificial Sequence: Synthetic oligonucleotide
ucuaaucuuuaucauuucu

SEQ ID NO: 2413705 - RNA, 19 nt, Artificial Sequence
  Description of Artificial Sequence: Synthetic oligonucleotide
aucugaacgcccaacaacc

SEQ ID NO: 2413706 - RNA, 19 nt, Artificial Sequence
  Description of Artificial Sequence: Synthetic oligonucleotide
uuauccauuucaauggcaa

SEQ ID NO: 2413707 - RNA, 19 nt, Artificial Sequence
  Description of Artificial Sequence: Synthetic oligonucleotide
uucccaucuugaaacaccg

SEQ ID NO: 2413708 - RNA, 19 nt, Artificial Sequence
  Description of Artificial Sequence: Synthetic oligonucleotide
aauaucaaguuggguuucc

SEQ ID NO: 2413709 - RNA, 19 nt, Artificial Sequence
  Description of Artificial Sequence: Synthetic oligonucleotide
cauaguugauuucacacug

SEQ ID NO: 2413710 - RNA, 19 nt, Artificial Sequence
  Description of Artificial Sequence: Synthetic oligonucleotide
agccaauaaagccauuuuc

SEQ ID NO: 2413711 - RNA, 19 nt, Artificial Sequence
  Description of Artificial Sequence: Synthetic oligonucleotide
gauuucagggcaauucugg

SEQ ID NO: 2413712 - RNA, 19 nt, Artificial Sequence
  Description of Artificial Sequence: Synthetic oligonucleotide
ugcaguaucggucagcuuu

SEQ ID NO: 2413713 - RNA, 19 nt, Artificial Sequence
  Description of Artificial Sequence: Synthetic oligonucleotide
acaggaucuaaucuuuauc

SEQ ID NO: 2413714 - RNA, 19 nt, Artificial Sequence
  Description of Artificial Sequence: Synthetic oligonucleotide
uucuuuacauaguugauuu

SEQ ID NO: 2413715 - RNA, 19 nt, Artificial Sequence
  Description of Artificial Sequence: Synthetic oligonucleotide
uuauucuuugcuucuauau

SEQ ID NO: 2413716 - RNA, 19 nt, Artificial Sequence
  Description of Artificial Sequence: Synthetic oligonucleotide
uuggaaacaguccaccaga

SEQ ID NO: 2413717 - RNA, 19 nt, Artificial Sequence
  Description of Artificial Sequence: Synthetic oligonucleotide
cuugguuucucuuucagca

SEQ ID NO: 2413718 - RNA, 19 nt, Artificial Sequence
  Description of Artificial Sequence: Synthetic oligonucleotide
aacuucucuauguggagcu

SEQ ID NO: 2413719 - RNA, 19 nt, Artificial Sequence
  Description of Artificial Sequence: Synthetic oligonucleotide
uuucccaucuugaaacacc

SEQ ID NO: 2413720 - RNA, 19 nt, Artificial Sequence
  Description of Artificial Sequence: Synthetic oligonucleotide
uuuacauaguugauuucac

SEQ ID NO: 2413721 - RNA, 19 nt, Artificial Sequence
  Description of Artificial Sequence: Synthetic oligonucleotide
auaaaacagcuauuugaag

SEQ ID NO: 2413722 - RNA, 19 nt, Artificial Sequence
  Description of Artificial Sequence: Synthetic oligonucleotide
acaaaacuagucuccauca

SEQ ID NO: 2413723 - RNA, 19 nt, Artificial Sequence
  Description of Artificial Sequence: Synthetic oligonucleotide
agguauuuuccauagccug

SEQ ID NO: 2413724 - RNA, 19 nt, Artificial Sequence
  Description of Artificial Sequence: Synthetic oligonucleotide
aaaguuggaaacaguccac

SEQ ID NO: 2413725 - RNA, 19 nt, Artificial Sequence
  Description of Artificial Sequence: Synthetic oligonucleotide
ccuuuauccauuucaaugg

SEQ ID NO: 2413726 - RNA, 19 nt, Artificial Sequence
  Description of Artificial Sequence: Synthetic oligonucleotide
uucacagcaguaaacugcu

SEQ ID NO: 2413727 - RNA, 19 nt, Artificial Sequence
  Description of Artificial Sequence: Synthetic oligonucleotide
ugggaugucaucuuucuuc

SEQ ID NO: 2413728 - RNA, 19 nt, Artificial Sequence
  Description of Artificial Sequence: Synthetic oligonucleotide
aucaaguuggguuuccuca

SEQ ID NO: 2413729 - RNA, 19 nt, Artificial Sequence
  Description of Artificial Sequence: Synthetic oligonucleotide
uacucuuggccuucgaacc

SEQ ID NO: 2413730 - RNA, 19 nt, Artificial Sequence
  Description of Artificial Sequence: Synthetic oligonucleotide
caacacaaaacuagucucc

SEQ ID NO: 2413731 - RNA, 19 nt, Artificial Sequence
  Description of Artificial Sequence: Synthetic oligonucleotide
uuugucuucuucugggaug

SEQ ID NO: 2413732 - RNA, 19 nt, Artificial Sequence
  Description of Artificial Sequence: Synthetic oligonucleotide
aagccauuuucccaucuug

SEQ ID NO: 2413733 - RNA, 19 nt, Artificial Sequence
  Description of Artificial Sequence: Synthetic oligonucleotide
accagauucccacaauauc

SEQ ID NO: 2413734 - RNA, 19 nt, Artificial Sequence
  Description of Artificial Sequence: Synthetic oligonucleotide
uuuuacuaucuucuuugcu

SEQ ID NO: 2413735 - RNA, 19 nt, Artificial Sequence
  Description of Artificial Sequence: Synthetic oligonucleotide
gagagagagagagagggag

SEQ ID NO: 2413736 - RNA, 19 nt, Artificial Sequence
  Description of Artificial Sequence: Synthetic oligonucleotide
caauucuggaaucggacag

SEQ ID NO: 2413737 - RNA, 19 nt, Artificial Sequence
  Description of Artificial Sequence: Synthetic oligonucleotide
uuacucuuggccuucgaac

SEQ ID NO: 2413738 - RNA, 19 nt, Artificial Sequence
  Description of Artificial Sequence: Synthetic oligonucleotide
acaauaucaaguuggguuu

SEQ ID NO: 2413739 - RNA, 19 nt, Artificial Sequence
  Description of Artificial Sequence: Synthetic oligonucleotide
uuuaucauuucuucuucuc

SEQ ID NO: 2413740 - RNA, 19 nt, Artificial Sequence
  Description of Artificial Sequence: Synthetic oligonucleotide
ucauuacauucuaauaaaa

SEQ ID NO: 2413741 - RNA, 19 nt, Artificial Sequence
  Description of Artificial Sequence: Synthetic oligonucleotide
uccauagccugauuucagg

SEQ ID NO: 2413742 - RNA, 19 nt, Artificial Sequence
  Description of Artificial Sequence: Synthetic oligonucleotide
aucacuugcaguaucgguc

SEQ ID NO: 2413743 - RNA, 19 nt, Artificial Sequence
  Description of Artificial Sequence: Synthetic oligonucleotide
ucuauaucaccuugcuuca

SEQ ID NO: 2413744 - RNA, 19 nt, Artificial Sequence
  Description of Artificial Sequence: Synthetic oligonucleotide
caaaguuggaaacagucca

SEQ ID NO: 2413745 - RNA, 19 nt, Artificial Sequence
  Description of Artificial Sequence: Synthetic oligonucleotide
caucaacuucucuaugugg

SEQ ID NO: 2413746 - RNA, 19 nt, Artificial Sequence
  Description of Artificial Sequence: Synthetic oligonucleotide
caggaucuaaucuuuauca

SEQ ID NO: 2413747 - RNA, 19 nt, Artificial Sequence
  Description of Artificial Sequence: Synthetic oligonucleotide
ugauuucagggcaauucug

SEQ ID NO: 2413748 - RNA, 19 nt, Artificial Sequence
  Description of Artificial Sequence: Synthetic oligonucleotide
guucucuuggcccaauugc

SEQ ID NO: 2413749 - RNA, 19 nt, Artificial Sequence
  Description of Artificial Sequence: Synthetic oligonucleotide
guuggaaacaguccaccag

SEQ ID NO: 2413750 - RNA, 19 nt, Artificial Sequence
  Description of Artificial Sequence: Synthetic oligonucleotide
uguucucuuggcccaauug

SEQ ID NO: 2413751 - RNA, 19 nt, Artificial Sequence
  Description of Artificial Sequence: Synthetic oligonucleotide
uuacauaguugauuucaca

SEQ ID NO: 2413752 - RNA, 19 nt, Artificial Sequence
  Description of Artificial Sequence: Synthetic oligonucleotide
agcuauuugaagccaauaa

SEQ ID NO: 2413753 - RNA, 19 nt, Artificial Sequence
  Description of Artificial Sequence: Synthetic oligonucleotide
agcaguaaacugcucuggg

SEQ ID NO: 2413754 - RNA, 19 nt, Artificial Sequence
  Description of Artificial Sequence: Synthetic oligonucleotide
gagagagagagagggaggg

SEQ ID NO: 2413755 - RNA, 19 nt, Artificial Sequence
  Description of Artificial Sequence: Synthetic oligonucleotide
uaguugauuucacacugcu

SEQ ID NO: 2413756 - RNA, 19 nt, Artificial Sequence
  Description of Artificial Sequence: Synthetic oligonucleotide
ucaauggcaaugguucccg

SEQ ID NO: 2413757 - RNA, 19 nt, Artificial Sequence
  Description of Artificial Sequence: Synthetic oligonucleotide
aucuuuaucauuucuucuu

SEQ ID NO: 2413758 - RNA, 19 nt, Artificial Sequence
  Description of Artificial Sequence: Synthetic oligonucleotide
ugcuucauuacauucuaau

SEQ ID NO: 2413759 - RNA, 19 nt, Artificial Sequence
  Description of Artificial Sequence: Synthetic oligonucleotide
cuuuauccauuucaauggc

SEQ ID NO: 2413760 - RNA, 19 nt, Artificial Sequence
  Description of Artificial Sequence: Synthetic oligonucleotide
ucaacuucucuauguggag

SEQ ID NO: 2413761 - RNA, 19 nt, Artificial Sequence
  Description of Artificial Sequence: Synthetic oligonucleotide
uggacuuuacaaaggagua

SEQ ID NO: 2413762 - RNA, 19 nt, Artificial Sequence
  Description of Artificial Sequence: Synthetic oligonucleotide
aguuucacagcaguaaacu

SEQ ID NO: 2413763 - RNA, 19 nt, Artificial Sequence
  Description of Artificial Sequence: Synthetic oligonucleotide
aaaggccauuguccagugc

SEQ ID NO: 2413764 - RNA, 19 nt, Artificial Sequence
  Description of Artificial Sequence: Synthetic oligonucleotide
cuguuuuauucuuugcuuc

SEQ ID NO: 2413765 - RNA, 19 nt, Artificial Sequence
  Description of Artificial Sequence: Synthetic oligonucleotide
uuucaauuuggcucuccug

SEQ ID NO: 2413766 - RNA, 19 nt, Artificial Sequence
  Description of Artificial Sequence: Synthetic oligonucleotide
ucacuugcaguaucgguca

SEQ ID NO: 2413767 - RNA, 19 nt, Artificial Sequence
  Description of Artificial Sequence: Synthetic oligonucleotide
aucugaauuuauaccaagg

SEQ ID NO: 2413768 - RNA, 19 nt, Artificial Sequence
  Description of Artificial Sequence: Synthetic oligonucleotide
aaguuggguuuccucaucu

SEQ ID NO: 2413769 - RNA, 19 nt, Artificial Sequence
  Description of Artificial Sequence: Synthetic oligonucleotide
ugaacgcccaacaaccagu

SEQ ID NO: 2413770 - RNA, 19 nt, Artificial Sequence
  Description of Artificial Sequence: Synthetic oligonucleotide
acguuuucucuucuuaucu

SEQ ID NO: 2413771 - RNA, 19 nt, Artificial Sequence
  Description of Artificial Sequence: Synthetic oligonucleotide
cacaaaacuagucuccauc

SEQ ID NO: 2413772 - RNA, 19 nt, Artificial Sequence
  Description of Artificial Sequence: Synthetic oligonucleotide
cauagccugauuucagggc

SEQ ID NO: 2413773 - RNA, 19 nt, Artificial Sequence
  Description of Artificial Sequence: Synthetic oligonucleotide
uuacuaucuucuuugcuua

SEQ ID NO: 2413774 - RNA, 19 nt, Artificial Sequence
  Description of Artificial Sequence: Synthetic oligonucleotide
ugaguuuguggucuuggaa

SEQ ID NO: 2413775 - RNA, 19 nt, Artificial Sequence
  Description of Artificial Sequence: Synthetic oligonucleotide
ugcaucugaacgcccaaca

SEQ ID NO: 2413776 - RNA, 19 nt, Artificial Sequence
  Description of Artificial Sequence: Synthetic oligonucleotide
aucaccuugcuucauuaca

SEQ ID NO: 2413777 - RNA, 19 nt, Artificial Sequence
  Description of Artificial Sequence: Synthetic oligonucleotide
ucggucagcuuucaauuug

SEQ ID NO: 2413778 - RNA, 19 nt, Artificial Sequence
  Description of Artificial Sequence: Synthetic oligonucleotide
aucuaaucuuuaucauuuc

SEQ ID NO: 2413779 - RNA, 19 nt, Artificial Sequence
  Description of Artificial Sequence: Synthetic oligonucleotide
auucccacaauaucaaguu

SEQ ID NO: 2413780 - RNA, 19 nt, Artificial Sequence
  Description of Artificial Sequence: Synthetic oligonucleotide
cuucgaacccuugagcacg

SEQ ID NO: 2413781 - RNA, 19 nt, Artificial Sequence
  Description of Artificial Sequence: Synthetic oligonucleotide
guugauuucacacugcuuu

SEQ ID NO: 2413782 - RNA, 19 nt, Artificial Sequence
  Description of Artificial Sequence: Synthetic oligonucleotide
uuccauagccugauuucag

SEQ ID NO: 2413783 - RNA, 19 nt, Artificial Sequence
  Description of Artificial Sequence: Synthetic oligonucleotide
aacgcccaacaaccagucc

SEQ ID NO: 2413784 - RNA, 19 nt, Artificial Sequence
  Description of Artificial Sequence: Synthetic oligonucleotide
uuuccauagccugauuuca

SEQ ID NO: 2413785 - RNA, 19 nt, Artificial Sequence
  Description of Artificial Sequence: Synthetic oligonucleotide
caucuugaaacaccgguuc

SEQ ID NO: 2413786 - RNA, 19 nt, Artificial Sequence
  Description of Artificial Sequence: Synthetic oligonucleotide
auuuauaccaagguauuuu

SEQ ID NO: 2413787 - RNA, 19 nt, Artificial Sequence
  Description of Artificial Sequence: Synthetic oligonucleotide
auaguugauuucacacugc

SEQ ID NO: 2413788 - RNA, 19 nt, Artificial Sequence
  Description of Artificial Sequence: Synthetic oligonucleotide
uaucggucagcuuucaauu

SEQ ID NO: 2413789 - RNA, 19 nt, Artificial Sequence
  Description of Artificial Sequence: Synthetic oligonucleotide
gcccaauugcaucugaacg

SEQ ID NO: 2413790 - RNA, 19 nt, Artificial Sequence
  Description of Artificial Sequence: Synthetic oligonucleotide
uugcuucuauaucaccuug

SEQ ID NO: 2413791 - RNA, 19 nt, Artificial Sequence
  Description of Artificial Sequence: Synthetic oligonucleotide
ucacauuuucuuuugucuu

SEQ ID NO: 2413792 - RNA, 19 nt, Artificial Sequence
  Description of Artificial Sequence: Synthetic oligonucleotide
aagguauuuuccauagccu

SEQ ID NO: 2413793 - RNA, 19 nt, Artificial Sequence
  Description of Artificial Sequence: Synthetic oligonucleotide
ucugggaugucaucuuucu

SEQ ID NO: 2413794 - RNA, 19 nt, Artificial Sequence
  Description of Artificial Sequence: Synthetic oligonucleotide
auccauuucaauggcaaug

SEQ ID NO: 2413795 - RNA, 19 nt, Artificial Sequence
  Description of Artificial Sequence: Synthetic oligonucleotide
aauggcaaugguucccgaa

SEQ ID NO: 2413796 - RNA, 19 nt, Artificial Sequence
  Description of Artificial Sequence: Synthetic oligonucleotide
aacuagucuccaucacuug

SEQ ID NO: 2413797 - RNA, 19 nt, Artificial Sequence
  Description of Artificial Sequence: Synthetic oligonucleotide
caucugaacgcccaacaac

SEQ ID NO: 2413798 - RNA, 19 nt, Artificial Sequence
  Description of Artificial Sequence: Synthetic oligonucleotide
aaacuagucuccaucacuu

SEQ ID NO: 2413799 - RNA, 19 nt, Artificial Sequence
  Description of Artificial Sequence: Synthetic oligonucleotide
ucuuggcccaauugcaucu

SEQ ID NO: 2413800 - RNA, 19 nt, Artificial Sequence
  Description of Artificial Sequence: Synthetic oligonucleotide
uucacguuuucucuucuua

SEQ ID NO: 2413801 - RNA, 19 nt, Artificial Sequence
  Description of Artificial Sequence: Synthetic oligonucleotide
acgcccaacaaccagucca

SEQ ID NO: 2413802 - RNA, 19 nt, Artificial Sequence
  Description of Artificial Sequence: Synthetic oligonucleotide
aauugcaucugaacgccca

SEQ ID NO: 2413803 - RNA, 19 nt, Artificial Sequence
  Description of Artificial Sequence: Synthetic oligonucleotide
gauuucacacugcuuucac

SEQ ID NO: 2413804 - RNA, 19 nt, Artificial Sequence
  Description of Artificial Sequence: Synthetic oligonucleotide
ucccauuguucucuuggcc

SEQ ID NO: 2413805 - RNA, 19 nt, Artificial Sequence
  Description of Artificial Sequence: Synthetic oligonucleotide
aauuuauaccaagguauuu

SEQ ID NO: 2413806 - RNA, 19 nt, Artificial Sequence
  Description of Artificial Sequence: Synthetic oligonucleotide
uuugcuucuauaucaccuu

SEQ ID NO: 2413807 - RNA, 19 nt, Artificial Sequence
  Description of Artificial Sequence: Synthetic oligonucleotide
caauaaagccauuuuccca

SEQ ID NO: 2413808 - RNA, 19 nt, Artificial Sequence
  Description of Artificial Sequence: Synthetic oligonucleotide
aagccaauaaagccauuuu

SEQ ID NO: 2413809 - RNA, 19 nt, Artificial Sequence
  Description of Artificial Sequence: Synthetic oligonucleotide
uauaucaccuugcuucauu

SEQ ID NO: 2413810 - RNA, 19 nt, Artificial Sequence
  Description of Artificial Sequence: Synthetic oligonucleotide
ccaauaaagccauuuuccc

SEQ ID NO: 2413811 - RNA, 19 nt, Artificial Sequence
  Description of Artificial Sequence: Synthetic oligonucleotide
auauaggcuccuuuaucca

SEQ ID NO: 2413812 - RNA, 19 nt, Artificial Sequence
  Description of Artificial Sequence: Synthetic oligonucleotide
uucccacaauaucaaguug

SEQ ID NO: 2413813 - RNA, 19 nt, Artificial Sequence
  Description of Artificial Sequence: Synthetic oligonucleotide
caauuuggcucuccugucc

SEQ ID NO: 2413814 - RNA, 19 nt, Artificial Sequence
  Description of Artificial Sequence: Synthetic oligonucleotide
uucucuauguggagcuccc

SEQ ID NO: 2413815 - RNA, 19 nt, Artificial Sequence
  Description of Artificial Sequence: Synthetic oligonucleotide
aaggaguauucggccaugg

SEQ ID NO: 2413816 - RNA, 19 nt, Artificial Sequence
  Description of Artificial Sequence: Synthetic oligonucleotide
uggauauaggcuccuuuau

SEQ ID NO: 2413817 - RNA, 19 nt, Artificial Sequence
  Description of Artificial Sequence: Synthetic oligonucleotide
cuauguggagcucccagug

SEQ ID NO: 2413818 - RNA, 19 nt, Artificial Sequence
  Description of Artificial Sequence: Synthetic oligonucleotide
agaauuuuacuaucuucuu

SEQ ID NO: 2413819 - RNA, 19 nt, Artificial Sequence
  Description of Artificial Sequence: Synthetic oligonucleotide
uagucuccaucacuugcag

SEQ ID NO: 2413820 - RNA, 19 nt, Artificial Sequence
  Description of Artificial Sequence: Synthetic oligonucleotide
auuucagggcaauucugga

SEQ ID NO: 2413821 - RNA, 19 nt, Artificial Sequence
  Description of Artificial Sequence: Synthetic oligonucleotide
uggccuucgaacccuugag

SEQ ID NO: 2413822 - RNA, 19 nt, Artificial Sequence
  Description of Artificial Sequence: Synthetic oligonucleotide
uuucagggcaauucuggaa

SEQ ID NO: 2413823 - RNA, 19 nt, Artificial Sequence
  Description of Artificial Sequence: Synthetic oligonucleotide
cacaauaucaaguuggguu

SEQ ID NO: 2413824 - RNA, 19 nt, Artificial Sequence
  Description of Artificial Sequence: Synthetic oligonucleotide
auggauauaggcuccuuua

SEQ ID NO: 2413825 - RNA, 19 nt, Artificial Sequence
  Description of Artificial Sequence: Synthetic oligonucleotide
aguuggaaacaguccacca

SEQ ID NO: 2413826 - RNA, 19 nt, Artificial Sequence
  Description of Artificial Sequence: Synthetic oligonucleotide
agauucccacaauaucaag

SEQ ID NO: 2413827 - RNA, 19 nt, Artificial Sequence
  Description of Artificial Sequence: Synthetic oligonucleotide
uauaggcuccuuuauccau

SEQ ID NO: 2413828 - RNA, 19 nt, Artificial Sequence
  Description of Artificial Sequence: Synthetic oligonucleotide
uccccaaaguuggaaacag

SEQ ID NO: 2413829 - RNA, 19 nt, Artificial Sequence
  Description of Artificial Sequence: Synthetic oligonucleotide
ucccgaaaucuccccaaag

SEQ ID NO: 2413830 - RNA, 19 nt, Artificial Sequence
  Description of Artificial Sequence: Synthetic oligonucleotide
ugauuucacacugcuuuca

SEQ ID NO: 2413831 - RNA, 19 nt, Artificial Sequence
  Description of Artificial Sequence: Synthetic oligonucleotide
uugauuucacacugcuuuc

SEQ ID NO: 2413832 - RNA, 19 nt, Artificial Sequence
  Description of Artificial Sequence: Synthetic oligonucleotide
cucuauguggagcucccag

SEQ ID NO: 2413833 - RNA, 19 nt, Artificial Sequence
  Description of Artificial Sequence: Synthetic oligonucleotide
ucugaacgcccaacaacca

SEQ ID NO: 2413834 - RNA, 19 nt, Artificial Sequence
  Description of Artificial Sequence: Synthetic oligonucleotide
ucacguuuucucuucuuau

SEQ ID NO: 2413835 - RNA, 19 nt, Artificial Sequence
  Description of Artificial Sequence: Synthetic oligonucleotide
acuuuacaaaggaguauuc

SEQ ID NO: 2413836 - RNA, 19 nt, Artificial Sequence
  Description of Artificial Sequence: Synthetic oligonucleotide
auaccaagguauuuuccau

SEQ ID NO: 2413837 - RNA, 19 nt, Artificial Sequence
  Description of Artificial Sequence: Synthetic oligonucleotide
aucggacaguuucacagca

SEQ ID NO: 2413838 - RNA, 19 nt, Artificial Sequence
  Description of Artificial Sequence: Synthetic oligonucleotide
uuggccuucgaacccuuga

SEQ ID NO: 2413839 - RNA, 19 nt, Artificial Sequence
  Description of Artificial Sequence: Synthetic oligonucleotide
gaucuaaucuuuaucauuu

SEQ ID NO: 2413840 - RNA, 19 nt, Artificial Sequence
  Description of Artificial Sequence: Synthetic oligonucleotide
cugaauuuauaccaaggua

SEQ ID NO: 2413841 - RNA, 19 nt, Artificial Sequence
  Description of Artificial Sequence: Synthetic oligonucleotide
auuuucccaucuugaaaca

SEQ ID NO: 2413842 - RNA, 19 nt, Artificial Sequence
  Description of Artificial Sequence: Synthetic oligonucleotide
guccagugcauggauauag

SEQ ID NO: 2413843 - RNA, 19 nt, Artificial Sequence
  Description of Artificial Sequence: Synthetic oligonucleotide
aaacagcuauuugaagcca

SEQ ID NO: 2413844 - RNA, 19 nt, Artificial Sequence
  Description of Artificial Sequence: Synthetic oligonucleotide
ucaaguuggguuuccucau

SEQ ID NO: 2413845 - RNA, 19 nt, Artificial Sequence
  Description of Artificial Sequence: Synthetic oligonucleotide
uucccauuguucucuuggc

SEQ ID NO: 2413846 - RNA, 19 nt, Artificial Sequence
  Description of Artificial Sequence: Synthetic oligonucleotide
ccaaaguuggaaacagucc

SEQ ID NO: 2413847 - RNA, 19 nt, Artificial Sequence
  Description of Artificial Sequence: Synthetic oligonucleotide
ucaauuuggcucuccuguc

SEQ ID NO: 2413848 - RNA, 19 nt, Artificial Sequence
  Description of Artificial Sequence: Synthetic oligonucleotide
uugaguuuguggucuugga

SEQ ID NO: 2413849 - RNA, 19 nt, Artificial Sequence
  Description of Artificial Sequence: Synthetic oligonucleotide
aggaucuaaucuuuaucau

SEQ ID NO: 2413850 - RNA, 19 nt, Artificial Sequence
  Description of Artificial Sequence: Synthetic oligonucleotide
guuugguggacuuuacaaa

SEQ ID NO: 2413851 - RNA, 19 nt, Artificial Sequence
  Description of Artificial Sequence: Synthetic oligonucleotide
cccaauugcaucugaacgc

SEQ ID NO: 2413852 - RNA, 19 nt, Artificial Sequence
  Description of Artificial Sequence: Synthetic oligonucleotide
cauucuaauaaaacagcua

SEQ ID NO: 2413853 - RNA, 19 nt, Artificial Sequence
  Description of Artificial Sequence: Synthetic oligonucleotide
ucuuuacauaguugauuuc

SEQ ID NO: 2413854 - RNA, 19 nt, Artificial Sequence
  Description of Artificial Sequence: Synthetic oligonucleotide
cuuugcuucuauaucaccu

SEQ ID NO: 2413855 - RNA, 19 nt, Artificial Sequence
  Description of Artificial Sequence: Synthetic oligonucleotide
acuugcaguaucggucagc

SEQ ID NO: 2413856 - RNA, 19 nt, Artificial Sequence
  Description of Artificial Sequence: Synthetic oligonucleotide
cuucucuauguggagcucc

SEQ ID NO: 2413857 - RNA, 19 nt, Artificial Sequence
  Description of Artificial Sequence: Synthetic oligonucleotide
acacugcuuucacauuuuc

SEQ ID NO: 2413858 - RNA, 19 nt, Artificial Sequence
  Description of Artificial Sequence: Synthetic oligonucleotide
augguucccgaaaucuccc

SEQ ID NO: 2413859 - RNA, 19 nt, Artificial Sequence
  Description of Artificial Sequence: Synthetic oligonucleotide
gcaguaaacugcucugggg

SEQ ID NO: 2413860 - RNA, 19 nt, Artificial Sequence
  Description of Artificial Sequence: Synthetic oligonucleotide
auggcaaugguucccgaaa

SEQ ID NO: 2413861 - RNA, 19 nt, Artificial Sequence
  Description of Artificial Sequence: Synthetic oligonucleotide
uuuucccaucuugaaacac

SEQ ID NO: 2413862 - RNA, 19 nt, Artificial Sequence
  Description of Artificial Sequence: Synthetic oligonucleotide
cacguuuucucuucuuauc

SEQ ID NO: 2413863 - RNA, 19 nt, Artificial Sequence
  Description of Artificial Sequence: Synthetic oligonucleotide
agagagagagagagggagg

SEQ ID NO: 2413864 - RNA, 19 nt, Artificial Sequence
  Description of Artificial Sequence: Synthetic oligonucleotide
cuugagcacgaguuuggug

SEQ ID NO: 2413865 - RNA, 19 nt, Artificial Sequence
  Description of Artificial Sequence: Synthetic oligonucleotide
ccagauucccacaauauca

SEQ ID NO: 2413866 - RNA, 19 nt, Artificial Sequence
  Description of Artificial Sequence: Synthetic oligonucleotide
ucccaucuugaaacaccgg

SEQ ID NO: 2413867 - RNA, 19 nt, Artificial Sequence
  Description of Artificial Sequence: Synthetic oligonucleotide
caacuucucuauguggagc

SEQ ID NO: 2413868 - RNA, 19 nt, Artificial Sequence
  Description of Artificial Sequence: Synthetic oligonucleotide
cugaacgcccaacaaccag

SEQ ID NO: 2413869 - RNA, 19 nt, Artificial Sequence
  Description of Artificial Sequence: Synthetic oligonucleotide
cuagucuccaucacuugca

SEQ ID NO: 2413870 - RNA, 19 nt, Artificial Sequence
  Description of Artificial Sequence: Synthetic oligonucleotide
gcuauuugaagccaauaaa

SEQ ID NO: 2413871 - RNA, 19 nt, Artificial Sequence
  Description of Artificial Sequence: Synthetic oligonucleotide
ucggacaguuucacagcag

SEQ ID NO: 2413872 - RNA, 19 nt, Artificial Sequence
  Description of Artificial Sequence: Synthetic oligonucleotide
gauucccacaauaucaagu

SEQ ID NO: 2413873 - RNA, 19 nt, Artificial Sequence
  Description of Artificial Sequence: Synthetic oligonucleotide
gccauuguccagugcaugg

SEQ ID NO: 2413874 - RNA, 19 nt, Artificial Sequence
  Description of Artificial Sequence: Synthetic oligonucleotide
cccaaaguuggaaacaguc

SEQ ID NO: 2413875 - RNA, 19 nt, Artificial Sequence
  Description of Artificial Sequence: Synthetic oligonucleotide
cccauuguucucuuggccc

SEQ ID NO: 2413876 - RNA, 19 nt, Artificial Sequence
  Description of Artificial Sequence: Synthetic oligonucleotide
agggcaauucuggaaucgg

SEQ ID NO: 2413877 - RNA, 19 nt, Artificial Sequence
  Description of Artificial Sequence: Synthetic oligonucleotide
uuguggucuuggaagcuuc

SEQ ID NO: 2413878 - RNA, 19 nt, Artificial Sequence
  Description of Artificial Sequence: Synthetic oligonucleotide
uuuugaguuuguggucuug

SEQ ID NO: 2413879 - RNA, 19 nt, Artificial Sequence
  Description of Artificial Sequence: Synthetic oligonucleotide
uguggucuuggaagcuucu

SEQ ID NO: 2413880 - RNA, 19 nt, Artificial Sequence
  Description of Artificial Sequence: Synthetic oligonucleotide
ugagcacgaguuuggugga

SEQ ID NO: 2413881 - RNA, 19 nt, Artificial Sequence
  Description of Artificial Sequence: Synthetic oligonucleotide
agagagagagagagagagg

SEQ ID NO: 2413882 - RNA, 19 nt, Artificial Sequence
  Description of Artificial Sequence: Synthetic oligonucleotide
uggcaaugguucccgaaau

SEQ ID NO: 2413883 - RNA, 19 nt, Artificial Sequence
  Description of Artificial Sequence: Synthetic oligonucleotide
ccauagccugauuucaggg

SEQ ID NO: 2413884 - RNA, 19 nt, Artificial Sequence
  Description of Artificial Sequence: Synthetic oligonucleotide
aacagcuauuugaagccaa

SEQ ID NO: 2413885 - RNA, 19 nt, Artificial Sequence
  Description of Artificial Sequence: Synthetic oligonucleotide
caauugcaucugaacgccc

SEQ ID NO: 2413886 - RNA, 19 nt, Artificial Sequence
  Description of Artificial Sequence: Synthetic oligonucleotide
cuaaucuuuaucauuucuu

SEQ ID NO: 2413887 - RNA, 19 nt, Artificial Sequence
  Description of Artificial Sequence: Synthetic oligonucleotide
uggaaucggacaguuucac

SEQ ID NO: 2413888 - RNA, 19 nt, Artificial Sequence
  Description of Artificial Sequence: Synthetic oligonucleotide
cagcaguaaacugcucugg

SEQ ID NO: 2413889 - RNA, 19 nt, Artificial Sequence
  Description of Artificial Sequence: Synthetic oligonucleotide
cucuuggcccaauugcauc

SEQ ID NO: 2413890 - RNA, 19 nt, Artificial Sequence
  Description of Artificial Sequence: Synthetic oligonucleotide
ggauauaggcuccuuuauc

SEQ ID NO: 2413891 - RNA, 19 nt, Artificial Sequence
  Description of Artificial Sequence: Synthetic oligonucleotide
aacccuugagcacgaguuu

SEQ ID NO: 2413892 - RNA, 19 nt, Artificial Sequence
  Description of Artificial Sequence: Synthetic oligonucleotide
cagggcaauucuggaaucg

SEQ ID NO: 2413893 - RNA, 19 nt, Artificial Sequence
  Description of Artificial Sequence: Synthetic oligonucleotide
cccacaauaucaaguuggg

SEQ ID NO: 2413894 - RNA, 19 nt, Artificial Sequence
  Description of Artificial Sequence: Synthetic oligonucleotide
acaaccaguccaucugaau

SEQ ID NO: 2413895 - RNA, 19 nt, Artificial Sequence
  Description of Artificial Sequence: Synthetic oligonucleotide
cuugcuucauuacauucua

SEQ ID NO: 2413896 - RNA, 19 nt, Artificial Sequence
  Description of Artificial Sequence: Synthetic oligonucleotide
cuuuugucuucuucuggga

SEQ ID NO: 2413897 - RNA, 19 nt, Artificial Sequence
  Description of Artificial Sequence: Synthetic oligonucleotide
uguggagcucccaguguaa

SEQ ID NO: 2413898 - RNA, 19 nt, Artificial Sequence
  Description of Artificial Sequence: Synthetic oligonucleotide
ucagggcaauucuggaauc

SEQ ID NO: 2413899 - RNA, 19 nt, Artificial Sequence
  Description of Artificial Sequence: Synthetic oligonucleotide
uuuggcucuccuguccaga

SEQ ID NO: 2413900 - RNA, 19 nt, Artificial Sequence
  Description of Artificial Sequence: Synthetic oligonucleotide
cgaaaucuccccaaaguug

SEQ ID NO: 2413901 - RNA, 19 nt, Artificial Sequence
  Description of Artificial Sequence: Synthetic oligonucleotide
ugguucccgaaaucucccc

SEQ ID NO: 2413902 - RNA, 19 nt, Artificial Sequence
  Description of Artificial Sequence: Synthetic oligonucleotide
ccaacaaccaguccaucug

SEQ ID NO: 2413903 - RNA, 19 nt, Artificial Sequence
  Description of Artificial Sequence: Synthetic oligonucleotide
cagauucccacaauaucaa

SEQ ID NO: 2413904 - RNA, 19 nt, Artificial Sequence
  Description of Artificial Sequence: Synthetic oligonucleotide
guaucggucagcuuucaau

SEQ ID NO: 2413905 - RNA, 19 nt, Artificial Sequence
  Description of Artificial Sequence: Synthetic oligonucleotide
uucgaacccuugagcacga

SEQ ID NO: 2413906 - RNA, 19 nt, Artificial Sequence
  Description of Artificial Sequence: Synthetic oligonucleotide
ccugcuguuuuauucuuug

SEQ ID NO: 2413907 - RNA, 19 nt, Artificial Sequence
  Description of Artificial Sequence: Synthetic oligonucleotide
uuuguggucuuggaagcuu

SEQ ID NO: 2413908 - RNA, 19 nt, Artificial Sequence
  Description of Artificial Sequence: Synthetic oligonucleotide
auugcaucugaacgcccaa

SEQ ID NO: 2413909 - RNA, 19 nt, Artificial Sequence
  Description of Artificial Sequence: Synthetic oligonucleotide
acacaaaacuagucuccau

SEQ ID NO: 2413910 - RNA, 19 nt, Artificial Sequence
  Description of Artificial Sequence: Synthetic oligonucleotide
gcaauucuggaaucggaca

SEQ ID NO: 2413911 - RNA, 19 nt, Artificial Sequence
  Description of Artificial Sequence: Synthetic oligonucleotide
ccaauugcaucugaacgcc

SEQ ID NO: 2413912 - RNA, 19 nt, Artificial Sequence
  Description of Artificial Sequence: Synthetic oligonucleotide
acccuugagcacgaguuug

SEQ ID NO: 2413913 - RNA, 19 nt, Artificial Sequence
  Description of Artificial Sequence: Synthetic oligonucleotide
gacuggggcccucaucaac

SEQ ID NO: 2413914 - RNA, 19 nt, Artificial Sequence
  Description of Artificial Sequence: Synthetic oligonucleotide
ccagugcauggauauaggc

SEQ ID NO: 2413915 - RNA, 19 nt, Artificial Sequence
  Description of Artificial Sequence: Synthetic oligonucleotide
cuuacucuuggccuucgaa

SEQ ID NO: 2413916 - RNA, 19 nt, Artificial Sequence
  Description of Artificial Sequence: Synthetic oligonucleotide
cuggaaucggacaguuuca

SEQ ID NO: 2413917 - RNA, 19 nt, Artificial Sequence
  Description of Artificial Sequence: Synthetic oligonucleotide
caauaucaaguuggguuuc

SEQ ID NO: 2413918 - RNA, 19 nt, Artificial Sequence
  Description of Artificial Sequence: Synthetic oligonucleotide
uucccgaaaucuccccaaa

SEQ ID NO: 2413919 - RNA, 19 nt, Artificial Sequence
  Description of Artificial Sequence: Synthetic oligonucleotide
gaauuuauaccaagguauu

SEQ ID NO: 2413920 - RNA, 19 nt, Artificial Sequence
  Description of Artificial Sequence: Synthetic oligonucleotide
acuggggcccucaucaacu

SEQ ID NO: 2413921 - RNA, 19 nt, Artificial Sequence
  Description of Artificial Sequence: Synthetic oligonucleotide
cagugcauggauauaggcu

SEQ ID NO: 2413922 - RNA, 19 nt, Artificial Sequence
  Description of Artificial Sequence: Synthetic oligonucleotide
aacaaccaguccaucugaa

SEQ ID NO: 2413923 - RNA, 19 nt, Artificial Sequence
  Description of Artificial Sequence: Synthetic oligonucleotide
uccaccagauucccacaau

SEQ ID NO: 2413924 - RNA, 19 nt, Artificial Sequence
  Description of Artificial Sequence: Synthetic oligonucleotide
gcuucauuacauucuaaua

SEQ ID NO: 2413925 - RNA, 19 nt, Artificial Sequence
  Description of Artificial Sequence: Synthetic oligonucleotide
ggcaauucuggaaucggac

SEQ ID NO: 2413926 - RNA, 19 nt, Artificial Sequence
  Description of Artificial Sequence: Synthetic oligonucleotide
uggagcucccaguguaaaa

SEQ ID NO: 2413927 - RNA, 19 nt, Artificial Sequence
  Description of Artificial Sequence: Synthetic oligonucleotide
gguauuuuccauagccuga

SEQ ID NO: 2413928 - RNA, 19 nt, Artificial Sequence
  Description of Artificial Sequence: Synthetic oligonucleotide
cugauuucagggcaauucu

SEQ ID NO: 2413929 - RNA, 19 nt, Artificial Sequence
  Description of Artificial Sequence: Synthetic oligonucleotide
gguggacuuuacaaaggag

SEQ ID NO: 2413930 - RNA, 19 nt, Artificial Sequence
  Description of Artificial Sequence: Synthetic oligonucleotide
ccugauuucagggcaauuc

SEQ ID NO: 2413931 - RNA, 19 nt, Artificial Sequence
  Description of Artificial Sequence: Synthetic oligonucleotide
cuugaaacaccgguuccca

SEQ ID NO: 2413932 - RNA, 19 nt, Artificial Sequence
  Description of Artificial Sequence: Synthetic oligonucleotide
gaagccaauaaagccauuu

SEQ ID NO: 2413933 - RNA, 19 nt, Artificial Sequence
  Description of Artificial Sequence: Synthetic oligonucleotide
uagccugauuucagggcaa

SEQ ID NO: 2413934 - RNA, 19 nt, Artificial Sequence
  Description of Artificial Sequence: Synthetic oligonucleotide
gccuucgaacccuugagca

SEQ ID NO: 2413935 - RNA, 19 nt, Artificial Sequence
  Description of Artificial Sequence: Synthetic oligonucleotide
uugaaacaccgguucccau

SEQ ID NO: 2413936 - RNA, 19 nt, Artificial Sequence
  Description of Artificial Sequence: Synthetic oligonucleotide
aucggucagcuuucaauuu

SEQ ID NO: 2413937 - RNA, 19 nt, Artificial Sequence
  Description of Artificial Sequence: Synthetic oligonucleotide
aaaucuccccaaaguugga

SEQ ID NO: 2413938 - RNA, 19 nt, Artificial Sequence
  Description of Artificial Sequence: Synthetic oligonucleotide
gucagcuuucaauuuggcu

SEQ ID NO: 2413939 - RNA, 19 nt, Artificial Sequence
  Description of Artificial Sequence: Synthetic oligonucleotide
acgaguuugguggacuuua

SEQ ID NO: 2413940 - RNA, 19 nt, Artificial Sequence
  Description of Artificial Sequence: Synthetic oligonucleotide
gaacccuugagcacgaguu

SEQ ID NO: 2413941 - RNA, 19 nt, Artificial Sequence
  Description of Artificial Sequence: Synthetic oligonucleotide
uucacacugcuuucacauu

SEQ ID NO: 2413942 - RNA, 19 nt, Artificial Sequence
  Description of Artificial Sequence: Synthetic oligonucleotide
uggguuuccucaucuucuu

SEQ ID NO: 2413943 - RNA, 19 nt, Artificial Sequence
  Description of Artificial Sequence: Synthetic oligonucleotide
ggucuuggaagcuucugaa

SEQ ID NO: 2413944 - RNA, 19 nt, Artificial Sequence
  Description of Artificial Sequence: Synthetic oligonucleotide
gaacgcccaacaaccaguc

SEQ ID NO: 2413945 - RNA, 19 nt, Artificial Sequence
  Description of Artificial Sequence: Synthetic oligonucleotide
cagcuuucaauuuggcucu

SEQ ID NO: 2413946 - RNA, 19 nt, Artificial Sequence
  Description of Artificial Sequence: Synthetic oligonucleotide
agcacaggaucuaaucuuu

SEQ ID NO: 2413947 - RNA, 19 nt, Artificial Sequence
  Description of Artificial Sequence: Synthetic oligonucleotide
uugcaucugaacgcccaac

SEQ ID NO: 2413948 - RNA, 19 nt, Artificial Sequence
  Description of Artificial Sequence: Synthetic oligonucleotide
ugcauggauauaggcuccu

SEQ ID NO: 2413949 - RNA, 19 nt, Artificial Sequence
  Description of Artificial Sequence: Synthetic oligonucleotide
ggcccaauugcaucugaac

SEQ ID NO: 2413950 - RNA, 19 nt, Artificial Sequence
  Description of Artificial Sequence: Synthetic oligonucleotide
agcacgaguuugguggacu

SEQ ID NO: 2413951 - RNA, 19 nt, Artificial Sequence
  Description of Artificial Sequence: Synthetic oligonucleotide
gugcauggauauaggcucc

SEQ ID NO: 2413952 - RNA, 19 nt, Artificial Sequence
  Description of Artificial Sequence: Synthetic oligonucleotide
cagaagugucucaugcaaa

SEQ ID NO: 2413953 - RNA, 19 nt, Artificial Sequence
  Description of Artificial Sequence: Synthetic oligonucleotide
guucccgaaaucuccccaa

SEQ ID NO: 2413954 - RNA, 19 nt, Artificial Sequence
  Description of Artificial Sequence: Synthetic oligonucleotide
caguccaucugaauuuaua

SEQ ID NO: 2413955 - RNA, 19 nt, Artificial Sequence
  Description of Artificial Sequence: Synthetic oligonucleotide
uccaucuuuccgagcuuuu

SEQ ID NO: 2413956 - RNA, 19 nt, Artificial Sequence
  Description of Artificial Sequence: Synthetic oligonucleotide
uuguucucuuggcccaauu

SEQ ID NO: 2413957 - RNA, 19 nt, Artificial Sequence
  Description of Artificial Sequence: Synthetic oligonucleotide
agagagagagagagagaga

SEQ ID NO: 2413958 - RNA, 19 nt, Artificial Sequence
  Description of Artificial Sequence: Synthetic oligonucleotide
caaccaguccaucugaauu

SEQ ID NO: 2413959 - RNA, 19 nt, Artificial Sequence
  Description of Artificial Sequence: Synthetic oligonucleotide
agagagagagagagaggga

SEQ ID NO: 2413960 - RNA, 19 nt, Artificial Sequence
  Description of Artificial Sequence: Synthetic oligonucleotide
cuaucuucuuugcuuauuu

SEQ ID NO: 2413961 - RNA, 19 nt, Artificial Sequence
  Description of Artificial Sequence: Synthetic oligonucleotide
uucuggaaucggacaguuu

SEQ ID NO: 2413962 - RNA, 19 nt, Artificial Sequence
  Description of Artificial Sequence: Synthetic oligonucleotide
ggccuucgaacccuugagc

SEQ ID NO: 2413963 - RNA, 19 nt, Artificial Sequence
  Description of Artificial Sequence: Synthetic oligonucleotide
cuugcaguaucggucagcu

SEQ ID NO: 2413964 - RNA, 19 nt, Artificial Sequence
  Description of Artificial Sequence: Synthetic oligonucleotide
ggaucuaaucuuuaucauu

SEQ ID NO: 2413965 - RNA, 19 nt, Artificial Sequence
  Description of Artificial Sequence: Synthetic oligonucleotide
ucacagcaguaaacugcuc

SEQ ID NO: 2413966 - RNA, 19 nt, Artificial Sequence
  Description of Artificial Sequence: Synthetic oligonucleotide
caucacuugcaguaucggu

SEQ ID NO: 2413967 - RNA, 19 nt, Artificial Sequence
  Description of Artificial Sequence: Synthetic oligonucleotide
acagcuauuugaagccaau

SEQ ID NO: 2413968 - RNA, 19 nt, Artificial Sequence
  Description of Artificial Sequence: Synthetic oligonucleotide
auaggcuccuuuauccauu

SEQ ID NO: 2413969 - RNA, 19 nt, Artificial Sequence
  Description of Artificial Sequence: Synthetic oligonucleotide
agagagagagagggaggga

SEQ ID NO: 2413970 - RNA, 19 nt, Artificial Sequence
  Description of Artificial Sequence: Synthetic oligonucleotide
ggaaucggacaguuucaca

SEQ ID NO: 2413971 - RNA, 19 nt, Artificial Sequence
  Description of Artificial Sequence: Synthetic oligonucleotide
ccuucgaacccuugagcac

SEQ ID NO: 2413972 - RNA, 19 nt, Artificial Sequence
  Description of Artificial Sequence: Synthetic oligonucleotide
guggucuuggaagcuucug

SEQ ID NO: 2413973 - RNA, 19 nt, Artificial Sequence
  Description of Artificial Sequence: Synthetic oligonucleotide
cuuggccuucgaacccuug

SEQ ID NO: 2413974 - RNA, 19 nt, Artificial Sequence
  Description of Artificial Sequence: Synthetic oligonucleotide
ggcaaugguucccgaaauc

SEQ ID NO: 2413975 - RNA, 19 nt, Artificial Sequence
  Description of Artificial Sequence: Synthetic oligonucleotide
cuuggaagcuucugaaauu

SEQ ID NO: 2413976 - RNA, 19 nt, Artificial Sequence
  Description of Artificial Sequence: Synthetic oligonucleotide
cuuggcccaauugcaucug

SEQ ID NO: 2413977 - RNA, 19 nt, Artificial Sequence
  Description of Artificial Sequence: Synthetic oligonucleotide
uggggcccucaucaacuuc

SEQ ID NO: 2413978 - RNA, 19 nt, Artificial Sequence
  Description of Artificial Sequence: Synthetic oligonucleotide
gguucccgaaaucucccca

SEQ ID NO: 2413979 - RNA, 19 nt, Artificial Sequence
  Description of Artificial Sequence: Synthetic oligonucleotide
guauuuuccauagccugau

SEQ ID NO: 2413980 - RNA, 19 nt, Artificial Sequence
  Description of Artificial Sequence: Synthetic oligonucleotide
ccagaagugucucaugcaa

SEQ ID NO: 2413981 - RNA, 19 nt, Artificial Sequence
  Description of Artificial Sequence: Synthetic oligonucleotide
gccauuuucccaucuugaa

SEQ ID NO: 2413982 - RNA, 19 nt, Artificial Sequence
  Description of Artificial Sequence: Synthetic oligonucleotide
gcaaugguucccgaaaucu

SEQ ID NO: 2413983 - RNA, 19 nt, Artificial Sequence
  Description of Artificial Sequence: Synthetic oligonucleotide
cacugcuuucacauuuucu

SEQ ID NO: 2413984 - RNA, 19 nt, Artificial Sequence
  Description of Artificial Sequence: Synthetic oligonucleotide
ccaagguauuuuccauagc

SEQ ID NO: 2413985 - RNA, 19 nt, Artificial Sequence
  Description of Artificial Sequence: Synthetic oligonucleotide
guccaccagauucccacaa

SEQ ID NO: 2413986 - RNA, 19 nt, Artificial Sequence
  Description of Artificial Sequence: Synthetic oligonucleotide
accaguccaucugaauuua

SEQ ID NO: 2413987 - RNA, 19 nt, Artificial Sequence
  Description of Artificial Sequence: Synthetic oligonucleotide
caccgguucccauuguucu

SEQ ID NO: 2413988 - RNA, 19 nt, Artificial Sequence
  Description of Artificial Sequence: Synthetic oligonucleotide
cacaggaucuaaucuuuau

SEQ ID NO: 2413989 - RNA, 19 nt, Artificial Sequence
  Description of Artificial Sequence: Synthetic oligonucleotide
ggcucuccuguccagaagu

SEQ ID NO: 2413990 - RNA, 19 nt, Artificial Sequence
  Description of Artificial Sequence: Synthetic oligonucleotide
ccaucacuugcaguaucgg

SEQ ID NO: 2413991 - RNA, 19 nt, Artificial Sequence
  Description of Artificial Sequence: Synthetic oligonucleotide
ccauuuucccaucuugaaa

SEQ ID NO: 2413992 - RNA, 19 nt, Artificial Sequence
  Description of Artificial Sequence: Synthetic oligonucleotide
ccauuguucucuuggccca

SEQ ID NO: 2413993 - RNA, 19 nt, Artificial Sequence
  Description of Artificial Sequence: Synthetic oligonucleotide
caccagauucccacaauau

SEQ ID NO: 2413994 - RNA, 19 nt, Artificial Sequence
  Description of Artificial Sequence: Synthetic oligonucleotide
cagcacaggaucuaaucuu

SEQ ID NO: 2413995 - RNA, 19 nt, Artificial Sequence
  Description of Artificial Sequence: Synthetic oligonucleotide
cauggauauaggcuccuuu

SEQ ID NO: 2413996 - RNA, 19 nt, Artificial Sequence
  Description of Artificial Sequence: Synthetic oligonucleotide
ggucagcuuucaauuuggc

SEQ ID NO: 2413997 - RNA, 19 nt, Artificial Sequence
  Description of Artificial Sequence: Synthetic oligonucleotide
ccaucugaauuuauaccaa

SEQ ID NO: 2413998 - RNA, 19 nt, Artificial Sequence
  Description of Artificial Sequence: Synthetic oligonucleotide
gguucccauuguucucuug

SEQ ID NO: 2413999 - RNA, 19 nt, Artificial Sequence
  Description of Artificial Sequence: Synthetic oligonucleotide
cuucuucacguuuucucuu

SEQ ID NO: 2414000 - RNA, 19 nt, Artificial Sequence
  Description of Artificial Sequence: Synthetic oligonucleotide
caauggcaaugguucccga

SEQ ID NO: 2414001 - RNA, 19 nt, Artificial Sequence
  Description of Artificial Sequence: Synthetic oligonucleotide
ucgaacccuugagcacgag

SEQ ID NO: 2414002 - RNA, 19 nt, Artificial Sequence
  Description of Artificial Sequence: Synthetic oligonucleotide
cuucuauaucaccuugcuu

SEQ ID NO: 2414003 - RNA, 19 nt, Artificial Sequence
  Description of Artificial Sequence: Synthetic oligonucleotide
gagcacgaguuugguggac

SEQ ID NO: 2414004 - RNA, 19 nt, Artificial Sequence
  Description of Artificial Sequence: Synthetic oligonucleotide
cauuguccagugcauggau

SEQ ID NO: 2414005 - RNA, 19 nt, Artificial Sequence
  Description of Artificial Sequence: Synthetic oligonucleotide
ggccauuguccagugcaug

SEQ ID NO: 2414006 - RNA, 19 nt, Artificial Sequence
  Description of Artificial Sequence: Synthetic oligonucleotide
gcaguaucggucagcuuuc

SEQ ID NO: 2414007 - RNA, 19 nt, Artificial Sequence
  Description of Artificial Sequence: Synthetic oligonucleotide
uugcaguaucggucagcuu

SEQ ID NO: 2414008 - RNA, 19 nt, Artificial Sequence
  Description of Artificial Sequence: Synthetic oligonucleotide
ggguuuccucaucuucuuc

SEQ ID NO: 2414009 - RNA, 19 nt, Artificial Sequence
  Description of Artificial Sequence: Synthetic oligonucleotide
acaguccaccagauuccca

SEQ ID NO: 2414010 - RNA, 19 nt, Artificial Sequence
  Description of Artificial Sequence: Synthetic oligonucleotide
gggcaauucuggaaucgga

SEQ ID NO: 2414011 - RNA, 19 nt, Artificial Sequence
  Description of Artificial Sequence: Synthetic oligonucleotide
cagcuauuugaagccaaua

SEQ ID NO: 2414012 - RNA, 19 nt, Artificial Sequence
  Description of Artificial Sequence: Synthetic oligonucleotide
agccugauuucagggcaau

SEQ ID NO: 2414013 - RNA, 19 nt, Artificial Sequence
  Description of Artificial Sequence: Synthetic oligonucleotide
guggagcucccaguguaaa

SEQ ID NO: 2414014 - RNA, 19 nt, Artificial Sequence
  Description of Artificial Sequence: Synthetic oligonucleotide
cccgaaaucuccccaaagu

SEQ ID NO: 2414015 - RNA, 19 nt, Artificial Sequence
  Description of Artificial Sequence: Synthetic oligonucleotide
cuguccagaagugucucau

SEQ ID NO: 2414016 - RNA, 19 nt, Artificial Sequence
  Description of Artificial Sequence: Synthetic oligonucleotide
ggacuuuacaaaggaguau

SEQ ID NO: 2414017 - RNA, 19 nt, Artificial Sequence
  Description of Artificial Sequence: Synthetic oligonucleotide
cgaguuugguggacuuuac

SEQ ID NO: 2414018 - RNA, 19 nt, Artificial Sequence
  Description of Artificial Sequence: Synthetic oligonucleotide
cccaacaaccaguccaucu

SEQ ID NO: 2414019 - RNA, 19 nt, Artificial Sequence
  Description of Artificial Sequence: Synthetic oligonucleotide
cuucugggaugucaucuuu

SEQ ID NO: 2414020 - RNA, 19 nt, Artificial Sequence
  Description of Artificial Sequence: Synthetic oligonucleotide
ggggcccucaucaacuucu

SEQ ID NO: 2414021 - RNA, 19 nt, Artificial Sequence
  Description of Artificial Sequence: Synthetic oligonucleotide
ggacaguuucacagcagua

SEQ ID NO: 2414022 - RNA, 19 nt, Artificial Sequence
  Description of Artificial Sequence: Synthetic oligonucleotide
ccgaaaucuccccaaaguu

SEQ ID NO: 2414023 - RNA, 19 nt, Artificial Sequence
  Description of Artificial Sequence: Synthetic oligonucleotide
ccauuguccagugcaugga

SEQ ID NO: 2414024 - RNA, 19 nt, Artificial Sequence
  Description of Artificial Sequence: Synthetic oligonucleotide
caguaucggucagcuuuca

SEQ ID NO: 2414025 - RNA, 19 nt, Artificial Sequence
  Description of Artificial Sequence: Synthetic oligonucleotide
caccuugcuucauuacauu

SEQ ID NO: 2414026 - RNA, 19 nt, Artificial Sequence
  Description of Artificial Sequence: Synthetic oligonucleotide
ccaucuugaaacaccgguu

SEQ ID NO: 2414027 - RNA, 19 nt, Artificial Sequence
  Description of Artificial Sequence: Synthetic oligonucleotide
ccuguccagaagugucuca

SEQ ID NO: 2414028 - RNA, 19 nt, Artificial Sequence
  Description of Artificial Sequence: Synthetic oligonucleotide
cuucuccugcuguuuuauu

SEQ ID NO: 2414029 - RNA, 19 nt, Artificial Sequence
  Description of Artificial Sequence: Synthetic oligonucleotide
cuauaucaccuugcuucau

SEQ ID NO: 2414030 - RNA, 19 nt, Artificial Sequence
  Description of Artificial Sequence: Synthetic oligonucleotide
ggacuggggcccucaucaa

SEQ ID NO: 2414031 - RNA, 19 nt, Artificial Sequence
  Description of Artificial Sequence: Synthetic oligonucleotide
gcacaggaucuaaucuuua

SEQ ID NO: 2414032 - RNA, 19 nt, Artificial Sequence
  Description of Artificial Sequence: Synthetic oligonucleotide
gcacgaguuugguggacuu

SEQ ID NO: 2414033 - RNA, 19 nt, Artificial Sequence
  Description of Artificial Sequence: Synthetic oligonucleotide
ccacaauaucaaguugggu

SEQ ID NO: 2414034 - RNA, 19 nt, Artificial Sequence
  Description of Artificial Sequence: Synthetic oligonucleotide
cacgaguuugguggacuuu

SEQ ID NO: 2414035 - RNA, 19 nt, Artificial Sequence
  Description of Artificial Sequence: Synthetic oligonucleotide
gcccaacaaccaguccauc

SEQ ID NO: 2414036 - RNA, 19 nt, Artificial Sequence
  Description of Artificial Sequence: Synthetic oligonucleotide
cgaacccuugagcacgagu

SEQ ID NO: 2414037 - RNA, 19 nt, Artificial Sequence
  Description of Artificial Sequence: Synthetic oligonucleotide
ccuugagcacgaguuuggu

SEQ ID NO: 2414038 - RNA, 19 nt, Artificial Sequence
  Description of Artificial Sequence: Synthetic oligonucleotide
ccaguccaucugaauuuau

SEQ ID NO: 2414039 - RNA, 19 nt, Artificial Sequence
  Description of Artificial Sequence: Synthetic oligonucleotide
cgcccaacaaccaguccau

SEQ ID NO: 2414040 - RNA, 19 nt, Artificial Sequence
  Description of Artificial Sequence: Synthetic oligonucleotide
gcauggauauaggcuccuu

SEQ ID NO: 2414041 - RNA, 19 nt, Artificial Sequence
  Description of Artificial Sequence: Synthetic oligonucleotide
aaauuuaaaggcuuaaugg

SEQ ID NO: 2414042 - RNA, 19 nt, Artificial Sequence
  Description of Artificial Sequence: Synthetic oligonucleotide
aauauaccaaaguacaucc

SEQ ID NO: 2414043 - RNA, 19 nt, Artificial Sequence
  Description of Artificial Sequence: Synthetic oligonucleotide
aauuuaaaggcuuaauggc

SEQ ID NO: 2414044 - RNA, 19 nt, Artificial Sequence
  Description of Artificial Sequence: Synthetic oligonucleotide
uuugcuuaaaauuuaaagg

SEQ ID NO: 2414045 - RNA, 19 nt, Artificial Sequence
  Description of Artificial Sequence: Synthetic oligonucleotide
aauacuuuuagcuuauuuc

SEQ ID NO: 2414046 - RNA, 19 nt, Artificial Sequence
  Description of Artificial Sequence: Synthetic oligonucleotide
aacaguuuuacacagaaug

SEQ ID NO: 2414047 - RNA, 19 nt, Artificial Sequence
  Description of Artificial Sequence: Synthetic oligonucleotide
aacuccauuaacuucacac

SEQ ID NO: 2414048 - RNA, 19 nt, Artificial Sequence
  Description of Artificial Sequence: Synthetic oligonucleotide
uuuaauauaccaaaguaca

SEQ ID NO: 2414049 - RNA, 19 nt, Artificial Sequence
  Description of Artificial Sequence: Synthetic oligonucleotide
aaaauuugaagugugugcc

SEQ ID NO: 2414050 - RNA, 19 nt, Artificial Sequence
  Description of Artificial Sequence: Synthetic oligonucleotide
aaaauuuaaaggcuuaaug

SEQ ID NO: 2414051 - RNA, 19 nt, Artificial Sequence
  Description of Artificial Sequence: Synthetic oligonucleotide
uugcuuaaaauuuaaaggc

SEQ ID NO: 2414052 - RNA, 19 nt, Artificial Sequence
  Description of Artificial Sequence: Synthetic oligonucleotide
uuaaguuuauuuuacaaac

SEQ ID NO: 2414053 - RNA, 19 nt, Artificial Sequence
  Description of Artificial Sequence: Synthetic oligonucleotide
uuauuuuacaaacuggcug

SEQ ID NO: 2414054 - RNA, 19 nt, Artificial Sequence
  Description of Artificial Sequence: Synthetic oligonucleotide
auuaacuucacaccugggc

SEQ ID NO: 2414055 - RNA, 19 nt, Artificial Sequence
  Description of Artificial Sequence: Synthetic oligonucleotide
ucuaauuccuaaauaaaug

SEQ ID NO: 2414056 - RNA, 19 nt, Artificial Sequence
  Description of Artificial Sequence: Synthetic oligonucleotide
uuaauggcaagguucaagg

SEQ ID NO: 2414057 - RNA, 19 nt, Artificial Sequence
  Description of Artificial Sequence: Synthetic oligonucleotide
cuuuaauauaccaaaguac

SEQ ID NO: 2414058 - RNA, 19 nt, Artificial Sequence
  Description of Artificial Sequence: Synthetic oligonucleotide
acuuaaaacauacagacuu

SEQ ID NO: 2414059 - RNA, 19 nt, Artificial Sequence
  Description of Artificial Sequence: Synthetic oligonucleotide
aauaacuugaagaaaguca

SEQ ID NO: 2414060 - RNA, 19 nt, Artificial Sequence
  Description of Artificial Sequence: Synthetic oligonucleotide
uuucacaacaguuuuacac

SEQ ID NO: 2414061 - RNA, 19 nt, Artificial Sequence
  Description of Artificial Sequence: Synthetic oligonucleotide
ucucguauuuuacaggagg

SEQ ID NO: 2414062 - RNA, 19 nt, Artificial Sequence
  Description of Artificial Sequence: Synthetic oligonucleotide
aaauuugaagugugugccc

SEQ ID NO: 2414063 - RNA, 19 nt, Artificial Sequence
  Description of Artificial Sequence: Synthetic oligonucleotide
aaagauuaaguuuauuuua

SEQ ID NO: 2414064 - RNA, 19 nt, Artificial Sequence
  Description of Artificial Sequence: Synthetic oligonucleotide
aacucuaauuccuaaauaa

SEQ ID NO: 2414065 - RNA, 19 nt, Artificial Sequence
  Description of Artificial Sequence: Synthetic oligonucleotide
uacaggaggacuuaaaaca

SEQ ID NO: 2414066 - RNA, 19 nt, Artificial Sequence
  Description of Artificial Sequence: Synthetic oligonucleotide
accuggucaagauuaaucc

SEQ ID NO: 2414067 - RNA, 19 nt, Artificial Sequence
  Description of Artificial Sequence: Synthetic oligonucleotide
uauuuuacaaacuggcuga

SEQ ID NO: 2414068 - RNA, 19 nt, Artificial Sequence
  Description of Artificial Sequence: Synthetic oligonucleotide
aagauuaaguuuauuuuac

SEQ ID NO: 2414069 - RNA, 19 nt, Artificial Sequence
  Description of Artificial Sequence: Synthetic oligonucleotide
aacauacagacuuuaauau

SEQ ID NO: 2414070 - RNA, 19 nt, Artificial Sequence
  Description of Artificial Sequence: Synthetic oligonucleotide
uuuagcuuauuucauugcc

SEQ ID NO: 2414071 - RNA, 19 nt, Artificial Sequence
  Description of Artificial Sequence: Synthetic oligonucleotide
uugaagaaagucaauagaa

SEQ ID NO: 2414072 - RNA, 19 nt, Artificial Sequence
  Description of Artificial Sequence: Synthetic oligonucleotide
uuacacagaaugcuaagag

SEQ ID NO: 2414073 - RNA, 19 nt, Artificial Sequence
  Description of Artificial Sequence: Synthetic oligonucleotide
cauacagacuuuaauauac

SEQ ID NO: 2414074 - RNA, 19 nt, Artificial Sequence
  Description of Artificial Sequence: Synthetic oligonucleotide
ucagagaaugguuaccugg

SEQ ID NO: 2414075 - RNA, 19 nt, Artificial Sequence
  Description of Artificial Sequence: Synthetic oligonucleotide
aauccagugauuugucuuc

SEQ ID NO: 2414076 - RNA, 19 nt, Artificial Sequence
  Description of Artificial Sequence: Synthetic oligonucleotide
uuuacaaacuggcugaaaa

SEQ ID NO: 2414077 - RNA, 19 nt, Artificial Sequence
  Description of Artificial Sequence: Synthetic oligonucleotide
aaaacauacagacuuuaau

SEQ ID NO: 2414078 - RNA, 19 nt, Artificial Sequence
  Description of Artificial Sequence: Synthetic oligonucleotide
acuccauuaacuucacacc

SEQ ID NO: 2414079 - RNA, 19 nt, Artificial Sequence
  Description of Artificial Sequence: Synthetic oligonucleotide
aaauaacuugaagaaaguc

SEQ ID NO: 2414080 - RNA, 19 nt, Artificial Sequence
  Description of Artificial Sequence: Synthetic oligonucleotide
auaaauguguuacaauuug

SEQ ID NO: 2414081 - RNA, 19 nt, Artificial Sequence
  Description of Artificial Sequence: Synthetic oligonucleotide
auacuuuuagcuuauuuca

SEQ ID NO: 2414082 - RNA, 19 nt, Artificial Sequence
  Description of Artificial Sequence: Synthetic oligonucleotide
caaaauuugaagugugugc

SEQ ID NO: 2414083 - RNA, 19 nt, Artificial Sequence
  Description of Artificial Sequence: Synthetic oligonucleotide
aauggcaagguucaaggga

SEQ ID NO: 2414084 - RNA, 19 nt, Artificial Sequence
  Description of Artificial Sequence: Synthetic oligonucleotide
uuaacuucacaccugggcu

SEQ ID NO: 2414085 - RNA, 19 nt, Artificial Sequence
  Description of Artificial Sequence: Synthetic oligonucleotide
aauuccuaaauaaaugugu

SEQ ID NO: 2414086 - RNA, 19 nt, Artificial Sequence
  Description of Artificial Sequence: Synthetic oligonucleotide
guuuauuuuacaaacuggc

SEQ ID NO: 2414087 - RNA, 19 nt, Artificial Sequence
  Description of Artificial Sequence: Synthetic oligonucleotide
aaagaauccagugauuugu

SEQ ID NO: 2414088 - RNA, 19 nt, Artificial Sequence
  Description of Artificial Sequence: Synthetic oligonucleotide
uaauuccuaaauaaaugug

SEQ ID NO: 2414089 - RNA, 19 nt, Artificial Sequence
  Description of Artificial Sequence: Synthetic oligonucleotide
uuuauuuuacaaacuggcu

SEQ ID NO: 2414090 - RNA, 19 nt, Artificial Sequence
  Description of Artificial Sequence: Synthetic oligonucleotide
acuugaagaaagucaauag

SEQ ID NO: 2414091 - RNA, 19 nt, Artificial Sequence
  Description of Artificial Sequence: Synthetic oligonucleotide
uccuaaauaaauguguuac

SEQ ID NO: 2414092 - RNA, 19 nt, Artificial Sequence
  Description of Artificial Sequence: Synthetic oligonucleotide
uuuucucguauuuuacagg

SEQ ID NO: 2414093 - RNA, 19 nt, Artificial Sequence
  Description of Artificial Sequence: Synthetic oligonucleotide
aaaagaauccagugauuug

SEQ ID NO: 2414094 - RNA, 19 nt, Artificial Sequence
  Description of Artificial Sequence: Synthetic oligonucleotide
uuucucguauuuuacagga

SEQ ID NO: 2414095 - RNA, 19 nt, Artificial Sequence
  Description of Artificial Sequence: Synthetic oligonucleotide
cuagucaguucuuucaagg

SEQ ID NO: 2414096 - RNA, 19 nt, Artificial Sequence
  Description of Artificial Sequence: Synthetic oligonucleotide
uucacaacaguuuuacaca

SEQ ID NO: 2414097 - RNA, 19 nt, Artificial Sequence
  Description of Artificial Sequence: Synthetic oligonucleotide
uucauugccaacccuagga

SEQ ID NO: 2414098 - RNA, 19 nt, Artificial Sequence
  Description of Artificial Sequence: Synthetic oligonucleotide
ggacuuaaaacauacagac

SEQ ID NO: 2414099 - RNA, 19 nt, Artificial Sequence
  Description of Artificial Sequence: Synthetic oligonucleotide
uaaauguguuacaauuugc

SEQ ID NO: 2414100 - RNA, 19 nt, Artificial Sequence
  Description of Artificial Sequence: Synthetic oligonucleotide
acuuuaauauaccaaagua

SEQ ID NO: 2414101 - RNA, 19 nt, Artificial Sequence
  Description of Artificial Sequence: Synthetic oligonucleotide
gcuaagagcacuuuucucg

SEQ ID NO: 2414102 - RNA, 19 nt, Artificial Sequence
  Description of Artificial Sequence: Synthetic oligonucleotide
uauaccaaaguacauccaa

SEQ ID NO: 2414103 - RNA, 19 nt, Artificial Sequence
  Description of Artificial Sequence: Synthetic oligonucleotide
cuuuucucguauuuuacag

SEQ ID NO: 2414104 - RNA, 19 nt, Artificial Sequence
  Description of Artificial Sequence: Synthetic oligonucleotide
uuuacaggaggacuuaaaa

SEQ ID NO: 2414105 - RNA, 19 nt, Artificial Sequence
  Description of Artificial Sequence: Synthetic oligonucleotide
ugcuuaaaauuuaaaggcu

SEQ ID NO: 2414106 - RNA, 19 nt, Artificial Sequence
  Description of Artificial Sequence: Synthetic oligonucleotide
uuuaaaggcuuaauggcaa

SEQ ID NO: 2414107 - RNA, 19 nt, Artificial Sequence
  Description of Artificial Sequence: Synthetic oligonucleotide
uucuuaaucuccuccuggg

SEQ ID NO: 2414108 - RNA, 19 nt, Artificial Sequence
  Description of Artificial Sequence: Synthetic oligonucleotide
uguauuucacaacaguuuu

SEQ ID NO: 2414109 - RNA, 19 nt, Artificial Sequence
  Description of Artificial Sequence: Synthetic oligonucleotide
gauuaaguuuauuuuacaa

SEQ ID NO: 2414110 - RNA, 19 nt, Artificial Sequence
  Description of Artificial Sequence: Synthetic oligonucleotide
aaauguguuacaauuugcu

SEQ ID NO: 2414111 - RNA, 19 nt, Artificial Sequence
  Description of Artificial Sequence: Synthetic oligonucleotide
uuagcuuauuucauugcca

SEQ ID NO: 2414112 - RNA, 19 nt, Artificial Sequence
  Description of Artificial Sequence: Synthetic oligonucleotide
acaguuuuacacagaaugc

SEQ ID NO: 2414113 - RNA, 19 nt, Artificial Sequence
  Description of Artificial Sequence: Synthetic oligonucleotide
auuccaaccgccaucuucc

SEQ ID NO: 2414114 - RNA, 19 nt, Artificial Sequence
  Description of Artificial Sequence: Synthetic oligonucleotide
acacauguauuucacaaca

SEQ ID NO: 2414115 - RNA, 19 nt, Artificial Sequence
  Description of Artificial Sequence: Synthetic oligonucleotide
aguuuauuuuacaaacugg

SEQ ID NO: 2414116 - RNA, 19 nt, Artificial Sequence
  Description of Artificial Sequence: Synthetic oligonucleotide
uguguuacaauuugcuuaa

SEQ ID NO: 2414117 - RNA, 19 nt, Artificial Sequence
  Description of Artificial Sequence: Synthetic oligonucleotide
aauugcacacauguauuuc

SEQ ID NO: 2414118 - RNA, 19 nt, Artificial Sequence
  Description of Artificial Sequence: Synthetic oligonucleotide
aaucuccuuaacucgauau

SEQ ID NO: 2414119 - RNA, 19 nt, Artificial Sequence
  Description of Artificial Sequence: Synthetic oligonucleotide
uaacgcgcgauuccaaccg

SEQ ID NO: 2414120 - RNA, 19 nt, Artificial Sequence
  Description of Artificial Sequence: Synthetic oligonucleotide
uacacagaaugcuaagagc

SEQ ID NO: 2414121 - RNA, 19 nt, Artificial Sequence
  Description of Artificial Sequence: Synthetic oligonucleotide
uaauauaccaaaguacauc

SEQ ID NO: 2414122 - RNA, 19 nt, Artificial Sequence
  Description of Artificial Sequence: Synthetic oligonucleotide
uauuucauugccaacccua

SEQ ID NO: 2414123 - RNA, 19 nt, Artificial Sequence
  Description of Artificial Sequence: Synthetic oligonucleotide
aguacauccaacucuaauu

SEQ ID NO: 2414124 - RNA, 19 nt, Artificial Sequence
  Description of Artificial Sequence: Synthetic oligonucleotide
ucuccuuaacucgauaucc

SEQ ID NO: 2414125 - RNA, 19 nt, Artificial Sequence
  Description of Artificial Sequence: Synthetic oligonucleotide
uuacaggaggacuuaaaac

SEQ ID NO: 2414126 - RNA, 19 nt, Artificial Sequence
  Description of Artificial Sequence: Synthetic oligonucleotide
ucacaacaguuuuacacag

SEQ ID NO: 2414127 - RNA, 19 nt, Artificial Sequence
  Description of Artificial Sequence: Synthetic oligonucleotide
cagugauuugucuucagag

SEQ ID NO: 2414128 - RNA, 19 nt, Artificial Sequence
  Description of Artificial Sequence: Synthetic oligonucleotide
aauguguuacaauuugcuu

SEQ ID NO: 2414129 - RNA, 19 nt, Artificial Sequence
  Description of Artificial Sequence: Synthetic oligonucleotide
uuuuagcuuauuucauugc

SEQ ID NO: 2414130 - RNA, 19 nt, Artificial Sequence
  Description of Artificial Sequence: Synthetic oligonucleotide
aggaaacuccauuaacuuc

SEQ ID NO: 2414131 - RNA, 19 nt, Artificial Sequence
  Description of Artificial Sequence: Synthetic oligonucleotide
uuaauauaccaaaguacau

SEQ ID NO: 2414132 - RNA, 19 nt, Artificial Sequence
  Description of Artificial Sequence: Synthetic oligonucleotide
cuuauuucauugccaaccc

SEQ ID NO: 2414133 - RNA, 19 nt, Artificial Sequence
  Description of Artificial Sequence: Synthetic oligonucleotide
ugccaaucuccuuaacucg

SEQ ID NO: 2414134 - RNA, 19 nt, Artificial Sequence
  Description of Artificial Sequence: Synthetic oligonucleotide
accaaaguacauccaacuc

SEQ ID NO: 2414135 - RNA, 19 nt, Artificial Sequence
  Description of Artificial Sequence: Synthetic oligonucleotide
aagaaagucaauagaauuu

SEQ ID NO: 2414136 - RNA, 19 nt, Artificial Sequence
  Description of Artificial Sequence: Synthetic oligonucleotide
auguguuacaauuugcuua

SEQ ID NO: 2414137 - RNA, 19 nt, Artificial Sequence
  Description of Artificial Sequence: Synthetic oligonucleotide
uuugucuucagagaauggu

SEQ ID NO: 2414138 - RNA, 19 nt, Artificial Sequence
  Description of Artificial Sequence: Synthetic oligonucleotide
uacagacuuuaauauacca

SEQ ID NO: 2414139 - RNA, 19 nt, Artificial Sequence
  Description of Artificial Sequence: Synthetic oligonucleotide
uguuacaauuugcuuaaaa

SEQ ID NO: 2414140 - RNA, 19 nt, Artificial Sequence
  Description of Artificial Sequence: Synthetic oligonucleotide
auugccaacccuaggaaac

SEQ ID NO: 2414141 - RNA, 19 nt, Artificial Sequence
  Description of Artificial Sequence: Synthetic oligonucleotide
acaacaguuuuacacagaa

SEQ ID NO: 2414142 - RNA, 19 nt, Artificial Sequence
  Description of Artificial Sequence: Synthetic oligonucleotide
uugcaaaauuugaagugug

SEQ ID NO: 2414143 - RNA, 19 nt, Artificial Sequence
  Description of Artificial Sequence: Synthetic oligonucleotide
agugauuugucuucagaga

SEQ ID NO: 2414144 - RNA, 19 nt, Artificial Sequence
  Description of Artificial Sequence: Synthetic oligonucleotide
aauaaauguguuacaauuu

SEQ ID NO: 2414145 - RNA, 19 nt, Artificial Sequence
  Description of Artificial Sequence: Synthetic oligonucleotide
cuucuuaaucuccuccugg

SEQ ID NO: 2414146 - RNA, 19 nt, Artificial Sequence
  Description of Artificial Sequence: Synthetic oligonucleotide
auugcacacauguauuuca

SEQ ID NO: 2414147 - RNA, 19 nt, Artificial Sequence
  Description of Artificial Sequence: Synthetic oligonucleotide
aauuugaagugugugcccu

SEQ ID NO: 2414148 - RNA, 19 nt, Artificial Sequence
  Description of Artificial Sequence: Synthetic oligonucleotide
acauguauuucacaacagu

SEQ ID NO: 2414149 - RNA, 19 nt, Artificial Sequence
  Description of Artificial Sequence: Synthetic oligonucleotide
gaggaaaagauuaaguuua

SEQ ID NO: 2414150 - RNA, 19 nt, Artificial Sequence
  Description of Artificial Sequence: Synthetic oligonucleotide
uaauggcaagguucaaggg

SEQ ID NO: 2414151 - RNA, 19 nt, Artificial Sequence
  Description of Artificial Sequence: Synthetic oligonucleotide
uaccaaaguacauccaacu

SEQ ID NO: 2414152 - RNA, 19 nt, Artificial Sequence
  Description of Artificial Sequence: Synthetic oligonucleotide
uaaaacauacagacuuuaa

SEQ ID NO: 2414153 - RNA, 19 nt, Artificial Sequence
  Description of Artificial Sequence: Synthetic oligonucleotide
aggaggacuuaaaacauac

SEQ ID NO: 2414154 - RNA, 19 nt, Artificial Sequence
  Description of Artificial Sequence: Synthetic oligonucleotide
uuuacacagaaugcuaaga

SEQ ID NO: 2414155 - RNA, 19 nt, Artificial Sequence
  Description of Artificial Sequence: Synthetic oligonucleotide
acacagaaugcuaagagca

SEQ ID NO: 2414156 - RNA, 19 nt, Artificial Sequence
  Description of Artificial Sequence: Synthetic oligonucleotide
uuucauugccaacccuagg

SEQ ID NO: 2414157 - RNA, 19 nt, Artificial Sequence
  Description of Artificial Sequence: Synthetic oligonucleotide
guacauccaacucuaauuc

SEQ ID NO: 2414158 - RNA, 19 nt, Artificial Sequence
  Description of Artificial Sequence: Synthetic oligonucleotide
uuaaaauuuaaaggcuuaa

SEQ ID NO: 2414159 - RNA, 19 nt, Artificial Sequence
  Description of Artificial Sequence: Synthetic oligonucleotide
aucuccuuaacucgauauc

SEQ ID NO: 2414160 - RNA, 19 nt, Artificial Sequence
  Description of Artificial Sequence: Synthetic oligonucleotide
uucuuucaagguugcaucc

SEQ ID NO: 2414161 - RNA, 19 nt, Artificial Sequence
  Description of Artificial Sequence: Synthetic oligonucleotide
uccuuaacucgauauccag

SEQ ID NO: 2414162 - RNA, 19 nt, Artificial Sequence
  Description of Artificial Sequence: Synthetic oligonucleotide
cuugaagaaagucaauaga

SEQ ID NO: 2414163 - RNA, 19 nt, Artificial Sequence
  Description of Artificial Sequence: Synthetic oligonucleotide
uccauuaacuucacaccug

SEQ ID NO: 2414164 - RNA, 19 nt, Artificial Sequence
  Description of Artificial Sequence: Synthetic oligonucleotide
uaaaggcuuaauggcaagg

SEQ ID NO: 2414165 - RNA, 19 nt, Artificial Sequence
  Description of Artificial Sequence: Synthetic oligonucleotide
aaguacauccaacucuaau

SEQ ID NO: 2414166 - RNA, 19 nt, Artificial Sequence
  Description of Artificial Sequence: Synthetic oligonucleotide
uuaaaggcuuaauggcaag

SEQ ID NO: 2414167 - RNA, 19 nt, Artificial Sequence
  Description of Artificial Sequence: Synthetic oligonucleotide
auuuaaaggcuuaauggca

SEQ ID NO: 2414168 - RNA, 19 nt, Artificial Sequence
  Description of Artificial Sequence: Synthetic oligonucleotide
aaugguuaccuggucaaga

SEQ ID NO: 2414169 - RNA, 19 nt, Artificial Sequence
  Description of Artificial Sequence: Synthetic oligonucleotide
aaaggcuuaauggcaaggu

SEQ ID NO: 2414170 - RNA, 19 nt, Artificial Sequence
  Description of Artificial Sequence: Synthetic oligonucleotide
ugcaaaauuugaagugugu

SEQ ID NO: 2414171 - RNA, 19 nt, Artificial Sequence
  Description of Artificial Sequence: Synthetic oligonucleotide
agauuaaguuuauuuuaca

SEQ ID NO: 2414172 - RNA, 19 nt, Artificial Sequence
  Description of Artificial Sequence: Synthetic oligonucleotide
cagacuuuaauauaccaaa

SEQ ID NO: 2414173 - RNA, 19 nt, Artificial Sequence
  Description of Artificial Sequence: Synthetic oligonucleotide
cuaauuccuaaauaaaugu

SEQ ID NO: 2414174 - RNA, 19 nt, Artificial Sequence
  Description of Artificial Sequence: Synthetic oligonucleotide
acuuuucucguauuuuaca

SEQ ID NO: 2414175 - RNA, 19 nt, Artificial Sequence
  Description of Artificial Sequence: Synthetic oligonucleotide
aagagcacuuuucucguau

SEQ ID NO: 2414176 - RNA, 19 nt, Artificial Sequence
  Description of Artificial Sequence: Synthetic oligonucleotide
auacagacuuuaauauacc

SEQ ID NO: 2414177 - RNA, 19 nt, Artificial Sequence
  Description of Artificial Sequence: Synthetic oligonucleotide
gucaagauuaauccuaaaa

SEQ ID NO: 2414178 - RNA, 19 nt, Artificial Sequence
  Description of Artificial Sequence: Synthetic oligonucleotide
uaccuggucaagauuaauc

SEQ ID NO: 2414179 - RNA, 19 nt, Artificial Sequence
  Description of Artificial Sequence: Synthetic oligonucleotide
ugucuucagagaaugguua

SEQ ID NO: 2414180 - RNA, 19 nt, Artificial Sequence
  Description of Artificial Sequence: Synthetic oligonucleotide
cugccaaucuccuuaacuc

SEQ ID NO: 2414181 - RNA, 19 nt, Artificial Sequence
  Description of Artificial Sequence: Synthetic oligonucleotide
uaaaauuuaaaggcuuaau

SEQ ID NO: 2414182 - RNA, 19 nt, Artificial Sequence
  Description of Artificial Sequence: Synthetic oligonucleotide
gauuccaaccgccaucuuc

SEQ ID NO: 2414183 - RNA, 19 nt, Artificial Sequence
  Description of Artificial Sequence: Synthetic oligonucleotide
cuuaauggcaagguucaag

SEQ ID NO: 2414184 - RNA, 19 nt, Artificial Sequence
  Description of Artificial Sequence: Synthetic oligonucleotide
uagcuuauuucauugccaa

SEQ ID NO: 2414185 - RNA, 19 nt, Artificial Sequence
  Description of Artificial Sequence: Synthetic oligonucleotide
guucuuucaagguugcauc

SEQ ID NO: 2414186 - RNA, 19 nt, Artificial Sequence
  Description of Artificial Sequence: Synthetic oligonucleotide
auaccaaaguacauccaac

SEQ ID NO: 2414187 - RNA, 19 nt, Artificial Sequence
  Description of Artificial Sequence: Synthetic oligonucleotide
cuaaauaaauguguuacaa

SEQ ID NO: 2414188 - RNA, 19 nt, Artificial Sequence
  Description of Artificial Sequence: Synthetic oligonucleotide
gagaaugguuaccugguca

SEQ ID NO: 2414189 - RNA, 19 nt, Artificial Sequence
  Description of Artificial Sequence: Synthetic oligonucleotide
aacgcgcgauuccaaccgc

SEQ ID NO: 2414190 - RNA, 19 nt, Artificial Sequence
  Description of Artificial Sequence: Synthetic oligonucleotide
uucacaccugggcuaauug

SEQ ID NO: 2414191 - RNA, 19 nt, Artificial Sequence
  Description of Artificial Sequence: Synthetic oligonucleotide
gcuuauuucauugccaacc

SEQ ID NO: 2414192 - RNA, 19 nt, Artificial Sequence
  Description of Artificial Sequence: Synthetic oligonucleotide
uaggaaacuccauuaacuu

SEQ ID NO: 2414193 - RNA, 19 nt, Artificial Sequence
  Description of Artificial Sequence: Synthetic oligonucleotide
uuuuacaggaggacuuaaa

SEQ ID NO: 2414194 - RNA, 19 nt, Artificial Sequence
  Description of Artificial Sequence: Synthetic oligonucleotide
uuaaaacauacagacuuua

SEQ ID NO: 2414195 - RNA, 19 nt, Artificial Sequence
  Description of Artificial Sequence: Synthetic oligonucleotide
gucaguucuuucaagguug

SEQ ID NO: 2414196 - RNA, 19 nt, Artificial Sequence
  Description of Artificial Sequence: Synthetic oligonucleotide
gacuuuaauauaccaaagu

SEQ ID NO: 2414197 - RNA, 19 nt, Artificial Sequence
  Description of Artificial Sequence: Synthetic oligonucleotide
aacccuaggaaacuccauu

SEQ ID NO: 2414198 - RNA, 19 nt, Artificial Sequence
  Description of Artificial Sequence: Synthetic oligonucleotide
uacuuuuagcuuauuucau

SEQ ID NO: 2414199 - RNA, 19 nt, Artificial Sequence
  Description of Artificial Sequence: Synthetic oligonucleotide
agaaugguuaccuggucaa

SEQ ID NO: 2414200 - RNA, 19 nt, Artificial Sequence
  Description of Artificial Sequence: Synthetic oligonucleotide
agcuuauuucauugccaac

SEQ ID NO: 2414201 - RNA, 19 nt, Artificial Sequence
  Description of Artificial Sequence: Synthetic oligonucleotide
accugggcuaauugcacac

SEQ ID NO: 2414202 - RNA, 19 nt, Artificial Sequence
  Description of Artificial Sequence: Synthetic oligonucleotide
ucaguucuuucaagguugc

SEQ ID NO: 2414203 - RNA, 19 nt, Artificial Sequence
  Description of Artificial Sequence: Synthetic oligonucleotide
gugauuugucuucagagaa

SEQ ID NO: 2414204 - RNA, 19 nt, Artificial Sequence
  Description of Artificial Sequence: Synthetic oligonucleotide
uuauuucauugccaacccu

SEQ ID NO: 2414205 - RNA, 19 nt, Artificial Sequence
  Description of Artificial Sequence: Synthetic oligonucleotide
ucacaccugggcuaauugc

SEQ ID NO: 2414206 - RNA, 19 nt, Artificial Sequence
  Description of Artificial Sequence: Synthetic oligonucleotide
uccuucuuaaucuccuccu

SEQ ID NO: 2414207 - RNA, 19 nt, Artificial Sequence
  Description of Artificial Sequence: Synthetic oligonucleotide
ucuuaaucuccuccugggu

SEQ ID NO: 2414208 - RNA, 19 nt, Artificial Sequence
  Description of Artificial Sequence: Synthetic oligonucleotide
uugucuucagagaaugguu

SEQ ID NO: 2414209 - RNA, 19 nt, Artificial Sequence
  Description of Artificial Sequence: Synthetic oligonucleotide
ucgggcuccuucuuaaucu

SEQ ID NO: 2414210 - RNA, 19 nt, Artificial Sequence
  Description of Artificial Sequence: Synthetic oligonucleotide
uucucguauuuuacaggag

SEQ ID NO: 2414211 - RNA, 19 nt, Artificial Sequence
  Description of Artificial Sequence: Synthetic oligonucleotide
aggacuuaaaacauacaga

SEQ ID NO: 2414212 - RNA, 19 nt, Artificial Sequence
  Description of Artificial Sequence: Synthetic oligonucleotide
auggcaagguucaagggag

SEQ ID NO: 2414213 - RNA, 19 nt, Artificial Sequence
  Description of Artificial Sequence: Synthetic oligonucleotide
cacauguauuucacaacag

SEQ ID NO: 2414214 - RNA, 19 nt, Artificial Sequence
  Description of Artificial Sequence: Synthetic oligonucleotide
agacuuuaauauaccaaag

SEQ ID NO: 2414215 - RNA, 19 nt, Artificial Sequence
  Description of Artificial Sequence: Synthetic oligonucleotide
acuuuuagcuuauuucauu

SEQ ID NO: 2414216 - RNA, 19 nt, Artificial Sequence
  Description of Artificial Sequence: Synthetic oligonucleotide
cuuaaaauuuaaaggcuua

SEQ ID NO: 2414217 - RNA, 19 nt, Artificial Sequence
  Description of Artificial Sequence: Synthetic oligonucleotide
ucuucagagaaugguuacc

SEQ ID NO: 2414218 - RNA, 19 nt, Artificial Sequence
  Description of Artificial Sequence: Synthetic oligonucleotide
uaauugcacacauguauuu

SEQ ID NO: 2414219 - RNA, 19 nt, Artificial Sequence
  Description of Artificial Sequence: Synthetic oligonucleotide
ugauuugucuucagagaau

SEQ ID NO: 2414220 - RNA, 19 nt, Artificial Sequence
  Description of Artificial Sequence: Synthetic oligonucleotide
ggaaacuccauuaacuuca

SEQ ID NO: 2414221 - RNA, 19 nt, Artificial Sequence
  Description of Artificial Sequence: Synthetic oligonucleotide
aguucuuucaagguugcau

SEQ ID NO: 2414222 - RNA, 19 nt, Artificial Sequence
  Description of Artificial Sequence: Synthetic oligonucleotide
cuuaacucgauauccaggu

SEQ ID NO: 2414223 - RNA, 19 nt, Artificial Sequence
  Description of Artificial Sequence: Synthetic oligonucleotide
uggucaagauuaauccuaa

SEQ ID NO: 2414224 - RNA, 19 nt, Artificial Sequence
  Description of Artificial Sequence: Synthetic oligonucleotide
cuaggaaacuccauuaacu

SEQ ID NO: 2414225 - RNA, 19 nt, Artificial Sequence
  Description of Artificial Sequence: Synthetic oligonucleotide
uuccuaaauaaauguguua

SEQ ID NO: 2414226 - RNA, 19 nt, Artificial Sequence
  Description of Artificial Sequence: Synthetic oligonucleotide
acauacagacuuuaauaua

SEQ ID NO: 2414227 - RNA, 19 nt, Artificial Sequence
  Description of Artificial Sequence: Synthetic oligonucleotide
aaggcuuaauggcaagguu

SEQ ID NO: 2414228 - RNA, 19 nt, Artificial Sequence
  Description of Artificial Sequence: Synthetic oligonucleotide
cacacauguauuucacaac

SEQ ID NO: 2414229 - RNA, 19 nt, Artificial Sequence
  Description of Artificial Sequence: Synthetic oligonucleotide
uucaagggaggaaaagauu

SEQ ID NO: 2414230 - RNA, 19 nt, Artificial Sequence
  Description of Artificial Sequence: Synthetic oligonucleotide
uucagagaaugguuaccug

SEQ ID NO: 2414231 - RNA, 19 nt, Artificial Sequence
  Description of Artificial Sequence: Synthetic oligonucleotide
uugcacacauguauuucac

SEQ ID NO: 2414232 - RNA, 19 nt, Artificial Sequence
  Description of Artificial Sequence: Synthetic oligonucleotide
uccaacucuaauuccuaaa

SEQ ID NO: 2414233 - RNA, 19 nt, Artificial Sequence
  Description of Artificial Sequence: Synthetic oligonucleotide
agaauccagugauuugucu

SEQ ID NO: 2414234 - RNA, 19 nt, Artificial Sequence
  Description of Artificial Sequence: Synthetic oligonucleotide
auuucauugccaacccuag

SEQ ID NO: 2414235 - RNA, 19 nt, Artificial Sequence
  Description of Artificial Sequence: Synthetic oligonucleotide
cacuuuucucguauuuuac

SEQ ID NO: 2414236 - RNA, 19 nt, Artificial Sequence
  Description of Artificial Sequence: Synthetic oligonucleotide
agcaggagcgggcaggucu

SEQ ID NO: 2414237 - RNA, 19 nt, Artificial Sequence
  Description of Artificial Sequence: Synthetic oligonucleotide
guaacgcgcgauuccaacc

SEQ ID NO: 2414238 - RNA, 19 nt, Artificial Sequence
  Description of Artificial Sequence: Synthetic oligonucleotide
caaaguacauccaacucua

SEQ ID NO: 2414239 - RNA, 19 nt, Artificial Sequence
  Description of Artificial Sequence: Synthetic oligonucleotide
cauuaacuucacaccuggg

SEQ ID NO: 2414240 - RNA, 19 nt, Artificial Sequence
  Description of Artificial Sequence: Synthetic oligonucleotide
ugcacacauguauuucaca

SEQ ID NO: 2414241 - RNA, 19 nt, Artificial Sequence
  Description of Artificial Sequence: Synthetic oligonucleotide
acauccaacucuaauuccu

SEQ ID NO: 2414242 - RNA, 19 nt, Artificial Sequence
  Description of Artificial Sequence: Synthetic oligonucleotide
ucguauuuuacaggaggac

SEQ ID NO: 2414243 - RNA, 19 nt, Artificial Sequence
  Description of Artificial Sequence: Synthetic oligonucleotide
acagaaugcuaagagcacu

SEQ ID NO: 2414244 - RNA, 19 nt, Artificial Sequence
  Description of Artificial Sequence: Synthetic oligonucleotide
ccauuaacuucacaccugg

SEQ ID NO: 2414245 - RNA, 19 nt, Artificial Sequence
  Description of Artificial Sequence: Synthetic oligonucleotide
gcaaaauuugaagugugug

SEQ ID NO: 2414246 - RNA, 19 nt, Artificial Sequence
  Description of Artificial Sequence: Synthetic oligonucleotide
ucuuucaagguugcaucca

SEQ ID NO: 2414247 - RNA, 19 nt, Artificial Sequence
  Description of Artificial Sequence: Synthetic oligonucleotide
cucguauuuuacaggagga

SEQ ID NO: 2414248 - RNA, 19 nt, Artificial Sequence
  Description of Artificial Sequence: Synthetic oligonucleotide
acagacuuuaauauaccaa

SEQ ID NO: 2414249 - RNA, 19 nt, Artificial Sequence
  Description of Artificial Sequence: Synthetic oligonucleotide
uuaacucgauauccagguc

SEQ ID NO: 2414250 - RNA, 19 nt, Artificial Sequence
  Description of Artificial Sequence: Synthetic oligonucleotide
auuucacaacaguuuuaca

SEQ ID NO: 2414251 - RNA, 19 nt, Artificial Sequence
  Description of Artificial Sequence: Synthetic oligonucleotide
auguauuucacaacaguuu

SEQ ID NO: 2414252 - RNA, 19 nt, Artificial Sequence
  Description of Artificial Sequence: Synthetic oligonucleotide
ccaaccgccaucuuccucc

SEQ ID NO: 2414253 - RNA, 19 nt, Artificial Sequence
  Description of Artificial Sequence: Synthetic oligonucleotide
ugcuaagagcacuuuucuc

SEQ ID NO: 2414254 - RNA, 19 nt, Artificial Sequence
  Description of Artificial Sequence: Synthetic oligonucleotide
ugggcuaauugcacacaug

SEQ ID NO: 2414255 - RNA, 19 nt, Artificial Sequence
  Description of Artificial Sequence: Synthetic oligonucleotide
uaacuucacaccugggcua

SEQ ID NO: 2414256 - RNA, 19 nt, Artificial Sequence
  Description of Artificial Sequence: Synthetic oligonucleotide
ccuuaacucgauauccagg

SEQ ID NO: 2414257 - RNA, 19 nt, Artificial Sequence
  Description of Artificial Sequence: Synthetic oligonucleotide
augguuaccuggucaagau

SEQ ID NO: 2414258 - RNA, 19 nt, Artificial Sequence
  Description of Artificial Sequence: Synthetic oligonucleotide
gagcgggcaggucuucucg

SEQ ID NO: 2414259 - RNA, 19 nt, Artificial Sequence
  Description of Artificial Sequence: Synthetic oligonucleotide
gucuucagagaaugguuac

SEQ ID NO: 2414260 - RNA, 19 nt, Artificial Sequence
  Description of Artificial Sequence: Synthetic oligonucleotide
cucuaauuccuaaauaaau

SEQ ID NO: 2414261 - RNA, 19 nt, Artificial Sequence
  Description of Artificial Sequence: Synthetic oligonucleotide
auuccuaaauaaauguguu

SEQ ID NO: 2414262 - RNA, 19 nt, Artificial Sequence
  Description of Artificial Sequence: Synthetic oligonucleotide
uggcaagguucaagggagg

SEQ ID NO: 2414263 - RNA, 19 nt, Artificial Sequence
  Description of Artificial Sequence: Synthetic oligonucleotide
auuugucuucagagaaugg

SEQ ID NO: 2414264 - RNA, 19 nt, Artificial Sequence
  Description of Artificial Sequence: Synthetic oligonucleotide
cuggucaagauuaauccua

SEQ ID NO: 2414265 - RNA, 19 nt, Artificial Sequence
  Description of Artificial Sequence: Synthetic oligonucleotide
agcgggcaggucuucucgc

SEQ ID NO: 2414266 - RNA, 19 nt, Artificial Sequence
  Description of Artificial Sequence: Synthetic oligonucleotide
guuuuacacagaaugcuaa

SEQ ID NO: 2414267 - RNA, 19 nt, Artificial Sequence
  Description of Artificial Sequence: Synthetic oligonucleotide
uauuuuacaggaggacuua

SEQ ID NO: 2414268 - RNA, 19 nt, Artificial Sequence
  Description of Artificial Sequence: Synthetic oligonucleotide
agggaggaaaagauuaagu

SEQ ID NO: 2414269 - RNA, 19 nt, Artificial Sequence
  Description of Artificial Sequence: Synthetic oligonucleotide
acucuaauuccuaaauaaa

SEQ ID NO: 2414270 - RNA, 19 nt, Artificial Sequence
  Description of Artificial Sequence: Synthetic oligonucleotide
cacaccugggcuaauugca

SEQ ID NO: 2414271 - RNA, 19 nt, Artificial Sequence
  Description of Artificial Sequence: Synthetic oligonucleotide
gcuaauugcacacauguau

SEQ ID NO: 2414272 - RNA, 19 nt, Artificial Sequence
  Description of Artificial Sequence: Synthetic oligonucleotide
uccagugauuugucuucag

SEQ ID NO: 2414273 - RNA, 19 nt, Artificial Sequence
  Description of Artificial Sequence: Synthetic oligonucleotide
cauguauuucacaacaguu

SEQ ID NO: 2414274 - RNA, 19 nt, Artificial Sequence
  Description of Artificial Sequence: Synthetic oligonucleotide
gaaugguuaccuggucaag

SEQ ID NO: 2414275 - RNA, 19 nt, Artificial Sequence
  Description of Artificial Sequence: Synthetic oligonucleotide
ggagaacucguccauccug

SEQ ID NO: 2414276 - RNA, 19 nt, Artificial Sequence
  Description of Artificial Sequence: Synthetic oligonucleotide
gaauccagugauuugucuu

SEQ ID NO: 2414277 - RNA, 19 nt, Artificial Sequence
  Description of Artificial Sequence: Synthetic oligonucleotide
guucccgcgggagaacucg

SEQ ID NO: 2414278 - RNA, 19 nt, Artificial Sequence
  Description of Artificial Sequence: Synthetic oligonucleotide
agguucaagggaggaaaag

SEQ ID NO: 2414279 - RNA, 19 nt, Artificial Sequence
  Description of Artificial Sequence: Synthetic oligonucleotide
acccuaggaaacuccauua

SEQ ID NO: 2414280 - RNA, 19 nt, Artificial Sequence
  Description of Artificial Sequence: Synthetic oligonucleotide
gcacacauguauuucacaa

SEQ ID NO: 2414281 - RNA, 19 nt, Artificial Sequence
  Description of Artificial Sequence: Synthetic oligonucleotide
acaggaggacuuaaaacau

SEQ ID NO: 2414282 - RNA, 19 nt, Artificial Sequence
  Description of Artificial Sequence: Synthetic oligonucleotide
aacuucacaccugggcuaa

SEQ ID NO: 2414283 - RNA, 19 nt, Artificial Sequence
  Description of Artificial Sequence: Synthetic oligonucleotide
caagguucaagggaggaaa

SEQ ID NO: 2414284 - RNA, 19 nt, Artificial Sequence
  Description of Artificial Sequence: Synthetic oligonucleotide
gguucaagggaggaaaaga

SEQ ID NO: 2414285 - RNA, 19 nt, Artificial Sequence
  Description of Artificial Sequence: Synthetic oligonucleotide
auccaacucuaauuccuaa

SEQ ID NO: 2414286 - RNA, 19 nt, Artificial Sequence
  Description of Artificial Sequence: Synthetic oligonucleotide
gaaacuccauuaacuucac

SEQ ID NO: 2414287 - RNA, 19 nt, Artificial Sequence
  Description of Artificial Sequence: Synthetic oligonucleotide
ggaggaaaagauuaaguuu

SEQ ID NO: 2414288 - RNA, 19 nt, Artificial Sequence
  Description of Artificial Sequence: Synthetic oligonucleotide
cuccauuaacuucacaccu

SEQ ID NO: 2414289 - RNA, 19 nt, Artificial Sequence
  Description of Artificial Sequence: Synthetic oligonucleotide
cuccuuaacucgauaucca

SEQ ID NO: 2414290 - RNA, 19 nt, Artificial Sequence
  Description of Artificial Sequence: Synthetic oligonucleotide
ccuaggaaacuccauuaac

SEQ ID NO: 2414291 - RNA, 19 nt, Artificial Sequence
  Description of Artificial Sequence: Synthetic oligonucleotide
gguuaccuggucaagauua

SEQ ID NO: 2414292 - RNA, 19 nt, Artificial Sequence
  Description of Artificial Sequence: Synthetic oligonucleotide
auauaccaaaguacaucca

SEQ ID NO: 2414293 - RNA, 19 nt, Artificial Sequence
  Description of Artificial Sequence: Synthetic oligonucleotide
cuaauugcacacauguauu

SEQ ID NO: 2414294 - RNA, 19 nt, Artificial Sequence
  Description of Artificial Sequence: Synthetic oligonucleotide
gggcuaauugcacacaugu

SEQ ID NO: 2414295 - RNA, 19 nt, Artificial Sequence
  Description of Artificial Sequence: Synthetic oligonucleotide
auuuuacaggaggacuuaa

SEQ ID NO: 2414296 - RNA, 19 nt, Artificial Sequence
  Description of Artificial Sequence: Synthetic oligonucleotide
ugguuaccuggucaagauu

SEQ ID NO: 2414297 - RNA, 19 nt, Artificial Sequence
  Description of Artificial Sequence: Synthetic oligonucleotide
aaaauacuuuuagcuuauu

SEQ ID NO: 2414298 - RNA, 19 nt, Artificial Sequence
  Description of Artificial Sequence: Synthetic oligonucleotide
caacucuaauuccuaaaua

SEQ ID NO: 2414299 - RNA, 19 nt, Artificial Sequence
  Description of Artificial Sequence: Synthetic oligonucleotide
aagguucaagggaggaaaa

SEQ ID NO: 2414300 - RNA, 19 nt, Artificial Sequence
  Description of Artificial Sequence: Synthetic oligonucleotide
cuaagagcacuuuucucgu

SEQ ID NO: 2414301 - RNA, 19 nt, Artificial Sequence
  Description of Artificial Sequence: Synthetic oligonucleotide
ccuaaauaaauguguuaca

SEQ ID NO: 2414302 - RNA, 19 nt, Artificial Sequence
  Description of Artificial Sequence: Synthetic oligonucleotide
agcacuuuucucguauuuu

SEQ ID NO: 2414303 - RNA, 19 nt, Artificial Sequence
  Description of Artificial Sequence: Synthetic oligonucleotide
auuuuacaaacuggcugaa

SEQ ID NO: 2414304 - RNA, 19 nt, Artificial Sequence
  Description of Artificial Sequence: Synthetic oligonucleotide
cucgggcuccuucuuaauc

SEQ ID NO: 2414305 - RNA, 19 nt, Artificial Sequence
  Description of Artificial Sequence: Synthetic oligonucleotide
cuuaaaacauacagacuuu

SEQ ID NO: 2414306 - RNA, 19 nt, Artificial Sequence
  Description of Artificial Sequence: Synthetic oligonucleotide
gaaugcuaagagcacuuuu

SEQ ID NO: 2414307 - RNA, 19 nt, Artificial Sequence
  Description of Artificial Sequence: Synthetic oligonucleotide
caguuuuacacagaaugcu

SEQ ID NO: 2414308 - RNA, 19 nt, Artificial Sequence
  Description of Artificial Sequence: Synthetic oligonucleotide
uaagagcacuuuucucgua

SEQ ID NO: 2414309 - RNA, 19 nt, Artificial Sequence
  Description of Artificial Sequence: Synthetic oligonucleotide
guauuuuacaggaggacuu

SEQ ID NO: 2414310 - RNA, 19 nt, Artificial Sequence
  Description of Artificial Sequence: Synthetic oligonucleotide
auuugaagugugugcccuu

SEQ ID NO: 2414311 - RNA, 19 nt, Artificial Sequence
  Description of Artificial Sequence: Synthetic oligonucleotide
gggaggaaaagauuaaguu

SEQ ID NO: 2414312 - RNA, 19 nt, Artificial Sequence
  Description of Artificial Sequence: Synthetic oligonucleotide
cuucagagaaugguuaccu

SEQ ID NO: 2414313 - RNA, 19 nt, Artificial Sequence
  Description of Artificial Sequence: Synthetic oligonucleotide
uuaccuggucaagauuaau

SEQ ID NO: 2414314 - RNA, 19 nt, Artificial Sequence
  Description of Artificial Sequence: Synthetic oligonucleotide
guucaagggaggaaaagau

SEQ ID NO: 2414315 - RNA, 19 nt, Artificial Sequence
  Description of Artificial Sequence: Synthetic oligonucleotide
agagcacuuuucucguauu

SEQ ID NO: 2414316 - RNA, 19 nt, Artificial Sequence
  Description of Artificial Sequence: Synthetic oligonucleotide
cagagaaugguuaccuggu

SEQ ID NO: 2414317 - RNA, 19 nt, Artificial Sequence
  Description of Artificial Sequence: Synthetic oligonucleotide
aaaguacauccaacucuaa

SEQ ID NO: 2414318 - RNA, 19 nt, Artificial Sequence
  Description of Artificial Sequence: Synthetic oligonucleotide
cacaacaguuuuacacaga

SEQ ID NO: 2414319 - RNA, 19 nt, Artificial Sequence
  Description of Artificial Sequence: Synthetic oligonucleotide
uccaaccgccaucuuccuc

SEQ ID NO: 2414320 - RNA, 19 nt, Artificial Sequence
  Description of Artificial Sequence: Synthetic oligonucleotide
acgcgcgauuccaaccgcc

SEQ ID NO: 2414321 - RNA, 19 nt, Artificial Sequence
  Description of Artificial Sequence: Synthetic oligonucleotide
gagaacucguccauccugu

SEQ ID NO: 2414322 - RNA, 19 nt, Artificial Sequence
  Description of Artificial Sequence: Synthetic oligonucleotide
ccaaaguacauccaacucu

SEQ ID NO: 2414323 - RNA, 19 nt, Artificial Sequence
  Description of Artificial Sequence: Synthetic oligonucleotide
aggaaaagauuaaguuuau

SEQ ID NO: 2414324 - RNA, 19 nt, Artificial Sequence
  Description of Artificial Sequence: Synthetic oligonucleotide
cauccaacucuaauuccua

SEQ ID NO: 2414325 - RNA, 19 nt, Artificial Sequence
  Description of Artificial Sequence: Synthetic oligonucleotide
gcacuuuucucguauuuua

SEQ ID NO: 2414326 - RNA, 19 nt, Artificial Sequence
  Description of Artificial Sequence: Synthetic oligonucleotide
agaaugcuaagagcacuuu

SEQ ID NO: 2414327 - RNA, 19 nt, Artificial Sequence
  Description of Artificial Sequence: Synthetic oligonucleotide
ccuucuuaaucuccuccug

SEQ ID NO: 2414328 - RNA, 19 nt, Artificial Sequence
  Description of Artificial Sequence: Synthetic oligonucleotide
uuccaaccgccaucuuccu

SEQ ID NO: 2414329 - RNA, 19 nt, Artificial Sequence
  Description of Artificial Sequence: Synthetic oligonucleotide
caggaggacuuaaaacaua

SEQ ID NO: 2414330 - RNA, 19 nt, Artificial Sequence
  Description of Artificial Sequence: Synthetic oligonucleotide
caccugggcuaauugcaca

SEQ ID NO: 2414331 - RNA, 19 nt, Artificial Sequence
  Description of Artificial Sequence: Synthetic oligonucleotide
guuaccuggucaagauuaa

SEQ ID NO: 2414332 - RNA, 19 nt, Artificial Sequence
  Description of Artificial Sequence: Synthetic oligonucleotide
cgggagaacucguccaucc

SEQ ID NO: 2414333 - RNA, 19 nt, Artificial Sequence
  Description of Artificial Sequence: Synthetic oligonucleotide
uucccgcgggagaacucgu

SEQ ID NO: 2414334 - RNA, 19 nt, Artificial Sequence
  Description of Artificial Sequence: Synthetic oligonucleotide
ucucgggcuccuucuuaau

SEQ ID NO: 2414335 - RNA, 19 nt, Artificial Sequence
  Description of Artificial Sequence: Synthetic oligonucleotide
gcuuaaaauuuaaaggcuu

SEQ ID NO: 2414336 - RNA, 19 nt, Artificial Sequence
  Description of Artificial Sequence: Synthetic oligonucleotide
gagcacuuuucucguauuu

SEQ ID NO: 2414337 - RNA, 19 nt, Artificial Sequence
  Description of Artificial Sequence: Synthetic oligonucleotide
gcgggcaggucuucucgcg

SEQ ID NO: 2414338 - RNA, 19 nt, Artificial Sequence
  Description of Artificial Sequence: Synthetic oligonucleotide
gccaacccuaggaaacucc

SEQ ID NO: 2414339 - RNA, 19 nt, Artificial Sequence
  Description of Artificial Sequence: Synthetic oligonucleotide
ccaacccuaggaaacucca

SEQ ID NO: 2414340 - RNA, 19 nt, Artificial Sequence
  Description of Artificial Sequence: Synthetic oligonucleotide
gccaaucuccuuaacucga

SEQ ID NO: 2414341 - RNA, 19 nt, Artificial Sequence
  Description of Artificial Sequence: Synthetic oligonucleotide
ucccgcgggagaacucguc

SEQ ID NO: 2414342 - RNA, 19 nt, Artificial Sequence
  Description of Artificial Sequence: Synthetic oligonucleotide
acguucccgcgggagaacu

SEQ ID NO: 2414343 - RNA, 19 nt, Artificial Sequence
  Description of Artificial Sequence: Synthetic oligonucleotide
caaucuccuuaacucgaua

SEQ ID NO: 2414344 - RNA, 19 nt, Artificial Sequence
  Description of Artificial Sequence: Synthetic oligonucleotide
ccagugauuugucuucaga

SEQ ID NO: 2414345 - RNA, 19 nt, Artificial Sequence
  Description of Artificial Sequence: Synthetic oligonucleotide
ggaggacuuaaaacauaca

SEQ ID NO: 2414346 - RNA, 19 nt, Artificial Sequence
  Description of Artificial Sequence: Synthetic oligonucleotide
cccgcgggagaacucgucc

SEQ ID NO: 2414347 - RNA, 19 nt, Artificial Sequence
  Description of Artificial Sequence: Synthetic oligonucleotide
ggcaagguucaagggagga

SEQ ID NO: 2414348 - RNA, 19 nt, Artificial Sequence
  Description of Artificial Sequence: Synthetic oligonucleotide
ccaacucuaauuccuaaau

SEQ ID NO: 2414349 - RNA, 19 nt, Artificial Sequence
  Description of Artificial Sequence: Synthetic oligonucleotide
ggucaagauuaauccuaaa

SEQ ID NO: 2414350 - RNA, 19 nt, Artificial Sequence
  Description of Artificial Sequence: Synthetic oligonucleotide
caacaguuuuacacagaau

SEQ ID NO: 2414351 - RNA, 19 nt, Artificial Sequence
  Description of Artificial Sequence: Synthetic oligonucleotide
cugggcuaauugcacacau

SEQ ID NO: 2414352 - RNA, 19 nt, Artificial Sequence
  Description of Artificial Sequence: Synthetic oligonucleotide
gggcuccuucuuaaucucc

SEQ ID NO: 2414353 - RNA, 19 nt, Artificial Sequence
  Description of Artificial Sequence: Synthetic oligonucleotide
ggagcgggcaggucuucuc

SEQ ID NO: 2414354 - RNA, 19 nt, Artificial Sequence
  Description of Artificial Sequence: Synthetic oligonucleotide
aggagcgggcaggucuucu

SEQ ID NO: 2414355 - RNA, 19 nt, Artificial Sequence
  Description of Artificial Sequence: Synthetic oligonucleotide
ccuggucaagauuaauccu

SEQ ID NO: 2414356 - RNA, 19 nt, Artificial Sequence
  Description of Artificial Sequence: Synthetic oligonucleotide
cguauuuuacaggaggacu

SEQ ID NO: 2414357 - RNA, 19 nt, Artificial Sequence
  Description of Artificial Sequence: Synthetic oligonucleotide
gcaagguucaagggaggaa

SEQ ID NO: 2414358 - RNA, 19 nt, Artificial Sequence
  Description of Artificial Sequence: Synthetic oligonucleotide
ggcuaauugcacacaugua

SEQ ID NO: 2414359 - RNA, 19 nt, Artificial Sequence
  Description of Artificial Sequence: Synthetic oligonucleotide
caguucuuucaagguugca

SEQ ID NO: 2414360 - RNA, 19 nt, Artificial Sequence
  Description of Artificial Sequence: Synthetic oligonucleotide
cccuaggaaacuccauuaa

SEQ ID NO: 2414361 - RNA, 19 nt, Artificial Sequence
  Description of Artificial Sequence: Synthetic oligonucleotide
cgcgauuccaaccgccauc

SEQ ID NO: 2414362 - RNA, 19 nt, Artificial Sequence
  Description of Artificial Sequence: Synthetic oligonucleotide
gcgauuccaaccgccaucu

SEQ ID NO: 2414363 - RNA, 19 nt, Artificial Sequence
  Description of Artificial Sequence: Synthetic oligonucleotide
caacccuaggaaacuccau

SEQ ID NO: 2414364 - RNA, 19 nt, Artificial Sequence
  Description of Artificial Sequence: Synthetic oligonucleotide
cacguucccgcgggagaac

SEQ ID NO: 2414365 - RNA, 19 nt, Artificial Sequence
  Description of Artificial Sequence: Synthetic oligonucleotide
ggaaaagauuaaguuuauu

SEQ ID NO: 2414366 - RNA, 19 nt, Artificial Sequence
  Description of Artificial Sequence: Synthetic oligonucleotide
guguuacaauuugcuuaaa

SEQ ID NO: 2414367 - RNA, 19 nt, Artificial Sequence
  Description of Artificial Sequence: Synthetic oligonucleotide
cgcagcaggagcgggcagg

SEQ ID NO: 2414368 - RNA, 19 nt, Artificial Sequence
  Description of Artificial Sequence: Synthetic oligonucleotide
gggagaacucguccauccu

SEQ ID NO: 2414369 - RNA, 19 nt, Artificial Sequence
  Description of Artificial Sequence: Synthetic oligonucleotide
ccgcgggagaacucgucca

SEQ ID NO: 2414370 - RNA, 19 nt, Artificial Sequence
  Description of Artificial Sequence: Synthetic oligonucleotide
gcuuaauggcaagguucaa

SEQ ID NO: 2414371 - RNA, 19 nt, Artificial Sequence
  Description of Artificial Sequence: Synthetic oligonucleotide
caaccgccaucuuccuccu

SEQ ID NO: 2414372 - RNA, 19 nt, Artificial Sequence
  Description of Artificial Sequence: Synthetic oligonucleotide
caggagcgggcaggucuuc

SEQ ID NO: 2414373 - RNA, 19 nt, Artificial Sequence
  Description of Artificial Sequence: Synthetic oligonucleotide
gcgggagaacucguccauc

SEQ ID NO: 2414374 - RNA, 19 nt, Artificial Sequence
  Description of Artificial Sequence: Synthetic oligonucleotide
ccugggcuaauugcacaca

SEQ ID NO: 2414375 - RNA, 19 nt, Artificial Sequence
  Description of Artificial Sequence: Synthetic oligonucleotide
ccaaucuccuuaacucgau

SEQ ID NO: 2414376 - RNA, 19 nt, Artificial Sequence
  Description of Artificial Sequence: Synthetic oligonucleotide
cgcgcgauuccaaccgcca

SEQ ID NO: 2414377 - RNA, 19 nt, Artificial Sequence
  Description of Artificial Sequence: Synthetic oligonucleotide
cagcaggagcgggcagguc

SEQ ID NO: 2414378 - RNA, 19 nt, Artificial Sequence
  Description of Artificial Sequence: Synthetic oligonucleotide
cguucccgcgggagaacuc

SEQ ID NO: 2414379 - RNA, 19 nt, Artificial Sequence
  Description of Artificial Sequence: Synthetic oligonucleotide
gcgcgauuccaaccgccau

SEQ ID NO: 2414380 - RNA, 19 nt, Artificial Sequence
  Description of Artificial Sequence: Synthetic oligonucleotide
gcaggagcgggcaggucuu

SEQ ID NO: 2414381 - RNA, 19 nt, Artificial Sequence
  Description of Artificial Sequence: Synthetic oligonucleotide
cgcgggagaacucguccau

SEQ ID NO: 2414382 - RNA, 19 nt, Artificial Sequence
  Description of Artificial Sequence: Synthetic oligonucleotide
cgauuccaaccgccaucuu

SEQ ID NO: 2414383 - RNA, 19 nt, Artificial Sequence
  Description of Artificial Sequence: Synthetic oligonucleotide
uuugguauggagaaucacg

SEQ ID NO: 2414384 - RNA, 19 nt, Artificial Sequence
  Description of Artificial Sequence: Synthetic oligonucleotide
uaaauaaaauaaaauaaaa

SEQ ID NO: 2414385 - RNA, 19 nt, Artificial Sequence
  Description of Artificial Sequence: Synthetic oligonucleotide
gauguaugaaguuucaccc

SEQ ID NO: 2414386 - RNA, 19 nt, Artificial Sequence
  Description of Artificial Sequence: Synthetic oligonucleotide
aagagagagagagagaaac

SEQ ID NO: 2414387 - RNA, 19 nt, Artificial Sequence
  Description of Artificial Sequence: Synthetic oligonucleotide
ugaaguuucacccucguga

SEQ ID NO: 2414388 - RNA, 19 nt, Artificial Sequence
  Description of Artificial Sequence: Synthetic oligonucleotide
uuuucucagauauucaacc

SEQ ID NO: 2414389 - RNA, 19 nt, Artificial Sequence
  Description of Artificial Sequence: Synthetic oligonucleotide
uugguauggagaaucacgg

SEQ ID NO: 2414390 - RNA, 19 nt, Artificial Sequence
  Description of Artificial Sequence: Synthetic oligonucleotide
guacuuguaaaacaggucc

SEQ ID NO: 2414391 - RNA, 19 nt, Artificial Sequence
  Description of Artificial Sequence: Synthetic oligonucleotide
agaaguaguguggagagcc

SEQ ID NO: 2414392 - RNA, 19 nt, Artificial Sequence
  Description of Artificial Sequence: Synthetic oligonucleotide
ucuuccauagauugcaucc

SEQ ID NO: 2414393 - RNA, 19 nt, Artificial Sequence
  Description of Artificial Sequence: Synthetic oligonucleotide
aaaagagagagagagagaa

SEQ ID NO: 2414394 - RNA, 19 nt, Artificial Sequence
  Description of Artificial Sequence: Synthetic oligonucleotide
aaaucagaccgucuuguag

SEQ ID NO: 2414395 - RNA, 19 nt, Artificial Sequence
  Description of Artificial Sequence: Synthetic oligonucleotide
aaaucaaucuggaauguag

SEQ ID NO: 2414396 - RNA, 19 nt, Artificial Sequence
  Description of Artificial Sequence: Synthetic oligonucleotide
ucaggauaaacucggaugu

SEQ ID NO: 2414397 - RNA, 19 nt, Artificial Sequence
  Description of Artificial Sequence: Synthetic oligonucleotide
uaaaacaggucccuccagg

SEQ ID NO: 2414398 - RNA, 19 nt, Artificial Sequence
  Description of Artificial Sequence: Synthetic oligonucleotide
agguuccccacguagaugc

SEQ ID NO: 2414399 - RNA, 19 nt, Artificial Sequence
  Description of Artificial Sequence: Synthetic oligonucleotide
aaucacggccccuggaccc

SEQ ID NO: 2414400 - RNA, 19 nt, Artificial Sequence
  Description of Artificial Sequence: Synthetic oligonucleotide
cagauauucaaccaucccc

SEQ ID NO: 2414401 - RNA, 19 nt, Artificial Sequence
  Description of Artificial Sequence: Synthetic oligonucleotide
uaaacucggauguaugaag

SEQ ID NO: 2414402 - RNA, 19 nt, Artificial Sequence
  Description of Artificial Sequence: Synthetic oligonucleotide
agagaaacuucccacgguc

SEQ ID NO: 2414403 - RNA, 19 nt, Artificial Sequence
  Description of Artificial Sequence: Synthetic oligonucleotide
auaacagacauccccagcu

SEQ ID NO: 2414404 - RNA, 19 nt, Artificial Sequence
  Description of Artificial Sequence: Synthetic oligonucleotide
uuuacgcagagcauacucc

SEQ ID NO: 2414405 - RNA, 19 nt, Artificial Sequence
  Description of Artificial Sequence: Synthetic oligonucleotide
aaggacucggaaaucagac

SEQ ID NO: 2414406 - RNA, 19 nt, Artificial Sequence
  Description of Artificial Sequence: Synthetic oligonucleotide
gagagagaaacuucccacg

SEQ ID NO: 2414407 - RNA, 19 nt, Artificial Sequence
  Description of Artificial Sequence: Synthetic oligonucleotide
aaagcagcucagcacaucu

SEQ ID NO: 2414408 - RNA, 19 nt, Artificial Sequence
  Description of Artificial Sequence: Synthetic oligonucleotide
acggaggaaguccugaaac

SEQ ID NO: 2414409 - RNA, 19 nt, Artificial Sequence
  Description of Artificial Sequence: Synthetic oligonucleotide
agagagaaacuucccacgg

SEQ ID NO: 2414410 - RNA, 19 nt, Artificial Sequence
  Description of Artificial Sequence: Synthetic oligonucleotide
ugcauaacagacaucccca

SEQ ID NO: 2414411 - RNA, 19 nt, Artificial Sequence
  Description of Artificial Sequence: Synthetic oligonucleotide
uccucucaggauaaacucg

SEQ ID NO: 2414412 - RNA, 19 nt, Artificial Sequence
  Description of Artificial Sequence: Synthetic oligonucleotide
uggaauguagauucugagc

SEQ ID NO: 2414413 - RNA, 19 nt, Artificial Sequence
  Description of Artificial Sequence: Synthetic oligonucleotide
aagggcacgaggccgugcc

SEQ ID NO: 2414414 - RNA, 19 nt, Artificial Sequence
  Description of Artificial Sequence: Synthetic oligonucleotide
agauucugagcacaaagca

SEQ ID NO: 2414415 - RNA, 19 nt, Artificial Sequence
  Description of Artificial Sequence: Synthetic oligonucleotide
agaaucacggccccuggac

SEQ ID NO: 2414416 - RNA, 19 nt, Artificial Sequence
  Description of Artificial Sequence: Synthetic oligonucleotide
ugaaacaaggacucggaaa

SEQ ID NO: 2414417 - RNA, 19 nt, Artificial Sequence
  Description of Artificial Sequence: Synthetic oligonucleotide
aaacuucccacggucuucc

SEQ ID NO: 2414418 - RNA, 19 nt, Artificial Sequence
  Description of Artificial Sequence: Synthetic oligonucleotide
uguaugaaguuucacccuc

SEQ ID NO: 2414419 - RNA, 19 nt, Artificial Sequence
  Description of Artificial Sequence: Synthetic oligonucleotide
ucagauauucaaccauccc

SEQ ID NO: 2414420 - RNA, 19 nt, Artificial Sequence
  Description of Artificial Sequence: Synthetic oligonucleotide
aagcguacgaaggcgaagg

SEQ ID NO: 2414421 - RNA, 19 nt, Artificial Sequence
  Description of Artificial Sequence: Synthetic oligonucleotide
uacuuguaaaacagguccc

SEQ ID NO: 2414422 - RNA, 19 nt, Artificial Sequence
  Description of Artificial Sequence: Synthetic oligonucleotide
cugcauaacagacaucccc

SEQ ID NO: 2414423 - RNA, 19 nt, Artificial Sequence
  Description of Artificial Sequence: Synthetic oligonucleotide
ggacucggaaaucagaccg

SEQ ID NO: 2414424 - RNA, 19 nt, Artificial Sequence
  Description of Artificial Sequence: Synthetic oligonucleotide
gauaaacucggauguauga

SEQ ID NO: 2414425 - RNA, 19 nt, Artificial Sequence
  Description of Artificial Sequence: Synthetic oligonucleotide
auuccuugcaccacggggc

SEQ ID NO: 2414426 - RNA, 19 nt, Artificial Sequence
  Description of Artificial Sequence: Synthetic oligonucleotide
ggauguaugaaguuucacc

SEQ ID NO: 2414427 - RNA, 19 nt, Artificial Sequence
  Description of Artificial Sequence: Synthetic oligonucleotide
uggggaauuccacacgaag

SEQ ID NO: 2414428 - RNA, 19 nt, Artificial Sequence
  Description of Artificial Sequence: Synthetic oligonucleotide
gagagagagagaaacuucc

SEQ ID NO: 2414429 - RNA, 19 nt, Artificial Sequence
  Description of Artificial Sequence: Synthetic oligonucleotide
uaaucauaaccauuucuuc

SEQ ID NO: 2414430 - RNA, 19 nt, Artificial Sequence
  Description of Artificial Sequence: Synthetic oligonucleotide
uucagguccugccagcugc

SEQ ID NO: 2414431 - RNA, 19 nt, Artificial Sequence
  Description of Artificial Sequence: Synthetic oligonucleotide
cuuuucucagauauucaac

SEQ ID NO: 2414432 - RNA, 19 nt, Artificial Sequence
  Description of Artificial Sequence: Synthetic oligonucleotide
cauuccuugcaccacgggg

SEQ ID NO: 2414433 - RNA, 19 nt, Artificial Sequence
  Description of Artificial Sequence: Synthetic oligonucleotide
cucagauauucaaccaucc

SEQ ID NO: 2414434 - RNA, 19 nt, Artificial Sequence
  Description of Artificial Sequence: Synthetic oligonucleotide
uuucucagauauucaacca

SEQ ID NO: 2414435 - RNA, 19 nt, Artificial Sequence
  Description of Artificial Sequence: Synthetic oligonucleotide
gguauggagaaucacggcc

SEQ ID NO: 2414436 - RNA, 19 nt, Artificial Sequence
  Description of Artificial Sequence: Synthetic oligonucleotide
ucucagauauucaaccauc

SEQ ID NO: 2414437 - RNA, 19 nt, Artificial Sequence
  Description of Artificial Sequence: Synthetic oligonucleotide
ucuuguaggaggcccauuc

SEQ ID NO: 2414438 - RNA, 19 nt, Artificial Sequence
  Description of Artificial Sequence: Synthetic oligonucleotide
uuuguacaucugcauaaca

SEQ ID NO: 2414439 - RNA, 19 nt, Artificial Sequence
  Description of Artificial Sequence: Synthetic oligonucleotide
uccugaaacaaggacucgg

SEQ ID NO: 2414440 - RNA, 19 nt, Artificial Sequence
  Description of Artificial Sequence: Synthetic oligonucleotide
aacaaggacucggaaauca

SEQ ID NO: 2414441 - RNA, 19 nt, Artificial Sequence
  Description of Artificial Sequence: Synthetic oligonucleotide
aggacucggaaaucagacc

SEQ ID NO: 2414442 - RNA, 19 nt, Artificial Sequence
  Description of Artificial Sequence: Synthetic oligonucleotide
uacaucugcauaacagaca

SEQ ID NO: 2414443 - RNA, 19 nt, Artificial Sequence
  Description of Artificial Sequence: Synthetic oligonucleotide
cagaccgucuuguaggagg

SEQ ID NO: 2414444 - RNA, 19 nt, Artificial Sequence
  Description of Artificial Sequence: Synthetic oligonucleotide
ucaaccauccccauuccau

SEQ ID NO: 2414445 - RNA, 19 nt, Artificial Sequence
  Description of Artificial Sequence: Synthetic oligonucleotide
aacuuugugucauccaguu

SEQ ID NO: 2414446 - RNA, 19 nt, Artificial Sequence
  Description of Artificial Sequence: Synthetic oligonucleotide
gaaacaaggacucggaaau

SEQ ID NO: 2414447 - RNA, 19 nt, Artificial Sequence
  Description of Artificial Sequence: Synthetic oligonucleotide
aguagccauagcuagugcu

SEQ ID NO: 2414448 - RNA, 19 nt, Artificial Sequence
  Description of Artificial Sequence: Synthetic oligonucleotide
accgugaguagccauagcu

SEQ ID NO: 2414449 - RNA, 19 nt, Artificial Sequence
  Description of Artificial Sequence: Synthetic oligonucleotide
agauauucaaccaucccca

SEQ ID NO: 2414450 - RNA, 19 nt, Artificial Sequence
  Description of Artificial Sequence: Synthetic oligonucleotide
ugaguagccauagcuagug

SEQ ID NO: 2414451 - RNA, 19 nt, Artificial Sequence
  Description of Artificial Sequence: Synthetic oligonucleotide
cuggaauguagauucugag

SEQ ID NO: 2414452 - RNA, 19 nt, Artificial Sequence
  Description of Artificial Sequence: Synthetic oligonucleotide
gagagcggaacuuuguguc

SEQ ID NO: 2414453 - RNA, 19 nt, Artificial Sequence
  Description of Artificial Sequence: Synthetic oligonucleotide
acacgaagucgacacuggc

SEQ ID NO: 2414454 - RNA, 19 nt, Artificial Sequence
  Description of Artificial Sequence: Synthetic oligonucleotide
cuugagcucgaucucgcgg

SEQ ID NO: 2414455 - RNA, 19 nt, Artificial Sequence
  Description of Artificial Sequence: Synthetic oligonucleotide
cucaguaaggccggaaagg

SEQ ID NO: 2414456 - RNA, 19 nt, Artificial Sequence
  Description of Artificial Sequence: Synthetic oligonucleotide
cauagauugcauccucagc

SEQ ID NO: 2414457 - RNA, 19 nt, Artificial Sequence
  Description of Artificial Sequence: Synthetic oligonucleotide
uccauagauugcauccuca

SEQ ID NO: 2414458 - RNA, 19 nt, Artificial Sequence
  Description of Artificial Sequence: Synthetic oligonucleotide
uuguaggaggcccauuccu

SEQ ID NO: 2414459 - RNA, 19 nt, Artificial Sequence
  Description of Artificial Sequence: Synthetic oligonucleotide
aauuccacacgaagucgac

SEQ ID NO: 2414460 - RNA, 19 nt, Artificial Sequence
  Description of Artificial Sequence: Synthetic oligonucleotide
agagagagagagaaacuuc

SEQ ID NO: 2414461 - RNA, 19 nt, Artificial Sequence
  Description of Artificial Sequence: Synthetic oligonucleotide
ucaguaaggccggaaagga

SEQ ID NO: 2414462 - RNA, 19 nt, Artificial Sequence
  Description of Artificial Sequence: Synthetic oligonucleotide
aaacucggauguaugaagu

SEQ ID NO: 2414463 - RNA, 19 nt, Artificial Sequence
  Description of Artificial Sequence: Synthetic oligonucleotide
acgacauccgcaccgcccg

SEQ ID NO: 2414464 - RNA, 19 nt, Artificial Sequence
  Description of Artificial Sequence: Synthetic oligonucleotide
ucggaaaucagaccgucuu

SEQ ID NO: 2414465 - RNA, 19 nt, Artificial Sequence
  Description of Artificial Sequence: Synthetic oligonucleotide
uuugugucauccaguuuac

SEQ ID NO: 2414466 - RNA, 19 nt, Artificial Sequence
  Description of Artificial Sequence: Synthetic oligonucleotide
accuccguaaguccugggg

SEQ ID NO: 2414467 - RNA, 19 nt, Artificial Sequence
  Description of Artificial Sequence: Synthetic oligonucleotide
agauugcauccucagcauc

SEQ ID NO: 2414468 - RNA, 19 nt, Artificial Sequence
  Description of Artificial Sequence: Synthetic oligonucleotide
cacgaagucgacacuggcc

SEQ ID NO: 2414469 - RNA, 19 nt, Artificial Sequence
  Description of Artificial Sequence: Synthetic oligonucleotide
cucggauguaugaaguuuc

SEQ ID NO: 2414470 - RNA, 19 nt, Artificial Sequence
  Description of Artificial Sequence: Synthetic oligonucleotide
uaugaaguuucacccucgu

SEQ ID NO: 2414471 - RNA, 19 nt, Artificial Sequence
  Description of Artificial Sequence: Synthetic oligonucleotide
guauggagaaucacggccc

SEQ ID NO: 2414472 - RNA, 19 nt, Artificial Sequence
  Description of Artificial Sequence: Synthetic oligonucleotide
gagagaaguaguguggaga

SEQ ID NO: 2414473 - RNA, 19 nt, Artificial Sequence
  Description of Artificial Sequence: Synthetic oligonucleotide
ucugcauaacagacauccc

SEQ ID NO: 2414474 - RNA, 19 nt, Artificial Sequence
  Description of Artificial Sequence: Synthetic oligonucleotide
gacauccccagcuucucgc

SEQ ID NO: 2414475 - RNA, 19 nt, Artificial Sequence
  Description of Artificial Sequence: Synthetic oligonucleotide
cauaacagacauccccagc

SEQ ID NO: 2414476 - RNA, 19 nt, Artificial Sequence
  Description of Artificial Sequence: Synthetic oligonucleotide
agcccgacgacauccgcac

SEQ ID NO: 2414477 - RNA, 19 nt, Artificial Sequence
  Description of Artificial Sequence: Synthetic oligonucleotide
gucgacacuggccauaauc

SEQ ID NO: 2414478 - RNA, 19 nt, Artificial Sequence
  Description of Artificial Sequence: Synthetic oligonucleotide
auguaugaaguuucacccu

SEQ ID NO: 2414479 - RNA, 19 nt, Artificial Sequence
  Description of Artificial Sequence: Synthetic oligonucleotide
uaaguccuggggaauucca

SEQ ID NO: 2414480 - RNA, 19 nt, Artificial Sequence
  Description of Artificial Sequence: Synthetic oligonucleotide
gaaucacggccccuggacc

SEQ ID NO: 2414481 - RNA, 19 nt, Artificial Sequence
  Description of Artificial Sequence: Synthetic oligonucleotide
uccuggggaauuccacacg

SEQ ID NO: 2414482 - RNA, 19 nt, Artificial Sequence
  Description of Artificial Sequence: Synthetic oligonucleotide
uucucgcgcacgucggucg

SEQ ID NO: 2414483 - RNA, 19 nt, Artificial Sequence
  Description of Artificial Sequence: Synthetic oligonucleotide
aaggccggaaaggagagaa

SEQ ID NO: 2414484 - RNA, 19 nt, Artificial Sequence
  Description of Artificial Sequence: Synthetic oligonucleotide
uuuuguacaucugcauaac

SEQ ID NO: 2414485 - RNA, 19 nt, Artificial Sequence
  Description of Artificial Sequence: Synthetic oligonucleotide
aaguccuggggaauuccac

SEQ ID NO: 2414486 - RNA, 19 nt, Artificial Sequence
  Description of Artificial Sequence: Synthetic oligonucleotide
ucgaagcguacgaaggcga

SEQ ID NO: 2414487 - RNA, 19 nt, Artificial Sequence
  Description of Artificial Sequence: Synthetic oligonucleotide
uacuccaugucuucuuuuc

SEQ ID NO: 2414488 - RNA, 19 nt, Artificial Sequence
  Description of Artificial Sequence: Synthetic oligonucleotide
uaaccauuucuuccauaga

SEQ ID NO: 2414489 - RNA, 19 nt, Artificial Sequence
  Description of Artificial Sequence: Synthetic oligonucleotide
ucuugagcucgaucucgcg

SEQ ID NO: 2414490 - RNA, 19 nt, Artificial Sequence
  Description of Artificial Sequence: Synthetic oligonucleotide
guacaucugcauaacagac

SEQ ID NO: 2414491 - RNA, 19 nt, Artificial Sequence
  Description of Artificial Sequence: Synthetic oligonucleotide
uuccccacguagaugcgcc

SEQ ID NO: 2414492 - RNA, 19 nt, Artificial Sequence
  Description of Artificial Sequence: Synthetic oligonucleotide
uagugcuccucucaggaua

SEQ ID NO: 2414493 - RNA, 19 nt, Artificial Sequence
  Description of Artificial Sequence: Synthetic oligonucleotide
ucaaucuggaauguagauu

SEQ ID NO: 2414494 - RNA, 19 nt, Artificial Sequence
  Description of Artificial Sequence: Synthetic oligonucleotide
cuuguaggaggcccauucc

SEQ ID NO: 2414495 - RNA, 19 nt, Artificial Sequence
  Description of Artificial Sequence: Synthetic oligonucleotide
aaaaucaaucuggaaugua

SEQ ID NO: 2414496 - RNA, 19 nt, Artificial Sequence
  Description of Artificial Sequence: Synthetic oligonucleotide
uccucaguaaggccggaaa

SEQ ID NO: 2414497 - RNA, 19 nt, Artificial Sequence
  Description of Artificial Sequence: Synthetic oligonucleotide
uugcauccucagcaucucg

SEQ ID NO: 2414498 - RNA, 19 nt, Artificial Sequence
  Description of Artificial Sequence: Synthetic oligonucleotide
ugguauggagaaucacggc

SEQ ID NO: 2414499 - RNA, 19 nt, Artificial Sequence
  Description of Artificial Sequence: Synthetic oligonucleotide
cacggggccagccagcccg

SEQ ID NO: 2414500 - RNA, 19 nt, Artificial Sequence
  Description of Artificial Sequence: Synthetic oligonucleotide
caguuuacgcagagcauac

SEQ ID NO: 2414501 - RNA, 19 nt, Artificial Sequence
  Description of Artificial Sequence: Synthetic oligonucleotide
uguggagagccccugcuuu

SEQ ID NO: 2414502 - RNA, 19 nt, Artificial Sequence
  Description of Artificial Sequence: Synthetic oligonucleotide
uccuucucgcgcacgucgg

SEQ ID NO: 2414503 - RNA, 19 nt, Artificial Sequence
  Description of Artificial Sequence: Synthetic oligonucleotide
cacacgaagucgacacugg

SEQ ID NO: 2414504 - RNA, 19 nt, Artificial Sequence
  Description of Artificial Sequence: Synthetic oligonucleotide
auaaacucggauguaugaa

SEQ ID NO: 2414505 - RNA, 19 nt, Artificial Sequence
  Description of Artificial Sequence: Synthetic oligonucleotide
cucgaagcguacgaaggcg

SEQ ID NO: 2414506 - RNA, 19 nt, Artificial Sequence
  Description of Artificial Sequence: Synthetic oligonucleotide
guaugaaguuucacccucg

SEQ ID NO: 2414507 - RNA, 19 nt, Artificial Sequence
  Description of Artificial Sequence: Synthetic oligonucleotide
uucacccucgugagagcgg

SEQ ID NO: 2414508 - RNA, 19 nt, Artificial Sequence
  Description of Artificial Sequence: Synthetic oligonucleotide
acuuguaaaacaggucccu

SEQ ID NO: 2414509 - RNA, 19 nt, Artificial Sequence
  Description of Artificial Sequence: Synthetic oligonucleotide
aacucggauguaugaaguu

SEQ ID NO: 2414510 - RNA, 19 nt, Artificial Sequence
  Description of Artificial Sequence: Synthetic oligonucleotide
agacauccccagcuucucg

SEQ ID NO: 2414511 - RNA, 19 nt, Artificial Sequence
  Description of Artificial Sequence: Synthetic oligonucleotide
ccucucaggauaaacucgg

SEQ ID NO: 2414512 - RNA, 19 nt, Artificial Sequence
  Description of Artificial Sequence: Synthetic oligonucleotide
uguaggaggcccauuccuu

SEQ ID NO: 2414513 - RNA, 19 nt, Artificial Sequence
  Description of Artificial Sequence: Synthetic oligonucleotide
gaugcggccguacuuguaa

SEQ ID NO: 2414514 - RNA, 19 nt, Artificial Sequence
  Description of Artificial Sequence: Synthetic oligonucleotide
guaggaggcccauuccuug

SEQ ID NO: 2414515 - RNA, 19 nt, Artificial Sequence
  Description of Artificial Sequence: Synthetic oligonucleotide
ucucgcgggguccucgaag

SEQ ID NO: 2414516 - RNA, 19 nt, Artificial Sequence
  Description of Artificial Sequence: Synthetic oligonucleotide
ggaauuccacacgaagucg

SEQ ID NO: 2414517 - RNA, 19 nt, Artificial Sequence
  Description of Artificial Sequence: Synthetic oligonucleotide
acgcagagcauacuccaug

SEQ ID NO: 2414518 - RNA, 19 nt, Artificial Sequence
  Description of Artificial Sequence: Synthetic oligonucleotide
uagauugcauccucagcau

SEQ ID NO: 2414519 - RNA, 19 nt, Artificial Sequence
  Description of Artificial Sequence: Synthetic oligonucleotide
agcuagugcuccucucagg

SEQ ID NO: 2414520 - RNA, 19 nt, Artificial Sequence
  Description of Artificial Sequence: Synthetic oligonucleotide
gaucucgcggaugcggccg

SEQ ID NO: 2414521 - RNA, 19 nt, Artificial Sequence
  Description of Artificial Sequence: Synthetic oligonucleotide
ucgugagagcggaacuuug

SEQ ID NO: 2414522 - RNA, 19 nt, Artificial Sequence
  Description of Artificial Sequence: Synthetic oligonucleotide
cuucccacggucuuccuca

SEQ ID NO: 2414523 - RNA, 19 nt, Artificial Sequence
  Description of Artificial Sequence: Synthetic oligonucleotide
uacgaaggcgaagggcacg

SEQ ID NO: 2414524 - RNA, 19 nt, Artificial Sequence
  Description of Artificial Sequence: Synthetic oligonucleotide
guccucgaagcguacgaag

SEQ ID NO: 2414525 - RNA, 19 nt, Artificial Sequence
  Description of Artificial Sequence: Synthetic oligonucleotide
acucggaaaucagaccguc

SEQ ID NO: 2414526 - RNA, 19 nt, Artificial Sequence
  Description of Artificial Sequence: Synthetic oligonucleotide
aggauaaacucggauguau

SEQ ID NO: 2414527 - RNA, 19 nt, Artificial Sequence
  Description of Artificial Sequence: Synthetic oligonucleotide
cacggucuuccucaguaag

SEQ ID NO: 2414528 - RNA, 19 nt, Artificial Sequence
  Description of Artificial Sequence: Synthetic oligonucleotide
auugcauccucagcaucuc

SEQ ID NO: 2414529 - RNA, 19 nt, Artificial Sequence
  Description of Artificial Sequence: Synthetic oligonucleotide
cauccucagcaucucgcgg

SEQ ID NO: 2414530 - RNA, 19 nt, Artificial Sequence
  Description of Artificial Sequence: Synthetic oligonucleotide
agcguacgaaggcgaaggg

SEQ ID NO: 2414531 - RNA, 19 nt, Artificial Sequence
  Description of Artificial Sequence: Synthetic oligonucleotide
uggccauaaucauaaccau

SEQ ID NO: 2414532 - RNA, 19 nt, Artificial Sequence
  Description of Artificial Sequence: Synthetic oligonucleotide
agagcggaacuuuguguca

SEQ ID NO: 2414533 - RNA, 19 nt, Artificial Sequence
  Description of Artificial Sequence: Synthetic oligonucleotide
aucuggaauguagauucug

SEQ ID NO: 2414534 - RNA, 19 nt, Artificial Sequence
  Description of Artificial Sequence: Synthetic oligonucleotide
caaccauccccauuccauc

SEQ ID NO: 2414535 - RNA, 19 nt, Artificial Sequence
  Description of Artificial Sequence: Synthetic oligonucleotide
guaaggccggaaaggagag

SEQ ID NO: 2414536 - RNA, 19 nt, Artificial Sequence
  Description of Artificial Sequence: Synthetic oligonucleotide
acgucggucggaagguucc

SEQ ID NO: 2414537 - RNA, 19 nt, Artificial Sequence
  Description of Artificial Sequence: Synthetic oligonucleotide
guagaugcgcccgucgccc

SEQ ID NO: 2414538 - RNA, 19 nt, Artificial Sequence
  Description of Artificial Sequence: Synthetic oligonucleotide
agcccgaccuccguaaguc

SEQ ID NO: 2414539 - RNA, 19 nt, Artificial Sequence
  Description of Artificial Sequence: Synthetic oligonucleotide
gauugcauccucagcaucu

SEQ ID NO: 2414540 - RNA, 19 nt, Artificial Sequence
  Description of Artificial Sequence: Synthetic oligonucleotide
gacgacauccgcaccgccc

SEQ ID NO: 2414541 - RNA, 19 nt, Artificial Sequence
  Description of Artificial Sequence: Synthetic oligonucleotide
gaaguaguguggagagccc

SEQ ID NO: 2414542 - RNA, 19 nt, Artificial Sequence
  Description of Artificial Sequence: Synthetic oligonucleotide
aaagagagagagagagaaa

SEQ ID NO: 2414543 - RNA, 19 nt, Artificial Sequence
  Description of Artificial Sequence: Synthetic oligonucleotide
auauucaaccauccccauu

SEQ ID NO: 2414544 - RNA, 19 nt, Artificial Sequence
  Description of Artificial Sequence: Synthetic oligonucleotide
guagccauagcuagugcuc

SEQ ID NO: 2414545 - RNA, 19 nt, Artificial Sequence
  Description of Artificial Sequence: Synthetic oligonucleotide
acaaggacucggaaaucag

SEQ ID NO: 2414546 - RNA, 19 nt, Artificial Sequence
  Description of Artificial Sequence: Synthetic oligonucleotide
ucucgcgcacgucggucgg

SEQ ID NO: 2414547 - RNA, 19 nt, Artificial Sequence
  Description of Artificial Sequence: Synthetic oligonucleotide
gaguagccauagcuagugc

SEQ ID NO: 2414548 - RNA, 19 nt, Artificial Sequence
  Description of Artificial Sequence: Synthetic oligonucleotide
agagagagagagagaaacu

SEQ ID NO: 2414549 - RNA, 19 nt, Artificial Sequence
  Description of Artificial Sequence: Synthetic oligonucleotide
ugcaccacggggccagcca

SEQ ID NO: 2414550 - RNA, 19 nt, Artificial Sequence
  Description of Artificial Sequence: Synthetic oligonucleotide
caaggacucggaaaucaga

SEQ ID NO: 2414551 - RNA, 19 nt, Artificial Sequence
  Description of Artificial Sequence: Synthetic oligonucleotide
cacguagaugcgcccgucg

SEQ ID NO: 2414552 - RNA, 19 nt, Artificial Sequence
  Description of Artificial Sequence: Synthetic oligonucleotide
ucagcaucucgcggggucc

SEQ ID NO: 2414553 - RNA, 19 nt, Artificial Sequence
  Description of Artificial Sequence: Synthetic oligonucleotide
gaaacuucccacggucuuc

SEQ ID NO: 2414554 - RNA, 19 nt, Artificial Sequence
  Description of Artificial Sequence: Synthetic oligonucleotide
ucggucggaagguucccca

SEQ ID NO: 2414555 - RNA, 19 nt, Artificial Sequence
  Description of Artificial Sequence: Synthetic oligonucleotide
ggccguacuuguaaaacag

SEQ ID NO: 2414556 - RNA, 19 nt, Artificial Sequence
  Description of Artificial Sequence: Synthetic oligonucleotide
acccucgugagagcggaac

SEQ ID NO: 2414557 - RNA, 19 nt, Artificial Sequence
  Description of Artificial Sequence: Synthetic oligonucleotide
guaaguccuggggaauucc

SEQ ID NO: 2414558 - RNA, 19 nt, Artificial Sequence
  Description of Artificial Sequence: Synthetic oligonucleotide
acauccgcaccgcccgacg

SEQ ID NO: 2414559 - RNA, 19 nt, Artificial Sequence
  Description of Artificial Sequence: Synthetic oligonucleotide
uccacacgaagucgacacu

SEQ ID NO: 2414560 - RNA, 19 nt, Artificial Sequence
  Description of Artificial Sequence: Synthetic oligonucleotide
ggagagaaguaguguggag

SEQ ID NO: 2414561 - RNA, 19 nt, Artificial Sequence
  Description of Artificial Sequence: Synthetic oligonucleotide
ggauaaacucggauguaug

SEQ ID NO: 2414562 - RNA, 19 nt, Artificial Sequence
  Description of Artificial Sequence: Synthetic oligonucleotide
ugccggacggaggaagucc

SEQ ID NO: 2414563 - RNA, 19 nt, Artificial Sequence
  Description of Artificial Sequence: Synthetic oligonucleotide
acagacauccccagcuucu

SEQ ID NO: 2414564 - RNA, 19 nt, Artificial Sequence
  Description of Artificial Sequence: Synthetic oligonucleotide
ugcuccucucaggauaaac

SEQ ID NO: 2414565 - RNA, 19 nt, Artificial Sequence
  Description of Artificial Sequence: Synthetic oligonucleotide
ucacccucgugagagcgga

SEQ ID NO: 2414566 - RNA, 19 nt, Artificial Sequence
  Description of Artificial Sequence: Synthetic oligonucleotide
aagucgacacuggccauaa

SEQ ID NO: 2414567 - RNA, 19 nt, Artificial Sequence
  Description of Artificial Sequence: Synthetic oligonucleotide
gagagagagagagaaacuu

SEQ ID NO: 2414568 - RNA, 19 nt, Artificial Sequence
  Description of Artificial Sequence: Synthetic oligonucleotide
ggucggaagguuccccacg

SEQ ID NO: 2414569 - RNA, 19 nt, Artificial Sequence
  Description of Artificial Sequence: Synthetic oligonucleotide
cucagcaucucgcgggguc

SEQ ID NO: 2414570 - RNA, 19 nt, Artificial Sequence
  Description of Artificial Sequence: Synthetic oligonucleotide
uacgcagagcauacuccau

SEQ ID NO: 2414571 - RNA, 19 nt, Artificial Sequence
  Description of Artificial Sequence: Synthetic oligonucleotide
ggagaaucacggccccugg

SEQ ID NO: 2414572 - RNA, 19 nt, Artificial Sequence
  Description of Artificial Sequence: Synthetic oligonucleotide
gagaaucacggccccugga

SEQ ID NO: 2414573 - RNA, 19 nt, Artificial Sequence
  Description of Artificial Sequence: Synthetic oligonucleotide
guggagagccccugcuuug

SEQ ID NO: 2414574 - RNA, 19 nt, Artificial Sequence
  Description of Artificial Sequence: Synthetic oligonucleotide
ugucuucuuuucucagaua

SEQ ID NO: 2414575 - RNA, 19 nt, Artificial Sequence
  Description of Artificial Sequence: Synthetic oligonucleotide
ucagaccgucuuguaggag

SEQ ID NO: 2414576 - RNA, 19 nt, Artificial Sequence
  Description of Artificial Sequence: Synthetic oligonucleotide
ucgcgggguccucgaagcg

SEQ ID NO: 2414577 - RNA, 19 nt, Artificial Sequence
  Description of Artificial Sequence: Synthetic oligonucleotide
gaagguuccccacguagau

SEQ ID NO: 2414578 - RNA, 19 nt, Artificial Sequence
  Description of Artificial Sequence: Synthetic oligonucleotide
agguccuucucgcgcacgu

SEQ ID NO: 2414579 - RNA, 19 nt, Artificial Sequence
  Description of Artificial Sequence: Synthetic oligonucleotide
uccgcaccgcccgacgccg

SEQ ID NO: 2414580 - RNA, 19 nt, Artificial Sequence
  Description of Artificial Sequence: Synthetic oligonucleotide
gaugcgcccgucgcccucg

SEQ ID NO: 2414581 - RNA, 19 nt, Artificial Sequence
  Description of Artificial Sequence: Synthetic oligonucleotide
aguaguguggagagccccu

SEQ ID NO: 2414582 - RNA, 19 nt, Artificial Sequence
  Description of Artificial Sequence: Synthetic oligonucleotide
ugugaucuuucagguccug

SEQ ID NO: 2414583 - RNA, 19 nt, Artificial Sequence
  Description of Artificial Sequence: Synthetic oligonucleotide
ccucaguaaggccggaaag

SEQ ID NO: 2414584 - RNA, 19 nt, Artificial Sequence
  Description of Artificial Sequence: Synthetic oligonucleotide
ggcgaagggcacgaggccg

SEQ ID NO: 2414585 - RNA, 19 nt, Artificial Sequence
  Description of Artificial Sequence: Synthetic oligonucleotide
cguacgaaggcgaagggca

SEQ ID NO: 2414586 - RNA, 19 nt, Artificial Sequence
  Description of Artificial Sequence: Synthetic oligonucleotide
gcgcacgucggucggaagg

SEQ ID NO: 2414587 - RNA, 19 nt, Artificial Sequence
  Description of Artificial Sequence: Synthetic oligonucleotide
ugcggccguacuuguaaaa

SEQ ID NO: 2414588 - RNA, 19 nt, Artificial Sequence
  Description of Artificial Sequence: Synthetic oligonucleotide
agccccugcuuugguaugg

SEQ ID NO: 2414589 - RNA, 19 nt, Artificial Sequence
  Description of Artificial Sequence: Synthetic oligonucleotide
cacgucggucggaagguuc

SEQ ID NO: 2414590 - RNA, 19 nt, Artificial Sequence
  Description of Artificial Sequence: Synthetic oligonucleotide
gaccuccguaaguccuggg

SEQ ID NO: 2414591 - RNA, 19 nt, Artificial Sequence
  Description of Artificial Sequence: Synthetic oligonucleotide
acggccccuggacccagac

SEQ ID NO: 2414592 - RNA, 19 nt, Artificial Sequence
  Description of Artificial Sequence: Synthetic oligonucleotide
cugaaacaaggacucggaa

SEQ ID NO: 2414593 - RNA, 19 nt, Artificial Sequence
  Description of Artificial Sequence: Synthetic oligonucleotide
cccgacgacauccgcaccg

SEQ ID NO: 2414594 - RNA, 19 nt, Artificial Sequence
  Description of Artificial Sequence: Synthetic oligonucleotide
gauauucaaccauccccau

SEQ ID NO: 2414595 - RNA, 19 nt, Artificial Sequence
  Description of Artificial Sequence: Synthetic oligonucleotide
guuccccacguagaugcgc

SEQ ID NO: 2414596 - RNA, 19 nt, Artificial Sequence
  Description of Artificial Sequence: Synthetic oligonucleotide
cauccgcaccgcccgacgc

SEQ ID NO: 2414597 - RNA, 19 nt, Artificial Sequence
  Description of Artificial Sequence: Synthetic oligonucleotide
gaccgugaguagccauagc

SEQ ID NO: 2414598 - RNA, 19 nt, Artificial Sequence
  Description of Artificial Sequence: Synthetic oligonucleotide
aguuuacgcagagcauacu

SEQ ID NO: 2414599 - RNA, 19 nt, Artificial Sequence
  Description of Artificial Sequence: Synthetic oligonucleotide
uucccacggucuuccucag

SEQ ID NO: 2414600 - RNA, 19 nt, Artificial Sequence
  Description of Artificial Sequence: Synthetic oligonucleotide
gccguacuuguaaaacagg

SEQ ID NO: 2414601 - RNA, 19 nt, Artificial Sequence
  Description of Artificial Sequence: Synthetic oligonucleotide
aacuucccacggucuuccu

SEQ ID NO: 2414602 - RNA, 19 nt, Artificial Sequence
  Description of Artificial Sequence: Synthetic oligonucleotide
cagaccgggaccgugagua

SEQ ID NO: 2414603 - RNA, 19 nt, Artificial Sequence
  Description of Artificial Sequence: Synthetic oligonucleotide
cuccguaaguccuggggaa

SEQ ID NO: 2414604 - RNA, 19 nt, Artificial Sequence
  Description of Artificial Sequence: Synthetic oligonucleotide
cauaaccauuucuuccaua

SEQ ID NO: 2414605 - RNA, 19 nt, Artificial Sequence
  Description of Artificial Sequence: Synthetic oligonucleotide
acgaaggcgaagggcacga

SEQ ID NO: 2414606 - RNA, 19 nt, Artificial Sequence
  Description of Artificial Sequence: Synthetic oligonucleotide
agggcacgaggccgugccg

SEQ ID NO: 2414607 - RNA, 19 nt, Artificial Sequence
  Description of Artificial Sequence: Synthetic oligonucleotide
auguagauucugagcacaa

SEQ ID NO: 2414608 - RNA, 19 nt, Artificial Sequence
  Description of Artificial Sequence: Synthetic oligonucleotide
ucgcggaugcggccguacu

SEQ ID NO: 2414609 - RNA, 19 nt, Artificial Sequence
  Description of Artificial Sequence: Synthetic oligonucleotide
uccguaaguccuggggaau

SEQ ID NO: 2414610 - RNA, 19 nt, Artificial Sequence
  Description of Artificial Sequence: Synthetic oligonucleotide
ccugaaacaaggacucgga

SEQ ID NO: 2414611 - RNA, 19 nt, Artificial Sequence
  Description of Artificial Sequence: Synthetic oligonucleotide
uaaggccggaaaggagaga

SEQ ID NO: 2414612 - RNA, 19 nt, Artificial Sequence
  Description of Artificial Sequence: Synthetic oligonucleotide
ggaccgugaguagccauag

SEQ ID NO: 2414613 - RNA, 19 nt, Artificial Sequence
  Description of Artificial Sequence: Synthetic oligonucleotide
ggaaaucagaccgucuugu

SEQ ID NO: 2414614 - RNA, 19 nt, Artificial Sequence
  Description of Artificial Sequence: Synthetic oligonucleotide
guacgaaggcgaagggcac

SEQ ID NO: 2414615 - RNA, 19 nt, Artificial Sequence
  Description of Artificial Sequence: Synthetic oligonucleotide
ggaagguuccccacguaga

SEQ ID NO: 2414616 - RNA, 19 nt, Artificial Sequence
  Description of Artificial Sequence: Synthetic oligonucleotide
gcggaacuuugugucaucc

SEQ ID NO: 2414617 - RNA, 19 nt, Artificial Sequence
  Description of Artificial Sequence: Synthetic oligonucleotide
cccauuccuugcaccacgg

SEQ ID NO: 2414618 - RNA, 19 nt, Artificial Sequence
  Description of Artificial Sequence: Synthetic oligonucleotide
uuccucaguaaggccggaa

SEQ ID NO: 2414619 - RNA, 19 nt, Artificial Sequence
  Description of Artificial Sequence: Synthetic oligonucleotide
ccuuuuguacaucugcaua

SEQ ID NO: 2414620 - RNA, 19 nt, Artificial Sequence
  Description of Artificial Sequence: Synthetic oligonucleotide
ucggaagguuccccacgua

SEQ ID NO: 2414621 - RNA, 19 nt, Artificial Sequence
  Description of Artificial Sequence: Synthetic oligonucleotide
uagaugcgcccgucgcccu

SEQ ID NO: 2414622 - RNA, 19 nt, Artificial Sequence
  Description of Artificial Sequence: Synthetic oligonucleotide
gcgcccgucgcccucgccg

SEQ ID NO: 2414623 - RNA, 19 nt, Artificial Sequence
  Description of Artificial Sequence: Synthetic oligonucleotide
gaagggcacgaggccgugc

SEQ ID NO: 2414624 - RNA, 19 nt, Artificial Sequence
  Description of Artificial Sequence: Synthetic oligonucleotide
cgcucguccgcccagcccg

SEQ ID NO: 2414625 - RNA, 19 nt, Artificial Sequence
  Description of Artificial Sequence: Synthetic oligonucleotide
cuucucgcgcacgucgguc

SEQ ID NO: 2414626 - RNA, 19 nt, Artificial Sequence
  Description of Artificial Sequence: Synthetic oligonucleotide
gacauccgcaccgcccgac

SEQ ID NO: 2414627 - RNA, 19 nt, Artificial Sequence
  Description of Artificial Sequence: Synthetic oligonucleotide
cagcccgacgacauccgca

SEQ ID NO: 2414628 - RNA, 19 nt, Artificial Sequence
  Description of Artificial Sequence: Synthetic oligonucleotide
gucggaagguuccccacgu

SEQ ID NO: 2414629 - RNA, 19 nt, Artificial Sequence
  Description of Artificial Sequence: Synthetic oligonucleotide
gucggucggaagguucccc

SEQ ID NO: 2414630 - RNA, 19 nt, Artificial Sequence
  Description of Artificial Sequence: Synthetic oligonucleotide
ggccgugccgguucuugag

SEQ ID NO: 2414631 - RNA, 19 nt, Artificial Sequence
  Description of Artificial Sequence: Synthetic oligonucleotide
augcggccguacuuguaaa

SEQ ID NO: 2414632 - RNA, 19 nt, Artificial Sequence
  Description of Artificial Sequence: Synthetic oligonucleotide
uccgcccagcccgacgaca

SEQ ID NO: 2414633 - RNA, 19 nt, Artificial Sequence
  Description of Artificial Sequence: Synthetic oligonucleotide
ccuggggaauuccacacga

SEQ ID NO: 2414634 - RNA, 19 nt, Artificial Sequence
  Description of Artificial Sequence: Synthetic oligonucleotide
gaccgucuuguaggaggcc

SEQ ID NO: 2414635 - RNA, 19 nt, Artificial Sequence
  Description of Artificial Sequence: Synthetic oligonucleotide
gcguacgaaggcgaagggc

SEQ ID NO: 2414636 - RNA, 19 nt, Artificial Sequence
  Description of Artificial Sequence: Synthetic oligonucleotide
cagacauccccagcuucuc

SEQ ID NO: 2414637 - RNA, 19 nt, Artificial Sequence
  Description of Artificial Sequence: Synthetic oligonucleotide
aagcagcucagcacaucua

SEQ ID NO: 2414638 - RNA, 19 nt, Artificial Sequence
  Description of Artificial Sequence: Synthetic oligonucleotide
ggggaauuccacacgaagu

SEQ ID NO: 2414639 - RNA, 19 nt, Artificial Sequence
  Description of Artificial Sequence: Synthetic oligonucleotide
cacuggccauaaucauaac

SEQ ID NO: 2414640 - RNA, 19 nt, Artificial Sequence
  Description of Artificial Sequence: Synthetic oligonucleotide
cggucuuccucaguaaggc

SEQ ID NO: 2414641 - RNA, 19 nt, Artificial Sequence
  Description of Artificial Sequence: Synthetic oligonucleotide
uugcaccacggggccagcc

SEQ ID NO: 2414642 - RNA, 19 nt, Artificial Sequence
  Description of Artificial Sequence: Synthetic oligonucleotide
ggguccucgaagcguacga

SEQ ID NO: 2414643 - RNA, 19 nt, Artificial Sequence
  Description of Artificial Sequence: Synthetic oligonucleotide
gggcacgaggccgugccgg

SEQ ID NO: 2414644 - RNA, 19 nt, Artificial Sequence
  Description of Artificial Sequence: Synthetic oligonucleotide
gcggaugcggccguacuug

SEQ ID NO: 2414645 - RNA, 19 nt, Artificial Sequence
  Description of Artificial Sequence: Synthetic oligonucleotide
aucucgcggaugcggccgu

SEQ ID NO: 2414646 - RNA, 19 nt, Artificial Sequence
  Description of Artificial Sequence: Synthetic oligonucleotide
ccuccguaaguccugggga

SEQ ID NO: 2414647 - RNA, 19 nt, Artificial Sequence
  Description of Artificial Sequence: Synthetic oligonucleotide
auggagaaucacggccccu

SEQ ID NO: 2414648 - RNA, 19 nt, Artificial Sequence
  Description of Artificial Sequence: Synthetic oligonucleotide
ucccacggucuuccucagu

SEQ ID NO: 2414649 - RNA, 19 nt, Artificial Sequence
  Description of Artificial Sequence: Synthetic oligonucleotide
gcggccguacuuguaaaac

SEQ ID NO: 2414650 - RNA, 19 nt, Artificial Sequence
  Description of Artificial Sequence: Synthetic oligonucleotide
gacucggaaaucagaccgu

SEQ ID NO: 2414651 - RNA, 19 nt, Artificial Sequence
  Description of Artificial Sequence: Synthetic oligonucleotide
aggccggaaaggagagaag

SEQ ID NO: 2414652 - RNA, 19 nt, Artificial Sequence
  Description of Artificial Sequence: Synthetic oligonucleotide
cagguccuucucgcgcacg

SEQ ID NO: 2414653 - RNA, 19 nt, Artificial Sequence
  Description of Artificial Sequence: Synthetic oligonucleotide
cuggggaauuccacacgaa

SEQ ID NO: 2414654 - RNA, 19 nt, Artificial Sequence
  Description of Artificial Sequence: Synthetic oligonucleotide
ccauuccuugcaccacggg

SEQ ID NO: 2414655 - RNA, 19 nt, Artificial Sequence
  Description of Artificial Sequence: Synthetic oligonucleotide
ggaggcccauuccuugcac

SEQ ID NO: 2414656 - RNA, 19 nt, Artificial Sequence
  Description of Artificial Sequence: Synthetic oligonucleotide
ccaguuuacgcagagcaua

SEQ ID NO: 2414657 - RNA, 19 nt, Artificial Sequence
  Description of Artificial Sequence: Synthetic oligonucleotide
acgaggccgugccgguucu

SEQ ID NO: 2414658 - RNA, 19 nt, Artificial Sequence
  Description of Artificial Sequence: Synthetic oligonucleotide
cagguccugccagcugccg

SEQ ID NO: 2414659 - RNA, 19 nt, Artificial Sequence
  Description of Artificial Sequence: Synthetic oligonucleotide
gggguccucgaagcguacg

SEQ ID NO: 2414660 - RNA, 19 nt, Artificial Sequence
  Description of Artificial Sequence: Synthetic oligonucleotide
cucggaaaucagaccgucu

SEQ ID NO: 2414661 - RNA, 19 nt, Artificial Sequence
  Description of Artificial Sequence: Synthetic oligonucleotide
gccgugccgguucuugagc

SEQ ID NO: 2414662 - RNA, 19 nt, Artificial Sequence
  Description of Artificial Sequence: Synthetic oligonucleotide
agcaucucgcgggguccuc

SEQ ID NO: 2414663 - RNA, 19 nt, Artificial Sequence
  Description of Artificial Sequence: Synthetic oligonucleotide
gcaucucgcgggguccucg

SEQ ID NO: 2414664 - RNA, 19 nt, Artificial Sequence
  Description of Artificial Sequence: Synthetic oligonucleotide
uccuugcaccacggggcca

SEQ ID NO: 2414665 - RNA, 19 nt, Artificial Sequence
  Description of Artificial Sequence: Synthetic oligonucleotide
caccgcccgacgccgcggg

SEQ ID NO: 2414666 - RNA, 19 nt, Artificial Sequence
  Description of Artificial Sequence: Synthetic oligonucleotide
augcgcccgucgcccucgc

SEQ ID NO: 2414667 - RNA, 19 nt, Artificial Sequence
  Description of Artificial Sequence: Synthetic oligonucleotide
aucacggccccuggaccca

SEQ ID NO: 2414668 - RNA, 19 nt, Artificial Sequence
  Description of Artificial Sequence: Synthetic oligonucleotide
gcuccucucaggauaaacu

SEQ ID NO: 2414669 - RNA, 19 nt, Artificial Sequence
  Description of Artificial Sequence: Synthetic oligonucleotide
ccuugcaccacggggccag

SEQ ID NO: 2414670 - RNA, 19 nt, Artificial Sequence
  Description of Artificial Sequence: Synthetic oligonucleotide
gcccagcccgacgacaucc

SEQ ID NO: 2414671 - RNA, 19 nt, Artificial Sequence
  Description of Artificial Sequence: Synthetic oligonucleotide
ggccggaaaggagagaagu

SEQ ID NO: 2414672 - RNA, 19 nt, Artificial Sequence
  Description of Artificial Sequence: Synthetic oligonucleotide
acccagaccgggaccguga

SEQ ID NO: 2414673 - RNA, 19 nt, Artificial Sequence
  Description of Artificial Sequence: Synthetic oligonucleotide
gugaguagccauagcuagu

SEQ ID NO: 2414674 - RNA, 19 nt, Artificial Sequence
  Description of Artificial Sequence: Synthetic oligonucleotide
gagcggaacuuugugucau

SEQ ID NO: 2414675 - RNA, 19 nt, Artificial Sequence
  Description of Artificial Sequence: Synthetic oligonucleotide
ucgcgcacgucggucggaa

SEQ ID NO: 2414676 - RNA, 19 nt, Artificial Sequence
  Description of Artificial Sequence: Synthetic oligonucleotide
caucucgcgggguccucga

SEQ ID NO: 2414677 - RNA, 19 nt, Artificial Sequence
  Description of Artificial Sequence: Synthetic oligonucleotide
ggacggaggaaguccugaa

SEQ ID NO: 2414678 - RNA, 19 nt, Artificial Sequence
  Description of Artificial Sequence: Synthetic oligonucleotide
cucgcggaugcggccguac

SEQ ID NO: 2414679 - RNA, 19 nt, Artificial Sequence
  Description of Artificial Sequence: Synthetic oligonucleotide
cugccggacggaggaaguc

SEQ ID NO: 2414680 - RNA, 19 nt, Artificial Sequence
  Description of Artificial Sequence: Synthetic oligonucleotide
ccgaccuccguaaguccug

SEQ ID NO: 2414681 - RNA, 19 nt, Artificial Sequence
  Description of Artificial Sequence: Synthetic oligonucleotide
caggauaaacucggaugua

SEQ ID NO: 2414682 - RNA, 19 nt, Artificial Sequence
  Description of Artificial Sequence: Synthetic oligonucleotide
aucucgcgggguccucgaa

SEQ ID NO: 2414683 - RNA, 19 nt, Artificial Sequence
  Description of Artificial Sequence: Synthetic oligonucleotide
agucgacacuggccauaau

SEQ ID NO: 2414684 - RNA, 19 nt, Artificial Sequence
  Description of Artificial Sequence: Synthetic oligonucleotide
ccgugaguagccauagcua

SEQ ID NO: 2414685 - RNA, 19 nt, Artificial Sequence
  Description of Artificial Sequence: Synthetic oligonucleotide
ccccacguagaugcgcccg

SEQ ID NO: 2414686 - RNA, 19 nt, Artificial Sequence
  Description of Artificial Sequence: Synthetic oligonucleotide
ugcgcccgucgcccucgcc

SEQ ID NO: 2414687 - RNA, 19 nt, Artificial Sequence
  Description of Artificial Sequence: Synthetic oligonucleotide
gcccgaccuccguaagucc

SEQ ID NO: 2414688 - RNA, 19 nt, Artificial Sequence
  Description of Artificial Sequence: Synthetic oligonucleotide
cuagugcuccucucaggau

SEQ ID NO: 2414689 - RNA, 19 nt, Artificial Sequence
  Description of Artificial Sequence: Synthetic oligonucleotide
cuugcaccacggggccagc

SEQ ID NO: 2414690 - RNA, 19 nt, Artificial Sequence
  Description of Artificial Sequence: Synthetic oligonucleotide
ggggccagccagcccgacc

SEQ ID NO: 2414691 - RNA, 19 nt, Artificial Sequence
  Description of Artificial Sequence: Synthetic oligonucleotide
cgaucucgcggaugcggcc

SEQ ID NO: 2414692 - RNA, 19 nt, Artificial Sequence
  Description of Artificial Sequence: Synthetic oligonucleotide
ccgguucuugagcucgauc

SEQ ID NO: 2414693 - RNA, 19 nt, Artificial Sequence
  Description of Artificial Sequence: Synthetic oligonucleotide
cggauguaugaaguuucac

SEQ ID NO: 2414694 - RNA, 19 nt, Artificial Sequence
  Description of Artificial Sequence: Synthetic oligonucleotide
gccagcccgaccuccguaa

SEQ ID NO: 2414695 - RNA, 19 nt, Artificial Sequence
  Description of Artificial Sequence: Synthetic oligonucleotide
cggccguacuuguaaaaca

SEQ ID NO: 2414696 - RNA, 19 nt, Artificial Sequence
  Description of Artificial Sequence: Synthetic oligonucleotide
cguaaguccuggggaauuc

SEQ ID NO: 2414697 - RNA, 19 nt, Artificial Sequence
  Description of Artificial Sequence: Synthetic oligonucleotide
ccgacgacauccgcaccgc

SEQ ID NO: 2414698 - RNA, 19 nt, Artificial Sequence
  Description of Artificial Sequence: Synthetic oligonucleotide
ggccauaaucauaaccauu

SEQ ID NO: 2414699 - RNA, 19 nt, Artificial Sequence
  Description of Artificial Sequence: Synthetic oligonucleotide
gggaccgugaguagccaua

SEQ ID NO: 2414700 - RNA, 19 nt, Artificial Sequence
  Description of Artificial Sequence: Synthetic oligonucleotide
cuucucgcaugugaucuuu

SEQ ID NO: 2414701 - RNA, 19 nt, Artificial Sequence
  Description of Artificial Sequence: Synthetic oligonucleotide
gccggaaaggagagaagua

SEQ ID NO: 2414702 - RNA, 19 nt, Artificial Sequence
  Description of Artificial Sequence: Synthetic oligonucleotide
cucgugagagcggaacuuu

SEQ ID NO: 2414703 - RNA, 19 nt, Artificial Sequence
  Description of Artificial Sequence: Synthetic oligonucleotide
cggaaaggagagaaguagu

SEQ ID NO: 2414704 - RNA, 19 nt, Artificial Sequence
  Description of Artificial Sequence: Synthetic oligonucleotide
guccgcccagcccgacgac

SEQ ID NO: 2414705 - RNA, 19 nt, Artificial Sequence
  Description of Artificial Sequence: Synthetic oligonucleotide
cgaccuccguaaguccugg

SEQ ID NO: 2414706 - RNA, 19 nt, Artificial Sequence
  Description of Artificial Sequence: Synthetic oligonucleotide
gccgcgcucguccgcccag

SEQ ID NO: 2414707 - RNA, 19 nt, Artificial Sequence
  Description of Artificial Sequence: Synthetic oligonucleotide
ccggacggaggaaguccug

SEQ ID NO: 2414708 - RNA, 19 nt, Artificial Sequence
  Description of Artificial Sequence: Synthetic oligonucleotide
cggucggaagguuccccac

SEQ ID NO: 2414709 - RNA, 19 nt, Artificial Sequence
  Description of Artificial Sequence: Synthetic oligonucleotide
cauccccagcuucucgcau

SEQ ID NO: 2414710 - RNA, 19 nt, Artificial Sequence
  Description of Artificial Sequence: Synthetic oligonucleotide
ucucgcggaugcggccgua

SEQ ID NO: 2414711 - RNA, 19 nt, Artificial Sequence
  Description of Artificial Sequence: Synthetic oligonucleotide
gcccgacgacauccgcacc

SEQ ID NO: 2414712 - RNA, 19 nt, Artificial Sequence
  Description of Artificial Sequence: Synthetic oligonucleotide
ccauagcuagugcuccucu

SEQ ID NO: 2414713 - RNA, 19 nt, Artificial Sequence
  Description of Artificial Sequence: Synthetic oligonucleotide
cagcccgaccuccguaagu

SEQ ID NO: 2414714 - RNA, 19 nt, Artificial Sequence
  Description of Artificial Sequence: Synthetic oligonucleotide
cgugagagcggaacuuugu

SEQ ID NO: 2414715 - RNA, 19 nt, Artificial Sequence
  Description of Artificial Sequence: Synthetic oligonucleotide
cccgaccuccguaaguccu

SEQ ID NO: 2414716 - RNA, 19 nt, Artificial Sequence
  Description of Artificial Sequence: Synthetic oligonucleotide
ccacggucuuccucaguaa

SEQ ID NO: 2414717 - RNA, 19 nt, Artificial Sequence
  Description of Artificial Sequence: Synthetic oligonucleotide
cgacgacauccgcaccgcc

SEQ ID NO: 2414718 - RNA, 19 nt, Artificial Sequence
  Description of Artificial Sequence: Synthetic oligonucleotide
cgcccgucgcccucgccgc

SEQ ID NO: 2414719 - RNA, 19 nt, Artificial Sequence
  Description of Artificial Sequence: Synthetic oligonucleotide
cguccgcccagcccgacga

SEQ ID NO: 2414720 - RNA, 19 nt, Artificial Sequence
  Description of Artificial Sequence: Synthetic oligonucleotide
gcgggguccucgaagcgua

SEQ ID NO: 2414721 - RNA, 19 nt, Artificial Sequence
  Description of Artificial Sequence: Synthetic oligonucleotide
cacccucgugagagcggaa

SEQ ID NO: 2414722 - RNA, 19 nt, Artificial Sequence
  Description of Artificial Sequence: Synthetic oligonucleotide
cucgcgcacgucggucgga

SEQ ID NO: 2414723 - RNA, 19 nt, Artificial Sequence
  Description of Artificial Sequence: Synthetic oligonucleotide
acggggccagccagcccga

SEQ ID NO: 2414724 - RNA, 19 nt, Artificial Sequence
  Description of Artificial Sequence: Synthetic oligonucleotide
ccgugccgguucuugagcu

SEQ ID NO: 2414725 - RNA, 19 nt, Artificial Sequence
  Description of Artificial Sequence: Synthetic oligonucleotide
gccggacggaggaaguccu

SEQ ID NO: 2414726 - RNA, 19 nt, Artificial Sequence
  Description of Artificial Sequence: Synthetic oligonucleotide
cgucggucggaagguuccc

SEQ ID NO: 2414727 - RNA, 19 nt, Artificial Sequence
  Description of Artificial Sequence: Synthetic oligonucleotide
ccacggggccagccagccc

SEQ ID NO: 2414728 - RNA, 19 nt, Artificial Sequence
  Description of Artificial Sequence: Synthetic oligonucleotide
ggaugcggccguacuugua

SEQ ID NO: 2414729 - RNA, 19 nt, Artificial Sequence
  Description of Artificial Sequence: Synthetic oligonucleotide
cccucgugagagcggaacu

SEQ ID NO: 2414730 - RNA, 19 nt, Artificial Sequence
  Description of Artificial Sequence: Synthetic oligonucleotide
cggacggaggaaguccuga

SEQ ID NO: 2414731 - RNA, 19 nt, Artificial Sequence
  Description of Artificial Sequence: Synthetic oligonucleotide
gugcuccucucaggauaaa

SEQ ID NO: 2414732 - RNA, 19 nt, Artificial Sequence
  Description of Artificial Sequence: Synthetic oligonucleotide
gcugccggacggaggaagu

SEQ ID NO: 2414733 - RNA, 19 nt, Artificial Sequence
  Description of Artificial Sequence: Synthetic oligonucleotide
cagcaucucgcgggguccu

SEQ ID NO: 2414734 - RNA, 19 nt, Artificial Sequence
  Description of Artificial Sequence: Synthetic oligonucleotide
cagccagcccgaccuccgu

SEQ ID NO: 2414735 - RNA, 19 nt, Artificial Sequence
  Description of Artificial Sequence: Synthetic oligonucleotide
cgcccgacgccgcgggccc

SEQ ID NO: 2414736 - RNA, 19 nt, Artificial Sequence
  Description of Artificial Sequence: Synthetic oligonucleotide
gcccgucgcccucgccgcc

SEQ ID NO: 2414737 - RNA, 19 nt, Artificial Sequence
  Description of Artificial Sequence: Synthetic oligonucleotide
cgcgcacgucggucggaag

SEQ ID NO: 2414738 - RNA, 19 nt, Artificial Sequence
  Description of Artificial Sequence: Synthetic oligonucleotide
cgggguccucgaagcguac

SEQ ID NO: 2414739 - RNA, 19 nt, Artificial Sequence
  Description of Artificial Sequence: Synthetic oligonucleotide
ccucgugagagcggaacuu

SEQ ID NO: 2414740 - RNA, 19 nt, Artificial Sequence
  Description of Artificial Sequence: Synthetic oligonucleotide
ccgcaccgcccgacgccgc

SEQ ID NO: 2414741 - RNA, 19 nt, Artificial Sequence
  Description of Artificial Sequence: Synthetic oligonucleotide
ccuucucgcgcacgucggu

SEQ ID NO: 2414742 - RNA, 19 nt, Artificial Sequence
  Description of Artificial Sequence: Synthetic oligonucleotide
gcucguccgcccagcccga

SEQ ID NO: 2414743 - RNA, 19 nt, Artificial Sequence
  Description of Artificial Sequence: Synthetic oligonucleotide
ccauccccauuccauccuu

SEQ ID NO: 2414744 - RNA, 19 nt, Artificial Sequence
  Description of Artificial Sequence: Synthetic oligonucleotide
ccgggaccgugaguagcca

SEQ ID NO: 2414745 - RNA, 19 nt, Artificial Sequence
  Description of Artificial Sequence: Synthetic oligonucleotide
ccguaaguccuggggaauu

SEQ ID NO: 2414746 - RNA, 19 nt, Artificial Sequence
  Description of Artificial Sequence: Synthetic oligonucleotide
ccgcccagcccgacgacau

SEQ ID NO: 2414747 - RNA, 19 nt, Artificial Sequence
  Description of Artificial Sequence: Synthetic oligonucleotide
cgcacgucggucggaaggu

SEQ ID NO: 2414748 - RNA, 19 nt, Artificial Sequence
  Description of Artificial Sequence: Synthetic oligonucleotide
cgaagucgacacuggccau

SEQ ID NO: 2414749 - RNA, 19 nt, Artificial Sequence
  Description of Artificial Sequence: Synthetic oligonucleotide
cggaugcggccguacuugu

SEQ ID NO: 2414750 - RNA, 19 nt, Artificial Sequence
  Description of Artificial Sequence: Synthetic oligonucleotide
cgacauccgcaccgcccga

SEQ ID NO: 2414751 - RNA, 19 nt, Artificial Sequence
  Description of Artificial Sequence: Synthetic oligonucleotide
gccgguucuugagcucgau

SEQ ID NO: 2414752 - RNA, 19 nt, Artificial Sequence
  Description of Artificial Sequence: Synthetic oligonucleotide
gcacgucggucggaagguu

SEQ ID NO: 2414753 - RNA, 19 nt, Artificial Sequence
  Description of Artificial Sequence: Synthetic oligonucleotide
cgggaccgugaguagccau

SEQ ID NO: 2414754 - RNA, 19 nt, Artificial Sequence
  Description of Artificial Sequence: Synthetic oligonucleotide
cgcggaugcggccguacuu

SEQ ID NO: 2414755 - RNA, 19 nt, Artificial Sequence
  Description of Artificial Sequence: Synthetic oligonucleotide
cggggccagccagcccgac

SEQ ID NO: 2414756 - RNA, 19 nt, Artificial Sequence
  Description of Artificial Sequence: Synthetic oligonucleotide
cgaggccgugccgguucuu

SEQ ID NO: 2414757 - RNA, 19 nt, Artificial Sequence
  Description of Artificial Sequence: Synthetic oligonucleotide
auuguuuacacuuauaugg

SEQ ID NO: 2414758 - RNA, 19 nt, Artificial Sequence
  Description of Artificial Sequence: Synthetic oligonucleotide
aaagaaaugaaacccuucc

SEQ ID NO: 2414759 - RNA, 19 nt, Artificial Sequence
  Description of Artificial Sequence: Synthetic oligonucleotide
aagaaauaaaaccuuugcc

SEQ ID NO: 2414760 - RNA, 19 nt, Artificial Sequence
  Description of Artificial Sequence: Synthetic oligonucleotide
aagaauugaaaccuuuucc

SEQ ID NO: 2414761 - RNA, 19 nt, Artificial Sequence
  Description of Artificial Sequence: Synthetic oligonucleotide
acuguuuacauacaaaugg

SEQ ID NO: 2414762 - RNA, 19 nt, Artificial Sequence
  Description of Artificial Sequence: Synthetic oligonucleotide
auugcuuacaaacauacgg

SEQ ID NO: 2414763 - RNA, 19 nt, Artificial Sequence
  Description of Artificial Sequence: Synthetic oligonucleotide
auugccuacauuuauaggg

SEQ ID NO: 2414764 - RNA, 19 nt, Artificial Sequence
  Description of Artificial Sequence: Synthetic oligonucleotide
auaguuuacauacacagag

SEQ ID NO: 2414765 - RNA, 19 nt, Artificial Sequence
  Description of Artificial Sequence: Synthetic oligonucleotide
cuuacuaaagaaaugaaac

SEQ ID NO: 2414766 - RNA, 19 nt, Artificial Sequence
  Description of Artificial Sequence: Synthetic oligonucleotide
aaaguauaaaaggauuucc

SEQ ID NO: 2414767 - RNA, 19 nt, Artificial Sequence
  Description of Artificial Sequence: Synthetic oligonucleotide
uuuuaagggaacuggaacg

SEQ ID NO: 2414768 - RNA, 19 nt, Artificial Sequence
  Description of Artificial Sequence: Synthetic oligonucleotide
aaugaaacccuucccacac

SEQ ID NO: 2414769 - RNA, 19 nt, Artificial Sequence
  Description of Artificial Sequence: Synthetic oligonucleotide
uuuacugcaagaaauaaaa

SEQ ID NO: 2414770 - RNA, 19 nt, Artificial Sequence
  Description of Artificial Sequence: Synthetic oligonucleotide
acugcugacacacauaggg

SEQ ID NO: 2414771 - RNA, 19 nt, Artificial Sequence
  Description of Artificial Sequence: Synthetic oligonucleotide
aaacauacgguuucucccc

SEQ ID NO: 2414772 - RNA, 19 nt, Artificial Sequence
  Description of Artificial Sequence: Synthetic oligonucleotide
acauaguuuacauacacag

SEQ ID NO: 2414773 - RNA, 19 nt, Artificial Sequence
  Description of Artificial Sequence: Synthetic oligonucleotide
aacugugaccaguaaaggc

SEQ ID NO: 2414774 - RNA, 19 nt, Artificial Sequence
  Description of Artificial Sequence: Synthetic oligonucleotide
aagaaaugaaacccuuccc

SEQ ID NO: 2414775 - RNA, 19 nt, Artificial Sequence
  Description of Artificial Sequence: Synthetic oligonucleotide
acugcaaacauacaugggg

SEQ ID NO: 2414776 - RNA, 19 nt, Artificial Sequence
  Description of Artificial Sequence: Synthetic oligonucleotide
auuuuaagggaacuggaac

SEQ ID NO: 2414777 - RNA, 19 nt, Artificial Sequence
  Description of Artificial Sequence: Synthetic oligonucleotide
uguauuuuaagggaacugg

SEQ ID NO: 2414778 - RNA, 19 nt, Artificial Sequence
  Description of Artificial Sequence: Synthetic oligonucleotide
uacugcaagaaauaaaacc

SEQ ID NO: 2414779 - RNA, 19 nt, Artificial Sequence
  Description of Artificial Sequence: Synthetic oligonucleotide
aaguauaaaaggauuuccc

SEQ ID NO: 2414780 - RNA, 19 nt, Artificial Sequence
  Description of Artificial Sequence: Synthetic oligonucleotide
aaugaguugauucauguuu

SEQ ID NO: 2414781 - RNA, 19 nt, Artificial Sequence
  Description of Artificial Sequence: Synthetic oligonucleotide
auugaaaccuuuuccacac

SEQ ID NO: 2414782 - RNA, 19 nt, Artificial Sequence
  Description of Artificial Sequence: Synthetic oligonucleotide
aaacuuacuaaagaaauga

SEQ ID NO: 2414783 - RNA, 19 nt, Artificial Sequence
  Description of Artificial Sequence: Synthetic oligonucleotide
aacacuaaagacuuuccca

SEQ ID NO: 2414784 - RNA, 19 nt, Artificial Sequence
  Description of Artificial Sequence: Synthetic oligonucleotide
uuacuaaagaaaugaaacc

SEQ ID NO: 2414785 - RNA, 19 nt, Artificial Sequence
  Description of Artificial Sequence: Synthetic oligonucleotide
aacugucaacacuaaagac

SEQ ID NO: 2414786 - RNA, 19 nt, Artificial Sequence
  Description of Artificial Sequence: Synthetic oligonucleotide
uacuaaagaaaugaaaccc

SEQ ID NO: 2414787 - RNA, 19 nt, Artificial Sequence
  Description of Artificial Sequence: Synthetic oligonucleotide
ucuagugugagucuucuca

SEQ ID NO: 2414788 - RNA, 19 nt, Artificial Sequence
  Description of Artificial Sequence: Synthetic oligonucleotide
gacaacaugacacugguuc

SEQ ID NO: 2414789 - RNA, 19 nt, Artificial Sequence
  Description of Artificial Sequence: Synthetic oligonucleotide
aguugauucauguuuucgg

SEQ ID NO: 2414790 - RNA, 19 nt, Artificial Sequence
  Description of Artificial Sequence: Synthetic oligonucleotide
acagugaauccuuucaugg

SEQ ID NO: 2414791 - RNA, 19 nt, Artificial Sequence
  Description of Artificial Sequence: Synthetic oligonucleotide
uauaaaaggauuucccaca

SEQ ID NO: 2414792 - RNA, 19 nt, Artificial Sequence
  Description of Artificial Sequence: Synthetic oligonucleotide
uguauugccauguuaagaa

SEQ ID NO: 2414793 - RNA, 19 nt, Artificial Sequence
  Description of Artificial Sequence: Synthetic oligonucleotide
ucuaaacuuacuaaagaaa

SEQ ID NO: 2414794 - RNA, 19 nt, Artificial Sequence
  Description of Artificial Sequence: Synthetic oligonucleotide
aauccuuucaucaguaaag

SEQ ID NO: 2414795 - RNA, 19 nt, Artificial Sequence
  Description of Artificial Sequence: Synthetic oligonucleotide
agaauugaaaccuuuucca

SEQ ID NO: 2414796 - RNA, 19 nt, Artificial Sequence
  Description of Artificial Sequence: Synthetic oligonucleotide
aucaguaaaggcuuuacca

SEQ ID NO: 2414797 - RNA, 19 nt, Artificial Sequence
  Description of Artificial Sequence: Synthetic oligonucleotide
aaaaccuuugccacauugc

SEQ ID NO: 2414798 - RNA, 19 nt, Artificial Sequence
  Description of Artificial Sequence: Synthetic oligonucleotide
uaaacuuacuaaagaaaug

SEQ ID NO: 2414799 - RNA, 19 nt, Artificial Sequence
  Description of Artificial Sequence: Synthetic oligonucleotide
uuaaaguauaaaaggauuu

SEQ ID NO: 2414800 - RNA, 19 nt, Artificial Sequence
  Description of Artificial Sequence: Synthetic oligonucleotide
caagaaauaaaaccuuugc

SEQ ID NO: 2414801 - RNA, 19 nt, Artificial Sequence
  Description of Artificial Sequence: Synthetic oligonucleotide
acuaaaggcauuccuacag

SEQ ID NO: 2414802 - RNA, 19 nt, Artificial Sequence
  Description of Artificial Sequence: Synthetic oligonucleotide
acacugcaaacauacaugg

SEQ ID NO: 2414803 - RNA, 19 nt, Artificial Sequence
  Description of Artificial Sequence: Synthetic oligonucleotide
aaggcauuccuacagacaa

SEQ ID NO: 2414804 - RNA, 19 nt, Artificial Sequence
  Description of Artificial Sequence: Synthetic oligonucleotide
uguauucuaaacuuacuaa

SEQ ID NO: 2414805 - RNA, 19 nt, Artificial Sequence
  Description of Artificial Sequence: Synthetic oligonucleotide
aguauaaaaggauuuccca

SEQ ID NO: 2414806 - RNA, 19 nt, Artificial Sequence
  Description of Artificial Sequence: Synthetic oligonucleotide
agaaaugaaacccuuccca

SEQ ID NO: 2414807 - RNA, 19 nt, Artificial Sequence
  Description of Artificial Sequence: Synthetic oligonucleotide
uuucauacauuguuuacac

SEQ ID NO: 2414808 - RNA, 19 nt, Artificial Sequence
  Description of Artificial Sequence: Synthetic oligonucleotide
ucauacauuguuuacacuu

SEQ ID NO: 2414809 - RNA, 19 nt, Artificial Sequence
  Description of Artificial Sequence: Synthetic oligonucleotide
uaaaaccuuugccacauug

SEQ ID NO: 2414810 - RNA, 19 nt, Artificial Sequence
  Description of Artificial Sequence: Synthetic oligonucleotide
ugauucauguuuucggaag

SEQ ID NO: 2414811 - RNA, 19 nt, Artificial Sequence
  Description of Artificial Sequence: Synthetic oligonucleotide
uucuaaacuuacuaaagaa

SEQ ID NO: 2414812 - RNA, 19 nt, Artificial Sequence
  Description of Artificial Sequence: Synthetic oligonucleotide
ucauguauucuaaacuuac

SEQ ID NO: 2414813 - RNA, 19 nt, Artificial Sequence
  Description of Artificial Sequence: Synthetic oligonucleotide
auuccuucuagugugaguc

SEQ ID NO: 2414814 - RNA, 19 nt, Artificial Sequence
  Description of Artificial Sequence: Synthetic oligonucleotide
auacacagaguuucucucc

SEQ ID NO: 2414815 - RNA, 19 nt, Artificial Sequence
  Description of Artificial Sequence: Synthetic oligonucleotide
caaacauacgguuucuccc

SEQ ID NO: 2414816 - RNA, 19 nt, Artificial Sequence
  Description of Artificial Sequence: Synthetic oligonucleotide
ugugaauccguucauguau

SEQ ID NO: 2414817 - RNA, 19 nt, Artificial Sequence
  Description of Artificial Sequence: Synthetic oligonucleotide
aaaccuuugccacauugcu

SEQ ID NO: 2414818 - RNA, 19 nt, Artificial Sequence
  Description of Artificial Sequence: Synthetic oligonucleotide
ucucauguauuuuaaggga

SEQ ID NO: 2414819 - RNA, 19 nt, Artificial Sequence
  Description of Artificial Sequence: Synthetic oligonucleotide
uacuggaagaauugaaacc

SEQ ID NO: 2414820 - RNA, 19 nt, Artificial Sequence
  Description of Artificial Sequence: Synthetic oligonucleotide
aagaugacuaaaggcauuc

SEQ ID NO: 2414821 - RNA, 19 nt, Artificial Sequence
  Description of Artificial Sequence: Synthetic oligonucleotide
uuucauguucuacacugag

SEQ ID NO: 2414822 - RNA, 19 nt, Artificial Sequence
  Description of Artificial Sequence: Synthetic oligonucleotide
acugcaagaaauaaaaccu

SEQ ID NO: 2414823 - RNA, 19 nt, Artificial Sequence
  Description of Artificial Sequence: Synthetic oligonucleotide
cuuuucaccacugugaauc

SEQ ID NO: 2414824 - RNA, 19 nt, Artificial Sequence
  Description of Artificial Sequence: Synthetic oligonucleotide
aggaauuccuucuagugug

SEQ ID NO: 2414825 - RNA, 19 nt, Artificial Sequence
  Description of Artificial Sequence: Synthetic oligonucleotide
ucaguaaaggcuuuaccac

SEQ ID NO: 2414826 - RNA, 19 nt, Artificial Sequence
  Description of Artificial Sequence: Synthetic oligonucleotide
uucauguucuacacugagg

SEQ ID NO: 2414827 - RNA, 19 nt, Artificial Sequence
  Description of Artificial Sequence: Synthetic oligonucleotide
auucuaaacuuacuaaaga

SEQ ID NO: 2414828 - RNA, 19 nt, Artificial Sequence
  Description of Artificial Sequence: Synthetic oligonucleotide
uuuucggaaguuuacugca

SEQ ID NO: 2414829 - RNA, 19 nt, Artificial Sequence
  Description of Artificial Sequence: Synthetic oligonucleotide
guauaaaaggauuucccac

SEQ ID NO: 2414830 - RNA, 19 nt, Artificial Sequence
  Description of Artificial Sequence: Synthetic oligonucleotide
acauugcuuacaaacauac

SEQ ID NO: 2414831 - RNA, 19 nt, Artificial Sequence
  Description of Artificial Sequence: Synthetic oligonucleotide
auacaugggguuucucucc

SEQ ID NO: 2414832 - RNA, 19 nt, Artificial Sequence
  Description of Artificial Sequence: Synthetic oligonucleotide
ugugaauccuuucgugacg

SEQ ID NO: 2414833 - RNA, 19 nt, Artificial Sequence
  Description of Artificial Sequence: Synthetic oligonucleotide
acauugccuacauuuauag

SEQ ID NO: 2414834 - RNA, 19 nt, Artificial Sequence
  Description of Artificial Sequence: Synthetic oligonucleotide
aaaccuuuuccacacugca

SEQ ID NO: 2414835 - RNA, 19 nt, Artificial Sequence
  Description of Artificial Sequence: Synthetic oligonucleotide
ugaaaccuuuuccacacug

SEQ ID NO: 2414836 - RNA, 19 nt, Artificial Sequence
  Description of Artificial Sequence: Synthetic oligonucleotide
aaaugaaacccuucccaca

SEQ ID NO: 2414837 - RNA, 19 nt, Artificial Sequence
  Description of Artificial Sequence: Synthetic oligonucleotide
uguuuucggaaguuuacug

SEQ ID NO: 2414838 - RNA, 19 nt, Artificial Sequence
  Description of Artificial Sequence: Synthetic oligonucleotide
gaagaauugaaaccuuuuc

SEQ ID NO: 2414839 - RNA, 19 nt, Artificial Sequence
  Description of Artificial Sequence: Synthetic oligonucleotide
uccagaaugaguugauuca

SEQ ID NO: 2414840 - RNA, 19 nt, Artificial Sequence
  Description of Artificial Sequence: Synthetic oligonucleotide
gaaaugaaacccuucccac

SEQ ID NO: 2414841 - RNA, 19 nt, Artificial Sequence
  Description of Artificial Sequence: Synthetic oligonucleotide
acacugcugacacacauag

SEQ ID NO: 2414842 - RNA, 19 nt, Artificial Sequence
  Description of Artificial Sequence: Synthetic oligonucleotide
auuccuacagacaacauga

SEQ ID NO: 2414843 - RNA, 19 nt, Artificial Sequence
  Description of Artificial Sequence: Synthetic oligonucleotide
auucgaaggguacuggaag

SEQ ID NO: 2414844 - RNA, 19 nt, Artificial Sequence
  Description of Artificial Sequence: Synthetic oligonucleotide
acacuguuuacauacaaau

SEQ ID NO: 2414845 - RNA, 19 nt, Artificial Sequence
  Description of Artificial Sequence: Synthetic oligonucleotide
agaaugaguugauucaugu

SEQ ID NO: 2414846 - RNA, 19 nt, Artificial Sequence
  Description of Artificial Sequence: Synthetic oligonucleotide
uauuuuaagggaacuggaa

SEQ ID NO: 2414847 - RNA, 19 nt, Artificial Sequence
  Description of Artificial Sequence: Synthetic oligonucleotide
gaauugaaaccuuuuccac

SEQ ID NO: 2414848 - RNA, 19 nt, Artificial Sequence
  Description of Artificial Sequence: Synthetic oligonucleotide
gaacugucaacacuaaaga

SEQ ID NO: 2414849 - RNA, 19 nt, Artificial Sequence
  Description of Artificial Sequence: Synthetic oligonucleotide
ucaacacuaaagacuuucc

SEQ ID NO: 2414850 - RNA, 19 nt, Artificial Sequence
  Description of Artificial Sequence: Synthetic oligonucleotide
uuguuuacacuuauauggu

SEQ ID NO: 2414851 - RNA, 19 nt, Artificial Sequence
  Description of Artificial Sequence: Synthetic oligonucleotide
ucuacacugaggaauuccu

SEQ ID NO: 2414852 - RNA, 19 nt, Artificial Sequence
  Description of Artificial Sequence: Synthetic oligonucleotide
aauccguucauguauucua

SEQ ID NO: 2414853 - RNA, 19 nt, Artificial Sequence
  Description of Artificial Sequence: Synthetic oligonucleotide
uauguauugccauguuaag

SEQ ID NO: 2414854 - RNA, 19 nt, Artificial Sequence
  Description of Artificial Sequence: Synthetic oligonucleotide
uacauaggggcuuuucacc

SEQ ID NO: 2414855 - RNA, 19 nt, Artificial Sequence
  Description of Artificial Sequence: Synthetic oligonucleotide
auugccauguuaagaauac

SEQ ID NO: 2414856 - RNA, 19 nt, Artificial Sequence
  Description of Artificial Sequence: Synthetic oligonucleotide
guuuucggaaguuuacugc

SEQ ID NO: 2414857 - RNA, 19 nt, Artificial Sequence
  Description of Artificial Sequence: Synthetic oligonucleotide
cauuguuuacacuuauaug

SEQ ID NO: 2414858 - RNA, 19 nt, Artificial Sequence
  Description of Artificial Sequence: Synthetic oligonucleotide
ccuacagacaacaugacac

SEQ ID NO: 2414859 - RNA, 19 nt, Artificial Sequence
  Description of Artificial Sequence: Synthetic oligonucleotide
acugucaacacuaaagacu

SEQ ID NO: 2414860 - RNA, 19 nt, Artificial Sequence
  Description of Artificial Sequence: Synthetic oligonucleotide
ucauguauuuuaagggaac

SEQ ID NO: 2414861 - RNA, 19 nt, Artificial Sequence
  Description of Artificial Sequence: Synthetic oligonucleotide
gaauccuuucgugacgucg

SEQ ID NO: 2414862 - RNA, 19 nt, Artificial Sequence
  Description of Artificial Sequence: Synthetic oligonucleotide
ugugaauccuuucauggua

SEQ ID NO: 2414863 - RNA, 19 nt, Artificial Sequence
  Description of Artificial Sequence: Synthetic oligonucleotide
cacuuaaaguauaaaagga

SEQ ID NO: 2414864 - RNA, 19 nt, Artificial Sequence
  Description of Artificial Sequence: Synthetic oligonucleotide
aaacccuucccacacugcu

SEQ ID NO: 2414865 - RNA, 19 nt, Artificial Sequence
  Description of Artificial Sequence: Synthetic oligonucleotide
cuauguauugccauguuaa

SEQ ID NO: 2414866 - RNA, 19 nt, Artificial Sequence
  Description of Artificial Sequence: Synthetic oligonucleotide
guacuggaagaauugaaac

SEQ ID NO: 2414867 - RNA, 19 nt, Artificial Sequence
  Description of Artificial Sequence: Synthetic oligonucleotide
ucauguauucgaaggguac

SEQ ID NO: 2414868 - RNA, 19 nt, Artificial Sequence
  Description of Artificial Sequence: Synthetic oligonucleotide
auguauucuaaacuuacua

SEQ ID NO: 2414869 - RNA, 19 nt, Artificial Sequence
  Description of Artificial Sequence: Synthetic oligonucleotide
aauccuuucaugguaucga

SEQ ID NO: 2414870 - RNA, 19 nt, Artificial Sequence
  Description of Artificial Sequence: Synthetic oligonucleotide
acauacaugggguuucucu

SEQ ID NO: 2414871 - RNA, 19 nt, Artificial Sequence
  Description of Artificial Sequence: Synthetic oligonucleotide
cacacugcaaacauacaug

SEQ ID NO: 2414872 - RNA, 19 nt, Artificial Sequence
  Description of Artificial Sequence: Synthetic oligonucleotide
uauugccauguuaagaaua

SEQ ID NO: 2414873 - RNA, 19 nt, Artificial Sequence
  Description of Artificial Sequence: Synthetic oligonucleotide
ggaacugucaacacuaaag

SEQ ID NO: 2414874 - RNA, 19 nt, Artificial Sequence
  Description of Artificial Sequence: Synthetic oligonucleotide
uucggaaguuuacugcaag

SEQ ID NO: 2414875 - RNA, 19 nt, Artificial Sequence
  Description of Artificial Sequence: Synthetic oligonucleotide
uuuaagggaacuggaacga

SEQ ID NO: 2414876 - RNA, 19 nt, Artificial Sequence
  Description of Artificial Sequence: Synthetic oligonucleotide
gaauccuuucaugguaucg

SEQ ID NO: 2414877 - RNA, 19 nt, Artificial Sequence
  Description of Artificial Sequence: Synthetic oligonucleotide
ucuucucauguauuuuaag

SEQ ID NO: 2414878 - RNA, 19 nt, Artificial Sequence
  Description of Artificial Sequence: Synthetic oligonucleotide
acauacacagaguuucucu

SEQ ID NO: 2414879 - RNA, 19 nt, Artificial Sequence
  Description of Artificial Sequence: Synthetic oligonucleotide
uaaaggcauuccuacagac

SEQ ID NO: 2414880 - RNA, 19 nt, Artificial Sequence
  Description of Artificial Sequence: Synthetic oligonucleotide
ccaguaaaggcuuucauac

SEQ ID NO: 2414881 - RNA, 19 nt, Artificial Sequence
  Description of Artificial Sequence: Synthetic oligonucleotide
ugugagucuucucauguau

SEQ ID NO: 2414882 - RNA, 19 nt, Artificial Sequence
  Description of Artificial Sequence: Synthetic oligonucleotide
ucuauguauugccauguua

SEQ ID NO: 2414883 - RNA, 19 nt, Artificial Sequence
  Description of Artificial Sequence: Synthetic oligonucleotide
ucugcucuauguauugcca

SEQ ID NO: 2414884 - RNA, 19 nt, Artificial Sequence
  Description of Artificial Sequence: Synthetic oligonucleotide
uuacugcaagaaauaaaac

SEQ ID NO: 2414885 - RNA, 19 nt, Artificial Sequence
  Description of Artificial Sequence: Synthetic oligonucleotide
gaguugauucauguuuucg

SEQ ID NO: 2414886 - RNA, 19 nt, Artificial Sequence
  Description of Artificial Sequence: Synthetic oligonucleotide
uacacugaggaauuccuuc

SEQ ID NO: 2414887 - RNA, 19 nt, Artificial Sequence
  Description of Artificial Sequence: Synthetic oligonucleotide
ugccauguuaagaauacuu

SEQ ID NO: 2414888 - RNA, 19 nt, Artificial Sequence
  Description of Artificial Sequence: Synthetic oligonucleotide
uguauucgaaggguacugg

SEQ ID NO: 2414889 - RNA, 19 nt, Artificial Sequence
  Description of Artificial Sequence: Synthetic oligonucleotide
uugccuacauuuauagggu

SEQ ID NO: 2414890 - RNA, 19 nt, Artificial Sequence
  Description of Artificial Sequence: Synthetic oligonucleotide
ugcaagaaauaaaaccuuu

SEQ ID NO: 2414891 - RNA, 19 nt, Artificial Sequence
  Description of Artificial Sequence: Synthetic oligonucleotide
cauguuuucggaaguuuac

SEQ ID NO: 2414892 - RNA, 19 nt, Artificial Sequence
  Description of Artificial Sequence: Synthetic oligonucleotide
aucgaagggaacugucaac

SEQ ID NO: 2414893 - RNA, 19 nt, Artificial Sequence
  Description of Artificial Sequence: Synthetic oligonucleotide
uaucgaagggaacugucaa

SEQ ID NO: 2414894 - RNA, 19 nt, Artificial Sequence
  Description of Artificial Sequence: Synthetic oligonucleotide
uuucauguauucgaagggu

SEQ ID NO: 2414895 - RNA, 19 nt, Artificial Sequence
  Description of Artificial Sequence: Synthetic oligonucleotide
cuaaacuuacuaaagaaau

SEQ ID NO: 2414896 - RNA, 19 nt, Artificial Sequence
  Description of Artificial Sequence: Synthetic oligonucleotide
acugugaccaguaaaggcu

SEQ ID NO: 2414897 - RNA, 19 nt, Artificial Sequence
  Description of Artificial Sequence: Synthetic oligonucleotide
uucauguauucuaaacuua

SEQ ID NO: 2414898 - RNA, 19 nt, Artificial Sequence
  Description of Artificial Sequence: Synthetic oligonucleotide
uauucgaaggguacuggaa

SEQ ID NO: 2414899 - RNA, 19 nt, Artificial Sequence
  Description of Artificial Sequence: Synthetic oligonucleotide
acugaggaauuccuucuag

SEQ ID NO: 2414900 - RNA, 19 nt, Artificial Sequence
  Description of Artificial Sequence: Synthetic oligonucleotide
cuccagaaugaguugauuc

SEQ ID NO: 2414901 - RNA, 19 nt, Artificial Sequence
  Description of Artificial Sequence: Synthetic oligonucleotide
acuuaaaguauaaaaggau

SEQ ID NO: 2414902 - RNA, 19 nt, Artificial Sequence
  Description of Artificial Sequence: Synthetic oligonucleotide
uaguuuacauacacagagu

SEQ ID NO: 2414903 - RNA, 19 nt, Artificial Sequence
  Description of Artificial Sequence: Synthetic oligonucleotide
caugacacugguucucugc

SEQ ID NO: 2414904 - RNA, 19 nt, Artificial Sequence
  Description of Artificial Sequence: Synthetic oligonucleotide
auccuuucaucaguaaagg

SEQ ID NO: 2414905 - RNA, 19 nt, Artificial Sequence
  Description of Artificial Sequence: Synthetic oligonucleotide
cacuguuuacauacaaaug

SEQ ID NO: 2414906 - RNA, 19 nt, Artificial Sequence
  Description of Artificial Sequence: Synthetic oligonucleotide
cauacaugggguuucucuc

SEQ ID NO: 2414907 - RNA, 19 nt, Artificial Sequence
  Description of Artificial Sequence: Synthetic oligonucleotide
cauugcuuacaaacauacg

SEQ ID NO: 2414908 - RNA, 19 nt, Artificial Sequence
  Description of Artificial Sequence: Synthetic oligonucleotide
cauacacagaguuucucuc

SEQ ID NO: 2414909 - RNA, 19 nt, Artificial Sequence
  Description of Artificial Sequence: Synthetic oligonucleotide
guugauucauguuuucgga

SEQ ID NO: 2414910 - RNA, 19 nt, Artificial Sequence
  Description of Artificial Sequence: Synthetic oligonucleotide
acgguuucuccccacagug

SEQ ID NO: 2414911 - RNA, 19 nt, Artificial Sequence
  Description of Artificial Sequence: Synthetic oligonucleotide
uucgugacgucgaagggaa

SEQ ID NO: 2414912 - RNA, 19 nt, Artificial Sequence
  Description of Artificial Sequence: Synthetic oligonucleotide
uguucuacacugaggaauu

SEQ ID NO: 2414913 - RNA, 19 nt, Artificial Sequence
  Description of Artificial Sequence: Synthetic oligonucleotide
gaauccuuucaucaguaaa

SEQ ID NO: 2414914 - RNA, 19 nt, Artificial Sequence
  Description of Artificial Sequence: Synthetic oligonucleotide
caucaguaaaggcuuuacc

SEQ ID NO: 2414915 - RNA, 19 nt, Artificial Sequence
  Description of Artificial Sequence: Synthetic oligonucleotide
uucauguauucgaagggua

SEQ ID NO: 2414916 - RNA, 19 nt, Artificial Sequence
  Description of Artificial Sequence: Synthetic oligonucleotide
uccuuucaugguaucgaag

SEQ ID NO: 2414917 - RNA, 19 nt, Artificial Sequence
  Description of Artificial Sequence: Synthetic oligonucleotide
ugcucuauguauugccaug

SEQ ID NO: 2414918 - RNA, 19 nt, Artificial Sequence
  Description of Artificial Sequence: Synthetic oligonucleotide
acauaggggcuuuucacca

SEQ ID NO: 2414919 - RNA, 19 nt, Artificial Sequence
  Description of Artificial Sequence: Synthetic oligonucleotide
uucgaaggguacuggaaga

SEQ ID NO: 2414920 - RNA, 19 nt, Artificial Sequence
  Description of Artificial Sequence: Synthetic oligonucleotide
aaggguacuggaagaauug

SEQ ID NO: 2414921 - RNA, 19 nt, Artificial Sequence
  Description of Artificial Sequence: Synthetic oligonucleotide
cauugccuacauuuauagg

SEQ ID NO: 2414922 - RNA, 19 nt, Artificial Sequence
  Description of Artificial Sequence: Synthetic oligonucleotide
acagacaacaugacacugg

SEQ ID NO: 2414923 - RNA, 19 nt, Artificial Sequence
  Description of Artificial Sequence: Synthetic oligonucleotide
uccuuucaucaguaaaggc

SEQ ID NO: 2414924 - RNA, 19 nt, Artificial Sequence
  Description of Artificial Sequence: Synthetic oligonucleotide
uuuucaccacugugaaucc

SEQ ID NO: 2414925 - RNA, 19 nt, Artificial Sequence
  Description of Artificial Sequence: Synthetic oligonucleotide
agguguggcgagugaaggc

SEQ ID NO: 2414926 - RNA, 19 nt, Artificial Sequence
  Description of Artificial Sequence: Synthetic oligonucleotide
gaaguuuacugcaagaaau

SEQ ID NO: 2414927 - RNA, 19 nt, Artificial Sequence
  Description of Artificial Sequence: Synthetic oligonucleotide
uucuacacugaggaauucc

SEQ ID NO: 2414928 - RNA, 19 nt, Artificial Sequence
  Description of Artificial Sequence: Synthetic oligonucleotide
uugauucauguuuucggaa

SEQ ID NO: 2414929 - RNA, 19 nt, Artificial Sequence
  Description of Artificial Sequence: Synthetic oligonucleotide
acuuacuaaagaaaugaaa

SEQ ID NO: 2414930 - RNA, 19 nt, Artificial Sequence
  Description of Artificial Sequence: Synthetic oligonucleotide
ccuuucgugacgucgaagg

SEQ ID NO: 2414931 - RNA, 19 nt, Artificial Sequence
  Description of Artificial Sequence: Synthetic oligonucleotide
gaaaccuuuuccacacugc

SEQ ID NO: 2414932 - RNA, 19 nt, Artificial Sequence
  Description of Artificial Sequence: Synthetic oligonucleotide
aagggaacugucaacacua

SEQ ID NO: 2414933 - RNA, 19 nt, Artificial Sequence
  Description of Artificial Sequence: Synthetic oligonucleotide
ugagucuucucauguauuu

SEQ ID NO: 2414934 - RNA, 19 nt, Artificial Sequence
  Description of Artificial Sequence: Synthetic oligonucleotide
uuucgugacgucgaaggga

SEQ ID NO: 2414935 - RNA, 19 nt, Artificial Sequence
  Description of Artificial Sequence: Synthetic oligonucleotide
agaugacuaaaggcauucc

SEQ ID NO: 2414936 - RNA, 19 nt, Artificial Sequence
  Description of Artificial Sequence: Synthetic oligonucleotide
cagugaauccuuucauggc

SEQ ID NO: 2414937 - RNA, 19 nt, Artificial Sequence
  Description of Artificial Sequence: Synthetic oligonucleotide
cugugaauccuuucaucag

SEQ ID NO: 2414938 - RNA, 19 nt, Artificial Sequence
  Description of Artificial Sequence: Synthetic oligonucleotide
cacagugaauccuuucaug

SEQ ID NO: 2414939 - RNA, 19 nt, Artificial Sequence
  Description of Artificial Sequence: Synthetic oligonucleotide
aucgaagggagguguggcg

SEQ ID NO: 2414940 - RNA, 19 nt, Artificial Sequence
  Description of Artificial Sequence: Synthetic oligonucleotide
acacugaggaauuccuucu

SEQ ID NO: 2414941 - RNA, 19 nt, Artificial Sequence
  Description of Artificial Sequence: Synthetic oligonucleotide
auguauuuuaagggaacug

SEQ ID NO: 2414942 - RNA, 19 nt, Artificial Sequence
  Description of Artificial Sequence: Synthetic oligonucleotide
uggaagaauugaaaccuuu

SEQ ID NO: 2414943 - RNA, 19 nt, Artificial Sequence
  Description of Artificial Sequence: Synthetic oligonucleotide
cuuaaaguauaaaaggauu

SEQ ID NO: 2414944 - RNA, 19 nt, Artificial Sequence
  Description of Artificial Sequence: Synthetic oligonucleotide
gaugacuaaaggcauuccu

SEQ ID NO: 2414945 - RNA, 19 nt, Artificial Sequence
  Description of Artificial Sequence: Synthetic oligonucleotide
aauccuuucgugacgucga

SEQ ID NO: 2414946 - RNA, 19 nt, Artificial Sequence
  Description of Artificial Sequence: Synthetic oligonucleotide
cuuucgugacgucgaaggg

SEQ ID NO: 2414947 - RNA, 19 nt, Artificial Sequence
  Description of Artificial Sequence: Synthetic oligonucleotide
agucuucucauguauuuua

SEQ ID NO: 2414948 - RNA, 19 nt, Artificial Sequence
  Description of Artificial Sequence: Synthetic oligonucleotide
uacagacaacaugacacug

SEQ ID NO: 2414949 - RNA, 19 nt, Artificial Sequence
  Description of Artificial Sequence: Synthetic oligonucleotide
ugcugacacacauaggguu

SEQ ID NO: 2414950 - RNA, 19 nt, Artificial Sequence
  Description of Artificial Sequence: Synthetic oligonucleotide
aaaggcauuccuacagaca

SEQ ID NO: 2414951 - RNA, 19 nt, Artificial Sequence
  Description of Artificial Sequence: Synthetic oligonucleotide
accaguaaaggcuuucaua

SEQ ID NO: 2414952 - RNA, 19 nt, Artificial Sequence
  Description of Artificial Sequence: Synthetic oligonucleotide
ucggaaguuuacugcaaga

SEQ ID NO: 2414953 - RNA, 19 nt, Artificial Sequence
  Description of Artificial Sequence: Synthetic oligonucleotide
aacuuacuaaagaaaugaa

SEQ ID NO: 2414954 - RNA, 19 nt, Artificial Sequence
  Description of Artificial Sequence: Synthetic oligonucleotide
gucaacacuaaagacuuuc

SEQ ID NO: 2414955 - RNA, 19 nt, Artificial Sequence
  Description of Artificial Sequence: Synthetic oligonucleotide
cauaguuuacauacacaga

SEQ ID NO: 2414956 - RNA, 19 nt, Artificial Sequence
  Description of Artificial Sequence: Synthetic oligonucleotide
uguuuacacuuauaugguu

SEQ ID NO: 2414957 - RNA, 19 nt, Artificial Sequence
  Description of Artificial Sequence: Synthetic oligonucleotide
augacacugguucucugcu

SEQ ID NO: 2414958 - RNA, 19 nt, Artificial Sequence
  Description of Artificial Sequence: Synthetic oligonucleotide
auguauugccauguuaaga

SEQ ID NO: 2414959 - RNA, 19 nt, Artificial Sequence
  Description of Artificial Sequence: Synthetic oligonucleotide
uucauacauuguuuacacu

SEQ ID NO: 2414960 - RNA, 19 nt, Artificial Sequence
  Description of Artificial Sequence: Synthetic oligonucleotide
auacgguuucuccccacag

SEQ ID NO: 2414961 - RNA, 19 nt, Artificial Sequence
  Description of Artificial Sequence: Synthetic oligonucleotide
ucaucaguaaaggcuuuac

SEQ ID NO: 2414962 - RNA, 19 nt, Artificial Sequence
  Description of Artificial Sequence: Synthetic oligonucleotide
cagaaugaguugauucaug

SEQ ID NO: 2414963 - RNA, 19 nt, Artificial Sequence
  Description of Artificial Sequence: Synthetic oligonucleotide
cucauguauuuuaagggaa

SEQ ID NO: 2414964 - RNA, 19 nt, Artificial Sequence
  Description of Artificial Sequence: Synthetic oligonucleotide
aaguuuacugcaagaaaua

SEQ ID NO: 2414965 - RNA, 19 nt, Artificial Sequence
  Description of Artificial Sequence: Synthetic oligonucleotide
cacugcaaacauacauggg

SEQ ID NO: 2414966 - RNA, 19 nt, Artificial Sequence
  Description of Artificial Sequence: Synthetic oligonucleotide
aguuuacugcaagaaauaa

SEQ ID NO: 2414967 - RNA, 19 nt, Artificial Sequence
  Description of Artificial Sequence: Synthetic oligonucleotide
uuucggaaguuuacugcaa

SEQ ID NO: 2414968 - RNA, 19 nt, Artificial Sequence
  Description of Artificial Sequence: Synthetic oligonucleotide
guauuuuaagggaacugga

SEQ ID NO: 2414969 - RNA, 19 nt, Artificial Sequence
  Description of Artificial Sequence: Synthetic oligonucleotide
gaggaauuccuucuagugu

SEQ ID NO: 2414970 - RNA, 19 nt, Artificial Sequence
  Description of Artificial Sequence: Synthetic oligonucleotide
auguauucgaaggguacug

SEQ ID NO: 2414971 - RNA, 19 nt, Artificial Sequence
  Description of Artificial Sequence: Synthetic oligonucleotide
guucauguauucuaaacuu

SEQ ID NO: 2414972 - RNA, 19 nt, Artificial Sequence
  Description of Artificial Sequence: Synthetic oligonucleotide
uacgguuucuccccacagu

SEQ ID NO: 2414973 - RNA, 19 nt, Artificial Sequence
  Description of Artificial Sequence: Synthetic oligonucleotide
caaacauacaugggguuuc

SEQ ID NO: 2414974 - RNA, 19 nt, Artificial Sequence
  Description of Artificial Sequence: Synthetic oligonucleotide
ugaguugauucauguuuuc

SEQ ID NO: 2414975 - RNA, 19 nt, Artificial Sequence
  Description of Artificial Sequence: Synthetic oligonucleotide
uuaccacauaguuuacaua

SEQ ID NO: 2414976 - RNA, 19 nt, Artificial Sequence
  Description of Artificial Sequence: Synthetic oligonucleotide
gaauuccuucuagugugag

SEQ ID NO: 2414977 - RNA, 19 nt, Artificial Sequence
  Description of Artificial Sequence: Synthetic oligonucleotide
acauacgguuucuccccac

SEQ ID NO: 2414978 - RNA, 19 nt, Artificial Sequence
  Description of Artificial Sequence: Synthetic oligonucleotide
cacauaguuuacauacaca

SEQ ID NO: 2414979 - RNA, 19 nt, Artificial Sequence
  Description of Artificial Sequence: Synthetic oligonucleotide
auaggggcuuuucaccacu

SEQ ID NO: 2414980 - RNA, 19 nt, Artificial Sequence
  Description of Artificial Sequence: Synthetic oligonucleotide
guauucgaaggguacugga

SEQ ID NO: 2414981 - RNA, 19 nt, Artificial Sequence
  Description of Artificial Sequence: Synthetic oligonucleotide
gauucauguuuucggaagu

SEQ ID NO: 2414982 - RNA, 19 nt, Artificial Sequence
  Description of Artificial Sequence: Synthetic oligonucleotide
aaacauacaugggguuucu

SEQ ID NO: 2414983 - RNA, 19 nt, Artificial Sequence
  Description of Artificial Sequence: Synthetic oligonucleotide
ugaauccuuucaucaguaa

SEQ ID NO: 2414984 - RNA, 19 nt, Artificial Sequence
  Description of Artificial Sequence: Synthetic oligonucleotide
ugcaaacauacaugggguu

SEQ ID NO: 2414985 - RNA, 19 nt, Artificial Sequence
  Description of Artificial Sequence: Synthetic oligonucleotide
gaagggaacugucaacacu

SEQ ID NO: 2414986 - RNA, 19 nt, Artificial Sequence
  Description of Artificial Sequence: Synthetic oligonucleotide
cauacauuguuuacacuua

SEQ ID NO: 2414987 - RNA, 19 nt, Artificial Sequence
  Description of Artificial Sequence: Synthetic oligonucleotide
auguuuucggaaguuuacu

SEQ ID NO: 2414988 - RNA, 19 nt, Artificial Sequence
  Description of Artificial Sequence: Synthetic oligonucleotide
ugaccaguaaaggcuuuca

SEQ ID NO: 2414989 - RNA, 19 nt, Artificial Sequence
  Description of Artificial Sequence: Synthetic oligonucleotide
cuuucaucaguaaaggcuu

SEQ ID NO: 2414990 - RNA, 19 nt, Artificial Sequence
  Description of Artificial Sequence: Synthetic oligonucleotide
aacccuucccacacugcuc

SEQ ID NO: 2414991 - RNA, 19 nt, Artificial Sequence
  Description of Artificial Sequence: Synthetic oligonucleotide
uuccuacagacaacaugac

SEQ ID NO: 2414992 - RNA, 19 nt, Artificial Sequence
  Description of Artificial Sequence: Synthetic oligonucleotide
gcaagaaauaaaaccuuug

SEQ ID NO: 2414993 - RNA, 19 nt, Artificial Sequence
  Description of Artificial Sequence: Synthetic oligonucleotide
cuaaaggcauuccuacaga

SEQ ID NO: 2414994 - RNA, 19 nt, Artificial Sequence
  Description of Artificial Sequence: Synthetic oligonucleotide
uacauacacagaguuucuc

SEQ ID NO: 2414995 - RNA, 19 nt, Artificial Sequence
  Description of Artificial Sequence: Synthetic oligonucleotide
ugguucucugcucuaugua

SEQ ID NO: 2414996 - RNA, 19 nt, Artificial Sequence
  Description of Artificial Sequence: Synthetic oligonucleotide
ucgaagggagguguggcga

SEQ ID NO: 2414997 - RNA, 19 nt, Artificial Sequence
  Description of Artificial Sequence: Synthetic oligonucleotide
augacuaaaggcauuccua

SEQ ID NO: 2414998 - RNA, 19 nt, Artificial Sequence
  Description of Artificial Sequence: Synthetic oligonucleotide
ugaauccguucauguauuc

SEQ ID NO: 2414999 - RNA, 19 nt, Artificial Sequence
  Description of Artificial Sequence: Synthetic oligonucleotide
gacacugguucucugcucu

SEQ ID NO: 2415000 - RNA, 19 nt, Artificial Sequence
  Description of Artificial Sequence: Synthetic oligonucleotide
caucgaagggagguguggc

SEQ ID NO: 2415001 - RNA, 19 nt, Artificial Sequence
  Description of Artificial Sequence: Synthetic oligonucleotide
ggaaguuuacugcaagaaa

SEQ ID NO: 2415002 - RNA, 19 nt, Artificial Sequence
  Description of Artificial Sequence: Synthetic oligonucleotide
auccuuucaugguaucgaa

SEQ ID NO: 2415003 - RNA, 19 nt, Artificial Sequence
  Description of Artificial Sequence: Synthetic oligonucleotide
acaugggguuucucuccac

SEQ ID NO: 2415004 - RNA, 19 nt, Artificial Sequence
  Description of Artificial Sequence: Synthetic oligonucleotide
uuucaucaguaaaggcuuu

SEQ ID NO: 2415005 - RNA, 19 nt, Artificial Sequence
  Description of Artificial Sequence: Synthetic oligonucleotide
gguguggcgagugaaggcc

SEQ ID NO: 2415006 - RNA, 19 nt, Artificial Sequence
  Description of Artificial Sequence: Synthetic oligonucleotide
gcuuucauacauuguuuac

SEQ ID NO: 2415007 - RNA, 19 nt, Artificial Sequence
  Description of Artificial Sequence: Synthetic oligonucleotide
cugucaacacuaaagacuu

SEQ ID NO: 2415008 - RNA, 19 nt, Artificial Sequence
  Description of Artificial Sequence: Synthetic oligonucleotide
uccguucauguauucuaaa

SEQ ID NO: 2415009 - RNA, 19 nt, Artificial Sequence
  Description of Artificial Sequence: Synthetic oligonucleotide
guaucgaagggaacuguca

SEQ ID NO: 2415010 - RNA, 19 nt, Artificial Sequence
  Description of Artificial Sequence: Synthetic oligonucleotide
cauaggggcuuuucaccac

SEQ ID NO: 2415011 - RNA, 19 nt, Artificial Sequence
  Description of Artificial Sequence: Synthetic oligonucleotide
ccuuucaucaguaaaggcu

SEQ ID NO: 2415012 - RNA, 19 nt, Artificial Sequence
  Description of Artificial Sequence: Synthetic oligonucleotide
gacgucgaagggaacugug

SEQ ID NO: 2415013 - RNA, 19 nt, Artificial Sequence
  Description of Artificial Sequence: Synthetic oligonucleotide
augaguugauucauguuuu

SEQ ID NO: 2415014 - RNA, 19 nt, Artificial Sequence
  Description of Artificial Sequence: Synthetic oligonucleotide
uuccuucuagugugagucu

SEQ ID NO: 2415015 - RNA, 19 nt, Artificial Sequence
  Description of Artificial Sequence: Synthetic oligonucleotide
gaaacccuucccacacugc

SEQ ID NO: 2415016 - RNA, 19 nt, Artificial Sequence
  Description of Artificial Sequence: Synthetic oligonucleotide
ucgaaggguacuggaagaa

SEQ ID NO: 2415017 - RNA, 19 nt, Artificial Sequence
  Description of Artificial Sequence: Synthetic oligonucleotide
uaggggcuuuucaccacug

SEQ ID NO: 2415018 - RNA, 19 nt, Artificial Sequence
  Description of Artificial Sequence: Synthetic oligonucleotide
gguacuggaagaauugaaa

SEQ ID NO: 2415019 - RNA, 19 nt, Artificial Sequence
  Description of Artificial Sequence: Synthetic oligonucleotide
acaugacacugguucucug

SEQ ID NO: 2415020 - RNA, 19 nt, Artificial Sequence
  Description of Artificial Sequence: Synthetic oligonucleotide
uucaucaguaaaggcuuua

SEQ ID NO: 2415021 - RNA, 19 nt, Artificial Sequence
  Description of Artificial Sequence: Synthetic oligonucleotide
ucuccccacagugaauccu

SEQ ID NO: 2415022 - RNA, 19 nt, Artificial Sequence
  Description of Artificial Sequence: Synthetic oligonucleotide
ccguucauguauucuaaac

SEQ ID NO: 2415023 - RNA, 19 nt, Artificial Sequence
  Description of Artificial Sequence: Synthetic oligonucleotide
cacugcugacacacauagg

SEQ ID NO: 2415024 - RNA, 19 nt, Artificial Sequence
  Description of Artificial Sequence: Synthetic oligonucleotide
cugcaaacauacauggggu

SEQ ID NO: 2415025 - RNA, 19 nt, Artificial Sequence
  Description of Artificial Sequence: Synthetic oligonucleotide
uccuuucgugacgucgaag

SEQ ID NO: 2415026 - RNA, 19 nt, Artificial Sequence
  Description of Artificial Sequence: Synthetic oligonucleotide
caacaugacacugguucuc

SEQ ID NO: 2415027 - RNA, 19 nt, Artificial Sequence
  Description of Artificial Sequence: Synthetic oligonucleotide
uuucaccacugugaauccu

SEQ ID NO: 2415028 - RNA, 19 nt, Artificial Sequence
  Description of Artificial Sequence: Synthetic oligonucleotide
cauguauucuaaacuuacu

SEQ ID NO: 2415029 - RNA, 19 nt, Artificial Sequence
  Description of Artificial Sequence: Synthetic oligonucleotide
cacagaguuucucuccaga

SEQ ID NO: 2415030 - RNA, 19 nt, Artificial Sequence
  Description of Artificial Sequence: Synthetic oligonucleotide
ggcauuccuacagacaaca

SEQ ID NO: 2415031 - RNA, 19 nt, Artificial Sequence
  Description of Artificial Sequence: Synthetic oligonucleotide
ugacacugguucucugcuc

SEQ ID NO: 2415032 - RNA, 19 nt, Artificial Sequence
  Description of Artificial Sequence: Synthetic oligonucleotide
aggguacuggaagaauuga

SEQ ID NO: 2415033 - RNA, 19 nt, Artificial Sequence
  Description of Artificial Sequence: Synthetic oligonucleotide
gugacgucgaagggaacug

SEQ ID NO: 2415034 - RNA, 19 nt, Artificial Sequence
  Description of Artificial Sequence: Synthetic oligonucleotide
cacauugccuacauuuaua

SEQ ID NO: 2415035 - RNA, 19 nt, Artificial Sequence
  Description of Artificial Sequence: Synthetic oligonucleotide
ugccuacauuuauaggguu

SEQ ID NO: 2415036 - RNA, 19 nt, Artificial Sequence
  Description of Artificial Sequence: Synthetic oligonucleotide
aaccuuugccacauugcuu

SEQ ID NO: 2415037 - RNA, 19 nt, Artificial Sequence
  Description of Artificial Sequence: Synthetic oligonucleotide
cuacagacaacaugacacu

SEQ ID NO: 2415038 - RNA, 19 nt, Artificial Sequence
  Description of Artificial Sequence: Synthetic oligonucleotide
uugccauguuaagaauacu

SEQ ID NO: 2415039 - RNA, 19 nt, Artificial Sequence
  Description of Artificial Sequence: Synthetic oligonucleotide
ugugaccaguaaaggcuuu

SEQ ID NO: 2415040 - RNA, 19 nt, Artificial Sequence
  Description of Artificial Sequence: Synthetic oligonucleotide
aggcauuccuacagacaac

SEQ ID NO: 2415041 - RNA, 19 nt, Artificial Sequence
  Description of Artificial Sequence: Synthetic oligonucleotide
uucuagugugagucuucuc

SEQ ID NO: 2415042 - RNA, 19 nt, Artificial Sequence
  Description of Artificial Sequence: Synthetic oligonucleotide
gaaugaguugauucauguu

SEQ ID NO: 2415043 - RNA, 19 nt, Artificial Sequence
  Description of Artificial Sequence: Synthetic oligonucleotide
uccuucuagugugagucuu

SEQ ID NO: 2415044 - RNA, 19 nt, Artificial Sequence
  Description of Artificial Sequence: Synthetic oligonucleotide
cauacgguuucuccccaca

SEQ ID NO: 2415045 - RNA, 19 nt, Artificial Sequence
  Description of Artificial Sequence: Synthetic oligonucleotide
gaaggguacuggaagaauu

SEQ ID NO: 2415046 - RNA, 19 nt, Artificial Sequence
  Description of Artificial Sequence: Synthetic oligonucleotide
ggcuuucauacauuguuua

SEQ ID NO: 2415047 - RNA, 19 nt, Artificial Sequence
  Description of Artificial Sequence: Synthetic oligonucleotide
ugacgucgaagggaacugu

SEQ ID NO: 2415048 - RNA, 19 nt, Artificial Sequence
  Description of Artificial Sequence: Synthetic oligonucleotide
uggcgagugaaggccuucc

SEQ ID NO: 2415049 - RNA, 19 nt, Artificial Sequence
  Description of Artificial Sequence: Synthetic oligonucleotide
gaauccguucauguauucu

SEQ ID NO: 2415050 - RNA, 19 nt, Artificial Sequence
  Description of Artificial Sequence: Synthetic oligonucleotide
cauguauuuuaagggaacu

SEQ ID NO: 2415051 - RNA, 19 nt, Artificial Sequence
  Description of Artificial Sequence: Synthetic oligonucleotide
cagacaacaugacacuggu

SEQ ID NO: 2415052 - RNA, 19 nt, Artificial Sequence
  Description of Artificial Sequence: Synthetic oligonucleotide
ugucaacacuaaagacuuu

SEQ ID NO: 2415053 - RNA, 19 nt, Artificial Sequence
  Description of Artificial Sequence: Synthetic oligonucleotide
aggggcuuuucaccacugu

SEQ ID NO: 2415054 - RNA, 19 nt, Artificial Sequence
  Description of Artificial Sequence: Synthetic oligonucleotide
gugugaauccguucaugua

SEQ ID NO: 2415055 - RNA, 19 nt, Artificial Sequence
  Description of Artificial Sequence: Synthetic oligonucleotide
ugaauccuuucgugacguc

SEQ ID NO: 2415056 - RNA, 19 nt, Artificial Sequence
  Description of Artificial Sequence: Synthetic oligonucleotide
cauguucuacacugaggaa

SEQ ID NO: 2415057 - RNA, 19 nt, Artificial Sequence
  Description of Artificial Sequence: Synthetic oligonucleotide
ucuccagaaugaguugauu

SEQ ID NO: 2415058 - RNA, 19 nt, Artificial Sequence
  Description of Artificial Sequence: Synthetic oligonucleotide
gguaucgaagggaacuguc

SEQ ID NO: 2415059 - RNA, 19 nt, Artificial Sequence
  Description of Artificial Sequence: Synthetic oligonucleotide
gcaucgaagggaggugugg

SEQ ID NO: 2415060 - RNA, 19 nt, Artificial Sequence
  Description of Artificial Sequence: Synthetic oligonucleotide
cauggcaucgaagggaggu

SEQ ID NO: 2415061 - RNA, 19 nt, Artificial Sequence
  Description of Artificial Sequence: Synthetic oligonucleotide
cugaggaauuccuucuagu

SEQ ID NO: 2415062 - RNA, 19 nt, Artificial Sequence
  Description of Artificial Sequence: Synthetic oligonucleotide
auccguucauguauucuaa

SEQ ID NO: 2415063 - RNA, 19 nt, Artificial Sequence
  Description of Artificial Sequence: Synthetic oligonucleotide
uguggcgagugaaggccuu

SEQ ID NO: 2415064 - RNA, 19 nt, Artificial Sequence
  Description of Artificial Sequence: Synthetic oligonucleotide
gugaauccuuucaucagua

SEQ ID NO: 2415065 - RNA, 19 nt, Artificial Sequence
  Description of Artificial Sequence: Synthetic oligonucleotide
acgucgaagggaacuguga

SEQ ID NO: 2415066 - RNA, 19 nt, Artificial Sequence
  Description of Artificial Sequence: Synthetic oligonucleotide
aggcuuucauacauuguuu

SEQ ID NO: 2415067 - RNA, 19 nt, Artificial Sequence
  Description of Artificial Sequence: Synthetic oligonucleotide
ggagguguggcgagugaag

SEQ ID NO: 2415068 - RNA, 19 nt, Artificial Sequence
  Description of Artificial Sequence: Synthetic oligonucleotide
agggaacugugaccaguaa

SEQ ID NO: 2415069 - RNA, 19 nt, Artificial Sequence
  Description of Artificial Sequence: Synthetic oligonucleotide
cuagugugagucuucucau

SEQ ID NO: 2415070 - RNA, 19 nt, Artificial Sequence
  Description of Artificial Sequence: Synthetic oligonucleotide
cugcaagaaauaaaaccuu

SEQ ID NO: 2415071 - RNA, 19 nt, Artificial Sequence
  Description of Artificial Sequence: Synthetic oligonucleotide
gugaccaguaaaggcuuuc

SEQ ID NO: 2415072 - RNA, 19 nt, Artificial Sequence
  Description of Artificial Sequence: Synthetic oligonucleotide
cauguauucgaaggguacu

SEQ ID NO: 2415073 - RNA, 19 nt, Artificial Sequence
  Description of Artificial Sequence: Synthetic oligonucleotide
ccuuuuccacacugcaaac

SEQ ID NO: 2415074 - RNA, 19 nt, Artificial Sequence
  Description of Artificial Sequence: Synthetic oligonucleotide
auaaaaccuuugccacauu

SEQ ID NO: 2415075 - RNA, 19 nt, Artificial Sequence
  Description of Artificial Sequence: Synthetic oligonucleotide
guauugccauguuaagaau

SEQ ID NO: 2415076 - RNA, 19 nt, Artificial Sequence
  Description of Artificial Sequence: Synthetic oligonucleotide
gaccaguaaaggcuuucau

SEQ ID NO: 2415077 - RNA, 19 nt, Artificial Sequence
  Description of Artificial Sequence: Synthetic oligonucleotide
gugaauccuuucgugacgu

SEQ ID NO: 2415078 - RNA, 19 nt, Artificial Sequence
  Description of Artificial Sequence: Synthetic oligonucleotide
cugguucucugcucuaugu

SEQ ID NO: 2415079 - RNA, 19 nt, Artificial Sequence
  Description of Artificial Sequence: Synthetic oligonucleotide
agggagguguggcgaguga

SEQ ID NO: 2415080 - RNA, 19 nt, Artificial Sequence
  Description of Artificial Sequence: Synthetic oligonucleotide
auccuuucgugacgucgaa

SEQ ID NO: 2415081 - RNA, 19 nt, Artificial Sequence
  Description of Artificial Sequence: Synthetic oligonucleotide
gugugagucuucucaugua

SEQ ID NO: 2415082 - RNA, 19 nt, Artificial Sequence
  Description of Artificial Sequence: Synthetic oligonucleotide
cgucgaagggaacugugac

SEQ ID NO: 2415083 - RNA, 19 nt, Artificial Sequence
  Description of Artificial Sequence: Synthetic oligonucleotide
gcgagugaaggccuuccca

SEQ ID NO: 2415084 - RNA, 19 nt, Artificial Sequence
  Description of Artificial Sequence: Synthetic oligonucleotide
uccccacagugaauccuuu

SEQ ID NO: 2415085 - RNA, 19 nt, Artificial Sequence
  Description of Artificial Sequence: Synthetic oligonucleotide
ggcgagugaaggccuuccc

SEQ ID NO: 2415086 - RNA, 19 nt, Artificial Sequence
  Description of Artificial Sequence: Synthetic oligonucleotide
guucuacacugaggaauuc

SEQ ID NO: 2415087 - RNA, 19 nt, Artificial Sequence
  Description of Artificial Sequence: Synthetic oligonucleotide
ccuucuagugugagucuuc

SEQ ID NO: 2415088 - RNA, 19 nt, Artificial Sequence
  Description of Artificial Sequence: Synthetic oligonucleotide
ucgugacgucgaagggaac

SEQ ID NO: 2415089 - RNA, 19 nt, Artificial Sequence
  Description of Artificial Sequence: Synthetic oligonucleotide
cugcugacacacauagggu

SEQ ID NO: 2415090 - RNA, 19 nt, Artificial Sequence
  Description of Artificial Sequence: Synthetic oligonucleotide
cguucauguauucuaaacu

SEQ ID NO: 2415091 - RNA, 19 nt, Artificial Sequence
  Description of Artificial Sequence: Synthetic oligonucleotide
gugaauccuuucaugguau

SEQ ID NO: 2415092 - RNA, 19 nt, Artificial Sequence
  Description of Artificial Sequence: Synthetic oligonucleotide
caagaugacuaaaggcauu

SEQ ID NO: 2415093 - RNA, 19 nt, Artificial Sequence
  Description of Artificial Sequence: Synthetic oligonucleotide
cuucuagugugagucuucu

SEQ ID NO: 2415094 - RNA, 19 nt, Artificial Sequence
  Description of Artificial Sequence: Synthetic oligonucleotide
gggaacugucaacacuaaa

SEQ ID NO: 2415095 - RNA, 19 nt, Artificial Sequence
  Description of Artificial Sequence: Synthetic oligonucleotide
ggguacuggaagaauugaa

SEQ ID NO: 2415096 - RNA, 19 nt, Artificial Sequence
  Description of Artificial Sequence: Synthetic oligonucleotide
cacugaggaauuccuucua

SEQ ID NO: 2415097 - RNA, 19 nt, Artificial Sequence
  Description of Artificial Sequence: Synthetic oligonucleotide
ggaauuccuucuaguguga

SEQ ID NO: 2415098 - RNA, 19 nt, Artificial Sequence
  Description of Artificial Sequence: Synthetic oligonucleotide
acacugguucucugcucua

SEQ ID NO: 2415099 - RNA, 19 nt, Artificial Sequence
  Description of Artificial Sequence: Synthetic oligonucleotide
ccauguuaagaauacuuuu

SEQ ID NO: 2415100 - RNA, 19 nt, Artificial Sequence
  Description of Artificial Sequence: Synthetic oligonucleotide
cugcucuauguauugccau

SEQ ID NO: 2415101 - RNA, 19 nt, Artificial Sequence
  Description of Artificial Sequence: Synthetic oligonucleotide
cugugaccaguaaaggcuu

SEQ ID NO: 2415102 - RNA, 19 nt, Artificial Sequence
  Description of Artificial Sequence: Synthetic oligonucleotide
cgaagggaacugucaacac

SEQ ID NO: 2415103 - RNA, 19 nt, Artificial Sequence
  Description of Artificial Sequence: Synthetic oligonucleotide
ggaagaauugaaaccuuuu

SEQ ID NO: 2415104 - RNA, 19 nt, Artificial Sequence
  Description of Artificial Sequence: Synthetic oligonucleotide
agggaacugucaacacuaa

SEQ ID NO: 2415105 - RNA, 19 nt, Artificial Sequence
  Description of Artificial Sequence: Synthetic oligonucleotide
cuggaagaauugaaaccuu

SEQ ID NO: 2415106 - RNA, 19 nt, Artificial Sequence
  Description of Artificial Sequence: Synthetic oligonucleotide
guucucugcucuauguauu

SEQ ID NO: 2415107 - RNA, 19 nt, Artificial Sequence
  Description of Artificial Sequence: Synthetic oligonucleotide
cuacacugaggaauuccuu

SEQ ID NO: 2415108 - RNA, 19 nt, Artificial Sequence
  Description of Artificial Sequence: Synthetic oligonucleotide
gcucuauguauugccaugu

SEQ ID NO: 2415109 - RNA, 19 nt, Artificial Sequence
  Description of Artificial Sequence: Synthetic oligonucleotide
gccauguuaagaauacuuu

SEQ ID NO: 2415110 - RNA, 19 nt, Artificial Sequence
  Description of Artificial Sequence: Synthetic oligonucleotide
gugaauccguucauguauu

SEQ ID NO: 2415111 - RNA, 19 nt, Artificial Sequence
  Description of Artificial Sequence: Synthetic oligonucleotide
cgaagggagguguggcgag

SEQ ID NO: 2415112 - RNA, 19 nt, Artificial Sequence
  Description of Artificial Sequence: Synthetic oligonucleotide
cucuccagaaugaguugau

SEQ ID NO: 2415113 - RNA, 19 nt, Artificial Sequence
  Description of Artificial Sequence: Synthetic oligonucleotide
gcaaacauacaugggguuu

SEQ ID NO: 2415114 - RNA, 19 nt, Artificial Sequence
  Description of Artificial Sequence: Synthetic oligonucleotide
gaagggagguguggcgagu

SEQ ID NO: 2415115 - RNA, 19 nt, Artificial Sequence
  Description of Artificial Sequence: Synthetic oligonucleotide
guggcgagugaaggccuuc

SEQ ID NO: 2415116 - RNA, 19 nt, Artificial Sequence
  Description of Artificial Sequence: Synthetic oligonucleotide
cuccccacagugaauccuu

SEQ ID NO: 2415117 - RNA, 19 nt, Artificial Sequence
  Description of Artificial Sequence: Synthetic oligonucleotide
cggaaguuuacugcaagaa

SEQ ID NO: 2415118 - RNA, 19 nt, Artificial Sequence
  Description of Artificial Sequence: Synthetic oligonucleotide
ccccacagugaauccuuuc

SEQ ID NO: 2415119 - RNA, 19 nt, Artificial Sequence
  Description of Artificial Sequence: Synthetic oligonucleotide
gggagguguggcgagugaa

SEQ ID NO: 2415120 - RNA, 19 nt, Artificial Sequence
  Description of Artificial Sequence: Synthetic oligonucleotide
cucuauguauugccauguu

SEQ ID NO: 2415121 - RNA, 19 nt, Artificial Sequence
  Description of Artificial Sequence: Synthetic oligonucleotide
gcugacacacauaggguuu

SEQ ID NO: 2415122 - RNA, 19 nt, Artificial Sequence
  Description of Artificial Sequence: Synthetic oligonucleotide
guguggcgagugaaggccu

SEQ ID NO: 2415123 - RNA, 19 nt, Artificial Sequence
  Description of Artificial Sequence: Synthetic oligonucleotide
ccagaaugaguugauucau

SEQ ID NO: 2415124 - RNA, 19 nt, Artificial Sequence
  Description of Artificial Sequence: Synthetic oligonucleotide
cacugguucucugcucuau

SEQ ID NO: 2415125 - RNA, 19 nt, Artificial Sequence
  Description of Artificial Sequence: Synthetic oligonucleotide
cgaaggguacuggaagaau

SEQ ID NO: 2415126 - RNA, 19 nt, Artificial Sequence
  Description of Artificial Sequence: Synthetic oligonucleotide
aauuaauugguaugaauac

SEQ ID NO: 2415127 - RNA, 19 nt, Artificial Sequence
  Description of Artificial Sequence: Synthetic oligonucleotide
uauauugcaguuuugauag

SEQ ID NO: 2415128 - RNA, 19 nt, Artificial Sequence
  Description of Artificial Sequence: Synthetic oligonucleotide
uuugauagcaaacugacaa

SEQ ID NO: 2415129 - RNA, 19 nt, Artificial Sequence
  Description of Artificial Sequence: Synthetic oligonucleotide
uacaacauaguacuuaucc

SEQ ID NO: 2415130 - RNA, 19 nt, Artificial Sequence
  Description of Artificial Sequence: Synthetic oligonucleotide
aaauaucgugcccucagcc

SEQ ID NO: 2415131 - RNA, 19 nt, Artificial Sequence
  Description of Artificial Sequence: Synthetic oligonucleotide
uccucauucauaaacauug

SEQ ID NO: 2415132 - RNA, 19 nt, Artificial Sequence
  Description of Artificial Sequence: Synthetic oligonucleotide
cugucuaagauccagaugc

SEQ ID NO: 2415133 - RNA, 19 nt, Artificial Sequence
  Description of Artificial Sequence: Synthetic oligonucleotide
augaauacaacauaguacu

SEQ ID NO: 2415134 - RNA, 19 nt, Artificial Sequence
  Description of Artificial Sequence: Synthetic oligonucleotide
uaaacauugcuuaacagac

SEQ ID NO: 2415135 - RNA, 19 nt, Artificial Sequence
  Description of Artificial Sequence: Synthetic oligonucleotide
aaaguccucaaacuuuacc

SEQ ID NO: 2415136 - RNA, 19 nt, Artificial Sequence
  Description of Artificial Sequence: Synthetic oligonucleotide
aauaucgugcccucagccc

SEQ ID NO: 2415137 - RNA, 19 nt, Artificial Sequence
  Description of Artificial Sequence: Synthetic oligonucleotide
uuuaccagcagguugaaga

SEQ ID NO: 2415138 - RNA, 19 nt, Artificial Sequence
  Description of Artificial Sequence: Synthetic oligonucleotide
uaauuaauugguaugaaua

SEQ ID NO: 2415139 - RNA, 19 nt, Artificial Sequence
  Description of Artificial Sequence: Synthetic oligonucleotide
aauugguaugaauacaaca

SEQ ID NO: 2415140 - RNA, 19 nt, Artificial Sequence
  Description of Artificial Sequence: Synthetic oligonucleotide
uuccuuuuaaauaucgugc

SEQ ID NO: 2415141 - RNA, 19 nt, Artificial Sequence
  Description of Artificial Sequence: Synthetic oligonucleotide
uuagaaucuagaauucucc

SEQ ID NO: 2415142 - RNA, 19 nt, Artificial Sequence
  Description of Artificial Sequence: Synthetic oligonucleotide
uuuuauuucccgauggaug

SEQ ID NO: 2415143 - RNA, 19 nt, Artificial Sequence
  Description of Artificial Sequence: Synthetic oligonucleotide
ugaaaauuuagaaucuaga

SEQ ID NO: 2415144 - RNA, 19 nt, Artificial Sequence
  Description of Artificial Sequence: Synthetic oligonucleotide
ugauccauauuuuagcacc

SEQ ID NO: 2415145 - RNA, 19 nt, Artificial Sequence
  Description of Artificial Sequence: Synthetic oligonucleotide
ugguaugaauacaacauag

SEQ ID NO: 2415146 - RNA, 19 nt, Artificial Sequence
  Description of Artificial Sequence: Synthetic oligonucleotide
auaaacauugcuuaacaga

SEQ ID NO: 2415147 - RNA, 19 nt, Artificial Sequence
  Description of Artificial Sequence: Synthetic oligonucleotide
aaguccucaaacuuuacca

SEQ ID NO: 2415148 - RNA, 19 nt, Artificial Sequence
  Description of Artificial Sequence: Synthetic oligonucleotide
ucuacugacagaacaagca

SEQ ID NO: 2415149 - RNA, 19 nt, Artificial Sequence
  Description of Artificial Sequence: Synthetic oligonucleotide
aaaagauaagguguuaugu

SEQ ID NO: 2415150 - RNA, 19 nt, Artificial Sequence
  Description of Artificial Sequence: Synthetic oligonucleotide
ucugugauccauauuuuag

SEQ ID NO: 2415151 - RNA, 19 nt, Artificial Sequence
  Description of Artificial Sequence: Synthetic oligonucleotide
aaacuuuaccagcagguug

SEQ ID NO: 2415152 - RNA, 19 nt, Artificial Sequence
  Description of Artificial Sequence: Synthetic oligonucleotide
uaagguguuauguuggggc

SEQ ID NO: 2415153 - RNA, 19 nt, Artificial Sequence
  Description of Artificial Sequence: Synthetic oligonucleotide
gaaaauuuagaaucuagaa

SEQ ID NO: 2415154 - RNA, 19 nt, Artificial Sequence
  Description of Artificial Sequence: Synthetic oligonucleotide
aaccuuuccaguucacugg

SEQ ID NO: 2415155 - RNA, 19 nt, Artificial Sequence
  Description of Artificial Sequence: Synthetic oligonucleotide
aaacugacaaguguuauca

SEQ ID NO: 2415156 - RNA, 19 nt, Artificial Sequence
  Description of Artificial Sequence: Synthetic oligonucleotide
uuauuuccugcaucuaucg

SEQ ID NO: 2415157 - RNA, 19 nt, Artificial Sequence
  Description of Artificial Sequence: Synthetic oligonucleotide
aacaauuuuauuucccgau

SEQ ID NO: 2415158 - RNA, 19 nt, Artificial Sequence
  Description of Artificial Sequence: Synthetic oligonucleotide
auuuccugcaucuaucgag

SEQ ID NO: 2415159 - RNA, 19 nt, Artificial Sequence
  Description of Artificial Sequence: Synthetic oligonucleotide
ugggcuugagcuaaaggcg

SEQ ID NO: 2415160 - RNA, 19 nt, Artificial Sequence
  Description of Artificial Sequence: Synthetic oligonucleotide
ugucugugcaguaagaauc

SEQ ID NO: 2415161 - RNA, 19 nt, Artificial Sequence
  Description of Artificial Sequence: Synthetic oligonucleotide
uuguuuaagggcaaucucu

SEQ ID NO: 2415162 - RNA, 19 nt, Artificial Sequence
  Description of Artificial Sequence: Synthetic oligonucleotide
uauuuuagcaccagcuucu

SEQ ID NO: 2415163 - RNA, 19 nt, Artificial Sequence
  Description of Artificial Sequence: Synthetic oligonucleotide
uuuaagggcaaucucuacu

SEQ ID NO: 2415164 - RNA, 19 nt, Artificial Sequence
  Description of Artificial Sequence: Synthetic oligonucleotide
auaucgugcccucagcccc

SEQ ID NO: 2415165 - RNA, 19 nt, Artificial Sequence
  Description of Artificial Sequence: Synthetic oligonucleotide
acuuauccaaaagauaagg

SEQ ID NO: 2415166 - RNA, 19 nt, Artificial Sequence
  Description of Artificial Sequence: Synthetic oligonucleotide
auaguacuuauccaaaaga

SEQ ID NO: 2415167 - RNA, 19 nt, Artificial Sequence
  Description of Artificial Sequence: Synthetic oligonucleotide
ugcacaugaaaauuuagaa

SEQ ID NO: 2415168 - RNA, 19 nt, Artificial Sequence
  Description of Artificial Sequence: Synthetic oligonucleotide
uuaagggcaaucucuacug

SEQ ID NO: 2415169 - RNA, 19 nt, Artificial Sequence
  Description of Artificial Sequence: Synthetic oligonucleotide
aguggcauuugucuggaac

SEQ ID NO: 2415170 - RNA, 19 nt, Artificial Sequence
  Description of Artificial Sequence: Synthetic oligonucleotide
aaacaauuuuauuucccga

SEQ ID NO: 2415171 - RNA, 19 nt, Artificial Sequence
  Description of Artificial Sequence: Synthetic oligonucleotide
aagggcaaucucuacugac

SEQ ID NO: 2415172 - RNA, 19 nt, Artificial Sequence
  Description of Artificial Sequence: Synthetic oligonucleotide
uugucauugcaaugcaugg

SEQ ID NO: 2415173 - RNA, 19 nt, Artificial Sequence
  Description of Artificial Sequence: Synthetic oligonucleotide
uccuuuuaaauaucgugcc

SEQ ID NO: 2415174 - RNA, 19 nt, Artificial Sequence
  Description of Artificial Sequence: Synthetic oligonucleotide
ucauucauaaacauugcuu

SEQ ID NO: 2415175 - RNA, 19 nt, Artificial Sequence
  Description of Artificial Sequence: Synthetic oligonucleotide
acagcuguccaguugucgc

SEQ ID NO: 2415176 - RNA, 19 nt, Artificial Sequence
  Description of Artificial Sequence: Synthetic oligonucleotide
aauuuuauuucccgaugga

SEQ ID NO: 2415177 - RNA, 19 nt, Artificial Sequence
  Description of Artificial Sequence: Synthetic oligonucleotide
gaugcauuggugcaccugc

SEQ ID NO: 2415178 - RNA, 19 nt, Artificial Sequence
  Description of Artificial Sequence: Synthetic oligonucleotide
ugugcaguaagaaucggaa

SEQ ID NO: 2415179 - RNA, 19 nt, Artificial Sequence
  Description of Artificial Sequence: Synthetic oligonucleotide
uugagcuaaaggcgcaugg

SEQ ID NO: 2415180 - RNA, 19 nt, Artificial Sequence
  Description of Artificial Sequence: Synthetic oligonucleotide
aaguguuaucacuauuuca

SEQ ID NO: 2415181 - RNA, 19 nt, Artificial Sequence
  Description of Artificial Sequence: Synthetic oligonucleotide
auagcaaacugacaagugu

SEQ ID NO: 2415182 - RNA, 19 nt, Artificial Sequence
  Description of Artificial Sequence: Synthetic oligonucleotide
agaacaagcacuugcacau

SEQ ID NO: 2415183 - RNA, 19 nt, Artificial Sequence
  Description of Artificial Sequence: Synthetic oligonucleotide
uguuaucacuauuucaagu

SEQ ID NO: 2415184 - RNA, 19 nt, Artificial Sequence
  Description of Artificial Sequence: Synthetic oligonucleotide
agacaaugaaacuuuauuu

SEQ ID NO: 2415185 - RNA, 19 nt, Artificial Sequence
  Description of Artificial Sequence: Synthetic oligonucleotide
gaaccuuuccaguucacug

SEQ ID NO: 2415186 - RNA, 19 nt, Artificial Sequence
  Description of Artificial Sequence: Synthetic oligonucleotide
uagaaucuagaauucuccc

SEQ ID NO: 2415187 - RNA, 19 nt, Artificial Sequence
  Description of Artificial Sequence: Synthetic oligonucleotide
uacuuauccaaaagauaag

SEQ ID NO: 2415188 - RNA, 19 nt, Artificial Sequence
  Description of Artificial Sequence: Synthetic oligonucleotide
cauaaacauugcuuaacag

SEQ ID NO: 2415189 - RNA, 19 nt, Artificial Sequence
  Description of Artificial Sequence: Synthetic oligonucleotide
uuaucacuauuucaaguaa

SEQ ID NO: 2415190 - RNA, 19 nt, Artificial Sequence
  Description of Artificial Sequence: Synthetic oligonucleotide
uagaauucuccccugugcu

SEQ ID NO: 2415191 - RNA, 19 nt, Artificial Sequence
  Description of Artificial Sequence: Synthetic oligonucleotide
cugugauccauauuuuagc

SEQ ID NO: 2415192 - RNA, 19 nt, Artificial Sequence
  Description of Artificial Sequence: Synthetic oligonucleotide
aguguuaucacuauuucaa

SEQ ID NO: 2415193 - RNA, 19 nt, Artificial Sequence
  Description of Artificial Sequence: Synthetic oligonucleotide
guacuuauccaaaagauaa

SEQ ID NO: 2415194 - RNA, 19 nt, Artificial Sequence
  Description of Artificial Sequence: Synthetic oligonucleotide
aacugacaaguguuaucac

SEQ ID NO: 2415195 - RNA, 19 nt, Artificial Sequence
  Description of Artificial Sequence: Synthetic oligonucleotide
uuuggagacaaugaaacuu

SEQ ID NO: 2415196 - RNA, 19 nt, Artificial Sequence
  Description of Artificial Sequence: Synthetic oligonucleotide
uuauguuggggcagcaaca

SEQ ID NO: 2415197 - RNA, 19 nt, Artificial Sequence
  Description of Artificial Sequence: Synthetic oligonucleotide
caaaagauaagguguuaug

SEQ ID NO: 2415198 - RNA, 19 nt, Artificial Sequence
  Description of Artificial Sequence: Synthetic oligonucleotide
acugacaaguguuaucacu

SEQ ID NO: 2415199 - RNA, 19 nt, Artificial Sequence
  Description of Artificial Sequence: Synthetic oligonucleotide
agauaagguguuauguugg

SEQ ID NO: 2415200 - RNA, 19 nt, Artificial Sequence
  Description of Artificial Sequence: Synthetic oligonucleotide
cuagaauucuccccugugc

SEQ ID NO: 2415201 - RNA, 19 nt, Artificial Sequence
  Description of Artificial Sequence: Synthetic oligonucleotide
gucauugcaaugcauggug

SEQ ID NO: 2415202 - RNA, 19 nt, Artificial Sequence
  Description of Artificial Sequence: Synthetic oligonucleotide
aacagacuaaacuuuucuu

SEQ ID NO: 2415203 - RNA, 19 nt, Artificial Sequence
  Description of Artificial Sequence: Synthetic oligonucleotide
augcaaaggaacugguguc

SEQ ID NO: 2415204 - RNA, 19 nt, Artificial Sequence
  Description of Artificial Sequence: Synthetic oligonucleotide
caucuaucgagucuuuggc

SEQ ID NO: 2415205 - RNA, 19 nt, Artificial Sequence
  Description of Artificial Sequence: Synthetic oligonucleotide
gaugcaaaggaacuggugu

SEQ ID NO: 2415206 - RNA, 19 nt, Artificial Sequence
  Description of Artificial Sequence: Synthetic oligonucleotide
ucuagaauucuccccugug

SEQ ID NO: 2415207 - RNA, 19 nt, Artificial Sequence
  Description of Artificial Sequence: Synthetic oligonucleotide
guuuugauagcaaacugac

SEQ ID NO: 2415208 - RNA, 19 nt, Artificial Sequence
  Description of Artificial Sequence: Synthetic oligonucleotide
guugggaugagauucaugu

SEQ ID NO: 2415209 - RNA, 19 nt, Artificial Sequence
  Description of Artificial Sequence: Synthetic oligonucleotide
cuuauuuccugcaucuauc

SEQ ID NO: 2415210 - RNA, 19 nt, Artificial Sequence
  Description of Artificial Sequence: Synthetic oligonucleotide
uauugcaguuuugauagca

SEQ ID NO: 2415211 - RNA, 19 nt, Artificial Sequence
  Description of Artificial Sequence: Synthetic oligonucleotide
guuauguuggggcagcaac

SEQ ID NO: 2415212 - RNA, 19 nt, Artificial Sequence
  Description of Artificial Sequence: Synthetic oligonucleotide
gaguuuuccucauucauaa

SEQ ID NO: 2415213 - RNA, 19 nt, Artificial Sequence
  Description of Artificial Sequence: Synthetic oligonucleotide
uuuugauagcaaacugaca

SEQ ID NO: 2415214 - RNA, 19 nt, Artificial Sequence
  Description of Artificial Sequence: Synthetic oligonucleotide
uaaauaucgugcccucagc

SEQ ID NO: 2415215 - RNA, 19 nt, Artificial Sequence
  Description of Artificial Sequence: Synthetic oligonucleotide
ugauagcaaacugacaagu

SEQ ID NO: 2415216 - RNA, 19 nt, Artificial Sequence
  Description of Artificial Sequence: Synthetic oligonucleotide
cagacuaaacuuuucuuuc

SEQ ID NO: 2415217 - RNA, 19 nt, Artificial Sequence
  Description of Artificial Sequence: Synthetic oligonucleotide
guuaucacuauuucaagua

SEQ ID NO: 2415218 - RNA, 19 nt, Artificial Sequence
  Description of Artificial Sequence: Synthetic oligonucleotide
uaauugguaugaauacaac

SEQ ID NO: 2415219 - RNA, 19 nt, Artificial Sequence
  Description of Artificial Sequence: Synthetic oligonucleotide
uucacugucuaagauccag

SEQ ID NO: 2415220 - RNA, 19 nt, Artificial Sequence
  Description of Artificial Sequence: Synthetic oligonucleotide
guaugaauacaacauagua

SEQ ID NO: 2415221 - RNA, 19 nt, Artificial Sequence
  Description of Artificial Sequence: Synthetic oligonucleotide
gaugagauucaugugguca

SEQ ID NO: 2415222 - RNA, 19 nt, Artificial Sequence
  Description of Artificial Sequence: Synthetic oligonucleotide
aaugcauggugcaccgggc

SEQ ID NO: 2415223 - RNA, 19 nt, Artificial Sequence
  Description of Artificial Sequence: Synthetic oligonucleotide
auuaauugguaugaauaca

SEQ ID NO: 2415224 - RNA, 19 nt, Artificial Sequence
  Description of Artificial Sequence: Synthetic oligonucleotide
ugcaaugcauggugcaccg

SEQ ID NO: 2415225 - RNA, 19 nt, Artificial Sequence
  Description of Artificial Sequence: Synthetic oligonucleotide
uguuuaagggcaaucucua

SEQ ID NO: 2415226 - RNA, 19 nt, Artificial Sequence
  Description of Artificial Sequence: Synthetic oligonucleotide
caaugcauggugcaccggg

SEQ ID NO: 2415227 - RNA, 19 nt, Artificial Sequence
  Description of Artificial Sequence: Synthetic oligonucleotide
aagguguuauguuggggca

SEQ ID NO: 2415228 - RNA, 19 nt, Artificial Sequence
  Description of Artificial Sequence: Synthetic oligonucleotide
uaagaaucggaacccuugu

SEQ ID NO: 2415229 - RNA, 19 nt, Artificial Sequence
  Description of Artificial Sequence: Synthetic oligonucleotide
uuagccacacagcugucca

SEQ ID NO: 2415230 - RNA, 19 nt, Artificial Sequence
  Description of Artificial Sequence: Synthetic oligonucleotide
uuggagacaaugaaacuuu

SEQ ID NO: 2415231 - RNA, 19 nt, Artificial Sequence
  Description of Artificial Sequence: Synthetic oligonucleotide
uuaacagacuaaacuuuuc

SEQ ID NO: 2415232 - RNA, 19 nt, Artificial Sequence
  Description of Artificial Sequence: Synthetic oligonucleotide
gaaucuagaauucuccccu

SEQ ID NO: 2415233 - RNA, 19 nt, Artificial Sequence
  Description of Artificial Sequence: Synthetic oligonucleotide
uaucacuauuucaaguaau

SEQ ID NO: 2415234 - RNA, 19 nt, Artificial Sequence
  Description of Artificial Sequence: Synthetic oligonucleotide
uuccacuucacugucuaag

SEQ ID NO: 2415235 - RNA, 19 nt, Artificial Sequence
  Description of Artificial Sequence: Synthetic oligonucleotide
cacuauuucaaguaauuaa

SEQ ID NO: 2415236 - RNA, 19 nt, Artificial Sequence
  Description of Artificial Sequence: Synthetic oligonucleotide
aguuuugauagcaaacuga

SEQ ID NO: 2415237 - RNA, 19 nt, Artificial Sequence
  Description of Artificial Sequence: Synthetic oligonucleotide
uuuuaaauaucgugcccuc

SEQ ID NO: 2415238 - RNA, 19 nt, Artificial Sequence
  Description of Artificial Sequence: Synthetic oligonucleotide
ucuaucgagucuuuggcuu

SEQ ID NO: 2415239 - RNA, 19 nt, Artificial Sequence
  Description of Artificial Sequence: Synthetic oligonucleotide
auugcaaugcauggugcac

SEQ ID NO: 2415240 - RNA, 19 nt, Artificial Sequence
  Description of Artificial Sequence: Synthetic oligonucleotide
ucggaacccuuguuuaagg

SEQ ID NO: 2415241 - RNA, 19 nt, Artificial Sequence
  Description of Artificial Sequence: Synthetic oligonucleotide
aggugaguggcauuugucu

SEQ ID NO: 2415242 - RNA, 19 nt, Artificial Sequence
  Description of Artificial Sequence: Synthetic oligonucleotide
ucucuacugacagaacaag

SEQ ID NO: 2415243 - RNA, 19 nt, Artificial Sequence
  Description of Artificial Sequence: Synthetic oligonucleotide
gauagcaaacugacaagug

SEQ ID NO: 2415244 - RNA, 19 nt, Artificial Sequence
  Description of Artificial Sequence: Synthetic oligonucleotide
cacugcaaaguccucaaac

SEQ ID NO: 2415245 - RNA, 19 nt, Artificial Sequence
  Description of Artificial Sequence: Synthetic oligonucleotide
agaaucggaacccuuguuu

SEQ ID NO: 2415246 - RNA, 19 nt, Artificial Sequence
  Description of Artificial Sequence: Synthetic oligonucleotide
agacuaaacuuuucuuucu

SEQ ID NO: 2415247 - RNA, 19 nt, Artificial Sequence
  Description of Artificial Sequence: Synthetic oligonucleotide
aaaggaacugguguccaga

SEQ ID NO: 2415248 - RNA, 19 nt, Artificial Sequence
  Description of Artificial Sequence: Synthetic oligonucleotide
auauugcaguuuugauagc

SEQ ID NO: 2415249 - RNA, 19 nt, Artificial Sequence
  Description of Artificial Sequence: Synthetic oligonucleotide
guaagaaucggaacccuug

SEQ ID NO: 2415250 - RNA, 19 nt, Artificial Sequence
  Description of Artificial Sequence: Synthetic oligonucleotide
ugugcuaucugugauccau

SEQ ID NO: 2415251 - RNA, 19 nt, Artificial Sequence
  Description of Artificial Sequence: Synthetic oligonucleotide
gaacccuuguuuaagggca

SEQ ID NO: 2415252 - RNA, 19 nt, Artificial Sequence
  Description of Artificial Sequence: Synthetic oligonucleotide
acugucuaagauccagaug

SEQ ID NO: 2415253 - RNA, 19 nt, Artificial Sequence
  Description of Artificial Sequence: Synthetic oligonucleotide
uauuuccugcaucuaucga

SEQ ID NO: 2415254 - RNA, 19 nt, Artificial Sequence
  Description of Artificial Sequence: Synthetic oligonucleotide
ugcaaaggaacuggugucc

SEQ ID NO: 2415255 - RNA, 19 nt, Artificial Sequence
  Description of Artificial Sequence: Synthetic oligonucleotide
uuuaaauaucgugcccuca

SEQ ID NO: 2415256 - RNA, 19 nt, Artificial Sequence
  Description of Artificial Sequence: Synthetic oligonucleotide
auaagguguuauguugggg

SEQ ID NO: 2415257 - RNA, 19 nt, Artificial Sequence
  Description of Artificial Sequence: Synthetic oligonucleotide
cacuucacugucuaagauc

SEQ ID NO: 2415258 - RNA, 19 nt, Artificial Sequence
  Description of Artificial Sequence: Synthetic oligonucleotide
caaguguuaucacuauuuc

SEQ ID NO: 2415259 - RNA, 19 nt, Artificial Sequence
  Description of Artificial Sequence: Synthetic oligonucleotide
aacauaguacuuauccaaa

SEQ ID NO: 2415260 - RNA, 19 nt, Artificial Sequence
  Description of Artificial Sequence: Synthetic oligonucleotide
uguguccugaguuuuccuc

SEQ ID NO: 2415261 - RNA, 19 nt, Artificial Sequence
  Description of Artificial Sequence: Synthetic oligonucleotide
caguuuugauagcaaacug

SEQ ID NO: 2415262 - RNA, 19 nt, Artificial Sequence
  Description of Artificial Sequence: Synthetic oligonucleotide
aauucuccccugugcuauc

SEQ ID NO: 2415263 - RNA, 19 nt, Artificial Sequence
  Description of Artificial Sequence: Synthetic oligonucleotide
augagauucauguggucau

SEQ ID NO: 2415264 - RNA, 19 nt, Artificial Sequence
  Description of Artificial Sequence: Synthetic oligonucleotide
aguucacuggucaccaagg

SEQ ID NO: 2415265 - RNA, 19 nt, Artificial Sequence
  Description of Artificial Sequence: Synthetic oligonucleotide
aaucggaacccuuguuuaa

SEQ ID NO: 2415266 - RNA, 19 nt, Artificial Sequence
  Description of Artificial Sequence: Synthetic oligonucleotide
ucacugucuaagauccaga

SEQ ID NO: 2415267 - RNA, 19 nt, Artificial Sequence
  Description of Artificial Sequence: Synthetic oligonucleotide
acaugaaaauuuagaaucu

SEQ ID NO: 2415268 - RNA, 19 nt, Artificial Sequence
  Description of Artificial Sequence: Synthetic oligonucleotide
uggucacuggcaaacaauu

SEQ ID NO: 2415269 - RNA, 19 nt, Artificial Sequence
  Description of Artificial Sequence: Synthetic oligonucleotide
ugucuaagauccagaugca

SEQ ID NO: 2415270 - RNA, 19 nt, Artificial Sequence
  Description of Artificial Sequence: Synthetic oligonucleotide
gagauucauguggucaucc

SEQ ID NO: 2415271 - RNA, 19 nt, Artificial Sequence
  Description of Artificial Sequence: Synthetic oligonucleotide
aucuaucgagucuuuggcu

SEQ ID NO: 2415272 - RNA, 19 nt, Artificial Sequence
  Description of Artificial Sequence: Synthetic oligonucleotide
acacacuuagccacacagc

SEQ ID NO: 2415273 - RNA, 19 nt, Artificial Sequence
  Description of Artificial Sequence: Synthetic oligonucleotide
uugcaaugcauggugcacc

SEQ ID NO: 2415274 - RNA, 19 nt, Artificial Sequence
  Description of Artificial Sequence: Synthetic oligonucleotide
gagcuaaaggcgcauggca

SEQ ID NO: 2415275 - RNA, 19 nt, Artificial Sequence
  Description of Artificial Sequence: Synthetic oligonucleotide
auucauguggucauccaca

SEQ ID NO: 2415276 - RNA, 19 nt, Artificial Sequence
  Description of Artificial Sequence: Synthetic oligonucleotide
uauguuggggcagcaacac

SEQ ID NO: 2415277 - RNA, 19 nt, Artificial Sequence
  Description of Artificial Sequence: Synthetic oligonucleotide
uuuggucauuguugggaug

SEQ ID NO: 2415278 - RNA, 19 nt, Artificial Sequence
  Description of Artificial Sequence: Synthetic oligonucleotide
ggaacccuuguuuaagggc

SEQ ID NO: 2415279 - RNA, 19 nt, Artificial Sequence
  Description of Artificial Sequence: Synthetic oligonucleotide
gacagaacaagcacuugca

SEQ ID NO: 2415280 - RNA, 19 nt, Artificial Sequence
  Description of Artificial Sequence: Synthetic oligonucleotide
gaaucggaacccuuguuua

SEQ ID NO: 2415281 - RNA, 19 nt, Artificial Sequence
  Description of Artificial Sequence: Synthetic oligonucleotide
cuuuccaguucacugguca

SEQ ID NO: 2415282 - RNA, 19 nt, Artificial Sequence
  Description of Artificial Sequence: Synthetic oligonucleotide
cuaaaggcgcauggcagcg

SEQ ID NO: 2415283 - RNA, 19 nt, Artificial Sequence
  Description of Artificial Sequence: Synthetic oligonucleotide
uccugcaucuaucgagucu

SEQ ID NO: 2415284 - RNA, 19 nt, Artificial Sequence
  Description of Artificial Sequence: Synthetic oligonucleotide
caguucacuggucaccaag

SEQ ID NO: 2415285 - RNA, 19 nt, Artificial Sequence
  Description of Artificial Sequence: Synthetic oligonucleotide
ugcauuggugcaccugcug

SEQ ID NO: 2415286 - RNA, 19 nt, Artificial Sequence
  Description of Artificial Sequence: Synthetic oligonucleotide
uauuucccgauggaugaca

SEQ ID NO: 2415287 - RNA, 19 nt, Artificial Sequence
  Description of Artificial Sequence: Synthetic oligonucleotide
ugaauacaacauaguacuu

SEQ ID NO: 2415288 - RNA, 19 nt, Artificial Sequence
  Description of Artificial Sequence: Synthetic oligonucleotide
cugacaaguguuaucacua

SEQ ID NO: 2415289 - RNA, 19 nt, Artificial Sequence
  Description of Artificial Sequence: Synthetic oligonucleotide
agcuaaaggcgcauggcag

SEQ ID NO: 2415290 - RNA, 19 nt, Artificial Sequence
  Description of Artificial Sequence: Synthetic oligonucleotide
agaggugaguggcauuugu

SEQ ID NO: 2415291 - RNA, 19 nt, Artificial Sequence
  Description of Artificial Sequence: Synthetic oligonucleotide
aagaaucggaacccuuguu

SEQ ID NO: 2415292 - RNA, 19 nt, Artificial Sequence
  Description of Artificial Sequence: Synthetic oligonucleotide
uaucugugauccauauuuu

SEQ ID NO: 2415293 - RNA, 19 nt, Artificial Sequence
  Description of Artificial Sequence: Synthetic oligonucleotide
uguggucauccacacacuu

SEQ ID NO: 2415294 - RNA, 19 nt, Artificial Sequence
  Description of Artificial Sequence: Synthetic oligonucleotide
aguacuuauccaaaagaua

SEQ ID NO: 2415295 - RNA, 19 nt, Artificial Sequence
  Description of Artificial Sequence: Synthetic oligonucleotide
agauucauguggucaucca

SEQ ID NO: 2415296 - RNA, 19 nt, Artificial Sequence
  Description of Artificial Sequence: Synthetic oligonucleotide
aguaauuaauugguaugaa

SEQ ID NO: 2415297 - RNA, 19 nt, Artificial Sequence
  Description of Artificial Sequence: Synthetic oligonucleotide
cuuauccaaaagauaaggu

SEQ ID NO: 2415298 - RNA, 19 nt, Artificial Sequence
  Description of Artificial Sequence: Synthetic oligonucleotide
aacugguguccagagguga

SEQ ID NO: 2415299 - RNA, 19 nt, Artificial Sequence
  Description of Artificial Sequence: Synthetic oligonucleotide
ugcauggugcaccgggcca

SEQ ID NO: 2415300 - RNA, 19 nt, Artificial Sequence
  Description of Artificial Sequence: Synthetic oligonucleotide
cuuuuaaauaucgugcccu

SEQ ID NO: 2415301 - RNA, 19 nt, Artificial Sequence
  Description of Artificial Sequence: Synthetic oligonucleotide
ugacaaguguuaucacuau

SEQ ID NO: 2415302 - RNA, 19 nt, Artificial Sequence
  Description of Artificial Sequence: Synthetic oligonucleotide
aucuagaauucuccccugu

SEQ ID NO: 2415303 - RNA, 19 nt, Artificial Sequence
  Description of Artificial Sequence: Synthetic oligonucleotide
aucggaacccuuguuuaag

SEQ ID NO: 2415304 - RNA, 19 nt, Artificial Sequence
  Description of Artificial Sequence: Synthetic oligonucleotide
cuuagccacacagcugucc

SEQ ID NO: 2415305 - RNA, 19 nt, Artificial Sequence
  Description of Artificial Sequence: Synthetic oligonucleotide
uggugcaccgggccaggcg

SEQ ID NO: 2415306 - RNA, 19 nt, Artificial Sequence
  Description of Artificial Sequence: Synthetic oligonucleotide
aucugugauccauauuuua

SEQ ID NO: 2415307 - RNA, 19 nt, Artificial Sequence
  Description of Artificial Sequence: Synthetic oligonucleotide
ucauuguugggaugagauu

SEQ ID NO: 2415308 - RNA, 19 nt, Artificial Sequence
  Description of Artificial Sequence: Synthetic oligonucleotide
guguccagaggugaguggc

SEQ ID NO: 2415309 - RNA, 19 nt, Artificial Sequence
  Description of Artificial Sequence: Synthetic oligonucleotide
cauugcaaugcauggugca

SEQ ID NO: 2415310 - RNA, 19 nt, Artificial Sequence
  Description of Artificial Sequence: Synthetic oligonucleotide
gauccauauuuuagcacca

SEQ ID NO: 2415311 - RNA, 19 nt, Artificial Sequence
  Description of Artificial Sequence: Synthetic oligonucleotide
cauugcuuaacagacuaaa

SEQ ID NO: 2415312 - RNA, 19 nt, Artificial Sequence
  Description of Artificial Sequence: Synthetic oligonucleotide
ucauguggucauccacaca

SEQ ID NO: 2415313 - RNA, 19 nt, Artificial Sequence
  Description of Artificial Sequence: Synthetic oligonucleotide
ccuuuuaaauaucgugccc

SEQ ID NO: 2415314 - RNA, 19 nt, Artificial Sequence
  Description of Artificial Sequence: Synthetic oligonucleotide
gugcaguaagaaucggaac

SEQ ID NO: 2415315 - RNA, 19 nt, Artificial Sequence
  Description of Artificial Sequence: Synthetic oligonucleotide
ucuccccugugcuaucugu

SEQ ID NO: 2415316 - RNA, 19 nt, Artificial Sequence
  Description of Artificial Sequence: Synthetic oligonucleotide
auacaacauaguacuuauc

SEQ ID NO: 2415317 - RNA, 19 nt, Artificial Sequence
  Description of Artificial Sequence: Synthetic oligonucleotide
gcuaaaggcgcauggcagc

SEQ ID NO: 2415318 - RNA, 19 nt, Artificial Sequence
  Description of Artificial Sequence: Synthetic oligonucleotide
uccccugugcuaucuguga

SEQ ID NO: 2415319 - RNA, 19 nt, Artificial Sequence
  Description of Artificial Sequence: Synthetic oligonucleotide
auuucccgauggaugacag

SEQ ID NO: 2415320 - RNA, 19 nt, Artificial Sequence
  Description of Artificial Sequence: Synthetic oligonucleotide
acugacagaacaagcacuu

SEQ ID NO: 2415321 - RNA, 19 nt, Artificial Sequence
  Description of Artificial Sequence: Synthetic oligonucleotide
ugcaucuaucgagucuuug

SEQ ID NO: 2415322 - RNA, 19 nt, Artificial Sequence
  Description of Artificial Sequence: Synthetic oligonucleotide
uccuggaaccuuuccaguu

SEQ ID NO: 2415323 - RNA, 19 nt, Artificial Sequence
  Description of Artificial Sequence: Synthetic oligonucleotide
cucgaugcauuggugcacc

SEQ ID NO: 2415324 - RNA, 19 nt, Artificial Sequence
  Description of Artificial Sequence: Synthetic oligonucleotide
ugacagagacuccuucauu

SEQ ID NO: 2415325 - RNA, 19 nt, Artificial Sequence
  Description of Artificial Sequence: Synthetic oligonucleotide
cgauggaugacagagacuc

SEQ ID NO: 2415326 - RNA, 19 nt, Artificial Sequence
  Description of Artificial Sequence: Synthetic oligonucleotide
uaucgagucuuuggcuuug

SEQ ID NO: 2415327 - RNA, 19 nt, Artificial Sequence
  Description of Artificial Sequence: Synthetic oligonucleotide
auccauauuuuagcaccag

SEQ ID NO: 2415328 - RNA, 19 nt, Artificial Sequence
  Description of Artificial Sequence: Synthetic oligonucleotide
caaaguccucaaacuuuac

SEQ ID NO: 2415329 - RNA, 19 nt, Artificial Sequence
  Description of Artificial Sequence: Synthetic oligonucleotide
caaucucuacugacagaac

SEQ ID NO: 2415330 - RNA, 19 nt, Artificial Sequence
  Description of Artificial Sequence: Synthetic oligonucleotide
cuuaacagacuaaacuuuu

SEQ ID NO: 2415331 - RNA, 19 nt, Artificial Sequence
  Description of Artificial Sequence: Synthetic oligonucleotide
gcaacacugcacugcaaag

SEQ ID NO: 2415332 - RNA, 19 nt, Artificial Sequence
  Description of Artificial Sequence: Synthetic oligonucleotide
uaucgugcccucagcccca

SEQ ID NO: 2415333 - RNA, 19 nt, Artificial Sequence
  Description of Artificial Sequence: Synthetic oligonucleotide
gauggaugacagagacucc

SEQ ID NO: 2415334 - RNA, 19 nt, Artificial Sequence
  Description of Artificial Sequence: Synthetic oligonucleotide
agaauucuccccugugcua

SEQ ID NO: 2415335 - RNA, 19 nt, Artificial Sequence
  Description of Artificial Sequence: Synthetic oligonucleotide
ucccgauggaugacagaga

SEQ ID NO: 2415336 - RNA, 19 nt, Artificial Sequence
  Description of Artificial Sequence: Synthetic oligonucleotide
uuuuagcaccagcuucuuu

SEQ ID NO: 2415337 - RNA, 19 nt, Artificial Sequence
  Description of Artificial Sequence: Synthetic oligonucleotide
agguguuauguuggggcag

SEQ ID NO: 2415338 - RNA, 19 nt, Artificial Sequence
  Description of Artificial Sequence: Synthetic oligonucleotide
uuauuucccgauggaugac

SEQ ID NO: 2415339 - RNA, 19 nt, Artificial Sequence
  Description of Artificial Sequence: Synthetic oligonucleotide
uguuauguuggggcagcaa

SEQ ID NO: 2415340 - RNA, 19 nt, Artificial Sequence
  Description of Artificial Sequence: Synthetic oligonucleotide
ccugugcuaucugugaucc

SEQ ID NO: 2415341 - RNA, 19 nt, Artificial Sequence
  Description of Artificial Sequence: Synthetic oligonucleotide
uggucaccaaggccugggc

SEQ ID NO: 2415342 - RNA, 19 nt, Artificial Sequence
  Description of Artificial Sequence: Synthetic oligonucleotide
uccaaaagauaagguguua

SEQ ID NO: 2415343 - RNA, 19 nt, Artificial Sequence
  Description of Artificial Sequence: Synthetic oligonucleotide
auugcaguuuugauagcaa

SEQ ID NO: 2415344 - RNA, 19 nt, Artificial Sequence
  Description of Artificial Sequence: Synthetic oligonucleotide
acuugcacaugaaaauuua

SEQ ID NO: 2415345 - RNA, 19 nt, Artificial Sequence
  Description of Artificial Sequence: Synthetic oligonucleotide
cuugagcuaaaggcgcaug

SEQ ID NO: 2415346 - RNA, 19 nt, Artificial Sequence
  Description of Artificial Sequence: Synthetic oligonucleotide
ccucauucauaaacauugc

SEQ ID NO: 2415347 - RNA, 19 nt, Artificial Sequence
  Description of Artificial Sequence: Synthetic oligonucleotide
cuccuuauuuccugcaucu

SEQ ID NO: 2415348 - RNA, 19 nt, Artificial Sequence
  Description of Artificial Sequence: Synthetic oligonucleotide
ugagauucauguggucauc

SEQ ID NO: 2415349 - RNA, 19 nt, Artificial Sequence
  Description of Artificial Sequence: Synthetic oligonucleotide
cuccccugugcuaucugug

SEQ ID NO: 2415350 - RNA, 19 nt, Artificial Sequence
  Description of Artificial Sequence: Synthetic oligonucleotide
gguguccagaggugagugg

SEQ ID NO: 2415351 - RNA, 19 nt, Artificial Sequence
  Description of Artificial Sequence: Synthetic oligonucleotide
acugguguccagaggugag

SEQ ID NO: 2415352 - RNA, 19 nt, Artificial Sequence
  Description of Artificial Sequence: Synthetic oligonucleotide
caugaaaauuuagaaucua

SEQ ID NO: 2415353 - RNA, 19 nt, Artificial Sequence
  Description of Artificial Sequence: Synthetic oligonucleotide
gaggugaguggcauuuguc

SEQ ID NO: 2415354 - RNA, 19 nt, Artificial Sequence
  Description of Artificial Sequence: Synthetic oligonucleotide
caaggccugggcuugagcu

SEQ ID NO: 2415355 - RNA, 19 nt, Artificial Sequence
  Description of Artificial Sequence: Synthetic oligonucleotide
ggcagcaacacugcacugc

SEQ ID NO: 2415356 - RNA, 19 nt, Artificial Sequence
  Description of Artificial Sequence: Synthetic oligonucleotide
aguaagaaucggaacccuu

SEQ ID NO: 2415357 - RNA, 19 nt, Artificial Sequence
  Description of Artificial Sequence: Synthetic oligonucleotide
uggaaccuuuccaguucac

SEQ ID NO: 2415358 - RNA, 19 nt, Artificial Sequence
  Description of Artificial Sequence: Synthetic oligonucleotide
cuggaaccuuuccaguuca

SEQ ID NO: 2415359 - RNA, 19 nt, Artificial Sequence
  Description of Artificial Sequence: Synthetic oligonucleotide
cacacagcuguccaguugu

SEQ ID NO: 2415360 - RNA, 19 nt, Artificial Sequence
  Description of Artificial Sequence: Synthetic oligonucleotide
ucgagucuuuggcuuuguc

SEQ ID NO: 2415361 - RNA, 19 nt, Artificial Sequence
  Description of Artificial Sequence: Synthetic oligonucleotide
gguguuauguuggggcagc

SEQ ID NO: 2415362 - RNA, 19 nt, Artificial Sequence
  Description of Artificial Sequence: Synthetic oligonucleotide
auguuggggcagcaacacu

SEQ ID NO: 2415363 - RNA, 19 nt, Artificial Sequence
  Description of Artificial Sequence: Synthetic oligonucleotide
auggucacuggcaaacaau

SEQ ID NO: 2415364 - RNA, 19 nt, Artificial Sequence
  Description of Artificial Sequence: Synthetic oligonucleotide
cacugcacugcaaaguccu

SEQ ID NO: 2415365 - RNA, 19 nt, Artificial Sequence
  Description of Artificial Sequence: Synthetic oligonucleotide
uaaaggcgcauggcagcgc

SEQ ID NO: 2415366 - RNA, 19 nt, Artificial Sequence
  Description of Artificial Sequence: Synthetic oligonucleotide
cuuuaccagcagguugaag

SEQ ID NO: 2415367 - RNA, 19 nt, Artificial Sequence
  Description of Artificial Sequence: Synthetic oligonucleotide
uuccugcaucuaucgaguc

SEQ ID NO: 2415368 - RNA, 19 nt, Artificial Sequence
  Description of Artificial Sequence: Synthetic oligonucleotide
agcaaacugacaaguguua

SEQ ID NO: 2415369 - RNA, 19 nt, Artificial Sequence
  Description of Artificial Sequence: Synthetic oligonucleotide
gaauucuccccugugcuau

SEQ ID NO: 2415370 - RNA, 19 nt, Artificial Sequence
  Description of Artificial Sequence: Synthetic oligonucleotide
cauggucacuggcaaacaa

SEQ ID NO: 2415371 - RNA, 19 nt, Artificial Sequence
  Description of Artificial Sequence: Synthetic oligonucleotide
gcgcucgaugcauuggugc

SEQ ID NO: 2415372 - RNA, 19 nt, Artificial Sequence
  Description of Artificial Sequence: Synthetic oligonucleotide
cugacagaacaagcacuug

SEQ ID NO: 2415373 - RNA, 19 nt, Artificial Sequence
  Description of Artificial Sequence: Synthetic oligonucleotide
gacaaguguuaucacuauu

SEQ ID NO: 2415374 - RNA, 19 nt, Artificial Sequence
  Description of Artificial Sequence: Synthetic oligonucleotide
auuggugcaccugcugcau

SEQ ID NO: 2415375 - RNA, 19 nt, Artificial Sequence
  Description of Artificial Sequence: Synthetic oligonucleotide
aacccuuguuuaagggcaa

SEQ ID NO: 2415376 - RNA, 19 nt, Artificial Sequence
  Description of Artificial Sequence: Synthetic oligonucleotide
gucuaagauccagaugcaa

SEQ ID NO: 2415377 - RNA, 19 nt, Artificial Sequence
  Description of Artificial Sequence: Synthetic oligonucleotide
uccuuauuuccugcaucua

SEQ ID NO: 2415378 - RNA, 19 nt, Artificial Sequence
  Description of Artificial Sequence: Synthetic oligonucleotide
ucgaugcauuggugcaccu

SEQ ID NO: 2415379 - RNA, 19 nt, Artificial Sequence
  Description of Artificial Sequence: Synthetic oligonucleotide
cacugucuaagauccagau

SEQ ID NO: 2415380 - RNA, 19 nt, Artificial Sequence
  Description of Artificial Sequence: Synthetic oligonucleotide
cggaacccuuguuuaaggg

SEQ ID NO: 2415381 - RNA, 19 nt, Artificial Sequence
  Description of Artificial Sequence: Synthetic oligonucleotide
auggugcaccgggccaggc

SEQ ID NO: 2415382 - RNA, 19 nt, Artificial Sequence
  Description of Artificial Sequence: Synthetic oligonucleotide
ggaugagauucaugugguc

SEQ ID NO: 2415383 - RNA, 19 nt, Artificial Sequence
  Description of Artificial Sequence: Synthetic oligonucleotide
cuugcuguguccugaguuu

SEQ ID NO: 2415384 - RNA, 19 nt, Artificial Sequence
  Description of Artificial Sequence: Synthetic oligonucleotide
uccagaggugaguggcauu

SEQ ID NO: 2415385 - RNA, 19 nt, Artificial Sequence
  Description of Artificial Sequence: Synthetic oligonucleotide
ggggcagcaacacugcacu

SEQ ID NO: 2415386 - RNA, 19 nt, Artificial Sequence
  Description of Artificial Sequence: Synthetic oligonucleotide
cgagucuuuggcuuuguca

SEQ ID NO: 2415387 - RNA, 19 nt, Artificial Sequence
  Description of Artificial Sequence: Synthetic oligonucleotide
ggccaggcgguccuggaac

SEQ ID NO: 2415388 - RNA, 19 nt, Artificial Sequence
  Description of Artificial Sequence: Synthetic oligonucleotide
ggcagcgcucgaugcauug

SEQ ID NO: 2415389 - RNA, 19 nt, Artificial Sequence
  Description of Artificial Sequence: Synthetic oligonucleotide
agcgcucgaugcauuggug

SEQ ID NO: 2415390 - RNA, 19 nt, Artificial Sequence
  Description of Artificial Sequence: Synthetic oligonucleotide
cagaugcaaaggaacuggu

SEQ ID NO: 2415391 - RNA, 19 nt, Artificial Sequence
  Description of Artificial Sequence: Synthetic oligonucleotide
augcauuggugcaccugcu

SEQ ID NO: 2415392 - RNA, 19 nt, Artificial Sequence
  Description of Artificial Sequence: Synthetic oligonucleotide
gcagcgcucgaugcauugg

SEQ ID NO: 2415393 - RNA, 19 nt, Artificial Sequence
  Description of Artificial Sequence: Synthetic oligonucleotide
cagaggugaguggcauuug

SEQ ID NO: 2415394 - RNA, 19 nt, Artificial Sequence
  Description of Artificial Sequence: Synthetic oligonucleotide
acuuuaccagcagguugaa

SEQ ID NO: 2415395 - RNA, 19 nt, Artificial Sequence
  Description of Artificial Sequence: Synthetic oligonucleotide
gcuuaacagacuaaacuuu

SEQ ID NO: 2415396 - RNA, 19 nt, Artificial Sequence
  Description of Artificial Sequence: Synthetic oligonucleotide
aucgagucuuuggcuuugu

SEQ ID NO: 2415397 - RNA, 19 nt, Artificial Sequence
  Description of Artificial Sequence: Synthetic oligonucleotide
cccugugcuaucugugauc

SEQ ID NO: 2415398 - RNA, 19 nt, Artificial Sequence
  Description of Artificial Sequence: Synthetic oligonucleotide
caaacuuuaccagcagguu

SEQ ID NO: 2415399 - RNA, 19 nt, Artificial Sequence
  Description of Artificial Sequence: Synthetic oligonucleotide
cuaucgagucuuuggcuuu

SEQ ID NO: 2415400 - RNA, 19 nt, Artificial Sequence
  Description of Artificial Sequence: Synthetic oligonucleotide
ggucauccacacacuuagc

SEQ ID NO: 2415401 - RNA, 19 nt, Artificial Sequence
  Description of Artificial Sequence: Synthetic oligonucleotide
ccuuguuuaagggcaaucu

SEQ ID NO: 2415402 - RNA, 19 nt, Artificial Sequence
  Description of Artificial Sequence: Synthetic oligonucleotide
ccuuauuuccugcaucuau

SEQ ID NO: 2415403 - RNA, 19 nt, Artificial Sequence
  Description of Artificial Sequence: Synthetic oligonucleotide
ggaaccuuuccaguucacu

SEQ ID NO: 2415404 - RNA, 19 nt, Artificial Sequence
  Description of Artificial Sequence: Synthetic oligonucleotide
uggcagcgcucgaugcauu

SEQ ID NO: 2415405 - RNA, 19 nt, Artificial Sequence
  Description of Artificial Sequence: Synthetic oligonucleotide
guguuauguuggggcagca

SEQ ID NO: 2415406 - RNA, 19 nt, Artificial Sequence
  Description of Artificial Sequence: Synthetic oligonucleotide
gcaaugcauggugcaccgg

SEQ ID NO: 2415407 - RNA, 19 nt, Artificial Sequence
  Description of Artificial Sequence: Synthetic oligonucleotide
gcgguccuggaaccuuucc

SEQ ID NO: 2415408 - RNA, 19 nt, Artificial Sequence
  Description of Artificial Sequence: Synthetic oligonucleotide
acccuuguuuaagggcaau

SEQ ID NO: 2415409 - RNA, 19 nt, Artificial Sequence
  Description of Artificial Sequence: Synthetic oligonucleotide
cugugcuaucugugaucca

SEQ ID NO: 2415410 - RNA, 19 nt, Artificial Sequence
  Description of Artificial Sequence: Synthetic oligonucleotide
ggagacaaugaaacuuuau

SEQ ID NO: 2415411 - RNA, 19 nt, Artificial Sequence
  Description of Artificial Sequence: Synthetic oligonucleotide
caguaagaaucggaacccu

SEQ ID NO: 2415412 - RNA, 19 nt, Artificial Sequence
  Description of Artificial Sequence: Synthetic oligonucleotide
cagcgcucgaugcauuggu

SEQ ID NO: 2415413 - RNA, 19 nt, Artificial Sequence
  Description of Artificial Sequence: Synthetic oligonucleotide
ccaaaagauaagguguuau

SEQ ID NO: 2415414 - RNA, 19 nt, Artificial Sequence
  Description of Artificial Sequence: Synthetic oligonucleotide
ggcuugagcuaaaggcgca

SEQ ID NO: 2415415 - RNA, 19 nt, Artificial Sequence
  Description of Artificial Sequence: Synthetic oligonucleotide
cccuuguuuaagggcaauc

SEQ ID NO: 2415416 - RNA, 19 nt, Artificial Sequence
  Description of Artificial Sequence: Synthetic oligonucleotide
cugcagcuccuuauuuccu

SEQ ID NO: 2415417 - RNA, 19 nt, Artificial Sequence
  Description of Artificial Sequence: Synthetic oligonucleotide
gaguggcauuugucuggaa

SEQ ID NO: 2415418 - RNA, 19 nt, Artificial Sequence
  Description of Artificial Sequence: Synthetic oligonucleotide
ccuuuccaguucacugguc

SEQ ID NO: 2415419 - RNA, 19 nt, Artificial Sequence
  Description of Artificial Sequence: Synthetic oligonucleotide
gcuugaugucugugcagua

SEQ ID NO: 2415420 - RNA, 19 nt, Artificial Sequence
  Description of Artificial Sequence: Synthetic oligonucleotide
ugcaccgggccaggcgguc

SEQ ID NO: 2415421 - RNA, 19 nt, Artificial Sequence
  Description of Artificial Sequence: Synthetic oligonucleotide
ucgugcccucagccccaug

SEQ ID NO: 2415422 - RNA, 19 nt, Artificial Sequence
  Description of Artificial Sequence: Synthetic oligonucleotide
ggugcaccugcugcauaga

SEQ ID NO: 2415423 - RNA, 19 nt, Artificial Sequence
  Description of Artificial Sequence: Synthetic oligonucleotide
gcacugcaaaguccucaaa

SEQ ID NO: 2415424 - RNA, 19 nt, Artificial Sequence
  Description of Artificial Sequence: Synthetic oligonucleotide
cgaugcauuggugcaccug

SEQ ID NO: 2415425 - RNA, 19 nt, Artificial Sequence
  Description of Artificial Sequence: Synthetic oligonucleotide
gcuaucugugauccauauu

SEQ ID NO: 2415426 - RNA, 19 nt, Artificial Sequence
  Description of Artificial Sequence: Synthetic oligonucleotide
ccacuucacugucuaagau

SEQ ID NO: 2415427 - RNA, 19 nt, Artificial Sequence
  Description of Artificial Sequence: Synthetic oligonucleotide
gcaccgggccaggcggucc

SEQ ID NO: 2415428 - RNA, 19 nt, Artificial Sequence
  Description of Artificial Sequence: Synthetic oligonucleotide
ggcgcauggcagcgcucga

SEQ ID NO: 2415429 - RNA, 19 nt, Artificial Sequence
  Description of Artificial Sequence: Synthetic oligonucleotide
ggcgguccuggaaccuuuc

SEQ ID NO: 2415430 - RNA, 19 nt, Artificial Sequence
  Description of Artificial Sequence: Synthetic oligonucleotide
cugcaucuaucgagucuuu

SEQ ID NO: 2415431 - RNA, 19 nt, Artificial Sequence
  Description of Artificial Sequence: Synthetic oligonucleotide
gcuugagcuaaaggcgcau

SEQ ID NO: 2415432 - RNA, 19 nt, Artificial Sequence
  Description of Artificial Sequence: Synthetic oligonucleotide
ccgauggaugacagagacu

SEQ ID NO: 2415433 - RNA, 19 nt, Artificial Sequence
  Description of Artificial Sequence: Synthetic oligonucleotide
ccaguucacuggucaccaa

SEQ ID NO: 2415434 - RNA, 19 nt, Artificial Sequence
  Description of Artificial Sequence: Synthetic oligonucleotide
caccgggccaggcgguccu

SEQ ID NO: 2415435 - RNA, 19 nt, Artificial Sequence
  Description of Artificial Sequence: Synthetic oligonucleotide
ccccauggucacuggcaaa

SEQ ID NO: 2415436 - RNA, 19 nt, Artificial Sequence
  Description of Artificial Sequence: Synthetic oligonucleotide
caggcgguccuggaaccuu

SEQ ID NO: 2415437 - RNA, 19 nt, Artificial Sequence
  Description of Artificial Sequence: Synthetic oligonucleotide
ccccugugcuaucugugau

SEQ ID NO: 2415438 - RNA, 19 nt, Artificial Sequence
  Description of Artificial Sequence: Synthetic oligonucleotide
gugcaccgggccaggcggu

SEQ ID NO: 2415439 - RNA, 19 nt, Artificial Sequence
  Description of Artificial Sequence: Synthetic oligonucleotide
gcgcauggcagcgcucgau

SEQ ID NO: 2415440 - RNA, 19 nt, Artificial Sequence
  Description of Artificial Sequence: Synthetic oligonucleotide
ggccugggcuugagcuaaa

SEQ ID NO: 2415441 - RNA, 19 nt, Artificial Sequence
  Description of Artificial Sequence: Synthetic oligonucleotide
ccaggcgguccuggaaccu

SEQ ID NO: 2415442 - RNA, 19 nt, Artificial Sequence
  Description of Artificial Sequence: Synthetic oligonucleotide
ccucagccccauggucacu

SEQ ID NO: 2415443 - RNA, 19 nt, Artificial Sequence
  Description of Artificial Sequence: Synthetic oligonucleotide
aaucccuuuauuuauuuac

SEQ ID NO: 2415444 - RNA, 19 nt, Artificial Sequence
  Description of Artificial Sequence: Synthetic oligonucleotide
aaaguuacucuuccaaacc

SEQ ID NO: 2415445 - RNA, 19 nt, Artificial Sequence
  Description of Artificial Sequence: Synthetic oligonucleotide
aacaacaucaaaguuacuc

SEQ ID NO: 2415446 - RNA, 19 nt, Artificial Sequence
  Description of Artificial Sequence: Synthetic oligonucleotide
aaagacagggcauucacag

SEQ ID NO: 2415447 - RNA, 19 nt, Artificial Sequence
  Description of Artificial Sequence: Synthetic oligonucleotide
ucuugaaaaggcaacagug

SEQ ID NO: 2415448 - RNA, 19 nt, Artificial Sequence
  Description of Artificial Sequence: Synthetic oligonucleotide
aguaugaguggauacacuc

SEQ ID NO: 2415449 - RNA, 19 nt, Artificial Sequence
  Description of Artificial Sequence: Synthetic oligonucleotide
ugugaggacguccagcugg

SEQ ID NO: 2415450 - RNA, 19 nt, Artificial Sequence
  Description of Artificial Sequence: Synthetic oligonucleotide
uccagaagcaaaauacucc

SEQ ID NO: 2415451 - RNA, 19 nt, Artificial Sequence
  Description of Artificial Sequence: Synthetic oligonucleotide
uaugaguggauacacuccc

SEQ ID NO: 2415452 - RNA, 19 nt, Artificial Sequence
  Description of Artificial Sequence: Synthetic oligonucleotide
aaaaccgccaugcucgcag

SEQ ID NO: 2415453 - RNA, 19 nt, Artificial Sequence
  Description of Artificial Sequence: Synthetic oligonucleotide
ucaacugagcuccugauuc

SEQ ID NO: 2415454 - RNA, 19 nt, Artificial Sequence
  Description of Artificial Sequence: Synthetic oligonucleotide
agguccaggaucuucaggg

SEQ ID NO: 2415455 - RNA, 19 nt, Artificial Sequence
  Description of Artificial Sequence: Synthetic oligonucleotide
acugacgcgcucuugagac

SEQ ID NO: 2415456 - RNA, 19 nt, Artificial Sequence
  Description of Artificial Sequence: Synthetic oligonucleotide
uuuauuuacucaagucacc

SEQ ID NO: 2415457 - RNA, 19 nt, Artificial Sequence
  Description of Artificial Sequence: Synthetic oligonucleotide
uccuaaucaacugagcucc

SEQ ID NO: 2415458 - RNA, 19 nt, Artificial Sequence
  Description of Artificial Sequence: Synthetic oligonucleotide
accauacaaaucccuagcc

SEQ ID NO: 2415459 - RNA, 19 nt, Artificial Sequence
  Description of Artificial Sequence: Synthetic oligonucleotide
ugagguaguuucccgacgg

SEQ ID NO: 2415460 - RNA, 19 nt, Artificial Sequence
  Description of Artificial Sequence: Synthetic oligonucleotide
cacauaggugacaaaaccg

SEQ ID NO: 2415461 - RNA, 19 nt, Artificial Sequence
  Description of Artificial Sequence: Synthetic oligonucleotide
acauaggugacaaaaccgc

SEQ ID NO: 2415462 - RNA, 19 nt, Artificial Sequence
  Description of Artificial Sequence: Synthetic oligonucleotide
uugaaaaggcaacaguggu

SEQ ID NO: 2415463 - RNA, 19 nt, Artificial Sequence
  Description of Artificial Sequence: Synthetic oligonucleotide
aaguuacucuuccaaacca

SEQ ID NO: 2415464 - RNA, 19 nt, Artificial Sequence
  Description of Artificial Sequence: Synthetic oligonucleotide
caaaguuacucuuccaaac

SEQ ID NO: 2415465 - RNA, 19 nt, Artificial Sequence
  Description of Artificial Sequence: Synthetic oligonucleotide
auaaugcugcaacagccgg

SEQ ID NO: 2415466 - RNA, 19 nt, Artificial Sequence
  Description of Artificial Sequence: Synthetic oligonucleotide
gauaaugcugcaacagccg

SEQ ID NO: 2415467 - RNA, 19 nt, Artificial Sequence
  Description of Artificial Sequence: Synthetic oligonucleotide
caugcucgcaguaugagug

SEQ ID NO: 2415468 - RNA, 19 nt, Artificial Sequence
  Description of Artificial Sequence: Synthetic oligonucleotide
agauguggcucccucaggg

SEQ ID NO: 2415469 - RNA, 19 nt, Artificial Sequence
  Description of Artificial Sequence: Synthetic oligonucleotide
uuauuuacucaagucacca

SEQ ID NO: 2415470 - RNA, 19 nt, Artificial Sequence
  Description of Artificial Sequence: Synthetic oligonucleotide
ugagacugcucuugcaccg

SEQ ID NO: 2415471 - RNA, 19 nt, Artificial Sequence
  Description of Artificial Sequence: Synthetic oligonucleotide
ucuugcaccgacuccaggc

SEQ ID NO: 2415472 - RNA, 19 nt, Artificial Sequence
  Description of Artificial Sequence: Synthetic oligonucleotide
ucaccauacaaaucccuag

SEQ ID NO: 2415473 - RNA, 19 nt, Artificial Sequence
  Description of Artificial Sequence: Synthetic oligonucleotide
uucuugaaaaggcaacagu

SEQ ID NO: 2415474 - RNA, 19 nt, Artificial Sequence
  Description of Artificial Sequence: Synthetic oligonucleotide
uguuccaggauggacacug

SEQ ID NO: 2415475 - RNA, 19 nt, Artificial Sequence
  Description of Artificial Sequence: Synthetic oligonucleotide
acuguguagcugauaaugc

SEQ ID NO: 2415476 - RNA, 19 nt, Artificial Sequence
  Description of Artificial Sequence: Synthetic oligonucleotide
aauacuccccaguucuuga

SEQ ID NO: 2415477 - RNA, 19 nt, Artificial Sequence
  Description of Artificial Sequence: Synthetic oligonucleotide
ucaaaguuacucuuccaaa

SEQ ID NO: 2415478 - RNA, 19 nt, Artificial Sequence
  Description of Artificial Sequence: Synthetic oligonucleotide
uagcugauaaugcugcaac

SEQ ID NO: 2415479 - RNA, 19 nt, Artificial Sequence
  Description of Artificial Sequence: Synthetic oligonucleotide
caggcaaauucauuucugg

SEQ ID NO: 2415480 - RNA, 19 nt, Artificial Sequence
  Description of Artificial Sequence: Synthetic oligonucleotide
uccugauucuugcuccugg

SEQ ID NO: 2415481 - RNA, 19 nt, Artificial Sequence
  Description of Artificial Sequence: Synthetic oligonucleotide
ugauucuugcuccuggguc

SEQ ID NO: 2415482 - RNA, 19 nt, Artificial Sequence
  Description of Artificial Sequence: Synthetic oligonucleotide
gacggguggaaagacaggg

SEQ ID NO: 2415483 - RNA, 19 nt, Artificial Sequence
  Description of Artificial Sequence: Synthetic oligonucleotide
cugauaaugcugcaacagc

SEQ ID NO: 2415484 - RNA, 19 nt, Artificial Sequence
  Description of Artificial Sequence: Synthetic oligonucleotide
acagucuugucaucacugg

SEQ ID NO: 2415485 - RNA, 19 nt, Artificial Sequence
  Description of Artificial Sequence: Synthetic oligonucleotide
uguuguccaugccagcugc

SEQ ID NO: 2415486 - RNA, 19 nt, Artificial Sequence
  Description of Artificial Sequence: Synthetic oligonucleotide
uuucuagcagagcuggccu

SEQ ID NO: 2415487 - RNA, 19 nt, Artificial Sequence
  Description of Artificial Sequence: Synthetic oligonucleotide
cuugagacugcucuugcac

SEQ ID NO: 2415488 - RNA, 19 nt, Artificial Sequence
  Description of Artificial Sequence: Synthetic oligonucleotide
cauaggugacaaaaccgcc

SEQ ID NO: 2415489 - RNA, 19 nt, Artificial Sequence
  Description of Artificial Sequence: Synthetic oligonucleotide
aaauacuccccaguucuug

SEQ ID NO: 2415490 - RNA, 19 nt, Artificial Sequence
  Description of Artificial Sequence: Synthetic oligonucleotide
ugugaugagguaguuuccc

SEQ ID NO: 2415491 - RNA, 19 nt, Artificial Sequence
  Description of Artificial Sequence: Synthetic oligonucleotide
uccacauaggugacaaaac

SEQ ID NO: 2415492 - RNA, 19 nt, Artificial Sequence
  Description of Artificial Sequence: Synthetic oligonucleotide
ugaguggauacacucccga

SEQ ID NO: 2415493 - RNA, 19 nt, Artificial Sequence
  Description of Artificial Sequence: Synthetic oligonucleotide
guaguuucccgacgggugg

SEQ ID NO: 2415494 - RNA, 19 nt, Artificial Sequence
  Description of Artificial Sequence: Synthetic oligonucleotide
uggcagauuucuagcagag

SEQ ID NO: 2415495 - RNA, 19 nt, Artificial Sequence
  Description of Artificial Sequence: Synthetic oligonucleotide
gaugagguaguuucccgac

SEQ ID NO: 2415496 - RNA, 19 nt, Artificial Sequence
  Description of Artificial Sequence: Synthetic oligonucleotide
ugggucaugauggcguucg

SEQ ID NO: 2415497 - RNA, 19 nt, Artificial Sequence
  Description of Artificial Sequence: Synthetic oligonucleotide
ugaugagguaguuucccga

SEQ ID NO: 2415498 - RNA, 19 nt, Artificial Sequence
  Description of Artificial Sequence: Synthetic oligonucleotide
aaucaacugagcuccugau

SEQ ID NO: 2415499 - RNA, 19 nt, Artificial Sequence
  Description of Artificial Sequence: Synthetic oligonucleotide
aacagugguggcagguccc

SEQ ID NO: 2415500 - RNA, 19 nt, Artificial Sequence
  Description of Artificial Sequence: Synthetic oligonucleotide
augugcuccagugugcugg

SEQ ID NO: 2415501 - RNA, 19 nt, Artificial Sequence
  Description of Artificial Sequence: Synthetic oligonucleotide
uccugggucaugauggcgu

SEQ ID NO: 2415502 - RNA, 19 nt, Artificial Sequence
  Description of Artificial Sequence: Synthetic oligonucleotide
caccauacaaaucccuagc

SEQ ID NO: 2415503 - RNA, 19 nt, Artificial Sequence
  Description of Artificial Sequence: Synthetic oligonucleotide
cuccagaagcaaaauacuc

SEQ ID NO: 2415504 - RNA, 19 nt, Artificial Sequence
  Description of Artificial Sequence: Synthetic oligonucleotide
acaacuucaccguguuguc

SEQ ID NO: 2415505 - RNA, 19 nt, Artificial Sequence
  Description of Artificial Sequence: Synthetic oligonucleotide
ucaucagcgccuccagaag

SEQ ID NO: 2415506 - RNA, 19 nt, Artificial Sequence
  Description of Artificial Sequence: Synthetic oligonucleotide
auacacucccgacuggucu

SEQ ID NO: 2415507 - RNA, 19 nt, Artificial Sequence
  Description of Artificial Sequence: Synthetic oligonucleotide
gugaugagguaguuucccg

SEQ ID NO: 2415508 - RNA, 19 nt, Artificial Sequence
  Description of Artificial Sequence: Synthetic oligonucleotide
cacgaugugcuccagugug

SEQ ID NO: 2415509 - RNA, 19 nt, Artificial Sequence
  Description of Artificial Sequence: Synthetic oligonucleotide
acaaaaccgccaugcucgc

SEQ ID NO: 2415510 - RNA, 19 nt, Artificial Sequence
  Description of Artificial Sequence: Synthetic oligonucleotide
uucuggcagauuucuagca

SEQ ID NO: 2415511 - RNA, 19 nt, Artificial Sequence
  Description of Artificial Sequence: Synthetic oligonucleotide
augagguaguuucccgacg

SEQ ID NO: 2415512 - RNA, 19 nt, Artificial Sequence
  Description of Artificial Sequence: Synthetic oligonucleotide
ggugacaaaaccgccaugc

SEQ ID NO: 2415513 - RNA, 19 nt, Artificial Sequence
  Description of Artificial Sequence: Synthetic oligonucleotide
cuccuaaucaacugagcuc

SEQ ID NO: 2415514 - RNA, 19 nt, Artificial Sequence
  Description of Artificial Sequence: Synthetic oligonucleotide
uuacucaagucaccauaca

SEQ ID NO: 2415515 - RNA, 19 nt, Artificial Sequence
  Description of Artificial Sequence: Synthetic oligonucleotide
caguucuugaaaaggcaac

SEQ ID NO: 2415516 - RNA, 19 nt, Artificial Sequence
  Description of Artificial Sequence: Synthetic oligonucleotide
caaugcaggugccacuggg

SEQ ID NO: 2415517 - RNA, 19 nt, Artificial Sequence
  Description of Artificial Sequence: Synthetic oligonucleotide
ugcucuugcaccgacucca

SEQ ID NO: 2415518 - RNA, 19 nt, Artificial Sequence
  Description of Artificial Sequence: Synthetic oligonucleotide
uaggugacaaaaccgccau

SEQ ID NO: 2415519 - RNA, 19 nt, Artificial Sequence
  Description of Artificial Sequence: Synthetic oligonucleotide
cagauuucuagcagagcug

SEQ ID NO: 2415520 - RNA, 19 nt, Artificial Sequence
  Description of Artificial Sequence: Synthetic oligonucleotide
guucuugaaaaggcaacag

SEQ ID NO: 2415521 - RNA, 19 nt, Artificial Sequence
  Description of Artificial Sequence: Synthetic oligonucleotide
guaugaguggauacacucc

SEQ ID NO: 2415522 - RNA, 19 nt, Artificial Sequence
  Description of Artificial Sequence: Synthetic oligonucleotide
ugucuggggcauacugacg

SEQ ID NO: 2415523 - RNA, 19 nt, Artificial Sequence
  Description of Artificial Sequence: Synthetic oligonucleotide
gaggacguccagcuggccc

SEQ ID NO: 2415524 - RNA, 19 nt, Artificial Sequence
  Description of Artificial Sequence: Synthetic oligonucleotide
uauuuacucaagucaccau

SEQ ID NO: 2415525 - RNA, 19 nt, Artificial Sequence
  Description of Artificial Sequence: Synthetic oligonucleotide
cagaagcaaaauacucccc

SEQ ID NO: 2415526 - RNA, 19 nt, Artificial Sequence
  Description of Artificial Sequence: Synthetic oligonucleotide
caacagugguggcaggucc

SEQ ID NO: 2415527 - RNA, 19 nt, Artificial Sequence
  Description of Artificial Sequence: Synthetic oligonucleotide
uggauacacucccgacugg

SEQ ID NO: 2415528 - RNA, 19 nt, Artificial Sequence
  Description of Artificial Sequence: Synthetic oligonucleotide
uccuccuaaucaacugagc

SEQ ID NO: 2415529 - RNA, 19 nt, Artificial Sequence
  Description of Artificial Sequence: Synthetic oligonucleotide
caucagcgccuccagaagc

SEQ ID NO: 2415530 - RNA, 19 nt, Artificial Sequence
  Description of Artificial Sequence: Synthetic oligonucleotide
ucuugagacugcucuugca

SEQ ID NO: 2415531 - RNA, 19 nt, Artificial Sequence
  Description of Artificial Sequence: Synthetic oligonucleotide
ucuggggcauacugacgcg

SEQ ID NO: 2415532 - RNA, 19 nt, Artificial Sequence
  Description of Artificial Sequence: Synthetic oligonucleotide
ccacauaggugacaaaacc

SEQ ID NO: 2415533 - RNA, 19 nt, Artificial Sequence
  Description of Artificial Sequence: Synthetic oligonucleotide
agucuugucaucacuggca

SEQ ID NO: 2415534 - RNA, 19 nt, Artificial Sequence
  Description of Artificial Sequence: Synthetic oligonucleotide
gagguaguuucccgacggg

SEQ ID NO: 2415535 - RNA, 19 nt, Artificial Sequence
  Description of Artificial Sequence: Synthetic oligonucleotide
cauacugacgcgcucuuga

SEQ ID NO: 2415536 - RNA, 19 nt, Artificial Sequence
  Description of Artificial Sequence: Synthetic oligonucleotide
auacugacgcgcucuugag

SEQ ID NO: 2415537 - RNA, 19 nt, Artificial Sequence
  Description of Artificial Sequence: Synthetic oligonucleotide
aaccgcuguuccaggaugg

SEQ ID NO: 2415538 - RNA, 19 nt, Artificial Sequence
  Description of Artificial Sequence: Synthetic oligonucleotide
uggagcguguagagcagcc

SEQ ID NO: 2415539 - RNA, 19 nt, Artificial Sequence
  Description of Artificial Sequence: Synthetic oligonucleotide
cagucuugucaucacuggc

SEQ ID NO: 2415540 - RNA, 19 nt, Artificial Sequence
  Description of Artificial Sequence: Synthetic oligonucleotide
ugucaaccgcuguuccagg

SEQ ID NO: 2415541 - RNA, 19 nt, Artificial Sequence
  Description of Artificial Sequence: Synthetic oligonucleotide
gcugauaaugcugcaacag

SEQ ID NO: 2415542 - RNA, 19 nt, Artificial Sequence
  Description of Artificial Sequence: Synthetic oligonucleotide
ucgcuggaggcugugauga

SEQ ID NO: 2415543 - RNA, 19 nt, Artificial Sequence
  Description of Artificial Sequence: Synthetic oligonucleotide
acucaagucaccauacaaa

SEQ ID NO: 2415544 - RNA, 19 nt, Artificial Sequence
  Description of Artificial Sequence: Synthetic oligonucleotide
augauuagcugcugguuuu

SEQ ID NO: 2415545 - RNA, 19 nt, Artificial Sequence
  Description of Artificial Sequence: Synthetic oligonucleotide
cugugaugagguaguuucc

SEQ ID NO: 2415546 - RNA, 19 nt, Artificial Sequence
  Description of Artificial Sequence: Synthetic oligonucleotide
cucccgacuggucuugucc

SEQ ID NO: 2415547 - RNA, 19 nt, Artificial Sequence
  Description of Artificial Sequence: Synthetic oligonucleotide
gugucaaccgcuguuccag

SEQ ID NO: 2415548 - RNA, 19 nt, Artificial Sequence
  Description of Artificial Sequence: Synthetic oligonucleotide
auaggugacaaaaccgcca

SEQ ID NO: 2415549 - RNA, 19 nt, Artificial Sequence
  Description of Artificial Sequence: Synthetic oligonucleotide
gcugcggcaaugcaggugc

SEQ ID NO: 2415550 - RNA, 19 nt, Artificial Sequence
  Description of Artificial Sequence: Synthetic oligonucleotide
ucccgacuggucuuguccc

SEQ ID NO: 2415551 - RNA, 19 nt, Artificial Sequence
  Description of Artificial Sequence: Synthetic oligonucleotide
augcucgcaguaugagugg

SEQ ID NO: 2415552 - RNA, 19 nt, Artificial Sequence
  Description of Artificial Sequence: Synthetic oligonucleotide
gcaacagccggugaguccg

SEQ ID NO: 2415553 - RNA, 19 nt, Artificial Sequence
  Description of Artificial Sequence: Synthetic oligonucleotide
uacugacgcgcucuugaga

SEQ ID NO: 2415554 - RNA, 19 nt, Artificial Sequence
  Description of Artificial Sequence: Synthetic oligonucleotide
ucuugcuccugggucauga

SEQ ID NO: 2415555 - RNA, 19 nt, Artificial Sequence
  Description of Artificial Sequence: Synthetic oligonucleotide
ucgcaguaugaguggauac

SEQ ID NO: 2415556 - RNA, 19 nt, Artificial Sequence
  Description of Artificial Sequence: Synthetic oligonucleotide
ugacgcgcucuugagacug

SEQ ID NO: 2415557 - RNA, 19 nt, Artificial Sequence
  Description of Artificial Sequence: Synthetic oligonucleotide
uucuagcagagcuggccug

SEQ ID NO: 2415558 - RNA, 19 nt, Artificial Sequence
  Description of Artificial Sequence: Synthetic oligonucleotide
ugcaacagccggugagucc

SEQ ID NO: 2415559 - RNA, 19 nt, Artificial Sequence
  Description of Artificial Sequence: Synthetic oligonucleotide
acagcugcacuguguagcu

SEQ ID NO: 2415560 - RNA, 19 nt, Artificial Sequence
  Description of Artificial Sequence: Synthetic oligonucleotide
ccagcugcggcaaugcagg

SEQ ID NO: 2415561 - RNA, 19 nt, Artificial Sequence
  Description of Artificial Sequence: Synthetic oligonucleotide
aguccgcacaucccacaac

SEQ ID NO: 2415562 - RNA, 19 nt, Artificial Sequence
  Description of Artificial Sequence: Synthetic oligonucleotide
gaguggauacacucccgac

SEQ ID NO: 2415563 - RNA, 19 nt, Artificial Sequence
  Description of Artificial Sequence: Synthetic oligonucleotide
ugcaccgacuccaggcucu

SEQ ID NO: 2415564 - RNA, 19 nt, Artificial Sequence
  Description of Artificial Sequence: Synthetic oligonucleotide
agugucaaccgcuguucca

SEQ ID NO: 2415565 - RNA, 19 nt, Artificial Sequence
  Description of Artificial Sequence: Synthetic oligonucleotide
ucccacaacuucaccgugu

SEQ ID NO: 2415566 - RNA, 19 nt, Artificial Sequence
  Description of Artificial Sequence: Synthetic oligonucleotide
accgacuccaggcucuugu

SEQ ID NO: 2415567 - RNA, 19 nt, Artificial Sequence
  Description of Artificial Sequence: Synthetic oligonucleotide
ucaaccgcuguuccaggau

SEQ ID NO: 2415568 - RNA, 19 nt, Artificial Sequence
  Description of Artificial Sequence: Synthetic oligonucleotide
cucuugagacugcucuugc

SEQ ID NO: 2415569 - RNA, 19 nt, Artificial Sequence
  Description of Artificial Sequence: Synthetic oligonucleotide
ugucugugugaggacgucc

SEQ ID NO: 2415570 - RNA, 19 nt, Artificial Sequence
  Description of Artificial Sequence: Synthetic oligonucleotide
aucccuuuauuuauuuacu

SEQ ID NO: 2415571 - RNA, 19 nt, Artificial Sequence
  Description of Artificial Sequence: Synthetic oligonucleotide
accguguuguccaugccag

SEQ ID NO: 2415572 - RNA, 19 nt, Artificial Sequence
  Description of Artificial Sequence: Synthetic oligonucleotide
caggcacugcuucagcuug

SEQ ID NO: 2415573 - RNA, 19 nt, Artificial Sequence
  Description of Artificial Sequence: Synthetic oligonucleotide
auggagcguguagagcagc

SEQ ID NO: 2415574 - RNA, 19 nt, Artificial Sequence
  Description of Artificial Sequence: Synthetic oligonucleotide
agcguguagagcagccggc

SEQ ID NO: 2415575 - RNA, 19 nt, Artificial Sequence
  Description of Artificial Sequence: Synthetic oligonucleotide
gugcuggucagugucuggg

SEQ ID NO: 2415576 - RNA, 19 nt, Artificial Sequence
  Description of Artificial Sequence: Synthetic oligonucleotide
acgaugugcuccagugugc

SEQ ID NO: 2415577 - RNA, 19 nt, Artificial Sequence
  Description of Artificial Sequence: Synthetic oligonucleotide
guuacucuuccaaaccauc

SEQ ID NO: 2415578 - RNA, 19 nt, Artificial Sequence
  Description of Artificial Sequence: Synthetic oligonucleotide
ugcuguccuccuaaucaac

SEQ ID NO: 2415579 - RNA, 19 nt, Artificial Sequence
  Description of Artificial Sequence: Synthetic oligonucleotide
cauggagcguguagagcag

SEQ ID NO: 2415580 - RNA, 19 nt, Artificial Sequence
  Description of Artificial Sequence: Synthetic oligonucleotide
ugaguccgcacaucccaca

SEQ ID NO: 2415581 - RNA, 19 nt, Artificial Sequence
  Description of Artificial Sequence: Synthetic oligonucleotide
ugcugguuuuccaggcacu

SEQ ID NO: 2415582 - RNA, 19 nt, Artificial Sequence
  Description of Artificial Sequence: Synthetic oligonucleotide
uacuccccaguucuugaaa

SEQ ID NO: 2415583 - RNA, 19 nt, Artificial Sequence
  Description of Artificial Sequence: Synthetic oligonucleotide
ugucuuugccuggugggac

SEQ ID NO: 2415584 - RNA, 19 nt, Artificial Sequence
  Description of Artificial Sequence: Synthetic oligonucleotide
aggccucugcaccuucacg

SEQ ID NO: 2415585 - RNA, 19 nt, Artificial Sequence
  Description of Artificial Sequence: Synthetic oligonucleotide
ugcccauggagcguguaga

SEQ ID NO: 2415586 - RNA, 19 nt, Artificial Sequence
  Description of Artificial Sequence: Synthetic oligonucleotide
cucaagucaccauacaaau

SEQ ID NO: 2415587 - RNA, 19 nt, Artificial Sequence
  Description of Artificial Sequence: Synthetic oligonucleotide
acaaaucccuagccugcug

SEQ ID NO: 2415588 - RNA, 19 nt, Artificial Sequence
  Description of Artificial Sequence: Synthetic oligonucleotide
uggggcauacugacgcgcu

SEQ ID NO: 2415589 - RNA, 19 nt, Artificial Sequence
  Description of Artificial Sequence: Synthetic oligonucleotide
cacaacuucaccguguugu

SEQ ID NO: 2415590 - RNA, 19 nt, Artificial Sequence
  Description of Artificial Sequence: Synthetic oligonucleotide
uacaaaucccuagccugcu

SEQ ID NO: 2415591 - RNA, 19 nt, Artificial Sequence
  Description of Artificial Sequence: Synthetic oligonucleotide
acagccggugaguccgcac

SEQ ID NO: 2415592 - RNA, 19 nt, Artificial Sequence
  Description of Artificial Sequence: Synthetic oligonucleotide
cuaaucaacugagcuccug

SEQ ID NO: 2415593 - RNA, 19 nt, Artificial Sequence
  Description of Artificial Sequence: Synthetic oligonucleotide
gguggaaauccacauaggu

SEQ ID NO: 2415594 - RNA, 19 nt, Artificial Sequence
  Description of Artificial Sequence: Synthetic oligonucleotide
cagugucaaccgcuguucc

SEQ ID NO: 2415595 - RNA, 19 nt, Artificial Sequence
  Description of Artificial Sequence: Synthetic oligonucleotide
augaguggauacacucccg

SEQ ID NO: 2415596 - RNA, 19 nt, Artificial Sequence
  Description of Artificial Sequence: Synthetic oligonucleotide
aaaccgccaugcucgcagu

SEQ ID NO: 2415597 - RNA, 19 nt, Artificial Sequence
  Description of Artificial Sequence: Synthetic oligonucleotide
gcaaaauacuccccaguuc

SEQ ID NO: 2415598 - RNA, 19 nt, Artificial Sequence
  Description of Artificial Sequence: Synthetic oligonucleotide
aauucauuucuggcagauu

SEQ ID NO: 2415599 - RNA, 19 nt, Artificial Sequence
  Description of Artificial Sequence: Synthetic oligonucleotide
gguaguuucccgacgggug

SEQ ID NO: 2415600 - RNA, 19 nt, Artificial Sequence
  Description of Artificial Sequence: Synthetic oligonucleotide
gauuucuagcagagcuggc

SEQ ID NO: 2415601 - RNA, 19 nt, Artificial Sequence
  Description of Artificial Sequence: Synthetic oligonucleotide
guguuguccaugccagcug

SEQ ID NO: 2415602 - RNA, 19 nt, Artificial Sequence
  Description of Artificial Sequence: Synthetic oligonucleotide
aguuacucuuccaaaccau

SEQ ID NO: 2415603 - RNA, 19 nt, Artificial Sequence
  Description of Artificial Sequence: Synthetic oligonucleotide
agucgcuggaggcugugau

SEQ ID NO: 2415604 - RNA, 19 nt, Artificial Sequence
  Description of Artificial Sequence: Synthetic oligonucleotide
aucccacaacuucaccgug

SEQ ID NO: 2415605 - RNA, 19 nt, Artificial Sequence
  Description of Artificial Sequence: Synthetic oligonucleotide
cauucacagcugcacugug

SEQ ID NO: 2415606 - RNA, 19 nt, Artificial Sequence
  Description of Artificial Sequence: Synthetic oligonucleotide
caucaaaguuacucuucca

SEQ ID NO: 2415607 - RNA, 19 nt, Artificial Sequence
  Description of Artificial Sequence: Synthetic oligonucleotide
ccgacggguggaaagacag

SEQ ID NO: 2415608 - RNA, 19 nt, Artificial Sequence
  Description of Artificial Sequence: Synthetic oligonucleotide
ucaccguguuguccaugcc

SEQ ID NO: 2415609 - RNA, 19 nt, Artificial Sequence
  Description of Artificial Sequence: Synthetic oligonucleotide
aaaauacuccccaguucuu

SEQ ID NO: 2415610 - RNA, 19 nt, Artificial Sequence
  Description of Artificial Sequence: Synthetic oligonucleotide
agguaguuucccgacgggu

SEQ ID NO: 2415611 - RNA, 19 nt, Artificial Sequence
  Description of Artificial Sequence: Synthetic oligonucleotide
uucccgacggguggaaaga

SEQ ID NO: 2415612 - RNA, 19 nt, Artificial Sequence
  Description of Artificial Sequence: Synthetic oligonucleotide
gccacugggguggaaaucc

SEQ ID NO: 2415613 - RNA, 19 nt, Artificial Sequence
  Description of Artificial Sequence: Synthetic oligonucleotide
auacuccccaguucuugaa

SEQ ID NO: 2415614 - RNA, 19 nt, Artificial Sequence
  Description of Artificial Sequence: Synthetic oligonucleotide
caccguguuguccaugcca

SEQ ID NO: 2415615 - RNA, 19 nt, Artificial Sequence
  Description of Artificial Sequence: Synthetic oligonucleotide
gggugaaucccuuuauuua

SEQ ID NO: 2415616 - RNA, 19 nt, Artificial Sequence
  Description of Artificial Sequence: Synthetic oligonucleotide
caugauggcguucgcugca

SEQ ID NO: 2415617 - RNA, 19 nt, Artificial Sequence
  Description of Artificial Sequence: Synthetic oligonucleotide
cacugggguggaaauccac

SEQ ID NO: 2415618 - RNA, 19 nt, Artificial Sequence
  Description of Artificial Sequence: Synthetic oligonucleotide
aggggugaaucccuuuauu

SEQ ID NO: 2415619 - RNA, 19 nt, Artificial Sequence
  Description of Artificial Sequence: Synthetic oligonucleotide
uugcaccgacuccaggcuc

SEQ ID NO: 2415620 - RNA, 19 nt, Artificial Sequence
  Description of Artificial Sequence: Synthetic oligonucleotide
ugcucgcaguaugagugga

SEQ ID NO: 2415621 - RNA, 19 nt, Artificial Sequence
  Description of Artificial Sequence: Synthetic oligonucleotide
cuguguagcugauaaugcu

SEQ ID NO: 2415622 - RNA, 19 nt, Artificial Sequence
  Description of Artificial Sequence: Synthetic oligonucleotide
guuguccaugccagcugcg

SEQ ID NO: 2415623 - RNA, 19 nt, Artificial Sequence
  Description of Artificial Sequence: Synthetic oligonucleotide
guucgcugcaugauuagcu

SEQ ID NO: 2415624 - RNA, 19 nt, Artificial Sequence
  Description of Artificial Sequence: Synthetic oligonucleotide
uugagucgcuggaggcugu

SEQ ID NO: 2415625 - RNA, 19 nt, Artificial Sequence
  Description of Artificial Sequence: Synthetic oligonucleotide
gucaccauacaaaucccua

SEQ ID NO: 2415626 - RNA, 19 nt, Artificial Sequence
  Description of Artificial Sequence: Synthetic oligonucleotide
agcagccggcccuccauca

SEQ ID NO: 2415627 - RNA, 19 nt, Artificial Sequence
  Description of Artificial Sequence: Synthetic oligonucleotide
caaaucccuagccugcugu

SEQ ID NO: 2415628 - RNA, 19 nt, Artificial Sequence
  Description of Artificial Sequence: Synthetic oligonucleotide
uggcguucgcugcaugauu

SEQ ID NO: 2415629 - RNA, 19 nt, Artificial Sequence
  Description of Artificial Sequence: Synthetic oligonucleotide
guggcaggucccuggugcc

SEQ ID NO: 2415630 - RNA, 19 nt, Artificial Sequence
  Description of Artificial Sequence: Synthetic oligonucleotide
gaguccgcacaucccacaa

SEQ ID NO: 2415631 - RNA, 19 nt, Artificial Sequence
  Description of Artificial Sequence: Synthetic oligonucleotide
gucaaccgcuguuccagga

SEQ ID NO: 2415632 - RNA, 19 nt, Artificial Sequence
  Description of Artificial Sequence: Synthetic oligonucleotide
ugccagcugcggcaaugca

SEQ ID NO: 2415633 - RNA, 19 nt, Artificial Sequence
  Description of Artificial Sequence: Synthetic oligonucleotide
caacaucaaaguuacucuu

SEQ ID NO: 2415634 - RNA, 19 nt, Artificial Sequence
  Description of Artificial Sequence: Synthetic oligonucleotide
gugaggacguccagcuggc

SEQ ID NO: 2415635 - RNA, 19 nt, Artificial Sequence
  Description of Artificial Sequence: Synthetic oligonucleotide
ccggugaguccgcacaucc

SEQ ID NO: 2415636 - RNA, 19 nt, Artificial Sequence
  Description of Artificial Sequence: Synthetic oligonucleotide
ggguggaaauccacauagg

SEQ ID NO: 2415637 - RNA, 19 nt, Artificial Sequence
  Description of Artificial Sequence: Synthetic oligonucleotide
uccgcacaucccacaacuu

SEQ ID NO: 2415638 - RNA, 19 nt, Artificial Sequence
  Description of Artificial Sequence: Synthetic oligonucleotide
agcugcggcaaugcaggug

SEQ ID NO: 2415639 - RNA, 19 nt, Artificial Sequence
  Description of Artificial Sequence: Synthetic oligonucleotide
cccuggugcccauggagcg

SEQ ID NO: 2415640 - RNA, 19 nt, Artificial Sequence
  Description of Artificial Sequence: Synthetic oligonucleotide
aaccgccaugcucgcagua

SEQ ID NO: 2415641 - RNA, 19 nt, Artificial Sequence
  Description of Artificial Sequence: Synthetic oligonucleotide
gccagcugcggcaaugcag

SEQ ID NO: 2415642 - RNA, 19 nt, Artificial Sequence
  Description of Artificial Sequence: Synthetic oligonucleotide
gcaaugcaggugccacugg

SEQ ID NO: 2415643 - RNA, 19 nt, Artificial Sequence
  Description of Artificial Sequence: Synthetic oligonucleotide
gcccauggagcguguagag

SEQ ID NO: 2415644 - RNA, 19 nt, Artificial Sequence
  Description of Artificial Sequence: Synthetic oligonucleotide
ugagucgcuggaggcugug

SEQ ID NO: 2415645 - RNA, 19 nt, Artificial Sequence
  Description of Artificial Sequence: Synthetic oligonucleotide
auggcguucgcugcaugau

SEQ ID NO: 2415646 - RNA, 19 nt, Artificial Sequence
  Description of Artificial Sequence: Synthetic oligonucleotide
acuucaccguguuguccau

SEQ ID NO: 2415647 - RNA, 19 nt, Artificial Sequence
  Description of Artificial Sequence: Synthetic oligonucleotide
gcugguuuuccaggcacug

SEQ ID NO: 2415648 - RNA, 19 nt, Artificial Sequence
  Description of Artificial Sequence: Synthetic oligonucleotide
cuugucccacagcuugaca

SEQ ID NO: 2415649 - RNA, 19 nt, Artificial Sequence
  Description of Artificial Sequence: Synthetic oligonucleotide
aacagccggugaguccgca

SEQ ID NO: 2415650 - RNA, 19 nt, Artificial Sequence
  Description of Artificial Sequence: Synthetic oligonucleotide
cuugcaccgacuccaggcu

SEQ ID NO: 2415651 - RNA, 19 nt, Artificial Sequence
  Description of Artificial Sequence: Synthetic oligonucleotide
agcuggcccacgaugugcu

SEQ ID NO: 2415652 - RNA, 19 nt, Artificial Sequence
  Description of Artificial Sequence: Synthetic oligonucleotide
cuucaggguugagucgcug

SEQ ID NO: 2415653 - RNA, 19 nt, Artificial Sequence
  Description of Artificial Sequence: Synthetic oligonucleotide
cagccggugaguccgcaca

SEQ ID NO: 2415654 - RNA, 19 nt, Artificial Sequence
  Description of Artificial Sequence: Synthetic oligonucleotide
cugcaacagccggugaguc

SEQ ID NO: 2415655 - RNA, 19 nt, Artificial Sequence
  Description of Artificial Sequence: Synthetic oligonucleotide
ggcagauuucuagcagagc

SEQ ID NO: 2415656 - RNA, 19 nt, Artificial Sequence
  Description of Artificial Sequence: Synthetic oligonucleotide
ucccgacggguggaaagac

SEQ ID NO: 2415657 - RNA, 19 nt, Artificial Sequence
  Description of Artificial Sequence: Synthetic oligonucleotide
ccuccuaaucaacugagcu

SEQ ID NO: 2415658 - RNA, 19 nt, Artificial Sequence
  Description of Artificial Sequence: Synthetic oligonucleotide
ugccacugggguggaaauc

SEQ ID NO: 2415659 - RNA, 19 nt, Artificial Sequence
  Description of Artificial Sequence: Synthetic oligonucleotide
cucgcaguaugaguggaua

SEQ ID NO: 2415660 - RNA, 19 nt, Artificial Sequence
  Description of Artificial Sequence: Synthetic oligonucleotide
gugaguccgcacaucccac

SEQ ID NO: 2415661 - RNA, 19 nt, Artificial Sequence
  Description of Artificial Sequence: Synthetic oligonucleotide
cagggcauucacagcugca

SEQ ID NO: 2415662 - RNA, 19 nt, Artificial Sequence
  Description of Artificial Sequence: Synthetic oligonucleotide
ccgcacaucccacaacuuc

SEQ ID NO: 2415663 - RNA, 19 nt, Artificial Sequence
  Description of Artificial Sequence: Synthetic oligonucleotide
agccggugaguccgcacau

SEQ ID NO: 2415664 - RNA, 19 nt, Artificial Sequence
  Description of Artificial Sequence: Synthetic oligonucleotide
ugaggacguccagcuggcc

SEQ ID NO: 2415665 - RNA, 19 nt, Artificial Sequence
  Description of Artificial Sequence: Synthetic oligonucleotide
acacucccgacuggucuug

SEQ ID NO: 2415666 - RNA, 19 nt, Artificial Sequence
  Description of Artificial Sequence: Synthetic oligonucleotide
caacagccggugaguccgc

SEQ ID NO: 2415667 - RNA, 19 nt, Artificial Sequence
  Description of Artificial Sequence: Synthetic oligonucleotide
ggggugaaucccuuuauuu

SEQ ID NO: 2415668 - RNA, 19 nt, Artificial Sequence
  Description of Artificial Sequence: Synthetic oligonucleotide
gcguucgcugcaugauuag

SEQ ID NO: 2415669 - RNA, 19 nt, Artificial Sequence
  Description of Artificial Sequence: Synthetic oligonucleotide
ucccuagccugcuguccuc

SEQ ID NO: 2415670 - RNA, 19 nt, Artificial Sequence
  Description of Artificial Sequence: Synthetic oligonucleotide
gccaugcucgcaguaugag

SEQ ID NO: 2415671 - RNA, 19 nt, Artificial Sequence
  Description of Artificial Sequence: Synthetic oligonucleotide
ccagugucaaccgcuguuc

SEQ ID NO: 2415672 - RNA, 19 nt, Artificial Sequence
  Description of Artificial Sequence: Synthetic oligonucleotide
cugcggcaaugcaggugcc

SEQ ID NO: 2415673 - RNA, 19 nt, Artificial Sequence
  Description of Artificial Sequence: Synthetic oligonucleotide
gcgcucuugagacugcucu

SEQ ID NO: 2415674 - RNA, 19 nt, Artificial Sequence
  Description of Artificial Sequence: Synthetic oligonucleotide
gcucccucaggggugaauc

SEQ ID NO: 2415675 - RNA, 19 nt, Artificial Sequence
  Description of Artificial Sequence: Synthetic oligonucleotide
gucuugucccacagcuuga

SEQ ID NO: 2415676 - RNA, 19 nt, Artificial Sequence
  Description of Artificial Sequence: Synthetic oligonucleotide
ccauacaaaucccuagccu

SEQ ID NO: 2415677 - RNA, 19 nt, Artificial Sequence
  Description of Artificial Sequence: Synthetic oligonucleotide
gcguguagagcagccggcc

SEQ ID NO: 2415678 - RNA, 19 nt, Artificial Sequence
  Description of Artificial Sequence: Synthetic oligonucleotide
gcggcaaugcaggugccac

SEQ ID NO: 2415679 - RNA, 19 nt, Artificial Sequence
  Description of Artificial Sequence: Synthetic oligonucleotide
aguuucccgacggguggaa

SEQ ID NO: 2415680 - RNA, 19 nt, Artificial Sequence
  Description of Artificial Sequence: Synthetic oligonucleotide
agccugcuguccuccuaau

SEQ ID NO: 2415681 - RNA, 19 nt, Artificial Sequence
  Description of Artificial Sequence: Synthetic oligonucleotide
cccauggagcguguagagc

SEQ ID NO: 2415682 - RNA, 19 nt, Artificial Sequence
  Description of Artificial Sequence: Synthetic oligonucleotide
ggcguucgcugcaugauua

SEQ ID NO: 2415683 - RNA, 19 nt, Artificial Sequence
  Description of Artificial Sequence: Synthetic oligonucleotide
gagucgcuggaggcuguga

SEQ ID NO: 2415684 - RNA, 19 nt, Artificial Sequence
  Description of Artificial Sequence: Synthetic oligonucleotide
gugaaucccuuuauuuauu

SEQ ID NO: 2415685 - RNA, 19 nt, Artificial Sequence
  Description of Artificial Sequence: Synthetic oligonucleotide
acgcgcucuugagacugcu

SEQ ID NO: 2415686 - RNA, 19 nt, Artificial Sequence
  Description of Artificial Sequence: Synthetic oligonucleotide
ccgccaugcucgcaguaug

SEQ ID NO: 2415687 - RNA, 19 nt, Artificial Sequence
  Description of Artificial Sequence: Synthetic oligonucleotide
cuagccugcuguccuccua

SEQ ID NO: 2415688 - RNA, 19 nt, Artificial Sequence
  Description of Artificial Sequence: Synthetic oligonucleotide
gcauacugacgcgcucuug

SEQ ID NO: 2415689 - RNA, 19 nt, Artificial Sequence
  Description of Artificial Sequence: Synthetic oligonucleotide
gggucaugauggcguucgc

SEQ ID NO: 2415690 - RNA, 19 nt, Artificial Sequence
  Description of Artificial Sequence: Synthetic oligonucleotide
gggcauucacagcugcacu

SEQ ID NO: 2415691 - RNA, 19 nt, Artificial Sequence
  Description of Artificial Sequence: Synthetic oligonucleotide
gguugagucgcuggaggcu

SEQ ID NO: 2415692 - RNA, 19 nt, Artificial Sequence
  Description of Artificial Sequence: Synthetic oligonucleotide
aggcacugcuucagcuugu

SEQ ID NO: 2415693 - RNA, 19 nt, Artificial Sequence
  Description of Artificial Sequence: Synthetic oligonucleotide
caaaaccgccaugcucgca

SEQ ID NO: 2415694 - RNA, 19 nt, Artificial Sequence
  Description of Artificial Sequence: Synthetic oligonucleotide
ggggcauacugacgcgcuc

SEQ ID NO: 2415695 - RNA, 19 nt, Artificial Sequence
  Description of Artificial Sequence: Synthetic oligonucleotide
cguucgcugcaugauuagc

SEQ ID NO: 2415696 - RNA, 19 nt, Artificial Sequence
  Description of Artificial Sequence: Synthetic oligonucleotide
ccguguuguccaugccagc

SEQ ID NO: 2415697 - RNA, 19 nt, Artificial Sequence
  Description of Artificial Sequence: Synthetic oligonucleotide
cagcgccuccagaagcaaa

SEQ ID NO: 2415698 - RNA, 19 nt, Artificial Sequence
  Description of Artificial Sequence: Synthetic oligonucleotide
cgcaguaugaguggauaca

SEQ ID NO: 2415699 - RNA, 19 nt, Artificial Sequence
  Description of Artificial Sequence: Synthetic oligonucleotide
ccacaacuucaccguguug

SEQ ID NO: 2415700 - RNA, 19 nt, Artificial Sequence
  Description of Artificial Sequence: Synthetic oligonucleotide
gugccacugggguggaaau

SEQ ID NO: 2415701 - RNA, 19 nt, Artificial Sequence
  Description of Artificial Sequence: Synthetic oligonucleotide
cggugaguccgcacauccc

SEQ ID NO: 2415702 - RNA, 19 nt, Artificial Sequence
  Description of Artificial Sequence: Synthetic oligonucleotide
ggcacugcuucagcuuguc

SEQ ID NO: 2415703 - RNA, 19 nt, Artificial Sequence
  Description of Artificial Sequence: Synthetic oligonucleotide
cccuagccugcuguccucc

SEQ ID NO: 2415704 - RNA, 19 nt, Artificial Sequence
  Description of Artificial Sequence: Synthetic oligonucleotide
gccagugucaaccgcuguu

SEQ ID NO: 2415705 - RNA, 19 nt, Artificial Sequence
  Description of Artificial Sequence: Synthetic oligonucleotide
ggucccuggugcccaugga

SEQ ID NO: 2415706 - RNA, 19 nt, Artificial Sequence
  Description of Artificial Sequence: Synthetic oligonucleotide
gggcauacugacgcgcucu

SEQ ID NO: 2415707 - RNA, 19 nt, Artificial Sequence
  Description of Artificial Sequence: Synthetic oligonucleotide
cugacgcgcucuugagacu

SEQ ID NO: 2415708 - RNA, 19 nt, Artificial Sequence
  Description of Artificial Sequence: Synthetic oligonucleotide
ccaugcucgcaguaugagu

SEQ ID NO: 2415709 - RNA, 19 nt, Artificial Sequence
  Description of Artificial Sequence: Synthetic oligonucleotide
ccgacuggucuugucccac

SEQ ID NO: 2415710 - RNA, 19 nt, Artificial Sequence
  Description of Artificial Sequence: Synthetic oligonucleotide
ccgcuguuccaggauggac

SEQ ID NO: 2415711 - RNA, 19 nt, Artificial Sequence
  Description of Artificial Sequence: Synthetic oligonucleotide
gcuccugauucuugcuccu

SEQ ID NO: 2415712 - RNA, 19 nt, Artificial Sequence
  Description of Artificial Sequence: Synthetic oligonucleotide
cccgacggguggaaagaca

SEQ ID NO: 2415713 - RNA, 19 nt, Artificial Sequence
  Description of Artificial Sequence: Synthetic oligonucleotide
guuccaggauggacacugu

SEQ ID NO: 2415714 - RNA, 19 nt, Artificial Sequence
  Description of Artificial Sequence: Synthetic oligonucleotide
gcucuugucuuugccuggu

SEQ ID NO: 2415715 - RNA, 19 nt, Artificial Sequence
  Description of Artificial Sequence: Synthetic oligonucleotide
cccgacuggucuuguccca

SEQ ID NO: 2415716 - RNA, 19 nt, Artificial Sequence
  Description of Artificial Sequence: Synthetic oligonucleotide
cguguuguccaugccagcu

SEQ ID NO: 2415717 - RNA, 19 nt, Artificial Sequence
  Description of Artificial Sequence: Synthetic oligonucleotide
cugcacuguguagcugaua

SEQ ID NO: 2415718 - RNA, 19 nt, Artificial Sequence
  Description of Artificial Sequence: Synthetic oligonucleotide
cgccaugcucgcaguauga

SEQ ID NO: 2415719 - RNA, 19 nt, Artificial Sequence
  Description of Artificial Sequence: Synthetic oligonucleotide
gcacugcuucagcuugucu

SEQ ID NO: 2415720 - RNA, 19 nt, Artificial Sequence
  Description of Artificial Sequence: Synthetic oligonucleotide
ccuaaucaacugagcuccu

SEQ ID NO: 2415721 - RNA, 19 nt, Artificial Sequence
  Description of Artificial Sequence: Synthetic oligonucleotide
ccucugcaccuucacgucu

SEQ ID NO: 2415722 - RNA, 19 nt, Artificial Sequence
  Description of Artificial Sequence: Synthetic oligonucleotide
gccggugaguccgcacauc

SEQ ID NO: 2415723 - RNA, 19 nt, Artificial Sequence
  Description of Artificial Sequence: Synthetic oligonucleotide
ggcugugaugagguaguuu

SEQ ID NO: 2415724 - RNA, 19 nt, Artificial Sequence
  Description of Artificial Sequence: Synthetic oligonucleotide
cgcgcucuugagacugcuc

SEQ ID NO: 2415725 - RNA, 19 nt, Artificial Sequence
  Description of Artificial Sequence: Synthetic oligonucleotide
ccuggugggacaggcaaau

SEQ ID NO: 2415726 - RNA, 19 nt, Artificial Sequence
  Description of Artificial Sequence: Synthetic oligonucleotide
cagcugcggcaaugcaggu

SEQ ID NO: 2415727 - RNA, 19 nt, Artificial Sequence
  Description of Artificial Sequence: Synthetic oligonucleotide
cgccuccagaagcaaaaua

SEQ ID NO: 2415728 - RNA, 19 nt, Artificial Sequence
  Description of Artificial Sequence: Synthetic oligonucleotide
uggcucccucaggggugaa

SEQ ID NO: 2415729 - RNA, 19 nt, Artificial Sequence
  Description of Artificial Sequence: Synthetic oligonucleotide
gccggcccuccaucagguc

SEQ ID NO: 2415730 - RNA, 19 nt, Artificial Sequence
  Description of Artificial Sequence: Synthetic oligonucleotide
gcucgcaguaugaguggau

SEQ ID NO: 2415731 - RNA, 19 nt, Artificial Sequence
  Description of Artificial Sequence: Synthetic oligonucleotide
cuggugggacaggcaaauu

SEQ ID NO: 2415732 - RNA, 19 nt, Artificial Sequence
  Description of Artificial Sequence: Synthetic oligonucleotide
ccuagccugcuguccuccu

SEQ ID NO: 2415733 - RNA, 19 nt, Artificial Sequence
  Description of Artificial Sequence: Synthetic oligonucleotide
gcgccuccagaagcaaaau

SEQ ID NO: 2415734 - RNA, 19 nt, Artificial Sequence
  Description of Artificial Sequence: Synthetic oligonucleotide
cggcaaugcaggugccacu

SEQ ID NO: 2415735 - RNA, 19 nt, Artificial Sequence
  Description of Artificial Sequence: Synthetic oligonucleotide
ggcucccucaggggugaau

SEQ ID NO: 2415736 - RNA, 19 nt, Artificial Sequence
  Description of Artificial Sequence: Synthetic oligonucleotide
ccaucagguccaggaucuu

SEQ ID NO: 2415737 - RNA, 19 nt, Artificial Sequence
  Description of Artificial Sequence: Synthetic oligonucleotide
gaaucuaacacccucacac

SEQ ID NO: 2415738 - RNA, 19 nt, Artificial Sequence
  Description of Artificial Sequence: Synthetic oligonucleotide
ugagcucguacacagaagg

SEQ ID NO: 2415739 - RNA, 19 nt, Artificial Sequence
  Description of Artificial Sequence: Synthetic oligonucleotide
uggguuugcucucugagcg

SEQ ID NO: 2415740 - RNA, 19 nt, Artificial Sequence
  Description of Artificial Sequence: Synthetic oligonucleotide
aaucaggagagcaugguac

SEQ ID NO: 2415741 - RNA, 19 nt, Artificial Sequence
  Description of Artificial Sequence: Synthetic oligonucleotide
aaaguccucaacaaccagc

SEQ ID NO: 2415742 - RNA, 19 nt, Artificial Sequence
  Description of Artificial Sequence: Synthetic oligonucleotide
cacaaaguccucaacaacc

SEQ ID NO: 2415743 - RNA, 19 nt, Artificial Sequence
  Description of Artificial Sequence: Synthetic oligonucleotide
aauggguuugcucucugag

SEQ ID NO: 2415744 - RNA, 19 nt, Artificial Sequence
  Description of Artificial Sequence: Synthetic oligonucleotide
cuggcauaagccuugaggc

SEQ ID NO: 2415745 - RNA, 19 nt, Artificial Sequence
  Description of Artificial Sequence: Synthetic oligonucleotide
accaucuauggacucaagc

SEQ ID NO: 2415746 - RNA, 19 nt, Artificial Sequence
  Description of Artificial Sequence: Synthetic oligonucleotide
uggacucaagcuuagcagg

SEQ ID NO: 2415747 - RNA, 19 nt, Artificial Sequence
  Description of Artificial Sequence: Synthetic oligonucleotide
ucauugguagcacagcaca

SEQ ID NO: 2415748 - RNA, 19 nt, Artificial Sequence
  Description of Artificial Sequence: Synthetic oligonucleotide
aagucaggugcccugauga

SEQ ID NO: 2415749 - RNA, 19 nt, Artificial Sequence
  Description of Artificial Sequence: Synthetic oligonucleotide
agaguuuguauucuggcca

SEQ ID NO: 2415750 - RNA, 19 nt, Artificial Sequence
  Description of Artificial Sequence: Synthetic oligonucleotide
aaguccucaacaaccagcg

SEQ ID NO: 2415751 - RNA, 19 nt, Artificial Sequence
  Description of Artificial Sequence: Synthetic oligonucleotide
accagaguccuucacaaag

SEQ ID NO: 2415752 - RNA, 19 nt, Artificial Sequence
  Description of Artificial Sequence: Synthetic oligonucleotide
cucacacagacauagugag

SEQ ID NO: 2415753 - RNA, 19 nt, Artificial Sequence
  Description of Artificial Sequence: Synthetic oligonucleotide
aucaggagagcaugguacc

SEQ ID NO: 2415754 - RNA, 19 nt, Artificial Sequence
  Description of Artificial Sequence: Synthetic oligonucleotide
agucuuguacccaacgugc

SEQ ID NO: 2415755 - RNA, 19 nt, Artificial Sequence
  Description of Artificial Sequence: Synthetic oligonucleotide
gacauagugaguucagcug

SEQ ID NO: 2415756 - RNA, 19 nt, Artificial Sequence
  Description of Artificial Sequence: Synthetic oligonucleotide
cagacuguagccuuggaac

SEQ ID NO: 2415757 - RNA, 19 nt, Artificial Sequence
  Description of Artificial Sequence: Synthetic oligonucleotide
agugaguucagcuguuguc

SEQ ID NO: 2415758 - RNA, 19 nt, Artificial Sequence
  Description of Artificial Sequence: Synthetic oligonucleotide
uuguauucuggccagugac

SEQ ID NO: 2415759 - RNA, 19 nt, Artificial Sequence
  Description of Artificial Sequence: Synthetic oligonucleotide
acgugcauuguucucaguc

SEQ ID NO: 2415760 - RNA, 19 nt, Artificial Sequence
  Description of Artificial Sequence: Synthetic oligonucleotide
acguccacaaaguccaugg

SEQ ID NO: 2415761 - RNA, 19 nt, Artificial Sequence
  Description of Artificial Sequence: Synthetic oligonucleotide
aauggcacaaauggguuug

SEQ ID NO: 2415762 - RNA, 19 nt, Artificial Sequence
  Description of Artificial Sequence: Synthetic oligonucleotide
auggacucaagcuuagcag

SEQ ID NO: 2415763 - RNA, 19 nt, Artificial Sequence
  Description of Artificial Sequence: Synthetic oligonucleotide
uagaguuuguauucuggcc

SEQ ID NO: 2415764 - RNA, 19 nt, Artificial Sequence
  Description of Artificial Sequence: Synthetic oligonucleotide
ucaacaaccagcggcaggc

SEQ ID NO: 2415765 - RNA, 19 nt, Artificial Sequence
  Description of Artificial Sequence: Synthetic oligonucleotide
agcucguacacagaaggcc

SEQ ID NO: 2415766 - RNA, 19 nt, Artificial Sequence
  Description of Artificial Sequence: Synthetic oligonucleotide
aguuacuuccggcugccac

SEQ ID NO: 2415767 - RNA, 19 nt, Artificial Sequence
  Description of Artificial Sequence: Synthetic oligonucleotide
uguauucuggccagugacc

SEQ ID NO: 2415768 - RNA, 19 nt, Artificial Sequence
  Description of Artificial Sequence: Synthetic oligonucleotide
aaucuaacacccucacaca

SEQ ID NO: 2415769 - RNA, 19 nt, Artificial Sequence
  Description of Artificial Sequence: Synthetic oligonucleotide
auggguuugcucucugagc

SEQ ID NO: 2415770 - RNA, 19 nt, Artificial Sequence
  Description of Artificial Sequence: Synthetic oligonucleotide
agacauagugaguucagcu

SEQ ID NO: 2415771 - RNA, 19 nt, Artificial Sequence
  Description of Artificial Sequence: Synthetic oligonucleotide
guagaguuuguauucuggc

SEQ ID NO: 2415772 - RNA, 19 nt, Artificial Sequence
  Description of Artificial Sequence: Synthetic oligonucleotide
acacagaaggcccugucag

SEQ ID NO: 2415773 - RNA, 19 nt, Artificial Sequence
  Description of Artificial Sequence: Synthetic oligonucleotide
ucaggugcccugaugagcu

SEQ ID NO: 2415774 - RNA, 19 nt, Artificial Sequence
  Description of Artificial Sequence: Synthetic oligonucleotide
guccucaacaaccagcggc

SEQ ID NO: 2415775 - RNA, 19 nt, Artificial Sequence
  Description of Artificial Sequence: Synthetic oligonucleotide
ucaagcuuagcagggcugg

SEQ ID NO: 2415776 - RNA, 19 nt, Artificial Sequence
  Description of Artificial Sequence: Synthetic oligonucleotide
aguagaguuuguauucugg

SEQ ID NO: 2415777 - RNA, 19 nt, Artificial Sequence
  Description of Artificial Sequence: Synthetic oligonucleotide
uccucaacaaccagcggca

SEQ ID NO: 2415778 - RNA, 19 nt, Artificial Sequence
  Description of Artificial Sequence: Synthetic oligonucleotide
ugcaguauccgagccaggg

SEQ ID NO: 2415779 - RNA, 19 nt, Artificial Sequence
  Description of Artificial Sequence: Synthetic oligonucleotide
ugcauuguucucagucacg

SEQ ID NO: 2415780 - RNA, 19 nt, Artificial Sequence
  Description of Artificial Sequence: Synthetic oligonucleotide
agacaggcaggccuguugg

SEQ ID NO: 2415781 - RNA, 19 nt, Artificial Sequence
  Description of Artificial Sequence: Synthetic oligonucleotide
uccaaguuacuuccggcug

SEQ ID NO: 2415782 - RNA, 19 nt, Artificial Sequence
  Description of Artificial Sequence: Synthetic oligonucleotide
ugggcugacacaccuucgg

SEQ ID NO: 2415783 - RNA, 19 nt, Artificial Sequence
  Description of Artificial Sequence: Synthetic oligonucleotide
ucagucacguccacaaagu

SEQ ID NO: 2415784 - RNA, 19 nt, Artificial Sequence
  Description of Artificial Sequence: Synthetic oligonucleotide
guagccuuggaacacccag

SEQ ID NO: 2415785 - RNA, 19 nt, Artificial Sequence
  Description of Artificial Sequence: Synthetic oligonucleotide
ucuauggacucaagcuuag

SEQ ID NO: 2415786 - RNA, 19 nt, Artificial Sequence
  Description of Artificial Sequence: Synthetic oligonucleotide
cacaauugucuguaacucc

SEQ ID NO: 2415787 - RNA, 19 nt, Artificial Sequence
  Description of Artificial Sequence: Synthetic oligonucleotide
cucagucacguccacaaag

SEQ ID NO: 2415788 - RNA, 19 nt, Artificial Sequence
  Description of Artificial Sequence: Synthetic oligonucleotide
ucuaacacccucacacaga

SEQ ID NO: 2415789 - RNA, 19 nt, Artificial Sequence
  Description of Artificial Sequence: Synthetic oligonucleotide
cuaacacccucacacagac

SEQ ID NO: 2415790 - RNA, 19 nt, Artificial Sequence
  Description of Artificial Sequence: Synthetic oligonucleotide
auugguagcacagcacagg

SEQ ID NO: 2415791 - RNA, 19 nt, Artificial Sequence
  Description of Artificial Sequence: Synthetic oligonucleotide
uggcauaagccuugaggcg

SEQ ID NO: 2415792 - RNA, 19 nt, Artificial Sequence
  Description of Artificial Sequence: Synthetic oligonucleotide
ugaggcggaagucuuguac

SEQ ID NO: 2415793 - RNA, 19 nt, Artificial Sequence
  Description of Artificial Sequence: Synthetic oligonucleotide
ugugaagcaguggaagaag

SEQ ID NO: 2415794 - RNA, 19 nt, Artificial Sequence
  Description of Artificial Sequence: Synthetic oligonucleotide
aggaucagggacagcaucc

SEQ ID NO: 2415795 - RNA, 19 nt, Artificial Sequence
  Description of Artificial Sequence: Synthetic oligonucleotide
gaggcggaagucuuguacc

SEQ ID NO: 2415796 - RNA, 19 nt, Artificial Sequence
  Description of Artificial Sequence: Synthetic oligonucleotide
agggcagcaacaccauggc

SEQ ID NO: 2415797 - RNA, 19 nt, Artificial Sequence
  Description of Artificial Sequence: Synthetic oligonucleotide
aaagucaggugcccugaug

SEQ ID NO: 2415798 - RNA, 19 nt, Artificial Sequence
  Description of Artificial Sequence: Synthetic oligonucleotide
aacaaccagcggcaggcag

SEQ ID NO: 2415799 - RNA, 19 nt, Artificial Sequence
  Description of Artificial Sequence: Synthetic oligonucleotide
ugaagccagcaccagaguc

SEQ ID NO: 2415800 - RNA, 19 nt, Artificial Sequence
  Description of Artificial Sequence: Synthetic oligonucleotide
uucagcuguugucucuagg

SEQ ID NO: 2415801 - RNA, 19 nt, Artificial Sequence
  Description of Artificial Sequence: Synthetic oligonucleotide
uagccuuggaacacccagg

SEQ ID NO: 2415802 - RNA, 19 nt, Artificial Sequence
  Description of Artificial Sequence: Synthetic oligonucleotide
acugcuggcaaggucaguc

SEQ ID NO: 2415803 - RNA, 19 nt, Artificial Sequence
  Description of Artificial Sequence: Synthetic oligonucleotide
uagguugaaggcagcacug

SEQ ID NO: 2415804 - RNA, 19 nt, Artificial Sequence
  Description of Artificial Sequence: Synthetic oligonucleotide
cagcauccaaguuacuucc

SEQ ID NO: 2415805 - RNA, 19 nt, Artificial Sequence
  Description of Artificial Sequence: Synthetic oligonucleotide
aggcggaagucuuguaccc

SEQ ID NO: 2415806 - RNA, 19 nt, Artificial Sequence
  Description of Artificial Sequence: Synthetic oligonucleotide
uacacagaaggcccuguca

SEQ ID NO: 2415807 - RNA, 19 nt, Artificial Sequence
  Description of Artificial Sequence: Synthetic oligonucleotide
gaugagcucguacacagaa

SEQ ID NO: 2415808 - RNA, 19 nt, Artificial Sequence
  Description of Artificial Sequence: Synthetic oligonucleotide
gaagccagcaccagagucc

SEQ ID NO: 2415809 - RNA, 19 nt, Artificial Sequence
  Description of Artificial Sequence: Synthetic oligonucleotide
guccacaaaguccauggcc

SEQ ID NO: 2415810 - RNA, 19 nt, Artificial Sequence
  Description of Artificial Sequence: Synthetic oligonucleotide
ucacaauugucuguaacuc

SEQ ID NO: 2415811 - RNA, 19 nt, Artificial Sequence
  Description of Artificial Sequence: Synthetic oligonucleotide
agaguccuucacaaagucc

SEQ ID NO: 2415812 - RNA, 19 nt, Artificial Sequence
  Description of Artificial Sequence: Synthetic oligonucleotide
agugugaagcaguggaaga

SEQ ID NO: 2415813 - RNA, 19 nt, Artificial Sequence
  Description of Artificial Sequence: Synthetic oligonucleotide
agagcaugguaccgggcac

SEQ ID NO: 2415814 - RNA, 19 nt, Artificial Sequence
  Description of Artificial Sequence: Synthetic oligonucleotide
acaauugucuguaacucca

SEQ ID NO: 2415815 - RNA, 19 nt, Artificial Sequence
  Description of Artificial Sequence: Synthetic oligonucleotide
aggccuguugggcagccgc

SEQ ID NO: 2415816 - RNA, 19 nt, Artificial Sequence
  Description of Artificial Sequence: Synthetic oligonucleotide
auccaaguuacuuccggcu

SEQ ID NO: 2415817 - RNA, 19 nt, Artificial Sequence
  Description of Artificial Sequence: Synthetic oligonucleotide
auucuggccagugaccagg

SEQ ID NO: 2415818 - RNA, 19 nt, Artificial Sequence
  Description of Artificial Sequence: Synthetic oligonucleotide
agcagggcuggcauaagcc

SEQ ID NO: 2415819 - RNA, 19 nt, Artificial Sequence
  Description of Artificial Sequence: Synthetic oligonucleotide
uuguucucagucacgucca

SEQ ID NO: 2415820 - RNA, 19 nt, Artificial Sequence
  Description of Artificial Sequence: Synthetic oligonucleotide
ugacacaccuucggaagcg

SEQ ID NO: 2415821 - RNA, 19 nt, Artificial Sequence
  Description of Artificial Sequence: Synthetic oligonucleotide
acacccaggaccugucuuc

SEQ ID NO: 2415822 - RNA, 19 nt, Artificial Sequence
  Description of Artificial Sequence: Synthetic oligonucleotide
gguagcacagcacagggca

SEQ ID NO: 2415823 - RNA, 19 nt, Artificial Sequence
  Description of Artificial Sequence: Synthetic oligonucleotide
aagcaguggaagaaggacu

SEQ ID NO: 2415824 - RNA, 19 nt, Artificial Sequence
  Description of Artificial Sequence: Synthetic oligonucleotide
agggacagcauccaaguua

SEQ ID NO: 2415825 - RNA, 19 nt, Artificial Sequence
  Description of Artificial Sequence: Synthetic oligonucleotide
agacuguagccuuggaaca

SEQ ID NO: 2415826 - RNA, 19 nt, Artificial Sequence
  Description of Artificial Sequence: Synthetic oligonucleotide
gccaccuguagguugaagg

SEQ ID NO: 2415827 - RNA, 19 nt, Artificial Sequence
  Description of Artificial Sequence: Synthetic oligonucleotide
caguauccgagccagggac

SEQ ID NO: 2415828 - RNA, 19 nt, Artificial Sequence
  Description of Artificial Sequence: Synthetic oligonucleotide
uucccagaacccauauggc

SEQ ID NO: 2415829 - RNA, 19 nt, Artificial Sequence
  Description of Artificial Sequence: Synthetic oligonucleotide
ucacuggcacugaagccag

SEQ ID NO: 2415830 - RNA, 19 nt, Artificial Sequence
  Description of Artificial Sequence: Synthetic oligonucleotide
gagagcaugguaccgggca

SEQ ID NO: 2415831 - RNA, 19 nt, Artificial Sequence
  Description of Artificial Sequence: Synthetic oligonucleotide
agcuguugucucuaggcca

SEQ ID NO: 2415832 - RNA, 19 nt, Artificial Sequence
  Description of Artificial Sequence: Synthetic oligonucleotide
ggcaaggucagucagggca

SEQ ID NO: 2415833 - RNA, 19 nt, Artificial Sequence
  Description of Artificial Sequence: Synthetic oligonucleotide
uuguacccaacgugcauug

SEQ ID NO: 2415834 - RNA, 19 nt, Artificial Sequence
  Description of Artificial Sequence: Synthetic oligonucleotide
ucaggagagcaugguaccg

SEQ ID NO: 2415835 - RNA, 19 nt, Artificial Sequence
  Description of Artificial Sequence: Synthetic oligonucleotide
cauugguagcacagcacag

SEQ ID NO: 2415836 - RNA, 19 nt, Artificial Sequence
  Description of Artificial Sequence: Synthetic oligonucleotide
uaccgggcaccaucuaugg

SEQ ID NO: 2415837 - RNA, 19 nt, Artificial Sequence
  Description of Artificial Sequence: Synthetic oligonucleotide
ugagcggaagugcugcagu

SEQ ID NO: 2415838 - RNA, 19 nt, Artificial Sequence
  Description of Artificial Sequence: Synthetic oligonucleotide
agcaccagaguccuucaca

SEQ ID NO: 2415839 - RNA, 19 nt, Artificial Sequence
  Description of Artificial Sequence: Synthetic oligonucleotide
acaugcacagcauccggcu

SEQ ID NO: 2415840 - RNA, 19 nt, Artificial Sequence
  Description of Artificial Sequence: Synthetic oligonucleotide
ggcauaagccuugaggcgg

SEQ ID NO: 2415841 - RNA, 19 nt, Artificial Sequence
  Description of Artificial Sequence: Synthetic oligonucleotide
cacaugcacagcauccggc

SEQ ID NO: 2415842 - RNA, 19 nt, Artificial Sequence
  Description of Artificial Sequence: Synthetic oligonucleotide
acucaagcuuagcagggcu

SEQ ID NO: 2415843 - RNA, 19 nt, Artificial Sequence
  Description of Artificial Sequence: Synthetic oligonucleotide
cuucauugguagcacagca

SEQ ID NO: 2415844 - RNA, 19 nt, Artificial Sequence
  Description of Artificial Sequence: Synthetic oligonucleotide
ugucagacuguagccuugg

SEQ ID NO: 2415845 - RNA, 19 nt, Artificial Sequence
  Description of Artificial Sequence: Synthetic oligonucleotide
cacccucacacagacauag

SEQ ID NO: 2415846 - RNA, 19 nt, Artificial Sequence
  Description of Artificial Sequence: Synthetic oligonucleotide
agggguggccaccuguagg

SEQ ID NO: 2415847 - RNA, 19 nt, Artificial Sequence
  Description of Artificial Sequence: Synthetic oligonucleotide
gaguccuucacaaaguccu

SEQ ID NO: 2415848 - RNA, 19 nt, Artificial Sequence
  Description of Artificial Sequence: Synthetic oligonucleotide
caugguaccgggcaccauc

SEQ ID NO: 2415849 - RNA, 19 nt, Artificial Sequence
  Description of Artificial Sequence: Synthetic oligonucleotide
acaccauggccaauggcac

SEQ ID NO: 2415850 - RNA, 19 nt, Artificial Sequence
  Description of Artificial Sequence: Synthetic oligonucleotide
cacagcauccggcucacug

SEQ ID NO: 2415851 - RNA, 19 nt, Artificial Sequence
  Description of Artificial Sequence: Synthetic oligonucleotide
caguggaagaaggacuggg

SEQ ID NO: 2415852 - RNA, 19 nt, Artificial Sequence
  Description of Artificial Sequence: Synthetic oligonucleotide
guuacuuccggcugccaca

SEQ ID NO: 2415853 - RNA, 19 nt, Artificial Sequence
  Description of Artificial Sequence: Synthetic oligonucleotide
cucaacaaccagcggcagg

SEQ ID NO: 2415854 - RNA, 19 nt, Artificial Sequence
  Description of Artificial Sequence: Synthetic oligonucleotide
ucuuguacccaacgugcau

SEQ ID NO: 2415855 - RNA, 19 nt, Artificial Sequence
  Description of Artificial Sequence: Synthetic oligonucleotide
agcaguggaagaaggacug

SEQ ID NO: 2415856 - RNA, 19 nt, Artificial Sequence
  Description of Artificial Sequence: Synthetic oligonucleotide
cagcugggaaucaggagag

SEQ ID NO: 2415857 - RNA, 19 nt, Artificial Sequence
  Description of Artificial Sequence: Synthetic oligonucleotide
uagcagggcuggcauaagc

SEQ ID NO: 2415858 - RNA, 19 nt, Artificial Sequence
  Description of Artificial Sequence: Synthetic oligonucleotide
gaacaguagaguuuguauu

SEQ ID NO: 2415859 - RNA, 19 nt, Artificial Sequence
  Description of Artificial Sequence: Synthetic oligonucleotide
acaaaguccucaacaacca

SEQ ID NO: 2415860 - RNA, 19 nt, Artificial Sequence
  Description of Artificial Sequence: Synthetic oligonucleotide
gcugacacaccuucggaag

SEQ ID NO: 2415861 - RNA, 19 nt, Artificial Sequence
  Description of Artificial Sequence: Synthetic oligonucleotide
cagugugaagcaguggaag

SEQ ID NO: 2415862 - RNA, 19 nt, Artificial Sequence
  Description of Artificial Sequence: Synthetic oligonucleotide
agccuuggaacacccagga

SEQ ID NO: 2415863 - RNA, 19 nt, Artificial Sequence
  Description of Artificial Sequence: Synthetic oligonucleotide
ucucugagcggaagugcug

SEQ ID NO: 2415864 - RNA, 19 nt, Artificial Sequence
  Description of Artificial Sequence: Synthetic oligonucleotide
cagggaaucuaacacccuc

SEQ ID NO: 2415865 - RNA, 19 nt, Artificial Sequence
  Description of Artificial Sequence: Synthetic oligonucleotide
ggcaggcaaagucaggugc

SEQ ID NO: 2415866 - RNA, 19 nt, Artificial Sequence
  Description of Artificial Sequence: Synthetic oligonucleotide
cagguggcgguccagcacc

SEQ ID NO: 2415867 - RNA, 19 nt, Artificial Sequence
  Description of Artificial Sequence: Synthetic oligonucleotide
augcacagcauccggcuca

SEQ ID NO: 2415868 - RNA, 19 nt, Artificial Sequence
  Description of Artificial Sequence: Synthetic oligonucleotide
cucacaauugucuguaacu

SEQ ID NO: 2415869 - RNA, 19 nt, Artificial Sequence
  Description of Artificial Sequence: Synthetic oligonucleotide
uugggcagccgcuccgacg

SEQ ID NO: 2415870 - RNA, 19 nt, Artificial Sequence
  Description of Artificial Sequence: Synthetic oligonucleotide
acaaccagcggcaggcagg

SEQ ID NO: 2415871 - RNA, 19 nt, Artificial Sequence
  Description of Artificial Sequence: Synthetic oligonucleotide
cucaagcuuagcagggcug

SEQ ID NO: 2415872 - RNA, 19 nt, Artificial Sequence
  Description of Artificial Sequence: Synthetic oligonucleotide
ucacacagacauagugagu

SEQ ID NO: 2415873 - RNA, 19 nt, Artificial Sequence
  Description of Artificial Sequence: Synthetic oligonucleotide
ucggaagcgccgcuggcca

SEQ ID NO: 2415874 - RNA, 19 nt, Artificial Sequence
  Description of Artificial Sequence: Synthetic oligonucleotide
ugguagcacagcacagggc

SEQ ID NO: 2415875 - RNA, 19 nt, Artificial Sequence
  Description of Artificial Sequence: Synthetic oligonucleotide
ugcugcaguauccgagcca

SEQ ID NO: 2415876 - RNA, 19 nt, Artificial Sequence
  Description of Artificial Sequence: Synthetic oligonucleotide
gaaucaggagagcauggua

SEQ ID NO: 2415877 - RNA, 19 nt, Artificial Sequence
  Description of Artificial Sequence: Synthetic oligonucleotide
gaagucuuguacccaacgu

SEQ ID NO: 2415878 - RNA, 19 nt, Artificial Sequence
  Description of Artificial Sequence: Synthetic oligonucleotide
guagguugaaggcagcacu

SEQ ID NO: 2415879 - RNA, 19 nt, Artificial Sequence
  Description of Artificial Sequence: Synthetic oligonucleotide
ugaguucagcuguugucuc

SEQ ID NO: 2415880 - RNA, 19 nt, Artificial Sequence
  Description of Artificial Sequence: Synthetic oligonucleotide
acaguagaguuuguauucu

SEQ ID NO: 2415881 - RNA, 19 nt, Artificial Sequence
  Description of Artificial Sequence: Synthetic oligonucleotide
gcaggaacaguagaguuug

SEQ ID NO: 2415882 - RNA, 19 nt, Artificial Sequence
  Description of Artificial Sequence: Synthetic oligonucleotide
uggccagugugaagcagug

SEQ ID NO: 2415883 - RNA, 19 nt, Artificial Sequence
  Description of Artificial Sequence: Synthetic oligonucleotide
cucugagcggaagugcugc

SEQ ID NO: 2415884 - RNA, 19 nt, Artificial Sequence
  Description of Artificial Sequence: Synthetic oligonucleotide
cuuccggcugccacagagg

SEQ ID NO: 2415885 - RNA, 19 nt, Artificial Sequence
  Description of Artificial Sequence: Synthetic oligonucleotide
caacgugcauuguucucag

SEQ ID NO: 2415886 - RNA, 19 nt, Artificial Sequence
  Description of Artificial Sequence: Synthetic oligonucleotide
guugucucuaggccaccag

SEQ ID NO: 2415887 - RNA, 19 nt, Artificial Sequence
  Description of Artificial Sequence: Synthetic oligonucleotide
caguagaguuuguauucug

SEQ ID NO: 2415888 - RNA, 19 nt, Artificial Sequence
  Description of Artificial Sequence: Synthetic oligonucleotide
cacaaauggguuugcucuc

SEQ ID NO: 2415889 - RNA, 19 nt, Artificial Sequence
  Description of Artificial Sequence: Synthetic oligonucleotide
gacaggcaggccuguuggg

SEQ ID NO: 2415890 - RNA, 19 nt, Artificial Sequence
  Description of Artificial Sequence: Synthetic oligonucleotide
acagacauagugaguucag

SEQ ID NO: 2415891 - RNA, 19 nt, Artificial Sequence
  Description of Artificial Sequence: Synthetic oligonucleotide
aagccagcaccagaguccu

SEQ ID NO: 2415892 - RNA, 19 nt, Artificial Sequence
  Description of Artificial Sequence: Synthetic oligonucleotide
ggaagugcugcaguauccg

SEQ ID NO: 2415893 - RNA, 19 nt, Artificial Sequence
  Description of Artificial Sequence: Synthetic oligonucleotide
ugcccugaugagcucguac

SEQ ID NO: 2415894 - RNA, 19 nt, Artificial Sequence
  Description of Artificial Sequence: Synthetic oligonucleotide
aguccucaacaaccagcgg

SEQ ID NO: 2415895 - RNA, 19 nt, Artificial Sequence
  Description of Artificial Sequence: Synthetic oligonucleotide
ugaugagcucguacacaga

SEQ ID NO: 2415896 - RNA, 19 nt, Artificial Sequence
  Description of Artificial Sequence: Synthetic oligonucleotide
cuguagccuuggaacaccc

SEQ ID NO: 2415897 - RNA, 19 nt, Artificial Sequence
  Description of Artificial Sequence: Synthetic oligonucleotide
caggagagcaugguaccgg

SEQ ID NO: 2415898 - RNA, 19 nt, Artificial Sequence
  Description of Artificial Sequence: Synthetic oligonucleotide
aggaccugucuucauuggu

SEQ ID NO: 2415899 - RNA, 19 nt, Artificial Sequence
  Description of Artificial Sequence: Synthetic oligonucleotide
aagcuuagcagggcuggca

SEQ ID NO: 2415900 - RNA, 19 nt, Artificial Sequence
  Description of Artificial Sequence: Synthetic oligonucleotide
cagacauagugaguucagc

SEQ ID NO: 2415901 - RNA, 19 nt, Artificial Sequence
  Description of Artificial Sequence: Synthetic oligonucleotide
uucggaagcgccgcuggcc

SEQ ID NO: 2415902 - RNA, 19 nt, Artificial Sequence
  Description of Artificial Sequence: Synthetic oligonucleotide
gcacaaauggguuugcucu

SEQ ID NO: 2415903 - RNA, 19 nt, Artificial Sequence
  Description of Artificial Sequence: Synthetic oligonucleotide
gguucuggacagcaggaac

SEQ ID NO: 2415904 - RNA, 19 nt, Artificial Sequence
  Description of Artificial Sequence: Synthetic oligonucleotide
ggucagucagggcaccagg

SEQ ID NO: 2415905 - RNA, 19 nt, Artificial Sequence
  Description of Artificial Sequence: Synthetic oligonucleotide
agcuuagcagggcuggcau

SEQ ID NO: 2415906 - RNA, 19 nt, Artificial Sequence
  Description of Artificial Sequence: Synthetic oligonucleotide
gacuguagccuuggaacac

SEQ ID NO: 2415907 - RNA, 19 nt, Artificial Sequence
  Description of Artificial Sequence: Synthetic oligonucleotide
gguugaaggcagcacuggc

SEQ ID NO: 2415908 - RNA, 19 nt, Artificial Sequence
  Description of Artificial Sequence: Synthetic oligonucleotide
ccaccuguagguugaaggc

SEQ ID NO: 2415909 - RNA, 19 nt, Artificial Sequence
  Description of Artificial Sequence: Synthetic oligonucleotide
gacucaagcuuagcagggc

SEQ ID NO: 2415910 - RNA, 19 nt, Artificial Sequence
  Description of Artificial Sequence: Synthetic oligonucleotide
cauauggcagcucacaauu

SEQ ID NO: 2415911 - RNA, 19 nt, Artificial Sequence
  Description of Artificial Sequence: Synthetic oligonucleotide
cagcauccggcucacuggc

SEQ ID NO: 2415912 - RNA, 19 nt, Artificial Sequence
  Description of Artificial Sequence: Synthetic oligonucleotide
acacaccuucggaagcgcc

SEQ ID NO: 2415913 - RNA, 19 nt, Artificial Sequence
  Description of Artificial Sequence: Synthetic oligonucleotide
acaaauggguuugcucucu

SEQ ID NO: 2415914 - RNA, 19 nt, Artificial Sequence
  Description of Artificial Sequence: Synthetic oligonucleotide
gcugcaguauccgagccag

SEQ ID NO: 2415915 - RNA, 19 nt, Artificial Sequence
  Description of Artificial Sequence: Synthetic oligonucleotide
caacaccauggccaauggc

SEQ ID NO: 2415916 - RNA, 19 nt, Artificial Sequence
  Description of Artificial Sequence: Synthetic oligonucleotide
auagugaguucagcuguug

SEQ ID NO: 2415917 - RNA, 19 nt, Artificial Sequence
  Description of Artificial Sequence: Synthetic oligonucleotide
accagcggcaggcaggcaa

SEQ ID NO: 2415918 - RNA, 19 nt, Artificial Sequence
  Description of Artificial Sequence: Synthetic oligonucleotide
acccaacgugcauuguucu

SEQ ID NO: 2415919 - RNA, 19 nt, Artificial Sequence
  Description of Artificial Sequence: Synthetic oligonucleotide
aucuauggacucaagcuua

SEQ ID NO: 2415920 - RNA, 19 nt, Artificial Sequence
  Description of Artificial Sequence: Synthetic oligonucleotide
cugggcugacacaccuucg

SEQ ID NO: 2415921 - RNA, 19 nt, Artificial Sequence
  Description of Artificial Sequence: Synthetic oligonucleotide
guaccgggcaccaucuaug

SEQ ID NO: 2415922 - RNA, 19 nt, Artificial Sequence
  Description of Artificial Sequence: Synthetic oligonucleotide
ggacucaagcuuagcaggg

SEQ ID NO: 2415923 - RNA, 19 nt, Artificial Sequence
  Description of Artificial Sequence: Synthetic oligonucleotide
guauccgagccagggaccc

SEQ ID NO: 2415924 - RNA, 19 nt, Artificial Sequence
  Description of Artificial Sequence: Synthetic oligonucleotide
auccgagccagggacccac

SEQ ID NO: 2415925 - RNA, 19 nt, Artificial Sequence
  Description of Artificial Sequence: Synthetic oligonucleotide
gggacagcauccaaguuac

SEQ ID NO: 2415926 - RNA, 19 nt, Artificial Sequence
  Description of Artificial Sequence: Synthetic oligonucleotide
agggaaucuaacacccuca

SEQ ID NO: 2415927 - RNA, 19 nt, Artificial Sequence
  Description of Artificial Sequence: Synthetic oligonucleotide
uguugucucuaggccacca

SEQ ID NO: 2415928 - RNA, 19 nt, Artificial Sequence
  Description of Artificial Sequence: Synthetic oligonucleotide
ccgggcaccaucuauggac

SEQ ID NO: 2415929 - RNA, 19 nt, Artificial Sequence
  Description of Artificial Sequence: Synthetic oligonucleotide
gagcucguacacagaaggc

SEQ ID NO: 2415930 - RNA, 19 nt, Artificial Sequence
  Description of Artificial Sequence: Synthetic oligonucleotide
aggugcccugaugagcucg

SEQ ID NO: 2415931 - RNA, 19 nt, Artificial Sequence
  Description of Artificial Sequence: Synthetic oligonucleotide
cacagacauagugaguuca

SEQ ID NO: 2415932 - RNA, 19 nt, Artificial Sequence
  Description of Artificial Sequence: Synthetic oligonucleotide
gaaggacugggcugacaca

SEQ ID NO: 2415933 - RNA, 19 nt, Artificial Sequence
  Description of Artificial Sequence: Synthetic oligonucleotide
cauuguucucagucacguc

SEQ ID NO: 2415934 - RNA, 19 nt, Artificial Sequence
  Description of Artificial Sequence: Synthetic oligonucleotide
ggcaaagucaggugcccug

SEQ ID NO: 2415935 - RNA, 19 nt, Artificial Sequence
  Description of Artificial Sequence: Synthetic oligonucleotide
cugucagacuguagccuug

SEQ ID NO: 2415936 - RNA, 19 nt, Artificial Sequence
  Description of Artificial Sequence: Synthetic oligonucleotide
gcucguacacagaaggccc

SEQ ID NO: 2415937 - RNA, 19 nt, Artificial Sequence
  Description of Artificial Sequence: Synthetic oligonucleotide
agcauccaaguuacuuccg

SEQ ID NO: 2415938 - RNA, 19 nt, Artificial Sequence
  Description of Artificial Sequence: Synthetic oligonucleotide
auaagccuugaggcggaag

SEQ ID NO: 2415939 - RNA, 19 nt, Artificial Sequence
  Description of Artificial Sequence: Synthetic oligonucleotide
aacgugcauuguucucagu

SEQ ID NO: 2415940 - RNA, 19 nt, Artificial Sequence
  Description of Artificial Sequence: Synthetic oligonucleotide
gagcaugguaccgggcacc

SEQ ID NO: 2415941 - RNA, 19 nt, Artificial Sequence
  Description of Artificial Sequence: Synthetic oligonucleotide
gcucacaauugucuguaac

SEQ ID NO: 2415942 - RNA, 19 nt, Artificial Sequence
  Description of Artificial Sequence: Synthetic oligonucleotide
cuguugggcagccgcuccg

SEQ ID NO: 2415943 - RNA, 19 nt, Artificial Sequence
  Description of Artificial Sequence: Synthetic oligonucleotide
gggaaucuaacacccucac

SEQ ID NO: 2415944 - RNA, 19 nt, Artificial Sequence
  Description of Artificial Sequence: Synthetic oligonucleotide
ggaacaguagaguuuguau

SEQ ID NO: 2415945 - RNA, 19 nt, Artificial Sequence
  Description of Artificial Sequence: Synthetic oligonucleotide
cuuagcagggcuggcauaa

SEQ ID NO: 2415946 - RNA, 19 nt, Artificial Sequence
  Description of Artificial Sequence: Synthetic oligonucleotide
uaacacccucacacagaca

SEQ ID NO: 2415947 - RNA, 19 nt, Artificial Sequence
  Description of Artificial Sequence: Synthetic oligonucleotide
augagcucguacacagaag

SEQ ID NO: 2415948 - RNA, 19 nt, Artificial Sequence
  Description of Artificial Sequence: Synthetic oligonucleotide
gggaaucaggagagcaugg

SEQ ID NO: 2415949 - RNA, 19 nt, Artificial Sequence
  Description of Artificial Sequence: Synthetic oligonucleotide
agccuugaggcggaagucu

SEQ ID NO: 2415950 - RNA, 19 nt, Artificial Sequence
  Description of Artificial Sequence: Synthetic oligonucleotide
aagaaggacugggcugaca

SEQ ID NO: 2415951 - RNA, 19 nt, Artificial Sequence
  Description of Artificial Sequence: Synthetic oligonucleotide
auauggcagcucacaauug

SEQ ID NO: 2415952 - RNA, 19 nt, Artificial Sequence
  Description of Artificial Sequence: Synthetic oligonucleotide
caaccagcggcaggcaggc

SEQ ID NO: 2415953 - RNA, 19 nt, Artificial Sequence
  Description of Artificial Sequence: Synthetic oligonucleotide
aggaacaguagaguuugua

SEQ ID NO: 2415954 - RNA, 19 nt, Artificial Sequence
  Description of Artificial Sequence: Synthetic oligonucleotide
agaacccauauggcagcuc

SEQ ID NO: 2415955 - RNA, 19 nt, Artificial Sequence
  Description of Artificial Sequence: Synthetic oligonucleotide
cuauggacucaagcuuagc

SEQ ID NO: 2415956 - RNA, 19 nt, Artificial Sequence
  Description of Artificial Sequence: Synthetic oligonucleotide
ccagaacccauauggcagc

SEQ ID NO: 2415957 - RNA, 19 nt, Artificial Sequence
  Description of Artificial Sequence: Synthetic oligonucleotide
agcaggaacaguagaguuu

SEQ ID NO: 2415958 - RNA, 19 nt, Artificial Sequence
  Description of Artificial Sequence: Synthetic oligonucleotide
gacacaccuucggaagcgc

SEQ ID NO: 2415959 - RNA, 19 nt, Artificial Sequence
  Description of Artificial Sequence: Synthetic oligonucleotide
ucguacacagaaggcccug

SEQ ID NO: 2415960 - RNA, 19 nt, Artificial Sequence
  Description of Artificial Sequence: Synthetic oligonucleotide
agcugggaaucaggagagc

SEQ ID NO: 2415961 - RNA, 19 nt, Artificial Sequence
  Description of Artificial Sequence: Synthetic oligonucleotide
gugcugcaguauccgagcc

SEQ ID NO: 2415962 - RNA, 19 nt, Artificial Sequence
  Description of Artificial Sequence: Synthetic oligonucleotide
ccaggaccugucuucauug

SEQ ID NO: 2415963 - RNA, 19 nt, Artificial Sequence
  Description of Artificial Sequence: Synthetic oligonucleotide
uuagcagggcuggcauaag

SEQ ID NO: 2415964 - RNA, 19 nt, Artificial Sequence
  Description of Artificial Sequence: Synthetic oligonucleotide
accauggccaauggcacaa

SEQ ID NO: 2415965 - RNA, 19 nt, Artificial Sequence
  Description of Artificial Sequence: Synthetic oligonucleotide
caggcaaagucaggugccc

SEQ ID NO: 2415966 - RNA, 19 nt, Artificial Sequence
  Description of Artificial Sequence: Synthetic oligonucleotide
caucuauggacucaagcuu

SEQ ID NO: 2415967 - RNA, 19 nt, Artificial Sequence
  Description of Artificial Sequence: Synthetic oligonucleotide
gacagcauccaaguuacuu

SEQ ID NO: 2415968 - RNA, 19 nt, Artificial Sequence
  Description of Artificial Sequence: Synthetic oligonucleotide
aggucagucagggcaccag

SEQ ID NO: 2415969 - RNA, 19 nt, Artificial Sequence
  Description of Artificial Sequence: Synthetic oligonucleotide
gugugaagcaguggaagaa

SEQ ID NO: 2415970 - RNA, 19 nt, Artificial Sequence
  Description of Artificial Sequence: Synthetic oligonucleotide
cagcaccacaugcacagca

SEQ ID NO: 2415971 - RNA, 19 nt, Artificial Sequence
  Description of Artificial Sequence: Synthetic oligonucleotide
cugagcggaagugcugcag

SEQ ID NO: 2415972 - RNA, 19 nt, Artificial Sequence
  Description of Artificial Sequence: Synthetic oligonucleotide
aguucagcuguugucucua

SEQ ID NO: 2415973 - RNA, 19 nt, Artificial Sequence
  Description of Artificial Sequence: Synthetic oligonucleotide
ggguuugcucucugagcgg

SEQ ID NO: 2415974 - RNA, 19 nt, Artificial Sequence
  Description of Artificial Sequence: Synthetic oligonucleotide
gaucagggacagcauccaa

SEQ ID NO: 2415975 - RNA, 19 nt, Artificial Sequence
  Description of Artificial Sequence: Synthetic oligonucleotide
ggaaucuaacacccucaca

SEQ ID NO: 2415976 - RNA, 19 nt, Artificial Sequence
  Description of Artificial Sequence: Synthetic oligonucleotide
uguugggcagccgcuccga

SEQ ID NO: 2415977 - RNA, 19 nt, Artificial Sequence
  Description of Artificial Sequence: Synthetic oligonucleotide
augguaccgggcaccaucu

SEQ ID NO: 2415978 - RNA, 19 nt, Artificial Sequence
  Description of Artificial Sequence: Synthetic oligonucleotide
caagcuuagcagggcuggc

SEQ ID NO: 2415979 - RNA, 19 nt, Artificial Sequence
  Description of Artificial Sequence: Synthetic oligonucleotide
cacagaaggcccugucaga

SEQ ID NO: 2415980 - RNA, 19 nt, Artificial Sequence
  Description of Artificial Sequence: Synthetic oligonucleotide
gcccugaugagcucguaca

SEQ ID NO: 2415981 - RNA, 19 nt, Artificial Sequence
  Description of Artificial Sequence: Synthetic oligonucleotide
ccacaugcacagcauccgg

SEQ ID NO: 2415982 - RNA, 19 nt, Artificial Sequence
  Description of Artificial Sequence: Synthetic oligonucleotide
gcccugucagacuguagcc

SEQ ID NO: 2415983 - RNA, 19 nt, Artificial Sequence
  Description of Artificial Sequence: Synthetic oligonucleotide
gcugggaaucaggagagca

SEQ ID NO: 2415984 - RNA, 19 nt, Artificial Sequence
  Description of Artificial Sequence: Synthetic oligonucleotide
cacguccacaaaguccaug

SEQ ID NO: 2415985 - RNA, 19 nt, Artificial Sequence
  Description of Artificial Sequence: Synthetic oligonucleotide
ggcacugaagccagcacca

SEQ ID NO: 2415986 - RNA, 19 nt, Artificial Sequence
  Description of Artificial Sequence: Synthetic oligonucleotide
gcggcaggcaggcaaaguc

SEQ ID NO: 2415987 - RNA, 19 nt, Artificial Sequence
  Description of Artificial Sequence: Synthetic oligonucleotide
caaggucagucagggcacc

SEQ ID NO: 2415988 - RNA, 19 nt, Artificial Sequence
  Description of Artificial Sequence: Synthetic oligonucleotide
caccaucuauggacucaag

SEQ ID NO: 2415989 - RNA, 19 nt, Artificial Sequence
  Description of Artificial Sequence: Synthetic oligonucleotide
caccuguagguugaaggca

SEQ ID NO: 2415990 - RNA, 19 nt, Artificial Sequence
  Description of Artificial Sequence: Synthetic oligonucleotide
cucucugagcggaagugcu

SEQ ID NO: 2415991 - RNA, 19 nt, Artificial Sequence
  Description of Artificial Sequence: Synthetic oligonucleotide
cugcaguauccgagccagg

SEQ ID NO: 2415992 - RNA, 19 nt, Artificial Sequence
  Description of Artificial Sequence: Synthetic oligonucleotide
agcaugguaccgggcacca

SEQ ID NO: 2415993 - RNA, 19 nt, Artificial Sequence
  Description of Artificial Sequence: Synthetic oligonucleotide
gcauccggcucacuggcac

SEQ ID NO: 2415994 - RNA, 19 nt, Artificial Sequence
  Description of Artificial Sequence: Synthetic oligonucleotide
gccaauggcacaaaugggu

SEQ ID NO: 2415995 - RNA, 19 nt, Artificial Sequence
  Description of Artificial Sequence: Synthetic oligonucleotide
ugcacagcauccggcucac

SEQ ID NO: 2415996 - RNA, 19 nt, Artificial Sequence
  Description of Artificial Sequence: Synthetic oligonucleotide
aaggcccugucagacugua

SEQ ID NO: 2415997 - RNA, 19 nt, Artificial Sequence
  Description of Artificial Sequence: Synthetic oligonucleotide
agcucacaauugucuguaa

SEQ ID NO: 2415998 - RNA, 19 nt, Artificial Sequence
  Description of Artificial Sequence: Synthetic oligonucleotide
ggcugacacaccuucggaa

SEQ ID NO: 2415999 - RNA, 19 nt, Artificial Sequence
  Description of Artificial Sequence: Synthetic oligonucleotide
cagggguggccaccuguag

SEQ ID NO: 2416000 - RNA, 19 nt, Artificial Sequence
  Description of Artificial Sequence: Synthetic oligonucleotide
gagcggaagugcugcagua

SEQ ID NO: 2416001 - RNA, 19 nt, Artificial Sequence
  Description of Artificial Sequence: Synthetic oligonucleotide
cuguagguugaaggcagca

SEQ ID NO: 2416002 - RNA, 19 nt, Artificial Sequence
  Description of Artificial Sequence: Synthetic oligonucleotide
gcggaagugcugcaguauc

SEQ ID NO: 2416003 - RNA, 19 nt, Artificial Sequence
  Description of Artificial Sequence: Synthetic oligonucleotide
uccggcugccacagaggaa

SEQ ID NO: 2416004 - RNA, 19 nt, Artificial Sequence
  Description of Artificial Sequence: Synthetic oligonucleotide
gguuugcucucugagcgga

SEQ ID NO: 2416005 - RNA, 19 nt, Artificial Sequence
  Description of Artificial Sequence: Synthetic oligonucleotide
uugaggcggaagucuugua

SEQ ID NO: 2416006 - RNA, 19 nt, Artificial Sequence
  Description of Artificial Sequence: Synthetic oligonucleotide
agcggaagugcugcaguau

SEQ ID NO: 2416007 - RNA, 19 nt, Artificial Sequence
  Description of Artificial Sequence: Synthetic oligonucleotide
gcucucugagcggaagugc

SEQ ID NO: 2416008 - RNA, 19 nt, Artificial Sequence
  Description of Artificial Sequence: Synthetic oligonucleotide
accgggcaccaucuaugga

SEQ ID NO: 2416009 - RNA, 19 nt, Artificial Sequence
  Description of Artificial Sequence: Synthetic oligonucleotide
ccaacgugcauuguucuca

SEQ ID NO: 2416010 - RNA, 19 nt, Artificial Sequence
  Description of Artificial Sequence: Synthetic oligonucleotide
cuggccagugugaagcagu

SEQ ID NO: 2416011 - RNA, 19 nt, Artificial Sequence
  Description of Artificial Sequence: Synthetic oligonucleotide
guacccaacgugcauuguu

SEQ ID NO: 2416012 - RNA, 19 nt, Artificial Sequence
  Description of Artificial Sequence: Synthetic oligonucleotide
ggacagcugggaaucagga

SEQ ID NO: 2416013 - RNA, 19 nt, Artificial Sequence
  Description of Artificial Sequence: Synthetic oligonucleotide
ccuguagguugaaggcagc

SEQ ID NO: 2416014 - RNA, 19 nt, Artificial Sequence
  Description of Artificial Sequence: Synthetic oligonucleotide
cagcaccagaguccuucac

SEQ ID NO: 2416015 - RNA, 19 nt, Artificial Sequence
  Description of Artificial Sequence: Synthetic oligonucleotide
cccugaugagcucguacac

SEQ ID NO: 2416016 - RNA, 19 nt, Artificial Sequence
  Description of Artificial Sequence: Synthetic oligonucleotide
ucacguccacaaaguccau

SEQ ID NO: 2416017 - RNA, 19 nt, Artificial Sequence
  Description of Artificial Sequence: Synthetic oligonucleotide
gccagcaccagaguccuuc

SEQ ID NO: 2416018 - RNA, 19 nt, Artificial Sequence
  Description of Artificial Sequence: Synthetic oligonucleotide
cgugcauuguucucaguca

SEQ ID NO: 2416019 - RNA, 19 nt, Artificial Sequence
  Description of Artificial Sequence: Synthetic oligonucleotide
gcaguauccgagccaggga

SEQ ID NO: 2416020 - RNA, 19 nt, Artificial Sequence
  Description of Artificial Sequence: Synthetic oligonucleotide
cuugaggcggaagucuugu

SEQ ID NO: 2416021 - RNA, 19 nt, Artificial Sequence
  Description of Artificial Sequence: Synthetic oligonucleotide
guugggcagccgcuccgac

SEQ ID NO: 2416022 - RNA, 19 nt, Artificial Sequence
  Description of Artificial Sequence: Synthetic oligonucleotide
cagcucacaauugucugua

SEQ ID NO: 2416023 - RNA, 19 nt, Artificial Sequence
  Description of Artificial Sequence: Synthetic oligonucleotide
uauccgagccagggaccca

SEQ ID NO: 2416024 - RNA, 19 nt, Artificial Sequence
  Description of Artificial Sequence: Synthetic oligonucleotide
ccuguugggcagccgcucc

SEQ ID NO: 2416025 - RNA, 19 nt, Artificial Sequence
  Description of Artificial Sequence: Synthetic oligonucleotide
gcauuguucucagucacgu

SEQ ID NO: 2416026 - RNA, 19 nt, Artificial Sequence
  Description of Artificial Sequence: Synthetic oligonucleotide
gucagacuguagccuugga

SEQ ID NO: 2416027 - RNA, 19 nt, Artificial Sequence
  Description of Artificial Sequence: Synthetic oligonucleotide
cuguugucucuaggccacc

SEQ ID NO: 2416028 - RNA, 19 nt, Artificial Sequence
  Description of Artificial Sequence: Synthetic oligonucleotide
ggcaccaucuauggacuca

SEQ ID NO: 2416029 - RNA, 19 nt, Artificial Sequence
  Description of Artificial Sequence: Synthetic oligonucleotide
ggaccugucuucauuggua

SEQ ID NO: 2416030 - RNA, 19 nt, Artificial Sequence
  Description of Artificial Sequence: Synthetic oligonucleotide
gcggaagucuuguacccaa

SEQ ID NO: 2416031 - RNA, 19 nt, Artificial Sequence
  Description of Artificial Sequence: Synthetic oligonucleotide
ggaucagggacagcaucca

SEQ ID NO: 2416032 - RNA, 19 nt, Artificial Sequence
  Description of Artificial Sequence: Synthetic oligonucleotide
cucguacacagaaggcccu

SEQ ID NO: 2416033 - RNA, 19 nt, Artificial Sequence
  Description of Artificial Sequence: Synthetic oligonucleotide
caauggcacaaauggguuu

SEQ ID NO: 2416034 - RNA, 19 nt, Artificial Sequence
  Description of Artificial Sequence: Synthetic oligonucleotide
gcaaagucaggugcccuga

SEQ ID NO: 2416035 - RNA, 19 nt, Artificial Sequence
  Description of Artificial Sequence: Synthetic oligonucleotide
gggacccacugcuggcaag

SEQ ID NO: 2416036 - RNA, 19 nt, Artificial Sequence
  Description of Artificial Sequence: Synthetic oligonucleotide
uacuuccggcugccacaga

SEQ ID NO: 2416037 - RNA, 19 nt, Artificial Sequence
  Description of Artificial Sequence: Synthetic oligonucleotide
ugguaccgggcaccaucua

SEQ ID NO: 2416038 - RNA, 19 nt, Artificial Sequence
  Description of Artificial Sequence: Synthetic oligonucleotide
gggguggccaccuguaggu

SEQ ID NO: 2416039 - RNA, 19 nt, Artificial Sequence
  Description of Artificial Sequence: Synthetic oligonucleotide
cauagugaguucagcuguu

SEQ ID NO: 2416040 - RNA, 19 nt, Artificial Sequence
  Description of Artificial Sequence: Synthetic oligonucleotide
cacuggccagugugaagca

SEQ ID NO: 2416041 - RNA, 19 nt, Artificial Sequence
  Description of Artificial Sequence: Synthetic oligonucleotide
gcagcucacaauugucugu

SEQ ID NO: 2416042 - RNA, 19 nt, Artificial Sequence
  Description of Artificial Sequence: Synthetic oligonucleotide
agcggcaggcaggcaaagu

SEQ ID NO: 2416043 - RNA, 19 nt, Artificial Sequence
  Description of Artificial Sequence: Synthetic oligonucleotide
ggaagcgccgcuggccacc

SEQ ID NO: 2416044 - RNA, 19 nt, Artificial Sequence
  Description of Artificial Sequence: Synthetic oligonucleotide
ggccagugugaagcagugg

SEQ ID NO: 2416045 - RNA, 19 nt, Artificial Sequence
  Description of Artificial Sequence: Synthetic oligonucleotide
gggcugacacaccuucgga

SEQ ID NO: 2416046 - RNA, 19 nt, Artificial Sequence
  Description of Artificial Sequence: Synthetic oligonucleotide
ggagagcaugguaccgggc

SEQ ID NO: 2416047 - RNA, 19 nt, Artificial Sequence
  Description of Artificial Sequence: Synthetic oligonucleotide
cccaacgugcauuguucuc

SEQ ID NO: 2416048 - RNA, 19 nt, Artificial Sequence
  Description of Artificial Sequence: Synthetic oligonucleotide
gucagggcaccaggacagc

SEQ ID NO: 2416049 - RNA, 19 nt, Artificial Sequence
  Description of Artificial Sequence: Synthetic oligonucleotide
ggcugccacagaggaagag

SEQ ID NO: 2416050 - RNA, 19 nt, Artificial Sequence
  Description of Artificial Sequence: Synthetic oligonucleotide
ggacugggcugacacaccu

SEQ ID NO: 2416051 - RNA, 19 nt, Artificial Sequence
  Description of Artificial Sequence: Synthetic oligonucleotide
gguaccgggcaccaucuau

SEQ ID NO: 2416052 - RNA, 19 nt, Artificial Sequence
  Description of Artificial Sequence: Synthetic oligonucleotide
ggaaucaggagagcauggu

SEQ ID NO: 2416053 - RNA, 19 nt, Artificial Sequence
  Description of Artificial Sequence: Synthetic oligonucleotide
gcagggcuggcauaagccu

SEQ ID NO: 2416054 - RNA, 19 nt, Artificial Sequence
  Description of Artificial Sequence: Synthetic oligonucleotide
aagcgccgcuggccaccag

SEQ ID NO: 2416055 - RNA, 19 nt, Artificial Sequence
  Description of Artificial Sequence: Synthetic oligonucleotide
cacccaggaccugucuuca

SEQ ID NO: 2416056 - RNA, 19 nt, Artificial Sequence
  Description of Artificial Sequence: Synthetic oligonucleotide
cguccacaaaguccauggc

SEQ ID NO: 2416057 - RNA, 19 nt, Artificial Sequence
  Description of Artificial Sequence: Synthetic oligonucleotide
gaagcgccgcuggccacca

SEQ ID NO: 2416058 - RNA, 19 nt, Artificial Sequence
  Description of Artificial Sequence: Synthetic oligonucleotide
ggcgguccagcaccacaug

SEQ ID NO: 2416059 - RNA, 19 nt, Artificial Sequence
  Description of Artificial Sequence: Synthetic oligonucleotide
ccugaugagcucguacaca

SEQ ID NO: 2416060 - RNA, 19 nt, Artificial Sequence
  Description of Artificial Sequence: Synthetic oligonucleotide
gccuuggaacacccaggac

SEQ ID NO: 2416061 - RNA, 19 nt, Artificial Sequence
  Description of Artificial Sequence: Synthetic oligonucleotide
caggugcccugaugagcuc

SEQ ID NO: 2416062 - RNA, 19 nt, Artificial Sequence
  Description of Artificial Sequence: Synthetic oligonucleotide
ccagugugaagcaguggaa

SEQ ID NO: 2416063 - RNA, 19 nt, Artificial Sequence
  Description of Artificial Sequence: Synthetic oligonucleotide
caggccuguugggcagccg

SEQ ID NO: 2416064 - RNA, 19 nt, Artificial Sequence
  Description of Artificial Sequence: Synthetic oligonucleotide
acccucacacagacauagu

SEQ ID NO: 2416065 - RNA, 19 nt, Artificial Sequence
  Description of Artificial Sequence: Synthetic oligonucleotide
agcauccggcucacuggca

SEQ ID NO: 2416066 - RNA, 19 nt, Artificial Sequence
  Description of Artificial Sequence: Synthetic oligonucleotide
aggcccugucagacuguag

SEQ ID NO: 2416067 - RNA, 19 nt, Artificial Sequence
  Description of Artificial Sequence: Synthetic oligonucleotide
ggcggaagucuuguaccca

SEQ ID NO: 2416068 - RNA, 19 nt, Artificial Sequence
  Description of Artificial Sequence: Synthetic oligonucleotide
gcauaagccuugaggcgga

SEQ ID NO: 2416069 - RNA, 19 nt, Artificial Sequence
  Description of Artificial Sequence: Synthetic oligonucleotide
cagcggcaggcaggcaaag

SEQ ID NO: 2416070 - RNA, 19 nt, Artificial Sequence
  Description of Artificial Sequence: Synthetic oligonucleotide
guuugcucucugagcggaa

SEQ ID NO: 2416071 - RNA, 19 nt, Artificial Sequence
  Description of Artificial Sequence: Synthetic oligonucleotide
gggcaccaucuauggacuc

SEQ ID NO: 2416072 - RNA, 19 nt, Artificial Sequence
  Description of Artificial Sequence: Synthetic oligonucleotide
ccaauggcacaaauggguu

SEQ ID NO: 2416073 - RNA, 19 nt, Artificial Sequence
  Description of Artificial Sequence: Synthetic oligonucleotide
aaccagcggcaggcaggca

SEQ ID NO: 2416074 - RNA, 19 nt, Artificial Sequence
  Description of Artificial Sequence: Synthetic oligonucleotide
cauccggcucacuggcacu

SEQ ID NO: 2416075 - RNA, 19 nt, Artificial Sequence
  Description of Artificial Sequence: Synthetic oligonucleotide
ggccaccuguagguugaag

SEQ ID NO: 2416076 - RNA, 19 nt, Artificial Sequence
  Description of Artificial Sequence: Synthetic oligonucleotide
cagugaccagguggcgguc

SEQ ID NO: 2416077 - RNA, 19 nt, Artificial Sequence
  Description of Artificial Sequence: Synthetic oligonucleotide
gcuuagcagggcuggcaua

SEQ ID NO: 2416078 - RNA, 19 nt, Artificial Sequence
  Description of Artificial Sequence: Synthetic oligonucleotide
ccagugaccagguggcggu

SEQ ID NO: 2416079 - RNA, 19 nt, Artificial Sequence
  Description of Artificial Sequence: Synthetic oligonucleotide
caaagucaggugcccugau

SEQ ID NO: 2416080 - RNA, 19 nt, Artificial Sequence
  Description of Artificial Sequence: Synthetic oligonucleotide
agguggcgguccagcacca

SEQ ID NO: 2416081 - RNA, 19 nt, Artificial Sequence
  Description of Artificial Sequence: Synthetic oligonucleotide
ccagcaccagaguccuuca

SEQ ID NO: 2416082 - RNA, 19 nt, Artificial Sequence
  Description of Artificial Sequence: Synthetic oligonucleotide
cacaaaguccauggccuuu

SEQ ID NO: 2416083 - RNA, 19 nt, Artificial Sequence
  Description of Artificial Sequence: Synthetic oligonucleotide
ccgagccagggacccacug

SEQ ID NO: 2416084 - RNA, 19 nt, Artificial Sequence
  Description of Artificial Sequence: Synthetic oligonucleotide
cagaacccauauggcagcu

SEQ ID NO: 2416085 - RNA, 19 nt, Artificial Sequence
  Description of Artificial Sequence: Synthetic oligonucleotide
cauaagccuugaggcggaa

SEQ ID NO: 2416086 - RNA, 19 nt, Artificial Sequence
  Description of Artificial Sequence: Synthetic oligonucleotide
ccugucagacuguagccuu

SEQ ID NO: 2416087 - RNA, 19 nt, Artificial Sequence
  Description of Artificial Sequence: Synthetic oligonucleotide
uggccaccuguagguugaa

SEQ ID NO: 2416088 - RNA, 19 nt, Artificial Sequence
  Description of Artificial Sequence: Synthetic oligonucleotide
ggcaggccuguugggcagc

SEQ ID NO: 2416089 - RNA, 19 nt, Artificial Sequence
  Description of Artificial Sequence: Synthetic oligonucleotide
ccagcggcaggcaggcaaa

SEQ ID NO: 2416090 - RNA, 19 nt, Artificial Sequence
  Description of Artificial Sequence: Synthetic oligonucleotide
ccagggguggccaccugua

SEQ ID NO: 2416091 - RNA, 19 nt, Artificial Sequence
  Description of Artificial Sequence: Synthetic oligonucleotide
gacugggcugacacaccuu

SEQ ID NO: 2416092 - RNA, 19 nt, Artificial Sequence
  Description of Artificial Sequence: Synthetic oligonucleotide
ccagggaaucuaacacccu

SEQ ID NO: 2416093 - RNA, 19 nt, Artificial Sequence
  Description of Artificial Sequence: Synthetic oligonucleotide
ggugcccugaugagcucgu

SEQ ID NO: 2416094 - RNA, 19 nt, Artificial Sequence
  Description of Artificial Sequence: Synthetic oligonucleotide
cccugucagacuguagccu

SEQ ID NO: 2416095 - RNA, 19 nt, Artificial Sequence
  Description of Artificial Sequence: Synthetic oligonucleotide
gcgccgcuggccaccagga

SEQ ID NO: 2416096 - RNA, 19 nt, Artificial Sequence
  Description of Artificial Sequence: Synthetic oligonucleotide
caccuucggaagcgccgcu

SEQ ID NO: 2416097 - RNA, 19 nt, Artificial Sequence
  Description of Artificial Sequence: Synthetic oligonucleotide
cccaggaccugucuucauu

SEQ ID NO: 2416098 - RNA, 19 nt, Artificial Sequence
  Description of Artificial Sequence: Synthetic oligonucleotide
gccuugaggcggaagucuu

SEQ ID NO: 2416099 - RNA, 19 nt, Artificial Sequence
  Description of Artificial Sequence: Synthetic oligonucleotide
gugcccugaugagcucgua

SEQ ID NO: 2416100 - RNA, 19 nt, Artificial Sequence
  Description of Artificial Sequence: Synthetic oligonucleotide
ggccuguugggcagccgcu

SEQ ID NO: 2416101 - RNA, 19 nt, Artificial Sequence
  Description of Artificial Sequence: Synthetic oligonucleotide
cgccgcuggccaccaggag

SEQ ID NO: 2416102 - RNA, 19 nt, Artificial Sequence
  Description of Artificial Sequence: Synthetic oligonucleotide
ggacagcauccaaguuacu

SEQ ID NO: 2416103 - RNA, 19 nt, Artificial Sequence
  Description of Artificial Sequence: Synthetic oligonucleotide
cguacacagaaggcccugu

SEQ ID NO: 2416104 - RNA, 19 nt, Artificial Sequence
  Description of Artificial Sequence: Synthetic oligonucleotide
ccccagggguggccaccug

SEQ ID NO: 2416105 - RNA, 19 nt, Artificial Sequence
  Description of Artificial Sequence: Synthetic oligonucleotide
cggcugccacagaggaaga

SEQ ID NO: 2416106 - RNA, 19 nt, Artificial Sequence
  Description of Artificial Sequence: Synthetic oligonucleotide
ggguggccaccuguagguu

SEQ ID NO: 2416107 - RNA, 19 nt, Artificial Sequence
  Description of Artificial Sequence: Synthetic oligonucleotide
gcaugguaccgggcaccau

SEQ ID NO: 2416108 - RNA, 19 nt, Artificial Sequence
  Description of Artificial Sequence: Synthetic oligonucleotide
uuuaaaauaggccaucucg

SEQ ID NO: 2416109 - RNA, 19 nt, Artificial Sequence
  Description of Artificial Sequence: Synthetic oligonucleotide
uucaauuuuguaaaugugg

SEQ ID NO: 2416110 - RNA, 19 nt, Artificial Sequence
  Description of Artificial Sequence: Synthetic oligonucleotide
  modified_base (13)..(13): a, c, u, g, unknown or other
uaaauguggacunaaaagc

SEQ ID NO: 2416111 - RNA, 19 nt, Artificial Sequence
  Description of Artificial Sequence: Synthetic oligonucleotide
aauuuugacgaacagaaga

SEQ ID NO: 2416112 - RNA, 19 nt, Artificial Sequence
  Description of Artificial Sequence: Synthetic oligonucleotide
  modified_base (14)..(14): a, c, u, g, unknown or other
guaaauguggacunaaaag

SEQ ID NO: 2416113 - RNA, 19 nt, Artificial Sequence
  Description of Artificial Sequence: Synthetic oligonucleotide
aaaucuauuuagcagagca

SEQ ID NO: 2416114 - RNA, 19 nt, Artificial Sequence
  Description of Artificial Sequence: Synthetic oligonucleotide
uucaucaacaauuaauuag

SEQ ID NO: 2416115 - RNA, 19 nt, Artificial Sequence
  Description of Artificial Sequence: Synthetic oligonucleotide
uuaaaauaggccaucucgg

SEQ ID NO: 2416116 - RNA, 19 nt, Artificial Sequence
  Description of Artificial Sequence: Synthetic oligonucleotide
aagcauauuuaaaauaggc

SEQ ID NO: 2416117 - RNA, 19 nt, Artificial Sequence
  Description of Artificial Sequence: Synthetic oligonucleotide
ucaacaauuaauuagugau

SEQ ID NO: 2416118 - RNA, 19 nt, Artificial Sequence
  Description of Artificial Sequence: Synthetic oligonucleotide
uaugaucaaauuuugacga

SEQ ID NO: 2416119 - RNA, 19 nt, Artificial Sequence
  Description of Artificial Sequence: Synthetic oligonucleotide
uauucuucagguaugguug

SEQ ID NO: 2416120 - RNA, 19 nt, Artificial Sequence
  Description of Artificial Sequence: Synthetic oligonucleotide
auuaauuagugaugguccc

SEQ ID NO: 2416121 - RNA, 19 nt, Artificial Sequence
  Description of Artificial Sequence: Synthetic oligonucleotide
uucaaaucuauuuagcaga

SEQ ID NO: 2416122 - RNA, 19 nt, Artificial Sequence
  Description of Artificial Sequence: Synthetic oligonucleotide
aguuaguauaucuuugagg

SEQ ID NO: 2416123 - RNA, 19 nt, Artificial Sequence
  Description of Artificial Sequence: Synthetic oligonucleotide
ucaucaacaauuaauuagu

SEQ ID NO: 2416124 - RNA, 19 nt, Artificial Sequence
  Description of Artificial Sequence: Synthetic oligonucleotide
ucaauuuuguaaaugugga

SEQ ID NO: 2416125 - RNA, 19 nt, Artificial Sequence
  Description of Artificial Sequence: Synthetic oligonucleotide
agcagaaacagcuuccucg

SEQ ID NO: 2416126 - RNA, 19 nt, Artificial Sequence
  Description of Artificial Sequence: Synthetic oligonucleotide
ucacauuacuaccaaaagc

SEQ ID NO: 2416127 - RNA, 19 nt, Artificial Sequence
  Description of Artificial Sequence: Synthetic oligonucleotide
aauguuaagagcauacaca

SEQ ID NO: 2416128 - RNA, 19 nt, Artificial Sequence
  Description of Artificial Sequence: Synthetic oligonucleotide
ugaaguuaguauaucuuug

SEQ ID NO: 2416129 - RNA, 19 nt, Artificial Sequence
  Description of Artificial Sequence: Synthetic oligonucleotide
uuugaggugauucuccaca

SEQ ID NO: 2416130 - RNA, 19 nt, Artificial Sequence
  Description of Artificial Sequence: Synthetic oligonucleotide
  modified_base (2)..(2): a, c, u, g, unknown or other
unaaaagcauucaauuuuc

SEQ ID NO: 2416131 - RNA, 19 nt, Artificial Sequence
  Description of Artificial Sequence: Synthetic oligonucleotide
uugacgaacagaagaaagc

SEQ ID NO: 2416132 - RNA, 19 nt, Artificial Sequence
  Description of Artificial Sequence: Synthetic oligonucleotide
uucaauguuaagagcauac

SEQ ID NO: 2416133 - RNA, 19 nt, Artificial Sequence
  Description of Artificial Sequence: Synthetic oligonucleotide
ucaaaucuauuuagcagag

SEQ ID NO: 2416134 - RNA, 19 nt, Artificial Sequence
  Description of Artificial Sequence: Synthetic oligonucleotide
uacauuauacacuucaauu

SEQ ID NO: 2416135 - RNA, 19 nt, Artificial Sequence
  Description of Artificial Sequence: Synthetic oligonucleotide
  modified_base (15)..(15): a, c, u, g, unknown or other
uguaaauguggacunaaaa

SEQ ID NO: 2416136 - RNA, 19 nt, Artificial Sequence
  Description of Artificial Sequence: Synthetic oligonucleotide
gaucauucucccuucaagc

SEQ ID NO: 2416137 - RNA, 19 nt, Artificial Sequence
  Description of Artificial Sequence: Synthetic oligonucleotide
uauuuagcagagcaaaguc

SEQ ID NO: 2416138 - RNA, 19 nt, Artificial Sequence
  Description of Artificial Sequence: Synthetic oligonucleotide
auuuagcagagcaaagucc

SEQ ID NO: 2416139 - RNA, 19 nt, Artificial Sequence
  Description of Artificial Sequence: Synthetic oligonucleotide
ucucccuucaagcugaccu

SEQ ID NO: 2416140 - RNA, 19 nt, Artificial Sequence
  Description of Artificial Sequence: Synthetic oligonucleotide
ucuauuuagcagagcaaag

SEQ ID NO: 2416141 - RNA, 19 nt, Artificial Sequence
  Description of Artificial Sequence: Synthetic oligonucleotide
ucaaccaaguuguuguaag

SEQ ID NO: 2416142 - RNA, 19 nt, Artificial Sequence
  Description of Artificial Sequence: Synthetic oligonucleotide
auacacuucaauuuuguaa

SEQ ID NO: 2416143 - RNA, 19 nt, Artificial Sequence
  Description of Artificial Sequence: Synthetic oligonucleotide
cuuguggggagcaucauag

SEQ ID NO: 2416144 - RNA, 19 nt, Artificial Sequence
  Description of Artificial Sequence: Synthetic oligonucleotide
  modified_base (7)..(7): a, c, u, g, unknown or other
uggacunaaaagcauucaa

SEQ ID NO: 2416145 - RNA, 19 nt, Artificial Sequence
  Description of Artificial Sequence: Synthetic oligonucleotide
aacagcagaaacagcuucc

SEQ ID NO: 2416146 - RNA, 19 nt, Artificial Sequence
  Description of Artificial Sequence: Synthetic oligonucleotide
ucauagugugggaacagag

SEQ ID NO: 2416147 - RNA, 19 nt, Artificial Sequence
  Description of Artificial Sequence: Synthetic oligonucleotide
ugccacaaacugcugagcg

SEQ ID NO: 2416148 - RNA, 19 nt, Artificial Sequence
  Description of Artificial Sequence: Synthetic oligonucleotide
gauccuuucaauguuaaga

SEQ ID NO: 2416149 - RNA, 19 nt, Artificial Sequence
  Description of Artificial Sequence: Synthetic oligonucleotide
uaagagcauacacaguaug

SEQ ID NO: 2416150 - RNA, 19 nt, Artificial Sequence
  Description of Artificial Sequence: Synthetic oligonucleotide
acauuauacacuucaauuu

SEQ ID NO: 2416151 - RNA, 19 nt, Artificial Sequence
  Description of Artificial Sequence: Synthetic oligonucleotide
  modified_base (4)..(4): a, c, u, g, unknown or other
acunaaaagcauucaauuu

SEQ ID NO: 2416152 - RNA, 19 nt, Artificial Sequence
  Description of Artificial Sequence: Synthetic oligonucleotide
agagcaaaguccuucuuug

SEQ ID NO: 2416153 - RNA, 19 nt, Artificial Sequence
  Description of Artificial Sequence: Synthetic oligonucleotide
  modified_base (12)..(12): a, c, u, g, unknown or other
aaauguggacunaaaagca

SEQ ID NO: 2416154 - RNA, 19 nt, Artificial Sequence
  Description of Artificial Sequence: Synthetic oligonucleotide
uguggggucacauuacuac

SEQ ID NO: 2416155 - RNA, 19 nt, Artificial Sequence
  Description of Artificial Sequence: Synthetic oligonucleotide
caagcugaccucuuguggg

SEQ ID NO: 2416156 - RNA, 19 nt, Artificial Sequence
  Description of Artificial Sequence: Synthetic oligonucleotide
uguggggagcaucauagug

SEQ ID NO: 2416157 - RNA, 19 nt, Artificial Sequence
  Description of Artificial Sequence: Synthetic oligonucleotide
uucuuugcugccaagcgcu

SEQ ID NO: 2416158 - RNA, 19 nt, Artificial Sequence
  Description of Artificial Sequence: Synthetic oligonucleotide
auuacuaccaaaagcauau

SEQ ID NO: 2416159 - RNA, 19 nt, Artificial Sequence
  Description of Artificial Sequence: Synthetic oligonucleotide
aucaacaauuaauuaguga

SEQ ID NO: 2416160 - RNA, 19 nt, Artificial Sequence
  Description of Artificial Sequence: Synthetic oligonucleotide
uaaaauaggccaucucgga

SEQ ID NO: 2416161 - RNA, 19 nt, Artificial Sequence
  Description of Artificial Sequence: Synthetic oligonucleotide
aacagaguuucaaaucauc

SEQ ID NO: 2416162 - RNA, 19 nt, Artificial Sequence
  Description of Artificial Sequence: Synthetic oligonucleotide
ucagguaugguuguggggu

SEQ ID NO: 2416163 - RNA, 19 nt, Artificial Sequence
  Description of Artificial Sequence: Synthetic oligonucleotide
auguguaggaaugaacuuc

SEQ ID NO: 2416164 - RNA, 19 nt, Artificial Sequence
  Description of Artificial Sequence: Synthetic oligonucleotide
guuguuguaagccaccaca

SEQ ID NO: 2416165 - RNA, 19 nt, Artificial Sequence
  Description of Artificial Sequence: Synthetic oligonucleotide
gacuuugucuuguuguagc

SEQ ID NO: 2416166 - RNA, 19 nt, Artificial Sequence
  Description of Artificial Sequence: Synthetic oligonucleotide
ugaacuuccccuguguacc

SEQ ID NO: 2416167 - RNA, 19 nt, Artificial Sequence
  Description of Artificial Sequence: Synthetic oligonucleotide
uccuucucgacacaacuga

SEQ ID NO: 2416168 - RNA, 19 nt, Artificial Sequence
  Description of Artificial Sequence: Synthetic oligonucleotide
caacaauuaauuagugaug

SEQ ID NO: 2416169 - RNA, 19 nt, Artificial Sequence
  Description of Artificial Sequence: Synthetic oligonucleotide
aaucuaugaucaaauuuug

SEQ ID NO: 2416170 - RNA, 19 nt, Artificial Sequence
  Description of Artificial Sequence: Synthetic oligonucleotide
  modified_base (9)..(9): a, c, u, g, unknown or other
uguggacunaaaagcauuc

SEQ ID NO: 2416171 - RNA, 19 nt, Artificial Sequence
  Description of Artificial Sequence: Synthetic oligonucleotide
uaggcuuuccuucucgaca

SEQ ID NO: 2416172 - RNA, 19 nt, Artificial Sequence
  Description of Artificial Sequence: Synthetic oligonucleotide
agugugggaacagaguuuc

SEQ ID NO: 2416173 - RNA, 19 nt, Artificial Sequence
  Description of Artificial Sequence: Synthetic oligonucleotide
aguauguguaggaaugaac

SEQ ID NO: 2416174 - RNA, 19 nt, Artificial Sequence
  Description of Artificial Sequence: Synthetic oligonucleotide
agaaacagcuuccucggug

SEQ ID NO: 2416175 - RNA, 19 nt, Artificial Sequence
  Description of Artificial Sequence: Synthetic oligonucleotide
  modified_base (19)..(19): a, c, u, g, unknown or other
auuuuguaaauguggacun

SEQ ID NO: 2416176 - RNA, 19 nt, Artificial Sequence
  Description of Artificial Sequence: Synthetic oligonucleotide
gguuauacauacauuauac

SEQ ID NO: 2416177 - RNA, 19 nt, Artificial Sequence
  Description of Artificial Sequence: Synthetic oligonucleotide
aagcugaccucuugugggg

SEQ ID NO: 2416178 - RNA, 19 nt, Artificial Sequence
  Description of Artificial Sequence: Synthetic oligonucleotide
uguagcucuucaugauugg

SEQ ID NO: 2416179 - RNA, 19 nt, Artificial Sequence
  Description of Artificial Sequence: Synthetic oligonucleotide
uauuuaaaauaggccaucu

SEQ ID NO: 2416180 - RNA, 19 nt, Artificial Sequence
  Description of Artificial Sequence: Synthetic oligonucleotide
uuguuguaagccaccacac

SEQ ID NO: 2416181 - RNA, 19 nt, Artificial Sequence
  Description of Artificial Sequence: Synthetic oligonucleotide
gaggugauucuccacagca

SEQ ID NO: 2416182 - RNA, 19 nt, Artificial Sequence
  Description of Artificial Sequence: Synthetic oligonucleotide
ugaucaaauuuugacgaac

SEQ ID NO: 2416183 - RNA, 19 nt, Artificial Sequence
  Description of Artificial Sequence: Synthetic oligonucleotide
ucgacacaacugaaguuag

SEQ ID NO: 2416184 - RNA, 19 nt, Artificial Sequence
  Description of Artificial Sequence: Synthetic oligonucleotide
uucagguaugguugugggg

SEQ ID NO: 2416185 - RNA, 19 nt, Artificial Sequence
  Description of Artificial Sequence: Synthetic oligonucleotide
gaaucuaugaucaaauuuu

SEQ ID NO: 2416186 - RNA, 19 nt, Artificial Sequence
  Description of Artificial Sequence: Synthetic oligonucleotide
uaauuagugauggucccca

SEQ ID NO: 2416187 - RNA, 19 nt, Artificial Sequence
  Description of Artificial Sequence: Synthetic oligonucleotide
agcaucgucucugacuggc

SEQ ID NO: 2416188 - RNA, 19 nt, Artificial Sequence
  Description of Artificial Sequence: Synthetic oligonucleotide
uuaauuagugauggucccc

SEQ ID NO: 2416189 - RNA, 19 nt, Artificial Sequence
  Description of Artificial Sequence: Synthetic oligonucleotide
aaauuuugacgaacagaag

SEQ ID NO: 2416190 - RNA, 19 nt, Artificial Sequence
  Description of Artificial Sequence: Synthetic oligonucleotide
uucaaaucaucaucauccu

SEQ ID NO: 2416191 - RNA, 19 nt, Artificial Sequence
  Description of Artificial Sequence: Synthetic oligonucleotide
  modified_base (5)..(5): a, c, u, g, unknown or other
gacunaaaagcauucaauu

SEQ ID NO: 2416192 - RNA, 19 nt, Artificial Sequence
  Description of Artificial Sequence: Synthetic oligonucleotide
uccuuucaauguuaagagc

SEQ ID NO: 2416193 - RNA, 19 nt, Artificial Sequence
  Description of Artificial Sequence: Synthetic oligonucleotide
ucaauguuaagagcauaca

SEQ ID NO: 2416194 - RNA, 19 nt, Artificial Sequence
  Description of Artificial Sequence: Synthetic oligonucleotide
uacuaccaaaagcauauuu

SEQ ID NO: 2416195 - RNA, 19 nt, Artificial Sequence
  Description of Artificial Sequence: Synthetic oligonucleotide
guagaguguccccagaaca

SEQ ID NO: 2416196 - RNA, 19 nt, Artificial Sequence
  Description of Artificial Sequence: Synthetic oligonucleotide
agugaugguccccaaauuu

SEQ ID NO: 2416197 - RNA, 19 nt, Artificial Sequence
  Description of Artificial Sequence: Synthetic oligonucleotide
agcucuucaugauuggggu

SEQ ID NO: 2416198 - RNA, 19 nt, Artificial Sequence
  Description of Artificial Sequence: Synthetic oligonucleotide
caucaacaauuaauuagug

SEQ ID NO: 2416199 - RNA, 19 nt, Artificial Sequence
  Description of Artificial Sequence: Synthetic oligonucleotide
uaccaaaagcauauuuaaa

SEQ ID NO: 2416200 - RNA, 19 nt, Artificial Sequence
  Description of Artificial Sequence: Synthetic oligonucleotide
guaggaaugaacuuccccu

SEQ ID NO: 2416201 - RNA, 19 nt, Artificial Sequence
  Description of Artificial Sequence: Synthetic oligonucleotide
gaugcagguagaguguccc

SEQ ID NO: 2416202 - RNA, 19 nt, Artificial Sequence
  Description of Artificial Sequence: Synthetic oligonucleotide
uguuguaagccaccacacu

SEQ ID NO: 2416203 - RNA, 19 nt, Artificial Sequence
  Description of Artificial Sequence: Synthetic oligonucleotide
  modified_base (17)..(17): a, c, u, g, unknown or other
uuuguaaauguggacunaa

SEQ ID NO: 2416204 - RNA, 19 nt, Artificial Sequence
  Description of Artificial Sequence: Synthetic oligonucleotide
accacacuauucuucaggu

SEQ ID NO: 2416205 - RNA, 19 nt, Artificial Sequence
  Description of Artificial Sequence: Synthetic oligonucleotide
cuucuuugcugccaagcgc

SEQ ID NO: 2416206 - RNA, 19 nt, Artificial Sequence
  Description of Artificial Sequence: Synthetic oligonucleotide
ucugaggcuggaaucuaug

SEQ ID NO: 2416207 - RNA, 19 nt, Artificial Sequence
  Description of Artificial Sequence: Synthetic oligonucleotide
cuucucgacacaacugaag

SEQ ID NO: 2416208 - RNA, 19 nt, Artificial Sequence
  Description of Artificial Sequence: Synthetic oligonucleotide
uuguaagccaccacacuau

SEQ ID NO: 2416209 - RNA, 19 nt, Artificial Sequence
  Description of Artificial Sequence: Synthetic oligonucleotide
gacguuguccagcccaugc

SEQ ID NO: 2416210 - RNA, 19 nt, Artificial Sequence
  Description of Artificial Sequence: Synthetic oligonucleotide
  modified_base (11)..(11): a, c, u, g, unknown or other
aauguggacunaaaagcau

SEQ ID NO: 2416211 - RNA, 19 nt, Artificial Sequence
  Description of Artificial Sequence: Synthetic oligonucleotide
  modified_base (3)..(3): a, c, u, g, unknown or other
cunaaaagcauucaauuuu

SEQ ID NO: 2416212 - RNA, 19 nt, Artificial Sequence
  Description of Artificial Sequence: Synthetic oligonucleotide
ugguuguggggucacauua

SEQ ID NO: 2416213 - RNA, 19 nt, Artificial Sequence
  Description of Artificial Sequence: Synthetic oligonucleotide
aaugcggccugcuguucag

SEQ ID NO: 2416214 - RNA, 19 nt, Artificial Sequence
  Description of Artificial Sequence: Synthetic oligonucleotide
acagaguuucaaaucauca

SEQ ID NO: 2416215 - RNA, 19 nt, Artificial Sequence
  Description of Artificial Sequence: Synthetic oligonucleotide
cauacacaguauguguagg

SEQ ID NO: 2416216 - RNA, 19 nt, Artificial Sequence
  Description of Artificial Sequence: Synthetic oligonucleotide
uggagggccuucaaccaag

SEQ ID NO: 2416217 - RNA, 19 nt, Artificial Sequence
  Description of Artificial Sequence: Synthetic oligonucleotide
ccuuucaauguuaagagca

SEQ ID NO: 2416218 - RNA, 19 nt, Artificial Sequence
  Description of Artificial Sequence: Synthetic oligonucleotide
ugauccuuucaauguuaag

SEQ ID NO: 2416219 - RNA, 19 nt, Artificial Sequence
  Description of Artificial Sequence: Synthetic oligonucleotide
aaacugcugagcgccagag

SEQ ID NO: 2416220 - RNA, 19 nt, Artificial Sequence
  Description of Artificial Sequence: Synthetic oligonucleotide
caaccaaguuguuguaagc

SEQ ID NO: 2416221 - RNA, 19 nt, Artificial Sequence
  Description of Artificial Sequence: Synthetic oligonucleotide
guuguaagccaccacacua

SEQ ID NO: 2416222 - RNA, 19 nt, Artificial Sequence
  Description of Artificial Sequence: Synthetic oligonucleotide
gcagaaacagcuuccucgg

SEQ ID NO: 2416223 - RNA, 19 nt, Artificial Sequence
  Description of Artificial Sequence: Synthetic oligonucleotide
acaauuaauuagugauggu

SEQ ID NO: 2416224 - RNA, 19 nt, Artificial Sequence
  Description of Artificial Sequence: Synthetic oligonucleotide
uagaguguccccagaacau

SEQ ID NO: 2416225 - RNA, 19 nt, Artificial Sequence
  Description of Artificial Sequence: Synthetic oligonucleotide
caugauuggggugccaaag

SEQ ID NO: 2416226 - RNA, 19 nt, Artificial Sequence
  Description of Artificial Sequence: Synthetic oligonucleotide
guauguguaggaaugaacu

SEQ ID NO: 2416227 - RNA, 19 nt, Artificial Sequence
  Description of Artificial Sequence: Synthetic oligonucleotide
cacaacugaaguuaguaua

SEQ ID NO: 2416228 - RNA, 19 nt, Artificial Sequence
  Description of Artificial Sequence: Synthetic oligonucleotide
uaccugcagagcuucaaac

SEQ ID NO: 2416229 - RNA, 19 nt, Artificial Sequence
  Description of Artificial Sequence: Synthetic oligonucleotide
ugauuggggugccaaaguu

SEQ ID NO: 2416230 - RNA, 19 nt, Artificial Sequence
  Description of Artificial Sequence: Synthetic oligonucleotide
acacaguauguguaggaau

SEQ ID NO: 2416231 - RNA, 19 nt, Artificial Sequence
  Description of Artificial Sequence: Synthetic oligonucleotide
cucguaggcagucacgauc

SEQ ID NO: 2416232 - RNA, 19 nt, Artificial Sequence
  Description of Artificial Sequence: Synthetic oligonucleotide
ugugggaacagaguuucaa

SEQ ID NO: 2416233 - RNA, 19 nt, Artificial Sequence
  Description of Artificial Sequence: Synthetic oligonucleotide
ggucauacauguucaccgg

SEQ ID NO: 2416234 - RNA, 19 nt, Artificial Sequence
  Description of Artificial Sequence: Synthetic oligonucleotide
agcccaugcucguaggcag

SEQ ID NO: 2416235 - RNA, 19 nt, Artificial Sequence
  Description of Artificial Sequence: Synthetic oligonucleotide
cacuauucuucagguaugg

SEQ ID NO: 2416236 - RNA, 19 nt, Artificial Sequence
  Description of Artificial Sequence: Synthetic oligonucleotide
caacagcagaaacagcuuc

SEQ ID NO: 2416237 - RNA, 19 nt, Artificial Sequence
  Description of Artificial Sequence: Synthetic oligonucleotide
  modified_base (18)..(18): a, c, u, g, unknown or other
uuuuguaaauguggacuna

SEQ ID NO: 2416238 - RNA, 19 nt, Artificial Sequence
  Description of Artificial Sequence: Synthetic oligonucleotide
gacacaacugaaguuagua

SEQ ID NO: 2416239 - RNA, 19 nt, Artificial Sequence
  Description of Artificial Sequence: Synthetic oligonucleotide
uguccccagaacaugccaa

SEQ ID NO: 2416240 - RNA, 19 nt, Artificial Sequence
  Description of Artificial Sequence: Synthetic oligonucleotide
ucggugacguuguccagcc

SEQ ID NO: 2416241 - RNA, 19 nt, Artificial Sequence
  Description of Artificial Sequence: Synthetic oligonucleotide
ucgucucugacuggcacag

SEQ ID NO: 2416242 - RNA, 19 nt, Artificial Sequence
  Description of Artificial Sequence: Synthetic oligonucleotide
acgaacagaagaaagcuuu

SEQ ID NO: 2416243 - RNA, 19 nt, Artificial Sequence
  Description of Artificial Sequence: Synthetic oligonucleotide
augauuggggugccaaagu

SEQ ID NO: 2416244 - RNA, 19 nt, Artificial Sequence
  Description of Artificial Sequence: Synthetic oligonucleotide
ugauucuccacagcauaga

SEQ ID NO: 2416245 - RNA, 19 nt, Artificial Sequence
  Description of Artificial Sequence: Synthetic oligonucleotide
ugcuguucagcaucgucuc

SEQ ID NO: 2416246 - RNA, 19 nt, Artificial Sequence
  Description of Artificial Sequence: Synthetic oligonucleotide
ugcucguaggcagucacga

SEQ ID NO: 2416247 - RNA, 19 nt, Artificial Sequence
  Description of Artificial Sequence: Synthetic oligonucleotide
cauuacuaccaaaagcaua

SEQ ID NO: 2416248 - RNA, 19 nt, Artificial Sequence
  Description of Artificial Sequence: Synthetic oligonucleotide
aaggaugcagguagagugu

SEQ ID NO: 2416249 - RNA, 19 nt, Artificial Sequence
  Description of Artificial Sequence: Synthetic oligonucleotide
ucuuguggggagcaucaua

SEQ ID NO: 2416250 - RNA, 19 nt, Artificial Sequence
  Description of Artificial Sequence: Synthetic oligonucleotide
uucaugauuggggugccaa

SEQ ID NO: 2416251 - RNA, 19 nt, Artificial Sequence
  Description of Artificial Sequence: Synthetic oligonucleotide
auuagugaugguccccaaa

SEQ ID NO: 2416252 - RNA, 19 nt, Artificial Sequence
  Description of Artificial Sequence: Synthetic oligonucleotide
ggcuggagggccuucaacc

SEQ ID NO: 2416253 - RNA, 19 nt, Artificial Sequence
  Description of Artificial Sequence: Synthetic oligonucleotide
aauuagugaugguccccaa

SEQ ID NO: 2416254 - RNA, 19 nt, Artificial Sequence
  Description of Artificial Sequence: Synthetic oligonucleotide
uggaaucuaugaucaaauu

SEQ ID NO: 2416255 - RNA, 19 nt, Artificial Sequence
  Description of Artificial Sequence: Synthetic oligonucleotide
cacacuauucuucagguau

SEQ ID NO: 2416256 - RNA, 19 nt, Artificial Sequence
  Description of Artificial Sequence: Synthetic oligonucleotide
caugcucguaggcagucac

SEQ ID NO: 2416257 - RNA, 19 nt, Artificial Sequence
  Description of Artificial Sequence: Synthetic oligonucleotide
uucaaccaaguuguuguaa

SEQ ID NO: 2416258 - RNA, 19 nt, Artificial Sequence
  Description of Artificial Sequence: Synthetic oligonucleotide
uuuggguuuuccaggucuu

SEQ ID NO: 2416259 - RNA, 19 nt, Artificial Sequence
  Description of Artificial Sequence: Synthetic oligonucleotide
uagugugggaacagaguuu

SEQ ID NO: 2416260 - RNA, 19 nt, Artificial Sequence
  Description of Artificial Sequence: Synthetic oligonucleotide
  modified_base (10)..(10): a, c, u, g, unknown or other
auguggacunaaaagcauu

SEQ ID NO: 2416261 - RNA, 19 nt, Artificial Sequence
  Description of Artificial Sequence: Synthetic oligonucleotide
ggugacguuguccagccca

SEQ ID NO: 2416262 - RNA, 19 nt, Artificial Sequence
  Description of Artificial Sequence: Synthetic oligonucleotide
aucuaugaucaaauuuuga

SEQ ID NO: 2416263 - RNA, 19 nt, Artificial Sequence
  Description of Artificial Sequence: Synthetic oligonucleotide
ucaugauuggggugccaaa

SEQ ID NO: 2416264 - RNA, 19 nt, Artificial Sequence
  Description of Artificial Sequence: Synthetic oligonucleotide
cuguucagcaucgucucug

SEQ ID NO: 2416265 - RNA, 19 nt, Artificial Sequence
  Description of Artificial Sequence: Synthetic oligonucleotide
cucgacacaacugaaguua

SEQ ID NO: 2416266 - RNA, 19 nt, Artificial Sequence
  Description of Artificial Sequence: Synthetic oligonucleotide
caucgucucugacuggcac

SEQ ID NO: 2416267 - RNA, 19 nt, Artificial Sequence
  Description of Artificial Sequence: Synthetic oligonucleotide
agaguguccccagaacaug

SEQ ID NO: 2416268 - RNA, 19 nt, Artificial Sequence
  Description of Artificial Sequence: Synthetic oligonucleotide
cuauucuucagguaugguu

SEQ ID NO: 2416269 - RNA, 19 nt, Artificial Sequence
  Description of Artificial Sequence: Synthetic oligonucleotide
guaggcuuuccuucucgac

SEQ ID NO: 2416270 - RNA, 19 nt, Artificial Sequence
  Description of Artificial Sequence: Synthetic oligonucleotide
gaaugcggccugcuguuca

SEQ ID NO: 2416271 - RNA, 19 nt, Artificial Sequence
  Description of Artificial Sequence: Synthetic oligonucleotide
ggaaucuaugaucaaauuu

SEQ ID NO: 2416272 - RNA, 19 nt, Artificial Sequence
  Description of Artificial Sequence: Synthetic oligonucleotide
ucuucaugauuggggugcc

SEQ ID NO: 2416273 - RNA, 19 nt, Artificial Sequence
  Description of Artificial Sequence: Synthetic oligonucleotide
ucacgaucauucucccuuc

SEQ ID NO: 2416274 - RNA, 19 nt, Artificial Sequence
  Description of Artificial Sequence: Synthetic oligonucleotide
uuguggggucacauuacua

SEQ ID NO: 2416275 - RNA, 19 nt, Artificial Sequence
  Description of Artificial Sequence: Synthetic oligonucleotide
cagcauagacaacagcaga

SEQ ID NO: 2416276 - RNA, 19 nt, Artificial Sequence
  Description of Artificial Sequence: Synthetic oligonucleotide
aucauagugugggaacaga

SEQ ID NO: 2416277 - RNA, 19 nt, Artificial Sequence
  Description of Artificial Sequence: Synthetic oligonucleotide
uguaccugcagagcuucaa

SEQ ID NO: 2416278 - RNA, 19 nt, Artificial Sequence
  Description of Artificial Sequence: Synthetic oligonucleotide
acacuucaauuuuguaaau

SEQ ID NO: 2416279 - RNA, 19 nt, Artificial Sequence
  Description of Artificial Sequence: Synthetic oligonucleotide
cugaaguuaguauaucuuu

SEQ ID NO: 2416280 - RNA, 19 nt, Artificial Sequence
  Description of Artificial Sequence: Synthetic oligonucleotide
cuuugcugccaagcgcugg

SEQ ID NO: 2416281 - RNA, 19 nt, Artificial Sequence
  Description of Artificial Sequence: Synthetic oligonucleotide
uuccccuguguaccugcag

SEQ ID NO: 2416282 - RNA, 19 nt, Artificial Sequence
  Description of Artificial Sequence: Synthetic oligonucleotide
ucucggacccgguaggcuu

SEQ ID NO: 2416283 - RNA, 19 nt, Artificial Sequence
  Description of Artificial Sequence: Synthetic oligonucleotide
gucuuguuguagcucuuca

SEQ ID NO: 2416284 - RNA, 19 nt, Artificial Sequence
  Description of Artificial Sequence: Synthetic oligonucleotide
cagucacgaucauucuccc

SEQ ID NO: 2416285 - RNA, 19 nt, Artificial Sequence
  Description of Artificial Sequence: Synthetic oligonucleotide
uggcgguggacuuugucuu

SEQ ID NO: 2416286 - RNA, 19 nt, Artificial Sequence
  Description of Artificial Sequence: Synthetic oligonucleotide
gcccuuuggguuuuccagg

SEQ ID NO: 2416287 - RNA, 19 nt, Artificial Sequence
  Description of Artificial Sequence: Synthetic oligonucleotide
gucacgaucauucucccuu

SEQ ID NO: 2416288 - RNA, 19 nt, Artificial Sequence
  Description of Artificial Sequence: Synthetic oligonucleotide
agcauacacaguaugugua

SEQ ID NO: 2416289 - RNA, 19 nt, Artificial Sequence
  Description of Artificial Sequence: Synthetic oligonucleotide
gguagaguguccccagaac

SEQ ID NO: 2416290 - RNA, 19 nt, Artificial Sequence
  Description of Artificial Sequence: Synthetic oligonucleotide
aacaggaaugcggccugcu

SEQ ID NO: 2416291 - RNA, 19 nt, Artificial Sequence
  Description of Artificial Sequence: Synthetic oligonucleotide
cuggaaucuaugaucaaau

SEQ ID NO: 2416292 - RNA, 19 nt, Artificial Sequence
  Description of Artificial Sequence: Synthetic oligonucleotide
acauuacuaccaaaagcau

SEQ ID NO: 2416293 - RNA, 19 nt, Artificial Sequence
  Description of Artificial Sequence: Synthetic oligonucleotide
cucccuucaagcugaccuc

SEQ ID NO: 2416294 - RNA, 19 nt, Artificial Sequence
  Description of Artificial Sequence: Synthetic oligonucleotide
ugucuuguuguagcucuuc

SEQ ID NO: 2416295 - RNA, 19 nt, Artificial Sequence
  Description of Artificial Sequence: Synthetic oligonucleotide
cagaacaugccaacaggaa

SEQ ID NO: 2416296 - RNA, 19 nt, Artificial Sequence
  Description of Artificial Sequence: Synthetic oligonucleotide
agcuuccucggugacguug

SEQ ID NO: 2416297 - RNA, 19 nt, Artificial Sequence
  Description of Artificial Sequence: Synthetic oligonucleotide
cauagugugggaacagagu

SEQ ID NO: 2416298 - RNA, 19 nt, Artificial Sequence
  Description of Artificial Sequence: Synthetic oligonucleotide
uuggguuuuccaggucuug

SEQ ID NO: 2416299 - RNA, 19 nt, Artificial Sequence
  Description of Artificial Sequence: Synthetic oligonucleotide
uggggugccaaaguuucau

SEQ ID NO: 2416300 - RNA, 19 nt, Artificial Sequence
  Description of Artificial Sequence: Synthetic oligonucleotide
uugccacaaacugcugagc

SEQ ID NO: 2416301 - RNA, 19 nt, Artificial Sequence
  Description of Artificial Sequence: Synthetic oligonucleotide
ugccaacaggaaugcggcc

SEQ ID NO: 2416302 - RNA, 19 nt, Artificial Sequence
  Description of Artificial Sequence: Synthetic oligonucleotide
ggugauucuccacagcaua

SEQ ID NO: 2416303 - RNA, 19 nt, Artificial Sequence
  Description of Artificial Sequence: Synthetic oligonucleotide
gggugccaaaguuucauga

SEQ ID NO: 2416304 - RNA, 19 nt, Artificial Sequence
  Description of Artificial Sequence: Synthetic oligonucleotide
cugcuguucagcaucgucu

SEQ ID NO: 2416305 - RNA, 19 nt, Artificial Sequence
  Description of Artificial Sequence: Synthetic oligonucleotide
  modified_base (8)..(8): a, c, u, g, unknown or other
guggacunaaaagcauuca

SEQ ID NO: 2416306 - RNA, 19 nt, Artificial Sequence
  Description of Artificial Sequence: Synthetic oligonucleotide
aggaaugcggccugcuguu

SEQ ID NO: 2416307 - RNA, 19 nt, Artificial Sequence
  Description of Artificial Sequence: Synthetic oligonucleotide
acgaucauucucccuucaa

SEQ ID NO: 2416308 - RNA, 19 nt, Artificial Sequence
  Description of Artificial Sequence: Synthetic oligonucleotide
ugaccucuuguggggagca

SEQ ID NO: 2416309 - RNA, 19 nt, Artificial Sequence
  Description of Artificial Sequence: Synthetic oligonucleotide
acuauucuucagguauggu

SEQ ID NO: 2416310 - RNA, 19 nt, Artificial Sequence
  Description of Artificial Sequence: Synthetic oligonucleotide
ccuucaaccaaguuguugu

SEQ ID NO: 2416311 - RNA, 19 nt, Artificial Sequence
  Description of Artificial Sequence: Synthetic oligonucleotide
aaggcuggagggccuucaa

SEQ ID NO: 2416312 - RNA, 19 nt, Artificial Sequence
  Description of Artificial Sequence: Synthetic oligonucleotide
acaugccaacaggaaugcg

SEQ ID NO: 2416313 - RNA, 19 nt, Artificial Sequence
  Description of Artificial Sequence: Synthetic oligonucleotide
aacuuccccuguguaccug

SEQ ID NO: 2416314 - RNA, 19 nt, Artificial Sequence
  Description of Artificial Sequence: Synthetic oligonucleotide
cgaucauucucccuucaag

SEQ ID NO: 2416315 - RNA, 19 nt, Artificial Sequence
  Description of Artificial Sequence: Synthetic oligonucleotide
gggauccuuugccacaaac

SEQ ID NO: 2416316 - RNA, 19 nt, Artificial Sequence
  Description of Artificial Sequence: Synthetic oligonucleotide
gagcaucauagugugggaa

SEQ ID NO: 2416317 - RNA, 19 nt, Artificial Sequence
  Description of Artificial Sequence: Synthetic oligonucleotide
guaagccaccacacuauuc

SEQ ID NO: 2416318 - RNA, 19 nt, Artificial Sequence
  Description of Artificial Sequence: Synthetic oligonucleotide
aguauaucuuugaggugau

SEQ ID NO: 2416319 - RNA, 19 nt, Artificial Sequence
  Description of Artificial Sequence: Synthetic oligonucleotide
ggagcagaaaaggcuggag

SEQ ID NO: 2416320 - RNA, 19 nt, Artificial Sequence
  Description of Artificial Sequence: Synthetic oligonucleotide
augguuguggggucacauu

SEQ ID NO: 2416321 - RNA, 19 nt, Artificial Sequence
  Description of Artificial Sequence: Synthetic oligonucleotide
gcagguagaguguccccag

SEQ ID NO: 2416322 - RNA, 19 nt, Artificial Sequence
  Description of Artificial Sequence: Synthetic oligonucleotide
uggggauccuuugccacaa

SEQ ID NO: 2416323 - RNA, 19 nt, Artificial Sequence
  Description of Artificial Sequence: Synthetic oligonucleotide
cuggcgguggacuuugucu

SEQ ID NO: 2416324 - RNA, 19 nt, Artificial Sequence
  Description of Artificial Sequence: Synthetic oligonucleotide
cagguaugguugugggguc

SEQ ID NO: 2416325 - RNA, 19 nt, Artificial Sequence
  Description of Artificial Sequence: Synthetic oligonucleotide
augcucguaggcagucacg

SEQ ID NO: 2416326 - RNA, 19 nt, Artificial Sequence
  Description of Artificial Sequence: Synthetic oligonucleotide
uugucuuguuguagcucuu

SEQ ID NO: 2416327 - RNA, 19 nt, Artificial Sequence
  Description of Artificial Sequence: Synthetic oligonucleotide
guggggagcaucauagugu

SEQ ID NO: 2416328 - RNA, 19 nt, Artificial Sequence
  Description of Artificial Sequence: Synthetic oligonucleotide
uuacuaccaaaagcauauu

SEQ ID NO: 2416329 - RNA, 19 nt, Artificial Sequence
  Description of Artificial Sequence: Synthetic oligonucleotide
caucucggacccgguaggc

SEQ ID NO: 2416330 - RNA, 19 nt, Artificial Sequence
  Description of Artificial Sequence: Synthetic oligonucleotide
ccaucucggacccgguagg

SEQ ID NO: 2416331 - RNA, 19 nt, Artificial Sequence
  Description of Artificial Sequence: Synthetic oligonucleotide
agguaugguugugggguca

SEQ ID NO: 2416332 - RNA, 19 nt, Artificial Sequence
  Description of Artificial Sequence: Synthetic oligonucleotide
gguaggcuuuccuucucga

SEQ ID NO: 2416333 - RNA, 19 nt, Artificial Sequence
  Description of Artificial Sequence: Synthetic oligonucleotide
gaacagaguuucaaaucau

SEQ ID NO: 2416334 - RNA, 19 nt, Artificial Sequence
  Description of Artificial Sequence: Synthetic oligonucleotide
gauuggggugccaaaguuu

SEQ ID NO: 2416335 - RNA, 19 nt, Artificial Sequence
  Description of Artificial Sequence: Synthetic oligonucleotide
  modified_base (6)..(6): a, c, u, g, unknown or other
ggacunaaaagcauucaau

SEQ ID NO: 2416336 - RNA, 19 nt, Artificial Sequence
  Description of Artificial Sequence: Synthetic oligonucleotide
uucucccuucaagcugacc

SEQ ID NO: 2416337 - RNA, 19 nt, Artificial Sequence
  Description of Artificial Sequence: Synthetic oligonucleotide
cagcaucgucucugacugg

SEQ ID NO: 2416338 - RNA, 19 nt, Artificial Sequence
  Description of Artificial Sequence: Synthetic oligonucleotide
gguuguggggucacauuac

SEQ ID NO: 2416339 - RNA, 19 nt, Artificial Sequence
  Description of Artificial Sequence: Synthetic oligonucleotide
ugacguuguccagcccaug

SEQ ID NO: 2416340 - RNA, 19 nt, Artificial Sequence
  Description of Artificial Sequence: Synthetic oligonucleotide
caguauguguaggaaugaa

SEQ ID NO: 2416341 - RNA, 19 nt, Artificial Sequence
  Description of Artificial Sequence: Synthetic oligonucleotide
ccaacaggaaugcggccug

SEQ ID NO: 2416342 - RNA, 19 nt, Artificial Sequence
  Description of Artificial Sequence: Synthetic oligonucleotide
aucucggacccgguaggcu

SEQ ID NO: 2416343 - RNA, 19 nt, Artificial Sequence
  Description of Artificial Sequence: Synthetic oligonucleotide
gaacuuccccuguguaccu

SEQ ID NO: 2416344 - RNA, 19 nt, Artificial Sequence
  Description of Artificial Sequence: Synthetic oligonucleotide
ccugcuguucagcaucguc

SEQ ID NO: 2416345 - RNA, 19 nt, Artificial Sequence
  Description of Artificial Sequence: Synthetic oligonucleotide
ggugccaaaguuucaugau

SEQ ID NO: 2416346 - RNA, 19 nt, Artificial Sequence
  Description of Artificial Sequence: Synthetic oligonucleotide
agcugaccucuugugggga

SEQ ID NO: 2416347 - RNA, 19 nt, Artificial Sequence
  Description of Artificial Sequence: Synthetic oligonucleotide
cugccaagcgcuggcggug

SEQ ID NO: 2416348 - RNA, 19 nt, Artificial Sequence
  Description of Artificial Sequence: Synthetic oligonucleotide
cacaaacugcugagcgcca

SEQ ID NO: 2416349 - RNA, 19 nt, Artificial Sequence
  Description of Artificial Sequence: Synthetic oligonucleotide
cacgaucauucucccuuca

SEQ ID NO: 2416350 - RNA, 19 nt, Artificial Sequence
  Description of Artificial Sequence: Synthetic oligonucleotide
gugaugguccccaaauuuu

SEQ ID NO: 2416351 - RNA, 19 nt, Artificial Sequence
  Description of Artificial Sequence: Synthetic oligonucleotide
ggcgguggacuuugucuug

SEQ ID NO: 2416352 - RNA, 19 nt, Artificial Sequence
  Description of Artificial Sequence: Synthetic oligonucleotide
cuggagggccuucaaccaa

SEQ ID NO: 2416353 - RNA, 19 nt, Artificial Sequence
  Description of Artificial Sequence: Synthetic oligonucleotide
gguaugguuguggggucac

SEQ ID NO: 2416354 - RNA, 19 nt, Artificial Sequence
  Description of Artificial Sequence: Synthetic oligonucleotide
aucauccuggggauccuuu

SEQ ID NO: 2416355 - RNA, 19 nt, Artificial Sequence
  Description of Artificial Sequence: Synthetic oligonucleotide
ggggucacauuacuaccaa

SEQ ID NO: 2416356 - RNA, 19 nt, Artificial Sequence
  Description of Artificial Sequence: Synthetic oligonucleotide
cuuccccuguguaccugca

SEQ ID NO: 2416357 - RNA, 19 nt, Artificial Sequence
  Description of Artificial Sequence: Synthetic oligonucleotide
gacccgguaggcuuuccuu

SEQ ID NO: 2416358 - RNA, 19 nt, Artificial Sequence
  Description of Artificial Sequence: Synthetic oligonucleotide
cagguagaguguccccaga

SEQ ID NO: 2416359 - RNA, 19 nt, Artificial Sequence
  Description of Artificial Sequence: Synthetic oligonucleotide
ccagcccaugcucguaggc

SEQ ID NO: 2416360 - RNA, 19 nt, Artificial Sequence
  Description of Artificial Sequence: Synthetic oligonucleotide
uuucugcccuuuggguuuu

SEQ ID NO: 2416361 - RNA, 19 nt, Artificial Sequence
  Description of Artificial Sequence: Synthetic oligonucleotide
cgguaggcuuuccuucucg

SEQ ID NO: 2416362 - RNA, 19 nt, Artificial Sequence
  Description of Artificial Sequence: Synthetic oligonucleotide
gggucacauuacuaccaaa

SEQ ID NO: 2416363 - RNA, 19 nt, Artificial Sequence
  Description of Artificial Sequence: Synthetic oligonucleotide
ccaccacacuauucuucag

SEQ ID NO: 2416364 - RNA, 19 nt, Artificial Sequence
  Description of Artificial Sequence: Synthetic oligonucleotide
guaugguuguggggucaca

SEQ ID NO: 2416365 - RNA, 19 nt, Artificial Sequence
  Description of Artificial Sequence: Synthetic oligonucleotide
cuuccucggugacguuguc

SEQ ID NO: 2416366 - RNA, 19 nt, Artificial Sequence
  Description of Artificial Sequence: Synthetic oligonucleotide
gccaacaggaaugcggccu

SEQ ID NO: 2416367 - RNA, 19 nt, Artificial Sequence
  Description of Artificial Sequence: Synthetic oligonucleotide
gggguucugaggcuggaau

SEQ ID NO: 2416368 - RNA, 19 nt, Artificial Sequence
  Description of Artificial Sequence: Synthetic oligonucleotide
ggggagcaucauagugugg

SEQ ID NO: 2416369 - RNA, 19 nt, Artificial Sequence
  Description of Artificial Sequence: Synthetic oligonucleotide
cccuguguaccugcagagc

SEQ ID NO: 2416370 - RNA, 19 nt, Artificial Sequence
  Description of Artificial Sequence: Synthetic oligonucleotide
cuucaugauuggggugcca

SEQ ID NO: 2416371 - RNA, 19 nt, Artificial Sequence
  Description of Artificial Sequence: Synthetic oligonucleotide
ccuucucgacacaacugaa

SEQ ID NO: 2416372 - RNA, 19 nt, Artificial Sequence
  Description of Artificial Sequence: Synthetic oligonucleotide
gcaaggaugcagguagagu

SEQ ID NO: 2416373 - RNA, 19 nt, Artificial Sequence
  Description of Artificial Sequence: Synthetic oligonucleotide
cuguguaccugcagagcuu

SEQ ID NO: 2416374 - RNA, 19 nt, Artificial Sequence
  Description of Artificial Sequence: Synthetic oligonucleotide
agcgcuggcgguggacuuu

SEQ ID NO: 2416375 - RNA, 19 nt, Artificial Sequence
  Description of Artificial Sequence: Synthetic oligonucleotide
ucggacccgguaggcuuuc

SEQ ID NO: 2416376 - RNA, 19 nt, Artificial Sequence
  Description of Artificial Sequence: Synthetic oligonucleotide
ggcuggaaucuaugaucaa

SEQ ID NO: 2416377 - RNA, 19 nt, Artificial Sequence
  Description of Artificial Sequence: Synthetic oligonucleotide
cagaaacagcuuccucggu

SEQ ID NO: 2416378 - RNA, 19 nt, Artificial Sequence
  Description of Artificial Sequence: Synthetic oligonucleotide
gcugccaagcgcuggcggu

SEQ ID NO: 2416379 - RNA, 19 nt, Artificial Sequence
  Description of Artificial Sequence: Synthetic oligonucleotide
ggaaugcggccugcuguuc

SEQ ID NO: 2416380 - RNA, 19 nt, Artificial Sequence
  Description of Artificial Sequence: Synthetic oligonucleotide
gugacguuguccagcccau

SEQ ID NO: 2416381 - RNA, 19 nt, Artificial Sequence
  Description of Artificial Sequence: Synthetic oligonucleotide
cccuuuggguuuuccaggu

SEQ ID NO: 2416382 - RNA, 19 nt, Artificial Sequence
  Description of Artificial Sequence: Synthetic oligonucleotide
gcugagcgccagagagggg

SEQ ID NO: 2416383 - RNA, 19 nt, Artificial Sequence
  Description of Artificial Sequence: Synthetic oligonucleotide
ccacacuauucuucaggua

SEQ ID NO: 2416384 - RNA, 19 nt, Artificial Sequence
  Description of Artificial Sequence: Synthetic oligonucleotide
gcagagcuucaaacagguc

SEQ ID NO: 2416385 - RNA, 19 nt, Artificial Sequence
  Description of Artificial Sequence: Synthetic oligonucleotide
ggacccgguaggcuuuccu

SEQ ID NO: 2416386 - RNA, 19 nt, Artificial Sequence
  Description of Artificial Sequence: Synthetic oligonucleotide
gcgcuggcgguggacuuug

SEQ ID NO: 2416387 - RNA, 19 nt, Artificial Sequence
  Description of Artificial Sequence: Synthetic oligonucleotide
guauaucuuugaggugauu

SEQ ID NO: 2416388 - RNA, 19 nt, Artificial Sequence
  Description of Artificial Sequence: Synthetic oligonucleotide
gcaucgucucugacuggca

SEQ ID NO: 2416389 - RNA, 19 nt, Artificial Sequence
  Description of Artificial Sequence: Synthetic oligonucleotide
uucugcccuuuggguuuuc

SEQ ID NO: 2416390 - RNA, 19 nt, Artificial Sequence
  Description of Artificial Sequence: Synthetic oligonucleotide
ccaagcgcuggcgguggac

SEQ ID NO: 2416391 - RNA, 19 nt, Artificial Sequence
  Description of Artificial Sequence: Synthetic oligonucleotide
cccgguaggcuuuccuucu

SEQ ID NO: 2416392 - RNA, 19 nt, Artificial Sequence
  Description of Artificial Sequence: Synthetic oligonucleotide
gcucguaggcagucacgau

SEQ ID NO: 2416393 - RNA, 19 nt, Artificial Sequence
  Description of Artificial Sequence: Synthetic oligonucleotide
gcgguggacuuugucuugu

SEQ ID NO: 2416394 - RNA, 19 nt, Artificial Sequence
  Description of Artificial Sequence: Synthetic oligonucleotide
ccaugcucguaggcaguca

SEQ ID NO: 2416395 - RNA, 19 nt, Artificial Sequence
  Description of Artificial Sequence: Synthetic oligonucleotide
ggggauccuuugccacaaa

SEQ ID NO: 2416396 - RNA, 19 nt, Artificial Sequence
  Description of Artificial Sequence: Synthetic oligonucleotide
cgacacaacugaaguuagu

SEQ ID NO: 2416397 - RNA, 19 nt, Artificial Sequence
  Description of Artificial Sequence: Synthetic oligonucleotide
gcggccugcuguucagcau

SEQ ID NO: 2416398 - RNA, 19 nt, Artificial Sequence
  Description of Artificial Sequence: Synthetic oligonucleotide
cccuucaagcugaccucuu

SEQ ID NO: 2416399 - RNA, 19 nt, Artificial Sequence
  Description of Artificial Sequence: Synthetic oligonucleotide
cggacccgguaggcuuucc

SEQ ID NO: 2416400 - RNA, 19 nt, Artificial Sequence
  Description of Artificial Sequence: Synthetic oligonucleotide
ggccuucaaccaaguuguu

SEQ ID NO: 2416401 - RNA, 19 nt, Artificial Sequence
  Description of Artificial Sequence: Synthetic oligonucleotide
cgguggacuuugucuuguu

SEQ ID NO: 2416402 - RNA, 19 nt, Artificial Sequence
  Description of Artificial Sequence: Synthetic oligonucleotide
cgcuggcgguggacuuugu

SEQ ID NO: 2416403 - RNA, 19 nt, Artificial Sequence
  Description of Artificial Sequence: Synthetic oligonucleotide
aauauauucacacaaaucg

SEQ ID NO: 2416404 - RNA, 19 nt, Artificial Sequence
  Description of Artificial Sequence: Synthetic oligonucleotide
aauauuaucauacauuuca

SEQ ID NO: 2416405 - RNA, 19 nt, Artificial Sequence
  Description of Artificial Sequence: Synthetic oligonucleotide
aauaauaauagcuuaaaau

SEQ ID NO: 2416406 - RNA, 19 nt, Artificial Sequence
  Description of Artificial Sequence: Synthetic oligonucleotide
gaaaauacguauuucauag

SEQ ID NO: 2416407 - RNA, 19 nt, Artificial Sequence
  Description of Artificial Sequence: Synthetic oligonucleotide
acaaauuucaguucaaaac

SEQ ID NO: 2416408 - RNA, 19 nt, Artificial Sequence
  Description of Artificial Sequence: Synthetic oligonucleotide
uuaaugcuaauaauaauag

SEQ ID NO: 2416409 - RNA, 19 nt, Artificial Sequence
  Description of Artificial Sequence: Synthetic oligonucleotide
guuaguguaaacuuaacag

SEQ ID NO: 2416410 - RNA, 19 nt, Artificial Sequence
  Description of Artificial Sequence: Synthetic oligonucleotide
aaaauaagcuuaauaaacg

SEQ ID NO: 2416411 - RNA, 19 nt, Artificial Sequence
  Description of Artificial Sequence: Synthetic oligonucleotide
uucacuauggaauagucag

SEQ ID NO: 2416412 - RNA, 19 nt, Artificial Sequence
  Description of Artificial Sequence: Synthetic oligonucleotide
auaauaauagcuuaaaauu

SEQ ID NO: 2416413 - RNA, 19 nt, Artificial Sequence
  Description of Artificial Sequence: Synthetic oligonucleotide
auuaggauuaaaugguggc

SEQ ID NO: 2416414 - RNA, 19 nt, Artificial Sequence
  Description of Artificial Sequence: Synthetic oligonucleotide
uuaauaaacgaauacaaau

SEQ ID NO: 2416415 - RNA, 19 nt, Artificial Sequence
  Description of Artificial Sequence: Synthetic oligonucleotide
uaguguaaacuuaacaggg

SEQ ID NO: 2416416 - RNA, 19 nt, Artificial Sequence
  Description of Artificial Sequence: Synthetic oligonucleotide
uaaacgaauacaaauuuca

SEQ ID NO: 2416417 - RNA, 19 nt, Artificial Sequence
  Description of Artificial Sequence: Synthetic oligonucleotide
aauagguuaaugcuaauaa

SEQ ID NO: 2416418 - RNA, 19 nt, Artificial Sequence
  Description of Artificial Sequence: Synthetic oligonucleotide
aagcuuaauaaacgaauac

SEQ ID NO: 2416419 - RNA, 19 nt, Artificial Sequence
  Description of Artificial Sequence: Synthetic oligonucleotide
aaaaggaugauucuggauu

SEQ ID NO: 2416420 - RNA, 19 nt, Artificial Sequence
  Description of Artificial Sequence: Synthetic oligonucleotide
aaagccaacaaaugcauca

SEQ ID NO: 2416421 - RNA, 19 nt, Artificial Sequence
  Description of Artificial Sequence: Synthetic oligonucleotide
ucagaagacacgcacacag

SEQ ID NO: 2416422 - RNA, 19 nt, Artificial Sequence
  Description of Artificial Sequence: Synthetic oligonucleotide
uauauucacacaaaucggc

SEQ ID NO: 2416423 - RNA, 19 nt, Artificial Sequence
  Description of Artificial Sequence: Synthetic oligonucleotide
aaauaagcuuaauaaacga

SEQ ID NO: 2416424 - RNA, 19 nt, Artificial Sequence
  Description of Artificial Sequence: Synthetic oligonucleotide
aaaguuccugauaucaucc

SEQ ID NO: 2416425 - RNA, 19 nt, Artificial Sequence
  Description of Artificial Sequence: Synthetic oligonucleotide
aauaaacgaauacaaauuu

SEQ ID NO: 2416426 - RNA, 19 nt, Artificial Sequence
  Description of Artificial Sequence: Synthetic oligonucleotide
uccagaauggaccacgccg

SEQ ID NO: 2416427 - RNA, 19 nt, Artificial Sequence
  Description of Artificial Sequence: Synthetic oligonucleotide
aguucuuccagaauggacc

SEQ ID NO: 2416428 - RNA, 19 nt, Artificial Sequence
  Description of Artificial Sequence: Synthetic oligonucleotide
auagucagaagacacgcac

SEQ ID NO: 2416429 - RNA, 19 nt, Artificial Sequence
  Description of Artificial Sequence: Synthetic oligonucleotide
agaaagucuucuuuggcac

SEQ ID NO: 2416430 - RNA, 19 nt, Artificial Sequence
  Description of Artificial Sequence: Synthetic oligonucleotide
aacgaauacaaauuucagu

SEQ ID NO: 2416431 - RNA, 19 nt, Artificial Sequence
  Description of Artificial Sequence: Synthetic oligonucleotide
aacacuggcauucacuaug

SEQ ID NO: 2416432 - RNA, 19 nt, Artificial Sequence
  Description of Artificial Sequence: Synthetic oligonucleotide
uaagucuucugaaggaggg

SEQ ID NO: 2416433 - RNA, 19 nt, Artificial Sequence
  Description of Artificial Sequence: Synthetic oligonucleotide
uauacauaguugaauauau

SEQ ID NO: 2416434 - RNA, 19 nt, Artificial Sequence
  Description of Artificial Sequence: Synthetic oligonucleotide
uguuaguguaaacuuaaca

SEQ ID NO: 2416435 - RNA, 19 nt, Artificial Sequence
  Description of Artificial Sequence: Synthetic oligonucleotide
uaauaauagcuuaaaauuu

SEQ ID NO: 2416436 - RNA, 19 nt, Artificial Sequence
  Description of Artificial Sequence: Synthetic oligonucleotide
ucaagaaagucuucuuugg

SEQ ID NO: 2416437 - RNA, 19 nt, Artificial Sequence
  Description of Artificial Sequence: Synthetic oligonucleotide
aagaaagucuucuuuggca

SEQ ID NO: 2416438 - RNA, 19 nt, Artificial Sequence
  Description of Artificial Sequence: Synthetic oligonucleotide
uaauaaacgaauacaaauu

SEQ ID NO: 2416439 - RNA, 19 nt, Artificial Sequence
  Description of Artificial Sequence: Synthetic oligonucleotide
aaauacguauuucauaguu

SEQ ID NO: 2416440 - RNA, 19 nt, Artificial Sequence
  Description of Artificial Sequence: Synthetic oligonucleotide
auagggaacugcuucuucc

SEQ ID NO: 2416441 - RNA, 19 nt, Artificial Sequence
  Description of Artificial Sequence: Synthetic oligonucleotide
uaagaaaagccaacaaaug

SEQ ID NO: 2416442 - RNA, 19 nt, Artificial Sequence
  Description of Artificial Sequence: Synthetic oligonucleotide
auacauuucagcaacaucu

SEQ ID NO: 2416443 - RNA, 19 nt, Artificial Sequence
  Description of Artificial Sequence: Synthetic oligonucleotide
uauggaauagucagaagac

SEQ ID NO: 2416444 - RNA, 19 nt, Artificial Sequence
  Description of Artificial Sequence: Synthetic oligonucleotide
cauaguugaauauauucac

SEQ ID NO: 2416445 - RNA, 19 nt, Artificial Sequence
  Description of Artificial Sequence: Synthetic oligonucleotide
aaaugaggcacugguauac

SEQ ID NO: 2416446 - RNA, 19 nt, Artificial Sequence
  Description of Artificial Sequence: Synthetic oligonucleotide
uucaagaaagucuucuuug

SEQ ID NO: 2416447 - RNA, 19 nt, Artificial Sequence
  Description of Artificial Sequence: Synthetic oligonucleotide
aaaaggaggcagcccauac

SEQ ID NO: 2416448 - RNA, 19 nt, Artificial Sequence
  Description of Artificial Sequence: Synthetic oligonucleotide
cauacagcaucucauagag

SEQ ID NO: 2416449 - RNA, 19 nt, Artificial Sequence
  Description of Artificial Sequence: Synthetic oligonucleotide
aauaagucuucugaaggag

SEQ ID NO: 2416450 - RNA, 19 nt, Artificial Sequence
  Description of Artificial Sequence: Synthetic oligonucleotide
uuuuguacgaggucagucc

SEQ ID NO: 2416451 - RNA, 19 nt, Artificial Sequence
  Description of Artificial Sequence: Synthetic oligonucleotide
aaauuucaguucaaaacuc

SEQ ID NO: 2416452 - RNA, 19 nt, Artificial Sequence
  Description of Artificial Sequence: Synthetic oligonucleotide
ugaauauauucacacaaau

SEQ ID NO: 2416453 - RNA, 19 nt, Artificial Sequence
  Description of Artificial Sequence: Synthetic oligonucleotide
uagguuaaugcuaauaaua

SEQ ID NO: 2416454 - RNA, 19 nt, Artificial Sequence
  Description of Artificial Sequence: Synthetic oligonucleotide
uaguugaauauauucacac

SEQ ID NO: 2416455 - RNA, 19 nt, Artificial Sequence
  Description of Artificial Sequence: Synthetic oligonucleotide
cauuucagcaacaucucgg

SEQ ID NO: 2416456 - RNA, 19 nt, Artificial Sequence
  Description of Artificial Sequence: Synthetic oligonucleotide
gaugauucuggauuucaag

SEQ ID NO: 2416457 - RNA, 19 nt, Artificial Sequence
  Description of Artificial Sequence: Synthetic oligonucleotide
uauuaucauacauuucagc

SEQ ID NO: 2416458 - RNA, 19 nt, Artificial Sequence
  Description of Artificial Sequence: Synthetic oligonucleotide
uucaacauuacauguaaaa

SEQ ID NO: 2416459 - RNA, 19 nt, Artificial Sequence
  Description of Artificial Sequence: Synthetic oligonucleotide
aguuuaggggcuuaugaag

SEQ ID NO: 2416460 - RNA, 19 nt, Artificial Sequence
  Description of Artificial Sequence: Synthetic oligonucleotide
agucagaagacacgcacac

SEQ ID NO: 2416461 - RNA, 19 nt, Artificial Sequence
  Description of Artificial Sequence: Synthetic oligonucleotide
uaggauuaaaugguggcgg

SEQ ID NO: 2416462 - RNA, 19 nt, Artificial Sequence
  Description of Artificial Sequence: Synthetic oligonucleotide
guuucugaacaucaaacug

SEQ ID NO: 2416463 - RNA, 19 nt, Artificial Sequence
  Description of Artificial Sequence: Synthetic oligonucleotide
caucucauagagaacggcg

SEQ ID NO: 2416464 - RNA, 19 nt, Artificial Sequence
  Description of Artificial Sequence: Synthetic oligonucleotide
uuuggcaccaagucgauuc

SEQ ID NO: 2416465 - RNA, 19 nt, Artificial Sequence
  Description of Artificial Sequence: Synthetic oligonucleotide
ugaaaugcccuauuucuug

SEQ ID NO: 2416466 - RNA, 19 nt, Artificial Sequence
  Description of Artificial Sequence: Synthetic oligonucleotide
cauuaggauuaaauggugg

SEQ ID NO: 2416467 - RNA, 19 nt, Artificial Sequence
  Description of Artificial Sequence: Synthetic oligonucleotide
uuuugaaaugcccuauuuc

SEQ ID NO: 2416468 - RNA, 19 nt, Artificial Sequence
  Description of Artificial Sequence: Synthetic oligonucleotide
gaggcacugguauacauag

SEQ ID NO: 2416469 - RNA, 19 nt, Artificial Sequence
  Description of Artificial Sequence: Synthetic oligonucleotide
auaguuuucaacauuacau

SEQ ID NO: 2416470 - RNA, 19 nt, Artificial Sequence
  Description of Artificial Sequence: Synthetic oligonucleotide
aguuuucaacauuacaugu

SEQ ID NO: 2416471 - RNA, 19 nt, Artificial Sequence
  Description of Artificial Sequence: Synthetic oligonucleotide
uguguuaguguaaacuuaa

SEQ ID NO: 2416472 - RNA, 19 nt, Artificial Sequence
  Description of Artificial Sequence: Synthetic oligonucleotide
ugguuucugaacaucaaac

SEQ ID NO: 2416473 - RNA, 19 nt, Artificial Sequence
  Description of Artificial Sequence: Synthetic oligonucleotide
aagacacgcacacagaaua

SEQ ID NO: 2416474 - RNA, 19 nt, Artificial Sequence
  Description of Artificial Sequence: Synthetic oligonucleotide
aacaucaaacuguucacaa

SEQ ID NO: 2416475 - RNA, 19 nt, Artificial Sequence
  Description of Artificial Sequence: Synthetic oligonucleotide
aauaauagcuuaaaauuuu

SEQ ID NO: 2416476 - RNA, 19 nt, Artificial Sequence
  Description of Artificial Sequence: Synthetic oligonucleotide
cuauggaauagucagaaga

SEQ ID NO: 2416477 - RNA, 19 nt, Artificial Sequence
  Description of Artificial Sequence: Synthetic oligonucleotide
gaauagucagaagacacgc

SEQ ID NO: 2416478 - RNA, 19 nt, Artificial Sequence
  Description of Artificial Sequence: Synthetic oligonucleotide
uaaugcuaauaauaauagc

SEQ ID NO: 2416479 - RNA, 19 nt, Artificial Sequence
  Description of Artificial Sequence: Synthetic oligonucleotide
ucugcaagcuugaauuugc

SEQ ID NO: 2416480 - RNA, 19 nt, Artificial Sequence
  Description of Artificial Sequence: Synthetic oligonucleotide
ccacauuaggauuaaaugg

SEQ ID NO: 2416481 - RNA, 19 nt, Artificial Sequence
  Description of Artificial Sequence: Synthetic oligonucleotide
auauauucacacaaaucgg

SEQ ID NO: 2416482 - RNA, 19 nt, Artificial Sequence
  Description of Artificial Sequence: Synthetic oligonucleotide
uacagcagaaaauacguau

SEQ ID NO: 2416483 - RNA, 19 nt, Artificial Sequence
  Description of Artificial Sequence: Synthetic oligonucleotide
ugaagaauauuaucauaca

SEQ ID NO: 2416484 - RNA, 19 nt, Artificial Sequence
  Description of Artificial Sequence: Synthetic oligonucleotide
augauucuggauuucaaga

SEQ ID NO: 2416485 - RNA, 19 nt, Artificial Sequence
  Description of Artificial Sequence: Synthetic oligonucleotide
uccugaucacuucaggugc

SEQ ID NO: 2416486 - RNA, 19 nt, Artificial Sequence
  Description of Artificial Sequence: Synthetic oligonucleotide
ucuugcuuacagcagaaaa

SEQ ID NO: 2416487 - RNA, 19 nt, Artificial Sequence
  Description of Artificial Sequence: Synthetic oligonucleotide
cugaacaucaaacuguuca

SEQ ID NO: 2416488 - RNA, 19 nt, Artificial Sequence
  Description of Artificial Sequence: Synthetic oligonucleotide
uugaauuugcccaaugguu

SEQ ID NO: 2416489 - RNA, 19 nt, Artificial Sequence
  Description of Artificial Sequence: Synthetic oligonucleotide
uaagcuuaauaaacgaaua

SEQ ID NO: 2416490 - RNA, 19 nt, Artificial Sequence
  Description of Artificial Sequence: Synthetic oligonucleotide
ugaauuugcccaaugguuu

SEQ ID NO: 2416491 - RNA, 19 nt, Artificial Sequence
  Description of Artificial Sequence: Synthetic oligonucleotide
uacaaauuucaguucaaaa

SEQ ID NO: 2416492 - RNA, 19 nt, Artificial Sequence
  Description of Artificial Sequence: Synthetic oligonucleotide
aaacgaauacaaauuucag

SEQ ID NO: 2416493 - RNA, 19 nt, Artificial Sequence
  Description of Artificial Sequence: Synthetic oligonucleotide
auaaacgaauacaaauuuc

SEQ ID NO: 2416494 - RNA, 19 nt, Artificial Sequence
  Description of Artificial Sequence: Synthetic oligonucleotide
aaaauacguauuucauagu

SEQ ID NO: 2416495 - RNA, 19 nt, Artificial Sequence
  Description of Artificial Sequence: Synthetic oligonucleotide
guuaaugcuaauaauaaua

SEQ ID NO: 2416496 - RNA, 19 nt, Artificial Sequence
  Description of Artificial Sequence: Synthetic oligonucleotide
agucuucugaaggaggggc

SEQ ID NO: 2416497 - RNA, 19 nt, Artificial Sequence
  Description of Artificial Sequence: Synthetic oligonucleotide
uugaauauauucacacaaa

SEQ ID NO: 2416498 - RNA, 19 nt, Artificial Sequence
  Description of Artificial Sequence: Synthetic oligonucleotide
uuucuaggaguucuuccag

SEQ ID NO: 2416499 - RNA, 19 nt, Artificial Sequence
  Description of Artificial Sequence: Synthetic oligonucleotide
cuauuucuugcuuacagca

SEQ ID NO: 2416500 - RNA, 19 nt, Artificial Sequence
  Description of Artificial Sequence: Synthetic oligonucleotide
aaaggaugauucuggauuu

SEQ ID NO: 2416501 - RNA, 19 nt, Artificial Sequence
  Description of Artificial Sequence: Synthetic oligonucleotide
aaguuuaggggcuuaugaa

SEQ ID NO: 2416502 - RNA, 19 nt, Artificial Sequence
  Description of Artificial Sequence: Synthetic oligonucleotide
aauaagcuuaauaaacgaa

SEQ ID NO: 2416503 - RNA, 19 nt, Artificial Sequence
  Description of Artificial Sequence: Synthetic oligonucleotide
accaagucgauucugccug

SEQ ID NO: 2416504 - RNA, 19 nt, Artificial Sequence
  Description of Artificial Sequence: Synthetic oligonucleotide
cagcaucucauagagaacg

SEQ ID NO: 2416505 - RNA, 19 nt, Artificial Sequence
  Description of Artificial Sequence: Synthetic oligonucleotide
aguuccugauaucauccgg

SEQ ID NO: 2416506 - RNA, 19 nt, Artificial Sequence
  Description of Artificial Sequence: Synthetic oligonucleotide
uaugaagaauauuaucaua

SEQ ID NO: 2416507 - RNA, 19 nt, Artificial Sequence
  Description of Artificial Sequence: Synthetic oligonucleotide
uuuguacgaggucagucca

SEQ ID NO: 2416508 - RNA, 19 nt, Artificial Sequence
  Description of Artificial Sequence: Synthetic oligonucleotide
auacguauuucauaguuuu

SEQ ID NO: 2416509 - RNA, 19 nt, Artificial Sequence
  Description of Artificial Sequence: Synthetic oligonucleotide
gaauauauucacacaaauc

SEQ ID NO: 2416510 - RNA, 19 nt, Artificial Sequence
  Description of Artificial Sequence: Synthetic oligonucleotide
agcuuaauaaacgaauaca

SEQ ID NO: 2416511 - RNA, 19 nt, Artificial Sequence
  Description of Artificial Sequence: Synthetic oligonucleotide
aauuucaguucaaaacuca

SEQ ID NO: 2416512 - RNA, 19 nt, Artificial Sequence
  Description of Artificial Sequence: Synthetic oligonucleotide
agaaaauacguauuucaua

SEQ ID NO: 2416513 - RNA, 19 nt, Artificial Sequence
  Description of Artificial Sequence: Synthetic oligonucleotide
auauucacacaaaucggcg

SEQ ID NO: 2416514 - RNA, 19 nt, Artificial Sequence
  Description of Artificial Sequence: Synthetic oligonucleotide
gaauggaccacgccgugag

SEQ ID NO: 2416515 - RNA, 19 nt, Artificial Sequence
  Description of Artificial Sequence: Synthetic oligonucleotide
aguugaauauauucacaca

SEQ ID NO: 2416516 - RNA, 19 nt, Artificial Sequence
  Description of Artificial Sequence: Synthetic oligonucleotide
aaucggcguuuccaucucc

SEQ ID NO: 2416517 - RNA, 19 nt, Artificial Sequence
  Description of Artificial Sequence: Synthetic oligonucleotide
uauucacacaaaucggcgu

SEQ ID NO: 2416518 - RNA, 19 nt, Artificial Sequence
  Description of Artificial Sequence: Synthetic oligonucleotide
auaagcuuaauaaacgaau

SEQ ID NO: 2416519 - RNA, 19 nt, Artificial Sequence
  Description of Artificial Sequence: Synthetic oligonucleotide
acacagaauagggaacugc

SEQ ID NO: 2416520 - RNA, 19 nt, Artificial Sequence
  Description of Artificial Sequence: Synthetic oligonucleotide
gaaaugcccuauuucuugc

SEQ ID NO: 2416521 - RNA, 19 nt, Artificial Sequence
  Description of Artificial Sequence: Synthetic oligonucleotide
uagggaacugcuucuuccg

SEQ ID NO: 2416522 - RNA, 19 nt, Artificial Sequence
  Description of Artificial Sequence: Synthetic oligonucleotide
caaauuucaguucaaaacu

SEQ ID NO: 2416523 - RNA, 19 nt, Artificial Sequence
  Description of Artificial Sequence: Synthetic oligonucleotide
uagagaacggcgcccaggc

SEQ ID NO: 2416524 - RNA, 19 nt, Artificial Sequence
  Description of Artificial Sequence: Synthetic oligonucleotide
aggauuaaaugguggcggg

SEQ ID NO: 2416525 - RNA, 19 nt, Artificial Sequence
  Description of Artificial Sequence: Synthetic oligonucleotide
auuaaaugguggcgggauc

SEQ ID NO: 2416526 - RNA, 19 nt, Artificial Sequence
  Description of Artificial Sequence: Synthetic oligonucleotide
cagaauagggaacugcuuc

SEQ ID NO: 2416527 - RNA, 19 nt, Artificial Sequence
  Description of Artificial Sequence: Synthetic oligonucleotide
gauaucauccggucccgcc

SEQ ID NO: 2416528 - RNA, 19 nt, Artificial Sequence
  Description of Artificial Sequence: Synthetic oligonucleotide
uuaaaugguggcgggaucu

SEQ ID NO: 2416529 - RNA, 19 nt, Artificial Sequence
  Description of Artificial Sequence: Synthetic oligonucleotide
caaaguuccugauaucauc

SEQ ID NO: 2416530 - RNA, 19 nt, Artificial Sequence
  Description of Artificial Sequence: Synthetic oligonucleotide
aaauagguuaaugcuaaua

SEQ ID NO: 2416531 - RNA, 19 nt, Artificial Sequence
  Description of Artificial Sequence: Synthetic oligonucleotide
aaaucggcguuuccaucuc

SEQ ID NO: 2416532 - RNA, 19 nt, Artificial Sequence
  Description of Artificial Sequence: Synthetic oligonucleotide
auagguuaaugcuaauaau

SEQ ID NO: 2416533 - RNA, 19 nt, Artificial Sequence
  Description of Artificial Sequence: Synthetic oligonucleotide
cuuaauaaacgaauacaaa

SEQ ID NO: 2416534 - RNA, 19 nt, Artificial Sequence
  Description of Artificial Sequence: Synthetic oligonucleotide
caagaaagucuucuuuggc

SEQ ID NO: 2416535 - RNA, 19 nt, Artificial Sequence
  Description of Artificial Sequence: Synthetic oligonucleotide
auucuggauuucaagaaag

SEQ ID NO: 2416536 - RNA, 19 nt, Artificial Sequence
  Description of Artificial Sequence: Synthetic oligonucleotide
aaaagccaacaaaugcauc

SEQ ID NO: 2416537 - RNA, 19 nt, Artificial Sequence
  Description of Artificial Sequence: Synthetic oligonucleotide
agaagacacgcacacagaa

SEQ ID NO: 2416538 - RNA, 19 nt, Artificial Sequence
  Description of Artificial Sequence: Synthetic oligonucleotide
ucuuccgugaagacugugu

SEQ ID NO: 2416539 - RNA, 19 nt, Artificial Sequence
  Description of Artificial Sequence: Synthetic oligonucleotide
guugucauagggcuguuuc

SEQ ID NO: 2416540 - RNA, 19 nt, Artificial Sequence
  Description of Artificial Sequence: Synthetic oligonucleotide
auauuaucauacauuucag

SEQ ID NO: 2416541 - RNA, 19 nt, Artificial Sequence
  Description of Artificial Sequence: Synthetic oligonucleotide
acguauuucauaguuuuca

SEQ ID NO: 2416542 - RNA, 19 nt, Artificial Sequence
  Description of Artificial Sequence: Synthetic oligonucleotide
uacgaggucaguccagcug

SEQ ID NO: 2416543 - RNA, 19 nt, Artificial Sequence
  Description of Artificial Sequence: Synthetic oligonucleotide
cuuacagcagaaaauacgu

SEQ ID NO: 2416544 - RNA, 19 nt, Artificial Sequence
  Description of Artificial Sequence: Synthetic oligonucleotide
gccacauuaggauuaaaug

SEQ ID NO: 2416545 - RNA, 19 nt, Artificial Sequence
  Description of Artificial Sequence: Synthetic oligonucleotide
agcagaaaauacguauuuc

SEQ ID NO: 2416546 - RNA, 19 nt, Artificial Sequence
  Description of Artificial Sequence: Synthetic oligonucleotide
ugcaagcuugaauuugccc

SEQ ID NO: 2416547 - RNA, 19 nt, Artificial Sequence
  Description of Artificial Sequence: Synthetic oligonucleotide
aggucaguccagcugagug

SEQ ID NO: 2416548 - RNA, 19 nt, Artificial Sequence
  Description of Artificial Sequence: Synthetic oligonucleotide
ucuaggaguucuuccagaa

SEQ ID NO: 2416549 - RNA, 19 nt, Artificial Sequence
  Description of Artificial Sequence: Synthetic oligonucleotide
uucuggauuucaagaaagu

SEQ ID NO: 2416550 - RNA, 19 nt, Artificial Sequence
  Description of Artificial Sequence: Synthetic oligonucleotide
gagaacggcgcccaggcac

SEQ ID NO: 2416551 - RNA, 19 nt, Artificial Sequence
  Description of Artificial Sequence: Synthetic oligonucleotide
gcuuacagcagaaaauacg

SEQ ID NO: 2416552 - RNA, 19 nt, Artificial Sequence
  Description of Artificial Sequence: Synthetic oligonucleotide
uggccucaaguuuaggggc

SEQ ID NO: 2416553 - RNA, 19 nt, Artificial Sequence
  Description of Artificial Sequence: Synthetic oligonucleotide
acaaaucggcguuuccauc

SEQ ID NO: 2416554 - RNA, 19 nt, Artificial Sequence
  Description of Artificial Sequence: Synthetic oligonucleotide
uccugauaucauccggucc

SEQ ID NO: 2416555 - RNA, 19 nt, Artificial Sequence
  Description of Artificial Sequence: Synthetic oligonucleotide
uugucauagggcuguuucc

SEQ ID NO: 2416556 - RNA, 19 nt, Artificial Sequence
  Description of Artificial Sequence: Synthetic oligonucleotide
cauucacuauggaauaguc

SEQ ID NO: 2416557 - RNA, 19 nt, Artificial Sequence
  Description of Artificial Sequence: Synthetic oligonucleotide
gcuugaauuugcccaaugg

SEQ ID NO: 2416558 - RNA, 19 nt, Artificial Sequence
  Description of Artificial Sequence: Synthetic oligonucleotide
uucugaacaucaaacuguu

SEQ ID NO: 2416559 - RNA, 19 nt, Artificial Sequence
  Description of Artificial Sequence: Synthetic oligonucleotide
gacacgcacacagaauagg

SEQ ID NO: 2416560 - RNA, 19 nt, Artificial Sequence
  Description of Artificial Sequence: Synthetic oligonucleotide
caaaacucagcucuuuuga

SEQ ID NO: 2416561 - RNA, 19 nt, Artificial Sequence
  Description of Artificial Sequence: Synthetic oligonucleotide
ugcuuacagcagaaaauac

SEQ ID NO: 2416562 - RNA, 19 nt, Artificial Sequence
  Description of Artificial Sequence: Synthetic oligonucleotide
uugcuuacagcagaaaaua

SEQ ID NO: 2416563 - RNA, 19 nt, Artificial Sequence
  Description of Artificial Sequence: Synthetic oligonucleotide
ucacuauggaauagucaga

SEQ ID NO: 2416564 - RNA, 19 nt, Artificial Sequence
  Description of Artificial Sequence: Synthetic oligonucleotide
caaguuuaggggcuuauga

SEQ ID NO: 2416565 - RNA, 19 nt, Artificial Sequence
  Description of Artificial Sequence: Synthetic oligonucleotide
aauacguauuucauaguuu

SEQ ID NO: 2416566 - RNA, 19 nt, Artificial Sequence
  Description of Artificial Sequence: Synthetic oligonucleotide
ccugauaucauccgguccc

SEQ ID NO: 2416567 - RNA, 19 nt, Artificial Sequence
  Description of Artificial Sequence: Synthetic oligonucleotide
gacugugucaaaguuccug

SEQ ID NO: 2416568 - RNA, 19 nt, Artificial Sequence
  Description of Artificial Sequence: Synthetic oligonucleotide
cacugguauacauaguuga

SEQ ID NO: 2416569 - RNA, 19 nt, Artificial Sequence
  Description of Artificial Sequence: Synthetic oligonucleotide
ugaggcucacuccuggccu

SEQ ID NO: 2416570 - RNA, 19 nt, Artificial Sequence
  Description of Artificial Sequence: Synthetic oligonucleotide
cauacauuucagcaacauc

SEQ ID NO: 2416571 - RNA, 19 nt, Artificial Sequence
  Description of Artificial Sequence: Synthetic oligonucleotide
acugcuucuuccgugaaga

SEQ ID NO: 2416572 - RNA, 19 nt, Artificial Sequence
  Description of Artificial Sequence: Synthetic oligonucleotide
gaagacugugucaaaguuc

SEQ ID NO: 2416573 - RNA, 19 nt, Artificial Sequence
  Description of Artificial Sequence: Synthetic oligonucleotide
gcaagcuugaauuugccca

SEQ ID NO: 2416574 - RNA, 19 nt, Artificial Sequence
  Description of Artificial Sequence: Synthetic oligonucleotide
gauguguuaguguaaacuu

SEQ ID NO: 2416575 - RNA, 19 nt, Artificial Sequence
  Description of Artificial Sequence: Synthetic oligonucleotide
acuauggaauagucagaag

SEQ ID NO: 2416576 - RNA, 19 nt, Artificial Sequence
  Description of Artificial Sequence: Synthetic oligonucleotide
aaaauagguuaaugcuaau

SEQ ID NO: 2416577 - RNA, 19 nt, Artificial Sequence
  Description of Artificial Sequence: Synthetic oligonucleotide
cacauuaggauuaaauggu

SEQ ID NO: 2416578 - RNA, 19 nt, Artificial Sequence
  Description of Artificial Sequence: Synthetic oligonucleotide
acgaggucaguccagcuga

SEQ ID NO: 2416579 - RNA, 19 nt, Artificial Sequence
  Description of Artificial Sequence: Synthetic oligonucleotide
ucauagggcuguuuccuga

SEQ ID NO: 2416580 - RNA, 19 nt, Artificial Sequence
  Description of Artificial Sequence: Synthetic oligonucleotide
caaugguuucugaacauca

SEQ ID NO: 2416581 - RNA, 19 nt, Artificial Sequence
  Description of Artificial Sequence: Synthetic oligonucleotide
ugcccaaugguuucugaac

SEQ ID NO: 2416582 - RNA, 19 nt, Artificial Sequence
  Description of Artificial Sequence: Synthetic oligonucleotide
aauggaccacgccgugagg

SEQ ID NO: 2416583 - RNA, 19 nt, Artificial Sequence
  Description of Artificial Sequence: Synthetic oligonucleotide
agguuaaugcuaauaauaa

SEQ ID NO: 2416584 - RNA, 19 nt, Artificial Sequence
  Description of Artificial Sequence: Synthetic oligonucleotide
ugaaggaggggcguaagaa

SEQ ID NO: 2416585 - RNA, 19 nt, Artificial Sequence
  Description of Artificial Sequence: Synthetic oligonucleotide
aguguugucauagggcugu

SEQ ID NO: 2416586 - RNA, 19 nt, Artificial Sequence
  Description of Artificial Sequence: Synthetic oligonucleotide
acgcacacagaauagggaa

SEQ ID NO: 2416587 - RNA, 19 nt, Artificial Sequence
  Description of Artificial Sequence: Synthetic oligonucleotide
uuucuugcuuacagcagaa

SEQ ID NO: 2416588 - RNA, 19 nt, Artificial Sequence
  Description of Artificial Sequence: Synthetic oligonucleotide
uccgugaagacugugucaa

SEQ ID NO: 2416589 - RNA, 19 nt, Artificial Sequence
  Description of Artificial Sequence: Synthetic oligonucleotide
uuuaggggcuuaugaagaa

SEQ ID NO: 2416590 - RNA, 19 nt, Artificial Sequence
  Description of Artificial Sequence: Synthetic oligonucleotide
aaugcccuauuucuugcuu

SEQ ID NO: 2416591 - RNA, 19 nt, Artificial Sequence
  Description of Artificial Sequence: Synthetic oligonucleotide
uucuaggaguucuuccaga

SEQ ID NO: 2416592 - RNA, 19 nt, Artificial Sequence
  Description of Artificial Sequence: Synthetic oligonucleotide
acacgcacacagaauaggg

SEQ ID NO: 2416593 - RNA, 19 nt, Artificial Sequence
  Description of Artificial Sequence: Synthetic oligonucleotide
uguacgaggucaguccagc

SEQ ID NO: 2416594 - RNA, 19 nt, Artificial Sequence
  Description of Artificial Sequence: Synthetic oligonucleotide
gcuucuuccgugaagacug

SEQ ID NO: 2416595 - RNA, 19 nt, Artificial Sequence
  Description of Artificial Sequence: Synthetic oligonucleotide
agccaacaaaugcaucauc

SEQ ID NO: 2416596 - RNA, 19 nt, Artificial Sequence
  Description of Artificial Sequence: Synthetic oligonucleotide
aaggaugauucuggauuuc

SEQ ID NO: 2416597 - RNA, 19 nt, Artificial Sequence
  Description of Artificial Sequence: Synthetic oligonucleotide
aauagucagaagacacgca

SEQ ID NO: 2416598 - RNA, 19 nt, Artificial Sequence
  Description of Artificial Sequence: Synthetic oligonucleotide
augguuucugaacaucaaa

SEQ ID NO: 2416599 - RNA, 19 nt, Artificial Sequence
  Description of Artificial Sequence: Synthetic oligonucleotide
auagagaacggcgcccagg

SEQ ID NO: 2416600 - RNA, 19 nt, Artificial Sequence
  Description of Artificial Sequence: Synthetic oligonucleotide
uacguauuucauaguuuuc

SEQ ID NO: 2416601 - RNA, 19 nt, Artificial Sequence
  Description of Artificial Sequence: Synthetic oligonucleotide
ugaggcacugguauacaua

SEQ ID NO: 2416602 - RNA, 19 nt, Artificial Sequence
  Description of Artificial Sequence: Synthetic oligonucleotide
guuuaggggcuuaugaaga

SEQ ID NO: 2416603 - RNA, 19 nt, Artificial Sequence
  Description of Artificial Sequence: Synthetic oligonucleotide
cuuccgugaagacuguguc

SEQ ID NO: 2416604 - RNA, 19 nt, Artificial Sequence
  Description of Artificial Sequence: Synthetic oligonucleotide
uuacagcagaaaauacgua

SEQ ID NO: 2416605 - RNA, 19 nt, Artificial Sequence
  Description of Artificial Sequence: Synthetic oligonucleotide
ucaaguuuaggggcuuaug

SEQ ID NO: 2416606 - RNA, 19 nt, Artificial Sequence
  Description of Artificial Sequence: Synthetic oligonucleotide
aucacuucaggugcaaggu

SEQ ID NO: 2416607 - RNA, 19 nt, Artificial Sequence
  Description of Artificial Sequence: Synthetic oligonucleotide
ucauagagaacggcgccca

SEQ ID NO: 2416608 - RNA, 19 nt, Artificial Sequence
  Description of Artificial Sequence: Synthetic oligonucleotide
acauuaggauuaaauggug

SEQ ID NO: 2416609 - RNA, 19 nt, Artificial Sequence
  Description of Artificial Sequence: Synthetic oligonucleotide
acacaaaucggcguuucca

SEQ ID NO: 2416610 - RNA, 19 nt, Artificial Sequence
  Description of Artificial Sequence: Synthetic oligonucleotide
acaucaaacuguucacaaa

SEQ ID NO: 2416611 - RNA, 19 nt, Artificial Sequence
  Description of Artificial Sequence: Synthetic oligonucleotide
agcucuuuugaaaugcccu

SEQ ID NO: 2416612 - RNA, 19 nt, Artificial Sequence
  Description of Artificial Sequence: Synthetic oligonucleotide
agucgauucugccuguuuu

SEQ ID NO: 2416613 - RNA, 19 nt, Artificial Sequence
  Description of Artificial Sequence: Synthetic oligonucleotide
uuccgugaagacuguguca

SEQ ID NO: 2416614 - RNA, 19 nt, Artificial Sequence
  Description of Artificial Sequence: Synthetic oligonucleotide
cuugaauuugcccaauggu

SEQ ID NO: 2416615 - RNA, 19 nt, Artificial Sequence
  Description of Artificial Sequence: Synthetic oligonucleotide
ugcccuauuucuugcuuac

SEQ ID NO: 2416616 - RNA, 19 nt, Artificial Sequence
  Description of Artificial Sequence: Synthetic oligonucleotide
cuggcauucacuauggaau

SEQ ID NO: 2416617 - RNA, 19 nt, Artificial Sequence
  Description of Artificial Sequence: Synthetic oligonucleotide
aaugguuucugaacaucaa

SEQ ID NO: 2416618 - RNA, 19 nt, Artificial Sequence
  Description of Artificial Sequence: Synthetic oligonucleotide
gaaggaggggcguaagaaa

SEQ ID NO: 2416619 - RNA, 19 nt, Artificial Sequence
  Description of Artificial Sequence: Synthetic oligonucleotide
auucacuauggaauaguca

SEQ ID NO: 2416620 - RNA, 19 nt, Artificial Sequence
  Description of Artificial Sequence: Synthetic oligonucleotide
ccuauuucuugcuuacagc

SEQ ID NO: 2416621 - RNA, 19 nt, Artificial Sequence
  Description of Artificial Sequence: Synthetic oligonucleotide
ccuggccucaaguuuaggg

SEQ ID NO: 2416622 - RNA, 19 nt, Artificial Sequence
  Description of Artificial Sequence: Synthetic oligonucleotide
aguguaaacuuaacaggga

SEQ ID NO: 2416623 - RNA, 19 nt, Artificial Sequence
  Description of Artificial Sequence: Synthetic oligonucleotide
aaugaggcacugguauaca

SEQ ID NO: 2416624 - RNA, 19 nt, Artificial Sequence
  Description of Artificial Sequence: Synthetic oligonucleotide
guucuuccagaauggacca

SEQ ID NO: 2416625 - RNA, 19 nt, Artificial Sequence
  Description of Artificial Sequence: Synthetic oligonucleotide
cucauagagaacggcgccc

SEQ ID NO: 2416626 - RNA, 19 nt, Artificial Sequence
  Description of Artificial Sequence: Synthetic oligonucleotide
guuuccaucuccucugcaa

SEQ ID NO: 2416627 - RNA, 19 nt, Artificial Sequence
  Description of Artificial Sequence: Synthetic oligonucleotide
uuccugauaucauccgguc

SEQ ID NO: 2416628 - RNA, 19 nt, Artificial Sequence
  Description of Artificial Sequence: Synthetic oligonucleotide
uggcauucacuauggaaua

SEQ ID NO: 2416629 - RNA, 19 nt, Artificial Sequence
  Description of Artificial Sequence: Synthetic oligonucleotide
uaucauccggucccgccac

SEQ ID NO: 2416630 - RNA, 19 nt, Artificial Sequence
  Description of Artificial Sequence: Synthetic oligonucleotide
auagggcuguuuccugauc

SEQ ID NO: 2416631 - RNA, 19 nt, Artificial Sequence
  Description of Artificial Sequence: Synthetic oligonucleotide
uuugcccaaugguuucuga

SEQ ID NO: 2416632 - RNA, 19 nt, Artificial Sequence
  Description of Artificial Sequence: Synthetic oligonucleotide
uugcccaaugguuucugaa

SEQ ID NO: 2416633 - RNA, 19 nt, Artificial Sequence
  Description of Artificial Sequence: Synthetic oligonucleotide
agaacggcgcccaggcacc

SEQ ID NO: 2416634 - RNA, 19 nt, Artificial Sequence
  Description of Artificial Sequence: Synthetic oligonucleotide
agucuucuuuggcaccaag

SEQ ID NO: 2416635 - RNA, 19 nt, Artificial Sequence
  Description of Artificial Sequence: Synthetic oligonucleotide
aagccaacaaaugcaucau

SEQ ID NO: 2416636 - RNA, 19 nt, Artificial Sequence
  Description of Artificial Sequence: Synthetic oligonucleotide
ucugaacaucaaacuguuc

SEQ ID NO: 2416637 - RNA, 19 nt, Artificial Sequence
  Description of Artificial Sequence: Synthetic oligonucleotide
cuccagaacacuggcauuc

SEQ ID NO: 2416638 - RNA, 19 nt, Artificial Sequence
  Description of Artificial Sequence: Synthetic oligonucleotide
uuggcaccaagucgauucu

SEQ ID NO: 2416639 - RNA, 19 nt, Artificial Sequence
  Description of Artificial Sequence: Synthetic oligonucleotide
ugucaaaguuccugauauc

SEQ ID NO: 2416640 - RNA, 19 nt, Artificial Sequence
  Description of Artificial Sequence: Synthetic oligonucleotide
acgccgugaggcucacucc

SEQ ID NO: 2416641 - RNA, 19 nt, Artificial Sequence
  Description of Artificial Sequence: Synthetic oligonucleotide
acggcgcccaggcaccacc

SEQ ID NO: 2416642 - RNA, 19 nt, Artificial Sequence
  Description of Artificial Sequence: Synthetic oligonucleotide
ucuucugaaggaggggcgu

SEQ ID NO: 2416643 - RNA, 19 nt, Artificial Sequence
  Description of Artificial Sequence: Synthetic oligonucleotide
uccggucccgccacauuag

SEQ ID NO: 2416644 - RNA, 19 nt, Artificial Sequence
  Description of Artificial Sequence: Synthetic oligonucleotide
ugaucacuucaggugcaag

SEQ ID NO: 2416645 - RNA, 19 nt, Artificial Sequence
  Description of Artificial Sequence: Synthetic oligonucleotide
cccuauuucuugcuuacag

SEQ ID NO: 2416646 - RNA, 19 nt, Artificial Sequence
  Description of Artificial Sequence: Synthetic oligonucleotide
agcaucucauagagaacgg

SEQ ID NO: 2416647 - RNA, 19 nt, Artificial Sequence
  Description of Artificial Sequence: Synthetic oligonucleotide
ucugaaggaggggcguaag

SEQ ID NO: 2416648 - RNA, 19 nt, Artificial Sequence
  Description of Artificial Sequence: Synthetic oligonucleotide
cacgccgugaggcucacuc

SEQ ID NO: 2416649 - RNA, 19 nt, Artificial Sequence
  Description of Artificial Sequence: Synthetic oligonucleotide
gaggggcguaagaaaagcc

SEQ ID NO: 2416650 - RNA, 19 nt, Artificial Sequence
  Description of Artificial Sequence: Synthetic oligonucleotide
aggaugauucuggauuuca

SEQ ID NO: 2416651 - RNA, 19 nt, Artificial Sequence
  Description of Artificial Sequence: Synthetic oligonucleotide
aagucgauucugccuguuu

SEQ ID NO: 2416652 - RNA, 19 nt, Artificial Sequence
  Description of Artificial Sequence: Synthetic oligonucleotide
aggggcguaagaaaagcca

SEQ ID NO: 2416653 - RNA, 19 nt, Artificial Sequence
  Description of Artificial Sequence: Synthetic oligonucleotide
ucacuucaggugcaaggua

SEQ ID NO: 2416654 - RNA, 19 nt, Artificial Sequence
  Description of Artificial Sequence: Synthetic oligonucleotide
gggcuuaugaagaauauua

SEQ ID NO: 2416655 - RNA, 19 nt, Artificial Sequence
  Description of Artificial Sequence: Synthetic oligonucleotide
cacagaauagggaacugcu

SEQ ID NO: 2416656 - RNA, 19 nt, Artificial Sequence
  Description of Artificial Sequence: Synthetic oligonucleotide
gucauagggcuguuuccug

SEQ ID NO: 2416657 - RNA, 19 nt, Artificial Sequence
  Description of Artificial Sequence: Synthetic oligonucleotide
caguccagcugagugauuc

SEQ ID NO: 2416658 - RNA, 19 nt, Artificial Sequence
  Description of Artificial Sequence: Synthetic oligonucleotide
cacacaaaucggcguuucc

SEQ ID NO: 2416659 - RNA, 19 nt, Artificial Sequence
  Description of Artificial Sequence: Synthetic oligonucleotide
caagcuugaauuugcccaa

SEQ ID NO: 2416660 - RNA, 19 nt, Artificial Sequence
  Description of Artificial Sequence: Synthetic oligonucleotide
caaaucggcguuuccaucu

SEQ ID NO: 2416661 - RNA, 19 nt, Artificial Sequence
  Description of Artificial Sequence: Synthetic oligonucleotide
gcuaauaauaauagcuuaa

SEQ ID NO: 2416662 - RNA, 19 nt, Artificial Sequence
  Description of Artificial Sequence: Synthetic oligonucleotide
cugauaucauccggucccg

SEQ ID NO: 2416663 - RNA, 19 nt, Artificial Sequence
  Description of Artificial Sequence: Synthetic oligonucleotide
aaugguggcgggaucuuuu

SEQ ID NO: 2416664 - RNA, 19 nt, Artificial Sequence
  Description of Artificial Sequence: Synthetic oligonucleotide
acagcagaaaauacguauu

SEQ ID NO: 2416665 - RNA, 19 nt, Artificial Sequence
  Description of Artificial Sequence: Synthetic oligonucleotide
agacacgcacacagaauag

SEQ ID NO: 2416666 - RNA, 19 nt, Artificial Sequence
  Description of Artificial Sequence: Synthetic oligonucleotide
ggugcaagguacuccggug

SEQ ID NO: 2416667 - RNA, 19 nt, Artificial Sequence
  Description of Artificial Sequence: Synthetic oligonucleotide
augaggcacugguauacau

SEQ ID NO: 2416668 - RNA, 19 nt, Artificial Sequence
  Description of Artificial Sequence: Synthetic oligonucleotide
ucccgccacauuaggauua

SEQ ID NO: 2416669 - RNA, 19 nt, Artificial Sequence
  Description of Artificial Sequence: Synthetic oligonucleotide
cagaaaauacguauuucau

SEQ ID NO: 2416670 - RNA, 19 nt, Artificial Sequence
  Description of Artificial Sequence: Synthetic oligonucleotide
uuaggggcuuaugaagaau

SEQ ID NO: 2416671 - RNA, 19 nt, Artificial Sequence
  Description of Artificial Sequence: Synthetic oligonucleotide
acugguauacauaguugaa

SEQ ID NO: 2416672 - RNA, 19 nt, Artificial Sequence
  Description of Artificial Sequence: Synthetic oligonucleotide
cacgcacacagaauaggga

SEQ ID NO: 2416673 - RNA, 19 nt, Artificial Sequence
  Description of Artificial Sequence: Synthetic oligonucleotide
caguguugucauagggcug

SEQ ID NO: 2416674 - RNA, 19 nt, Artificial Sequence
  Description of Artificial Sequence: Synthetic oligonucleotide
ggaacugcuucuuccguga

SEQ ID NO: 2416675 - RNA, 19 nt, Artificial Sequence
  Description of Artificial Sequence: Synthetic oligonucleotide
augcccuauuucuugcuua

SEQ ID NO: 2416676 - RNA, 19 nt, Artificial Sequence
  Description of Artificial Sequence: Synthetic oligonucleotide
auguguuaguguaaacuua

SEQ ID NO: 2416677 - RNA, 19 nt, Artificial Sequence
  Description of Artificial Sequence: Synthetic oligonucleotide
cuuggauguguuaguguaa

SEQ ID NO: 2416678 - RNA, 19 nt, Artificial Sequence
  Description of Artificial Sequence: Synthetic oligonucleotide
ggauguguuaguguaaacu

SEQ ID NO: 2416679 - RNA, 19 nt, Artificial Sequence
  Description of Artificial Sequence: Synthetic oligonucleotide
uccagaacacuggcauuca

SEQ ID NO: 2416680 - RNA, 19 nt, Artificial Sequence
  Description of Artificial Sequence: Synthetic oligonucleotide
auccggucccgccacauua

SEQ ID NO: 2416681 - RNA, 19 nt, Artificial Sequence
  Description of Artificial Sequence: Synthetic oligonucleotide
gggaacugcuucuuccgug

SEQ ID NO: 2416682 - RNA, 19 nt, Artificial Sequence
  Description of Artificial Sequence: Synthetic oligonucleotide
aguccagcugagugauuca

SEQ ID NO: 2416683 - RNA, 19 nt, Artificial Sequence
  Description of Artificial Sequence: Synthetic oligonucleotide
auuugcccaaugguuucug

SEQ ID NO: 2416684 - RNA, 19 nt, Artificial Sequence
  Description of Artificial Sequence: Synthetic oligonucleotide
ugauaucauccggucccgc

SEQ ID NO: 2416685 - RNA, 19 nt, Artificial Sequence
  Description of Artificial Sequence: Synthetic oligonucleotide
cccauacagcaucucauag

SEQ ID NO: 2416686 - RNA, 19 nt, Artificial Sequence
  Description of Artificial Sequence: Synthetic oligonucleotide
ucacacaaaucggcguuuc

SEQ ID NO: 2416687 - RNA, 19 nt, Artificial Sequence
  Description of Artificial Sequence: Synthetic oligonucleotide
ggaggggcguaagaaaagc

SEQ ID NO: 2416688 - RNA, 19 nt, Artificial Sequence
  Description of Artificial Sequence: Synthetic oligonucleotide
cauagagaacggcgcccag

SEQ ID NO: 2416689 - RNA, 19 nt, Artificial Sequence
  Description of Artificial Sequence: Synthetic oligonucleotide
uucugaaggaggggcguaa

SEQ ID NO: 2416690 - RNA, 19 nt, Artificial Sequence
  Description of Artificial Sequence: Synthetic oligonucleotide
agaauggaccacgccguga

SEQ ID NO: 2416691 - RNA, 19 nt, Artificial Sequence
  Description of Artificial Sequence: Synthetic oligonucleotide
auacauaguugaauauauu

SEQ ID NO: 2416692 - RNA, 19 nt, Artificial Sequence
  Description of Artificial Sequence: Synthetic oligonucleotide
aaaugguggcgggaucuuu

SEQ ID NO: 2416693 - RNA, 19 nt, Artificial Sequence
  Description of Artificial Sequence: Synthetic oligonucleotide
uucacacaaaucggcguuu

SEQ ID NO: 2416694 - RNA, 19 nt, Artificial Sequence
  Description of Artificial Sequence: Synthetic oligonucleotide
guguuaguguaaacuuaac

SEQ ID NO: 2416695 - RNA, 19 nt, Artificial Sequence
  Description of Artificial Sequence: Synthetic oligonucleotide
agcaacaucucggcaguaa

SEQ ID NO: 2416696 - RNA, 19 nt, Artificial Sequence
  Description of Artificial Sequence: Synthetic oligonucleotide
ggcaccaagucgauucugc

SEQ ID NO: 2416697 - RNA, 19 nt, Artificial Sequence
  Description of Artificial Sequence: Synthetic oligonucleotide
uucuuccgugaagacugug

SEQ ID NO: 2416698 - RNA, 19 nt, Artificial Sequence
  Description of Artificial Sequence: Synthetic oligonucleotide
gguuaaugcuaauaauaau

SEQ ID NO: 2416699 - RNA, 19 nt, Artificial Sequence
  Description of Artificial Sequence: Synthetic oligonucleotide
uucuugcuuacagcagaaa

SEQ ID NO: 2416700 - RNA, 19 nt, Artificial Sequence
  Description of Artificial Sequence: Synthetic oligonucleotide
guuccugauaucauccggu

SEQ ID NO: 2416701 - RNA, 19 nt, Artificial Sequence
  Description of Artificial Sequence: Synthetic oligonucleotide
gcaccaagucgauucugcc

SEQ ID NO: 2416702 - RNA, 19 nt, Artificial Sequence
  Description of Artificial Sequence: Synthetic oligonucleotide
cagaauggaccacgccgug

SEQ ID NO: 2416703 - RNA, 19 nt, Artificial Sequence
  Description of Artificial Sequence: Synthetic oligonucleotide
ggcauucacuauggaauag

SEQ ID NO: 2416704 - RNA, 19 nt, Artificial Sequence
  Description of Artificial Sequence: Synthetic oligonucleotide
cacacagaauagggaacug

SEQ ID NO: 2416705 - RNA, 19 nt, Artificial Sequence
  Description of Artificial Sequence: Synthetic oligonucleotide
acagaauagggaacugcuu

SEQ ID NO: 2416706 - RNA, 19 nt, Artificial Sequence
  Description of Artificial Sequence: Synthetic oligonucleotide
cagcccauacagcaucuca

SEQ ID NO: 2416707 - RNA, 19 nt, Artificial Sequence
  Description of Artificial Sequence: Synthetic oligonucleotide
gcaucucauagagaacggc

SEQ ID NO: 2416708 - RNA, 19 nt, Artificial Sequence
  Description of Artificial Sequence: Synthetic oligonucleotide
gcacugguauacauaguug

SEQ ID NO: 2416709 - RNA, 19 nt, Artificial Sequence
  Description of Artificial Sequence: Synthetic oligonucleotide
ucggcguuuccaucuccuc

SEQ ID NO: 2416710 - RNA, 19 nt, Artificial Sequence
  Description of Artificial Sequence: Synthetic oligonucleotide
cgugaagacugugucaaag

SEQ ID NO: 2416711 - RNA, 19 nt, Artificial Sequence
  Description of Artificial Sequence: Synthetic oligonucleotide
uggcaccaagucgauucug

SEQ ID NO: 2416712 - RNA, 19 nt, Artificial Sequence
  Description of Artificial Sequence: Synthetic oligonucleotide
aguucaaaacucagcucuu

SEQ ID NO: 2416713 - RNA, 19 nt, Artificial Sequence
  Description of Artificial Sequence: Synthetic oligonucleotide
ccauacagcaucucauaga

SEQ ID NO: 2416714 - RNA, 19 nt, Artificial Sequence
  Description of Artificial Sequence: Synthetic oligonucleotide
uaaaugguggcgggaucuu

SEQ ID NO: 2416715 - RNA, 19 nt, Artificial Sequence
  Description of Artificial Sequence: Synthetic oligonucleotide
agagaacggcgcccaggca

SEQ ID NO: 2416716 - RNA, 19 nt, Artificial Sequence
  Description of Artificial Sequence: Synthetic oligonucleotide
cugaaggaggggcguaaga

SEQ ID NO: 2416717 - RNA, 19 nt, Artificial Sequence
  Description of Artificial Sequence: Synthetic oligonucleotide
cacaaaucggcguuuccau

SEQ ID NO: 2416718 - RNA, 19 nt, Artificial Sequence
  Description of Artificial Sequence: Synthetic oligonucleotide
aacggcgcccaggcaccac

SEQ ID NO: 2416719 - RNA, 19 nt, Artificial Sequence
  Description of Artificial Sequence: Synthetic oligonucleotide
aucggcguuuccaucuccu

SEQ ID NO: 2416720 - RNA, 19 nt, Artificial Sequence
  Description of Artificial Sequence: Synthetic oligonucleotide
gcaacaucucggcaguaaa

SEQ ID NO: 2416721 - RNA, 19 nt, Artificial Sequence
  Description of Artificial Sequence: Synthetic oligonucleotide
ccagcugagugauucaaaa

SEQ ID NO: 2416722 - RNA, 19 nt, Artificial Sequence
  Description of Artificial Sequence: Synthetic oligonucleotide
uccuggccucaaguuuagg

SEQ ID NO: 2416723 - RNA, 19 nt, Artificial Sequence
  Description of Artificial Sequence: Synthetic oligonucleotide
aggggcuuaugaagaauau

SEQ ID NO: 2416724 - RNA, 19 nt, Artificial Sequence
  Description of Artificial Sequence: Synthetic oligonucleotide
gcucuuuugaaaugcccua

SEQ ID NO: 2416725 - RNA, 19 nt, Artificial Sequence
  Description of Artificial Sequence: Synthetic oligonucleotide
gaagacacgcacacagaau

SEQ ID NO: 2416726 - RNA, 19 nt, Artificial Sequence
  Description of Artificial Sequence: Synthetic oligonucleotide
aagucuucuuuggcaccaa

SEQ ID NO: 2416727 - RNA, 19 nt, Artificial Sequence
  Description of Artificial Sequence: Synthetic oligonucleotide
auacagcaucucauagaga

SEQ ID NO: 2416728 - RNA, 19 nt, Artificial Sequence
  Description of Artificial Sequence: Synthetic oligonucleotide
gaacugcuucuuccgugaa

SEQ ID NO: 2416729 - RNA, 19 nt, Artificial Sequence
  Description of Artificial Sequence: Synthetic oligonucleotide
caccaagucgauucugccu

SEQ ID NO: 2416730 - RNA, 19 nt, Artificial Sequence
  Description of Artificial Sequence: Synthetic oligonucleotide
gaacacuggcauucacuau

SEQ ID NO: 2416731 - RNA, 19 nt, Artificial Sequence
  Description of Artificial Sequence: Synthetic oligonucleotide
ggauuaaaugguggcggga

SEQ ID NO: 2416732 - RNA, 19 nt, Artificial Sequence
  Description of Artificial Sequence: Synthetic oligonucleotide
ccaaugguuucugaacauc

SEQ ID NO: 2416733 - RNA, 19 nt, Artificial Sequence
  Description of Artificial Sequence: Synthetic oligonucleotide
cagcagaaaauacguauuu

SEQ ID NO: 2416734 - RNA, 19 nt, Artificial Sequence
  Description of Artificial Sequence: Synthetic oligonucleotide
ucauccggucccgccacau

SEQ ID NO: 2416735 - RNA, 19 nt, Artificial Sequence
  Description of Artificial Sequence: Synthetic oligonucleotide
cgcacacagaauagggaac

SEQ ID NO: 2416736 - RNA, 19 nt, Artificial Sequence
  Description of Artificial Sequence: Synthetic oligonucleotide
ggggcguaagaaaagccaa

SEQ ID NO: 2416737 - RNA, 19 nt, Artificial Sequence
  Description of Artificial Sequence: Synthetic oligonucleotide
ggaugauucuggauuucaa

SEQ ID NO: 2416738 - RNA, 19 nt, Artificial Sequence
  Description of Artificial Sequence: Synthetic oligonucleotide
aucauccggucccgccaca

SEQ ID NO: 2416739 - RNA, 19 nt, Artificial Sequence
  Description of Artificial Sequence: Synthetic oligonucleotide
ggucccgccacauuaggau

SEQ ID NO: 2416740 - RNA, 19 nt, Artificial Sequence
  Description of Artificial Sequence: Synthetic oligonucleotide
guccagcugagugauucaa

SEQ ID NO: 2416741 - RNA, 19 nt, Artificial Sequence
  Description of Artificial Sequence: Synthetic oligonucleotide
gucaguccagcugagugau

SEQ ID NO: 2416742 - RNA, 19 nt, Artificial Sequence
  Description of Artificial Sequence: Synthetic oligonucleotide
gaccacgccgugaggcuca

SEQ ID NO: 2416743 - RNA, 19 nt, Artificial Sequence
  Description of Artificial Sequence: Synthetic oligonucleotide
gccuccagaacacuggcau

SEQ ID NO: 2416744 - RNA, 19 nt, Artificial Sequence
  Description of Artificial Sequence: Synthetic oligonucleotide
aguccacaguguugucaua

SEQ ID NO: 2416745 - RNA, 19 nt, Artificial Sequence
  Description of Artificial Sequence: Synthetic oligonucleotide
ggcuuaugaagaauauuau

SEQ ID NO: 2416746 - RNA, 19 nt, Artificial Sequence
  Description of Artificial Sequence: Synthetic oligonucleotide
cucuuuugaaaugcccuau

SEQ ID NO: 2416747 - RNA, 19 nt, Artificial Sequence
  Description of Artificial Sequence: Synthetic oligonucleotide
gcauucacuauggaauagu

SEQ ID NO: 2416748 - RNA, 19 nt, Artificial Sequence
  Description of Artificial Sequence: Synthetic oligonucleotide
guacgaggucaguccagcu

SEQ ID NO: 2416749 - RNA, 19 nt, Artificial Sequence
  Description of Artificial Sequence: Synthetic oligonucleotide
gcccauacagcaucucaua

SEQ ID NO: 2416750 - RNA, 19 nt, Artificial Sequence
  Description of Artificial Sequence: Synthetic oligonucleotide
aggcacugguauacauagu

SEQ ID NO: 2416751 - RNA, 19 nt, Artificial Sequence
  Description of Artificial Sequence: Synthetic oligonucleotide
cugaucacuucaggugcaa

SEQ ID NO: 2416752 - RNA, 19 nt, Artificial Sequence
  Description of Artificial Sequence: Synthetic oligonucleotide
cacuccuggccucaaguuu

SEQ ID NO: 2416753 - RNA, 19 nt, Artificial Sequence
  Description of Artificial Sequence: Synthetic oligonucleotide
aggcucacuccuggccuca

SEQ ID NO: 2416754 - RNA, 19 nt, Artificial Sequence
  Description of Artificial Sequence: Synthetic oligonucleotide
accacgccgugaggcucac

SEQ ID NO: 2416755 - RNA, 19 nt, Artificial Sequence
  Description of Artificial Sequence: Synthetic oligonucleotide
cgugaggcucacuccuggc

SEQ ID NO: 2416756 - RNA, 19 nt, Artificial Sequence
  Description of Artificial Sequence: Synthetic oligonucleotide
ccggucccgccacauuagg

SEQ ID NO: 2416757 - RNA, 19 nt, Artificial Sequence
  Description of Artificial Sequence: Synthetic oligonucleotide
cuucugaaggaggggcgua

SEQ ID NO: 2416758 - RNA, 19 nt, Artificial Sequence
  Description of Artificial Sequence: Synthetic oligonucleotide
cuucuuccgugaagacugu

SEQ ID NO: 2416759 - RNA, 19 nt, Artificial Sequence
  Description of Artificial Sequence: Synthetic oligonucleotide
cucaaguuuaggggcuuau

SEQ ID NO: 2416760 - RNA, 19 nt, Artificial Sequence
  Description of Artificial Sequence: Synthetic oligonucleotide
gucccgccacauuaggauu

SEQ ID NO: 2416761 - RNA, 19 nt, Artificial Sequence
  Description of Artificial Sequence: Synthetic oligonucleotide
ggcgcccaggcaccaccag

SEQ ID NO: 2416762 - RNA, 19 nt, Artificial Sequence
  Description of Artificial Sequence: Synthetic oligonucleotide
gaacggcgcccaggcacca

SEQ ID NO: 2416763 - RNA, 19 nt, Artificial Sequence
  Description of Artificial Sequence: Synthetic oligonucleotide
cgaggucaguccagcugag

SEQ ID NO: 2416764 - RNA, 19 nt, Artificial Sequence
  Description of Artificial Sequence: Synthetic oligonucleotide
cgccacauuaggauuaaau

SEQ ID NO: 2416765 - RNA, 19 nt, Artificial Sequence
  Description of Artificial Sequence: Synthetic oligonucleotide
gccgugaggcucacuccug

SEQ ID NO: 2416766 - RNA, 19 nt, Artificial Sequence
  Description of Artificial Sequence: Synthetic oligonucleotide
ggggcuuaugaagaauauu

SEQ ID NO: 2416767 - RNA, 19 nt, Artificial Sequence
  Description of Artificial Sequence: Synthetic oligonucleotide
ggccucaaguuuaggggcu

SEQ ID NO: 2416768 - RNA, 19 nt, Artificial Sequence
  Description of Artificial Sequence: Synthetic oligonucleotide
gcccuauuucuugcuuaca

SEQ ID NO: 2416769 - RNA, 19 nt, Artificial Sequence
  Description of Artificial Sequence: Synthetic oligonucleotide
caucugccuccagaacacu

SEQ ID NO: 2416770 - RNA, 19 nt, Artificial Sequence
  Description of Artificial Sequence: Synthetic oligonucleotide
cuuuggcaccaagucgauu

SEQ ID NO: 2416771 - RNA, 19 nt, Artificial Sequence
  Description of Artificial Sequence: Synthetic oligonucleotide
cggucccgccacauuagga

SEQ ID NO: 2416772 - RNA, 19 nt, Artificial Sequence
  Description of Artificial Sequence: Synthetic oligonucleotide
caagucgauucugccuguu

SEQ ID NO: 2416773 - RNA, 19 nt, Artificial Sequence
  Description of Artificial Sequence: Synthetic oligonucleotide
ccaagucgauucugccugu

SEQ ID NO: 2416774 - RNA, 19 nt, Artificial Sequence
  Description of Artificial Sequence: Synthetic oligonucleotide
cagcaacaucucggcagua

SEQ ID NO: 2416775 - RNA, 19 nt, Artificial Sequence
  Description of Artificial Sequence: Synthetic oligonucleotide
ccgugaagacugugucaaa

SEQ ID NO: 2416776 - RNA, 19 nt, Artificial Sequence
  Description of Artificial Sequence: Synthetic oligonucleotide
cauccggucccgccacauu

SEQ ID NO: 2416777 - RNA, 19 nt, Artificial Sequence
  Description of Artificial Sequence: Synthetic oligonucleotide
cggcguuuccaucuccucu

SEQ ID NO: 2416778 - RNA, 19 nt, Artificial Sequence
  Description of Artificial Sequence: Synthetic oligonucleotide
ccucaaguuuaggggcuua

SEQ ID NO: 2416779 - RNA, 19 nt, Artificial Sequence
  Description of Artificial Sequence: Synthetic oligonucleotide
cgccgugaggcucacuccu

SEQ ID NO: 2416780 - RNA, 19 nt, Artificial Sequence
  Description of Artificial Sequence: Synthetic oligonucleotide
ccuccagaacacuggcauu

SEQ ID NO: 2416781 - RNA, 19 nt, Artificial Sequence
  Description of Artificial Sequence: Synthetic oligonucleotide
guguugucauagggcuguu

SEQ ID NO: 2416782 - RNA, 19 nt, Artificial Sequence
  Description of Artificial Sequence: Synthetic oligonucleotide
cccgccacauuaggauuaa

SEQ ID NO: 2416783 - RNA, 19 nt, Artificial Sequence
  Description of Artificial Sequence: Synthetic oligonucleotide
ggcucacuccuggccucaa

SEQ ID NO: 2416784 - RNA, 19 nt, Artificial Sequence
  Description of Artificial Sequence: Synthetic oligonucleotide
gccucaaguuuaggggcuu

SEQ ID NO: 2416785 - RNA, 19 nt, Artificial Sequence
  Description of Artificial Sequence: Synthetic oligonucleotide
cggcgcccaggcaccacca

SEQ ID NO: 2416786 - RNA, 19 nt, Artificial Sequence
  Description of Artificial Sequence: Synthetic oligonucleotide
ccgccacauuaggauuaaa

SEQ ID NO: 2416787 - RNA, 19 nt, Artificial Sequence
  Description of Artificial Sequence: Synthetic oligonucleotide
ccacgccgugaggcucacu

SEQ ID NO: 2416788 - RNA, 19 nt, Artificial Sequence
  Description of Artificial Sequence: Synthetic oligonucleotide
uagaauauaaauaugaucc

SEQ ID NO: 2416789 - RNA, 19 nt, Artificial Sequence
  Description of Artificial Sequence: Synthetic oligonucleotide
uaauauuuccaaaugagcg

SEQ ID NO: 2416790 - RNA, 19 nt, Artificial Sequence
  Description of Artificial Sequence: Synthetic oligonucleotide
auuaaaacagcacuauugg

SEQ ID NO: 2416791 - RNA, 19 nt, Artificial Sequence
  Description of Artificial Sequence: Synthetic oligonucleotide
auagaauauaaauaugauc

SEQ ID NO: 2416792 - RNA, 19 nt, Artificial Sequence
  Description of Artificial Sequence: Synthetic oligonucleotide
auagccacaacuuuauuac

SEQ ID NO: 2416793 - RNA, 19 nt, Artificial Sequence
  Description of Artificial Sequence: Synthetic oligonucleotide
aaauccaacaggugauucc

SEQ ID NO: 2416794 - RNA, 19 nt, Artificial Sequence
  Description of Artificial Sequence: Synthetic oligonucleotide
ucguccaucauacugacag

SEQ ID NO: 2416795 - RNA, 19 nt, Artificial Sequence
  Description of Artificial Sequence: Synthetic oligonucleotide
aaccauuugaucuuggcca

SEQ ID NO: 2416796 - RNA, 19 nt, Artificial Sequence
  Description of Artificial Sequence: Synthetic oligonucleotide
acuaaaauccaacagguga

SEQ ID NO: 2416797 - RNA, 19 nt, Artificial Sequence
  Description of Artificial Sequence: Synthetic oligonucleotide
aaagcgacgcuuauaaacc

SEQ ID NO: 2416798 - RNA, 19 nt, Artificial Sequence
  Description of Artificial Sequence: Synthetic oligonucleotide
aauauuuccaaaugagcga

SEQ ID NO: 2416799 - RNA, 19 nt, Artificial Sequence
  Description of Artificial Sequence: Synthetic oligonucleotide
uucuaaaauuaaaacagca

SEQ ID NO: 2416800 - RNA, 19 nt, Artificial Sequence
  Description of Artificial Sequence: Synthetic oligonucleotide
uuccaaaugagcgagauca

SEQ ID NO: 2416801 - RNA, 19 nt, Artificial Sequence
  Description of Artificial Sequence: Synthetic oligonucleotide
auaucuggcgaacucgucc

SEQ ID NO: 2416802 - RNA, 19 nt, Artificial Sequence
  Description of Artificial Sequence: Synthetic oligonucleotide
cagacuaaaauccaacagg

SEQ ID NO: 2416803 - RNA, 19 nt, Artificial Sequence
  Description of Artificial Sequence: Synthetic oligonucleotide
uugucagucacuuuguuga

SEQ ID NO: 2416804 - RNA, 19 nt, Artificial Sequence
  Description of Artificial Sequence: Synthetic oligonucleotide
gaaagcgacgcuuauaaac

SEQ ID NO: 2416805 - RNA, 19 nt, Artificial Sequence
  Description of Artificial Sequence: Synthetic oligonucleotide
uguuaaucagcucuuuacc

SEQ ID NO: 2416806 - RNA, 19 nt, Artificial Sequence
  Description of Artificial Sequence: Synthetic oligonucleotide
aguaggaaaggcuaccagg

SEQ ID NO: 2416807 - RNA, 19 nt, Artificial Sequence
  Description of Artificial Sequence: Synthetic oligonucleotide
agaauguagaaagcgacgc

SEQ ID NO: 2416808 - RNA, 19 nt, Artificial Sequence
  Description of Artificial Sequence: Synthetic oligonucleotide
auaugauccuucaaaaccc

SEQ ID NO: 2416809 - RNA, 19 nt, Artificial Sequence
  Description of Artificial Sequence: Synthetic oligonucleotide
agugcuaugcuuugauccc

SEQ ID NO: 2416810 - RNA, 19 nt, Artificial Sequence
  Description of Artificial Sequence: Synthetic oligonucleotide
aguaauauuuccaaaugag

SEQ ID NO: 2416811 - RNA, 19 nt, Artificial Sequence
  Description of Artificial Sequence: Synthetic oligonucleotide
acaacuuuauuacagacua

SEQ ID NO: 2416812 - RNA, 19 nt, Artificial Sequence
  Description of Artificial Sequence: Synthetic oligonucleotide
uuucacgugagucuugagc

SEQ ID NO: 2416813 - RNA, 19 nt, Artificial Sequence
  Description of Artificial Sequence: Synthetic oligonucleotide
acagacuaaaauccaacag

SEQ ID NO: 2416814 - RNA, 19 nt, Artificial Sequence
  Description of Artificial Sequence: Synthetic oligonucleotide
uugaucuuggccaacugug

SEQ ID NO: 2416815 - RNA, 19 nt, Artificial Sequence
  Description of Artificial Sequence: Synthetic oligonucleotide
uagaaagcgacgcuuauaa

SEQ ID NO: 2416816 - RNA, 19 nt, Artificial Sequence
  Description of Artificial Sequence: Synthetic oligonucleotide
aaaugagcgagaucaucag

SEQ ID NO: 2416817 - RNA, 19 nt, Artificial Sequence
  Description of Artificial Sequence: Synthetic oligonucleotide
uucacgugagucuugagcu

SEQ ID NO: 2416818 - RNA, 19 nt, Artificial Sequence
  Description of Artificial Sequence: Synthetic oligonucleotide
ugcuacucgaguaggaaag

SEQ ID NO: 2416819 - RNA, 19 nt, Artificial Sequence
  Description of Artificial Sequence: Synthetic oligonucleotide
uuucuuucuccucagcuga

SEQ ID NO: 2416820 - RNA, 19 nt, Artificial Sequence
  Description of Artificial Sequence: Synthetic oligonucleotide
guuaaucagcucuuuaccc

SEQ ID NO: 2416821 - RNA, 19 nt, Artificial Sequence
  Description of Artificial Sequence: Synthetic oligonucleotide
uuguuaaucagcucuuuac

SEQ ID NO: 2416822 - RNA, 19 nt, Artificial Sequence
  Description of Artificial Sequence: Synthetic oligonucleotide
cauaaggagacauagaaua

SEQ ID NO: 2416823 - RNA, 19 nt, Artificial Sequence
  Description of Artificial Sequence: Synthetic oligonucleotide
cagugcuaugcuuugaucc

SEQ ID NO: 2416824 - RNA, 19 nt, Artificial Sequence
  Description of Artificial Sequence: Synthetic oligonucleotide
acuauuggaguuguuaauc

SEQ ID NO: 2416825 - RNA, 19 nt, Artificial Sequence
  Description of Artificial Sequence: Synthetic oligonucleotide
agcggggugauccacuugc

SEQ ID NO: 2416826 - RNA, 19 nt, Artificial Sequence
  Description of Artificial Sequence: Synthetic oligonucleotide
uuaaucagcucuuuacccu

SEQ ID NO: 2416827 - RNA, 19 nt, Artificial Sequence
  Description of Artificial Sequence: Synthetic oligonucleotide
acgcuuauaaaccauuuga

SEQ ID NO: 2416828 - RNA, 19 nt, Artificial Sequence
  Description of Artificial Sequence: Synthetic oligonucleotide
auauaaauaugauccuuca

SEQ ID NO: 2416829 - RNA, 19 nt, Artificial Sequence
  Description of Artificial Sequence: Synthetic oligonucleotide
uuacagacuaaaauccaac

SEQ ID NO: 2416830 - RNA, 19 nt, Artificial Sequence
  Description of Artificial Sequence: Synthetic oligonucleotide
uugcagaauguagaaagcg

SEQ ID NO: 2416831 - RNA, 19 nt, Artificial Sequence
  Description of Artificial Sequence: Synthetic oligonucleotide
uuggaguuguuaaucagcu

SEQ ID NO: 2416832 - RNA, 19 nt, Artificial Sequence
  Description of Artificial Sequence: Synthetic oligonucleotide
gaacacgaagcucagcacc

SEQ ID NO: 2416833 - RNA, 19 nt, Artificial Sequence
  Description of Artificial Sequence: Synthetic oligonucleotide
agaauauaaauaugauccu

SEQ ID NO: 2416834 - RNA, 19 nt, Artificial Sequence
  Description of Artificial Sequence: Synthetic oligonucleotide
aggaaaggcuaccaggcgg

SEQ ID NO: 2416835 - RNA, 19 nt, Artificial Sequence
  Description of Artificial Sequence: Synthetic oligonucleotide
ugcagaauguagaaagcga

SEQ ID NO: 2416836 - RNA, 19 nt, Artificial Sequence
  Description of Artificial Sequence: Synthetic oligonucleotide
gagcuugucagucacuuug

SEQ ID NO: 2416837 - RNA, 19 nt, Artificial Sequence
  Description of Artificial Sequence: Synthetic oligonucleotide
gaguaauauuuccaaauga

SEQ ID NO: 2416838 - RNA, 19 nt, Artificial Sequence
  Description of Artificial Sequence: Synthetic oligonucleotide
uacagacuaaaauccaaca

SEQ ID NO: 2416839 - RNA, 19 nt, Artificial Sequence
  Description of Artificial Sequence: Synthetic oligonucleotide
uuugaucccagcagcuggg

SEQ ID NO: 2416840 - RNA, 19 nt, Artificial Sequence
  Description of Artificial Sequence: Synthetic oligonucleotide
auauuuccaaaugagcgag

SEQ ID NO: 2416841 - RNA, 19 nt, Artificial Sequence
  Description of Artificial Sequence: Synthetic oligonucleotide
uuacacccgaacacgaagc

SEQ ID NO: 2416842 - RNA, 19 nt, Artificial Sequence
  Description of Artificial Sequence: Synthetic oligonucleotide
uaaaccauuugaucuuggc

SEQ ID NO: 2416843 - RNA, 19 nt, Artificial Sequence
  Description of Artificial Sequence: Synthetic oligonucleotide
uuauaaaccauuugaucuu

SEQ ID NO: 2416844 - RNA, 19 nt, Artificial Sequence
  Description of Artificial Sequence: Synthetic oligonucleotide
aauccaacaggugauucca

SEQ ID NO: 2416845 - RNA, 19 nt, Artificial Sequence
  Description of Artificial Sequence: Synthetic oligonucleotide
ucaaaacccagugcuaugc

SEQ ID NO: 2416846 - RNA, 19 nt, Artificial Sequence
  Description of Artificial Sequence: Synthetic oligonucleotide
uggggaagcagacaggauc

SEQ ID NO: 2416847 - RNA, 19 nt, Artificial Sequence
  Description of Artificial Sequence: Synthetic oligonucleotide
uaaucagcucuuuacccug

SEQ ID NO: 2416848 - RNA, 19 nt, Artificial Sequence
  Description of Artificial Sequence: Synthetic oligonucleotide
auccuucaaaacccagugc

SEQ ID NO: 2416849 - RNA, 19 nt, Artificial Sequence
  Description of Artificial Sequence: Synthetic oligonucleotide
caaaugagcgagaucauca

SEQ ID NO: 2416850 - RNA, 19 nt, Artificial Sequence
  Description of Artificial Sequence: Synthetic oligonucleotide
ugauccuucaaaacccagu

SEQ ID NO: 2416851 - RNA, 19 nt, Artificial Sequence
  Description of Artificial Sequence: Synthetic oligonucleotide
cuugcagaauguagaaagc

SEQ ID NO: 2416852 - RNA, 19 nt, Artificial Sequence
  Description of Artificial Sequence: Synthetic oligonucleotide
aauguagaaagcgacgcuu

SEQ ID NO: 2416853 - RNA, 19 nt, Artificial Sequence
  Description of Artificial Sequence: Synthetic oligonucleotide
aaugagcgagaucaucagu

SEQ ID NO: 2416854 - RNA, 19 nt, Artificial Sequence
  Description of Artificial Sequence: Synthetic oligonucleotide
gagacauagaauauaaaua

SEQ ID NO: 2416855 - RNA, 19 nt, Artificial Sequence
  Description of Artificial Sequence: Synthetic oligonucleotide
ucuuuacccugugaaaucc

SEQ ID NO: 2416856 - RNA, 19 nt, Artificial Sequence
  Description of Artificial Sequence: Synthetic oligonucleotide
guuacacccgaacacgaag

SEQ ID NO: 2416857 - RNA, 19 nt, Artificial Sequence
  Description of Artificial Sequence: Synthetic oligonucleotide
uacugcagcgccaugggga

SEQ ID NO: 2416858 - RNA, 19 nt, Artificial Sequence
  Description of Artificial Sequence: Synthetic oligonucleotide
uaggaaaggcuaccaggcg

SEQ ID NO: 2416859 - RNA, 19 nt, Artificial Sequence
  Description of Artificial Sequence: Synthetic oligonucleotide
uauaaaccauuugaucuug

SEQ ID NO: 2416860 - RNA, 19 nt, Artificial Sequence
  Description of Artificial Sequence: Synthetic oligonucleotide
uaugauccuucaaaaccca

SEQ ID NO: 2416861 - RNA, 19 nt, Artificial Sequence
  Description of Artificial Sequence: Synthetic oligonucleotide
ugaucuuggccaacugugc

SEQ ID NO: 2416862 - RNA, 19 nt, Artificial Sequence
  Description of Artificial Sequence: Synthetic oligonucleotide
aggguggaguacaauagcc

SEQ ID NO: 2416863 - RNA, 19 nt, Artificial Sequence
  Description of Artificial Sequence: Synthetic oligonucleotide
gacgcuuauaaaccauuug

SEQ ID NO: 2416864 - RNA, 19 nt, Artificial Sequence
  Description of Artificial Sequence: Synthetic oligonucleotide
uacucgaguaggaaaggcu

SEQ ID NO: 2416865 - RNA, 19 nt, Artificial Sequence
  Description of Artificial Sequence: Synthetic oligonucleotide
aaagucuuguagcugcguu

SEQ ID NO: 2416866 - RNA, 19 nt, Artificial Sequence
  Description of Artificial Sequence: Synthetic oligonucleotide
acgaagaggacagggacgg

SEQ ID NO: 2416867 - RNA, 19 nt, Artificial Sequence
  Description of Artificial Sequence: Synthetic oligonucleotide
agcauaucuggcgaacucg

SEQ ID NO: 2416868 - RNA, 19 nt, Artificial Sequence
  Description of Artificial Sequence: Synthetic oligonucleotide
cagccuagcauaucuggcg

SEQ ID NO: 2416869 - RNA, 19 nt, Artificial Sequence
  Description of Artificial Sequence: Synthetic oligonucleotide
aacagcacuauuggaguug

SEQ ID NO: 2416870 - RNA, 19 nt, Artificial Sequence
  Description of Artificial Sequence: Synthetic oligonucleotide
ucaucugcgacuccugcuc

SEQ ID NO: 2416871 - RNA, 19 nt, Artificial Sequence
  Description of Artificial Sequence: Synthetic oligonucleotide
ugauuccaauuccaccugc

SEQ ID NO: 2416872 - RNA, 19 nt, Artificial Sequence
  Description of Artificial Sequence: Synthetic oligonucleotide
ugagcgagaucaucagugc

SEQ ID NO: 2416873 - RNA, 19 nt, Artificial Sequence
  Description of Artificial Sequence: Synthetic oligonucleotide
uaucuggcgaacucgucca

SEQ ID NO: 2416874 - RNA, 19 nt, Artificial Sequence
  Description of Artificial Sequence: Synthetic oligonucleotide
agcacguuacacccgaaca

SEQ ID NO: 2416875 - RNA, 19 nt, Artificial Sequence
  Description of Artificial Sequence: Synthetic oligonucleotide
aguacaauagccacaacuu

SEQ ID NO: 2416876 - RNA, 19 nt, Artificial Sequence
  Description of Artificial Sequence: Synthetic oligonucleotide
uuccuuuccagccuagcau

SEQ ID NO: 2416877 - RNA, 19 nt, Artificial Sequence
  Description of Artificial Sequence: Synthetic oligonucleotide
acugcagcgccauggggac

SEQ ID NO: 2416878 - RNA, 19 nt, Artificial Sequence
  Description of Artificial Sequence: Synthetic oligonucleotide
agucuugagcuugucaguc

SEQ ID NO: 2416879 - RNA, 19 nt, Artificial Sequence
  Description of Artificial Sequence: Synthetic oligonucleotide
agucuuguagcugcguuuc

SEQ ID NO: 2416880 - RNA, 19 nt, Artificial Sequence
  Description of Artificial Sequence: Synthetic oligonucleotide
augagcgagaucaucagug

SEQ ID NO: 2416881 - RNA, 19 nt, Artificial Sequence
  Description of Artificial Sequence: Synthetic oligonucleotide
ggggugauccacuugcugg

SEQ ID NO: 2416882 - RNA, 19 nt, Artificial Sequence
  Description of Artificial Sequence: Synthetic oligonucleotide
acucguccaucauacugac

SEQ ID NO: 2416883 - RNA, 19 nt, Artificial Sequence
  Description of Artificial Sequence: Synthetic oligonucleotide
uggaguacaauagccacaa

SEQ ID NO: 2416884 - RNA, 19 nt, Artificial Sequence
  Description of Artificial Sequence: Synthetic oligonucleotide
ggaaacgaagaggacaggg

SEQ ID NO: 2416885 - RNA, 19 nt, Artificial Sequence
  Description of Artificial Sequence: Synthetic oligonucleotide
gacggaguaauauuuccaa

SEQ ID NO: 2416886 - RNA, 19 nt, Artificial Sequence
  Description of Artificial Sequence: Synthetic oligonucleotide
uucaaaacccagugcuaug

SEQ ID NO: 2416887 - RNA, 19 nt, Artificial Sequence
  Description of Artificial Sequence: Synthetic oligonucleotide
agagugugcagagacuguc

SEQ ID NO: 2416888 - RNA, 19 nt, Artificial Sequence
  Description of Artificial Sequence: Synthetic oligonucleotide
caucauacugacaguggac

SEQ ID NO: 2416889 - RNA, 19 nt, Artificial Sequence
  Description of Artificial Sequence: Synthetic oligonucleotide
agagacugucugcaaaaca

SEQ ID NO: 2416890 - RNA, 19 nt, Artificial Sequence
  Description of Artificial Sequence: Synthetic oligonucleotide
cacguuacacccgaacacg

SEQ ID NO: 2416891 - RNA, 19 nt, Artificial Sequence
  Description of Artificial Sequence: Synthetic oligonucleotide
uuuacccugugaaauccau

SEQ ID NO: 2416892 - RNA, 19 nt, Artificial Sequence
  Description of Artificial Sequence: Synthetic oligonucleotide
cuauuggaguuguuaauca

SEQ ID NO: 2416893 - RNA, 19 nt, Artificial Sequence
  Description of Artificial Sequence: Synthetic oligonucleotide
gcuuauaaaccauuugauc

SEQ ID NO: 2416894 - RNA, 19 nt, Artificial Sequence
  Description of Artificial Sequence: Synthetic oligonucleotide
agccacaacuuuauuacag

SEQ ID NO: 2416895 - RNA, 19 nt, Artificial Sequence
  Description of Artificial Sequence: Synthetic oligonucleotide
cauacugacaguggacagc

SEQ ID NO: 2416896 - RNA, 19 nt, Artificial Sequence
  Description of Artificial Sequence: Synthetic oligonucleotide
auacugacaguggacagcu

SEQ ID NO: 2416897 - RNA, 19 nt, Artificial Sequence
  Description of Artificial Sequence: Synthetic oligonucleotide
ggaguuguuaaucagcucu

SEQ ID NO: 2416898 - RNA, 19 nt, Artificial Sequence
  Description of Artificial Sequence: Synthetic oligonucleotide
uguagaaagcgacgcuuau

SEQ ID NO: 2416899 - RNA, 19 nt, Artificial Sequence
  Description of Artificial Sequence: Synthetic oligonucleotide
ggagacauagaauauaaau

SEQ ID NO: 2416900 - RNA, 19 nt, Artificial Sequence
  Description of Artificial Sequence: Synthetic oligonucleotide
cuaccaggcggucuagcgg

SEQ ID NO: 2416901 - RNA, 19 nt, Artificial Sequence
  Description of Artificial Sequence: Synthetic oligonucleotide
aaacagcacuauuggaguu

SEQ ID NO: 2416902 - RNA, 19 nt, Artificial Sequence
  Description of Artificial Sequence: Synthetic oligonucleotide
agggacggcaggaggaucc

SEQ ID NO: 2416903 - RNA, 19 nt, Artificial Sequence
  Description of Artificial Sequence: Synthetic oligonucleotide
ugcuuugaucccagcagcu

SEQ ID NO: 2416904 - RNA, 19 nt, Artificial Sequence
  Description of Artificial Sequence: Synthetic oligonucleotide
gguggaguacaauagccac

SEQ ID NO: 2416905 - RNA, 19 nt, Artificial Sequence
  Description of Artificial Sequence: Synthetic oligonucleotide
uacacccgaacacgaagcu

SEQ ID NO: 2416906 - RNA, 19 nt, Artificial Sequence
  Description of Artificial Sequence: Synthetic oligonucleotide
auuacagacuaaaauccaa

SEQ ID NO: 2416907 - RNA, 19 nt, Artificial Sequence
  Description of Artificial Sequence: Synthetic oligonucleotide
ugcguuucuuucuccucag

SEQ ID NO: 2416908 - RNA, 19 nt, Artificial Sequence
  Description of Artificial Sequence: Synthetic oligonucleotide
cucuuuacccugugaaauc

SEQ ID NO: 2416909 - RNA, 19 nt, Artificial Sequence
  Description of Artificial Sequence: Synthetic oligonucleotide
ggugauuccaauuccaccu

SEQ ID NO: 2416910 - RNA, 19 nt, Artificial Sequence
  Description of Artificial Sequence: Synthetic oligonucleotide
cacccgaacacgaagcuca

SEQ ID NO: 2416911 - RNA, 19 nt, Artificial Sequence
  Description of Artificial Sequence: Synthetic oligonucleotide
uccuuuccagccuagcaua

SEQ ID NO: 2416912 - RNA, 19 nt, Artificial Sequence
  Description of Artificial Sequence: Synthetic oligonucleotide
guccaucauacugacagug

SEQ ID NO: 2416913 - RNA, 19 nt, Artificial Sequence
  Description of Artificial Sequence: Synthetic oligonucleotide
aaacccagugcuaugcuuu

SEQ ID NO: 2416914 - RNA, 19 nt, Artificial Sequence
  Description of Artificial Sequence: Synthetic oligonucleotide
ucagcucuuuacccuguga

SEQ ID NO: 2416915 - RNA, 19 nt, Artificial Sequence
  Description of Artificial Sequence: Synthetic oligonucleotide
uuuccaaaugagcgagauc

SEQ ID NO: 2416916 - RNA, 19 nt, Artificial Sequence
  Description of Artificial Sequence: Synthetic oligonucleotide
ucuagcggggugauccacu

SEQ ID NO: 2416917 - RNA, 19 nt, Artificial Sequence
  Description of Artificial Sequence: Synthetic oligonucleotide
gacaguggacagcuccugc

SEQ ID NO: 2416918 - RNA, 19 nt, Artificial Sequence
  Description of Artificial Sequence: Synthetic oligonucleotide
cuaugcuuugaucccagca

SEQ ID NO: 2416919 - RNA, 19 nt, Artificial Sequence
  Description of Artificial Sequence: Synthetic oligonucleotide
caggugauuccaauuccac

SEQ ID NO: 2416920 - RNA, 19 nt, Artificial Sequence
  Description of Artificial Sequence: Synthetic oligonucleotide
cauagaauauaaauaugau

SEQ ID NO: 2416921 - RNA, 19 nt, Artificial Sequence
  Description of Artificial Sequence: Synthetic oligonucleotide
auaaaccauuugaucuugg

SEQ ID NO: 2416922 - RNA, 19 nt, Artificial Sequence
  Description of Artificial Sequence: Synthetic oligonucleotide
cuaaaauccaacaggugau

SEQ ID NO: 2416923 - RNA, 19 nt, Artificial Sequence
  Description of Artificial Sequence: Synthetic oligonucleotide
ugcuguccgcgcuuucacg

SEQ ID NO: 2416924 - RNA, 19 nt, Artificial Sequence
  Description of Artificial Sequence: Synthetic oligonucleotide
uccaacaggugauuccaau

SEQ ID NO: 2416925 - RNA, 19 nt, Artificial Sequence
  Description of Artificial Sequence: Synthetic oligonucleotide
agcgagaucaucagugcug

SEQ ID NO: 2416926 - RNA, 19 nt, Artificial Sequence
  Description of Artificial Sequence: Synthetic oligonucleotide
agcacuauuggaguuguua

SEQ ID NO: 2416927 - RNA, 19 nt, Artificial Sequence
  Description of Artificial Sequence: Synthetic oligonucleotide
cuacucgaguaggaaaggc

SEQ ID NO: 2416928 - RNA, 19 nt, Artificial Sequence
  Description of Artificial Sequence: Synthetic oligonucleotide
agccuagcauaucuggcga

SEQ ID NO: 2416929 - RNA, 19 nt, Artificial Sequence
  Description of Artificial Sequence: Synthetic oligonucleotide
gugauuccaauuccaccug

SEQ ID NO: 2416930 - RNA, 19 nt, Artificial Sequence
  Description of Artificial Sequence: Synthetic oligonucleotide
uagccacaacuuuauuaca

SEQ ID NO: 2416931 - RNA, 19 nt, Artificial Sequence
  Description of Artificial Sequence: Synthetic oligonucleotide
gggacggaguaauauuucc

SEQ ID NO: 2416932 - RNA, 19 nt, Artificial Sequence
  Description of Artificial Sequence: Synthetic oligonucleotide
auaaggagacauagaauau

SEQ ID NO: 2416933 - RNA, 19 nt, Artificial Sequence
  Description of Artificial Sequence: Synthetic oligonucleotide
accauuugaucuuggccaa

SEQ ID NO: 2416934 - RNA, 19 nt, Artificial Sequence
  Description of Artificial Sequence: Synthetic oligonucleotide
acagggacggaguaauauu

SEQ ID NO: 2416935 - RNA, 19 nt, Artificial Sequence
  Description of Artificial Sequence: Synthetic oligonucleotide
ucuccucagcugaaagggu

SEQ ID NO: 2416936 - RNA, 19 nt, Artificial Sequence
  Description of Artificial Sequence: Synthetic oligonucleotide
cucggcagcgcucauccug

SEQ ID NO: 2416937 - RNA, 19 nt, Artificial Sequence
  Description of Artificial Sequence: Synthetic oligonucleotide
gcuaccaggcggucuagcg

SEQ ID NO: 2416938 - RNA, 19 nt, Artificial Sequence
  Description of Artificial Sequence: Synthetic oligonucleotide
gcagaauguagaaagcgac

SEQ ID NO: 2416939 - RNA, 19 nt, Artificial Sequence
  Description of Artificial Sequence: Synthetic oligonucleotide
caauuccaccugcuacucg

SEQ ID NO: 2416940 - RNA, 19 nt, Artificial Sequence
  Description of Artificial Sequence: Synthetic oligonucleotide
ugaucccagcagcugggga

SEQ ID NO: 2416941 - RNA, 19 nt, Artificial Sequence
  Description of Artificial Sequence: Synthetic oligonucleotide
acggaguaauauuuccaaa

SEQ ID NO: 2416942 - RNA, 19 nt, Artificial Sequence
  Description of Artificial Sequence: Synthetic oligonucleotide
uaaaauccaacaggugauu

SEQ ID NO: 2416943 - RNA, 19 nt, Artificial Sequence
  Description of Artificial Sequence: Synthetic oligonucleotide
uguccgcgcuuucacguga

SEQ ID NO: 2416944 - RNA, 19 nt, Artificial Sequence
  Description of Artificial Sequence: Synthetic oligonucleotide
agcugcguuucuuucuccu

SEQ ID NO: 2416945 - RNA, 19 nt, Artificial Sequence
  Description of Artificial Sequence: Synthetic oligonucleotide
guuguuaaucagcucuuua

SEQ ID NO: 2416946 - RNA, 19 nt, Artificial Sequence
  Description of Artificial Sequence: Synthetic oligonucleotide
gaauguagaaagcgacgcu

SEQ ID NO: 2416947 - RNA, 19 nt, Artificial Sequence
  Description of Artificial Sequence: Synthetic oligonucleotide
agacaggaucucuguaagu

SEQ ID NO: 2416948 - RNA, 19 nt, Artificial Sequence
  Description of Artificial Sequence: Synthetic oligonucleotide
agggacggaguaauauuuc

SEQ ID NO: 2416949 - RNA, 19 nt, Artificial Sequence
  Description of Artificial Sequence: Synthetic oligonucleotide
uggaaacgaagaggacagg

SEQ ID NO: 2416950 - RNA, 19 nt, Artificial Sequence
  Description of Artificial Sequence: Synthetic oligonucleotide
gugugcagagacugucugc

SEQ ID NO: 2416951 - RNA, 19 nt, Artificial Sequence
  Description of Artificial Sequence: Synthetic oligonucleotide
acaggugauuccaauucca

SEQ ID NO: 2416952 - RNA, 19 nt, Artificial Sequence
  Description of Artificial Sequence: Synthetic oligonucleotide
uuacccugugaaauccauu

SEQ ID NO: 2416953 - RNA, 19 nt, Artificial Sequence
  Description of Artificial Sequence: Synthetic oligonucleotide
uugaucccagcagcugggg

SEQ ID NO: 2416954 - RNA, 19 nt, Artificial Sequence
  Description of Artificial Sequence: Synthetic oligonucleotide
aggauccgcagcacguuac

SEQ ID NO: 2416955 - RNA, 19 nt, Artificial Sequence
  Description of Artificial Sequence: Synthetic oligonucleotide
gcucccacgcaccagcucc

SEQ ID NO: 2416956 - RNA, 19 nt, Artificial Sequence
  Description of Artificial Sequence: Synthetic oligonucleotide
acacccgaacacgaagcuc

SEQ ID NO: 2416957 - RNA, 19 nt, Artificial Sequence
  Description of Artificial Sequence: Synthetic oligonucleotide
gcacguuacacccgaacac

SEQ ID NO: 2416958 - RNA, 19 nt, Artificial Sequence
  Description of Artificial Sequence: Synthetic oligonucleotide
cacgugagucuugagcuug

SEQ ID NO: 2416959 - RNA, 19 nt, Artificial Sequence
  Description of Artificial Sequence: Synthetic oligonucleotide
cauaucuggcgaacucguc

SEQ ID NO: 2416960 - RNA, 19 nt, Artificial Sequence
  Description of Artificial Sequence: Synthetic oligonucleotide
cacgaagcucagcaccagc

SEQ ID NO: 2416961 - RNA, 19 nt, Artificial Sequence
  Description of Artificial Sequence: Synthetic oligonucleotide
agaaagcgacgcuuauaaa

SEQ ID NO: 2416962 - RNA, 19 nt, Artificial Sequence
  Description of Artificial Sequence: Synthetic oligonucleotide
auccauucugcaaagucuu

SEQ ID NO: 2416963 - RNA, 19 nt, Artificial Sequence
  Description of Artificial Sequence: Synthetic oligonucleotide
ugucagucacuuuguugau

SEQ ID NO: 2416964 - RNA, 19 nt, Artificial Sequence
  Description of Artificial Sequence: Synthetic oligonucleotide
aacugugcuguccgcgcuu

SEQ ID NO: 2416965 - RNA, 19 nt, Artificial Sequence
  Description of Artificial Sequence: Synthetic oligonucleotide
gcacuauuggaguuguuaa

SEQ ID NO: 2416966 - RNA, 19 nt, Artificial Sequence
  Description of Artificial Sequence: Synthetic oligonucleotide
cagcucuuuacccugugaa

SEQ ID NO: 2416967 - RNA, 19 nt, Artificial Sequence
  Description of Artificial Sequence: Synthetic oligonucleotide
ugaaaggguggaguacaau

SEQ ID NO: 2416968 - RNA, 19 nt, Artificial Sequence
  Description of Artificial Sequence: Synthetic oligonucleotide
cagcacguuacacccgaac

SEQ ID NO: 2416969 - RNA, 19 nt, Artificial Sequence
  Description of Artificial Sequence: Synthetic oligonucleotide
gcgaacucguccaucauac

SEQ ID NO: 2416970 - RNA, 19 nt, Artificial Sequence
  Description of Artificial Sequence: Synthetic oligonucleotide
ggacagggacggcaggagg

SEQ ID NO: 2416971 - RNA, 19 nt, Artificial Sequence
  Description of Artificial Sequence: Synthetic oligonucleotide
gcacccuggaaacgaagag

SEQ ID NO: 2416972 - RNA, 19 nt, Artificial Sequence
  Description of Artificial Sequence: Synthetic oligonucleotide
cagcgcucauccuggcucc

SEQ ID NO: 2416973 - RNA, 19 nt, Artificial Sequence
  Description of Artificial Sequence: Synthetic oligonucleotide
ccagccuagcauaucuggc

SEQ ID NO: 2416974 - RNA, 19 nt, Artificial Sequence
  Description of Artificial Sequence: Synthetic oligonucleotide
ccagagugugcagagacug

SEQ ID NO: 2416975 - RNA, 19 nt, Artificial Sequence
  Description of Artificial Sequence: Synthetic oligonucleotide
ccgaacacgaagcucagca

SEQ ID NO: 2416976 - RNA, 19 nt, Artificial Sequence
  Description of Artificial Sequence: Synthetic oligonucleotide
cagagacugucugcaaaac

SEQ ID NO: 2416977 - RNA, 19 nt, Artificial Sequence
  Description of Artificial Sequence: Synthetic oligonucleotide
gccacaacuuuauuacaga

SEQ ID NO: 2416978 - RNA, 19 nt, Artificial Sequence
  Description of Artificial Sequence: Synthetic oligonucleotide
cugcaaagucuuguagcug

SEQ ID NO: 2416979 - RNA, 19 nt, Artificial Sequence
  Description of Artificial Sequence: Synthetic oligonucleotide
cucccacgcaccagcuccg

SEQ ID NO: 2416980 - RNA, 19 nt, Artificial Sequence
  Description of Artificial Sequence: Synthetic oligonucleotide
cagcacccuggaaacgaag

SEQ ID NO: 2416981 - RNA, 19 nt, Artificial Sequence
  Description of Artificial Sequence: Synthetic oligonucleotide
guggaguacaauagccaca

SEQ ID NO: 2416982 - RNA, 19 nt, Artificial Sequence
  Description of Artificial Sequence: Synthetic oligonucleotide
gacggcaggaggauccgca

SEQ ID NO: 2416983 - RNA, 19 nt, Artificial Sequence
  Description of Artificial Sequence: Synthetic oligonucleotide
ucacgugagucuugagcuu

SEQ ID NO: 2416984 - RNA, 19 nt, Artificial Sequence
  Description of Artificial Sequence: Synthetic oligonucleotide
cugcuugcagaauguagaa

SEQ ID NO: 2416985 - RNA, 19 nt, Artificial Sequence
  Description of Artificial Sequence: Synthetic oligonucleotide
caccugcuacucgaguagg

SEQ ID NO: 2416986 - RNA, 19 nt, Artificial Sequence
  Description of Artificial Sequence: Synthetic oligonucleotide
ugagcuugucagucacuuu

SEQ ID NO: 2416987 - RNA, 19 nt, Artificial Sequence
  Description of Artificial Sequence: Synthetic oligonucleotide
cacgcaccagcuccgcuac

SEQ ID NO: 2416988 - RNA, 19 nt, Artificial Sequence
  Description of Artificial Sequence: Synthetic oligonucleotide
ccuggaaacgaagaggaca

SEQ ID NO: 2416989 - RNA, 19 nt, Artificial Sequence
  Description of Artificial Sequence: Synthetic oligonucleotide
aguuguuaaucagcucuuu

SEQ ID NO: 2416990 - RNA, 19 nt, Artificial Sequence
  Description of Artificial Sequence: Synthetic oligonucleotide
gccucggcagcgcucaucc

SEQ ID NO: 2416991 - RNA, 19 nt, Artificial Sequence
  Description of Artificial Sequence: Synthetic oligonucleotide
guacaauagccacaacuuu

SEQ ID NO: 2416992 - RNA, 19 nt, Artificial Sequence
  Description of Artificial Sequence: Synthetic oligonucleotide
gcagcgcucauccuggcuc

SEQ ID NO: 2416993 - RNA, 19 nt, Artificial Sequence
  Description of Artificial Sequence: Synthetic oligonucleotide
uccgccucggcagcgcuca

SEQ ID NO: 2416994 - RNA, 19 nt, Artificial Sequence
  Description of Artificial Sequence: Synthetic oligonucleotide
ccaacugugcuguccgcgc

SEQ ID NO: 2416995 - RNA, 19 nt, Artificial Sequence
  Description of Artificial Sequence: Synthetic oligonucleotide
uccgcuacugcagcgccau

SEQ ID NO: 2416996 - RNA, 19 nt, Artificial Sequence
  Description of Artificial Sequence: Synthetic oligonucleotide
auguagaaagcgacgcuua

SEQ ID NO: 2416997 - RNA, 19 nt, Artificial Sequence
  Description of Artificial Sequence: Synthetic oligonucleotide
gagcgagaucaucagugcu

SEQ ID NO: 2416998 - RNA, 19 nt, Artificial Sequence
  Description of Artificial Sequence: Synthetic oligonucleotide
gcgagaucaucagugcugc

SEQ ID NO: 2416999 - RNA, 19 nt, Artificial Sequence
  Description of Artificial Sequence: Synthetic oligonucleotide
caacuuuauuacagacuaa

SEQ ID NO: 2417000 - RNA, 19 nt, Artificial Sequence
  Description of Artificial Sequence: Synthetic oligonucleotide
agcuugucagucacuuugu

SEQ ID NO: 2417001 - RNA, 19 nt, Artificial Sequence
  Description of Artificial Sequence: Synthetic oligonucleotide
uagcggggugauccacuug

SEQ ID NO: 2417002 - RNA, 19 nt, Artificial Sequence
  Description of Artificial Sequence: Synthetic oligonucleotide
gcaaagucuuguagcugcg

SEQ ID NO: 2417003 - RNA, 19 nt, Artificial Sequence
  Description of Artificial Sequence: Synthetic oligonucleotide
ucuggcgaacucguccauc

SEQ ID NO: 2417004 - RNA, 19 nt, Artificial Sequence
  Description of Artificial Sequence: Synthetic oligonucleotide
acguuacacccgaacacga

SEQ ID NO: 2417005 - RNA, 19 nt, Artificial Sequence
  Description of Artificial Sequence: Synthetic oligonucleotide
acacgaagcucagcaccag

SEQ ID NO: 2417006 - RNA, 19 nt, Artificial Sequence
  Description of Artificial Sequence: Synthetic oligonucleotide
gucagucacuuuguugauc

SEQ ID NO: 2417007 - RNA, 19 nt, Artificial Sequence
  Description of Artificial Sequence: Synthetic oligonucleotide
cagcuccgcuacugcagcg

SEQ ID NO: 2417008 - RNA, 19 nt, Artificial Sequence
  Description of Artificial Sequence: Synthetic oligonucleotide
aggagacauagaauauaaa

SEQ ID NO: 2417009 - RNA, 19 nt, Artificial Sequence
  Description of Artificial Sequence: Synthetic oligonucleotide
cuuuccagccuagcauauc

SEQ ID NO: 2417010 - RNA, 19 nt, Artificial Sequence
  Description of Artificial Sequence: Synthetic oligonucleotide
guagaaagcgacgcuuaua

SEQ ID NO: 2417011 - RNA, 19 nt, Artificial Sequence
  Description of Artificial Sequence: Synthetic oligonucleotide
gugcuguccgcgcuuucac

SEQ ID NO: 2417012 - RNA, 19 nt, Artificial Sequence
  Description of Artificial Sequence: Synthetic oligonucleotide
gaggauccgcagcacguua

SEQ ID NO: 2417013 - RNA, 19 nt, Artificial Sequence
  Description of Artificial Sequence: Synthetic oligonucleotide
ggacggaguaauauuucca

SEQ ID NO: 2417014 - RNA, 19 nt, Artificial Sequence
  Description of Artificial Sequence: Synthetic oligonucleotide
agcagccacgccccgcggu

SEQ ID NO: 2417015 - RNA, 19 nt, Artificial Sequence
  Description of Artificial Sequence: Synthetic oligonucleotide
cucugcccucaucugcgac

SEQ ID NO: 2417016 - RNA, 19 nt, Artificial Sequence
  Description of Artificial Sequence: Synthetic oligonucleotide
agccacgccccgcgguccg

SEQ ID NO: 2417017 - RNA, 19 nt, Artificial Sequence
  Description of Artificial Sequence: Synthetic oligonucleotide
cggucuagcggggugaucc

SEQ ID NO: 2417018 - RNA, 19 nt, Artificial Sequence
  Description of Artificial Sequence: Synthetic oligonucleotide
cauuugaucuuggccaacu

SEQ ID NO: 2417019 - RNA, 19 nt, Artificial Sequence
  Description of Artificial Sequence: Synthetic oligonucleotide
ggguggaguacaauagcca

SEQ ID NO: 2417020 - RNA, 19 nt, Artificial Sequence
  Description of Artificial Sequence: Synthetic oligonucleotide
cagggacggaguaauauuu

SEQ ID NO: 2417021 - RNA, 19 nt, Artificial Sequence
  Description of Artificial Sequence: Synthetic oligonucleotide
uggcgaacucguccaucau

SEQ ID NO: 2417022 - RNA, 19 nt, Artificial Sequence
  Description of Artificial Sequence: Synthetic oligonucleotide
agcgacgcuuauaaaccau

SEQ ID NO: 2417023 - RNA, 19 nt, Artificial Sequence
  Description of Artificial Sequence: Synthetic oligonucleotide
caggcggucuagcggggug

SEQ ID NO: 2417024 - RNA, 19 nt, Artificial Sequence
  Description of Artificial Sequence: Synthetic oligonucleotide
uccgcgcuuucacgugagu

SEQ ID NO: 2417025 - RNA, 19 nt, Artificial Sequence
  Description of Artificial Sequence: Synthetic oligonucleotide
ccuagcauaucuggcgaac

SEQ ID NO: 2417026 - RNA, 19 nt, Artificial Sequence
  Description of Artificial Sequence: Synthetic oligonucleotide
cucaucugcgacuccugcu

SEQ ID NO: 2417027 - RNA, 19 nt, Artificial Sequence
  Description of Artificial Sequence: Synthetic oligonucleotide
auccacuugcugggcacca

SEQ ID NO: 2417028 - RNA, 19 nt, Artificial Sequence
  Description of Artificial Sequence: Synthetic oligonucleotide
caccagcuccgcuacugca

SEQ ID NO: 2417029 - RNA, 19 nt, Artificial Sequence
  Description of Artificial Sequence: Synthetic oligonucleotide
ccagugcuaugcuuugauc

SEQ ID NO: 2417030 - RNA, 19 nt, Artificial Sequence
  Description of Artificial Sequence: Synthetic oligonucleotide
accugcuacucgaguagga

SEQ ID NO: 2417031 - RNA, 19 nt, Artificial Sequence
  Description of Artificial Sequence: Synthetic oligonucleotide
gcugcguuucuuucuccuc

SEQ ID NO: 2417032 - RNA, 19 nt, Artificial Sequence
  Description of Artificial Sequence: Synthetic oligonucleotide
gaguuguuaaucagcucuu

SEQ ID NO: 2417033 - RNA, 19 nt, Artificial Sequence
  Description of Artificial Sequence: Synthetic oligonucleotide
aucuggcgaacucguccau

SEQ ID NO: 2417034 - RNA, 19 nt, Artificial Sequence
  Description of Artificial Sequence: Synthetic oligonucleotide
gagugugcagagacugucu

SEQ ID NO: 2417035 - RNA, 19 nt, Artificial Sequence
  Description of Artificial Sequence: Synthetic oligonucleotide
gcuuucacgugagucuuga

SEQ ID NO: 2417036 - RNA, 19 nt, Artificial Sequence
  Description of Artificial Sequence: Synthetic oligonucleotide
cuagcauaucuggcgaacu

SEQ ID NO: 2417037 - RNA, 19 nt, Artificial Sequence
  Description of Artificial Sequence: Synthetic oligonucleotide
cacuuuguugaucuuccuu

SEQ ID NO: 2417038 - RNA, 19 nt, Artificial Sequence
  Description of Artificial Sequence: Synthetic oligonucleotide
gcucuuuacccugugaaau

SEQ ID NO: 2417039 - RNA, 19 nt, Artificial Sequence
  Description of Artificial Sequence: Synthetic oligonucleotide
gcuccgcuacugcagcgcc

SEQ ID NO: 2417040 - RNA, 19 nt, Artificial Sequence
  Description of Artificial Sequence: Synthetic oligonucleotide
ggcgaacucguccaucaua

SEQ ID NO: 2417041 - RNA, 19 nt, Artificial Sequence
  Description of Artificial Sequence: Synthetic oligonucleotide
cgaacacgaagcucagcac

SEQ ID NO: 2417042 - RNA, 19 nt, Artificial Sequence
  Description of Artificial Sequence: Synthetic oligonucleotide
ggggaagcagacaggaucu

SEQ ID NO: 2417043 - RNA, 19 nt, Artificial Sequence
  Description of Artificial Sequence: Synthetic oligonucleotide
gucuagcggggugauccac

SEQ ID NO: 2417044 - RNA, 19 nt, Artificial Sequence
  Description of Artificial Sequence: Synthetic oligonucleotide
acccgaacacgaagcucag

SEQ ID NO: 2417045 - RNA, 19 nt, Artificial Sequence
  Description of Artificial Sequence: Synthetic oligonucleotide
aggcggucuagcgggguga

SEQ ID NO: 2417046 - RNA, 19 nt, Artificial Sequence
  Description of Artificial Sequence: Synthetic oligonucleotide
cuuggccaacugugcuguc

SEQ ID NO: 2417047 - RNA, 19 nt, Artificial Sequence
  Description of Artificial Sequence: Synthetic oligonucleotide
ggaaaggcuaccaggcggu

SEQ ID NO: 2417048 - RNA, 19 nt, Artificial Sequence
  Description of Artificial Sequence: Synthetic oligonucleotide
cacagggacggaguaauau

SEQ ID NO: 2417049 - RNA, 19 nt, Artificial Sequence
  Description of Artificial Sequence: Synthetic oligonucleotide
guccgcgcuuucacgugag

SEQ ID NO: 2417050 - RNA, 19 nt, Artificial Sequence
  Description of Artificial Sequence: Synthetic oligonucleotide
acgugagucuugagcuugu

SEQ ID NO: 2417051 - RNA, 19 nt, Artificial Sequence
  Description of Artificial Sequence: Synthetic oligonucleotide
ggaguacaauagccacaac

SEQ ID NO: 2417052 - RNA, 19 nt, Artificial Sequence
  Description of Artificial Sequence: Synthetic oligonucleotide
ucccacgcaccagcuccgc

SEQ ID NO: 2417053 - RNA, 19 nt, Artificial Sequence
  Description of Artificial Sequence: Synthetic oligonucleotide
auccaacaggugauuccaa

SEQ ID NO: 2417054 - RNA, 19 nt, Artificial Sequence
  Description of Artificial Sequence: Synthetic oligonucleotide
gugcagagacugucugcaa

SEQ ID NO: 2417055 - RNA, 19 nt, Artificial Sequence
  Description of Artificial Sequence: Synthetic oligonucleotide
cagagugugcagagacugu

SEQ ID NO: 2417056 - RNA, 19 nt, Artificial Sequence
  Description of Artificial Sequence: Synthetic oligonucleotide
gggacggcaggaggauccg

SEQ ID NO: 2417057 - RNA, 19 nt, Artificial Sequence
  Description of Artificial Sequence: Synthetic oligonucleotide
cgacuccugcucugcaucc

SEQ ID NO: 2417058 - RNA, 19 nt, Artificial Sequence
  Description of Artificial Sequence: Synthetic oligonucleotide
ggucuagcggggugaucca

SEQ ID NO: 2417059 - RNA, 19 nt, Artificial Sequence
  Description of Artificial Sequence: Synthetic oligonucleotide
cccuggaaacgaagaggac

SEQ ID NO: 2417060 - RNA, 19 nt, Artificial Sequence
  Description of Artificial Sequence: Synthetic oligonucleotide
cuccgcuacugcagcgcca

SEQ ID NO: 2417061 - RNA, 19 nt, Artificial Sequence
  Description of Artificial Sequence: Synthetic oligonucleotide
aggcuaccaggcggucuag

SEQ ID NO: 2417062 - RNA, 19 nt, Artificial Sequence
  Description of Artificial Sequence: Synthetic oligonucleotide
gcauaucuggcgaacucgu

SEQ ID NO: 2417063 - RNA, 19 nt, Artificial Sequence
  Description of Artificial Sequence: Synthetic oligonucleotide
caucugcgacuccugcucu

SEQ ID NO: 2417064 - RNA, 19 nt, Artificial Sequence
  Description of Artificial Sequence: Synthetic oligonucleotide
cgcuuauaaaccauuugau

SEQ ID NO: 2417065 - RNA, 19 nt, Artificial Sequence
  Description of Artificial Sequence: Synthetic oligonucleotide
cccucaucugcgacuccug

SEQ ID NO: 2417066 - RNA, 19 nt, Artificial Sequence
  Description of Artificial Sequence: Synthetic oligonucleotide
gcagccacgccccgcgguc

SEQ ID NO: 2417067 - RNA, 19 nt, Artificial Sequence
  Description of Artificial Sequence: Synthetic oligonucleotide
caacugugcuguccgcgcu

SEQ ID NO: 2417068 - RNA, 19 nt, Artificial Sequence
  Description of Artificial Sequence: Synthetic oligonucleotide
cugcgacuccugcucugca

SEQ ID NO: 2417069 - RNA, 19 nt, Artificial Sequence
  Description of Artificial Sequence: Synthetic oligonucleotide
cugugcuguccgcgcuuuc

SEQ ID NO: 2417070 - RNA, 19 nt, Artificial Sequence
  Description of Artificial Sequence: Synthetic oligonucleotide
cuagcggggugauccacuu

SEQ ID NO: 2417071 - RNA, 19 nt, Artificial Sequence
  Description of Artificial Sequence: Synthetic oligonucleotide
gccuagcauaucuggcgaa

SEQ ID NO: 2417072 - RNA, 19 nt, Artificial Sequence
  Description of Artificial Sequence: Synthetic oligonucleotide
ccgcagcacguuacacccg

SEQ ID NO: 2417073 - RNA, 19 nt, Artificial Sequence
  Description of Artificial Sequence: Synthetic oligonucleotide
ggcuaccaggcggucuagc

SEQ ID NO: 2417074 - RNA, 19 nt, Artificial Sequence
  Description of Artificial Sequence: Synthetic oligonucleotide
ccauuugaucuuggccaac

SEQ ID NO: 2417075 - RNA, 19 nt, Artificial Sequence
  Description of Artificial Sequence: Synthetic oligonucleotide
ccacuugcugggcaccaca

SEQ ID NO: 2417076 - RNA, 19 nt, Artificial Sequence
  Description of Artificial Sequence: Synthetic oligonucleotide
ccaacaggugauuccaauu

SEQ ID NO: 2417077 - RNA, 19 nt, Artificial Sequence
  Description of Artificial Sequence: Synthetic oligonucleotide
cggggugauccacuugcug

SEQ ID NO: 2417078 - RNA, 19 nt, Artificial Sequence
  Description of Artificial Sequence: Synthetic oligonucleotide
gugcugcuugcagaaugua

SEQ ID NO: 2417079 - RNA, 19 nt, Artificial Sequence
  Description of Artificial Sequence: Synthetic oligonucleotide
cgaguaggaaaggcuacca

SEQ ID NO: 2417080 - RNA, 19 nt, Artificial Sequence
  Description of Artificial Sequence: Synthetic oligonucleotide
ggacggcaggaggauccgc

SEQ ID NO: 2417081 - RNA, 19 nt, Artificial Sequence
  Description of Artificial Sequence: Synthetic oligonucleotide
cgcagcacguuacacccga

SEQ ID NO: 2417082 - RNA, 19 nt, Artificial Sequence
  Description of Artificial Sequence: Synthetic oligonucleotide
cuggggaagcagacaggau

SEQ ID NO: 2417083 - RNA, 19 nt, Artificial Sequence
  Description of Artificial Sequence: Synthetic oligonucleotide
ccacgcaccagcuccgcua

SEQ ID NO: 2417084 - RNA, 19 nt, Artificial Sequence
  Description of Artificial Sequence: Synthetic oligonucleotide
cguuacacccgaacacgaa

SEQ ID NO: 2417085 - RNA, 19 nt, Artificial Sequence
  Description of Artificial Sequence: Synthetic oligonucleotide
cccgaacacgaagcucagc

SEQ ID NO: 2417086 - RNA, 19 nt, Artificial Sequence
  Description of Artificial Sequence: Synthetic oligonucleotide
cccgcgguccgccucggca

SEQ ID NO: 2417087 - RNA, 19 nt, Artificial Sequence
  Description of Artificial Sequence: Synthetic oligonucleotide
ggcagcgcucauccuggcu

SEQ ID NO: 2417088 - RNA, 19 nt, Artificial Sequence
  Description of Artificial Sequence: Synthetic oligonucleotide
gcgguccgccucggcagcg

SEQ ID NO: 2417089 - RNA, 19 nt, Artificial Sequence
  Description of Artificial Sequence: Synthetic oligonucleotide
gccagagugugcagagacu

SEQ ID NO: 2417090 - RNA, 19 nt, Artificial Sequence
  Description of Artificial Sequence: Synthetic oligonucleotide
gcgacgcuuauaaaccauu

SEQ ID NO: 2417091 - RNA, 19 nt, Artificial Sequence
  Description of Artificial Sequence: Synthetic oligonucleotide
guccgccucggcagcgcuc

SEQ ID NO: 2417092 - RNA, 19 nt, Artificial Sequence
  Description of Artificial Sequence: Synthetic oligonucleotide
ccuuuccagccuagcauau

SEQ ID NO: 2417093 - RNA, 19 nt, Artificial Sequence
  Description of Artificial Sequence: Synthetic oligonucleotide
cagucacuuuguugaucuu

SEQ ID NO: 2417094 - RNA, 19 nt, Artificial Sequence
  Description of Artificial Sequence: Synthetic oligonucleotide
cgugagucuugagcuuguc

SEQ ID NO: 2417095 - RNA, 19 nt, Artificial Sequence
  Description of Artificial Sequence: Synthetic oligonucleotide
gcgcuuucacgugagucuu

SEQ ID NO: 2417096 - RNA, 19 nt, Artificial Sequence
  Description of Artificial Sequence: Synthetic oligonucleotide
cgacgcuuauaaaccauuu

SEQ ID NO: 2417097 - RNA, 19 nt, Artificial Sequence
  Description of Artificial Sequence: Synthetic oligonucleotide
cgccccgcgguccgccucg

SEQ ID NO: 2417098 - RNA, 19 nt, Artificial Sequence
  Description of Artificial Sequence: Synthetic oligonucleotide
cgcgguccgccucggcagc

SEQ ID NO: 2417099 - RNA, 19 nt, Artificial Sequence
  Description of Artificial Sequence: Synthetic oligonucleotide
gguccgccucggcagcgcu

SEQ ID NO: 2417100 - RNA, 19 nt, Artificial Sequence
  Description of Artificial Sequence: Synthetic oligonucleotide
ccacgccccgcgguccgcc

SEQ ID NO: 2417101 - RNA, 19 nt, Artificial Sequence
  Description of Artificial Sequence: Synthetic oligonucleotide
gcagcacguuacacccgaa

SEQ ID NO: 2417102 - RNA, 19 nt, Artificial Sequence
  Description of Artificial Sequence: Synthetic oligonucleotide
cagcacuauuggaguuguu

SEQ ID NO: 2417103 - RNA, 19 nt, Artificial Sequence
  Description of Artificial Sequence: Synthetic oligonucleotide
cgaacucguccaucauacu

SEQ ID NO: 2417104 - RNA, 19 nt, Artificial Sequence
  Description of Artificial Sequence: Synthetic oligonucleotide
gcggucuagcggggugauc

SEQ ID NO: 2417105 - RNA, 19 nt, Artificial Sequence
  Description of Artificial Sequence: Synthetic oligonucleotide
ccgcuacugcagcgccaug

SEQ ID NO: 2417106 - RNA, 19 nt, Artificial Sequence
  Description of Artificial Sequence: Synthetic oligonucleotide
gcggggugauccacuugcu

SEQ ID NO: 2417107 - RNA, 19 nt, Artificial Sequence
  Description of Artificial Sequence: Synthetic oligonucleotide
ggcggucuagcggggugau

SEQ ID NO: 2417108 - RNA, 19 nt, Artificial Sequence
  Description of Artificial Sequence: Synthetic oligonucleotide
cgguccgccucggcagcgc

SEQ ID NO: 2417109 - RNA, 19 nt, Artificial Sequence
  Description of Artificial Sequence: Synthetic oligonucleotide
ccccgcgguccgccucggc

SEQ ID NO: 2417110 - RNA, 19 nt, Artificial Sequence
  Description of Artificial Sequence: Synthetic oligonucleotide
cgccucggcagcgcucauc

SEQ ID NO: 2417111 - RNA, 19 nt, Artificial Sequence
  Description of Artificial Sequence: Synthetic oligonucleotide
cccacgcaccagcuccgcu

SEQ ID NO: 2417112 - RNA, 19 nt, Artificial Sequence
  Description of Artificial Sequence: Synthetic oligonucleotide
ccaggcggucuagcggggu

SEQ ID NO: 2417113 - RNA, 19 nt, Artificial Sequence
  Description of Artificial Sequence: Synthetic oligonucleotide
ccgccucggcagcgcucau

SEQ ID NO: 2417114 - RNA, 19 nt, Artificial Sequence
  Description of Artificial Sequence: Synthetic oligonucleotide
uauuaaacauuuuaggagg

SEQ ID NO: 2417115 - RNA, 19 nt, Artificial Sequence
  Description of Artificial Sequence: Synthetic oligonucleotide
gacaaauugucacaaaugg

SEQ ID NO: 2417116 - RNA, 19 nt, Artificial Sequence
  Description of Artificial Sequence: Synthetic oligonucleotide
uuugucuugaaacagcuug

SEQ ID NO: 2417117 - RNA, 19 nt, Artificial Sequence
  Description of Artificial Sequence: Synthetic oligonucleotide
aauggaaaugggcucuucc

SEQ ID NO: 2417118 - RNA, 19 nt, Artificial Sequence
  Description of Artificial Sequence: Synthetic oligonucleotide
uuuuaucuuauccucagca

SEQ ID NO: 2417119 - RNA, 19 nt, Artificial Sequence
  Description of Artificial Sequence: Synthetic oligonucleotide
ucuagaagaguacaacggg

SEQ ID NO: 2417120 - RNA, 19 nt, Artificial Sequence
  Description of Artificial Sequence: Synthetic oligonucleotide
acggacacugucuugaugc

SEQ ID NO: 2417121 - RNA, 19 nt, Artificial Sequence
  Description of Artificial Sequence: Synthetic oligonucleotide
uuaaugcugaaacaagugc

SEQ ID NO: 2417122 - RNA, 19 nt, Artificial Sequence
  Description of Artificial Sequence: Synthetic oligonucleotide
gauauuuuaucuuauccuc

SEQ ID NO: 2417123 - RNA, 19 nt, Artificial Sequence
  Description of Artificial Sequence: Synthetic oligonucleotide
uuuaaugcugaaacaagug

SEQ ID NO: 2417124 - RNA, 19 nt, Artificial Sequence
  Description of Artificial Sequence: Synthetic oligonucleotide
ucucuagaagaguacaacg

SEQ ID NO: 2417125 - RNA, 19 nt, Artificial Sequence
  Description of Artificial Sequence: Synthetic oligonucleotide
uugucaaucuaaaacauuc

SEQ ID NO: 2417126 - RNA, 19 nt, Artificial Sequence
  Description of Artificial Sequence: Synthetic oligonucleotide
ucacaaauggaaaugggcu

SEQ ID NO: 2417127 - RNA, 19 nt, Artificial Sequence
  Description of Artificial Sequence: Synthetic oligonucleotide
ucuuuguauauucuaguug

SEQ ID NO: 2417128 - RNA, 19 nt, Artificial Sequence
  Description of Artificial Sequence: Synthetic oligonucleotide
agauauuuuaucuuauccu

SEQ ID NO: 2417129 - RNA, 19 nt, Artificial Sequence
  Description of Artificial Sequence: Synthetic oligonucleotide
uauccuugaguucugaacu

SEQ ID NO: 2417130 - RNA, 19 nt, Artificial Sequence
  Description of Artificial Sequence: Synthetic oligonucleotide
caugaagauucauuuaucc

SEQ ID NO: 2417131 - RNA, 19 nt, Artificial Sequence
  Description of Artificial Sequence: Synthetic oligonucleotide
aagacauccagcuuuucca

SEQ ID NO: 2417132 - RNA, 19 nt, Artificial Sequence
  Description of Artificial Sequence: Synthetic oligonucleotide
uucucuuuguauauucuag

SEQ ID NO: 2417133 - RNA, 19 nt, Artificial Sequence
  Description of Artificial Sequence: Synthetic oligonucleotide
ucucguuccacauugagaa

SEQ ID NO: 2417134 - RNA, 19 nt, Artificial Sequence
  Description of Artificial Sequence: Synthetic oligonucleotide
acacgcuuugucuugaaac

SEQ ID NO: 2417135 - RNA, 19 nt, Artificial Sequence
  Description of Artificial Sequence: Synthetic oligonucleotide
ucguugucaaucuaaaaca

SEQ ID NO: 2417136 - RNA, 19 nt, Artificial Sequence
  Description of Artificial Sequence: Synthetic oligonucleotide
cagauauuuuaucuuaucc

SEQ ID NO: 2417137 - RNA, 19 nt, Artificial Sequence
  Description of Artificial Sequence: Synthetic oligonucleotide
uuuaucuuauccucagcag

SEQ ID NO: 2417138 - RNA, 19 nt, Artificial Sequence
  Description of Artificial Sequence: Synthetic oligonucleotide
cucuagaagaguacaacgg

SEQ ID NO: 2417139 - RNA, 19 nt, Artificial Sequence
  Description of Artificial Sequence: Synthetic oligonucleotide
aauugucacaaauggaaau

SEQ ID NO: 2417140 - RNA, 19 nt, Artificial Sequence
  Description of Artificial Sequence: Synthetic oligonucleotide
uuugcugcagcuuacggac

SEQ ID NO: 2417141 - RNA, 19 nt, Artificial Sequence
  Description of Artificial Sequence: Synthetic oligonucleotide
ugcauugccaucaaaaguu

SEQ ID NO: 2417142 - RNA, 19 nt, Artificial Sequence
  Description of Artificial Sequence: Synthetic oligonucleotide
uuaucuuauccucagcagu

SEQ ID NO: 2417143 - RNA, 19 nt, Artificial Sequence
  Description of Artificial Sequence: Synthetic oligonucleotide
cuucuuagcuaauugcucc

SEQ ID NO: 2417144 - RNA, 19 nt, Artificial Sequence
  Description of Artificial Sequence: Synthetic oligonucleotide
ucuugaaacagcuugcgau

SEQ ID NO: 2417145 - RNA, 19 nt, Artificial Sequence
  Description of Artificial Sequence: Synthetic oligonucleotide
uguauauucuaguugcuuc

SEQ ID NO: 2417146 - RNA, 19 nt, Artificial Sequence
  Description of Artificial Sequence: Synthetic oligonucleotide
uaucuucuuagcuaauugc

SEQ ID NO: 2417147 - RNA, 19 nt, Artificial Sequence
  Description of Artificial Sequence: Synthetic oligonucleotide
ucuugcauugccaucaaaa

SEQ ID NO: 2417148 - RNA, 19 nt, Artificial Sequence
  Description of Artificial Sequence: Synthetic oligonucleotide
uuugucucacucuccaggg

SEQ ID NO: 2417149 - RNA, 19 nt, Artificial Sequence
  Description of Artificial Sequence: Synthetic oligonucleotide
uaagacauccagcuuuucc

SEQ ID NO: 2417150 - RNA, 19 nt, Artificial Sequence
  Description of Artificial Sequence: Synthetic oligonucleotide
uuaaucagcucccgguggg

SEQ ID NO: 2417151 - RNA, 19 nt, Artificial Sequence
  Description of Artificial Sequence: Synthetic oligonucleotide
aguacaacgggacugggcu

SEQ ID NO: 2417152 - RNA, 19 nt, Artificial Sequence
  Description of Artificial Sequence: Synthetic oligonucleotide
gucguugucaaucuaaaac

SEQ ID NO: 2417153 - RNA, 19 nt, Artificial Sequence
  Description of Artificial Sequence: Synthetic oligonucleotide
uuagcaugcagcuucauuu

SEQ ID NO: 2417154 - RNA, 19 nt, Artificial Sequence
  Description of Artificial Sequence: Synthetic oligonucleotide
aggaucauggccuuuucuc

SEQ ID NO: 2417155 - RNA, 19 nt, Artificial Sequence
  Description of Artificial Sequence: Synthetic oligonucleotide
agugcuugguuguuugggc

SEQ ID NO: 2417156 - RNA, 19 nt, Artificial Sequence
  Description of Artificial Sequence: Synthetic oligonucleotide
uugcuuucuaucuucuuag

SEQ ID NO: 2417157 - RNA, 19 nt, Artificial Sequence
  Description of Artificial Sequence: Synthetic oligonucleotide
auuuuaucuuauccucagc

SEQ ID NO: 2417158 - RNA, 19 nt, Artificial Sequence
  Description of Artificial Sequence: Synthetic oligonucleotide
ucaaucuaaaacauucuuu

SEQ ID NO: 2417159 - RNA, 19 nt, Artificial Sequence
  Description of Artificial Sequence: Synthetic oligonucleotide
uucuaagacauccagcuuu

SEQ ID NO: 2417160 - RNA, 19 nt, Artificial Sequence
  Description of Artificial Sequence: Synthetic oligonucleotide
ggcuauuaaacauuuuagg

SEQ ID NO: 2417161 - RNA, 19 nt, Artificial Sequence
  Description of Artificial Sequence: Synthetic oligonucleotide
uugaguuuggaaaucuggu

SEQ ID NO: 2417162 - RNA, 19 nt, Artificial Sequence
  Description of Artificial Sequence: Synthetic oligonucleotide
uuucaguaguucuuugugc

SEQ ID NO: 2417163 - RNA, 19 nt, Artificial Sequence
  Description of Artificial Sequence: Synthetic oligonucleotide
cuugcauugccaucaaaag

SEQ ID NO: 2417164 - RNA, 19 nt, Artificial Sequence
  Description of Artificial Sequence: Synthetic oligonucleotide
ugggcuauuaaacauuuua

SEQ ID NO: 2417165 - RNA, 19 nt, Artificial Sequence
  Description of Artificial Sequence: Synthetic oligonucleotide
aggcgauuggaucuuuucc

SEQ ID NO: 2417166 - RNA, 19 nt, Artificial Sequence
  Description of Artificial Sequence: Synthetic oligonucleotide
uuauccuugaguucugaac

SEQ ID NO: 2417167 - RNA, 19 nt, Artificial Sequence
  Description of Artificial Sequence: Synthetic oligonucleotide
uucuuugugcuccacaguc

SEQ ID NO: 2417168 - RNA, 19 nt, Artificial Sequence
  Description of Artificial Sequence: Synthetic oligonucleotide
auggaaaugggcucuuccg

SEQ ID NO: 2417169 - RNA, 19 nt, Artificial Sequence
  Description of Artificial Sequence: Synthetic oligonucleotide
cuuuucucguuccacauug

SEQ ID NO: 2417170 - RNA, 19 nt, Artificial Sequence
  Description of Artificial Sequence: Synthetic oligonucleotide
caucagaguaccuuccagg

SEQ ID NO: 2417171 - RNA, 19 nt, Artificial Sequence
  Description of Artificial Sequence: Synthetic oligonucleotide
uagaagaguacaacgggac

SEQ ID NO: 2417172 - RNA, 19 nt, Artificial Sequence
  Description of Artificial Sequence: Synthetic oligonucleotide
uaucuuauccucagcaguc

SEQ ID NO: 2417173 - RNA, 19 nt, Artificial Sequence
  Description of Artificial Sequence: Synthetic oligonucleotide
agcuaauugcuccaguuca

SEQ ID NO: 2417174 - RNA, 19 nt, Artificial Sequence
  Description of Artificial Sequence: Synthetic oligonucleotide
ucuugcuuaaucagcuccc

SEQ ID NO: 2417175 - RNA, 19 nt, Artificial Sequence
  Description of Artificial Sequence: Synthetic oligonucleotide
uccaguuuagcaugcagcu

SEQ ID NO: 2417176 - RNA, 19 nt, Artificial Sequence
  Description of Artificial Sequence: Synthetic oligonucleotide
ucuuuuccugguaaggagu

SEQ ID NO: 2417177 - RNA, 19 nt, Artificial Sequence
  Description of Artificial Sequence: Synthetic oligonucleotide
cagaguaccuuccagguug

SEQ ID NO: 2417178 - RNA, 19 nt, Artificial Sequence
  Description of Artificial Sequence: Synthetic oligonucleotide
uuuugcugcagcuuacgga

SEQ ID NO: 2417179 - RNA, 19 nt, Artificial Sequence
  Description of Artificial Sequence: Synthetic oligonucleotide
cuugaaacagcuugcgaug

SEQ ID NO: 2417180 - RNA, 19 nt, Artificial Sequence
  Description of Artificial Sequence: Synthetic oligonucleotide
gcuauuaaacauuuuagga

SEQ ID NO: 2417181 - RNA, 19 nt, Artificial Sequence
  Description of Artificial Sequence: Synthetic oligonucleotide
cuuucaguaguucuuugug

SEQ ID NO: 2417182 - RNA, 19 nt, Artificial Sequence
  Description of Artificial Sequence: Synthetic oligonucleotide
ucagcagucugcugagucg

SEQ ID NO: 2417183 - RNA, 19 nt, Artificial Sequence
  Description of Artificial Sequence: Synthetic oligonucleotide
uuucucguuccacauugag

SEQ ID NO: 2417184 - RNA, 19 nt, Artificial Sequence
  Description of Artificial Sequence: Synthetic oligonucleotide
augaagauucauuuauccu

SEQ ID NO: 2417185 - RNA, 19 nt, Artificial Sequence
  Description of Artificial Sequence: Synthetic oligonucleotide
guuguuugggcuauuaaac

SEQ ID NO: 2417186 - RNA, 19 nt, Artificial Sequence
  Description of Artificial Sequence: Synthetic oligonucleotide
uuguuugggcuauuaaaca

SEQ ID NO: 2417187 - RNA, 19 nt, Artificial Sequence
  Description of Artificial Sequence: Synthetic oligonucleotide
cucuaugucaucagaguac

SEQ ID NO: 2417188 - RNA, 19 nt, Artificial Sequence
  Description of Artificial Sequence: Synthetic oligonucleotide
ugucaaucuaaaacauucu

SEQ ID NO: 2417189 - RNA, 19 nt, Artificial Sequence
  Description of Artificial Sequence: Synthetic oligonucleotide
aguucagguugucuucagc

SEQ ID NO: 2417190 - RNA, 19 nt, Artificial Sequence
  Description of Artificial Sequence: Synthetic oligonucleotide
aacgggacugggcugagcu

SEQ ID NO: 2417191 - RNA, 19 nt, Artificial Sequence
  Description of Artificial Sequence: Synthetic oligonucleotide
ucaucagaguaccuuccag

SEQ ID NO: 2417192 - RNA, 19 nt, Artificial Sequence
  Description of Artificial Sequence: Synthetic oligonucleotide
auuaaacauuuuaggaggg

SEQ ID NO: 2417193 - RNA, 19 nt, Artificial Sequence
  Description of Artificial Sequence: Synthetic oligonucleotide
ucucuuuguauauucuagu

SEQ ID NO: 2417194 - RNA, 19 nt, Artificial Sequence
  Description of Artificial Sequence: Synthetic oligonucleotide
cuaucuucuuagcuaauug

SEQ ID NO: 2417195 - RNA, 19 nt, Artificial Sequence
  Description of Artificial Sequence: Synthetic oligonucleotide
uugucuucagccugagucc

SEQ ID NO: 2417196 - RNA, 19 nt, Artificial Sequence
  Description of Artificial Sequence: Synthetic oligonucleotide
ugagucguugucaaucuaa

SEQ ID NO: 2417197 - RNA, 19 nt, Artificial Sequence
  Description of Artificial Sequence: Synthetic oligonucleotide
cuuaaucagcucccggugg

SEQ ID NO: 2417198 - RNA, 19 nt, Artificial Sequence
  Description of Artificial Sequence: Synthetic oligonucleotide
ucuaguugcuucucuagaa

SEQ ID NO: 2417199 - RNA, 19 nt, Artificial Sequence
  Description of Artificial Sequence: Synthetic oligonucleotide
uaacuggaugcuuauauuu

SEQ ID NO: 2417200 - RNA, 19 nt, Artificial Sequence
  Description of Artificial Sequence: Synthetic oligonucleotide
uguuugggcuauuaaacau

SEQ ID NO: 2417201 - RNA, 19 nt, Artificial Sequence
  Description of Artificial Sequence: Synthetic oligonucleotide
ucguuccacauugagaacc

SEQ ID NO: 2417202 - RNA, 19 nt, Artificial Sequence
  Description of Artificial Sequence: Synthetic oligonucleotide
acugggcugagcuuaacug

SEQ ID NO: 2417203 - RNA, 19 nt, Artificial Sequence
  Description of Artificial Sequence: Synthetic oligonucleotide
ugcuuaaucagcucccggu

SEQ ID NO: 2417204 - RNA, 19 nt, Artificial Sequence
  Description of Artificial Sequence: Synthetic oligonucleotide
agcuuuuccaguuuagcau

SEQ ID NO: 2417205 - RNA, 19 nt, Artificial Sequence
  Description of Artificial Sequence: Synthetic oligonucleotide
uggaaaugggcucuuccga

SEQ ID NO: 2417206 - RNA, 19 nt, Artificial Sequence
  Description of Artificial Sequence: Synthetic oligonucleotide
cacauugagaaccauucuc

SEQ ID NO: 2417207 - RNA, 19 nt, Artificial Sequence
  Description of Artificial Sequence: Synthetic oligonucleotide
ugaguuuggaaaucugguc

SEQ ID NO: 2417208 - RNA, 19 nt, Artificial Sequence
  Description of Artificial Sequence: Synthetic oligonucleotide
ugucuugaaacagcuugcg

SEQ ID NO: 2417209 - RNA, 19 nt, Artificial Sequence
  Description of Artificial Sequence: Synthetic oligonucleotide
ugucaucagaguaccuucc

SEQ ID NO: 2417210 - RNA, 19 nt, Artificial Sequence
  Description of Artificial Sequence: Synthetic oligonucleotide
uucuaguugcuucucuaga

SEQ ID NO: 2417211 - RNA, 19 nt, Artificial Sequence
  Description of Artificial Sequence: Synthetic oligonucleotide
uaguugcuucucuagaaga

SEQ ID NO: 2417212 - RNA, 19 nt, Artificial Sequence
  Description of Artificial Sequence: Synthetic oligonucleotide
uuuguauauucuaguugcu

SEQ ID NO: 2417213 - RNA, 19 nt, Artificial Sequence
  Description of Artificial Sequence: Synthetic oligonucleotide
agauucauuuauccuugag

SEQ ID NO: 2417214 - RNA, 19 nt, Artificial Sequence
  Description of Artificial Sequence: Synthetic oligonucleotide
ugugccgccucucuggaca

SEQ ID NO: 2417215 - RNA, 19 nt, Artificial Sequence
  Description of Artificial Sequence: Synthetic oligonucleotide
aucagaguaccuuccaggu

SEQ ID NO: 2417216 - RNA, 19 nt, Artificial Sequence
  Description of Artificial Sequence: Synthetic oligonucleotide
uacugugccgccucucugg

SEQ ID NO: 2417217 - RNA, 19 nt, Artificial Sequence
  Description of Artificial Sequence: Synthetic oligonucleotide
uuugggcuauuaaacauuu

SEQ ID NO: 2417218 - RNA, 19 nt, Artificial Sequence
  Description of Artificial Sequence: Synthetic oligonucleotide
uccaguucaugcucuaugu

SEQ ID NO: 2417219 - RNA, 19 nt, Artificial Sequence
  Description of Artificial Sequence: Synthetic oligonucleotide
cuaguugcuucucuagaag

SEQ ID NO: 2417220 - RNA, 19 nt, Artificial Sequence
  Description of Artificial Sequence: Synthetic oligonucleotide
gaaaucuggucuccuuugc

SEQ ID NO: 2417221 - RNA, 19 nt, Artificial Sequence
  Description of Artificial Sequence: Synthetic oligonucleotide
uuagcuaauugcuccaguu

SEQ ID NO: 2417222 - RNA, 19 nt, Artificial Sequence
  Description of Artificial Sequence: Synthetic oligonucleotide
auugccaucaaaaguucag

SEQ ID NO: 2417223 - RNA, 19 nt, Artificial Sequence
  Description of Artificial Sequence: Synthetic oligonucleotide
uugcuuaaucagcucccgg

SEQ ID NO: 2417224 - RNA, 19 nt, Artificial Sequence
  Description of Artificial Sequence: Synthetic oligonucleotide
acagcuugcgaugaugcuc

SEQ ID NO: 2417225 - RNA, 19 nt, Artificial Sequence
  Description of Artificial Sequence: Synthetic oligonucleotide
uccagcuuugcccugggaa

SEQ ID NO: 2417226 - RNA, 19 nt, Artificial Sequence
  Description of Artificial Sequence: Synthetic oligonucleotide
aaauugucacaaauggaaa

SEQ ID NO: 2417227 - RNA, 19 nt, Artificial Sequence
  Description of Artificial Sequence: Synthetic oligonucleotide
uggaucuuuuccugguaag

SEQ ID NO: 2417228 - RNA, 19 nt, Artificial Sequence
  Description of Artificial Sequence: Synthetic oligonucleotide
agacaaauugucacaaaug

SEQ ID NO: 2417229 - RNA, 19 nt, Artificial Sequence
  Description of Artificial Sequence: Synthetic oligonucleotide
cacaaauggaaaugggcuc

SEQ ID NO: 2417230 - RNA, 19 nt, Artificial Sequence
  Description of Artificial Sequence: Synthetic oligonucleotide
ugcucuaugucaucagagu

SEQ ID NO: 2417231 - RNA, 19 nt, Artificial Sequence
  Description of Artificial Sequence: Synthetic oligonucleotide
cagcuugcgaugaugcucc

SEQ ID NO: 2417232 - RNA, 19 nt, Artificial Sequence
  Description of Artificial Sequence: Synthetic oligonucleotide
ggaucauggccuuuucucg

SEQ ID NO: 2417233 - RNA, 19 nt, Artificial Sequence
  Description of Artificial Sequence: Synthetic oligonucleotide
gaaccauucucuuuguaua

SEQ ID NO: 2417234 - RNA, 19 nt, Artificial Sequence
  Description of Artificial Sequence: Synthetic oligonucleotide
uucucuagaagaguacaac

SEQ ID NO: 2417235 - RNA, 19 nt, Artificial Sequence
  Description of Artificial Sequence: Synthetic oligonucleotide
uccucuugcauugccauca

SEQ ID NO: 2417236 - RNA, 19 nt, Artificial Sequence
  Description of Artificial Sequence: Synthetic oligonucleotide
uuggaucuuuuccugguaa

SEQ ID NO: 2417237 - RNA, 19 nt, Artificial Sequence
  Description of Artificial Sequence: Synthetic oligonucleotide
gcucuuccgaguuaggagg

SEQ ID NO: 2417238 - RNA, 19 nt, Artificial Sequence
  Description of Artificial Sequence: Synthetic oligonucleotide
aguuaggagguccagcuuu

SEQ ID NO: 2417239 - RNA, 19 nt, Artificial Sequence
  Description of Artificial Sequence: Synthetic oligonucleotide
ucuuugugcuccacaguca

SEQ ID NO: 2417240 - RNA, 19 nt, Artificial Sequence
  Description of Artificial Sequence: Synthetic oligonucleotide
gacacaugaagauucauuu

SEQ ID NO: 2417241 - RNA, 19 nt, Artificial Sequence
  Description of Artificial Sequence: Synthetic oligonucleotide
uucaugcucuaugucauca

SEQ ID NO: 2417242 - RNA, 19 nt, Artificial Sequence
  Description of Artificial Sequence: Synthetic oligonucleotide
uuuagcaugcagcuucauu

SEQ ID NO: 2417243 - RNA, 19 nt, Artificial Sequence
  Description of Artificial Sequence: Synthetic oligonucleotide
ugucuucagccugaguccg

SEQ ID NO: 2417244 - RNA, 19 nt, Artificial Sequence
  Description of Artificial Sequence: Synthetic oligonucleotide
uucagacaaauugucacaa

SEQ ID NO: 2417245 - RNA, 19 nt, Artificial Sequence
  Description of Artificial Sequence: Synthetic oligonucleotide
uauucuaguugcuucucua

SEQ ID NO: 2417246 - RNA, 19 nt, Artificial Sequence
  Description of Artificial Sequence: Synthetic oligonucleotide
uucuuagcuaauugcucca

SEQ ID NO: 2417247 - RNA, 19 nt, Artificial Sequence
  Description of Artificial Sequence: Synthetic oligonucleotide
cuagaagaguacaacggga

SEQ ID NO: 2417248 - RNA, 19 nt, Artificial Sequence
  Description of Artificial Sequence: Synthetic oligonucleotide
uagcuaauugcuccaguuc

SEQ ID NO: 2417249 - RNA, 19 nt, Artificial Sequence
  Description of Artificial Sequence: Synthetic oligonucleotide
acaaauggaaaugggcucu

SEQ ID NO: 2417250 - RNA, 19 nt, Artificial Sequence
  Description of Artificial Sequence: Synthetic oligonucleotide
uccagauauuuuaucuuau

SEQ ID NO: 2417251 - RNA, 19 nt, Artificial Sequence
  Description of Artificial Sequence: Synthetic oligonucleotide
gaaacaagugcuugguugu

SEQ ID NO: 2417252 - RNA, 19 nt, Artificial Sequence
  Description of Artificial Sequence: Synthetic oligonucleotide
uuaacuggaugcuuauauu

SEQ ID NO: 2417253 - RNA, 19 nt, Artificial Sequence
  Description of Artificial Sequence: Synthetic oligonucleotide
uuugguccagcuccucuug

SEQ ID NO: 2417254 - RNA, 19 nt, Artificial Sequence
  Description of Artificial Sequence: Synthetic oligonucleotide
gaaacagcuugcgaugaug

SEQ ID NO: 2417255 - RNA, 19 nt, Artificial Sequence
  Description of Artificial Sequence: Synthetic oligonucleotide
ugggcugagcuuaacugga

SEQ ID NO: 2417256 - RNA, 19 nt, Artificial Sequence
  Description of Artificial Sequence: Synthetic oligonucleotide
auauucuaguugcuucucu

SEQ ID NO: 2417257 - RNA, 19 nt, Artificial Sequence
  Description of Artificial Sequence: Synthetic oligonucleotide
ucugcugagucguugucaa

SEQ ID NO: 2417258 - RNA, 19 nt, Artificial Sequence
  Description of Artificial Sequence: Synthetic oligonucleotide
aucuucuuagcuaauugcu

SEQ ID NO: 2417259 - RNA, 19 nt, Artificial Sequence
  Description of Artificial Sequence: Synthetic oligonucleotide
guaccuuccagguugcauc

SEQ ID NO: 2417260 - RNA, 19 nt, Artificial Sequence
  Description of Artificial Sequence: Synthetic oligonucleotide
uagcaugcagcuucauuug

SEQ ID NO: 2417261 - RNA, 19 nt, Artificial Sequence
  Description of Artificial Sequence: Synthetic oligonucleotide
ucaugcucuaugucaucag

SEQ ID NO: 2417262 - RNA, 19 nt, Artificial Sequence
  Description of Artificial Sequence: Synthetic oligonucleotide
acaugaagauucauuuauc

SEQ ID NO: 2417263 - RNA, 19 nt, Artificial Sequence
  Description of Artificial Sequence: Synthetic oligonucleotide
ucuaagacauccagcuuuu

SEQ ID NO: 2417264 - RNA, 19 nt, Artificial Sequence
  Description of Artificial Sequence: Synthetic oligonucleotide
uuuauccuugaguucugaa

SEQ ID NO: 2417265 - RNA, 19 nt, Artificial Sequence
  Description of Artificial Sequence: Synthetic oligonucleotide
uuccucacacgcuuugucu

SEQ ID NO: 2417266 - RNA, 19 nt, Artificial Sequence
  Description of Artificial Sequence: Synthetic oligonucleotide
aacagcuugcgaugaugcu

SEQ ID NO: 2417267 - RNA, 19 nt, Artificial Sequence
  Description of Artificial Sequence: Synthetic oligonucleotide
acagucauuugguccagcu

SEQ ID NO: 2417268 - RNA, 19 nt, Artificial Sequence
  Description of Artificial Sequence: Synthetic oligonucleotide
aaauggaaaugggcucuuc

SEQ ID NO: 2417269 - RNA, 19 nt, Artificial Sequence
  Description of Artificial Sequence: Synthetic oligonucleotide
gaucuuuuccugguaagga

SEQ ID NO: 2417270 - RNA, 19 nt, Artificial Sequence
  Description of Artificial Sequence: Synthetic oligonucleotide
guucagacaaauugucaca

SEQ ID NO: 2417271 - RNA, 19 nt, Artificial Sequence
  Description of Artificial Sequence: Synthetic oligonucleotide
guuguucuaggaucauggc

SEQ ID NO: 2417272 - RNA, 19 nt, Artificial Sequence
  Description of Artificial Sequence: Synthetic oligonucleotide
aaugcugaaacaagugcuu

SEQ ID NO: 2417273 - RNA, 19 nt, Artificial Sequence
  Description of Artificial Sequence: Synthetic oligonucleotide
auugagaaccauucucuuu

SEQ ID NO: 2417274 - RNA, 19 nt, Artificial Sequence
  Description of Artificial Sequence: Synthetic oligonucleotide
acaaauugucacaaaugga

SEQ ID NO: 2417275 - RNA, 19 nt, Artificial Sequence
  Description of Artificial Sequence: Synthetic oligonucleotide
uugaaacagcuugcgauga

SEQ ID NO: 2417276 - RNA, 19 nt, Artificial Sequence
  Description of Artificial Sequence: Synthetic oligonucleotide
ucuuagcuaauugcuccag

SEQ ID NO: 2417277 - RNA, 19 nt, Artificial Sequence
  Description of Artificial Sequence: Synthetic oligonucleotide
cugaguccgcuccaguucc

SEQ ID NO: 2417278 - RNA, 19 nt, Artificial Sequence
  Description of Artificial Sequence: Synthetic oligonucleotide
ugggaaguuguuccucaca

SEQ ID NO: 2417279 - RNA, 19 nt, Artificial Sequence
  Description of Artificial Sequence: Synthetic oligonucleotide
ugcugagucguugucaauc

SEQ ID NO: 2417280 - RNA, 19 nt, Artificial Sequence
  Description of Artificial Sequence: Synthetic oligonucleotide
gagaguucagguugucuuc

SEQ ID NO: 2417281 - RNA, 19 nt, Artificial Sequence
  Description of Artificial Sequence: Synthetic oligonucleotide
cucccggugggccaggucc

SEQ ID NO: 2417282 - RNA, 19 nt, Artificial Sequence
  Description of Artificial Sequence: Synthetic oligonucleotide
uaggaucauggccuuuucu

SEQ ID NO: 2417283 - RNA, 19 nt, Artificial Sequence
  Description of Artificial Sequence: Synthetic oligonucleotide
ugcuuucuaucuucuuagc

SEQ ID NO: 2417284 - RNA, 19 nt, Artificial Sequence
  Description of Artificial Sequence: Synthetic oligonucleotide
gcugagcuuaacuggaugc

SEQ ID NO: 2417285 - RNA, 19 nt, Artificial Sequence
  Description of Artificial Sequence: Synthetic oligonucleotide
gcuuuuccaguuuagcaug

SEQ ID NO: 2417286 - RNA, 19 nt, Artificial Sequence
  Description of Artificial Sequence: Synthetic oligonucleotide
cuugcuuaaucagcucccg

SEQ ID NO: 2417287 - RNA, 19 nt, Artificial Sequence
  Description of Artificial Sequence: Synthetic oligonucleotide
ucccuuugaagcugggccu

SEQ ID NO: 2417288 - RNA, 19 nt, Artificial Sequence
  Description of Artificial Sequence: Synthetic oligonucleotide
gggcuauuaaacauuuuag

SEQ ID NO: 2417289 - RNA, 19 nt, Artificial Sequence
  Description of Artificial Sequence: Synthetic oligonucleotide
cuuacggacacugucuuga

SEQ ID NO: 2417290 - RNA, 19 nt, Artificial Sequence
  Description of Artificial Sequence: Synthetic oligonucleotide
cacgcuuugucuugaaaca

SEQ ID NO: 2417291 - RNA, 19 nt, Artificial Sequence
  Description of Artificial Sequence: Synthetic oligonucleotide
uuuucucguuccacauuga

SEQ ID NO: 2417292 - RNA, 19 nt, Artificial Sequence
  Description of Artificial Sequence: Synthetic oligonucleotide
ggaaguuguuccucacacg

SEQ ID NO: 2417293 - RNA, 19 nt, Artificial Sequence
  Description of Artificial Sequence: Synthetic oligonucleotide
uauauucuaguugcuucuc

SEQ ID NO: 2417294 - RNA, 19 nt, Artificial Sequence
  Description of Artificial Sequence: Synthetic oligonucleotide
cuuaacuggaugcuuauau

SEQ ID NO: 2417295 - RNA, 19 nt, Artificial Sequence
  Description of Artificial Sequence: Synthetic oligonucleotide
augcucuaugucaucagag

SEQ ID NO: 2417296 - RNA, 19 nt, Artificial Sequence
  Description of Artificial Sequence: Synthetic oligonucleotide
gguuguuugggcuauuaaa

SEQ ID NO: 2417297 - RNA, 19 nt, Artificial Sequence
  Description of Artificial Sequence: Synthetic oligonucleotide
gucuccuuugcuuucuauc

SEQ ID NO: 2417298 - RNA, 19 nt, Artificial Sequence
  Description of Artificial Sequence: Synthetic oligonucleotide
uaccuuccagguugcauca

SEQ ID NO: 2417299 - RNA, 19 nt, Artificial Sequence
  Description of Artificial Sequence: Synthetic oligonucleotide
caagugcuugguuguuugg

SEQ ID NO: 2417300 - RNA, 19 nt, Artificial Sequence
  Description of Artificial Sequence: Synthetic oligonucleotide
gcaucauuucuuucaguag

SEQ ID NO: 2417301 - RNA, 19 nt, Artificial Sequence
  Description of Artificial Sequence: Synthetic oligonucleotide
cuccaguucaugcucuaug

SEQ ID NO: 2417302 - RNA, 19 nt, Artificial Sequence
  Description of Artificial Sequence: Synthetic oligonucleotide
uuucuaagacauccagcuu

SEQ ID NO: 2417303 - RNA, 19 nt, Artificial Sequence
  Description of Artificial Sequence: Synthetic oligonucleotide
uuguauauucuaguugcuu

SEQ ID NO: 2417304 - RNA, 19 nt, Artificial Sequence
  Description of Artificial Sequence: Synthetic oligonucleotide
ucaguaguucuuugugcuc

SEQ ID NO: 2417305 - RNA, 19 nt, Artificial Sequence
  Description of Artificial Sequence: Synthetic oligonucleotide
uacggacacugucuugaug

SEQ ID NO: 2417306 - RNA, 19 nt, Artificial Sequence
  Description of Artificial Sequence: Synthetic oligonucleotide
ucagacaaauugucacaaa

SEQ ID NO: 2417307 - RNA, 19 nt, Artificial Sequence
  Description of Artificial Sequence: Synthetic oligonucleotide
ugcgaugaugcuccucuuc

SEQ ID NO: 2417308 - RNA, 19 nt, Artificial Sequence
  Description of Artificial Sequence: Synthetic oligonucleotide
uacaacgggacugggcuga

SEQ ID NO: 2417309 - RNA, 19 nt, Artificial Sequence
  Description of Artificial Sequence: Synthetic oligonucleotide
cuuccgaguuaggaggucc

SEQ ID NO: 2417310 - RNA, 19 nt, Artificial Sequence
  Description of Artificial Sequence: Synthetic oligonucleotide
ugguuguuugggcuauuaa

SEQ ID NO: 2417311 - RNA, 19 nt, Artificial Sequence
  Description of Artificial Sequence: Synthetic oligonucleotide
cuaauugcuccaguucaug

SEQ ID NO: 2417312 - RNA, 19 nt, Artificial Sequence
  Description of Artificial Sequence: Synthetic oligonucleotide
uuuccugguaaggaguuuu

SEQ ID NO: 2417313 - RNA, 19 nt, Artificial Sequence
  Description of Artificial Sequence: Synthetic oligonucleotide
ggcucuuccgaguuaggag

SEQ ID NO: 2417314 - RNA, 19 nt, Artificial Sequence
  Description of Artificial Sequence: Synthetic oligonucleotide
uuucccuuugaagcugggc

SEQ ID NO: 2417315 - RNA, 19 nt, Artificial Sequence
  Description of Artificial Sequence: Synthetic oligonucleotide
uucauuugaucuuguucuu

SEQ ID NO: 2417316 - RNA, 19 nt, Artificial Sequence
  Description of Artificial Sequence: Synthetic oligonucleotide
uuccgaguuaggaggucca

SEQ ID NO: 2417317 - RNA, 19 nt, Artificial Sequence
  Description of Artificial Sequence: Synthetic oligonucleotide
agguugcaucauuucuuuc

SEQ ID NO: 2417318 - RNA, 19 nt, Artificial Sequence
  Description of Artificial Sequence: Synthetic oligonucleotide
gauuggaucuuuuccuggu

SEQ ID NO: 2417319 - RNA, 19 nt, Artificial Sequence
  Description of Artificial Sequence: Synthetic oligonucleotide
cacaugaagauucauuuau

SEQ ID NO: 2417320 - RNA, 19 nt, Artificial Sequence
  Description of Artificial Sequence: Synthetic oligonucleotide
aguaguucuuugugcucca

SEQ ID NO: 2417321 - RNA, 19 nt, Artificial Sequence
  Description of Artificial Sequence: Synthetic oligonucleotide
aguucaugcucuaugucau

SEQ ID NO: 2417322 - RNA, 19 nt, Artificial Sequence
  Description of Artificial Sequence: Synthetic oligonucleotide
cauuuauccuugaguucug

SEQ ID NO: 2417323 - RNA, 19 nt, Artificial Sequence
  Description of Artificial Sequence: Synthetic oligonucleotide
acgcuuugucuugaaacag

SEQ ID NO: 2417324 - RNA, 19 nt, Artificial Sequence
  Description of Artificial Sequence: Synthetic oligonucleotide
augggcucuuccgaguuag

SEQ ID NO: 2417325 - RNA, 19 nt, Artificial Sequence
  Description of Artificial Sequence: Synthetic oligonucleotide
agcaugcagcuucauuuga

SEQ ID NO: 2417326 - RNA, 19 nt, Artificial Sequence
  Description of Artificial Sequence: Synthetic oligonucleotide
gaugcuccucuuccuucag

SEQ ID NO: 2417327 - RNA, 19 nt, Artificial Sequence
  Description of Artificial Sequence: Synthetic oligonucleotide
cuugcgaugaugcuccucu

SEQ ID NO: 2417328 - RNA, 19 nt, Artificial Sequence
  Description of Artificial Sequence: Synthetic oligonucleotide
guuuggaaaucuggucucc

SEQ ID NO: 2417329 - RNA, 19 nt, Artificial Sequence
  Description of Artificial Sequence: Synthetic oligonucleotide
ugaaacagcuugcgaugau

SEQ ID NO: 2417330 - RNA, 19 nt, Artificial Sequence
  Description of Artificial Sequence: Synthetic oligonucleotide
ucagaguaccuuccagguu

SEQ ID NO: 2417331 - RNA, 19 nt, Artificial Sequence
  Description of Artificial Sequence: Synthetic oligonucleotide
gaguacaacgggacugggc

SEQ ID NO: 2417332 - RNA, 19 nt, Artificial Sequence
  Description of Artificial Sequence: Synthetic oligonucleotide
agucguugucaaucuaaaa

SEQ ID NO: 2417333 - RNA, 19 nt, Artificial Sequence
  Description of Artificial Sequence: Synthetic oligonucleotide
gcgaugaugcuccucuucc

SEQ ID NO: 2417334 - RNA, 19 nt, Artificial Sequence
  Description of Artificial Sequence: Synthetic oligonucleotide
uccucacacgcuuugucuu

SEQ ID NO: 2417335 - RNA, 19 nt, Artificial Sequence
  Description of Artificial Sequence: Synthetic oligonucleotide
ucagccugaguccgcucca

SEQ ID NO: 2417336 - RNA, 19 nt, Artificial Sequence
  Description of Artificial Sequence: Synthetic oligonucleotide
ugugcuccacagucauuug

SEQ ID NO: 2417337 - RNA, 19 nt, Artificial Sequence
  Description of Artificial Sequence: Synthetic oligonucleotide
guuccaggcgauuggaucu

SEQ ID NO: 2417338 - RNA, 19 nt, Artificial Sequence
  Description of Artificial Sequence: Synthetic oligonucleotide
caugcucuaugucaucaga

SEQ ID NO: 2417339 - RNA, 19 nt, Artificial Sequence
  Description of Artificial Sequence: Synthetic oligonucleotide
agcuuaacuggaugcuuau

SEQ ID NO: 2417340 - RNA, 19 nt, Artificial Sequence
  Description of Artificial Sequence: Synthetic oligonucleotide
uuccagguugcaucauuuc

SEQ ID NO: 2417341 - RNA, 19 nt, Artificial Sequence
  Description of Artificial Sequence: Synthetic oligonucleotide
ugggccuguuguucuagga

SEQ ID NO: 2417342 - RNA, 19 nt, Artificial Sequence
  Description of Artificial Sequence: Synthetic oligonucleotide
cuucucuagaagaguacaa

SEQ ID NO: 2417343 - RNA, 19 nt, Artificial Sequence
  Description of Artificial Sequence: Synthetic oligonucleotide
caggcgauuggaucuuuuc

SEQ ID NO: 2417344 - RNA, 19 nt, Artificial Sequence
  Description of Artificial Sequence: Synthetic oligonucleotide
ugcuugguuguuugggcua

SEQ ID NO: 2417345 - RNA, 19 nt, Artificial Sequence
  Description of Artificial Sequence: Synthetic oligonucleotide
ugcagcuuacggacacugu

SEQ ID NO: 2417346 - RNA, 19 nt, Artificial Sequence
  Description of Artificial Sequence: Synthetic oligonucleotide
gaucauggccuuuucucgu

SEQ ID NO: 2417347 - RNA, 19 nt, Artificial Sequence
  Description of Artificial Sequence: Synthetic oligonucleotide
ugagcuuaacuggaugcuu

SEQ ID NO: 2417348 - RNA, 19 nt, Artificial Sequence
  Description of Artificial Sequence: Synthetic oligonucleotide
guuccucacacgcuuuguc

SEQ ID NO: 2417349 - RNA, 19 nt, Artificial Sequence
  Description of Artificial Sequence: Synthetic oligonucleotide
gucaaucuaaaacauucuu

SEQ ID NO: 2417350 - RNA, 19 nt, Artificial Sequence
  Description of Artificial Sequence: Synthetic oligonucleotide
guuaggagguccagcuuug

SEQ ID NO: 2417351 - RNA, 19 nt, Artificial Sequence
  Description of Artificial Sequence: Synthetic oligonucleotide
cagacaaauugucacaaau

SEQ ID NO: 2417352 - RNA, 19 nt, Artificial Sequence
  Description of Artificial Sequence: Synthetic oligonucleotide
agaguacaacgggacuggg

SEQ ID NO: 2417353 - RNA, 19 nt, Artificial Sequence
  Description of Artificial Sequence: Synthetic oligonucleotide
gucaucagaguaccuucca

SEQ ID NO: 2417354 - RNA, 19 nt, Artificial Sequence
  Description of Artificial Sequence: Synthetic oligonucleotide
gucuugaaacagcuugcga

SEQ ID NO: 2417355 - RNA, 19 nt, Artificial Sequence
  Description of Artificial Sequence: Synthetic oligonucleotide
agcuuacggacacugucuu

SEQ ID NO: 2417356 - RNA, 19 nt, Artificial Sequence
  Description of Artificial Sequence: Synthetic oligonucleotide
cagucauuugguccagcuc

SEQ ID NO: 2417357 - RNA, 19 nt, Artificial Sequence
  Description of Artificial Sequence: Synthetic oligonucleotide
aucuuauccucagcagucu

SEQ ID NO: 2417358 - RNA, 19 nt, Artificial Sequence
  Description of Artificial Sequence: Synthetic oligonucleotide
aguaccuuccagguugcau

SEQ ID NO: 2417359 - RNA, 19 nt, Artificial Sequence
  Description of Artificial Sequence: Synthetic oligonucleotide
uaaucagcucccggugggc

SEQ ID NO: 2417360 - RNA, 19 nt, Artificial Sequence
  Description of Artificial Sequence: Synthetic oligonucleotide
gcagcuucauuugaucuug

SEQ ID NO: 2417361 - RNA, 19 nt, Artificial Sequence
  Description of Artificial Sequence: Synthetic oligonucleotide
gcagcuuacggacacuguc

SEQ ID NO: 2417362 - RNA, 19 nt, Artificial Sequence
  Description of Artificial Sequence: Synthetic oligonucleotide
uauccucagcagucugcug

SEQ ID NO: 2417363 - RNA, 19 nt, Artificial Sequence
  Description of Artificial Sequence: Synthetic oligonucleotide
ccagauauuuuaucuuauc

SEQ ID NO: 2417364 - RNA, 19 nt, Artificial Sequence
  Description of Artificial Sequence: Synthetic oligonucleotide
guacaacgggacugggcug

SEQ ID NO: 2417365 - RNA, 19 nt, Artificial Sequence
  Description of Artificial Sequence: Synthetic oligonucleotide
ugggcucuuccgaguuagg

SEQ ID NO: 2417366 - RNA, 19 nt, Artificial Sequence
  Description of Artificial Sequence: Synthetic oligonucleotide
gcgauuggaucuuuuccug

SEQ ID NO: 2417367 - RNA, 19 nt, Artificial Sequence
  Description of Artificial Sequence: Synthetic oligonucleotide
uccgaguuaggagguccag

SEQ ID NO: 2417368 - RNA, 19 nt, Artificial Sequence
  Description of Artificial Sequence: Synthetic oligonucleotide
ggccuguuguucuaggauc

SEQ ID NO: 2417369 - RNA, 19 nt, Artificial Sequence
  Description of Artificial Sequence: Synthetic oligonucleotide
auccuugaguucugaacuu

SEQ ID NO: 2417370 - RNA, 19 nt, Artificial Sequence
  Description of Artificial Sequence: Synthetic oligonucleotide
cuguuguucuaggaucaug

SEQ ID NO: 2417371 - RNA, 19 nt, Artificial Sequence
  Description of Artificial Sequence: Synthetic oligonucleotide
uuaggagguccagcuuugc

SEQ ID NO: 2417372 - RNA, 19 nt, Artificial Sequence
  Description of Artificial Sequence: Synthetic oligonucleotide
cugggaaguuguuccucac

SEQ ID NO: 2417373 - RNA, 19 nt, Artificial Sequence
  Description of Artificial Sequence: Synthetic oligonucleotide
caucaaaaguucagacaaa

SEQ ID NO: 2417374 - RNA, 19 nt, Artificial Sequence
  Description of Artificial Sequence: Synthetic oligonucleotide
gagucguugucaaucuaaa

SEQ ID NO: 2417375 - RNA, 19 nt, Artificial Sequence
  Description of Artificial Sequence: Synthetic oligonucleotide
gaucuuguucuuuucccuu

SEQ ID NO: 2417376 - RNA, 19 nt, Artificial Sequence
  Description of Artificial Sequence: Synthetic oligonucleotide
cucguuccacauugagaac

SEQ ID NO: 2417377 - RNA, 19 nt, Artificial Sequence
  Description of Artificial Sequence: Synthetic oligonucleotide
cuaggaucauggccuuuuc

SEQ ID NO: 2417378 - RNA, 19 nt, Artificial Sequence
  Description of Artificial Sequence: Synthetic oligonucleotide
agcuucauuugaucuuguu

SEQ ID NO: 2417379 - RNA, 19 nt, Artificial Sequence
  Description of Artificial Sequence: Synthetic oligonucleotide
guacugugccgccucucug

SEQ ID NO: 2417380 - RNA, 19 nt, Artificial Sequence
  Description of Artificial Sequence: Synthetic oligonucleotide
cugcagcuuacggacacug

SEQ ID NO: 2417381 - RNA, 19 nt, Artificial Sequence
  Description of Artificial Sequence: Synthetic oligonucleotide
aucagcucccggugggcca

SEQ ID NO: 2417382 - RNA, 19 nt, Artificial Sequence
  Description of Artificial Sequence: Synthetic oligonucleotide
gagcuuaacuggaugcuua

SEQ ID NO: 2417383 - RNA, 19 nt, Artificial Sequence
  Description of Artificial Sequence: Synthetic oligonucleotide
uuacggacacugucuugau

SEQ ID NO: 2417384 - RNA, 19 nt, Artificial Sequence
  Description of Artificial Sequence: Synthetic oligonucleotide
aucauggccuuuucucguu

SEQ ID NO: 2417385 - RNA, 19 nt, Artificial Sequence
  Description of Artificial Sequence: Synthetic oligonucleotide
ggcugagcuuaacuggaug

SEQ ID NO: 2417386 - RNA, 19 nt, Artificial Sequence
  Description of Artificial Sequence: Synthetic oligonucleotide
gaugaugcuccucuuccuu

SEQ ID NO: 2417387 - RNA, 19 nt, Artificial Sequence
  Description of Artificial Sequence: Synthetic oligonucleotide
uccuugaguucugaacuuu

SEQ ID NO: 2417388 - RNA, 19 nt, Artificial Sequence
  Description of Artificial Sequence: Synthetic oligonucleotide
ggcgauuggaucuuuuccu

SEQ ID NO: 2417389 - RNA, 19 nt, Artificial Sequence
  Description of Artificial Sequence: Synthetic oligonucleotide
ucccggugggccagguccc

SEQ ID NO: 2417390 - RNA, 19 nt, Artificial Sequence
  Description of Artificial Sequence: Synthetic oligonucleotide
uuugcccugggaaguuguu

SEQ ID NO: 2417391 - RNA, 19 nt, Artificial Sequence
  Description of Artificial Sequence: Synthetic oligonucleotide
uugggcuauuaaacauuuu

SEQ ID NO: 2417392 - RNA, 19 nt, Artificial Sequence
  Description of Artificial Sequence: Synthetic oligonucleotide
cucuuuguauauucuaguu

SEQ ID NO: 2417393 - RNA, 19 nt, Artificial Sequence
  Description of Artificial Sequence: Synthetic oligonucleotide
uggccuuuucucguuccac

SEQ ID NO: 2417394 - RNA, 19 nt, Artificial Sequence
  Description of Artificial Sequence: Synthetic oligonucleotide
gcuucucuagaagaguaca

SEQ ID NO: 2417395 - RNA, 19 nt, Artificial Sequence
  Description of Artificial Sequence: Synthetic oligonucleotide
gacugggcugagcuuaacu

SEQ ID NO: 2417396 - RNA, 19 nt, Artificial Sequence
  Description of Artificial Sequence: Synthetic oligonucleotide
guugcuucucuagaagagu

SEQ ID NO: 2417397 - RNA, 19 nt, Artificial Sequence
  Description of Artificial Sequence: Synthetic oligonucleotide
gagaaccauucucuuugua

SEQ ID NO: 2417398 - RNA, 19 nt, Artificial Sequence
  Description of Artificial Sequence: Synthetic oligonucleotide
cucucuggacagagaguuc

SEQ ID NO: 2417399 - RNA, 19 nt, Artificial Sequence
  Description of Artificial Sequence: Synthetic oligonucleotide
cuccucuugcauugccauc

SEQ ID NO: 2417400 - RNA, 19 nt, Artificial Sequence
  Description of Artificial Sequence: Synthetic oligonucleotide
cagcuccucuugcauugcc

SEQ ID NO: 2417401 - RNA, 19 nt, Artificial Sequence
  Description of Artificial Sequence: Synthetic oligonucleotide
cuuugugcuccacagucau

SEQ ID NO: 2417402 - RNA, 19 nt, Artificial Sequence
  Description of Artificial Sequence: Synthetic oligonucleotide
ggccuuuucucguuccaca

SEQ ID NO: 2417403 - RNA, 19 nt, Artificial Sequence
  Description of Artificial Sequence: Synthetic oligonucleotide
aggucccgcucguuugucu

SEQ ID NO: 2417404 - RNA, 19 nt, Artificial Sequence
  Description of Artificial Sequence: Synthetic oligonucleotide
cagcuuacggacacugucu

SEQ ID NO: 2417405 - RNA, 19 nt, Artificial Sequence
  Description of Artificial Sequence: Synthetic oligonucleotide
cuuagcuaauugcuccagu

SEQ ID NO: 2417406 - RNA, 19 nt, Artificial Sequence
  Description of Artificial Sequence: Synthetic oligonucleotide
ucacacgcuuugucuugaa

SEQ ID NO: 2417407 - RNA, 19 nt, Artificial Sequence
  Description of Artificial Sequence: Synthetic oligonucleotide
gacagagaguucagguugu

SEQ ID NO: 2417408 - RNA, 19 nt, Artificial Sequence
  Description of Artificial Sequence: Synthetic oligonucleotide
gugcuugguuguuugggcu

SEQ ID NO: 2417409 - RNA, 19 nt, Artificial Sequence
  Description of Artificial Sequence: Synthetic oligonucleotide
guucuuugugcuccacagu

SEQ ID NO: 2417410 - RNA, 19 nt, Artificial Sequence
  Description of Artificial Sequence: Synthetic oligonucleotide
ccugaguccgcuccaguuc

SEQ ID NO: 2417411 - RNA, 19 nt, Artificial Sequence
  Description of Artificial Sequence: Synthetic oligonucleotide
ucauuugguccagcuccuc

SEQ ID NO: 2417412 - RNA, 19 nt, Artificial Sequence
  Description of Artificial Sequence: Synthetic oligonucleotide
guuugggcuauuaaacauu

SEQ ID NO: 2417413 - RNA, 19 nt, Artificial Sequence
  Description of Artificial Sequence: Synthetic oligonucleotide
gagguccagcuuugcccug

SEQ ID NO: 2417414 - RNA, 19 nt, Artificial Sequence
  Description of Artificial Sequence: Synthetic oligonucleotide
gcuuacggacacugucuug

SEQ ID NO: 2417415 - RNA, 19 nt, Artificial Sequence
  Description of Artificial Sequence: Synthetic oligonucleotide
cauuugguccagcuccucu

SEQ ID NO: 2417416 - RNA, 19 nt, Artificial Sequence
  Description of Artificial Sequence: Synthetic oligonucleotide
guugucaaucuaaaacauu

SEQ ID NO: 2417417 - RNA, 19 nt, Artificial Sequence
  Description of Artificial Sequence: Synthetic oligonucleotide
cuaagacauccagcuuuuc

SEQ ID NO: 2417418 - RNA, 19 nt, Artificial Sequence
  Description of Artificial Sequence: Synthetic oligonucleotide
cgccucucuggacagagag

SEQ ID NO: 2417419 - RNA, 19 nt, Artificial Sequence
  Description of Artificial Sequence: Synthetic oligonucleotide
gugccgccucucuggacag

SEQ ID NO: 2417420 - RNA, 19 nt, Artificial Sequence
  Description of Artificial Sequence: Synthetic oligonucleotide
cauugagaaccauucucuu

SEQ ID NO: 2417421 - RNA, 19 nt, Artificial Sequence
  Description of Artificial Sequence: Synthetic oligonucleotide
agccugaguccgcuccagu

SEQ ID NO: 2417422 - RNA, 19 nt, Artificial Sequence
  Description of Artificial Sequence: Synthetic oligonucleotide
gccaggucccgcucguuug

SEQ ID NO: 2417423 - RNA, 19 nt, Artificial Sequence
  Description of Artificial Sequence: Synthetic oligonucleotide
ccucacacgcuuugucuug

SEQ ID NO: 2417424 - RNA, 19 nt, Artificial Sequence
  Description of Artificial Sequence: Synthetic oligonucleotide
ccaguucaugcucuauguc

SEQ ID NO: 2417425 - RNA, 19 nt, Artificial Sequence
  Description of Artificial Sequence: Synthetic oligonucleotide
cuuugcccugggaaguugu

SEQ ID NO: 2417426 - RNA, 19 nt, Artificial Sequence
  Description of Artificial Sequence: Synthetic oligonucleotide
ucccgcucguuugucucac

SEQ ID NO: 2417427 - RNA, 19 nt, Artificial Sequence
  Description of Artificial Sequence: Synthetic oligonucleotide
ucacucuccagggccuuuu

SEQ ID NO: 2417428 - RNA, 19 nt, Artificial Sequence
  Description of Artificial Sequence: Synthetic oligonucleotide
uugcgaugaugcuccucuu

SEQ ID NO: 2417429 - RNA, 19 nt, Artificial Sequence
  Description of Artificial Sequence: Synthetic oligonucleotide
gccuguuguucuaggauca

SEQ ID NO: 2417430 - RNA, 19 nt, Artificial Sequence
  Description of Artificial Sequence: Synthetic oligonucleotide
cuucagccugaguccgcuc

SEQ ID NO: 2417431 - RNA, 19 nt, Artificial Sequence
  Description of Artificial Sequence: Synthetic oligonucleotide
gcugagucguugucaaucu

SEQ ID NO: 2417432 - RNA, 19 nt, Artificial Sequence
  Description of Artificial Sequence: Synthetic oligonucleotide
ccugggaaguuguuccuca

SEQ ID NO: 2417433 - RNA, 19 nt, Artificial Sequence
  Description of Artificial Sequence: Synthetic oligonucleotide
cugagcuuaacuggaugcu

SEQ ID NO: 2417434 - RNA, 19 nt, Artificial Sequence
  Description of Artificial Sequence: Synthetic oligonucleotide
gcagucugcugagucguug

SEQ ID NO: 2417435 - RNA, 19 nt, Artificial Sequence
  Description of Artificial Sequence: Synthetic oligonucleotide
cacacgcuuugucuugaaa

SEQ ID NO: 2417436 - RNA, 19 nt, Artificial Sequence
  Description of Artificial Sequence: Synthetic oligonucleotide
gcauugccaucaaaaguuc

SEQ ID NO: 2417437 - RNA, 19 nt, Artificial Sequence
  Description of Artificial Sequence: Synthetic oligonucleotide
cagguugcaucauuucuuu

SEQ ID NO: 2417438 - RNA, 19 nt, Artificial Sequence
  Description of Artificial Sequence: Synthetic oligonucleotide
gcugaaacaagugcuuggu

SEQ ID NO: 2417439 - RNA, 19 nt, Artificial Sequence
  Description of Artificial Sequence: Synthetic oligonucleotide
cucacacgcuuugucuuga

SEQ ID NO: 2417440 - RNA, 19 nt, Artificial Sequence
  Description of Artificial Sequence: Synthetic oligonucleotide
gucccgcucguuugucuca

SEQ ID NO: 2417441 - RNA, 19 nt, Artificial Sequence
  Description of Artificial Sequence: Synthetic oligonucleotide
uuccaggcgauuggaucuu

SEQ ID NO: 2417442 - RNA, 19 nt, Artificial Sequence
  Description of Artificial Sequence: Synthetic oligonucleotide
cucuuccgaguuaggaggu

SEQ ID NO: 2417443 - RNA, 19 nt, Artificial Sequence
  Description of Artificial Sequence: Synthetic oligonucleotide
acaacgggacugggcugag

SEQ ID NO: 2417444 - RNA, 19 nt, Artificial Sequence
  Description of Artificial Sequence: Synthetic oligonucleotide
gucuucagccugaguccgc

SEQ ID NO: 2417445 - RNA, 19 nt, Artificial Sequence
  Description of Artificial Sequence: Synthetic oligonucleotide
ccgaguuaggagguccagc

SEQ ID NO: 2417446 - RNA, 19 nt, Artificial Sequence
  Description of Artificial Sequence: Synthetic oligonucleotide
uucuaggaucauggccuuu

SEQ ID NO: 2417447 - RNA, 19 nt, Artificial Sequence
  Description of Artificial Sequence: Synthetic oligonucleotide
cugugccgccucucuggac

SEQ ID NO: 2417448 - RNA, 19 nt, Artificial Sequence
  Description of Artificial Sequence: Synthetic oligonucleotide
gaguuaggagguccagcuu

SEQ ID NO: 2417449 - RNA, 19 nt, Artificial Sequence
  Description of Artificial Sequence: Synthetic oligonucleotide
cuaugucaucagaguaccu

SEQ ID NO: 2417450 - RNA, 19 nt, Artificial Sequence
  Description of Artificial Sequence: Synthetic oligonucleotide
gccgccucucuggacagag

SEQ ID NO: 2417451 - RNA, 19 nt, Artificial Sequence
  Description of Artificial Sequence: Synthetic oligonucleotide
cagccugaguccgcuccag

SEQ ID NO: 2417452 - RNA, 19 nt, Artificial Sequence
  Description of Artificial Sequence: Synthetic oligonucleotide
gggcucuuccgaguuagga

SEQ ID NO: 2417453 - RNA, 19 nt, Artificial Sequence
  Description of Artificial Sequence: Synthetic oligonucleotide
ggacacaugaagauucauu

SEQ ID NO: 2417454 - RNA, 19 nt, Artificial Sequence
  Description of Artificial Sequence: Synthetic oligonucleotide
acgggacugggcugagcuu

SEQ ID NO: 2417455 - RNA, 19 nt, Artificial Sequence
  Description of Artificial Sequence: Synthetic oligonucleotide
agcuuugcccugggaaguu

SEQ ID NO: 2417456 - RNA, 19 nt, Artificial Sequence
  Description of Artificial Sequence: Synthetic oligonucleotide
agcugggccuguuguucua

SEQ ID NO: 2417457 - RNA, 19 nt, Artificial Sequence
  Description of Artificial Sequence: Synthetic oligonucleotide
cugagucguugucaaucua

SEQ ID NO: 2417458 - RNA, 19 nt, Artificial Sequence
  Description of Artificial Sequence: Synthetic oligonucleotide
cgaguuaggagguccagcu

SEQ ID NO: 2417459 - RNA, 19 nt, Artificial Sequence
  Description of Artificial Sequence: Synthetic oligonucleotide
caacgggacugggcugagc

SEQ ID NO: 2417460 - RNA, 19 nt, Artificial Sequence
  Description of Artificial Sequence: Synthetic oligonucleotide
cagagaguucagguugucu

SEQ ID NO: 2417461 - RNA, 19 nt, Artificial Sequence
  Description of Artificial Sequence: Synthetic oligonucleotide
cguuccacauugagaacca

SEQ ID NO: 2417462 - RNA, 19 nt, Artificial Sequence
  Description of Artificial Sequence: Synthetic oligonucleotide
gcuuugcccugggaaguug

SEQ ID NO: 2417463 - RNA, 19 nt, Artificial Sequence
  Description of Artificial Sequence: Synthetic oligonucleotide
ccgcucguuugucucacuc

SEQ ID NO: 2417464 - RNA, 19 nt, Artificial Sequence
  Description of Artificial Sequence: Synthetic oligonucleotide
cagcagucugcugagucgu

SEQ ID NO: 2417465 - RNA, 19 nt, Artificial Sequence
  Description of Artificial Sequence: Synthetic oligonucleotide
cccuuugaagcugggccug

SEQ ID NO: 2417466 - RNA, 19 nt, Artificial Sequence
  Description of Artificial Sequence: Synthetic oligonucleotide
uccaggcgauuggaucuuu

SEQ ID NO: 2417467 - RNA, 19 nt, Artificial Sequence
  Description of Artificial Sequence: Synthetic oligonucleotide
ccagguugcaucauuucuu

SEQ ID NO: 2417468 - RNA, 19 nt, Artificial Sequence
  Description of Artificial Sequence: Synthetic oligonucleotide
cguugucaaucuaaaacau

SEQ ID NO: 2417469 - RNA, 19 nt, Artificial Sequence
  Description of Artificial Sequence: Synthetic oligonucleotide
guccagcuuugcccuggga

SEQ ID NO: 2417470 - RNA, 19 nt, Artificial Sequence
  Description of Artificial Sequence: Synthetic oligonucleotide
gccuuuucucguuccacau

SEQ ID NO: 2417471 - RNA, 19 nt, Artificial Sequence
  Description of Artificial Sequence: Synthetic oligonucleotide
cagcuuugcccugggaagu

SEQ ID NO: 2417472 - RNA, 19 nt, Artificial Sequence
  Description of Artificial Sequence: Synthetic oligonucleotide
caggucccgcucguuuguc

SEQ ID NO: 2417473 - RNA, 19 nt, Artificial Sequence
  Description of Artificial Sequence: Synthetic oligonucleotide
ccuccagauauuuuaucuu

SEQ ID NO: 2417474 - RNA, 19 nt, Artificial Sequence
  Description of Artificial Sequence: Synthetic oligonucleotide
accuuccagguugcaucau

SEQ ID NO: 2417475 - RNA, 19 nt, Artificial Sequence
  Description of Artificial Sequence: Synthetic oligonucleotide
ccucucuggacagagaguu

SEQ ID NO: 2417476 - RNA, 19 nt, Artificial Sequence
  Description of Artificial Sequence: Synthetic oligonucleotide
gcuaauugcuccaguucau

SEQ ID NO: 2417477 - RNA, 19 nt, Artificial Sequence
  Description of Artificial Sequence: Synthetic oligonucleotide
cauccagcuuuuccaguuu

SEQ ID NO: 2417478 - RNA, 19 nt, Artificial Sequence
  Description of Artificial Sequence: Synthetic oligonucleotide
ugccgccucucuggacaga

SEQ ID NO: 2417479 - RNA, 19 nt, Artificial Sequence
  Description of Artificial Sequence: Synthetic oligonucleotide
gcuuaacuggaugcuuaua

SEQ ID NO: 2417480 - RNA, 19 nt, Artificial Sequence
  Description of Artificial Sequence: Synthetic oligonucleotide
cagcuucauuugaucuugu

SEQ ID NO: 2417481 - RNA, 19 nt, Artificial Sequence
  Description of Artificial Sequence: Synthetic oligonucleotide
ccacauugagaaccauucu

SEQ ID NO: 2417482 - RNA, 19 nt, Artificial Sequence
  Description of Artificial Sequence: Synthetic oligonucleotide
caaauggaaaugggcucuu

SEQ ID NO: 2417483 - RNA, 19 nt, Artificial Sequence
  Description of Artificial Sequence: Synthetic oligonucleotide
agcagucugcugagucguu

SEQ ID NO: 2417484 - RNA, 19 nt, Artificial Sequence
  Description of Artificial Sequence: Synthetic oligonucleotide
gguugucuucagccugagu

SEQ ID NO: 2417485 - RNA, 19 nt, Artificial Sequence
  Description of Artificial Sequence: Synthetic oligonucleotide
guuuagcaugcagcuucau

SEQ ID NO: 2417486 - RNA, 19 nt, Artificial Sequence
  Description of Artificial Sequence: Synthetic oligonucleotide
guuccacauugagaaccau

SEQ ID NO: 2417487 - RNA, 19 nt, Artificial Sequence
  Description of Artificial Sequence: Synthetic oligonucleotide
gcuugguuguuugggcuau

SEQ ID NO: 2417488 - RNA, 19 nt, Artificial Sequence
  Description of Artificial Sequence: Synthetic oligonucleotide
ggacugggcugagcuuaac

SEQ ID NO: 2417489 - RNA, 19 nt, Artificial Sequence
  Description of Artificial Sequence: Synthetic oligonucleotide
gggacugggcugagcuuaa

SEQ ID NO: 2417490 - RNA, 19 nt, Artificial Sequence
  Description of Artificial Sequence: Synthetic oligonucleotide
ggacacugucuugaugcuu

SEQ ID NO: 2417491 - RNA, 19 nt, Artificial Sequence
  Description of Artificial Sequence: Synthetic oligonucleotide
ggccaggucccgcucguuu

SEQ ID NO: 2417492 - RNA, 19 nt, Artificial Sequence
  Description of Artificial Sequence: Synthetic oligonucleotide
ccuuuucucguuccacauu

SEQ ID NO: 2417493 - RNA, 19 nt, Artificial Sequence
  Description of Artificial Sequence: Synthetic oligonucleotide
cgaugaugcuccucuuccu

SEQ ID NO: 2417494 - RNA, 19 nt, Artificial Sequence
  Description of Artificial Sequence: Synthetic oligonucleotide
cccggugggccaggucccg

SEQ ID NO: 2417495 - RNA, 19 nt, Artificial Sequence
  Description of Artificial Sequence: Synthetic oligonucleotide
ccuuccagguugcaucauu

SEQ ID NO: 2417496 - RNA, 19 nt, Artificial Sequence
  Description of Artificial Sequence: Synthetic oligonucleotide
gccucucuggacagagagu

SEQ ID NO: 2417497 - RNA, 19 nt, Artificial Sequence
  Description of Artificial Sequence: Synthetic oligonucleotide
cgcucguuugucucacucu

SEQ ID NO: 2417498 - RNA, 19 nt, Artificial Sequence
  Description of Artificial Sequence: Synthetic oligonucleotide
cgggacugggcugagcuua

SEQ ID NO: 2417499 - RNA, 19 nt, Artificial Sequence
  Description of Artificial Sequence: Synthetic oligonucleotide
cuugguuguuugggcuauu

SEQ ID NO: 2417500 - RNA, 19 nt, Artificial Sequence
  Description of Artificial Sequence: Synthetic oligonucleotide
ccaggucccgcucguuugu

SEQ ID NO: 2417501 - RNA, 19 nt, Artificial Sequence
  Description of Artificial Sequence: Synthetic oligonucleotide
ccggugggccaggucccgc

SEQ ID NO: 2417502 - RNA, 19 nt, Artificial Sequence
  Description of Artificial Sequence: Synthetic oligonucleotide
gggcugagcuuaacuggau

SEQ ID NO: 2417503 - RNA, 19 nt, Artificial Sequence
  Description of Artificial Sequence: Synthetic oligonucleotide
ccaguuuagcaugcagcuu

SEQ ID NO: 2417504 - RNA, 19 nt, Artificial Sequence
  Description of Artificial Sequence: Synthetic oligonucleotide
ccgccucucuggacagaga

SEQ ID NO: 2417505 - RNA, 19 nt, Artificial Sequence
  Description of Artificial Sequence: Synthetic oligonucleotide
ccaggcgauuggaucuuuu

SEQ ID NO: 2417506 - RNA, 19 nt, Artificial Sequence
  Description of Artificial Sequence: Synthetic oligonucleotide
ccuuugaagcugggccugu

SEQ ID NO: 2417507 - RNA, 19 nt, Artificial Sequence
  Description of Artificial Sequence: Synthetic oligonucleotide
ccuguuguucuaggaucau

SEQ ID NO: 2417508 - RNA, 19 nt, Artificial Sequence
  Description of Artificial Sequence: Synthetic oligonucleotide
cccgcucguuugucucacu

SEQ ID NO: 2417509 - RNA, 19 nt, Artificial Sequence
  Description of Artificial Sequence: Synthetic oligonucleotide
ucaacuaucagcacaaucc

SEQ ID NO: 2417510 - RNA, 19 nt, Artificial Sequence
  Description of Artificial Sequence: Synthetic oligonucleotide
uucagaaagacaaucgucc

SEQ ID NO: 2417511 - RNA, 19 nt, Artificial Sequence
  Description of Artificial Sequence: Synthetic oligonucleotide
aaugucauccagcugccac

SEQ ID NO: 2417512 - RNA, 19 nt, Artificial Sequence
  Description of Artificial Sequence: Synthetic oligonucleotide
aaacucuuuaauugcaaag

SEQ ID NO: 2417513 - RNA, 19 nt, Artificial Sequence
  Description of Artificial Sequence: Synthetic oligonucleotide
acacgagacacauugaagg

SEQ ID NO: 2417514 - RNA, 19 nt, Artificial Sequence
  Description of Artificial Sequence: Synthetic oligonucleotide
aagcacacgagacacauug

SEQ ID NO: 2417515 - RNA, 19 nt, Artificial Sequence
  Description of Artificial Sequence: Synthetic oligonucleotide
auaggaaguuuccagcugc

SEQ ID NO: 2417516 - RNA, 19 nt, Artificial Sequence
  Description of Artificial Sequence: Synthetic oligonucleotide
aagacaaucguccuccuca

SEQ ID NO: 2417517 - RNA, 19 nt, Artificial Sequence
  Description of Artificial Sequence: Synthetic oligonucleotide
aaucacuccuccauggucc

SEQ ID NO: 2417518 - RNA, 19 nt, Artificial Sequence
  Description of Artificial Sequence: Synthetic oligonucleotide
gacauaggaagccaguggg

SEQ ID NO: 2417519 - RNA, 19 nt, Artificial Sequence
  Description of Artificial Sequence: Synthetic oligonucleotide
guugacacggauauuaugg

SEQ ID NO: 2417520 - RNA, 19 nt, Artificial Sequence
  Description of Artificial Sequence: Synthetic oligonucleotide
aaggcguugaaagacaaag

SEQ ID NO: 2417521 - RNA, 19 nt, Artificial Sequence
  Description of Artificial Sequence: Synthetic oligonucleotide
uuuaauugcaaaguguccu

SEQ ID NO: 2417522 - RNA, 19 nt, Artificial Sequence
  Description of Artificial Sequence: Synthetic oligonucleotide
acaaucguccuccucaacg

SEQ ID NO: 2417523 - RNA, 19 nt, Artificial Sequence
  Description of Artificial Sequence: Synthetic oligonucleotide
ugaaaaucucagcaauccg

SEQ ID NO: 2417524 - RNA, 19 nt, Artificial Sequence
  Description of Artificial Sequence: Synthetic oligonucleotide
ucauuugggaaugucaucc

SEQ ID NO: 2417525 - RNA, 19 nt, Artificial Sequence
  Description of Artificial Sequence: Synthetic oligonucleotide
auuauggggaccccacucc

SEQ ID NO: 2417526 - RNA, 19 nt, Artificial Sequence
  Description of Artificial Sequence: Synthetic oligonucleotide
aauugcaaaguguccuggg

SEQ ID NO: 2417527 - RNA, 19 nt, Artificial Sequence
  Description of Artificial Sequence: Synthetic oligonucleotide
guugcuugaggucauuugg

SEQ ID NO: 2417528 - RNA, 19 nt, Artificial Sequence
  Description of Artificial Sequence: Synthetic oligonucleotide
acugaugggaccaggagcc

SEQ ID NO: 2417529 - RNA, 19 nt, Artificial Sequence
  Description of Artificial Sequence: Synthetic oligonucleotide
agugucgugucauagcauc

SEQ ID NO: 2417530 - RNA, 19 nt, Artificial Sequence
  Description of Artificial Sequence: Synthetic oligonucleotide
cuuagcagcgccugcaugg

SEQ ID NO: 2417531 - RNA, 19 nt, Artificial Sequence
  Description of Artificial Sequence: Synthetic oligonucleotide
aacucuuuaauugcaaagu

SEQ ID NO: 2417532 - RNA, 19 nt, Artificial Sequence
  Description of Artificial Sequence: Synthetic oligonucleotide
aauaaggaugucaacuuug

SEQ ID NO: 2417533 - RNA, 19 nt, Artificial Sequence
  Description of Artificial Sequence: Synthetic oligonucleotide
agaagguccggacagaaga

SEQ ID NO: 2417534 - RNA, 19 nt, Artificial Sequence
  Description of Artificial Sequence: Synthetic oligonucleotide
uugaaagacaaagcgcugg

SEQ ID NO: 2417535 - RNA, 19 nt, Artificial Sequence
  Description of Artificial Sequence: Synthetic oligonucleotide
ucauaaagcacacgagaca

SEQ ID NO: 2417536 - RNA, 19 nt, Artificial Sequence
  Description of Artificial Sequence: Synthetic oligonucleotide
acggauauuauggggaccc

SEQ ID NO: 2417537 - RNA, 19 nt, Artificial Sequence
  Description of Artificial Sequence: Synthetic oligonucleotide
guauucagaaagacaaucg

SEQ ID NO: 2417538 - RNA, 19 nt, Artificial Sequence
  Description of Artificial Sequence: Synthetic oligonucleotide
uuaauaaggaugucaacuu

SEQ ID NO: 2417539 - RNA, 19 nt, Artificial Sequence
  Description of Artificial Sequence: Synthetic oligonucleotide
cuugguagacuccugcugg

SEQ ID NO: 2417540 - RNA, 19 nt, Artificial Sequence
  Description of Artificial Sequence: Synthetic oligonucleotide
cuuuaauugcaaagugucc

SEQ ID NO: 2417541 - RNA, 19 nt, Artificial Sequence
  Description of Artificial Sequence: Synthetic oligonucleotide
cacacugugggcaaucucc

SEQ ID NO: 2417542 - RNA, 19 nt, Artificial Sequence
  Description of Artificial Sequence: Synthetic oligonucleotide
ggcguugaaagacaaagcg

SEQ ID NO: 2417543 - RNA, 19 nt, Artificial Sequence
  Description of Artificial Sequence: Synthetic oligonucleotide
gguggugguauucagaaag

SEQ ID NO: 2417544 - RNA, 19 nt, Artificial Sequence
  Description of Artificial Sequence: Synthetic oligonucleotide
aucaacuaucagcacaauc

SEQ ID NO: 2417545 - RNA, 19 nt, Artificial Sequence
  Description of Artificial Sequence: Synthetic oligonucleotide
auugcaaaguguccugggg

SEQ ID NO: 2417546 - RNA, 19 nt, Artificial Sequence
  Description of Artificial Sequence: Synthetic oligonucleotide
uucucauaaagcacacgag

SEQ ID NO: 2417547 - RNA, 19 nt, Artificial Sequence
  Description of Artificial Sequence: Synthetic oligonucleotide
uuaaaggcguugaaagaca

SEQ ID NO: 2417548 - RNA, 19 nt, Artificial Sequence
  Description of Artificial Sequence: Synthetic oligonucleotide
uugacacggauauuauggg

SEQ ID NO: 2417549 - RNA, 19 nt, Artificial Sequence
  Description of Artificial Sequence: Synthetic oligonucleotide
agacauaggaagccagugg

SEQ ID NO: 2417550 - RNA, 19 nt, Artificial Sequence
  Description of Artificial Sequence: Synthetic oligonucleotide
uuaauugcaaaguguccug

SEQ ID NO: 2417551 - RNA, 19 nt, Artificial Sequence
  Description of Artificial Sequence: Synthetic oligonucleotide
cauaaagcacacgagacac

SEQ ID NO: 2417552 - RNA, 19 nt, Artificial Sequence
  Description of Artificial Sequence: Synthetic oligonucleotide
auaaggaugucaacuuugc

SEQ ID NO: 2417553 - RNA, 19 nt, Artificial Sequence
  Description of Artificial Sequence: Synthetic oligonucleotide
aaagacaaucguccuccuc

SEQ ID NO: 2417554 - RNA, 19 nt, Artificial Sequence
  Description of Artificial Sequence: Synthetic oligonucleotide
ugacacggauauuaugggg

SEQ ID NO: 2417555 - RNA, 19 nt, Artificial Sequence
  Description of Artificial Sequence: Synthetic oligonucleotide
agcugcacaguuaauaagg

SEQ ID NO: 2417556 - RNA, 19 nt, Artificial Sequence
  Description of Artificial Sequence: Synthetic oligonucleotide
gucaaccacagucuuaaag

SEQ ID NO: 2417557 - RNA, 19 nt, Artificial Sequence
  Description of Artificial Sequence: Synthetic oligonucleotide
cuucucauaaagcacacga

SEQ ID NO: 2417558 - RNA, 19 nt, Artificial Sequence
  Description of Artificial Sequence: Synthetic oligonucleotide
aaaaucucagcaauccgga

SEQ ID NO: 2417559 - RNA, 19 nt, Artificial Sequence
  Description of Artificial Sequence: Synthetic oligonucleotide
ucuugguagacuccugcug

SEQ ID NO: 2417560 - RNA, 19 nt, Artificial Sequence
  Description of Artificial Sequence: Synthetic oligonucleotide
acaguuaauaaggauguca

SEQ ID NO: 2417561 - RNA, 19 nt, Artificial Sequence
  Description of Artificial Sequence: Synthetic oligonucleotide
agcaaccaacuucucagcg

SEQ ID NO: 2417562 - RNA, 19 nt, Artificial Sequence
  Description of Artificial Sequence: Synthetic oligonucleotide
uaauugcaaaguguccugg

SEQ ID NO: 2417563 - RNA, 19 nt, Artificial Sequence
  Description of Artificial Sequence: Synthetic oligonucleotide
uauuauggggaccccacuc

SEQ ID NO: 2417564 - RNA, 19 nt, Artificial Sequence
  Description of Artificial Sequence: Synthetic oligonucleotide
agcacaaucccugagacau

SEQ ID NO: 2417565 - RNA, 19 nt, Artificial Sequence
  Description of Artificial Sequence: Synthetic oligonucleotide
guuaauaaggaugucaacu

SEQ ID NO: 2417566 - RNA, 19 nt, Artificial Sequence
  Description of Artificial Sequence: Synthetic oligonucleotide
caacuaucagcacaauccc

SEQ ID NO: 2417567 - RNA, 19 nt, Artificial Sequence
  Description of Artificial Sequence: Synthetic oligonucleotide
acacggauauuauggggac

SEQ ID NO: 2417568 - RNA, 19 nt, Artificial Sequence
  Description of Artificial Sequence: Synthetic oligonucleotide
gugguauucagaaagacaa

SEQ ID NO: 2417569 - RNA, 19 nt, Artificial Sequence
  Description of Artificial Sequence: Synthetic oligonucleotide
caaccaacuucucagcggc

SEQ ID NO: 2417570 - RNA, 19 nt, Artificial Sequence
  Description of Artificial Sequence: Synthetic oligonucleotide
aaucccagaaccaccaccu

SEQ ID NO: 2417571 - RNA, 19 nt, Artificial Sequence
  Description of Artificial Sequence: Synthetic oligonucleotide
aaacucuuucagugccugg

SEQ ID NO: 2417572 - RNA, 19 nt, Artificial Sequence
  Description of Artificial Sequence: Synthetic oligonucleotide
uguucacaaucacuccucc

SEQ ID NO: 2417573 - RNA, 19 nt, Artificial Sequence
  Description of Artificial Sequence: Synthetic oligonucleotide
uccauagacagagggaggc

SEQ ID NO: 2417574 - RNA, 19 nt, Artificial Sequence
  Description of Artificial Sequence: Synthetic oligonucleotide
uaaggaugucaacuuugcc

SEQ ID NO: 2417575 - RNA, 19 nt, Artificial Sequence
  Description of Artificial Sequence: Synthetic oligonucleotide
uugcaaaguguccuggggu

SEQ ID NO: 2417576 - RNA, 19 nt, Artificial Sequence
  Description of Artificial Sequence: Synthetic oligonucleotide
ucagaaagacaaucguccu

SEQ ID NO: 2417577 - RNA, 19 nt, Artificial Sequence
  Description of Artificial Sequence: Synthetic oligonucleotide
ucgugucauagcauccacg

SEQ ID NO: 2417578 - RNA, 19 nt, Artificial Sequence
  Description of Artificial Sequence: Synthetic oligonucleotide
uguugacacggauauuaug

SEQ ID NO: 2417579 - RNA, 19 nt, Artificial Sequence
  Description of Artificial Sequence: Synthetic oligonucleotide
gccaccaucaacuaucagc

SEQ ID NO: 2417580 - RNA, 19 nt, Artificial Sequence
  Description of Artificial Sequence: Synthetic oligonucleotide
aacgucgggcgguugcugg

SEQ ID NO: 2417581 - RNA, 19 nt, Artificial Sequence
  Description of Artificial Sequence: Synthetic oligonucleotide
caugaaaaucucagcaauc

SEQ ID NO: 2417582 - RNA, 19 nt, Artificial Sequence
  Description of Artificial Sequence: Synthetic oligonucleotide
caauccggaagccaauccc

SEQ ID NO: 2417583 - RNA, 19 nt, Artificial Sequence
  Description of Artificial Sequence: Synthetic oligonucleotide
gauauuauggggaccccac

SEQ ID NO: 2417584 - RNA, 19 nt, Artificial Sequence
  Description of Artificial Sequence: Synthetic oligonucleotide
ugagacauaggaagccagu

SEQ ID NO: 2417585 - RNA, 19 nt, Artificial Sequence
  Description of Artificial Sequence: Synthetic oligonucleotide
cacuccacagccaaguguc

SEQ ID NO: 2417586 - RNA, 19 nt, Artificial Sequence
  Description of Artificial Sequence: Synthetic oligonucleotide
uaaaggcguugaaagacaa

SEQ ID NO: 2417587 - RNA, 19 nt, Artificial Sequence
  Description of Artificial Sequence: Synthetic oligonucleotide
uaucagcacaaucccugag

SEQ ID NO: 2417588 - RNA, 19 nt, Artificial Sequence
  Description of Artificial Sequence: Synthetic oligonucleotide
cacacgagacacauugaag

SEQ ID NO: 2417589 - RNA, 19 nt, Artificial Sequence
  Description of Artificial Sequence: Synthetic oligonucleotide
cucggacauccauagacag

SEQ ID NO: 2417590 - RNA, 19 nt, Artificial Sequence
  Description of Artificial Sequence: Synthetic oligonucleotide
aagguccggacagaagagg

SEQ ID NO: 2417591 - RNA, 19 nt, Artificial Sequence
  Description of Artificial Sequence: Synthetic oligonucleotide
agcgccugcauggagcugc

SEQ ID NO: 2417592 - RNA, 19 nt, Artificial Sequence
  Description of Artificial Sequence: Synthetic oligonucleotide
agacaaagcgcuggcaggg

SEQ ID NO: 2417593 - RNA, 19 nt, Artificial Sequence
  Description of Artificial Sequence: Synthetic oligonucleotide
auggugucaaugucaacca

SEQ ID NO: 2417594 - RNA, 19 nt, Artificial Sequence
  Description of Artificial Sequence: Synthetic oligonucleotide
agaaccaccaccugugaua

SEQ ID NO: 2417595 - RNA, 19 nt, Artificial Sequence
  Description of Artificial Sequence: Synthetic oligonucleotide
gacacauugaaggugccga

SEQ ID NO: 2417596 - RNA, 19 nt, Artificial Sequence
  Description of Artificial Sequence: Synthetic oligonucleotide
caguuaauaaggaugucaa

SEQ ID NO: 2417597 - RNA, 19 nt, Artificial Sequence
  Description of Artificial Sequence: Synthetic oligonucleotide
uagacagagggaggcaccg

SEQ ID NO: 2417598 - RNA, 19 nt, Artificial Sequence
  Description of Artificial Sequence: Synthetic oligonucleotide
gagguggugguauucagaa

SEQ ID NO: 2417599 - RNA, 19 nt, Artificial Sequence
  Description of Artificial Sequence: Synthetic oligonucleotide
ugcaaaguguccugggguc

SEQ ID NO: 2417600 - RNA, 19 nt, Artificial Sequence
  Description of Artificial Sequence: Synthetic oligonucleotide
gagacauaggaagccagug

SEQ ID NO: 2417601 - RNA, 19 nt, Artificial Sequence
  Description of Artificial Sequence: Synthetic oligonucleotide
auagacagagggaggcacc

SEQ ID NO: 2417602 - RNA, 19 nt, Artificial Sequence
  Description of Artificial Sequence: Synthetic oligonucleotide
uuauggggaccccacucca

SEQ ID NO: 2417603 - RNA, 19 nt, Artificial Sequence
  Description of Artificial Sequence: Synthetic oligonucleotide
cugagacauaggaagccag

SEQ ID NO: 2417604 - RNA, 19 nt, Artificial Sequence
  Description of Artificial Sequence: Synthetic oligonucleotide
ggaagccaaucccagaacc

SEQ ID NO: 2417605 - RNA, 19 nt, Artificial Sequence
  Description of Artificial Sequence: Synthetic oligonucleotide
ugccaaacucuuucagugc

SEQ ID NO: 2417606 - RNA, 19 nt, Artificial Sequence
  Description of Artificial Sequence: Synthetic oligonucleotide
cccucuguaccacugaugg

SEQ ID NO: 2417607 - RNA, 19 nt, Artificial Sequence
  Description of Artificial Sequence: Synthetic oligonucleotide
ucuguaccacugaugggac

SEQ ID NO: 2417608 - RNA, 19 nt, Artificial Sequence
  Description of Artificial Sequence: Synthetic oligonucleotide
guccggacagaagaggugg

SEQ ID NO: 2417609 - RNA, 19 nt, Artificial Sequence
  Description of Artificial Sequence: Synthetic oligonucleotide
ucuccgucuuguuuccaag

SEQ ID NO: 2417610 - RNA, 19 nt, Artificial Sequence
  Description of Artificial Sequence: Synthetic oligonucleotide
aggcuguugacacggauau

SEQ ID NO: 2417611 - RNA, 19 nt, Artificial Sequence
  Description of Artificial Sequence: Synthetic oligonucleotide
cacaaucccugagacauag

SEQ ID NO: 2417612 - RNA, 19 nt, Artificial Sequence
  Description of Artificial Sequence: Synthetic oligonucleotide
cauaggaaguuuccagcug

SEQ ID NO: 2417613 - RNA, 19 nt, Artificial Sequence
  Description of Artificial Sequence: Synthetic oligonucleotide
uccgucuuguuuccaaguc

SEQ ID NO: 2417614 - RNA, 19 nt, Artificial Sequence
  Description of Artificial Sequence: Synthetic oligonucleotide
ggcauaggaaguuuccagc

SEQ ID NO: 2417615 - RNA, 19 nt, Artificial Sequence
  Description of Artificial Sequence: Synthetic oligonucleotide
aggcguugaaagacaaagc

SEQ ID NO: 2417616 - RNA, 19 nt, Artificial Sequence
  Description of Artificial Sequence: Synthetic oligonucleotide
uucucagcggccguggaca

SEQ ID NO: 2417617 - RNA, 19 nt, Artificial Sequence
  Description of Artificial Sequence: Synthetic oligonucleotide
ucccagaaccaccaccugu

SEQ ID NO: 2417618 - RNA, 19 nt, Artificial Sequence
  Description of Artificial Sequence: Synthetic oligonucleotide
gagaguggcgguaauguuc

SEQ ID NO: 2417619 - RNA, 19 nt, Artificial Sequence
  Description of Artificial Sequence: Synthetic oligonucleotide
gguauucagaaagacaauc

SEQ ID NO: 2417620 - RNA, 19 nt, Artificial Sequence
  Description of Artificial Sequence: Synthetic oligonucleotide
accgcuucccaguggcagc

SEQ ID NO: 2417621 - RNA, 19 nt, Artificial Sequence
  Description of Artificial Sequence: Synthetic oligonucleotide
auaggaagccagugggcug

SEQ ID NO: 2417622 - RNA, 19 nt, Artificial Sequence
  Description of Artificial Sequence: Synthetic oligonucleotide
auguucacaaucacuccuc

SEQ ID NO: 2417623 - RNA, 19 nt, Artificial Sequence
  Description of Artificial Sequence: Synthetic oligonucleotide
uugaggucauuugggaaug

SEQ ID NO: 2417624 - RNA, 19 nt, Artificial Sequence
  Description of Artificial Sequence: Synthetic oligonucleotide
accacagucuuaaaggcgu

SEQ ID NO: 2417625 - RNA, 19 nt, Artificial Sequence
  Description of Artificial Sequence: Synthetic oligonucleotide
caugccucaugaaaaucuc

SEQ ID NO: 2417626 - RNA, 19 nt, Artificial Sequence
  Description of Artificial Sequence: Synthetic oligonucleotide
ggcgguaauguucacaauc

SEQ ID NO: 2417627 - RNA, 19 nt, Artificial Sequence
  Description of Artificial Sequence: Synthetic oligonucleotide
ggagcucggacauccauag

SEQ ID NO: 2417628 - RNA, 19 nt, Artificial Sequence
  Description of Artificial Sequence: Synthetic oligonucleotide
aaaguguccuggggucccc

SEQ ID NO: 2417629 - RNA, 19 nt, Artificial Sequence
  Description of Artificial Sequence: Synthetic oligonucleotide
gcaaccaacuucucagcgg

SEQ ID NO: 2417630 - RNA, 19 nt, Artificial Sequence
  Description of Artificial Sequence: Synthetic oligonucleotide
auauuauggggaccccacu

SEQ ID NO: 2417631 - RNA, 19 nt, Artificial Sequence
  Description of Artificial Sequence: Synthetic oligonucleotide
cgugucauagcauccacgg

SEQ ID NO: 2417632 - RNA, 19 nt, Artificial Sequence
  Description of Artificial Sequence: Synthetic oligonucleotide
gaagguccggacagaagag

SEQ ID NO: 2417633 - RNA, 19 nt, Artificial Sequence
  Description of Artificial Sequence: Synthetic oligonucleotide
uaggaaguuuccagcugca

SEQ ID NO: 2417634 - RNA, 19 nt, Artificial Sequence
  Description of Artificial Sequence: Synthetic oligonucleotide
ugggcaaucuccgucuugu

SEQ ID NO: 2417635 - RNA, 19 nt, Artificial Sequence
  Description of Artificial Sequence: Synthetic oligonucleotide
augucaacuuugccaaacu

SEQ ID NO: 2417636 - RNA, 19 nt, Artificial Sequence
  Description of Artificial Sequence: Synthetic oligonucleotide
uccagcugcacaguuaaua

SEQ ID NO: 2417637 - RNA, 19 nt, Artificial Sequence
  Description of Artificial Sequence: Synthetic oligonucleotide
agacacauugaaggugccg

SEQ ID NO: 2417638 - RNA, 19 nt, Artificial Sequence
  Description of Artificial Sequence: Synthetic oligonucleotide
augacaguguggcagccau

SEQ ID NO: 2417639 - RNA, 19 nt, Artificial Sequence
  Description of Artificial Sequence: Synthetic oligonucleotide
uugguagacuccugcuggc

SEQ ID NO: 2417640 - RNA, 19 nt, Artificial Sequence
  Description of Artificial Sequence: Synthetic oligonucleotide
ugucgugucauagcaucca

SEQ ID NO: 2417641 - RNA, 19 nt, Artificial Sequence
  Description of Artificial Sequence: Synthetic oligonucleotide
guggcgguaauguucacaa

SEQ ID NO: 2417642 - RNA, 19 nt, Artificial Sequence
  Description of Artificial Sequence: Synthetic oligonucleotide
acagucuuaaaggcguuga

SEQ ID NO: 2417643 - RNA, 19 nt, Artificial Sequence
  Description of Artificial Sequence: Synthetic oligonucleotide
caaucacuccuccaugguc

SEQ ID NO: 2417644 - RNA, 19 nt, Artificial Sequence
  Description of Artificial Sequence: Synthetic oligonucleotide
acuucucauaaagcacacg

SEQ ID NO: 2417645 - RNA, 19 nt, Artificial Sequence
  Description of Artificial Sequence: Synthetic oligonucleotide
acgagacacauugaaggug

SEQ ID NO: 2417646 - RNA, 19 nt, Artificial Sequence
  Description of Artificial Sequence: Synthetic oligonucleotide
cagcugcacaguuaauaag

SEQ ID NO: 2417647 - RNA, 19 nt, Artificial Sequence
  Description of Artificial Sequence: Synthetic oligonucleotide
agaguggcgguaauguuca

SEQ ID NO: 2417648 - RNA, 19 nt, Artificial Sequence
  Description of Artificial Sequence: Synthetic oligonucleotide
acagccaagugucguguca

SEQ ID NO: 2417649 - RNA, 19 nt, Artificial Sequence
  Description of Artificial Sequence: Synthetic oligonucleotide
cucaacgucgggcgguugc

SEQ ID NO: 2417650 - RNA, 19 nt, Artificial Sequence
  Description of Artificial Sequence: Synthetic oligonucleotide
aaccaacuucucagcggcc

SEQ ID NO: 2417651 - RNA, 19 nt, Artificial Sequence
  Description of Artificial Sequence: Synthetic oligonucleotide
ugguagacuccugcuggcg

SEQ ID NO: 2417652 - RNA, 19 nt, Artificial Sequence
  Description of Artificial Sequence: Synthetic oligonucleotide
ggaaguuuccagcugcaca

SEQ ID NO: 2417653 - RNA, 19 nt, Artificial Sequence
  Description of Artificial Sequence: Synthetic oligonucleotide
agcaauccggaagccaauc

SEQ ID NO: 2417654 - RNA, 19 nt, Artificial Sequence
  Description of Artificial Sequence: Synthetic oligonucleotide
guugaaagacaaagcgcug

SEQ ID NO: 2417655 - RNA, 19 nt, Artificial Sequence
  Description of Artificial Sequence: Synthetic oligonucleotide
aggucauuugggaauguca

SEQ ID NO: 2417656 - RNA, 19 nt, Artificial Sequence
  Description of Artificial Sequence: Synthetic oligonucleotide
uggugucaaugucaaccac

SEQ ID NO: 2417657 - RNA, 19 nt, Artificial Sequence
  Description of Artificial Sequence: Synthetic oligonucleotide
cauagcauccacggcugcc

SEQ ID NO: 2417658 - RNA, 19 nt, Artificial Sequence
  Description of Artificial Sequence: Synthetic oligonucleotide
ucauagcauccacggcugc

SEQ ID NO: 2417659 - RNA, 19 nt, Artificial Sequence
  Description of Artificial Sequence: Synthetic oligonucleotide
uucccaguggcagcaacca

SEQ ID NO: 2417660 - RNA, 19 nt, Artificial Sequence
  Description of Artificial Sequence: Synthetic oligonucleotide
acaaagcgcuggcagggca

SEQ ID NO: 2417661 - RNA, 19 nt, Artificial Sequence
  Description of Artificial Sequence: Synthetic oligonucleotide
acauccauagacagaggga

SEQ ID NO: 2417662 - RNA, 19 nt, Artificial Sequence
  Description of Artificial Sequence: Synthetic oligonucleotide
uggucccggaagaacuucu

SEQ ID NO: 2417663 - RNA, 19 nt, Artificial Sequence
  Description of Artificial Sequence: Synthetic oligonucleotide
auagcauccacggcugccu

SEQ ID NO: 2417664 - RNA, 19 nt, Artificial Sequence
  Description of Artificial Sequence: Synthetic oligonucleotide
aaucgccgcauccccucug

SEQ ID NO: 2417665 - RNA, 19 nt, Artificial Sequence
  Description of Artificial Sequence: Synthetic oligonucleotide
cauccagcugccaccauca

SEQ ID NO: 2417666 - RNA, 19 nt, Artificial Sequence
  Description of Artificial Sequence: Synthetic oligonucleotide
uauggggaccccacuccac

SEQ ID NO: 2417667 - RNA, 19 nt, Artificial Sequence
  Description of Artificial Sequence: Synthetic oligonucleotide
gucauuugggaaugucauc

SEQ ID NO: 2417668 - RNA, 19 nt, Artificial Sequence
  Description of Artificial Sequence: Synthetic oligonucleotide
cuugaggucauuugggaau

SEQ ID NO: 2417669 - RNA, 19 nt, Artificial Sequence
  Description of Artificial Sequence: Synthetic oligonucleotide
ugucaaugucaaccacagu

SEQ ID NO: 2417670 - RNA, 19 nt, Artificial Sequence
  Description of Artificial Sequence: Synthetic oligonucleotide
gaaagacaaagcgcuggca

SEQ ID NO: 2417671 - RNA, 19 nt, Artificial Sequence
  Description of Artificial Sequence: Synthetic oligonucleotide
gucaacuuugccaaacucu

SEQ ID NO: 2417672 - RNA, 19 nt, Artificial Sequence
  Description of Artificial Sequence: Synthetic oligonucleotide
uccuggagaagguccggac

SEQ ID NO: 2417673 - RNA, 19 nt, Artificial Sequence
  Description of Artificial Sequence: Synthetic oligonucleotide
acugagaguggcgguaaug

SEQ ID NO: 2417674 - RNA, 19 nt, Artificial Sequence
  Description of Artificial Sequence: Synthetic oligonucleotide
uggcagccaugccucauga

SEQ ID NO: 2417675 - RNA, 19 nt, Artificial Sequence
  Description of Artificial Sequence: Synthetic oligonucleotide
ucagcggccguggacacuc

SEQ ID NO: 2417676 - RNA, 19 nt, Artificial Sequence
  Description of Artificial Sequence: Synthetic oligonucleotide
gaaccaccaccugugauaa

SEQ ID NO: 2417677 - RNA, 19 nt, Artificial Sequence
  Description of Artificial Sequence: Synthetic oligonucleotide
gagaagguccggacagaag

SEQ ID NO: 2417678 - RNA, 19 nt, Artificial Sequence
  Description of Artificial Sequence: Synthetic oligonucleotide
gagccaggcuguugacacg

SEQ ID NO: 2417679 - RNA, 19 nt, Artificial Sequence
  Description of Artificial Sequence: Synthetic oligonucleotide
gaaggugccgaugguguca

SEQ ID NO: 2417680 - RNA, 19 nt, Artificial Sequence
  Description of Artificial Sequence: Synthetic oligonucleotide
ggacacucuugguagacuc

SEQ ID NO: 2417681 - RNA, 19 nt, Artificial Sequence
  Description of Artificial Sequence: Synthetic oligonucleotide
agacaaucguccuccucaa

SEQ ID NO: 2417682 - RNA, 19 nt, Artificial Sequence
  Description of Artificial Sequence: Synthetic oligonucleotide
agccaugccucaugaaaau

SEQ ID NO: 2417683 - RNA, 19 nt, Artificial Sequence
  Description of Artificial Sequence: Synthetic oligonucleotide
uccggaagccaaucccaga

SEQ ID NO: 2417684 - RNA, 19 nt, Artificial Sequence
  Description of Artificial Sequence: Synthetic oligonucleotide
ugcuggcgaugacagugug

SEQ ID NO: 2417685 - RNA, 19 nt, Artificial Sequence
  Description of Artificial Sequence: Synthetic oligonucleotide
gcguugaaagacaaagcgc

SEQ ID NO: 2417686 - RNA, 19 nt, Artificial Sequence
  Description of Artificial Sequence: Synthetic oligonucleotide
ugacaguguggcagccaug

SEQ ID NO: 2417687 - RNA, 19 nt, Artificial Sequence
  Description of Artificial Sequence: Synthetic oligonucleotide
cacauugaaggugccgaug

SEQ ID NO: 2417688 - RNA, 19 nt, Artificial Sequence
  Description of Artificial Sequence: Synthetic oligonucleotide
aguggcgguaauguucaca

SEQ ID NO: 2417689 - RNA, 19 nt, Artificial Sequence
  Description of Artificial Sequence: Synthetic oligonucleotide
gcugccaccaucaacuauc

SEQ ID NO: 2417690 - RNA, 19 nt, Artificial Sequence
  Description of Artificial Sequence: Synthetic oligonucleotide
uuagcagcgccugcaugga

SEQ ID NO: 2417691 - RNA, 19 nt, Artificial Sequence
  Description of Artificial Sequence: Synthetic oligonucleotide
ggugucaaugucaaccaca

SEQ ID NO: 2417692 - RNA, 19 nt, Artificial Sequence
  Description of Artificial Sequence: Synthetic oligonucleotide
ccaagugucgugucauagc

SEQ ID NO: 2417693 - RNA, 19 nt, Artificial Sequence
  Description of Artificial Sequence: Synthetic oligonucleotide
agacagagggaggcaccgc

SEQ ID NO: 2417694 - RNA, 19 nt, Artificial Sequence
  Description of Artificial Sequence: Synthetic oligonucleotide
uaccacugaugggaccagg

SEQ ID NO: 2417695 - RNA, 19 nt, Artificial Sequence
  Description of Artificial Sequence: Synthetic oligonucleotide
cauccccucuguaccacug

SEQ ID NO: 2417696 - RNA, 19 nt, Artificial Sequence
  Description of Artificial Sequence: Synthetic oligonucleotide
gaggcaccgcuucccagug

SEQ ID NO: 2417697 - RNA, 19 nt, Artificial Sequence
  Description of Artificial Sequence: Synthetic oligonucleotide
gucgugucauagcauccac

SEQ ID NO: 2417698 - RNA, 19 nt, Artificial Sequence
  Description of Artificial Sequence: Synthetic oligonucleotide
gcuguugacacggauauua

SEQ ID NO: 2417699 - RNA, 19 nt, Artificial Sequence
  Description of Artificial Sequence: Synthetic oligonucleotide
ccguggacacucuugguag

SEQ ID NO: 2417700 - RNA, 19 nt, Artificial Sequence
  Description of Artificial Sequence: Synthetic oligonucleotide
cuucucagcggccguggac

SEQ ID NO: 2417701 - RNA, 19 nt, Artificial Sequence
  Description of Artificial Sequence: Synthetic oligonucleotide
uccggacagaagagguggu

SEQ ID NO: 2417702 - RNA, 19 nt, Artificial Sequence
  Description of Artificial Sequence: Synthetic oligonucleotide
gcaauccggaagccaaucc

SEQ ID NO: 2417703 - RNA, 19 nt, Artificial Sequence
  Description of Artificial Sequence: Synthetic oligonucleotide
uccccucuguaccacugau

SEQ ID NO: 2417704 - RNA, 19 nt, Artificial Sequence
  Description of Artificial Sequence: Synthetic oligonucleotide
ggcaccgcuucccaguggc

SEQ ID NO: 2417705 - RNA, 19 nt, Artificial Sequence
  Description of Artificial Sequence: Synthetic oligonucleotide
gacagagggaggcaccgcu

SEQ ID NO: 2417706 - RNA, 19 nt, Artificial Sequence
  Description of Artificial Sequence: Synthetic oligonucleotide
cacggauauuauggggacc

SEQ ID NO: 2417707 - RNA, 19 nt, Artificial Sequence
  Description of Artificial Sequence: Synthetic oligonucleotide
ucucagcaauccggaagcc

SEQ ID NO: 2417708 - RNA, 19 nt, Artificial Sequence
  Description of Artificial Sequence: Synthetic oligonucleotide
gccgcauccccucuguacc

SEQ ID NO: 2417709 - RNA, 19 nt, Artificial Sequence
  Description of Artificial Sequence: Synthetic oligonucleotide
gacaaucguccuccucaac

SEQ ID NO: 2417710 - RNA, 19 nt, Artificial Sequence
  Description of Artificial Sequence: Synthetic oligonucleotide
gaggucauuugggaauguc

SEQ ID NO: 2417711 - RNA, 19 nt, Artificial Sequence
  Description of Artificial Sequence: Synthetic oligonucleotide
uuucagugccugguccaca

SEQ ID NO: 2417712 - RNA, 19 nt, Artificial Sequence
  Description of Artificial Sequence: Synthetic oligonucleotide
cuuucagugccugguccac

SEQ ID NO: 2417713 - RNA, 19 nt, Artificial Sequence
  Description of Artificial Sequence: Synthetic oligonucleotide
acgucgggcgguugcuggg

SEQ ID NO: 2417714 - RNA, 19 nt, Artificial Sequence
  Description of Artificial Sequence: Synthetic oligonucleotide
ucaacgucgggcgguugcu

SEQ ID NO: 2417715 - RNA, 19 nt, Artificial Sequence
  Description of Artificial Sequence: Synthetic oligonucleotide
guggcagccaugccucaug

SEQ ID NO: 2417716 - RNA, 19 nt, Artificial Sequence
  Description of Artificial Sequence: Synthetic oligonucleotide
uagcagcgccugcauggag

SEQ ID NO: 2417717 - RNA, 19 nt, Artificial Sequence
  Description of Artificial Sequence: Synthetic oligonucleotide
cacagucuuaaaggcguug

SEQ ID NO: 2417718 - RNA, 19 nt, Artificial Sequence
  Description of Artificial Sequence: Synthetic oligonucleotide
gacaaagcgcuggcagggc

SEQ ID NO: 2417719 - RNA, 19 nt, Artificial Sequence
  Description of Artificial Sequence: Synthetic oligonucleotide
gugucgugucauagcaucc

SEQ ID NO: 2417720 - RNA, 19 nt, Artificial Sequence
  Description of Artificial Sequence: Synthetic oligonucleotide
uggacacucuugguagacu

SEQ ID NO: 2417721 - RNA, 19 nt, Artificial Sequence
  Description of Artificial Sequence: Synthetic oligonucleotide
agguccggacagaagaggu

SEQ ID NO: 2417722 - RNA, 19 nt, Artificial Sequence
  Description of Artificial Sequence: Synthetic oligonucleotide
cagagggaggcaccgcuuc

SEQ ID NO: 2417723 - RNA, 19 nt, Artificial Sequence
  Description of Artificial Sequence: Synthetic oligonucleotide
cguugaaagacaaagcgcu

SEQ ID NO: 2417724 - RNA, 19 nt, Artificial Sequence
  Description of Artificial Sequence: Synthetic oligonucleotide
aaggugccgauggugucaa

SEQ ID NO: 2417725 - RNA, 19 nt, Artificial Sequence
  Description of Artificial Sequence: Synthetic oligonucleotide
gaugacaguguggcagcca

SEQ ID NO: 2417726 - RNA, 19 nt, Artificial Sequence
  Description of Artificial Sequence: Synthetic oligonucleotide
auccggaagccaaucccag

SEQ ID NO: 2417727 - RNA, 19 nt, Artificial Sequence
  Description of Artificial Sequence: Synthetic oligonucleotide
aucccagaaccaccaccug

SEQ ID NO: 2417728 - RNA, 19 nt, Artificial Sequence
  Description of Artificial Sequence: Synthetic oligonucleotide
aagugucgugucauagcau

SEQ ID NO: 2417729 - RNA, 19 nt, Artificial Sequence
  Description of Artificial Sequence: Synthetic oligonucleotide
gcgguaauguucacaauca

SEQ ID NO: 2417730 - RNA, 19 nt, Artificial Sequence
  Description of Artificial Sequence: Synthetic oligonucleotide
cauaggaagccagugggcu

SEQ ID NO: 2417731 - RNA, 19 nt, Artificial Sequence
  Description of Artificial Sequence: Synthetic oligonucleotide
ccaucaacuaucagcacaa

SEQ ID NO: 2417732 - RNA, 19 nt, Artificial Sequence
  Description of Artificial Sequence: Synthetic oligonucleotide
agcgcuggcagggcauagg

SEQ ID NO: 2417733 - RNA, 19 nt, Artificial Sequence
  Description of Artificial Sequence: Synthetic oligonucleotide
aucgccgcauccccucugu

SEQ ID NO: 2417734 - RNA, 19 nt, Artificial Sequence
  Description of Artificial Sequence: Synthetic oligonucleotide
auacugagaguggcgguaa

SEQ ID NO: 2417735 - RNA, 19 nt, Artificial Sequence
  Description of Artificial Sequence: Synthetic oligonucleotide
uggagaagguccggacaga

SEQ ID NO: 2417736 - RNA, 19 nt, Artificial Sequence
  Description of Artificial Sequence: Synthetic oligonucleotide
gguagacuccugcuggcga

SEQ ID NO: 2417737 - RNA, 19 nt, Artificial Sequence
  Description of Artificial Sequence: Synthetic oligonucleotide
gcgaugacaguguggcagc

SEQ ID NO: 2417738 - RNA, 19 nt, Artificial Sequence
  Description of Artificial Sequence: Synthetic oligonucleotide
acaaucccugagacauagg

SEQ ID NO: 2417739 - RNA, 19 nt, Artificial Sequence
  Description of Artificial Sequence: Synthetic oligonucleotide
guggacacucuugguagac

SEQ ID NO: 2417740 - RNA, 19 nt, Artificial Sequence
  Description of Artificial Sequence: Synthetic oligonucleotide
ucucagcggccguggacac

SEQ ID NO: 2417741 - RNA, 19 nt, Artificial Sequence
  Description of Artificial Sequence: Synthetic oligonucleotide
caggcuguugacacggaua

SEQ ID NO: 2417742 - RNA, 19 nt, Artificial Sequence
  Description of Artificial Sequence: Synthetic oligonucleotide
cacgagacacauugaaggu

SEQ ID NO: 2417743 - RNA, 19 nt, Artificial Sequence
  Description of Artificial Sequence: Synthetic oligonucleotide
cauacugagaguggcggua

SEQ ID NO: 2417744 - RNA, 19 nt, Artificial Sequence
  Description of Artificial Sequence: Synthetic oligonucleotide
ggauauuauggggacccca

SEQ ID NO: 2417745 - RNA, 19 nt, Artificial Sequence
  Description of Artificial Sequence: Synthetic oligonucleotide
cacaguuaauaaggauguc

SEQ ID NO: 2417746 - RNA, 19 nt, Artificial Sequence
  Description of Artificial Sequence: Synthetic oligonucleotide
aagcgcuggcagggcauag

SEQ ID NO: 2417747 - RNA, 19 nt, Artificial Sequence
  Description of Artificial Sequence: Synthetic oligonucleotide
gcauaggaaguuuccagcu

SEQ ID NO: 2417748 - RNA, 19 nt, Artificial Sequence
  Description of Artificial Sequence: Synthetic oligonucleotide
ugucaaccacagucuuaaa

SEQ ID NO: 2417749 - RNA, 19 nt, Artificial Sequence
  Description of Artificial Sequence: Synthetic oligonucleotide
aaagcgcuggcagggcaua

SEQ ID NO: 2417750 - RNA, 19 nt, Artificial Sequence
  Description of Artificial Sequence: Synthetic oligonucleotide
cgcauacugagaguggcgg

SEQ ID NO: 2417751 - RNA, 19 nt, Artificial Sequence
  Description of Artificial Sequence: Synthetic oligonucleotide
gcauccacggcugccuuag

SEQ ID NO: 2417752 - RNA, 19 nt, Artificial Sequence
  Description of Artificial Sequence: Synthetic oligonucleotide
ccaagucuuugcacagggc

SEQ ID NO: 2417753 - RNA, 19 nt, Artificial Sequence
  Description of Artificial Sequence: Synthetic oligonucleotide
cacagccaagugucguguc

SEQ ID NO: 2417754 - RNA, 19 nt, Artificial Sequence
  Description of Artificial Sequence: Synthetic oligonucleotide
cucagcaauccggaagcca

SEQ ID NO: 2417755 - RNA, 19 nt, Artificial Sequence
  Description of Artificial Sequence: Synthetic oligonucleotide
uggcgaugacaguguggca

SEQ ID NO: 2417756 - RNA, 19 nt, Artificial Sequence
  Description of Artificial Sequence: Synthetic oligonucleotide
ccagcugcacaguuaauaa

SEQ ID NO: 2417757 - RNA, 19 nt, Artificial Sequence
  Description of Artificial Sequence: Synthetic oligonucleotide
cccugagacauaggaagcc

SEQ ID NO: 2417758 - RNA, 19 nt, Artificial Sequence
  Description of Artificial Sequence: Synthetic oligonucleotide
gccgauggugucaauguca

SEQ ID NO: 2417759 - RNA, 19 nt, Artificial Sequence
  Description of Artificial Sequence: Synthetic oligonucleotide
ccgcauacugagaguggcg

SEQ ID NO: 2417760 - RNA, 19 nt, Artificial Sequence
  Description of Artificial Sequence: Synthetic oligonucleotide
ggucauuugggaaugucau

SEQ ID NO: 2417761 - RNA, 19 nt, Artificial Sequence
  Description of Artificial Sequence: Synthetic oligonucleotide
gcugcacaguuaauaagga

SEQ ID NO: 2417762 - RNA, 19 nt, Artificial Sequence
  Description of Artificial Sequence: Synthetic oligonucleotide
cccgcauacugagaguggc

SEQ ID NO: 2417763 - RNA, 19 nt, Artificial Sequence
  Description of Artificial Sequence: Synthetic oligonucleotide
uggcgguaauguucacaau

SEQ ID NO: 2417764 - RNA, 19 nt, Artificial Sequence
  Description of Artificial Sequence: Synthetic oligonucleotide
ccaugccucaugaaaaucu

SEQ ID NO: 2417765 - RNA, 19 nt, Artificial Sequence
  Description of Artificial Sequence: Synthetic oligonucleotide
gagcacacugugggcaauc

SEQ ID NO: 2417766 - RNA, 19 nt, Artificial Sequence
  Description of Artificial Sequence: Synthetic oligonucleotide
agcacacgagacacauuga

SEQ ID NO: 2417767 - RNA, 19 nt, Artificial Sequence
  Description of Artificial Sequence: Synthetic oligonucleotide
ucgggcgguugcugggcca

SEQ ID NO: 2417768 - RNA, 19 nt, Artificial Sequence
  Description of Artificial Sequence: Synthetic oligonucleotide
uuccagcugcacaguuaau

SEQ ID NO: 2417769 - RNA, 19 nt, Artificial Sequence
  Description of Artificial Sequence: Synthetic oligonucleotide
gacuccugcuggcgaugac

SEQ ID NO: 2417770 - RNA, 19 nt, Artificial Sequence
  Description of Artificial Sequence: Synthetic oligonucleotide
guagacuccugcuggcgau

SEQ ID NO: 2417771 - RNA, 19 nt, Artificial Sequence
  Description of Artificial Sequence: Synthetic oligonucleotide
gucgggcgguugcugggcc

SEQ ID NO: 2417772 - RNA, 19 nt, Artificial Sequence
  Description of Artificial Sequence: Synthetic oligonucleotide
gguccggacagaagaggug

SEQ ID NO: 2417773 - RNA, 19 nt, Artificial Sequence
  Description of Artificial Sequence: Synthetic oligonucleotide
uggcagggcauaggaaguu

SEQ ID NO: 2417774 - RNA, 19 nt, Artificial Sequence
  Description of Artificial Sequence: Synthetic oligonucleotide
agcauccacggcugccuua

SEQ ID NO: 2417775 - RNA, 19 nt, Artificial Sequence
  Description of Artificial Sequence: Synthetic oligonucleotide
ccggaagaacuucucauaa

SEQ ID NO: 2417776 - RNA, 19 nt, Artificial Sequence
  Description of Artificial Sequence: Synthetic oligonucleotide
cugcacaguuaauaaggau

SEQ ID NO: 2417777 - RNA, 19 nt, Artificial Sequence
  Description of Artificial Sequence: Synthetic oligonucleotide
gccguggacacucuuggua

SEQ ID NO: 2417778 - RNA, 19 nt, Artificial Sequence
  Description of Artificial Sequence: Synthetic oligonucleotide
agccaagugucgugucaua

SEQ ID NO: 2417779 - RNA, 19 nt, Artificial Sequence
  Description of Artificial Sequence: Synthetic oligonucleotide
ccaaucgccgcauccccuc

SEQ ID NO: 2417780 - RNA, 19 nt, Artificial Sequence
  Description of Artificial Sequence: Synthetic oligonucleotide
gagcucggacauccauaga

SEQ ID NO: 2417781 - RNA, 19 nt, Artificial Sequence
  Description of Artificial Sequence: Synthetic oligonucleotide
ggagaagguccggacagaa

SEQ ID NO: 2417782 - RNA, 19 nt, Artificial Sequence
  Description of Artificial Sequence: Synthetic oligonucleotide
cuccgucuuguuuccaagu

SEQ ID NO: 2417783 - RNA, 19 nt, Artificial Sequence
  Description of Artificial Sequence: Synthetic oligonucleotide
gaguggcgguaauguucac

SEQ ID NO: 2417784 - RNA, 19 nt, Artificial Sequence
  Description of Artificial Sequence: Synthetic oligonucleotide
ccggaagccaaucccagaa

SEQ ID NO: 2417785 - RNA, 19 nt, Artificial Sequence
  Description of Artificial Sequence: Synthetic oligonucleotide
ccccaaucgccgcaucccc

SEQ ID NO: 2417786 - RNA, 19 nt, Artificial Sequence
  Description of Artificial Sequence: Synthetic oligonucleotide
caacgucgggcgguugcug

SEQ ID NO: 2417787 - RNA, 19 nt, Artificial Sequence
  Description of Artificial Sequence: Synthetic oligonucleotide
uccucaacgucgggcgguu

SEQ ID NO: 2417788 - RNA, 19 nt, Artificial Sequence
  Description of Artificial Sequence: Synthetic oligonucleotide
ccccucuguaccacugaug

SEQ ID NO: 2417789 - RNA, 19 nt, Artificial Sequence
  Description of Artificial Sequence: Synthetic oligonucleotide
gcgcuggcagggcauagga

SEQ ID NO: 2417790 - RNA, 19 nt, Artificial Sequence
  Description of Artificial Sequence: Synthetic oligonucleotide
acagagggaggcaccgcuu

SEQ ID NO: 2417791 - RNA, 19 nt, Artificial Sequence
  Description of Artificial Sequence: Synthetic oligonucleotide
gccaugccucaugaaaauc

SEQ ID NO: 2417792 - RNA, 19 nt, Artificial Sequence
  Description of Artificial Sequence: Synthetic oligonucleotide
ucgccgcauccccucugua

SEQ ID NO: 2417793 - RNA, 19 nt, Artificial Sequence
  Description of Artificial Sequence: Synthetic oligonucleotide
gcggccguggacacucuug

SEQ ID NO: 2417794 - RNA, 19 nt, Artificial Sequence
  Description of Artificial Sequence: Synthetic oligonucleotide
agcggccguggacacucuu

SEQ ID NO: 2417795 - RNA, 19 nt, Artificial Sequence
  Description of Artificial Sequence: Synthetic oligonucleotide
gcauacugagaguggcggu

SEQ ID NO: 2417796 - RNA, 19 nt, Artificial Sequence
  Description of Artificial Sequence: Synthetic oligonucleotide
gggagcucggacauccaua

SEQ ID NO: 2417797 - RNA, 19 nt, Artificial Sequence
  Description of Artificial Sequence: Synthetic oligonucleotide
ccggacagaagagguggug

SEQ ID NO: 2417798 - RNA, 19 nt, Artificial Sequence
  Description of Artificial Sequence: Synthetic oligonucleotide
cugaugggaccaggagcca

SEQ ID NO: 2417799 - RNA, 19 nt, Artificial Sequence
  Description of Artificial Sequence: Synthetic oligonucleotide
cgccgcauccccucuguac

SEQ ID NO: 2417800 - RNA, 19 nt, Artificial Sequence
  Description of Artificial Sequence: Synthetic oligonucleotide
cggaagccaaucccagaac

SEQ ID NO: 2417801 - RNA, 19 nt, Artificial Sequence
  Description of Artificial Sequence: Synthetic oligonucleotide
cacugugggcaaucuccgu

SEQ ID NO: 2417802 - RNA, 19 nt, Artificial Sequence
  Description of Artificial Sequence: Synthetic oligonucleotide
ccgucuuguuuccaagucu

SEQ ID NO: 2417803 - RNA, 19 nt, Artificial Sequence
  Description of Artificial Sequence: Synthetic oligonucleotide
ccagaaccaccaccuguga

SEQ ID NO: 2417804 - RNA, 19 nt, Artificial Sequence
  Description of Artificial Sequence: Synthetic oligonucleotide
cagcugccaccaucaacua

SEQ ID NO: 2417805 - RNA, 19 nt, Artificial Sequence
  Description of Artificial Sequence: Synthetic oligonucleotide
ggcgguugcugggccauga

SEQ ID NO: 2417806 - RNA, 19 nt, Artificial Sequence
  Description of Artificial Sequence: Synthetic oligonucleotide
cagcaauccggaagccaau

SEQ ID NO: 2417807 - RNA, 19 nt, Artificial Sequence
  Description of Artificial Sequence: Synthetic oligonucleotide
cagccaagugucgugucau

SEQ ID NO: 2417808 - RNA, 19 nt, Artificial Sequence
  Description of Artificial Sequence: Synthetic oligonucleotide
ccauagacagagggaggca

SEQ ID NO: 2417809 - RNA, 19 nt, Artificial Sequence
  Description of Artificial Sequence: Synthetic oligonucleotide
ggcagccaugccucaugaa

SEQ ID NO: 2417810 - RNA, 19 nt, Artificial Sequence
  Description of Artificial Sequence: Synthetic oligonucleotide
caaucgccgcauccccucu

SEQ ID NO: 2417811 - RNA, 19 nt, Artificial Sequence
  Description of Artificial Sequence: Synthetic oligonucleotide
cggauauuauggggacccc

SEQ ID NO: 2417812 - RNA, 19 nt, Artificial Sequence
  Description of Artificial Sequence: Synthetic oligonucleotide
cgucuuguuuccaagucuu

SEQ ID NO: 2417813 - RNA, 19 nt, Artificial Sequence
  Description of Artificial Sequence: Synthetic oligonucleotide
ggggagcucggacauccau

SEQ ID NO: 2417814 - RNA, 19 nt, Artificial Sequence
  Description of Artificial Sequence: Synthetic oligonucleotide
ccgcauccccucuguacca

SEQ ID NO: 2417815 - RNA, 19 nt, Artificial Sequence
  Description of Artificial Sequence: Synthetic oligonucleotide
gccuuagcagcgccugcau

SEQ ID NO: 2417816 - RNA, 19 nt, Artificial Sequence
  Description of Artificial Sequence: Synthetic oligonucleotide
gucauccagcugccaccau

SEQ ID NO: 2417817 - RNA, 19 nt, Artificial Sequence
  Description of Artificial Sequence: Synthetic oligonucleotide
gcacaaucccugagacaua

SEQ ID NO: 2417818 - RNA, 19 nt, Artificial Sequence
  Description of Artificial Sequence: Synthetic oligonucleotide
cccaaucgccgcauccccu

SEQ ID NO: 2417819 - RNA, 19 nt, Artificial Sequence
  Description of Artificial Sequence: Synthetic oligonucleotide
ccaggcuguugacacggau

SEQ ID NO: 2417820 - RNA, 19 nt, Artificial Sequence
  Description of Artificial Sequence: Synthetic oligonucleotide
gcaccgcuucccaguggca

SEQ ID NO: 2417821 - RNA, 19 nt, Artificial Sequence
  Description of Artificial Sequence: Synthetic oligonucleotide
ccucaacgucgggcgguug

SEQ ID NO: 2417822 - RNA, 19 nt, Artificial Sequence
  Description of Artificial Sequence: Synthetic oligonucleotide
gggcgguugcugggccaug

SEQ ID NO: 2417823 - RNA, 19 nt, Artificial Sequence
  Description of Artificial Sequence: Synthetic oligonucleotide
gcgccugcauggagcugca

SEQ ID NO: 2417824 - RNA, 19 nt, Artificial Sequence
  Description of Artificial Sequence: Synthetic oligonucleotide
cagcggccguggacacucu

SEQ ID NO: 2417825 - RNA, 19 nt, Artificial Sequence
  Description of Artificial Sequence: Synthetic oligonucleotide
cgggcgguugcugggccau

SEQ ID NO: 2417826 - RNA, 19 nt, Artificial Sequence
  Description of Artificial Sequence: Synthetic oligonucleotide
aaggacaucauugagagcc

SEQ ID NO: 2417827 - RNA, 19 nt, Artificial Sequence
  Description of Artificial Sequence: Synthetic oligonucleotide
agacauuggauuuaggggc

SEQ ID NO: 2417828 - RNA, 19 nt, Artificial Sequence
  Description of Artificial Sequence: Synthetic oligonucleotide
aaaucaaggcuccagcagg

SEQ ID NO: 2417829 - RNA, 19 nt, Artificial Sequence
  Description of Artificial Sequence: Synthetic oligonucleotide
auuacccucaauaaggucc

SEQ ID NO: 2417830 - RNA, 19 nt, Artificial Sequence
  Description of Artificial Sequence: Synthetic oligonucleotide
ucagacucgagccagaccc

SEQ ID NO: 2417831 - RNA, 19 nt, Artificial Sequence
  Description of Artificial Sequence: Synthetic oligonucleotide
aaucagauauccuugauuu

SEQ ID NO: 2417832 - RNA, 19 nt, Artificial Sequence
  Description of Artificial Sequence: Synthetic oligonucleotide
cuagacauuggauuuaggg

SEQ ID NO: 2417833 - RNA, 19 nt, Artificial Sequence
  Description of Artificial Sequence: Synthetic oligonucleotide
uguuauuacccucaauaag

SEQ ID NO: 2417834 - RNA, 19 nt, Artificial Sequence
  Description of Artificial Sequence: Synthetic oligonucleotide
acagacuucacauuucagg

SEQ ID NO: 2417835 - RNA, 19 nt, Artificial Sequence
  Description of Artificial Sequence: Synthetic oligonucleotide
augagugcaauacacacag

SEQ ID NO: 2417836 - RNA, 19 nt, Artificial Sequence
  Description of Artificial Sequence: Synthetic oligonucleotide
aguaugauggcucaagagu

SEQ ID NO: 2417837 - RNA, 19 nt, Artificial Sequence
  Description of Artificial Sequence: Synthetic oligonucleotide
ucaagagugacaugguucc

SEQ ID NO: 2417838 - RNA, 19 nt, Artificial Sequence
  Description of Artificial Sequence: Synthetic oligonucleotide
aaguacagcaagcccaggg

SEQ ID NO: 2417839 - RNA, 19 nt, Artificial Sequence
  Description of Artificial Sequence: Synthetic oligonucleotide
gacagugacagugaaaucc

SEQ ID NO: 2417840 - RNA, 19 nt, Artificial Sequence
  Description of Artificial Sequence: Synthetic oligonucleotide
aguacagcaagcccagggc

SEQ ID NO: 2417841 - RNA, 19 nt, Artificial Sequence
  Description of Artificial Sequence: Synthetic oligonucleotide
aagacaggcgaccagaaaa

SEQ ID NO: 2417842 - RNA, 19 nt, Artificial Sequence
  Description of Artificial Sequence: Synthetic oligonucleotide
ugcaugagcacgaucugcg

SEQ ID NO: 2417843 - RNA, 19 nt, Artificial Sequence
  Description of Artificial Sequence: Synthetic oligonucleotide
aacacuagacauuggauuu

SEQ ID NO: 2417844 - RNA, 19 nt, Artificial Sequence
  Description of Artificial Sequence: Synthetic oligonucleotide
uacaccgucugcaugagca

SEQ ID NO: 2417845 - RNA, 19 nt, Artificial Sequence
  Description of Artificial Sequence: Synthetic oligonucleotide
uggauuuaggggcugagcu

SEQ ID NO: 2417846 - RNA, 19 nt, Artificial Sequence
  Description of Artificial Sequence: Synthetic oligonucleotide
gaaagaaguggacagugac

SEQ ID NO: 2417847 - RNA, 19 nt, Artificial Sequence
  Description of Artificial Sequence: Synthetic oligonucleotide
uggcucaagagugacaugg

SEQ ID NO: 2417848 - RNA, 19 nt, Artificial Sequence
  Description of Artificial Sequence: Synthetic oligonucleotide
cagaaaagugguuugcgcc

SEQ ID NO: 2417849 - RNA, 19 nt, Artificial Sequence
  Description of Artificial Sequence: Synthetic oligonucleotide
guagcugcgaaacuggccc

SEQ ID NO: 2417850 - RNA, 19 nt, Artificial Sequence
  Description of Artificial Sequence: Synthetic oligonucleotide
cagguauuccccaaugacg

SEQ ID NO: 2417851 - RNA, 19 nt, Artificial Sequence
  Description of Artificial Sequence: Synthetic oligonucleotide
aggugaaagaaguggacag

SEQ ID NO: 2417852 - RNA, 19 nt, Artificial Sequence
  Description of Artificial Sequence: Synthetic oligonucleotide
ucgaacaucugguccaggg

SEQ ID NO: 2417853 - RNA, 19 nt, Artificial Sequence
  Description of Artificial Sequence: Synthetic oligonucleotide
uguagagccaacaccccag

SEQ ID NO: 2417854 - RNA, 19 nt, Artificial Sequence
  Description of Artificial Sequence: Synthetic oligonucleotide
auacacacagcuuggacca

SEQ ID NO: 2417855 - RNA, 19 nt, Artificial Sequence
  Description of Artificial Sequence: Synthetic oligonucleotide
ucgagccagacccaugugg

SEQ ID NO: 2417856 - RNA, 19 nt, Artificial Sequence
  Description of Artificial Sequence: Synthetic oligonucleotide
uccaccaacagacuucaca

SEQ ID NO: 2417857 - RNA, 19 nt, Artificial Sequence
  Description of Artificial Sequence: Synthetic oligonucleotide
uugaggacgaaggacauca

SEQ ID NO: 2417858 - RNA, 19 nt, Artificial Sequence
  Description of Artificial Sequence: Synthetic oligonucleotide
uuauuacccucaauaaggu

SEQ ID NO: 2417859 - RNA, 19 nt, Artificial Sequence
  Description of Artificial Sequence: Synthetic oligonucleotide
auaagguccccuuccuggc

SEQ ID NO: 2417860 - RNA, 19 nt, Artificial Sequence
  Description of Artificial Sequence: Synthetic oligonucleotide
aaaucuguuauuacccuca

SEQ ID NO: 2417861 - RNA, 19 nt, Artificial Sequence
  Description of Artificial Sequence: Synthetic oligonucleotide
ucuccuugagcuccguccg

SEQ ID NO: 2417862 - RNA, 19 nt, Artificial Sequence
  Description of Artificial Sequence: Synthetic oligonucleotide
uguuacaggaccucacucu

SEQ ID NO: 2417863 - RNA, 19 nt, Artificial Sequence
  Description of Artificial Sequence: Synthetic oligonucleotide
agguauuccccaaugacgg

SEQ ID NO: 2417864 - RNA, 19 nt, Artificial Sequence
  Description of Artificial Sequence: Synthetic oligonucleotide
acggaugaaguacagcaag

SEQ ID NO: 2417865 - RNA, 19 nt, Artificial Sequence
  Description of Artificial Sequence: Synthetic oligonucleotide
acaucauugagagccggcc

SEQ ID NO: 2417866 - RNA, 19 nt, Artificial Sequence
  Description of Artificial Sequence: Synthetic oligonucleotide
agugguuugcgccaaucag

SEQ ID NO: 2417867 - RNA, 19 nt, Artificial Sequence
  Description of Artificial Sequence: Synthetic oligonucleotide
gugacagugaaauccagac

SEQ ID NO: 2417868 - RNA, 19 nt, Artificial Sequence
  Description of Artificial Sequence: Synthetic oligonucleotide
gacacugcuucccucgacg

SEQ ID NO: 2417869 - RNA, 19 nt, Artificial Sequence
  Description of Artificial Sequence: Synthetic oligonucleotide
uggacagugacagugaaau

SEQ ID NO: 2417870 - RNA, 19 nt, Artificial Sequence
  Description of Artificial Sequence: Synthetic oligonucleotide
uggaccagccaccagguca

SEQ ID NO: 2417871 - RNA, 19 nt, Artificial Sequence
  Description of Artificial Sequence: Synthetic oligonucleotide
agagccaacaccccaggag

SEQ ID NO: 2417872 - RNA, 19 nt, Artificial Sequence
  Description of Artificial Sequence: Synthetic oligonucleotide
uuacccucaauaagguccc

SEQ ID NO: 2417873 - RNA, 19 nt, Artificial Sequence
  Description of Artificial Sequence: Synthetic oligonucleotide
agaaaagugguuugcgcca

SEQ ID NO: 2417874 - RNA, 19 nt, Artificial Sequence
  Description of Artificial Sequence: Synthetic oligonucleotide
uaguacaccgucugcauga

SEQ ID NO: 2417875 - RNA, 19 nt, Artificial Sequence
  Description of Artificial Sequence: Synthetic oligonucleotide
agugaaauccagacacugc

SEQ ID NO: 2417876 - RNA, 19 nt, Artificial Sequence
  Description of Artificial Sequence: Synthetic oligonucleotide
agaaaucaaggcuccagca

SEQ ID NO: 2417877 - RNA, 19 nt, Artificial Sequence
  Description of Artificial Sequence: Synthetic oligonucleotide
uuccucucagacucgagcc

SEQ ID NO: 2417878 - RNA, 19 nt, Artificial Sequence
  Description of Artificial Sequence: Synthetic oligonucleotide
guaugauggcucaagagug

SEQ ID NO: 2417879 - RNA, 19 nt, Artificial Sequence
  Description of Artificial Sequence: Synthetic oligonucleotide
uuuuaaacaacaggcuggu

SEQ ID NO: 2417880 - RNA, 19 nt, Artificial Sequence
  Description of Artificial Sequence: Synthetic oligonucleotide
ucuguuacaggaccucacu

SEQ ID NO: 2417881 - RNA, 19 nt, Artificial Sequence
  Description of Artificial Sequence: Synthetic oligonucleotide
acggccaugagugcaauac

SEQ ID NO: 2417882 - RNA, 19 nt, Artificial Sequence
  Description of Artificial Sequence: Synthetic oligonucleotide
gacgaaggacaucauugag

SEQ ID NO: 2417883 - RNA, 19 nt, Artificial Sequence
  Description of Artificial Sequence: Synthetic oligonucleotide
aagugguuugcgccaauca

SEQ ID NO: 2417884 - RNA, 19 nt, Artificial Sequence
  Description of Artificial Sequence: Synthetic oligonucleotide
ccaaugacggccaugagug

SEQ ID NO: 2417885 - RNA, 19 nt, Artificial Sequence
  Description of Artificial Sequence: Synthetic oligonucleotide
aaagugguuugcgccaauc

SEQ ID NO: 2417886 - RNA, 19 nt, Artificial Sequence
  Description of Artificial Sequence: Synthetic oligonucleotide
ugacagugaaauccagaca

SEQ ID NO: 2417887 - RNA, 19 nt, Artificial Sequence
  Description of Artificial Sequence: Synthetic oligonucleotide
aucauugagagccggccug

SEQ ID NO: 2417888 - RNA, 19 nt, Artificial Sequence
  Description of Artificial Sequence: Synthetic oligonucleotide
aaugacggccaugagugca

SEQ ID NO: 2417889 - RNA, 19 nt, Artificial Sequence
  Description of Artificial Sequence: Synthetic oligonucleotide
gacaguaugauggcucaag

SEQ ID NO: 2417890 - RNA, 19 nt, Artificial Sequence
  Description of Artificial Sequence: Synthetic oligonucleotide
guuugcgccaaucagauau

SEQ ID NO: 2417891 - RNA, 19 nt, Artificial Sequence
  Description of Artificial Sequence: Synthetic oligonucleotide
gauuuaggggcugagcuga

SEQ ID NO: 2417892 - RNA, 19 nt, Artificial Sequence
  Description of Artificial Sequence: Synthetic oligonucleotide
agcaguggaucccacacgu

SEQ ID NO: 2417893 - RNA, 19 nt, Artificial Sequence
  Description of Artificial Sequence: Synthetic oligonucleotide
gguggaaaagcccaggauc

SEQ ID NO: 2417894 - RNA, 19 nt, Artificial Sequence
  Description of Artificial Sequence: Synthetic oligonucleotide
uugagcuccguccgcauac

SEQ ID NO: 2417895 - RNA, 19 nt, Artificial Sequence
  Description of Artificial Sequence: Synthetic oligonucleotide
guuccucucagacucgagc

SEQ ID NO: 2417896 - RNA, 19 nt, Artificial Sequence
  Description of Artificial Sequence: Synthetic oligonucleotide
caguggaucccacacguag

SEQ ID NO: 2417897 - RNA, 19 nt, Artificial Sequence
  Description of Artificial Sequence: Synthetic oligonucleotide
cacguagcugcgaaacugg

SEQ ID NO: 2417898 - RNA, 19 nt, Artificial Sequence
  Description of Artificial Sequence: Synthetic oligonucleotide
gugaaagaaguggacagug

SEQ ID NO: 2417899 - RNA, 19 nt, Artificial Sequence
  Description of Artificial Sequence: Synthetic oligonucleotide
gaaacgggagcuguagagc

SEQ ID NO: 2417900 - RNA, 19 nt, Artificial Sequence
  Description of Artificial Sequence: Synthetic oligonucleotide
ugguuugcgccaaucagau

SEQ ID NO: 2417901 - RNA, 19 nt, Artificial Sequence
  Description of Artificial Sequence: Synthetic oligonucleotide
aggaucuccgcgucgaaca

SEQ ID NO: 2417902 - RNA, 19 nt, Artificial Sequence
  Description of Artificial Sequence: Synthetic oligonucleotide
agcgagccauaguacaccg

SEQ ID NO: 2417903 - RNA, 19 nt, Artificial Sequence
  Description of Artificial Sequence: Synthetic oligonucleotide
caaaucuguuauuacccuc

SEQ ID NO: 2417904 - RNA, 19 nt, Artificial Sequence
  Description of Artificial Sequence: Synthetic oligonucleotide
ucuuuccaccaacagacuu

SEQ ID NO: 2417905 - RNA, 19 nt, Artificial Sequence
  Description of Artificial Sequence: Synthetic oligonucleotide
augagcacgaucugcgaca

SEQ ID NO: 2417906 - RNA, 19 nt, Artificial Sequence
  Description of Artificial Sequence: Synthetic oligonucleotide
uuuccaccaacagacuuca

SEQ ID NO: 2417907 - RNA, 19 nt, Artificial Sequence
  Description of Artificial Sequence: Synthetic oligonucleotide
uccgcgucgaacaucuggu

SEQ ID NO: 2417908 - RNA, 19 nt, Artificial Sequence
  Description of Artificial Sequence: Synthetic oligonucleotide
aguggaucccacacguagc

SEQ ID NO: 2417909 - RNA, 19 nt, Artificial Sequence
  Description of Artificial Sequence: Synthetic oligonucleotide
uauuccccaaugacggcca

SEQ ID NO: 2417910 - RNA, 19 nt, Artificial Sequence
  Description of Artificial Sequence: Synthetic oligonucleotide
ggaaacgggagcuguagag

SEQ ID NO: 2417911 - RNA, 19 nt, Artificial Sequence
  Description of Artificial Sequence: Synthetic oligonucleotide
auaguacaccgucugcaug

SEQ ID NO: 2417912 - RNA, 19 nt, Artificial Sequence
  Description of Artificial Sequence: Synthetic oligonucleotide
gcuuggaccagccaccagg

SEQ ID NO: 2417913 - RNA, 19 nt, Artificial Sequence
  Description of Artificial Sequence: Synthetic oligonucleotide
aagggcccaacacuagaca

SEQ ID NO: 2417914 - RNA, 19 nt, Artificial Sequence
  Description of Artificial Sequence: Synthetic oligonucleotide
uccguccgcauacacaggu

SEQ ID NO: 2417915 - RNA, 19 nt, Artificial Sequence
  Description of Artificial Sequence: Synthetic oligonucleotide
agcacgaucugcgacagga

SEQ ID NO: 2417916 - RNA, 19 nt, Artificial Sequence
  Description of Artificial Sequence: Synthetic oligonucleotide
gcugcugcgcacuagcgcg

SEQ ID NO: 2417917 - RNA, 19 nt, Artificial Sequence
  Description of Artificial Sequence: Synthetic oligonucleotide
ucugcaugagcacgaucug

SEQ ID NO: 2417918 - RNA, 19 nt, Artificial Sequence
  Description of Artificial Sequence: Synthetic oligonucleotide
cagaguguccaaagggccc

SEQ ID NO: 2417919 - RNA, 19 nt, Artificial Sequence
  Description of Artificial Sequence: Synthetic oligonucleotide
uacagcaagcccagggcac

SEQ ID NO: 2417920 - RNA, 19 nt, Artificial Sequence
  Description of Artificial Sequence: Synthetic oligonucleotide
aagcccaggaucuccgcgu

SEQ ID NO: 2417921 - RNA, 19 nt, Artificial Sequence
  Description of Artificial Sequence: Synthetic oligonucleotide
agggcguugaggacgaagg

SEQ ID NO: 2417922 - RNA, 19 nt, Artificial Sequence
  Description of Artificial Sequence: Synthetic oligonucleotide
acauuucaggguuccucuc

SEQ ID NO: 2417923 - RNA, 19 nt, Artificial Sequence
  Description of Artificial Sequence: Synthetic oligonucleotide
aacaucugguccagggaag

SEQ ID NO: 2417924 - RNA, 19 nt, Artificial Sequence
  Description of Artificial Sequence: Synthetic oligonucleotide
augauggcucaagagugac

SEQ ID NO: 2417925 - RNA, 19 nt, Artificial Sequence
  Description of Artificial Sequence: Synthetic oligonucleotide
guuccaaaucuguuauuac

SEQ ID NO: 2417926 - RNA, 19 nt, Artificial Sequence
  Description of Artificial Sequence: Synthetic oligonucleotide
acucgagccagacccaugu

SEQ ID NO: 2417927 - RNA, 19 nt, Artificial Sequence
  Description of Artificial Sequence: Synthetic oligonucleotide
guuacaggaccucacucuc

SEQ ID NO: 2417928 - RNA, 19 nt, Artificial Sequence
  Description of Artificial Sequence: Synthetic oligonucleotide
ucauugagagccggccugg

SEQ ID NO: 2417929 - RNA, 19 nt, Artificial Sequence
  Description of Artificial Sequence: Synthetic oligonucleotide
acacugcuucccucgacgg

SEQ ID NO: 2417930 - RNA, 19 nt, Artificial Sequence
  Description of Artificial Sequence: Synthetic oligonucleotide
uauuacccucaauaagguc

SEQ ID NO: 2417931 - RNA, 19 nt, Artificial Sequence
  Description of Artificial Sequence: Synthetic oligonucleotide
aacagacuucacauuucag

SEQ ID NO: 2417932 - RNA, 19 nt, Artificial Sequence
  Description of Artificial Sequence: Synthetic oligonucleotide
guauuccccaaugacggcc

SEQ ID NO: 2417933 - RNA, 19 nt, Artificial Sequence
  Description of Artificial Sequence: Synthetic oligonucleotide
cuccgcgucgaacaucugg

SEQ ID NO: 2417934 - RNA, 19 nt, Artificial Sequence
  Description of Artificial Sequence: Synthetic oligonucleotide
gugaaauccagacacugcu

SEQ ID NO: 2417935 - RNA, 19 nt, Artificial Sequence
  Description of Artificial Sequence: Synthetic oligonucleotide
gcuccguccgcauacacag

SEQ ID NO: 2417936 - RNA, 19 nt, Artificial Sequence
  Description of Artificial Sequence: Synthetic oligonucleotide
acaggcuggugacaguaug

SEQ ID NO: 2417937 - RNA, 19 nt, Artificial Sequence
  Description of Artificial Sequence: Synthetic oligonucleotide
ucacauuucaggguuccuc

SEQ ID NO: 2417938 - RNA, 19 nt, Artificial Sequence
  Description of Artificial Sequence: Synthetic oligonucleotide
caugagcacgaucugcgac

SEQ ID NO: 2417939 - RNA, 19 nt, Artificial Sequence
  Description of Artificial Sequence: Synthetic oligonucleotide
uccgcauacacagguauuc

SEQ ID NO: 2417940 - RNA, 19 nt, Artificial Sequence
  Description of Artificial Sequence: Synthetic oligonucleotide
acacguagcugcgaaacug

SEQ ID NO: 2417941 - RNA, 19 nt, Artificial Sequence
  Description of Artificial Sequence: Synthetic oligonucleotide
ugaaauccagacacugcuu

SEQ ID NO: 2417942 - RNA, 19 nt, Artificial Sequence
  Description of Artificial Sequence: Synthetic oligonucleotide
guagagccaacaccccagg

SEQ ID NO: 2417943 - RNA, 19 nt, Artificial Sequence
  Description of Artificial Sequence: Synthetic oligonucleotide
aaugcccgcagagugucca

SEQ ID NO: 2417944 - RNA, 19 nt, Artificial Sequence
  Description of Artificial Sequence: Synthetic oligonucleotide
cuggugacaguaugauggc

SEQ ID NO: 2417945 - RNA, 19 nt, Artificial Sequence
  Description of Artificial Sequence: Synthetic oligonucleotide
aagguccccuuccuggccu

SEQ ID NO: 2417946 - RNA, 19 nt, Artificial Sequence
  Description of Artificial Sequence: Synthetic oligonucleotide
uaagguccccuuccuggcc

SEQ ID NO: 2417947 - RNA, 19 nt, Artificial Sequence
  Description of Artificial Sequence: Synthetic oligonucleotide
caugagugcaauacacaca

SEQ ID NO: 2417948 - RNA, 19 nt, Artificial Sequence
  Description of Artificial Sequence: Synthetic oligonucleotide
cuucccucgacggaugaag

SEQ ID NO: 2417949 - RNA, 19 nt, Artificial Sequence
  Description of Artificial Sequence: Synthetic oligonucleotide
uuggauuuaggggcugagc

SEQ ID NO: 2417950 - RNA, 19 nt, Artificial Sequence
  Description of Artificial Sequence: Synthetic oligonucleotide
cagugaaauccagacacug

SEQ ID NO: 2417951 - RNA, 19 nt, Artificial Sequence
  Description of Artificial Sequence: Synthetic oligonucleotide
acgaaggacaucauugaga

SEQ ID NO: 2417952 - RNA, 19 nt, Artificial Sequence
  Description of Artificial Sequence: Synthetic oligonucleotide
uuacaggaccucacucucu

SEQ ID NO: 2417953 - RNA, 19 nt, Artificial Sequence
  Description of Artificial Sequence: Synthetic oligonucleotide
auugagagccggccuggag

SEQ ID NO: 2417954 - RNA, 19 nt, Artificial Sequence
  Description of Artificial Sequence: Synthetic oligonucleotide
agacaggcgaccagaaaag

SEQ ID NO: 2417955 - RNA, 19 nt, Artificial Sequence
  Description of Artificial Sequence: Synthetic oligonucleotide
ugauggcucaagagugaca

SEQ ID NO: 2417956 - RNA, 19 nt, Artificial Sequence
  Description of Artificial Sequence: Synthetic oligonucleotide
gccaaaugcccgcagagug

SEQ ID NO: 2417957 - RNA, 19 nt, Artificial Sequence
  Description of Artificial Sequence: Synthetic oligonucleotide
uaagacaggcgaccagaaa

SEQ ID NO: 2417958 - RNA, 19 nt, Artificial Sequence
  Description of Artificial Sequence: Synthetic oligonucleotide
aacuggcccgccaugccgg

SEQ ID NO: 2417959 - RNA, 19 nt, Artificial Sequence
  Description of Artificial Sequence: Synthetic oligonucleotide
gaccagaaaagugguuugc

SEQ ID NO: 2417960 - RNA, 19 nt, Artificial Sequence
  Description of Artificial Sequence: Synthetic oligonucleotide
uuuaggggcugagcugagg

SEQ ID NO: 2417961 - RNA, 19 nt, Artificial Sequence
  Description of Artificial Sequence: Synthetic oligonucleotide
ugagcacgaucugcgacag

SEQ ID NO: 2417962 - RNA, 19 nt, Artificial Sequence
  Description of Artificial Sequence: Synthetic oligonucleotide
agacacugcuucccucgac

SEQ ID NO: 2417963 - RNA, 19 nt, Artificial Sequence
  Description of Artificial Sequence: Synthetic oligonucleotide
cucuguuacaggaccucac

SEQ ID NO: 2417964 - RNA, 19 nt, Artificial Sequence
  Description of Artificial Sequence: Synthetic oligonucleotide
gaucccacacguagcugcg

SEQ ID NO: 2417965 - RNA, 19 nt, Artificial Sequence
  Description of Artificial Sequence: Synthetic oligonucleotide
auuggauuuaggggcugag

SEQ ID NO: 2417966 - RNA, 19 nt, Artificial Sequence
  Description of Artificial Sequence: Synthetic oligonucleotide
uuugcgccaaucagauauc

SEQ ID NO: 2417967 - RNA, 19 nt, Artificial Sequence
  Description of Artificial Sequence: Synthetic oligonucleotide
cuguuacaggaccucacuc

SEQ ID NO: 2417968 - RNA, 19 nt, Artificial Sequence
  Description of Artificial Sequence: Synthetic oligonucleotide
cacuagacauuggauuuag

SEQ ID NO: 2417969 - RNA, 19 nt, Artificial Sequence
  Description of Artificial Sequence: Synthetic oligonucleotide
gugacaguaugauggcuca

SEQ ID NO: 2417970 - RNA, 19 nt, Artificial Sequence
  Description of Artificial Sequence: Synthetic oligonucleotide
caauaagguccccuuccug

SEQ ID NO: 2417971 - RNA, 19 nt, Artificial Sequence
  Description of Artificial Sequence: Synthetic oligonucleotide
ccagaaaagugguuugcgc

SEQ ID NO: 2417972 - RNA, 19 nt, Artificial Sequence
  Description of Artificial Sequence: Synthetic oligonucleotide
guacagcaagcccagggca

SEQ ID NO: 2417973 - RNA, 19 nt, Artificial Sequence
  Description of Artificial Sequence: Synthetic oligonucleotide
ugcgaaacuggcccgccau

SEQ ID NO: 2417974 - RNA, 19 nt, Artificial Sequence
  Description of Artificial Sequence: Synthetic oligonucleotide
uagcugcgaaacuggcccg

SEQ ID NO: 2417975 - RNA, 19 nt, Artificial Sequence
  Description of Artificial Sequence: Synthetic oligonucleotide
aggaggugaaagaagugga

SEQ ID NO: 2417976 - RNA, 19 nt, Artificial Sequence
  Description of Artificial Sequence: Synthetic oligonucleotide
ugagugcaauacacacagc

SEQ ID NO: 2417977 - RNA, 19 nt, Artificial Sequence
  Description of Artificial Sequence: Synthetic oligonucleotide
uuuaaacaacaggcuggug

SEQ ID NO: 2417978 - RNA, 19 nt, Artificial Sequence
  Description of Artificial Sequence: Synthetic oligonucleotide
ugcgccaaucagauauccu

SEQ ID NO: 2417979 - RNA, 19 nt, Artificial Sequence
  Description of Artificial Sequence: Synthetic oligonucleotide
agugacagugaaauccaga

SEQ ID NO: 2417980 - RNA, 19 nt, Artificial Sequence
  Description of Artificial Sequence: Synthetic oligonucleotide
gucugcaugagcacgaucu

SEQ ID NO: 2417981 - RNA, 19 nt, Artificial Sequence
  Description of Artificial Sequence: Synthetic oligonucleotide
ggauuuaggggcugagcug

SEQ ID NO: 2417982 - RNA, 19 nt, Artificial Sequence
  Description of Artificial Sequence: Synthetic oligonucleotide
agggcccaacacuagacau

SEQ ID NO: 2417983 - RNA, 19 nt, Artificial Sequence
  Description of Artificial Sequence: Synthetic oligonucleotide
cacgaucugcgacaggauc

SEQ ID NO: 2417984 - RNA, 19 nt, Artificial Sequence
  Description of Artificial Sequence: Synthetic oligonucleotide
aucugcgacaggaucagca

SEQ ID NO: 2417985 - RNA, 19 nt, Artificial Sequence
  Description of Artificial Sequence: Synthetic oligonucleotide
uucccucgacggaugaagu

SEQ ID NO: 2417986 - RNA, 19 nt, Artificial Sequence
  Description of Artificial Sequence: Synthetic oligonucleotide
aguggacagugacagugaa

SEQ ID NO: 2417987 - RNA, 19 nt, Artificial Sequence
  Description of Artificial Sequence: Synthetic oligonucleotide
acgaucugcgacaggauca

SEQ ID NO: 2417988 - RNA, 19 nt, Artificial Sequence
  Description of Artificial Sequence: Synthetic oligonucleotide
gacuucacauuucaggguu

SEQ ID NO: 2417989 - RNA, 19 nt, Artificial Sequence
  Description of Artificial Sequence: Synthetic oligonucleotide
uugcgccaaucagauaucc

SEQ ID NO: 2417990 - RNA, 19 nt, Artificial Sequence
  Description of Artificial Sequence: Synthetic oligonucleotide
acaggcgaccagaaaagug

SEQ ID NO: 2417991 - RNA, 19 nt, Artificial Sequence
  Description of Artificial Sequence: Synthetic oligonucleotide
ggagcuguagagccaacac

SEQ ID NO: 2417992 - RNA, 19 nt, Artificial Sequence
  Description of Artificial Sequence: Synthetic oligonucleotide
aaguggacagugacaguga

SEQ ID NO: 2417993 - RNA, 19 nt, Artificial Sequence
  Description of Artificial Sequence: Synthetic oligonucleotide
aaaagugguuugcgccaau

SEQ ID NO: 2417994 - RNA, 19 nt, Artificial Sequence
  Description of Artificial Sequence: Synthetic oligonucleotide
uagagccaacaccccagga

SEQ ID NO: 2417995 - RNA, 19 nt, Artificial Sequence
  Description of Artificial Sequence: Synthetic oligonucleotide
gcauacacagguauucccc

SEQ ID NO: 2417996 - RNA, 19 nt, Artificial Sequence
  Description of Artificial Sequence: Synthetic oligonucleotide
cucgacggaugaaguacag

SEQ ID NO: 2417997 - RNA, 19 nt, Artificial Sequence
  Description of Artificial Sequence: Synthetic oligonucleotide
aaacaacaggcuggugaca

SEQ ID NO: 2417998 - RNA, 19 nt, Artificial Sequence
  Description of Artificial Sequence: Synthetic oligonucleotide
cugcaugagcacgaucugc

SEQ ID NO: 2417999 - RNA, 19 nt, Artificial Sequence
  Description of Artificial Sequence: Synthetic oligonucleotide
agcugcgaaacuggcccgc

SEQ ID NO: 2418000 - RNA, 19 nt, Artificial Sequence
  Description of Artificial Sequence: Synthetic oligonucleotide
ucgacggaugaaguacagc

SEQ ID NO: 2418001 - RNA, 19 nt, Artificial Sequence
  Description of Artificial Sequence: Synthetic oligonucleotide
acguagcugcgaaacuggc

SEQ ID NO: 2418002 - RNA, 19 nt, Artificial Sequence
  Description of Artificial Sequence: Synthetic oligonucleotide
ucccacacguagcugcgaa

SEQ ID NO: 2418003 - RNA, 19 nt, Artificial Sequence
  Description of Artificial Sequence: Synthetic oligonucleotide
aucuccgcgucgaacaucu

SEQ ID NO: 2418004 - RNA, 19 nt, Artificial Sequence
  Description of Artificial Sequence: Synthetic oligonucleotide
caaaugcccgcagaguguc

SEQ ID NO: 2418005 - RNA, 19 nt, Artificial Sequence
  Description of Artificial Sequence: Synthetic oligonucleotide
cagcaguggaucccacacg

SEQ ID NO: 2418006 - RNA, 19 nt, Artificial Sequence
  Description of Artificial Sequence: Synthetic oligonucleotide
uuucaggguuccucucaga

SEQ ID NO: 2418007 - RNA, 19 nt, Artificial Sequence
  Description of Artificial Sequence: Synthetic oligonucleotide
aucagauauccuugauuuu

SEQ ID NO: 2418008 - RNA, 19 nt, Artificial Sequence
  Description of Artificial Sequence: Synthetic oligonucleotide
agaguguccaaagggccca

SEQ ID NO: 2418009 - RNA, 19 nt, Artificial Sequence
  Description of Artificial Sequence: Synthetic oligonucleotide
ucagcgccgaggggaaacg

SEQ ID NO: 2418010 - RNA, 19 nt, Artificial Sequence
  Description of Artificial Sequence: Synthetic oligonucleotide
gugguuugcgccaaucaga

SEQ ID NO: 2418011 - RNA, 19 nt, Artificial Sequence
  Description of Artificial Sequence: Synthetic oligonucleotide
ggugacaguaugauggcuc

SEQ ID NO: 2418012 - RNA, 19 nt, Artificial Sequence
  Description of Artificial Sequence: Synthetic oligonucleotide
cucagacucgagccagacc

SEQ ID NO: 2418013 - RNA, 19 nt, Artificial Sequence
  Description of Artificial Sequence: Synthetic oligonucleotide
gagggcguugaggacgaag

SEQ ID NO: 2418014 - RNA, 19 nt, Artificial Sequence
  Description of Artificial Sequence: Synthetic oligonucleotide
uuccuggccuccagaaauc

SEQ ID NO: 2418015 - RNA, 19 nt, Artificial Sequence
  Description of Artificial Sequence: Synthetic oligonucleotide
agaaguggacagugacagu

SEQ ID NO: 2418016 - RNA, 19 nt, Artificial Sequence
  Description of Artificial Sequence: Synthetic oligonucleotide
auccagacacugcuucccu

SEQ ID NO: 2418017 - RNA, 19 nt, Artificial Sequence
  Description of Artificial Sequence: Synthetic oligonucleotide
caaugacggccaugagugc

SEQ ID NO: 2418018 - RNA, 19 nt, Artificial Sequence
  Description of Artificial Sequence: Synthetic oligonucleotide
guguccaaagggcccaaca

SEQ ID NO: 2418019 - RNA, 19 nt, Artificial Sequence
  Description of Artificial Sequence: Synthetic oligonucleotide
ucucagacucgagccagac

SEQ ID NO: 2418020 - RNA, 19 nt, Artificial Sequence
  Description of Artificial Sequence: Synthetic oligonucleotide
agcagcccaaggugacagg

SEQ ID NO: 2418021 - RNA, 19 nt, Artificial Sequence
  Description of Artificial Sequence: Synthetic oligonucleotide
caccgucugcaugagcacg

SEQ ID NO: 2418022 - RNA, 19 nt, Artificial Sequence
  Description of Artificial Sequence: Synthetic oligonucleotide
ccgcagaguguccaaaggg

SEQ ID NO: 2418023 - RNA, 19 nt, Artificial Sequence
  Description of Artificial Sequence: Synthetic oligonucleotide
gguuccaaaucuguuauua

SEQ ID NO: 2418024 - RNA, 19 nt, Artificial Sequence
  Description of Artificial Sequence: Synthetic oligonucleotide
acaccccaggaggugaaag

SEQ ID NO: 2418025 - RNA, 19 nt, Artificial Sequence
  Description of Artificial Sequence: Synthetic oligonucleotide
cagcgagccauaguacacc

SEQ ID NO: 2418026 - RNA, 19 nt, Artificial Sequence
  Description of Artificial Sequence: Synthetic oligonucleotide
ugcuucccucgacggauga

SEQ ID NO: 2418027 - RNA, 19 nt, Artificial Sequence
  Description of Artificial Sequence: Synthetic oligonucleotide
acccauguggaggucugag

SEQ ID NO: 2418028 - RNA, 19 nt, Artificial Sequence
  Description of Artificial Sequence: Synthetic oligonucleotide
aguacaccgucugcaugag

SEQ ID NO: 2418029 - RNA, 19 nt, Artificial Sequence
  Description of Artificial Sequence: Synthetic oligonucleotide
gacaugguuccaaaucugu

SEQ ID NO: 2418030 - RNA, 19 nt, Artificial Sequence
  Description of Artificial Sequence: Synthetic oligonucleotide
cacuagcgcguccaccagc

SEQ ID NO: 2418031 - RNA, 19 nt, Artificial Sequence
  Description of Artificial Sequence: Synthetic oligonucleotide
gcagaguguccaaagggcc

SEQ ID NO: 2418032 - RNA, 19 nt, Artificial Sequence
  Description of Artificial Sequence: Synthetic oligonucleotide
gaaaagugguuugcgccaa

SEQ ID NO: 2418033 - RNA, 19 nt, Artificial Sequence
  Description of Artificial Sequence: Synthetic oligonucleotide
agggaagggcugcugcgca

SEQ ID NO: 2418034 - RNA, 19 nt, Artificial Sequence
  Description of Artificial Sequence: Synthetic oligonucleotide
cuguagagccaacacccca

SEQ ID NO: 2418035 - RNA, 19 nt, Artificial Sequence
  Description of Artificial Sequence: Synthetic oligonucleotide
gggccaaaugcccgcagag

SEQ ID NO: 2418036 - RNA, 19 nt, Artificial Sequence
  Description of Artificial Sequence: Synthetic oligonucleotide
gcagcccaaggugacaggg

SEQ ID NO: 2418037 - RNA, 19 nt, Artificial Sequence
  Description of Artificial Sequence: Synthetic oligonucleotide
gagggguggaaaagcccag

SEQ ID NO: 2418038 - RNA, 19 nt, Artificial Sequence
  Description of Artificial Sequence: Synthetic oligonucleotide
gacggaugaaguacagcaa

SEQ ID NO: 2418039 - RNA, 19 nt, Artificial Sequence
  Description of Artificial Sequence: Synthetic oligonucleotide
cgacggaugaaguacagca

SEQ ID NO: 2418040 - RNA, 19 nt, Artificial Sequence
  Description of Artificial Sequence: Synthetic oligonucleotide
agcgccgaggggaaacggg

SEQ ID NO: 2418041 - RNA, 19 nt, Artificial Sequence
  Description of Artificial Sequence: Synthetic oligonucleotide
ugagcagcccaaggugaca

SEQ ID NO: 2418042 - RNA, 19 nt, Artificial Sequence
  Description of Artificial Sequence: Synthetic oligonucleotide
cuuccuggccuccagaaau

SEQ ID NO: 2418043 - RNA, 19 nt, Artificial Sequence
  Description of Artificial Sequence: Synthetic oligonucleotide
aagggcugcugcgcacuag

SEQ ID NO: 2418044 - RNA, 19 nt, Artificial Sequence
  Description of Artificial Sequence: Synthetic oligonucleotide
ucuugcagcugugccccug

SEQ ID NO: 2418045 - RNA, 19 nt, Artificial Sequence
  Description of Artificial Sequence: Synthetic oligonucleotide
gacauuggauuuaggggcu

SEQ ID NO: 2418046 - RNA, 19 nt, Artificial Sequence
  Description of Artificial Sequence: Synthetic oligonucleotide
ggagggguggaaaagccca

SEQ ID NO: 2418047 - RNA, 19 nt, Artificial Sequence
  Description of Artificial Sequence: Synthetic oligonucleotide
caggucagcgccgagggga

SEQ ID NO: 2418048 - RNA, 19 nt, Artificial Sequence
  Description of Artificial Sequence: Synthetic oligonucleotide
gacaggaucagcaguggau

SEQ ID NO: 2418049 - RNA, 19 nt, Artificial Sequence
  Description of Artificial Sequence: Synthetic oligonucleotide
ugaggacgaaggacaucau

SEQ ID NO: 2418050 - RNA, 19 nt, Artificial Sequence
  Description of Artificial Sequence: Synthetic oligonucleotide
ggaggugaaagaaguggac

SEQ ID NO: 2418051 - RNA, 19 nt, Artificial Sequence
  Description of Artificial Sequence: Synthetic oligonucleotide
ucccucgacggaugaagua

SEQ ID NO: 2418052 - RNA, 19 nt, Artificial Sequence
  Description of Artificial Sequence: Synthetic oligonucleotide
caaucagauauccuugauu

SEQ ID NO: 2418053 - RNA, 19 nt, Artificial Sequence
  Description of Artificial Sequence: Synthetic oligonucleotide
ggacaucauugagagccgg

SEQ ID NO: 2418054 - RNA, 19 nt, Artificial Sequence
  Description of Artificial Sequence: Synthetic oligonucleotide
uggaucccacacguagcug

SEQ ID NO: 2418055 - RNA, 19 nt, Artificial Sequence
  Description of Artificial Sequence: Synthetic oligonucleotide
gccaaucagauauccuuga

SEQ ID NO: 2418056 - RNA, 19 nt, Artificial Sequence
  Description of Artificial Sequence: Synthetic oligonucleotide
acauuggauuuaggggcug

SEQ ID NO: 2418057 - RNA, 19 nt, Artificial Sequence
  Description of Artificial Sequence: Synthetic oligonucleotide
uacacacagcuuggaccag

SEQ ID NO: 2418058 - RNA, 19 nt, Artificial Sequence
  Description of Artificial Sequence: Synthetic oligonucleotide
ggcguugaggacgaaggac

SEQ ID NO: 2418059 - RNA, 19 nt, Artificial Sequence
  Description of Artificial Sequence: Synthetic oligonucleotide
cccaacacuagacauugga

SEQ ID NO: 2418060 - RNA, 19 nt, Artificial Sequence
  Description of Artificial Sequence: Synthetic oligonucleotide
guggaucccacacguagcu

SEQ ID NO: 2418061 - RNA, 19 nt, Artificial Sequence
  Description of Artificial Sequence: Synthetic oligonucleotide
gcgucgaacaucuggucca

SEQ ID NO: 2418062 - RNA, 19 nt, Artificial Sequence
  Description of Artificial Sequence: Synthetic oligonucleotide
gcguugaggacgaaggaca

SEQ ID NO: 2418063 - RNA, 19 nt, Artificial Sequence
  Description of Artificial Sequence: Synthetic oligonucleotide
acacuagacauuggauuua

SEQ ID NO: 2418064 - RNA, 19 nt, Artificial Sequence
  Description of Artificial Sequence: Synthetic oligonucleotide
ugguuccaaaucuguuauu

SEQ ID NO: 2418065 - RNA, 19 nt, Artificial Sequence
  Description of Artificial Sequence: Synthetic oligonucleotide
agcuuggaccagccaccag

SEQ ID NO: 2418066 - RNA, 19 nt, Artificial Sequence
  Description of Artificial Sequence: Synthetic oligonucleotide
agcaggcagaggccauucu

SEQ ID NO: 2418067 - RNA, 19 nt, Artificial Sequence
  Description of Artificial Sequence: Synthetic oligonucleotide
acccucaauaagguccccu

SEQ ID NO: 2418068 - RNA, 19 nt, Artificial Sequence
  Description of Artificial Sequence: Synthetic oligonucleotide
cgagccauaguacaccguc

SEQ ID NO: 2418069 - RNA, 19 nt, Artificial Sequence
  Description of Artificial Sequence: Synthetic oligonucleotide
guacaccgucugcaugagc

SEQ ID NO: 2418070 - RNA, 19 nt, Artificial Sequence
  Description of Artificial Sequence: Synthetic oligonucleotide
caccccaggaggugaaaga

SEQ ID NO: 2418071 - RNA, 19 nt, Artificial Sequence
  Description of Artificial Sequence: Synthetic oligonucleotide
cuccguccgcauacacagg

SEQ ID NO: 2418072 - RNA, 19 nt, Artificial Sequence
  Description of Artificial Sequence: Synthetic oligonucleotide
ccagcgagccauaguacac

SEQ ID NO: 2418073 - RNA, 19 nt, Artificial Sequence
  Description of Artificial Sequence: Synthetic oligonucleotide
ugagcuccguccgcauaca

SEQ ID NO: 2418074 - RNA, 19 nt, Artificial Sequence
  Description of Artificial Sequence: Synthetic oligonucleotide
uuccccaaugacggccaug

SEQ ID NO: 2418075 - RNA, 19 nt, Artificial Sequence
  Description of Artificial Sequence: Synthetic oligonucleotide
ggcccagcgagccauagua

SEQ ID NO: 2418076 - RNA, 19 nt, Artificial Sequence
  Description of Artificial Sequence: Synthetic oligonucleotide
gagcacgaucugcgacagg

SEQ ID NO: 2418077 - RNA, 19 nt, Artificial Sequence
  Description of Artificial Sequence: Synthetic oligonucleotide
ugacaguaugauggcucaa

SEQ ID NO: 2418078 - RNA, 19 nt, Artificial Sequence
  Description of Artificial Sequence: Synthetic oligonucleotide
uuggaccagccaccagguc

SEQ ID NO: 2418079 - RNA, 19 nt, Artificial Sequence
  Description of Artificial Sequence: Synthetic oligonucleotide
accgucugcaugagcacga

SEQ ID NO: 2418080 - RNA, 19 nt, Artificial Sequence
  Description of Artificial Sequence: Synthetic oligonucleotide
agacccauguggaggucug

SEQ ID NO: 2418081 - RNA, 19 nt, Artificial Sequence
  Description of Artificial Sequence: Synthetic oligonucleotide
agcuccguccgcauacaca

SEQ ID NO: 2418082 - RNA, 19 nt, Artificial Sequence
  Description of Artificial Sequence: Synthetic oligonucleotide
auuuaggggcugagcugag

SEQ ID NO: 2418083 - RNA, 19 nt, Artificial Sequence
  Description of Artificial Sequence: Synthetic oligonucleotide
cccgcagaguguccaaagg

SEQ ID NO: 2418084 - RNA, 19 nt, Artificial Sequence
  Description of Artificial Sequence: Synthetic oligonucleotide
cuuggaccagccaccaggu

SEQ ID NO: 2418085 - RNA, 19 nt, Artificial Sequence
  Description of Artificial Sequence: Synthetic oligonucleotide
cguagcugcgaaacuggcc

SEQ ID NO: 2418086 - RNA, 19 nt, Artificial Sequence
  Description of Artificial Sequence: Synthetic oligonucleotide
gagcuccguccgcauacac

SEQ ID NO: 2418087 - RNA, 19 nt, Artificial Sequence
  Description of Artificial Sequence: Synthetic oligonucleotide
gucagcgccgaggggaaac

SEQ ID NO: 2418088 - RNA, 19 nt, Artificial Sequence
  Description of Artificial Sequence: Synthetic oligonucleotide
gaucuccgcgucgaacauc

SEQ ID NO: 2418089 - RNA, 19 nt, Artificial Sequence
  Description of Artificial Sequence: Synthetic oligonucleotide
gaggacgaaggacaucauu

SEQ ID NO: 2418090 - RNA, 19 nt, Artificial Sequence
  Description of Artificial Sequence: Synthetic oligonucleotide
cccucgacggaugaaguac

SEQ ID NO: 2418091 - RNA, 19 nt, Artificial Sequence
  Description of Artificial Sequence: Synthetic oligonucleotide
gaucugcgacaggaucagc

SEQ ID NO: 2418092 - RNA, 19 nt, Artificial Sequence
  Description of Artificial Sequence: Synthetic oligonucleotide
gacucgagccagacccaug

SEQ ID NO: 2418093 - RNA, 19 nt, Artificial Sequence
  Description of Artificial Sequence: Synthetic oligonucleotide
gucgaacaucugguccagg

SEQ ID NO: 2418094 - RNA, 19 nt, Artificial Sequence
  Description of Artificial Sequence: Synthetic oligonucleotide
cgccaaucagauauccuug

SEQ ID NO: 2418095 - RNA, 19 nt, Artificial Sequence
  Description of Artificial Sequence: Synthetic oligonucleotide
guggaggucugagcagccc

SEQ ID NO: 2418096 - RNA, 19 nt, Artificial Sequence
  Description of Artificial Sequence: Synthetic oligonucleotide
cauuggauuuaggggcuga

SEQ ID NO: 2418097 - RNA, 19 nt, Artificial Sequence
  Description of Artificial Sequence: Synthetic oligonucleotide
cucgagccagacccaugug

SEQ ID NO: 2418098 - RNA, 19 nt, Artificial Sequence
  Description of Artificial Sequence: Synthetic oligonucleotide
cgcgucgaacaucuggucc

SEQ ID NO: 2418099 - RNA, 19 nt, Artificial Sequence
  Description of Artificial Sequence: Synthetic oligonucleotide
caucauugagagccggccu

SEQ ID NO: 2418100 - RNA, 19 nt, Artificial Sequence
  Description of Artificial Sequence: Synthetic oligonucleotide
gccgaggggaaacgggagc

SEQ ID NO: 2418101 - RNA, 19 nt, Artificial Sequence
  Description of Artificial Sequence: Synthetic oligonucleotide
ccucaauaagguccccuuc

SEQ ID NO: 2418102 - RNA, 19 nt, Artificial Sequence
  Description of Artificial Sequence: Synthetic oligonucleotide
gagugacaugguuccaaau

SEQ ID NO: 2418103 - RNA, 19 nt, Artificial Sequence
  Description of Artificial Sequence: Synthetic oligonucleotide
uuccaccaacagacuucac

SEQ ID NO: 2418104 - RNA, 19 nt, Artificial Sequence
  Description of Artificial Sequence: Synthetic oligonucleotide
ggaucagcaguggauccca

SEQ ID NO: 2418105 - RNA, 19 nt, Artificial Sequence
  Description of Artificial Sequence: Synthetic oligonucleotide
ccucucagacucgagccag

SEQ ID NO: 2418106 - RNA, 19 nt, Artificial Sequence
  Description of Artificial Sequence: Synthetic oligonucleotide
cucacucucuuuccaccaa

SEQ ID NO: 2418107 - RNA, 19 nt, Artificial Sequence
  Description of Artificial Sequence: Synthetic oligonucleotide
augacggccaugagugcaa

SEQ ID NO: 2418108 - RNA, 19 nt, Artificial Sequence
  Description of Artificial Sequence: Synthetic oligonucleotide
agacucgagccagacccau

SEQ ID NO: 2418109 - RNA, 19 nt, Artificial Sequence
  Description of Artificial Sequence: Synthetic oligonucleotide
gaggggaaacgggagcugu

SEQ ID NO: 2418110 - RNA, 19 nt, Artificial Sequence
  Description of Artificial Sequence: Synthetic oligonucleotide
cuagcgcguccaccagcgc

SEQ ID NO: 2418111 - RNA, 19 nt, Artificial Sequence
  Description of Artificial Sequence: Synthetic oligonucleotide
gccaugagugcaauacaca

SEQ ID NO: 2418112 - RNA, 19 nt, Artificial Sequence
  Description of Artificial Sequence: Synthetic oligonucleotide
gcgacaggaucagcagugg

SEQ ID NO: 2418113 - RNA, 19 nt, Artificial Sequence
  Description of Artificial Sequence: Synthetic oligonucleotide
cagacucgagccagaccca

SEQ ID NO: 2418114 - RNA, 19 nt, Artificial Sequence
  Description of Artificial Sequence: Synthetic oligonucleotide
uacccucaauaaggucccc

SEQ ID NO: 2418115 - RNA, 19 nt, Artificial Sequence
  Description of Artificial Sequence: Synthetic oligonucleotide
gacaggcgaccagaaaagu

SEQ ID NO: 2418116 - RNA, 19 nt, Artificial Sequence
  Description of Artificial Sequence: Synthetic oligonucleotide
cccagcgagccauaguaca

SEQ ID NO: 2418117 - RNA, 19 nt, Artificial Sequence
  Description of Artificial Sequence: Synthetic oligonucleotide
ucuccgcgucgaacaucug

SEQ ID NO: 2418118 - RNA, 19 nt, Artificial Sequence
  Description of Artificial Sequence: Synthetic oligonucleotide
cucucagacucgagccaga

SEQ ID NO: 2418119 - RNA, 19 nt, Artificial Sequence
  Description of Artificial Sequence: Synthetic oligonucleotide
uucuugcagcugugccccu

SEQ ID NO: 2418120 - RNA, 19 nt, Artificial Sequence
  Description of Artificial Sequence: Synthetic oligonucleotide
auuccccaaugacggccau

SEQ ID NO: 2418121 - RNA, 19 nt, Artificial Sequence
  Description of Artificial Sequence: Synthetic oligonucleotide
gagccauaguacaccgucu

SEQ ID NO: 2418122 - RNA, 19 nt, Artificial Sequence
  Description of Artificial Sequence: Synthetic oligonucleotide
gcgccaaucagauauccuu

SEQ ID NO: 2418123 - RNA, 19 nt, Artificial Sequence
  Description of Artificial Sequence: Synthetic oligonucleotide
ggugaaagaaguggacagu

SEQ ID NO: 2418124 - RNA, 19 nt, Artificial Sequence
  Description of Artificial Sequence: Synthetic oligonucleotide
cgaaacuggcccgccaugc

SEQ ID NO: 2418125 - RNA, 19 nt, Artificial Sequence
  Description of Artificial Sequence: Synthetic oligonucleotide
cagcgccgaggggaaacgg

SEQ ID NO: 2418126 - RNA, 19 nt, Artificial Sequence
  Description of Artificial Sequence: Synthetic oligonucleotide
ccgcauacacagguauucc

SEQ ID NO: 2418127 - RNA, 19 nt, Artificial Sequence
  Description of Artificial Sequence: Synthetic oligonucleotide
gcgaaacuggcccgccaug

SEQ ID NO: 2418128 - RNA, 19 nt, Artificial Sequence
  Description of Artificial Sequence: Synthetic oligonucleotide
cuugagcuccguccgcaua

SEQ ID NO: 2418129 - RNA, 19 nt, Artificial Sequence
  Description of Artificial Sequence: Synthetic oligonucleotide
gcaugagcacgaucugcga

SEQ ID NO: 2418130 - RNA, 19 nt, Artificial Sequence
  Description of Artificial Sequence: Synthetic oligonucleotide
ccucacucucuuuccacca

SEQ ID NO: 2418131 - RNA, 19 nt, Artificial Sequence
  Description of Artificial Sequence: Synthetic oligonucleotide
gccuggagggguggaaaag

SEQ ID NO: 2418132 - RNA, 19 nt, Artificial Sequence
  Description of Artificial Sequence: Synthetic oligonucleotide
gcacuagcgcguccaccag

SEQ ID NO: 2418133 - RNA, 19 nt, Artificial Sequence
  Description of Artificial Sequence: Synthetic oligonucleotide
gggagcuguagagccaaca

SEQ ID NO: 2418134 - RNA, 19 nt, Artificial Sequence
  Description of Artificial Sequence: Synthetic oligonucleotide
ggggccaaaugcccgcaga

SEQ ID NO: 2418135 - RNA, 19 nt, Artificial Sequence
  Description of Artificial Sequence: Synthetic oligonucleotide
cggccucuguuacaggacc

SEQ ID NO: 2418136 - RNA, 19 nt, Artificial Sequence
  Description of Artificial Sequence: Synthetic oligonucleotide
ccucgacggaugaaguaca

SEQ ID NO: 2418137 - RNA, 19 nt, Artificial Sequence
  Description of Artificial Sequence: Synthetic oligonucleotide
cgcacuagcgcguccacca

SEQ ID NO: 2418138 - RNA, 19 nt, Artificial Sequence
  Description of Artificial Sequence: Synthetic oligonucleotide
ugacggccaugagugcaau

SEQ ID NO: 2418139 - RNA, 19 nt, Artificial Sequence
  Description of Artificial Sequence: Synthetic oligonucleotide
gggcguugaggacgaagga

SEQ ID NO: 2418140 - RNA, 19 nt, Artificial Sequence
  Description of Artificial Sequence: Synthetic oligonucleotide
gacggccaugagugcaaua

SEQ ID NO: 2418141 - RNA, 19 nt, Artificial Sequence
  Description of Artificial Sequence: Synthetic oligonucleotide
ugcugcgcacuagcgcguc

SEQ ID NO: 2418142 - RNA, 19 nt, Artificial Sequence
  Description of Artificial Sequence: Synthetic oligonucleotide
cucuuuccaccaacagacu

SEQ ID NO: 2418143 - RNA, 19 nt, Artificial Sequence
  Description of Artificial Sequence: Synthetic oligonucleotide
cugcgacaggaucagcagu

SEQ ID NO: 2418144 - RNA, 19 nt, Artificial Sequence
  Description of Artificial Sequence: Synthetic oligonucleotide
cacacguagcugcgaaacu

SEQ ID NO: 2418145 - RNA, 19 nt, Artificial Sequence
  Description of Artificial Sequence: Synthetic oligonucleotide
cugcgaaacuggcccgcca

SEQ ID NO: 2418146 - RNA, 19 nt, Artificial Sequence
  Description of Artificial Sequence: Synthetic oligonucleotide
gacccauguggaggucuga

SEQ ID NO: 2418147 - RNA, 19 nt, Artificial Sequence
  Description of Artificial Sequence: Synthetic oligonucleotide
gccaacaccccaggaggug

SEQ ID NO: 2418148 - RNA, 19 nt, Artificial Sequence
  Description of Artificial Sequence: Synthetic oligonucleotide
ccggccucuguuacaggac

SEQ ID NO: 2418149 - RNA, 19 nt, Artificial Sequence
  Description of Artificial Sequence: Synthetic oligonucleotide
aucccacacguagcugcga

SEQ ID NO: 2418150 - RNA, 19 nt, Artificial Sequence
  Description of Artificial Sequence: Synthetic oligonucleotide
gcgaccagaaaagugguuu

SEQ ID NO: 2418151 - RNA, 19 nt, Artificial Sequence
  Description of Artificial Sequence: Synthetic oligonucleotide
cgaucugcgacaggaucag

SEQ ID NO: 2418152 - RNA, 19 nt, Artificial Sequence
  Description of Artificial Sequence: Synthetic oligonucleotide
gagccggccuggaggggug

SEQ ID NO: 2418153 - RNA, 19 nt, Artificial Sequence
  Description of Artificial Sequence: Synthetic oligonucleotide
gccagacccauguggaggu

SEQ ID NO: 2418154 - RNA, 19 nt, Artificial Sequence
  Description of Artificial Sequence: Synthetic oligonucleotide
ugacugcucccggccucug

SEQ ID NO: 2418155 - RNA, 19 nt, Artificial Sequence
  Description of Artificial Sequence: Synthetic oligonucleotide
cagcuuggaccagccacca

SEQ ID NO: 2418156 - RNA, 19 nt, Artificial Sequence
  Description of Artificial Sequence: Synthetic oligonucleotide
cauugagagccggccugga

SEQ ID NO: 2418157 - RNA, 19 nt, Artificial Sequence
  Description of Artificial Sequence: Synthetic oligonucleotide
gcacaggugagggcguuga

SEQ ID NO: 2418158 - RNA, 19 nt, Artificial Sequence
  Description of Artificial Sequence: Synthetic oligonucleotide
gccccugacugcucccggc

SEQ ID NO: 2418159 - RNA, 19 nt, Artificial Sequence
  Description of Artificial Sequence: Synthetic oligonucleotide
gcugcgaaacuggcccgcc

SEQ ID NO: 2418160 - RNA, 19 nt, Artificial Sequence
  Description of Artificial Sequence: Synthetic oligonucleotide
aggucagcgccgaggggaa

SEQ ID NO: 2418161 - RNA, 19 nt, Artificial Sequence
  Description of Artificial Sequence: Synthetic oligonucleotide
agccggccuggaggggugg

SEQ ID NO: 2418162 - RNA, 19 nt, Artificial Sequence
  Description of Artificial Sequence: Synthetic oligonucleotide
ggccuggagggguggaaaa

SEQ ID NO: 2418163 - RNA, 19 nt, Artificial Sequence
  Description of Artificial Sequence: Synthetic oligonucleotide
gcucaagagugacaugguu

SEQ ID NO: 2418164 - RNA, 19 nt, Artificial Sequence
  Description of Artificial Sequence: Synthetic oligonucleotide
cagacccauguggaggucu

SEQ ID NO: 2418165 - RNA, 19 nt, Artificial Sequence
  Description of Artificial Sequence: Synthetic oligonucleotide
ccaaaugcccgcagagugu

SEQ ID NO: 2418166 - RNA, 19 nt, Artificial Sequence
  Description of Artificial Sequence: Synthetic oligonucleotide
gacugcucccggccucugu

SEQ ID NO: 2418167 - RNA, 19 nt, Artificial Sequence
  Description of Artificial Sequence: Synthetic oligonucleotide
ggaggucugagcagcccaa

SEQ ID NO: 2418168 - RNA, 19 nt, Artificial Sequence
  Description of Artificial Sequence: Synthetic oligonucleotide
ggcacaggugagggcguug

SEQ ID NO: 2418169 - RNA, 19 nt, Artificial Sequence
  Description of Artificial Sequence: Synthetic oligonucleotide
gcccaacacuagacauugg

SEQ ID NO: 2418170 - RNA, 19 nt, Artificial Sequence
  Description of Artificial Sequence: Synthetic oligonucleotide
ccucuguuacaggaccuca

SEQ ID NO: 2418171 - RNA, 19 nt, Artificial Sequence
  Description of Artificial Sequence: Synthetic oligonucleotide
cuggcccgccaugccggcc

SEQ ID NO: 2418172 - RNA, 19 nt, Artificial Sequence
  Description of Artificial Sequence: Synthetic oligonucleotide
gcgccgaggggaaacggga

SEQ ID NO: 2418173 - RNA, 19 nt, Artificial Sequence
  Description of Artificial Sequence: Synthetic oligonucleotide
cugcucccggccucuguua

SEQ ID NO: 2418174 - RNA, 19 nt, Artificial Sequence
  Description of Artificial Sequence: Synthetic oligonucleotide
cgccgaggggaaacgggag

SEQ ID NO: 2418175 - RNA, 19 nt, Artificial Sequence
  Description of Artificial Sequence: Synthetic oligonucleotide
gguuugcgccaaucagaua

SEQ ID NO: 2418176 - RNA, 19 nt, Artificial Sequence
  Description of Artificial Sequence: Synthetic oligonucleotide
gcccagcgagccauaguac

SEQ ID NO: 2418177 - RNA, 19 nt, Artificial Sequence
  Description of Artificial Sequence: Synthetic oligonucleotide
gcgcacuagcgcguccacc

SEQ ID NO: 2418178 - RNA, 19 nt, Artificial Sequence
  Description of Artificial Sequence: Synthetic oligonucleotide
ccgcgucgaacaucugguc

SEQ ID NO: 2418179 - RNA, 19 nt, Artificial Sequence
  Description of Artificial Sequence: Synthetic oligonucleotide
cgucgaacaucugguccag

SEQ ID NO: 2418180 - RNA, 19 nt, Artificial Sequence
  Description of Artificial Sequence: Synthetic oligonucleotide
ggaucuccgcgucgaacau

SEQ ID NO: 2418181 - RNA, 19 nt, Artificial Sequence
  Description of Artificial Sequence: Synthetic oligonucleotide
cccaggaucuccgcgucga

SEQ ID NO: 2418182 - RNA, 19 nt, Artificial Sequence
  Description of Artificial Sequence: Synthetic oligonucleotide
ggccaaaugcccgcagagu

SEQ ID NO: 2418183 - RNA, 19 nt, Artificial Sequence
  Description of Artificial Sequence: Synthetic oligonucleotide
ggcucaagagugacauggu

SEQ ID NO: 2418184 - RNA, 19 nt, Artificial Sequence
  Description of Artificial Sequence: Synthetic oligonucleotide
ccaaucagauauccuugau

SEQ ID NO: 2418185 - RNA, 19 nt, Artificial Sequence
  Description of Artificial Sequence: Synthetic oligonucleotide
cccgccaugccggcccgcg

SEQ ID NO: 2418186 - RNA, 19 nt, Artificial Sequence
  Description of Artificial Sequence: Synthetic oligonucleotide
cugcugcgcacuagcgcgu

SEQ ID NO: 2418187 - RNA, 19 nt, Artificial Sequence
  Description of Artificial Sequence: Synthetic oligonucleotide
ugagggcguugaggacgaa

SEQ ID NO: 2418188 - RNA, 19 nt, Artificial Sequence
  Description of Artificial Sequence: Synthetic oligonucleotide
cgacaggaucagcagugga

SEQ ID NO: 2418189 - RNA, 19 nt, Artificial Sequence
  Description of Artificial Sequence: Synthetic oligonucleotide
cccucaauaagguccccuu

SEQ ID NO: 2418190 - RNA, 19 nt, Artificial Sequence
  Description of Artificial Sequence: Synthetic oligonucleotide
gcuucccucgacggaugaa

SEQ ID NO: 2418191 - RNA, 19 nt, Artificial Sequence
  Description of Artificial Sequence: Synthetic oligonucleotide
ccgaggggaaacgggagcu

SEQ ID NO: 2418192 - RNA, 19 nt, Artificial Sequence
  Description of Artificial Sequence: Synthetic oligonucleotide
gggcccaacacuagacauu

SEQ ID NO: 2418193 - RNA, 19 nt, Artificial Sequence
  Description of Artificial Sequence: Synthetic oligonucleotide
gcaguggaucccacacgua

SEQ ID NO: 2418194 - RNA, 19 nt, Artificial Sequence
  Description of Artificial Sequence: Synthetic oligonucleotide
ccguccgcauacacaggua

SEQ ID NO: 2418195 - RNA, 19 nt, Artificial Sequence
  Description of Artificial Sequence: Synthetic oligonucleotide
gcgcguccaccagcgccag

SEQ ID NO: 2418196 - RNA, 19 nt, Artificial Sequence
  Description of Artificial Sequence: Synthetic oligonucleotide
ggcgaccagaaaagugguu

SEQ ID NO: 2418197 - RNA, 19 nt, Artificial Sequence
  Description of Artificial Sequence: Synthetic oligonucleotide
cgggagcuguagagccaac

SEQ ID NO: 2418198 - RNA, 19 nt, Artificial Sequence
  Description of Artificial Sequence: Synthetic oligonucleotide
gcgagccauaguacaccgu

SEQ ID NO: 2418199 - RNA, 19 nt, Artificial Sequence
  Description of Artificial Sequence: Synthetic oligonucleotide
ggucagcgccgaggggaaa

SEQ ID NO: 2418200 - RNA, 19 nt, Artificial Sequence
  Description of Artificial Sequence: Synthetic oligonucleotide
cccugacugcucccggccu

SEQ ID NO: 2418201 - RNA, 19 nt, Artificial Sequence
  Description of Artificial Sequence: Synthetic oligonucleotide
gccggccuggaggggugga

SEQ ID NO: 2418202 - RNA, 19 nt, Artificial Sequence
  Description of Artificial Sequence: Synthetic oligonucleotide
cggccuggagggguggaaa

SEQ ID NO: 2418203 - RNA, 19 nt, Artificial Sequence
  Description of Artificial Sequence: Synthetic oligonucleotide
gcccgccaugccggcccgc

SEQ ID NO: 2418204 - RNA, 19 nt, Artificial Sequence
  Description of Artificial Sequence: Synthetic oligonucleotide
gggcacaggugagggcguu

SEQ ID NO: 2418205 - RNA, 19 nt, Artificial Sequence
  Description of Artificial Sequence: Synthetic oligonucleotide
ccgucugcaugagcacgau

SEQ ID NO: 2418206 - RNA, 19 nt, Artificial Sequence
  Description of Artificial Sequence: Synthetic oligonucleotide
uuguagaugggcuugacag

SEQ ID NO: 2418207 - RNA, 19 nt, Artificial Sequence
  Description of Artificial Sequence: Synthetic oligonucleotide
uuauauuugugcuucaggu

SEQ ID NO: 2418208 - RNA, 19 nt, Artificial Sequence
  Description of Artificial Sequence: Synthetic oligonucleotide
ugugauuugggaauagacc

SEQ ID NO: 2418209 - RNA, 19 nt, Artificial Sequence
  Description of Artificial Sequence: Synthetic oligonucleotide
gaagguuccagucagaguc

SEQ ID NO: 2418210 - RNA, 19 nt, Artificial Sequence
  Description of Artificial Sequence: Synthetic oligonucleotide
uagguaaggacccuucugg

SEQ ID NO: 2418211 - RNA, 19 nt, Artificial Sequence
  Description of Artificial Sequence: Synthetic oligonucleotide
ugugcuucagguuccaacg

SEQ ID NO: 2418212 - RNA, 19 nt, Artificial Sequence
  Description of Artificial Sequence: Synthetic oligonucleotide
uuauuccuagguaaggacc

SEQ ID NO: 2418213 - RNA, 19 nt, Artificial Sequence
  Description of Artificial Sequence: Synthetic oligonucleotide
ugugauucgaccuucaauu

SEQ ID NO: 2418214 - RNA, 19 nt, Artificial Sequence
  Description of Artificial Sequence: Synthetic oligonucleotide
ucaauuacaguugucuucc

SEQ ID NO: 2418215 - RNA, 19 nt, Artificial Sequence
  Description of Artificial Sequence: Synthetic oligonucleotide
caucuuuacacacuccucg

SEQ ID NO: 2418216 - RNA, 19 nt, Artificial Sequence
  Description of Artificial Sequence: Synthetic oligonucleotide
agggcaaugguucuggcgg

SEQ ID NO: 2418217 - RNA, 19 nt, Artificial Sequence
  Description of Artificial Sequence: Synthetic oligonucleotide
agucagagucuucagcugc

SEQ ID NO: 2418218 - RNA, 19 nt, Artificial Sequence
  Description of Artificial Sequence: Synthetic oligonucleotide
ucgaccuucaauuacaguu

SEQ ID NO: 2418219 - RNA, 19 nt, Artificial Sequence
  Description of Artificial Sequence: Synthetic oligonucleotide
gaugaacugacugagcagc

SEQ ID NO: 2418220 - RNA, 19 nt, Artificial Sequence
  Description of Artificial Sequence: Synthetic oligonucleotide
gacauugcggggcagcacg

SEQ ID NO: 2418221 - RNA, 19 nt, Artificial Sequence
  Description of Artificial Sequence: Synthetic oligonucleotide
gcuuauuucauucuuugag

SEQ ID NO: 2418222 - RNA, 19 nt, Artificial Sequence
  Description of Artificial Sequence: Synthetic oligonucleotide
ugaguuuggguuuauuccu

SEQ ID NO: 2418223 - RNA, 19 nt, Artificial Sequence
  Description of Artificial Sequence: Synthetic oligonucleotide
ucccauuaaugaaugagcu

SEQ ID NO: 2418224 - RNA, 19 nt, Artificial Sequence
  Description of Artificial Sequence: Synthetic oligonucleotide
aggagauccagcuccugcc

SEQ ID NO: 2418225 - RNA, 19 nt, Artificial Sequence
  Description of Artificial Sequence: Synthetic oligonucleotide
acagaaaugaguccccaug

SEQ ID NO: 2418226 - RNA, 19 nt, Artificial Sequence
  Description of Artificial Sequence: Synthetic oligonucleotide
aauuacaguugucuucccu

SEQ ID NO: 2418227 - RNA, 19 nt, Artificial Sequence
  Description of Artificial Sequence: Synthetic oligonucleotide
ugaguuagacuccuguccu

SEQ ID NO: 2418228 - RNA, 19 nt, Artificial Sequence
  Description of Artificial Sequence: Synthetic oligonucleotide
guaaggacccuucuggaag

SEQ ID NO: 2418229 - RNA, 19 nt, Artificial Sequence
  Description of Artificial Sequence: Synthetic oligonucleotide
gaucuuucgguguucuucc

SEQ ID NO: 2418230 - RNA, 19 nt, Artificial Sequence
  Description of Artificial Sequence: Synthetic oligonucleotide
cucccauuaaugaaugagc

SEQ ID NO: 2418231 - RNA, 19 nt, Artificial Sequence
  Description of Artificial Sequence: Synthetic oligonucleotide
cuucucucaacccacgagc

SEQ ID NO: 2418232 - RNA, 19 nt, Artificial Sequence
  Description of Artificial Sequence: Synthetic oligonucleotide
uggaguagcagacauuguc

SEQ ID NO: 2418233 - RNA, 19 nt, Artificial Sequence
  Description of Artificial Sequence: Synthetic oligonucleotide
agucagaagaccacaggcc

SEQ ID NO: 2418234 - RNA, 19 nt, Artificial Sequence
  Description of Artificial Sequence: Synthetic oligonucleotide
ugcgaggaaccccugaagc

SEQ ID NO: 2418235 - RNA, 19 nt, Artificial Sequence
  Description of Artificial Sequence: Synthetic oligonucleotide
uggguuuauuccuagguaa

SEQ ID NO: 2418236 - RNA, 19 nt, Artificial Sequence
  Description of Artificial Sequence: Synthetic oligonucleotide
uuaaugaaugagcuucaaa

SEQ ID NO: 2418237 - RNA, 19 nt, Artificial Sequence
  Description of Artificial Sequence: Synthetic oligonucleotide
caacccacgagcuggaagc

SEQ ID NO: 2418238 - RNA, 19 nt, Artificial Sequence
  Description of Artificial Sequence: Synthetic oligonucleotide
agcccagcgagucagguag

SEQ ID NO: 2418239 - RNA, 19 nt, Artificial Sequence
  Description of Artificial Sequence: Synthetic oligonucleotide
aguugucuucccuucuugg

SEQ ID NO: 2418240 - RNA, 19 nt, Artificial Sequence
  Description of Artificial Sequence: Synthetic oligonucleotide
cuuucgguguucuuccagg

SEQ ID NO: 2418241 - RNA, 19 nt, Artificial Sequence
  Description of Artificial Sequence: Synthetic oligonucleotide
ucggggaacagaaaugagu

SEQ ID NO: 2418242 - RNA, 19 nt, Artificial Sequence
  Description of Artificial Sequence: Synthetic oligonucleotide
agacuccuguccuugcacc

SEQ ID NO: 2418243 - RNA, 19 nt, Artificial Sequence
  Description of Artificial Sequence: Synthetic oligonucleotide
augagccaucuuuacacac

SEQ ID NO: 2418244 - RNA, 19 nt, Artificial Sequence
  Description of Artificial Sequence: Synthetic oligonucleotide
ugauucgaccuucaauuac

SEQ ID NO: 2418245 - RNA, 19 nt, Artificial Sequence
  Description of Artificial Sequence: Synthetic oligonucleotide
aaccccugaagcugccgcc

SEQ ID NO: 2418246 - RNA, 19 nt, Artificial Sequence
  Description of Artificial Sequence: Synthetic oligonucleotide
ugauuugggaauagaccug

SEQ ID NO: 2418247 - RNA, 19 nt, Artificial Sequence
  Description of Artificial Sequence: Synthetic oligonucleotide
ugaucggggaacagaaaug

SEQ ID NO: 2418248 - RNA, 19 nt, Artificial Sequence
  Description of Artificial Sequence: Synthetic oligonucleotide
ucauucuuugaguuagacu

SEQ ID NO: 2418249 - RNA, 19 nt, Artificial Sequence
  Description of Artificial Sequence: Synthetic oligonucleotide
cugugauuugggaauagac

SEQ ID NO: 2418250 - RNA, 19 nt, Artificial Sequence
  Description of Artificial Sequence: Synthetic oligonucleotide
agcacauccucauaguuau

SEQ ID NO: 2418251 - RNA, 19 nt, Artificial Sequence
  Description of Artificial Sequence: Synthetic oligonucleotide
gauuugggaauagaccugc

SEQ ID NO: 2418252 - RNA, 19 nt, Artificial Sequence
  Description of Artificial Sequence: Synthetic oligonucleotide
uuugaguuagacuccuguc

SEQ ID NO: 2418253 - RNA, 19 nt, Artificial Sequence
  Description of Artificial Sequence: Synthetic oligonucleotide
gugauuugggaauagaccu

SEQ ID NO: 2418254 - RNA, 19 nt, Artificial Sequence
  Description of Artificial Sequence: Synthetic oligonucleotide
ucaacccacgagcuggaag

SEQ ID NO: 2418255 - RNA, 19 nt, Artificial Sequence
  Description of Artificial Sequence: Synthetic oligonucleotide
cuugacagagcugggagcc

SEQ ID NO: 2418256 - RNA, 19 nt, Artificial Sequence
  Description of Artificial Sequence: Synthetic oligonucleotide
ugcucgaugagccaucuuu

SEQ ID NO: 2418257 - RNA, 19 nt, Artificial Sequence
  Description of Artificial Sequence: Synthetic oligonucleotide
ucgguguucuuccaggcac

SEQ ID NO: 2418258 - RNA, 19 nt, Artificial Sequence
  Description of Artificial Sequence: Synthetic oligonucleotide
cagugcgucacguggaagg

SEQ ID NO: 2418259 - RNA, 19 nt, Artificial Sequence
  Description of Artificial Sequence: Synthetic oligonucleotide
ucuuucgguguucuuccag

SEQ ID NO: 2418260 - RNA, 19 nt, Artificial Sequence
  Description of Artificial Sequence: Synthetic oligonucleotide
guagaugggcuugacagag

SEQ ID NO: 2418261 - RNA, 19 nt, Artificial Sequence
  Description of Artificial Sequence: Synthetic oligonucleotide
cucucaacccacgagcugg

SEQ ID NO: 2418262 - RNA, 19 nt, Artificial Sequence
  Description of Artificial Sequence: Synthetic oligonucleotide
gagggcaaugguucuggcg

SEQ ID NO: 2418263 - RNA, 19 nt, Artificial Sequence
  Description of Artificial Sequence: Synthetic oligonucleotide
auagaccugcucgaugagc

SEQ ID NO: 2418264 - RNA, 19 nt, Artificial Sequence
  Description of Artificial Sequence: Synthetic oligonucleotide
auacccacuuuguuccaac

SEQ ID NO: 2418265 - RNA, 19 nt, Artificial Sequence
  Description of Artificial Sequence: Synthetic oligonucleotide
gaguuucugugauucgacc

SEQ ID NO: 2418266 - RNA, 19 nt, Artificial Sequence
  Description of Artificial Sequence: Synthetic oligonucleotide
ucgaugagccaucuuuaca

SEQ ID NO: 2418267 - RNA, 19 nt, Artificial Sequence
  Description of Artificial Sequence: Synthetic oligonucleotide
uguagaugggcuugacaga

SEQ ID NO: 2418268 - RNA, 19 nt, Artificial Sequence
  Description of Artificial Sequence: Synthetic oligonucleotide
ugcuucagguuccaacggc

SEQ ID NO: 2418269 - RNA, 19 nt, Artificial Sequence
  Description of Artificial Sequence: Synthetic oligonucleotide
ggaagccuuaaccagccgg

SEQ ID NO: 2418270 - RNA, 19 nt, Artificial Sequence
  Description of Artificial Sequence: Synthetic oligonucleotide
ucuuggaucuccaccacuu

SEQ ID NO: 2418271 - RNA, 19 nt, Artificial Sequence
  Description of Artificial Sequence: Synthetic oligonucleotide
uucucucaacccacgagcu

SEQ ID NO: 2418272 - RNA, 19 nt, Artificial Sequence
  Description of Artificial Sequence: Synthetic oligonucleotide
cuuuacacacuccucgauc

SEQ ID NO: 2418273 - RNA, 19 nt, Artificial Sequence
  Description of Artificial Sequence: Synthetic oligonucleotide
uugugcuucagguuccaac

SEQ ID NO: 2418274 - RNA, 19 nt, Artificial Sequence
  Description of Artificial Sequence: Synthetic oligonucleotide
gauucgaccuucaauuaca

SEQ ID NO: 2418275 - RNA, 19 nt, Artificial Sequence
  Description of Artificial Sequence: Synthetic oligonucleotide
agccuuaaccagccggucg

SEQ ID NO: 2418276 - RNA, 19 nt, Artificial Sequence
  Description of Artificial Sequence: Synthetic oligonucleotide
uaaccagccggucgcggcg

SEQ ID NO: 2418277 - RNA, 19 nt, Artificial Sequence
  Description of Artificial Sequence: Synthetic oligonucleotide
ugaccccacggccauaccc

SEQ ID NO: 2418278 - RNA, 19 nt, Artificial Sequence
  Description of Artificial Sequence: Synthetic oligonucleotide
aguuauauuugugcuucag

SEQ ID NO: 2418279 - RNA, 19 nt, Artificial Sequence
  Description of Artificial Sequence: Synthetic oligonucleotide
ugcuuauuucauucuuuga

SEQ ID NO: 2418280 - RNA, 19 nt, Artificial Sequence
  Description of Artificial Sequence: Synthetic oligonucleotide
uugucuucccuucuuggau

SEQ ID NO: 2418281 - RNA, 19 nt, Artificial Sequence
  Description of Artificial Sequence: Synthetic oligonucleotide
ugggaauagaccugcucga

SEQ ID NO: 2418282 - RNA, 19 nt, Artificial Sequence
  Description of Artificial Sequence: Synthetic oligonucleotide
ccauuaaugaaugagcuuc

SEQ ID NO: 2418283 - RNA, 19 nt, Artificial Sequence
  Description of Artificial Sequence: Synthetic oligonucleotide
ugccuugggaguuucugug

SEQ ID NO: 2418284 - RNA, 19 nt, Artificial Sequence
  Description of Artificial Sequence: Synthetic oligonucleotide
cuugcaccaagcucagccc

SEQ ID NO: 2418285 - RNA, 19 nt, Artificial Sequence
  Description of Artificial Sequence: Synthetic oligonucleotide
uuaaccagccggucgcggc

SEQ ID NO: 2418286 - RNA, 19 nt, Artificial Sequence
  Description of Artificial Sequence: Synthetic oligonucleotide
aacagaaaugaguccccau

SEQ ID NO: 2418287 - RNA, 19 nt, Artificial Sequence
  Description of Artificial Sequence: Synthetic oligonucleotide
aggaguggugaccccacgg

SEQ ID NO: 2418288 - RNA, 19 nt, Artificial Sequence
  Description of Artificial Sequence: Synthetic oligonucleotide
uguccuugaggagugguga

SEQ ID NO: 2418289 - RNA, 19 nt, Artificial Sequence
  Description of Artificial Sequence: Synthetic oligonucleotide
uuucgguguucuuccaggc

SEQ ID NO: 2418290 - RNA, 19 nt, Artificial Sequence
  Description of Artificial Sequence: Synthetic oligonucleotide
ugcgucacguggaagguuc

SEQ ID NO: 2418291 - RNA, 19 nt, Artificial Sequence
  Description of Artificial Sequence: Synthetic oligonucleotide
cagcacgccuccaugaggc

SEQ ID NO: 2418292 - RNA, 19 nt, Artificial Sequence
  Description of Artificial Sequence: Synthetic oligonucleotide
gagcuggaagccuuaacca

SEQ ID NO: 2418293 - RNA, 19 nt, Artificial Sequence
  Description of Artificial Sequence: Synthetic oligonucleotide
cuagguaaggacccuucug

SEQ ID NO: 2418294 - RNA, 19 nt, Artificial Sequence
  Description of Artificial Sequence: Synthetic oligonucleotide
uuacaguugucuucccuuc

SEQ ID NO: 2418295 - RNA, 19 nt, Artificial Sequence
  Description of Artificial Sequence: Synthetic oligonucleotide
uagcgguugaguuuggguu

SEQ ID NO: 2418296 - RNA, 19 nt, Artificial Sequence
  Description of Artificial Sequence: Synthetic oligonucleotide
ugacugagcagcagcacau

SEQ ID NO: 2418297 - RNA, 19 nt, Artificial Sequence
  Description of Artificial Sequence: Synthetic oligonucleotide
ucuuuacacacuccucgau

SEQ ID NO: 2418298 - RNA, 19 nt, Artificial Sequence
  Description of Artificial Sequence: Synthetic oligonucleotide
guuuauuccuagguaagga

SEQ ID NO: 2418299 - RNA, 19 nt, Artificial Sequence
  Description of Artificial Sequence: Synthetic oligonucleotide
aucuuuacacacuccucga

SEQ ID NO: 2418300 - RNA, 19 nt, Artificial Sequence
  Description of Artificial Sequence: Synthetic oligonucleotide
uucagguuccaacggcaga

SEQ ID NO: 2418301 - RNA, 19 nt, Artificial Sequence
  Description of Artificial Sequence: Synthetic oligonucleotide
caugaggccggaugaacug

SEQ ID NO: 2418302 - RNA, 19 nt, Artificial Sequence
  Description of Artificial Sequence: Synthetic oligonucleotide
gaaccccugaagcugccgc

SEQ ID NO: 2418303 - RNA, 19 nt, Artificial Sequence
  Description of Artificial Sequence: Synthetic oligonucleotide
uagacuccuguccuugcac

SEQ ID NO: 2418304 - RNA, 19 nt, Artificial Sequence
  Description of Artificial Sequence: Synthetic oligonucleotide
aacccacgagcuggaagcc

SEQ ID NO: 2418305 - RNA, 19 nt, Artificial Sequence
  Description of Artificial Sequence: Synthetic oligonucleotide
ugucuucccuucuuggauc

SEQ ID NO: 2418306 - RNA, 19 nt, Artificial Sequence
  Description of Artificial Sequence: Synthetic oligonucleotide
ccuugcaccaagcucagcc

SEQ ID NO: 2418307 - RNA, 19 nt, Artificial Sequence
  Description of Artificial Sequence: Synthetic oligonucleotide
ggcgggaggagccagugcg

SEQ ID NO: 2418308 - RNA, 19 nt, Artificial Sequence
  Description of Artificial Sequence: Synthetic oligonucleotide
gguuuauuccuagguaagg

SEQ ID NO: 2418309 - RNA, 19 nt, Artificial Sequence
  Description of Artificial Sequence: Synthetic oligonucleotide
ugggaguuucugugauucg

SEQ ID NO: 2418310 - RNA, 19 nt, Artificial Sequence
  Description of Artificial Sequence: Synthetic oligonucleotide
cuucagguuccaacggcag

SEQ ID NO: 2418311 - RNA, 19 nt, Artificial Sequence
  Description of Artificial Sequence: Synthetic oligonucleotide
gaugagccaucuuuacaca

SEQ ID NO: 2418312 - RNA, 19 nt, Artificial Sequence
  Description of Artificial Sequence: Synthetic oligonucleotide
aguuagacuccuguccuug

SEQ ID NO: 2418313 - RNA, 19 nt, Artificial Sequence
  Description of Artificial Sequence: Synthetic oligonucleotide
aacugacugagcagcagca

SEQ ID NO: 2418314 - RNA, 19 nt, Artificial Sequence
  Description of Artificial Sequence: Synthetic oligonucleotide
ucucucaacccacgagcug

SEQ ID NO: 2418315 - RNA, 19 nt, Artificial Sequence
  Description of Artificial Sequence: Synthetic oligonucleotide
ggaguagcagacauugucc

SEQ ID NO: 2418316 - RNA, 19 nt, Artificial Sequence
  Description of Artificial Sequence: Synthetic oligonucleotide
aggccggaugaacugacug

SEQ ID NO: 2418317 - RNA, 19 nt, Artificial Sequence
  Description of Artificial Sequence: Synthetic oligonucleotide
ucagguagcgguugaguuu

SEQ ID NO: 2418318 - RNA, 19 nt, Artificial Sequence
  Description of Artificial Sequence: Synthetic oligonucleotide
ucacguggaagguuccagu

SEQ ID NO: 2418319 - RNA, 19 nt, Artificial Sequence
  Description of Artificial Sequence: Synthetic oligonucleotide
cugagagccugcuuauuuc

SEQ ID NO: 2418320 - RNA, 19 nt, Artificial Sequence
  Description of Artificial Sequence: Synthetic oligonucleotide
cucgaugagccaucuuuac

SEQ ID NO: 2418321 - RNA, 19 nt, Artificial Sequence
  Description of Artificial Sequence: Synthetic oligonucleotide
ucuuugaguuagacuccug

SEQ ID NO: 2418322 - RNA, 19 nt, Artificial Sequence
  Description of Artificial Sequence: Synthetic oligonucleotide
guugucuucccuucuugga

SEQ ID NO: 2418323 - RNA, 19 nt, Artificial Sequence
  Description of Artificial Sequence: Synthetic oligonucleotide
gaaugagcuucaaaggucu

SEQ ID NO: 2418324 - RNA, 19 nt, Artificial Sequence
  Description of Artificial Sequence: Synthetic oligonucleotide
cagguagcgguugaguuug

SEQ ID NO: 2418325 - RNA, 19 nt, Artificial Sequence
  Description of Artificial Sequence: Synthetic oligonucleotide
caaugguucuggcgggagg

SEQ ID NO: 2418326 - RNA, 19 nt, Artificial Sequence
  Description of Artificial Sequence: Synthetic oligonucleotide
aagccuuaaccagccgguc

SEQ ID NO: 2418327 - RNA, 19 nt, Artificial Sequence
  Description of Artificial Sequence: Synthetic oligonucleotide
gugcuucagguuccaacgg

SEQ ID NO: 2418328 - RNA, 19 nt, Artificial Sequence
  Description of Artificial Sequence: Synthetic oligonucleotide
agagcugggagcccagcga

SEQ ID NO: 2418329 - RNA, 19 nt, Artificial Sequence
  Description of Artificial Sequence: Synthetic oligonucleotide
uccuagguaaggacccuuc

SEQ ID NO: 2418330 - RNA, 19 nt, Artificial Sequence
  Description of Artificial Sequence: Synthetic oligonucleotide
gcucccauuaaugaaugag

SEQ ID NO: 2418331 - RNA, 19 nt, Artificial Sequence
  Description of Artificial Sequence: Synthetic oligonucleotide
uaguuauauuugugcuuca

SEQ ID NO: 2418332 - RNA, 19 nt, Artificial Sequence
  Description of Artificial Sequence: Synthetic oligonucleotide
agguaaggacccuucugga

SEQ ID NO: 2418333 - RNA, 19 nt, Artificial Sequence
  Description of Artificial Sequence: Synthetic oligonucleotide
ugaggaguggugaccccac

SEQ ID NO: 2418334 - RNA, 19 nt, Artificial Sequence
  Description of Artificial Sequence: Synthetic oligonucleotide
cgaugagccaucuuuacac

SEQ ID NO: 2418335 - RNA, 19 nt, Artificial Sequence
  Description of Artificial Sequence: Synthetic oligonucleotide
uugaggaguggugacccca

SEQ ID NO: 2418336 - RNA, 19 nt, Artificial Sequence
  Description of Artificial Sequence: Synthetic oligonucleotide
ugaggccggaugaacugac

SEQ ID NO: 2418337 - RNA, 19 nt, Artificial Sequence
  Description of Artificial Sequence: Synthetic oligonucleotide
acguggaagguuccaguca

SEQ ID NO: 2418338 - RNA, 19 nt, Artificial Sequence
  Description of Artificial Sequence: Synthetic oligonucleotide
cacguggaagguuccaguc

SEQ ID NO: 2418339 - RNA, 19 nt, Artificial Sequence
  Description of Artificial Sequence: Synthetic oligonucleotide
gaguagcagacauuguccu

SEQ ID NO: 2418340 - RNA, 19 nt, Artificial Sequence
  Description of Artificial Sequence: Synthetic oligonucleotide
ggaauagaccugcucgaug

SEQ ID NO: 2418341 - RNA, 19 nt, Artificial Sequence
  Description of Artificial Sequence: Synthetic oligonucleotide
uuccaacggcagauggggc

SEQ ID NO: 2418342 - RNA, 19 nt, Artificial Sequence
  Description of Artificial Sequence: Synthetic oligonucleotide
auucgaccuucaauuacag

SEQ ID NO: 2418343 - RNA, 19 nt, Artificial Sequence
  Description of Artificial Sequence: Synthetic oligonucleotide
cacuuuguuccaacgguga

SEQ ID NO: 2418344 - RNA, 19 nt, Artificial Sequence
  Description of Artificial Sequence: Synthetic oligonucleotide
uucgaccuucaauuacagu

SEQ ID NO: 2418345 - RNA, 19 nt, Artificial Sequence
  Description of Artificial Sequence: Synthetic oligonucleotide
guccccaugcagugugugg

SEQ ID NO: 2418346 - RNA, 19 nt, Artificial Sequence
  Description of Artificial Sequence: Synthetic oligonucleotide
gaggaaccccugaagcugc

SEQ ID NO: 2418347 - RNA, 19 nt, Artificial Sequence
  Description of Artificial Sequence: Synthetic oligonucleotide
uccucgaucuuucgguguu

SEQ ID NO: 2418348 - RNA, 19 nt, Artificial Sequence
  Description of Artificial Sequence: Synthetic oligonucleotide
caauuacaguugucuuccc

SEQ ID NO: 2418349 - RNA, 19 nt, Artificial Sequence
  Description of Artificial Sequence: Synthetic oligonucleotide
gaggaguggugaccccacg

SEQ ID NO: 2418350 - RNA, 19 nt, Artificial Sequence
  Description of Artificial Sequence: Synthetic oligonucleotide
cuuugaguuagacuccugu

SEQ ID NO: 2418351 - RNA, 19 nt, Artificial Sequence
  Description of Artificial Sequence: Synthetic oligonucleotide
ucucaacccacgagcugga

SEQ ID NO: 2418352 - RNA, 19 nt, Artificial Sequence
  Description of Artificial Sequence: Synthetic oligonucleotide
agcgguugaguuuggguuu

SEQ ID NO: 2418353 - RNA, 19 nt, Artificial Sequence
  Description of Artificial Sequence: Synthetic oligonucleotide
agcacgccuccaugaggcc

SEQ ID NO: 2418354 - RNA, 19 nt, Artificial Sequence
  Description of Artificial Sequence: Synthetic oligonucleotide
auuaaugaaugagcuucaa

SEQ ID NO: 2418355 - RNA, 19 nt, Artificial Sequence
  Description of Artificial Sequence: Synthetic oligonucleotide
aagccguggccugugauuu

SEQ ID NO: 2418356 - RNA, 19 nt, Artificial Sequence
  Description of Artificial Sequence: Synthetic oligonucleotide
auugcggggcagcacgccu

SEQ ID NO: 2418357 - RNA, 19 nt, Artificial Sequence
  Description of Artificial Sequence: Synthetic oligonucleotide
uccaugaggccggaugaac

SEQ ID NO: 2418358 - RNA, 19 nt, Artificial Sequence
  Description of Artificial Sequence: Synthetic oligonucleotide
ggaguggugaccccacggc

SEQ ID NO: 2418359 - RNA, 19 nt, Artificial Sequence
  Description of Artificial Sequence: Synthetic oligonucleotide
accccugaagcugccgccc

SEQ ID NO: 2418360 - RNA, 19 nt, Artificial Sequence
  Description of Artificial Sequence: Synthetic oligonucleotide
cuugaggaguggugacccc

SEQ ID NO: 2418361 - RNA, 19 nt, Artificial Sequence
  Description of Artificial Sequence: Synthetic oligonucleotide
gucacguggaagguuccag

SEQ ID NO: 2418362 - RNA, 19 nt, Artificial Sequence
  Description of Artificial Sequence: Synthetic oligonucleotide
cuuaaccagccggucgcgg

SEQ ID NO: 2418363 - RNA, 19 nt, Artificial Sequence
  Description of Artificial Sequence: Synthetic oligonucleotide
ggguuuauuccuagguaag

SEQ ID NO: 2418364 - RNA, 19 nt, Artificial Sequence
  Description of Artificial Sequence: Synthetic oligonucleotide
gccccagccagucagaaga

SEQ ID NO: 2418365 - RNA, 19 nt, Artificial Sequence
  Description of Artificial Sequence: Synthetic oligonucleotide
acaguugucuucccuucuu

SEQ ID NO: 2418366 - RNA, 19 nt, Artificial Sequence
  Description of Artificial Sequence: Synthetic oligonucleotide
agccugugacauugcgggg

SEQ ID NO: 2418367 - RNA, 19 nt, Artificial Sequence
  Description of Artificial Sequence: Synthetic oligonucleotide
ccucauaguuauauuugug

SEQ ID NO: 2418368 - RNA, 19 nt, Artificial Sequence
  Description of Artificial Sequence: Synthetic oligonucleotide
gacuccuguccuugcacca

SEQ ID NO: 2418369 - RNA, 19 nt, Artificial Sequence
  Description of Artificial Sequence: Synthetic oligonucleotide
cuucuuggaucuccaccac

SEQ ID NO: 2418370 - RNA, 19 nt, Artificial Sequence
  Description of Artificial Sequence: Synthetic oligonucleotide
agccaucuuuacacacucc

SEQ ID NO: 2418371 - RNA, 19 nt, Artificial Sequence
  Description of Artificial Sequence: Synthetic oligonucleotide
cacggccauacccacuuug

SEQ ID NO: 2418372 - RNA, 19 nt, Artificial Sequence
  Description of Artificial Sequence: Synthetic oligonucleotide
gguuccaacggcagauggg

SEQ ID NO: 2418373 - RNA, 19 nt, Artificial Sequence
  Description of Artificial Sequence: Synthetic oligonucleotide
ggggaacagaaaugagucc

SEQ ID NO: 2418374 - RNA, 19 nt, Artificial Sequence
  Description of Artificial Sequence: Synthetic oligonucleotide
cuuggaucuccaccacuuc

SEQ ID NO: 2418375 - RNA, 19 nt, Artificial Sequence
  Description of Artificial Sequence: Synthetic oligonucleotide
agccugcuuauuucauucu

SEQ ID NO: 2418376 - RNA, 19 nt, Artificial Sequence
  Description of Artificial Sequence: Synthetic oligonucleotide
gccuuaaccagccggucgc

SEQ ID NO: 2418377 - RNA, 19 nt, Artificial Sequence
  Description of Artificial Sequence: Synthetic oligonucleotide
ccaugcaguguguggaggg

SEQ ID NO: 2418378 - RNA, 19 nt, Artificial Sequence
  Description of Artificial Sequence: Synthetic oligonucleotide
acauugcggggcagcacgc

SEQ ID NO: 2418379 - RNA, 19 nt, Artificial Sequence
  Description of Artificial Sequence: Synthetic oligonucleotide
cugcgaggaaccccugaag

SEQ ID NO: 2418380 - RNA, 19 nt, Artificial Sequence
  Description of Artificial Sequence: Synthetic oligonucleotide
caccacuucucucaaccca

SEQ ID NO: 2418381 - RNA, 19 nt, Artificial Sequence
  Description of Artificial Sequence: Synthetic oligonucleotide
cggggaacagaaaugaguc

SEQ ID NO: 2418382 - RNA, 19 nt, Artificial Sequence
  Description of Artificial Sequence: Synthetic oligonucleotide
gcuggaagccuuaaccagc

SEQ ID NO: 2418383 - RNA, 19 nt, Artificial Sequence
  Description of Artificial Sequence: Synthetic oligonucleotide
caaaggucuccuggaguag

SEQ ID NO: 2418384 - RNA, 19 nt, Artificial Sequence
  Description of Artificial Sequence: Synthetic oligonucleotide
gaagccuuaaccagccggu

SEQ ID NO: 2418385 - RNA, 19 nt, Artificial Sequence
  Description of Artificial Sequence: Synthetic oligonucleotide
gaccuucaauuacaguugu

SEQ ID NO: 2418386 - RNA, 19 nt, Artificial Sequence
  Description of Artificial Sequence: Synthetic oligonucleotide
ugguucuggcgggaggagc

SEQ ID NO: 2418387 - RNA, 19 nt, Artificial Sequence
  Description of Artificial Sequence: Synthetic oligonucleotide
ugcggggcagcacgccucc

SEQ ID NO: 2418388 - RNA, 19 nt, Artificial Sequence
  Description of Artificial Sequence: Synthetic oligonucleotide
aaccagccggucgcggcgg

SEQ ID NO: 2418389 - RNA, 19 nt, Artificial Sequence
  Description of Artificial Sequence: Synthetic oligonucleotide
cugaucggggaacagaaau

SEQ ID NO: 2418390 - RNA, 19 nt, Artificial Sequence
  Description of Artificial Sequence: Synthetic oligonucleotide
cagcacauccucauaguua

SEQ ID NO: 2418391 - RNA, 19 nt, Artificial Sequence
  Description of Artificial Sequence: Synthetic oligonucleotide
gugauucgaccuucaauua

SEQ ID NO: 2418392 - RNA, 19 nt, Artificial Sequence
  Description of Artificial Sequence: Synthetic oligonucleotide
gccggaugaacugacugag

SEQ ID NO: 2418393 - RNA, 19 nt, Artificial Sequence
  Description of Artificial Sequence: Synthetic oligonucleotide
cgaccuucaauuacaguug

SEQ ID NO: 2418394 - RNA, 19 nt, Artificial Sequence
  Description of Artificial Sequence: Synthetic oligonucleotide
aucggggaacagaaaugag

SEQ ID NO: 2418395 - RNA, 19 nt, Artificial Sequence
  Description of Artificial Sequence: Synthetic oligonucleotide
guagcgguugaguuugggu

SEQ ID NO: 2418396 - RNA, 19 nt, Artificial Sequence
  Description of Artificial Sequence: Synthetic oligonucleotide
gaccccacggccauaccca

SEQ ID NO: 2418397 - RNA, 19 nt, Artificial Sequence
  Description of Artificial Sequence: Synthetic oligonucleotide
ccacuuuguuccaacggug

SEQ ID NO: 2418398 - RNA, 19 nt, Artificial Sequence
  Description of Artificial Sequence: Synthetic oligonucleotide
agugcgucacguggaaggu

SEQ ID NO: 2418399 - RNA, 19 nt, Artificial Sequence
  Description of Artificial Sequence: Synthetic oligonucleotide
ggaguuucugugauucgac

SEQ ID NO: 2418400 - RNA, 19 nt, Artificial Sequence
  Description of Artificial Sequence: Synthetic oligonucleotide
ccuugaggaguggugaccc

SEQ ID NO: 2418401 - RNA, 19 nt, Artificial Sequence
  Description of Artificial Sequence: Synthetic oligonucleotide
gcagcacgccuccaugagg

SEQ ID NO: 2418402 - RNA, 19 nt, Artificial Sequence
  Description of Artificial Sequence: Synthetic oligonucleotide
uugacagagcugggagccc

SEQ ID NO: 2418403 - RNA, 19 nt, Artificial Sequence
  Description of Artificial Sequence: Synthetic oligonucleotide
gaggagccagugcgucacg

SEQ ID NO: 2418404 - RNA, 19 nt, Artificial Sequence
  Description of Artificial Sequence: Synthetic oligonucleotide
cacuccucgaucuuucggu

SEQ ID NO: 2418405 - RNA, 19 nt, Artificial Sequence
  Description of Artificial Sequence: Synthetic oligonucleotide
gguaaggacccuucuggaa

SEQ ID NO: 2418406 - RNA, 19 nt, Artificial Sequence
  Description of Artificial Sequence: Synthetic oligonucleotide
gauccagcuccugccugcc

SEQ ID NO: 2418407 - RNA, 19 nt, Artificial Sequence
  Description of Artificial Sequence: Synthetic oligonucleotide
acccuucuggaagccgugg

SEQ ID NO: 2418408 - RNA, 19 nt, Artificial Sequence
  Description of Artificial Sequence: Synthetic oligonucleotide
augaggccggaugaacuga

SEQ ID NO: 2418409 - RNA, 19 nt, Artificial Sequence
  Description of Artificial Sequence: Synthetic oligonucleotide
gccaucuuuacacacuccu

SEQ ID NO: 2418410 - RNA, 19 nt, Artificial Sequence
  Description of Artificial Sequence: Synthetic oligonucleotide
ugacauugcggggcagcac

SEQ ID NO: 2418411 - RNA, 19 nt, Artificial Sequence
  Description of Artificial Sequence: Synthetic oligonucleotide
gcucccaacacuggcuggg

SEQ ID NO: 2418412 - RNA, 19 nt, Artificial Sequence
  Description of Artificial Sequence: Synthetic oligonucleotide
uugcggggcagcacgccuc

SEQ ID NO: 2418413 - RNA, 19 nt, Artificial Sequence
  Description of Artificial Sequence: Synthetic oligonucleotide
cagauggggcacuggccug

SEQ ID NO: 2418414 - RNA, 19 nt, Artificial Sequence
  Description of Artificial Sequence: Synthetic oligonucleotide
auuugugcuucagguucca

SEQ ID NO: 2418415 - RNA, 19 nt, Artificial Sequence
  Description of Artificial Sequence: Synthetic oligonucleotide
ccaucuuuacacacuccuc

SEQ ID NO: 2418416 - RNA, 19 nt, Artificial Sequence
  Description of Artificial Sequence: Synthetic oligonucleotide
gggaguuucugugauucga

SEQ ID NO: 2418417 - RNA, 19 nt, Artificial Sequence
  Description of Artificial Sequence: Synthetic oligonucleotide
cagggcucccauuaaugaa

SEQ ID NO: 2418418 - RNA, 19 nt, Artificial Sequence
  Description of Artificial Sequence: Synthetic oligonucleotide
cauuguccuugaggagugg

SEQ ID NO: 2418419 - RNA, 19 nt, Artificial Sequence
  Description of Artificial Sequence: Synthetic oligonucleotide
ggcagcacgccuccaugag

SEQ ID NO: 2418420 - RNA, 19 nt, Artificial Sequence
  Description of Artificial Sequence: Synthetic oligonucleotide
agccggucgcggcggggcc

SEQ ID NO: 2418421 - RNA, 19 nt, Artificial Sequence
  Description of Artificial Sequence: Synthetic oligonucleotide
gaguuuggguuuauuccua

SEQ ID NO: 2418422 - RNA, 19 nt, Artificial Sequence
  Description of Artificial Sequence: Synthetic oligonucleotide
acggccauacccacuuugu

SEQ ID NO: 2418423 - RNA, 19 nt, Artificial Sequence
  Description of Artificial Sequence: Synthetic oligonucleotide
aguccccaugcagugugug

SEQ ID NO: 2418424 - RNA, 19 nt, Artificial Sequence
  Description of Artificial Sequence: Synthetic oligonucleotide
aggaaccccugaagcugcc

SEQ ID NO: 2418425 - RNA, 19 nt, Artificial Sequence
  Description of Artificial Sequence: Synthetic oligonucleotide
cagcgagucagguagcggu

SEQ ID NO: 2418426 - RNA, 19 nt, Artificial Sequence
  Description of Artificial Sequence: Synthetic oligonucleotide
gccugugacauugcggggc

SEQ ID NO: 2418427 - RNA, 19 nt, Artificial Sequence
  Description of Artificial Sequence: Synthetic oligonucleotide
gguagcgguugaguuuggg

SEQ ID NO: 2418428 - RNA, 19 nt, Artificial Sequence
  Description of Artificial Sequence: Synthetic oligonucleotide
cacauccucauaguuauau

SEQ ID NO: 2418429 - RNA, 19 nt, Artificial Sequence
  Description of Artificial Sequence: Synthetic oligonucleotide
ggccggaugaacugacuga

SEQ ID NO: 2418430 - RNA, 19 nt, Artificial Sequence
  Description of Artificial Sequence: Synthetic oligonucleotide
uccugccugccgcggcucc

SEQ ID NO: 2418431 - RNA, 19 nt, Artificial Sequence
  Description of Artificial Sequence: Synthetic oligonucleotide
auuugggaauagaccugcu

SEQ ID NO: 2418432 - RNA, 19 nt, Artificial Sequence
  Description of Artificial Sequence: Synthetic oligonucleotide
accugcucgaugagccauc

SEQ ID NO: 2418433 - RNA, 19 nt, Artificial Sequence
  Description of Artificial Sequence: Synthetic oligonucleotide
uuccuagguaaggacccuu

SEQ ID NO: 2418434 - RNA, 19 nt, Artificial Sequence
  Description of Artificial Sequence: Synthetic oligonucleotide
ggagccagugcgucacgug

SEQ ID NO: 2418435 - RNA, 19 nt, Artificial Sequence
  Description of Artificial Sequence: Synthetic oligonucleotide
ggcucccaacacuggcugg

SEQ ID NO: 2418436 - RNA, 19 nt, Artificial Sequence
  Description of Artificial Sequence: Synthetic oligonucleotide
ccaccacuucucucaaccc

SEQ ID NO: 2418437 - RNA, 19 nt, Artificial Sequence
  Description of Artificial Sequence: Synthetic oligonucleotide
augaguccccaugcagugu

SEQ ID NO: 2418438 - RNA, 19 nt, Artificial Sequence
  Description of Artificial Sequence: Synthetic oligonucleotide
ucgaucuuucgguguucuu

SEQ ID NO: 2418439 - RNA, 19 nt, Artificial Sequence
  Description of Artificial Sequence: Synthetic oligonucleotide
cgaucuuucgguguucuuc

SEQ ID NO: 2418440 - RNA, 19 nt, Artificial Sequence
  Description of Artificial Sequence: Synthetic oligonucleotide
aggagccagugcgucacgu

SEQ ID NO: 2418441 - RNA, 19 nt, Artificial Sequence
  Description of Artificial Sequence: Synthetic oligonucleotide
ggcugaucggggaacagaa

SEQ ID NO: 2418442 - RNA, 19 nt, Artificial Sequence
  Description of Artificial Sequence: Synthetic oligonucleotide
ggugaccccacggccauac

SEQ ID NO: 2418443 - RNA, 19 nt, Artificial Sequence
  Description of Artificial Sequence: Synthetic oligonucleotide
agcugccgcccgcagccug

SEQ ID NO: 2418444 - RNA, 19 nt, Artificial Sequence
  Description of Artificial Sequence: Synthetic oligonucleotide
acuccuguccuugcaccaa

SEQ ID NO: 2418445 - RNA, 19 nt, Artificial Sequence
  Description of Artificial Sequence: Synthetic oligonucleotide
gcaaugguucuggcgggag

SEQ ID NO: 2418446 - RNA, 19 nt, Artificial Sequence
  Description of Artificial Sequence: Synthetic oligonucleotide
ggaaccccugaagcugccg

SEQ ID NO: 2418447 - RNA, 19 nt, Artificial Sequence
  Description of Artificial Sequence: Synthetic oligonucleotide
gggcucccauuaaugaaug

SEQ ID NO: 2418448 - RNA, 19 nt, Artificial Sequence
  Description of Artificial Sequence: Synthetic oligonucleotide
cuggcgggaggagccagug

SEQ ID NO: 2418449 - RNA, 19 nt, Artificial Sequence
  Description of Artificial Sequence: Synthetic oligonucleotide
ccggaugaacugacugagc

SEQ ID NO: 2418450 - RNA, 19 nt, Artificial Sequence
  Description of Artificial Sequence: Synthetic oligonucleotide
gaguugccuugggaguuuc

SEQ ID NO: 2418451 - RNA, 19 nt, Artificial Sequence
  Description of Artificial Sequence: Synthetic oligonucleotide
gagcccagcgagucaggua

SEQ ID NO: 2418452 - RNA, 19 nt, Artificial Sequence
  Description of Artificial Sequence: Synthetic oligonucleotide
ccuccaugaggccggauga

SEQ ID NO: 2418453 - RNA, 19 nt, Artificial Sequence
  Description of Artificial Sequence: Synthetic oligonucleotide
caccaagcucagccccagc

SEQ ID NO: 2418454 - RNA, 19 nt, Artificial Sequence
  Description of Artificial Sequence: Synthetic oligonucleotide
cauacccacuuuguuccaa

SEQ ID NO: 2418455 - RNA, 19 nt, Artificial Sequence
  Description of Artificial Sequence: Synthetic oligonucleotide
gccuugggaguuucuguga

SEQ ID NO: 2418456 - RNA, 19 nt, Artificial Sequence
  Description of Artificial Sequence: Synthetic oligonucleotide
uccuugcaccaagcucagc

SEQ ID NO: 2418457 - RNA, 19 nt, Artificial Sequence
  Description of Artificial Sequence: Synthetic oligonucleotide
gaguuagacuccuguccuu

SEQ ID NO: 2418458 - RNA, 19 nt, Artificial Sequence
  Description of Artificial Sequence: Synthetic oligonucleotide
acccacgagcuggaagccu

SEQ ID NO: 2418459 - RNA, 19 nt, Artificial Sequence
  Description of Artificial Sequence: Synthetic oligonucleotide
cagccggucgcggcggggc

SEQ ID NO: 2418460 - RNA, 19 nt, Artificial Sequence
  Description of Artificial Sequence: Synthetic oligonucleotide
gcgaggaaccccugaagcu

SEQ ID NO: 2418461 - RNA, 19 nt, Artificial Sequence
  Description of Artificial Sequence: Synthetic oligonucleotide
ccaacggcagauggggcac

SEQ ID NO: 2418462 - RNA, 19 nt, Artificial Sequence
  Description of Artificial Sequence: Synthetic oligonucleotide
ccuuaaccagccggucgcg

SEQ ID NO: 2418463 - RNA, 19 nt, Artificial Sequence
  Description of Artificial Sequence: Synthetic oligonucleotide
ggcucccauuaaugaauga

SEQ ID NO: 2418464 - RNA, 19 nt, Artificial Sequence
  Description of Artificial Sequence: Synthetic oligonucleotide
gccugugauuugggaauag

SEQ ID NO: 2418465 - RNA, 19 nt, Artificial Sequence
  Description of Artificial Sequence: Synthetic oligonucleotide
cuccucgaucuuucggugu

SEQ ID NO: 2418466 - RNA, 19 nt, Artificial Sequence
  Description of Artificial Sequence: Synthetic oligonucleotide
ccagcgagucagguagcgg

SEQ ID NO: 2418467 - RNA, 19 nt, Artificial Sequence
  Description of Artificial Sequence: Synthetic oligonucleotide
agguagcgguugaguuugg

SEQ ID NO: 2418468 - RNA, 19 nt, Artificial Sequence
  Description of Artificial Sequence: Synthetic oligonucleotide
ccugccgcggcucccaaca

SEQ ID NO: 2418469 - RNA, 19 nt, Artificial Sequence
  Description of Artificial Sequence: Synthetic oligonucleotide
gaccugcucgaugagccau

SEQ ID NO: 2418470 - RNA, 19 nt, Artificial Sequence
  Description of Artificial Sequence: Synthetic oligonucleotide
cucgaucuuucgguguucu

SEQ ID NO: 2418471 - RNA, 19 nt, Artificial Sequence
  Description of Artificial Sequence: Synthetic oligonucleotide
ggggccugcgaggaacccc

SEQ ID NO: 2418472 - RNA, 19 nt, Artificial Sequence
  Description of Artificial Sequence: Synthetic oligonucleotide
cugggcugaucggggaaca

SEQ ID NO: 2418473 - RNA, 19 nt, Artificial Sequence
  Description of Artificial Sequence: Synthetic oligonucleotide
gcucgaugagccaucuuua

SEQ ID NO: 2418474 - RNA, 19 nt, Artificial Sequence
  Description of Artificial Sequence: Synthetic oligonucleotide
guucuggcgggaggagcca

SEQ ID NO: 2418475 - RNA, 19 nt, Artificial Sequence
  Description of Artificial Sequence: Synthetic oligonucleotide
ggcggggccugcgaggaac

SEQ ID NO: 2418476 - RNA, 19 nt, Artificial Sequence
  Description of Artificial Sequence: Synthetic oligonucleotide
gggcugaucggggaacaga

SEQ ID NO: 2418477 - RNA, 19 nt, Artificial Sequence
  Description of Artificial Sequence: Synthetic oligonucleotide
aagcugccgcccgcagccu

SEQ ID NO: 2418478 - RNA, 19 nt, Artificial Sequence
  Description of Artificial Sequence: Synthetic oligonucleotide
ccugugacauugcggggca

SEQ ID NO: 2418479 - RNA, 19 nt, Artificial Sequence
  Description of Artificial Sequence: Synthetic oligonucleotide
cuugggaguuucugugauu

SEQ ID NO: 2418480 - RNA, 19 nt, Artificial Sequence
  Description of Artificial Sequence: Synthetic oligonucleotide
ccaugaggccggaugaacu

SEQ ID NO: 2418481 - RNA, 19 nt, Artificial Sequence
  Description of Artificial Sequence: Synthetic oligonucleotide
cugccgcggcucccaacac

SEQ ID NO: 2418482 - RNA, 19 nt, Artificial Sequence
  Description of Artificial Sequence: Synthetic oligonucleotide
guuccaacggugaccuuuu

SEQ ID NO: 2418483 - RNA, 19 nt, Artificial Sequence
  Description of Artificial Sequence: Synthetic oligonucleotide
ccugcgaggaaccccugaa

SEQ ID NO: 2418484 - RNA, 19 nt, Artificial Sequence
  Description of Artificial Sequence: Synthetic oligonucleotide
uuguuccaacggugaccuu

SEQ ID NO: 2418485 - RNA, 19 nt, Artificial Sequence
  Description of Artificial Sequence: Synthetic oligonucleotide
ccccugaagcugccgcccg

SEQ ID NO: 2418486 - RNA, 19 nt, Artificial Sequence
  Description of Artificial Sequence: Synthetic oligonucleotide
cgcggcucccaacacuggc

SEQ ID NO: 2418487 - RNA, 19 nt, Artificial Sequence
  Description of Artificial Sequence: Synthetic oligonucleotide
cuccaugaggccggaugaa

SEQ ID NO: 2418488 - RNA, 19 nt, Artificial Sequence
  Description of Artificial Sequence: Synthetic oligonucleotide
ggacccuucuggaagccgu

SEQ ID NO: 2418489 - RNA, 19 nt, Artificial Sequence
  Description of Artificial Sequence: Synthetic oligonucleotide
ccguggccugugauuuggg

SEQ ID NO: 2418490 - RNA, 19 nt, Artificial Sequence
  Description of Artificial Sequence: Synthetic oligonucleotide
gguuccagucagagucuuc

SEQ ID NO: 2418491 - RNA, 19 nt, Artificial Sequence
  Description of Artificial Sequence: Synthetic oligonucleotide
ccaacacuggcugggcuga

SEQ ID NO: 2418492 - RNA, 19 nt, Artificial Sequence
  Description of Artificial Sequence: Synthetic oligonucleotide
cacuggccugagggguuag

SEQ ID NO: 2418493 - RNA, 19 nt, Artificial Sequence
  Description of Artificial Sequence: Synthetic oligonucleotide
gccugcuuauuucauucuu

SEQ ID NO: 2418494 - RNA, 19 nt, Artificial Sequence
  Description of Artificial Sequence: Synthetic oligonucleotide
gaggccggaugaacugacu

SEQ ID NO: 2418495 - RNA, 19 nt, Artificial Sequence
  Description of Artificial Sequence: Synthetic oligonucleotide
gccagugcgucacguggaa

SEQ ID NO: 2418496 - RNA, 19 nt, Artificial Sequence
  Description of Artificial Sequence: Synthetic oligonucleotide
ggcugggcugaucggggaa

SEQ ID NO: 2418497 - RNA, 19 nt, Artificial Sequence
  Description of Artificial Sequence: Synthetic oligonucleotide
ccagugcgucacguggaag

SEQ ID NO: 2418498 - RNA, 19 nt, Artificial Sequence
  Description of Artificial Sequence: Synthetic oligonucleotide
cugcagggcucccauuaau

SEQ ID NO: 2418499 - RNA, 19 nt, Artificial Sequence
  Description of Artificial Sequence: Synthetic oligonucleotide
ccuagguaaggacccuucu

SEQ ID NO: 2418500 - RNA, 19 nt, Artificial Sequence
  Description of Artificial Sequence: Synthetic oligonucleotide
gccugcgaggaaccccuga

SEQ ID NO: 2418501 - RNA, 19 nt, Artificial Sequence
  Description of Artificial Sequence: Synthetic oligonucleotide
cccauuaaugaaugagcuu

SEQ ID NO: 2418502 - RNA, 19 nt, Artificial Sequence
  Description of Artificial Sequence: Synthetic oligonucleotide
ccgcccgcagccugacacc

SEQ ID NO: 2418503 - RNA, 19 nt, Artificial Sequence
  Description of Artificial Sequence: Synthetic oligonucleotide
gcgucacguggaagguucc

SEQ ID NO: 2418504 - RNA, 19 nt, Artificial Sequence
  Description of Artificial Sequence: Synthetic oligonucleotide
gggaauagaccugcucgau

SEQ ID NO: 2418505 - RNA, 19 nt, Artificial Sequence
  Description of Artificial Sequence: Synthetic oligonucleotide
gcugaucggggaacagaaa

SEQ ID NO: 2418506 - RNA, 19 nt, Artificial Sequence
  Description of Artificial Sequence: Synthetic oligonucleotide
ccacaggccaggagaucca

SEQ ID NO: 2418507 - RNA, 19 nt, Artificial Sequence
  Description of Artificial Sequence: Synthetic oligonucleotide
ccgcggcucccaacacugg

SEQ ID NO: 2418508 - RNA, 19 nt, Artificial Sequence
  Description of Artificial Sequence: Synthetic oligonucleotide
ccuugggaguuucugugau

SEQ ID NO: 2418509 - RNA, 19 nt, Artificial Sequence
  Description of Artificial Sequence: Synthetic oligonucleotide
cucaacccacgagcuggaa

SEQ ID NO: 2418510 - RNA, 19 nt, Artificial Sequence
  Description of Artificial Sequence: Synthetic oligonucleotide
ccuguccuugcaccaagcu

SEQ ID NO: 2418511 - RNA, 19 nt, Artificial Sequence
  Description of Artificial Sequence: Synthetic oligonucleotide
gggccugcgaggaaccccu

SEQ ID NO: 2418512 - RNA, 19 nt, Artificial Sequence
  Description of Artificial Sequence: Synthetic oligonucleotide
cugccugccgcggcuccca

SEQ ID NO: 2418513 - RNA, 19 nt, Artificial Sequence
  Description of Artificial Sequence: Synthetic oligonucleotide
ggccugugauuugggaaua

SEQ ID NO: 2418514 - RNA, 19 nt, Artificial Sequence
  Description of Artificial Sequence: Synthetic oligonucleotide
cugccgcccgcagccugac

SEQ ID NO: 2418515 - RNA, 19 nt, Artificial Sequence
  Description of Artificial Sequence: Synthetic oligonucleotide
cgguguucuuccaggcaca

SEQ ID NO: 2418516 - RNA, 19 nt, Artificial Sequence
  Description of Artificial Sequence: Synthetic oligonucleotide
gcgguugaguuuggguuua

SEQ ID NO: 2418517 - RNA, 19 nt, Artificial Sequence
  Description of Artificial Sequence: Synthetic oligonucleotide
gguugaguuuggguuuauu

SEQ ID NO: 2418518 - RNA, 19 nt, Artificial Sequence
  Description of Artificial Sequence: Synthetic oligonucleotide
gcccugagggccgccaucu

SEQ ID NO: 2418519 - RNA, 19 nt, Artificial Sequence
  Description of Artificial Sequence: Synthetic oligonucleotide
cccacggccauacccacuu

SEQ ID NO: 2418520 - RNA, 19 nt, Artificial Sequence
  Description of Artificial Sequence: Synthetic oligonucleotide
gccugccgcggcucccaac

SEQ ID NO: 2418521 - RNA, 19 nt, Artificial Sequence
  Description of Artificial Sequence: Synthetic oligonucleotide
gugcgucacguggaagguu

SEQ ID NO: 2418522 - RNA, 19 nt, Artificial Sequence
  Description of Artificial Sequence: Synthetic oligonucleotide
gcccgcagccugacaccag

SEQ ID NO: 2418523 - RNA, 19 nt, Artificial Sequence
  Description of Artificial Sequence: Synthetic oligonucleotide
ccagccggucgcggcgggg

SEQ ID NO: 2418524 - RNA, 19 nt, Artificial Sequence
  Description of Artificial Sequence: Synthetic oligonucleotide
caacggcagauggggcacu

SEQ ID NO: 2418525 - RNA, 19 nt, Artificial Sequence
  Description of Artificial Sequence: Synthetic oligonucleotide
ggccugcgaggaaccccug

SEQ ID NO: 2418526 - RNA, 19 nt, Artificial Sequence
  Description of Artificial Sequence: Synthetic oligonucleotide
gcacauccucauaguuaua

SEQ ID NO: 2418527 - RNA, 19 nt, Artificial Sequence
  Description of Artificial Sequence: Synthetic oligonucleotide
cgucacguggaagguucca

SEQ ID NO: 2418528 - RNA, 19 nt, Artificial Sequence
  Description of Artificial Sequence: Synthetic oligonucleotide
gccugacaccagagcccug

SEQ ID NO: 2418529 - RNA, 19 nt, Artificial Sequence
  Description of Artificial Sequence: Synthetic oligonucleotide
ggcacuggccugagggguu

SEQ ID NO: 2418530 - RNA, 19 nt, Artificial Sequence
  Description of Artificial Sequence: Synthetic oligonucleotide
cugcucgaugagccaucuu

SEQ ID NO: 2418531 - RNA, 19 nt, Artificial Sequence
  Description of Artificial Sequence: Synthetic oligonucleotide
cggccauacccacuuuguu

SEQ ID NO: 2418532 - RNA, 19 nt, Artificial Sequence
  Description of Artificial Sequence: Synthetic oligonucleotide
gccggucgcggcggggccu

SEQ ID NO: 2418533 - RNA, 19 nt, Artificial Sequence
  Description of Artificial Sequence: Synthetic oligonucleotide
ccacggccauacccacuuu

SEQ ID NO: 2418534 - RNA, 19 nt, Artificial Sequence
  Description of Artificial Sequence: Synthetic oligonucleotide
cgguugaguuuggguuuau

SEQ ID NO: 2418535 - RNA, 19 nt, Artificial Sequence
  Description of Artificial Sequence: Synthetic oligonucleotide
cggcggggccugcgaggaa

SEQ ID NO: 2418536 - RNA, 19 nt, Artificial Sequence
  Description of Artificial Sequence: Synthetic oligonucleotide
aaauuucuaaaacacaucc

SEQ ID NO: 2418537 - RNA, 19 nt, Artificial Sequence
  Description of Artificial Sequence: Synthetic oligonucleotide
aauagcuaaauucuucacc

SEQ ID NO: 2418538 - RNA, 19 nt, Artificial Sequence
  Description of Artificial Sequence: Synthetic oligonucleotide
aauuuucuagaguucaugc

SEQ ID NO: 2418539 - RNA, 19 nt, Artificial Sequence
  Description of Artificial Sequence: Synthetic oligonucleotide
aauauccuguuguauaucc

SEQ ID NO: 2418540 - RNA, 19 nt, Artificial Sequence
  Description of Artificial Sequence: Synthetic oligonucleotide
ucauauaagaauaugcugc

SEQ ID NO: 2418541 - RNA, 19 nt, Artificial Sequence
  Description of Artificial Sequence: Synthetic oligonucleotide
uuaacuuacauucuuaaga

SEQ ID NO: 2418542 - RNA, 19 nt, Artificial Sequence
  Description of Artificial Sequence: Synthetic oligonucleotide
uuaauuaccaaccugagua

SEQ ID NO: 2418543 - RNA, 19 nt, Artificial Sequence
  Description of Artificial Sequence: Synthetic oligonucleotide
aaucucuacaaauuaacuc

SEQ ID NO: 2418544 - RNA, 19 nt, Artificial Sequence
  Description of Artificial Sequence: Synthetic oligonucleotide
uaaaucuuaaauuuucuag

SEQ ID NO: 2418545 - RNA, 19 nt, Artificial Sequence
  Description of Artificial Sequence: Synthetic oligonucleotide
agcuuuaagaguuuuagac

SEQ ID NO: 2418546 - RNA, 19 nt, Artificial Sequence
  Description of Artificial Sequence: Synthetic oligonucleotide
caaauuaacucacauaucc

SEQ ID NO: 2418547 - RNA, 19 nt, Artificial Sequence
  Description of Artificial Sequence: Synthetic oligonucleotide
uaucuuaagaacaaugagc

SEQ ID NO: 2418548 - RNA, 19 nt, Artificial Sequence
  Description of Artificial Sequence: Synthetic oligonucleotide
uguucauauaagaauaugc

SEQ ID NO: 2418549 - RNA, 19 nt, Artificial Sequence
  Description of Artificial Sequence: Synthetic oligonucleotide
uaauaagucaacaaugaca

SEQ ID NO: 2418550 - RNA, 19 nt, Artificial Sequence
  Description of Artificial Sequence: Synthetic oligonucleotide
agaacaaugagcuuuaaga

SEQ ID NO: 2418551 - RNA, 19 nt, Artificial Sequence
  Description of Artificial Sequence: Synthetic oligonucleotide
aaauuaucuagcuaauuca

SEQ ID NO: 2418552 - RNA, 19 nt, Artificial Sequence
  Description of Artificial Sequence: Synthetic oligonucleotide
ugaaacucuaguuucagag

SEQ ID NO: 2418553 - RNA, 19 nt, Artificial Sequence
  Description of Artificial Sequence: Synthetic oligonucleotide
ucuaaaacacaucccaagg

SEQ ID NO: 2418554 - RNA, 19 nt, Artificial Sequence
  Description of Artificial Sequence: Synthetic oligonucleotide
aacaaugacaucgagagcu

SEQ ID NO: 2418555 - RNA, 19 nt, Artificial Sequence
  Description of Artificial Sequence: Synthetic oligonucleotide
aaggcauuaauuaccaacc

SEQ ID NO: 2418556 - RNA, 19 nt, Artificial Sequence
  Description of Artificial Sequence: Synthetic oligonucleotide
acaauuuccgaccuuggcc

SEQ ID NO: 2418557 - RNA, 19 nt, Artificial Sequence
  Description of Artificial Sequence: Synthetic oligonucleotide
uaaauuaucuagcuaauuc

SEQ ID NO: 2418558 - RNA, 19 nt, Artificial Sequence
  Description of Artificial Sequence: Synthetic oligonucleotide
aauauuccgaacuccuugg

SEQ ID NO: 2418559 - RNA, 19 nt, Artificial Sequence
  Description of Artificial Sequence: Synthetic oligonucleotide
uucuaauaagucaacaaug

SEQ ID NO: 2418560 - RNA, 19 nt, Artificial Sequence
  Description of Artificial Sequence: Synthetic oligonucleotide
aagaguuacuuguucuugc

SEQ ID NO: 2418561 - RNA, 19 nt, Artificial Sequence
  Description of Artificial Sequence: Synthetic oligonucleotide
ucuaauaagucaacaauga

SEQ ID NO: 2418562 - RNA, 19 nt, Artificial Sequence
  Description of Artificial Sequence: Synthetic oligonucleotide
uuucuuuaucuuaagaaca

SEQ ID NO: 2418563 - RNA, 19 nt, Artificial Sequence
  Description of Artificial Sequence: Synthetic oligonucleotide
uuaucuuaagaacaaugag

SEQ ID NO: 2418564 - RNA, 19 nt, Artificial Sequence
  Description of Artificial Sequence: Synthetic oligonucleotide
aaguuauacagauaaauua

SEQ ID NO: 2418565 - RNA, 19 nt, Artificial Sequence
  Description of Artificial Sequence: Synthetic oligonucleotide
aauaagucaacaaugacau

SEQ ID NO: 2418566 - RNA, 19 nt, Artificial Sequence
  Description of Artificial Sequence: Synthetic oligonucleotide
auuccuaucggcuaucagg

SEQ ID NO: 2418567 - RNA, 19 nt, Artificial Sequence
  Description of Artificial Sequence: Synthetic oligonucleotide
uuauaaaucuuaaauuuuc

SEQ ID NO: 2418568 - RNA, 19 nt, Artificial Sequence
  Description of Artificial Sequence: Synthetic oligonucleotide
auuucuaaaacacauccca

SEQ ID NO: 2418569 - RNA, 19 nt, Artificial Sequence
  Description of Artificial Sequence: Synthetic oligonucleotide
gaguuuuagacuugggugg

SEQ ID NO: 2418570 - RNA, 19 nt, Artificial Sequence
  Description of Artificial Sequence: Synthetic oligonucleotide
agaguuuuagacuugggug

SEQ ID NO: 2418571 - RNA, 19 nt, Artificial Sequence
  Description of Artificial Sequence: Synthetic oligonucleotide
aauuucuaaaacacauccc

SEQ ID NO: 2418572 - RNA, 19 nt, Artificial Sequence
  Description of Artificial Sequence: Synthetic oligonucleotide
uguuauggagagcugauug

SEQ ID NO: 2418573 - RNA, 19 nt, Artificial Sequence
  Description of Artificial Sequence: Synthetic oligonucleotide
aaacucuaguuucagagga

SEQ ID NO: 2418574 - RNA, 19 nt, Artificial Sequence
  Description of Artificial Sequence: Synthetic oligonucleotide
cuuacauucuuaagaaagg

SEQ ID NO: 2418575 - RNA, 19 nt, Artificial Sequence
  Description of Artificial Sequence: Synthetic oligonucleotide
aucucauacccucugaggg

SEQ ID NO: 2418576 - RNA, 19 nt, Artificial Sequence
  Description of Artificial Sequence: Synthetic oligonucleotide
gaaaggucuguauaaauac

SEQ ID NO: 2418577 - RNA, 19 nt, Artificial Sequence
  Description of Artificial Sequence: Synthetic oligonucleotide
aagaguuuuagacuugggu

SEQ ID NO: 2418578 - RNA, 19 nt, Artificial Sequence
  Description of Artificial Sequence: Synthetic oligonucleotide
uguauauccauagugaaaa

SEQ ID NO: 2418579 - RNA, 19 nt, Artificial Sequence
  Description of Artificial Sequence: Synthetic oligonucleotide
aaaggaagccugcaguauc

SEQ ID NO: 2418580 - RNA, 19 nt, Artificial Sequence
  Description of Artificial Sequence: Synthetic oligonucleotide
uauaauagcuaaauucuuc

SEQ ID NO: 2418581 - RNA, 19 nt, Artificial Sequence
  Description of Artificial Sequence: Synthetic oligonucleotide
agucugacaagguccaugc

SEQ ID NO: 2418582 - RNA, 19 nt, Artificial Sequence
  Description of Artificial Sequence: Synthetic oligonucleotide
ucugacaagguccaugccc

SEQ ID NO: 2418583 - RNA, 19 nt, Artificial Sequence
  Description of Artificial Sequence: Synthetic oligonucleotide
aagaauaugcugcaguaaa

SEQ ID NO: 2418584 - RNA, 19 nt, Artificial Sequence
  Description of Artificial Sequence: Synthetic oligonucleotide
uauaaaucuuaaauuuucu

SEQ ID NO: 2418585 - RNA, 19 nt, Artificial Sequence
  Description of Artificial Sequence: Synthetic oligonucleotide
aguaaaaucaaaguccucu

SEQ ID NO: 2418586 - RNA, 19 nt, Artificial Sequence
  Description of Artificial Sequence: Synthetic oligonucleotide
uuaagaaaggucuguauaa

SEQ ID NO: 2418587 - RNA, 19 nt, Artificial Sequence
  Description of Artificial Sequence: Synthetic oligonucleotide
gaaacucuaguuucagagg

SEQ ID NO: 2418588 - RNA, 19 nt, Artificial Sequence
  Description of Artificial Sequence: Synthetic oligonucleotide
caggaaacuguuauaauag

SEQ ID NO: 2418589 - RNA, 19 nt, Artificial Sequence
  Description of Artificial Sequence: Synthetic oligonucleotide
ucgaucuugguuguuaugg

SEQ ID NO: 2418590 - RNA, 19 nt, Artificial Sequence
  Description of Artificial Sequence: Synthetic oligonucleotide
aaacuguuauaauagcuaa

SEQ ID NO: 2418591 - RNA, 19 nt, Artificial Sequence
  Description of Artificial Sequence: Synthetic oligonucleotide
ucuagcuaauucauuaacu

SEQ ID NO: 2418592 - RNA, 19 nt, Artificial Sequence
  Description of Artificial Sequence: Synthetic oligonucleotide
uuaucuagcuaauucauua

SEQ ID NO: 2418593 - RNA, 19 nt, Artificial Sequence
  Description of Artificial Sequence: Synthetic oligonucleotide
ugagcuuuaagaguuuuag

SEQ ID NO: 2418594 - RNA, 19 nt, Artificial Sequence
  Description of Artificial Sequence: Synthetic oligonucleotide
aaggccaagucugacaagg

SEQ ID NO: 2418595 - RNA, 19 nt, Artificial Sequence
  Description of Artificial Sequence: Synthetic oligonucleotide
ugcaguaucugcuuguaug

SEQ ID NO: 2418596 - RNA, 19 nt, Artificial Sequence
  Description of Artificial Sequence: Synthetic oligonucleotide
uaugaggcuaccaaguuau

SEQ ID NO: 2418597 - RNA, 19 nt, Artificial Sequence
  Description of Artificial Sequence: Synthetic oligonucleotide
aggaaacuguuauaauagc

SEQ ID NO: 2418598 - RNA, 19 nt, Artificial Sequence
  Description of Artificial Sequence: Synthetic oligonucleotide
agugaaaaucucuacaaau

SEQ ID NO: 2418599 - RNA, 19 nt, Artificial Sequence
  Description of Artificial Sequence: Synthetic oligonucleotide
aucuagcuaauucauuaac

SEQ ID NO: 2418600 - RNA, 19 nt, Artificial Sequence
  Description of Artificial Sequence: Synthetic oligonucleotide
auuaacuuacauucuuaag

SEQ ID NO: 2418601 - RNA, 19 nt, Artificial Sequence
  Description of Artificial Sequence: Synthetic oligonucleotide
uuaagaguuuuagacuugg

SEQ ID NO: 2418602 - RNA, 19 nt, Artificial Sequence
  Description of Artificial Sequence: Synthetic oligonucleotide
caaggcauuaauuaccaac

SEQ ID NO: 2418603 - RNA, 19 nt, Artificial Sequence
  Description of Artificial Sequence: Synthetic oligonucleotide
uuagacuugggugggaggg

SEQ ID NO: 2418604 - RNA, 19 nt, Artificial Sequence
  Description of Artificial Sequence: Synthetic oligonucleotide
ucggcuaucaggaaacugu

SEQ ID NO: 2418605 - RNA, 19 nt, Artificial Sequence
  Description of Artificial Sequence: Synthetic oligonucleotide
ucuugguuguuauggagag

SEQ ID NO: 2418606 - RNA, 19 nt, Artificial Sequence
  Description of Artificial Sequence: Synthetic oligonucleotide
cuaaaacacaucccaaggc

SEQ ID NO: 2418607 - RNA, 19 nt, Artificial Sequence
  Description of Artificial Sequence: Synthetic oligonucleotide
ucucauguugggauguucc

SEQ ID NO: 2418608 - RNA, 19 nt, Artificial Sequence
  Description of Artificial Sequence: Synthetic oligonucleotide
augagaagugcaugaaagg

SEQ ID NO: 2418609 - RNA, 19 nt, Artificial Sequence
  Description of Artificial Sequence: Synthetic oligonucleotide
auauccauagugaaaaucu

SEQ ID NO: 2418610 - RNA, 19 nt, Artificial Sequence
  Description of Artificial Sequence: Synthetic oligonucleotide
gcugauuggaaauauuccg

SEQ ID NO: 2418611 - RNA, 19 nt, Artificial Sequence
  Description of Artificial Sequence: Synthetic oligonucleotide
ucaggucucaaauauccug

SEQ ID NO: 2418612 - RNA, 19 nt, Artificial Sequence
  Description of Artificial Sequence: Synthetic oligonucleotide
gaucucauacccucugagg

SEQ ID NO: 2418613 - RNA, 19 nt, Artificial Sequence
  Description of Artificial Sequence: Synthetic oligonucleotide
uccuguuguauauccauag

SEQ ID NO: 2418614 - RNA, 19 nt, Artificial Sequence
  Description of Artificial Sequence: Synthetic oligonucleotide
uuccuaucggcuaucagga

SEQ ID NO: 2418615 - RNA, 19 nt, Artificial Sequence
  Description of Artificial Sequence: Synthetic oligonucleotide
cauaguuucucauguuggg

SEQ ID NO: 2418616 - RNA, 19 nt, Artificial Sequence
  Description of Artificial Sequence: Synthetic oligonucleotide
guuauggagagcugauugg

SEQ ID NO: 2418617 - RNA, 19 nt, Artificial Sequence
  Description of Artificial Sequence: Synthetic oligonucleotide
aacucacauauccuuauaa

SEQ ID NO: 2418618 - RNA, 19 nt, Artificial Sequence
  Description of Artificial Sequence: Synthetic oligonucleotide
agaauccaggcuucauucc

SEQ ID NO: 2418619 - RNA, 19 nt, Artificial Sequence
  Description of Artificial Sequence: Synthetic oligonucleotide
agcauaguuucucauguug

SEQ ID NO: 2418620 - RNA, 19 nt, Artificial Sequence
  Description of Artificial Sequence: Synthetic oligonucleotide
ugagaagugcaugaaagga

SEQ ID NO: 2418621 - RNA, 19 nt, Artificial Sequence
  Description of Artificial Sequence: Synthetic oligonucleotide
uugugcuuagcauaguuuc

SEQ ID NO: 2418622 - RNA, 19 nt, Artificial Sequence
  Description of Artificial Sequence: Synthetic oligonucleotide
auugaagccguguucauau

SEQ ID NO: 2418623 - RNA, 19 nt, Artificial Sequence
  Description of Artificial Sequence: Synthetic oligonucleotide
gauggcucaugguuaagag

SEQ ID NO: 2418624 - RNA, 19 nt, Artificial Sequence
  Description of Artificial Sequence: Synthetic oligonucleotide
aguaucugcuuguaugaag

SEQ ID NO: 2418625 - RNA, 19 nt, Artificial Sequence
  Description of Artificial Sequence: Synthetic oligonucleotide
ucccaaggcauuaauuacc

SEQ ID NO: 2418626 - RNA, 19 nt, Artificial Sequence
  Description of Artificial Sequence: Synthetic oligonucleotide
uuuaagaguuuuagacuug

SEQ ID NO: 2418627 - RNA, 19 nt, Artificial Sequence
  Description of Artificial Sequence: Synthetic oligonucleotide
uggcucaugguuaagaguu

SEQ ID NO: 2418628 - RNA, 19 nt, Artificial Sequence
  Description of Artificial Sequence: Synthetic oligonucleotide
cuagaguucaugcuuauga

SEQ ID NO: 2418629 - RNA, 19 nt, Artificial Sequence
  Description of Artificial Sequence: Synthetic oligonucleotide
ucuguauaaauacuuucuu

SEQ ID NO: 2418630 - RNA, 19 nt, Artificial Sequence
  Description of Artificial Sequence: Synthetic oligonucleotide
gaucuugguuguuauggag

SEQ ID NO: 2418631 - RNA, 19 nt, Artificial Sequence
  Description of Artificial Sequence: Synthetic oligonucleotide
uaucaggaaacuguuauaa

SEQ ID NO: 2418632 - RNA, 19 nt, Artificial Sequence
  Description of Artificial Sequence: Synthetic oligonucleotide
aauuaucuagcuaauucau

SEQ ID NO: 2418633 - RNA, 19 nt, Artificial Sequence
  Description of Artificial Sequence: Synthetic oligonucleotide
auuaauuaccaaccugagu

SEQ ID NO: 2418634 - RNA, 19 nt, Artificial Sequence
  Description of Artificial Sequence: Synthetic oligonucleotide
auuccgaacuccuuggacu

SEQ ID NO: 2418635 - RNA, 19 nt, Artificial Sequence
  Description of Artificial Sequence: Synthetic oligonucleotide
auaaaucuuaaauuuucua

SEQ ID NO: 2418636 - RNA, 19 nt, Artificial Sequence
  Description of Artificial Sequence: Synthetic oligonucleotide
uacuuucuuuaucuuaaga

SEQ ID NO: 2418637 - RNA, 19 nt, Artificial Sequence
  Description of Artificial Sequence: Synthetic oligonucleotide
uuauaauagcuaaauucuu

SEQ ID NO: 2418638 - RNA, 19 nt, Artificial Sequence
  Description of Artificial Sequence: Synthetic oligonucleotide
cuaauaagucaacaaugac

SEQ ID NO: 2418639 - RNA, 19 nt, Artificial Sequence
  Description of Artificial Sequence: Synthetic oligonucleotide
ugcuuaugaggcuaccaag

SEQ ID NO: 2418640 - RNA, 19 nt, Artificial Sequence
  Description of Artificial Sequence: Synthetic oligonucleotide
guaucagcucuuucaaagg

SEQ ID NO: 2418641 - RNA, 19 nt, Artificial Sequence
  Description of Artificial Sequence: Synthetic oligonucleotide
uccauagugaaaaucucua

SEQ ID NO: 2418642 - RNA, 19 nt, Artificial Sequence
  Description of Artificial Sequence: Synthetic oligonucleotide
uuaagaacaaugagcuuua

SEQ ID NO: 2418643 - RNA, 19 nt, Artificial Sequence
  Description of Artificial Sequence: Synthetic oligonucleotide
uuggaaauauuccgaacuc

SEQ ID NO: 2418644 - RNA, 19 nt, Artificial Sequence
  Description of Artificial Sequence: Synthetic oligonucleotide
cauuaauuaccaaccugag

SEQ ID NO: 2418645 - RNA, 19 nt, Artificial Sequence
  Description of Artificial Sequence: Synthetic oligonucleotide
uuucuaaaacacaucccaa

SEQ ID NO: 2418646 - RNA, 19 nt, Artificial Sequence
  Description of Artificial Sequence: Synthetic oligonucleotide
cugcaguaaaaucaaaguc

SEQ ID NO: 2418647 - RNA, 19 nt, Artificial Sequence
  Description of Artificial Sequence: Synthetic oligonucleotide
auaagaauaugcugcagua

SEQ ID NO: 2418648 - RNA, 19 nt, Artificial Sequence
  Description of Artificial Sequence: Synthetic oligonucleotide
acuguuauaauagcuaaau

SEQ ID NO: 2418649 - RNA, 19 nt, Artificial Sequence
  Description of Artificial Sequence: Synthetic oligonucleotide
ugauuggaaauauuccgaa

SEQ ID NO: 2418650 - RNA, 19 nt, Artificial Sequence
  Description of Artificial Sequence: Synthetic oligonucleotide
caugguuaagaguuacuug

SEQ ID NO: 2418651 - RNA, 19 nt, Artificial Sequence
  Description of Artificial Sequence: Synthetic oligonucleotide
uuguauauccauagugaaa

SEQ ID NO: 2418652 - RNA, 19 nt, Artificial Sequence
  Description of Artificial Sequence: Synthetic oligonucleotide
cuaucggcuaucaggaaac

SEQ ID NO: 2418653 - RNA, 19 nt, Artificial Sequence
  Description of Artificial Sequence: Synthetic oligonucleotide
aucccaccagccuuugugc

SEQ ID NO: 2418654 - RNA, 19 nt, Artificial Sequence
  Description of Artificial Sequence: Synthetic oligonucleotide
uaagaguuacuuguucuug

SEQ ID NO: 2418655 - RNA, 19 nt, Artificial Sequence
  Description of Artificial Sequence: Synthetic oligonucleotide
ucaaaggccaagucugaca

SEQ ID NO: 2418656 - RNA, 19 nt, Artificial Sequence
  Description of Artificial Sequence: Synthetic oligonucleotide
uaauagcuaaauucuucac

SEQ ID NO: 2418657 - RNA, 19 nt, Artificial Sequence
  Description of Artificial Sequence: Synthetic oligonucleotide
aagccguguucauauaaga

SEQ ID NO: 2418658 - RNA, 19 nt, Artificial Sequence
  Description of Artificial Sequence: Synthetic oligonucleotide
uuaacucacauauccuuau

SEQ ID NO: 2418659 - RNA, 19 nt, Artificial Sequence
  Description of Artificial Sequence: Synthetic oligonucleotide
uggaaauauuccgaacucc

SEQ ID NO: 2418660 - RNA, 19 nt, Artificial Sequence
  Description of Artificial Sequence: Synthetic oligonucleotide
uuuuagacuugggugggag

SEQ ID NO: 2418661 - RNA, 19 nt, Artificial Sequence
  Description of Artificial Sequence: Synthetic oligonucleotide
gaaacuguuauaauagcua

SEQ ID NO: 2418662 - RNA, 19 nt, Artificial Sequence
  Description of Artificial Sequence: Synthetic oligonucleotide
uauccuguuguauauccau

SEQ ID NO: 2418663 - RNA, 19 nt, Artificial Sequence
  Description of Artificial Sequence: Synthetic oligonucleotide
ucccggucgaucuugguug

SEQ ID NO: 2418664 - RNA, 19 nt, Artificial Sequence
  Description of Artificial Sequence: Synthetic oligonucleotide
ucuuaagaaaggucuguau

SEQ ID NO: 2418665 - RNA, 19 nt, Artificial Sequence
  Description of Artificial Sequence: Synthetic oligonucleotide
uauuccgaacuccuuggac

SEQ ID NO: 2418666 - RNA, 19 nt, Artificial Sequence
  Description of Artificial Sequence: Synthetic oligonucleotide
ugaagccguguucauauaa

SEQ ID NO: 2418667 - RNA, 19 nt, Artificial Sequence
  Description of Artificial Sequence: Synthetic oligonucleotide
caugaaaggaagccugcag

SEQ ID NO: 2418668 - RNA, 19 nt, Artificial Sequence
  Description of Artificial Sequence: Synthetic oligonucleotide
uauccuuauaaaucuuaaa

SEQ ID NO: 2418669 - RNA, 19 nt, Artificial Sequence
  Description of Artificial Sequence: Synthetic oligonucleotide
ucugaaacucuaguuucag

SEQ ID NO: 2418670 - RNA, 19 nt, Artificial Sequence
  Description of Artificial Sequence: Synthetic oligonucleotide
uauccauagugaaaaucuc

SEQ ID NO: 2418671 - RNA, 19 nt, Artificial Sequence
  Description of Artificial Sequence: Synthetic oligonucleotide
ugugcuuagcauaguuucu

SEQ ID NO: 2418672 - RNA, 19 nt, Artificial Sequence
  Description of Artificial Sequence: Synthetic oligonucleotide
ucucauacccucugagggc

SEQ ID NO: 2418673 - RNA, 19 nt, Artificial Sequence
  Description of Artificial Sequence: Synthetic oligonucleotide
aucauugaagccguguuca

SEQ ID NO: 2418674 - RNA, 19 nt, Artificial Sequence
  Description of Artificial Sequence: Synthetic oligonucleotide
ugcaugaaaggaagccugc

SEQ ID NO: 2418675 - RNA, 19 nt, Artificial Sequence
  Description of Artificial Sequence: Synthetic oligonucleotide
uuaugaggcuaccaaguua

SEQ ID NO: 2418676 - RNA, 19 nt, Artificial Sequence
  Description of Artificial Sequence: Synthetic oligonucleotide
aaaggucuguauaaauacu

SEQ ID NO: 2418677 - RNA, 19 nt, Artificial Sequence
  Description of Artificial Sequence: Synthetic oligonucleotide
ugaguauucaggucucaaa

SEQ ID NO: 2418678 - RNA, 19 nt, Artificial Sequence
  Description of Artificial Sequence: Synthetic oligonucleotide
ugaaaggaagccugcagua

SEQ ID NO: 2418679 - RNA, 19 nt, Artificial Sequence
  Description of Artificial Sequence: Synthetic oligonucleotide
caauuuccgaccuuggcca

SEQ ID NO: 2418680 - RNA, 19 nt, Artificial Sequence
  Description of Artificial Sequence: Synthetic oligonucleotide
guuguauauccauagugaa

SEQ ID NO: 2418681 - RNA, 19 nt, Artificial Sequence
  Description of Artificial Sequence: Synthetic oligonucleotide
guuacuuguucuugcugag

SEQ ID NO: 2418682 - RNA, 19 nt, Artificial Sequence
  Description of Artificial Sequence: Synthetic oligonucleotide
aguuuuagacuuggguggg

SEQ ID NO: 2418683 - RNA, 19 nt, Artificial Sequence
  Description of Artificial Sequence: Synthetic oligonucleotide
acucacauauccuuauaaa

SEQ ID NO: 2418684 - RNA, 19 nt, Artificial Sequence
  Description of Artificial Sequence: Synthetic oligonucleotide
acaaauuaacucacauauc

SEQ ID NO: 2418685 - RNA, 19 nt, Artificial Sequence
  Description of Artificial Sequence: Synthetic oligonucleotide
aaguccucuuugccauccc

SEQ ID NO: 2418686 - RNA, 19 nt, Artificial Sequence
  Description of Artificial Sequence: Synthetic oligonucleotide
aagucugacaagguccaug

SEQ ID NO: 2418687 - RNA, 19 nt, Artificial Sequence
  Description of Artificial Sequence: Synthetic oligonucleotide
ucaugguuaagaguuacuu

SEQ ID NO: 2418688 - RNA, 19 nt, Artificial Sequence
  Description of Artificial Sequence: Synthetic oligonucleotide
gaagccguguucauauaag

SEQ ID NO: 2418689 - RNA, 19 nt, Artificial Sequence
  Description of Artificial Sequence: Synthetic oligonucleotide
agaguuacuuguucuugcu

SEQ ID NO: 2418690 - RNA, 19 nt, Artificial Sequence
  Description of Artificial Sequence: Synthetic oligonucleotide
ugcuuguaugaagucauca

SEQ ID NO: 2418691 - RNA, 19 nt, Artificial Sequence
  Description of Artificial Sequence: Synthetic oligonucleotide
ccaggcuucauuccuaucg

SEQ ID NO: 2418692 - RNA, 19 nt, Artificial Sequence
  Description of Artificial Sequence: Synthetic oligonucleotide
cacauauccuuauaaaucu

SEQ ID NO: 2418693 - RNA, 19 nt, Artificial Sequence
  Description of Artificial Sequence: Synthetic oligonucleotide
aggcuucauuccuaucggc

SEQ ID NO: 2418694 - RNA, 19 nt, Artificial Sequence
  Description of Artificial Sequence: Synthetic oligonucleotide
aguauucaggucucaaaua

SEQ ID NO: 2418695 - RNA, 19 nt, Artificial Sequence
  Description of Artificial Sequence: Synthetic oligonucleotide
cagaggaucucauacccuc

SEQ ID NO: 2418696 - RNA, 19 nt, Artificial Sequence
  Description of Artificial Sequence: Synthetic oligonucleotide
gaguuacuuguucuugcug

SEQ ID NO: 2418697 - RNA, 19 nt, Artificial Sequence
  Description of Artificial Sequence: Synthetic oligonucleotide
aaaggccaagucugacaag

SEQ ID NO: 2418698 - RNA, 19 nt, Artificial Sequence
  Description of Artificial Sequence: Synthetic oligonucleotide
ugaggcuaccaaguuauac

SEQ ID NO: 2418699 - RNA, 19 nt, Artificial Sequence
  Description of Artificial Sequence: Synthetic oligonucleotide
cuuuaagaguuuuagacuu

SEQ ID NO: 2418700 - RNA, 19 nt, Artificial Sequence
  Description of Artificial Sequence: Synthetic oligonucleotide
uuaccaaccugaguauuca

SEQ ID NO: 2418701 - RNA, 19 nt, Artificial Sequence
  Description of Artificial Sequence: Synthetic oligonucleotide
cacaauuuccgaccuuggc

SEQ ID NO: 2418702 - RNA, 19 nt, Artificial Sequence
  Description of Artificial Sequence: Synthetic oligonucleotide
uccucuuugccaucccacc

SEQ ID NO: 2418703 - RNA, 19 nt, Artificial Sequence
  Description of Artificial Sequence: Synthetic oligonucleotide
uaagaauaugcugcaguaa

SEQ ID NO: 2418704 - RNA, 19 nt, Artificial Sequence
  Description of Artificial Sequence: Synthetic oligonucleotide
gcauuaauuaccaaccuga

SEQ ID NO: 2418705 - RNA, 19 nt, Artificial Sequence
  Description of Artificial Sequence: Synthetic oligonucleotide
caggcuucauuccuaucgg

SEQ ID NO: 2418706 - RNA, 19 nt, Artificial Sequence
  Description of Artificial Sequence: Synthetic oligonucleotide
ucuaguuucagaggaucuc

SEQ ID NO: 2418707 - RNA, 19 nt, Artificial Sequence
  Description of Artificial Sequence: Synthetic oligonucleotide
ugcuuagcauaguuucuca

SEQ ID NO: 2418708 - RNA, 19 nt, Artificial Sequence
  Description of Artificial Sequence: Synthetic oligonucleotide
agucaacaaugacaucgag

SEQ ID NO: 2418709 - RNA, 19 nt, Artificial Sequence
  Description of Artificial Sequence: Synthetic oligonucleotide
gucucaaauauccuguugu

SEQ ID NO: 2418710 - RNA, 19 nt, Artificial Sequence
  Description of Artificial Sequence: Synthetic oligonucleotide
uggagagcugauuggaaau

SEQ ID NO: 2418711 - RNA, 19 nt, Artificial Sequence
  Description of Artificial Sequence: Synthetic oligonucleotide
uucaggucucaaauauccu

SEQ ID NO: 2418712 - RNA, 19 nt, Artificial Sequence
  Description of Artificial Sequence: Synthetic oligonucleotide
augcuuaugaggcuaccaa

SEQ ID NO: 2418713 - RNA, 19 nt, Artificial Sequence
  Description of Artificial Sequence: Synthetic oligonucleotide
ggcauuaauuaccaaccug

SEQ ID NO: 2418714 - RNA, 19 nt, Artificial Sequence
  Description of Artificial Sequence: Synthetic oligonucleotide
aggcaugagaagugcauga

SEQ ID NO: 2418715 - RNA, 19 nt, Artificial Sequence
  Description of Artificial Sequence: Synthetic oligonucleotide
gaggaucucauacccucug

SEQ ID NO: 2418716 - RNA, 19 nt, Artificial Sequence
  Description of Artificial Sequence: Synthetic oligonucleotide
gaguauucaggucucaaau

SEQ ID NO: 2418717 - RNA, 19 nt, Artificial Sequence
  Description of Artificial Sequence: Synthetic oligonucleotide
agaaaggucuguauaaaua

SEQ ID NO: 2418718 - RNA, 19 nt, Artificial Sequence
  Description of Artificial Sequence: Synthetic oligonucleotide
cuuaagaacaaugagcuuu

SEQ ID NO: 2418719 - RNA, 19 nt, Artificial Sequence
  Description of Artificial Sequence: Synthetic oligonucleotide
gagcuuuaagaguuuuaga

SEQ ID NO: 2418720 - RNA, 19 nt, Artificial Sequence
  Description of Artificial Sequence: Synthetic oligonucleotide
aggcauuaauuaccaaccu

SEQ ID NO: 2418721 - RNA, 19 nt, Artificial Sequence
  Description of Artificial Sequence: Synthetic oligonucleotide
aaugagcuuuaagaguuuu

SEQ ID NO: 2418722 - RNA, 19 nt, Artificial Sequence
  Description of Artificial Sequence: Synthetic oligonucleotide
auggcucaugguuaagagu

SEQ ID NO: 2418723 - RNA, 19 nt, Artificial Sequence
  Description of Artificial Sequence: Synthetic oligonucleotide
aaggaagccugcaguaucu

SEQ ID NO: 2418724 - RNA, 19 nt, Artificial Sequence
  Description of Artificial Sequence: Synthetic oligonucleotide
guguucauauaagaauaug

SEQ ID NO: 2418725 - RNA, 19 nt, Artificial Sequence
  Description of Artificial Sequence: Synthetic oligonucleotide
agccaucugaaacucuagu

SEQ ID NO: 2418726 - RNA, 19 nt, Artificial Sequence
  Description of Artificial Sequence: Synthetic oligonucleotide
gagaagugcaugaaaggaa

SEQ ID NO: 2418727 - RNA, 19 nt, Artificial Sequence
  Description of Artificial Sequence: Synthetic oligonucleotide
ucacccuccugccacaauu

SEQ ID NO: 2418728 - RNA, 19 nt, Artificial Sequence
  Description of Artificial Sequence: Synthetic oligonucleotide
gugcaugaaaggaagccug

SEQ ID NO: 2418729 - RNA, 19 nt, Artificial Sequence
  Description of Artificial Sequence: Synthetic oligonucleotide
auaaauuaucuagcuaauu

SEQ ID NO: 2418730 - RNA, 19 nt, Artificial Sequence
  Description of Artificial Sequence: Synthetic oligonucleotide
aucuugguuguuauggaga

SEQ ID NO: 2418731 - RNA, 19 nt, Artificial Sequence
  Description of Artificial Sequence: Synthetic oligonucleotide
uccgaccuuggccauauuu

SEQ ID NO: 2418732 - RNA, 19 nt, Artificial Sequence
  Description of Artificial Sequence: Synthetic oligonucleotide
ccugccacaauuuccgacc

SEQ ID NO: 2418733 - RNA, 19 nt, Artificial Sequence
  Description of Artificial Sequence: Synthetic oligonucleotide
gucaacaaugacaucgaga

SEQ ID NO: 2418734 - RNA, 19 nt, Artificial Sequence
  Description of Artificial Sequence: Synthetic oligonucleotide
ggaucucauacccucugag

SEQ ID NO: 2418735 - RNA, 19 nt, Artificial Sequence
  Description of Artificial Sequence: Synthetic oligonucleotide
aacuguuauaauagcuaaa

SEQ ID NO: 2418736 - RNA, 19 nt, Artificial Sequence
  Description of Artificial Sequence: Synthetic oligonucleotide
uucuuaagaaaggucugua

SEQ ID NO: 2418737 - RNA, 19 nt, Artificial Sequence
  Description of Artificial Sequence: Synthetic oligonucleotide
uaccaaccugaguauucag

SEQ ID NO: 2418738 - RNA, 19 nt, Artificial Sequence
  Description of Artificial Sequence: Synthetic oligonucleotide
ucuagaguucaugcuuaug

SEQ ID NO: 2418739 - RNA, 19 nt, Artificial Sequence
  Description of Artificial Sequence: Synthetic oligonucleotide
auuaacucacauauccuua

SEQ ID NO: 2418740 - RNA, 19 nt, Artificial Sequence
  Description of Artificial Sequence: Synthetic oligonucleotide
uccugccacaauuuccgac

SEQ ID NO: 2418741 - RNA, 19 nt, Artificial Sequence
  Description of Artificial Sequence: Synthetic oligonucleotide
cucacauauccuuauaaau

SEQ ID NO: 2418742 - RNA, 19 nt, Artificial Sequence
  Description of Artificial Sequence: Synthetic oligonucleotide
gccaagucugacaaggucc

SEQ ID NO: 2418743 - RNA, 19 nt, Artificial Sequence
  Description of Artificial Sequence: Synthetic oligonucleotide
ucuuaagaacaaugagcuu

SEQ ID NO: 2418744 - RNA, 19 nt, Artificial Sequence
  Description of Artificial Sequence: Synthetic oligonucleotide
auauuccgaacuccuugga

SEQ ID NO: 2418745 - RNA, 19 nt, Artificial Sequence
  Description of Artificial Sequence: Synthetic oligonucleotide
aacacaucccaaggcauua

SEQ ID NO: 2418746 - RNA, 19 nt, Artificial Sequence
  Description of Artificial Sequence: Synthetic oligonucleotide
gcuaaauucuucacccucc

SEQ ID NO: 2418747 - RNA, 19 nt, Artificial Sequence
  Description of Artificial Sequence: Synthetic oligonucleotide
uagacuugggugggagggg

SEQ ID NO: 2418748 - RNA, 19 nt, Artificial Sequence
  Description of Artificial Sequence: Synthetic oligonucleotide
uaacucacauauccuuaua

SEQ ID NO: 2418749 - RNA, 19 nt, Artificial Sequence
  Description of Artificial Sequence: Synthetic oligonucleotide
uucaaaggccaagucugac

SEQ ID NO: 2418750 - RNA, 19 nt, Artificial Sequence
  Description of Artificial Sequence: Synthetic oligonucleotide
aauuuccgaccuuggccau

SEQ ID NO: 2418751 - RNA, 19 nt, Artificial Sequence
  Description of Artificial Sequence: Synthetic oligonucleotide
uuccgaacuccuuggacuu

SEQ ID NO: 2418752 - RNA, 19 nt, Artificial Sequence
  Description of Artificial Sequence: Synthetic oligonucleotide
uuccccgaagucuccagaa

SEQ ID NO: 2418753 - RNA, 19 nt, Artificial Sequence
  Description of Artificial Sequence: Synthetic oligonucleotide
uucccggucgaucuugguu

SEQ ID NO: 2418754 - RNA, 19 nt, Artificial Sequence
  Description of Artificial Sequence: Synthetic oligonucleotide
aaacacaucccaaggcauu

SEQ ID NO: 2418755 - RNA, 19 nt, Artificial Sequence
  Description of Artificial Sequence: Synthetic oligonucleotide
caaccugaguauucagguc

SEQ ID NO: 2418756 - RNA, 19 nt, Artificial Sequence
  Description of Artificial Sequence: Synthetic oligonucleotide
ugguuguuauggagagcug

SEQ ID NO: 2418757 - RNA, 19 nt, Artificial Sequence
  Description of Artificial Sequence: Synthetic oligonucleotide
cucuuucaaaggccaaguc

SEQ ID NO: 2418758 - RNA, 19 nt, Artificial Sequence
  Description of Artificial Sequence: Synthetic oligonucleotide
aguuucagaggaucucaua

SEQ ID NO: 2418759 - RNA, 19 nt, Artificial Sequence
  Description of Artificial Sequence: Synthetic oligonucleotide
cauuccuaucggcuaucag

SEQ ID NO: 2418760 - RNA, 19 nt, Artificial Sequence
  Description of Artificial Sequence: Synthetic oligonucleotide
ccuuauaaaucuuaaauuu

SEQ ID NO: 2418761 - RNA, 19 nt, Artificial Sequence
  Description of Artificial Sequence: Synthetic oligonucleotide
aggaucucauacccucuga

SEQ ID NO: 2418762 - RNA, 19 nt, Artificial Sequence
  Description of Artificial Sequence: Synthetic oligonucleotide
agucuccagaauccaggcu

SEQ ID NO: 2418763 - RNA, 19 nt, Artificial Sequence
  Description of Artificial Sequence: Synthetic oligonucleotide
agaauaugcugcaguaaaa

SEQ ID NO: 2418764 - RNA, 19 nt, Artificial Sequence
  Description of Artificial Sequence: Synthetic oligonucleotide
gcuuuaagaguuuuagacu

SEQ ID NO: 2418765 - RNA, 19 nt, Artificial Sequence
  Description of Artificial Sequence: Synthetic oligonucleotide
acuuccccgaagucuccag

SEQ ID NO: 2418766 - RNA, 19 nt, Artificial Sequence
  Description of Artificial Sequence: Synthetic oligonucleotide
ucauuccuaucggcuauca

SEQ ID NO: 2418767 - RNA, 19 nt, Artificial Sequence
  Description of Artificial Sequence: Synthetic oligonucleotide
acccucugagggcaccagg

SEQ ID NO: 2418768 - RNA, 19 nt, Artificial Sequence
  Description of Artificial Sequence: Synthetic oligonucleotide
gcuaccaaguuauacagau

SEQ ID NO: 2418769 - RNA, 19 nt, Artificial Sequence
  Description of Artificial Sequence: Synthetic oligonucleotide
uugggauguucccggucga

SEQ ID NO: 2418770 - RNA, 19 nt, Artificial Sequence
  Description of Artificial Sequence: Synthetic oligonucleotide
ccauagugaaaaucucuac

SEQ ID NO: 2418771 - RNA, 19 nt, Artificial Sequence
  Description of Artificial Sequence: Synthetic oligonucleotide
ucaugcuuaugaggcuacc

SEQ ID NO: 2418772 - RNA, 19 nt, Artificial Sequence
  Description of Artificial Sequence: Synthetic oligonucleotide
gucgaucuugguuguuaug

SEQ ID NO: 2418773 - RNA, 19 nt, Artificial Sequence
  Description of Artificial Sequence: Synthetic oligonucleotide
cuugguuguuauggagagc

SEQ ID NO: 2418774 - RNA, 19 nt, Artificial Sequence
  Description of Artificial Sequence: Synthetic oligonucleotide
aacucuaguuucagaggau

SEQ ID NO: 2418775 - RNA, 19 nt, Artificial Sequence
  Description of Artificial Sequence: Synthetic oligonucleotide
caggcaugagaagugcaug

SEQ ID NO: 2418776 - RNA, 19 nt, Artificial Sequence
  Description of Artificial Sequence: Synthetic oligonucleotide
cugaaacucuaguuucaga

SEQ ID NO: 2418777 - RNA, 19 nt, Artificial Sequence
  Description of Artificial Sequence: Synthetic oligonucleotide
gcuaucaggaaacuguuau

SEQ ID NO: 2418778 - RNA, 19 nt, Artificial Sequence
  Description of Artificial Sequence: Synthetic oligonucleotide
aucggcuaucaggaaacug

SEQ ID NO: 2418779 - RNA, 19 nt, Artificial Sequence
  Description of Artificial Sequence: Synthetic oligonucleotide
gugcuuagcauaguuucuc

SEQ ID NO: 2418780 - RNA, 19 nt, Artificial Sequence
  Description of Artificial Sequence: Synthetic oligonucleotide
gccacaauuuccgaccuug

SEQ ID NO: 2418781 - RNA, 19 nt, Artificial Sequence
  Description of Artificial Sequence: Synthetic oligonucleotide
auauccuguuguauaucca

SEQ ID NO: 2418782 - RNA, 19 nt, Artificial Sequence
  Description of Artificial Sequence: Synthetic oligonucleotide
caggucucaaauauccugu

SEQ ID NO: 2418783 - RNA, 19 nt, Artificial Sequence
  Description of Artificial Sequence: Synthetic oligonucleotide
uuuccgaccuuggccauau

SEQ ID NO: 2418784 - RNA, 19 nt, Artificial Sequence
  Description of Artificial Sequence: Synthetic oligonucleotide
cuaucaggaaacuguuaua

SEQ ID NO: 2418785 - RNA, 19 nt, Artificial Sequence
  Description of Artificial Sequence: Synthetic oligonucleotide
uucucauguugggauguuc

SEQ ID NO: 2418786 - RNA, 19 nt, Artificial Sequence
  Description of Artificial Sequence: Synthetic oligonucleotide
uuucugcugcccaguacuu

SEQ ID NO: 2418787 - RNA, 19 nt, Artificial Sequence
  Description of Artificial Sequence: Synthetic oligonucleotide
acagccaucugaaacucua

SEQ ID NO: 2418788 - RNA, 19 nt, Artificial Sequence
  Description of Artificial Sequence: Synthetic oligonucleotide
ggaaacuguuauaauagcu

SEQ ID NO: 2418789 - RNA, 19 nt, Artificial Sequence
  Description of Artificial Sequence: Synthetic oligonucleotide
cucauacccucugagggca

SEQ ID NO: 2418790 - RNA, 19 nt, Artificial Sequence
  Description of Artificial Sequence: Synthetic oligonucleotide
caugcuuaugaggcuacca

SEQ ID NO: 2418791 - RNA, 19 nt, Artificial Sequence
  Description of Artificial Sequence: Synthetic oligonucleotide
gcuguaucagcucuuucaa

SEQ ID NO: 2418792 - RNA, 19 nt, Artificial Sequence
  Description of Artificial Sequence: Synthetic oligonucleotide
uagcauaguuucucauguu

SEQ ID NO: 2418793 - RNA, 19 nt, Artificial Sequence
  Description of Artificial Sequence: Synthetic oligonucleotide
uuguuauggagagcugauu

SEQ ID NO: 2418794 - RNA, 19 nt, Artificial Sequence
  Description of Artificial Sequence: Synthetic oligonucleotide
auccaggcuucauuccuau

SEQ ID NO: 2418795 - RNA, 19 nt, Artificial Sequence
  Description of Artificial Sequence: Synthetic oligonucleotide
aggucucaaauauccuguu

SEQ ID NO: 2418796 - RNA, 19 nt, Artificial Sequence
  Description of Artificial Sequence: Synthetic oligonucleotide
agccguguucauauaagaa

SEQ ID NO: 2418797 - RNA, 19 nt, Artificial Sequence
  Description of Artificial Sequence: Synthetic oligonucleotide
caccaggcaugagaagugc

SEQ ID NO: 2418798 - RNA, 19 nt, Artificial Sequence
  Description of Artificial Sequence: Synthetic oligonucleotide
uccccgaagucuccagaau

SEQ ID NO: 2418799 - RNA, 19 nt, Artificial Sequence
  Description of Artificial Sequence: Synthetic oligonucleotide
gucugacaagguccaugcc

SEQ ID NO: 2418800 - RNA, 19 nt, Artificial Sequence
  Description of Artificial Sequence: Synthetic oligonucleotide
uucauuccuaucggcuauc

SEQ ID NO: 2418801 - RNA, 19 nt, Artificial Sequence
  Description of Artificial Sequence: Synthetic oligonucleotide
cauacccucugagggcacc

SEQ ID NO: 2418802 - RNA, 19 nt, Artificial Sequence
  Description of Artificial Sequence: Synthetic oligonucleotide
agaggaucucauacccucu

SEQ ID NO: 2418803 - RNA, 19 nt, Artificial Sequence
  Description of Artificial Sequence: Synthetic oligonucleotide
ucauacccucugagggcac

SEQ ID NO: 2418804 - RNA, 19 nt, Artificial Sequence
  Description of Artificial Sequence: Synthetic oligonucleotide
cugcuuguaugaagucauc

SEQ ID NO: 2418805 - RNA, 19 nt, Artificial Sequence
  Description of Artificial Sequence: Synthetic oligonucleotide
uaucggcuaucaggaaacu

SEQ ID NO: 2418806 - RNA, 19 nt, Artificial Sequence
  Description of Artificial Sequence: Synthetic oligonucleotide
ccguguucauauaagaaua

SEQ ID NO: 2418807 - RNA, 19 nt, Artificial Sequence
  Description of Artificial Sequence: Synthetic oligonucleotide
uacuuccccgaagucucca

SEQ ID NO: 2418808 - RNA, 19 nt, Artificial Sequence
  Description of Artificial Sequence: Synthetic oligonucleotide
acaucccaaggcauuaauu

SEQ ID NO: 2418809 - RNA, 19 nt, Artificial Sequence
  Description of Artificial Sequence: Synthetic oligonucleotide
uccuaucggcuaucaggaa

SEQ ID NO: 2418810 - RNA, 19 nt, Artificial Sequence
  Description of Artificial Sequence: Synthetic oligonucleotide
ggauguucccggucgaucu

SEQ ID NO: 2418811 - RNA, 19 nt, Artificial Sequence
  Description of Artificial Sequence: Synthetic oligonucleotide
guuucucauguugggaugu

SEQ ID NO: 2418812 - RNA, 19 nt, Artificial Sequence
  Description of Artificial Sequence: Synthetic oligonucleotide
uugaagccguguucauaua

SEQ ID NO: 2418813 - RNA, 19 nt, Artificial Sequence
  Description of Artificial Sequence: Synthetic oligonucleotide
gaaauauuccgaacuccuu

SEQ ID NO: 2418814 - RNA, 19 nt, Artificial Sequence
  Description of Artificial Sequence: Synthetic oligonucleotide
cccaaggcauuaauuacca

SEQ ID NO: 2418815 - RNA, 19 nt, Artificial Sequence
  Description of Artificial Sequence: Synthetic oligonucleotide
gcaugagaagugcaugaaa

SEQ ID NO: 2418816 - RNA, 19 nt, Artificial Sequence
  Description of Artificial Sequence: Synthetic oligonucleotide
gcucaugguuaagaguuac

SEQ ID NO: 2418817 - RNA, 19 nt, Artificial Sequence
  Description of Artificial Sequence: Synthetic oligonucleotide
uacccucugagggcaccag

SEQ ID NO: 2418818 - RNA, 19 nt, Artificial Sequence
  Description of Artificial Sequence: Synthetic oligonucleotide
agagcugauuggaaauauu

SEQ ID NO: 2418819 - RNA, 19 nt, Artificial Sequence
  Description of Artificial Sequence: Synthetic oligonucleotide
gagagcugauuggaaauau

SEQ ID NO: 2418820 - RNA, 19 nt, Artificial Sequence
  Description of Artificial Sequence: Synthetic oligonucleotide
cuuaugaggcuaccaaguu

SEQ ID NO: 2418821 - RNA, 19 nt, Artificial Sequence
  Description of Artificial Sequence: Synthetic oligonucleotide
uccaggcuucauuccuauc

SEQ ID NO: 2418822 - RNA, 19 nt, Artificial Sequence
  Description of Artificial Sequence: Synthetic oligonucleotide
cugcccaguacuuccccga

SEQ ID NO: 2418823 - RNA, 19 nt, Artificial Sequence
  Description of Artificial Sequence: Synthetic oligonucleotide
guuguuauggagagcugau

SEQ ID NO: 2418824 - RNA, 19 nt, Artificial Sequence
  Description of Artificial Sequence: Synthetic oligonucleotide
gucaucauugaagccgugu

SEQ ID NO: 2418825 - RNA, 19 nt, Artificial Sequence
  Description of Artificial Sequence: Synthetic oligonucleotide
cuguuauaauagcuaaauu

SEQ ID NO: 2418826 - RNA, 19 nt, Artificial Sequence
  Description of Artificial Sequence: Synthetic oligonucleotide
cuuccccgaagucuccaga

SEQ ID NO: 2418827 - RNA, 19 nt, Artificial Sequence
  Description of Artificial Sequence: Synthetic oligonucleotide
uuucucauguugggauguu

SEQ ID NO: 2418828 - RNA, 19 nt, Artificial Sequence
  Description of Artificial Sequence: Synthetic oligonucleotide
gcuuaugaggcuaccaagu

SEQ ID NO: 2418829 - RNA, 19 nt, Artificial Sequence
  Description of Artificial Sequence: Synthetic oligonucleotide
accaggcaugagaagugca

SEQ ID NO: 2418830 - RNA, 19 nt, Artificial Sequence
  Description of Artificial Sequence: Synthetic oligonucleotide
guauauccauagugaaaau

SEQ ID NO: 2418831 - RNA, 19 nt, Artificial Sequence
  Description of Artificial Sequence: Synthetic oligonucleotide
cucaugguuaagaguuacu

SEQ ID NO: 2418832 - RNA, 19 nt, Artificial Sequence
  Description of Artificial Sequence: Synthetic oligonucleotide
auacccucugagggcacca

SEQ ID NO: 2418833 - RNA, 19 nt, Artificial Sequence
  Description of Artificial Sequence: Synthetic oligonucleotide
cugaguauucaggucucaa

SEQ ID NO: 2418834 - RNA, 19 nt, Artificial Sequence
  Description of Artificial Sequence: Synthetic oligonucleotide
ccuaucggcuaucaggaaa

SEQ ID NO: 2418835 - RNA, 19 nt, Artificial Sequence
  Description of Artificial Sequence: Synthetic oligonucleotide
guuuuagacuuggguggga

SEQ ID NO: 2418836 - RNA, 19 nt, Artificial Sequence
  Description of Artificial Sequence: Synthetic oligonucleotide
acaaugacaucgagagcuu

SEQ ID NO: 2418837 - RNA, 19 nt, Artificial Sequence
  Description of Artificial Sequence: Synthetic oligonucleotide
ggcaccaggcaugagaagu

SEQ ID NO: 2418838 - RNA, 19 nt, Artificial Sequence
  Description of Artificial Sequence: Synthetic oligonucleotide
guacuuccccgaagucucc

SEQ ID NO: 2418839 - RNA, 19 nt, Artificial Sequence
  Description of Artificial Sequence: Synthetic oligonucleotide
ugggauguucccggucgau

SEQ ID NO: 2418840 - RNA, 19 nt, Artificial Sequence
  Description of Artificial Sequence: Synthetic oligonucleotide
ugggugggaggggcuggag

SEQ ID NO: 2418841 - RNA, 19 nt, Artificial Sequence
  Description of Artificial Sequence: Synthetic oligonucleotide
aggccaagucugacaaggu

SEQ ID NO: 2418842 - RNA, 19 nt, Artificial Sequence
  Description of Artificial Sequence: Synthetic oligonucleotide
guuugguccccagcaccca

SEQ ID NO: 2418843 - RNA, 19 nt, Artificial Sequence
  Description of Artificial Sequence: Synthetic oligonucleotide
ggcuucauuccuaucggcu

SEQ ID NO: 2418844 - RNA, 19 nt, Artificial Sequence
  Description of Artificial Sequence: Synthetic oligonucleotide
ggagagcugauuggaaaua

SEQ ID NO: 2418845 - RNA, 19 nt, Artificial Sequence
  Description of Artificial Sequence: Synthetic oligonucleotide
ggcaugagaagugcaugaa

SEQ ID NO: 2418846 - RNA, 19 nt, Artificial Sequence
  Description of Artificial Sequence: Synthetic oligonucleotide
auuuccgaccuuggccaua

SEQ ID NO: 2418847 - RNA, 19 nt, Artificial Sequence
  Description of Artificial Sequence: Synthetic oligonucleotide
gauguucccggucgaucuu

SEQ ID NO: 2418848 - RNA, 19 nt, Artificial Sequence
  Description of Artificial Sequence: Synthetic oligonucleotide
gggauguucccggucgauc

SEQ ID NO: 2418849 - RNA, 19 nt, Artificial Sequence
  Description of Artificial Sequence: Synthetic oligonucleotide
ggcuaccaaguuauacaga

SEQ ID NO: 2418850 - RNA, 19 nt, Artificial Sequence
  Description of Artificial Sequence: Synthetic oligonucleotide
cuccugccacaauuuccga

SEQ ID NO: 2418851 - RNA, 19 nt, Artificial Sequence
  Description of Artificial Sequence: Synthetic oligonucleotide
uccgaacuccuuggacuuu

SEQ ID NO: 2418852 - RNA, 19 nt, Artificial Sequence
  Description of Artificial Sequence: Synthetic oligonucleotide
ccaguacuuccccgaaguc

SEQ ID NO: 2418853 - RNA, 19 nt, Artificial Sequence
  Description of Artificial Sequence: Synthetic oligonucleotide
gcuuagcauaguuucucau

SEQ ID NO: 2418854 - RNA, 19 nt, Artificial Sequence
  Description of Artificial Sequence: Synthetic oligonucleotide
cugccacaauuuccgaccu

SEQ ID NO: 2418855 - RNA, 19 nt, Artificial Sequence
  Description of Artificial Sequence: Synthetic oligonucleotide
cacaucccaaggcauuaau

SEQ ID NO: 2418856 - RNA, 19 nt, Artificial Sequence
  Description of Artificial Sequence: Synthetic oligonucleotide
ggucgaucuugguuguuau

SEQ ID NO: 2418857 - RNA, 19 nt, Artificial Sequence
  Description of Artificial Sequence: Synthetic oligonucleotide
caccagccuuugugcuuag

SEQ ID NO: 2418858 - RNA, 19 nt, Artificial Sequence
  Description of Artificial Sequence: Synthetic oligonucleotide
cgaucuugguuguuaugga

SEQ ID NO: 2418859 - RNA, 19 nt, Artificial Sequence
  Description of Artificial Sequence: Synthetic oligonucleotide
caaugagcuuuaagaguuu

SEQ ID NO: 2418860 - RNA, 19 nt, Artificial Sequence
  Description of Artificial Sequence: Synthetic oligonucleotide
ccuguuguauauccauagu

SEQ ID NO: 2418861 - RNA, 19 nt, Artificial Sequence
  Description of Artificial Sequence: Synthetic oligonucleotide
ggcuaucaggaaacuguua

SEQ ID NO: 2418862 - RNA, 19 nt, Artificial Sequence
  Description of Artificial Sequence: Synthetic oligonucleotide
augaggcuaccaaguuaua

SEQ ID NO: 2418863 - RNA, 19 nt, Artificial Sequence
  Description of Artificial Sequence: Synthetic oligonucleotide
gacuugggugggaggggcu

SEQ ID NO: 2418864 - RNA, 19 nt, Artificial Sequence
  Description of Artificial Sequence: Synthetic oligonucleotide
ccgaccuuggccauauuuu

SEQ ID NO: 2418865 - RNA, 19 nt, Artificial Sequence
  Description of Artificial Sequence: Synthetic oligonucleotide
cugcaguaucugcuuguau

SEQ ID NO: 2418866 - RNA, 19 nt, Artificial Sequence
  Description of Artificial Sequence: Synthetic oligonucleotide
cuucacccuccugccacaa

SEQ ID NO: 2418867 - RNA, 19 nt, Artificial Sequence
  Description of Artificial Sequence: Synthetic oligonucleotide
cguguucauauaagaauau

SEQ ID NO: 2418868 - RNA, 19 nt, Artificial Sequence
  Description of Artificial Sequence: Synthetic oligonucleotide
ccgaagucuccagaaucca

SEQ ID NO: 2418869 - RNA, 19 nt, Artificial Sequence
  Description of Artificial Sequence: Synthetic oligonucleotide
ccaaggcauuaauuaccaa

SEQ ID NO: 2418870 - RNA, 19 nt, Artificial Sequence
  Description of Artificial Sequence: Synthetic oligonucleotide
cacccuccugccacaauuu

SEQ ID NO: 2418871 - RNA, 19 nt, Artificial Sequence
  Description of Artificial Sequence: Synthetic oligonucleotide
ccagaauccaggcuucauu

SEQ ID NO: 2418872 - RNA, 19 nt, Artificial Sequence
  Description of Artificial Sequence: Synthetic oligonucleotide
uuccgaccuuggccauauu

SEQ ID NO: 2418873 - RNA, 19 nt, Artificial Sequence
  Description of Artificial Sequence: Synthetic oligonucleotide
ggcucaugguuaagaguua

SEQ ID NO: 2418874 - RNA, 19 nt, Artificial Sequence
  Description of Artificial Sequence: Synthetic oligonucleotide
ccugaguauucaggucuca

SEQ ID NO: 2418875 - RNA, 19 nt, Artificial Sequence
  Description of Artificial Sequence: Synthetic oligonucleotide
cggucgaucuugguuguua

SEQ ID NO: 2418876 - RNA, 19 nt, Artificial Sequence
  Description of Artificial Sequence: Synthetic oligonucleotide
cggcuaucaggaaacuguu

SEQ ID NO: 2418877 - RNA, 19 nt, Artificial Sequence
  Description of Artificial Sequence: Synthetic oligonucleotide
cccggucgaucuugguugu

SEQ ID NO: 2418878 - RNA, 19 nt, Artificial Sequence
  Description of Artificial Sequence: Synthetic oligonucleotide
agagauaucacagaaaacc

SEQ ID NO: 2418879 - RNA, 19 nt, Artificial Sequence
  Description of Artificial Sequence: Synthetic oligonucleotide
auaauguugacuuguagcc

SEQ ID NO: 2418880 - RNA, 19 nt, Artificial Sequence
  Description of Artificial Sequence: Synthetic oligonucleotide
aauguugacuuguagcccc

SEQ ID NO: 2418881 - RNA, 19 nt, Artificial Sequence
  Description of Artificial Sequence: Synthetic oligonucleotide
auuauuguaagggugauac

SEQ ID NO: 2418882 - RNA, 19 nt, Artificial Sequence
  Description of Artificial Sequence: Synthetic oligonucleotide
uuugcagucgcuauggagg

SEQ ID NO: 2418883 - RNA, 19 nt, Artificial Sequence
  Description of Artificial Sequence: Synthetic oligonucleotide
uuagucuuaaaguucauac

SEQ ID NO: 2418884 - RNA, 19 nt, Artificial Sequence
  Description of Artificial Sequence: Synthetic oligonucleotide
uccuuuaccuguuucaugg

SEQ ID NO: 2418885 - RNA, 19 nt, Artificial Sequence
  Description of Artificial Sequence: Synthetic oligonucleotide
cuuaaacagacugugaugg

SEQ ID NO: 2418886 - RNA, 19 nt, Artificial Sequence
  Description of Artificial Sequence: Synthetic oligonucleotide
uugaccugaaaauaggucc

SEQ ID NO: 2418887 - RNA, 19 nt, Artificial Sequence
  Description of Artificial Sequence: Synthetic oligonucleotide
ucaguggcagaacugaacg

SEQ ID NO: 2418888 - RNA, 19 nt, Artificial Sequence
  Description of Artificial Sequence: Synthetic oligonucleotide
ucuuuaagagcacauuccc

SEQ ID NO: 2418889 - RNA, 19 nt, Artificial Sequence
  Description of Artificial Sequence: Synthetic oligonucleotide
agucuuaaaguucauacga

SEQ ID NO: 2418890 - RNA, 19 nt, Artificial Sequence
  Description of Artificial Sequence: Synthetic oligonucleotide
uuaaaguucauacgauuca

SEQ ID NO: 2418891 - RNA, 19 nt, Artificial Sequence
  Description of Artificial Sequence: Synthetic oligonucleotide
guagaucucaaacugguag

SEQ ID NO: 2418892 - RNA, 19 nt, Artificial Sequence
  Description of Artificial Sequence: Synthetic oligonucleotide
gaagagauaucacagaaaa

SEQ ID NO: 2418893 - RNA, 19 nt, Artificial Sequence
  Description of Artificial Sequence: Synthetic oligonucleotide
uucuuuaagagcacauucc

SEQ ID NO: 2418894 - RNA, 19 nt, Artificial Sequence
  Description of Artificial Sequence: Synthetic oligonucleotide
ucaaaaucuugucugcgag

SEQ ID NO: 2418895 - RNA, 19 nt, Artificial Sequence
  Description of Artificial Sequence: Synthetic oligonucleotide
ucuuccucgaagaagucag

SEQ ID NO: 2418896 - RNA, 19 nt, Artificial Sequence
  Description of Artificial Sequence: Synthetic oligonucleotide
uuuuggucgcauuauagug

SEQ ID NO: 2418897 - RNA, 19 nt, Artificial Sequence
  Description of Artificial Sequence: Synthetic oligonucleotide
uaagucacggugcucaaag

SEQ ID NO: 2418898 - RNA, 19 nt, Artificial Sequence
  Description of Artificial Sequence: Synthetic oligonucleotide
aaauagguccucuucagaa

SEQ ID NO: 2418899 - RNA, 19 nt, Artificial Sequence
  Description of Artificial Sequence: Synthetic oligonucleotide
accucaucagacaagaggc

SEQ ID NO: 2418900 - RNA, 19 nt, Artificial Sequence
  Description of Artificial Sequence: Synthetic oligonucleotide
uagucuuaaaguucauacg

SEQ ID NO: 2418901 - RNA, 19 nt, Artificial Sequence
  Description of Artificial Sequence: Synthetic oligonucleotide
ugaacgucaguacaguucu

SEQ ID NO: 2418902 - RNA, 19 nt, Artificial Sequence
  Description of Artificial Sequence: Synthetic oligonucleotide
aauagguccucuucagaag

SEQ ID NO: 2418903 - RNA, 19 nt, Artificial Sequence
  Description of Artificial Sequence: Synthetic oligonucleotide
auucgcucuaagucaaucc

SEQ ID NO: 2418904 - RNA, 19 nt, Artificial Sequence
  Description of Artificial Sequence: Synthetic oligonucleotide
cuuaaaguucauacgauuc

SEQ ID NO: 2418905 - RNA, 19 nt, Artificial Sequence
  Description of Artificial Sequence: Synthetic oligonucleotide
aguguacugaguucagccc

SEQ ID NO: 2418906 - RNA, 19 nt, Artificial Sequence
  Description of Artificial Sequence: Synthetic oligonucleotide
agucaaucccaccaaacuc

SEQ ID NO: 2418907 - RNA, 19 nt, Artificial Sequence
  Description of Artificial Sequence: Synthetic oligonucleotide
uguaguggagcucuuugag

SEQ ID NO: 2418908 - RNA, 19 nt, Artificial Sequence
  Description of Artificial Sequence: Synthetic oligonucleotide
cuggucuucccauugaggg

SEQ ID NO: 2418909 - RNA, 19 nt, Artificial Sequence
  Description of Artificial Sequence: Synthetic oligonucleotide
aaguucauacgauucaaaa

SEQ ID NO: 2418910 - RNA, 19 nt, Artificial Sequence
  Description of Artificial Sequence: Synthetic oligonucleotide
auuauagugaucccaggcu

SEQ ID NO: 2418911 - RNA, 19 nt, Artificial Sequence
  Description of Artificial Sequence: Synthetic oligonucleotide
accaaacucaaauuccagg

SEQ ID NO: 2418912 - RNA, 19 nt, Artificial Sequence
  Description of Artificial Sequence: Synthetic oligonucleotide
aguucagcccaaugaagcc

SEQ ID NO: 2418913 - RNA, 19 nt, Artificial Sequence
  Description of Artificial Sequence: Synthetic oligonucleotide
ugacacuuagucuuaaagu

SEQ ID NO: 2418914 - RNA, 19 nt, Artificial Sequence
  Description of Artificial Sequence: Synthetic oligonucleotide
uacuuaaacagacugugau

SEQ ID NO: 2418915 - RNA, 19 nt, Artificial Sequence
  Description of Artificial Sequence: Synthetic oligonucleotide
aagucaaucccaccaaacu

SEQ ID NO: 2418916 - RNA, 19 nt, Artificial Sequence
  Description of Artificial Sequence: Synthetic oligonucleotide
aaaaucuugucugcgaggu

SEQ ID NO: 2418917 - RNA, 19 nt, Artificial Sequence
  Description of Artificial Sequence: Synthetic oligonucleotide
cuuacuuaaacagacugug

SEQ ID NO: 2418918 - RNA, 19 nt, Artificial Sequence
  Description of Artificial Sequence: Synthetic oligonucleotide
uauuguaagggugauacuc

SEQ ID NO: 2418919 - RNA, 19 nt, Artificial Sequence
  Description of Artificial Sequence: Synthetic oligonucleotide
agugcagcgaggcuucugc

SEQ ID NO: 2418920 - RNA, 19 nt, Artificial Sequence
  Description of Artificial Sequence: Synthetic oligonucleotide
aaugaagccuuccgugcgg

SEQ ID NO: 2418921 - RNA, 19 nt, Artificial Sequence
  Description of Artificial Sequence: Synthetic oligonucleotide
cauacgauucaaaaucuug

SEQ ID NO: 2418922 - RNA, 19 nt, Artificial Sequence
  Description of Artificial Sequence: Synthetic oligonucleotide
uuuggucgcauuauaguga

SEQ ID NO: 2418923 - RNA, 19 nt, Artificial Sequence
  Description of Artificial Sequence: Synthetic oligonucleotide
cauuauagugaucccaggc

SEQ ID NO: 2418924 - RNA, 19 nt, Artificial Sequence
  Description of Artificial Sequence: Synthetic oligonucleotide
uucgcucuaagucaauccc

SEQ ID NO: 2418925 - RNA, 19 nt, Artificial Sequence
  Description of Artificial Sequence: Synthetic oligonucleotide
uagucgauaauguugacuu

SEQ ID NO: 2418926 - RNA, 19 nt, Artificial Sequence
  Description of Artificial Sequence: Synthetic oligonucleotide
aagggugauacucacucca

SEQ ID NO: 2418927 - RNA, 19 nt, Artificial Sequence
  Description of Artificial Sequence: Synthetic oligonucleotide
ucucauucgcucuaaguca

SEQ ID NO: 2418928 - RNA, 19 nt, Artificial Sequence
  Description of Artificial Sequence: Synthetic oligonucleotide
agucaggccggucauuugc

SEQ ID NO: 2418929 - RNA, 19 nt, Artificial Sequence
  Description of Artificial Sequence: Synthetic oligonucleotide
uucauacgauucaaaaucu

SEQ ID NO: 2418930 - RNA, 19 nt, Artificial Sequence
  Description of Artificial Sequence: Synthetic oligonucleotide
acugugauggcagagcagg

SEQ ID NO: 2418931 - RNA, 19 nt, Artificial Sequence
  Description of Artificial Sequence: Synthetic oligonucleotide
aagaggcucagcucuuugg

SEQ ID NO: 2418932 - RNA, 19 nt, Artificial Sequence
  Description of Artificial Sequence: Synthetic oligonucleotide
uuauagugaucccaggcuc

SEQ ID NO: 2418933 - RNA, 19 nt, Artificial Sequence
  Description of Artificial Sequence: Synthetic oligonucleotide
aaaauagguccucuucaga

SEQ ID NO: 2418934 - RNA, 19 nt, Artificial Sequence
  Description of Artificial Sequence: Synthetic oligonucleotide
agguaauguagccacagca

SEQ ID NO: 2418935 - RNA, 19 nt, Artificial Sequence
  Description of Artificial Sequence: Synthetic oligonucleotide
gugacacuuagucuuaaag

SEQ ID NO: 2418936 - RNA, 19 nt, Artificial Sequence
  Description of Artificial Sequence: Synthetic oligonucleotide
gguaggaucuccucaaagg

SEQ ID NO: 2418937 - RNA, 19 nt, Artificial Sequence
  Description of Artificial Sequence: Synthetic oligonucleotide
cuggcuuacuuaaacagac

SEQ ID NO: 2418938 - RNA, 19 nt, Artificial Sequence
  Description of Artificial Sequence: Synthetic oligonucleotide
uguacaccucaucagacaa

SEQ ID NO: 2418939 - RNA, 19 nt, Artificial Sequence
  Description of Artificial Sequence: Synthetic oligonucleotide
ugaguucagcccaaugaag

SEQ ID NO: 2418940 - RNA, 19 nt, Artificial Sequence
  Description of Artificial Sequence: Synthetic oligonucleotide
aaucccaucccgcuccaag

SEQ ID NO: 2418941 - RNA, 19 nt, Artificial Sequence
  Description of Artificial Sequence: Synthetic oligonucleotide
ugcaggaugcucuuugcag

SEQ ID NO: 2418942 - RNA, 19 nt, Artificial Sequence
  Description of Artificial Sequence: Synthetic oligonucleotide
guaagggugauacucacuc

SEQ ID NO: 2418943 - RNA, 19 nt, Artificial Sequence
  Description of Artificial Sequence: Synthetic oligonucleotide
gauaucacagaaaaccaca

SEQ ID NO: 2418944 - RNA, 19 nt, Artificial Sequence
  Description of Artificial Sequence: Synthetic oligonucleotide
accuggcuuacuuaaacag

SEQ ID NO: 2418945 - RNA, 19 nt, Artificial Sequence
  Description of Artificial Sequence: Synthetic oligonucleotide
uacaguucuguggaaaugc

SEQ ID NO: 2418946 - RNA, 19 nt, Artificial Sequence
  Description of Artificial Sequence: Synthetic oligonucleotide
cucucauucgcucuaaguc

SEQ ID NO: 2418947 - RNA, 19 nt, Artificial Sequence
  Description of Artificial Sequence: Synthetic oligonucleotide
caguguacugaguucagcc

SEQ ID NO: 2418948 - RNA, 19 nt, Artificial Sequence
  Description of Artificial Sequence: Synthetic oligonucleotide
aguucauacgauucaaaau

SEQ ID NO: 2418949 - RNA, 19 nt, Artificial Sequence
  Description of Artificial Sequence: Synthetic oligonucleotide
cagcacauuauuguaaggg

SEQ ID NO: 2418950 - RNA, 19 nt, Artificial Sequence
  Description of Artificial Sequence: Synthetic oligonucleotide
aaauuccaggauaaugaag

SEQ ID NO: 2418951 - RNA, 19 nt, Artificial Sequence
  Description of Artificial Sequence: Synthetic oligonucleotide
aagagauaucacagaaaac

SEQ ID NO: 2418952 - RNA, 19 nt, Artificial Sequence
  Description of Artificial Sequence: Synthetic oligonucleotide
uaagucaaucccaccaaac

SEQ ID NO: 2418953 - RNA, 19 nt, Artificial Sequence
  Description of Artificial Sequence: Synthetic oligonucleotide
ugcgagguaauguagccac

SEQ ID NO: 2418954 - RNA, 19 nt, Artificial Sequence
  Description of Artificial Sequence: Synthetic oligonucleotide
aaacagacugugauggcag

SEQ ID NO: 2418955 - RNA, 19 nt, Artificial Sequence
  Description of Artificial Sequence: Synthetic oligonucleotide
acgauucaaaaucuugucu

SEQ ID NO: 2418956 - RNA, 19 nt, Artificial Sequence
  Description of Artificial Sequence: Synthetic oligonucleotide
uaaacagacugugauggca

SEQ ID NO: 2418957 - RNA, 19 nt, Artificial Sequence
  Description of Artificial Sequence: Synthetic oligonucleotide
uuacuuaaacagacuguga

SEQ ID NO: 2418958 - RNA, 19 nt, Artificial Sequence
  Description of Artificial Sequence: Synthetic oligonucleotide
aguggcagaacugaacguc

SEQ ID NO: 2418959 - RNA, 19 nt, Artificial Sequence
  Description of Artificial Sequence: Synthetic oligonucleotide
caaaaucuugucugcgagg

SEQ ID NO: 2418960 - RNA, 19 nt, Artificial Sequence
  Description of Artificial Sequence: Synthetic oligonucleotide
ugaccugaaaauagguccu

SEQ ID NO: 2418961 - RNA, 19 nt, Artificial Sequence
  Description of Artificial Sequence: Synthetic oligonucleotide
ucuuaaaguucauacgauu

SEQ ID NO: 2418962 - RNA, 19 nt, Artificial Sequence
  Description of Artificial Sequence: Synthetic oligonucleotide
gaguucagcccaaugaagc

SEQ ID NO: 2418963 - RNA, 19 nt, Artificial Sequence
  Description of Artificial Sequence: Synthetic oligonucleotide
uagaucucaaacugguagu

SEQ ID NO: 2418964 - RNA, 19 nt, Artificial Sequence
  Description of Artificial Sequence: Synthetic oligonucleotide
guaguggagcucuuugagg

SEQ ID NO: 2418965 - RNA, 19 nt, Artificial Sequence
  Description of Artificial Sequence: Synthetic oligonucleotide
uggaggacagcuuuccucu

SEQ ID NO: 2418966 - RNA, 19 nt, Artificial Sequence
  Description of Artificial Sequence: Synthetic oligonucleotide
ucugcgagguaauguagcc

SEQ ID NO: 2418967 - RNA, 19 nt, Artificial Sequence
  Description of Artificial Sequence: Synthetic oligonucleotide
uacgauucaaaaucuuguc

SEQ ID NO: 2418968 - RNA, 19 nt, Artificial Sequence
  Description of Artificial Sequence: Synthetic oligonucleotide
aacugguagucaccuugac

SEQ ID NO: 2418969 - RNA, 19 nt, Artificial Sequence
  Description of Artificial Sequence: Synthetic oligonucleotide
agucacggugcucaaagug

SEQ ID NO: 2418970 - RNA, 19 nt, Artificial Sequence
  Description of Artificial Sequence: Synthetic oligonucleotide
auagguccucuucagaaga

SEQ ID NO: 2418971 - RNA, 19 nt, Artificial Sequence
  Description of Artificial Sequence: Synthetic oligonucleotide
cuugaccugaaaauagguc

SEQ ID NO: 2418972 - RNA, 19 nt, Artificial Sequence
  Description of Artificial Sequence: Synthetic oligonucleotide
uuuugaugggacccauuga

SEQ ID NO: 2418973 - RNA, 19 nt, Artificial Sequence
  Description of Artificial Sequence: Synthetic oligonucleotide
ugguaggaucuccucaaag

SEQ ID NO: 2418974 - RNA, 19 nt, Artificial Sequence
  Description of Artificial Sequence: Synthetic oligonucleotide
gaggguaaggcccuuggac

SEQ ID NO: 2418975 - RNA, 19 nt, Artificial Sequence
  Description of Artificial Sequence: Synthetic oligonucleotide
aaccacaaucccaucccgc

SEQ ID NO: 2418976 - RNA, 19 nt, Artificial Sequence
  Description of Artificial Sequence: Synthetic oligonucleotide
guuucauggcuguagugug

SEQ ID NO: 2418977 - RNA, 19 nt, Artificial Sequence
  Description of Artificial Sequence: Synthetic oligonucleotide
agcucuuuggagaugauga

SEQ ID NO: 2418978 - RNA, 19 nt, Artificial Sequence
  Description of Artificial Sequence: Synthetic oligonucleotide
ggucgcauuauagugaucc

SEQ ID NO: 2418979 - RNA, 19 nt, Artificial Sequence
  Description of Artificial Sequence: Synthetic oligonucleotide
gaugcggugaucuggugca

SEQ ID NO: 2418980 - RNA, 19 nt, Artificial Sequence
  Description of Artificial Sequence: Synthetic oligonucleotide
gaacugaacgucaguacag

SEQ ID NO: 2418981 - RNA, 19 nt, Artificial Sequence
  Description of Artificial Sequence: Synthetic oligonucleotide
guaauguagccacagcaca

SEQ ID NO: 2418982 - RNA, 19 nt, Artificial Sequence
  Description of Artificial Sequence: Synthetic oligonucleotide
uuugagguugguuuucuuu

SEQ ID NO: 2418983 - RNA, 19 nt, Artificial Sequence
  Description of Artificial Sequence: Synthetic oligonucleotide
cugaaaauagguccucuuc

SEQ ID NO: 2418984 - RNA, 19 nt, Artificial Sequence
  Description of Artificial Sequence: Synthetic oligonucleotide
cacauuauuguaaggguga

SEQ ID NO: 2418985 - RNA, 19 nt, Artificial Sequence
  Description of Artificial Sequence: Synthetic oligonucleotide
uacaccucaucagacaaga

SEQ ID NO: 2418986 - RNA, 19 nt, Artificial Sequence
  Description of Artificial Sequence: Synthetic oligonucleotide
uuaaacagacugugauggc

SEQ ID NO: 2418987 - RNA, 19 nt, Artificial Sequence
  Description of Artificial Sequence: Synthetic oligonucleotide
uaauguugacuuguagccc

SEQ ID NO: 2418988 - RNA, 19 nt, Artificial Sequence
  Description of Artificial Sequence: Synthetic oligonucleotide
ugucugcgagguaauguag

SEQ ID NO: 2418989 - RNA, 19 nt, Artificial Sequence
  Description of Artificial Sequence: Synthetic oligonucleotide
auacgauucaaaaucuugu

SEQ ID NO: 2418990 - RNA, 19 nt, Artificial Sequence
  Description of Artificial Sequence: Synthetic oligonucleotide
caaugaagccuuccgugcg

SEQ ID NO: 2418991 - RNA, 19 nt, Artificial Sequence
  Description of Artificial Sequence: Synthetic oligonucleotide
cugaacgucaguacaguuc

SEQ ID NO: 2418992 - RNA, 19 nt, Artificial Sequence
  Description of Artificial Sequence: Synthetic oligonucleotide
cugguagucaccuugaccu

SEQ ID NO: 2418993 - RNA, 19 nt, Artificial Sequence
  Description of Artificial Sequence: Synthetic oligonucleotide
uaauguagccacagcacau

SEQ ID NO: 2418994 - RNA, 19 nt, Artificial Sequence
  Description of Artificial Sequence: Synthetic oligonucleotide
ggcuuacuuaaacagacug

SEQ ID NO: 2418995 - RNA, 19 nt, Artificial Sequence
  Description of Artificial Sequence: Synthetic oligonucleotide
acacuuagucuuaaaguuc

SEQ ID NO: 2418996 - RNA, 19 nt, Artificial Sequence
  Description of Artificial Sequence: Synthetic oligonucleotide
aacucaaauuccaggauaa

SEQ ID NO: 2418997 - RNA, 19 nt, Artificial Sequence
  Description of Artificial Sequence: Synthetic oligonucleotide
ucugguaggaucuccucaa

SEQ ID NO: 2418998 - RNA, 19 nt, Artificial Sequence
  Description of Artificial Sequence: Synthetic oligonucleotide
gagauaucacagaaaacca

SEQ ID NO: 2418999 - RNA, 19 nt, Artificial Sequence
  Description of Artificial Sequence: Synthetic oligonucleotide
uccucgaagaagucaggcc

SEQ ID NO: 2419000 - RNA, 19 nt, Artificial Sequence
  Description of Artificial Sequence: Synthetic oligonucleotide
agccacagcacauuauugu

SEQ ID NO: 2419001 - RNA, 19 nt, Artificial Sequence
  Description of Artificial Sequence: Synthetic oligonucleotide
cacuuagucuuaaaguuca

SEQ ID NO: 2419002 - RNA, 19 nt, Artificial Sequence
  Description of Artificial Sequence: Synthetic oligonucleotide
acagcacauuauuguaagg

SEQ ID NO: 2419003 - RNA, 19 nt, Artificial Sequence
  Description of Artificial Sequence: Synthetic oligonucleotide
agugaucccaggcucugag

SEQ ID NO: 2419004 - RNA, 19 nt, Artificial Sequence
  Description of Artificial Sequence: Synthetic oligonucleotide
aacgucaguacaguucugu

SEQ ID NO: 2419005 - RNA, 19 nt, Artificial Sequence
  Description of Artificial Sequence: Synthetic oligonucleotide
ucccaucccgcuccaagcg

SEQ ID NO: 2419006 - RNA, 19 nt, Artificial Sequence
  Description of Artificial Sequence: Synthetic oligonucleotide
cucuaagucaaucccacca

SEQ ID NO: 2419007 - RNA, 19 nt, Artificial Sequence
  Description of Artificial Sequence: Synthetic oligonucleotide
cacaaucccaucccgcucc

SEQ ID NO: 2419008 - RNA, 19 nt, Artificial Sequence
  Description of Artificial Sequence: Synthetic oligonucleotide
uuguacaccucaucagaca

SEQ ID NO: 2419009 - RNA, 19 nt, Artificial Sequence
  Description of Artificial Sequence: Synthetic oligonucleotide
ucugccaccgcgagggaug

SEQ ID NO: 2419010 - RNA, 19 nt, Artificial Sequence
  Description of Artificial Sequence: Synthetic oligonucleotide
ucacggugcucaaagugca

SEQ ID NO: 2419011 - RNA, 19 nt, Artificial Sequence
  Description of Artificial Sequence: Synthetic oligonucleotide
cucgaagaagucaggccgg

SEQ ID NO: 2419012 - RNA, 19 nt, Artificial Sequence
  Description of Artificial Sequence: Synthetic oligonucleotide
ccucgaagaagucaggccg

SEQ ID NO: 2419013 - RNA, 19 nt, Artificial Sequence
  Description of Artificial Sequence: Synthetic oligonucleotide
cauggcuguagugugacac

SEQ ID NO: 2419014 - RNA, 19 nt, Artificial Sequence
  Description of Artificial Sequence: Synthetic oligonucleotide
uguaagggugauacucacu

SEQ ID NO: 2419015 - RNA, 19 nt, Artificial Sequence
  Description of Artificial Sequence: Synthetic oligonucleotide
uuaccuguuucauggcugu

SEQ ID NO: 2419016 - RNA, 19 nt, Artificial Sequence
  Description of Artificial Sequence: Synthetic oligonucleotide
uagccacagcacauuauug

SEQ ID NO: 2419017 - RNA, 19 nt, Artificial Sequence
  Description of Artificial Sequence: Synthetic oligonucleotide
agacugugauggcagagca

SEQ ID NO: 2419018 - RNA, 19 nt, Artificial Sequence
  Description of Artificial Sequence: Synthetic oligonucleotide
acaguguacugaguucagc

SEQ ID NO: 2419019 - RNA, 19 nt, Artificial Sequence
  Description of Artificial Sequence: Synthetic oligonucleotide
ucgcucuaagucaauccca

SEQ ID NO: 2419020 - RNA, 19 nt, Artificial Sequence
  Description of Artificial Sequence: Synthetic oligonucleotide
gagguugguuuucuuuaag

SEQ ID NO: 2419021 - RNA, 19 nt, Artificial Sequence
  Description of Artificial Sequence: Synthetic oligonucleotide
uaagggugauacucacucc

SEQ ID NO: 2419022 - RNA, 19 nt, Artificial Sequence
  Description of Artificial Sequence: Synthetic oligonucleotide
caggguguagucgauaaug

SEQ ID NO: 2419023 - RNA, 19 nt, Artificial Sequence
  Description of Artificial Sequence: Synthetic oligonucleotide
uugaggguguaguggagcu

SEQ ID NO: 2419024 - RNA, 19 nt, Artificial Sequence
  Description of Artificial Sequence: Synthetic oligonucleotide
auuguaagggugauacuca

SEQ ID NO: 2419025 - RNA, 19 nt, Artificial Sequence
  Description of Artificial Sequence: Synthetic oligonucleotide
uaccuggcuuacuuaaaca

SEQ ID NO: 2419026 - RNA, 19 nt, Artificial Sequence
  Description of Artificial Sequence: Synthetic oligonucleotide
acggugcucaaagugcagc

SEQ ID NO: 2419027 - RNA, 19 nt, Artificial Sequence
  Description of Artificial Sequence: Synthetic oligonucleotide
ucgcauuauagugauccca

SEQ ID NO: 2419028 - RNA, 19 nt, Artificial Sequence
  Description of Artificial Sequence: Synthetic oligonucleotide
gugcucaaagugcagcgag

SEQ ID NO: 2419029 - RNA, 19 nt, Artificial Sequence
  Description of Artificial Sequence: Synthetic oligonucleotide
agucaccuugaccugaaaa

SEQ ID NO: 2419030 - RNA, 19 nt, Artificial Sequence
  Description of Artificial Sequence: Synthetic oligonucleotide
guaccuggcuuacuuaaac

SEQ ID NO: 2419031 - RNA, 19 nt, Artificial Sequence
  Description of Artificial Sequence: Synthetic oligonucleotide
aacugaacgucaguacagu

SEQ ID NO: 2419032 - RNA, 19 nt, Artificial Sequence
  Description of Artificial Sequence: Synthetic oligonucleotide
uuggucgcauuauagugau

SEQ ID NO: 2419033 - RNA, 19 nt, Artificial Sequence
  Description of Artificial Sequence: Synthetic oligonucleotide
gucaaucccaccaaacuca

SEQ ID NO: 2419034 - RNA, 19 nt, Artificial Sequence
  Description of Artificial Sequence: Synthetic oligonucleotide
uuauuguaagggugauacu

SEQ ID NO: 2419035 - RNA, 19 nt, Artificial Sequence
  Description of Artificial Sequence: Synthetic oligonucleotide
aacagacugugauggcaga

SEQ ID NO: 2419036 - RNA, 19 nt, Artificial Sequence
  Description of Artificial Sequence: Synthetic oligonucleotide
ucauacgauucaaaaucuu

SEQ ID NO: 2419037 - RNA, 19 nt, Artificial Sequence
  Description of Artificial Sequence: Synthetic oligonucleotide
cagcuuuccucucauucgc

SEQ ID NO: 2419038 - RNA, 19 nt, Artificial Sequence
  Description of Artificial Sequence: Synthetic oligonucleotide
uggagcucuuugagguugg

SEQ ID NO: 2419039 - RNA, 19 nt, Artificial Sequence
  Description of Artificial Sequence: Synthetic oligonucleotide
uuccucgaagaagucaggc

SEQ ID NO: 2419040 - RNA, 19 nt, Artificial Sequence
  Description of Artificial Sequence: Synthetic oligonucleotide
uggcagaacugaacgucag

SEQ ID NO: 2419041 - RNA, 19 nt, Artificial Sequence
  Description of Artificial Sequence: Synthetic oligonucleotide
uguacugaguucagcccaa

SEQ ID NO: 2419042 - RNA, 19 nt, Artificial Sequence
  Description of Artificial Sequence: Synthetic oligonucleotide
cuauggaggacagcuuucc

SEQ ID NO: 2419043 - RNA, 19 nt, Artificial Sequence
  Description of Artificial Sequence: Synthetic oligonucleotide
aaaguucauacgauucaaa

SEQ ID NO: 2419044 - RNA, 19 nt, Artificial Sequence
  Description of Artificial Sequence: Synthetic oligonucleotide
ugagguugguuuucuuuaa

SEQ ID NO: 2419045 - RNA, 19 nt, Artificial Sequence
  Description of Artificial Sequence: Synthetic oligonucleotide
gcuguagugugacacuuag

SEQ ID NO: 2419046 - RNA, 19 nt, Artificial Sequence
  Description of Artificial Sequence: Synthetic oligonucleotide
uugcagucgcuauggagga

SEQ ID NO: 2419047 - RNA, 19 nt, Artificial Sequence
  Description of Artificial Sequence: Synthetic oligonucleotide
gagcuggucuuccucgaag

SEQ ID NO: 2419048 - RNA, 19 nt, Artificial Sequence
  Description of Artificial Sequence: Synthetic oligonucleotide
guguacugaguucagccca

SEQ ID NO: 2419049 - RNA, 19 nt, Artificial Sequence
  Description of Artificial Sequence: Synthetic oligonucleotide
aauguagccacagcacauu

SEQ ID NO: 2419050 - RNA, 19 nt, Artificial Sequence
  Description of Artificial Sequence: Synthetic oligonucleotide
gacaggguguagucgauaa

SEQ ID NO: 2419051 - RNA, 19 nt, Artificial Sequence
  Description of Artificial Sequence: Synthetic oligonucleotide
ucgauaauguugacuugua

SEQ ID NO: 2419052 - RNA, 19 nt, Artificial Sequence
  Description of Artificial Sequence: Synthetic oligonucleotide
aagccuuccgugcgguugu

SEQ ID NO: 2419053 - RNA, 19 nt, Artificial Sequence
  Description of Artificial Sequence: Synthetic oligonucleotide
augaucucugguaggaucu

SEQ ID NO: 2419054 - RNA, 19 nt, Artificial Sequence
  Description of Artificial Sequence: Synthetic oligonucleotide
gguuguacaccucaucaga

SEQ ID NO: 2419055 - RNA, 19 nt, Artificial Sequence
  Description of Artificial Sequence: Synthetic oligonucleotide
gcucugagcagcaagggag

SEQ ID NO: 2419056 - RNA, 19 nt, Artificial Sequence
  Description of Artificial Sequence: Synthetic oligonucleotide
gguguaguggagcucuuug

SEQ ID NO: 2419057 - RNA, 19 nt, Artificial Sequence
  Description of Artificial Sequence: Synthetic oligonucleotide
guaggaucuccucaaaggu

SEQ ID NO: 2419058 - RNA, 19 nt, Artificial Sequence
  Description of Artificial Sequence: Synthetic oligonucleotide
cccaccaaacucaaauucc

SEQ ID NO: 2419059 - RNA, 19 nt, Artificial Sequence
  Description of Artificial Sequence: Synthetic oligonucleotide
uggcuuacuuaaacagacu

SEQ ID NO: 2419060 - RNA, 19 nt, Artificial Sequence
  Description of Artificial Sequence: Synthetic oligonucleotide
acgucaguacaguucugug

SEQ ID NO: 2419061 - RNA, 19 nt, Artificial Sequence
  Description of Artificial Sequence: Synthetic oligonucleotide
cuuccucgaagaagucagg

SEQ ID NO: 2419062 - RNA, 19 nt, Artificial Sequence
  Description of Artificial Sequence: Synthetic oligonucleotide
uuuccucucauucgcucua

SEQ ID NO: 2419063 - RNA, 19 nt, Artificial Sequence
  Description of Artificial Sequence: Synthetic oligonucleotide
cagacaagaggcucagcuc

SEQ ID NO: 2419064 - RNA, 19 nt, Artificial Sequence
  Description of Artificial Sequence: Synthetic oligonucleotide
cccaguguaagucacggug

SEQ ID NO: 2419065 - RNA, 19 nt, Artificial Sequence
  Description of Artificial Sequence: Synthetic oligonucleotide
ugcucuuugcagucgcuau

SEQ ID NO: 2419066 - RNA, 19 nt, Artificial Sequence
  Description of Artificial Sequence: Synthetic oligonucleotide
aagucaggccggucauuug

SEQ ID NO: 2419067 - RNA, 19 nt, Artificial Sequence
  Description of Artificial Sequence: Synthetic oligonucleotide
ucuccuuuaccuguuucau

SEQ ID NO: 2419068 - RNA, 19 nt, Artificial Sequence
  Description of Artificial Sequence: Synthetic oligonucleotide
aggauaaugaagagcuggu

SEQ ID NO: 2419069 - RNA, 19 nt, Artificial Sequence
  Description of Artificial Sequence: Synthetic oligonucleotide
uggucuucccauugagggu

SEQ ID NO: 2419070 - RNA, 19 nt, Artificial Sequence
  Description of Artificial Sequence: Synthetic oligonucleotide
cucuuuggagaugaugauc

SEQ ID NO: 2419071 - RNA, 19 nt, Artificial Sequence
  Description of Artificial Sequence: Synthetic oligonucleotide
ugugacacuuagucuuaaa

SEQ ID NO: 2419072 - RNA, 19 nt, Artificial Sequence
  Description of Artificial Sequence: Synthetic oligonucleotide
ugagccuguagaucucaaa

SEQ ID NO: 2419073 - RNA, 19 nt, Artificial Sequence
  Description of Artificial Sequence: Synthetic oligonucleotide
uacucacuccagcaguuuu

SEQ ID NO: 2419074 - RNA, 19 nt, Artificial Sequence
  Description of Artificial Sequence: Synthetic oligonucleotide
cuccuuuaccuguuucaug

SEQ ID NO: 2419075 - RNA, 19 nt, Artificial Sequence
  Description of Artificial Sequence: Synthetic oligonucleotide
aggucaguggcagaacuga

SEQ ID NO: 2419076 - RNA, 19 nt, Artificial Sequence
  Description of Artificial Sequence: Synthetic oligonucleotide
ucuuugcagucgcuaugga

SEQ ID NO: 2419077 - RNA, 19 nt, Artificial Sequence
  Description of Artificial Sequence: Synthetic oligonucleotide
uguagucgauaauguugac

SEQ ID NO: 2419078 - RNA, 19 nt, Artificial Sequence
  Description of Artificial Sequence: Synthetic oligonucleotide
gcauuauagugaucccagg

SEQ ID NO: 2419079 - RNA, 19 nt, Artificial Sequence
  Description of Artificial Sequence: Synthetic oligonucleotide
gucgcauuauagugauccc

SEQ ID NO: 2419080 - RNA, 19 nt, Artificial Sequence
  Description of Artificial Sequence: Synthetic oligonucleotide
ggaugcggugaucuggugc

SEQ ID NO: 2419081 - RNA, 19 nt, Artificial Sequence
  Description of Artificial Sequence: Synthetic oligonucleotide
cuguuucauggcuguagug

SEQ ID NO: 2419082 - RNA, 19 nt, Artificial Sequence
  Description of Artificial Sequence: Synthetic oligonucleotide
ugcgguuguacaccucauc

SEQ ID NO: 2419083 - RNA, 19 nt, Artificial Sequence
  Description of Artificial Sequence: Synthetic oligonucleotide
agaagagauaucacagaaa

SEQ ID NO: 2419084 - RNA, 19 nt, Artificial Sequence
  Description of Artificial Sequence: Synthetic oligonucleotide
auggcuguagugugacacu

SEQ ID NO: 2419085 - RNA, 19 nt, Artificial Sequence
  Description of Artificial Sequence: Synthetic oligonucleotide
ugguagucaccuugaccug

SEQ ID NO: 2419086 - RNA, 19 nt, Artificial Sequence
  Description of Artificial Sequence: Synthetic oligonucleotide
uuccgugcgguuguacacc

SEQ ID NO: 2419087 - RNA, 19 nt, Artificial Sequence
  Description of Artificial Sequence: Synthetic oligonucleotide
aaaucuugucugcgaggua

SEQ ID NO: 2419088 - RNA, 19 nt, Artificial Sequence
  Description of Artificial Sequence: Synthetic oligonucleotide
gucugcgagguaauguagc

SEQ ID NO: 2419089 - RNA, 19 nt, Artificial Sequence
  Description of Artificial Sequence: Synthetic oligonucleotide
caggaugcucuuugcaguc

SEQ ID NO: 2419090 - RNA, 19 nt, Artificial Sequence
  Description of Artificial Sequence: Synthetic oligonucleotide
guacaguucuguggaaaug

SEQ ID NO: 2419091 - RNA, 19 nt, Artificial Sequence
  Description of Artificial Sequence: Synthetic oligonucleotide
ugcggugaucuggugcagg

SEQ ID NO: 2419092 - RNA, 19 nt, Artificial Sequence
  Description of Artificial Sequence: Synthetic oligonucleotide
acugaacgucaguacaguu

SEQ ID NO: 2419093 - RNA, 19 nt, Artificial Sequence
  Description of Artificial Sequence: Synthetic oligonucleotide
guguaguggagcucuuuga

SEQ ID NO: 2419094 - RNA, 19 nt, Artificial Sequence
  Description of Artificial Sequence: Synthetic oligonucleotide
gucgcuauggaggacagcu

SEQ ID NO: 2419095 - RNA, 19 nt, Artificial Sequence
  Description of Artificial Sequence: Synthetic oligonucleotide
cucauucgcucuaagucaa

SEQ ID NO: 2419096 - RNA, 19 nt, Artificial Sequence
  Description of Artificial Sequence: Synthetic oligonucleotide
guagugugacacuuagucu

SEQ ID NO: 2419097 - RNA, 19 nt, Artificial Sequence
  Description of Artificial Sequence: Synthetic oligonucleotide
cgcauuauagugaucccag

SEQ ID NO: 2419098 - RNA, 19 nt, Artificial Sequence
  Description of Artificial Sequence: Synthetic oligonucleotide
uguaagucacggugcucaa

SEQ ID NO: 2419099 - RNA, 19 nt, Artificial Sequence
  Description of Artificial Sequence: Synthetic oligonucleotide
ucuugucugcgagguaaug

SEQ ID NO: 2419100 - RNA, 19 nt, Artificial Sequence
  Description of Artificial Sequence: Synthetic oligonucleotide
auagugaucccaggcucug

SEQ ID NO: 2419101 - RNA, 19 nt, Artificial Sequence
  Description of Artificial Sequence: Synthetic oligonucleotide
cgucaguacaguucugugg

SEQ ID NO: 2419102 - RNA, 19 nt, Artificial Sequence
  Description of Artificial Sequence: Synthetic oligonucleotide
cauucgcucuaagucaauc

SEQ ID NO: 2419103 - RNA, 19 nt, Artificial Sequence
  Description of Artificial Sequence: Synthetic oligonucleotide
gucgauaauguugacuugu

SEQ ID NO: 2419104 - RNA, 19 nt, Artificial Sequence
  Description of Artificial Sequence: Synthetic oligonucleotide
gcgguuguacaccucauca

SEQ ID NO: 2419105 - RNA, 19 nt, Artificial Sequence
  Description of Artificial Sequence: Synthetic oligonucleotide
aucccaccaaacucaaauu

SEQ ID NO: 2419106 - RNA, 19 nt, Artificial Sequence
  Description of Artificial Sequence: Synthetic oligonucleotide
aggccggucauuugcagua

SEQ ID NO: 2419107 - RNA, 19 nt, Artificial Sequence
  Description of Artificial Sequence: Synthetic oligonucleotide
cuaagucaaucccaccaaa

SEQ ID NO: 2419108 - RNA, 19 nt, Artificial Sequence
  Description of Artificial Sequence: Synthetic oligonucleotide
ucaguacaguucuguggaa

SEQ ID NO: 2419109 - RNA, 19 nt, Artificial Sequence
  Description of Artificial Sequence: Synthetic oligonucleotide
aucagacaagaggcucagc

SEQ ID NO: 2419110 - RNA, 19 nt, Artificial Sequence
  Description of Artificial Sequence: Synthetic oligonucleotide
ucccgcuccaagcgggaca

SEQ ID NO: 2419111 - RNA, 19 nt, Artificial Sequence
  Description of Artificial Sequence: Synthetic oligonucleotide
acauuauuguaagggugau

SEQ ID NO: 2419112 - RNA, 19 nt, Artificial Sequence
  Description of Artificial Sequence: Synthetic oligonucleotide
aagcgggacaggguguagu

SEQ ID NO: 2419113 - RNA, 19 nt, Artificial Sequence
  Description of Artificial Sequence: Synthetic oligonucleotide
uccuuccucaugagccugu

SEQ ID NO: 2419114 - RNA, 19 nt, Artificial Sequence
  Description of Artificial Sequence: Synthetic oligonucleotide
guacaccucaucagacaag

SEQ ID NO: 2419115 - RNA, 19 nt, Artificial Sequence
  Description of Artificial Sequence: Synthetic oligonucleotide
cuucccauugaggguguag

SEQ ID NO: 2419116 - RNA, 19 nt, Artificial Sequence
  Description of Artificial Sequence: Synthetic oligonucleotide
aggcucugagcagcaaggg

SEQ ID NO: 2419117 - RNA, 19 nt, Artificial Sequence
  Description of Artificial Sequence: Synthetic oligonucleotide
cuuccucaugagccuguag

SEQ ID NO: 2419118 - RNA, 19 nt, Artificial Sequence
  Description of Artificial Sequence: Synthetic oligonucleotide
gggugauacucacuccagc

SEQ ID NO: 2419119 - RNA, 19 nt, Artificial Sequence
  Description of Artificial Sequence: Synthetic oligonucleotide
acaguucuguggaaaugcu

SEQ ID NO: 2419120 - RNA, 19 nt, Artificial Sequence
  Description of Artificial Sequence: Synthetic oligonucleotide
guagccacagcacauuauu

SEQ ID NO: 2419121 - RNA, 19 nt, Artificial Sequence
  Description of Artificial Sequence: Synthetic oligonucleotide
agucgcuauggaggacagc

SEQ ID NO: 2419122 - RNA, 19 nt, Artificial Sequence
  Description of Artificial Sequence: Synthetic oligonucleotide
ggguaaggcccuuggacac

SEQ ID NO: 2419123 - RNA, 19 nt, Artificial Sequence
  Description of Artificial Sequence: Synthetic oligonucleotide
cuuagucuuaaaguucaua

SEQ ID NO: 2419124 - RNA, 19 nt, Artificial Sequence
  Description of Artificial Sequence: Synthetic oligonucleotide
guagucgauaauguugacu

SEQ ID NO: 2419125 - RNA, 19 nt, Artificial Sequence
  Description of Artificial Sequence: Synthetic oligonucleotide
gaggguguaguggagcucu

SEQ ID NO: 2419126 - RNA, 19 nt, Artificial Sequence
  Description of Artificial Sequence: Synthetic oligonucleotide
cagucgcuauggaggacag

SEQ ID NO: 2419127 - RNA, 19 nt, Artificial Sequence
  Description of Artificial Sequence: Synthetic oligonucleotide
aagugcagcgaggcuucug

SEQ ID NO: 2419128 - RNA, 19 nt, Artificial Sequence
  Description of Artificial Sequence: Synthetic oligonucleotide
ucauucgcucuaagucaau

SEQ ID NO: 2419129 - RNA, 19 nt, Artificial Sequence
  Description of Artificial Sequence: Synthetic oligonucleotide
cacggugcucaaagugcag

SEQ ID NO: 2419130 - RNA, 19 nt, Artificial Sequence
  Description of Artificial Sequence: Synthetic oligonucleotide
gcuggucuucccauugagg

SEQ ID NO: 2419131 - RNA, 19 nt, Artificial Sequence
  Description of Artificial Sequence: Synthetic oligonucleotide
acaggguguagucgauaau

SEQ ID NO: 2419132 - RNA, 19 nt, Artificial Sequence
  Description of Artificial Sequence: Synthetic oligonucleotide
guggcagaacugaacguca

SEQ ID NO: 2419133 - RNA, 19 nt, Artificial Sequence
  Description of Artificial Sequence: Synthetic oligonucleotide
agagcaggucaguggcaga

SEQ ID NO: 2419134 - RNA, 19 nt, Artificial Sequence
  Description of Artificial Sequence: Synthetic oligonucleotide
gcucuuugcagucgcuaug

SEQ ID NO: 2419135 - RNA, 19 nt, Artificial Sequence
  Description of Artificial Sequence: Synthetic oligonucleotide
uggcuguagugugacacuu

SEQ ID NO: 2419136 - RNA, 19 nt, Artificial Sequence
  Description of Artificial Sequence: Synthetic oligonucleotide
agggaugcggugaucuggu

SEQ ID NO: 2419137 - RNA, 19 nt, Artificial Sequence
  Description of Artificial Sequence: Synthetic oligonucleotide
caaacucaaauuccaggau

SEQ ID NO: 2419138 - RNA, 19 nt, Artificial Sequence
  Description of Artificial Sequence: Synthetic oligonucleotide
ugaucucugguaggaucuc

SEQ ID NO: 2419139 - RNA, 19 nt, Artificial Sequence
  Description of Artificial Sequence: Synthetic oligonucleotide
accgcgagggaugcgguga

SEQ ID NO: 2419140 - RNA, 19 nt, Artificial Sequence
  Description of Artificial Sequence: Synthetic oligonucleotide
ucgcuauggaggacagcuu

SEQ ID NO: 2419141 - RNA, 19 nt, Artificial Sequence
  Description of Artificial Sequence: Synthetic oligonucleotide
gcucuaagucaaucccacc

SEQ ID NO: 2419142 - RNA, 19 nt, Artificial Sequence
  Description of Artificial Sequence: Synthetic oligonucleotide
ccuggcuuacuuaaacaga

SEQ ID NO: 2419143 - RNA, 19 nt, Artificial Sequence
  Description of Artificial Sequence: Synthetic oligonucleotide
ugaggguguaguggagcuc

SEQ ID NO: 2419144 - RNA, 19 nt, Artificial Sequence
  Description of Artificial Sequence: Synthetic oligonucleotide
gaauggcgcuggucuuccc

SEQ ID NO: 2419145 - RNA, 19 nt, Artificial Sequence
  Description of Artificial Sequence: Synthetic oligonucleotide
aaagugcagcgaggcuucu

SEQ ID NO: 2419146 - RNA, 19 nt, Artificial Sequence
  Description of Artificial Sequence: Synthetic oligonucleotide
ggcgcuggucuucccauug

SEQ ID NO: 2419147 - RNA, 19 nt, Artificial Sequence
  Description of Artificial Sequence: Synthetic oligonucleotide
agugugacacuuagucuua

SEQ ID NO: 2419148 - RNA, 19 nt, Artificial Sequence
  Description of Artificial Sequence: Synthetic oligonucleotide
ccuuuaccuguuucauggc

SEQ ID NO: 2419149 - RNA, 19 nt, Artificial Sequence
  Description of Artificial Sequence: Synthetic oligonucleotide
aguaccuggcuuacuuaaa

SEQ ID NO: 2419150 - RNA, 19 nt, Artificial Sequence
  Description of Artificial Sequence: Synthetic oligonucleotide
gcuuuccucucauucgcuc

SEQ ID NO: 2419151 - RNA, 19 nt, Artificial Sequence
  Description of Artificial Sequence: Synthetic oligonucleotide
gaacgucaguacaguucug

SEQ ID NO: 2419152 - RNA, 19 nt, Artificial Sequence
  Description of Artificial Sequence: Synthetic oligonucleotide
caugagccuguagaucuca

SEQ ID NO: 2419153 - RNA, 19 nt, Artificial Sequence
  Description of Artificial Sequence: Synthetic oligonucleotide
uagucaccuugaccugaaa

SEQ ID NO: 2419154 - RNA, 19 nt, Artificial Sequence
  Description of Artificial Sequence: Synthetic oligonucleotide
gccaccgcgagggaugcgg

SEQ ID NO: 2419155 - RNA, 19 nt, Artificial Sequence
  Description of Artificial Sequence: Synthetic oligonucleotide
gauacucacuccagcaguu

SEQ ID NO: 2419156 - RNA, 19 nt, Artificial Sequence
  Description of Artificial Sequence: Synthetic oligonucleotide
gguagucaccuugaccuga

SEQ ID NO: 2419157 - RNA, 19 nt, Artificial Sequence
  Description of Artificial Sequence: Synthetic oligonucleotide
caguacaguucuguggaaa

SEQ ID NO: 2419158 - RNA, 19 nt, Artificial Sequence
  Description of Artificial Sequence: Synthetic oligonucleotide
cgcucuaagucaaucccac

SEQ ID NO: 2419159 - RNA, 19 nt, Artificial Sequence
  Description of Artificial Sequence: Synthetic oligonucleotide
ggaauggcgcuggucuucc

SEQ ID NO: 2419160 - RNA, 19 nt, Artificial Sequence
  Description of Artificial Sequence: Synthetic oligonucleotide
uucugccaccgcgagggau

SEQ ID NO: 2419161 - RNA, 19 nt, Artificial Sequence
  Description of Artificial Sequence: Synthetic oligonucleotide
aucccgcuccaagcgggac

SEQ ID NO: 2419162 - RNA, 19 nt, Artificial Sequence
  Description of Artificial Sequence: Synthetic oligonucleotide
gcagucgcuauggaggaca

SEQ ID NO: 2419163 - RNA, 19 nt, Artificial Sequence
  Description of Artificial Sequence: Synthetic oligonucleotide
gcaggaugcucuuugcagu

SEQ ID NO: 2419164 - RNA, 19 nt, Artificial Sequence
  Description of Artificial Sequence: Synthetic oligonucleotide
uggucgcauuauagugauc

SEQ ID NO: 2419165 - RNA, 19 nt, Artificial Sequence
  Description of Artificial Sequence: Synthetic oligonucleotide
augcucuuugcagucgcua

SEQ ID NO: 2419166 - RNA, 19 nt, Artificial Sequence
  Description of Artificial Sequence: Synthetic oligonucleotide
cauuauuguaagggugaua

SEQ ID NO: 2419167 - RNA, 19 nt, Artificial Sequence
  Description of Artificial Sequence: Synthetic oligonucleotide
ccaggauaaugaagagcug

SEQ ID NO: 2419168 - RNA, 19 nt, Artificial Sequence
  Description of Artificial Sequence: Synthetic oligonucleotide
cgagguaauguagccacag

SEQ ID NO: 2419169 - RNA, 19 nt, Artificial Sequence
  Description of Artificial Sequence: Synthetic oligonucleotide
uuccucucauucgcucuaa

SEQ ID NO: 2419170 - RNA, 19 nt, Artificial Sequence
  Description of Artificial Sequence: Synthetic oligonucleotide
gcuuacuuaaacagacugu

SEQ ID NO: 2419171 - RNA, 19 nt, Artificial Sequence
  Description of Artificial Sequence: Synthetic oligonucleotide
acuuagucuuaaaguucau

SEQ ID NO: 2419172 - RNA, 19 nt, Artificial Sequence
  Description of Artificial Sequence: Synthetic oligonucleotide
cugcgagguaauguagcca

SEQ ID NO: 2419173 - RNA, 19 nt, Artificial Sequence
  Description of Artificial Sequence: Synthetic oligonucleotide
guagucaccuugaccugaa

SEQ ID NO: 2419174 - RNA, 19 nt, Artificial Sequence
  Description of Artificial Sequence: Synthetic oligonucleotide
gcgggacaggguguagucg

SEQ ID NO: 2419175 - RNA, 19 nt, Artificial Sequence
  Description of Artificial Sequence: Synthetic oligonucleotide
caccgcgagggaugcggug

SEQ ID NO: 2419176 - RNA, 19 nt, Artificial Sequence
  Description of Artificial Sequence: Synthetic oligonucleotide
cccaucccgcuccaagcgg

SEQ ID NO: 2419177 - RNA, 19 nt, Artificial Sequence
  Description of Artificial Sequence: Synthetic oligonucleotide
aucuugucugcgagguaau

SEQ ID NO: 2419178 - RNA, 19 nt, Artificial Sequence
  Description of Artificial Sequence: Synthetic oligonucleotide
gauggcagagcaggucagu

SEQ ID NO: 2419179 - RNA, 19 nt, Artificial Sequence
  Description of Artificial Sequence: Synthetic oligonucleotide
cugccaccgcgagggaugc

SEQ ID NO: 2419180 - RNA, 19 nt, Artificial Sequence
  Description of Artificial Sequence: Synthetic oligonucleotide
agggaggguaaggcccuug

SEQ ID NO: 2419181 - RNA, 19 nt, Artificial Sequence
  Description of Artificial Sequence: Synthetic oligonucleotide
caagcgggacaggguguag

SEQ ID NO: 2419182 - RNA, 19 nt, Artificial Sequence
  Description of Artificial Sequence: Synthetic oligonucleotide
cucaaagugcagcgaggcu

SEQ ID NO: 2419183 - RNA, 19 nt, Artificial Sequence
  Description of Artificial Sequence: Synthetic oligonucleotide
ccucaugagccuguagauc

SEQ ID NO: 2419184 - RNA, 19 nt, Artificial Sequence
  Description of Artificial Sequence: Synthetic oligonucleotide
augcggugaucuggugcag

SEQ ID NO: 2419185 - RNA, 19 nt, Artificial Sequence
  Description of Artificial Sequence: Synthetic oligonucleotide
cugguaggaucuccucaaa

SEQ ID NO: 2419186 - RNA, 19 nt, Artificial Sequence
  Description of Artificial Sequence: Synthetic oligonucleotide
caguggcagaacugaacgu

SEQ ID NO: 2419187 - RNA, 19 nt, Artificial Sequence
  Description of Artificial Sequence: Synthetic oligonucleotide
caucccgcuccaagcggga

SEQ ID NO: 2419188 - RNA, 19 nt, Artificial Sequence
  Description of Artificial Sequence: Synthetic oligonucleotide
uggcgcuggucuucccauu

SEQ ID NO: 2419189 - RNA, 19 nt, Artificial Sequence
  Description of Artificial Sequence: Synthetic oligonucleotide
gugugacacuuagucuuaa

SEQ ID NO: 2419190 - RNA, 19 nt, Artificial Sequence
  Description of Artificial Sequence: Synthetic oligonucleotide
ggcagaacugaacgucagu

SEQ ID NO: 2419191 - RNA, 19 nt, Artificial Sequence
  Description of Artificial Sequence: Synthetic oligonucleotide
gggaugcggugaucuggug

SEQ ID NO: 2419192 - RNA, 19 nt, Artificial Sequence
  Description of Artificial Sequence: Synthetic oligonucleotide
aagggaggguaaggcccuu

SEQ ID NO: 2419193 - RNA, 19 nt, Artificial Sequence
  Description of Artificial Sequence: Synthetic oligonucleotide
gcucuuuggagaugaugau

SEQ ID NO: 2419194 - RNA, 19 nt, Artificial Sequence
  Description of Artificial Sequence: Synthetic oligonucleotide
ccucucauucgcucuaagu

SEQ ID NO: 2419195 - RNA, 19 nt, Artificial Sequence
  Description of Artificial Sequence: Synthetic oligonucleotide
ggguguagucgauaauguu

SEQ ID NO: 2419196 - RNA, 19 nt, Artificial Sequence
  Description of Artificial Sequence: Synthetic oligonucleotide
gacaagaggcucagcucuu

SEQ ID NO: 2419197 - RNA, 19 nt, Artificial Sequence
  Description of Artificial Sequence: Synthetic oligonucleotide
gcgagggaugcggugaucu

SEQ ID NO: 2419198 - RNA, 19 nt, Artificial Sequence
  Description of Artificial Sequence: Synthetic oligonucleotide
ccugaaaauagguccucuu

SEQ ID NO: 2419199 - RNA, 19 nt, Artificial Sequence
  Description of Artificial Sequence: Synthetic oligonucleotide
cgagggaugcggugaucug

SEQ ID NO: 2419200 - RNA, 19 nt, Artificial Sequence
  Description of Artificial Sequence: Synthetic oligonucleotide
gcgcuggucuucccauuga

SEQ ID NO: 2419201 - RNA, 19 nt, Artificial Sequence
  Description of Artificial Sequence: Synthetic oligonucleotide
gcgagguaauguagccaca

SEQ ID NO: 2419202 - RNA, 19 nt, Artificial Sequence
  Description of Artificial Sequence: Synthetic oligonucleotide
ggcuguagugugacacuua

SEQ ID NO: 2419203 - RNA, 19 nt, Artificial Sequence
  Description of Artificial Sequence: Synthetic oligonucleotide
cccuuggacacaguguacu

SEQ ID NO: 2419204 - RNA, 19 nt, Artificial Sequence
  Description of Artificial Sequence: Synthetic oligonucleotide
ccgggugggaauggcgcug

SEQ ID NO: 2419205 - RNA, 19 nt, Artificial Sequence
  Description of Artificial Sequence: Synthetic oligonucleotide
gucuucccauugagggugu

SEQ ID NO: 2419206 - RNA, 19 nt, Artificial Sequence
  Description of Artificial Sequence: Synthetic oligonucleotide
guacugaguucagcccaau

SEQ ID NO: 2419207 - RNA, 19 nt, Artificial Sequence
  Description of Artificial Sequence: Synthetic oligonucleotide
gccuuccgugcgguuguac

SEQ ID NO: 2419208 - RNA, 19 nt, Artificial Sequence
  Description of Artificial Sequence: Synthetic oligonucleotide
gcgaggcuucugccaccgc

SEQ ID NO: 2419209 - RNA, 19 nt, Artificial Sequence
  Description of Artificial Sequence: Synthetic oligonucleotide
caaucccaucccgcuccaa

SEQ ID NO: 2419210 - RNA, 19 nt, Artificial Sequence
  Description of Artificial Sequence: Synthetic oligonucleotide
gugcgguuguacaccucau

SEQ ID NO: 2419211 - RNA, 19 nt, Artificial Sequence
  Description of Artificial Sequence: Synthetic oligonucleotide
ccaagcgggacagggugua

SEQ ID NO: 2419212 - RNA, 19 nt, Artificial Sequence
  Description of Artificial Sequence: Synthetic oligonucleotide
agccuuccgugcgguugua

SEQ ID NO: 2419213 - RNA, 19 nt, Artificial Sequence
  Description of Artificial Sequence: Synthetic oligonucleotide
ggagcucuuugagguuggu

SEQ ID NO: 2419214 - RNA, 19 nt, Artificial Sequence
  Description of Artificial Sequence: Synthetic oligonucleotide
gccggucauuugcaguauu

SEQ ID NO: 2419215 - RNA, 19 nt, Artificial Sequence
  Description of Artificial Sequence: Synthetic oligonucleotide
ggguguaguggagcucuuu

SEQ ID NO: 2419216 - RNA, 19 nt, Artificial Sequence
  Description of Artificial Sequence: Synthetic oligonucleotide
cccgggugggaauggcgcu

SEQ ID NO: 2419217 - RNA, 19 nt, Artificial Sequence
  Description of Artificial Sequence: Synthetic oligonucleotide
ccuuccucaugagccugua

SEQ ID NO: 2419218 - RNA, 19 nt, Artificial Sequence
  Description of Artificial Sequence: Synthetic oligonucleotide
ccgcuccaagcgggacagg

SEQ ID NO: 2419219 - RNA, 19 nt, Artificial Sequence
  Description of Artificial Sequence: Synthetic oligonucleotide
ccaccgcgagggaugcggu

SEQ ID NO: 2419220 - RNA, 19 nt, Artificial Sequence
  Description of Artificial Sequence: Synthetic oligonucleotide
cgcgagggaugcggugauc

SEQ ID NO: 2419221 - RNA, 19 nt, Artificial Sequence
  Description of Artificial Sequence: Synthetic oligonucleotide
ccgcgagggaugcggugau

SEQ ID NO: 2419222 - RNA, 19 nt, Artificial Sequence
  Description of Artificial Sequence: Synthetic oligonucleotide
cggugaucuggugcaggau

SEQ ID NO: 2419223 - RNA, 19 nt, Artificial Sequence
  Description of Artificial Sequence: Synthetic oligonucleotide
ucaaucugcgcguugcccu

SEQ ID NO: 2419224 - RNA, 19 nt, Artificial Sequence
  Description of Artificial Sequence: Synthetic oligonucleotide
gucagggcaccucagggug

SEQ ID NO: 2419225 - RNA, 19 nt, Artificial Sequence
  Description of Artificial Sequence: Synthetic oligonucleotide
guucccucggucaaucugc

SEQ ID NO: 2419226 - RNA, 19 nt, Artificial Sequence
  Description of Artificial Sequence: Synthetic oligonucleotide
caggucagggcaccucagg

SEQ ID NO: 2419227 - RNA, 19 nt, Artificial Sequence
  Description of Artificial Sequence: Synthetic oligonucleotide
gguucccucggucaaucug

SEQ ID NO: 2419228 - RNA, 19 nt, Artificial Sequence
  Description of Artificial Sequence: Synthetic oligonucleotide
ucggucaaucugcgcguug

SEQ ID NO: 2419229 - RNA, 19 nt, Artificial Sequence
  Description of Artificial Sequence: Synthetic oligonucleotide
aaucugcgcguugcccuug

SEQ ID NO: 2419230 - RNA, 19 nt, Artificial Sequence
  Description of Artificial Sequence: Synthetic oligonucleotide
ucagguucccucggucaau

SEQ ID NO: 2419231 - RNA, 19 nt, Artificial Sequence
  Description of Artificial Sequence: Synthetic oligonucleotide
cagguucccucggucaauc

SEQ ID NO: 2419232 - RNA, 19 nt, Artificial Sequence
  Description of Artificial Sequence: Synthetic oligonucleotide
cagggcaccucagggugac

SEQ ID NO: 2419233 - RNA, 19 nt, Artificial Sequence
  Description of Artificial Sequence: Synthetic oligonucleotide
gccaggucagggcaccuca

SEQ ID NO: 2419234 - RNA, 19 nt, Artificial Sequence
  Description of Artificial Sequence: Synthetic oligonucleotide
ugccaggucagggcaccuc

SEQ ID NO: 2419235 - RNA, 19 nt, Artificial Sequence
  Description of Artificial Sequence: Synthetic oligonucleotide
ggucagggcaccucagggu

SEQ ID NO: 2419236 - RNA, 19 nt, Artificial Sequence
  Description of Artificial Sequence: Synthetic oligonucleotide
cggucaaucugcgcguugc

SEQ ID NO: 2419237 - RNA, 19 nt, Artificial Sequence
  Description of Artificial Sequence: Synthetic oligonucleotide
ccaggucagggcaccucag

SEQ ID NO: 2419238 - RNA, 19 nt, Artificial Sequence
  Description of Artificial Sequence: Synthetic oligonucleotide
caaucugcgcguugcccuu

SEQ ID NO: 2419239 - RNA, 19 nt, Artificial Sequence
  Description of Artificial Sequence: Synthetic oligonucleotide
gggcaccucagggugacau

SEQ ID NO: 2419240 - RNA, 19 nt, Artificial Sequence
  Description of Artificial Sequence: Synthetic oligonucleotide
agggcaccucagggugaca

SEQ ID NO: 2419241 - RNA, 19 nt, Artificial Sequence
  Description of Artificial Sequence: Synthetic oligonucleotide
cucggucaaucugcgcguu

SEQ ID NO: 2419242 - RNA, 19 nt, Artificial Sequence
  Description of Artificial Sequence: Synthetic oligonucleotide
cugccaggucagggcaccu

SEQ ID NO: 2419243 - RNA, 19 nt, Artificial Sequence
  Description of Artificial Sequence: Synthetic oligonucleotide
ugguuuacuauaaagagcg

SEQ ID NO: 2419244 - RNA, 19 nt, Artificial Sequence
  Description of Artificial Sequence: Synthetic oligonucleotide
uauuucagcaagcuuaagg

SEQ ID NO: 2419245 - RNA, 19 nt, Artificial Sequence
  Description of Artificial Sequence: Synthetic oligonucleotide
auuuccuacauauuucagc

SEQ ID NO: 2419246 - RNA, 19 nt, Artificial Sequence
  Description of Artificial Sequence: Synthetic oligonucleotide
ugaauaguccaccauagcc

SEQ ID NO: 2419247 - RNA, 19 nt, Artificial Sequence
  Description of Artificial Sequence: Synthetic oligonucleotide
aucucgaucucuuuggagc

SEQ ID NO: 2419248 - RNA, 19 nt, Artificial Sequence
  Description of Artificial Sequence: Synthetic oligonucleotide
uuugacuaaguucuccugg

SEQ ID NO: 2419249 - RNA, 19 nt, Artificial Sequence
  Description of Artificial Sequence: Synthetic oligonucleotide
aaaggcaaucuuccggucc

SEQ ID NO: 2419250 - RNA, 19 nt, Artificial Sequence
  Description of Artificial Sequence: Synthetic oligonucleotide
uuuacuauaaagagcgggu

SEQ ID NO: 2419251 - RNA, 19 nt, Artificial Sequence
  Description of Artificial Sequence: Synthetic oligonucleotide
uguaucucgaucucuuugg

SEQ ID NO: 2419252 - RNA, 19 nt, Artificial Sequence
  Description of Artificial Sequence: Synthetic oligonucleotide
augucuaacagcugcgugc

SEQ ID NO: 2419253 - RNA, 19 nt, Artificial Sequence
  Description of Artificial Sequence: Synthetic oligonucleotide
uucguaucaucccacaugc

SEQ ID NO: 2419254 - RNA, 19 nt, Artificial Sequence
  Description of Artificial Sequence: Synthetic oligonucleotide
uccuacauauuucagcaag

SEQ ID NO: 2419255 - RNA, 19 nt, Artificial Sequence
  Description of Artificial Sequence: Synthetic oligonucleotide
uuucagggaacuuauggcc

SEQ ID NO: 2419256 - RNA, 19 nt, Artificial Sequence
  Description of Artificial Sequence: Synthetic oligonucleotide
auguucuccaguuguaggc

SEQ ID NO: 2419257 - RNA, 19 nt, Artificial Sequence
  Description of Artificial Sequence: Synthetic oligonucleotide
acgaucuucccuuucaggg

SEQ ID NO: 2419258 - RNA, 19 nt, Artificial Sequence
  Description of Artificial Sequence: Synthetic oligonucleotide
cuguauaugcaccagcucc

SEQ ID NO: 2419259 - RNA, 19 nt, Artificial Sequence
  Description of Artificial Sequence: Synthetic oligonucleotide
ucaucgcucacugagaucc

SEQ ID NO: 2419260 - RNA, 19 nt, Artificial Sequence
  Description of Artificial Sequence: Synthetic oligonucleotide
guugaguuggcucagcacc

SEQ ID NO: 2419261 - RNA, 19 nt, Artificial Sequence
  Description of Artificial Sequence: Synthetic oligonucleotide
uuucguaucaucccacaug

SEQ ID NO: 2419262 - RNA, 19 nt, Artificial Sequence
  Description of Artificial Sequence: Synthetic oligonucleotide
uucaucuguaucucgaucu

SEQ ID NO: 2419263 - RNA, 19 nt, Artificial Sequence
  Description of Artificial Sequence: Synthetic oligonucleotide
guuuacuauaaagagcggg

SEQ ID NO: 2419264 - RNA, 19 nt, Artificial Sequence
  Description of Artificial Sequence: Synthetic oligonucleotide
uguuguaucucuuccagaa

SEQ ID NO: 2419265 - RNA, 19 nt, Artificial Sequence
  Description of Artificial Sequence: Synthetic oligonucleotide
gaauaguccaccauagccc

SEQ ID NO: 2419266 - RNA, 19 nt, Artificial Sequence
  Description of Artificial Sequence: Synthetic oligonucleotide
cuuucagggaacuuauggc

SEQ ID NO: 2419267 - RNA, 19 nt, Artificial Sequence
  Description of Artificial Sequence: Synthetic oligonucleotide
aguacuuuucucuuccucu

SEQ ID NO: 2419268 - RNA, 19 nt, Artificial Sequence
  Description of Artificial Sequence: Synthetic oligonucleotide
ugucguugcggacacagug

SEQ ID NO: 2419269 - RNA, 19 nt, Artificial Sequence
  Description of Artificial Sequence: Synthetic oligonucleotide
ugagaucccguccagguac

SEQ ID NO: 2419270 - RNA, 19 nt, Artificial Sequence
  Description of Artificial Sequence: Synthetic oligonucleotide
auaaagagcggguugaguu

SEQ ID NO: 2419271 - RNA, 19 nt, Artificial Sequence
  Description of Artificial Sequence: Synthetic oligonucleotide
cuuucggagcuguauaugc

SEQ ID NO: 2419272 - RNA, 19 nt, Artificial Sequence
  Description of Artificial Sequence: Synthetic oligonucleotide
cugaggaguagaaaggcag

SEQ ID NO: 2419273 - RNA, 19 nt, Artificial Sequence
  Description of Artificial Sequence: Synthetic oligonucleotide
caguuguaggcgaagaaag

SEQ ID NO: 2419274 - RNA, 19 nt, Artificial Sequence
  Description of Artificial Sequence: Synthetic oligonucleotide
uccagggugaguuugacua

SEQ ID NO: 2419275 - RNA, 19 nt, Artificial Sequence
  Description of Artificial Sequence: Synthetic oligonucleotide
ggugguguuacuuuccagg

SEQ ID NO: 2419276 - RNA, 19 nt, Artificial Sequence
  Description of Artificial Sequence: Synthetic oligonucleotide
uguauaugcaccagcuccu

SEQ ID NO: 2419277 - RNA, 19 nt, Artificial Sequence
  Description of Artificial Sequence: Synthetic oligonucleotide
cuuguuguaucucuuccag

SEQ ID NO: 2419278 - RNA, 19 nt, Artificial Sequence
  Description of Artificial Sequence: Synthetic oligonucleotide
aucaguguaguucuugagu

SEQ ID NO: 2419279 - RNA, 19 nt, Artificial Sequence
  Description of Artificial Sequence: Synthetic oligonucleotide
acauauuucagcaagcuua

SEQ ID NO: 2419280 - RNA, 19 nt, Artificial Sequence
  Description of Artificial Sequence: Synthetic oligonucleotide
uggaaucuucuccauaggu

SEQ ID NO: 2419281 - RNA, 19 nt, Artificial Sequence
  Description of Artificial Sequence: Synthetic oligonucleotide
ugucuaacagcugcgugcg

SEQ ID NO: 2419282 - RNA, 19 nt, Artificial Sequence
  Description of Artificial Sequence: Synthetic oligonucleotide
uguaggcgaagaaagugcu

SEQ ID NO: 2419283 - RNA, 19 nt, Artificial Sequence
  Description of Artificial Sequence: Synthetic oligonucleotide
uacuguuugagcagcuccc

SEQ ID NO: 2419284 - RNA, 19 nt, Artificial Sequence
  Description of Artificial Sequence: Synthetic oligonucleotide
acggcugugggauacgauc

SEQ ID NO: 2419285 - RNA, 19 nt, Artificial Sequence
  Description of Artificial Sequence: Synthetic oligonucleotide
uguuucaaauuuccuacau

SEQ ID NO: 2419286 - RNA, 19 nt, Artificial Sequence
  Description of Artificial Sequence: Synthetic oligonucleotide
uguuugagcagcucccuca

SEQ ID NO: 2419287 - RNA, 19 nt, Artificial Sequence
  Description of Artificial Sequence: Synthetic oligonucleotide
uccucuacuauguucucca

SEQ ID NO: 2419288 - RNA, 19 nt, Artificial Sequence
  Description of Artificial Sequence: Synthetic oligonucleotide
ucucaaaggcaaucuuccg

SEQ ID NO: 2419289 - RNA, 19 nt, Artificial Sequence
  Description of Artificial Sequence: Synthetic oligonucleotide
aaccugcguccuuugggcc

SEQ ID NO: 2419290 - RNA, 19 nt, Artificial Sequence
  Description of Artificial Sequence: Synthetic oligonucleotide
gauacgaucuucccuuuca

SEQ ID NO: 2419291 - RNA, 19 nt, Artificial Sequence
  Description of Artificial Sequence: Synthetic oligonucleotide
uacgaucuucccuuucagg

SEQ ID NO: 2419292 - RNA, 19 nt, Artificial Sequence
  Description of Artificial Sequence: Synthetic oligonucleotide
cauccucagagucucaaag

SEQ ID NO: 2419293 - RNA, 19 nt, Artificial Sequence
  Description of Artificial Sequence: Synthetic oligonucleotide
gaacuuauggccuccugca

SEQ ID NO: 2419294 - RNA, 19 nt, Artificial Sequence
  Description of Artificial Sequence: Synthetic oligonucleotide
gacuaaguucuccugggac

SEQ ID NO: 2419295 - RNA, 19 nt, Artificial Sequence
  Description of Artificial Sequence: Synthetic oligonucleotide
cugugguuuacuauaaaga

SEQ ID NO: 2419296 - RNA, 19 nt, Artificial Sequence
  Description of Artificial Sequence: Synthetic oligonucleotide
ugggccuuaagcuuucgga

SEQ ID NO: 2419297 - RNA, 19 nt, Artificial Sequence
  Description of Artificial Sequence: Synthetic oligonucleotide
gguguuacuuuccagggug

SEQ ID NO: 2419298 - RNA, 19 nt, Artificial Sequence
  Description of Artificial Sequence: Synthetic oligonucleotide
guacuguuugagcagcucc

SEQ ID NO: 2419299 - RNA, 19 nt, Artificial Sequence
  Description of Artificial Sequence: Synthetic oligonucleotide
agcucccucagcuucccgc

SEQ ID NO: 2419300 - RNA, 19 nt, Artificial Sequence
  Description of Artificial Sequence: Synthetic oligonucleotide
gaugucuaacagcugcgug

SEQ ID NO: 2419301 - RNA, 19 nt, Artificial Sequence
  Description of Artificial Sequence: Synthetic oligonucleotide
gcugaugucuaacagcugc

SEQ ID NO: 2419302 - RNA, 19 nt, Artificial Sequence
  Description of Artificial Sequence: Synthetic oligonucleotide
gugaguuugacuaaguucu

SEQ ID NO: 2419303 - RNA, 19 nt, Artificial Sequence
  Description of Artificial Sequence: Synthetic oligonucleotide
ugggauacgaucuucccuu

SEQ ID NO: 2419304 - RNA, 19 nt, Artificial Sequence
  Description of Artificial Sequence: Synthetic oligonucleotide
uugagugcauccuggaauc

SEQ ID NO: 2419305 - RNA, 19 nt, Artificial Sequence
  Description of Artificial Sequence: Synthetic oligonucleotide
cugaugucuaacagcugcg

SEQ ID NO: 2419306 - RNA, 19 nt, Artificial Sequence
  Description of Artificial Sequence: Synthetic oligonucleotide
gugguuuacuauaaagagc

SEQ ID NO: 2419307 - RNA, 19 nt, Artificial Sequence
  Description of Artificial Sequence: Synthetic oligonucleotide
uucggagcuguauaugcac

SEQ ID NO: 2419308 - RNA, 19 nt, Artificial Sequence
  Description of Artificial Sequence: Synthetic oligonucleotide
guaguucuugagugcaucc

SEQ ID NO: 2419309 - RNA, 19 nt, Artificial Sequence
  Description of Artificial Sequence: Synthetic oligonucleotide
caccucaucgcucacugag

SEQ ID NO: 2419310 - RNA, 19 nt, Artificial Sequence
  Description of Artificial Sequence: Synthetic oligonucleotide
uacauauuucagcaagcuu

SEQ ID NO: 2419311 - RNA, 19 nt, Artificial Sequence
  Description of Artificial Sequence: Synthetic oligonucleotide
uuuucguaucaucccacau

SEQ ID NO: 2419312 - RNA, 19 nt, Artificial Sequence
  Description of Artificial Sequence: Synthetic oligonucleotide
gguucugccauucacuuuc

SEQ ID NO: 2419313 - RNA, 19 nt, Artificial Sequence
  Description of Artificial Sequence: Synthetic oligonucleotide
cagaaguucuccaucccug

SEQ ID NO: 2419314 - RNA, 19 nt, Artificial Sequence
  Description of Artificial Sequence: Synthetic oligonucleotide
cuugucguugcggacacag

SEQ ID NO: 2419315 - RNA, 19 nt, Artificial Sequence
  Description of Artificial Sequence: Synthetic oligonucleotide
uaggcgaagaaagugcuuc

SEQ ID NO: 2419316 - RNA, 19 nt, Artificial Sequence
  Description of Artificial Sequence: Synthetic oligonucleotide
auacgaucuucccuuucag

SEQ ID NO: 2419317 - RNA, 19 nt, Artificial Sequence
  Description of Artificial Sequence: Synthetic oligonucleotide
ggaacuuauggccuccugc

SEQ ID NO: 2419318 - RNA, 19 nt, Artificial Sequence
  Description of Artificial Sequence: Synthetic oligonucleotide
guuugacuaaguucuccug

SEQ ID NO: 2419319 - RNA, 19 nt, Artificial Sequence
  Description of Artificial Sequence: Synthetic oligonucleotide
ucggagcuguauaugcacc

SEQ ID NO: 2419320 - RNA, 19 nt, Artificial Sequence
  Description of Artificial Sequence: Synthetic oligonucleotide
aguguaguucuugagugca

SEQ ID NO: 2419321 - RNA, 19 nt, Artificial Sequence
  Description of Artificial Sequence: Synthetic oligonucleotide
uugggccuuaagcuuucgg

SEQ ID NO: 2419322 - RNA, 19 nt, Artificial Sequence
  Description of Artificial Sequence: Synthetic oligonucleotide
caugcucuggaacuccagc

SEQ ID NO: 2419323 - RNA, 19 nt, Artificial Sequence
  Description of Artificial Sequence: Synthetic oligonucleotide
agcaccucaucgcucacug

SEQ ID NO: 2419324 - RNA, 19 nt, Artificial Sequence
  Description of Artificial Sequence: Synthetic oligonucleotide
uccagaaguucuccauccc

SEQ ID NO: 2419325 - RNA, 19 nt, Artificial Sequence
  Description of Artificial Sequence: Synthetic oligonucleotide
acuccccgaaccugcgucc

SEQ ID NO: 2419326 - RNA, 19 nt, Artificial Sequence
  Description of Artificial Sequence: Synthetic oligonucleotide
ucuuccucuguuucaaauu

SEQ ID NO: 2419327 - RNA, 19 nt, Artificial Sequence
  Description of Artificial Sequence: Synthetic oligonucleotide
agugcauccuggaaucuuc

SEQ ID NO: 2419328 - RNA, 19 nt, Artificial Sequence
  Description of Artificial Sequence: Synthetic oligonucleotide
cuauguucuccaguuguag

SEQ ID NO: 2419329 - RNA, 19 nt, Artificial Sequence
  Description of Artificial Sequence: Synthetic oligonucleotide
agaaguucuccaucccuga

SEQ ID NO: 2419330 - RNA, 19 nt, Artificial Sequence
  Description of Artificial Sequence: Synthetic oligonucleotide
ugacuaaguucuccuggga

SEQ ID NO: 2419331 - RNA, 19 nt, Artificial Sequence
  Description of Artificial Sequence: Synthetic oligonucleotide
ucaucuguaucucgaucuc

SEQ ID NO: 2419332 - RNA, 19 nt, Artificial Sequence
  Description of Artificial Sequence: Synthetic oligonucleotide
agcggguugaguuggcuca

SEQ ID NO: 2419333 - RNA, 19 nt, Artificial Sequence
  Description of Artificial Sequence: Synthetic oligonucleotide
gagcuguauaugcaccagc

SEQ ID NO: 2419334 - RNA, 19 nt, Artificial Sequence
  Description of Artificial Sequence: Synthetic oligonucleotide
uauaaagagcggguugagu

SEQ ID NO: 2419335 - RNA, 19 nt, Artificial Sequence
  Description of Artificial Sequence: Synthetic oligonucleotide
ucccgcugaugucuaacag

SEQ ID NO: 2419336 - RNA, 19 nt, Artificial Sequence
  Description of Artificial Sequence: Synthetic oligonucleotide
aagcuuucggagcuguaua

SEQ ID NO: 2419337 - RNA, 19 nt, Artificial Sequence
  Description of Artificial Sequence: Synthetic oligonucleotide
uuguuguaucucuuccaga

SEQ ID NO: 2419338 - RNA, 19 nt, Artificial Sequence
  Description of Artificial Sequence: Synthetic oligonucleotide
ucuaacagcugcgugcguc

SEQ ID NO: 2419339 - RNA, 19 nt, Artificial Sequence
  Description of Artificial Sequence: Synthetic oligonucleotide
guugcggacacagugguuc

SEQ ID NO: 2419340 - RNA, 19 nt, Artificial Sequence
  Description of Artificial Sequence: Synthetic oligonucleotide
guuugagcagcucccucag

SEQ ID NO: 2419341 - RNA, 19 nt, Artificial Sequence
  Description of Artificial Sequence: Synthetic oligonucleotide
cugaauaguccaccauagc

SEQ ID NO: 2419342 - RNA, 19 nt, Artificial Sequence
  Description of Artificial Sequence: Synthetic oligonucleotide
aguagaaaggcaguacuuu

SEQ ID NO: 2419343 - RNA, 19 nt, Artificial Sequence
  Description of Artificial Sequence: Synthetic oligonucleotide
uguaguucuugagugcauc

SEQ ID NO: 2419344 - RNA, 19 nt, Artificial Sequence
  Description of Artificial Sequence: Synthetic oligonucleotide
caguguaguucuugagugc

SEQ ID NO: 2419345 - RNA, 19 nt, Artificial Sequence
  Description of Artificial Sequence: Synthetic oligonucleotide
acuuucacggcugugggau

SEQ ID NO: 2419346 - RNA, 19 nt, Artificial Sequence
  Description of Artificial Sequence: Synthetic oligonucleotide
ccugaauaguccaccauag

SEQ ID NO: 2419347 - RNA, 19 nt, Artificial Sequence
  Description of Artificial Sequence: Synthetic oligonucleotide
ucaucccacaugcucugga

SEQ ID NO: 2419348 - RNA, 19 nt, Artificial Sequence
  Description of Artificial Sequence: Synthetic oligonucleotide
uccaguuguaggcgaagaa

SEQ ID NO: 2419349 - RNA, 19 nt, Artificial Sequence
  Description of Artificial Sequence: Synthetic oligonucleotide
uaagcuuucggagcuguau

SEQ ID NO: 2419350 - RNA, 19 nt, Artificial Sequence
  Description of Artificial Sequence: Synthetic oligonucleotide
ucguugcggacacaguggu

SEQ ID NO: 2419351 - RNA, 19 nt, Artificial Sequence
  Description of Artificial Sequence: Synthetic oligonucleotide
gaucuucccuuucagggaa

SEQ ID NO: 2419352 - RNA, 19 nt, Artificial Sequence
  Description of Artificial Sequence: Synthetic oligonucleotide
uccggguucugucuuccug

SEQ ID NO: 2419353 - RNA, 19 nt, Artificial Sequence
  Description of Artificial Sequence: Synthetic oligonucleotide
ugguguuacuuuccagggu

SEQ ID NO: 2419354 - RNA, 19 nt, Artificial Sequence
  Description of Artificial Sequence: Synthetic oligonucleotide
ugccauucacuuucacggc

SEQ ID NO: 2419355 - RNA, 19 nt, Artificial Sequence
  Description of Artificial Sequence: Synthetic oligonucleotide
uuacuauaaagagcggguu

SEQ ID NO: 2419356 - RNA, 19 nt, Artificial Sequence
  Description of Artificial Sequence: Synthetic oligonucleotide
aggcaguacuuuucucuuc

SEQ ID NO: 2419357 - RNA, 19 nt, Artificial Sequence
  Description of Artificial Sequence: Synthetic oligonucleotide
gggccuuaagcuuucggag

SEQ ID NO: 2419358 - RNA, 19 nt, Artificial Sequence
  Description of Artificial Sequence: Synthetic oligonucleotide
gucguugcggacacagugg

SEQ ID NO: 2419359 - RNA, 19 nt, Artificial Sequence
  Description of Artificial Sequence: Synthetic oligonucleotide
cuggagacucagcaccucc

SEQ ID NO: 2419360 - RNA, 19 nt, Artificial Sequence
  Description of Artificial Sequence: Synthetic oligonucleotide
uccauagguccucuacuau

SEQ ID NO: 2419361 - RNA, 19 nt, Artificial Sequence
  Description of Artificial Sequence: Synthetic oligonucleotide
cucacugagaucccgucca

SEQ ID NO: 2419362 - RNA, 19 nt, Artificial Sequence
  Description of Artificial Sequence: Synthetic oligonucleotide
ugaguuugacuaaguucuc

SEQ ID NO: 2419363 - RNA, 19 nt, Artificial Sequence
  Description of Artificial Sequence: Synthetic oligonucleotide
ccuacauauuucagcaagc

SEQ ID NO: 2419364 - RNA, 19 nt, Artificial Sequence
  Description of Artificial Sequence: Synthetic oligonucleotide
uucccuuucagggaacuua

SEQ ID NO: 2419365 - RNA, 19 nt, Artificial Sequence
  Description of Artificial Sequence: Synthetic oligonucleotide
agugguucugccauucacu

SEQ ID NO: 2419366 - RNA, 19 nt, Artificial Sequence
  Description of Artificial Sequence: Synthetic oligonucleotide
uucccgcugaugucuaaca

SEQ ID NO: 2419367 - RNA, 19 nt, Artificial Sequence
  Description of Artificial Sequence: Synthetic oligonucleotide
ugaugucuaacagcugcgu

SEQ ID NO: 2419368 - RNA, 19 nt, Artificial Sequence
  Description of Artificial Sequence: Synthetic oligonucleotide
ugggacacuccccgaaccu

SEQ ID NO: 2419369 - RNA, 19 nt, Artificial Sequence
  Description of Artificial Sequence: Synthetic oligonucleotide
gacacagugguucugccau

SEQ ID NO: 2419370 - RNA, 19 nt, Artificial Sequence
  Description of Artificial Sequence: Synthetic oligonucleotide
cuuuggagcuuuucucauc

SEQ ID NO: 2419371 - RNA, 19 nt, Artificial Sequence
  Description of Artificial Sequence: Synthetic oligonucleotide
uaugcaccagcuccuuguc

SEQ ID NO: 2419372 - RNA, 19 nt, Artificial Sequence
  Description of Artificial Sequence: Synthetic oligonucleotide
uaguucuugagugcauccu

SEQ ID NO: 2419373 - RNA, 19 nt, Artificial Sequence
  Description of Artificial Sequence: Synthetic oligonucleotide
uugagggugguguuacuuu

SEQ ID NO: 2419374 - RNA, 19 nt, Artificial Sequence
  Description of Artificial Sequence: Synthetic oligonucleotide
cuauaaagagcggguugag

SEQ ID NO: 2419375 - RNA, 19 nt, Artificial Sequence
  Description of Artificial Sequence: Synthetic oligonucleotide
uccuugucguugcggacac

SEQ ID NO: 2419376 - RNA, 19 nt, Artificial Sequence
  Description of Artificial Sequence: Synthetic oligonucleotide
agcuuucggagcuguauau

SEQ ID NO: 2419377 - RNA, 19 nt, Artificial Sequence
  Description of Artificial Sequence: Synthetic oligonucleotide
guucuccugggacacuccc

SEQ ID NO: 2419378 - RNA, 19 nt, Artificial Sequence
  Description of Artificial Sequence: Synthetic oligonucleotide
uuucacggcugugggauac

SEQ ID NO: 2419379 - RNA, 19 nt, Artificial Sequence
  Description of Artificial Sequence: Synthetic oligonucleotide
caguacuuuucucuuccuc

SEQ ID NO: 2419380 - RNA, 19 nt, Artificial Sequence
  Description of Artificial Sequence: Synthetic oligonucleotide
cugggacacuccccgaacc

SEQ ID NO: 2419381 - RNA, 19 nt, Artificial Sequence
  Description of Artificial Sequence: Synthetic oligonucleotide
ggaaucuucuccauagguc

SEQ ID NO: 2419382 - RNA, 19 nt, Artificial Sequence
  Description of Artificial Sequence: Synthetic oligonucleotide
ucauccucagagucucaaa

SEQ ID NO: 2419383 - RNA, 19 nt, Artificial Sequence
  Description of Artificial Sequence: Synthetic oligonucleotide
ggccuuaagcuuucggagc

SEQ ID NO: 2419384 - RNA, 19 nt, Artificial Sequence
  Description of Artificial Sequence: Synthetic oligonucleotide
aguuguaggcgaagaaagu

SEQ ID NO: 2419385 - RNA, 19 nt, Artificial Sequence
  Description of Artificial Sequence: Synthetic oligonucleotide
cauagguccucuacuaugu

SEQ ID NO: 2419386 - RNA, 19 nt, Artificial Sequence
  Description of Artificial Sequence: Synthetic oligonucleotide
agggugguguuacuuucca

SEQ ID NO: 2419387 - RNA, 19 nt, Artificial Sequence
  Description of Artificial Sequence: Synthetic oligonucleotide
uuccuacauauuucagcaa

SEQ ID NO: 2419388 - RNA, 19 nt, Artificial Sequence
  Description of Artificial Sequence: Synthetic oligonucleotide
cuguuucaaauuuccuaca

SEQ ID NO: 2419389 - RNA, 19 nt, Artificial Sequence
  Description of Artificial Sequence: Synthetic oligonucleotide
uggagucagugcugaggag

SEQ ID NO: 2419390 - RNA, 19 nt, Artificial Sequence
  Description of Artificial Sequence: Synthetic oligonucleotide
uugcuucugugguuuacua

SEQ ID NO: 2419391 - RNA, 19 nt, Artificial Sequence
  Description of Artificial Sequence: Synthetic oligonucleotide
aggcgaagaaagugcuucu

SEQ ID NO: 2419392 - RNA, 19 nt, Artificial Sequence
  Description of Artificial Sequence: Synthetic oligonucleotide
guaucucuuccagaaguuc

SEQ ID NO: 2419393 - RNA, 19 nt, Artificial Sequence
  Description of Artificial Sequence: Synthetic oligonucleotide
cugcgugcgucugugcugg

SEQ ID NO: 2419394 - RNA, 19 nt, Artificial Sequence
  Description of Artificial Sequence: Synthetic oligonucleotide
uccugggacacuccccgaa

SEQ ID NO: 2419395 - RNA, 19 nt, Artificial Sequence
  Description of Artificial Sequence: Synthetic oligonucleotide
agcaagcuuaaggaucugu

SEQ ID NO: 2419396 - RNA, 19 nt, Artificial Sequence
  Description of Artificial Sequence: Synthetic oligonucleotide
gagggugguguuacuuucc

SEQ ID NO: 2419397 - RNA, 19 nt, Artificial Sequence
  Description of Artificial Sequence: Synthetic oligonucleotide
guaucucgaucucuuugga

SEQ ID NO: 2419398 - RNA, 19 nt, Artificial Sequence
  Description of Artificial Sequence: Synthetic oligonucleotide
guaucaucccacaugcucu

SEQ ID NO: 2419399 - RNA, 19 nt, Artificial Sequence
  Description of Artificial Sequence: Synthetic oligonucleotide
ccauagguccucuacuaug

SEQ ID NO: 2419400 - RNA, 19 nt, Artificial Sequence
  Description of Artificial Sequence: Synthetic oligonucleotide
ucccugaauaguccaccau

SEQ ID NO: 2419401 - RNA, 19 nt, Artificial Sequence
  Description of Artificial Sequence: Synthetic oligonucleotide
uuaagcuuucggagcugua

SEQ ID NO: 2419402 - RNA, 19 nt, Artificial Sequence
  Description of Artificial Sequence: Synthetic oligonucleotide
ggaguagaaaggcaguacu

SEQ ID NO: 2419403 - RNA, 19 nt, Artificial Sequence
  Description of Artificial Sequence: Synthetic oligonucleotide
gggcagguugcuucugugg

SEQ ID NO: 2419404 - RNA, 19 nt, Artificial Sequence
  Description of Artificial Sequence: Synthetic oligonucleotide
gagcggguugaguuggcuc

SEQ ID NO: 2419405 - RNA, 19 nt, Artificial Sequence
  Description of Artificial Sequence: Synthetic oligonucleotide
ggagacucagcaccuccag

SEQ ID NO: 2419406 - RNA, 19 nt, Artificial Sequence
  Description of Artificial Sequence: Synthetic oligonucleotide
gacacuccccgaaccugcg

SEQ ID NO: 2419407 - RNA, 19 nt, Artificial Sequence
  Description of Artificial Sequence: Synthetic oligonucleotide
uuugggccuuaagcuuucg

SEQ ID NO: 2419408 - RNA, 19 nt, Artificial Sequence
  Description of Artificial Sequence: Synthetic oligonucleotide
cguaucaucccacaugcuc

SEQ ID NO: 2419409 - RNA, 19 nt, Artificial Sequence
  Description of Artificial Sequence: Synthetic oligonucleotide
aucccguccagguacuguu

SEQ ID NO: 2419410 - RNA, 19 nt, Artificial Sequence
  Description of Artificial Sequence: Synthetic oligonucleotide
gguugaguuggcucagcac

SEQ ID NO: 2419411 - RNA, 19 nt, Artificial Sequence
  Description of Artificial Sequence: Synthetic oligonucleotide
ucguaucaucccacaugcu

SEQ ID NO: 2419412 - RNA, 19 nt, Artificial Sequence
  Description of Artificial Sequence: Synthetic oligonucleotide
guccucuacuauguucucc

SEQ ID NO: 2419413 - RNA, 19 nt, Artificial Sequence
  Description of Artificial Sequence: Synthetic oligonucleotide
uugucguugcggacacagu

SEQ ID NO: 2419414 - RNA, 19 nt, Artificial Sequence
  Description of Artificial Sequence: Synthetic oligonucleotide
aggaucuguucacccuucu

SEQ ID NO: 2419415 - RNA, 19 nt, Artificial Sequence
  Description of Artificial Sequence: Synthetic oligonucleotide
cccgcugaugucuaacagc

SEQ ID NO: 2419416 - RNA, 19 nt, Artificial Sequence
  Description of Artificial Sequence: Synthetic oligonucleotide
guagaaaggcaguacuuuu

SEQ ID NO: 2419417 - RNA, 19 nt, Artificial Sequence
  Description of Artificial Sequence: Synthetic oligonucleotide
uucacggcugugggauacg

SEQ ID NO: 2419418 - RNA, 19 nt, Artificial Sequence
  Description of Artificial Sequence: Synthetic oligonucleotide
acagugguucugccauuca

SEQ ID NO: 2419419 - RNA, 19 nt, Artificial Sequence
  Description of Artificial Sequence: Synthetic oligonucleotide
cacuccccgaaccugcguc

SEQ ID NO: 2419420 - RNA, 19 nt, Artificial Sequence
  Description of Artificial Sequence: Synthetic oligonucleotide
gaguuggcucagcaccuca

SEQ ID NO: 2419421 - RNA, 19 nt, Artificial Sequence
  Description of Artificial Sequence: Synthetic oligonucleotide
gaggaguagaaaggcagua

SEQ ID NO: 2419422 - RNA, 19 nt, Artificial Sequence
  Description of Artificial Sequence: Synthetic oligonucleotide
cuacauauuucagcaagcu

SEQ ID NO: 2419423 - RNA, 19 nt, Artificial Sequence
  Description of Artificial Sequence: Synthetic oligonucleotide
cuccauagguccucuacua

SEQ ID NO: 2419424 - RNA, 19 nt, Artificial Sequence
  Description of Artificial Sequence: Synthetic oligonucleotide
cuguuugagcagcucccuc

SEQ ID NO: 2419425 - RNA, 19 nt, Artificial Sequence
  Description of Artificial Sequence: Synthetic oligonucleotide
ugagugcauccuggaaucu

SEQ ID NO: 2419426 - RNA, 19 nt, Artificial Sequence
  Description of Artificial Sequence: Synthetic oligonucleotide
gugcgucugugcuggagac

SEQ ID NO: 2419427 - RNA, 19 nt, Artificial Sequence
  Description of Artificial Sequence: Synthetic oligonucleotide
ucgaucucuuuggagcuuu

SEQ ID NO: 2419428 - RNA, 19 nt, Artificial Sequence
  Description of Artificial Sequence: Synthetic oligonucleotide
cucaucgcucacugagauc

SEQ ID NO: 2419429 - RNA, 19 nt, Artificial Sequence
  Description of Artificial Sequence: Synthetic oligonucleotide
gcucacugagaucccgucc

SEQ ID NO: 2419430 - RNA, 19 nt, Artificial Sequence
  Description of Artificial Sequence: Synthetic oligonucleotide
caucgcucacugagauccc

SEQ ID NO: 2419431 - RNA, 19 nt, Artificial Sequence
  Description of Artificial Sequence: Synthetic oligonucleotide
ucacggcugugggauacga

SEQ ID NO: 2419432 - RNA, 19 nt, Artificial Sequence
  Description of Artificial Sequence: Synthetic oligonucleotide
uuccgguccucuguggcau

SEQ ID NO: 2419433 - RNA, 19 nt, Artificial Sequence
  Description of Artificial Sequence: Synthetic oligonucleotide
gcuguauaugcaccagcuc

SEQ ID NO: 2419434 - RNA, 19 nt, Artificial Sequence
  Description of Artificial Sequence: Synthetic oligonucleotide
uaacagcugcgugcgucug

SEQ ID NO: 2419435 - RNA, 19 nt, Artificial Sequence
  Description of Artificial Sequence: Synthetic oligonucleotide
cuuccgguccucuguggca

SEQ ID NO: 2419436 - RNA, 19 nt, Artificial Sequence
  Description of Artificial Sequence: Synthetic oligonucleotide
caaucuuccgguccucugu

SEQ ID NO: 2419437 - RNA, 19 nt, Artificial Sequence
  Description of Artificial Sequence: Synthetic oligonucleotide
cacaugcucuggaacucca

SEQ ID NO: 2419438 - RNA, 19 nt, Artificial Sequence
  Description of Artificial Sequence: Synthetic oligonucleotide
cuaacagcugcgugcgucu

SEQ ID NO: 2419439 - RNA, 19 nt, Artificial Sequence
  Description of Artificial Sequence: Synthetic oligonucleotide
accauagcccuggccagcu

SEQ ID NO: 2419440 - RNA, 19 nt, Artificial Sequence
  Description of Artificial Sequence: Synthetic oligonucleotide
caucccacaugcucuggaa

SEQ ID NO: 2419441 - RNA, 19 nt, Artificial Sequence
  Description of Artificial Sequence: Synthetic oligonucleotide
uuccuugagggugguguua

SEQ ID NO: 2419442 - RNA, 19 nt, Artificial Sequence
  Description of Artificial Sequence: Synthetic oligonucleotide
ggaucuguucacccuucuc

SEQ ID NO: 2419443 - RNA, 19 nt, Artificial Sequence
  Description of Artificial Sequence: Synthetic oligonucleotide
gaguagaaaggcaguacuu

SEQ ID NO: 2419444 - RNA, 19 nt, Artificial Sequence
  Description of Artificial Sequence: Synthetic oligonucleotide
gggguggacagcuggggca

SEQ ID NO: 2419445 - RNA, 19 nt, Artificial Sequence
  Description of Artificial Sequence: Synthetic oligonucleotide
caccauagcccuggccagc

SEQ ID NO: 2419446 - RNA, 19 nt, Artificial Sequence
  Description of Artificial Sequence: Synthetic oligonucleotide
cacuuucacggcuguggga

SEQ ID NO: 2419447 - RNA, 19 nt, Artificial Sequence
  Description of Artificial Sequence: Synthetic oligonucleotide
agagcggguugaguuggcu

SEQ ID NO: 2419448 - RNA, 19 nt, Artificial Sequence
  Description of Artificial Sequence: Synthetic oligonucleotide
ugcgucugugcuggagacu

SEQ ID NO: 2419449 - RNA, 19 nt, Artificial Sequence
  Description of Artificial Sequence: Synthetic oligonucleotide
gcugcgugcgucugugcug

SEQ ID NO: 2419450 - RNA, 19 nt, Artificial Sequence
  Description of Artificial Sequence: Synthetic oligonucleotide
gggaacuuauggccuccug

SEQ ID NO: 2419451 - RNA, 19 nt, Artificial Sequence
  Description of Artificial Sequence: Synthetic oligonucleotide
accucaucgcucacugaga

SEQ ID NO: 2419452 - RNA, 19 nt, Artificial Sequence
  Description of Artificial Sequence: Synthetic oligonucleotide
ggagucagugcugaggagu

SEQ ID NO: 2419453 - RNA, 19 nt, Artificial Sequence
  Description of Artificial Sequence: Synthetic oligonucleotide
ggauacgaucuucccuuuc

SEQ ID NO: 2419454 - RNA, 19 nt, Artificial Sequence
  Description of Artificial Sequence: Synthetic oligonucleotide
acacuccccgaaccugcgu

SEQ ID NO: 2419455 - RNA, 19 nt, Artificial Sequence
  Description of Artificial Sequence: Synthetic oligonucleotide
cuuaagcuuucggagcugu

SEQ ID NO: 2419456 - RNA, 19 nt, Artificial Sequence
  Description of Artificial Sequence: Synthetic oligonucleotide
gcgucugugcuggagacuc

SEQ ID NO: 2419457 - RNA, 19 nt, Artificial Sequence
  Description of Artificial Sequence: Synthetic oligonucleotide
ucccguccagguacuguuu

SEQ ID NO: 2419458 - RNA, 19 nt, Artificial Sequence
  Description of Artificial Sequence: Synthetic oligonucleotide
uuccggguucugucuuccu

SEQ ID NO: 2419459 - RNA, 19 nt, Artificial Sequence
  Description of Artificial Sequence: Synthetic oligonucleotide
gcgaagaaagugcuucucu

SEQ ID NO: 2419460 - RNA, 19 nt, Artificial Sequence
  Description of Artificial Sequence: Synthetic oligonucleotide
gccuuaagcuuucggagcu

SEQ ID NO: 2419461 - RNA, 19 nt, Artificial Sequence
  Description of Artificial Sequence: Synthetic oligonucleotide
auaguccaccauagcccug

SEQ ID NO: 2419462 - RNA, 19 nt, Artificial Sequence
  Description of Artificial Sequence: Synthetic oligonucleotide
agguacuguuugagcagcu

SEQ ID NO: 2419463 - RNA, 19 nt, Artificial Sequence
  Description of Artificial Sequence: Synthetic oligonucleotide
agggaacuuauggccuccu

SEQ ID NO: 2419464 - RNA, 19 nt, Artificial Sequence
  Description of Artificial Sequence: Synthetic oligonucleotide
ccgcugaugucuaacagcu

SEQ ID NO: 2419465 - RNA, 19 nt, Artificial Sequence
  Description of Artificial Sequence: Synthetic oligonucleotide
cugagaucccguccaggua

SEQ ID NO: 2419466 - RNA, 19 nt, Artificial Sequence
  Description of Artificial Sequence: Synthetic oligonucleotide
cccugaauaguccaccaua

SEQ ID NO: 2419467 - RNA, 19 nt, Artificial Sequence
  Description of Artificial Sequence: Synthetic oligonucleotide
cauucacuuucacggcugu

SEQ ID NO: 2419468 - RNA, 19 nt, Artificial Sequence
  Description of Artificial Sequence: Synthetic oligonucleotide
gccauucacuuucacggcu

SEQ ID NO: 2419469 - RNA, 19 nt, Artificial Sequence
  Description of Artificial Sequence: Synthetic oligonucleotide
gaucccguccagguacugu

SEQ ID NO: 2419470 - RNA, 19 nt, Artificial Sequence
  Description of Artificial Sequence: Synthetic oligonucleotide
ccacaugcucuggaacucc

SEQ ID NO: 2419471 - RNA, 19 nt, Artificial Sequence
  Description of Artificial Sequence: Synthetic oligonucleotide
agaucccguccagguacug

SEQ ID NO: 2419472 - RNA, 19 nt, Artificial Sequence
  Description of Artificial Sequence: Synthetic oligonucleotide
ggcucagcaccucaucgcu

SEQ ID NO: 2419473 - RNA, 19 nt, Artificial Sequence
  Description of Artificial Sequence: Synthetic oligonucleotide
cccguccagguacuguuug

SEQ ID NO: 2419474 - RNA, 19 nt, Artificial Sequence
  Description of Artificial Sequence: Synthetic oligonucleotide
gcguccuuugggccuuaag

SEQ ID NO: 2419475 - RNA, 19 nt, Artificial Sequence
  Description of Artificial Sequence: Synthetic oligonucleotide
ccgaaccugcguccuuugg

SEQ ID NO: 2419476 - RNA, 19 nt, Artificial Sequence
  Description of Artificial Sequence: Synthetic oligonucleotide
agguugcuucugugguuua

SEQ ID NO: 2419477 - RNA, 19 nt, Artificial Sequence
  Description of Artificial Sequence: Synthetic oligonucleotide
cgaucuucccuuucaggga

SEQ ID NO: 2419478 - RNA, 19 nt, Artificial Sequence
  Description of Artificial Sequence: Synthetic oligonucleotide
uccgguccucuguggcauc

SEQ ID NO: 2419479 - RNA, 19 nt, Artificial Sequence
  Description of Artificial Sequence: Synthetic oligonucleotide
ggguucugucuuccuguuc

SEQ ID NO: 2419480 - RNA, 19 nt, Artificial Sequence
  Description of Artificial Sequence: Synthetic oligonucleotide
cuuucacggcugugggaua

SEQ ID NO: 2419481 - RNA, 19 nt, Artificial Sequence
  Description of Artificial Sequence: Synthetic oligonucleotide
ggucuuccggguucugucu

SEQ ID NO: 2419482 - RNA, 19 nt, Artificial Sequence
  Description of Artificial Sequence: Synthetic oligonucleotide
gcuucaccuuguuguaucu

SEQ ID NO: 2419483 - RNA, 19 nt, Artificial Sequence
  Description of Artificial Sequence: Synthetic oligonucleotide
cccuuucagggaacuuaug

SEQ ID NO: 2419484 - RNA, 19 nt, Artificial Sequence
  Description of Artificial Sequence: Synthetic oligonucleotide
uccccgaaccugcguccuu

SEQ ID NO: 2419485 - RNA, 19 nt, Artificial Sequence
  Description of Artificial Sequence: Synthetic oligonucleotide
ccagaaguucuccaucccu

SEQ ID NO: 2419486 - RNA, 19 nt, Artificial Sequence
  Description of Artificial Sequence: Synthetic oligonucleotide
uuauggccuccugcagcuu

SEQ ID NO: 2419487 - RNA, 19 nt, Artificial Sequence
  Description of Artificial Sequence: Synthetic oligonucleotide
gagaucccguccagguacu

SEQ ID NO: 2419488 - RNA, 19 nt, Artificial Sequence
  Description of Artificial Sequence: Synthetic oligonucleotide
ccuuaagcuuucggagcug

SEQ ID NO: 2419489 - RNA, 19 nt, Artificial Sequence
  Description of Artificial Sequence: Synthetic oligonucleotide
gcggguugaguuggcucag

SEQ ID NO: 2419490 - RNA, 19 nt, Artificial Sequence
  Description of Artificial Sequence: Synthetic oligonucleotide
caguuccuugaggguggug

SEQ ID NO: 2419491 - RNA, 19 nt, Artificial Sequence
  Description of Artificial Sequence: Synthetic oligonucleotide
guauaugcaccagcuccuu

SEQ ID NO: 2419492 - RNA, 19 nt, Artificial Sequence
  Description of Artificial Sequence: Synthetic oligonucleotide
gcaguacuuuucucuuccu

SEQ ID NO: 2419493 - RNA, 19 nt, Artificial Sequence
  Description of Artificial Sequence: Synthetic oligonucleotide
gcgugcgucugugcuggag

SEQ ID NO: 2419494 - RNA, 19 nt, Artificial Sequence
  Description of Artificial Sequence: Synthetic oligonucleotide
ccagggugaguuugacuaa

SEQ ID NO: 2419495 - RNA, 19 nt, Artificial Sequence
  Description of Artificial Sequence: Synthetic oligonucleotide
guaggcgaagaaagugcuu

SEQ ID NO: 2419496 - RNA, 19 nt, Artificial Sequence
  Description of Artificial Sequence: Synthetic oligonucleotide
cccgaaccugcguccuuug

SEQ ID NO: 2419497 - RNA, 19 nt, Artificial Sequence
  Description of Artificial Sequence: Synthetic oligonucleotide
ugcguccuuugggccuuaa

SEQ ID NO: 2419498 - RNA, 19 nt, Artificial Sequence
  Description of Artificial Sequence: Synthetic oligonucleotide
ccucaucgcucacugagau

SEQ ID NO: 2419499 - RNA, 19 nt, Artificial Sequence
  Description of Artificial Sequence: Synthetic oligonucleotide
gucuaacagcugcgugcgu

SEQ ID NO: 2419500 - RNA, 19 nt, Artificial Sequence
  Description of Artificial Sequence: Synthetic oligonucleotide
cacggcugugggauacgau

SEQ ID NO: 2419501 - RNA, 19 nt, Artificial Sequence
  Description of Artificial Sequence: Synthetic oligonucleotide
cugugaggucuuccggguu

SEQ ID NO: 2419502 - RNA, 19 nt, Artificial Sequence
  Description of Artificial Sequence: Synthetic oligonucleotide
gcuucccgcugaugucuaa

SEQ ID NO: 2419503 - RNA, 19 nt, Artificial Sequence
  Description of Artificial Sequence: Synthetic oligonucleotide
gggauacgaucuucccuuu

SEQ ID NO: 2419504 - RNA, 19 nt, Artificial Sequence
  Description of Artificial Sequence: Synthetic oligonucleotide
cucgaucucuuuggagcuu

SEQ ID NO: 2419505 - RNA, 19 nt, Artificial Sequence
  Description of Artificial Sequence: Synthetic oligonucleotide
cuccccgaaccugcguccu

SEQ ID NO: 2419506 - RNA, 19 nt, Artificial Sequence
  Description of Artificial Sequence: Synthetic oligonucleotide
cuguggcaucaguguaguu

SEQ ID NO: 2419507 - RNA, 19 nt, Artificial Sequence
  Description of Artificial Sequence: Synthetic oligonucleotide
ccuugagggugguguuacu

SEQ ID NO: 2419508 - RNA, 19 nt, Artificial Sequence
  Description of Artificial Sequence: Synthetic oligonucleotide
ccuguucacuggagucagu

SEQ ID NO: 2419509 - RNA, 19 nt, Artificial Sequence
  Description of Artificial Sequence: Synthetic oligonucleotide
ccuugucguugcggacaca

SEQ ID NO: 2419510 - RNA, 19 nt, Artificial Sequence
  Description of Artificial Sequence: Synthetic oligonucleotide
ccugcguccuuugggccuu

SEQ ID NO: 2419511 - RNA, 19 nt, Artificial Sequence
  Description of Artificial Sequence: Synthetic oligonucleotide
cggguucugucuuccuguu

SEQ ID NO: 2419512 - RNA, 19 nt, Artificial Sequence
  Description of Artificial Sequence: Synthetic oligonucleotide
ccccgaaccugcguccuuu

SEQ ID NO: 2419513 - RNA, 19 nt, Artificial Sequence
  Description of Artificial Sequence: Synthetic oligonucleotide
cguugcggacacagugguu

SEQ ID NO: 2419514 - RNA, 19 nt, Artificial Sequence
  Description of Artificial Sequence: Synthetic oligonucleotide
cgaucucuuuggagcuuuu

SEQ ID NO: 2419515 - RNA, 19 nt, Artificial Sequence
  Description of Artificial Sequence: Synthetic oligonucleotide
auuaccauaauuuuaaagg

SEQ ID NO: 2419516 - RNA, 19 nt, Artificial Sequence
  Description of Artificial Sequence: Synthetic oligonucleotide
auaaacacaaauuucagag

SEQ ID NO: 2419517 - RNA, 19 nt, Artificial Sequence
  Description of Artificial Sequence: Synthetic oligonucleotide
aauaagugaguacacaguc

SEQ ID NO: 2419518 - RNA, 19 nt, Artificial Sequence
  Description of Artificial Sequence: Synthetic oligonucleotide
uuuucauuuauuuuggacc

SEQ ID NO: 2419519 - RNA, 19 nt, Artificial Sequence
  Description of Artificial Sequence: Synthetic oligonucleotide
aaauagucugguaagaagc

SEQ ID NO: 2419520 - RNA, 19 nt, Artificial Sequence
  Description of Artificial Sequence: Synthetic oligonucleotide
uuaccauaauuuuaaaggg

SEQ ID NO: 2419521 - RNA, 19 nt, Artificial Sequence
  Description of Artificial Sequence: Synthetic oligonucleotide
uuuggaaaugcugagauag

SEQ ID NO: 2419522 - RNA, 19 nt, Artificial Sequence
  Description of Artificial Sequence: Synthetic oligonucleotide
aagauugggagucaguucu

SEQ ID NO: 2419523 - RNA, 19 nt, Artificial Sequence
  Description of Artificial Sequence: Synthetic oligonucleotide
aacagaaauagucugguaa

SEQ ID NO: 2419524 - RNA, 19 nt, Artificial Sequence
  Description of Artificial Sequence: Synthetic oligonucleotide
aaacaauuuucaucuagag

SEQ ID NO: 2419525 - RNA, 19 nt, Artificial Sequence
  Description of Artificial Sequence: Synthetic oligonucleotide
uuuuggacccuuacuaugg

SEQ ID NO: 2419526 - RNA, 19 nt, Artificial Sequence
  Description of Artificial Sequence: Synthetic oligonucleotide
gacagugaaaacaucaucc

SEQ ID NO: 2419527 - RNA, 19 nt, Artificial Sequence
  Description of Artificial Sequence: Synthetic oligonucleotide
aauuuuaaaggguggggcu

SEQ ID NO: 2419528 - RNA, 19 nt, Artificial Sequence
  Description of Artificial Sequence: Synthetic oligonucleotide
aacaauuuucaucuagaga

SEQ ID NO: 2419529 - RNA, 19 nt, Artificial Sequence
  Description of Artificial Sequence: Synthetic oligonucleotide
aauacagauguucuuuacu

SEQ ID NO: 2419530 - RNA, 19 nt, Artificial Sequence
  Description of Artificial Sequence: Synthetic oligonucleotide
ugauaaacacaaauuucag

SEQ ID NO: 2419531 - RNA, 19 nt, Artificial Sequence
  Description of Artificial Sequence: Synthetic oligonucleotide
uccauuaccauaauuuuaa

SEQ ID NO: 2419532 - RNA, 19 nt, Artificial Sequence
  Description of Artificial Sequence: Synthetic oligonucleotide
aguuuagggagguuaaguc

SEQ ID NO: 2419533 - RNA, 19 nt, Artificial Sequence
  Description of Artificial Sequence: Synthetic oligonucleotide
uagucugguaagaagcugg

SEQ ID NO: 2419534 - RNA, 19 nt, Artificial Sequence
  Description of Artificial Sequence: Synthetic oligonucleotide
ucugguaagaagcuggccu

SEQ ID NO: 2419535 - RNA, 19 nt, Artificial Sequence
  Description of Artificial Sequence: Synthetic oligonucleotide
ugaaaacaauuugaaaagg

SEQ ID NO: 2419536 - RNA, 19 nt, Artificial Sequence
  Description of Artificial Sequence: Synthetic oligonucleotide
uaagugaguacacaguccu

SEQ ID NO: 2419537 - RNA, 19 nt, Artificial Sequence
  Description of Artificial Sequence: Synthetic oligonucleotide
uuacuauggaagcugauaa

SEQ ID NO: 2419538 - RNA, 19 nt, Artificial Sequence
  Description of Artificial Sequence: Synthetic oligonucleotide
acuauggaagcugauaaac

SEQ ID NO: 2419539 - RNA, 19 nt, Artificial Sequence
  Description of Artificial Sequence: Synthetic oligonucleotide
uaagucuacauucccacca

SEQ ID NO: 2419540 - RNA, 19 nt, Artificial Sequence
  Description of Artificial Sequence: Synthetic oligonucleotide
uucauuuuagacugguagc

SEQ ID NO: 2419541 - RNA, 19 nt, Artificial Sequence
  Description of Artificial Sequence: Synthetic oligonucleotide
acagaaauagucugguaag

SEQ ID NO: 2419542 - RNA, 19 nt, Artificial Sequence
  Description of Artificial Sequence: Synthetic oligonucleotide
aguggauccagacaggaug

SEQ ID NO: 2419543 - RNA, 19 nt, Artificial Sequence
  Description of Artificial Sequence: Synthetic oligonucleotide
gauuccuaacugcugaugc

SEQ ID NO: 2419544 - RNA, 19 nt, Artificial Sequence
  Description of Artificial Sequence: Synthetic oligonucleotide
uucuggagggugaagauug

SEQ ID NO: 2419545 - RNA, 19 nt, Artificial Sequence
  Description of Artificial Sequence: Synthetic oligonucleotide
uuucagagauuccuaacug

SEQ ID NO: 2419546 - RNA, 19 nt, Artificial Sequence
  Description of Artificial Sequence: Synthetic oligonucleotide
agagcaauaagugaguaca

SEQ ID NO: 2419547 - RNA, 19 nt, Artificial Sequence
  Description of Artificial Sequence: Synthetic oligonucleotide
uguuuggaaaugcugagau

SEQ ID NO: 2419548 - RNA, 19 nt, Artificial Sequence
  Description of Artificial Sequence: Synthetic oligonucleotide
uaggauuuugaaaacaauu

SEQ ID NO: 2419549 - RNA, 19 nt, Artificial Sequence
  Description of Artificial Sequence: Synthetic oligonucleotide
aagagaguuguucucauua

SEQ ID NO: 2419550 - RNA, 19 nt, Artificial Sequence
  Description of Artificial Sequence: Synthetic oligonucleotide
ugugcuuacuuuucaagca

SEQ ID NO: 2419551 - RNA, 19 nt, Artificial Sequence
  Description of Artificial Sequence: Synthetic oligonucleotide
aaaacaauuuucaucuaga

SEQ ID NO: 2419552 - RNA, 19 nt, Artificial Sequence
  Description of Artificial Sequence: Synthetic oligonucleotide
aagucuacauucccaccac

SEQ ID NO: 2419553 - RNA, 19 nt, Artificial Sequence
  Description of Artificial Sequence: Synthetic oligonucleotide
ucaucaagagaguuguucu

SEQ ID NO: 2419554 - RNA, 19 nt, Artificial Sequence
  Description of Artificial Sequence: Synthetic oligonucleotide
agguauuugagccaaugcu

SEQ ID NO: 2419555 - RNA, 19 nt, Artificial Sequence
  Description of Artificial Sequence: Synthetic oligonucleotide
uggacccuuacuauggaag

SEQ ID NO: 2419556 - RNA, 19 nt, Artificial Sequence
  Description of Artificial Sequence: Synthetic oligonucleotide
uaauaggccagguauuuga

SEQ ID NO: 2419557 - RNA, 19 nt, Artificial Sequence
  Description of Artificial Sequence: Synthetic oligonucleotide
uuuucaucuagagacaauc

SEQ ID NO: 2419558 - RNA, 19 nt, Artificial Sequence
  Description of Artificial Sequence: Synthetic oligonucleotide
ugcaccaucacuuuuccuc

SEQ ID NO: 2419559 - RNA, 19 nt, Artificial Sequence
  Description of Artificial Sequence: Synthetic oligonucleotide
gagaguuguucucauuagg

SEQ ID NO: 2419560 - RNA, 19 nt, Artificial Sequence
  Description of Artificial Sequence: Synthetic oligonucleotide
ucauuuuagacugguagca

SEQ ID NO: 2419561 - RNA, 19 nt, Artificial Sequence
  Description of Artificial Sequence: Synthetic oligonucleotide
guucuuuacuucuggagag

SEQ ID NO: 2419562 - RNA, 19 nt, Artificial Sequence
  Description of Artificial Sequence: Synthetic oligonucleotide
uuuagggagguuaagucua

SEQ ID NO: 2419563 - RNA, 19 nt, Artificial Sequence
  Description of Artificial Sequence: Synthetic oligonucleotide
agguuaagucuacauuccc

SEQ ID NO: 2419564 - RNA, 19 nt, Artificial Sequence
  Description of Artificial Sequence: Synthetic oligonucleotide
guuaagucuacauucccac

SEQ ID NO: 2419565 - RNA, 19 nt, Artificial Sequence
  Description of Artificial Sequence: Synthetic oligonucleotide
agcugauaaacacaaauuu

SEQ ID NO: 2419566 - RNA, 19 nt, Artificial Sequence
  Description of Artificial Sequence: Synthetic oligonucleotide
ugcuugaccuccauuacca

SEQ ID NO: 2419567 - RNA, 19 nt, Artificial Sequence
  Description of Artificial Sequence: Synthetic oligonucleotide
aucuguugucaguggaucc

SEQ ID NO: 2419568 - RNA, 19 nt, Artificial Sequence
  Description of Artificial Sequence: Synthetic oligonucleotide
ucucauuaggauuuugaaa

SEQ ID NO: 2419569 - RNA, 19 nt, Artificial Sequence
  Description of Artificial Sequence: Synthetic oligonucleotide
gcugaugcggcuuuggugg

SEQ ID NO: 2419570 - RNA, 19 nt, Artificial Sequence
  Description of Artificial Sequence: Synthetic oligonucleotide
cugaguacaauacagaugu

SEQ ID NO: 2419571 - RNA, 19 nt, Artificial Sequence
  Description of Artificial Sequence: Synthetic oligonucleotide
auaagugaguacacagucc

SEQ ID NO: 2419572 - RNA, 19 nt, Artificial Sequence
  Description of Artificial Sequence: Synthetic oligonucleotide
uuuuagacugguagcaguc

SEQ ID NO: 2419573 - RNA, 19 nt, Artificial Sequence
  Description of Artificial Sequence: Synthetic oligonucleotide
auagcacugcagccaaucc

SEQ ID NO: 2419574 - RNA, 19 nt, Artificial Sequence
  Description of Artificial Sequence: Synthetic oligonucleotide
cugugcuuacuuuucaagc

SEQ ID NO: 2419575 - RNA, 19 nt, Artificial Sequence
  Description of Artificial Sequence: Synthetic oligonucleotide
ucaagcagagcacagccuc

SEQ ID NO: 2419576 - RNA, 19 nt, Artificial Sequence
  Description of Artificial Sequence: Synthetic oligonucleotide
auuuuggacccuuacuaug

SEQ ID NO: 2419577 - RNA, 19 nt, Artificial Sequence
  Description of Artificial Sequence: Synthetic oligonucleotide
ucuacauucccaccacuga

SEQ ID NO: 2419578 - RNA, 19 nt, Artificial Sequence
  Description of Artificial Sequence: Synthetic oligonucleotide
ugcuaugguuucuggaggg

SEQ ID NO: 2419579 - RNA, 19 nt, Artificial Sequence
  Description of Artificial Sequence: Synthetic oligonucleotide
ucuuggauugcuuaugguu

SEQ ID NO: 2419580 - RNA, 19 nt, Artificial Sequence
  Description of Artificial Sequence: Synthetic oligonucleotide
aaggucccuuauaauaggc

SEQ ID NO: 2419581 - RNA, 19 nt, Artificial Sequence
  Description of Artificial Sequence: Synthetic oligonucleotide
guagcagucaucugcauuc

SEQ ID NO: 2419582 - RNA, 19 nt, Artificial Sequence
  Description of Artificial Sequence: Synthetic oligonucleotide
uugauuucgucuucuguga

SEQ ID NO: 2419583 - RNA, 19 nt, Artificial Sequence
  Description of Artificial Sequence: Synthetic oligonucleotide
auuccuaacugcugaugcg

SEQ ID NO: 2419584 - RNA, 19 nt, Artificial Sequence
  Description of Artificial Sequence: Synthetic oligonucleotide
agcaguaggcucaaugagc

SEQ ID NO: 2419585 - RNA, 19 nt, Artificial Sequence
  Description of Artificial Sequence: Synthetic oligonucleotide
aguacaauacagauguucu

SEQ ID NO: 2419586 - RNA, 19 nt, Artificial Sequence
  Description of Artificial Sequence: Synthetic oligonucleotide
acuguuuggaaaugcugag

SEQ ID NO: 2419587 - RNA, 19 nt, Artificial Sequence
  Description of Artificial Sequence: Synthetic oligonucleotide
auuuuagacugguagcagu

SEQ ID NO: 2419588 - RNA, 19 nt, Artificial Sequence
  Description of Artificial Sequence: Synthetic oligonucleotide
uuccuaacugcugaugcgg

SEQ ID NO: 2419589 - RNA, 19 nt, Artificial Sequence
  Description of Artificial Sequence: Synthetic oligonucleotide
caaugcuugauuugacacc

SEQ ID NO: 2419590 - RNA, 19 nt, Artificial Sequence
  Description of Artificial Sequence: Synthetic oligonucleotide
auacagauguucuuuacuu

SEQ ID NO: 2419591 - RNA, 19 nt, Artificial Sequence
  Description of Artificial Sequence: Synthetic oligonucleotide
uuugcaccaucacuuuucc

SEQ ID NO: 2419592 - RNA, 19 nt, Artificial Sequence
  Description of Artificial Sequence: Synthetic oligonucleotide
ggagguuaagucuacauuc

SEQ ID NO: 2419593 - RNA, 19 nt, Artificial Sequence
  Description of Artificial Sequence: Synthetic oligonucleotide
uaugguuucuggaggguga

SEQ ID NO: 2419594 - RNA, 19 nt, Artificial Sequence
  Description of Artificial Sequence: Synthetic oligonucleotide
cuuauaauaggccagguau

SEQ ID NO: 2419595 - RNA, 19 nt, Artificial Sequence
  Description of Artificial Sequence: Synthetic oligonucleotide
guuucauucucucccacac

SEQ ID NO: 2419596 - RNA, 19 nt, Artificial Sequence
  Description of Artificial Sequence: Synthetic oligonucleotide
ugaguacacaguccugugc

SEQ ID NO: 2419597 - RNA, 19 nt, Artificial Sequence
  Description of Artificial Sequence: Synthetic oligonucleotide
aauuuucaucuagagacaa

SEQ ID NO: 2419598 - RNA, 19 nt, Artificial Sequence
  Description of Artificial Sequence: Synthetic oligonucleotide
uacuuuucaagcagagcac

SEQ ID NO: 2419599 - RNA, 19 nt, Artificial Sequence
  Description of Artificial Sequence: Synthetic oligonucleotide
gcagcauagcuuuugacag

SEQ ID NO: 2419600 - RNA, 19 nt, Artificial Sequence
  Description of Artificial Sequence: Synthetic oligonucleotide
ucacuuuuccuccugcauc

SEQ ID NO: 2419601 - RNA, 19 nt, Artificial Sequence
  Description of Artificial Sequence: Synthetic oligonucleotide
auucccaccacugaguaca

SEQ ID NO: 2419602 - RNA, 19 nt, Artificial Sequence
  Description of Artificial Sequence: Synthetic oligonucleotide
uucgucuucugugacagug

SEQ ID NO: 2419603 - RNA, 19 nt, Artificial Sequence
  Description of Artificial Sequence: Synthetic oligonucleotide
gacaggauggucaucaaga

SEQ ID NO: 2419604 - RNA, 19 nt, Artificial Sequence
  Description of Artificial Sequence: Synthetic oligonucleotide
uuauaauaggccagguauu

SEQ ID NO: 2419605 - RNA, 19 nt, Artificial Sequence
  Description of Artificial Sequence: Synthetic oligonucleotide
uggguugcauacuugauuu

SEQ ID NO: 2419606 - RNA, 19 nt, Artificial Sequence
  Description of Artificial Sequence: Synthetic oligonucleotide
cauucagggguucugcagc

SEQ ID NO: 2419607 - RNA, 19 nt, Artificial Sequence
  Description of Artificial Sequence: Synthetic oligonucleotide
accacugaguacaauacag

SEQ ID NO: 2419608 - RNA, 19 nt, Artificial Sequence
  Description of Artificial Sequence: Synthetic oligonucleotide
uuuucaagcagagcacagc

SEQ ID NO: 2419609 - RNA, 19 nt, Artificial Sequence
  Description of Artificial Sequence: Synthetic oligonucleotide
uggucaucaagagaguugu

SEQ ID NO: 2419610 - RNA, 19 nt, Artificial Sequence
  Description of Artificial Sequence: Synthetic oligonucleotide
agggugaagauugggaguc

SEQ ID NO: 2419611 - RNA, 19 nt, Artificial Sequence
  Description of Artificial Sequence: Synthetic oligonucleotide
uugucaguggauccagaca

SEQ ID NO: 2419612 - RNA, 19 nt, Artificial Sequence
  Description of Artificial Sequence: Synthetic oligonucleotide
acaaucuucucaugaauuu

SEQ ID NO: 2419613 - RNA, 19 nt, Artificial Sequence
  Description of Artificial Sequence: Synthetic oligonucleotide
gacuguuuggaaaugcuga

SEQ ID NO: 2419614 - RNA, 19 nt, Artificial Sequence
  Description of Artificial Sequence: Synthetic oligonucleotide
guauuugagccaaugcuug

SEQ ID NO: 2419615 - RNA, 19 nt, Artificial Sequence
  Description of Artificial Sequence: Synthetic oligonucleotide
aggcucaaugagcaguuuc

SEQ ID NO: 2419616 - RNA, 19 nt, Artificial Sequence
  Description of Artificial Sequence: Synthetic oligonucleotide
ucccuuauaauaggccagg

SEQ ID NO: 2419617 - RNA, 19 nt, Artificial Sequence
  Description of Artificial Sequence: Synthetic oligonucleotide
auucagggguucugcagcg

SEQ ID NO: 2419618 - RNA, 19 nt, Artificial Sequence
  Description of Artificial Sequence: Synthetic oligonucleotide
agucaucugcauucagggg

SEQ ID NO: 2419619 - RNA, 19 nt, Artificial Sequence
  Description of Artificial Sequence: Synthetic oligonucleotide
auuuuaaaggguggggcug

SEQ ID NO: 2419620 - RNA, 19 nt, Artificial Sequence
  Description of Artificial Sequence: Synthetic oligonucleotide
gauugcuuaugguuucuca

SEQ ID NO: 2419621 - RNA, 19 nt, Artificial Sequence
  Description of Artificial Sequence: Synthetic oligonucleotide
gugcuuacuuuucaagcag

SEQ ID NO: 2419622 - RNA, 19 nt, Artificial Sequence
  Description of Artificial Sequence: Synthetic oligonucleotide
gaagauugggagucaguuc

SEQ ID NO: 2419623 - RNA, 19 nt, Artificial Sequence
  Description of Artificial Sequence: Synthetic oligonucleotide
uucugcagcguauaccuuc

SEQ ID NO: 2419624 - RNA, 19 nt, Artificial Sequence
  Description of Artificial Sequence: Synthetic oligonucleotide
uguggcagcagcauagcuu

SEQ ID NO: 2419625 - RNA, 19 nt, Artificial Sequence
  Description of Artificial Sequence: Synthetic oligonucleotide
cuguguggcagcagcauag

SEQ ID NO: 2419626 - RNA, 19 nt, Artificial Sequence
  Description of Artificial Sequence: Synthetic oligonucleotide
cucaugaauuuaaacagaa

SEQ ID NO: 2419627 - RNA, 19 nt, Artificial Sequence
  Description of Artificial Sequence: Synthetic oligonucleotide
uauaauaggccagguauuu

SEQ ID NO: 2419628 - RNA, 19 nt, Artificial Sequence
  Description of Artificial Sequence: Synthetic oligonucleotide
gauccagacaggaugguca

SEQ ID NO: 2419629 - RNA, 19 nt, Artificial Sequence
  Description of Artificial Sequence: Synthetic oligonucleotide
uacagauguucuuuacuuc

SEQ ID NO: 2419630 - RNA, 19 nt, Artificial Sequence
  Description of Artificial Sequence: Synthetic oligonucleotide
uugcuuaugguuucucaaa

SEQ ID NO: 2419631 - RNA, 19 nt, Artificial Sequence
  Description of Artificial Sequence: Synthetic oligonucleotide
uuagacugguagcagucau

SEQ ID NO: 2419632 - RNA, 19 nt, Artificial Sequence
  Description of Artificial Sequence: Synthetic oligonucleotide
ugcugaugcggcuuuggug

SEQ ID NO: 2419633 - RNA, 19 nt, Artificial Sequence
  Description of Artificial Sequence: Synthetic oligonucleotide
agacaggauggucaucaag

SEQ ID NO: 2419634 - RNA, 19 nt, Artificial Sequence
  Description of Artificial Sequence: Synthetic oligonucleotide
ucugcagcguauaccuuca

SEQ ID NO: 2419635 - RNA, 19 nt, Artificial Sequence
  Description of Artificial Sequence: Synthetic oligonucleotide
aguaggcucaaugagcagu

SEQ ID NO: 2419636 - RNA, 19 nt, Artificial Sequence
  Description of Artificial Sequence: Synthetic oligonucleotide
caauacagauguucuuuac

SEQ ID NO: 2419637 - RNA, 19 nt, Artificial Sequence
  Description of Artificial Sequence: Synthetic oligonucleotide
ugcagcguauaccuucaca

SEQ ID NO: 2419638 - RNA, 19 nt, Artificial Sequence
  Description of Artificial Sequence: Synthetic oligonucleotide
aagcugauaaacacaaauu

SEQ ID NO: 2419639 - RNA, 19 nt, Artificial Sequence
  Description of Artificial Sequence: Synthetic oligonucleotide
ucuuuacuucuggagagac

SEQ ID NO: 2419640 - RNA, 19 nt, Artificial Sequence
  Description of Artificial Sequence: Synthetic oligonucleotide
acugaguacaauacagaug

SEQ ID NO: 2419641 - RNA, 19 nt, Artificial Sequence
  Description of Artificial Sequence: Synthetic oligonucleotide
agcguauaccuucacacua

SEQ ID NO: 2419642 - RNA, 19 nt, Artificial Sequence
  Description of Artificial Sequence: Synthetic oligonucleotide
agacaaucuucucaugaau

SEQ ID NO: 2419643 - RNA, 19 nt, Artificial Sequence
  Description of Artificial Sequence: Synthetic oligonucleotide
cuauggaagcugauaaaca

SEQ ID NO: 2419644 - RNA, 19 nt, Artificial Sequence
  Description of Artificial Sequence: Synthetic oligonucleotide
aguuucauucucucccaca

SEQ ID NO: 2419645 - RNA, 19 nt, Artificial Sequence
  Description of Artificial Sequence: Synthetic oligonucleotide
aggucccuuauaauaggcc

SEQ ID NO: 2419646 - RNA, 19 nt, Artificial Sequence
  Description of Artificial Sequence: Synthetic oligonucleotide
gagacaaucuucucaugaa

SEQ ID NO: 2419647 - RNA, 19 nt, Artificial Sequence
  Description of Artificial Sequence: Synthetic oligonucleotide
ugauuucgucuucugugac

SEQ ID NO: 2419648 - RNA, 19 nt, Artificial Sequence
  Description of Artificial Sequence: Synthetic oligonucleotide
aucaagagaguuguucuca

SEQ ID NO: 2419649 - RNA, 19 nt, Artificial Sequence
  Description of Artificial Sequence: Synthetic oligonucleotide
accuccauuaccauaauuu

SEQ ID NO: 2419650 - RNA, 19 nt, Artificial Sequence
  Description of Artificial Sequence: Synthetic oligonucleotide
uucucucccacaccagcug

SEQ ID NO: 2419651 - RNA, 19 nt, Artificial Sequence
  Description of Artificial Sequence: Synthetic oligonucleotide
uuuggacccuuacuaugga

SEQ ID NO: 2419652 - RNA, 19 nt, Artificial Sequence
  Description of Artificial Sequence: Synthetic oligonucleotide
gauuucgucuucugugaca

SEQ ID NO: 2419653 - RNA, 19 nt, Artificial Sequence
  Description of Artificial Sequence: Synthetic oligonucleotide
guggauccagacaggaugg

SEQ ID NO: 2419654 - RNA, 19 nt, Artificial Sequence
  Description of Artificial Sequence: Synthetic oligonucleotide
acaauacagauguucuuua

SEQ ID NO: 2419655 - RNA, 19 nt, Artificial Sequence
  Description of Artificial Sequence: Synthetic oligonucleotide
gcagcguauaccuucacac

SEQ ID NO: 2419656 - RNA, 19 nt, Artificial Sequence
  Description of Artificial Sequence: Synthetic oligonucleotide
cuuaugguuucucaaaagu

SEQ ID NO: 2419657 - RNA, 19 nt, Artificial Sequence
  Description of Artificial Sequence: Synthetic oligonucleotide
cacaaggucccuuauaaua

SEQ ID NO: 2419658 - RNA, 19 nt, Artificial Sequence
  Description of Artificial Sequence: Synthetic oligonucleotide
uuuagacugguagcaguca

SEQ ID NO: 2419659 - RNA, 19 nt, Artificial Sequence
  Description of Artificial Sequence: Synthetic oligonucleotide
uccuaacugcugaugcggc

SEQ ID NO: 2419660 - RNA, 19 nt, Artificial Sequence
  Description of Artificial Sequence: Synthetic oligonucleotide
gucaucaagagaguuguuc

SEQ ID NO: 2419661 - RNA, 19 nt, Artificial Sequence
  Description of Artificial Sequence: Synthetic oligonucleotide
agucugguaagaagcuggc

SEQ ID NO: 2419662 - RNA, 19 nt, Artificial Sequence
  Description of Artificial Sequence: Synthetic oligonucleotide
uuuuaaaggguggggcugu

SEQ ID NO: 2419663 - RNA, 19 nt, Artificial Sequence
  Description of Artificial Sequence: Synthetic oligonucleotide
uccuuucauuuuagacugg

SEQ ID NO: 2419664 - RNA, 19 nt, Artificial Sequence
  Description of Artificial Sequence: Synthetic oligonucleotide
agccucauugcuacaggcc

SEQ ID NO: 2419665 - RNA, 19 nt, Artificial Sequence
  Description of Artificial Sequence: Synthetic oligonucleotide
cauuuuagacugguagcag

SEQ ID NO: 2419666 - RNA, 19 nt, Artificial Sequence
  Description of Artificial Sequence: Synthetic oligonucleotide
uacuauggaagcugauaaa

SEQ ID NO: 2419667 - RNA, 19 nt, Artificial Sequence
  Description of Artificial Sequence: Synthetic oligonucleotide
ugcuacaggccaucuguug

SEQ ID NO: 2419668 - RNA, 19 nt, Artificial Sequence
  Description of Artificial Sequence: Synthetic oligonucleotide
uuuugacagcucuuggauu

SEQ ID NO: 2419669 - RNA, 19 nt, Artificial Sequence
  Description of Artificial Sequence: Synthetic oligonucleotide
ccaaugcuugauuugacac

SEQ ID NO: 2419670 - RNA, 19 nt, Artificial Sequence
  Description of Artificial Sequence: Synthetic oligonucleotide
uuagggagguuaagucuac

SEQ ID NO: 2419671 - RNA, 19 nt, Artificial Sequence
  Description of Artificial Sequence: Synthetic oligonucleotide
agcaauaagugaguacaca

SEQ ID NO: 2419672 - RNA, 19 nt, Artificial Sequence
  Description of Artificial Sequence: Synthetic oligonucleotide
guuuagggagguuaagucu

SEQ ID NO: 2419673 - RNA, 19 nt, Artificial Sequence
  Description of Artificial Sequence: Synthetic oligonucleotide
caucaagagaguuguucuc

SEQ ID NO: 2419674 - RNA, 19 nt, Artificial Sequence
  Description of Artificial Sequence: Synthetic oligonucleotide
ucaagagaguuguucucau

SEQ ID NO: 2419675 - RNA, 19 nt, Artificial Sequence
  Description of Artificial Sequence: Synthetic oligonucleotide
ucgucuucugugacaguga

SEQ ID NO: 2419676 - RNA, 19 nt, Artificial Sequence
  Description of Artificial Sequence: Synthetic oligonucleotide
ggucccuuauaauaggcca

SEQ ID NO: 2419677 - RNA, 19 nt, Artificial Sequence
  Description of Artificial Sequence: Synthetic oligonucleotide
cauuaggauuuugaaaaca

SEQ ID NO: 2419678 - RNA, 19 nt, Artificial Sequence
  Description of Artificial Sequence: Synthetic oligonucleotide
gcuuaugguuucucaaaag

SEQ ID NO: 2419679 - RNA, 19 nt, Artificial Sequence
  Description of Artificial Sequence: Synthetic oligonucleotide
auagucugguaagaagcug

SEQ ID NO: 2419680 - RNA, 19 nt, Artificial Sequence
  Description of Artificial Sequence: Synthetic oligonucleotide
auggucaucaagagaguug

SEQ ID NO: 2419681 - RNA, 19 nt, Artificial Sequence
  Description of Artificial Sequence: Synthetic oligonucleotide
gugcuugaccuccauuacc

SEQ ID NO: 2419682 - RNA, 19 nt, Artificial Sequence
  Description of Artificial Sequence: Synthetic oligonucleotide
auaauaggccagguauuug

SEQ ID NO: 2419683 - RNA, 19 nt, Artificial Sequence
  Description of Artificial Sequence: Synthetic oligonucleotide
gcugauaaacacaaauuuc

SEQ ID NO: 2419684 - RNA, 19 nt, Artificial Sequence
  Description of Artificial Sequence: Synthetic oligonucleotide
agggagguuaagucuacau

SEQ ID NO: 2419685 - RNA, 19 nt, Artificial Sequence
  Description of Artificial Sequence: Synthetic oligonucleotide
gauuugacaccaucugcua

SEQ ID NO: 2419686 - RNA, 19 nt, Artificial Sequence
  Description of Artificial Sequence: Synthetic oligonucleotide
uagagacaaucuucucaug

SEQ ID NO: 2419687 - RNA, 19 nt, Artificial Sequence
  Description of Artificial Sequence: Synthetic oligonucleotide
ggacccuuacuauggaagc

SEQ ID NO: 2419688 - RNA, 19 nt, Artificial Sequence
  Description of Artificial Sequence: Synthetic oligonucleotide
auugggagucaguucuccu

SEQ ID NO: 2419689 - RNA, 19 nt, Artificial Sequence
  Description of Artificial Sequence: Synthetic oligonucleotide
gagccaaugcuugauuuga

SEQ ID NO: 2419690 - RNA, 19 nt, Artificial Sequence
  Description of Artificial Sequence: Synthetic oligonucleotide
acccuuacuauggaagcug

SEQ ID NO: 2419691 - RNA, 19 nt, Artificial Sequence
  Description of Artificial Sequence: Synthetic oligonucleotide
caucuagagacaaucuucu

SEQ ID NO: 2419692 - RNA, 19 nt, Artificial Sequence
  Description of Artificial Sequence: Synthetic oligonucleotide
gucccuuauaauaggccag

SEQ ID NO: 2419693 - RNA, 19 nt, Artificial Sequence
  Description of Artificial Sequence: Synthetic oligonucleotide
cagcauagcuuuugacagc

SEQ ID NO: 2419694 - RNA, 19 nt, Artificial Sequence
  Description of Artificial Sequence: Synthetic oligonucleotide
cugugcuugaccuccauua

SEQ ID NO: 2419695 - RNA, 19 nt, Artificial Sequence
  Description of Artificial Sequence: Synthetic oligonucleotide
uugggagucaguucuccuu

SEQ ID NO: 2419696 - RNA, 19 nt, Artificial Sequence
  Description of Artificial Sequence: Synthetic oligonucleotide
acauucccaccacugagua

SEQ ID NO: 2419697 - RNA, 19 nt, Artificial Sequence
  Description of Artificial Sequence: Synthetic oligonucleotide
cuacaggccaucuguuguc

SEQ ID NO: 2419698 - RNA, 19 nt, Artificial Sequence
  Description of Artificial Sequence: Synthetic oligonucleotide
caucuguugucaguggauc

SEQ ID NO: 2419699 - RNA, 19 nt, Artificial Sequence
  Description of Artificial Sequence: Synthetic oligonucleotide
cuuggauugcuuaugguuu

SEQ ID NO: 2419700 - RNA, 19 nt, Artificial Sequence
  Description of Artificial Sequence: Synthetic oligonucleotide
gguucugcagcguauaccu

SEQ ID NO: 2419701 - RNA, 19 nt, Artificial Sequence
  Description of Artificial Sequence: Synthetic oligonucleotide
ucagggguucugcagcgua

SEQ ID NO: 2419702 - RNA, 19 nt, Artificial Sequence
  Description of Artificial Sequence: Synthetic oligonucleotide
auuugagccaaugcuugau

SEQ ID NO: 2419703 - RNA, 19 nt, Artificial Sequence
  Description of Artificial Sequence: Synthetic oligonucleotide
gcaccaucacuuuuccucc

SEQ ID NO: 2419704 - RNA, 19 nt, Artificial Sequence
  Description of Artificial Sequence: Synthetic oligonucleotide
uuggacccuuacuauggaa

SEQ ID NO: 2419705 - RNA, 19 nt, Artificial Sequence
  Description of Artificial Sequence: Synthetic oligonucleotide
gaguuguucucauuaggau

SEQ ID NO: 2419706 - RNA, 19 nt, Artificial Sequence
  Description of Artificial Sequence: Synthetic oligonucleotide
agcucuuggauugcuuaug

SEQ ID NO: 2419707 - RNA, 19 nt, Artificial Sequence
  Description of Artificial Sequence: Synthetic oligonucleotide
aagugaguacacaguccug

SEQ ID NO: 2419708 - RNA, 19 nt, Artificial Sequence
  Description of Artificial Sequence: Synthetic oligonucleotide
cacaguccugugcuugacc

SEQ ID NO: 2419709 - RNA, 19 nt, Artificial Sequence
  Description of Artificial Sequence: Synthetic oligonucleotide
uuucagccugcuucaccca

SEQ ID NO: 2419710 - RNA, 19 nt, Artificial Sequence
  Description of Artificial Sequence: Synthetic oligonucleotide
acaccaucugcuaugguuu

SEQ ID NO: 2419711 - RNA, 19 nt, Artificial Sequence
  Description of Artificial Sequence: Synthetic oligonucleotide
ucagccugcuucacccagu

SEQ ID NO: 2419712 - RNA, 19 nt, Artificial Sequence
  Description of Artificial Sequence: Synthetic oligonucleotide
augcugagauagcacugca

SEQ ID NO: 2419713 - RNA, 19 nt, Artificial Sequence
  Description of Artificial Sequence: Synthetic oligonucleotide
gcuuacuuuucaagcagag

SEQ ID NO: 2419714 - RNA, 19 nt, Artificial Sequence
  Description of Artificial Sequence: Synthetic oligonucleotide
gcauucagggguucugcag

SEQ ID NO: 2419715 - RNA, 19 nt, Artificial Sequence
  Description of Artificial Sequence: Synthetic oligonucleotide
gguuaagucuacauuccca

SEQ ID NO: 2419716 - RNA, 19 nt, Artificial Sequence
  Description of Artificial Sequence: Synthetic oligonucleotide
uacaggccaucuguuguca

SEQ ID NO: 2419717 - RNA, 19 nt, Artificial Sequence
  Description of Artificial Sequence: Synthetic oligonucleotide
augagcaguuucauucucu

SEQ ID NO: 2419718 - RNA, 19 nt, Artificial Sequence
  Description of Artificial Sequence: Synthetic oligonucleotide
cugcauucagggguucugc

SEQ ID NO: 2419719 - RNA, 19 nt, Artificial Sequence
  Description of Artificial Sequence: Synthetic oligonucleotide
cacugaguacaauacagau

SEQ ID NO: 2419720 - RNA, 19 nt, Artificial Sequence
  Description of Artificial Sequence: Synthetic oligonucleotide
caacaccagcaguaggcuc

SEQ ID NO: 2419721 - RNA, 19 nt, Artificial Sequence
  Description of Artificial Sequence: Synthetic oligonucleotide
gccucauugcuacaggcca

SEQ ID NO: 2419722 - RNA, 19 nt, Artificial Sequence
  Description of Artificial Sequence: Synthetic oligonucleotide
ccaccacugaguacaauac

SEQ ID NO: 2419723 - RNA, 19 nt, Artificial Sequence
  Description of Artificial Sequence: Synthetic oligonucleotide
cauucccaccacugaguac

SEQ ID NO: 2419724 - RNA, 19 nt, Artificial Sequence
  Description of Artificial Sequence: Synthetic oligonucleotide
uuaaaggguggggcugugu

SEQ ID NO: 2419725 - RNA, 19 nt, Artificial Sequence
  Description of Artificial Sequence: Synthetic oligonucleotide
gccaauccaacaccagcag

SEQ ID NO: 2419726 - RNA, 19 nt, Artificial Sequence
  Description of Artificial Sequence: Synthetic oligonucleotide
cuugaccuccauuaccaua

SEQ ID NO: 2419727 - RNA, 19 nt, Artificial Sequence
  Description of Artificial Sequence: Synthetic oligonucleotide
gcaguaggcucaaugagca

SEQ ID NO: 2419728 - RNA, 19 nt, Artificial Sequence
  Description of Artificial Sequence: Synthetic oligonucleotide
ucacccaguuuagggaggu

SEQ ID NO: 2419729 - RNA, 19 nt, Artificial Sequence
  Description of Artificial Sequence: Synthetic oligonucleotide
acacaguccugugcuugac

SEQ ID NO: 2419730 - RNA, 19 nt, Artificial Sequence
  Description of Artificial Sequence: Synthetic oligonucleotide
uaacugcugaugcggcuuu

SEQ ID NO: 2419731 - RNA, 19 nt, Artificial Sequence
  Description of Artificial Sequence: Synthetic oligonucleotide
uggauugcuuaugguuucu

SEQ ID NO: 2419732 - RNA, 19 nt, Artificial Sequence
  Description of Artificial Sequence: Synthetic oligonucleotide
cacuuuuccuccugcaucu

SEQ ID NO: 2419733 - RNA, 19 nt, Artificial Sequence
  Description of Artificial Sequence: Synthetic oligonucleotide
aggccagguauuugagcca

SEQ ID NO: 2419734 - RNA, 19 nt, Artificial Sequence
  Description of Artificial Sequence: Synthetic oligonucleotide
ucauugcuacaggccaucu

SEQ ID NO: 2419735 - RNA, 19 nt, Artificial Sequence
  Description of Artificial Sequence: Synthetic oligonucleotide
caucugugcuuacuuuuca

SEQ ID NO: 2419736 - RNA, 19 nt, Artificial Sequence
  Description of Artificial Sequence: Synthetic oligonucleotide
gcggcuuugguggugacug

SEQ ID NO: 2419737 - RNA, 19 nt, Artificial Sequence
  Description of Artificial Sequence: Synthetic oligonucleotide
cacugcagccaauccaaca

SEQ ID NO: 2419738 - RNA, 19 nt, Artificial Sequence
  Description of Artificial Sequence: Synthetic oligonucleotide
guuuggaaaugcugagaua

SEQ ID NO: 2419739 - RNA, 19 nt, Artificial Sequence
  Description of Artificial Sequence: Synthetic oligonucleotide
acccaguuuagggagguua

SEQ ID NO: 2419740 - RNA, 19 nt, Artificial Sequence
  Description of Artificial Sequence: Synthetic oligonucleotide
gccaaugcuugauuugaca

SEQ ID NO: 2419741 - RNA, 19 nt, Artificial Sequence
  Description of Artificial Sequence: Synthetic oligonucleotide
uugcaccaucacuuuuccu

SEQ ID NO: 2419742 - RNA, 19 nt, Artificial Sequence
  Description of Artificial Sequence: Synthetic oligonucleotide
gucugguaagaagcuggcc

SEQ ID NO: 2419743 - RNA, 19 nt, Artificial Sequence
  Description of Artificial Sequence: Synthetic oligonucleotide
gcguauaccuucacacuag

SEQ ID NO: 2419744 - RNA, 19 nt, Artificial Sequence
  Description of Artificial Sequence: Synthetic oligonucleotide
cuguuuggaaaugcugaga

SEQ ID NO: 2419745 - RNA, 19 nt, Artificial Sequence
  Description of Artificial Sequence: Synthetic oligonucleotide
aacugcugaugcggcuuug

SEQ ID NO: 2419746 - RNA, 19 nt, Artificial Sequence
  Description of Artificial Sequence: Synthetic oligonucleotide
uagggagguuaagucuaca

SEQ ID NO: 2419747 - RNA, 19 nt, Artificial Sequence
  Description of Artificial Sequence: Synthetic oligonucleotide
ugacagcucuuggauugcu

SEQ ID NO: 2419748 - RNA, 19 nt, Artificial Sequence
  Description of Artificial Sequence: Synthetic oligonucleotide
ugacaccaucugcuauggu

SEQ ID NO: 2419749 - RNA, 19 nt, Artificial Sequence
  Description of Artificial Sequence: Synthetic oligonucleotide
gauggucaucaagagaguu

SEQ ID NO: 2419750 - RNA, 19 nt, Artificial Sequence
  Description of Artificial Sequence: Synthetic oligonucleotide
cugcuucacccaguuuagg

SEQ ID NO: 2419751 - RNA, 19 nt, Artificial Sequence
  Description of Artificial Sequence: Synthetic oligonucleotide
uuucgucuucugugacagu

SEQ ID NO: 2419752 - RNA, 19 nt, Artificial Sequence
  Description of Artificial Sequence: Synthetic oligonucleotide
cguauaccuucacacuagg

SEQ ID NO: 2419753 - RNA, 19 nt, Artificial Sequence
  Description of Artificial Sequence: Synthetic oligonucleotide
ugaccuccauuaccauaau

SEQ ID NO: 2419754 - RNA, 19 nt, Artificial Sequence
  Description of Artificial Sequence: Synthetic oligonucleotide
gguauuugagccaaugcuu

SEQ ID NO: 2419755 - RNA, 19 nt, Artificial Sequence
  Description of Artificial Sequence: Synthetic oligonucleotide
ggguucugcagcguauacc

SEQ ID NO: 2419756 - RNA, 19 nt, Artificial Sequence
  Description of Artificial Sequence: Synthetic oligonucleotide
guugcauacuugauuucgu

SEQ ID NO: 2419757 - RNA, 19 nt, Artificial Sequence
  Description of Artificial Sequence: Synthetic oligonucleotide
ggagucaguucuccuuuca

SEQ ID NO: 2419758 - RNA, 19 nt, Artificial Sequence
  Description of Artificial Sequence: Synthetic oligonucleotide
gcuacaggccaucuguugu

SEQ ID NO: 2419759 - RNA, 19 nt, Artificial Sequence
  Description of Artificial Sequence: Synthetic oligonucleotide
uucccaccacugaguacaa

SEQ ID NO: 2419760 - RNA, 19 nt, Artificial Sequence
  Description of Artificial Sequence: Synthetic oligonucleotide
augcggcuuugguggugac

SEQ ID NO: 2419761 - RNA, 19 nt, Artificial Sequence
  Description of Artificial Sequence: Synthetic oligonucleotide
augguuucuggagggugaa

SEQ ID NO: 2419762 - RNA, 19 nt, Artificial Sequence
  Description of Artificial Sequence: Synthetic oligonucleotide
gacccuuacuauggaagcu

SEQ ID NO: 2419763 - RNA, 19 nt, Artificial Sequence
  Description of Artificial Sequence: Synthetic oligonucleotide
ccacugaguacaauacaga

SEQ ID NO: 2419764 - RNA, 19 nt, Artificial Sequence
  Description of Artificial Sequence: Synthetic oligonucleotide
uucagggguucugcagcgu

SEQ ID NO: 2419765 - RNA, 19 nt, Artificial Sequence
  Description of Artificial Sequence: Synthetic oligonucleotide
cuggguugcauacuugauu

SEQ ID NO: 2419766 - RNA, 19 nt, Artificial Sequence
  Description of Artificial Sequence: Synthetic oligonucleotide
cagcguauaccuucacacu

SEQ ID NO: 2419767 - RNA, 19 nt, Artificial Sequence
  Description of Artificial Sequence: Synthetic oligonucleotide
cccaccacugaguacaaua

SEQ ID NO: 2419768 - RNA, 19 nt, Artificial Sequence
  Description of Artificial Sequence: Synthetic oligonucleotide
ggauccagacaggaugguc

SEQ ID NO: 2419769 - RNA, 19 nt, Artificial Sequence
  Description of Artificial Sequence: Synthetic oligonucleotide
guauaccuucacacuaggu

SEQ ID NO: 2419770 - RNA, 19 nt, Artificial Sequence
  Description of Artificial Sequence: Synthetic oligonucleotide
gggagguuaagucuacauu

SEQ ID NO: 2419771 - RNA, 19 nt, Artificial Sequence
  Description of Artificial Sequence: Synthetic oligonucleotide
ccuuauaauaggccaggua

SEQ ID NO: 2419772 - RNA, 19 nt, Artificial Sequence
  Description of Artificial Sequence: Synthetic oligonucleotide
cucuuggauugcuuauggu

SEQ ID NO: 2419773 - RNA, 19 nt, Artificial Sequence
  Description of Artificial Sequence: Synthetic oligonucleotide
gggguucugcagcguauac

SEQ ID NO: 2419774 - RNA, 19 nt, Artificial Sequence
  Description of Artificial Sequence: Synthetic oligonucleotide
ggguugcauacuugauuuc

SEQ ID NO: 2419775 - RNA, 19 nt, Artificial Sequence
  Description of Artificial Sequence: Synthetic oligonucleotide
agcagagcacagccucauu

SEQ ID NO: 2419776 - RNA, 19 nt, Artificial Sequence
  Description of Artificial Sequence: Synthetic oligonucleotide
agggguucugcagcguaua

SEQ ID NO: 2419777 - RNA, 19 nt, Artificial Sequence
  Description of Artificial Sequence: Synthetic oligonucleotide
cugcagcguauaccuucac

SEQ ID NO: 2419778 - RNA, 19 nt, Artificial Sequence
  Description of Artificial Sequence: Synthetic oligonucleotide
gaccuccauuaccauaauu

SEQ ID NO: 2419779 - RNA, 19 nt, Artificial Sequence
  Description of Artificial Sequence: Synthetic oligonucleotide
ggauugcuuaugguuucuc

SEQ ID NO: 2419780 - RNA, 19 nt, Artificial Sequence
  Description of Artificial Sequence: Synthetic oligonucleotide
gguagcagucaucugcauu

SEQ ID NO: 2419781 - RNA, 19 nt, Artificial Sequence
  Description of Artificial Sequence: Synthetic oligonucleotide
cccuuacuauggaagcuga

SEQ ID NO: 2419782 - RNA, 19 nt, Artificial Sequence
  Description of Artificial Sequence: Synthetic oligonucleotide
caggccaucuguugucagu

SEQ ID NO: 2419783 - RNA, 19 nt, Artificial Sequence
  Description of Artificial Sequence: Synthetic oligonucleotide
uaggcucaaugagcaguuu

SEQ ID NO: 2419784 - RNA, 19 nt, Artificial Sequence
  Description of Artificial Sequence: Synthetic oligonucleotide
cccaguuuagggagguuaa

SEQ ID NO: 2419785 - RNA, 19 nt, Artificial Sequence
  Description of Artificial Sequence: Synthetic oligonucleotide
cagacaggauggucaucaa

SEQ ID NO: 2419786 - RNA, 19 nt, Artificial Sequence
  Description of Artificial Sequence: Synthetic oligonucleotide
ccauuaccauaauuuuaaa

SEQ ID NO: 2419787 - RNA, 19 nt, Artificial Sequence
  Description of Artificial Sequence: Synthetic oligonucleotide
gcuguguggcagcagcaua

SEQ ID NO: 2419788 - RNA, 19 nt, Artificial Sequence
  Description of Artificial Sequence: Synthetic oligonucleotide
ccuccauuaccauaauuuu

SEQ ID NO: 2419789 - RNA, 19 nt, Artificial Sequence
  Description of Artificial Sequence: Synthetic oligonucleotide
cagcucuuggauugcuuau

SEQ ID NO: 2419790 - RNA, 19 nt, Artificial Sequence
  Description of Artificial Sequence: Synthetic oligonucleotide
cuccugcaucugugcuuac

SEQ ID NO: 2419791 - RNA, 19 nt, Artificial Sequence
  Description of Artificial Sequence: Synthetic oligonucleotide
ucccaccacugaguacaau

SEQ ID NO: 2419792 - RNA, 19 nt, Artificial Sequence
  Description of Artificial Sequence: Synthetic oligonucleotide
caguggauccagacaggau

SEQ ID NO: 2419793 - RNA, 19 nt, Artificial Sequence
  Description of Artificial Sequence: Synthetic oligonucleotide
ccuuucauuuuagacuggu

SEQ ID NO: 2419794 - RNA, 19 nt, Artificial Sequence
  Description of Artificial Sequence: Synthetic oligonucleotide
augcuugauuugacaccau

SEQ ID NO: 2419795 - RNA, 19 nt, Artificial Sequence
  Description of Artificial Sequence: Synthetic oligonucleotide
ccaauccaacaccagcagu

SEQ ID NO: 2419796 - RNA, 19 nt, Artificial Sequence
  Description of Artificial Sequence: Synthetic oligonucleotide
cagggguucugcagcguau

SEQ ID NO: 2419797 - RNA, 19 nt, Artificial Sequence
  Description of Artificial Sequence: Synthetic oligonucleotide
cauccacaaggucccuuau

SEQ ID NO: 2419798 - RNA, 19 nt, Artificial Sequence
  Description of Artificial Sequence: Synthetic oligonucleotide
gggugaagauugggaguca

SEQ ID NO: 2419799 - RNA, 19 nt, Artificial Sequence
  Description of Artificial Sequence: Synthetic oligonucleotide
ccugcaucugugcuuacuu

SEQ ID NO: 2419800 - RNA, 19 nt, Artificial Sequence
  Description of Artificial Sequence: Synthetic oligonucleotide
ccuaacugcugaugcggcu

SEQ ID NO: 2419801 - RNA, 19 nt, Artificial Sequence
  Description of Artificial Sequence: Synthetic oligonucleotide
gcauagcuuuugacagcuc

SEQ ID NO: 2419802 - RNA, 19 nt, Artificial Sequence
  Description of Artificial Sequence: Synthetic oligonucleotide
gcuugaccuccauuaccau

SEQ ID NO: 2419803 - RNA, 19 nt, Artificial Sequence
  Description of Artificial Sequence: Synthetic oligonucleotide
cagccugcuucacccaguu

SEQ ID NO: 2419804 - RNA, 19 nt, Artificial Sequence
  Description of Artificial Sequence: Synthetic oligonucleotide
ccuuacuauggaagcugau

SEQ ID NO: 2419805 - RNA, 19 nt, Artificial Sequence
  Description of Artificial Sequence: Synthetic oligonucleotide
ccacaaggucccuuauaau

SEQ ID NO: 2419806 - RNA, 19 nt, Artificial Sequence
  Description of Artificial Sequence: Synthetic oligonucleotide
cccuuauaauaggccaggu

SEQ ID NO: 2419807 - RNA, 19 nt, Artificial Sequence
  Description of Artificial Sequence: Synthetic oligonucleotide
ccugugcuugaccuccauu

SEQ ID NO: 2419808 - RNA, 19 nt, Artificial Sequence
  Description of Artificial Sequence: Synthetic oligonucleotide
ggucaucaagagaguuguu

SEQ ID NO: 2419809 - RNA, 19 nt, Artificial Sequence
  Description of Artificial Sequence: Synthetic oligonucleotide
cacccaguuuagggagguu

SEQ ID NO: 2419810 - RNA, 19 nt, Artificial Sequence
  Description of Artificial Sequence: Synthetic oligonucleotide
caccagcaguaggcucaau

SEQ ID NO: 2419811 - RNA, 19 nt, Artificial Sequence
  Description of Artificial Sequence: Synthetic oligonucleotide
augaguaugguuuauaacc

SEQ ID NO: 2419812 - RNA, 19 nt, Artificial Sequence
  Description of Artificial Sequence: Synthetic oligonucleotide
auauguuacauucauacgg

SEQ ID NO: 2419813 - RNA, 19 nt, Artificial Sequence
  Description of Artificial Sequence: Synthetic oligonucleotide
acauauguuacauucauac

SEQ ID NO: 2419814 - RNA, 19 nt, Artificial Sequence
  Description of Artificial Sequence: Synthetic oligonucleotide
aaagccuuugcacauaccg

SEQ ID NO: 2419815 - RNA, 19 nt, Artificial Sequence
  Description of Artificial Sequence: Synthetic oligonucleotide
acauaugacauccauaggg

SEQ ID NO: 2419816 - RNA, 19 nt, Artificial Sequence
  Description of Artificial Sequence: Synthetic oligonucleotide
ucuuacauucuuuacaucc

SEQ ID NO: 2419817 - RNA, 19 nt, Artificial Sequence
  Description of Artificial Sequence: Synthetic oligonucleotide
aauguuuuccugcauuccg

SEQ ID NO: 2419818 - RNA, 19 nt, Artificial Sequence
  Description of Artificial Sequence: Synthetic oligonucleotide
acauucgucacacucauac

SEQ ID NO: 2419819 - RNA, 19 nt, Artificial Sequence
  Description of Artificial Sequence: Synthetic oligonucleotide
aguucugugauguacauug

SEQ ID NO: 2419820 - RNA, 19 nt, Artificial Sequence
  Description of Artificial Sequence: Synthetic oligonucleotide
acacauaugacauccauag

SEQ ID NO: 2419821 - RNA, 19 nt, Artificial Sequence
  Description of Artificial Sequence: Synthetic oligonucleotide
ugagagaugacuuaaugca

SEQ ID NO: 2419822 - RNA, 19 nt, Artificial Sequence
  Description of Artificial Sequence: Synthetic oligonucleotide
aaaaugauuucccacacau

SEQ ID NO: 2419823 - RNA, 19 nt, Artificial Sequence
  Description of Artificial Sequence: Synthetic oligonucleotide
ucugacuuacaguagaaag

SEQ ID NO: 2419824 - RNA, 19 nt, Artificial Sequence
  Description of Artificial Sequence: Synthetic oligonucleotide
ugguuuauaaccugugugg

SEQ ID NO: 2419825 - RNA, 19 nt, Artificial Sequence
  Description of Artificial Sequence: Synthetic oligonucleotide
uuugacuuccgauugaaug

SEQ ID NO: 2419826 - RNA, 19 nt, Artificial Sequence
  Description of Artificial Sequence: Synthetic oligonucleotide
uuuucugaugcacagugag

SEQ ID NO: 2419827 - RNA, 19 nt, Artificial Sequence
  Description of Artificial Sequence: Synthetic oligonucleotide
uguuacaugaucccucagg

SEQ ID NO: 2419828 - RNA, 19 nt, Artificial Sequence
  Description of Artificial Sequence: Synthetic oligonucleotide
ucugugauguacauugagg

SEQ ID NO: 2419829 - RNA, 19 nt, Artificial Sequence
  Description of Artificial Sequence: Synthetic oligonucleotide
aauguuuuccuacauuccu

SEQ ID NO: 2419830 - RNA, 19 nt, Artificial Sequence
  Description of Artificial Sequence: Synthetic oligonucleotide
ugauuucccacacauauga

SEQ ID NO: 2419831 - RNA, 19 nt, Artificial Sequence
  Description of Artificial Sequence: Synthetic oligonucleotide
uacaugaucccucagguga

SEQ ID NO: 2419832 - RNA, 19 nt, Artificial Sequence
  Description of Artificial Sequence: Synthetic oligonucleotide
ugugacuuacuguagaaug

SEQ ID NO: 2419833 - RNA, 19 nt, Artificial Sequence
  Description of Artificial Sequence: Synthetic oligonucleotide
auucgucacacucauacgg

SEQ ID NO: 2419834 - RNA, 19 nt, Artificial Sequence
  Description of Artificial Sequence: Synthetic oligonucleotide
uucaugaguuaccugaugc

SEQ ID NO: 2419835 - RNA, 19 nt, Artificial Sequence
  Description of Artificial Sequence: Synthetic oligonucleotide
uguguguguuacaugaucc

SEQ ID NO: 2419836 - RNA, 19 nt, Artificial Sequence
  Description of Artificial Sequence: Synthetic oligonucleotide
ugauguauaaugaggugug

SEQ ID NO: 2419837 - RNA, 19 nt, Artificial Sequence
  Description of Artificial Sequence: Synthetic oligonucleotide
ucguuucucacuuucauga

SEQ ID NO: 2419838 - RNA, 19 nt, Artificial Sequence
  Description of Artificial Sequence: Synthetic oligonucleotide
aggauuucuggugaaaagc

SEQ ID NO: 2419839 - RNA, 19 nt, Artificial Sequence
  Description of Artificial Sequence: Synthetic oligonucleotide
uguguuuucugauguacag

SEQ ID NO: 2419840 - RNA, 19 nt, Artificial Sequence
  Description of Artificial Sequence: Synthetic oligonucleotide
uguauaaugaggugugacu

SEQ ID NO: 2419841 - RNA, 19 nt, Artificial Sequence
  Description of Artificial Sequence: Synthetic oligonucleotide
ugagggaugacuuaugaua

SEQ ID NO: 2419842 - RNA, 19 nt, Artificial Sequence
  Description of Artificial Sequence: Synthetic oligonucleotide
aaugcaggaauguuuuccu

SEQ ID NO: 2419843 - RNA, 19 nt, Artificial Sequence
  Description of Artificial Sequence: Synthetic oligonucleotide
ugagggaugacuuauggua

SEQ ID NO: 2419844 - RNA, 19 nt, Artificial Sequence
  Description of Artificial Sequence: Synthetic oligonucleotide
uuuuccugcauuccgguga

SEQ ID NO: 2419845 - RNA, 19 nt, Artificial Sequence
  Description of Artificial Sequence: Synthetic oligonucleotide
ugaguaugguuuauaaccu

SEQ ID NO: 2419846 - RNA, 19 nt, Artificial Sequence
  Description of Artificial Sequence: Synthetic oligonucleotide
ugaggucugacuuacagua

SEQ ID NO: 2419847 - RNA, 19 nt, Artificial Sequence
  Description of Artificial Sequence: Synthetic oligonucleotide
ugauagaauguuuuccuac

SEQ ID NO: 2419848 - RNA, 19 nt, Artificial Sequence
  Description of Artificial Sequence: Synthetic oligonucleotide
augguuuauaaccugugug

SEQ ID NO: 2419849 - RNA, 19 nt, Artificial Sequence
  Description of Artificial Sequence: Synthetic oligonucleotide
uccgguaaaaugauuuccc

SEQ ID NO: 2419850 - RNA, 19 nt, Artificial Sequence
  Description of Artificial Sequence: Synthetic oligonucleotide
cauauguuacauucauacg

SEQ ID NO: 2419851 - RNA, 19 nt, Artificial Sequence
  Description of Artificial Sequence: Synthetic oligonucleotide
uugacuuccgauugaaugu

SEQ ID NO: 2419852 - RNA, 19 nt, Artificial Sequence
  Description of Artificial Sequence: Synthetic oligonucleotide
uguacauugaggucugacu

SEQ ID NO: 2419853 - RNA, 19 nt, Artificial Sequence
  Description of Artificial Sequence: Synthetic oligonucleotide
uacaguagaaaguuuuccu

SEQ ID NO: 2419854 - RNA, 19 nt, Artificial Sequence
  Description of Artificial Sequence: Synthetic oligonucleotide
gugagagaugacuuaaugc

SEQ ID NO: 2419855 - RNA, 19 nt, Artificial Sequence
  Description of Artificial Sequence: Synthetic oligonucleotide
uaaugcaggaauguuuucc

SEQ ID NO: 2419856 - RNA, 19 nt, Artificial Sequence
  Description of Artificial Sequence: Synthetic oligonucleotide
agugagagaugacuuaaug

SEQ ID NO: 2419857 - RNA, 19 nt, Artificial Sequence
  Description of Artificial Sequence: Synthetic oligonucleotide
caggugaauuuucugaugc

SEQ ID NO: 2419858 - RNA, 19 nt, Artificial Sequence
  Description of Artificial Sequence: Synthetic oligonucleotide
guucagguaggauuucugg

SEQ ID NO: 2419859 - RNA, 19 nt, Artificial Sequence
  Description of Artificial Sequence: Synthetic oligonucleotide
auaccggacauucguaggg

SEQ ID NO: 2419860 - RNA, 19 nt, Artificial Sequence
  Description of Artificial Sequence: Synthetic oligonucleotide
cuuaugauagaauguuuuc

SEQ ID NO: 2419861 - RNA, 19 nt, Artificial Sequence
  Description of Artificial Sequence: Synthetic oligonucleotide
uaugguuuauaaccugugu

SEQ ID NO: 2419862 - RNA, 19 nt, Artificial Sequence
  Description of Artificial Sequence: Synthetic oligonucleotide
ugguagaaaguuuucuuac

SEQ ID NO: 2419863 - RNA, 19 nt, Artificial Sequence
  Description of Artificial Sequence: Synthetic oligonucleotide
uuacaguagaaaguuuucc

SEQ ID NO: 2419864 - RNA, 19 nt, Artificial Sequence
  Description of Artificial Sequence: Synthetic oligonucleotide
uugauggacagugagagau

SEQ ID NO: 2419865 - RNA, 19 nt, Artificial Sequence
  Description of Artificial Sequence: Synthetic oligonucleotide
ugcaggaauguuuuccugc

SEQ ID NO: 2419866 - RNA, 19 nt, Artificial Sequence
  Description of Artificial Sequence: Synthetic oligonucleotide
gagggaugacuuaugauag

SEQ ID NO: 2419867 - RNA, 19 nt, Artificial Sequence
  Description of Artificial Sequence: Synthetic oligonucleotide
uuucucacuuucaugaguu

SEQ ID NO: 2419868 - RNA, 19 nt, Artificial Sequence
  Description of Artificial Sequence: Synthetic oligonucleotide
aaucguuucucacuuucau

SEQ ID NO: 2419869 - RNA, 19 nt, Artificial Sequence
  Description of Artificial Sequence: Synthetic oligonucleotide
cucacuuucaugaguuacc

SEQ ID NO: 2419870 - RNA, 19 nt, Artificial Sequence
  Description of Artificial Sequence: Synthetic oligonucleotide
ucaugaguuaccugaugcc

SEQ ID NO: 2419871 - RNA, 19 nt, Artificial Sequence
  Description of Artificial Sequence: Synthetic oligonucleotide
uaugguuugucaccugugu

SEQ ID NO: 2419872 - RNA, 19 nt, Artificial Sequence
  Description of Artificial Sequence: Synthetic oligonucleotide
uaggauuucuggugaaaag

SEQ ID NO: 2419873 - RNA, 19 nt, Artificial Sequence
  Description of Artificial Sequence: Synthetic oligonucleotide
agugaggugugacuuacug

SEQ ID NO: 2419874 - RNA, 19 nt, Artificial Sequence
  Description of Artificial Sequence: Synthetic oligonucleotide
ucuggugaaaagccuuugc

SEQ ID NO: 2419875 - RNA, 19 nt, Artificial Sequence
  Description of Artificial Sequence: Synthetic oligonucleotide
agagaugacuuaaugcagg

SEQ ID NO: 2419876 - RNA, 19 nt, Artificial Sequence
  Description of Artificial Sequence: Synthetic oligonucleotide
uguguuacaugaucccuca

SEQ ID NO: 2419877 - RNA, 19 nt, Artificial Sequence
  Description of Artificial Sequence: Synthetic oligonucleotide
ugauggauagugagggaug

SEQ ID NO: 2419878 - RNA, 19 nt, Artificial Sequence
  Description of Artificial Sequence: Synthetic oligonucleotide
ugacuuaugguagaaaguu

SEQ ID NO: 2419879 - RNA, 19 nt, Artificial Sequence
  Description of Artificial Sequence: Synthetic oligonucleotide
caguagaaaguuuuccuac

SEQ ID NO: 2419880 - RNA, 19 nt, Artificial Sequence
  Description of Artificial Sequence: Synthetic oligonucleotide
uccgauugaauguuuccug

SEQ ID NO: 2419881 - RNA, 19 nt, Artificial Sequence
  Description of Artificial Sequence: Synthetic oligonucleotide
acucaaaucguuucucacu

SEQ ID NO: 2419882 - RNA, 19 nt, Artificial Sequence
  Description of Artificial Sequence: Synthetic oligonucleotide
acauaccggacauucguag

SEQ ID NO: 2419883 - RNA, 19 nt, Artificial Sequence
  Description of Artificial Sequence: Synthetic oligonucleotide
uccauaggguuucucaccu

SEQ ID NO: 2419884 - RNA, 19 nt, Artificial Sequence
  Description of Artificial Sequence: Synthetic oligonucleotide
gauugaauguuuccuggca

SEQ ID NO: 2419885 - RNA, 19 nt, Artificial Sequence
  Description of Artificial Sequence: Synthetic oligonucleotide
uuuauaaccuguguggcuu

SEQ ID NO: 2419886 - RNA, 19 nt, Artificial Sequence
  Description of Artificial Sequence: Synthetic oligonucleotide
auaaugaggugugacuuag

SEQ ID NO: 2419887 - RNA, 19 nt, Artificial Sequence
  Description of Artificial Sequence: Synthetic oligonucleotide
gaugacuuaaugcaggaau

SEQ ID NO: 2419888 - RNA, 19 nt, Artificial Sequence
  Description of Artificial Sequence: Synthetic oligonucleotide
uacauucuucgcaugagua

SEQ ID NO: 2419889 - RNA, 19 nt, Artificial Sequence
  Description of Artificial Sequence: Synthetic oligonucleotide
uuuccuggcaugcuucaca

SEQ ID NO: 2419890 - RNA, 19 nt, Artificial Sequence
  Description of Artificial Sequence: Synthetic oligonucleotide
caugaguaugguuuauaac

SEQ ID NO: 2419891 - RNA, 19 nt, Artificial Sequence
  Description of Artificial Sequence: Synthetic oligonucleotide
uguucagguaggauuucug

SEQ ID NO: 2419892 - RNA, 19 nt, Artificial Sequence
  Description of Artificial Sequence: Synthetic oligonucleotide
ucccacacauaugacaucc

SEQ ID NO: 2419893 - RNA, 19 nt, Artificial Sequence
  Description of Artificial Sequence: Synthetic oligonucleotide
uccuacauucuucgcauga

SEQ ID NO: 2419894 - RNA, 19 nt, Artificial Sequence
  Description of Artificial Sequence: Synthetic oligonucleotide
uucagguaggauuucuggu

SEQ ID NO: 2419895 - RNA, 19 nt, Artificial Sequence
  Description of Artificial Sequence: Synthetic oligonucleotide
acauugaggucugacuuac

SEQ ID NO: 2419896 - RNA, 19 nt, Artificial Sequence
  Description of Artificial Sequence: Synthetic oligonucleotide
guguguguguguuacauga

SEQ ID NO: 2419897 - RNA, 19 nt, Artificial Sequence
  Description of Artificial Sequence: Synthetic oligonucleotide
ugacuuaugauagaauguu

SEQ ID NO: 2419898 - RNA, 19 nt, Artificial Sequence
  Description of Artificial Sequence: Synthetic oligonucleotide
gagagaugacuuaaugcag

SEQ ID NO: 2419899 - RNA, 19 nt, Artificial Sequence
  Description of Artificial Sequence: Synthetic oligonucleotide
ugcacauaccggacauucg

SEQ ID NO: 2419900 - RNA, 19 nt, Artificial Sequence
  Description of Artificial Sequence: Synthetic oligonucleotide
ugaauguuuccuggcaugc

SEQ ID NO: 2419901 - RNA, 19 nt, Artificial Sequence
  Description of Artificial Sequence: Synthetic oligonucleotide
gaaaagccuuugcacauac

SEQ ID NO: 2419902 - RNA, 19 nt, Artificial Sequence
  Description of Artificial Sequence: Synthetic oligonucleotide
ugacuuacaguagaaaguu

SEQ ID NO: 2419903 - RNA, 19 nt, Artificial Sequence
  Description of Artificial Sequence: Synthetic oligonucleotide
uuccgguaaaaugauuucc

SEQ ID NO: 2419904 - RNA, 19 nt, Artificial Sequence
  Description of Artificial Sequence: Synthetic oligonucleotide
aagccuuugcacauaccgg

SEQ ID NO: 2419905 - RNA, 19 nt, Artificial Sequence
  Description of Artificial Sequence: Synthetic oligonucleotide
guugaggugugacuuccgg

SEQ ID NO: 2419906 - RNA, 19 nt, Artificial Sequence
  Description of Artificial Sequence: Synthetic oligonucleotide
cuuccgauugaauguuucc

SEQ ID NO: 2419907 - RNA, 19 nt, Artificial Sequence
  Description of Artificial Sequence: Synthetic oligonucleotide
ugcauuccggugaaaaguc

SEQ ID NO: 2419908 - RNA, 19 nt, Artificial Sequence
  Description of Artificial Sequence: Synthetic oligonucleotide
caaaucguuucucacuuuc

SEQ ID NO: 2419909 - RNA, 19 nt, Artificial Sequence
  Description of Artificial Sequence: Synthetic oligonucleotide
aguuaccugaugccuguuc

SEQ ID NO: 2419910 - RNA, 19 nt, Artificial Sequence
  Description of Artificial Sequence: Synthetic oligonucleotide
cauaccggacauucguagg

SEQ ID NO: 2419911 - RNA, 19 nt, Artificial Sequence
  Description of Artificial Sequence: Synthetic oligonucleotide
agugagggaugacuuauga

SEQ ID NO: 2419912 - RNA, 19 nt, Artificial Sequence
  Description of Artificial Sequence: Synthetic oligonucleotide
ugugauguacauugagguc

SEQ ID NO: 2419913 - RNA, 19 nt, Artificial Sequence
  Description of Artificial Sequence: Synthetic oligonucleotide
cuuaugguagaaaguuuuc

SEQ ID NO: 2419914 - RNA, 19 nt, Artificial Sequence
  Description of Artificial Sequence: Synthetic oligonucleotide
gaguaugguuuauaaccug

SEQ ID NO: 2419915 - RNA, 19 nt, Artificial Sequence
  Description of Artificial Sequence: Synthetic oligonucleotide
acaguagaaaguuuuccua

SEQ ID NO: 2419916 - RNA, 19 nt, Artificial Sequence
  Description of Artificial Sequence: Synthetic oligonucleotide
ggugaaaagccuuugcaca

SEQ ID NO: 2419917 - RNA, 19 nt, Artificial Sequence
  Description of Artificial Sequence: Synthetic oligonucleotide
aaaagccuuugcacauacc

SEQ ID NO: 2419918 - RNA, 19 nt, Artificial Sequence
  Description of Artificial Sequence: Synthetic oligonucleotide
uccggugaaaagucuuucc

SEQ ID NO: 2419919 - RNA, 19 nt, Artificial Sequence
  Description of Artificial Sequence: Synthetic oligonucleotide
cuuacauucuuuacaucca

SEQ ID NO: 2419920 - RNA, 19 nt, Artificial Sequence
  Description of Artificial Sequence: Synthetic oligonucleotide
aucguuucucacuuucaug

SEQ ID NO: 2419921 - RNA, 19 nt, Artificial Sequence
  Description of Artificial Sequence: Synthetic oligonucleotide
ucucacuuucaugaguuac

SEQ ID NO: 2419922 - RNA, 19 nt, Artificial Sequence
  Description of Artificial Sequence: Synthetic oligonucleotide
cauucuucgcaugaguaug

SEQ ID NO: 2419923 - RNA, 19 nt, Artificial Sequence
  Description of Artificial Sequence: Synthetic oligonucleotide
uucgucacacucauacggu

SEQ ID NO: 2419924 - RNA, 19 nt, Artificial Sequence
  Description of Artificial Sequence: Synthetic oligonucleotide
uauaaugaggugugacuua

SEQ ID NO: 2419925 - RNA, 19 nt, Artificial Sequence
  Description of Artificial Sequence: Synthetic oligonucleotide
cauucgucacacucauacg

SEQ ID NO: 2419926 - RNA, 19 nt, Artificial Sequence
  Description of Artificial Sequence: Synthetic oligonucleotide
uuaccugaugccuguucag

SEQ ID NO: 2419927 - RNA, 19 nt, Artificial Sequence
  Description of Artificial Sequence: Synthetic oligonucleotide
ugaguuaccugaugccugu

SEQ ID NO: 2419928 - RNA, 19 nt, Artificial Sequence
  Description of Artificial Sequence: Synthetic oligonucleotide
gaauguuuuccugcauucc

SEQ ID NO: 2419929 - RNA, 19 nt, Artificial Sequence
  Description of Artificial Sequence: Synthetic oligonucleotide
ugcacagugagggaugacu

SEQ ID NO: 2419930 - RNA, 19 nt, Artificial Sequence
  Description of Artificial Sequence: Synthetic oligonucleotide
uguguguuacaugaucccu

SEQ ID NO: 2419931 - RNA, 19 nt, Artificial Sequence
  Description of Artificial Sequence: Synthetic oligonucleotide
uguggcuucuuugauggac

SEQ ID NO: 2419932 - RNA, 19 nt, Artificial Sequence
  Description of Artificial Sequence: Synthetic oligonucleotide
ugacuuaaugcaggaaugu

SEQ ID NO: 2419933 - RNA, 19 nt, Artificial Sequence
  Description of Artificial Sequence: Synthetic oligonucleotide
aggucugacuuacaguaga

SEQ ID NO: 2419934 - RNA, 19 nt, Artificial Sequence
  Description of Artificial Sequence: Synthetic oligonucleotide
uguugaggugugacuuccg

SEQ ID NO: 2419935 - RNA, 19 nt, Artificial Sequence
  Description of Artificial Sequence: Synthetic oligonucleotide
uuccucacacucaaaucgu

SEQ ID NO: 2419936 - RNA, 19 nt, Artificial Sequence
  Description of Artificial Sequence: Synthetic oligonucleotide
caugcuucacauucauaug

SEQ ID NO: 2419937 - RNA, 19 nt, Artificial Sequence
  Description of Artificial Sequence: Synthetic oligonucleotide
augacuuaaugcaggaaug

SEQ ID NO: 2419938 - RNA, 19 nt, Artificial Sequence
  Description of Artificial Sequence: Synthetic oligonucleotide
ucacuuucaugaguuaccu

SEQ ID NO: 2419939 - RNA, 19 nt, Artificial Sequence
  Description of Artificial Sequence: Synthetic oligonucleotide
guuaccugaugccuguuca

SEQ ID NO: 2419940 - RNA, 19 nt, Artificial Sequence
  Description of Artificial Sequence: Synthetic oligonucleotide
uaccugaugccuguucagg

SEQ ID NO: 2419941 - RNA, 19 nt, Artificial Sequence
  Description of Artificial Sequence: Synthetic oligonucleotide
uagaaaguuuucuuacauu

SEQ ID NO: 2419942 - RNA, 19 nt, Artificial Sequence
  Description of Artificial Sequence: Synthetic oligonucleotide
uguguguguguguuacaug

SEQ ID NO: 2419943 - RNA, 19 nt, Artificial Sequence
  Description of Artificial Sequence: Synthetic oligonucleotide
uuccgauugaauguuuccu

SEQ ID NO: 2419944 - RNA, 19 nt, Artificial Sequence
  Description of Artificial Sequence: Synthetic oligonucleotide
acuuaugauagaauguuuu

SEQ ID NO: 2419945 - RNA, 19 nt, Artificial Sequence
  Description of Artificial Sequence: Synthetic oligonucleotide
ugauggacagugagagaug

SEQ ID NO: 2419946 - RNA, 19 nt, Artificial Sequence
  Description of Artificial Sequence: Synthetic oligonucleotide
ugaugccuguucagguagg

SEQ ID NO: 2419947 - RNA, 19 nt, Artificial Sequence
  Description of Artificial Sequence: Synthetic oligonucleotide
augacuuaugauagaaugu

SEQ ID NO: 2419948 - RNA, 19 nt, Artificial Sequence
  Description of Artificial Sequence: Synthetic oligonucleotide
ggugaaaagucuuuccaca

SEQ ID NO: 2419949 - RNA, 19 nt, Artificial Sequence
  Description of Artificial Sequence: Synthetic oligonucleotide
acuuacaguagaaaguuuu

SEQ ID NO: 2419950 - RNA, 19 nt, Artificial Sequence
  Description of Artificial Sequence: Synthetic oligonucleotide
acauucuucgcaugaguau

SEQ ID NO: 2419951 - RNA, 19 nt, Artificial Sequence
  Description of Artificial Sequence: Synthetic oligonucleotide
guguguguuacaugauccc

SEQ ID NO: 2419952 - RNA, 19 nt, Artificial Sequence
  Description of Artificial Sequence: Synthetic oligonucleotide
guuacaugaucccucaggu

SEQ ID NO: 2419953 - RNA, 19 nt, Artificial Sequence
  Description of Artificial Sequence: Synthetic oligonucleotide
acuuaugguagaaaguuuu

SEQ ID NO: 2419954 - RNA, 19 nt, Artificial Sequence
  Description of Artificial Sequence: Synthetic oligonucleotide
auguuuuccuacauuccuc

SEQ ID NO: 2419955 - RNA, 19 nt, Artificial Sequence
  Description of Artificial Sequence: Synthetic oligonucleotide
ugccuguucagguaggauu

SEQ ID NO: 2419956 - RNA, 19 nt, Artificial Sequence
  Description of Artificial Sequence: Synthetic oligonucleotide
auguuuuccugcauuccgg

SEQ ID NO: 2419957 - RNA, 19 nt, Artificial Sequence
  Description of Artificial Sequence: Synthetic oligonucleotide
aaaucguuucucacuuuca

SEQ ID NO: 2419958 - RNA, 19 nt, Artificial Sequence
  Description of Artificial Sequence: Synthetic oligonucleotide
uuugauggacagugagaga

SEQ ID NO: 2419959 - RNA, 19 nt, Artificial Sequence
  Description of Artificial Sequence: Synthetic oligonucleotide
cacauaugacauccauagg

SEQ ID NO: 2419960 - RNA, 19 nt, Artificial Sequence
  Description of Artificial Sequence: Synthetic oligonucleotide
ggauuucuggugaaaagcc

SEQ ID NO: 2419961 - RNA, 19 nt, Artificial Sequence
  Description of Artificial Sequence: Synthetic oligonucleotide
cuuccgguaaaaugauuuc

SEQ ID NO: 2419962 - RNA, 19 nt, Artificial Sequence
  Description of Artificial Sequence: Synthetic oligonucleotide
uugcacauaccggacauuc

SEQ ID NO: 2419963 - RNA, 19 nt, Artificial Sequence
  Description of Artificial Sequence: Synthetic oligonucleotide
auucuucgcaugaguaugg

SEQ ID NO: 2419964 - RNA, 19 nt, Artificial Sequence
  Description of Artificial Sequence: Synthetic oligonucleotide
ucuggugccuguugaggug

SEQ ID NO: 2419965 - RNA, 19 nt, Artificial Sequence
  Description of Artificial Sequence: Synthetic oligonucleotide
uacauugaggucugacuua

SEQ ID NO: 2419966 - RNA, 19 nt, Artificial Sequence
  Description of Artificial Sequence: Synthetic oligonucleotide
acuuccgguaaaaugauuu

SEQ ID NO: 2419967 - RNA, 19 nt, Artificial Sequence
  Description of Artificial Sequence: Synthetic oligonucleotide
acuuccgauugaauguuuc

SEQ ID NO: 2419968 - RNA, 19 nt, Artificial Sequence
  Description of Artificial Sequence: Synthetic oligonucleotide
cugugauguacauugaggu

SEQ ID NO: 2419969 - RNA, 19 nt, Artificial Sequence
  Description of Artificial Sequence: Synthetic oligonucleotide
acuuaaugcaggaauguuu

SEQ ID NO: 2419970 - RNA, 19 nt, Artificial Sequence
  Description of Artificial Sequence: Synthetic oligonucleotide
gugauguacauugaggucu

SEQ ID NO: 2419971 - RNA, 19 nt, Artificial Sequence
  Description of Artificial Sequence: Synthetic oligonucleotide
uguuuccuggcaugcuuca

SEQ ID NO: 2419972 - RNA, 19 nt, Artificial Sequence
  Description of Artificial Sequence: Synthetic oligonucleotide
auagugagggaugacuuau

SEQ ID NO: 2419973 - RNA, 19 nt, Artificial Sequence
  Description of Artificial Sequence: Synthetic oligonucleotide
augauagaauguuuuccua

SEQ ID NO: 2419974 - RNA, 19 nt, Artificial Sequence
  Description of Artificial Sequence: Synthetic oligonucleotide
gguuuauaaccuguguggc

SEQ ID NO: 2419975 - RNA, 19 nt, Artificial Sequence
  Description of Artificial Sequence: Synthetic oligonucleotide
uuaaugcaggaauguuuuc

SEQ ID NO: 2419976 - RNA, 19 nt, Artificial Sequence
  Description of Artificial Sequence: Synthetic oligonucleotide
cuggugaaaagccuuugca

SEQ ID NO: 2419977 - RNA, 19 nt, Artificial Sequence
  Description of Artificial Sequence: Synthetic oligonucleotide
ucugauggauagugaggga

SEQ ID NO: 2419978 - RNA, 19 nt, Artificial Sequence
  Description of Artificial Sequence: Synthetic oligonucleotide
cugacuuacaguagaaagu

SEQ ID NO: 2419979 - RNA, 19 nt, Artificial Sequence
  Description of Artificial Sequence: Synthetic oligonucleotide
guaugguuuauaaccugug

SEQ ID NO: 2419980 - RNA, 19 nt, Artificial Sequence
  Description of Artificial Sequence: Synthetic oligonucleotide
cuuaaugcaggaauguuuu

SEQ ID NO: 2419981 - RNA, 19 nt, Artificial Sequence
  Description of Artificial Sequence: Synthetic oligonucleotide
agcagugugugugugugug

SEQ ID NO: 2419982 - RNA, 19 nt, Artificial Sequence
  Description of Artificial Sequence: Synthetic oligonucleotide
augacuuaugguagaaagu

SEQ ID NO: 2419983 - RNA, 19 nt, Artificial Sequence
  Description of Artificial Sequence: Synthetic oligonucleotide
uagugagggaugacuuaug

SEQ ID NO: 2419984 - RNA, 19 nt, Artificial Sequence
  Description of Artificial Sequence: Synthetic oligonucleotide
cuguguggcuucuuugaug

SEQ ID NO: 2419985 - RNA, 19 nt, Artificial Sequence
  Description of Artificial Sequence: Synthetic oligonucleotide
gauagugagggaugacuua

SEQ ID NO: 2419986 - RNA, 19 nt, Artificial Sequence
  Description of Artificial Sequence: Synthetic oligonucleotide
uucgcaugaguaugguuua

SEQ ID NO: 2419987 - RNA, 19 nt, Artificial Sequence
  Description of Artificial Sequence: Synthetic oligonucleotide
accugaugccuguucaggu

SEQ ID NO: 2419988 - RNA, 19 nt, Artificial Sequence
  Description of Artificial Sequence: Synthetic oligonucleotide
ccgauugaauguuuccugg

SEQ ID NO: 2419989 - RNA, 19 nt, Artificial Sequence
  Description of Artificial Sequence: Synthetic oligonucleotide
acagugagagaugacuuaa

SEQ ID NO: 2419990 - RNA, 19 nt, Artificial Sequence
  Description of Artificial Sequence: Synthetic oligonucleotide
ccuggcaugcuucacauuc

SEQ ID NO: 2419991 - RNA, 19 nt, Artificial Sequence
  Description of Artificial Sequence: Synthetic oligonucleotide
ucauaugguuugucaccug

SEQ ID NO: 2419992 - RNA, 19 nt, Artificial Sequence
  Description of Artificial Sequence: Synthetic oligonucleotide
cuucgcaugaguaugguuu

SEQ ID NO: 2419993 - RNA, 19 nt, Artificial Sequence
  Description of Artificial Sequence: Synthetic oligonucleotide
ugacuuacuguagaauguu

SEQ ID NO: 2419994 - RNA, 19 nt, Artificial Sequence
  Description of Artificial Sequence: Synthetic oligonucleotide
ucccucaggugaauuuucu

SEQ ID NO: 2419995 - RNA, 19 nt, Artificial Sequence
  Description of Artificial Sequence: Synthetic oligonucleotide
cuguugaggugugacuucc

SEQ ID NO: 2419996 - RNA, 19 nt, Artificial Sequence
  Description of Artificial Sequence: Synthetic oligonucleotide
augaguuaccugaugccug

SEQ ID NO: 2419997 - RNA, 19 nt, Artificial Sequence
  Description of Artificial Sequence: Synthetic oligonucleotide
ugaucccucaggugaauuu

SEQ ID NO: 2419998 - RNA, 19 nt, Artificial Sequence
  Description of Artificial Sequence: Synthetic oligonucleotide
gacagugagagaugacuua

SEQ ID NO: 2419999 - RNA, 19 nt, Artificial Sequence
  Description of Artificial Sequence: Synthetic oligonucleotide
uccugcauuccggugaaaa

SEQ ID NO: 2420000 - RNA, 19 nt, Artificial Sequence
  Description of Artificial Sequence: Synthetic oligonucleotide
auuucuggugaaaagccuu

SEQ ID NO: 2420001 - RNA, 19 nt, Artificial Sequence
  Description of Artificial Sequence: Synthetic oligonucleotide
uuccuggcaugcuucacau

SEQ ID NO: 2420002 - RNA, 19 nt, Artificial Sequence
  Description of Artificial Sequence: Synthetic oligonucleotide
acagugagggaugacuuau

SEQ ID NO: 2420003 - RNA, 19 nt, Artificial Sequence
  Description of Artificial Sequence: Synthetic oligonucleotide
guuuuccugcauuccggug

SEQ ID NO: 2420004 - RNA, 19 nt, Artificial Sequence
  Description of Artificial Sequence: Synthetic oligonucleotide
guacauugaggucugacuu

SEQ ID NO: 2420005 - RNA, 19 nt, Artificial Sequence
  Description of Artificial Sequence: Synthetic oligonucleotide
ugugugugugugugugugu

SEQ ID NO: 2420006 - RNA, 19 nt, Artificial Sequence
  Description of Artificial Sequence: Synthetic oligonucleotide
gauguauaaugagguguga

SEQ ID NO: 2420007 - RNA, 19 nt, Artificial Sequence
  Description of Artificial Sequence: Synthetic oligonucleotide
cugauguauaaugaggugu

SEQ ID NO: 2420008 - RNA, 19 nt, Artificial Sequence
  Description of Artificial Sequence: Synthetic oligonucleotide
gcaugcuucacauucauau

SEQ ID NO: 2420009 - RNA, 19 nt, Artificial Sequence
  Description of Artificial Sequence: Synthetic oligonucleotide
aaaugauuucccacacaua

SEQ ID NO: 2420010 - RNA, 19 nt, Artificial Sequence
  Description of Artificial Sequence: Synthetic oligonucleotide
gaggucugacuuacaguag

SEQ ID NO: 2420011 - RNA, 19 nt, Artificial Sequence
  Description of Artificial Sequence: Synthetic oligonucleotide
cuacauuccucacacucaa

SEQ ID NO: 2420012 - RNA, 19 nt, Artificial Sequence
  Description of Artificial Sequence: Synthetic oligonucleotide
uguguguguguguguuaca

SEQ ID NO: 2420013 - RNA, 19 nt, Artificial Sequence
  Description of Artificial Sequence: Synthetic oligonucleotide
augauuucccacacauaug

SEQ ID NO: 2420014 - RNA, 19 nt, Artificial Sequence
  Description of Artificial Sequence: Synthetic oligonucleotide
guguguguguguguguuac

SEQ ID NO: 2420015 - RNA, 19 nt, Artificial Sequence
  Description of Artificial Sequence: Synthetic oligonucleotide
guuuauaaccuguguggcu

SEQ ID NO: 2420016 - RNA, 19 nt, Artificial Sequence
  Description of Artificial Sequence: Synthetic oligonucleotide
guaggauuucuggugaaaa

SEQ ID NO: 2420017 - RNA, 19 nt, Artificial Sequence
  Description of Artificial Sequence: Synthetic oligonucleotide
gugugugugugugugugug

SEQ ID NO: 2420018 - RNA, 19 nt, Artificial Sequence
  Description of Artificial Sequence: Synthetic oligonucleotide
uggcaugcuucacauucau

SEQ ID NO: 2420019 - RNA, 19 nt, Artificial Sequence
  Description of Artificial Sequence: Synthetic oligonucleotide
ugccuguugaggugugacu

SEQ ID NO: 2420020 - RNA, 19 nt, Artificial Sequence
  Description of Artificial Sequence: Synthetic oligonucleotide
agugugugugugugugugu

SEQ ID NO: 2420021 - RNA, 19 nt, Artificial Sequence
  Description of Artificial Sequence: Synthetic oligonucleotide
uuccuacauucuucgcaug

SEQ ID NO: 2420022 - RNA, 19 nt, Artificial Sequence
  Description of Artificial Sequence: Synthetic oligonucleotide
uaccggacauucguagggc

SEQ ID NO: 2420023 - RNA, 19 nt, Artificial Sequence
  Description of Artificial Sequence: Synthetic oligonucleotide
cagugugugugugugugug

SEQ ID NO: 2420024 - RNA, 19 nt, Artificial Sequence
  Description of Artificial Sequence: Synthetic oligonucleotide
guuucucacuuucaugagu

SEQ ID NO: 2420025 - RNA, 19 nt, Artificial Sequence
  Description of Artificial Sequence: Synthetic oligonucleotide
guguguuacaugaucccuc

SEQ ID NO: 2420026 - RNA, 19 nt, Artificial Sequence
  Description of Artificial Sequence: Synthetic oligonucleotide
ugacuuccgauugaauguu

SEQ ID NO: 2420027 - RNA, 19 nt, Artificial Sequence
  Description of Artificial Sequence: Synthetic oligonucleotide
uauaaccuguguggcuucu

SEQ ID NO: 2420028 - RNA, 19 nt, Artificial Sequence
  Description of Artificial Sequence: Synthetic oligonucleotide
cacuuucaugaguuaccug

SEQ ID NO: 2420029 - RNA, 19 nt, Artificial Sequence
  Description of Artificial Sequence: Synthetic oligonucleotide
ucuucgcaugaguaugguu

SEQ ID NO: 2420030 - RNA, 19 nt, Artificial Sequence
  Description of Artificial Sequence: Synthetic oligonucleotide
guauaaugaggugugacuu

SEQ ID NO: 2420031 - RNA, 19 nt, Artificial Sequence
  Description of Artificial Sequence: Synthetic oligonucleotide
gauuucuggugaaaagccu

SEQ ID NO: 2420032 - RNA, 19 nt, Artificial Sequence
  Description of Artificial Sequence: Synthetic oligonucleotide
uccucacacucaaaucguu

SEQ ID NO: 2420033 - RNA, 19 nt, Artificial Sequence
  Description of Artificial Sequence: Synthetic oligonucleotide
ucaaaucguuucucacuuu

SEQ ID NO: 2420034 - RNA, 19 nt, Artificial Sequence
  Description of Artificial Sequence: Synthetic oligonucleotide
gcaugaguaugguuuauaa

SEQ ID NO: 2420035 - RNA, 19 nt, Artificial Sequence
  Description of Artificial Sequence: Synthetic oligonucleotide
gaugcacagugagggauga

SEQ ID NO: 2420036 - RNA, 19 nt, Artificial Sequence
  Description of Artificial Sequence: Synthetic oligonucleotide
cauaugguuugucaccugu

SEQ ID NO: 2420037 - RNA, 19 nt, Artificial Sequence
  Description of Artificial Sequence: Synthetic oligonucleotide
uuccggugaaaagucuuuc

SEQ ID NO: 2420038 - RNA, 19 nt, Artificial Sequence
  Description of Artificial Sequence: Synthetic oligonucleotide
uguguguguguguguguua

SEQ ID NO: 2420039 - RNA, 19 nt, Artificial Sequence
  Description of Artificial Sequence: Synthetic oligonucleotide
guguguuuucugauguaca

SEQ ID NO: 2420040 - RNA, 19 nt, Artificial Sequence
  Description of Artificial Sequence: Synthetic oligonucleotide
ccugcauuccggugaaaag

SEQ ID NO: 2420041 - RNA, 19 nt, Artificial Sequence
  Description of Artificial Sequence: Synthetic oligonucleotide
cagugagggaugacuuaug

SEQ ID NO: 2420042 - RNA, 19 nt, Artificial Sequence
  Description of Artificial Sequence: Synthetic oligonucleotide
uuucuacauucgucacacu

SEQ ID NO: 2420043 - RNA, 19 nt, Artificial Sequence
  Description of Artificial Sequence: Synthetic oligonucleotide
cucaaaucguuucucacuu

SEQ ID NO: 2420044 - RNA, 19 nt, Artificial Sequence
  Description of Artificial Sequence: Synthetic oligonucleotide
guguuacaugaucccucag

SEQ ID NO: 2420045 - RNA, 19 nt, Artificial Sequence
  Description of Artificial Sequence: Synthetic oligonucleotide
uucuucgcaugaguauggu

SEQ ID NO: 2420046 - RNA, 19 nt, Artificial Sequence
  Description of Artificial Sequence: Synthetic oligonucleotide
caugaguuaccugaugccu

SEQ ID NO: 2420047 - RNA, 19 nt, Artificial Sequence
  Description of Artificial Sequence: Synthetic oligonucleotide
gugacuuacuguagaaugu

SEQ ID NO: 2420048 - RNA, 19 nt, Artificial Sequence
  Description of Artificial Sequence: Synthetic oligonucleotide
agaugacuuaaugcaggaa

SEQ ID NO: 2420049 - RNA, 19 nt, Artificial Sequence
  Description of Artificial Sequence: Synthetic oligonucleotide
cucaggugaauuuucugau

SEQ ID NO: 2420050 - RNA, 19 nt, Artificial Sequence
  Description of Artificial Sequence: Synthetic oligonucleotide
gaugccuguucagguagga

SEQ ID NO: 2420051 - RNA, 19 nt, Artificial Sequence
  Description of Artificial Sequence: Synthetic oligonucleotide
aggugugacuuccgguaaa

SEQ ID NO: 2420052 - RNA, 19 nt, Artificial Sequence
  Description of Artificial Sequence: Synthetic oligonucleotide
gggaugacuuaugauagaa

SEQ ID NO: 2420053 - RNA, 19 nt, Artificial Sequence
  Description of Artificial Sequence: Synthetic oligonucleotide
cgauugaauguuuccuggc

SEQ ID NO: 2420054 - RNA, 19 nt, Artificial Sequence
  Description of Artificial Sequence: Synthetic oligonucleotide
uuccuacauuccucacacu

SEQ ID NO: 2420055 - RNA, 19 nt, Artificial Sequence
  Description of Artificial Sequence: Synthetic oligonucleotide
cuacauucuucgcaugagu

SEQ ID NO: 2420056 - RNA, 19 nt, Artificial Sequence
  Description of Artificial Sequence: Synthetic oligonucleotide
cugcauuccggugaaaagu

SEQ ID NO: 2420057 - RNA, 19 nt, Artificial Sequence
  Description of Artificial Sequence: Synthetic oligonucleotide
cuuugcacauaccggacau

SEQ ID NO: 2420058 - RNA, 19 nt, Artificial Sequence
  Description of Artificial Sequence: Synthetic oligonucleotide
ugucaccugugugaauuuu

SEQ ID NO: 2420059 - RNA, 19 nt, Artificial Sequence
  Description of Artificial Sequence: Synthetic oligonucleotide
auuccggugaaaagucuuu

SEQ ID NO: 2420060 - RNA, 19 nt, Artificial Sequence
  Description of Artificial Sequence: Synthetic oligonucleotide
uuugcacauaccggacauu

SEQ ID NO: 2420061 - RNA, 19 nt, Artificial Sequence
  Description of Artificial Sequence: Synthetic oligonucleotide
cuacauucgucacacucau

SEQ ID NO: 2420062 - RNA, 19 nt, Artificial Sequence
  Description of Artificial Sequence: Synthetic oligonucleotide
cacccguguguguuuucug

SEQ ID NO: 2420063 - RNA, 19 nt, Artificial Sequence
  Description of Artificial Sequence: Synthetic oligonucleotide
uggugccuguugaggugug

SEQ ID NO: 2420064 - RNA, 19 nt, Artificial Sequence
  Description of Artificial Sequence: Synthetic oligonucleotide
cacauaccggacauucgua

SEQ ID NO: 2420065 - RNA, 19 nt, Artificial Sequence
  Description of Artificial Sequence: Synthetic oligonucleotide
acaugaucccucaggugaa

SEQ ID NO: 2420066 - RNA, 19 nt, Artificial Sequence
  Description of Artificial Sequence: Synthetic oligonucleotide
gacuuaugauagaauguuu

SEQ ID NO: 2420067 - RNA, 19 nt, Artificial Sequence
  Description of Artificial Sequence: Synthetic oligonucleotide
cugauggauagugagggau

SEQ ID NO: 2420068 - RNA, 19 nt, Artificial Sequence
  Description of Artificial Sequence: Synthetic oligonucleotide
gacuuaaugcaggaauguu

SEQ ID NO: 2420069 - RNA, 19 nt, Artificial Sequence
  Description of Artificial Sequence: Synthetic oligonucleotide
gacuuagaguagaaaguuu

SEQ ID NO: 2420070 - RNA, 19 nt, Artificial Sequence
  Description of Artificial Sequence: Synthetic oligonucleotide
gaauguuuccuggcaugcu

SEQ ID NO: 2420071 - RNA, 19 nt, Artificial Sequence
  Description of Artificial Sequence: Synthetic oligonucleotide
gguuugacuuccgauugaa

SEQ ID NO: 2420072 - RNA, 19 nt, Artificial Sequence
  Description of Artificial Sequence: Synthetic oligonucleotide
gacuuaugguagaaaguuu

SEQ ID NO: 2420073 - RNA, 19 nt, Artificial Sequence
  Description of Artificial Sequence: Synthetic oligonucleotide
ccggugaaaagucuuucca

SEQ ID NO: 2420074 - RNA, 19 nt, Artificial Sequence
  Description of Artificial Sequence: Synthetic oligonucleotide
guguuuucugauguacagu

SEQ ID NO: 2420075 - RNA, 19 nt, Artificial Sequence
  Description of Artificial Sequence: Synthetic oligonucleotide
cauuccggugaaaagucuu

SEQ ID NO: 2420076 - RNA, 19 nt, Artificial Sequence
  Description of Artificial Sequence: Synthetic oligonucleotide
gaucccucaggugaauuuu

SEQ ID NO: 2420077 - RNA, 19 nt, Artificial Sequence
  Description of Artificial Sequence: Synthetic oligonucleotide
cguuucucacuuucaugag

SEQ ID NO: 2420078 - RNA, 19 nt, Artificial Sequence
  Description of Artificial Sequence: Synthetic oligonucleotide
gugagggaugacuuaugau

SEQ ID NO: 2420079 - RNA, 19 nt, Artificial Sequence
  Description of Artificial Sequence: Synthetic oligonucleotide
ccgguaaaaugauuuccca

SEQ ID NO: 2420080 - RNA, 19 nt, Artificial Sequence
  Description of Artificial Sequence: Synthetic oligonucleotide
gugugacuuagaguagaaa

SEQ ID NO: 2420081 - RNA, 19 nt, Artificial Sequence
  Description of Artificial Sequence: Synthetic oligonucleotide
cauugaggucugacuuaca

SEQ ID NO: 2420082 - RNA, 19 nt, Artificial Sequence
  Description of Artificial Sequence: Synthetic oligonucleotide
guguguguguguguuacau

SEQ ID NO: 2420083 - RNA, 19 nt, Artificial Sequence
  Description of Artificial Sequence: Synthetic oligonucleotide
ccuguugaggugugacuuc

SEQ ID NO: 2420084 - RNA, 19 nt, Artificial Sequence
  Description of Artificial Sequence: Synthetic oligonucleotide
ucgcaugaguaugguuuau

SEQ ID NO: 2420085 - RNA, 19 nt, Artificial Sequence
  Description of Artificial Sequence: Synthetic oligonucleotide
augaucccucaggugaauu

SEQ ID NO: 2420086 - RNA, 19 nt, Artificial Sequence
  Description of Artificial Sequence: Synthetic oligonucleotide
gacuuacuguagaauguuu

SEQ ID NO: 2420087 - RNA, 19 nt, Artificial Sequence
  Description of Artificial Sequence: Synthetic oligonucleotide
cugaugcacagugagggau

SEQ ID NO: 2420088 - RNA, 19 nt, Artificial Sequence
  Description of Artificial Sequence: Synthetic oligonucleotide
gguaggauuucuggugaaa

SEQ ID NO: 2420089 - RNA, 19 nt, Artificial Sequence
  Description of Artificial Sequence: Synthetic oligonucleotide
augccuguucagguaggau

SEQ ID NO: 2420090 - RNA, 19 nt, Artificial Sequence
  Description of Artificial Sequence: Synthetic oligonucleotide
auaaccuguguggcuucuu

SEQ ID NO: 2420091 - RNA, 19 nt, Artificial Sequence
  Description of Artificial Sequence: Synthetic oligonucleotide
cucacccguguguguuuuc

SEQ ID NO: 2420092 - RNA, 19 nt, Artificial Sequence
  Description of Artificial Sequence: Synthetic oligonucleotide
ggugugacuuccgguaaaa

SEQ ID NO: 2420093 - RNA, 19 nt, Artificial Sequence
  Description of Artificial Sequence: Synthetic oligonucleotide
uccuggcaugcuucacauu

SEQ ID NO: 2420094 - RNA, 19 nt, Artificial Sequence
  Description of Artificial Sequence: Synthetic oligonucleotide
ggaugacuuaugguagaaa

SEQ ID NO: 2420095 - RNA, 19 nt, Artificial Sequence
  Description of Artificial Sequence: Synthetic oligonucleotide
gacuuacaguagaaaguuu

SEQ ID NO: 2420096 - RNA, 19 nt, Artificial Sequence
  Description of Artificial Sequence: Synthetic oligonucleotide
gugugacuuacuguagaau

SEQ ID NO: 2420097 - RNA, 19 nt, Artificial Sequence
  Description of Artificial Sequence: Synthetic oligonucleotide
ggucugacuuacaguagaa

SEQ ID NO: 2420098 - RNA, 19 nt, Artificial Sequence
  Description of Artificial Sequence: Synthetic oligonucleotide
ggauagugagggaugacuu

SEQ ID NO: 2420099 - RNA, 19 nt, Artificial Sequence
  Description of Artificial Sequence: Synthetic oligonucleotide
ccacauauguuacauucau

SEQ ID NO: 2420100 - RNA, 19 nt, Artificial Sequence
  Description of Artificial Sequence: Synthetic oligonucleotide
gggaugacuuaugguagaa

SEQ ID NO: 2420101 - RNA, 19 nt, Artificial Sequence
  Description of Artificial Sequence: Synthetic oligonucleotide
gccuuugcacauaccggac

SEQ ID NO: 2420102 - RNA, 19 nt, Artificial Sequence
  Description of Artificial Sequence: Synthetic oligonucleotide
cagugagagaugacuuaau

SEQ ID NO: 2420103 - RNA, 19 nt, Artificial Sequence
  Description of Artificial Sequence: Synthetic oligonucleotide
guguguguguguguguguu

SEQ ID NO: 2420104 - RNA, 19 nt, Artificial Sequence
  Description of Artificial Sequence: Synthetic oligonucleotide
guuugacuuccgauugaau

SEQ ID NO: 2420105 - RNA, 19 nt, Artificial Sequence
  Description of Artificial Sequence: Synthetic oligonucleotide
ggaugacuuaugauagaau

SEQ ID NO: 2420106 - RNA, 19 nt, Artificial Sequence
  Description of Artificial Sequence: Synthetic oligonucleotide
cuggugccuguugaggugu

SEQ ID NO: 2420107 - RNA, 19 nt, Artificial Sequence
  Description of Artificial Sequence: Synthetic oligonucleotide
cggacauucguagggcuuc

SEQ ID NO: 2420108 - RNA, 19 nt, Artificial Sequence
  Description of Artificial Sequence: Synthetic oligonucleotide
gacuuccgguaaaaugauu

SEQ ID NO: 2420109 - RNA, 19 nt, Artificial Sequence
  Description of Artificial Sequence: Synthetic oligonucleotide
gccuguucagguaggauuu

SEQ ID NO: 2420110 - RNA, 19 nt, Artificial Sequence
  Description of Artificial Sequence: Synthetic oligonucleotide
gacuuccgauugaauguuu

SEQ ID NO: 2420111 - RNA, 19 nt, Artificial Sequence
  Description of Artificial Sequence: Synthetic oligonucleotide
gccuguugaggugugacuu

SEQ ID NO: 2420112 - RNA, 19 nt, Artificial Sequence
  Description of Artificial Sequence: Synthetic oligonucleotide
cccacacauaugacaucca

SEQ ID NO: 2420113 - RNA, 19 nt, Artificial Sequence
  Description of Artificial Sequence: Synthetic oligonucleotide
gugugacuuccgguaaaau

SEQ ID NO: 2420114 - RNA, 19 nt, Artificial Sequence
  Description of Artificial Sequence: Synthetic oligonucleotide
gcagugugugugugugugu

SEQ ID NO: 2420115 - RNA, 19 nt, Artificial Sequence
  Description of Artificial Sequence: Synthetic oligonucleotide
ggugccuguugagguguga

SEQ ID NO: 2420116 - RNA, 19 nt, Artificial Sequence
  Description of Artificial Sequence: Synthetic oligonucleotide
ggcaugcuucacauucaua

SEQ ID NO: 2420117 - RNA, 19 nt, Artificial Sequence
  Description of Artificial Sequence: Synthetic oligonucleotide
gcauuccggugaaaagucu

SEQ ID NO: 2420118 - RNA, 19 nt, Artificial Sequence
  Description of Artificial Sequence: Synthetic oligonucleotide
ccucacacucaaaucguuu

SEQ ID NO: 2420119 - RNA, 19 nt, Artificial Sequence
  Description of Artificial Sequence: Synthetic oligonucleotide
caugaucccucaggugaau

SEQ ID NO: 2420120 - RNA, 19 nt, Artificial Sequence
  Description of Artificial Sequence: Synthetic oligonucleotide
gaguuaccugaugccuguu

SEQ ID NO: 2420121 - RNA, 19 nt, Artificial Sequence
  Description of Artificial Sequence: Synthetic oligonucleotide
cgcaugaguaugguuuaua

SEQ ID NO: 2420122 - RNA, 19 nt, Artificial Sequence
  Description of Artificial Sequence: Synthetic oligonucleotide
ccggacauucguagggcuu

SEQ ID NO: 2420123 - RNA, 19 nt, Artificial Sequence
  Description of Artificial Sequence: Synthetic oligonucleotide
uucaaaauaaaucacccgg

SEQ ID NO: 2420124 - RNA, 19 nt, Artificial Sequence
  Description of Artificial Sequence: Synthetic oligonucleotide
agugacauuagccagaucu

SEQ ID NO: 2420125 - RNA, 19 nt, Artificial Sequence
  Description of Artificial Sequence: Synthetic oligonucleotide
aagauacccaacccgagcc

SEQ ID NO: 2420126 - RNA, 19 nt, Artificial Sequence
  Description of Artificial Sequence: Synthetic oligonucleotide
aguuaagccacacggagcc

SEQ ID NO: 2420127 - RNA, 19 nt, Artificial Sequence
  Description of Artificial Sequence: Synthetic oligonucleotide
uccaugaucacgcuucucg

SEQ ID NO: 2420128 - RNA, 19 nt, Artificial Sequence
  Description of Artificial Sequence: Synthetic oligonucleotide
ucaaaauaaaucacccggc

SEQ ID NO: 2420129 - RNA, 19 nt, Artificial Sequence
  Description of Artificial Sequence: Synthetic oligonucleotide
uauaacugagucugcacgg

SEQ ID NO: 2420130 - RNA, 19 nt, Artificial Sequence
  Description of Artificial Sequence: Synthetic oligonucleotide
uugucaggcaucaacaccc

SEQ ID NO: 2420131 - RNA, 19 nt, Artificial Sequence
  Description of Artificial Sequence: Synthetic oligonucleotide
auugagacgagcaugacag

SEQ ID NO: 2420132 - RNA, 19 nt, Artificial Sequence
  Description of Artificial Sequence: Synthetic oligonucleotide
ugguaagauacccaacccg

SEQ ID NO: 2420133 - RNA, 19 nt, Artificial Sequence
  Description of Artificial Sequence: Synthetic oligonucleotide
cuuaaacgcacugagaaag

SEQ ID NO: 2420134 - RNA, 19 nt, Artificial Sequence
  Description of Artificial Sequence: Synthetic oligonucleotide
gaacacgugugucacauag

SEQ ID NO: 2420135 - RNA, 19 nt, Artificial Sequence
  Description of Artificial Sequence: Synthetic oligonucleotide
augaucacgcuucucggcc

SEQ ID NO: 2420136 - RNA, 19 nt, Artificial Sequence
  Description of Artificial Sequence: Synthetic oligonucleotide
aauaaaucacccggccacc

SEQ ID NO: 2420137 - RNA, 19 nt, Artificial Sequence
  Description of Artificial Sequence: Synthetic oligonucleotide
aucugaaccagugaagcgc

SEQ ID NO: 2420138 - RNA, 19 nt, Artificial Sequence
  Description of Artificial Sequence: Synthetic oligonucleotide
ucaacacccguuuauaacu

SEQ ID NO: 2420139 - RNA, 19 nt, Artificial Sequence
  Description of Artificial Sequence: Synthetic oligonucleotide
aucaacacccguuuauaac

SEQ ID NO: 2420140 - RNA, 19 nt, Artificial Sequence
  Description of Artificial Sequence: Synthetic oligonucleotide
acugcugcgcacuacuagc

SEQ ID NO: 2420141 - RNA, 19 nt, Artificial Sequence
  Description of Artificial Sequence: Synthetic oligonucleotide
aaagcgaggaccgucaaca

SEQ ID NO: 2420142 - RNA, 19 nt, Artificial Sequence
  Description of Artificial Sequence: Synthetic oligonucleotide
agcccgucgagauugagac

SEQ ID NO: 2420143 - RNA, 19 nt, Artificial Sequence
  Description of Artificial Sequence: Synthetic oligonucleotide
aacauaacaggugcagaac

SEQ ID NO: 2420144 - RNA, 19 nt, Artificial Sequence
  Description of Artificial Sequence: Synthetic oligonucleotide
cugcaguuaagccacacgg

SEQ ID NO: 2420145 - RNA, 19 nt, Artificial Sequence
  Description of Artificial Sequence: Synthetic oligonucleotide
uuaaacgcacugagaaagg

SEQ ID NO: 2420146 - RNA, 19 nt, Artificial Sequence
  Description of Artificial Sequence: Synthetic oligonucleotide
acauuagccagaucugaac

SEQ ID NO: 2420147 - RNA, 19 nt, Artificial Sequence
  Description of Artificial Sequence: Synthetic oligonucleotide
ucuccuuaggcucaccacc

SEQ ID NO: 2420148 - RNA, 19 nt, Artificial Sequence
  Description of Artificial Sequence: Synthetic oligonucleotide
aguagcugguaagauaccc

SEQ ID NO: 2420149 - RNA, 19 nt, Artificial Sequence
  Description of Artificial Sequence: Synthetic oligonucleotide
ugggcuuaaacgcacugag

SEQ ID NO: 2420150 - RNA, 19 nt, Artificial Sequence
  Description of Artificial Sequence: Synthetic oligonucleotide
aaagcccgcgcugaggugc

SEQ ID NO: 2420151 - RNA, 19 nt, Artificial Sequence
  Description of Artificial Sequence: Synthetic oligonucleotide
acccguuuauaacugaguc

SEQ ID NO: 2420152 - RNA, 19 nt, Artificial Sequence
  Description of Artificial Sequence: Synthetic oligonucleotide
auaacaggugcagaacugc

SEQ ID NO: 2420153 - RNA, 19 nt, Artificial Sequence
  Description of Artificial Sequence: Synthetic oligonucleotide
cuccauggcacaaagcccg

SEQ ID NO: 2420154 - RNA, 19 nt, Artificial Sequence
  Description of Artificial Sequence: Synthetic oligonucleotide
accuuggaauuccaggccc

SEQ ID NO: 2420155 - RNA, 19 nt, Artificial Sequence
  Description of Artificial Sequence: Synthetic oligonucleotide
uaagauacccaacccgagc

SEQ ID NO: 2420156 - RNA, 19 nt, Artificial Sequence
  Description of Artificial Sequence: Synthetic oligonucleotide
cauuagccagaucugaacc

SEQ ID NO: 2420157 - RNA, 19 nt, Artificial Sequence
  Description of Artificial Sequence: Synthetic oligonucleotide
augacaggugauugguugc

SEQ ID NO: 2420158 - RNA, 19 nt, Artificial Sequence
  Description of Artificial Sequence: Synthetic oligonucleotide
uuguaagcggugauccugg

SEQ ID NO: 2420159 - RNA, 19 nt, Artificial Sequence
  Description of Artificial Sequence: Synthetic oligonucleotide
uuuauaacugagucugcac

SEQ ID NO: 2420160 - RNA, 19 nt, Artificial Sequence
  Description of Artificial Sequence: Synthetic oligonucleotide
gagaaaggcguugaggucc

SEQ ID NO: 2420161 - RNA, 19 nt, Artificial Sequence
  Description of Artificial Sequence: Synthetic oligonucleotide
gaucugaaccagugaagcg

SEQ ID NO: 2420162 - RNA, 19 nt, Artificial Sequence
  Description of Artificial Sequence: Synthetic oligonucleotide
caucacguaggucaaagug

SEQ ID NO: 2420163 - RNA, 19 nt, Artificial Sequence
  Description of Artificial Sequence: Synthetic oligonucleotide
caugacaggugauugguug

SEQ ID NO: 2420164 - RNA, 19 nt, Artificial Sequence
  Description of Artificial Sequence: Synthetic oligonucleotide
ucacguaggucaaagugac

SEQ ID NO: 2420165 - RNA, 19 nt, Artificial Sequence
  Description of Artificial Sequence: Synthetic oligonucleotide
uguacuuguggcccacuag

SEQ ID NO: 2420166 - RNA, 19 nt, Artificial Sequence
  Description of Artificial Sequence: Synthetic oligonucleotide
aacugcugcgcacuacuag

SEQ ID NO: 2420167 - RNA, 19 nt, Artificial Sequence
  Description of Artificial Sequence: Synthetic oligonucleotide
aaacgcacugagaaaggcg

SEQ ID NO: 2420168 - RNA, 19 nt, Artificial Sequence
  Description of Artificial Sequence: Synthetic oligonucleotide
aaaucacccggccaccucu

SEQ ID NO: 2420169 - RNA, 19 nt, Artificial Sequence
  Description of Artificial Sequence: Synthetic oligonucleotide
aggaccgucaacauaacag

SEQ ID NO: 2420170 - RNA, 19 nt, Artificial Sequence
  Description of Artificial Sequence: Synthetic oligonucleotide
aaaagcgacgggaacagga

SEQ ID NO: 2420171 - RNA, 19 nt, Artificial Sequence
  Description of Artificial Sequence: Synthetic oligonucleotide
aaagcgacgggaacaggac

SEQ ID NO: 2420172 - RNA, 19 nt, Artificial Sequence
  Description of Artificial Sequence: Synthetic oligonucleotide
acacgugugucacauagca

SEQ ID NO: 2420173 - RNA, 19 nt, Artificial Sequence
  Description of Artificial Sequence: Synthetic oligonucleotide
acugagaaaggcguugagg

SEQ ID NO: 2420174 - RNA, 19 nt, Artificial Sequence
  Description of Artificial Sequence: Synthetic oligonucleotide
cuugucaggcaucaacacc

SEQ ID NO: 2420175 - RNA, 19 nt, Artificial Sequence
  Description of Artificial Sequence: Synthetic oligonucleotide
uagaguguacuuguggccc

SEQ ID NO: 2420176 - RNA, 19 nt, Artificial Sequence
  Description of Artificial Sequence: Synthetic oligonucleotide
auaacugagucugcacggc

SEQ ID NO: 2420177 - RNA, 19 nt, Artificial Sequence
  Description of Artificial Sequence: Synthetic oligonucleotide
acuacuagcccgucgagau

SEQ ID NO: 2420178 - RNA, 19 nt, Artificial Sequence
  Description of Artificial Sequence: Synthetic oligonucleotide
ucugaaccagugaagcgcu

SEQ ID NO: 2420179 - RNA, 19 nt, Artificial Sequence
  Description of Artificial Sequence: Synthetic oligonucleotide
gcggcuaccagcaaaagcg

SEQ ID NO: 2420180 - RNA, 19 nt, Artificial Sequence
  Description of Artificial Sequence: Synthetic oligonucleotide
gagugcgcaggcuggaacg

SEQ ID NO: 2420181 - RNA, 19 nt, Artificial Sequence
  Description of Artificial Sequence: Synthetic oligonucleotide
acauccaguagcugguaag

SEQ ID NO: 2420182 - RNA, 19 nt, Artificial Sequence
  Description of Artificial Sequence: Synthetic oligonucleotide
aacgcacugagaaaggcgu

SEQ ID NO: 2420183 - RNA, 19 nt, Artificial Sequence
  Description of Artificial Sequence: Synthetic oligonucleotide
cuaccagcaaaagcgacgg

SEQ ID NO: 2420184 - RNA, 19 nt, Artificial Sequence
  Description of Artificial Sequence: Synthetic oligonucleotide
gauugagacgagcaugaca

SEQ ID NO: 2420185 - RNA, 19 nt, Artificial Sequence
  Description of Artificial Sequence: Synthetic oligonucleotide
cauaacaggugcagaacug

SEQ ID NO: 2420186 - RNA, 19 nt, Artificial Sequence
  Description of Artificial Sequence: Synthetic oligonucleotide
ggaccgucaacauaacagg

SEQ ID NO: 2420187 - RNA, 19 nt, Artificial Sequence
  Description of Artificial Sequence: Synthetic oligonucleotide
gcugguaagauacccaacc

SEQ ID NO: 2420188 - RNA, 19 nt, Artificial Sequence
  Description of Artificial Sequence: Synthetic oligonucleotide
guagaguguacuuguggcc

SEQ ID NO: 2420189 - RNA, 19 nt, Artificial Sequence
  Description of Artificial Sequence: Synthetic oligonucleotide
cagcucugggcuuaaacgc

SEQ ID NO: 2420190 - RNA, 19 nt, Artificial Sequence
  Description of Artificial Sequence: Synthetic oligonucleotide
ucacauagcagcguagagu

SEQ ID NO: 2420191 - RNA, 19 nt, Artificial Sequence
  Description of Artificial Sequence: Synthetic oligonucleotide
uucuccugcgcaagugacg

SEQ ID NO: 2420192 - RNA, 19 nt, Artificial Sequence
  Description of Artificial Sequence: Synthetic oligonucleotide
aacacgugugucacauagc

SEQ ID NO: 2420193 - RNA, 19 nt, Artificial Sequence
  Description of Artificial Sequence: Synthetic oligonucleotide
ugcgauggaggcagaagcc

SEQ ID NO: 2420194 - RNA, 19 nt, Artificial Sequence
  Description of Artificial Sequence: Synthetic oligonucleotide
ugcaguuaagccacacgga

SEQ ID NO: 2420195 - RNA, 19 nt, Artificial Sequence
  Description of Artificial Sequence: Synthetic oligonucleotide
agucugcacggccugguac

SEQ ID NO: 2420196 - RNA, 19 nt, Artificial Sequence
  Description of Artificial Sequence: Synthetic oligonucleotide
aggucguuggguccugccc

SEQ ID NO: 2420197 - RNA, 19 nt, Artificial Sequence
  Description of Artificial Sequence: Synthetic oligonucleotide
gagcaugacaggugauugg

SEQ ID NO: 2420198 - RNA, 19 nt, Artificial Sequence
  Description of Artificial Sequence: Synthetic oligonucleotide
uaaacgcacugagaaaggc

SEQ ID NO: 2420199 - RNA, 19 nt, Artificial Sequence
  Description of Artificial Sequence: Synthetic oligonucleotide
ugugucacauagcagcgua

SEQ ID NO: 2420200 - RNA, 19 nt, Artificial Sequence
  Description of Artificial Sequence: Synthetic oligonucleotide
uacuugcgcacguagacaa

SEQ ID NO: 2420201 - RNA, 19 nt, Artificial Sequence
  Description of Artificial Sequence: Synthetic oligonucleotide
uacuagcccgucgagauug

SEQ ID NO: 2420202 - RNA, 19 nt, Artificial Sequence
  Description of Artificial Sequence: Synthetic oligonucleotide
gucaacauaacaggugcag

SEQ ID NO: 2420203 - RNA, 19 nt, Artificial Sequence
  Description of Artificial Sequence: Synthetic oligonucleotide
caugggagggcuuugcauc

SEQ ID NO: 2420204 - RNA, 19 nt, Artificial Sequence
  Description of Artificial Sequence: Synthetic oligonucleotide
uucucggccguuuguaagc

SEQ ID NO: 2420205 - RNA, 19 nt, Artificial Sequence
  Description of Artificial Sequence: Synthetic oligonucleotide
uuaagccacacggagcccc

SEQ ID NO: 2420206 - RNA, 19 nt, Artificial Sequence
  Description of Artificial Sequence: Synthetic oligonucleotide
uccugcgcaagugacgacg

SEQ ID NO: 2420207 - RNA, 19 nt, Artificial Sequence
  Description of Artificial Sequence: Synthetic oligonucleotide
ucuugucaggcaucaacac

SEQ ID NO: 2420208 - RNA, 19 nt, Artificial Sequence
  Description of Artificial Sequence: Synthetic oligonucleotide
cugguaagauacccaaccc

SEQ ID NO: 2420209 - RNA, 19 nt, Artificial Sequence
  Description of Artificial Sequence: Synthetic oligonucleotide
ccaguagcugguaagauac

SEQ ID NO: 2420210 - RNA, 19 nt, Artificial Sequence
  Description of Artificial Sequence: Synthetic oligonucleotide
acaaagcccgcgcugaggu

SEQ ID NO: 2420211 - RNA, 19 nt, Artificial Sequence
  Description of Artificial Sequence: Synthetic oligonucleotide
ugaucacgcuucucggccg

SEQ ID NO: 2420212 - RNA, 19 nt, Artificial Sequence
  Description of Artificial Sequence: Synthetic oligonucleotide
ugagacgagcaugacaggu

SEQ ID NO: 2420213 - RNA, 19 nt, Artificial Sequence
  Description of Artificial Sequence: Synthetic oligonucleotide
agugacgacgcagcgcacc

SEQ ID NO: 2420214 - RNA, 19 nt, Artificial Sequence
  Description of Artificial Sequence: Synthetic oligonucleotide
caugaucacgcuucucggc

SEQ ID NO: 2420215 - RNA, 19 nt, Artificial Sequence
  Description of Artificial Sequence: Synthetic oligonucleotide
ugacauuagccagaucuga

SEQ ID NO: 2420216 - RNA, 19 nt, Artificial Sequence
  Description of Artificial Sequence: Synthetic oligonucleotide
gcaguuaagccacacggag

SEQ ID NO: 2420217 - RNA, 19 nt, Artificial Sequence
  Description of Artificial Sequence: Synthetic oligonucleotide
caagugacgacgcagcgca

SEQ ID NO: 2420218 - RNA, 19 nt, Artificial Sequence
  Description of Artificial Sequence: Synthetic oligonucleotide
ugucaggcaucaacacccg

SEQ ID NO: 2420219 - RNA, 19 nt, Artificial Sequence
  Description of Artificial Sequence: Synthetic oligonucleotide
agccauggagugucuuucc

SEQ ID NO: 2420220 - RNA, 19 nt, Artificial Sequence
  Description of Artificial Sequence: Synthetic oligonucleotide
aaaggcguugaggucccgg

SEQ ID NO: 2420221 - RNA, 19 nt, Artificial Sequence
  Description of Artificial Sequence: Synthetic oligonucleotide
ucugggcuuaaacgcacug

SEQ ID NO: 2420222 - RNA, 19 nt, Artificial Sequence
  Description of Artificial Sequence: Synthetic oligonucleotide
ugggcucaaagcgaggacc

SEQ ID NO: 2420223 - RNA, 19 nt, Artificial Sequence
  Description of Artificial Sequence: Synthetic oligonucleotide
ucaggcaucaacacccguu

SEQ ID NO: 2420224 - RNA, 19 nt, Artificial Sequence
  Description of Artificial Sequence: Synthetic oligonucleotide
caguuaagccacacggagc

SEQ ID NO: 2420225 - RNA, 19 nt, Artificial Sequence
  Description of Artificial Sequence: Synthetic oligonucleotide
gagauugagacgagcauga

SEQ ID NO: 2420226 - RNA, 19 nt, Artificial Sequence
  Description of Artificial Sequence: Synthetic oligonucleotide
ugaaccagugaagcgcucc

SEQ ID NO: 2420227 - RNA, 19 nt, Artificial Sequence
  Description of Artificial Sequence: Synthetic oligonucleotide
agacgagcaugacagguga

SEQ ID NO: 2420228 - RNA, 19 nt, Artificial Sequence
  Description of Artificial Sequence: Synthetic oligonucleotide
ccaaccauggcugcgaugg

SEQ ID NO: 2420229 - RNA, 19 nt, Artificial Sequence
  Description of Artificial Sequence: Synthetic oligonucleotide
uagcugguaagauacccaa

SEQ ID NO: 2420230 - RNA, 19 nt, Artificial Sequence
  Description of Artificial Sequence: Synthetic oligonucleotide
aucacguaggucaaaguga

SEQ ID NO: 2420231 - RNA, 19 nt, Artificial Sequence
  Description of Artificial Sequence: Synthetic oligonucleotide
acguaggucaaagugacau

SEQ ID NO: 2420232 - RNA, 19 nt, Artificial Sequence
  Description of Artificial Sequence: Synthetic oligonucleotide
ucuccugcgcaagugacga

SEQ ID NO: 2420233 - RNA, 19 nt, Artificial Sequence
  Description of Artificial Sequence: Synthetic oligonucleotide
uacuuguggcccacuagga

SEQ ID NO: 2420234 - RNA, 19 nt, Artificial Sequence
  Description of Artificial Sequence: Synthetic oligonucleotide
cugagaaaggcguugaggu

SEQ ID NO: 2420235 - RNA, 19 nt, Artificial Sequence
  Description of Artificial Sequence: Synthetic oligonucleotide
cuugcgcacguagacaacc

SEQ ID NO: 2420236 - RNA, 19 nt, Artificial Sequence
  Description of Artificial Sequence: Synthetic oligonucleotide
ucgagauugagacgagcau

SEQ ID NO: 2420237 - RNA, 19 nt, Artificial Sequence
  Description of Artificial Sequence: Synthetic oligonucleotide
guaagcggugauccuggcg

SEQ ID NO: 2420238 - RNA, 19 nt, Artificial Sequence
  Description of Artificial Sequence: Synthetic oligonucleotide
cuggcgguggcuucgcgcg

SEQ ID NO: 2420239 - RNA, 19 nt, Artificial Sequence
  Description of Artificial Sequence: Synthetic oligonucleotide
ccagcucugggcuuaaacg

SEQ ID NO: 2420240 - RNA, 19 nt, Artificial Sequence
  Description of Artificial Sequence: Synthetic oligonucleotide
caaagugacauuagccaga

SEQ ID NO: 2420241 - RNA, 19 nt, Artificial Sequence
  Description of Artificial Sequence: Synthetic oligonucleotide
ucggauaggcggcuaccag

SEQ ID NO: 2420242 - RNA, 19 nt, Artificial Sequence
  Description of Artificial Sequence: Synthetic oligonucleotide
aggugcagaacugcugcgc

SEQ ID NO: 2420243 - RNA, 19 nt, Artificial Sequence
  Description of Artificial Sequence: Synthetic oligonucleotide
cuucucggccguuuguaag

SEQ ID NO: 2420244 - RNA, 19 nt, Artificial Sequence
  Description of Artificial Sequence: Synthetic oligonucleotide
cauggcacaaagcccgcgc

SEQ ID NO: 2420245 - RNA, 19 nt, Artificial Sequence
  Description of Artificial Sequence: Synthetic oligonucleotide
uacccaacccgagccaugg

SEQ ID NO: 2420246 - RNA, 19 nt, Artificial Sequence
  Description of Artificial Sequence: Synthetic oligonucleotide
uccaguagcugguaagaua

SEQ ID NO: 2420247 - RNA, 19 nt, Artificial Sequence
  Description of Artificial Sequence: Synthetic oligonucleotide
aagcgacgggaacaggaca

SEQ ID NO: 2420248 - RNA, 19 nt, Artificial Sequence
  Description of Artificial Sequence: Synthetic oligonucleotide
ucggccguuuguaagcggu

SEQ ID NO: 2420249 - RNA, 19 nt, Artificial Sequence
  Description of Artificial Sequence: Synthetic oligonucleotide
aggugauugguugccagag

SEQ ID NO: 2420250 - RNA, 19 nt, Artificial Sequence
  Description of Artificial Sequence: Synthetic oligonucleotide
ccguuuauaacugagucug

SEQ ID NO: 2420251 - RNA, 19 nt, Artificial Sequence
  Description of Artificial Sequence: Synthetic oligonucleotide
gacaggaggcuccaugauc

SEQ ID NO: 2420252 - RNA, 19 nt, Artificial Sequence
  Description of Artificial Sequence: Synthetic oligonucleotide
ugguacuugcgcacguaga

SEQ ID NO: 2420253 - RNA, 19 nt, Artificial Sequence
  Description of Artificial Sequence: Synthetic oligonucleotide
uaggcucaccaccaagaac

SEQ ID NO: 2420254 - RNA, 19 nt, Artificial Sequence
  Description of Artificial Sequence: Synthetic oligonucleotide
ugauugguugccagagguc

SEQ ID NO: 2420255 - RNA, 19 nt, Artificial Sequence
  Description of Artificial Sequence: Synthetic oligonucleotide
cacuaggacaggaggcucc

SEQ ID NO: 2420256 - RNA, 19 nt, Artificial Sequence
  Description of Artificial Sequence: Synthetic oligonucleotide
uugagacgagcaugacagg

SEQ ID NO: 2420257 - RNA, 19 nt, Artificial Sequence
  Description of Artificial Sequence: Synthetic oligonucleotide
gguacuugcgcacguagac

SEQ ID NO: 2420258 - RNA, 19 nt, Artificial Sequence
  Description of Artificial Sequence: Synthetic oligonucleotide
ugagugcgcaggcuggaac

SEQ ID NO: 2420259 - RNA, 19 nt, Artificial Sequence
  Description of Artificial Sequence: Synthetic oligonucleotide
ugcgcacguagacaacccc

SEQ ID NO: 2420260 - RNA, 19 nt, Artificial Sequence
  Description of Artificial Sequence: Synthetic oligonucleotide
agaaaggcguugagguccc

SEQ ID NO: 2420261 - RNA, 19 nt, Artificial Sequence
  Description of Artificial Sequence: Synthetic oligonucleotide
ggucguuggguccugcccg

SEQ ID NO: 2420262 - RNA, 19 nt, Artificial Sequence
  Description of Artificial Sequence: Synthetic oligonucleotide
agcaugacaggugauuggu

SEQ ID NO: 2420263 - RNA, 19 nt, Artificial Sequence
  Description of Artificial Sequence: Synthetic oligonucleotide
caggcuggaacgcaccggc

SEQ ID NO: 2420264 - RNA, 19 nt, Artificial Sequence
  Description of Artificial Sequence: Synthetic oligonucleotide
aaccccacggggaacacgu

SEQ ID NO: 2420265 - RNA, 19 nt, Artificial Sequence
  Description of Artificial Sequence: Synthetic oligonucleotide
guaagauacccaacccgag

SEQ ID NO: 2420266 - RNA, 19 nt, Artificial Sequence
  Description of Artificial Sequence: Synthetic oligonucleotide
uaggcggcuaccagcaaaa

SEQ ID NO: 2420267 - RNA, 19 nt, Artificial Sequence
  Description of Artificial Sequence: Synthetic oligonucleotide
caacacccguuuauaacug

SEQ ID NO: 2420268 - RNA, 19 nt, Artificial Sequence
  Description of Artificial Sequence: Synthetic oligonucleotide
ugacaggugauugguugcc

SEQ ID NO: 2420269 - RNA, 19 nt, Artificial Sequence
  Description of Artificial Sequence: Synthetic oligonucleotide
uugcgcacguagacaaccc

SEQ ID NO: 2420270 - RNA, 19 nt, Artificial Sequence
  Description of Artificial Sequence: Synthetic oligonucleotide
ccgucaacauaacaggugc

SEQ ID NO: 2420271 - RNA, 19 nt, Artificial Sequence
  Description of Artificial Sequence: Synthetic oligonucleotide
gagacgagcaugacaggug

SEQ ID NO: 2420272 - RNA, 19 nt, Artificial Sequence
  Description of Artificial Sequence: Synthetic oligonucleotide
uagcccgucgagauugaga

SEQ ID NO: 2420273 - RNA, 19 nt, Artificial Sequence
  Description of Artificial Sequence: Synthetic oligonucleotide
gguaagauacccaacccga

SEQ ID NO: 2420274 - RNA, 19 nt, Artificial Sequence
  Description of Artificial Sequence: Synthetic oligonucleotide
aacugagucugcacggccu

SEQ ID NO: 2420275 - RNA, 19 nt, Artificial Sequence
  Description of Artificial Sequence: Synthetic oligonucleotide
ucucggccguuuguaagcg

SEQ ID NO: 2420276 - RNA, 19 nt, Artificial Sequence
  Description of Artificial Sequence: Synthetic oligonucleotide
gcuaccagcaaaagcgacg

SEQ ID NO: 2420277 - RNA, 19 nt, Artificial Sequence
  Description of Artificial Sequence: Synthetic oligonucleotide
uccugcccgcaucacguag

SEQ ID NO: 2420278 - RNA, 19 nt, Artificial Sequence
  Description of Artificial Sequence: Synthetic oligonucleotide
cguagaguguacuuguggc

SEQ ID NO: 2420279 - RNA, 19 nt, Artificial Sequence
  Description of Artificial Sequence: Synthetic oligonucleotide
agugcgcaggcuggaacgc

SEQ ID NO: 2420280 - RNA, 19 nt, Artificial Sequence
  Description of Artificial Sequence: Synthetic oligonucleotide
auaggcggcuaccagcaaa

SEQ ID NO: 2420281 - RNA, 19 nt, Artificial Sequence
  Description of Artificial Sequence: Synthetic oligonucleotide
uaaaucacccggccaccuc

SEQ ID NO: 2420282 - RNA, 19 nt, Artificial Sequence
  Description of Artificial Sequence: Synthetic oligonucleotide
agcgacgggaacaggacag

SEQ ID NO: 2420283 - RNA, 19 nt, Artificial Sequence
  Description of Artificial Sequence: Synthetic oligonucleotide
gugacauuagccagaucug

SEQ ID NO: 2420284 - RNA, 19 nt, Artificial Sequence
  Description of Artificial Sequence: Synthetic oligonucleotide
acggggaacacguguguca

SEQ ID NO: 2420285 - RNA, 19 nt, Artificial Sequence
  Description of Artificial Sequence: Synthetic oligonucleotide
cacuccucggauaggcggc

SEQ ID NO: 2420286 - RNA, 19 nt, Artificial Sequence
  Description of Artificial Sequence: Synthetic oligonucleotide
aagugacauuagccagauc

SEQ ID NO: 2420287 - RNA, 19 nt, Artificial Sequence
  Description of Artificial Sequence: Synthetic oligonucleotide
uggcccacuaggacaggag

SEQ ID NO: 2420288 - RNA, 19 nt, Artificial Sequence
  Description of Artificial Sequence: Synthetic oligonucleotide
gcguagaguguacuugugg

SEQ ID NO: 2420289 - RNA, 19 nt, Artificial Sequence
  Description of Artificial Sequence: Synthetic oligonucleotide
cucaaagcgaggaccguca

SEQ ID NO: 2420290 - RNA, 19 nt, Artificial Sequence
  Description of Artificial Sequence: Synthetic oligonucleotide
uggcacaaagcccgcgcug

SEQ ID NO: 2420291 - RNA, 19 nt, Artificial Sequence
  Description of Artificial Sequence: Synthetic oligonucleotide
gucgagauugagacgagca

SEQ ID NO: 2420292 - RNA, 19 nt, Artificial Sequence
  Description of Artificial Sequence: Synthetic oligonucleotide
gugauugguugccagaggu

SEQ ID NO: 2420293 - RNA, 19 nt, Artificial Sequence
  Description of Artificial Sequence: Synthetic oligonucleotide
caacccgagccauggagug

SEQ ID NO: 2420294 - RNA, 19 nt, Artificial Sequence
  Description of Artificial Sequence: Synthetic oligonucleotide
accgucaacauaacaggug

SEQ ID NO: 2420295 - RNA, 19 nt, Artificial Sequence
  Description of Artificial Sequence: Synthetic oligonucleotide
cugcugcgcacuacuagcc

SEQ ID NO: 2420296 - RNA, 19 nt, Artificial Sequence
  Description of Artificial Sequence: Synthetic oligonucleotide
ggaggcuccaugaucacgc

SEQ ID NO: 2420297 - RNA, 19 nt, Artificial Sequence
  Description of Artificial Sequence: Synthetic oligonucleotide
agauacccaacccgagcca

SEQ ID NO: 2420298 - RNA, 19 nt, Artificial Sequence
  Description of Artificial Sequence: Synthetic oligonucleotide
gauccuggcgguggcuucg

SEQ ID NO: 2420299 - RNA, 19 nt, Artificial Sequence
  Description of Artificial Sequence: Synthetic oligonucleotide
cuucgcgcguuucuccugc

SEQ ID NO: 2420300 - RNA, 19 nt, Artificial Sequence
  Description of Artificial Sequence: Synthetic oligonucleotide
gcugcaguuaagccacacg

SEQ ID NO: 2420301 - RNA, 19 nt, Artificial Sequence
  Description of Artificial Sequence: Synthetic oligonucleotide
cacgugugucacauagcag

SEQ ID NO: 2420302 - RNA, 19 nt, Artificial Sequence
  Description of Artificial Sequence: Synthetic oligonucleotide
agauugagacgagcaugac

SEQ ID NO: 2420303 - RNA, 19 nt, Artificial Sequence
  Description of Artificial Sequence: Synthetic oligonucleotide
agaguguacuuguggccca

SEQ ID NO: 2420304 - RNA, 19 nt, Artificial Sequence
  Description of Artificial Sequence: Synthetic oligonucleotide
ggugauugguugccagagg

SEQ ID NO: 2420305 - RNA, 19 nt, Artificial Sequence
  Description of Artificial Sequence: Synthetic oligonucleotide
uaccagcaaaagcgacggg

SEQ ID NO: 2420306 - RNA, 19 nt, Artificial Sequence
  Description of Artificial Sequence: Synthetic oligonucleotide
acacccguuuauaacugag

SEQ ID NO: 2420307 - RNA, 19 nt, Artificial Sequence
  Description of Artificial Sequence: Synthetic oligonucleotide
gcccgcaucacguagguca

SEQ ID NO: 2420308 - RNA, 19 nt, Artificial Sequence
  Description of Artificial Sequence: Synthetic oligonucleotide
ugccagaggucguuggguc

SEQ ID NO: 2420309 - RNA, 19 nt, Artificial Sequence
  Description of Artificial Sequence: Synthetic oligonucleotide
agacuccauggcacaaagc

SEQ ID NO: 2420310 - RNA, 19 nt, Artificial Sequence
  Description of Artificial Sequence: Synthetic oligonucleotide
acccgagccauggaguguc

SEQ ID NO: 2420311 - RNA, 19 nt, Artificial Sequence
  Description of Artificial Sequence: Synthetic oligonucleotide
ggcccacuaggacaggagg

SEQ ID NO: 2420312 - RNA, 19 nt, Artificial Sequence
  Description of Artificial Sequence: Synthetic oligonucleotide
auggcacaaagcccgcgcu

SEQ ID NO: 2420313 - RNA, 19 nt, Artificial Sequence
  Description of Artificial Sequence: Synthetic oligonucleotide
ucaaagcgaggaccgucaa

SEQ ID NO: 2420314 - RNA, 19 nt, Artificial Sequence
  Description of Artificial Sequence: Synthetic oligonucleotide
agcugguaagauacccaac

SEQ ID NO: 2420315 - RNA, 19 nt, Artificial Sequence
  Description of Artificial Sequence: Synthetic oligonucleotide
gacauuagccagaucugaa

SEQ ID NO: 2420316 - RNA, 19 nt, Artificial Sequence
  Description of Artificial Sequence: Synthetic oligonucleotide
gagugucuuucccugccuc

SEQ ID NO: 2420317 - RNA, 19 nt, Artificial Sequence
  Description of Artificial Sequence: Synthetic oligonucleotide
ugcgcaggcuggaacgcac

SEQ ID NO: 2420318 - RNA, 19 nt, Artificial Sequence
  Description of Artificial Sequence: Synthetic oligonucleotide
auaaaucacccggccaccu

SEQ ID NO: 2420319 - RNA, 19 nt, Artificial Sequence
  Description of Artificial Sequence: Synthetic oligonucleotide
aggaggcuccaugaucacg

SEQ ID NO: 2420320 - RNA, 19 nt, Artificial Sequence
  Description of Artificial Sequence: Synthetic oligonucleotide
gcaaaagcgacgggaacag

SEQ ID NO: 2420321 - RNA, 19 nt, Artificial Sequence
  Description of Artificial Sequence: Synthetic oligonucleotide
gaggaccgucaacauaaca

SEQ ID NO: 2420322 - RNA, 19 nt, Artificial Sequence
  Description of Artificial Sequence: Synthetic oligonucleotide
ccaugaucacgcuucucgg

SEQ ID NO: 2420323 - RNA, 19 nt, Artificial Sequence
  Description of Artificial Sequence: Synthetic oligonucleotide
accaagaaccccacgggga

SEQ ID NO: 2420324 - RNA, 19 nt, Artificial Sequence
  Description of Artificial Sequence: Synthetic oligonucleotide
caucaacacccguuuauaa

SEQ ID NO: 2420325 - RNA, 19 nt, Artificial Sequence
  Description of Artificial Sequence: Synthetic oligonucleotide
uggcuucgcgcguuucucc

SEQ ID NO: 2420326 - RNA, 19 nt, Artificial Sequence
  Description of Artificial Sequence: Synthetic oligonucleotide
cguuuguaagcggugaucc

SEQ ID NO: 2420327 - RNA, 19 nt, Artificial Sequence
  Description of Artificial Sequence: Synthetic oligonucleotide
caaagcgaggaccgucaac

SEQ ID NO: 2420328 - RNA, 19 nt, Artificial Sequence
  Description of Artificial Sequence: Synthetic oligonucleotide
uccucggauaggcggcuac

SEQ ID NO: 2420329 - RNA, 19 nt, Artificial Sequence
  Description of Artificial Sequence: Synthetic oligonucleotide
caguagcugguaagauacc

SEQ ID NO: 2420330 - RNA, 19 nt, Artificial Sequence
  Description of Artificial Sequence: Synthetic oligonucleotide
gagccauggagugucuuuc

SEQ ID NO: 2420331 - RNA, 19 nt, Artificial Sequence
  Description of Artificial Sequence: Synthetic oligonucleotide
gucccggaaggcaugggag

SEQ ID NO: 2420332 - RNA, 19 nt, Artificial Sequence
  Description of Artificial Sequence: Synthetic oligonucleotide
gcguugaggucccggaagg

SEQ ID NO: 2420333 - RNA, 19 nt, Artificial Sequence
  Description of Artificial Sequence: Synthetic oligonucleotide
aagcgaggaccgucaacau

SEQ ID NO: 2420334 - RNA, 19 nt, Artificial Sequence
  Description of Artificial Sequence: Synthetic oligonucleotide
agcagcguagaguguacuu

SEQ ID NO: 2420335 - RNA, 19 nt, Artificial Sequence
  Description of Artificial Sequence: Synthetic oligonucleotide
ccacuccucggauaggcgg

SEQ ID NO: 2420336 - RNA, 19 nt, Artificial Sequence
  Description of Artificial Sequence: Synthetic oligonucleotide
uugccagaggucguugggu

SEQ ID NO: 2420337 - RNA, 19 nt, Artificial Sequence
  Description of Artificial Sequence: Synthetic oligonucleotide
cagcugagugcgcaggcug

SEQ ID NO: 2420338 - RNA, 19 nt, Artificial Sequence
  Description of Artificial Sequence: Synthetic oligonucleotide
gcuggaacgcaccggcagg

SEQ ID NO: 2420339 - RNA, 19 nt, Artificial Sequence
  Description of Artificial Sequence: Synthetic oligonucleotide
ucccucuugucaggcauca

SEQ ID NO: 2420340 - RNA, 19 nt, Artificial Sequence
  Description of Artificial Sequence: Synthetic oligonucleotide
ggcggcuaccagcaaaagc

SEQ ID NO: 2420341 - RNA, 19 nt, Artificial Sequence
  Description of Artificial Sequence: Synthetic oligonucleotide
cacaaagcccgcgcugagg

SEQ ID NO: 2420342 - RNA, 19 nt, Artificial Sequence
  Description of Artificial Sequence: Synthetic oligonucleotide
gacgcagcgcaccuuggaa

SEQ ID NO: 2420343 - RNA, 19 nt, Artificial Sequence
  Description of Artificial Sequence: Synthetic oligonucleotide
cacggccugguacuugcgc

SEQ ID NO: 2420344 - RNA, 19 nt, Artificial Sequence
  Description of Artificial Sequence: Synthetic oligonucleotide
ucagcugagugcgcaggcu

SEQ ID NO: 2420345 - RNA, 19 nt, Artificial Sequence
  Description of Artificial Sequence: Synthetic oligonucleotide
cauccaguagcugguaaga

SEQ ID NO: 2420346 - RNA, 19 nt, Artificial Sequence
  Description of Artificial Sequence: Synthetic oligonucleotide
acgcagcgcaccuuggaau

SEQ ID NO: 2420347 - RNA, 19 nt, Artificial Sequence
  Description of Artificial Sequence: Synthetic oligonucleotide
ucacccggccaccucuccu

SEQ ID NO: 2420348 - RNA, 19 nt, Artificial Sequence
  Description of Artificial Sequence: Synthetic oligonucleotide
gcagcguagaguguacuug

SEQ ID NO: 2420349 - RNA, 19 nt, Artificial Sequence
  Description of Artificial Sequence: Synthetic oligonucleotide
ggcuccaugaucacgcuuc

SEQ ID NO: 2420350 - RNA, 19 nt, Artificial Sequence
  Description of Artificial Sequence: Synthetic oligonucleotide
gggcucaaagcgaggaccg

SEQ ID NO: 2420351 - RNA, 19 nt, Artificial Sequence
  Description of Artificial Sequence: Synthetic oligonucleotide
agcucugggcuuaaacgca

SEQ ID NO: 2420352 - RNA, 19 nt, Artificial Sequence
  Description of Artificial Sequence: Synthetic oligonucleotide
uucgcgcguuucuccugcg

SEQ ID NO: 2420353 - RNA, 19 nt, Artificial Sequence
  Description of Artificial Sequence: Synthetic oligonucleotide
caaaagcgacgggaacagg

SEQ ID NO: 2420354 - RNA, 19 nt, Artificial Sequence
  Description of Artificial Sequence: Synthetic oligonucleotide
ugagucugcacggccuggu

SEQ ID NO: 2420355 - RNA, 19 nt, Artificial Sequence
  Description of Artificial Sequence: Synthetic oligonucleotide
gugucacauagcagcguag

SEQ ID NO: 2420356 - RNA, 19 nt, Artificial Sequence
  Description of Artificial Sequence: Synthetic oligonucleotide
agcgaggaccgucaacaua

SEQ ID NO: 2420357 - RNA, 19 nt, Artificial Sequence
  Description of Artificial Sequence: Synthetic oligonucleotide
ucgcgcguuucuccugcgc

SEQ ID NO: 2420358 - RNA, 19 nt, Artificial Sequence
  Description of Artificial Sequence: Synthetic oligonucleotide
acuugcgcacguagacaac

SEQ ID NO: 2420359 - RNA, 19 nt, Artificial Sequence
  Description of Artificial Sequence: Synthetic oligonucleotide
gcgaggaccgucaacauaa

SEQ ID NO: 2420360 - RNA, 19 nt, Artificial Sequence
  Description of Artificial Sequence: Synthetic oligonucleotide
cucggccguuuguaagcgg

SEQ ID NO: 2420361 - RNA, 19 nt, Artificial Sequence
  Description of Artificial Sequence: Synthetic oligonucleotide
guacuugcgcacguagaca

SEQ ID NO: 2420362 - RNA, 19 nt, Artificial Sequence
  Description of Artificial Sequence: Synthetic oligonucleotide
gucguuggguccugcccgc

SEQ ID NO: 2420363 - RNA, 19 nt, Artificial Sequence
  Description of Artificial Sequence: Synthetic oligonucleotide
aucccaaccauggcugcga

SEQ ID NO: 2420364 - RNA, 19 nt, Artificial Sequence
  Description of Artificial Sequence: Synthetic oligonucleotide
gcuccagacuuucaaaaua

SEQ ID NO: 2420365 - RNA, 19 nt, Artificial Sequence
  Description of Artificial Sequence: Synthetic oligonucleotide
ggaggaucccaaccauggc

SEQ ID NO: 2420366 - RNA, 19 nt, Artificial Sequence
  Description of Artificial Sequence: Synthetic oligonucleotide
acgagcaugacaggugauu

SEQ ID NO: 2420367 - RNA, 19 nt, Artificial Sequence
  Description of Artificial Sequence: Synthetic oligonucleotide
aagugacgacgcagcgcac

SEQ ID NO: 2420368 - RNA, 19 nt, Artificial Sequence
  Description of Artificial Sequence: Synthetic oligonucleotide
aacccgagccauggagugu

SEQ ID NO: 2420369 - RNA, 19 nt, Artificial Sequence
  Description of Artificial Sequence: Synthetic oligonucleotide
ggauaggcggcuaccagca

SEQ ID NO: 2420370 - RNA, 19 nt, Artificial Sequence
  Description of Artificial Sequence: Synthetic oligonucleotide
gcuuaaacgcacugagaaa

SEQ ID NO: 2420371 - RNA, 19 nt, Artificial Sequence
  Description of Artificial Sequence: Synthetic oligonucleotide
cacgcuucucggccguuug

SEQ ID NO: 2420372 - RNA, 19 nt, Artificial Sequence
  Description of Artificial Sequence: Synthetic oligonucleotide
auugguugccagaggucgu

SEQ ID NO: 2420373 - RNA, 19 nt, Artificial Sequence
  Description of Artificial Sequence: Synthetic oligonucleotide
cgagauugagacgagcaug

SEQ ID NO: 2420374 - RNA, 19 nt, Artificial Sequence
  Description of Artificial Sequence: Synthetic oligonucleotide
aagcccgcgcugaggugcg

SEQ ID NO: 2420375 - RNA, 19 nt, Artificial Sequence
  Description of Artificial Sequence: Synthetic oligonucleotide
agcguagaguguacuugug

SEQ ID NO: 2420376 - RNA, 19 nt, Artificial Sequence
  Description of Artificial Sequence: Synthetic oligonucleotide
uagcagcguagaguguacu

SEQ ID NO: 2420377 - RNA, 19 nt, Artificial Sequence
  Description of Artificial Sequence: Synthetic oligonucleotide
gaccgucaacauaacaggu

SEQ ID NO: 2420378 - RNA, 19 nt, Artificial Sequence
  Description of Artificial Sequence: Synthetic oligonucleotide
ccugcccgcaucacguagg

SEQ ID NO: 2420379 - RNA, 19 nt, Artificial Sequence
  Description of Artificial Sequence: Synthetic oligonucleotide
caccaccaagaaccccacg

SEQ ID NO: 2420380 - RNA, 19 nt, Artificial Sequence
  Description of Artificial Sequence: Synthetic oligonucleotide
ggaucccaaccauggcugc

SEQ ID NO: 2420381 - RNA, 19 nt, Artificial Sequence
  Description of Artificial Sequence: Synthetic oligonucleotide
gcaagugacgacgcagcgc

SEQ ID NO: 2420382 - RNA, 19 nt, Artificial Sequence
  Description of Artificial Sequence: Synthetic oligonucleotide
caaagcccgcgcugaggug

SEQ ID NO: 2420383 - RNA, 19 nt, Artificial Sequence
  Description of Artificial Sequence: Synthetic oligonucleotide
gaguguacuuguggcccac

SEQ ID NO: 2420384 - RNA, 19 nt, Artificial Sequence
  Description of Artificial Sequence: Synthetic oligonucleotide
cggauaggcggcuaccagc

SEQ ID NO: 2420385 - RNA, 19 nt, Artificial Sequence
  Description of Artificial Sequence: Synthetic oligonucleotide
ccugcgcaagugacgacgc

SEQ ID NO: 2420386 - RNA, 19 nt, Artificial Sequence
  Description of Artificial Sequence: Synthetic oligonucleotide
caagaaccccacggggaac

SEQ ID NO: 2420387 - RNA, 19 nt, Artificial Sequence
  Description of Artificial Sequence: Synthetic oligonucleotide
cagcguagaguguacuugu

SEQ ID NO: 2420388 - RNA, 19 nt, Artificial Sequence
  Description of Artificial Sequence: Synthetic oligonucleotide
uucccugccucagcugagu

SEQ ID NO: 2420389 - RNA, 19 nt, Artificial Sequence
  Description of Artificial Sequence: Synthetic oligonucleotide
gucugcacggccugguacu

SEQ ID NO: 2420390 - RNA, 19 nt, Artificial Sequence
  Description of Artificial Sequence: Synthetic oligonucleotide
ucccaaccauggcugcgau

SEQ ID NO: 2420391 - RNA, 19 nt, Artificial Sequence
  Description of Artificial Sequence: Synthetic oligonucleotide
auccuggcgguggcuucgc

SEQ ID NO: 2420392 - RNA, 19 nt, Artificial Sequence
  Description of Artificial Sequence: Synthetic oligonucleotide
cccgucgagauugagacga

SEQ ID NO: 2420393 - RNA, 19 nt, Artificial Sequence
  Description of Artificial Sequence: Synthetic oligonucleotide
gcugcgauggaggcagaag

SEQ ID NO: 2420394 - RNA, 19 nt, Artificial Sequence
  Description of Artificial Sequence: Synthetic oligonucleotide
acgcuucucggccguuugu

SEQ ID NO: 2420395 - RNA, 19 nt, Artificial Sequence
  Description of Artificial Sequence: Synthetic oligonucleotide
cguuuauaacugagucugc

SEQ ID NO: 2420396 - RNA, 19 nt, Artificial Sequence
  Description of Artificial Sequence: Synthetic oligonucleotide
gauacccaacccgagccau

SEQ ID NO: 2420397 - RNA, 19 nt, Artificial Sequence
  Description of Artificial Sequence: Synthetic oligonucleotide
cagaacugcugcgcacuac

SEQ ID NO: 2420398 - RNA, 19 nt, Artificial Sequence
  Description of Artificial Sequence: Synthetic oligonucleotide
caggaggcuccaugaucac

SEQ ID NO: 2420399 - RNA, 19 nt, Artificial Sequence
  Description of Artificial Sequence: Synthetic oligonucleotide
cacuacuagcccgucgaga

SEQ ID NO: 2420400 - RNA, 19 nt, Artificial Sequence
  Description of Artificial Sequence: Synthetic oligonucleotide
gacgggaacaggacagacu

SEQ ID NO: 2420401 - RNA, 19 nt, Artificial Sequence
  Description of Artificial Sequence: Synthetic oligonucleotide
cugaaccagugaagcgcuc

SEQ ID NO: 2420402 - RNA, 19 nt, Artificial Sequence
  Description of Artificial Sequence: Synthetic oligonucleotide
ucacauccaguagcuggua

SEQ ID NO: 2420403 - RNA, 19 nt, Artificial Sequence
  Description of Artificial Sequence: Synthetic oligonucleotide
cucggauaggcggcuacca

SEQ ID NO: 2420404 - RNA, 19 nt, Artificial Sequence
  Description of Artificial Sequence: Synthetic oligonucleotide
auacccaacccgagccaug

SEQ ID NO: 2420405 - RNA, 19 nt, Artificial Sequence
  Description of Artificial Sequence: Synthetic oligonucleotide
gaagcgcuccagacuuuca

SEQ ID NO: 2420406 - RNA, 19 nt, Artificial Sequence
  Description of Artificial Sequence: Synthetic oligonucleotide
cuagcccgucgagauugag

SEQ ID NO: 2420407 - RNA, 19 nt, Artificial Sequence
  Description of Artificial Sequence: Synthetic oligonucleotide
cacggggaacacguguguc

SEQ ID NO: 2420408 - RNA, 19 nt, Artificial Sequence
  Description of Artificial Sequence: Synthetic oligonucleotide
aguguacuuguggcccacu

SEQ ID NO: 2420409 - RNA, 19 nt, Artificial Sequence
  Description of Artificial Sequence: Synthetic oligonucleotide
gauaggcggcuaccagcaa

SEQ ID NO: 2420410 - RNA, 19 nt, Artificial Sequence
  Description of Artificial Sequence: Synthetic oligonucleotide
ggcacaaagcccgcgcuga

SEQ ID NO: 2420411 - RNA, 19 nt, Artificial Sequence
  Description of Artificial Sequence: Synthetic oligonucleotide
guggcuucgcgcguuucuc

SEQ ID NO: 2420412 - RNA, 19 nt, Artificial Sequence
  Description of Artificial Sequence: Synthetic oligonucleotide
ccuggcgguggcuucgcgc

SEQ ID NO: 2420413 - RNA, 19 nt, Artificial Sequence
  Description of Artificial Sequence: Synthetic oligonucleotide
gaucacgcuucucggccgu

SEQ ID NO: 2420414 - RNA, 19 nt, Artificial Sequence
  Description of Artificial Sequence: Synthetic oligonucleotide
cgagcaugacaggugauug

SEQ ID NO: 2420415 - RNA, 19 nt, Artificial Sequence
  Description of Artificial Sequence: Synthetic oligonucleotide
cacccguuuauaacugagu

SEQ ID NO: 2420416 - RNA, 19 nt, Artificial Sequence
  Description of Artificial Sequence: Synthetic oligonucleotide
ugggagggcuuugcaucca

SEQ ID NO: 2420417 - RNA, 19 nt, Artificial Sequence
  Description of Artificial Sequence: Synthetic oligonucleotide
gcgcuccagacuuucaaaa

SEQ ID NO: 2420418 - RNA, 19 nt, Artificial Sequence
  Description of Artificial Sequence: Synthetic oligonucleotide
cagugaagcgcuccagacu

SEQ ID NO: 2420419 - RNA, 19 nt, Artificial Sequence
  Description of Artificial Sequence: Synthetic oligonucleotide
gaaggcaugggagggcuuu

SEQ ID NO: 2420420 - RNA, 19 nt, Artificial Sequence
  Description of Artificial Sequence: Synthetic oligonucleotide
gcgcacuacuagcccgucg

SEQ ID NO: 2420421 - RNA, 19 nt, Artificial Sequence
  Description of Artificial Sequence: Synthetic oligonucleotide
gcucaaagcgaggaccguc

SEQ ID NO: 2420422 - RNA, 19 nt, Artificial Sequence
  Description of Artificial Sequence: Synthetic oligonucleotide
acgacgcagcgcaccuugg

SEQ ID NO: 2420423 - RNA, 19 nt, Artificial Sequence
  Description of Artificial Sequence: Synthetic oligonucleotide
ggcuaccagcaaaagcgac

SEQ ID NO: 2420424 - RNA, 19 nt, Artificial Sequence
  Description of Artificial Sequence: Synthetic oligonucleotide
agcggugauccuggcggug

SEQ ID NO: 2420425 - RNA, 19 nt, Artificial Sequence
  Description of Artificial Sequence: Synthetic oligonucleotide
gugacgacgcagcgcaccu

SEQ ID NO: 2420426 - RNA, 19 nt, Artificial Sequence
  Description of Artificial Sequence: Synthetic oligonucleotide
ggccugguacuugcgcacg

SEQ ID NO: 2420427 - RNA, 19 nt, Artificial Sequence
  Description of Artificial Sequence: Synthetic oligonucleotide
cgcaucacguaggucaaag

SEQ ID NO: 2420428 - RNA, 19 nt, Artificial Sequence
  Description of Artificial Sequence: Synthetic oligonucleotide
gccaaggcuuuggaggcug

SEQ ID NO: 2420429 - RNA, 19 nt, Artificial Sequence
  Description of Artificial Sequence: Synthetic oligonucleotide
cgcaagugacgacgcagcg

SEQ ID NO: 2420430 - RNA, 19 nt, Artificial Sequence
  Description of Artificial Sequence: Synthetic oligonucleotide
ggcaugggagggcuuugca

SEQ ID NO: 2420431 - RNA, 19 nt, Artificial Sequence
  Description of Artificial Sequence: Synthetic oligonucleotide
gaacugcugcgcacuacua

SEQ ID NO: 2420432 - RNA, 19 nt, Artificial Sequence
  Description of Artificial Sequence: Synthetic oligonucleotide
gagucugcacggccuggua

SEQ ID NO: 2420433 - RNA, 19 nt, Artificial Sequence
  Description of Artificial Sequence: Synthetic oligonucleotide
gcccgucgagauugagacg

SEQ ID NO: 2420434 - RNA, 19 nt, Artificial Sequence
  Description of Artificial Sequence: Synthetic oligonucleotide
cuccugcgcaagugacgac

SEQ ID NO: 2420435 - RNA, 19 nt, Artificial Sequence
  Description of Artificial Sequence: Synthetic oligonucleotide
ucacgcuucucggccguuu

SEQ ID NO: 2420436 - RNA, 19 nt, Artificial Sequence
  Description of Artificial Sequence: Synthetic oligonucleotide
gggcuuugcauccacucau

SEQ ID NO: 2420437 - RNA, 19 nt, Artificial Sequence
  Description of Artificial Sequence: Synthetic oligonucleotide
guggcccacuaggacagga

SEQ ID NO: 2420438 - RNA, 19 nt, Artificial Sequence
  Description of Artificial Sequence: Synthetic oligonucleotide
gcaucaacacccguuuaua

SEQ ID NO: 2420439 - RNA, 19 nt, Artificial Sequence
  Description of Artificial Sequence: Synthetic oligonucleotide
gccucagcugagugcgcag

SEQ ID NO: 2420440 - RNA, 19 nt, Artificial Sequence
  Description of Artificial Sequence: Synthetic oligonucleotide
gcucugggcuuaaacgcac

SEQ ID NO: 2420441 - RNA, 19 nt, Artificial Sequence
  Description of Artificial Sequence: Synthetic oligonucleotide
ccaagaaccccacggggaa

SEQ ID NO: 2420442 - RNA, 19 nt, Artificial Sequence
  Description of Artificial Sequence: Synthetic oligonucleotide
gcuucgcgcguuucuccug

SEQ ID NO: 2420443 - RNA, 19 nt, Artificial Sequence
  Description of Artificial Sequence: Synthetic oligonucleotide
cuccaugaucacgcuucuc

SEQ ID NO: 2420444 - RNA, 19 nt, Artificial Sequence
  Description of Artificial Sequence: Synthetic oligonucleotide
cccguuuauaacugagucu

SEQ ID NO: 2420445 - RNA, 19 nt, Artificial Sequence
  Description of Artificial Sequence: Synthetic oligonucleotide
aggcagaagccaaggcuuu

SEQ ID NO: 2420446 - RNA, 19 nt, Artificial Sequence
  Description of Artificial Sequence: Synthetic oligonucleotide
gcuucucggccguuuguaa

SEQ ID NO: 2420447 - RNA, 19 nt, Artificial Sequence
  Description of Artificial Sequence: Synthetic oligonucleotide
cgcacuacuagcccgucga

SEQ ID NO: 2420448 - RNA, 19 nt, Artificial Sequence
  Description of Artificial Sequence: Synthetic oligonucleotide
ggccguuuguaagcgguga

SEQ ID NO: 2420449 - RNA, 19 nt, Artificial Sequence
  Description of Artificial Sequence: Synthetic oligonucleotide
ucguuggguccugcccgca

SEQ ID NO: 2420450 - RNA, 19 nt, Artificial Sequence
  Description of Artificial Sequence: Synthetic oligonucleotide
gggaacacgugugucacau

SEQ ID NO: 2420451 - RNA, 19 nt, Artificial Sequence
  Description of Artificial Sequence: Synthetic oligonucleotide
ccguuuguaagcggugauc

SEQ ID NO: 2420452 - RNA, 19 nt, Artificial Sequence
  Description of Artificial Sequence: Synthetic oligonucleotide
agcgcaccuuggaauucca

SEQ ID NO: 2420453 - RNA, 19 nt, Artificial Sequence
  Description of Artificial Sequence: Synthetic oligonucleotide
ugcgcacuacuagcccguc

SEQ ID NO: 2420454 - RNA, 19 nt, Artificial Sequence
  Description of Artificial Sequence: Synthetic oligonucleotide
acuagcccgucgagauuga

SEQ ID NO: 2420455 - RNA, 19 nt, Artificial Sequence
  Description of Artificial Sequence: Synthetic oligonucleotide
cugcacggccugguacuug

SEQ ID NO: 2420456 - RNA, 19 nt, Artificial Sequence
  Description of Artificial Sequence: Synthetic oligonucleotide
ccauggcacaaagcccgcg

SEQ ID NO: 2420457 - RNA, 19 nt, Artificial Sequence
  Description of Artificial Sequence: Synthetic oligonucleotide
ccucggauaggcggcuacc

SEQ ID NO: 2420458 - RNA, 19 nt, Artificial Sequence
  Description of Artificial Sequence: Synthetic oligonucleotide
cugcgcacuacuagcccgu

SEQ ID NO: 2420459 - RNA, 19 nt, Artificial Sequence
  Description of Artificial Sequence: Synthetic oligonucleotide
gucaggcaucaacacccgu

SEQ ID NO: 2420460 - RNA, 19 nt, Artificial Sequence
  Description of Artificial Sequence: Synthetic oligonucleotide
uggcugcgauggaggcaga

SEQ ID NO: 2420461 - RNA, 19 nt, Artificial Sequence
  Description of Artificial Sequence: Synthetic oligonucleotide
cugcgcaagugacgacgca

SEQ ID NO: 2420462 - RNA, 19 nt, Artificial Sequence
  Description of Artificial Sequence: Synthetic oligonucleotide
cucugggcuuaaacgcacu

SEQ ID NO: 2420463 - RNA, 19 nt, Artificial Sequence
  Description of Artificial Sequence: Synthetic oligonucleotide
gcaucacguaggucaaagu

SEQ ID NO: 2420464 - RNA, 19 nt, Artificial Sequence
  Description of Artificial Sequence: Synthetic oligonucleotide
caccucuccuuaggcucac

SEQ ID NO: 2420465 - RNA, 19 nt, Artificial Sequence
  Description of Artificial Sequence: Synthetic oligonucleotide
ggagugucuuucccugccu

SEQ ID NO: 2420466 - RNA, 19 nt, Artificial Sequence
  Description of Artificial Sequence: Synthetic oligonucleotide
cagaggucguuggguccug

SEQ ID NO: 2420467 - RNA, 19 nt, Artificial Sequence
  Description of Artificial Sequence: Synthetic oligonucleotide
gugugucacauagcagcgu

SEQ ID NO: 2420468 - RNA, 19 nt, Artificial Sequence
  Description of Artificial Sequence: Synthetic oligonucleotide
cgucgagauugagacgagc

SEQ ID NO: 2420469 - RNA, 19 nt, Artificial Sequence
  Description of Artificial Sequence: Synthetic oligonucleotide
ccgucgagauugagacgag

SEQ ID NO: 2420470 - RNA, 19 nt, Artificial Sequence
  Description of Artificial Sequence: Synthetic oligonucleotide
ugcccgcaucacguagguc

SEQ ID NO: 2420471 - RNA, 19 nt, Artificial Sequence
  Description of Artificial Sequence: Synthetic oligonucleotide
acccggccaccucuccuua

SEQ ID NO: 2420472 - RNA, 19 nt, Artificial Sequence
  Description of Artificial Sequence: Synthetic oligonucleotide
acgcacugagaaaggcguu

SEQ ID NO: 2420473 - RNA, 19 nt, Artificial Sequence
  Description of Artificial Sequence: Synthetic oligonucleotide
ggcuucgcgcguuucuccu

SEQ ID NO: 2420474 - RNA, 19 nt, Artificial Sequence
  Description of Artificial Sequence: Synthetic oligonucleotide
ccaacccgagccauggagu

SEQ ID NO: 2420475 - RNA, 19 nt, Artificial Sequence
  Description of Artificial Sequence: Synthetic oligonucleotide
cccaaccauggcugcgaug

SEQ ID NO: 2420476 - RNA, 19 nt, Artificial Sequence
  Description of Artificial Sequence: Synthetic oligonucleotide
cggggaacacgugugucac

SEQ ID NO: 2420477 - RNA, 19 nt, Artificial Sequence
  Description of Artificial Sequence: Synthetic oligonucleotide
gcgcaccuuggaauuccag

SEQ ID NO: 2420478 - RNA, 19 nt, Artificial Sequence
  Description of Artificial Sequence: Synthetic oligonucleotide
ccccgggaggcacagccuc

SEQ ID NO: 2420479 - RNA, 19 nt, Artificial Sequence
  Description of Artificial Sequence: Synthetic oligonucleotide
gcgcguuucuccugcgcaa

SEQ ID NO: 2420480 - RNA, 19 nt, Artificial Sequence
  Description of Artificial Sequence: Synthetic oligonucleotide
gacgagcaugacaggugau

SEQ ID NO: 2420481 - RNA, 19 nt, Artificial Sequence
  Description of Artificial Sequence: Synthetic oligonucleotide
cugagugcgcaggcuggaa

SEQ ID NO: 2420482 - RNA, 19 nt, Artificial Sequence
  Description of Artificial Sequence: Synthetic oligonucleotide
cggccugguacuugcgcac

SEQ ID NO: 2420483 - RNA, 19 nt, Artificial Sequence
  Description of Artificial Sequence: Synthetic oligonucleotide
gcugagugcgcaggcugga

SEQ ID NO: 2420484 - RNA, 19 nt, Artificial Sequence
  Description of Artificial Sequence: Synthetic oligonucleotide
cugcccgcaucacguaggu

SEQ ID NO: 2420485 - RNA, 19 nt, Artificial Sequence
  Description of Artificial Sequence: Synthetic oligonucleotide
gcacggccugguacuugcg

SEQ ID NO: 2420486 - RNA, 19 nt, Artificial Sequence
  Description of Artificial Sequence: Synthetic oligonucleotide
gcagcgcaccuuggaauuc

SEQ ID NO: 2420487 - RNA, 19 nt, Artificial Sequence
  Description of Artificial Sequence: Synthetic oligonucleotide
gcuccaugaucacgcuucu

SEQ ID NO: 2420488 - RNA, 19 nt, Artificial Sequence
  Description of Artificial Sequence: Synthetic oligonucleotide
guccugcccgcaucacgua

SEQ ID NO: 2420489 - RNA, 19 nt, Artificial Sequence
  Description of Artificial Sequence: Synthetic oligonucleotide
ggcucccacuccucggaua

SEQ ID NO: 2420490 - RNA, 19 nt, Artificial Sequence
  Description of Artificial Sequence: Synthetic oligonucleotide
cgacgggaacaggacagac

SEQ ID NO: 2420491 - RNA, 19 nt, Artificial Sequence
  Description of Artificial Sequence: Synthetic oligonucleotide
cgaggaccgucaacauaac

SEQ ID NO: 2420492 - RNA, 19 nt, Artificial Sequence
  Description of Artificial Sequence: Synthetic oligonucleotide
accccacggggaacacgug

SEQ ID NO: 2420493 - RNA, 19 nt, Artificial Sequence
  Description of Artificial Sequence: Synthetic oligonucleotide
cuacuagcccgucgagauu

SEQ ID NO: 2420494 - RNA, 19 nt, Artificial Sequence
  Description of Artificial Sequence: Synthetic oligonucleotide
cgcgcguuucuccugcgca

SEQ ID NO: 2420495 - RNA, 19 nt, Artificial Sequence
  Description of Artificial Sequence: Synthetic oligonucleotide
cccggccaccucuccuuag

SEQ ID NO: 2420496 - RNA, 19 nt, Artificial Sequence
  Description of Artificial Sequence: Synthetic oligonucleotide
aucacgcuucucggccguu

SEQ ID NO: 2420497 - RNA, 19 nt, Artificial Sequence
  Description of Artificial Sequence: Synthetic oligonucleotide
cccgcaucacguaggucaa

SEQ ID NO: 2420498 - RNA, 19 nt, Artificial Sequence
  Description of Artificial Sequence: Synthetic oligonucleotide
cggccguuuguaagcggug

SEQ ID NO: 2420499 - RNA, 19 nt, Artificial Sequence
  Description of Artificial Sequence: Synthetic oligonucleotide
agcccgcgcugaggugcgg

SEQ ID NO: 2420500 - RNA, 19 nt, Artificial Sequence
  Description of Artificial Sequence: Synthetic oligonucleotide
gcccucacauccaguagcu

SEQ ID NO: 2420501 - RNA, 19 nt, Artificial Sequence
  Description of Artificial Sequence: Synthetic oligonucleotide
ggcugcgauggaggcagaa

SEQ ID NO: 2420502 - RNA, 19 nt, Artificial Sequence
  Description of Artificial Sequence: Synthetic oligonucleotide
ccaggaggaucccaaccau

SEQ ID NO: 2420503 - RNA, 19 nt, Artificial Sequence
  Description of Artificial Sequence: Synthetic oligonucleotide
ggcucaaagcgaggaccgu

SEQ ID NO: 2420504 - RNA, 19 nt, Artificial Sequence
  Description of Artificial Sequence: Synthetic oligonucleotide
ccccacggggaacacgugu

SEQ ID NO: 2420505 - RNA, 19 nt, Artificial Sequence
  Description of Artificial Sequence: Synthetic oligonucleotide
gcaugacaggugauugguu

SEQ ID NO: 2420506 - RNA, 19 nt, Artificial Sequence
  Description of Artificial Sequence: Synthetic oligonucleotide
cgacgcagcgcaccuugga

SEQ ID NO: 2420507 - RNA, 19 nt, Artificial Sequence
  Description of Artificial Sequence: Synthetic oligonucleotide
ccugguacuugcgcacgua

SEQ ID NO: 2420508 - RNA, 19 nt, Artificial Sequence
  Description of Artificial Sequence: Synthetic oligonucleotide
cuccucggauaggcggcua

SEQ ID NO: 2420509 - RNA, 19 nt, Artificial Sequence
  Description of Artificial Sequence: Synthetic oligonucleotide
cgagccauggagugucuuu

SEQ ID NO: 2420510 - RNA, 19 nt, Artificial Sequence
  Description of Artificial Sequence: Synthetic oligonucleotide
cgcagcgcaccuuggaauu

SEQ ID NO: 2420511 - RNA, 19 nt, Artificial Sequence
  Description of Artificial Sequence: Synthetic oligonucleotide
ggcgguggcuucgcgcguu

SEQ ID NO: 2420512 - RNA, 19 nt, Artificial Sequence
  Description of Artificial Sequence: Synthetic oligonucleotide
ccgcaucacguaggucaaa

SEQ ID NO: 2420513 - RNA, 19 nt, Artificial Sequence
  Description of Artificial Sequence: Synthetic oligonucleotide
cccgagccauggagugucu

SEQ ID NO: 2420514 - RNA, 19 nt, Artificial Sequence
  Description of Artificial Sequence: Synthetic oligonucleotide
gcgguggcuucgcgcguuu

SEQ ID NO: 2420515 - RNA, 19 nt, Artificial Sequence
  Description of Artificial Sequence: Synthetic oligonucleotide
ccgagccauggagugucuu

SEQ ID NO: 2420516 - RNA, 19 nt, Artificial Sequence
  Description of Artificial Sequence: Synthetic oligonucleotide
aauaagaacauaauuaaac

SEQ ID NO: 2420517 - RNA, 19 nt, Artificial Sequence
  Description of Artificial Sequence: Synthetic oligonucleotide
ucuaacuacaauaagaaca

SEQ ID NO: 2420518 - RNA, 19 nt, Artificial Sequence
  Description of Artificial Sequence: Synthetic oligonucleotide
aauagguuucuguuuaugc

SEQ ID NO: 2420519 - RNA, 19 nt, Artificial Sequence
  Description of Artificial Sequence: Synthetic oligonucleotide
auugccuaaacacacacgc

SEQ ID NO: 2420520 - RNA, 19 nt, Artificial Sequence
  Description of Artificial Sequence: Synthetic oligonucleotide
uaaguaaaucccaagauug

SEQ ID NO: 2420521 - RNA, 19 nt, Artificial Sequence
  Description of Artificial Sequence: Synthetic oligonucleotide
aguaauaccuuuuaauaac

SEQ ID NO: 2420522 - RNA, 19 nt, Artificial Sequence
  Description of Artificial Sequence: Synthetic oligonucleotide
uuuauuacuaauuccaucu

SEQ ID NO: 2420523 - RNA, 19 nt, Artificial Sequence
  Description of Artificial Sequence: Synthetic oligonucleotide
uauaauuuccuacaaauuc

SEQ ID NO: 2420524 - RNA, 19 nt, Artificial Sequence
  Description of Artificial Sequence: Synthetic oligonucleotide
uuuucuaacuacaauaaga

SEQ ID NO: 2420525 - RNA, 19 nt, Artificial Sequence
  Description of Artificial Sequence: Synthetic oligonucleotide
aaucuacuuaaauauauug

SEQ ID NO: 2420526 - RNA, 19 nt, Artificial Sequence
  Description of Artificial Sequence: Synthetic oligonucleotide
cacaaaaucaacaccaugg

SEQ ID NO: 2420527 - RNA, 19 nt, Artificial Sequence
  Description of Artificial Sequence: Synthetic oligonucleotide
accuguaacaucuaaaguc

SEQ ID NO: 2420528 - RNA, 19 nt, Artificial Sequence
  Description of Artificial Sequence: Synthetic oligonucleotide
uuaacaucuuccuucacgg

SEQ ID NO: 2420529 - RNA, 19 nt, Artificial Sequence
  Description of Artificial Sequence: Synthetic oligonucleotide
aaauugccuaaacacacac

SEQ ID NO: 2420530 - RNA, 19 nt, Artificial Sequence
  Description of Artificial Sequence: Synthetic oligonucleotide
uuauuggucguauaaacag

SEQ ID NO: 2420531 - RNA, 19 nt, Artificial Sequence
  Description of Artificial Sequence: Synthetic oligonucleotide
uauuaaaggaaauacagua

SEQ ID NO: 2420532 - RNA, 19 nt, Artificial Sequence
  Description of Artificial Sequence: Synthetic oligonucleotide
uauauuguuaauucuaagu

SEQ ID NO: 2420533 - RNA, 19 nt, Artificial Sequence
  Description of Artificial Sequence: Synthetic oligonucleotide
aaacauguaucuuucuaag

SEQ ID NO: 2420534 - RNA, 19 nt, Artificial Sequence
  Description of Artificial Sequence: Synthetic oligonucleotide
uaaaucccaagauugacag

SEQ ID NO: 2420535 - RNA, 19 nt, Artificial Sequence
  Description of Artificial Sequence: Synthetic oligonucleotide
auaaacaguguguucuucc

SEQ ID NO: 2420536 - RNA, 19 nt, Artificial Sequence
  Description of Artificial Sequence: Synthetic oligonucleotide
augguuguggucuaaguac

SEQ ID NO: 2420537 - RNA, 19 nt, Artificial Sequence
  Description of Artificial Sequence: Synthetic oligonucleotide
uaaauuaauagguuucugu

SEQ ID NO: 2420538 - RNA, 19 nt, Artificial Sequence
  Description of Artificial Sequence: Synthetic oligonucleotide
ucauauuaaaggaaauaca

SEQ ID NO: 2420539 - RNA, 19 nt, Artificial Sequence
  Description of Artificial Sequence: Synthetic oligonucleotide
ucagcuaaagcauugcggc

SEQ ID NO: 2420540 - RNA, 19 nt, Artificial Sequence
  Description of Artificial Sequence: Synthetic oligonucleotide
aaucccaagauugacagug

SEQ ID NO: 2420541 - RNA, 19 nt, Artificial Sequence
  Description of Artificial Sequence: Synthetic oligonucleotide
uauuguuaauucuaaguca

SEQ ID NO: 2420542 - RNA, 19 nt, Artificial Sequence
  Description of Artificial Sequence: Synthetic oligonucleotide
aaauuaauagguuucuguu

SEQ ID NO: 2420543 - RNA, 19 nt, Artificial Sequence
  Description of Artificial Sequence: Synthetic oligonucleotide
uccuacaaauucuauaaag

SEQ ID NO: 2420544 - RNA, 19 nt, Artificial Sequence
  Description of Artificial Sequence: Synthetic oligonucleotide
ugcaauuugaaaguaauac

SEQ ID NO: 2420545 - RNA, 19 nt, Artificial Sequence
  Description of Artificial Sequence: Synthetic oligonucleotide
acaauaagaacauaauuaa

SEQ ID NO: 2420546 - RNA, 19 nt, Artificial Sequence
  Description of Artificial Sequence: Synthetic oligonucleotide
aaccuauuggguaucaugg

SEQ ID NO: 2420547 - RNA, 19 nt, Artificial Sequence
  Description of Artificial Sequence: Synthetic oligonucleotide
uuuuaauaaccuauugggu

SEQ ID NO: 2420548 - RNA, 19 nt, Artificial Sequence
  Description of Artificial Sequence: Synthetic oligonucleotide
uucuaaguaaaucccaaga

SEQ ID NO: 2420549 - RNA, 19 nt, Artificial Sequence
  Description of Artificial Sequence: Synthetic oligonucleotide
aauacaguauaauuuugau

SEQ ID NO: 2420550 - RNA, 19 nt, Artificial Sequence
  Description of Artificial Sequence: Synthetic oligonucleotide
uacuaauuccaucucacca

SEQ ID NO: 2420551 - RNA, 19 nt, Artificial Sequence
  Description of Artificial Sequence: Synthetic oligonucleotide
ucuacuuaaauauauuguu

SEQ ID NO: 2420552 - RNA, 19 nt, Artificial Sequence
  Description of Artificial Sequence: Synthetic oligonucleotide
uucuaagucaggugaaggg

SEQ ID NO: 2420553 - RNA, 19 nt, Artificial Sequence
  Description of Artificial Sequence: Synthetic oligonucleotide
caaaauugccuaaacacac

SEQ ID NO: 2420554 - RNA, 19 nt, Artificial Sequence
  Description of Artificial Sequence: Synthetic oligonucleotide
uacuuaaauauauuguuaa

SEQ ID NO: 2420555 - RNA, 19 nt, Artificial Sequence
  Description of Artificial Sequence: Synthetic oligonucleotide
ugacaguggauuuuauugg

SEQ ID NO: 2420556 - RNA, 19 nt, Artificial Sequence
  Description of Artificial Sequence: Synthetic oligonucleotide
aaggaaauacaguauaauu

SEQ ID NO: 2420557 - RNA, 19 nt, Artificial Sequence
  Description of Artificial Sequence: Synthetic oligonucleotide
aacaguguguucuuccuug

SEQ ID NO: 2420558 - RNA, 19 nt, Artificial Sequence
  Description of Artificial Sequence: Synthetic oligonucleotide
uauuacuaauuccaucuca

SEQ ID NO: 2420559 - RNA, 19 nt, Artificial Sequence
  Description of Artificial Sequence: Synthetic oligonucleotide
ucuccgaugaaucuguccu

SEQ ID NO: 2420560 - RNA, 19 nt, Artificial Sequence
  Description of Artificial Sequence: Synthetic oligonucleotide
aauuaauagguuucuguuu

SEQ ID NO: 2420561 - RNA, 19 nt, Artificial Sequence
  Description of Artificial Sequence: Synthetic oligonucleotide
auuguuaauucuaagucag

SEQ ID NO: 2420562 - RNA, 19 nt, Artificial Sequence
  Description of Artificial Sequence: Synthetic oligonucleotide
acacauuuuauguauguga

SEQ ID NO: 2420563 - RNA, 19 nt, Artificial Sequence
  Description of Artificial Sequence: Synthetic oligonucleotide
auuacuaauuccaucucac

SEQ ID NO: 2420564 - RNA, 19 nt, Artificial Sequence
  Description of Artificial Sequence: Synthetic oligonucleotide
ucuuucuaaguaaauccca

SEQ ID NO: 2420565 - RNA, 19 nt, Artificial Sequence
  Description of Artificial Sequence: Synthetic oligonucleotide
auuaauagguuucuguuua

SEQ ID NO: 2420566 - RNA, 19 nt, Artificial Sequence
  Description of Artificial Sequence: Synthetic oligonucleotide
gaaucuguccucaucacag

SEQ ID NO: 2420567 - RNA, 19 nt, Artificial Sequence
  Description of Artificial Sequence: Synthetic oligonucleotide
acuuaccacgguuacuacc

SEQ ID NO: 2420568 - RNA, 19 nt, Artificial Sequence
  Description of Artificial Sequence: Synthetic oligonucleotide
uguuuaugcauaucaagaa

SEQ ID NO: 2420569 - RNA, 19 nt, Artificial Sequence
  Description of Artificial Sequence: Synthetic oligonucleotide
cuaagucaggugaagggcg

SEQ ID NO: 2420570 - RNA, 19 nt, Artificial Sequence
  Description of Artificial Sequence: Synthetic oligonucleotide
uuuuauuacuaauuccauc

SEQ ID NO: 2420571 - RNA, 19 nt, Artificial Sequence
  Description of Artificial Sequence: Synthetic oligonucleotide
aaauacaguauaauuuuga

SEQ ID NO: 2420572 - RNA, 19 nt, Artificial Sequence
  Description of Artificial Sequence: Synthetic oligonucleotide
acgugcacaaaaucaacac

SEQ ID NO: 2420573 - RNA, 19 nt, Artificial Sequence
  Description of Artificial Sequence: Synthetic oligonucleotide
aacuacaauaagaacauaa

SEQ ID NO: 2420574 - RNA, 19 nt, Artificial Sequence
  Description of Artificial Sequence: Synthetic oligonucleotide
ucuccuaacgugcacaaaa

SEQ ID NO: 2420575 - RNA, 19 nt, Artificial Sequence
  Description of Artificial Sequence: Synthetic oligonucleotide
auauauuguuaauucuaag

SEQ ID NO: 2420576 - RNA, 19 nt, Artificial Sequence
  Description of Artificial Sequence: Synthetic oligonucleotide
ugucagcuaaagcauugcg

SEQ ID NO: 2420577 - RNA, 19 nt, Artificial Sequence
  Description of Artificial Sequence: Synthetic oligonucleotide
ugcacacacacacacacac

SEQ ID NO: 2420578 - RNA, 19 nt, Artificial Sequence
  Description of Artificial Sequence: Synthetic oligonucleotide
agcauaaucuacuuaaaua

SEQ ID NO: 2420579 - RNA, 19 nt, Artificial Sequence
  Description of Artificial Sequence: Synthetic oligonucleotide
auuuucuaacuacaauaag

SEQ ID NO: 2420580 - RNA, 19 nt, Artificial Sequence
  Description of Artificial Sequence: Synthetic oligonucleotide
aguaaaucccaagauugac

SEQ ID NO: 2420581 - RNA, 19 nt, Artificial Sequence
  Description of Artificial Sequence: Synthetic oligonucleotide
acuaugucuccuaacgugc

SEQ ID NO: 2420582 - RNA, 19 nt, Artificial Sequence
  Description of Artificial Sequence: Synthetic oligonucleotide
caguggauuuuauuggucg

SEQ ID NO: 2420583 - RNA, 19 nt, Artificial Sequence
  Description of Artificial Sequence: Synthetic oligonucleotide
uguuaauucuaagucaggu

SEQ ID NO: 2420584 - RNA, 19 nt, Artificial Sequence
  Description of Artificial Sequence: Synthetic oligonucleotide
uaaccuauuggguaucaug

SEQ ID NO: 2420585 - RNA, 19 nt, Artificial Sequence
  Description of Artificial Sequence: Synthetic oligonucleotide
uuucuaaguaaaucccaag

SEQ ID NO: 2420586 - RNA, 19 nt, Artificial Sequence
  Description of Artificial Sequence: Synthetic oligonucleotide
guuaauucuaagucaggug

SEQ ID NO: 2420587 - RNA, 19 nt, Artificial Sequence
  Description of Artificial Sequence: Synthetic oligonucleotide
uggucguauaaacagugug

SEQ ID NO: 2420588 - RNA, 19 nt, Artificial Sequence
  Description of Artificial Sequence: Synthetic oligonucleotide
ugcauaucaagaaaauuuu

SEQ ID NO: 2420589 - RNA, 19 nt, Artificial Sequence
  Description of Artificial Sequence: Synthetic oligonucleotide
aguacagggcaucacaaca

SEQ ID NO: 2420590 - RNA, 19 nt, Artificial Sequence
  Description of Artificial Sequence: Synthetic oligonucleotide
auagguuucuguuuaugca

SEQ ID NO: 2420591 - RNA, 19 nt, Artificial Sequence
  Description of Artificial Sequence: Synthetic oligonucleotide
acauguaucuuucuaagua

SEQ ID NO: 2420592 - RNA, 19 nt, Artificial Sequence
  Description of Artificial Sequence: Synthetic oligonucleotide
cuugcacacacacacacac

SEQ ID NO: 2420593 - RNA, 19 nt, Artificial Sequence
  Description of Artificial Sequence: Synthetic oligonucleotide
aauuguaagccuucauuuu

SEQ ID NO: 2420594 - RNA, 19 nt, Artificial Sequence
  Description of Artificial Sequence: Synthetic oligonucleotide
ucuaagucaggugaagggc

SEQ ID NO: 2420595 - RNA, 19 nt, Artificial Sequence
  Description of Artificial Sequence: Synthetic oligonucleotide
caauaugauuuuauucccc

SEQ ID NO: 2420596 - RNA, 19 nt, Artificial Sequence
  Description of Artificial Sequence: Synthetic oligonucleotide
uuguuaauucuaagucagg

SEQ ID NO: 2420597 - RNA, 19 nt, Artificial Sequence
  Description of Artificial Sequence: Synthetic oligonucleotide
auaucaagaaaauuuucua

SEQ ID NO: 2420598 - RNA, 19 nt, Artificial Sequence
  Description of Artificial Sequence: Synthetic oligonucleotide
gaucacagacuccacauca

SEQ ID NO: 2420599 - RNA, 19 nt, Artificial Sequence
  Description of Artificial Sequence: Synthetic oligonucleotide
ugugcuuucucuucauucu

SEQ ID NO: 2420600 - RNA, 19 nt, Artificial Sequence
  Description of Artificial Sequence: Synthetic oligonucleotide
auaauuuccuacaaauucu

SEQ ID NO: 2420601 - RNA, 19 nt, Artificial Sequence
  Description of Artificial Sequence: Synthetic oligonucleotide
uguggucuaaguacagggc

SEQ ID NO: 2420602 - RNA, 19 nt, Artificial Sequence
  Description of Artificial Sequence: Synthetic oligonucleotide
cacgcuugcacacacacac

SEQ ID NO: 2420603 - RNA, 19 nt, Artificial Sequence
  Description of Artificial Sequence: Synthetic oligonucleotide
uuaaauuaauagguuucug

SEQ ID NO: 2420604 - RNA, 19 nt, Artificial Sequence
  Description of Artificial Sequence: Synthetic oligonucleotide
acuaauuccaucucaccaa

SEQ ID NO: 2420605 - RNA, 19 nt, Artificial Sequence
  Description of Artificial Sequence: Synthetic oligonucleotide
uuacuaauuccaucucacc

SEQ ID NO: 2420606 - RNA, 19 nt, Artificial Sequence
  Description of Artificial Sequence: Synthetic oligonucleotide
acacacacacacuuaccac

SEQ ID NO: 2420607 - RNA, 19 nt, Artificial Sequence
  Description of Artificial Sequence: Synthetic oligonucleotide
uauuggucguauaaacagu

SEQ ID NO: 2420608 - RNA, 19 nt, Artificial Sequence
  Description of Artificial Sequence: Synthetic oligonucleotide
gcaauuugaaaguaauacc

SEQ ID NO: 2420609 - RNA, 19 nt, Artificial Sequence
  Description of Artificial Sequence: Synthetic oligonucleotide
auaaucuacuuaaauauau

SEQ ID NO: 2420610 - RNA, 19 nt, Artificial Sequence
  Description of Artificial Sequence: Synthetic oligonucleotide
aucuccgaugaaucugucc

SEQ ID NO: 2420611 - RNA, 19 nt, Artificial Sequence
  Description of Artificial Sequence: Synthetic oligonucleotide
aauugccuaaacacacacg

SEQ ID NO: 2420612 - RNA, 19 nt, Artificial Sequence
  Description of Artificial Sequence: Synthetic oligonucleotide
guaauaccuuuuaauaacc

SEQ ID NO: 2420613 - RNA, 19 nt, Artificial Sequence
  Description of Artificial Sequence: Synthetic oligonucleotide
cacacacacacacacacac

SEQ ID NO: 2420614 - RNA, 19 nt, Artificial Sequence
  Description of Artificial Sequence: Synthetic oligonucleotide
uuccuugugugcaauuuga

SEQ ID NO: 2420615 - RNA, 19 nt, Artificial Sequence
  Description of Artificial Sequence: Synthetic oligonucleotide
acaaaauugccuaaacaca

SEQ ID NO: 2420616 - RNA, 19 nt, Artificial Sequence
  Description of Artificial Sequence: Synthetic oligonucleotide
aagucuggaugucagcuaa

SEQ ID NO: 2420617 - RNA, 19 nt, Artificial Sequence
  Description of Artificial Sequence: Synthetic oligonucleotide
cacuaugucuccuaacgug

SEQ ID NO: 2420618 - RNA, 19 nt, Artificial Sequence
  Description of Artificial Sequence: Synthetic oligonucleotide
uucuaacuacaauaagaac

SEQ ID NO: 2420619 - RNA, 19 nt, Artificial Sequence
  Description of Artificial Sequence: Synthetic oligonucleotide
ucaucuccgaugaaucugu

SEQ ID NO: 2420620 - RNA, 19 nt, Artificial Sequence
  Description of Artificial Sequence: Synthetic oligonucleotide
uuauuacuaauuccaucuc

SEQ ID NO: 2420621 - RNA, 19 nt, Artificial Sequence
  Description of Artificial Sequence: Synthetic oligonucleotide
augcauaucaagaaaauuu

SEQ ID NO: 2420622 - RNA, 19 nt, Artificial Sequence
  Description of Artificial Sequence: Synthetic oligonucleotide
agcuaaagcauugcggcgg

SEQ ID NO: 2420623 - RNA, 19 nt, Artificial Sequence
  Description of Artificial Sequence: Synthetic oligonucleotide
cacagcauaaucuacuuaa

SEQ ID NO: 2420624 - RNA, 19 nt, Artificial Sequence
  Description of Artificial Sequence: Synthetic oligonucleotide
aucuacuuaaauauauugu

SEQ ID NO: 2420625 - RNA, 19 nt, Artificial Sequence
  Description of Artificial Sequence: Synthetic oligonucleotide
cuuaccacgguuacuacca

SEQ ID NO: 2420626 - RNA, 19 nt, Artificial Sequence
  Description of Artificial Sequence: Synthetic oligonucleotide
gucagcuaaagcauugcgg

SEQ ID NO: 2420627 - RNA, 19 nt, Artificial Sequence
  Description of Artificial Sequence: Synthetic oligonucleotide
uaaucuacuuaaauauauu

SEQ ID NO: 2420628 - RNA, 19 nt, Artificial Sequence
  Description of Artificial Sequence: Synthetic oligonucleotide
uagguuucuguuuaugcau

SEQ ID NO: 2420629 - RNA, 19 nt, Artificial Sequence
  Description of Artificial Sequence: Synthetic oligonucleotide
cauaucaagaaaauuuucu

SEQ ID NO: 2420630 - RNA, 19 nt, Artificial Sequence
  Description of Artificial Sequence: Synthetic oligonucleotide
augaaucuguccucaucac

SEQ ID NO: 2420631 - RNA, 19 nt, Artificial Sequence
  Description of Artificial Sequence: Synthetic oligonucleotide
caaaaucaacaccauggac

SEQ ID NO: 2420632 - RNA, 19 nt, Artificial Sequence
  Description of Artificial Sequence: Synthetic oligonucleotide
ugguuguggucuaaguaca

SEQ ID NO: 2420633 - RNA, 19 nt, Artificial Sequence
  Description of Artificial Sequence: Synthetic oligonucleotide
uucagcgggagaucagagg

SEQ ID NO: 2420634 - RNA, 19 nt, Artificial Sequence
  Description of Artificial Sequence: Synthetic oligonucleotide
uacuaccagaucaaacacu

SEQ ID NO: 2420635 - RNA, 19 nt, Artificial Sequence
  Description of Artificial Sequence: Synthetic oligonucleotide
ugccuaaacacacacgcuu

SEQ ID NO: 2420636 - RNA, 19 nt, Artificial Sequence
  Description of Artificial Sequence: Synthetic oligonucleotide
cacgguuacuaccagauca

SEQ ID NO: 2420637 - RNA, 19 nt, Artificial Sequence
  Description of Artificial Sequence: Synthetic oligonucleotide
guaucuuucuaaguaaauc

SEQ ID NO: 2420638 - RNA, 19 nt, Artificial Sequence
  Description of Artificial Sequence: Synthetic oligonucleotide
aauuugaaaguaauaccuu

SEQ ID NO: 2420639 - RNA, 19 nt, Artificial Sequence
  Description of Artificial Sequence: Synthetic oligonucleotide
uaacgugcacaaaaucaac

SEQ ID NO: 2420640 - RNA, 19 nt, Artificial Sequence
  Description of Artificial Sequence: Synthetic oligonucleotide
aacgugcacaaaaucaaca

SEQ ID NO: 2420641 - RNA, 19 nt, Artificial Sequence
  Description of Artificial Sequence: Synthetic oligonucleotide
auuggucguauaaacagug

SEQ ID NO: 2420642 - RNA, 19 nt, Artificial Sequence
  Description of Artificial Sequence: Synthetic oligonucleotide
aaagcauugcggcggccug

SEQ ID NO: 2420643 - RNA, 19 nt, Artificial Sequence
  Description of Artificial Sequence: Synthetic oligonucleotide
uccucaucacagcauaauc

SEQ ID NO: 2420644 - RNA, 19 nt, Artificial Sequence
  Description of Artificial Sequence: Synthetic oligonucleotide
uauuggguaucaugguugu

SEQ ID NO: 2420645 - RNA, 19 nt, Artificial Sequence
  Description of Artificial Sequence: Synthetic oligonucleotide
cacacacacacacacuuac

SEQ ID NO: 2420646 - RNA, 19 nt, Artificial Sequence
  Description of Artificial Sequence: Synthetic oligonucleotide
uuccuucacggucaaugcc

SEQ ID NO: 2420647 - RNA, 19 nt, Artificial Sequence
  Description of Artificial Sequence: Synthetic oligonucleotide
cuaacgugcacaaaaucaa

SEQ ID NO: 2420648 - RNA, 19 nt, Artificial Sequence
  Description of Artificial Sequence: Synthetic oligonucleotide
aauuuugauuaaauauaaa

SEQ ID NO: 2420649 - RNA, 19 nt, Artificial Sequence
  Description of Artificial Sequence: Synthetic oligonucleotide
aaguaaaucccaagauuga

SEQ ID NO: 2420650 - RNA, 19 nt, Artificial Sequence
  Description of Artificial Sequence: Synthetic oligonucleotide
uguguucuuccuugugugc

SEQ ID NO: 2420651 - RNA, 19 nt, Artificial Sequence
  Description of Artificial Sequence: Synthetic oligonucleotide
cuaaguacagggcaucaca

SEQ ID NO: 2420652 - RNA, 19 nt, Artificial Sequence
  Description of Artificial Sequence: Synthetic oligonucleotide
acuacaauaagaacauaau

SEQ ID NO: 2420653 - RNA, 19 nt, Artificial Sequence
  Description of Artificial Sequence: Synthetic oligonucleotide
cuaacuacaauaagaacau

SEQ ID NO: 2420654 - RNA, 19 nt, Artificial Sequence
  Description of Artificial Sequence: Synthetic oligonucleotide
ucagucaucuccgaugaau

SEQ ID NO: 2420655 - RNA, 19 nt, Artificial Sequence
  Description of Artificial Sequence: Synthetic oligonucleotide
augucagcuaaagcauugc

SEQ ID NO: 2420656 - RNA, 19 nt, Artificial Sequence
  Description of Artificial Sequence: Synthetic oligonucleotide
aaagucuggaugucagcua

SEQ ID NO: 2420657 - RNA, 19 nt, Artificial Sequence
  Description of Artificial Sequence: Synthetic oligonucleotide
cuacuuaaauauauuguua

SEQ ID NO: 2420658 - RNA, 19 nt, Artificial Sequence
  Description of Artificial Sequence: Synthetic oligonucleotide
uccuaacgugcacaaaauc

SEQ ID NO: 2420659 - RNA, 19 nt, Artificial Sequence
  Description of Artificial Sequence: Synthetic oligonucleotide
aaaucccaagauugacagu

SEQ ID NO: 2420660 - RNA, 19 nt, Artificial Sequence
  Description of Artificial Sequence: Synthetic oligonucleotide
auugacaguggauuuuauu

SEQ ID NO: 2420661 - RNA, 19 nt, Artificial Sequence
  Description of Artificial Sequence: Synthetic oligonucleotide
ccaccuguaacaucuaaag

SEQ ID NO: 2420662 - RNA, 19 nt, Artificial Sequence
  Description of Artificial Sequence: Synthetic oligonucleotide
ucccaagauugacagugga

SEQ ID NO: 2420663 - RNA, 19 nt, Artificial Sequence
  Description of Artificial Sequence: Synthetic oligonucleotide
ucaugguuguggucuaagu

SEQ ID NO: 2420664 - RNA, 19 nt, Artificial Sequence
  Description of Artificial Sequence: Synthetic oligonucleotide
uaacaucuaaagucuggau

SEQ ID NO: 2420665 - RNA, 19 nt, Artificial Sequence
  Description of Artificial Sequence: Synthetic oligonucleotide
uuggucguauaaacagugu

SEQ ID NO: 2420666 - RNA, 19 nt, Artificial Sequence
  Description of Artificial Sequence: Synthetic oligonucleotide
cacacacacacacuuacca

SEQ ID NO: 2420667 - RNA, 19 nt, Artificial Sequence
  Description of Artificial Sequence: Synthetic oligonucleotide
aagcauugcggcggccugc

SEQ ID NO: 2420668 - RNA, 19 nt, Artificial Sequence
  Description of Artificial Sequence: Synthetic oligonucleotide
uaaagcauugcggcggccu

SEQ ID NO: 2420669 - RNA, 19 nt, Artificial Sequence
  Description of Artificial Sequence: Synthetic oligonucleotide
agucaucuccgaugaaucu

SEQ ID NO: 2420670 - RNA, 19 nt, Artificial Sequence
  Description of Artificial Sequence: Synthetic oligonucleotide
ugcaaaggugcugaucaca

SEQ ID NO: 2420671 - RNA, 19 nt, Artificial Sequence
  Description of Artificial Sequence: Synthetic oligonucleotide
uaugucuccuaacgugcac

SEQ ID NO: 2420672 - RNA, 19 nt, Artificial Sequence
  Description of Artificial Sequence: Synthetic oligonucleotide
agaucagagguuccaccug

SEQ ID NO: 2420673 - RNA, 19 nt, Artificial Sequence
  Description of Artificial Sequence: Synthetic oligonucleotide
acaaauuguaagccuucau

SEQ ID NO: 2420674 - RNA, 19 nt, Artificial Sequence
  Description of Artificial Sequence: Synthetic oligonucleotide
aucuguccucaucacagca

SEQ ID NO: 2420675 - RNA, 19 nt, Artificial Sequence
  Description of Artificial Sequence: Synthetic oligonucleotide
cacagacuccacaucaguc

SEQ ID NO: 2420676 - RNA, 19 nt, Artificial Sequence
  Description of Artificial Sequence: Synthetic oligonucleotide
agcgggagaucagagguuc

SEQ ID NO: 2420677 - RNA, 19 nt, Artificial Sequence
  Description of Artificial Sequence: Synthetic oligonucleotide
cagcuaaagcauugcggcg

SEQ ID NO: 2420678 - RNA, 19 nt, Artificial Sequence
  Description of Artificial Sequence: Synthetic oligonucleotide
uggguaucaugguuguggu

SEQ ID NO: 2420679 - RNA, 19 nt, Artificial Sequence
  Description of Artificial Sequence: Synthetic oligonucleotide
acuaccagaucaaacacuu

SEQ ID NO: 2420680 - RNA, 19 nt, Artificial Sequence
  Description of Artificial Sequence: Synthetic oligonucleotide
aguguuaaauuaauagguu

SEQ ID NO: 2420681 - RNA, 19 nt, Artificial Sequence
  Description of Artificial Sequence: Synthetic oligonucleotide
cucgcugagguugcaaagg

SEQ ID NO: 2420682 - RNA, 19 nt, Artificial Sequence
  Description of Artificial Sequence: Synthetic oligonucleotide
cacacgcuugcacacacac

SEQ ID NO: 2420683 - RNA, 19 nt, Artificial Sequence
  Description of Artificial Sequence: Synthetic oligonucleotide
uuaauagguuucuguuuau

SEQ ID NO: 2420684 - RNA, 19 nt, Artificial Sequence
  Description of Artificial Sequence: Synthetic oligonucleotide
ccuaacgugcacaaaauca

SEQ ID NO: 2420685 - RNA, 19 nt, Artificial Sequence
  Description of Artificial Sequence: Synthetic oligonucleotide
uugccuaaacacacacgcu

SEQ ID NO: 2420686 - RNA, 19 nt, Artificial Sequence
  Description of Artificial Sequence: Synthetic oligonucleotide
ucguauaaacaguguguuc

SEQ ID NO: 2420687 - RNA, 19 nt, Artificial Sequence
  Description of Artificial Sequence: Synthetic oligonucleotide
uccgaugaaucuguccuca

SEQ ID NO: 2420688 - RNA, 19 nt, Artificial Sequence
  Description of Artificial Sequence: Synthetic oligonucleotide
acacacacacacacuuacc

SEQ ID NO: 2420689 - RNA, 19 nt, Artificial Sequence
  Description of Artificial Sequence: Synthetic oligonucleotide
aagauugacaguggauuuu

SEQ ID NO: 2420690 - RNA, 19 nt, Artificial Sequence
  Description of Artificial Sequence: Synthetic oligonucleotide
cuuaaauauauuguuaauu

SEQ ID NO: 2420691 - RNA, 19 nt, Artificial Sequence
  Description of Artificial Sequence: Synthetic oligonucleotide
ucaggaaugcagagccacu

SEQ ID NO: 2420692 - RNA, 19 nt, Artificial Sequence
  Description of Artificial Sequence: Synthetic oligonucleotide
cuguaacaucuaaagucug

SEQ ID NO: 2420693 - RNA, 19 nt, Artificial Sequence
  Description of Artificial Sequence: Synthetic oligonucleotide
ucgcugagguugcaaaggu

SEQ ID NO: 2420694 - RNA, 19 nt, Artificial Sequence
  Description of Artificial Sequence: Synthetic oligonucleotide
aauuuccuacaaauucuau

SEQ ID NO: 2420695 - RNA, 19 nt, Artificial Sequence
  Description of Artificial Sequence: Synthetic oligonucleotide
aucacagcauaaucuacuu

SEQ ID NO: 2420696 - RNA, 19 nt, Artificial Sequence
  Description of Artificial Sequence: Synthetic oligonucleotide
ucuaaguacagggcaucac

SEQ ID NO: 2420697 - RNA, 19 nt, Artificial Sequence
  Description of Artificial Sequence: Synthetic oligonucleotide
cucaucacagcauaaucua

SEQ ID NO: 2420698 - RNA, 19 nt, Artificial Sequence
  Description of Artificial Sequence: Synthetic oligonucleotide
gucaucuccgaugaaucug

SEQ ID NO: 2420699 - RNA, 19 nt, Artificial Sequence
  Description of Artificial Sequence: Synthetic oligonucleotide
auugcggcggccugcccuc

SEQ ID NO: 2420700 - RNA, 19 nt, Artificial Sequence
  Description of Artificial Sequence: Synthetic oligonucleotide
gagaucagagguuccaccu

SEQ ID NO: 2420701 - RNA, 19 nt, Artificial Sequence
  Description of Artificial Sequence: Synthetic oligonucleotide
cuucagcgggagaucagag

SEQ ID NO: 2420702 - RNA, 19 nt, Artificial Sequence
  Description of Artificial Sequence: Synthetic oligonucleotide
ccagaucaaacacuucagg

SEQ ID NO: 2420703 - RNA, 19 nt, Artificial Sequence
  Description of Artificial Sequence: Synthetic oligonucleotide
uccuugugugcaauuugaa

SEQ ID NO: 2420704 - RNA, 19 nt, Artificial Sequence
  Description of Artificial Sequence: Synthetic oligonucleotide
accuauuggguaucauggu

SEQ ID NO: 2420705 - RNA, 19 nt, Artificial Sequence
  Description of Artificial Sequence: Synthetic oligonucleotide
gacaguggauuuuauuggu

SEQ ID NO: 2420706 - RNA, 19 nt, Artificial Sequence
  Description of Artificial Sequence: Synthetic oligonucleotide
uugcacacacacacacaca

SEQ ID NO: 2420707 - RNA, 19 nt, Artificial Sequence
  Description of Artificial Sequence: Synthetic oligonucleotide
uaauuccaucucaccaaaa

SEQ ID NO: 2420708 - RNA, 19 nt, Artificial Sequence
  Description of Artificial Sequence: Synthetic oligonucleotide
ggagaucagagguuccacc

SEQ ID NO: 2420709 - RNA, 19 nt, Artificial Sequence
  Description of Artificial Sequence: Synthetic oligonucleotide
ugucuccuaacgugcacaa

SEQ ID NO: 2420710 - RNA, 19 nt, Artificial Sequence
  Description of Artificial Sequence: Synthetic oligonucleotide
gucuggaugucagcuaaag

SEQ ID NO: 2420711 - RNA, 19 nt, Artificial Sequence
  Description of Artificial Sequence: Synthetic oligonucleotide
guguuaaauuaauagguuu

SEQ ID NO: 2420712 - RNA, 19 nt, Artificial Sequence
  Description of Artificial Sequence: Synthetic oligonucleotide
aucuaaagucuggauguca

SEQ ID NO: 2420713 - RNA, 19 nt, Artificial Sequence
  Description of Artificial Sequence: Synthetic oligonucleotide
ugugugcaauuugaaagua

SEQ ID NO: 2420714 - RNA, 19 nt, Artificial Sequence
  Description of Artificial Sequence: Synthetic oligonucleotide
gguaucaugguuguggucu

SEQ ID NO: 2420715 - RNA, 19 nt, Artificial Sequence
  Description of Artificial Sequence: Synthetic oligonucleotide
agcauugcggcggccugcc

SEQ ID NO: 2420716 - RNA, 19 nt, Artificial Sequence
  Description of Artificial Sequence: Synthetic oligonucleotide
caugguuguggucuaagua

SEQ ID NO: 2420717 - RNA, 19 nt, Artificial Sequence
  Description of Artificial Sequence: Synthetic oligonucleotide
gaucagagguuccaccugu

SEQ ID NO: 2420718 - RNA, 19 nt, Artificial Sequence
  Description of Artificial Sequence: Synthetic oligonucleotide
gcaaaggugcugaucacag

SEQ ID NO: 2420719 - RNA, 19 nt, Artificial Sequence
  Description of Artificial Sequence: Synthetic oligonucleotide
uguccucaucacagcauaa

SEQ ID NO: 2420720 - RNA, 19 nt, Artificial Sequence
  Description of Artificial Sequence: Synthetic oligonucleotide
uaccacgguuacuaccaga

SEQ ID NO: 2420721 - RNA, 19 nt, Artificial Sequence
  Description of Artificial Sequence: Synthetic oligonucleotide
agguuccaccuguaacauc

SEQ ID NO: 2420722 - RNA, 19 nt, Artificial Sequence
  Description of Artificial Sequence: Synthetic oligonucleotide
uuuuccggcuggucuugug

SEQ ID NO: 2420723 - RNA, 19 nt, Artificial Sequence
  Description of Artificial Sequence: Synthetic oligonucleotide
agauugacaguggauuuua

SEQ ID NO: 2420724 - RNA, 19 nt, Artificial Sequence
  Description of Artificial Sequence: Synthetic oligonucleotide
gguuacuaccagaucaaac

SEQ ID NO: 2420725 - RNA, 19 nt, Artificial Sequence
  Description of Artificial Sequence: Synthetic oligonucleotide
accacgguuacuaccagau

SEQ ID NO: 2420726 - RNA, 19 nt, Artificial Sequence
  Description of Artificial Sequence: Synthetic oligonucleotide
aucacagacuccacaucag

SEQ ID NO: 2420727 - RNA, 19 nt, Artificial Sequence
  Description of Artificial Sequence: Synthetic oligonucleotide
ucaacaccauggacaaauu

SEQ ID NO: 2420728 - RNA, 19 nt, Artificial Sequence
  Description of Artificial Sequence: Synthetic oligonucleotide
augucuccuaacgugcaca

SEQ ID NO: 2420729 - RNA, 19 nt, Artificial Sequence
  Description of Artificial Sequence: Synthetic oligonucleotide
aggaaugcagagccacuau

SEQ ID NO: 2420730 - RNA, 19 nt, Artificial Sequence
  Description of Artificial Sequence: Synthetic oligonucleotide
cuaugucuccuaacgugca

SEQ ID NO: 2420731 - RNA, 19 nt, Artificial Sequence
  Description of Artificial Sequence: Synthetic oligonucleotide
ccuacaaauucuauaaagu

SEQ ID NO: 2420732 - RNA, 19 nt, Artificial Sequence
  Description of Artificial Sequence: Synthetic oligonucleotide
cuaccagaucaaacacuuc

SEQ ID NO: 2420733 - RNA, 19 nt, Artificial Sequence
  Description of Artificial Sequence: Synthetic oligonucleotide
gaacauaauuaaacaugua

SEQ ID NO: 2420734 - RNA, 19 nt, Artificial Sequence
  Description of Artificial Sequence: Synthetic oligonucleotide
cagggcaucacaacaaaau

SEQ ID NO: 2420735 - RNA, 19 nt, Artificial Sequence
  Description of Artificial Sequence: Synthetic oligonucleotide
caaugccuccagcuucagc

SEQ ID NO: 2420736 - RNA, 19 nt, Artificial Sequence
  Description of Artificial Sequence: Synthetic oligonucleotide
cuccgaugaaucuguccuc

SEQ ID NO: 2420737 - RNA, 19 nt, Artificial Sequence
  Description of Artificial Sequence: Synthetic oligonucleotide
cacuuaccacgguuacuac

SEQ ID NO: 2420738 - RNA, 19 nt, Artificial Sequence
  Description of Artificial Sequence: Synthetic oligonucleotide
caguguguucuuccuugug

SEQ ID NO: 2420739 - RNA, 19 nt, Artificial Sequence
  Description of Artificial Sequence: Synthetic oligonucleotide
acagcauaaucuacuuaaa

SEQ ID NO: 2420740 - RNA, 19 nt, Artificial Sequence
  Description of Artificial Sequence: Synthetic oligonucleotide
ccacucauauuaaaggaaa

SEQ ID NO: 2420741 - RNA, 19 nt, Artificial Sequence
  Description of Artificial Sequence: Synthetic oligonucleotide
gcuaaagcauugcggcggc

SEQ ID NO: 2420742 - RNA, 19 nt, Artificial Sequence
  Description of Artificial Sequence: Synthetic oligonucleotide
uaacuacaauaagaacaua

SEQ ID NO: 2420743 - RNA, 19 nt, Artificial Sequence
  Description of Artificial Sequence: Synthetic oligonucleotide
cacggucaaugccuccagc

SEQ ID NO: 2420744 - RNA, 19 nt, Artificial Sequence
  Description of Artificial Sequence: Synthetic oligonucleotide
guacagggcaucacaacaa

SEQ ID NO: 2420745 - RNA, 19 nt, Artificial Sequence
  Description of Artificial Sequence: Synthetic oligonucleotide
gucaaugccuccagcuuca

SEQ ID NO: 2420746 - RNA, 19 nt, Artificial Sequence
  Description of Artificial Sequence: Synthetic oligonucleotide
cacacacacacacacacuu

SEQ ID NO: 2420747 - RNA, 19 nt, Artificial Sequence
  Description of Artificial Sequence: Synthetic oligonucleotide
caccauggacaaauuguaa

SEQ ID NO: 2420748 - RNA, 19 nt, Artificial Sequence
  Description of Artificial Sequence: Synthetic oligonucleotide
acgguuacuaccagaucaa

SEQ ID NO: 2420749 - RNA, 19 nt, Artificial Sequence
  Description of Artificial Sequence: Synthetic oligonucleotide
auaaccuauuggguaucau

SEQ ID NO: 2420750 - RNA, 19 nt, Artificial Sequence
  Description of Artificial Sequence: Synthetic oligonucleotide
caaaggugcugaucacaga

SEQ ID NO: 2420751 - RNA, 19 nt, Artificial Sequence
  Description of Artificial Sequence: Synthetic oligonucleotide
gcaucacaacaaaauugcc

SEQ ID NO: 2420752 - RNA, 19 nt, Artificial Sequence
  Description of Artificial Sequence: Synthetic oligonucleotide
gccuaaacacacacgcuug

SEQ ID NO: 2420753 - RNA, 19 nt, Artificial Sequence
  Description of Artificial Sequence: Synthetic oligonucleotide
gguuguggucuaaguacag

SEQ ID NO: 2420754 - RNA, 19 nt, Artificial Sequence
  Description of Artificial Sequence: Synthetic oligonucleotide
gucguauaaacaguguguu

SEQ ID NO: 2420755 - RNA, 19 nt, Artificial Sequence
  Description of Artificial Sequence: Synthetic oligonucleotide
ggucguauaaacagugugu

SEQ ID NO: 2420756 - RNA, 19 nt, Artificial Sequence
  Description of Artificial Sequence: Synthetic oligonucleotide
cuguccucaucacagcaua

SEQ ID NO: 2420757 - RNA, 19 nt, Artificial Sequence
  Description of Artificial Sequence: Synthetic oligonucleotide
acacacacacacacacaca

SEQ ID NO: 2420758 - RNA, 19 nt, Artificial Sequence
  Description of Artificial Sequence: Synthetic oligonucleotide
gugugcaauuugaaaguaa

SEQ ID NO: 2420759 - RNA, 19 nt, Artificial Sequence
  Description of Artificial Sequence: Synthetic oligonucleotide
acacacacacacacacacu

SEQ ID NO: 2420760 - RNA, 19 nt, Artificial Sequence
  Description of Artificial Sequence: Synthetic oligonucleotide
gagccacuaugucuccuaa

SEQ ID NO: 2420761 - RNA, 19 nt, Artificial Sequence
  Description of Artificial Sequence: Synthetic oligonucleotide
cagcauaaucuacuuaaau

SEQ ID NO: 2420762 - RNA, 19 nt, Artificial Sequence
  Description of Artificial Sequence: Synthetic oligonucleotide
cuaaagcauugcggcggcc

SEQ ID NO: 2420763 - RNA, 19 nt, Artificial Sequence
  Description of Artificial Sequence: Synthetic oligonucleotide
cguauaaacaguguguucu

SEQ ID NO: 2420764 - RNA, 19 nt, Artificial Sequence
  Description of Artificial Sequence: Synthetic oligonucleotide
gugcaauuugaaaguaaua

SEQ ID NO: 2420765 - RNA, 19 nt, Artificial Sequence
  Description of Artificial Sequence: Synthetic oligonucleotide
ccucaucacagcauaaucu

SEQ ID NO: 2420766 - RNA, 19 nt, Artificial Sequence
  Description of Artificial Sequence: Synthetic oligonucleotide
guaucaugguuguggucua

SEQ ID NO: 2420767 - RNA, 19 nt, Artificial Sequence
  Description of Artificial Sequence: Synthetic oligonucleotide
cacucauauuaaaggaaau

SEQ ID NO: 2420768 - RNA, 19 nt, Artificial Sequence
  Description of Artificial Sequence: Synthetic oligonucleotide
caucuccgaugaaucuguc

SEQ ID NO: 2420769 - RNA, 19 nt, Artificial Sequence
  Description of Artificial Sequence: Synthetic oligonucleotide
ccugcccucgcugagguug

SEQ ID NO: 2420770 - RNA, 19 nt, Artificial Sequence
  Description of Artificial Sequence: Synthetic oligonucleotide
cccacucauauuaaaggaa

SEQ ID NO: 2420771 - RNA, 19 nt, Artificial Sequence
  Description of Artificial Sequence: Synthetic oligonucleotide
caccuguaacaucuaaagu

SEQ ID NO: 2420772 - RNA, 19 nt, Artificial Sequence
  Description of Artificial Sequence: Synthetic oligonucleotide
ccucgcugagguugcaaag

SEQ ID NO: 2420773 - RNA, 19 nt, Artificial Sequence
  Description of Artificial Sequence: Synthetic oligonucleotide
ggucuaaguacagggcauc

SEQ ID NO: 2420774 - RNA, 19 nt, Artificial Sequence
  Description of Artificial Sequence: Synthetic oligonucleotide
cgcuugcacacacacacac

SEQ ID NO: 2420775 - RNA, 19 nt, Artificial Sequence
  Description of Artificial Sequence: Synthetic oligonucleotide
ggauuuuauuggucguaua

SEQ ID NO: 2420776 - RNA, 19 nt, Artificial Sequence
  Description of Artificial Sequence: Synthetic oligonucleotide
gguugcaaaggugcugauc

SEQ ID NO: 2420777 - RNA, 19 nt, Artificial Sequence
  Description of Artificial Sequence: Synthetic oligonucleotide
aucagucaucuccgaugaa

SEQ ID NO: 2420778 - RNA, 19 nt, Artificial Sequence
  Description of Artificial Sequence: Synthetic oligonucleotide
caggaaugcagagccacua

SEQ ID NO: 2420779 - RNA, 19 nt, Artificial Sequence
  Description of Artificial Sequence: Synthetic oligonucleotide
cuccuaacgugcacaaaau

SEQ ID NO: 2420780 - RNA, 19 nt, Artificial Sequence
  Description of Artificial Sequence: Synthetic oligonucleotide
cagcuucagcgggagauca

SEQ ID NO: 2420781 - RNA, 19 nt, Artificial Sequence
  Description of Artificial Sequence: Synthetic oligonucleotide
acacacacacacacacuua

SEQ ID NO: 2420782 - RNA, 19 nt, Artificial Sequence
  Description of Artificial Sequence: Synthetic oligonucleotide
agguugcaaaggugcugau

SEQ ID NO: 2420783 - RNA, 19 nt, Artificial Sequence
  Description of Artificial Sequence: Synthetic oligonucleotide
gagguuccaccuguaacau

SEQ ID NO: 2420784 - RNA, 19 nt, Artificial Sequence
  Description of Artificial Sequence: Synthetic oligonucleotide
gggagaucagagguuccac

SEQ ID NO: 2420785 - RNA, 19 nt, Artificial Sequence
  Description of Artificial Sequence: Synthetic oligonucleotide
gcuucagcgggagaucaga

SEQ ID NO: 2420786 - RNA, 19 nt, Artificial Sequence
  Description of Artificial Sequence: Synthetic oligonucleotide
ccuucacggucaaugccuc

SEQ ID NO: 2420787 - RNA, 19 nt, Artificial Sequence
  Description of Artificial Sequence: Synthetic oligonucleotide
cauugcggcggccugcccu

SEQ ID NO: 2420788 - RNA, 19 nt, Artificial Sequence
  Description of Artificial Sequence: Synthetic oligonucleotide
cgaugaaucuguccucauc

SEQ ID NO: 2420789 - RNA, 19 nt, Artificial Sequence
  Description of Artificial Sequence: Synthetic oligonucleotide
gauugacaguggauuuuau

SEQ ID NO: 2420790 - RNA, 19 nt, Artificial Sequence
  Description of Artificial Sequence: Synthetic oligonucleotide
cacaucagucaucuccgau

SEQ ID NO: 2420791 - RNA, 19 nt, Artificial Sequence
  Description of Artificial Sequence: Synthetic oligonucleotide
acgcuugcacacacacaca

SEQ ID NO: 2420792 - RNA, 19 nt, Artificial Sequence
  Description of Artificial Sequence: Synthetic oligonucleotide
agucuggaugucagcuaaa

SEQ ID NO: 2420793 - RNA, 19 nt, Artificial Sequence
  Description of Artificial Sequence: Synthetic oligonucleotide
acacacgcuugcacacaca

SEQ ID NO: 2420794 - RNA, 19 nt, Artificial Sequence
  Description of Artificial Sequence: Synthetic oligonucleotide
gcuugcacacacacacaca

SEQ ID NO: 2420795 - RNA, 19 nt, Artificial Sequence
  Description of Artificial Sequence: Synthetic oligonucleotide
gcacacacacacacacaca

SEQ ID NO: 2420796 - RNA, 19 nt, Artificial Sequence
  Description of Artificial Sequence: Synthetic oligonucleotide
cacacuuaccacgguuacu

SEQ ID NO: 2420797 - RNA, 19 nt, Artificial Sequence
  Description of Artificial Sequence: Synthetic oligonucleotide
ccacgguuacuaccagauc

SEQ ID NO: 2420798 - RNA, 19 nt, Artificial Sequence
  Description of Artificial Sequence: Synthetic oligonucleotide
gucuccuaacgugcacaaa

SEQ ID NO: 2420799 - RNA, 19 nt, Artificial Sequence
  Description of Artificial Sequence: Synthetic oligonucleotide
ggcggccugcccucgcuga

SEQ ID NO: 2420800 - RNA, 19 nt, Artificial Sequence
  Description of Artificial Sequence: Synthetic oligonucleotide
ccacuaugucuccuaacgu

SEQ ID NO: 2420801 - RNA, 19 nt, Artificial Sequence
  Description of Artificial Sequence: Synthetic oligonucleotide
gcgggagaucagagguucc

SEQ ID NO: 2420802 - RNA, 19 nt, Artificial Sequence
  Description of Artificial Sequence: Synthetic oligonucleotide
gcauugcggcggccugccc

SEQ ID NO: 2420803 - RNA, 19 nt, Artificial Sequence
  Description of Artificial Sequence: Synthetic oligonucleotide
cagagccacuaugucuccu

SEQ ID NO: 2420804 - RNA, 19 nt, Artificial Sequence
  Description of Artificial Sequence: Synthetic oligonucleotide
cgggagaucagagguucca

SEQ ID NO: 2420805 - RNA, 19 nt, Artificial Sequence
  Description of Artificial Sequence: Synthetic oligonucleotide
cgguuacuaccagaucaaa

SEQ ID NO: 2420806 - RNA, 19 nt, Artificial Sequence
  Description of Artificial Sequence: Synthetic oligonucleotide
ccgaugaaucuguccucau

SEQ ID NO: 2420807 - RNA, 19 nt, Artificial Sequence
  Description of Artificial Sequence: Synthetic oligonucleotide
gcccucgcugagguugcaa

SEQ ID NO: 2420808 - RNA, 19 nt, Artificial Sequence
  Description of Artificial Sequence: Synthetic oligonucleotide
ccggcuggucuugugcuuu

SEQ ID NO: 2420809 - RNA, 19 nt, Artificial Sequence
  Description of Artificial Sequence: Synthetic oligonucleotide
aauaaugacguuuauuucc

SEQ ID NO: 2420810 - RNA, 19 nt, Artificial Sequence
  Description of Artificial Sequence: Synthetic oligonucleotide
aaacuugaaaaguacaagc

SEQ ID NO: 2420811 - RNA, 19 nt, Artificial Sequence
  Description of Artificial Sequence: Synthetic oligonucleotide
uuaaauacgaaacaucagg

SEQ ID NO: 2420812 - RNA, 19 nt, Artificial Sequence
  Description of Artificial Sequence: Synthetic oligonucleotide
ugaauacucaaucauaugg

SEQ ID NO: 2420813 - RNA, 19 nt, Artificial Sequence
  Description of Artificial Sequence: Synthetic oligonucleotide
ugauaauugaguaggaugg

SEQ ID NO: 2420814 - RNA, 19 nt, Artificial Sequence
  Description of Artificial Sequence: Synthetic oligonucleotide
aaugagaacauugaucucc

SEQ ID NO: 2420815 - RNA, 19 nt, Artificial Sequence
  Description of Artificial Sequence: Synthetic oligonucleotide
aaaaucuuaugcuucuggc

SEQ ID NO: 2420816 - RNA, 19 nt, Artificial Sequence
  Description of Artificial Sequence: Synthetic oligonucleotide
aauacgaaacaucaggcag

SEQ ID NO: 2420817 - RNA, 19 nt, Artificial Sequence
  Description of Artificial Sequence: Synthetic oligonucleotide
aacaggaacuaacucaggc

SEQ ID NO: 2420818 - RNA, 19 nt, Artificial Sequence
  Description of Artificial Sequence: Synthetic oligonucleotide
uguggcuugaauaaugacg

SEQ ID NO: 2420819 - RNA, 19 nt, Artificial Sequence
  Description of Artificial Sequence: Synthetic oligonucleotide
aaucuuaugcuucuggcag

SEQ ID NO: 2420820 - RNA, 19 nt, Artificial Sequence
  Description of Artificial Sequence: Synthetic oligonucleotide
ucuuguaaaacacaaguac

SEQ ID NO: 2420821 - RNA, 19 nt, Artificial Sequence
  Description of Artificial Sequence: Synthetic oligonucleotide
uuaacaggaacuaacucag

SEQ ID NO: 2420822 - RNA, 19 nt, Artificial Sequence
  Description of Artificial Sequence: Synthetic oligonucleotide
aguacauuugguguuaucc

SEQ ID NO: 2420823 - RNA, 19 nt, Artificial Sequence
  Description of Artificial Sequence: Synthetic oligonucleotide
ugaauaaugacguuuauuu

SEQ ID NO: 2420824 - RNA, 19 nt, Artificial Sequence
  Description of Artificial Sequence: Synthetic oligonucleotide
ucaugugugguccacagag

SEQ ID NO: 2420825 - RNA, 19 nt, Artificial Sequence
  Description of Artificial Sequence: Synthetic oligonucleotide
uaaauacgaaacaucaggc

SEQ ID NO: 2420826 - RNA, 19 nt, Artificial Sequence
  Description of Artificial Sequence: Synthetic oligonucleotide
ugcagacacacucacaacg

SEQ ID NO: 2420827 - RNA, 19 nt, Artificial Sequence
  Description of Artificial Sequence: Synthetic oligonucleotide
uaauucauaagcauugcac

SEQ ID NO: 2420828 - RNA, 19 nt, Artificial Sequence
  Description of Artificial Sequence: Synthetic oligonucleotide
aauaauucauaagcauugc

SEQ ID NO: 2420829 - RNA, 19 nt, Artificial Sequence
  Description of Artificial Sequence: Synthetic oligonucleotide
auuacaucagugcugauca

SEQ ID NO: 2420830 - RNA, 19 nt, Artificial Sequence
  Description of Artificial Sequence: Synthetic oligonucleotide
uaauugaguaggauggcgg

SEQ ID NO: 2420831 - RNA, 19 nt, Artificial Sequence
  Description of Artificial Sequence: Synthetic oligonucleotide
aauaggacagaguuucuug

SEQ ID NO: 2420832 - RNA, 19 nt, Artificial Sequence
  Description of Artificial Sequence: Synthetic oligonucleotide
aauugaguaggauggcggg

SEQ ID NO: 2420833 - RNA, 19 nt, Artificial Sequence
  Description of Artificial Sequence: Synthetic oligonucleotide
aauuacaucagugcugauc

SEQ ID NO: 2420834 - RNA, 19 nt, Artificial Sequence
  Description of Artificial Sequence: Synthetic oligonucleotide
uauugaauggaaaugugaa

SEQ ID NO: 2420835 - RNA, 19 nt, Artificial Sequence
  Description of Artificial Sequence: Synthetic oligonucleotide
aaugugaauucaccauggc

SEQ ID NO: 2420836 - RNA, 19 nt, Artificial Sequence
  Description of Artificial Sequence: Synthetic oligonucleotide
gaauaauucauaagcauug

SEQ ID NO: 2420837 - RNA, 19 nt, Artificial Sequence
  Description of Artificial Sequence: Synthetic oligonucleotide
aacauugaucuccuucugg

SEQ ID NO: 2420838 - RNA, 19 nt, Artificial Sequence
  Description of Artificial Sequence: Synthetic oligonucleotide
auaagcauugcacuccaac

SEQ ID NO: 2420839 - RNA, 19 nt, Artificial Sequence
  Description of Artificial Sequence: Synthetic oligonucleotide
aacuuugccagucugaaua

SEQ ID NO: 2420840 - RNA, 19 nt, Artificial Sequence
  Description of Artificial Sequence: Synthetic oligonucleotide
gaaaugugaauucaccaug

SEQ ID NO: 2420841 - RNA, 19 nt, Artificial Sequence
  Description of Artificial Sequence: Synthetic oligonucleotide
aaauacgaaacaucaggca

SEQ ID NO: 2420842 - RNA, 19 nt, Artificial Sequence
  Description of Artificial Sequence: Synthetic oligonucleotide
cuagagguaauugucagcg

SEQ ID NO: 2420843 - RNA, 19 nt, Artificial Sequence
  Description of Artificial Sequence: Synthetic oligonucleotide
aaaucuuaugcuucuggca

SEQ ID NO: 2420844 - RNA, 19 nt, Artificial Sequence
  Description of Artificial Sequence: Synthetic oligonucleotide
gaaguucugcauaagaaag

SEQ ID NO: 2420845 - RNA, 19 nt, Artificial Sequence
  Description of Artificial Sequence: Synthetic oligonucleotide
aauggaaaugugaauucac

SEQ ID NO: 2420846 - RNA, 19 nt, Artificial Sequence
  Description of Artificial Sequence: Synthetic oligonucleotide
uacucaaucauauggcacc

SEQ ID NO: 2420847 - RNA, 19 nt, Artificial Sequence
  Description of Artificial Sequence: Synthetic oligonucleotide
cugauaauugaguaggaug

SEQ ID NO: 2420848 - RNA, 19 nt, Artificial Sequence
  Description of Artificial Sequence: Synthetic oligonucleotide
auucauaagcauugcacuc

SEQ ID NO: 2420849 - RNA, 19 nt, Artificial Sequence
  Description of Artificial Sequence: Synthetic oligonucleotide
aaaugugaauucaccaugg

SEQ ID NO: 2420850 - RNA, 19 nt, Artificial Sequence
  Description of Artificial Sequence: Synthetic oligonucleotide
ucaaucauauggcaccugc

SEQ ID NO: 2420851 - RNA, 19 nt, Artificial Sequence
  Description of Artificial Sequence: Synthetic oligonucleotide
uuuuguggcuugaauaaug

SEQ ID NO: 2420852 - RNA, 19 nt, Artificial Sequence
  Description of Artificial Sequence: Synthetic oligonucleotide
gccagaauaauucauaagc

SEQ ID NO: 2420853 - RNA, 19 nt, Artificial Sequence
  Description of Artificial Sequence: Synthetic oligonucleotide
agaacauugaucuccuucu

SEQ ID NO: 2420854 - RNA, 19 nt, Artificial Sequence
  Description of Artificial Sequence: Synthetic oligonucleotide
uaagaaagagccagaauaa

SEQ ID NO: 2420855 - RNA, 19 nt, Artificial Sequence
  Description of Artificial Sequence: Synthetic oligonucleotide
ucuaacagcuggcugcagg

SEQ ID NO: 2420856 - RNA, 19 nt, Artificial Sequence
  Description of Artificial Sequence: Synthetic oligonucleotide
augguuggcaauuuuaaca

SEQ ID NO: 2420857 - RNA, 19 nt, Artificial Sequence
  Description of Artificial Sequence: Synthetic oligonucleotide
auaggacagaguuucuugg

SEQ ID NO: 2420858 - RNA, 19 nt, Artificial Sequence
  Description of Artificial Sequence: Synthetic oligonucleotide
uuguaaaacacaaguacau

SEQ ID NO: 2420859 - RNA, 19 nt, Artificial Sequence
  Description of Artificial Sequence: Synthetic oligonucleotide
aucauauggcaccugcuac

SEQ ID NO: 2420860 - RNA, 19 nt, Artificial Sequence
  Description of Artificial Sequence: Synthetic oligonucleotide
agcacuuacagccuguaug

SEQ ID NO: 2420861 - RNA, 19 nt, Artificial Sequence
  Description of Artificial Sequence: Synthetic oligonucleotide
uucucauucaucaccacaa

SEQ ID NO: 2420862 - RNA, 19 nt, Artificial Sequence
  Description of Artificial Sequence: Synthetic oligonucleotide
ucaguaaacuugaaaagua

SEQ ID NO: 2420863 - RNA, 19 nt, Artificial Sequence
  Description of Artificial Sequence: Synthetic oligonucleotide
uuccugaagguaagaaugg

SEQ ID NO: 2420864 - RNA, 19 nt, Artificial Sequence
  Description of Artificial Sequence: Synthetic oligonucleotide
cuuacagccuguaugguug

SEQ ID NO: 2420865 - RNA, 19 nt, Artificial Sequence
  Description of Artificial Sequence: Synthetic oligonucleotide
aaagagccagaauaauuca

SEQ ID NO: 2420866 - RNA, 19 nt, Artificial Sequence
  Description of Artificial Sequence: Synthetic oligonucleotide
gaauacucaaucauauggc

SEQ ID NO: 2420867 - RNA, 19 nt, Artificial Sequence
  Description of Artificial Sequence: Synthetic oligonucleotide
auugcacuccaacuuugcc

SEQ ID NO: 2420868 - RNA, 19 nt, Artificial Sequence
  Description of Artificial Sequence: Synthetic oligonucleotide
uuugguguuaucccacagc

SEQ ID NO: 2420869 - RNA, 19 nt, Artificial Sequence
  Description of Artificial Sequence: Synthetic oligonucleotide
ugaagcuagagguaauugu

SEQ ID NO: 2420870 - RNA, 19 nt, Artificial Sequence
  Description of Artificial Sequence: Synthetic oligonucleotide
uuuguggcuugaauaauga

SEQ ID NO: 2420871 - RNA, 19 nt, Artificial Sequence
  Description of Artificial Sequence: Synthetic oligonucleotide
aacuugaaaaguacaagcu

SEQ ID NO: 2420872 - RNA, 19 nt, Artificial Sequence
  Description of Artificial Sequence: Synthetic oligonucleotide
ucaucuuguaaaacacaag

SEQ ID NO: 2420873 - RNA, 19 nt, Artificial Sequence
  Description of Artificial Sequence: Synthetic oligonucleotide
ugauguuuugcagacacac

SEQ ID NO: 2420874 - RNA, 19 nt, Artificial Sequence
  Description of Artificial Sequence: Synthetic oligonucleotide
uuaugcuucuggcagcagc

SEQ ID NO: 2420875 - RNA, 19 nt, Artificial Sequence
  Description of Artificial Sequence: Synthetic oligonucleotide
aauucaccauggcacuagg

SEQ ID NO: 2420876 - RNA, 19 nt, Artificial Sequence
  Description of Artificial Sequence: Synthetic oligonucleotide
auaauugaguaggauggcg

SEQ ID NO: 2420877 - RNA, 19 nt, Artificial Sequence
  Description of Artificial Sequence: Synthetic oligonucleotide
caaacuucauguguggucc

SEQ ID NO: 2420878 - RNA, 19 nt, Artificial Sequence
  Description of Artificial Sequence: Synthetic oligonucleotide
gacagaguuucuuggaaug

SEQ ID NO: 2420879 - RNA, 19 nt, Artificial Sequence
  Description of Artificial Sequence: Synthetic oligonucleotide
cauucaucaccacaauggg

SEQ ID NO: 2420880 - RNA, 19 nt, Artificial Sequence
  Description of Artificial Sequence: Synthetic oligonucleotide
acacaaguacauuuggugu

SEQ ID NO: 2420881 - RNA, 19 nt, Artificial Sequence
  Description of Artificial Sequence: Synthetic oligonucleotide
aaucauauggcaccugcua

SEQ ID NO: 2420882 - RNA, 19 nt, Artificial Sequence
  Description of Artificial Sequence: Synthetic oligonucleotide
acucacaacgcucuucauc

SEQ ID NO: 2420883 - RNA, 19 nt, Artificial Sequence
  Description of Artificial Sequence: Synthetic oligonucleotide
uugaauggaaaugugaauu

SEQ ID NO: 2420884 - RNA, 19 nt, Artificial Sequence
  Description of Artificial Sequence: Synthetic oligonucleotide
uggauucucaucuuguaaa

SEQ ID NO: 2420885 - RNA, 19 nt, Artificial Sequence
  Description of Artificial Sequence: Synthetic oligonucleotide
aauaggaucuucugauaau

SEQ ID NO: 2420886 - RNA, 19 nt, Artificial Sequence
  Description of Artificial Sequence: Synthetic oligonucleotide
uacauuugguguuauccca

SEQ ID NO: 2420887 - RNA, 19 nt, Artificial Sequence
  Description of Artificial Sequence: Synthetic oligonucleotide
ugcugaaugagaucuccag

SEQ ID NO: 2420888 - RNA, 19 nt, Artificial Sequence
  Description of Artificial Sequence: Synthetic oligonucleotide
uaucugaauaggaucuucu

SEQ ID NO: 2420889 - RNA, 19 nt, Artificial Sequence
  Description of Artificial Sequence: Synthetic oligonucleotide
cauacaaaugaaguucugc

SEQ ID NO: 2420890 - RNA, 19 nt, Artificial Sequence
  Description of Artificial Sequence: Synthetic oligonucleotide
auaauucauaagcauugca

SEQ ID NO: 2420891 - RNA, 19 nt, Artificial Sequence
  Description of Artificial Sequence: Synthetic oligonucleotide
aaugagaucuccaggacau

SEQ ID NO: 2420892 - RNA, 19 nt, Artificial Sequence
  Description of Artificial Sequence: Synthetic oligonucleotide
ugaauggaaaugugaauuc

SEQ ID NO: 2420893 - RNA, 19 nt, Artificial Sequence
  Description of Artificial Sequence: Synthetic oligonucleotide
uucauaagcauugcacucc

SEQ ID NO: 2420894 - RNA, 19 nt, Artificial Sequence
  Description of Artificial Sequence: Synthetic oligonucleotide
ugaucauacaaaugaaguu

SEQ ID NO: 2420895 - RNA, 19 nt, Artificial Sequence
  Description of Artificial Sequence: Synthetic oligonucleotide
gagaacauugaucuccuuc

SEQ ID NO: 2420896 - RNA, 19 nt, Artificial Sequence
  Description of Artificial Sequence: Synthetic oligonucleotide
gucaauaggacagaguuuc

SEQ ID NO: 2420897 - RNA, 19 nt, Artificial Sequence
  Description of Artificial Sequence: Synthetic oligonucleotide
agggaguggauucucaucu

SEQ ID NO: 2420898 - RNA, 19 nt, Artificial Sequence
  Description of Artificial Sequence: Synthetic oligonucleotide
agagguaauugucagcgga

SEQ ID NO: 2420899 - RNA, 19 nt, Artificial Sequence
  Description of Artificial Sequence: Synthetic oligonucleotide
ggaaugagaacauugaucu

SEQ ID NO: 2420900 - RNA, 19 nt, Artificial Sequence
  Description of Artificial Sequence: Synthetic oligonucleotide
acaaaugaaguucugcaua

SEQ ID NO: 2420901 - RNA, 19 nt, Artificial Sequence
  Description of Artificial Sequence: Synthetic oligonucleotide
gguguuaucccacagcaug

SEQ ID NO: 2420902 - RNA, 19 nt, Artificial Sequence
  Description of Artificial Sequence: Synthetic oligonucleotide
uucaccauggcacuaggua

SEQ ID NO: 2420903 - RNA, 19 nt, Artificial Sequence
  Description of Artificial Sequence: Synthetic oligonucleotide
gaauaggaucuucugauaa

SEQ ID NO: 2420904 - RNA, 19 nt, Artificial Sequence
  Description of Artificial Sequence: Synthetic oligonucleotide
agguaggcgaagcacuuac

SEQ ID NO: 2420905 - RNA, 19 nt, Artificial Sequence
  Description of Artificial Sequence: Synthetic oligonucleotide
cagugguucaguaaacuug

SEQ ID NO: 2420906 - RNA, 19 nt, Artificial Sequence
  Description of Artificial Sequence: Synthetic oligonucleotide
caggaacuaacucaggcac

SEQ ID NO: 2420907 - RNA, 19 nt, Artificial Sequence
  Description of Artificial Sequence: Synthetic oligonucleotide
cucacaacgcucuucauca

SEQ ID NO: 2420908 - RNA, 19 nt, Artificial Sequence
  Description of Artificial Sequence: Synthetic oligonucleotide
guaggcgaagcacuuacag

SEQ ID NO: 2420909 - RNA, 19 nt, Artificial Sequence
  Description of Artificial Sequence: Synthetic oligonucleotide
ucaaacuucaugugugguc

SEQ ID NO: 2420910 - RNA, 19 nt, Artificial Sequence
  Description of Artificial Sequence: Synthetic oligonucleotide
aucagugcugaucauacaa

SEQ ID NO: 2420911 - RNA, 19 nt, Artificial Sequence
  Description of Artificial Sequence: Synthetic oligonucleotide
auucaaagcaacugcaguu

SEQ ID NO: 2420912 - RNA, 19 nt, Artificial Sequence
  Description of Artificial Sequence: Synthetic oligonucleotide
ucugcauaagaaagagcca

SEQ ID NO: 2420913 - RNA, 19 nt, Artificial Sequence
  Description of Artificial Sequence: Synthetic oligonucleotide
auacucaaucauauggcac

SEQ ID NO: 2420914 - RNA, 19 nt, Artificial Sequence
  Description of Artificial Sequence: Synthetic oligonucleotide
uaauugucagcggaccagg

SEQ ID NO: 2420915 - RNA, 19 nt, Artificial Sequence
  Description of Artificial Sequence: Synthetic oligonucleotide
aaguacauuugguguuauc

SEQ ID NO: 2420916 - RNA, 19 nt, Artificial Sequence
  Description of Artificial Sequence: Synthetic oligonucleotide
augugaauucaccauggca

SEQ ID NO: 2420917 - RNA, 19 nt, Artificial Sequence
  Description of Artificial Sequence: Synthetic oligonucleotide
gaagcuagagguaauuguc

SEQ ID NO: 2420918 - RNA, 19 nt, Artificial Sequence
  Description of Artificial Sequence: Synthetic oligonucleotide
acaggaacuaacucaggca

SEQ ID NO: 2420919 - RNA, 19 nt, Artificial Sequence
  Description of Artificial Sequence: Synthetic oligonucleotide
uacaaaugaaguucugcau

SEQ ID NO: 2420920 - RNA, 19 nt, Artificial Sequence
  Description of Artificial Sequence: Synthetic oligonucleotide
ucauaagcauugcacucca

SEQ ID NO: 2420921 - RNA, 19 nt, Artificial Sequence
  Description of Artificial Sequence: Synthetic oligonucleotide
uaugguuggcaauuuuaac

SEQ ID NO: 2420922 - RNA, 19 nt, Artificial Sequence
  Description of Artificial Sequence: Synthetic oligonucleotide
aacuaacucaggcacugau

SEQ ID NO: 2420923 - RNA, 19 nt, Artificial Sequence
  Description of Artificial Sequence: Synthetic oligonucleotide
agguaauugucagcggacc

SEQ ID NO: 2420924 - RNA, 19 nt, Artificial Sequence
  Description of Artificial Sequence: Synthetic oligonucleotide
auugaauggaaaugugaau

SEQ ID NO: 2420925 - RNA, 19 nt, Artificial Sequence
  Description of Artificial Sequence: Synthetic oligonucleotide
uacucgguggcaagcaacc

SEQ ID NO: 2420926 - RNA, 19 nt, Artificial Sequence
  Description of Artificial Sequence: Synthetic oligonucleotide
ucauauggcaccugcuacu

SEQ ID NO: 2420927 - RNA, 19 nt, Artificial Sequence
  Description of Artificial Sequence: Synthetic oligonucleotide
acaaugggcuccccagacc

SEQ ID NO: 2420928 - RNA, 19 nt, Artificial Sequence
  Description of Artificial Sequence: Synthetic oligonucleotide
aguaaacuugaaaaguaca

SEQ ID NO: 2420929 - RNA, 19 nt, Artificial Sequence
  Description of Artificial Sequence: Synthetic oligonucleotide
uuggaaugagaacauugau

SEQ ID NO: 2420930 - RNA, 19 nt, Artificial Sequence
  Description of Artificial Sequence: Synthetic oligonucleotide
uguuccagggaguggauuc

SEQ ID NO: 2420931 - RNA, 19 nt, Artificial Sequence
  Description of Artificial Sequence: Synthetic oligonucleotide
gauaauugaguaggauggc

SEQ ID NO: 2420932 - RNA, 19 nt, Artificial Sequence
  Description of Artificial Sequence: Synthetic oligonucleotide
aacgcucuucaucaaacuu

SEQ ID NO: 2420933 - RNA, 19 nt, Artificial Sequence
  Description of Artificial Sequence: Synthetic oligonucleotide
agccagaauaauucauaag

SEQ ID NO: 2420934 - RNA, 19 nt, Artificial Sequence
  Description of Artificial Sequence: Synthetic oligonucleotide
ugguucaguaaacuugaaa

SEQ ID NO: 2420935 - RNA, 19 nt, Artificial Sequence
  Description of Artificial Sequence: Synthetic oligonucleotide
ucuccagacuuucuuugca

SEQ ID NO: 2420936 - RNA, 19 nt, Artificial Sequence
  Description of Artificial Sequence: Synthetic oligonucleotide
uaacaggaacuaacucagg

SEQ ID NO: 2420937 - RNA, 19 nt, Artificial Sequence
  Description of Artificial Sequence: Synthetic oligonucleotide
gaauucaccauggcacuag

SEQ ID NO: 2420938 - RNA, 19 nt, Artificial Sequence
  Description of Artificial Sequence: Synthetic oligonucleotide
uaggcgaagcacuuacagc

SEQ ID NO: 2420939 - RNA, 19 nt, Artificial Sequence
  Description of Artificial Sequence: Synthetic oligonucleotide
guaaacuugaaaaguacaa

SEQ ID NO: 2420940 - RNA, 19 nt, Artificial Sequence
  Description of Artificial Sequence: Synthetic oligonucleotide
uucugauaauugaguagga

SEQ ID NO: 2420941 - RNA, 19 nt, Artificial Sequence
  Description of Artificial Sequence: Synthetic oligonucleotide
cugaucauacaaaugaagu

SEQ ID NO: 2420942 - RNA, 19 nt, Artificial Sequence
  Description of Artificial Sequence: Synthetic oligonucleotide
aacuucaugugugguccac

SEQ ID NO: 2420943 - RNA, 19 nt, Artificial Sequence
  Description of Artificial Sequence: Synthetic oligonucleotide
ugcugaucauacaaaugaa

SEQ ID NO: 2420944 - RNA, 19 nt, Artificial Sequence
  Description of Artificial Sequence: Synthetic oligonucleotide
guaauugucagcggaccag

SEQ ID NO: 2420945 - RNA, 19 nt, Artificial Sequence
  Description of Artificial Sequence: Synthetic oligonucleotide
acgcucuucaucaaacuuc

SEQ ID NO: 2420946 - RNA, 19 nt, Artificial Sequence
  Description of Artificial Sequence: Synthetic oligonucleotide
uagagguaauugucagcgg

SEQ ID NO: 2420947 - RNA, 19 nt, Artificial Sequence
  Description of Artificial Sequence: Synthetic oligonucleotide
guuggcaauuuuaacagga

SEQ ID NO: 2420948 - RNA, 19 nt, Artificial Sequence
  Description of Artificial Sequence: Synthetic oligonucleotide
gaagguaagaauggucuuc

SEQ ID NO: 2420949 - RNA, 19 nt, Artificial Sequence
  Description of Artificial Sequence: Synthetic oligonucleotide
acauuugguguuaucccac

SEQ ID NO: 2420950 - RNA, 19 nt, Artificial Sequence
  Description of Artificial Sequence: Synthetic oligonucleotide
cugaagguaagaauggucu

SEQ ID NO: 2420951 - RNA, 19 nt, Artificial Sequence
  Description of Artificial Sequence: Synthetic oligonucleotide
ugacguuuauuuccuuuaa

SEQ ID NO: 2420952 - RNA, 19 nt, Artificial Sequence
  Description of Artificial Sequence: Synthetic oligonucleotide
guuuugcagacacacucac

SEQ ID NO: 2420953 - RNA, 19 nt, Artificial Sequence
  Description of Artificial Sequence: Synthetic oligonucleotide
uacgaaacaucaggcagug

SEQ ID NO: 2420954 - RNA, 19 nt, Artificial Sequence
  Description of Artificial Sequence: Synthetic oligonucleotide
uccucucugagcacuggug

SEQ ID NO: 2420955 - RNA, 19 nt, Artificial Sequence
  Description of Artificial Sequence: Synthetic oligonucleotide
aggaauuacaucagugcug

SEQ ID NO: 2420956 - RNA, 19 nt, Artificial Sequence
  Description of Artificial Sequence: Synthetic oligonucleotide
aagcuagagguaauuguca

SEQ ID NO: 2420957 - RNA, 19 nt, Artificial Sequence
  Description of Artificial Sequence: Synthetic oligonucleotide
ucugauaauugaguaggau

SEQ ID NO: 2420958 - RNA, 19 nt, Artificial Sequence
  Description of Artificial Sequence: Synthetic oligonucleotide
uggcaagcaaccuuuucuc

SEQ ID NO: 2420959 - RNA, 19 nt, Artificial Sequence
  Description of Artificial Sequence: Synthetic oligonucleotide
aauugucagcggaccaggg

SEQ ID NO: 2420960 - RNA, 19 nt, Artificial Sequence
  Description of Artificial Sequence: Synthetic oligonucleotide
augacguuuauuuccuuua

SEQ ID NO: 2420961 - RNA, 19 nt, Artificial Sequence
  Description of Artificial Sequence: Synthetic oligonucleotide
cauugcacuccaacuuugc

SEQ ID NO: 2420962 - RNA, 19 nt, Artificial Sequence
  Description of Artificial Sequence: Synthetic oligonucleotide
ucuuaugcuucuggcagca

SEQ ID NO: 2420963 - RNA, 19 nt, Artificial Sequence
  Description of Artificial Sequence: Synthetic oligonucleotide
caaccuuuucucauucauc

SEQ ID NO: 2420964 - RNA, 19 nt, Artificial Sequence
  Description of Artificial Sequence: Synthetic oligonucleotide
uucaaagcaacugcaguuu

SEQ ID NO: 2420965 - RNA, 19 nt, Artificial Sequence
  Description of Artificial Sequence: Synthetic oligonucleotide
aaucacccagccgcuauug

SEQ ID NO: 2420966 - RNA, 19 nt, Artificial Sequence
  Description of Artificial Sequence: Synthetic oligonucleotide
aaacuucauguguggucca

SEQ ID NO: 2420967 - RNA, 19 nt, Artificial Sequence
  Description of Artificial Sequence: Synthetic oligonucleotide
ugaagguaagaauggucuu

SEQ ID NO: 2420968 - RNA, 19 nt, Artificial Sequence
  Description of Artificial Sequence: Synthetic oligonucleotide
guaagaauggucuucuguu

SEQ ID NO: 2420969 - RNA, 19 nt, Artificial Sequence
  Description of Artificial Sequence: Synthetic oligonucleotide
auauggcaccugcuacucg

SEQ ID NO: 2420970 - RNA, 19 nt, Artificial Sequence
  Description of Artificial Sequence: Synthetic oligonucleotide
acuuacagccuguaugguu

SEQ ID NO: 2420971 - RNA, 19 nt, Artificial Sequence
  Description of Artificial Sequence: Synthetic oligonucleotide
auacgaaacaucaggcagu

SEQ ID NO: 2420972 - RNA, 19 nt, Artificial Sequence
  Description of Artificial Sequence: Synthetic oligonucleotide
ccuucugguaucugaauag

SEQ ID NO: 2420973 - RNA, 19 nt, Artificial Sequence
  Description of Artificial Sequence: Synthetic oligonucleotide
gcugaucauacaaaugaag

SEQ ID NO: 2420974 - RNA, 19 nt, Artificial Sequence
  Description of Artificial Sequence: Synthetic oligonucleotide
ggaauuacaucagugcuga

SEQ ID NO: 2420975 - RNA, 19 nt, Artificial Sequence
  Description of Artificial Sequence: Synthetic oligonucleotide
uuguggcuugaauaaugac

SEQ ID NO: 2420976 - RNA, 19 nt, Artificial Sequence
  Description of Artificial Sequence: Synthetic oligonucleotide
agcauugcacuccaacuuu

SEQ ID NO: 2420977 - RNA, 19 nt, Artificial Sequence
  Description of Artificial Sequence: Synthetic oligonucleotide
ucgguggcaagcaaccuuu

SEQ ID NO: 2420978 - RNA, 19 nt, Artificial Sequence
  Description of Artificial Sequence: Synthetic oligonucleotide
gaguuucuuggaaugagaa

SEQ ID NO: 2420979 - RNA, 19 nt, Artificial Sequence
  Description of Artificial Sequence: Synthetic oligonucleotide
cuacucgguggcaagcaac

SEQ ID NO: 2420980 - RNA, 19 nt, Artificial Sequence
  Description of Artificial Sequence: Synthetic oligonucleotide
agugcugaucauacaaaug

SEQ ID NO: 2420981 - RNA, 19 nt, Artificial Sequence
  Description of Artificial Sequence: Synthetic oligonucleotide
uugaucuccuucugguauc

SEQ ID NO: 2420982 - RNA, 19 nt, Artificial Sequence
  Description of Artificial Sequence: Synthetic oligonucleotide
aggacagaguuucuuggaa

SEQ ID NO: 2420983 - RNA, 19 nt, Artificial Sequence
  Description of Artificial Sequence: Synthetic oligonucleotide
uucaugugugguccacaga

SEQ ID NO: 2420984 - RNA, 19 nt, Artificial Sequence
  Description of Artificial Sequence: Synthetic oligonucleotide
gguuggcaauuuuaacagg

SEQ ID NO: 2420985 - RNA, 19 nt, Artificial Sequence
  Description of Artificial Sequence: Synthetic oligonucleotide
acuaacucaggcacugaug

SEQ ID NO: 2420986 - RNA, 19 nt, Artificial Sequence
  Description of Artificial Sequence: Synthetic oligonucleotide
cugaagcuagagguaauug

SEQ ID NO: 2420987 - RNA, 19 nt, Artificial Sequence
  Description of Artificial Sequence: Synthetic oligonucleotide
ucacccagccgcuauugaa

SEQ ID NO: 2420988 - RNA, 19 nt, Artificial Sequence
  Description of Artificial Sequence: Synthetic oligonucleotide
uccagggaguggauucuca

SEQ ID NO: 2420989 - RNA, 19 nt, Artificial Sequence
  Description of Artificial Sequence: Synthetic oligonucleotide
ggacaugauguuuugcaga

SEQ ID NO: 2420990 - RNA, 19 nt, Artificial Sequence
  Description of Artificial Sequence: Synthetic oligonucleotide
ggaacuaacucaggcacug

SEQ ID NO: 2420991 - RNA, 19 nt, Artificial Sequence
  Description of Artificial Sequence: Synthetic oligonucleotide
cagaauaauucauaagcau

SEQ ID NO: 2420992 - RNA, 19 nt, Artificial Sequence
  Description of Artificial Sequence: Synthetic oligonucleotide
guggcaagcaaccuuuucu

SEQ ID NO: 2420993 - RNA, 19 nt, Artificial Sequence
  Description of Artificial Sequence: Synthetic oligonucleotide
gaucuucugauaauugagu

SEQ ID NO: 2420994 - RNA, 19 nt, Artificial Sequence
  Description of Artificial Sequence: Synthetic oligonucleotide
guaugguuggcaauuuuaa

SEQ ID NO: 2420995 - RNA, 19 nt, Artificial Sequence
  Description of Artificial Sequence: Synthetic oligonucleotide
agaguuucuuggaaugaga

SEQ ID NO: 2420996 - RNA, 19 nt, Artificial Sequence
  Description of Artificial Sequence: Synthetic oligonucleotide
aagcacuuacagccuguau

SEQ ID NO: 2420997 - RNA, 19 nt, Artificial Sequence
  Description of Artificial Sequence: Synthetic oligonucleotide
acccagccgcuauugaaug

SEQ ID NO: 2420998 - RNA, 19 nt, Artificial Sequence
  Description of Artificial Sequence: Synthetic oligonucleotide
guggauucucaucuuguaa

SEQ ID NO: 2420999 - RNA, 19 nt, Artificial Sequence
  Description of Artificial Sequence: Synthetic oligonucleotide
caggaauuacaucagugcu

SEQ ID NO: 2421000 - RNA, 19 nt, Artificial Sequence
  Description of Artificial Sequence: Synthetic oligonucleotide
acaagcugaacaggaauua

SEQ ID NO: 2421001 - RNA, 19 nt, Artificial Sequence
  Description of Artificial Sequence: Synthetic oligonucleotide
ggugcugaaugagaucucc

SEQ ID NO: 2421002 - RNA, 19 nt, Artificial Sequence
  Description of Artificial Sequence: Synthetic oligonucleotide
gaucuccaggacaugaugu

SEQ ID NO: 2421003 - RNA, 19 nt, Artificial Sequence
  Description of Artificial Sequence: Synthetic oligonucleotide
cauauggcaccugcuacuc

SEQ ID NO: 2421004 - RNA, 19 nt, Artificial Sequence
  Description of Artificial Sequence: Synthetic oligonucleotide
gguaauugucagcggacca

SEQ ID NO: 2421005 - RNA, 19 nt, Artificial Sequence
  Description of Artificial Sequence: Synthetic oligonucleotide
gguaagaauggucuucugu

SEQ ID NO: 2421006 - RNA, 19 nt, Artificial Sequence
  Description of Artificial Sequence: Synthetic oligonucleotide
gcuauugaauggaaaugug

SEQ ID NO: 2421007 - RNA, 19 nt, Artificial Sequence
  Description of Artificial Sequence: Synthetic oligonucleotide
agguaagaauggucuucug

SEQ ID NO: 2421008 - RNA, 19 nt, Artificial Sequence
  Description of Artificial Sequence: Synthetic oligonucleotide
agaccccuuccucucugag

SEQ ID NO: 2421009 - RNA, 19 nt, Artificial Sequence
  Description of Artificial Sequence: Synthetic oligonucleotide
gacacacucacaacgcucu

SEQ ID NO: 2421010 - RNA, 19 nt, Artificial Sequence
  Description of Artificial Sequence: Synthetic oligonucleotide
cagggaguggauucucauc

SEQ ID NO: 2421011 - RNA, 19 nt, Artificial Sequence
  Description of Artificial Sequence: Synthetic oligonucleotide
ucaucaccacaaugggcuc

SEQ ID NO: 2421012 - RNA, 19 nt, Artificial Sequence
  Description of Artificial Sequence: Synthetic oligonucleotide
ugguguuaucccacagcau

SEQ ID NO: 2421013 - RNA, 19 nt, Artificial Sequence
  Description of Artificial Sequence: Synthetic oligonucleotide
ugucagcggaccagggaau

SEQ ID NO: 2421014 - RNA, 19 nt, Artificial Sequence
  Description of Artificial Sequence: Synthetic oligonucleotide
cauuugguguuaucccaca

SEQ ID NO: 2421015 - RNA, 19 nt, Artificial Sequence
  Description of Artificial Sequence: Synthetic oligonucleotide
agcucuccagacuuucuuu

SEQ ID NO: 2421016 - RNA, 19 nt, Artificial Sequence
  Description of Artificial Sequence: Synthetic oligonucleotide
cuuugcauucaaagcaacu

SEQ ID NO: 2421017 - RNA, 19 nt, Artificial Sequence
  Description of Artificial Sequence: Synthetic oligonucleotide
agcggaccagggaaucacc

SEQ ID NO: 2421018 - RNA, 19 nt, Artificial Sequence
  Description of Artificial Sequence: Synthetic oligonucleotide
ugguccacagagagcuggu

SEQ ID NO: 2421019 - RNA, 19 nt, Artificial Sequence
  Description of Artificial Sequence: Synthetic oligonucleotide
ugaauucaccauggcacua

SEQ ID NO: 2421020 - RNA, 19 nt, Artificial Sequence
  Description of Artificial Sequence: Synthetic oligonucleotide
cccacagcaugucaauagg

SEQ ID NO: 2421021 - RNA, 19 nt, Artificial Sequence
  Description of Artificial Sequence: Synthetic oligonucleotide
cacuagguaaaaucaauuu

SEQ ID NO: 2421022 - RNA, 19 nt, Artificial Sequence
  Description of Artificial Sequence: Synthetic oligonucleotide
acagccuguaugguuggca

SEQ ID NO: 2421023 - RNA, 19 nt, Artificial Sequence
  Description of Artificial Sequence: Synthetic oligonucleotide
uggcaccugcuacucggug

SEQ ID NO: 2421024 - RNA, 19 nt, Artificial Sequence
  Description of Artificial Sequence: Synthetic oligonucleotide
ggauucucaucuuguaaaa

SEQ ID NO: 2421025 - RNA, 19 nt, Artificial Sequence
  Description of Artificial Sequence: Synthetic oligonucleotide
gcagacacacucacaacgc

SEQ ID NO: 2421026 - RNA, 19 nt, Artificial Sequence
  Description of Artificial Sequence: Synthetic oligonucleotide
agcaugucaauaggacaga

SEQ ID NO: 2421027 - RNA, 19 nt, Artificial Sequence
  Description of Artificial Sequence: Synthetic oligonucleotide
ucagcggaccagggaauca

SEQ ID NO: 2421028 - RNA, 19 nt, Artificial Sequence
  Description of Artificial Sequence: Synthetic oligonucleotide
cuucuggcagcagcucucc

SEQ ID NO: 2421029 - RNA, 19 nt, Artificial Sequence
  Description of Artificial Sequence: Synthetic oligonucleotide
acuucaugugugguccaca

SEQ ID NO: 2421030 - RNA, 19 nt, Artificial Sequence
  Description of Artificial Sequence: Synthetic oligonucleotide
cugggugcugaaugagauc

SEQ ID NO: 2421031 - RNA, 19 nt, Artificial Sequence
  Description of Artificial Sequence: Synthetic oligonucleotide
uuacaucagugcugaucau

SEQ ID NO: 2421032 - RNA, 19 nt, Artificial Sequence
  Description of Artificial Sequence: Synthetic oligonucleotide
aggaacuaacucaggcacu

SEQ ID NO: 2421033 - RNA, 19 nt, Artificial Sequence
  Description of Artificial Sequence: Synthetic oligonucleotide
ucacaacgcucuucaucaa

SEQ ID NO: 2421034 - RNA, 19 nt, Artificial Sequence
  Description of Artificial Sequence: Synthetic oligonucleotide
acaugauguuuugcagaca

SEQ ID NO: 2421035 - RNA, 19 nt, Artificial Sequence
  Description of Artificial Sequence: Synthetic oligonucleotide
cauaagaaagagccagaau

SEQ ID NO: 2421036 - RNA, 19 nt, Artificial Sequence
  Description of Artificial Sequence: Synthetic oligonucleotide
augauguuuugcagacaca

SEQ ID NO: 2421037 - RNA, 19 nt, Artificial Sequence
  Description of Artificial Sequence: Synthetic oligonucleotide
cacaacgcucuucaucaaa

SEQ ID NO: 2421038 - RNA, 19 nt, Artificial Sequence
  Description of Artificial Sequence: Synthetic oligonucleotide
auucaccauggcacuaggu

SEQ ID NO: 2421039 - RNA, 19 nt, Artificial Sequence
  Description of Artificial Sequence: Synthetic oligonucleotide
cagccuguaugguuggcaa

SEQ ID NO: 2421040 - RNA, 19 nt, Artificial Sequence
  Description of Artificial Sequence: Synthetic oligonucleotide
agccuguaugguuggcaau

SEQ ID NO: 2421041 - RNA, 19 nt, Artificial Sequence
  Description of Artificial Sequence: Synthetic oligonucleotide
acgaaacaucaggcagugg

SEQ ID NO: 2421042 - RNA, 19 nt, Artificial Sequence
  Description of Artificial Sequence: Synthetic oligonucleotide
ugagaacauugaucuccuu

SEQ ID NO: 2421043 - RNA, 19 nt, Artificial Sequence
  Description of Artificial Sequence: Synthetic oligonucleotide
gaacuaacucaggcacuga

SEQ ID NO: 2421044 - RNA, 19 nt, Artificial Sequence
  Description of Artificial Sequence: Synthetic oligonucleotide
gguuccugaagguaagaau

SEQ ID NO: 2421045 - RNA, 19 nt, Artificial Sequence
  Description of Artificial Sequence: Synthetic oligonucleotide
uacagccuguaugguuggc

SEQ ID NO: 2421046 - RNA, 19 nt, Artificial Sequence
  Description of Artificial Sequence: Synthetic oligonucleotide
cagcggaccagggaaucac

SEQ ID NO: 2421047 - RNA, 19 nt, Artificial Sequence
  Description of Artificial Sequence: Synthetic oligonucleotide
gcgaagcacuuacagccug

SEQ ID NO: 2421048 - RNA, 19 nt, Artificial Sequence
  Description of Artificial Sequence: Synthetic oligonucleotide
cagugcugaucauacaaau

SEQ ID NO: 2421049 - RNA, 19 nt, Artificial Sequence
  Description of Artificial Sequence: Synthetic oligonucleotide
cuuaugcuucuggcagcag

SEQ ID NO: 2421050 - RNA, 19 nt, Artificial Sequence
  Description of Artificial Sequence: Synthetic oligonucleotide
augagaucuccaggacaug

SEQ ID NO: 2421051 - RNA, 19 nt, Artificial Sequence
  Description of Artificial Sequence: Synthetic oligonucleotide
gccgcuauugaauggaaau

SEQ ID NO: 2421052 - RNA, 19 nt, Artificial Sequence
  Description of Artificial Sequence: Synthetic oligonucleotide
gaagcacuuacagccugua

SEQ ID NO: 2421053 - RNA, 19 nt, Artificial Sequence
  Description of Artificial Sequence: Synthetic oligonucleotide
gcauugcacuccaacuuug

SEQ ID NO: 2421054 - RNA, 19 nt, Artificial Sequence
  Description of Artificial Sequence: Synthetic oligonucleotide
ggcgagguaggcgaagcac

SEQ ID NO: 2421055 - RNA, 19 nt, Artificial Sequence
  Description of Artificial Sequence: Synthetic oligonucleotide
ccgcuauugaauggaaaug

SEQ ID NO: 2421056 - RNA, 19 nt, Artificial Sequence
  Description of Artificial Sequence: Synthetic oligonucleotide
cuugaauaaugacguuuau

SEQ ID NO: 2421057 - RNA, 19 nt, Artificial Sequence
  Description of Artificial Sequence: Synthetic oligonucleotide
ccagggaaucacccagccg

SEQ ID NO: 2421058 - RNA, 19 nt, Artificial Sequence
  Description of Artificial Sequence: Synthetic oligonucleotide
gugcugaaugagaucucca

SEQ ID NO: 2421059 - RNA, 19 nt, Artificial Sequence
  Description of Artificial Sequence: Synthetic oligonucleotide
gcaaccuuuucucauucau

SEQ ID NO: 2421060 - RNA, 19 nt, Artificial Sequence
  Description of Artificial Sequence: Synthetic oligonucleotide
caagcaaccuuuucucauu

SEQ ID NO: 2421061 - RNA, 19 nt, Artificial Sequence
  Description of Artificial Sequence: Synthetic oligonucleotide
gugugcagaggcaucugaa

SEQ ID NO: 2421062 - RNA, 19 nt, Artificial Sequence
  Description of Artificial Sequence: Synthetic oligonucleotide
caacgcucuucaucaaacu

SEQ ID NO: 2421063 - RNA, 19 nt, Artificial Sequence
  Description of Artificial Sequence: Synthetic oligonucleotide
acucgguggcaagcaaccu

SEQ ID NO: 2421064 - RNA, 19 nt, Artificial Sequence
  Description of Artificial Sequence: Synthetic oligonucleotide
gcaagcaaccuuuucucau

SEQ ID NO: 2421065 - RNA, 19 nt, Artificial Sequence
  Description of Artificial Sequence: Synthetic oligonucleotide
gucagcggaccagggaauc

SEQ ID NO: 2421066 - RNA, 19 nt, Artificial Sequence
  Description of Artificial Sequence: Synthetic oligonucleotide
caccacaaugggcucccca

SEQ ID NO: 2421067 - RNA, 19 nt, Artificial Sequence
  Description of Artificial Sequence: Synthetic oligonucleotide
ggacagaguuucuuggaau

SEQ ID NO: 2421068 - RNA, 19 nt, Artificial Sequence
  Description of Artificial Sequence: Synthetic oligonucleotide
cauaagcauugcacuccaa

SEQ ID NO: 2421069 - RNA, 19 nt, Artificial Sequence
  Description of Artificial Sequence: Synthetic oligonucleotide
gagaucuccaggacaugau

SEQ ID NO: 2421070 - RNA, 19 nt, Artificial Sequence
  Description of Artificial Sequence: Synthetic oligonucleotide
agccgcuauugaauggaaa

SEQ ID NO: 2421071 - RNA, 19 nt, Artificial Sequence
  Description of Artificial Sequence: Synthetic oligonucleotide
gcggaccagggaaucaccc

SEQ ID NO: 2421072 - RNA, 19 nt, Artificial Sequence
  Description of Artificial Sequence: Synthetic oligonucleotide
gaaucacccagccgcuauu

SEQ ID NO: 2421073 - RNA, 19 nt, Artificial Sequence
  Description of Artificial Sequence: Synthetic oligonucleotide
cacccagccgcuauugaau

SEQ ID NO: 2421074 - RNA, 19 nt, Artificial Sequence
  Description of Artificial Sequence: Synthetic oligonucleotide
ggcacuagguaaaaucaau

SEQ ID NO: 2421075 - RNA, 19 nt, Artificial Sequence
  Description of Artificial Sequence: Synthetic oligonucleotide
ggggcgagguaggcgaagc

SEQ ID NO: 2421076 - RNA, 19 nt, Artificial Sequence
  Description of Artificial Sequence: Synthetic oligonucleotide
auggcaccugcuacucggu

SEQ ID NO: 2421077 - RNA, 19 nt, Artificial Sequence
  Description of Artificial Sequence: Synthetic oligonucleotide
ggaaucacccagccgcuau

SEQ ID NO: 2421078 - RNA, 19 nt, Artificial Sequence
  Description of Artificial Sequence: Synthetic oligonucleotide
gcagugguucaguaaacuu

SEQ ID NO: 2421079 - RNA, 19 nt, Artificial Sequence
  Description of Artificial Sequence: Synthetic oligonucleotide
cagaccccuuccucucuga

SEQ ID NO: 2421080 - RNA, 19 nt, Artificial Sequence
  Description of Artificial Sequence: Synthetic oligonucleotide
gguaggcgaagcacuuaca

SEQ ID NO: 2421081 - RNA, 19 nt, Artificial Sequence
  Description of Artificial Sequence: Synthetic oligonucleotide
cagccgcuauugaauggaa

SEQ ID NO: 2421082 - RNA, 19 nt, Artificial Sequence
  Description of Artificial Sequence: Synthetic oligonucleotide
gaauuacaucagugcugau

SEQ ID NO: 2421083 - RNA, 19 nt, Artificial Sequence
  Description of Artificial Sequence: Synthetic oligonucleotide
gcuacucgguggcaagcaa

SEQ ID NO: 2421084 - RNA, 19 nt, Artificial Sequence
  Description of Artificial Sequence: Synthetic oligonucleotide
ccagccgcuauugaaugga

SEQ ID NO: 2421085 - RNA, 19 nt, Artificial Sequence
  Description of Artificial Sequence: Synthetic oligonucleotide
cucgguggcaagcaaccuu

SEQ ID NO: 2421086 - RNA, 19 nt, Artificial Sequence
  Description of Artificial Sequence: Synthetic oligonucleotide
gcacuagguaaaaucaauu

SEQ ID NO: 2421087 - RNA, 19 nt, Artificial Sequence
  Description of Artificial Sequence: Synthetic oligonucleotide
ccagaccccuuccucucug

SEQ ID NO: 2421088 - RNA, 19 nt, Artificial Sequence
  Description of Artificial Sequence: Synthetic oligonucleotide
cgcuauugaauggaaaugu

SEQ ID NO: 2421089 - RNA, 19 nt, Artificial Sequence
  Description of Artificial Sequence: Synthetic oligonucleotide
gcgagguaggcgaagcacu

SEQ ID NO: 2421090 - RNA, 19 nt, Artificial Sequence
  Description of Artificial Sequence: Synthetic oligonucleotide
cacuggugugcagaggcau

SEQ ID NO: 2421091 - RNA, 19 nt, Artificial Sequence
  Description of Artificial Sequence: Synthetic oligonucleotide
gguaucugaauaggaucuu

SEQ ID NO: 2421092 - RNA, 19 nt, Artificial Sequence
  Description of Artificial Sequence: Synthetic oligonucleotide
cacuuacagccuguauggu

SEQ ID NO: 2421093 - RNA, 19 nt, Artificial Sequence
  Description of Artificial Sequence: Synthetic oligonucleotide
gccuguaugguuggcaauu

SEQ ID NO: 2421094 - RNA, 19 nt, Artificial Sequence
  Description of Artificial Sequence: Synthetic oligonucleotide
ggcgaagcacuuacagccu

SEQ ID NO: 2421095 - RNA, 19 nt, Artificial Sequence
  Description of Artificial Sequence: Synthetic oligonucleotide
gggcuccccagaccccuuc

SEQ ID NO: 2421096 - RNA, 19 nt, Artificial Sequence
  Description of Artificial Sequence: Synthetic oligonucleotide
gggaguggauucucaucuu

SEQ ID NO: 2421097 - RNA, 19 nt, Artificial Sequence
  Description of Artificial Sequence: Synthetic oligonucleotide
gggaaucacccagccgcua

SEQ ID NO: 2421098 - RNA, 19 nt, Artificial Sequence
  Description of Artificial Sequence: Synthetic oligonucleotide
cgaagcacuuacagccugu

SEQ ID NO: 2421099 - RNA, 19 nt, Artificial Sequence
  Description of Artificial Sequence: Synthetic oligonucleotide
gcacuccaacuuugccagu

SEQ ID NO: 2421100 - RNA, 19 nt, Artificial Sequence
  Description of Artificial Sequence: Synthetic oligonucleotide
cgagguaggcgaagcacuu

SEQ ID NO: 2421101 - RNA, 19 nt, Artificial Sequence
  Description of Artificial Sequence: Synthetic oligonucleotide
ccuguaugguuggcaauuu

SEQ ID NO: 2421102 - RNA, 19 nt, Artificial Sequence
  Description of Artificial Sequence: Synthetic oligonucleotide
aaagauuucagggacaacc

SEQ ID NO: 2421103 - RNA, 19 nt, Artificial Sequence
  Description of Artificial Sequence: Synthetic oligonucleotide
auugagauacuuuaugagc

SEQ ID NO: 2421104 - RNA, 19 nt, Artificial Sequence
  Description of Artificial Sequence: Synthetic oligonucleotide
aauauuugagaugaccacc

SEQ ID NO: 2421105 - RNA, 19 nt, Artificial Sequence
  Description of Artificial Sequence: Synthetic oligonucleotide
aguaaaugagcgcagacgg

SEQ ID NO: 2421106 - RNA, 19 nt, Artificial Sequence
  Description of Artificial Sequence: Synthetic oligonucleotide
ucaauauuugagaugacca

SEQ ID NO: 2421107 - RNA, 19 nt, Artificial Sequence
  Description of Artificial Sequence: Synthetic oligonucleotide
cauacuauucacuuugugg

SEQ ID NO: 2421108 - RNA, 19 nt, Artificial Sequence
  Description of Artificial Sequence: Synthetic oligonucleotide
uuugagaugaccaccacca

SEQ ID NO: 2421109 - RNA, 19 nt, Artificial Sequence
  Description of Artificial Sequence: Synthetic oligonucleotide
ucaauuagcauguauuuca

SEQ ID NO: 2421110 - RNA, 19 nt, Artificial Sequence
  Description of Artificial Sequence: Synthetic oligonucleotide
uuugccugaucacugaacg

SEQ ID NO: 2421111 - RNA, 19 nt, Artificial Sequence
  Description of Artificial Sequence: Synthetic oligonucleotide
ucuugaauggcuuugugug

SEQ ID NO: 2421112 - RNA, 19 nt, Artificial Sequence
  Description of Artificial Sequence: Synthetic oligonucleotide
uuaaacaguaucaacugcu

SEQ ID NO: 2421113 - RNA, 19 nt, Artificial Sequence
  Description of Artificial Sequence: Synthetic oligonucleotide
ucaguaguuacaagcaagg

SEQ ID NO: 2421114 - RNA, 19 nt, Artificial Sequence
  Description of Artificial Sequence: Synthetic oligonucleotide
agaaacuuccagcaguggc

SEQ ID NO: 2421115 - RNA, 19 nt, Artificial Sequence
  Description of Artificial Sequence: Synthetic oligonucleotide
uaaaucagcagaucaaaug

SEQ ID NO: 2421116 - RNA, 19 nt, Artificial Sequence
  Description of Artificial Sequence: Synthetic oligonucleotide
ugauacaaaaugcuguuga

SEQ ID NO: 2421117 - RNA, 19 nt, Artificial Sequence
  Description of Artificial Sequence: Synthetic oligonucleotide
auacuauucacuuugugga

SEQ ID NO: 2421118 - RNA, 19 nt, Artificial Sequence
  Description of Artificial Sequence: Synthetic oligonucleotide
uauugagauacuuuaugag

SEQ ID NO: 2421119 - RNA, 19 nt, Artificial Sequence
  Description of Artificial Sequence: Synthetic oligonucleotide
auuauugagauacuuuaug

SEQ ID NO: 2421120 - RNA, 19 nt, Artificial Sequence
  Description of Artificial Sequence: Synthetic oligonucleotide
uugugguaguaaaugagcg

SEQ ID NO: 2421121 - RNA, 19 nt, Artificial Sequence
  Description of Artificial Sequence: Synthetic oligonucleotide
uguagagccacucuuucag

SEQ ID NO: 2421122 - RNA, 19 nt, Artificial Sequence
  Description of Artificial Sequence: Synthetic oligonucleotide
uucagggacaaccaaaucu

SEQ ID NO: 2421123 - RNA, 19 nt, Artificial Sequence
  Description of Artificial Sequence: Synthetic oligonucleotide
uuauugagauacuuuauga

SEQ ID NO: 2421124 - RNA, 19 nt, Artificial Sequence
  Description of Artificial Sequence: Synthetic oligonucleotide
uucagaauugguaaugaac

SEQ ID NO: 2421125 - RNA, 19 nt, Artificial Sequence
  Description of Artificial Sequence: Synthetic oligonucleotide
auuugagaugaccaccacc

SEQ ID NO: 2421126 - RNA, 19 nt, Artificial Sequence
  Description of Artificial Sequence: Synthetic oligonucleotide
aguaguuacaagcaaggug

SEQ ID NO: 2421127 - RNA, 19 nt, Artificial Sequence
  Description of Artificial Sequence: Synthetic oligonucleotide
guauaugccacgcugauac

SEQ ID NO: 2421128 - RNA, 19 nt, Artificial Sequence
  Description of Artificial Sequence: Synthetic oligonucleotide
acaaccaaaucuuugucag

SEQ ID NO: 2421129 - RNA, 19 nt, Artificial Sequence
  Description of Artificial Sequence: Synthetic oligonucleotide
aguguaaaucagcagauca

SEQ ID NO: 2421130 - RNA, 19 nt, Artificial Sequence
  Description of Artificial Sequence: Synthetic oligonucleotide
guaucaacugcuuugugag

SEQ ID NO: 2421131 - RNA, 19 nt, Artificial Sequence
  Description of Artificial Sequence: Synthetic oligonucleotide
aaugcuguugacgccaaac

SEQ ID NO: 2421132 - RNA, 19 nt, Artificial Sequence
  Description of Artificial Sequence: Synthetic oligonucleotide
gaacagagcacuuguagag

SEQ ID NO: 2421133 - RNA, 19 nt, Artificial Sequence
  Description of Artificial Sequence: Synthetic oligonucleotide
aaugugagucuauacaaaa

SEQ ID NO: 2421134 - RNA, 19 nt, Artificial Sequence
  Description of Artificial Sequence: Synthetic oligonucleotide
caaacugccaucuuucaag

SEQ ID NO: 2421135 - RNA, 19 nt, Artificial Sequence
  Description of Artificial Sequence: Synthetic oligonucleotide
uuagcauguauuucaaugu

SEQ ID NO: 2421136 - RNA, 19 nt, Artificial Sequence
  Description of Artificial Sequence: Synthetic oligonucleotide
uacuuuaugagcucggggu

SEQ ID NO: 2421137 - RNA, 19 nt, Artificial Sequence
  Description of Artificial Sequence: Synthetic oligonucleotide
uugucaguguaaaucagcc

SEQ ID NO: 2421138 - RNA, 19 nt, Artificial Sequence
  Description of Artificial Sequence: Synthetic oligonucleotide
gaguucaagguauauacac

SEQ ID NO: 2421139 - RNA, 19 nt, Artificial Sequence
  Description of Artificial Sequence: Synthetic oligonucleotide
aucuuugucaguguaaauc

SEQ ID NO: 2421140 - RNA, 19 nt, Artificial Sequence
  Description of Artificial Sequence: Synthetic oligonucleotide
gaguaaagguuuccgacgg

SEQ ID NO: 2421141 - RNA, 19 nt, Artificial Sequence
  Description of Artificial Sequence: Synthetic oligonucleotide
uuugucaguguaaaucagc

SEQ ID NO: 2421142 - RNA, 19 nt, Artificial Sequence
  Description of Artificial Sequence: Synthetic oligonucleotide
caaaugaacaagaaacuuc

SEQ ID NO: 2421143 - RNA, 19 nt, Artificial Sequence
  Description of Artificial Sequence: Synthetic oligonucleotide
agaauugguaaugaacugg

SEQ ID NO: 2421144 - RNA, 19 nt, Artificial Sequence
  Description of Artificial Sequence: Synthetic oligonucleotide
uucaauauuugagaugacc

SEQ ID NO: 2421145 - RNA, 19 nt, Artificial Sequence
  Description of Artificial Sequence: Synthetic oligonucleotide
aauucaauuagcauguauu

SEQ ID NO: 2421146 - RNA, 19 nt, Artificial Sequence
  Description of Artificial Sequence: Synthetic oligonucleotide
auugguaaugaacuggggu

SEQ ID NO: 2421147 - RNA, 19 nt, Artificial Sequence
  Description of Artificial Sequence: Synthetic oligonucleotide
guaguuacaagcaagguga

SEQ ID NO: 2421148 - RNA, 19 nt, Artificial Sequence
  Description of Artificial Sequence: Synthetic oligonucleotide
ucagggacaaccaaauccu

SEQ ID NO: 2421149 - RNA, 19 nt, Artificial Sequence
  Description of Artificial Sequence: Synthetic oligonucleotide
aacaagaaacuuccagcag

SEQ ID NO: 2421150 - RNA, 19 nt, Artificial Sequence
  Description of Artificial Sequence: Synthetic oligonucleotide
uugucaguguaaaucagca

SEQ ID NO: 2421151 - RNA, 19 nt, Artificial Sequence
  Description of Artificial Sequence: Synthetic oligonucleotide
uauauacacugaaaauuca

SEQ ID NO: 2421152 - RNA, 19 nt, Artificial Sequence
  Description of Artificial Sequence: Synthetic oligonucleotide
acacucaauaucaaacugc

SEQ ID NO: 2421153 - RNA, 19 nt, Artificial Sequence
  Description of Artificial Sequence: Synthetic oligonucleotide
cacucaauaucaaacugcc

SEQ ID NO: 2421154 - RNA, 19 nt, Artificial Sequence
  Description of Artificial Sequence: Synthetic oligonucleotide
ucuuuugcagucuugucac

SEQ ID NO: 2421155 - RNA, 19 nt, Artificial Sequence
  Description of Artificial Sequence: Synthetic oligonucleotide
aguaucaacugcuuuguga

SEQ ID NO: 2421156 - RNA, 19 nt, Artificial Sequence
  Description of Artificial Sequence: Synthetic oligonucleotide
uaguaaaugagcgcagacg

SEQ ID NO: 2421157 - RNA, 19 nt, Artificial Sequence
  Description of Artificial Sequence: Synthetic oligonucleotide
acaaaaugcuguugacgcc

SEQ ID NO: 2421158 - RNA, 19 nt, Artificial Sequence
  Description of Artificial Sequence: Synthetic oligonucleotide
gaugccuugcucucgggcg

SEQ ID NO: 2421159 - RNA, 19 nt, Artificial Sequence
  Description of Artificial Sequence: Synthetic oligonucleotide
acauuauugagauacuuua

SEQ ID NO: 2421160 - RNA, 19 nt, Artificial Sequence
  Description of Artificial Sequence: Synthetic oligonucleotide
aaauucaauuagcauguau

SEQ ID NO: 2421161 - RNA, 19 nt, Artificial Sequence
  Description of Artificial Sequence: Synthetic oligonucleotide
gugacuuuucucuacaaac

SEQ ID NO: 2421162 - RNA, 19 nt, Artificial Sequence
  Description of Artificial Sequence: Synthetic oligonucleotide
auacaaaaugcuguugacg

SEQ ID NO: 2421163 - RNA, 19 nt, Artificial Sequence
  Description of Artificial Sequence: Synthetic oligonucleotide
ugcuuugugaguucaaggu

SEQ ID NO: 2421164 - RNA, 19 nt, Artificial Sequence
  Description of Artificial Sequence: Synthetic oligonucleotide
uugguaaugaacugggguc

SEQ ID NO: 2421165 - RNA, 19 nt, Artificial Sequence
  Description of Artificial Sequence: Synthetic oligonucleotide
cucgaucuaacggagaccg

SEQ ID NO: 2421166 - RNA, 19 nt, Artificial Sequence
  Description of Artificial Sequence: Synthetic oligonucleotide
gauugugguaguaaaugag

SEQ ID NO: 2421167 - RNA, 19 nt, Artificial Sequence
  Description of Artificial Sequence: Synthetic oligonucleotide
guuuccgacggguauaugc

SEQ ID NO: 2421168 - RNA, 19 nt, Artificial Sequence
  Description of Artificial Sequence: Synthetic oligonucleotide
auuuuguaggccaccauac

SEQ ID NO: 2421169 - RNA, 19 nt, Artificial Sequence
  Description of Artificial Sequence: Synthetic oligonucleotide
ugauucuucccacuuuuca

SEQ ID NO: 2421170 - RNA, 19 nt, Artificial Sequence
  Description of Artificial Sequence: Synthetic oligonucleotide
uuuccgacggguauaugcc

SEQ ID NO: 2421171 - RNA, 19 nt, Artificial Sequence
  Description of Artificial Sequence: Synthetic oligonucleotide
ucaagguauauacacugaa

SEQ ID NO: 2421172 - RNA, 19 nt, Artificial Sequence
  Description of Artificial Sequence: Synthetic oligonucleotide
uuucucuacaaacaccauc

SEQ ID NO: 2421173 - RNA, 19 nt, Artificial Sequence
  Description of Artificial Sequence: Synthetic oligonucleotide
auacuuuaugagcucgggg

SEQ ID NO: 2421174 - RNA, 19 nt, Artificial Sequence
  Description of Artificial Sequence: Synthetic oligonucleotide
ugugguaguaaaugagcgc

SEQ ID NO: 2421175 - RNA, 19 nt, Artificial Sequence
  Description of Artificial Sequence: Synthetic oligonucleotide
ucgaccacauuauugagau

SEQ ID NO: 2421176 - RNA, 19 nt, Artificial Sequence
  Description of Artificial Sequence: Synthetic oligonucleotide
ucgaguaaagguuuccgac

SEQ ID NO: 2421177 - RNA, 19 nt, Artificial Sequence
  Description of Artificial Sequence: Synthetic oligonucleotide
ucugcacucgaguaaaggu

SEQ ID NO: 2421178 - RNA, 19 nt, Artificial Sequence
  Description of Artificial Sequence: Synthetic oligonucleotide
cacugaaaauucaauuagc

SEQ ID NO: 2421179 - RNA, 19 nt, Artificial Sequence
  Description of Artificial Sequence: Synthetic oligonucleotide
gaaaauucaauuagcaugu

SEQ ID NO: 2421180 - RNA, 19 nt, Artificial Sequence
  Description of Artificial Sequence: Synthetic oligonucleotide
acggagaccgcugucagcc

SEQ ID NO: 2421181 - RNA, 19 nt, Artificial Sequence
  Description of Artificial Sequence: Synthetic oligonucleotide
acaagaguucuuuauuaca

SEQ ID NO: 2421182 - RNA, 19 nt, Artificial Sequence
  Description of Artificial Sequence: Synthetic oligonucleotide
agaucaaaugaacaagaaa

SEQ ID NO: 2421183 - RNA, 19 nt, Artificial Sequence
  Description of Artificial Sequence: Synthetic oligonucleotide
gauacuuuaugagcucggg

SEQ ID NO: 2421184 - RNA, 19 nt, Artificial Sequence
  Description of Artificial Sequence: Synthetic oligonucleotide
uuuguaggccaccauacua

SEQ ID NO: 2421185 - RNA, 19 nt, Artificial Sequence
  Description of Artificial Sequence: Synthetic oligonucleotide
auucaauuagcauguauuu

SEQ ID NO: 2421186 - RNA, 19 nt, Artificial Sequence
  Description of Artificial Sequence: Synthetic oligonucleotide
ucaguguaaaucagcagau

SEQ ID NO: 2421187 - RNA, 19 nt, Artificial Sequence
  Description of Artificial Sequence: Synthetic oligonucleotide
caccauacuauucacuuug

SEQ ID NO: 2421188 - RNA, 19 nt, Artificial Sequence
  Description of Artificial Sequence: Synthetic oligonucleotide
uguaaaucagcagaucaaa

SEQ ID NO: 2421189 - RNA, 19 nt, Artificial Sequence
  Description of Artificial Sequence: Synthetic oligonucleotide
ugugauuugccugaucacu

SEQ ID NO: 2421190 - RNA, 19 nt, Artificial Sequence
  Description of Artificial Sequence: Synthetic oligonucleotide
aaagguuuccgacggguau

SEQ ID NO: 2421191 - RNA, 19 nt, Artificial Sequence
  Description of Artificial Sequence: Synthetic oligonucleotide
augcuguugacgccaaacg

SEQ ID NO: 2421192 - RNA, 19 nt, Artificial Sequence
  Description of Artificial Sequence: Synthetic oligonucleotide
gacaaccaaaucuuuguca

SEQ ID NO: 2421193 - RNA, 19 nt, Artificial Sequence
  Description of Artificial Sequence: Synthetic oligonucleotide
uaaaugagcgcagacggac

SEQ ID NO: 2421194 - RNA, 19 nt, Artificial Sequence
  Description of Artificial Sequence: Synthetic oligonucleotide
uauuucugcacucgaguaa

SEQ ID NO: 2421195 - RNA, 19 nt, Artificial Sequence
  Description of Artificial Sequence: Synthetic oligonucleotide
ugugugacuuuucucuaca

SEQ ID NO: 2421196 - RNA, 19 nt, Artificial Sequence
  Description of Artificial Sequence: Synthetic oligonucleotide
ucauugacagggauuuugu

SEQ ID NO: 2421197 - RNA, 19 nt, Artificial Sequence
  Description of Artificial Sequence: Synthetic oligonucleotide
agcagaucaaaugaacaag

SEQ ID NO: 2421198 - RNA, 19 nt, Artificial Sequence
  Description of Artificial Sequence: Synthetic oligonucleotide
ugaguucaagguauauaca

SEQ ID NO: 2421199 - RNA, 19 nt, Artificial Sequence
  Description of Artificial Sequence: Synthetic oligonucleotide
uucgaccacauuauugaga

SEQ ID NO: 2421200 - RNA, 19 nt, Artificial Sequence
  Description of Artificial Sequence: Synthetic oligonucleotide
uguggauugugguaguaaa

SEQ ID NO: 2421201 - RNA, 19 nt, Artificial Sequence
  Description of Artificial Sequence: Synthetic oligonucleotide
uucaagguauauacacuga

SEQ ID NO: 2421202 - RNA, 19 nt, Artificial Sequence
  Description of Artificial Sequence: Synthetic oligonucleotide
aucuugaauggcuuugugu

SEQ ID NO: 2421203 - RNA, 19 nt, Artificial Sequence
  Description of Artificial Sequence: Synthetic oligonucleotide
ugaacggauuucaucuuga

SEQ ID NO: 2421204 - RNA, 19 nt, Artificial Sequence
  Description of Artificial Sequence: Synthetic oligonucleotide
aacggagaccgcugucagc

SEQ ID NO: 2421205 - RNA, 19 nt, Artificial Sequence
  Description of Artificial Sequence: Synthetic oligonucleotide
ugugacuuuucucuacaaa

SEQ ID NO: 2421206 - RNA, 19 nt, Artificial Sequence
  Description of Artificial Sequence: Synthetic oligonucleotide
uacaagcaaggugaguccg

SEQ ID NO: 2421207 - RNA, 19 nt, Artificial Sequence
  Description of Artificial Sequence: Synthetic oligonucleotide
auaucaaacugccaucuuu

SEQ ID NO: 2421208 - RNA, 19 nt, Artificial Sequence
  Description of Artificial Sequence: Synthetic oligonucleotide
acagggauuuuguaggcca

SEQ ID NO: 2421209 - RNA, 19 nt, Artificial Sequence
  Description of Artificial Sequence: Synthetic oligonucleotide
gucacacucaauaucaaac

SEQ ID NO: 2421210 - RNA, 19 nt, Artificial Sequence
  Description of Artificial Sequence: Synthetic oligonucleotide
aauugguaaugaacugggg

SEQ ID NO: 2421211 - RNA, 19 nt, Artificial Sequence
  Description of Artificial Sequence: Synthetic oligonucleotide
uuucaaggaccucaccacu

SEQ ID NO: 2421212 - RNA, 19 nt, Artificial Sequence
  Description of Artificial Sequence: Synthetic oligonucleotide
aacggauuucaucuugaau

SEQ ID NO: 2421213 - RNA, 19 nt, Artificial Sequence
  Description of Artificial Sequence: Synthetic oligonucleotide
aaacuuccagcaguggcag

SEQ ID NO: 2421214 - RNA, 19 nt, Artificial Sequence
  Description of Artificial Sequence: Synthetic oligonucleotide
uuguaggccaccauacuau

SEQ ID NO: 2421215 - RNA, 19 nt, Artificial Sequence
  Description of Artificial Sequence: Synthetic oligonucleotide
ugucaguguaaaucagcag

SEQ ID NO: 2421216 - RNA, 19 nt, Artificial Sequence
  Description of Artificial Sequence: Synthetic oligonucleotide
aaggugaguccguauuucu

SEQ ID NO: 2421217 - RNA, 19 nt, Artificial Sequence
  Description of Artificial Sequence: Synthetic oligonucleotide
gaccucaccacuuucaaua

SEQ ID NO: 2421218 - RNA, 19 nt, Artificial Sequence
  Description of Artificial Sequence: Synthetic oligonucleotide
ugguaaugaacuggggucc

SEQ ID NO: 2421219 - RNA, 19 nt, Artificial Sequence
  Description of Artificial Sequence: Synthetic oligonucleotide
gucaguaguuacaagcaag

SEQ ID NO: 2421220 - RNA, 19 nt, Artificial Sequence
  Description of Artificial Sequence: Synthetic oligonucleotide
acggguauaugccacgcug

SEQ ID NO: 2421221 - RNA, 19 nt, Artificial Sequence
  Description of Artificial Sequence: Synthetic oligonucleotide
uuuuguaggccaccauacu

SEQ ID NO: 2421222 - RNA, 19 nt, Artificial Sequence
  Description of Artificial Sequence: Synthetic oligonucleotide
ucacuuuguggauuguggu

SEQ ID NO: 2421223 - RNA, 19 nt, Artificial Sequence
  Description of Artificial Sequence: Synthetic oligonucleotide
aagauuucagggacaacca

SEQ ID NO: 2421224 - RNA, 19 nt, Artificial Sequence
  Description of Artificial Sequence: Synthetic oligonucleotide
cugccaucuuucaaggacc

SEQ ID NO: 2421225 - RNA, 19 nt, Artificial Sequence
  Description of Artificial Sequence: Synthetic oligonucleotide
cuucccacuuuucagggac

SEQ ID NO: 2421226 - RNA, 19 nt, Artificial Sequence
  Description of Artificial Sequence: Synthetic oligonucleotide
uucugcacucgaguaaagg

SEQ ID NO: 2421227 - RNA, 19 nt, Artificial Sequence
  Description of Artificial Sequence: Synthetic oligonucleotide
agccucaccgcacaccgcg

SEQ ID NO: 2421228 - RNA, 19 nt, Artificial Sequence
  Description of Artificial Sequence: Synthetic oligonucleotide
ugccugaucacugaacgga

SEQ ID NO: 2421229 - RNA, 19 nt, Artificial Sequence
  Description of Artificial Sequence: Synthetic oligonucleotide
guguaaaucagccuuuucu

SEQ ID NO: 2421230 - RNA, 19 nt, Artificial Sequence
  Description of Artificial Sequence: Synthetic oligonucleotide
auauuugagaugaccacca

SEQ ID NO: 2421231 - RNA, 19 nt, Artificial Sequence
  Description of Artificial Sequence: Synthetic oligonucleotide
aagaaacuuccagcagugg

SEQ ID NO: 2421232 - RNA, 19 nt, Artificial Sequence
  Description of Artificial Sequence: Synthetic oligonucleotide
uugccugaucacugaacgg

SEQ ID NO: 2421233 - RNA, 19 nt, Artificial Sequence
  Description of Artificial Sequence: Synthetic oligonucleotide
uaacggagaccgcugucag

SEQ ID NO: 2421234 - RNA, 19 nt, Artificial Sequence
  Description of Artificial Sequence: Synthetic oligonucleotide
ugagcucggggucaguagu

SEQ ID NO: 2421235 - RNA, 19 nt, Artificial Sequence
  Description of Artificial Sequence: Synthetic oligonucleotide
caucacucgaucuaacgga

SEQ ID NO: 2421236 - RNA, 19 nt, Artificial Sequence
  Description of Artificial Sequence: Synthetic oligonucleotide
guaguaaaugagcgcagac

SEQ ID NO: 2421237 - RNA, 19 nt, Artificial Sequence
  Description of Artificial Sequence: Synthetic oligonucleotide
ugcacucgaguaaagguuu

SEQ ID NO: 2421238 - RNA, 19 nt, Artificial Sequence
  Description of Artificial Sequence: Synthetic oligonucleotide
acucgaguaaagguuuccg

SEQ ID NO: 2421239 - RNA, 19 nt, Artificial Sequence
  Description of Artificial Sequence: Synthetic oligonucleotide
uugaauggcuuugugugac

SEQ ID NO: 2421240 - RNA, 19 nt, Artificial Sequence
  Description of Artificial Sequence: Synthetic oligonucleotide
aaucuuugucaguguaaau

SEQ ID NO: 2421241 - RNA, 19 nt, Artificial Sequence
  Description of Artificial Sequence: Synthetic oligonucleotide
ugauuugccugaucacuga

SEQ ID NO: 2421242 - RNA, 19 nt, Artificial Sequence
  Description of Artificial Sequence: Synthetic oligonucleotide
gugguaguaaaugagcgca

SEQ ID NO: 2421243 - RNA, 19 nt, Artificial Sequence
  Description of Artificial Sequence: Synthetic oligonucleotide
aaugagcgcagacggacuu

SEQ ID NO: 2421244 - RNA, 19 nt, Artificial Sequence
  Description of Artificial Sequence: Synthetic oligonucleotide
ucacugaacggauuucauc

SEQ ID NO: 2421245 - RNA, 19 nt, Artificial Sequence
  Description of Artificial Sequence: Synthetic oligonucleotide
ggugaguccguauuucugc

SEQ ID NO: 2421246 - RNA, 19 nt, Artificial Sequence
  Description of Artificial Sequence: Synthetic oligonucleotide
aguccguauuucugcacuc

SEQ ID NO: 2421247 - RNA, 19 nt, Artificial Sequence
  Description of Artificial Sequence: Synthetic oligonucleotide
cacucgaucuaacggagac

SEQ ID NO: 2421248 - RNA, 19 nt, Artificial Sequence
  Description of Artificial Sequence: Synthetic oligonucleotide
ugucaguguaaaucagccu

SEQ ID NO: 2421249 - RNA, 19 nt, Artificial Sequence
  Description of Artificial Sequence: Synthetic oligonucleotide
gggacaaccaaauccuuug

SEQ ID NO: 2421250 - RNA, 19 nt, Artificial Sequence
  Description of Artificial Sequence: Synthetic oligonucleotide
uaugccacgcugauacaaa

SEQ ID NO: 2421251 - RNA, 19 nt, Artificial Sequence
  Description of Artificial Sequence: Synthetic oligonucleotide
auuugccugaucacugaac

SEQ ID NO: 2421252 - RNA, 19 nt, Artificial Sequence
  Description of Artificial Sequence: Synthetic oligonucleotide
acucgaucuaacggagacc

SEQ ID NO: 2421253 - RNA, 19 nt, Artificial Sequence
  Description of Artificial Sequence: Synthetic oligonucleotide
uuguagagccacucuuuca

SEQ ID NO: 2421254 - RNA, 19 nt, Artificial Sequence
  Description of Artificial Sequence: Synthetic oligonucleotide
ucggccacgaucuccgcgc

SEQ ID NO: 2421255 - RNA, 19 nt, Artificial Sequence
  Description of Artificial Sequence: Synthetic oligonucleotide
uccguauuucugcacucga

SEQ ID NO: 2421256 - RNA, 19 nt, Artificial Sequence
  Description of Artificial Sequence: Synthetic oligonucleotide
gcugugauuugccugauca

SEQ ID NO: 2421257 - RNA, 19 nt, Artificial Sequence
  Description of Artificial Sequence: Synthetic oligonucleotide
uucagucauugacagggau

SEQ ID NO: 2421258 - RNA, 19 nt, Artificial Sequence
  Description of Artificial Sequence: Synthetic oligonucleotide
uauuucaaugugagucuau

SEQ ID NO: 2421259 - RNA, 19 nt, Artificial Sequence
  Description of Artificial Sequence: Synthetic oligonucleotide
gcauguauuucaaugugag

SEQ ID NO: 2421260 - RNA, 19 nt, Artificial Sequence
  Description of Artificial Sequence: Synthetic oligonucleotide
uuuaugagcucggggucag

SEQ ID NO: 2421261 - RNA, 19 nt, Artificial Sequence
  Description of Artificial Sequence: Synthetic oligonucleotide
ugugaguucaagguauaua

SEQ ID NO: 2421262 - RNA, 19 nt, Artificial Sequence
  Description of Artificial Sequence: Synthetic oligonucleotide
cugaacggauuucaucuug

SEQ ID NO: 2421263 - RNA, 19 nt, Artificial Sequence
  Description of Artificial Sequence: Synthetic oligonucleotide
uugugugacuuuucucuac

SEQ ID NO: 2421264 - RNA, 19 nt, Artificial Sequence
  Description of Artificial Sequence: Synthetic oligonucleotide
cacugaacggauuucaucu

SEQ ID NO: 2421265 - RNA, 19 nt, Artificial Sequence
  Description of Artificial Sequence: Synthetic oligonucleotide
acaguaucaacugcuuugu

SEQ ID NO: 2421266 - RNA, 19 nt, Artificial Sequence
  Description of Artificial Sequence: Synthetic oligonucleotide
aguucaagguauauacacu

SEQ ID NO: 2421267 - RNA, 19 nt, Artificial Sequence
  Description of Artificial Sequence: Synthetic oligonucleotide
gaucacugaacggauuuca

SEQ ID NO: 2421268 - RNA, 19 nt, Artificial Sequence
  Description of Artificial Sequence: Synthetic oligonucleotide
uaaagguuuccgacgggua

SEQ ID NO: 2421269 - RNA, 19 nt, Artificial Sequence
  Description of Artificial Sequence: Synthetic oligonucleotide
gguagcugugauuugccug

SEQ ID NO: 2421270 - RNA, 19 nt, Artificial Sequence
  Description of Artificial Sequence: Synthetic oligonucleotide
uacuauucacuuuguggau

SEQ ID NO: 2421271 - RNA, 19 nt, Artificial Sequence
  Description of Artificial Sequence: Synthetic oligonucleotide
ccaucacucgaucuaacgg

SEQ ID NO: 2421272 - RNA, 19 nt, Artificial Sequence
  Description of Artificial Sequence: Synthetic oligonucleotide
ugcagucuugucacacuca

SEQ ID NO: 2421273 - RNA, 19 nt, Artificial Sequence
  Description of Artificial Sequence: Synthetic oligonucleotide
ucucgggcgagcugcugcg

SEQ ID NO: 2421274 - RNA, 19 nt, Artificial Sequence
  Description of Artificial Sequence: Synthetic oligonucleotide
uuucugcacucgaguaaag

SEQ ID NO: 2421275 - RNA, 19 nt, Artificial Sequence
  Description of Artificial Sequence: Synthetic oligonucleotide
uuugugaguucaagguaua

SEQ ID NO: 2421276 - RNA, 19 nt, Artificial Sequence
  Description of Artificial Sequence: Synthetic oligonucleotide
auuucugcacucgaguaaa

SEQ ID NO: 2421277 - RNA, 19 nt, Artificial Sequence
  Description of Artificial Sequence: Synthetic oligonucleotide
gugauuugccugaucacug

SEQ ID NO: 2421278 - RNA, 19 nt, Artificial Sequence
  Description of Artificial Sequence: Synthetic oligonucleotide
uguugacgccaaacgaaaa

SEQ ID NO: 2421279 - RNA, 19 nt, Artificial Sequence
  Description of Artificial Sequence: Synthetic oligonucleotide
ugcgccaucacucgaucua

SEQ ID NO: 2421280 - RNA, 19 nt, Artificial Sequence
  Description of Artificial Sequence: Synthetic oligonucleotide
gucaguguaaaucagccuu

SEQ ID NO: 2421281 - RNA, 19 nt, Artificial Sequence
  Description of Artificial Sequence: Synthetic oligonucleotide
uucaaggaccucaccacuu

SEQ ID NO: 2421282 - RNA, 19 nt, Artificial Sequence
  Description of Artificial Sequence: Synthetic oligonucleotide
auucacuuuguggauugug

SEQ ID NO: 2421283 - RNA, 19 nt, Artificial Sequence
  Description of Artificial Sequence: Synthetic oligonucleotide
augagcucggggucaguag

SEQ ID NO: 2421284 - RNA, 19 nt, Artificial Sequence
  Description of Artificial Sequence: Synthetic oligonucleotide
uuuucucuacaaacaccau

SEQ ID NO: 2421285 - RNA, 19 nt, Artificial Sequence
  Description of Artificial Sequence: Synthetic oligonucleotide
ucugaacagagcacuugua

SEQ ID NO: 2421286 - RNA, 19 nt, Artificial Sequence
  Description of Artificial Sequence: Synthetic oligonucleotide
ccacuuuucagggacaacc

SEQ ID NO: 2421287 - RNA, 19 nt, Artificial Sequence
  Description of Artificial Sequence: Synthetic oligonucleotide
uccgacggguauaugccac

SEQ ID NO: 2421288 - RNA, 19 nt, Artificial Sequence
  Description of Artificial Sequence: Synthetic oligonucleotide
agcaaggugaguccguauu

SEQ ID NO: 2421289 - RNA, 19 nt, Artificial Sequence
  Description of Artificial Sequence: Synthetic oligonucleotide
caagguauauacacugaaa

SEQ ID NO: 2421290 - RNA, 19 nt, Artificial Sequence
  Description of Artificial Sequence: Synthetic oligonucleotide
aucacucgaucuaacggag

SEQ ID NO: 2421291 - RNA, 19 nt, Artificial Sequence
  Description of Artificial Sequence: Synthetic oligonucleotide
gccacgcugauacaaaaug

SEQ ID NO: 2421292 - RNA, 19 nt, Artificial Sequence
  Description of Artificial Sequence: Synthetic oligonucleotide
agauuucagggacaaccaa

SEQ ID NO: 2421293 - RNA, 19 nt, Artificial Sequence
  Description of Artificial Sequence: Synthetic oligonucleotide
cacgguagcugugauuugc

SEQ ID NO: 2421294 - RNA, 19 nt, Artificial Sequence
  Description of Artificial Sequence: Synthetic oligonucleotide
agcauguauuucaauguga

SEQ ID NO: 2421295 - RNA, 19 nt, Artificial Sequence
  Description of Artificial Sequence: Synthetic oligonucleotide
gaucuaacggagaccgcug

SEQ ID NO: 2421296 - RNA, 19 nt, Artificial Sequence
  Description of Artificial Sequence: Synthetic oligonucleotide
cuuugugaguucaagguau

SEQ ID NO: 2421297 - RNA, 19 nt, Artificial Sequence
  Description of Artificial Sequence: Synthetic oligonucleotide
uugcucucgggcgagcugc

SEQ ID NO: 2421298 - RNA, 19 nt, Artificial Sequence
  Description of Artificial Sequence: Synthetic oligonucleotide
ucuaacggagaccgcuguc

SEQ ID NO: 2421299 - RNA, 19 nt, Artificial Sequence
  Description of Artificial Sequence: Synthetic oligonucleotide
ucaaggaccucaccacuuu

SEQ ID NO: 2421300 - RNA, 19 nt, Artificial Sequence
  Description of Artificial Sequence: Synthetic oligonucleotide
cuugaauggcuuuguguga

SEQ ID NO: 2421301 - RNA, 19 nt, Artificial Sequence
  Description of Artificial Sequence: Synthetic oligonucleotide
cucuucagucauugacagg

SEQ ID NO: 2421302 - RNA, 19 nt, Artificial Sequence
  Description of Artificial Sequence: Synthetic oligonucleotide
gccaucacucgaucuaacg

SEQ ID NO: 2421303 - RNA, 19 nt, Artificial Sequence
  Description of Artificial Sequence: Synthetic oligonucleotide
cuucuuuugcagucuuguc

SEQ ID NO: 2421304 - RNA, 19 nt, Artificial Sequence
  Description of Artificial Sequence: Synthetic oligonucleotide
aaaugagcgcagacggacu

SEQ ID NO: 2421305 - RNA, 19 nt, Artificial Sequence
  Description of Artificial Sequence: Synthetic oligonucleotide
gacagggauuuuguaggcc

SEQ ID NO: 2421306 - RNA, 19 nt, Artificial Sequence
  Description of Artificial Sequence: Synthetic oligonucleotide
ucacucgaucuaacggaga

SEQ ID NO: 2421307 - RNA, 19 nt, Artificial Sequence
  Description of Artificial Sequence: Synthetic oligonucleotide
cgaguaaagguuuccgacg

SEQ ID NO: 2421308 - RNA, 19 nt, Artificial Sequence
  Description of Artificial Sequence: Synthetic oligonucleotide
cugauacaaaaugcuguug

SEQ ID NO: 2421309 - RNA, 19 nt, Artificial Sequence
  Description of Artificial Sequence: Synthetic oligonucleotide
aucuaacggagaccgcugu

SEQ ID NO: 2421310 - RNA, 19 nt, Artificial Sequence
  Description of Artificial Sequence: Synthetic oligonucleotide
ugaguccguauuucugcac

SEQ ID NO: 2421311 - RNA, 19 nt, Artificial Sequence
  Description of Artificial Sequence: Synthetic oligonucleotide
uuguggauugugguaguaa

SEQ ID NO: 2421312 - RNA, 19 nt, Artificial Sequence
  Description of Artificial Sequence: Synthetic oligonucleotide
ucuucccacuuuucaggga

SEQ ID NO: 2421313 - RNA, 19 nt, Artificial Sequence
  Description of Artificial Sequence: Synthetic oligonucleotide
caaugugagucuauacaaa

SEQ ID NO: 2421314 - RNA, 19 nt, Artificial Sequence
  Description of Artificial Sequence: Synthetic oligonucleotide
uauaugccacgcugauaca

SEQ ID NO: 2421315 - RNA, 19 nt, Artificial Sequence
  Description of Artificial Sequence: Synthetic oligonucleotide
agggacaaccaaaucuuug

SEQ ID NO: 2421316 - RNA, 19 nt, Artificial Sequence
  Description of Artificial Sequence: Synthetic oligonucleotide
caucuugaauggcuuugug

SEQ ID NO: 2421317 - RNA, 19 nt, Artificial Sequence
  Description of Artificial Sequence: Synthetic oligonucleotide
auaugccacgcugauacaa

SEQ ID NO: 2421318 - RNA, 19 nt, Artificial Sequence
  Description of Artificial Sequence: Synthetic oligonucleotide
cagccuuuucuucaccuuc

SEQ ID NO: 2421319 - RNA, 19 nt, Artificial Sequence
  Description of Artificial Sequence: Synthetic oligonucleotide
uuccgacggguauaugcca

SEQ ID NO: 2421320 - RNA, 19 nt, Artificial Sequence
  Description of Artificial Sequence: Synthetic oligonucleotide
gauuugccugaucacugaa

SEQ ID NO: 2421321 - RNA, 19 nt, Artificial Sequence
  Description of Artificial Sequence: Synthetic oligonucleotide
ccacgcugauacaaaaugc

SEQ ID NO: 2421322 - RNA, 19 nt, Artificial Sequence
  Description of Artificial Sequence: Synthetic oligonucleotide
guccguauuucugcacucg

SEQ ID NO: 2421323 - RNA, 19 nt, Artificial Sequence
  Description of Artificial Sequence: Synthetic oligonucleotide
acggacuucuucagaauug

SEQ ID NO: 2421324 - RNA, 19 nt, Artificial Sequence
  Description of Artificial Sequence: Synthetic oligonucleotide
acgcugauacaaaaugcug

SEQ ID NO: 2421325 - RNA, 19 nt, Artificial Sequence
  Description of Artificial Sequence: Synthetic oligonucleotide
cagacggacuucuucagaa

SEQ ID NO: 2421326 - RNA, 19 nt, Artificial Sequence
  Description of Artificial Sequence: Synthetic oligonucleotide
cucucgggcgagcugcugc

SEQ ID NO: 2421327 - RNA, 19 nt, Artificial Sequence
  Description of Artificial Sequence: Synthetic oligonucleotide
caccacuuucaauauuuga

SEQ ID NO: 2421328 - RNA, 19 nt, Artificial Sequence
  Description of Artificial Sequence: Synthetic oligonucleotide
ugagcgcagacggacuucu

SEQ ID NO: 2421329 - RNA, 19 nt, Artificial Sequence
  Description of Artificial Sequence: Synthetic oligonucleotide
uguaggccaccauacuauu

SEQ ID NO: 2421330 - RNA, 19 nt, Artificial Sequence
  Description of Artificial Sequence: Synthetic oligonucleotide
cacgcugauacaaaaugcu

SEQ ID NO: 2421331 - RNA, 19 nt, Artificial Sequence
  Description of Artificial Sequence: Synthetic oligonucleotide
ugccacgcugauacaaaau

SEQ ID NO: 2421332 - RNA, 19 nt, Artificial Sequence
  Description of Artificial Sequence: Synthetic oligonucleotide
ugaucacugaacggauuuc

SEQ ID NO: 2421333 - RNA, 19 nt, Artificial Sequence
  Description of Artificial Sequence: Synthetic oligonucleotide
aagcaaggugaguccguau

SEQ ID NO: 2421334 - RNA, 19 nt, Artificial Sequence
  Description of Artificial Sequence: Synthetic oligonucleotide
uccugauucuucccacuuu

SEQ ID NO: 2421335 - RNA, 19 nt, Artificial Sequence
  Description of Artificial Sequence: Synthetic oligonucleotide
cuaacggagaccgcuguca

SEQ ID NO: 2421336 - RNA, 19 nt, Artificial Sequence
  Description of Artificial Sequence: Synthetic oligonucleotide
guguaaaucagcagaucaa

SEQ ID NO: 2421337 - RNA, 19 nt, Artificial Sequence
  Description of Artificial Sequence: Synthetic oligonucleotide
gaacggauuucaucuugaa

SEQ ID NO: 2421338 - RNA, 19 nt, Artificial Sequence
  Description of Artificial Sequence: Synthetic oligonucleotide
cuguugacgccaaacgaaa

SEQ ID NO: 2421339 - RNA, 19 nt, Artificial Sequence
  Description of Artificial Sequence: Synthetic oligonucleotide
uaugagcucggggucagua

SEQ ID NO: 2421340 - RNA, 19 nt, Artificial Sequence
  Description of Artificial Sequence: Synthetic oligonucleotide
agcugugauuugccugauc

SEQ ID NO: 2421341 - RNA, 19 nt, Artificial Sequence
  Description of Artificial Sequence: Synthetic oligonucleotide
gaguccguauuucugcacu

SEQ ID NO: 2421342 - RNA, 19 nt, Artificial Sequence
  Description of Artificial Sequence: Synthetic oligonucleotide
cagcuguucgaccacauua

SEQ ID NO: 2421343 - RNA, 19 nt, Artificial Sequence
  Description of Artificial Sequence: Synthetic oligonucleotide
cugauucuucccacuuuuc

SEQ ID NO: 2421344 - RNA, 19 nt, Artificial Sequence
  Description of Artificial Sequence: Synthetic oligonucleotide
caaggugaguccguauuuc

SEQ ID NO: 2421345 - RNA, 19 nt, Artificial Sequence
  Description of Artificial Sequence: Synthetic oligonucleotide
ucggggucaguaguuacaa

SEQ ID NO: 2421346 - RNA, 19 nt, Artificial Sequence
  Description of Artificial Sequence: Synthetic oligonucleotide
aagguuuccgacggguaua

SEQ ID NO: 2421347 - RNA, 19 nt, Artificial Sequence
  Description of Artificial Sequence: Synthetic oligonucleotide
uucagcuguucgaccacau

SEQ ID NO: 2421348 - RNA, 19 nt, Artificial Sequence
  Description of Artificial Sequence: Synthetic oligonucleotide
acugaacggauuucaucuu

SEQ ID NO: 2421349 - RNA, 19 nt, Artificial Sequence
  Description of Artificial Sequence: Synthetic oligonucleotide
ucgaucuaacggagaccgc

SEQ ID NO: 2421350 - RNA, 19 nt, Artificial Sequence
  Description of Artificial Sequence: Synthetic oligonucleotide
aggaccucaccacuuucaa

SEQ ID NO: 2421351 - RNA, 19 nt, Artificial Sequence
  Description of Artificial Sequence: Synthetic oligonucleotide
cuuuaugagcucgggguca

SEQ ID NO: 2421352 - RNA, 19 nt, Artificial Sequence
  Description of Artificial Sequence: Synthetic oligonucleotide
aguuacaagcaaggugagu

SEQ ID NO: 2421353 - RNA, 19 nt, Artificial Sequence
  Description of Artificial Sequence: Synthetic oligonucleotide
cacucgaguaaagguuucc

SEQ ID NO: 2421354 - RNA, 19 nt, Artificial Sequence
  Description of Artificial Sequence: Synthetic oligonucleotide
ucgggcgagcugcugcgcc

SEQ ID NO: 2421355 - RNA, 19 nt, Artificial Sequence
  Description of Artificial Sequence: Synthetic oligonucleotide
gugaguccguauuucugca

SEQ ID NO: 2421356 - RNA, 19 nt, Artificial Sequence
  Description of Artificial Sequence: Synthetic oligonucleotide
accucaccacuuucaauau

SEQ ID NO: 2421357 - RNA, 19 nt, Artificial Sequence
  Description of Artificial Sequence: Synthetic oligonucleotide
ugcugcgccaucacucgau

SEQ ID NO: 2421358 - RNA, 19 nt, Artificial Sequence
  Description of Artificial Sequence: Synthetic oligonucleotide
caauaucaaacugccaucu

SEQ ID NO: 2421359 - RNA, 19 nt, Artificial Sequence
  Description of Artificial Sequence: Synthetic oligonucleotide
aaaugcuguugacgccaaa

SEQ ID NO: 2421360 - RNA, 19 nt, Artificial Sequence
  Description of Artificial Sequence: Synthetic oligonucleotide
agacggacuucuucagaau

SEQ ID NO: 2421361 - RNA, 19 nt, Artificial Sequence
  Description of Artificial Sequence: Synthetic oligonucleotide
augccacgcugauacaaaa

SEQ ID NO: 2421362 - RNA, 19 nt, Artificial Sequence
  Description of Artificial Sequence: Synthetic oligonucleotide
ggacaaccaaaucuuuguc

SEQ ID NO: 2421363 - RNA, 19 nt, Artificial Sequence
  Description of Artificial Sequence: Synthetic oligonucleotide
agcuguucgaccacauuau

SEQ ID NO: 2421364 - RNA, 19 nt, Artificial Sequence
  Description of Artificial Sequence: Synthetic oligonucleotide
augccuugcucucgggcga

SEQ ID NO: 2421365 - RNA, 19 nt, Artificial Sequence
  Description of Artificial Sequence: Synthetic oligonucleotide
uccgcgcucccgcgcaggg

SEQ ID NO: 2421366 - RNA, 19 nt, Artificial Sequence
  Description of Artificial Sequence: Synthetic oligonucleotide
uugugaguucaagguauau

SEQ ID NO: 2421367 - RNA, 19 nt, Artificial Sequence
  Description of Artificial Sequence: Synthetic oligonucleotide
aggugaguccguauuucug

SEQ ID NO: 2421368 - RNA, 19 nt, Artificial Sequence
  Description of Artificial Sequence: Synthetic oligonucleotide
uuuguggauugugguagua

SEQ ID NO: 2421369 - RNA, 19 nt, Artificial Sequence
  Description of Artificial Sequence: Synthetic oligonucleotide
gggacaaccaaaucuuugu

SEQ ID NO: 2421370 - RNA, 19 nt, Artificial Sequence
  Description of Artificial Sequence: Synthetic oligonucleotide
gucacgguagcugugauuu

SEQ ID NO: 2421371 - RNA, 19 nt, Artificial Sequence
  Description of Artificial Sequence: Synthetic oligonucleotide
ucacgguagcugugauuug

SEQ ID NO: 2421372 - RNA, 19 nt, Artificial Sequence
  Description of Artificial Sequence: Synthetic oligonucleotide
caaauccuuugucagugua

SEQ ID NO: 2421373 - RNA, 19 nt, Artificial Sequence
  Description of Artificial Sequence: Synthetic oligonucleotide
guaaagguuuccgacgggu

SEQ ID NO: 2421374 - RNA, 19 nt, Artificial Sequence
  Description of Artificial Sequence: Synthetic oligonucleotide
guaaaugagcgcagacgga

SEQ ID NO: 2421375 - RNA, 19 nt, Artificial Sequence
  Description of Artificial Sequence: Synthetic oligonucleotide
gacggacuucuucagaauu

SEQ ID NO: 2421376 - RNA, 19 nt, Artificial Sequence
  Description of Artificial Sequence: Synthetic oligonucleotide
augagcgcagacggacuuc

SEQ ID NO: 2421377 - RNA, 19 nt, Artificial Sequence
  Description of Artificial Sequence: Synthetic oligonucleotide
caguaucaacugcuuugug

SEQ ID NO: 2421378 - RNA, 19 nt, Artificial Sequence
  Description of Artificial Sequence: Synthetic oligonucleotide
cucggggucaguaguuaca

SEQ ID NO: 2421379 - RNA, 19 nt, Artificial Sequence
  Description of Artificial Sequence: Synthetic oligonucleotide
gaucuccgcgcucccgcgc

SEQ ID NO: 2421380 - RNA, 19 nt, Artificial Sequence
  Description of Artificial Sequence: Synthetic oligonucleotide
acucaauaucaaacugcca

SEQ ID NO: 2421381 - RNA, 19 nt, Artificial Sequence
  Description of Artificial Sequence: Synthetic oligonucleotide
cuugcucucgggcgagcug

SEQ ID NO: 2421382 - RNA, 19 nt, Artificial Sequence
  Description of Artificial Sequence: Synthetic oligonucleotide
caguguaaaucagcagauc

SEQ ID NO: 2421383 - RNA, 19 nt, Artificial Sequence
  Description of Artificial Sequence: Synthetic oligonucleotide
gguaguaaaugagcgcaga

SEQ ID NO: 2421384 - RNA, 19 nt, Artificial Sequence
  Description of Artificial Sequence: Synthetic oligonucleotide
ccaucuuucaaggaccuca

SEQ ID NO: 2421385 - RNA, 19 nt, Artificial Sequence
  Description of Artificial Sequence: Synthetic oligonucleotide
cucaccgcacaccgcgccc

SEQ ID NO: 2421386 - RNA, 19 nt, Artificial Sequence
  Description of Artificial Sequence: Synthetic oligonucleotide
gugaugccuugcucucggg

SEQ ID NO: 2421387 - RNA, 19 nt, Artificial Sequence
  Description of Artificial Sequence: Synthetic oligonucleotide
guaaugaacugggguccug

SEQ ID NO: 2421388 - RNA, 19 nt, Artificial Sequence
  Description of Artificial Sequence: Synthetic oligonucleotide
guauuucaaugugagucua

SEQ ID NO: 2421389 - RNA, 19 nt, Artificial Sequence
  Description of Artificial Sequence: Synthetic oligonucleotide
cucccgcgcagggugaugc

SEQ ID NO: 2421390 - RNA, 19 nt, Artificial Sequence
  Description of Artificial Sequence: Synthetic oligonucleotide
ccauacuauucacuuugug

SEQ ID NO: 2421391 - RNA, 19 nt, Artificial Sequence
  Description of Artificial Sequence: Synthetic oligonucleotide
cuucagucauugacaggga

SEQ ID NO: 2421392 - RNA, 19 nt, Artificial Sequence
  Description of Artificial Sequence: Synthetic oligonucleotide
ccguauuucugcacucgag

SEQ ID NO: 2421393 - RNA, 19 nt, Artificial Sequence
  Description of Artificial Sequence: Synthetic oligonucleotide
accacauuauugagauacu

SEQ ID NO: 2421394 - RNA, 19 nt, Artificial Sequence
  Description of Artificial Sequence: Synthetic oligonucleotide
cagcaguggcagaaagguc

SEQ ID NO: 2421395 - RNA, 19 nt, Artificial Sequence
  Description of Artificial Sequence: Synthetic oligonucleotide
gcuuugugaguucaaggua

SEQ ID NO: 2421396 - RNA, 19 nt, Artificial Sequence
  Description of Artificial Sequence: Synthetic oligonucleotide
cauugacagggauuuugua

SEQ ID NO: 2421397 - RNA, 19 nt, Artificial Sequence
  Description of Artificial Sequence: Synthetic oligonucleotide
aucacugaacggauuucau

SEQ ID NO: 2421398 - RNA, 19 nt, Artificial Sequence
  Description of Artificial Sequence: Synthetic oligonucleotide
guaaaucagcagaucaaau

SEQ ID NO: 2421399 - RNA, 19 nt, Artificial Sequence
  Description of Artificial Sequence: Synthetic oligonucleotide
accauacuauucacuuugu

SEQ ID NO: 2421400 - RNA, 19 nt, Artificial Sequence
  Description of Artificial Sequence: Synthetic oligonucleotide
acaagcaaggugaguccgu

SEQ ID NO: 2421401 - RNA, 19 nt, Artificial Sequence
  Description of Artificial Sequence: Synthetic oligonucleotide
gcuguugacgccaaacgaa

SEQ ID NO: 2421402 - RNA, 19 nt, Artificial Sequence
  Description of Artificial Sequence: Synthetic oligonucleotide
agggacaaccaaauccuuu

SEQ ID NO: 2421403 - RNA, 19 nt, Artificial Sequence
  Description of Artificial Sequence: Synthetic oligonucleotide
cugaucacugaacggauuu

SEQ ID NO: 2421404 - RNA, 19 nt, Artificial Sequence
  Description of Artificial Sequence: Synthetic oligonucleotide
gccacgaucuccgcgcucc

SEQ ID NO: 2421405 - RNA, 19 nt, Artificial Sequence
  Description of Artificial Sequence: Synthetic oligonucleotide
cagucauugacagggauuu

SEQ ID NO: 2421406 - RNA, 19 nt, Artificial Sequence
  Description of Artificial Sequence: Synthetic oligonucleotide
cugcacucgaguaaagguu

SEQ ID NO: 2421407 - RNA, 19 nt, Artificial Sequence
  Description of Artificial Sequence: Synthetic oligonucleotide
agguuuccgacggguauau

SEQ ID NO: 2421408 - RNA, 19 nt, Artificial Sequence
  Description of Artificial Sequence: Synthetic oligonucleotide
cggacuucuucagaauugg

SEQ ID NO: 2421409 - RNA, 19 nt, Artificial Sequence
  Description of Artificial Sequence: Synthetic oligonucleotide
ugccuugcucucgggcgag

SEQ ID NO: 2421410 - RNA, 19 nt, Artificial Sequence
  Description of Artificial Sequence: Synthetic oligonucleotide
cacgaucuccgcgcucccg

SEQ ID NO: 2421411 - RNA, 19 nt, Artificial Sequence
  Description of Artificial Sequence: Synthetic oligonucleotide
ggguccugauucuucccac

SEQ ID NO: 2421412 - RNA, 19 nt, Artificial Sequence
  Description of Artificial Sequence: Synthetic oligonucleotide
gccaccauacuauucacuu

SEQ ID NO: 2421413 - RNA, 19 nt, Artificial Sequence
  Description of Artificial Sequence: Synthetic oligonucleotide
ggcuuugugugacuuuucu

SEQ ID NO: 2421414 - RNA, 19 nt, Artificial Sequence
  Description of Artificial Sequence: Synthetic oligonucleotide
aggucacgguagcugugau

SEQ ID NO: 2421415 - RNA, 19 nt, Artificial Sequence
  Description of Artificial Sequence: Synthetic oligonucleotide
ccgacggguauaugccacg

SEQ ID NO: 2421416 - RNA, 19 nt, Artificial Sequence
  Description of Artificial Sequence: Synthetic oligonucleotide
agaccgcugucagccucac

SEQ ID NO: 2421417 - RNA, 19 nt, Artificial Sequence
  Description of Artificial Sequence: Synthetic oligonucleotide
ccaaaucuuugucagugua

SEQ ID NO: 2421418 - RNA, 19 nt, Artificial Sequence
  Description of Artificial Sequence: Synthetic oligonucleotide
gacggguauaugccacgcu

SEQ ID NO: 2421419 - RNA, 19 nt, Artificial Sequence
  Description of Artificial Sequence: Synthetic oligonucleotide
cuuuguggauugugguagu

SEQ ID NO: 2421420 - RNA, 19 nt, Artificial Sequence
  Description of Artificial Sequence: Synthetic oligonucleotide
ucccgcgcagggugaugcc

SEQ ID NO: 2421421 - RNA, 19 nt, Artificial Sequence
  Description of Artificial Sequence: Synthetic oligonucleotide
gcagacggacuucuucaga

SEQ ID NO: 2421422 - RNA, 19 nt, Artificial Sequence
  Description of Artificial Sequence: Synthetic oligonucleotide
uuaugagcucggggucagu

SEQ ID NO: 2421423 - RNA, 19 nt, Artificial Sequence
  Description of Artificial Sequence: Synthetic oligonucleotide
gcucggggucaguaguuac

SEQ ID NO: 2421424 - RNA, 19 nt, Artificial Sequence
  Description of Artificial Sequence: Synthetic oligonucleotide
cagccucaccgcacaccgc

SEQ ID NO: 2421425 - RNA, 19 nt, Artificial Sequence
  Description of Artificial Sequence: Synthetic oligonucleotide
caagcaaggugaguccgua

SEQ ID NO: 2421426 - RNA, 19 nt, Artificial Sequence
  Description of Artificial Sequence: Synthetic oligonucleotide
gaccgcugucagccucacc

SEQ ID NO: 2421427 - RNA, 19 nt, Artificial Sequence
  Description of Artificial Sequence: Synthetic oligonucleotide
ggacaaccaaauccuuugu

SEQ ID NO: 2421428 - RNA, 19 nt, Artificial Sequence
  Description of Artificial Sequence: Synthetic oligonucleotide
cgcugauacaaaaugcugu

SEQ ID NO: 2421429 - RNA, 19 nt, Artificial Sequence
  Description of Artificial Sequence: Synthetic oligonucleotide
agcucggggucaguaguua

SEQ ID NO: 2421430 - RNA, 19 nt, Artificial Sequence
  Description of Artificial Sequence: Synthetic oligonucleotide
ccucaccgcacaccgcgcc

SEQ ID NO: 2421431 - RNA, 19 nt, Artificial Sequence
  Description of Artificial Sequence: Synthetic oligonucleotide
guccugauucuucccacuu

SEQ ID NO: 2421432 - RNA, 19 nt, Artificial Sequence
  Description of Artificial Sequence: Synthetic oligonucleotide
cguauuucugcacucgagu

SEQ ID NO: 2421433 - RNA, 19 nt, Artificial Sequence
  Description of Artificial Sequence: Synthetic oligonucleotide
gguauaugccacgcugaua

SEQ ID NO: 2421434 - RNA, 19 nt, Artificial Sequence
  Description of Artificial Sequence: Synthetic oligonucleotide
cgcagacggacuucuucag

SEQ ID NO: 2421435 - RNA, 19 nt, Artificial Sequence
  Description of Artificial Sequence: Synthetic oligonucleotide
gcugcgccaucacucgauc

SEQ ID NO: 2421436 - RNA, 19 nt, Artificial Sequence
  Description of Artificial Sequence: Synthetic oligonucleotide
gguccugauucuucccacu

SEQ ID NO: 2421437 - RNA, 19 nt, Artificial Sequence
  Description of Artificial Sequence: Synthetic oligonucleotide
ggguauaugccacgcugau

SEQ ID NO: 2421438 - RNA, 19 nt, Artificial Sequence
  Description of Artificial Sequence: Synthetic oligonucleotide
cuccgcgcucccgcgcagg

SEQ ID NO: 2421439 - RNA, 19 nt, Artificial Sequence
  Description of Artificial Sequence: Synthetic oligonucleotide
gguaaugaacugggguccu

SEQ ID NO: 2421440 - RNA, 19 nt, Artificial Sequence
  Description of Artificial Sequence: Synthetic oligonucleotide
cggguauaugccacgcuga

SEQ ID NO: 2421441 - RNA, 19 nt, Artificial Sequence
  Description of Artificial Sequence: Synthetic oligonucleotide
cagggacaaccaaaucuuu

SEQ ID NO: 2421442 - RNA, 19 nt, Artificial Sequence
  Description of Artificial Sequence: Synthetic oligonucleotide
cugcugcgccaucacucga

SEQ ID NO: 2421443 - RNA, 19 nt, Artificial Sequence
  Description of Artificial Sequence: Synthetic oligonucleotide
gcacucgaguaaagguuuc

SEQ ID NO: 2421444 - RNA, 19 nt, Artificial Sequence
  Description of Artificial Sequence: Synthetic oligonucleotide
gagcacuuguagagccacu

SEQ ID NO: 2421445 - RNA, 19 nt, Artificial Sequence
  Description of Artificial Sequence: Synthetic oligonucleotide
cgacggguauaugccacgc

SEQ ID NO: 2421446 - RNA, 19 nt, Artificial Sequence
  Description of Artificial Sequence: Synthetic oligonucleotide
cgcgcucccgcgcagggug

SEQ ID NO: 2421447 - RNA, 19 nt, Artificial Sequence
  Description of Artificial Sequence: Synthetic oligonucleotide
ggaccucaccacuuucaau

SEQ ID NO: 2421448 - RNA, 19 nt, Artificial Sequence
  Description of Artificial Sequence: Synthetic oligonucleotide
cagggacaaccaaauccuu

SEQ ID NO: 2421449 - RNA, 19 nt, Artificial Sequence
  Description of Artificial Sequence: Synthetic oligonucleotide
cgaucuaacggagaccgcu

SEQ ID NO: 2421450 - RNA, 19 nt, Artificial Sequence
  Description of Artificial Sequence: Synthetic oligonucleotide
cccacuuuucagggacaac

SEQ ID NO: 2421451 - RNA, 19 nt, Artificial Sequence
  Description of Artificial Sequence: Synthetic oligonucleotide
gcgccaucacucgaucuaa

SEQ ID NO: 2421452 - RNA, 19 nt, Artificial Sequence
  Description of Artificial Sequence: Synthetic oligonucleotide
gcuguucgaccacauuauu

SEQ ID NO: 2421453 - RNA, 19 nt, Artificial Sequence
  Description of Artificial Sequence: Synthetic oligonucleotide
gagcucggggucaguaguu

SEQ ID NO: 2421454 - RNA, 19 nt, Artificial Sequence
  Description of Artificial Sequence: Synthetic oligonucleotide
ccacgaucuccgcgcuccc

SEQ ID NO: 2421455 - RNA, 19 nt, Artificial Sequence
  Description of Artificial Sequence: Synthetic oligonucleotide
ggucacgguagcugugauu

SEQ ID NO: 2421456 - RNA, 19 nt, Artificial Sequence
  Description of Artificial Sequence: Synthetic oligonucleotide
ccaaauccuuugucagugu

SEQ ID NO: 2421457 - RNA, 19 nt, Artificial Sequence
  Description of Artificial Sequence: Synthetic oligonucleotide
gccugaucacugaacggau

SEQ ID NO: 2421458 - RNA, 19 nt, Artificial Sequence
  Description of Artificial Sequence: Synthetic oligonucleotide
gcucccgcgcagggugaug

SEQ ID NO: 2421459 - RNA, 19 nt, Artificial Sequence
  Description of Artificial Sequence: Synthetic oligonucleotide
ccucaccacuuucaauauu

SEQ ID NO: 2421460 - RNA, 19 nt, Artificial Sequence
  Description of Artificial Sequence: Synthetic oligonucleotide
cgggcgagcugcugcgcca

SEQ ID NO: 2421461 - RNA, 19 nt, Artificial Sequence
  Description of Artificial Sequence: Synthetic oligonucleotide
gagcgcagacggacuucuu

SEQ ID NO: 2421462 - RNA, 19 nt, Artificial Sequence
  Description of Artificial Sequence: Synthetic oligonucleotide
gggcgagcugcugcgccau

SEQ ID NO: 2421463 - RNA, 19 nt, Artificial Sequence
  Description of Artificial Sequence: Synthetic oligonucleotide
ccgcgcagggugaugccuu

SEQ ID NO: 2421464 - RNA, 19 nt, Artificial Sequence
  Description of Artificial Sequence: Synthetic oligonucleotide
cccgcgcagggugaugccu

SEQ ID NO: 2421465 - RNA, 19 nt, Artificial Sequence
  Description of Artificial Sequence: Synthetic oligonucleotide
cggagaccgcugucagccu

SEQ ID NO: 2421466 - RNA, 19 nt, Artificial Sequence
  Description of Artificial Sequence: Synthetic oligonucleotide
cggccacgaucuccgcgcu

SEQ ID NO: 2421467 - RNA, 19 nt, Artificial Sequence
  Description of Artificial Sequence: Synthetic oligonucleotide
cgcucccgcgcagggugau

SEQ ID NO: 2421468 - RNA, 19 nt, Artificial Sequence
  Description of Artificial Sequence: Synthetic oligonucleotide
gaaaagaucaucgacgagg

SEQ ID NO: 2421469 - RNA, 19 nt, Artificial Sequence
  Description of Artificial Sequence: Synthetic oligonucleotide
uaagcgggcauuaacaccg

SEQ ID NO: 2421470 - RNA, 19 nt, Artificial Sequence
  Description of Artificial Sequence: Synthetic oligonucleotide
aauaagcgggcauuaacac

SEQ ID NO: 2421471 - RNA, 19 nt, Artificial Sequence
  Description of Artificial Sequence: Synthetic oligonucleotide
ucaccguugaccuugagcc

SEQ ID NO: 2421472 - RNA, 19 nt, Artificial Sequence
  Description of Artificial Sequence: Synthetic oligonucleotide
ucuuccaagguuauuaucu

SEQ ID NO: 2421473 - RNA, 19 nt, Artificial Sequence
  Description of Artificial Sequence: Synthetic oligonucleotide
auauucuugccccauuccc

SEQ ID NO: 2421474 - RNA, 19 nt, Artificial Sequence
  Description of Artificial Sequence: Synthetic oligonucleotide
uauuaucuuggaaacguag

SEQ ID NO: 2421475 - RNA, 19 nt, Artificial Sequence
  Description of Artificial Sequence: Synthetic oligonucleotide
agguuauuaucuuggaaac

SEQ ID NO: 2421476 - RNA, 19 nt, Artificial Sequence
  Description of Artificial Sequence: Synthetic oligonucleotide
aucauuuucuuuaacuggc

SEQ ID NO: 2421477 - RNA, 19 nt, Artificial Sequence
  Description of Artificial Sequence: Synthetic oligonucleotide
aagaucaucgacgaggugu

SEQ ID NO: 2421478 - RNA, 19 nt, Artificial Sequence
  Description of Artificial Sequence: Synthetic oligonucleotide
uugaaccucauacuaacca

SEQ ID NO: 2421479 - RNA, 19 nt, Artificial Sequence
  Description of Artificial Sequence: Synthetic oligonucleotide
auaagcgggcauuaacacc

SEQ ID NO: 2421480 - RNA, 19 nt, Artificial Sequence
  Description of Artificial Sequence: Synthetic oligonucleotide
uuaucuuggaaacguagcu

SEQ ID NO: 2421481 - RNA, 19 nt, Artificial Sequence
  Description of Artificial Sequence: Synthetic oligonucleotide
auuaucuuggaaacguagc

SEQ ID NO: 2421482 - RNA, 19 nt, Artificial Sequence
  Description of Artificial Sequence: Synthetic oligonucleotide
acgcacacgauauucuugc

SEQ ID NO: 2421483 - RNA, 19 nt, Artificial Sequence
  Description of Artificial Sequence: Synthetic oligonucleotide
auggaaaagaucaucgacg

SEQ ID NO: 2421484 - RNA, 19 nt, Artificial Sequence
  Description of Artificial Sequence: Synthetic oligonucleotide
cacagguucgcuuagcacc

SEQ ID NO: 2421485 - RNA, 19 nt, Artificial Sequence
  Description of Artificial Sequence: Synthetic oligonucleotide
uggaaaagaucaucgacga

SEQ ID NO: 2421486 - RNA, 19 nt, Artificial Sequence
  Description of Artificial Sequence: Synthetic oligonucleotide
accacgcuugcccaaaagc

SEQ ID NO: 2421487 - RNA, 19 nt, Artificial Sequence
  Description of Artificial Sequence: Synthetic oligonucleotide
aguagcuggacgcugaggu

SEQ ID NO: 2421488 - RNA, 19 nt, Artificial Sequence
  Description of Artificial Sequence: Synthetic oligonucleotide
aaccucauacuaaccaccc

SEQ ID NO: 2421489 - RNA, 19 nt, Artificial Sequence
  Description of Artificial Sequence: Synthetic oligonucleotide
ucaagauaaggucuccuuc

SEQ ID NO: 2421490 - RNA, 19 nt, Artificial Sequence
  Description of Artificial Sequence: Synthetic oligonucleotide
aagcgagacagugacuugg

SEQ ID NO: 2421491 - RNA, 19 nt, Artificial Sequence
  Description of Artificial Sequence: Synthetic oligonucleotide
auuaacaccggugagcccu

SEQ ID NO: 2421492 - RNA, 19 nt, Artificial Sequence
  Description of Artificial Sequence: Synthetic oligonucleotide
uaggacgguguucuggccg

SEQ ID NO: 2421493 - RNA, 19 nt, Artificial Sequence
  Description of Artificial Sequence: Synthetic oligonucleotide
ugaaccucauacuaaccac

SEQ ID NO: 2421494 - RNA, 19 nt, Artificial Sequence
  Description of Artificial Sequence: Synthetic oligonucleotide
aaaagaucaucgacgaggu

SEQ ID NO: 2421495 - RNA, 19 nt, Artificial Sequence
  Description of Artificial Sequence: Synthetic oligonucleotide
cuuaggacgguguucuggc

SEQ ID NO: 2421496 - RNA, 19 nt, Artificial Sequence
  Description of Artificial Sequence: Synthetic oligonucleotide
ugauguaggggauggaaaa

SEQ ID NO: 2421497 - RNA, 19 nt, Artificial Sequence
  Description of Artificial Sequence: Synthetic oligonucleotide
ucuuuaacuggcccaacuc

SEQ ID NO: 2421498 - RNA, 19 nt, Artificial Sequence
  Description of Artificial Sequence: Synthetic oligonucleotide
gucacgcugccuuaggacg

SEQ ID NO: 2421499 - RNA, 19 nt, Artificial Sequence
  Description of Artificial Sequence: Synthetic oligonucleotide
aaccugugucacgugaucg

SEQ ID NO: 2421500 - RNA, 19 nt, Artificial Sequence
  Description of Artificial Sequence: Synthetic oligonucleotide
gauggcuugaccacgcuug

SEQ ID NO: 2421501 - RNA, 19 nt, Artificial Sequence
  Description of Artificial Sequence: Synthetic oligonucleotide
caagaagagcacagguucg

SEQ ID NO: 2421502 - RNA, 19 nt, Artificial Sequence
  Description of Artificial Sequence: Synthetic oligonucleotide
cagguuccggcaauaagcg

SEQ ID NO: 2421503 - RNA, 19 nt, Artificial Sequence
  Description of Artificial Sequence: Synthetic oligonucleotide
accugugucacgugaucgc

SEQ ID NO: 2421504 - RNA, 19 nt, Artificial Sequence
  Description of Artificial Sequence: Synthetic oligonucleotide
uucuuuaacuggcccaacu

SEQ ID NO: 2421505 - RNA, 19 nt, Artificial Sequence
  Description of Artificial Sequence: Synthetic oligonucleotide
caauaagcgggcauuaaca

SEQ ID NO: 2421506 - RNA, 19 nt, Artificial Sequence
  Description of Artificial Sequence: Synthetic oligonucleotide
cacgugaucgcacacuccc

SEQ ID NO: 2421507 - RNA, 19 nt, Artificial Sequence
  Description of Artificial Sequence: Synthetic oligonucleotide
gucguugcgcaguagcugg

SEQ ID NO: 2421508 - RNA, 19 nt, Artificial Sequence
  Description of Artificial Sequence: Synthetic oligonucleotide
uacaaccugugucacguga

SEQ ID NO: 2421509 - RNA, 19 nt, Artificial Sequence
  Description of Artificial Sequence: Synthetic oligonucleotide
acgguguucuggccgaagc

SEQ ID NO: 2421510 - RNA, 19 nt, Artificial Sequence
  Description of Artificial Sequence: Synthetic oligonucleotide
cuugacguggucugcguag

SEQ ID NO: 2421511 - RNA, 19 nt, Artificial Sequence
  Description of Artificial Sequence: Synthetic oligonucleotide
ugccccauucccagaagcg

SEQ ID NO: 2421512 - RNA, 19 nt, Artificial Sequence
  Description of Artificial Sequence: Synthetic oligonucleotide
aaggacucugcgcgcgggc

SEQ ID NO: 2421513 - RNA, 19 nt, Artificial Sequence
  Description of Artificial Sequence: Synthetic oligonucleotide
ucacgcugccuuaggacgg

SEQ ID NO: 2421514 - RNA, 19 nt, Artificial Sequence
  Description of Artificial Sequence: Synthetic oligonucleotide
ucccaacucuaccucgugg

SEQ ID NO: 2421515 - RNA, 19 nt, Artificial Sequence
  Description of Artificial Sequence: Synthetic oligonucleotide
gaaccucauacuaaccacc

SEQ ID NO: 2421516 - RNA, 19 nt, Artificial Sequence
  Description of Artificial Sequence: Synthetic oligonucleotide
cuaaccaccccgucuauuc

SEQ ID NO: 2421517 - RNA, 19 nt, Artificial Sequence
  Description of Artificial Sequence: Synthetic oligonucleotide
gcugaggucagcuaaagga

SEQ ID NO: 2421518 - RNA, 19 nt, Artificial Sequence
  Description of Artificial Sequence: Synthetic oligonucleotide
gggauggaaaagaucaucg

SEQ ID NO: 2421519 - RNA, 19 nt, Artificial Sequence
  Description of Artificial Sequence: Synthetic oligonucleotide
aaagcacucccaacucuac

SEQ ID NO: 2421520 - RNA, 19 nt, Artificial Sequence
  Description of Artificial Sequence: Synthetic oligonucleotide
guuauuaucuuggaaacgu

SEQ ID NO: 2421521 - RNA, 19 nt, Artificial Sequence
  Description of Artificial Sequence: Synthetic oligonucleotide
ucaucgacgagguguugcc

SEQ ID NO: 2421522 - RNA, 19 nt, Artificial Sequence
  Description of Artificial Sequence: Synthetic oligonucleotide
gauguaggggauggaaaag

SEQ ID NO: 2421523 - RNA, 19 nt, Artificial Sequence
  Description of Artificial Sequence: Synthetic oligonucleotide
ugugucacgugaucgcaca

SEQ ID NO: 2421524 - RNA, 19 nt, Artificial Sequence
  Description of Artificial Sequence: Synthetic oligonucleotide
uauuccagccucgaucuca

SEQ ID NO: 2421525 - RNA, 19 nt, Artificial Sequence
  Description of Artificial Sequence: Synthetic oligonucleotide
ucccagucaagauaagguc

SEQ ID NO: 2421526 - RNA, 19 nt, Artificial Sequence
  Description of Artificial Sequence: Synthetic oligonucleotide
uucuggccgaagcugcccg

SEQ ID NO: 2421527 - RNA, 19 nt, Artificial Sequence
  Description of Artificial Sequence: Synthetic oligonucleotide
uuauuaucuuggaaacgua

SEQ ID NO: 2421528 - RNA, 19 nt, Artificial Sequence
  Description of Artificial Sequence: Synthetic oligonucleotide
gguuccggcaauaagcggg

SEQ ID NO: 2421529 - RNA, 19 nt, Artificial Sequence
  Description of Artificial Sequence: Synthetic oligonucleotide
uaaaggacucugcgcgcgg

SEQ ID NO: 2421530 - RNA, 19 nt, Artificial Sequence
  Description of Artificial Sequence: Synthetic oligonucleotide
agucccagucaagauaagg

SEQ ID NO: 2421531 - RNA, 19 nt, Artificial Sequence
  Description of Artificial Sequence: Synthetic oligonucleotide
auacuaaccaccccgucua

SEQ ID NO: 2421532 - RNA, 19 nt, Artificial Sequence
  Description of Artificial Sequence: Synthetic oligonucleotide
ucugcguaguuccucccca

SEQ ID NO: 2421533 - RNA, 19 nt, Artificial Sequence
  Description of Artificial Sequence: Synthetic oligonucleotide
ugcguaguuccuccccacg

SEQ ID NO: 2421534 - RNA, 19 nt, Artificial Sequence
  Description of Artificial Sequence: Synthetic oligonucleotide
gagcguacgcgguggacgg

SEQ ID NO: 2421535 - RNA, 19 nt, Artificial Sequence
  Description of Artificial Sequence: Synthetic oligonucleotide
cuaaaggacucugcgcgcg

SEQ ID NO: 2421536 - RNA, 19 nt, Artificial Sequence
  Description of Artificial Sequence: Synthetic oligonucleotide
accguugaccuugagccac

SEQ ID NO: 2421537 - RNA, 19 nt, Artificial Sequence
  Description of Artificial Sequence: Synthetic oligonucleotide
cuugcccaaaagcacuccc

SEQ ID NO: 2421538 - RNA, 19 nt, Artificial Sequence
  Description of Artificial Sequence: Synthetic oligonucleotide
uggagucccagucaagaua

SEQ ID NO: 2421539 - RNA, 19 nt, Artificial Sequence
  Description of Artificial Sequence: Synthetic oligonucleotide
uaccucguggugcagguuc

SEQ ID NO: 2421540 - RNA, 19 nt, Artificial Sequence
  Description of Artificial Sequence: Synthetic oligonucleotide
aaagaucaucgacgaggug

SEQ ID NO: 2421541 - RNA, 19 nt, Artificial Sequence
  Description of Artificial Sequence: Synthetic oligonucleotide
ggaaacguagcugaugaug

SEQ ID NO: 2421542 - RNA, 19 nt, Artificial Sequence
  Description of Artificial Sequence: Synthetic oligonucleotide
ucccuuuggagucccaguc

SEQ ID NO: 2421543 - RNA, 19 nt, Artificial Sequence
  Description of Artificial Sequence: Synthetic oligonucleotide
ugguacaaccugugucacg

SEQ ID NO: 2421544 - RNA, 19 nt, Artificial Sequence
  Description of Artificial Sequence: Synthetic oligonucleotide
aggucuccuucuuccaagg

SEQ ID NO: 2421545 - RNA, 19 nt, Artificial Sequence
  Description of Artificial Sequence: Synthetic oligonucleotide
cucgucguugcgcaguagc

SEQ ID NO: 2421546 - RNA, 19 nt, Artificial Sequence
  Description of Artificial Sequence: Synthetic oligonucleotide
uaaccaccccgucuauucc

SEQ ID NO: 2421547 - RNA, 19 nt, Artificial Sequence
  Description of Artificial Sequence: Synthetic oligonucleotide
cagcuaaaggacucugcgc

SEQ ID NO: 2421548 - RNA, 19 nt, Artificial Sequence
  Description of Artificial Sequence: Synthetic oligonucleotide
gguuauuaucuuggaaacg

SEQ ID NO: 2421549 - RNA, 19 nt, Artificial Sequence
  Description of Artificial Sequence: Synthetic oligonucleotide
uuccuccccacgcacacga

SEQ ID NO: 2421550 - RNA, 19 nt, Artificial Sequence
  Description of Artificial Sequence: Synthetic oligonucleotide
uggucugcguaguuccucc

SEQ ID NO: 2421551 - RNA, 19 nt, Artificial Sequence
  Description of Artificial Sequence: Synthetic oligonucleotide
acagucuuagggcggugag

SEQ ID NO: 2421552 - RNA, 19 nt, Artificial Sequence
  Description of Artificial Sequence: Synthetic oligonucleotide
cacgcuugcccaaaagcac

SEQ ID NO: 2421553 - RNA, 19 nt, Artificial Sequence
  Description of Artificial Sequence: Synthetic oligonucleotide
acagguucgcuuagcaccg

SEQ ID NO: 2421554 - RNA, 19 nt, Artificial Sequence
  Description of Artificial Sequence: Synthetic oligonucleotide
aaaggacucugcgcgcggg

SEQ ID NO: 2421555 - RNA, 19 nt, Artificial Sequence
  Description of Artificial Sequence: Synthetic oligonucleotide
ugaucgcacacucccggga

SEQ ID NO: 2421556 - RNA, 19 nt, Artificial Sequence
  Description of Artificial Sequence: Synthetic oligonucleotide
cuuagcaccgcgcugcgca

SEQ ID NO: 2421557 - RNA, 19 nt, Artificial Sequence
  Description of Artificial Sequence: Synthetic oligonucleotide
ucuuagggcggugaggguc

SEQ ID NO: 2421558 - RNA, 19 nt, Artificial Sequence
  Description of Artificial Sequence: Synthetic oligonucleotide
guugcgcaguagcuggacg

SEQ ID NO: 2421559 - RNA, 19 nt, Artificial Sequence
  Description of Artificial Sequence: Synthetic oligonucleotide
ucuaccucguggugcaggu

SEQ ID NO: 2421560 - RNA, 19 nt, Artificial Sequence
  Description of Artificial Sequence: Synthetic oligonucleotide
acaccggugagcccucggg

SEQ ID NO: 2421561 - RNA, 19 nt, Artificial Sequence
  Description of Artificial Sequence: Synthetic oligonucleotide
aucgacgagguguugcccu

SEQ ID NO: 2421562 - RNA, 19 nt, Artificial Sequence
  Description of Artificial Sequence: Synthetic oligonucleotide
agcacagguucgcuuagca

SEQ ID NO: 2421563 - RNA, 19 nt, Artificial Sequence
  Description of Artificial Sequence: Synthetic oligonucleotide
uucgcuuagcaccgcgcug

SEQ ID NO: 2421564 - RNA, 19 nt, Artificial Sequence
  Description of Artificial Sequence: Synthetic oligonucleotide
cacucccaacucuaccucg

SEQ ID NO: 2421565 - RNA, 19 nt, Artificial Sequence
  Description of Artificial Sequence: Synthetic oligonucleotide
ucccagaagcgagacagug

SEQ ID NO: 2421566 - RNA, 19 nt, Artificial Sequence
  Description of Artificial Sequence: Synthetic oligonucleotide
uguucuggccgaagcugcc

SEQ ID NO: 2421567 - RNA, 19 nt, Artificial Sequence
  Description of Artificial Sequence: Synthetic oligonucleotide
cuuggaaacguagcugaug

SEQ ID NO: 2421568 - RNA, 19 nt, Artificial Sequence
  Description of Artificial Sequence: Synthetic oligonucleotide
gcauuaacaccggugagcc

SEQ ID NO: 2421569 - RNA, 19 nt, Artificial Sequence
  Description of Artificial Sequence: Synthetic oligonucleotide
auguaggggauggaaaaga

SEQ ID NO: 2421570 - RNA, 19 nt, Artificial Sequence
  Description of Artificial Sequence: Synthetic oligonucleotide
ucgucguugcgcaguagcu

SEQ ID NO: 2421571 - RNA, 19 nt, Artificial Sequence
  Description of Artificial Sequence: Synthetic oligonucleotide
cacacucccgggacuacgg

SEQ ID NO: 2421572 - RNA, 19 nt, Artificial Sequence
  Description of Artificial Sequence: Synthetic oligonucleotide
ucauacuaaccaccccguc

SEQ ID NO: 2421573 - RNA, 19 nt, Artificial Sequence
  Description of Artificial Sequence: Synthetic oligonucleotide
gaucgcacacucccgggac

SEQ ID NO: 2421574 - RNA, 19 nt, Artificial Sequence
  Description of Artificial Sequence: Synthetic oligonucleotide
augguacaaccugugucac

SEQ ID NO: 2421575 - RNA, 19 nt, Artificial Sequence
  Description of Artificial Sequence: Synthetic oligonucleotide
gaagcgagacagugacuug

SEQ ID NO: 2421576 - RNA, 19 nt, Artificial Sequence
  Description of Artificial Sequence: Synthetic oligonucleotide
aaacguagcugaugaugua

SEQ ID NO: 2421577 - RNA, 19 nt, Artificial Sequence
  Description of Artificial Sequence: Synthetic oligonucleotide
ccuugaaccucauacuaac

SEQ ID NO: 2421578 - RNA, 19 nt, Artificial Sequence
  Description of Artificial Sequence: Synthetic oligonucleotide
cacgcacacgauauucuug

SEQ ID NO: 2421579 - RNA, 19 nt, Artificial Sequence
  Description of Artificial Sequence: Synthetic oligonucleotide
acacucccgggacuacggc

SEQ ID NO: 2421580 - RNA, 19 nt, Artificial Sequence
  Description of Artificial Sequence: Synthetic oligonucleotide
ccagaagcgagacagugac

SEQ ID NO: 2421581 - RNA, 19 nt, Artificial Sequence
  Description of Artificial Sequence: Synthetic oligonucleotide
accggugagcccucgggag

SEQ ID NO: 2421582 - RNA, 19 nt, Artificial Sequence
  Description of Artificial Sequence: Synthetic oligonucleotide
ucguggugcagguuccggc

SEQ ID NO: 2421583 - RNA, 19 nt, Artificial Sequence
  Description of Artificial Sequence: Synthetic oligonucleotide
agguuccggcaauaagcgg

SEQ ID NO: 2421584 - RNA, 19 nt, Artificial Sequence
  Description of Artificial Sequence: Synthetic oligonucleotide
ucacgugaucgcacacucc

SEQ ID NO: 2421585 - RNA, 19 nt, Artificial Sequence
  Description of Artificial Sequence: Synthetic oligonucleotide
cacucccgggacuacggcg

SEQ ID NO: 2421586 - RNA, 19 nt, Artificial Sequence
  Description of Artificial Sequence: Synthetic oligonucleotide
ggcuugaccacgcuugccc

SEQ ID NO: 2421587 - RNA, 19 nt, Artificial Sequence
  Description of Artificial Sequence: Synthetic oligonucleotide
gcaauaagcgggcauuaac

SEQ ID NO: 2421588 - RNA, 19 nt, Artificial Sequence
  Description of Artificial Sequence: Synthetic oligonucleotide
agguucgcuuagcaccgcg

SEQ ID NO: 2421589 - RNA, 19 nt, Artificial Sequence
  Description of Artificial Sequence: Synthetic oligonucleotide
aagccaugguacaaccugu

SEQ ID NO: 2421590 - RNA, 19 nt, Artificial Sequence
  Description of Artificial Sequence: Synthetic oligonucleotide
ggcauuaacaccggugagc

SEQ ID NO: 2421591 - RNA, 19 nt, Artificial Sequence
  Description of Artificial Sequence: Synthetic oligonucleotide
gucacgugaucgcacacuc

SEQ ID NO: 2421592 - RNA, 19 nt, Artificial Sequence
  Description of Artificial Sequence: Synthetic oligonucleotide
caguuuucugaccuuuuca

SEQ ID NO: 2421593 - RNA, 19 nt, Artificial Sequence
  Description of Artificial Sequence: Synthetic oligonucleotide
gugaucgcacacucccggg

SEQ ID NO: 2421594 - RNA, 19 nt, Artificial Sequence
  Description of Artificial Sequence: Synthetic oligonucleotide
cucggggauggcuugacca

SEQ ID NO: 2421595 - RNA, 19 nt, Artificial Sequence
  Description of Artificial Sequence: Synthetic oligonucleotide
ucggggauggcuugaccac

SEQ ID NO: 2421596 - RNA, 19 nt, Artificial Sequence
  Description of Artificial Sequence: Synthetic oligonucleotide
gguguugcccuccugccug

SEQ ID NO: 2421597 - RNA, 19 nt, Artificial Sequence
  Description of Artificial Sequence: Synthetic oligonucleotide
ugucacgugaucgcacacu

SEQ ID NO: 2421598 - RNA, 19 nt, Artificial Sequence
  Description of Artificial Sequence: Synthetic oligonucleotide
acguaguccauggcggcgg

SEQ ID NO: 2421599 - RNA, 19 nt, Artificial Sequence
  Description of Artificial Sequence: Synthetic oligonucleotide
ugccugagcucaccguuga

SEQ ID NO: 2421600 - RNA, 19 nt, Artificial Sequence
  Description of Artificial Sequence: Synthetic oligonucleotide
cuucaagaagagcacaggu

SEQ ID NO: 2421601 - RNA, 19 nt, Artificial Sequence
  Description of Artificial Sequence: Synthetic oligonucleotide
uuggagucccagucaagau

SEQ ID NO: 2421602 - RNA, 19 nt, Artificial Sequence
  Description of Artificial Sequence: Synthetic oligonucleotide
caagguuauuaucuuggaa

SEQ ID NO: 2421603 - RNA, 19 nt, Artificial Sequence
  Description of Artificial Sequence: Synthetic oligonucleotide
agucaagauaaggucuccu

SEQ ID NO: 2421604 - RNA, 19 nt, Artificial Sequence
  Description of Artificial Sequence: Synthetic oligonucleotide
gaccacgcuugcccaaaag

SEQ ID NO: 2421605 - RNA, 19 nt, Artificial Sequence
  Description of Artificial Sequence: Synthetic oligonucleotide
ggaaaagaucaucgacgag

SEQ ID NO: 2421606 - RNA, 19 nt, Artificial Sequence
  Description of Artificial Sequence: Synthetic oligonucleotide
ggagcguacgcgguggacg

SEQ ID NO: 2421607 - RNA, 19 nt, Artificial Sequence
  Description of Artificial Sequence: Synthetic oligonucleotide
cauacuaaccaccccgucu

SEQ ID NO: 2421608 - RNA, 19 nt, Artificial Sequence
  Description of Artificial Sequence: Synthetic oligonucleotide
ucgggagcguacgcggugg

SEQ ID NO: 2421609 - RNA, 19 nt, Artificial Sequence
  Description of Artificial Sequence: Synthetic oligonucleotide
gucagcuaaaggacucugc

SEQ ID NO: 2421610 - RNA, 19 nt, Artificial Sequence
  Description of Artificial Sequence: Synthetic oligonucleotide
ugcgcaucuccuugacgug

SEQ ID NO: 2421611 - RNA, 19 nt, Artificial Sequence
  Description of Artificial Sequence: Synthetic oligonucleotide
cauuaacaccggugagccc

SEQ ID NO: 2421612 - RNA, 19 nt, Artificial Sequence
  Description of Artificial Sequence: Synthetic oligonucleotide
uccggcaauaagcgggcau

SEQ ID NO: 2421613 - RNA, 19 nt, Artificial Sequence
  Description of Artificial Sequence: Synthetic oligonucleotide
cuugagccacagucuuagg

SEQ ID NO: 2421614 - RNA, 19 nt, Artificial Sequence
  Description of Artificial Sequence: Synthetic oligonucleotide
ugcgcgcgggcaacggccg

SEQ ID NO: 2421615 - RNA, 19 nt, Artificial Sequence
  Description of Artificial Sequence: Synthetic oligonucleotide
ggauggaaaagaucaucga

SEQ ID NO: 2421616 - RNA, 19 nt, Artificial Sequence
  Description of Artificial Sequence: Synthetic oligonucleotide
gucugcguaguuccucccc

SEQ ID NO: 2421617 - RNA, 19 nt, Artificial Sequence
  Description of Artificial Sequence: Synthetic oligonucleotide
ccggaagagacgaggaggc

SEQ ID NO: 2421618 - RNA, 19 nt, Artificial Sequence
  Description of Artificial Sequence: Synthetic oligonucleotide
cuuagggcggugaggguca

SEQ ID NO: 2421619 - RNA, 19 nt, Artificial Sequence
  Description of Artificial Sequence: Synthetic oligonucleotide
ggcuucaagaagagcacag

SEQ ID NO: 2421620 - RNA, 19 nt, Artificial Sequence
  Description of Artificial Sequence: Synthetic oligonucleotide
agcgagacagugacuuggg

SEQ ID NO: 2421621 - RNA, 19 nt, Artificial Sequence
  Description of Artificial Sequence: Synthetic oligonucleotide
aggacgguguucuggccga

SEQ ID NO: 2421622 - RNA, 19 nt, Artificial Sequence
  Description of Artificial Sequence: Synthetic oligonucleotide
ccaugguacaaccuguguc

SEQ ID NO: 2421623 - RNA, 19 nt, Artificial Sequence
  Description of Artificial Sequence: Synthetic oligonucleotide
cugcgcaucuccuugacgu

SEQ ID NO: 2421624 - RNA, 19 nt, Artificial Sequence
  Description of Artificial Sequence: Synthetic oligonucleotide
guguucuggccgaagcugc

SEQ ID NO: 2421625 - RNA, 19 nt, Artificial Sequence
  Description of Artificial Sequence: Synthetic oligonucleotide
cucuaccucguggugcagg

SEQ ID NO: 2421626 - RNA, 19 nt, Artificial Sequence
  Description of Artificial Sequence: Synthetic oligonucleotide
cugugucacgugaucgcac

SEQ ID NO: 2421627 - RNA, 19 nt, Artificial Sequence
  Description of Artificial Sequence: Synthetic oligonucleotide
cugcgcgcgggcaacggcc

SEQ ID NO: 2421628 - RNA, 19 nt, Artificial Sequence
  Description of Artificial Sequence: Synthetic oligonucleotide
acucccuuuggagucccag

SEQ ID NO: 2421629 - RNA, 19 nt, Artificial Sequence
  Description of Artificial Sequence: Synthetic oligonucleotide
cagucuuagggcggugagg

SEQ ID NO: 2421630 - RNA, 19 nt, Artificial Sequence
  Description of Artificial Sequence: Synthetic oligonucleotide
guaggggauggaaaagauc

SEQ ID NO: 2421631 - RNA, 19 nt, Artificial Sequence
  Description of Artificial Sequence: Synthetic oligonucleotide
accucguggugcagguucc

SEQ ID NO: 2421632 - RNA, 19 nt, Artificial Sequence
  Description of Artificial Sequence: Synthetic oligonucleotide
agcccucgggagcguacgc

SEQ ID NO: 2421633 - RNA, 19 nt, Artificial Sequence
  Description of Artificial Sequence: Synthetic oligonucleotide
guagccggccacguagucc

SEQ ID NO: 2421634 - RNA, 19 nt, Artificial Sequence
  Description of Artificial Sequence: Synthetic oligonucleotide
cacguaguccauggcggcg

SEQ ID NO: 2421635 - RNA, 19 nt, Artificial Sequence
  Description of Artificial Sequence: Synthetic oligonucleotide
acagggcguagccggccac

SEQ ID NO: 2421636 - RNA, 19 nt, Artificial Sequence
  Description of Artificial Sequence: Synthetic oligonucleotide
gugagggucagggaucuuc

SEQ ID NO: 2421637 - RNA, 19 nt, Artificial Sequence
  Description of Artificial Sequence: Synthetic oligonucleotide
ggucacgcugccuuaggac

SEQ ID NO: 2421638 - RNA, 19 nt, Artificial Sequence
  Description of Artificial Sequence: Synthetic oligonucleotide
caaccugugucacgugauc

SEQ ID NO: 2421639 - RNA, 19 nt, Artificial Sequence
  Description of Artificial Sequence: Synthetic oligonucleotide
uccuugacguggucugcgu

SEQ ID NO: 2421640 - RNA, 19 nt, Artificial Sequence
  Description of Artificial Sequence: Synthetic oligonucleotide
uugacguggucugcguagu

SEQ ID NO: 2421641 - RNA, 19 nt, Artificial Sequence
  Description of Artificial Sequence: Synthetic oligonucleotide
ccuugagccacagucuuag

SEQ ID NO: 2421642 - RNA, 19 nt, Artificial Sequence
  Description of Artificial Sequence: Synthetic oligonucleotide
uuucaccuugaaccucaua

SEQ ID NO: 2421643 - RNA, 19 nt, Artificial Sequence
  Description of Artificial Sequence: Synthetic oligonucleotide
cagucaagauaaggucucc

SEQ ID NO: 2421644 - RNA, 19 nt, Artificial Sequence
  Description of Artificial Sequence: Synthetic oligonucleotide
ugagcccucgggagcguac

SEQ ID NO: 2421645 - RNA, 19 nt, Artificial Sequence
  Description of Artificial Sequence: Synthetic oligonucleotide
accccgucuauuccagccu

SEQ ID NO: 2421646 - RNA, 19 nt, Artificial Sequence
  Description of Artificial Sequence: Synthetic oligonucleotide
cugccugagcucaccguug

SEQ ID NO: 2421647 - RNA, 19 nt, Artificial Sequence
  Description of Artificial Sequence: Synthetic oligonucleotide
agaucaucgacgagguguu

SEQ ID NO: 2421648 - RNA, 19 nt, Artificial Sequence
  Description of Artificial Sequence: Synthetic oligonucleotide
gaagcugcccgcucgucgu

SEQ ID NO: 2421649 - RNA, 19 nt, Artificial Sequence
  Description of Artificial Sequence: Synthetic oligonucleotide
acgaaggcgcugacagggc

SEQ ID NO: 2421650 - RNA, 19 nt, Artificial Sequence
  Description of Artificial Sequence: Synthetic oligonucleotide
aucgcacacucccgggacu

SEQ ID NO: 2421651 - RNA, 19 nt, Artificial Sequence
  Description of Artificial Sequence: Synthetic oligonucleotide
ccuuaggacgguguucugg

SEQ ID NO: 2421652 - RNA, 19 nt, Artificial Sequence
  Description of Artificial Sequence: Synthetic oligonucleotide
accuugaaccucauacuaa

SEQ ID NO: 2421653 - RNA, 19 nt, Artificial Sequence
  Description of Artificial Sequence: Synthetic oligonucleotide
gagcccucgggagcguacg

SEQ ID NO: 2421654 - RNA, 19 nt, Artificial Sequence
  Description of Artificial Sequence: Synthetic oligonucleotide
acgcuugcccaaaagcacu

SEQ ID NO: 2421655 - RNA, 19 nt, Artificial Sequence
  Description of Artificial Sequence: Synthetic oligonucleotide
agcaccgcgcugcgcaucu

SEQ ID NO: 2421656 - RNA, 19 nt, Artificial Sequence
  Description of Artificial Sequence: Synthetic oligonucleotide
aagcgggcauuaacaccgg

SEQ ID NO: 2421657 - RNA, 19 nt, Artificial Sequence
  Description of Artificial Sequence: Synthetic oligonucleotide
ccaaaagcacucccaacuc

SEQ ID NO: 2421658 - RNA, 19 nt, Artificial Sequence
  Description of Artificial Sequence: Synthetic oligonucleotide
ccugagcucaccguugacc

SEQ ID NO: 2421659 - RNA, 19 nt, Artificial Sequence
  Description of Artificial Sequence: Synthetic oligonucleotide
acgauauucuugccccauu

SEQ ID NO: 2421660 - RNA, 19 nt, Artificial Sequence
  Description of Artificial Sequence: Synthetic oligonucleotide
uggggucacgcugccuuag

SEQ ID NO: 2421661 - RNA, 19 nt, Artificial Sequence
  Description of Artificial Sequence: Synthetic oligonucleotide
acggcggccucgugggguc

SEQ ID NO: 2421662 - RNA, 19 nt, Artificial Sequence
  Description of Artificial Sequence: Synthetic oligonucleotide
gggcauuaacaccggugag

SEQ ID NO: 2421663 - RNA, 19 nt, Artificial Sequence
  Description of Artificial Sequence: Synthetic oligonucleotide
uacgcgguggacggcuuca

SEQ ID NO: 2421664 - RNA, 19 nt, Artificial Sequence
  Description of Artificial Sequence: Synthetic oligonucleotide
caaaagcacucccaacucu

SEQ ID NO: 2421665 - RNA, 19 nt, Artificial Sequence
  Description of Artificial Sequence: Synthetic oligonucleotide
ucgacgagguguugcccuc

SEQ ID NO: 2421666 - RNA, 19 nt, Artificial Sequence
  Description of Artificial Sequence: Synthetic oligonucleotide
gucaagauaaggucuccuu

SEQ ID NO: 2421667 - RNA, 19 nt, Artificial Sequence
  Description of Artificial Sequence: Synthetic oligonucleotide
gcguaguuccuccccacgc

SEQ ID NO: 2421668 - RNA, 19 nt, Artificial Sequence
  Description of Artificial Sequence: Synthetic oligonucleotide
acgugaucgcacacucccg

SEQ ID NO: 2421669 - RNA, 19 nt, Artificial Sequence
  Description of Artificial Sequence: Synthetic oligonucleotide
uugaccacgcuugcccaaa

SEQ ID NO: 2421670 - RNA, 19 nt, Artificial Sequence
  Description of Artificial Sequence: Synthetic oligonucleotide
caucgacgagguguugccc

SEQ ID NO: 2421671 - RNA, 19 nt, Artificial Sequence
  Description of Artificial Sequence: Synthetic oligonucleotide
acaaccugugucacgugau

SEQ ID NO: 2421672 - RNA, 19 nt, Artificial Sequence
  Description of Artificial Sequence: Synthetic oligonucleotide
cugcguaguuccuccccac

SEQ ID NO: 2421673 - RNA, 19 nt, Artificial Sequence
  Description of Artificial Sequence: Synthetic oligonucleotide
caccgcgcugcgcaucucc

SEQ ID NO: 2421674 - RNA, 19 nt, Artificial Sequence
  Description of Artificial Sequence: Synthetic oligonucleotide
cucauacuaaccaccccgu

SEQ ID NO: 2421675 - RNA, 19 nt, Artificial Sequence
  Description of Artificial Sequence: Synthetic oligonucleotide
ccacgcuugcccaaaagca

SEQ ID NO: 2421676 - RNA, 19 nt, Artificial Sequence
  Description of Artificial Sequence: Synthetic oligonucleotide
ggggauggaaaagaucauc

SEQ ID NO: 2421677 - RNA, 19 nt, Artificial Sequence
  Description of Artificial Sequence: Synthetic oligonucleotide
uggacgcugaggucagcua

SEQ ID NO: 2421678 - RNA, 19 nt, Artificial Sequence
  Description of Artificial Sequence: Synthetic oligonucleotide
guacaaccugugucacgug

SEQ ID NO: 2421679 - RNA, 19 nt, Artificial Sequence
  Description of Artificial Sequence: Synthetic oligonucleotide
cgugaucgcacacucccgg

SEQ ID NO: 2421680 - RNA, 19 nt, Artificial Sequence
  Description of Artificial Sequence: Synthetic oligonucleotide
uguccaggcacagggcgua

SEQ ID NO: 2421681 - RNA, 19 nt, Artificial Sequence
  Description of Artificial Sequence: Synthetic oligonucleotide
gaagagcacagguucgcuu

SEQ ID NO: 2421682 - RNA, 19 nt, Artificial Sequence
  Description of Artificial Sequence: Synthetic oligonucleotide
aggucagcuaaaggacucu

SEQ ID NO: 2421683 - RNA, 19 nt, Artificial Sequence
  Description of Artificial Sequence: Synthetic oligonucleotide
gacgguguucuggccgaag

SEQ ID NO: 2421684 - RNA, 19 nt, Artificial Sequence
  Description of Artificial Sequence: Synthetic oligonucleotide
guucgcuuagcaccgcgcu

SEQ ID NO: 2421685 - RNA, 19 nt, Artificial Sequence
  Description of Artificial Sequence: Synthetic oligonucleotide
guugcccuccugccugagc

SEQ ID NO: 2421686 - RNA, 19 nt, Artificial Sequence
  Description of Artificial Sequence: Synthetic oligonucleotide
guucuggccgaagcugccc

SEQ ID NO: 2421687 - RNA, 19 nt, Artificial Sequence
  Description of Artificial Sequence: Synthetic oligonucleotide
cucgggagcguacgcggug

SEQ ID NO: 2421688 - RNA, 19 nt, Artificial Sequence
  Description of Artificial Sequence: Synthetic oligonucleotide
gcgagacagugacuugggg

SEQ ID NO: 2421689 - RNA, 19 nt, Artificial Sequence
  Description of Artificial Sequence: Synthetic oligonucleotide
ugaccacgcuugcccaaaa

SEQ ID NO: 2421690 - RNA, 19 nt, Artificial Sequence
  Description of Artificial Sequence: Synthetic oligonucleotide
uggcuugaccacgcuugcc

SEQ ID NO: 2421691 - RNA, 19 nt, Artificial Sequence
  Description of Artificial Sequence: Synthetic oligonucleotide
uuagcaccgcgcugcgcau

SEQ ID NO: 2421692 - RNA, 19 nt, Artificial Sequence
  Description of Artificial Sequence: Synthetic oligonucleotide
gcgguggacggcuucaaga

SEQ ID NO: 2421693 - RNA, 19 nt, Artificial Sequence
  Description of Artificial Sequence: Synthetic oligonucleotide
gcaacggccggaagagacg

SEQ ID NO: 2421694 - RNA, 19 nt, Artificial Sequence
  Description of Artificial Sequence: Synthetic oligonucleotide
uacggcggccucguggggu

SEQ ID NO: 2421695 - RNA, 19 nt, Artificial Sequence
  Description of Artificial Sequence: Synthetic oligonucleotide
gugucacgugaucgcacac

SEQ ID NO: 2421696 - RNA, 19 nt, Artificial Sequence
  Description of Artificial Sequence: Synthetic oligonucleotide
gaucaucgacgagguguug

SEQ ID NO: 2421697 - RNA, 19 nt, Artificial Sequence
  Description of Artificial Sequence: Synthetic oligonucleotide
caggcccuucuucuugcac

SEQ ID NO: 2421698 - RNA, 19 nt, Artificial Sequence
  Description of Artificial Sequence: Synthetic oligonucleotide
gagcacagguucgcuuagc

SEQ ID NO: 2421699 - RNA, 19 nt, Artificial Sequence
  Description of Artificial Sequence: Synthetic oligonucleotide
ggacgcugaggucagcuaa

SEQ ID NO: 2421700 - RNA, 19 nt, Artificial Sequence
  Description of Artificial Sequence: Synthetic oligonucleotide
ggccggaagagacgaggag

SEQ ID NO: 2421701 - RNA, 19 nt, Artificial Sequence
  Description of Artificial Sequence: Synthetic oligonucleotide
ggucagcuaaaggacucug

SEQ ID NO: 2421702 - RNA, 19 nt, Artificial Sequence
  Description of Artificial Sequence: Synthetic oligonucleotide
ccuucuuccaagguuauua

SEQ ID NO: 2421703 - RNA, 19 nt, Artificial Sequence
  Description of Artificial Sequence: Synthetic oligonucleotide
ugcccgcucgucguugcgc

SEQ ID NO: 2421704 - RNA, 19 nt, Artificial Sequence
  Description of Artificial Sequence: Synthetic oligonucleotide
gcgcaucuccuugacgugg

SEQ ID NO: 2421705 - RNA, 19 nt, Artificial Sequence
  Description of Artificial Sequence: Synthetic oligonucleotide
ugagcucaccguugaccuu

SEQ ID NO: 2421706 - RNA, 19 nt, Artificial Sequence
  Description of Artificial Sequence: Synthetic oligonucleotide
caucucuggcagucauguc

SEQ ID NO: 2421707 - RNA, 19 nt, Artificial Sequence
  Description of Artificial Sequence: Synthetic oligonucleotide
ccucguggggucacgcugc

SEQ ID NO: 2421708 - RNA, 19 nt, Artificial Sequence
  Description of Artificial Sequence: Synthetic oligonucleotide
agcguacgcgguggacggc

SEQ ID NO: 2421709 - RNA, 19 nt, Artificial Sequence
  Description of Artificial Sequence: Synthetic oligonucleotide
cugccuuaggacgguguuc

SEQ ID NO: 2421710 - RNA, 19 nt, Artificial Sequence
  Description of Artificial Sequence: Synthetic oligonucleotide
caacggccggaagagacga

SEQ ID NO: 2421711 - RNA, 19 nt, Artificial Sequence
  Description of Artificial Sequence: Synthetic oligonucleotide
ugacguggucugcguaguu

SEQ ID NO: 2421712 - RNA, 19 nt, Artificial Sequence
  Description of Artificial Sequence: Synthetic oligonucleotide
gacgcugaggucagcuaaa

SEQ ID NO: 2421713 - RNA, 19 nt, Artificial Sequence
  Description of Artificial Sequence: Synthetic oligonucleotide
gcacgaaggcgcugacagg

SEQ ID NO: 2421714 - RNA, 19 nt, Artificial Sequence
  Description of Artificial Sequence: Synthetic oligonucleotide
aacggccggaagagacgag

SEQ ID NO: 2421715 - RNA, 19 nt, Artificial Sequence
  Description of Artificial Sequence: Synthetic oligonucleotide
cucguggggucacgcugcc

SEQ ID NO: 2421716 - RNA, 19 nt, Artificial Sequence
  Description of Artificial Sequence: Synthetic oligonucleotide
gagucccagucaagauaag

SEQ ID NO: 2421717 - RNA, 19 nt, Artificial Sequence
  Description of Artificial Sequence: Synthetic oligonucleotide
cuugaccacgcuugcccaa

SEQ ID NO: 2421718 - RNA, 19 nt, Artificial Sequence
  Description of Artificial Sequence: Synthetic oligonucleotide
gguucgcuuagcaccgcgc

SEQ ID NO: 2421719 - RNA, 19 nt, Artificial Sequence
  Description of Artificial Sequence: Synthetic oligonucleotide
aggacucugcgcgcgggca

SEQ ID NO: 2421720 - RNA, 19 nt, Artificial Sequence
  Description of Artificial Sequence: Synthetic oligonucleotide
acuaaccaccccgucuauu

SEQ ID NO: 2421721 - RNA, 19 nt, Artificial Sequence
  Description of Artificial Sequence: Synthetic oligonucleotide
cucuggcagucauguccag

SEQ ID NO: 2421722 - RNA, 19 nt, Artificial Sequence
  Description of Artificial Sequence: Synthetic oligonucleotide
gacucugcgcgcgggcaac

SEQ ID NO: 2421723 - RNA, 19 nt, Artificial Sequence
  Description of Artificial Sequence: Synthetic oligonucleotide
ugggcacgaaggcgcugac

SEQ ID NO: 2421724 - RNA, 19 nt, Artificial Sequence
  Description of Artificial Sequence: Synthetic oligonucleotide
uguugcccuccugccugag

SEQ ID NO: 2421725 - RNA, 19 nt, Artificial Sequence
  Description of Artificial Sequence: Synthetic oligonucleotide
cacagucuuagggcgguga

SEQ ID NO: 2421726 - RNA, 19 nt, Artificial Sequence
  Description of Artificial Sequence: Synthetic oligonucleotide
ggggucacgcugccuuagg

SEQ ID NO: 2421727 - RNA, 19 nt, Artificial Sequence
  Description of Artificial Sequence: Synthetic oligonucleotide
ggggaagccaugguacaac

SEQ ID NO: 2421728 - RNA, 19 nt, Artificial Sequence
  Description of Artificial Sequence: Synthetic oligonucleotide
gacagggcaggaggccgug

SEQ ID NO: 2421729 - RNA, 19 nt, Artificial Sequence
  Description of Artificial Sequence: Synthetic oligonucleotide
ucgcacacucccgggacua

SEQ ID NO: 2421730 - RNA, 19 nt, Artificial Sequence
  Description of Artificial Sequence: Synthetic oligonucleotide
cgaagcugcccgcucgucg

SEQ ID NO: 2421731 - RNA, 19 nt, Artificial Sequence
  Description of Artificial Sequence: Synthetic oligonucleotide
uuagggcggugagggucag

SEQ ID NO: 2421732 - RNA, 19 nt, Artificial Sequence
  Description of Artificial Sequence: Synthetic oligonucleotide
acucugcgcgcgggcaacg

SEQ ID NO: 2421733 - RNA, 19 nt, Artificial Sequence
  Description of Artificial Sequence: Synthetic oligonucleotide
cccagucaagauaaggucu

SEQ ID NO: 2421734 - RNA, 19 nt, Artificial Sequence
  Description of Artificial Sequence: Synthetic oligonucleotide
caccguugaccuugagcca

SEQ ID NO: 2421735 - RNA, 19 nt, Artificial Sequence
  Description of Artificial Sequence: Synthetic oligonucleotide
cuccccacgcacacgauau

SEQ ID NO: 2421736 - RNA, 19 nt, Artificial Sequence
  Description of Artificial Sequence: Synthetic oligonucleotide
ggucugcguaguuccuccc

SEQ ID NO: 2421737 - RNA, 19 nt, Artificial Sequence
  Description of Artificial Sequence: Synthetic oligonucleotide
cccgucuauuccagccucg

SEQ ID NO: 2421738 - RNA, 19 nt, Artificial Sequence
  Description of Artificial Sequence: Synthetic oligonucleotide
uggccgaagcugcccgcuc

SEQ ID NO: 2421739 - RNA, 19 nt, Artificial Sequence
  Description of Artificial Sequence: Synthetic oligonucleotide
gcgggcaacggccggaaga

SEQ ID NO: 2421740 - RNA, 19 nt, Artificial Sequence
  Description of Artificial Sequence: Synthetic oligonucleotide
gcacacucccgggacuacg

SEQ ID NO: 2421741 - RNA, 19 nt, Artificial Sequence
  Description of Artificial Sequence: Synthetic oligonucleotide
cucugcgcgcgggcaacgg

SEQ ID NO: 2421742 - RNA, 19 nt, Artificial Sequence
  Description of Artificial Sequence: Synthetic oligonucleotide
gcacucccaacucuaccuc

SEQ ID NO: 2421743 - RNA, 19 nt, Artificial Sequence
  Description of Artificial Sequence: Synthetic oligonucleotide
aagcugcccgcucgucguu

SEQ ID NO: 2421744 - RNA, 19 nt, Artificial Sequence
  Description of Artificial Sequence: Synthetic oligonucleotide
cuacggcggccucgugggg

SEQ ID NO: 2421745 - RNA, 19 nt, Artificial Sequence
  Description of Artificial Sequence: Synthetic oligonucleotide
ggcggugagggucagggau

SEQ ID NO: 2421746 - RNA, 19 nt, Artificial Sequence
  Description of Artificial Sequence: Synthetic oligonucleotide
uagggcggugagggucagg

SEQ ID NO: 2421747 - RNA, 19 nt, Artificial Sequence
  Description of Artificial Sequence: Synthetic oligonucleotide
guacgcgguggacggcuuc

SEQ ID NO: 2421748 - RNA, 19 nt, Artificial Sequence
  Description of Artificial Sequence: Synthetic oligonucleotide
ccaacucccuuuggagucc

SEQ ID NO: 2421749 - RNA, 19 nt, Artificial Sequence
  Description of Artificial Sequence: Synthetic oligonucleotide
gacgagguguugcccuccu

SEQ ID NO: 2421750 - RNA, 19 nt, Artificial Sequence
  Description of Artificial Sequence: Synthetic oligonucleotide
agcugcccgcucgucguug

SEQ ID NO: 2421751 - RNA, 19 nt, Artificial Sequence
  Description of Artificial Sequence: Synthetic oligonucleotide
ccauucccagaagcgagac

SEQ ID NO: 2421752 - RNA, 19 nt, Artificial Sequence
  Description of Artificial Sequence: Synthetic oligonucleotide
cccagaagcgagacaguga

SEQ ID NO: 2421753 - RNA, 19 nt, Artificial Sequence
  Description of Artificial Sequence: Synthetic oligonucleotide
agggcguagccggccacgu

SEQ ID NO: 2421754 - RNA, 19 nt, Artificial Sequence
  Description of Artificial Sequence: Synthetic oligonucleotide
cgcugaggucagcuaaagg

SEQ ID NO: 2421755 - RNA, 19 nt, Artificial Sequence
  Description of Artificial Sequence: Synthetic oligonucleotide
aacucccuuuggaguccca

SEQ ID NO: 2421756 - RNA, 19 nt, Artificial Sequence
  Description of Artificial Sequence: Synthetic oligonucleotide
ggacggcuucaagaagagc

SEQ ID NO: 2421757 - RNA, 19 nt, Artificial Sequence
  Description of Artificial Sequence: Synthetic oligonucleotide
ucccgggacuacggcggcc

SEQ ID NO: 2421758 - RNA, 19 nt, Artificial Sequence
  Description of Artificial Sequence: Synthetic oligonucleotide
cagguucgcuuagcaccgc

SEQ ID NO: 2421759 - RNA, 19 nt, Artificial Sequence
  Description of Artificial Sequence: Synthetic oligonucleotide
cccaacucuaccucguggu

SEQ ID NO: 2421760 - RNA, 19 nt, Artificial Sequence
  Description of Artificial Sequence: Synthetic oligonucleotide
ggcaauaagcgggcauuaa

SEQ ID NO: 2421761 - RNA, 19 nt, Artificial Sequence
  Description of Artificial Sequence: Synthetic oligonucleotide
cccauucccagaagcgaga

SEQ ID NO: 2421762 - RNA, 19 nt, Artificial Sequence
  Description of Artificial Sequence: Synthetic oligonucleotide
uagcaccgcgcugcgcauc

SEQ ID NO: 2421763 - RNA, 19 nt, Artificial Sequence
  Description of Artificial Sequence: Synthetic oligonucleotide
cccuuuggagucccaguca

SEQ ID NO: 2421764 - RNA, 19 nt, Artificial Sequence
  Description of Artificial Sequence: Synthetic oligonucleotide
ccccgucuauuccagccuc

SEQ ID NO: 2421765 - RNA, 19 nt, Artificial Sequence
  Description of Artificial Sequence: Synthetic oligonucleotide
ccugugucacgugaucgca

SEQ ID NO: 2421766 - RNA, 19 nt, Artificial Sequence
  Description of Artificial Sequence: Synthetic oligonucleotide
cagaagcgagacagugacu

SEQ ID NO: 2421767 - RNA, 19 nt, Artificial Sequence
  Description of Artificial Sequence: Synthetic oligonucleotide
gugcagguuccggcaauaa

SEQ ID NO: 2421768 - RNA, 19 nt, Artificial Sequence
  Description of Artificial Sequence: Synthetic oligonucleotide
gccaugguacaaccugugu

SEQ ID NO: 2421769 - RNA, 19 nt, Artificial Sequence
  Description of Artificial Sequence: Synthetic oligonucleotide
ccucggggauggcuugacc

SEQ ID NO: 2421770 - RNA, 19 nt, Artificial Sequence
  Description of Artificial Sequence: Synthetic oligonucleotide
ucguggggucacgcugccu

SEQ ID NO: 2421771 - RNA, 19 nt, Artificial Sequence
  Description of Artificial Sequence: Synthetic oligonucleotide
cgucguugcgcaguagcug

SEQ ID NO: 2421772 - RNA, 19 nt, Artificial Sequence
  Description of Artificial Sequence: Synthetic oligonucleotide
agcucaccguugaccuuga

SEQ ID NO: 2421773 - RNA, 19 nt, Artificial Sequence
  Description of Artificial Sequence: Synthetic oligonucleotide
gcggugagggucagggauc

SEQ ID NO: 2421774 - RNA, 19 nt, Artificial Sequence
  Description of Artificial Sequence: Synthetic oligonucleotide
aggguccagggcaggcccu

SEQ ID NO: 2421775 - RNA, 19 nt, Artificial Sequence
  Description of Artificial Sequence: Synthetic oligonucleotide
cggggauggcuugaccacg

SEQ ID NO: 2421776 - RNA, 19 nt, Artificial Sequence
  Description of Artificial Sequence: Synthetic oligonucleotide
ggaagccaugguacaaccu

SEQ ID NO: 2421777 - RNA, 19 nt, Artificial Sequence
  Description of Artificial Sequence: Synthetic oligonucleotide
cgguggacggcuucaagaa

SEQ ID NO: 2421778 - RNA, 19 nt, Artificial Sequence
  Description of Artificial Sequence: Synthetic oligonucleotide
gucuuagggcggugagggu

SEQ ID NO: 2421779 - RNA, 19 nt, Artificial Sequence
  Description of Artificial Sequence: Synthetic oligonucleotide
ggucuccuucuuccaaggu

SEQ ID NO: 2421780 - RNA, 19 nt, Artificial Sequence
  Description of Artificial Sequence: Synthetic oligonucleotide
ggacucugcgcgcgggcaa

SEQ ID NO: 2421781 - RNA, 19 nt, Artificial Sequence
  Description of Artificial Sequence: Synthetic oligonucleotide
acgcugccuuaggacggug

SEQ ID NO: 2421782 - RNA, 19 nt, Artificial Sequence
  Description of Artificial Sequence: Synthetic oligonucleotide
ggauggcuugaccacgcuu

SEQ ID NO: 2421783 - RNA, 19 nt, Artificial Sequence
  Description of Artificial Sequence: Synthetic oligonucleotide
ccaccccgucuauuccagc

SEQ ID NO: 2421784 - RNA, 19 nt, Artificial Sequence
  Description of Artificial Sequence: Synthetic oligonucleotide
gcgcaguagcuggacgcug

SEQ ID NO: 2421785 - RNA, 19 nt, Artificial Sequence
  Description of Artificial Sequence: Synthetic oligonucleotide
gcugccuuaggacgguguu

SEQ ID NO: 2421786 - RNA, 19 nt, Artificial Sequence
  Description of Artificial Sequence: Synthetic oligonucleotide
gcuuagcaccgcgcugcgc

SEQ ID NO: 2421787 - RNA, 19 nt, Artificial Sequence
  Description of Artificial Sequence: Synthetic oligonucleotide
ggugcagguuccggcaaua

SEQ ID NO: 2421788 - RNA, 19 nt, Artificial Sequence
  Description of Artificial Sequence: Synthetic oligonucleotide
gggagcguacgcgguggac

SEQ ID NO: 2421789 - RNA, 19 nt, Artificial Sequence
  Description of Artificial Sequence: Synthetic oligonucleotide
cccacgcacacgauauucu

SEQ ID NO: 2421790 - RNA, 19 nt, Artificial Sequence
  Description of Artificial Sequence: Synthetic oligonucleotide
cgcuuagcaccgcgcugcg

SEQ ID NO: 2421791 - RNA, 19 nt, Artificial Sequence
  Description of Artificial Sequence: Synthetic oligonucleotide
acgcgguggacggcuucaa

SEQ ID NO: 2421792 - RNA, 19 nt, Artificial Sequence
  Description of Artificial Sequence: Synthetic oligonucleotide
gcgcugcgcaucuccuuga

SEQ ID NO: 2421793 - RNA, 19 nt, Artificial Sequence
  Description of Artificial Sequence: Synthetic oligonucleotide
cgggacuacggcggccucg

SEQ ID NO: 2421794 - RNA, 19 nt, Artificial Sequence
  Description of Artificial Sequence: Synthetic oligonucleotide
cguugcgcaguagcuggac

SEQ ID NO: 2421795 - RNA, 19 nt, Artificial Sequence
  Description of Artificial Sequence: Synthetic oligonucleotide
gcucgucguugcgcaguag

SEQ ID NO: 2421796 - RNA, 19 nt, Artificial Sequence
  Description of Artificial Sequence: Synthetic oligonucleotide
ccuugacguggucugcgua

SEQ ID NO: 2421797 - RNA, 19 nt, Artificial Sequence
  Description of Artificial Sequence: Synthetic oligonucleotide
gggacuacggcggccucgu

SEQ ID NO: 2421798 - RNA, 19 nt, Artificial Sequence
  Description of Artificial Sequence: Synthetic oligonucleotide
ggacuacggcggccucgug

SEQ ID NO: 2421799 - RNA, 19 nt, Artificial Sequence
  Description of Artificial Sequence: Synthetic oligonucleotide
gggcggugagggucaggga

SEQ ID NO: 2421800 - RNA, 19 nt, Artificial Sequence
  Description of Artificial Sequence: Synthetic oligonucleotide
gggcacgaaggcgcugaca

SEQ ID NO: 2421801 - RNA, 19 nt, Artificial Sequence
  Description of Artificial Sequence: Synthetic oligonucleotide
gccggccacguaguccaug

SEQ ID NO: 2421802 - RNA, 19 nt, Artificial Sequence
  Description of Artificial Sequence: Synthetic oligonucleotide
ccguugaccuugagccaca

SEQ ID NO: 2421803 - RNA, 19 nt, Artificial Sequence
  Description of Artificial Sequence: Synthetic oligonucleotide
cgcgguggacggcuucaag

SEQ ID NO: 2421804 - RNA, 19 nt, Artificial Sequence
  Description of Artificial Sequence: Synthetic oligonucleotide
ccugccugagcucaccguu

SEQ ID NO: 2421805 - RNA, 19 nt, Artificial Sequence
  Description of Artificial Sequence: Synthetic oligonucleotide
cccgcucgucguugcgcag

SEQ ID NO: 2421806 - RNA, 19 nt, Artificial Sequence
  Description of Artificial Sequence: Synthetic oligonucleotide
cagccucgaucucaucauu

SEQ ID NO: 2421807 - RNA, 19 nt, Artificial Sequence
  Description of Artificial Sequence: Synthetic oligonucleotide
gggauggcuugaccacgcu

SEQ ID NO: 2421808 - RNA, 19 nt, Artificial Sequence
  Description of Artificial Sequence: Synthetic oligonucleotide
ccuccccacgcacacgaua

SEQ ID NO: 2421809 - RNA, 19 nt, Artificial Sequence
  Description of Artificial Sequence: Synthetic oligonucleotide
cgacgagguguugcccucc

SEQ ID NO: 2421810 - RNA, 19 nt, Artificial Sequence
  Description of Artificial Sequence: Synthetic oligonucleotide
cggccggaagagacgagga

SEQ ID NO: 2421811 - RNA, 19 nt, Artificial Sequence
  Description of Artificial Sequence: Synthetic oligonucleotide
gugagcccucgggagcgua

SEQ ID NO: 2421812 - RNA, 19 nt, Artificial Sequence
  Description of Artificial Sequence: Synthetic oligonucleotide
ggcggcggccucggggaug

SEQ ID NO: 2421813 - RNA, 19 nt, Artificial Sequence
  Description of Artificial Sequence: Synthetic oligonucleotide
gcggccucguggggucacg

SEQ ID NO: 2421814 - RNA, 19 nt, Artificial Sequence
  Description of Artificial Sequence: Synthetic oligonucleotide
ccacgcacacgauauucuu

SEQ ID NO: 2421815 - RNA, 19 nt, Artificial Sequence
  Description of Artificial Sequence: Synthetic oligonucleotide
cacgcugccuuaggacggu

SEQ ID NO: 2421816 - RNA, 19 nt, Artificial Sequence
  Description of Artificial Sequence: Synthetic oligonucleotide
cggcuucaagaagagcaca

SEQ ID NO: 2421817 - RNA, 19 nt, Artificial Sequence
  Description of Artificial Sequence: Synthetic oligonucleotide
gcguacgcgguggacggcu

SEQ ID NO: 2421818 - RNA, 19 nt, Artificial Sequence
  Description of Artificial Sequence: Synthetic oligonucleotide
gccgaagcugcccgcucgu

SEQ ID NO: 2421819 - RNA, 19 nt, Artificial Sequence
  Description of Artificial Sequence: Synthetic oligonucleotide
ggccucguggggucacgcu

SEQ ID NO: 2421820 - RNA, 19 nt, Artificial Sequence
  Description of Artificial Sequence: Synthetic oligonucleotide
ccacagucuuagggcggug

SEQ ID NO: 2421821 - RNA, 19 nt, Artificial Sequence
  Description of Artificial Sequence: Synthetic oligonucleotide
cguggggucacgcugccuu

SEQ ID NO: 2421822 - RNA, 19 nt, Artificial Sequence
  Description of Artificial Sequence: Synthetic oligonucleotide
ccuugggcacgaaggcgcu

SEQ ID NO: 2421823 - RNA, 19 nt, Artificial Sequence
  Description of Artificial Sequence: Synthetic oligonucleotide
ccugcacaucucuggcagu

SEQ ID NO: 2421824 - RNA, 19 nt, Artificial Sequence
  Description of Artificial Sequence: Synthetic oligonucleotide
ggcggccucguggggucac

SEQ ID NO: 2421825 - RNA, 19 nt, Artificial Sequence
  Description of Artificial Sequence: Synthetic oligonucleotide
gcccuuggccaggguccag

SEQ ID NO: 2421826 - RNA, 19 nt, Artificial Sequence
  Description of Artificial Sequence: Synthetic oligonucleotide
gggcguagccggccacgua

SEQ ID NO: 2421827 - RNA, 19 nt, Artificial Sequence
  Description of Artificial Sequence: Synthetic oligonucleotide
ggcggccucggggauggcu

SEQ ID NO: 2421828 - RNA, 19 nt, Artificial Sequence
  Description of Artificial Sequence: Synthetic oligonucleotide
ggacgguguucuggccgaa

SEQ ID NO: 2421829 - RNA, 19 nt, Artificial Sequence
  Description of Artificial Sequence: Synthetic oligonucleotide
ccucgggagcguacgcggu

SEQ ID NO: 2421830 - RNA, 19 nt, Artificial Sequence
  Description of Artificial Sequence: Synthetic oligonucleotide
cggccucguggggucacgc

SEQ ID NO: 2421831 - RNA, 19 nt, Artificial Sequence
  Description of Artificial Sequence: Synthetic oligonucleotide
cuaccucguggugcagguu

SEQ ID NO: 2421832 - RNA, 19 nt, Artificial Sequence
  Description of Artificial Sequence: Synthetic oligonucleotide
agccggccacguaguccau

SEQ ID NO: 2421833 - RNA, 19 nt, Artificial Sequence
  Description of Artificial Sequence: Synthetic oligonucleotide
ccgggacuacggcggccuc

SEQ ID NO: 2421834 - RNA, 19 nt, Artificial Sequence
  Description of Artificial Sequence: Synthetic oligonucleotide
cgcacacucccgggacuac

SEQ ID NO: 2421835 - RNA, 19 nt, Artificial Sequence
  Description of Artificial Sequence: Synthetic oligonucleotide
cggcaauaagcgggcauua

SEQ ID NO: 2421836 - RNA, 19 nt, Artificial Sequence
  Description of Artificial Sequence: Synthetic oligonucleotide
cgcgggcaacggccggaag

SEQ ID NO: 2421837 - RNA, 19 nt, Artificial Sequence
  Description of Artificial Sequence: Synthetic oligonucleotide
cccgggacuacggcggccu

SEQ ID NO: 2421838 - RNA, 19 nt, Artificial Sequence
  Description of Artificial Sequence: Synthetic oligonucleotide
cgcugccuuaggacggugu

SEQ ID NO: 2421839 - RNA, 19 nt, Artificial Sequence
  Description of Artificial Sequence: Synthetic oligonucleotide
ggugagcccucgggagcgu

SEQ ID NO: 2421840 - RNA, 19 nt, Artificial Sequence
  Description of Artificial Sequence: Synthetic oligonucleotide
gcgcgggcaacggccggaa

SEQ ID NO: 2421841 - RNA, 19 nt, Artificial Sequence
  Description of Artificial Sequence: Synthetic oligonucleotide
cgcucgucguugcgcagua

SEQ ID NO: 2421842 - RNA, 19 nt, Artificial Sequence
  Description of Artificial Sequence: Synthetic oligonucleotide
ccgcucgucguugcgcagu

SEQ ID NO: 2421843 - RNA, 19 nt, Artificial Sequence
  Description of Artificial Sequence: Synthetic oligonucleotide
cgggagcguacgcggugga

SEQ ID NO: 2421844 - RNA, 19 nt, Artificial Sequence
  Description of Artificial Sequence: Synthetic oligonucleotide
gcaccgcgcugcgcaucuc

SEQ ID NO: 2421845 - RNA, 19 nt, Artificial Sequence
  Description of Artificial Sequence: Synthetic oligonucleotide
cgcgcgggcaacggccgga

SEQ ID NO: 2421846 - RNA, 19 nt, Artificial Sequence
  Description of Artificial Sequence: Synthetic oligonucleotide
ggugagggucagggaucuu

SEQ ID NO: 2421847 - RNA, 19 nt, Artificial Sequence
  Description of Artificial Sequence: Synthetic oligonucleotide
cguacgcgguggacggcuu

SEQ ID NO: 2421848 - RNA, 19 nt, Artificial Sequence
  Description of Artificial Sequence: Synthetic oligonucleotide
cggcggccucgugggguca

SEQ ID NO: 2421849 - RNA, 19 nt, Artificial Sequence
  Description of Artificial Sequence: Synthetic oligonucleotide
aacauuaccaucuuugucc

SEQ ID NO: 2421850 - RNA, 19 nt, Artificial Sequence
  Description of Artificial Sequence: Synthetic oligonucleotide
aaauguaagacuucaaggc

SEQ ID NO: 2421851 - RNA, 19 nt, Artificial Sequence
  Description of Artificial Sequence: Synthetic oligonucleotide
aauuguaccaucuggaaag

SEQ ID NO: 2421852 - RNA, 19 nt, Artificial Sequence
  Description of Artificial Sequence: Synthetic oligonucleotide
aauguaagacuucaaggcc

SEQ ID NO: 2421853 - RNA, 19 nt, Artificial Sequence
  Description of Artificial Sequence: Synthetic oligonucleotide
aacaguacaacccggcacc

SEQ ID NO: 2421854 - RNA, 19 nt, Artificial Sequence
  Description of Artificial Sequence: Synthetic oligonucleotide
uuuuaaaaguguuaguuca

SEQ ID NO: 2421855 - RNA, 19 nt, Artificial Sequence
  Description of Artificial Sequence: Synthetic oligonucleotide
aaauguaacagugaugcuc

SEQ ID NO: 2421856 - RNA, 19 nt, Artificial Sequence
  Description of Artificial Sequence: Synthetic oligonucleotide
uaugguaaaacuuuaauuu

SEQ ID NO: 2421857 - RNA, 19 nt, Artificial Sequence
  Description of Artificial Sequence: Synthetic oligonucleotide
uuuaguuuccgucaucucc

SEQ ID NO: 2421858 - RNA, 19 nt, Artificial Sequence
  Description of Artificial Sequence: Synthetic oligonucleotide
uuuauaaaccuuuucuacc

SEQ ID NO: 2421859 - RNA, 19 nt, Artificial Sequence
  Description of Artificial Sequence: Synthetic oligonucleotide
uuauuaaacucuaugauuu

SEQ ID NO: 2421860 - RNA, 19 nt, Artificial Sequence
  Description of Artificial Sequence: Synthetic oligonucleotide
ugaccauuugcauagacag

SEQ ID NO: 2421861 - RNA, 19 nt, Artificial Sequence
  Description of Artificial Sequence: Synthetic oligonucleotide
auacucuucuauucgagcc

SEQ ID NO: 2421862 - RNA, 19 nt, Artificial Sequence
  Description of Artificial Sequence: Synthetic oligonucleotide
uguccuauuaguaacauua

SEQ ID NO: 2421863 - RNA, 19 nt, Artificial Sequence
  Description of Artificial Sequence: Synthetic oligonucleotide
aaacaguacaacccggcac

SEQ ID NO: 2421864 - RNA, 19 nt, Artificial Sequence
  Description of Artificial Sequence: Synthetic oligonucleotide
uguaauuuaguuuccguca

SEQ ID NO: 2421865 - RNA, 19 nt, Artificial Sequence
  Description of Artificial Sequence: Synthetic oligonucleotide
aauucuguguccuauuagu

SEQ ID NO: 2421866 - RNA, 19 nt, Artificial Sequence
  Description of Artificial Sequence: Synthetic oligonucleotide
uucuauucgagccaguucu

SEQ ID NO: 2421867 - RNA, 19 nt, Artificial Sequence
  Description of Artificial Sequence: Synthetic oligonucleotide
guuaguucaugauuaaucc

SEQ ID NO: 2421868 - RNA, 19 nt, Artificial Sequence
  Description of Artificial Sequence: Synthetic oligonucleotide
uuuuguugcucaaagucag

SEQ ID NO: 2421869 - RNA, 19 nt, Artificial Sequence
  Description of Artificial Sequence: Synthetic oligonucleotide
aaaaccugugaucgaacac

SEQ ID NO: 2421870 - RNA, 19 nt, Artificial Sequence
  Description of Artificial Sequence: Synthetic oligonucleotide
auucuuaacgguuugguca

SEQ ID NO: 2421871 - RNA, 19 nt, Artificial Sequence
  Description of Artificial Sequence: Synthetic oligonucleotide
accaucggcaaauaaauuc

SEQ ID NO: 2421872 - RNA, 19 nt, Artificial Sequence
  Description of Artificial Sequence: Synthetic oligonucleotide
uguuaguucaugauuaauc

SEQ ID NO: 2421873 - RNA, 19 nt, Artificial Sequence
  Description of Artificial Sequence: Synthetic oligonucleotide
aacgguuuggucaggaacc

SEQ ID NO: 2421874 - RNA, 19 nt, Artificial Sequence
  Description of Artificial Sequence: Synthetic oligonucleotide
gcaaauaaauucuuaacgg

SEQ ID NO: 2421875 - RNA, 19 nt, Artificial Sequence
  Description of Artificial Sequence: Synthetic oligonucleotide
uaguucaugauuaauccca

SEQ ID NO: 2421876 - RNA, 19 nt, Artificial Sequence
  Description of Artificial Sequence: Synthetic oligonucleotide
uucaugauuaaucccacga

SEQ ID NO: 2421877 - RNA, 19 nt, Artificial Sequence
  Description of Artificial Sequence: Synthetic oligonucleotide
uuuuaacagucccaucugg

SEQ ID NO: 2421878 - RNA, 19 nt, Artificial Sequence
  Description of Artificial Sequence: Synthetic oligonucleotide
auuaguaacauuaccaucu

SEQ ID NO: 2421879 - RNA, 19 nt, Artificial Sequence
  Description of Artificial Sequence: Synthetic oligonucleotide
uuauaaaccuuuucuaccu

SEQ ID NO: 2421880 - RNA, 19 nt, Artificial Sequence
  Description of Artificial Sequence: Synthetic oligonucleotide
uuucuaaggcacuuucucg

SEQ ID NO: 2421881 - RNA, 19 nt, Artificial Sequence
  Description of Artificial Sequence: Synthetic oligonucleotide
uaaagauguguucucagcu

SEQ ID NO: 2421882 - RNA, 19 nt, Artificial Sequence
  Description of Artificial Sequence: Synthetic oligonucleotide
uuggccauuauuaaacucu

SEQ ID NO: 2421883 - RNA, 19 nt, Artificial Sequence
  Description of Artificial Sequence: Synthetic oligonucleotide
agacaguuuuaacaguccc

SEQ ID NO: 2421884 - RNA, 19 nt, Artificial Sequence
  Description of Artificial Sequence: Synthetic oligonucleotide
uguccuucacucuaacucg

SEQ ID NO: 2421885 - RNA, 19 nt, Artificial Sequence
  Description of Artificial Sequence: Synthetic oligonucleotide
auuaaucccacgaagaucu

SEQ ID NO: 2421886 - RNA, 19 nt, Artificial Sequence
  Description of Artificial Sequence: Synthetic oligonucleotide
ucuauuucugauuccaacu

SEQ ID NO: 2421887 - RNA, 19 nt, Artificial Sequence
  Description of Artificial Sequence: Synthetic oligonucleotide
uguaccaucuggaaagaug

SEQ ID NO: 2421888 - RNA, 19 nt, Artificial Sequence
  Description of Artificial Sequence: Synthetic oligonucleotide
ucgaaguuuagcuaaagau

SEQ ID NO: 2421889 - RNA, 19 nt, Artificial Sequence
  Description of Artificial Sequence: Synthetic oligonucleotide
ucugauuccaacucaacaa

SEQ ID NO: 2421890 - RNA, 19 nt, Artificial Sequence
  Description of Artificial Sequence: Synthetic oligonucleotide
uucccuguaauuuaguuuc

SEQ ID NO: 2421891 - RNA, 19 nt, Artificial Sequence
  Description of Artificial Sequence: Synthetic oligonucleotide
aagacuucaaggccuuccg

SEQ ID NO: 2421892 - RNA, 19 nt, Artificial Sequence
  Description of Artificial Sequence: Synthetic oligonucleotide
aaaaguguuaguucaugau

SEQ ID NO: 2421893 - RNA, 19 nt, Artificial Sequence
  Description of Artificial Sequence: Synthetic oligonucleotide
cucucaaaaccugugaucg

SEQ ID NO: 2421894 - RNA, 19 nt, Artificial Sequence
  Description of Artificial Sequence: Synthetic oligonucleotide
auauucucgucucuugaac

SEQ ID NO: 2421895 - RNA, 19 nt, Artificial Sequence
  Description of Artificial Sequence: Synthetic oligonucleotide
uucucguucaguucgaagu

SEQ ID NO: 2421896 - RNA, 19 nt, Artificial Sequence
  Description of Artificial Sequence: Synthetic oligonucleotide
uuauacucuucuauucgag

SEQ ID NO: 2421897 - RNA, 19 nt, Artificial Sequence
  Description of Artificial Sequence: Synthetic oligonucleotide
uuaguuuccgucaucuccu

SEQ ID NO: 2421898 - RNA, 19 nt, Artificial Sequence
  Description of Artificial Sequence: Synthetic oligonucleotide
caugauuaaucccacgaag

SEQ ID NO: 2421899 - RNA, 19 nt, Artificial Sequence
  Description of Artificial Sequence: Synthetic oligonucleotide
uguaugguaaaacuuuaau

SEQ ID NO: 2421900 - RNA, 19 nt, Artificial Sequence
  Description of Artificial Sequence: Synthetic oligonucleotide
uaaaaguguuaguucauga

SEQ ID NO: 2421901 - RNA, 19 nt, Artificial Sequence
  Description of Artificial Sequence: Synthetic oligonucleotide
gacuucaaggccuuccggg

SEQ ID NO: 2421902 - RNA, 19 nt, Artificial Sequence
  Description of Artificial Sequence: Synthetic oligonucleotide
aguaguagaccacucuguc

SEQ ID NO: 2421903 - RNA, 19 nt, Artificial Sequence
  Description of Artificial Sequence: Synthetic oligonucleotide
ugaucgaacacugucaccu

SEQ ID NO: 2421904 - RNA, 19 nt, Artificial Sequence
  Description of Artificial Sequence: Synthetic oligonucleotide
uuaguucaugauuaauccc

SEQ ID NO: 2421905 - RNA, 19 nt, Artificial Sequence
  Description of Artificial Sequence: Synthetic oligonucleotide
gaugcucucuucuugacca

SEQ ID NO: 2421906 - RNA, 19 nt, Artificial Sequence
  Description of Artificial Sequence: Synthetic oligonucleotide
uuuaacagucccaucugga

SEQ ID NO: 2421907 - RNA, 19 nt, Artificial Sequence
  Description of Artificial Sequence: Synthetic oligonucleotide
aacagucccaucuggauau

SEQ ID NO: 2421908 - RNA, 19 nt, Artificial Sequence
  Description of Artificial Sequence: Synthetic oligonucleotide
agaucuuuacaauucugug

SEQ ID NO: 2421909 - RNA, 19 nt, Artificial Sequence
  Description of Artificial Sequence: Synthetic oligonucleotide
ucuugaacugggcaguaug

SEQ ID NO: 2421910 - RNA, 19 nt, Artificial Sequence
  Description of Artificial Sequence: Synthetic oligonucleotide
uuggucaggaaccacuuga

SEQ ID NO: 2421911 - RNA, 19 nt, Artificial Sequence
  Description of Artificial Sequence: Synthetic oligonucleotide
uauuucugauuccaacuca

SEQ ID NO: 2421912 - RNA, 19 nt, Artificial Sequence
  Description of Artificial Sequence: Synthetic oligonucleotide
uucacucuaacucggccag

SEQ ID NO: 2421913 - RNA, 19 nt, Artificial Sequence
  Description of Artificial Sequence: Synthetic oligonucleotide
auagacaguuuuaacaguc

SEQ ID NO: 2421914 - RNA, 19 nt, Artificial Sequence
  Description of Artificial Sequence: Synthetic oligonucleotide
uucuuaacgguuuggucag

SEQ ID NO: 2421915 - RNA, 19 nt, Artificial Sequence
  Description of Artificial Sequence: Synthetic oligonucleotide
uugaccaucggcaaauaaa

SEQ ID NO: 2421916 - RNA, 19 nt, Artificial Sequence
  Description of Artificial Sequence: Synthetic oligonucleotide
uaguagaccacucugucau

SEQ ID NO: 2421917 - RNA, 19 nt, Artificial Sequence
  Description of Artificial Sequence: Synthetic oligonucleotide
uauacucuucuauucgagc

SEQ ID NO: 2421918 - RNA, 19 nt, Artificial Sequence
  Description of Artificial Sequence: Synthetic oligonucleotide
gaaagaugcucucuucuug

SEQ ID NO: 2421919 - RNA, 19 nt, Artificial Sequence
  Description of Artificial Sequence: Synthetic oligonucleotide
ugaccaucggcaaauaaau

SEQ ID NO: 2421920 - RNA, 19 nt, Artificial Sequence
  Description of Artificial Sequence: Synthetic oligonucleotide
aaauucuuaacgguuuggu

SEQ ID NO: 2421921 - RNA, 19 nt, Artificial Sequence
  Description of Artificial Sequence: Synthetic oligonucleotide
cuugaacugggcaguaugg

SEQ ID NO: 2421922 - RNA, 19 nt, Artificial Sequence
  Description of Artificial Sequence: Synthetic oligonucleotide
uauuaguaacauuaccauc

SEQ ID NO: 2421923 - RNA, 19 nt, Artificial Sequence
  Description of Artificial Sequence: Synthetic oligonucleotide
ugugaucgaacacugucac

SEQ ID NO: 2421924 - RNA, 19 nt, Artificial Sequence
  Description of Artificial Sequence: Synthetic oligonucleotide
uuacguugcacucggacaa

SEQ ID NO: 2421925 - RNA, 19 nt, Artificial Sequence
  Description of Artificial Sequence: Synthetic oligonucleotide
cuaccuuuccaucaggaug

SEQ ID NO: 2421926 - RNA, 19 nt, Artificial Sequence
  Description of Artificial Sequence: Synthetic oligonucleotide
ucccaucuggauauucucg

SEQ ID NO: 2421927 - RNA, 19 nt, Artificial Sequence
  Description of Artificial Sequence: Synthetic oligonucleotide
uuuagcuaaagauguguuc

SEQ ID NO: 2421928 - RNA, 19 nt, Artificial Sequence
  Description of Artificial Sequence: Synthetic oligonucleotide
gcauagacaguuuuaacag

SEQ ID NO: 2421929 - RNA, 19 nt, Artificial Sequence
  Description of Artificial Sequence: Synthetic oligonucleotide
ucuggcaugaccugcuuca

SEQ ID NO: 2421930 - RNA, 19 nt, Artificial Sequence
  Description of Artificial Sequence: Synthetic oligonucleotide
ugauuaaucccacgaagau

SEQ ID NO: 2421931 - RNA, 19 nt, Artificial Sequence
  Description of Artificial Sequence: Synthetic oligonucleotide
uaacgguuuggucaggaac

SEQ ID NO: 2421932 - RNA, 19 nt, Artificial Sequence
  Description of Artificial Sequence: Synthetic oligonucleotide
uuaaaaguguuaguucaug

SEQ ID NO: 2421933 - RNA, 19 nt, Artificial Sequence
  Description of Artificial Sequence: Synthetic oligonucleotide
guaccaucuggaaagaugc

SEQ ID NO: 2421934 - RNA, 19 nt, Artificial Sequence
  Description of Artificial Sequence: Synthetic oligonucleotide
uucgaaguuuagcuaaaga

SEQ ID NO: 2421935 - RNA, 19 nt, Artificial Sequence
  Description of Artificial Sequence: Synthetic oligonucleotide
guaguaguagaccacucug

SEQ ID NO: 2421936 - RNA, 19 nt, Artificial Sequence
  Description of Artificial Sequence: Synthetic oligonucleotide
auuacguugcacucggaca

SEQ ID NO: 2421937 - RNA, 19 nt, Artificial Sequence
  Description of Artificial Sequence: Synthetic oligonucleotide
uuuuguuguaugguaaaac

SEQ ID NO: 2421938 - RNA, 19 nt, Artificial Sequence
  Description of Artificial Sequence: Synthetic oligonucleotide
uuugcauagacaguuuuaa

SEQ ID NO: 2421939 - RNA, 19 nt, Artificial Sequence
  Description of Artificial Sequence: Synthetic oligonucleotide
cuguaauuuaguuuccguc

SEQ ID NO: 2421940 - RNA, 19 nt, Artificial Sequence
  Description of Artificial Sequence: Synthetic oligonucleotide
uggaaagaugcucucuucu

SEQ ID NO: 2421941 - RNA, 19 nt, Artificial Sequence
  Description of Artificial Sequence: Synthetic oligonucleotide
uauucucgucucuugaacu

SEQ ID NO: 2421942 - RNA, 19 nt, Artificial Sequence
  Description of Artificial Sequence: Synthetic oligonucleotide
ucaugauuaaucccacgaa

SEQ ID NO: 2421943 - RNA, 19 nt, Artificial Sequence
  Description of Artificial Sequence: Synthetic oligonucleotide
uagacaguuuuaacagucc

SEQ ID NO: 2421944 - RNA, 19 nt, Artificial Sequence
  Description of Artificial Sequence: Synthetic oligonucleotide
ucuaugauuuuguugccau

SEQ ID NO: 2421945 - RNA, 19 nt, Artificial Sequence
  Description of Artificial Sequence: Synthetic oligonucleotide
aguauggagcucucuuugg

SEQ ID NO: 2421946 - RNA, 19 nt, Artificial Sequence
  Description of Artificial Sequence: Synthetic oligonucleotide
acgaagaucuuuacaauuc

SEQ ID NO: 2421947 - RNA, 19 nt, Artificial Sequence
  Description of Artificial Sequence: Synthetic oligonucleotide
acuuugucucuugaugacc

SEQ ID NO: 2421948 - RNA, 19 nt, Artificial Sequence
  Description of Artificial Sequence: Synthetic oligonucleotide
ugauuccaacucaacaacu

SEQ ID NO: 2421949 - RNA, 19 nt, Artificial Sequence
  Description of Artificial Sequence: Synthetic oligonucleotide
uauggagcucucuuuggcc

SEQ ID NO: 2421950 - RNA, 19 nt, Artificial Sequence
  Description of Artificial Sequence: Synthetic oligonucleotide
aucuggauauucucgucuc

SEQ ID NO: 2421951 - RNA, 19 nt, Artificial Sequence
  Description of Artificial Sequence: Synthetic oligonucleotide
ucuaacucggccagaugug

SEQ ID NO: 2421952 - RNA, 19 nt, Artificial Sequence
  Description of Artificial Sequence: Synthetic oligonucleotide
cuauuucugauuccaacuc

SEQ ID NO: 2421953 - RNA, 19 nt, Artificial Sequence
  Description of Artificial Sequence: Synthetic oligonucleotide
ugcacucggacaauuguac

SEQ ID NO: 2421954 - RNA, 19 nt, Artificial Sequence
  Description of Artificial Sequence: Synthetic oligonucleotide
aaguguuaguucaugauua

SEQ ID NO: 2421955 - RNA, 19 nt, Artificial Sequence
  Description of Artificial Sequence: Synthetic oligonucleotide
ggacaauuguaccaucugg

SEQ ID NO: 2421956 - RNA, 19 nt, Artificial Sequence
  Description of Artificial Sequence: Synthetic oligonucleotide
cuucacgucaccauuaaaa

SEQ ID NO: 2421957 - RNA, 19 nt, Artificial Sequence
  Description of Artificial Sequence: Synthetic oligonucleotide
uuguuguaugguaaaacuu

SEQ ID NO: 2421958 - RNA, 19 nt, Artificial Sequence
  Description of Artificial Sequence: Synthetic oligonucleotide
uuucugaguuccauuggga

SEQ ID NO: 2421959 - RNA, 19 nt, Artificial Sequence
  Description of Artificial Sequence: Synthetic oligonucleotide
uaguaguagaccacucugu

SEQ ID NO: 2421960 - RNA, 19 nt, Artificial Sequence
  Description of Artificial Sequence: Synthetic oligonucleotide
aguuuagcuaaagaugugu

SEQ ID NO: 2421961 - RNA, 19 nt, Artificial Sequence
  Description of Artificial Sequence: Synthetic oligonucleotide
ugagcagcggcguaguagu

SEQ ID NO: 2421962 - RNA, 19 nt, Artificial Sequence
  Description of Artificial Sequence: Synthetic oligonucleotide
cugauuccaacucaacaac

SEQ ID NO: 2421963 - RNA, 19 nt, Artificial Sequence
  Description of Artificial Sequence: Synthetic oligonucleotide
uucuguguccuauuaguaa

SEQ ID NO: 2421964 - RNA, 19 nt, Artificial Sequence
  Description of Artificial Sequence: Synthetic oligonucleotide
uuaacagucccaucuggau

SEQ ID NO: 2421965 - RNA, 19 nt, Artificial Sequence
  Description of Artificial Sequence: Synthetic oligonucleotide
cacuugagaaauguaagac

SEQ ID NO: 2421966 - RNA, 19 nt, Artificial Sequence
  Description of Artificial Sequence: Synthetic oligonucleotide
auucucgucucuugaacug

SEQ ID NO: 2421967 - RNA, 19 nt, Artificial Sequence
  Description of Artificial Sequence: Synthetic oligonucleotide
gacaauuguaccaucugga

SEQ ID NO: 2421968 - RNA, 19 nt, Artificial Sequence
  Description of Artificial Sequence: Synthetic oligonucleotide
gccauuauuaaacucuaug

SEQ ID NO: 2421969 - RNA, 19 nt, Artificial Sequence
  Description of Artificial Sequence: Synthetic oligonucleotide
ucuggaaagaugcucucuu

SEQ ID NO: 2421970 - RNA, 19 nt, Artificial Sequence
  Description of Artificial Sequence: Synthetic oligonucleotide
ucucucaaaaccugugauc

SEQ ID NO: 2421971 - RNA, 19 nt, Artificial Sequence
  Description of Artificial Sequence: Synthetic oligonucleotide
uuucucguucaguucgaag

SEQ ID NO: 2421972 - RNA, 19 nt, Artificial Sequence
  Description of Artificial Sequence: Synthetic oligonucleotide
ugucucuugaugaccauuu

SEQ ID NO: 2421973 - RNA, 19 nt, Artificial Sequence
  Description of Artificial Sequence: Synthetic oligonucleotide
uuuggccauuauuaaacuc

SEQ ID NO: 2421974 - RNA, 19 nt, Artificial Sequence
  Description of Artificial Sequence: Synthetic oligonucleotide
uggucaggaaccacuugag

SEQ ID NO: 2421975 - RNA, 19 nt, Artificial Sequence
  Description of Artificial Sequence: Synthetic oligonucleotide
ucggacaauuguaccaucu

SEQ ID NO: 2421976 - RNA, 19 nt, Artificial Sequence
  Description of Artificial Sequence: Synthetic oligonucleotide
gauuaaucccacgaagauc

SEQ ID NO: 2421977 - RNA, 19 nt, Artificial Sequence
  Description of Artificial Sequence: Synthetic oligonucleotide
auucgagccaguucucuug

SEQ ID NO: 2421978 - RNA, 19 nt, Artificial Sequence
  Description of Artificial Sequence: Synthetic oligonucleotide
uggauauucucgucucuug

SEQ ID NO: 2421979 - RNA, 19 nt, Artificial Sequence
  Description of Artificial Sequence: Synthetic oligonucleotide
gucaggaaccacuugagaa

SEQ ID NO: 2421980 - RNA, 19 nt, Artificial Sequence
  Description of Artificial Sequence: Synthetic oligonucleotide
cacucugucaucuggcaug

SEQ ID NO: 2421981 - RNA, 19 nt, Artificial Sequence
  Description of Artificial Sequence: Synthetic oligonucleotide
ucgucucuugaacugggca

SEQ ID NO: 2421982 - RNA, 19 nt, Artificial Sequence
  Description of Artificial Sequence: Synthetic oligonucleotide
acaauuguaccaucuggaa

SEQ ID NO: 2421983 - RNA, 19 nt, Artificial Sequence
  Description of Artificial Sequence: Synthetic oligonucleotide
uuguugcucaaagucagca

SEQ ID NO: 2421984 - RNA, 19 nt, Artificial Sequence
  Description of Artificial Sequence: Synthetic oligonucleotide
ucuuuacaauucugugucc

SEQ ID NO: 2421985 - RNA, 19 nt, Artificial Sequence
  Description of Artificial Sequence: Synthetic oligonucleotide
uauguggugugaguggucu

SEQ ID NO: 2421986 - RNA, 19 nt, Artificial Sequence
  Description of Artificial Sequence: Synthetic oligonucleotide
agcaauuucuuuccucagu

SEQ ID NO: 2421987 - RNA, 19 nt, Artificial Sequence
  Description of Artificial Sequence: Synthetic oligonucleotide
acauuaccaucuuuguccu

SEQ ID NO: 2421988 - RNA, 19 nt, Artificial Sequence
  Description of Artificial Sequence: Synthetic oligonucleotide
uugagaaauguaagacuuc

SEQ ID NO: 2421989 - RNA, 19 nt, Artificial Sequence
  Description of Artificial Sequence: Synthetic oligonucleotide
aacucggccagaugugacu

SEQ ID NO: 2421990 - RNA, 19 nt, Artificial Sequence
  Description of Artificial Sequence: Synthetic oligonucleotide
gaaacaguacaacccggca

SEQ ID NO: 2421991 - RNA, 19 nt, Artificial Sequence
  Description of Artificial Sequence: Synthetic oligonucleotide
caauucuguguccuauuag

SEQ ID NO: 2421992 - RNA, 19 nt, Artificial Sequence
  Description of Artificial Sequence: Synthetic oligonucleotide
uaacagucccaucuggaua

SEQ ID NO: 2421993 - RNA, 19 nt, Artificial Sequence
  Description of Artificial Sequence: Synthetic oligonucleotide
cuuugucucuugaugacca

SEQ ID NO: 2421994 - RNA, 19 nt, Artificial Sequence
  Description of Artificial Sequence: Synthetic oligonucleotide
gaugaccauuugcauagac

SEQ ID NO: 2421995 - RNA, 19 nt, Artificial Sequence
  Description of Artificial Sequence: Synthetic oligonucleotide
uucucgucucuugaacugg

SEQ ID NO: 2421996 - RNA, 19 nt, Artificial Sequence
  Description of Artificial Sequence: Synthetic oligonucleotide
acaguuuuaacagucccau

SEQ ID NO: 2421997 - RNA, 19 nt, Artificial Sequence
  Description of Artificial Sequence: Synthetic oligonucleotide
uuccauugggaaacaguac

SEQ ID NO: 2421998 - RNA, 19 nt, Artificial Sequence
  Description of Artificial Sequence: Synthetic oligonucleotide
ucaguucgaaguuuagcua

SEQ ID NO: 2421999 - RNA, 19 nt, Artificial Sequence
  Description of Artificial Sequence: Synthetic oligonucleotide
uucgagccaguucucuugc

SEQ ID NO: 2422000 - RNA, 19 nt, Artificial Sequence
  Description of Artificial Sequence: Synthetic oligonucleotide
cgaaguuuagcuaaagaug

SEQ ID NO: 2422001 - RNA, 19 nt, Artificial Sequence
  Description of Artificial Sequence: Synthetic oligonucleotide
agacuucaaggccuuccgg

SEQ ID NO: 2422002 - RNA, 19 nt, Artificial Sequence
  Description of Artificial Sequence: Synthetic oligonucleotide
ugcacucacuucuuucuga

SEQ ID NO: 2422003 - RNA, 19 nt, Artificial Sequence
  Description of Artificial Sequence: Synthetic oligonucleotide
uggcaugaccugcuucacg

SEQ ID NO: 2422004 - RNA, 19 nt, Artificial Sequence
  Description of Artificial Sequence: Synthetic oligonucleotide
cuugagaaauguaagacuu

SEQ ID NO: 2422005 - RNA, 19 nt, Artificial Sequence
  Description of Artificial Sequence: Synthetic oligonucleotide
ugccauuacguugcacucg

SEQ ID NO: 2422006 - RNA, 19 nt, Artificial Sequence
  Description of Artificial Sequence: Synthetic oligonucleotide
uauuaaacucuaugauuuu

SEQ ID NO: 2422007 - RNA, 19 nt, Artificial Sequence
  Description of Artificial Sequence: Synthetic oligonucleotide
auaaaccuuuucuaccuuu

SEQ ID NO: 2422008 - RNA, 19 nt, Artificial Sequence
  Description of Artificial Sequence: Synthetic oligonucleotide
ugugacuuugucucuugau

SEQ ID NO: 2422009 - RNA, 19 nt, Artificial Sequence
  Description of Artificial Sequence: Synthetic oligonucleotide
agcggcguaguaguagacc

SEQ ID NO: 2422010 - RNA, 19 nt, Artificial Sequence
  Description of Artificial Sequence: Synthetic oligonucleotide
uuuacaauucuguguccua

SEQ ID NO: 2422011 - RNA, 19 nt, Artificial Sequence
  Description of Artificial Sequence: Synthetic oligonucleotide
auguaagacuucaaggccu

SEQ ID NO: 2422012 - RNA, 19 nt, Artificial Sequence
  Description of Artificial Sequence: Synthetic oligonucleotide
uaauuuaguuuccgucauc

SEQ ID NO: 2422013 - RNA, 19 nt, Artificial Sequence
  Description of Artificial Sequence: Synthetic oligonucleotide
caguauggagcucucuuug

SEQ ID NO: 2422014 - RNA, 19 nt, Artificial Sequence
  Description of Artificial Sequence: Synthetic oligonucleotide
acuucaaggccuuccgggu

SEQ ID NO: 2422015 - RNA, 19 nt, Artificial Sequence
  Description of Artificial Sequence: Synthetic oligonucleotide
ucuaccuuuccaucaggau

SEQ ID NO: 2422016 - RNA, 19 nt, Artificial Sequence
  Description of Artificial Sequence: Synthetic oligonucleotide
uguaagacuucaaggccuu

SEQ ID NO: 2422017 - RNA, 19 nt, Artificial Sequence
  Description of Artificial Sequence: Synthetic oligonucleotide
cauuauuaaacucuaugau

SEQ ID NO: 2422018 - RNA, 19 nt, Artificial Sequence
  Description of Artificial Sequence: Synthetic oligonucleotide
aguacaacccggcacccau

SEQ ID NO: 2422019 - RNA, 19 nt, Artificial Sequence
  Description of Artificial Sequence: Synthetic oligonucleotide
guaugguaaaacuuuaauu

SEQ ID NO: 2422020 - RNA, 19 nt, Artificial Sequence
  Description of Artificial Sequence: Synthetic oligonucleotide
uuacaauucuguguccuau

SEQ ID NO: 2422021 - RNA, 19 nt, Artificial Sequence
  Description of Artificial Sequence: Synthetic oligonucleotide
ucccacgaagaucuuuaca

SEQ ID NO: 2422022 - RNA, 19 nt, Artificial Sequence
  Description of Artificial Sequence: Synthetic oligonucleotide
aaucccacgaagaucuuua

SEQ ID NO: 2422023 - RNA, 19 nt, Artificial Sequence
  Description of Artificial Sequence: Synthetic oligonucleotide
ucuuuguccuucacucuaa

SEQ ID NO: 2422024 - RNA, 19 nt, Artificial Sequence
  Description of Artificial Sequence: Synthetic oligonucleotide
ucucguucaguucgaaguu

SEQ ID NO: 2422025 - RNA, 19 nt, Artificial Sequence
  Description of Artificial Sequence: Synthetic oligonucleotide
acaauucuguguccuauua

SEQ ID NO: 2422026 - RNA, 19 nt, Artificial Sequence
  Description of Artificial Sequence: Synthetic oligonucleotide
uauaaaccuuuucuaccuu

SEQ ID NO: 2422027 - RNA, 19 nt, Artificial Sequence
  Description of Artificial Sequence: Synthetic oligonucleotide
ccaucuuuguccuucacuc

SEQ ID NO: 2422028 - RNA, 19 nt, Artificial Sequence
  Description of Artificial Sequence: Synthetic oligonucleotide
caaaaccugugaucgaaca

SEQ ID NO: 2422029 - RNA, 19 nt, Artificial Sequence
  Description of Artificial Sequence: Synthetic oligonucleotide
gacaguuuuaacaguccca

SEQ ID NO: 2422030 - RNA, 19 nt, Artificial Sequence
  Description of Artificial Sequence: Synthetic oligonucleotide
cuucacucuaacucggcca

SEQ ID NO: 2422031 - RNA, 19 nt, Artificial Sequence
  Description of Artificial Sequence: Synthetic oligonucleotide
cuauuaguaacauuaccau

SEQ ID NO: 2422032 - RNA, 19 nt, Artificial Sequence
  Description of Artificial Sequence: Synthetic oligonucleotide
aaguuuagcuaaagaugug

SEQ ID NO: 2422033 - RNA, 19 nt, Artificial Sequence
  Description of Artificial Sequence: Synthetic oligonucleotide
ucuugccuuuuguugcuca

SEQ ID NO: 2422034 - RNA, 19 nt, Artificial Sequence
  Description of Artificial Sequence: Synthetic oligonucleotide
aguguuaguucaugauuaa

SEQ ID NO: 2422035 - RNA, 19 nt, Artificial Sequence
  Description of Artificial Sequence: Synthetic oligonucleotide
uugcacucggacaauugua

SEQ ID NO: 2422036 - RNA, 19 nt, Artificial Sequence
  Description of Artificial Sequence: Synthetic oligonucleotide
uucuugaccaucggcaaau

SEQ ID NO: 2422037 - RNA, 19 nt, Artificial Sequence
  Description of Artificial Sequence: Synthetic oligonucleotide
aucccacgaagaucuuuac

SEQ ID NO: 2422038 - RNA, 19 nt, Artificial Sequence
  Description of Artificial Sequence: Synthetic oligonucleotide
uugaacugggcaguaugga

SEQ ID NO: 2422039 - RNA, 19 nt, Artificial Sequence
  Description of Artificial Sequence: Synthetic oligonucleotide
cuucuauucgagccaguuc

SEQ ID NO: 2422040 - RNA, 19 nt, Artificial Sequence
  Description of Artificial Sequence: Synthetic oligonucleotide
guuccauugggaaacagua

SEQ ID NO: 2422041 - RNA, 19 nt, Artificial Sequence
  Description of Artificial Sequence: Synthetic oligonucleotide
uggccauuauuaaacucua

SEQ ID NO: 2422042 - RNA, 19 nt, Artificial Sequence
  Description of Artificial Sequence: Synthetic oligonucleotide
cauugggaaacaguacaac

SEQ ID NO: 2422043 - RNA, 19 nt, Artificial Sequence
  Description of Artificial Sequence: Synthetic oligonucleotide
guaguagaccacucuguca

SEQ ID NO: 2422044 - RNA, 19 nt, Artificial Sequence
  Description of Artificial Sequence: Synthetic oligonucleotide
ugucaucuggcaugaccug

SEQ ID NO: 2422045 - RNA, 19 nt, Artificial Sequence
  Description of Artificial Sequence: Synthetic oligonucleotide
ucguucaguucgaaguuua

SEQ ID NO: 2422046 - RNA, 19 nt, Artificial Sequence
  Description of Artificial Sequence: Synthetic oligonucleotide
gccauuacguugcacucgg

SEQ ID NO: 2422047 - RNA, 19 nt, Artificial Sequence
  Description of Artificial Sequence: Synthetic oligonucleotide
uguaacagugaugcucuuc

SEQ ID NO: 2422048 - RNA, 19 nt, Artificial Sequence
  Description of Artificial Sequence: Synthetic oligonucleotide
cugugaucgaacacuguca

SEQ ID NO: 2422049 - RNA, 19 nt, Artificial Sequence
  Description of Artificial Sequence: Synthetic oligonucleotide
augaccauuugcauagaca

SEQ ID NO: 2422050 - RNA, 19 nt, Artificial Sequence
  Description of Artificial Sequence: Synthetic oligonucleotide
caguucgaaguuuagcuaa

SEQ ID NO: 2422051 - RNA, 19 nt, Artificial Sequence
  Description of Artificial Sequence: Synthetic oligonucleotide
ucccuguaauuuaguuucc

SEQ ID NO: 2422052 - RNA, 19 nt, Artificial Sequence
  Description of Artificial Sequence: Synthetic oligonucleotide
aguuccauugggaaacagu

SEQ ID NO: 2422053 - RNA, 19 nt, Artificial Sequence
  Description of Artificial Sequence: Synthetic oligonucleotide
ucucuugccuuuuguugcu

SEQ ID NO: 2422054 - RNA, 19 nt, Artificial Sequence
  Description of Artificial Sequence: Synthetic oligonucleotide
acaguacaacccggcaccc

SEQ ID NO: 2422055 - RNA, 19 nt, Artificial Sequence
  Description of Artificial Sequence: Synthetic oligonucleotide
aguggucugagcagcggcg

SEQ ID NO: 2422056 - RNA, 19 nt, Artificial Sequence
  Description of Artificial Sequence: Synthetic oligonucleotide
ucuauucgagccaguucuc

SEQ ID NO: 2422057 - RNA, 19 nt, Artificial Sequence
  Description of Artificial Sequence: Synthetic oligonucleotide
uuaacgguuuggucaggaa

SEQ ID NO: 2422058 - RNA, 19 nt, Artificial Sequence
  Description of Artificial Sequence: Synthetic oligonucleotide
uccuucacucuaacucggc

SEQ ID NO: 2422059 - RNA, 19 nt, Artificial Sequence
  Description of Artificial Sequence: Synthetic oligonucleotide
ugaguggucugagcagcgg

SEQ ID NO: 2422060 - RNA, 19 nt, Artificial Sequence
  Description of Artificial Sequence: Synthetic oligonucleotide
ggguauguggugugagugg

SEQ ID NO: 2422061 - RNA, 19 nt, Artificial Sequence
  Description of Artificial Sequence: Synthetic oligonucleotide
cacucggacaauuguacca

SEQ ID NO: 2422062 - RNA, 19 nt, Artificial Sequence
  Description of Artificial Sequence: Synthetic oligonucleotide
caauuguaccaucuggaaa

SEQ ID NO: 2422063 - RNA, 19 nt, Artificial Sequence
  Description of Artificial Sequence: Synthetic oligonucleotide
cucuaacucggccagaugu

SEQ ID NO: 2422064 - RNA, 19 nt, Artificial Sequence
  Description of Artificial Sequence: Synthetic oligonucleotide
agcuaaagauguguucuca

SEQ ID NO: 2422065 - RNA, 19 nt, Artificial Sequence
  Description of Artificial Sequence: Synthetic oligonucleotide
cugagcagcggcguaguag

SEQ ID NO: 2422066 - RNA, 19 nt, Artificial Sequence
  Description of Artificial Sequence: Synthetic oligonucleotide
uauucgagccaguucucuu

SEQ ID NO: 2422067 - RNA, 19 nt, Artificial Sequence
  Description of Artificial Sequence: Synthetic oligonucleotide
ucuaaggcacuuucucguu

SEQ ID NO: 2422068 - RNA, 19 nt, Artificial Sequence
  Description of Artificial Sequence: Synthetic oligonucleotide
uguguccuauuaguaacau

SEQ ID NO: 2422069 - RNA, 19 nt, Artificial Sequence
  Description of Artificial Sequence: Synthetic oligonucleotide
cucucuucuugaccaucgg

SEQ ID NO: 2422070 - RNA, 19 nt, Artificial Sequence
  Description of Artificial Sequence: Synthetic oligonucleotide
uacaacccggcacccauuu

SEQ ID NO: 2422071 - RNA, 19 nt, Artificial Sequence
  Description of Artificial Sequence: Synthetic oligonucleotide
ucggccagaugugacuuug

SEQ ID NO: 2422072 - RNA, 19 nt, Artificial Sequence
  Description of Artificial Sequence: Synthetic oligonucleotide
uaccaucuggaaagaugcu

SEQ ID NO: 2422073 - RNA, 19 nt, Artificial Sequence
  Description of Artificial Sequence: Synthetic oligonucleotide
gucaucuggcaugaccugc

SEQ ID NO: 2422074 - RNA, 19 nt, Artificial Sequence
  Description of Artificial Sequence: Synthetic oligonucleotide
gguaaaacuuuaauuuuaa

SEQ ID NO: 2422075 - RNA, 19 nt, Artificial Sequence
  Description of Artificial Sequence: Synthetic oligonucleotide
cuuuguccuucacucuaac

SEQ ID NO: 2422076 - RNA, 19 nt, Artificial Sequence
  Description of Artificial Sequence: Synthetic oligonucleotide
uccgucaucuccuccuuuu

SEQ ID NO: 2422077 - RNA, 19 nt, Artificial Sequence
  Description of Artificial Sequence: Synthetic oligonucleotide
guccuucacucuaacucgg

SEQ ID NO: 2422078 - RNA, 19 nt, Artificial Sequence
  Description of Artificial Sequence: Synthetic oligonucleotide
ccugugaucgaacacuguc

SEQ ID NO: 2422079 - RNA, 19 nt, Artificial Sequence
  Description of Artificial Sequence: Synthetic oligonucleotide
gugaucgaacacugucacc

SEQ ID NO: 2422080 - RNA, 19 nt, Artificial Sequence
  Description of Artificial Sequence: Synthetic oligonucleotide
guaauuuaguuuccgucau

SEQ ID NO: 2422081 - RNA, 19 nt, Artificial Sequence
  Description of Artificial Sequence: Synthetic oligonucleotide
ggauauucucgucucuuga

SEQ ID NO: 2422082 - RNA, 19 nt, Artificial Sequence
  Description of Artificial Sequence: Synthetic oligonucleotide
aaggccuuccggguaugug

SEQ ID NO: 2422083 - RNA, 19 nt, Artificial Sequence
  Description of Artificial Sequence: Synthetic oligonucleotide
augugacuuugucucuuga

SEQ ID NO: 2422084 - RNA, 19 nt, Artificial Sequence
  Description of Artificial Sequence: Synthetic oligonucleotide
ucuuaacgguuuggucagg

SEQ ID NO: 2422085 - RNA, 19 nt, Artificial Sequence
  Description of Artificial Sequence: Synthetic oligonucleotide
cucgucucuugaacugggc

SEQ ID NO: 2422086 - RNA, 19 nt, Artificial Sequence
  Description of Artificial Sequence: Synthetic oligonucleotide
uggugugaguggucugagc

SEQ ID NO: 2422087 - RNA, 19 nt, Artificial Sequence
  Description of Artificial Sequence: Synthetic oligonucleotide
uccggguauguggugugag

SEQ ID NO: 2422088 - RNA, 19 nt, Artificial Sequence
  Description of Artificial Sequence: Synthetic oligonucleotide
acucggacaauuguaccau

SEQ ID NO: 2422089 - RNA, 19 nt, Artificial Sequence
  Description of Artificial Sequence: Synthetic oligonucleotide
uuugucucuugaugaccau

SEQ ID NO: 2422090 - RNA, 19 nt, Artificial Sequence
  Description of Artificial Sequence: Synthetic oligonucleotide
guugcacucggacaauugu

SEQ ID NO: 2422091 - RNA, 19 nt, Artificial Sequence
  Description of Artificial Sequence: Synthetic oligonucleotide
aucuggaaagaugcucucu

SEQ ID NO: 2422092 - RNA, 19 nt, Artificial Sequence
  Description of Artificial Sequence: Synthetic oligonucleotide
cugcacucacuucuuucug

SEQ ID NO: 2422093 - RNA, 19 nt, Artificial Sequence
  Description of Artificial Sequence: Synthetic oligonucleotide
cuuccggguauguggugug

SEQ ID NO: 2422094 - RNA, 19 nt, Artificial Sequence
  Description of Artificial Sequence: Synthetic oligonucleotide
gaguuccauugggaaacag

SEQ ID NO: 2422095 - RNA, 19 nt, Artificial Sequence
  Description of Artificial Sequence: Synthetic oligonucleotide
gggaaacaguacaacccgg

SEQ ID NO: 2422096 - RNA, 19 nt, Artificial Sequence
  Description of Artificial Sequence: Synthetic oligonucleotide
caguuuuaacagucccauc

SEQ ID NO: 2422097 - RNA, 19 nt, Artificial Sequence
  Description of Artificial Sequence: Synthetic oligonucleotide
uaaucccacgaagaucuuu

SEQ ID NO: 2422098 - RNA, 19 nt, Artificial Sequence
  Description of Artificial Sequence: Synthetic oligonucleotide
cuuuacaauucuguguccu

SEQ ID NO: 2422099 - RNA, 19 nt, Artificial Sequence
  Description of Artificial Sequence: Synthetic oligonucleotide
cuuaacgguuuggucagga

SEQ ID NO: 2422100 - RNA, 19 nt, Artificial Sequence
  Description of Artificial Sequence: Synthetic oligonucleotide
uugucucuugaugaccauu

SEQ ID NO: 2422101 - RNA, 19 nt, Artificial Sequence
  Description of Artificial Sequence: Synthetic oligonucleotide
gauuccaacucaacaacuu

SEQ ID NO: 2422102 - RNA, 19 nt, Artificial Sequence
  Description of Artificial Sequence: Synthetic oligonucleotide
ucgagccaguucucuugcc

SEQ ID NO: 2422103 - RNA, 19 nt, Artificial Sequence
  Description of Artificial Sequence: Synthetic oligonucleotide
cgucucuugaacugggcag

SEQ ID NO: 2422104 - RNA, 19 nt, Artificial Sequence
  Description of Artificial Sequence: Synthetic oligonucleotide
ccuucacucuaacucggcc

SEQ ID NO: 2422105 - RNA, 19 nt, Artificial Sequence
  Description of Artificial Sequence: Synthetic oligonucleotide
cuaacucggccagauguga

SEQ ID NO: 2422106 - RNA, 19 nt, Artificial Sequence
  Description of Artificial Sequence: Synthetic oligonucleotide
cuugaccaucggcaaauaa

SEQ ID NO: 2422107 - RNA, 19 nt, Artificial Sequence
  Description of Artificial Sequence: Synthetic oligonucleotide
gcacucggacaauuguacc

SEQ ID NO: 2422108 - RNA, 19 nt, Artificial Sequence
  Description of Artificial Sequence: Synthetic oligonucleotide
cucggacaauuguaccauc

SEQ ID NO: 2422109 - RNA, 19 nt, Artificial Sequence
  Description of Artificial Sequence: Synthetic oligonucleotide
agaugugacuuugucucuu

SEQ ID NO: 2422110 - RNA, 19 nt, Artificial Sequence
  Description of Artificial Sequence: Synthetic oligonucleotide
uaguuuccgucaucuccuc

SEQ ID NO: 2422111 - RNA, 19 nt, Artificial Sequence
  Description of Artificial Sequence: Synthetic oligonucleotide
cacgaagaucuuuacaauu

SEQ ID NO: 2422112 - RNA, 19 nt, Artificial Sequence
  Description of Artificial Sequence: Synthetic oligonucleotide
ggaaccacuugagaaaugu

SEQ ID NO: 2422113 - RNA, 19 nt, Artificial Sequence
  Description of Artificial Sequence: Synthetic oligonucleotide
uuaaucccacgaagaucuu

SEQ ID NO: 2422114 - RNA, 19 nt, Artificial Sequence
  Description of Artificial Sequence: Synthetic oligonucleotide
aguucgaaguuuagcuaaa

SEQ ID NO: 2422115 - RNA, 19 nt, Artificial Sequence
  Description of Artificial Sequence: Synthetic oligonucleotide
uuguaccaucuggaaagau

SEQ ID NO: 2422116 - RNA, 19 nt, Artificial Sequence
  Description of Artificial Sequence: Synthetic oligonucleotide
ugaugaccauuugcauaga

SEQ ID NO: 2422117 - RNA, 19 nt, Artificial Sequence
  Description of Artificial Sequence: Synthetic oligonucleotide
agccaguucucuugccuuu

SEQ ID NO: 2422118 - RNA, 19 nt, Artificial Sequence
  Description of Artificial Sequence: Synthetic oligonucleotide
ggcacuuucucguucaguu

SEQ ID NO: 2422119 - RNA, 19 nt, Artificial Sequence
  Description of Artificial Sequence: Synthetic oligonucleotide
acgguuuggucaggaacca

SEQ ID NO: 2422120 - RNA, 19 nt, Artificial Sequence
  Description of Artificial Sequence: Synthetic oligonucleotide
cuugccuuuuguugcucaa

SEQ ID NO: 2422121 - RNA, 19 nt, Artificial Sequence
  Description of Artificial Sequence: Synthetic oligonucleotide
ugggcaguauggagcucuc

SEQ ID NO: 2422122 - RNA, 19 nt, Artificial Sequence
  Description of Artificial Sequence: Synthetic oligonucleotide
cccuguaauuuaguuuccg

SEQ ID NO: 2422123 - RNA, 19 nt, Artificial Sequence
  Description of Artificial Sequence: Synthetic oligonucleotide
guuuagcuaaagauguguu

SEQ ID NO: 2422124 - RNA, 19 nt, Artificial Sequence
  Description of Artificial Sequence: Synthetic oligonucleotide
ccaucggcaaauaaauucu

SEQ ID NO: 2422125 - RNA, 19 nt, Artificial Sequence
  Description of Artificial Sequence: Synthetic oligonucleotide
uggucugagcagcggcgua

SEQ ID NO: 2422126 - RNA, 19 nt, Artificial Sequence
  Description of Artificial Sequence: Synthetic oligonucleotide
ggccagaugugacuuuguc

SEQ ID NO: 2422127 - RNA, 19 nt, Artificial Sequence
  Description of Artificial Sequence: Synthetic oligonucleotide
acucggccagaugugacuu

SEQ ID NO: 2422128 - RNA, 19 nt, Artificial Sequence
  Description of Artificial Sequence: Synthetic oligonucleotide
uuccggguaugugguguga

SEQ ID NO: 2422129 - RNA, 19 nt, Artificial Sequence
  Description of Artificial Sequence: Synthetic oligonucleotide
caucuuuguccuucacucu

SEQ ID NO: 2422130 - RNA, 19 nt, Artificial Sequence
  Description of Artificial Sequence: Synthetic oligonucleotide
ucuugaccaucggcaaaua

SEQ ID NO: 2422131 - RNA, 19 nt, Artificial Sequence
  Description of Artificial Sequence: Synthetic oligonucleotide
gccagaugugacuuugucu

SEQ ID NO: 2422132 - RNA, 19 nt, Artificial Sequence
  Description of Artificial Sequence: Synthetic oligonucleotide
gucucuugaacugggcagu

SEQ ID NO: 2422133 - RNA, 19 nt, Artificial Sequence
  Description of Artificial Sequence: Synthetic oligonucleotide
gaccugcuucacgucacca

SEQ ID NO: 2422134 - RNA, 19 nt, Artificial Sequence
  Description of Artificial Sequence: Synthetic oligonucleotide
cagcggcguaguaguagac

SEQ ID NO: 2422135 - RNA, 19 nt, Artificial Sequence
  Description of Artificial Sequence: Synthetic oligonucleotide
gagccaguucucuugccuu

SEQ ID NO: 2422136 - RNA, 19 nt, Artificial Sequence
  Description of Artificial Sequence: Synthetic oligonucleotide
guauguggugugagugguc

SEQ ID NO: 2422137 - RNA, 19 nt, Artificial Sequence
  Description of Artificial Sequence: Synthetic oligonucleotide
gguauguggugugaguggu

SEQ ID NO: 2422138 - RNA, 19 nt, Artificial Sequence
  Description of Artificial Sequence: Synthetic oligonucleotide
auguaacagugaugcucuu

SEQ ID NO: 2422139 - RNA, 19 nt, Artificial Sequence
  Description of Artificial Sequence: Synthetic oligonucleotide
cguucaguucgaaguuuag

SEQ ID NO: 2422140 - RNA, 19 nt, Artificial Sequence
  Description of Artificial Sequence: Synthetic oligonucleotide
cggacaauuguaccaucug

SEQ ID NO: 2422141 - RNA, 19 nt, Artificial Sequence
  Description of Artificial Sequence: Synthetic oligonucleotide
cuauucgagccaguucucu

SEQ ID NO: 2422142 - RNA, 19 nt, Artificial Sequence
  Description of Artificial Sequence: Synthetic oligonucleotide
guguuaguucaugauuaau

SEQ ID NO: 2422143 - RNA, 19 nt, Artificial Sequence
  Description of Artificial Sequence: Synthetic oligonucleotide
cagaugugacuuugucucu

SEQ ID NO: 2422144 - RNA, 19 nt, Artificial Sequence
  Description of Artificial Sequence: Synthetic oligonucleotide
acaacccggcacccauuuu

SEQ ID NO: 2422145 - RNA, 19 nt, Artificial Sequence
  Description of Artificial Sequence: Synthetic oligonucleotide
ccuguaauuuaguuuccgu

SEQ ID NO: 2422146 - RNA, 19 nt, Artificial Sequence
  Description of Artificial Sequence: Synthetic oligonucleotide
cguugcacucggacaauug

SEQ ID NO: 2422147 - RNA, 19 nt, Artificial Sequence
  Description of Artificial Sequence: Synthetic oligonucleotide
accugugaucgaacacugu

SEQ ID NO: 2422148 - RNA, 19 nt, Artificial Sequence
  Description of Artificial Sequence: Synthetic oligonucleotide
cuaugauuuuguugccauu

SEQ ID NO: 2422149 - RNA, 19 nt, Artificial Sequence
  Description of Artificial Sequence: Synthetic oligonucleotide
caucggcaaauaaauucuu

SEQ ID NO: 2422150 - RNA, 19 nt, Artificial Sequence
  Description of Artificial Sequence: Synthetic oligonucleotide
cggguauguggugugagug

SEQ ID NO: 2422151 - RNA, 19 nt, Artificial Sequence
  Description of Artificial Sequence: Synthetic oligonucleotide
acguugcacucggacaauu

SEQ ID NO: 2422152 - RNA, 19 nt, Artificial Sequence
  Description of Artificial Sequence: Synthetic oligonucleotide
ggcguaguaguagaccacu

SEQ ID NO: 2422153 - RNA, 19 nt, Artificial Sequence
  Description of Artificial Sequence: Synthetic oligonucleotide
cuuucucguucaguucgaa

SEQ ID NO: 2422154 - RNA, 19 nt, Artificial Sequence
  Description of Artificial Sequence: Synthetic oligonucleotide
guguccuauuaguaacauu

SEQ ID NO: 2422155 - RNA, 19 nt, Artificial Sequence
  Description of Artificial Sequence: Synthetic oligonucleotide
gcaugaccugcuucacguc

SEQ ID NO: 2422156 - RNA, 19 nt, Artificial Sequence
  Description of Artificial Sequence: Synthetic oligonucleotide
gccuuuuguugcucaaagu

SEQ ID NO: 2422157 - RNA, 19 nt, Artificial Sequence
  Description of Artificial Sequence: Synthetic oligonucleotide
gcaguauggagcucucuuu

SEQ ID NO: 2422158 - RNA, 19 nt, Artificial Sequence
  Description of Artificial Sequence: Synthetic oligonucleotide
cuggauauucucgucucuu

SEQ ID NO: 2422159 - RNA, 19 nt, Artificial Sequence
  Description of Artificial Sequence: Synthetic oligonucleotide
gaccaucggcaaauaaauu

SEQ ID NO: 2422160 - RNA, 19 nt, Artificial Sequence
  Description of Artificial Sequence: Synthetic oligonucleotide
gcuucacgucaccauuaaa

SEQ ID NO: 2422161 - RNA, 19 nt, Artificial Sequence
  Description of Artificial Sequence: Synthetic oligonucleotide
caguacaacccggcaccca

SEQ ID NO: 2422162 - RNA, 19 nt, Artificial Sequence
  Description of Artificial Sequence: Synthetic oligonucleotide
cgaagaucuuuacaauucu

SEQ ID NO: 2422163 - RNA, 19 nt, Artificial Sequence
  Description of Artificial Sequence: Synthetic oligonucleotide
gcguaguaguagaccacuc

SEQ ID NO: 2422164 - RNA, 19 nt, Artificial Sequence
  Description of Artificial Sequence: Synthetic oligonucleotide
gcucucuuuggccauuauu

SEQ ID NO: 2422165 - RNA, 19 nt, Artificial Sequence
  Description of Artificial Sequence: Synthetic oligonucleotide
guggucugagcagcggcgu

SEQ ID NO: 2422166 - RNA, 19 nt, Artificial Sequence
  Description of Artificial Sequence: Synthetic oligonucleotide
gccuuccggguauguggug

SEQ ID NO: 2422167 - RNA, 19 nt, Artificial Sequence
  Description of Artificial Sequence: Synthetic oligonucleotide
ccaucaggaugacuguacu

SEQ ID NO: 2422168 - RNA, 19 nt, Artificial Sequence
  Description of Artificial Sequence: Synthetic oligonucleotide
cucguucaguucgaaguuu

SEQ ID NO: 2422169 - RNA, 19 nt, Artificial Sequence
  Description of Artificial Sequence: Synthetic oligonucleotide
ccacgaagaucuuuacaau

SEQ ID NO: 2422170 - RNA, 19 nt, Artificial Sequence
  Description of Artificial Sequence: Synthetic oligonucleotide
ggccuuccggguauguggu

SEQ ID NO: 2422171 - RNA, 19 nt, Artificial Sequence
  Description of Artificial Sequence: Synthetic oligonucleotide
ccuuccggguauguggugu

SEQ ID NO: 2422172 - RNA, 19 nt, Artificial Sequence
  Description of Artificial Sequence: Synthetic oligonucleotide
ggccauuauuaaacucuau

SEQ ID NO: 2422173 - RNA, 19 nt, Artificial Sequence
  Description of Artificial Sequence: Synthetic oligonucleotide
ccauuacguugcacucgga

SEQ ID NO: 2422174 - RNA, 19 nt, Artificial Sequence
  Description of Artificial Sequence: Synthetic oligonucleotide
guacaacccggcacccauu

SEQ ID NO: 2422175 - RNA, 19 nt, Artificial Sequence
  Description of Artificial Sequence: Synthetic oligonucleotide
cucggccagaugugacuuu

SEQ ID NO: 2422176 - RNA, 19 nt, Artificial Sequence
  Description of Artificial Sequence: Synthetic oligonucleotide
ccggguauguggugugagu

SEQ ID NO: 2422177 - RNA, 19 nt, Artificial Sequence
  Description of Artificial Sequence: Synthetic oligonucleotide
gggcaguauggagcucucu

SEQ ID NO: 2422178 - RNA, 19 nt, Artificial Sequence
  Description of Artificial Sequence: Synthetic oligonucleotide
cggccagaugugacuuugu

SEQ ID NO: 2422179 - RNA, 19 nt, Artificial Sequence
  Description of Artificial Sequence: Synthetic oligonucleotide
aaugacaucccacucagac

SEQ ID NO: 2422180 - RNA, 19 nt, Artificial Sequence
  Description of Artificial Sequence: Synthetic oligonucleotide
uuuauaguaaauuuggcug

SEQ ID NO: 2422181 - RNA, 19 nt, Artificial Sequence
  Description of Artificial Sequence: Synthetic oligonucleotide
cuugauugaauccugaucg

SEQ ID NO: 2422182 - RNA, 19 nt, Artificial Sequence
  Description of Artificial Sequence: Synthetic oligonucleotide
aacauuaucaucuucuugu

SEQ ID NO: 2422183 - RNA, 19 nt, Artificial Sequence
  Description of Artificial Sequence: Synthetic oligonucleotide
caauuuguuauacagagcc

SEQ ID NO: 2422184 - RNA, 19 nt, Artificial Sequence
  Description of Artificial Sequence: Synthetic oligonucleotide
uaagauguggaccugaaga

SEQ ID NO: 2422185 - RNA, 19 nt, Artificial Sequence
  Description of Artificial Sequence: Synthetic oligonucleotide
ugugcugacguccagagag

SEQ ID NO: 2422186 - RNA, 19 nt, Artificial Sequence
  Description of Artificial Sequence: Synthetic oligonucleotide
gacaaaacuugcuugaucc

SEQ ID NO: 2422187 - RNA, 19 nt, Artificial Sequence
  Description of Artificial Sequence: Synthetic oligonucleotide
uuauaguaaauuuggcugg

SEQ ID NO: 2422188 - RNA, 19 nt, Artificial Sequence
  Description of Artificial Sequence: Synthetic oligonucleotide
uuauaaaacucuaucugag

SEQ ID NO: 2422189 - RNA, 19 nt, Artificial Sequence
  Description of Artificial Sequence: Synthetic oligonucleotide
uuuauaaaacucuaucuga

SEQ ID NO: 2422190 - RNA, 19 nt, Artificial Sequence
  Description of Artificial Sequence: Synthetic oligonucleotide
ugaguuuauaguaaauuug

SEQ ID NO: 2422191 - RNA, 19 nt, Artificial Sequence
  Description of Artificial Sequence: Synthetic oligonucleotide
uguauuaagauguggaccu

SEQ ID NO: 2422192 - RNA, 19 nt, Artificial Sequence
  Description of Artificial Sequence: Synthetic oligonucleotide
ucuucauucuccaaauucc

SEQ ID NO: 2422193 - RNA, 19 nt, Artificial Sequence
  Description of Artificial Sequence: Synthetic oligonucleotide
ucaacaucagaucucuggg

SEQ ID NO: 2422194 - RNA, 19 nt, Artificial Sequence
  Description of Artificial Sequence: Synthetic oligonucleotide
ucuauuuccacuucaguga

SEQ ID NO: 2422195 - RNA, 19 nt, Artificial Sequence
  Description of Artificial Sequence: Synthetic oligonucleotide
aauuccuaguuucuauuuc

SEQ ID NO: 2422196 - RNA, 19 nt, Artificial Sequence
  Description of Artificial Sequence: Synthetic oligonucleotide
auugaauccugaucgcugc

SEQ ID NO: 2422197 - RNA, 19 nt, Artificial Sequence
  Description of Artificial Sequence: Synthetic oligonucleotide
auaaaacucuaucugagca

SEQ ID NO: 2422198 - RNA, 19 nt, Artificial Sequence
  Description of Artificial Sequence: Synthetic oligonucleotide
ucuucuuguacccagguuc

SEQ ID NO: 2422199 - RNA, 19 nt, Artificial Sequence
  Description of Artificial Sequence: Synthetic oligonucleotide
uaugcuaucauauguucug

SEQ ID NO: 2422200 - RNA, 19 nt, Artificial Sequence
  Description of Artificial Sequence: Synthetic oligonucleotide
uuaaguauguuguccaucu

SEQ ID NO: 2422201 - RNA, 19 nt, Artificial Sequence
  Description of Artificial Sequence: Synthetic oligonucleotide
uucuguauuaagaugugga

SEQ ID NO: 2422202 - RNA, 19 nt, Artificial Sequence
  Description of Artificial Sequence: Synthetic oligonucleotide
auuccauuuggcuauugcg

SEQ ID NO: 2422203 - RNA, 19 nt, Artificial Sequence
  Description of Artificial Sequence: Synthetic oligonucleotide
uguaaguuguccauccuug

SEQ ID NO: 2422204 - RNA, 19 nt, Artificial Sequence
  Description of Artificial Sequence: Synthetic oligonucleotide
aguaaauuuggcuggaaga

SEQ ID NO: 2422205 - RNA, 19 nt, Artificial Sequence
  Description of Artificial Sequence: Synthetic oligonucleotide
ucaaugacaucccacucag

SEQ ID NO: 2422206 - RNA, 19 nt, Artificial Sequence
  Description of Artificial Sequence: Synthetic oligonucleotide
aaaacucuaucugagcaag

SEQ ID NO: 2422207 - RNA, 19 nt, Artificial Sequence
  Description of Artificial Sequence: Synthetic oligonucleotide
uauuguaaguuguccaucc

SEQ ID NO: 2422208 - RNA, 19 nt, Artificial Sequence
  Description of Artificial Sequence: Synthetic oligonucleotide
uucgguaugaugcucaaaa

SEQ ID NO: 2422209 - RNA, 19 nt, Artificial Sequence
  Description of Artificial Sequence: Synthetic oligonucleotide
uggaagauugcucugucug

SEQ ID NO: 2422210 - RNA, 19 nt, Artificial Sequence
  Description of Artificial Sequence: Synthetic oligonucleotide
uuugauauccccuucggua

SEQ ID NO: 2422211 - RNA, 19 nt, Artificial Sequence
  Description of Artificial Sequence: Synthetic oligonucleotide
uaguaaauuuggcuggaag

SEQ ID NO: 2422212 - RNA, 19 nt, Artificial Sequence
  Description of Artificial Sequence: Synthetic oligonucleotide
ucuaagaacuuccuuugga

SEQ ID NO: 2422213 - RNA, 19 nt, Artificial Sequence
  Description of Artificial Sequence: Synthetic oligonucleotide
cuaagaacuuccuuuggag

SEQ ID NO: 2422214 - RNA, 19 nt, Artificial Sequence
  Description of Artificial Sequence: Synthetic oligonucleotide
auccccuucgguaugaugc

SEQ ID NO: 2422215 - RNA, 19 nt, Artificial Sequence
  Description of Artificial Sequence: Synthetic oligonucleotide
uuggcuauugcguugugug

SEQ ID NO: 2422216 - RNA, 19 nt, Artificial Sequence
  Description of Artificial Sequence: Synthetic oligonucleotide
uuaucaucuucuuguaccc

SEQ ID NO: 2422217 - RNA, 19 nt, Artificial Sequence
  Description of Artificial Sequence: Synthetic oligonucleotide
uuuauuguaaguuguccau

SEQ ID NO: 2422218 - RNA, 19 nt, Artificial Sequence
  Description of Artificial Sequence: Synthetic oligonucleotide
ucuguauuaagauguggac

SEQ ID NO: 2422219 - RNA, 19 nt, Artificial Sequence
  Description of Artificial Sequence: Synthetic oligonucleotide
caucuuucauuucagaguc

SEQ ID NO: 2422220 - RNA, 19 nt, Artificial Sequence
  Description of Artificial Sequence: Synthetic oligonucleotide
aguuuauaguaaauuuggc

SEQ ID NO: 2422221 - RNA, 19 nt, Artificial Sequence
  Description of Artificial Sequence: Synthetic oligonucleotide
uaacauuaucaucuucuug

SEQ ID NO: 2422222 - RNA, 19 nt, Artificial Sequence
  Description of Artificial Sequence: Synthetic oligonucleotide
uucagagucccauucuucc

SEQ ID NO: 2422223 - RNA, 19 nt, Artificial Sequence
  Description of Artificial Sequence: Synthetic oligonucleotide
uuccauuuggcuauugcgu

SEQ ID NO: 2422224 - RNA, 19 nt, Artificial Sequence
  Description of Artificial Sequence: Synthetic oligonucleotide
ucuuucauuucagaguccc

SEQ ID NO: 2422225 - RNA, 19 nt, Artificial Sequence
  Description of Artificial Sequence: Synthetic oligonucleotide
uaaguuguccauccuugag

SEQ ID NO: 2422226 - RNA, 19 nt, Artificial Sequence
  Description of Artificial Sequence: Synthetic oligonucleotide
augaguuuauaguaaauuu

SEQ ID NO: 2422227 - RNA, 19 nt, Artificial Sequence
  Description of Artificial Sequence: Synthetic oligonucleotide
ucuccaaauuccuaguuuc

SEQ ID NO: 2422228 - RNA, 19 nt, Artificial Sequence
  Description of Artificial Sequence: Synthetic oligonucleotide
aagauguggaccugaagaa

SEQ ID NO: 2422229 - RNA, 19 nt, Artificial Sequence
  Description of Artificial Sequence: Synthetic oligonucleotide
uuauacagagccuacuuuu

SEQ ID NO: 2422230 - RNA, 19 nt, Artificial Sequence
  Description of Artificial Sequence: Synthetic oligonucleotide
uucuaagaacuuccuuugg

SEQ ID NO: 2422231 - RNA, 19 nt, Artificial Sequence
  Description of Artificial Sequence: Synthetic oligonucleotide
cuucuaagaacuuccuuug

SEQ ID NO: 2422232 - RNA, 19 nt, Artificial Sequence
  Description of Artificial Sequence: Synthetic oligonucleotide
ugauccaguaauucuucag

SEQ ID NO: 2422233 - RNA, 19 nt, Artificial Sequence
  Description of Artificial Sequence: Synthetic oligonucleotide
cuguauuaagauguggacc

SEQ ID NO: 2422234 - RNA, 19 nt, Artificial Sequence
  Description of Artificial Sequence: Synthetic oligonucleotide
agacaaaacuugcuugauc

SEQ ID NO: 2422235 - RNA, 19 nt, Artificial Sequence
  Description of Artificial Sequence: Synthetic oligonucleotide
cucuaucugagcaaggguc

SEQ ID NO: 2422236 - RNA, 19 nt, Artificial Sequence
  Description of Artificial Sequence: Synthetic oligonucleotide
gaagauugcucugucuggg

SEQ ID NO: 2422237 - RNA, 19 nt, Artificial Sequence
  Description of Artificial Sequence: Synthetic oligonucleotide
uggaccugaagaaguauug

SEQ ID NO: 2422238 - RNA, 19 nt, Artificial Sequence
  Description of Artificial Sequence: Synthetic oligonucleotide
uguaugcuaucauauguuc

SEQ ID NO: 2422239 - RNA, 19 nt, Artificial Sequence
  Description of Artificial Sequence: Synthetic oligonucleotide
ugaugcucaaaacucuccu

SEQ ID NO: 2422240 - RNA, 19 nt, Artificial Sequence
  Description of Artificial Sequence: Synthetic oligonucleotide
cuuuauuguaaguugucca

SEQ ID NO: 2422241 - RNA, 19 nt, Artificial Sequence
  Description of Artificial Sequence: Synthetic oligonucleotide
aaacugcgauuccauuugg

SEQ ID NO: 2422242 - RNA, 19 nt, Artificial Sequence
  Description of Artificial Sequence: Synthetic oligonucleotide
guuuauaguaaauuuggcu

SEQ ID NO: 2422243 - RNA, 19 nt, Artificial Sequence
  Description of Artificial Sequence: Synthetic oligonucleotide
agugagacaauuacugauc

SEQ ID NO: 2422244 - RNA, 19 nt, Artificial Sequence
  Description of Artificial Sequence: Synthetic oligonucleotide
acaauuacugaucuucuua

SEQ ID NO: 2422245 - RNA, 19 nt, Artificial Sequence
  Description of Artificial Sequence: Synthetic oligonucleotide
agcugaaugcaccaauuug

SEQ ID NO: 2422246 - RNA, 19 nt, Artificial Sequence
  Description of Artificial Sequence: Synthetic oligonucleotide
ucauuucagagucccauuc

SEQ ID NO: 2422247 - RNA, 19 nt, Artificial Sequence
  Description of Artificial Sequence: Synthetic oligonucleotide
uguuauacagagccuacuu

SEQ ID NO: 2422248 - RNA, 19 nt, Artificial Sequence
  Description of Artificial Sequence: Synthetic oligonucleotide
agaacuccuuuauuguaag

SEQ ID NO: 2422249 - RNA, 19 nt, Artificial Sequence
  Description of Artificial Sequence: Synthetic oligonucleotide
cagagagauuccaucagcc

SEQ ID NO: 2422250 - RNA, 19 nt, Artificial Sequence
  Description of Artificial Sequence: Synthetic oligonucleotide
ugugugcugacguccagag

SEQ ID NO: 2422251 - RNA, 19 nt, Artificial Sequence
  Description of Artificial Sequence: Synthetic oligonucleotide
gaaugcaccaauuuguuau

SEQ ID NO: 2422252 - RNA, 19 nt, Artificial Sequence
  Description of Artificial Sequence: Synthetic oligonucleotide
uuuugauauccccuucggu

SEQ ID NO: 2422253 - RNA, 19 nt, Artificial Sequence
  Description of Artificial Sequence: Synthetic oligonucleotide
aacuccuuuauuguaaguu

SEQ ID NO: 2422254 - RNA, 19 nt, Artificial Sequence
  Description of Artificial Sequence: Synthetic oligonucleotide
cugacguccagagagauuc

SEQ ID NO: 2422255 - RNA, 19 nt, Artificial Sequence
  Description of Artificial Sequence: Synthetic oligonucleotide
aucuucuuaaguauguugu

SEQ ID NO: 2422256 - RNA, 19 nt, Artificial Sequence
  Description of Artificial Sequence: Synthetic oligonucleotide
agagccuacuuuuccuugg

SEQ ID NO: 2422257 - RNA, 19 nt, Artificial Sequence
  Description of Artificial Sequence: Synthetic oligonucleotide
aguauugaagaacuccuuu

SEQ ID NO: 2422258 - RNA, 19 nt, Artificial Sequence
  Description of Artificial Sequence: Synthetic oligonucleotide
gauugaauccugaucgcug

SEQ ID NO: 2422259 - RNA, 19 nt, Artificial Sequence
  Description of Artificial Sequence: Synthetic oligonucleotide
gaugcucaaaacucuccug

SEQ ID NO: 2422260 - RNA, 19 nt, Artificial Sequence
  Description of Artificial Sequence: Synthetic oligonucleotide
ugcgauuccauuuggcuau

SEQ ID NO: 2422261 - RNA, 19 nt, Artificial Sequence
  Description of Artificial Sequence: Synthetic oligonucleotide
aucccacucagacaaaacu

SEQ ID NO: 2422262 - RNA, 19 nt, Artificial Sequence
  Description of Artificial Sequence: Synthetic oligonucleotide
gaagaaguauugaagaacu

SEQ ID NO: 2422263 - RNA, 19 nt, Artificial Sequence
  Description of Artificial Sequence: Synthetic oligonucleotide
aacuagaugggguccugcu

SEQ ID NO: 2422264 - RNA, 19 nt, Artificial Sequence
  Description of Artificial Sequence: Synthetic oligonucleotide
uugauauccccuucgguau

SEQ ID NO: 2422265 - RNA, 19 nt, Artificial Sequence
  Description of Artificial Sequence: Synthetic oligonucleotide
ucuggguaggugaugaguu

SEQ ID NO: 2422266 - RNA, 19 nt, Artificial Sequence
  Description of Artificial Sequence: Synthetic oligonucleotide
gaugggguccugcucaggc

SEQ ID NO: 2422267 - RNA, 19 nt, Artificial Sequence
  Description of Artificial Sequence: Synthetic oligonucleotide
uuuggcuggaagauugcuc

SEQ ID NO: 2422268 - RNA, 19 nt, Artificial Sequence
  Description of Artificial Sequence: Synthetic oligonucleotide
caaaacuugcuugauccag

SEQ ID NO: 2422269 - RNA, 19 nt, Artificial Sequence
  Description of Artificial Sequence: Synthetic oligonucleotide
aagaaguauugaagaacuc

SEQ ID NO: 2422270 - RNA, 19 nt, Artificial Sequence
  Description of Artificial Sequence: Synthetic oligonucleotide
ugagucucaacaucagauc

SEQ ID NO: 2422271 - RNA, 19 nt, Artificial Sequence
  Description of Artificial Sequence: Synthetic oligonucleotide
ugagaaacugcgauuccau

SEQ ID NO: 2422272 - RNA, 19 nt, Artificial Sequence
  Description of Artificial Sequence: Synthetic oligonucleotide
aacugcgauuccauuuggc

SEQ ID NO: 2422273 - RNA, 19 nt, Artificial Sequence
  Description of Artificial Sequence: Synthetic oligonucleotide
acuagaugggguccugcuc

SEQ ID NO: 2422274 - RNA, 19 nt, Artificial Sequence
  Description of Artificial Sequence: Synthetic oligonucleotide
uugauugaauccugaucgc

SEQ ID NO: 2422275 - RNA, 19 nt, Artificial Sequence
  Description of Artificial Sequence: Synthetic oligonucleotide
uauuaagauguggaccuga

SEQ ID NO: 2422276 - RNA, 19 nt, Artificial Sequence
  Description of Artificial Sequence: Synthetic oligonucleotide
augaugcucaaaacucucc

SEQ ID NO: 2422277 - RNA, 19 nt, Artificial Sequence
  Description of Artificial Sequence: Synthetic oligonucleotide
aagggucuguguuuucugu

SEQ ID NO: 2422278 - RNA, 19 nt, Artificial Sequence
  Description of Artificial Sequence: Synthetic oligonucleotide
ucuucuuaaguauguuguc

SEQ ID NO: 2422279 - RNA, 19 nt, Artificial Sequence
  Description of Artificial Sequence: Synthetic oligonucleotide
uauaguaaauuuggcugga

SEQ ID NO: 2422280 - RNA, 19 nt, Artificial Sequence
  Description of Artificial Sequence: Synthetic oligonucleotide
ugaucuuguaugcuaucau

SEQ ID NO: 2422281 - RNA, 19 nt, Artificial Sequence
  Description of Artificial Sequence: Synthetic oligonucleotide
cacagauacugucacugag

SEQ ID NO: 2422282 - RNA, 19 nt, Artificial Sequence
  Description of Artificial Sequence: Synthetic oligonucleotide
ugaugaguuuauaguaaau

SEQ ID NO: 2422283 - RNA, 19 nt, Artificial Sequence
  Description of Artificial Sequence: Synthetic oligonucleotide
aauuuguuauacagagccu

SEQ ID NO: 2422284 - RNA, 19 nt, Artificial Sequence
  Description of Artificial Sequence: Synthetic oligonucleotide
aagaacuccuuuauuguaa

SEQ ID NO: 2422285 - RNA, 19 nt, Artificial Sequence
  Description of Artificial Sequence: Synthetic oligonucleotide
uuguccauccuugaguuuc

SEQ ID NO: 2422286 - RNA, 19 nt, Artificial Sequence
  Description of Artificial Sequence: Synthetic oligonucleotide
uuucagagucccauucuuc

SEQ ID NO: 2422287 - RNA, 19 nt, Artificial Sequence
  Description of Artificial Sequence: Synthetic oligonucleotide
gguaugaugcucaaaacuc

SEQ ID NO: 2422288 - RNA, 19 nt, Artificial Sequence
  Description of Artificial Sequence: Synthetic oligonucleotide
aguuguccauccuugaguu

SEQ ID NO: 2422289 - RNA, 19 nt, Artificial Sequence
  Description of Artificial Sequence: Synthetic oligonucleotide
agagagauuccaucagccu

SEQ ID NO: 2422290 - RNA, 19 nt, Artificial Sequence
  Description of Artificial Sequence: Synthetic oligonucleotide
uguuguccaucucauuuau

SEQ ID NO: 2422291 - RNA, 19 nt, Artificial Sequence
  Description of Artificial Sequence: Synthetic oligonucleotide
gaaguauugaagaacuccu

SEQ ID NO: 2422292 - RNA, 19 nt, Artificial Sequence
  Description of Artificial Sequence: Synthetic oligonucleotide
cucuccugaucuuguaugc

SEQ ID NO: 2422293 - RNA, 19 nt, Artificial Sequence
  Description of Artificial Sequence: Synthetic oligonucleotide
uucucauuuguaacauuau

SEQ ID NO: 2422294 - RNA, 19 nt, Artificial Sequence
  Description of Artificial Sequence: Synthetic oligonucleotide
guucuguauuaagaugugg

SEQ ID NO: 2422295 - RNA, 19 nt, Artificial Sequence
  Description of Artificial Sequence: Synthetic oligonucleotide
ugcugcaacuagauggggu

SEQ ID NO: 2422296 - RNA, 19 nt, Artificial Sequence
  Description of Artificial Sequence: Synthetic oligonucleotide
cauuaucaucuucuuguac

SEQ ID NO: 2422297 - RNA, 19 nt, Artificial Sequence
  Description of Artificial Sequence: Synthetic oligonucleotide
ggaagauugcucugucugg

SEQ ID NO: 2422298 - RNA, 19 nt, Artificial Sequence
  Description of Artificial Sequence: Synthetic oligonucleotide
uacuuuuccuuggugaguc

SEQ ID NO: 2422299 - RNA, 19 nt, Artificial Sequence
  Description of Artificial Sequence: Synthetic oligonucleotide
uugcguugugugcugacgu

SEQ ID NO: 2422300 - RNA, 19 nt, Artificial Sequence
  Description of Artificial Sequence: Synthetic oligonucleotide
aaacuugcuugauccagua

SEQ ID NO: 2422301 - RNA, 19 nt, Artificial Sequence
  Description of Artificial Sequence: Synthetic oligonucleotide
ugauugaauccugaucgcu

SEQ ID NO: 2422302 - RNA, 19 nt, Artificial Sequence
  Description of Artificial Sequence: Synthetic oligonucleotide
gauugcucugucuggguuc

SEQ ID NO: 2422303 - RNA, 19 nt, Artificial Sequence
  Description of Artificial Sequence: Synthetic oligonucleotide
ugaucgcugcugcaacuag

SEQ ID NO: 2422304 - RNA, 19 nt, Artificial Sequence
  Description of Artificial Sequence: Synthetic oligonucleotide
gauuccaucagccuugauu

SEQ ID NO: 2422305 - RNA, 19 nt, Artificial Sequence
  Description of Artificial Sequence: Synthetic oligonucleotide
uuauuguaaguuguccauc

SEQ ID NO: 2422306 - RNA, 19 nt, Artificial Sequence
  Description of Artificial Sequence: Synthetic oligonucleotide
agagauuccaucagccuug

SEQ ID NO: 2422307 - RNA, 19 nt, Artificial Sequence
  Description of Artificial Sequence: Synthetic oligonucleotide
aagauugcucugucugggu

SEQ ID NO: 2422308 - RNA, 19 nt, Artificial Sequence
  Description of Artificial Sequence: Synthetic oligonucleotide
caauuacugaucuucuuaa

SEQ ID NO: 2422309 - RNA, 19 nt, Artificial Sequence
  Description of Artificial Sequence: Synthetic oligonucleotide
ucccauucuuccauagggu

SEQ ID NO: 2422310 - RNA, 19 nt, Artificial Sequence
  Description of Artificial Sequence: Synthetic oligonucleotide
uuguaacauuaucaucuuc

SEQ ID NO: 2422311 - RNA, 19 nt, Artificial Sequence
  Description of Artificial Sequence: Synthetic oligonucleotide
gagucucaacaucagaucu

SEQ ID NO: 2422312 - RNA, 19 nt, Artificial Sequence
  Description of Artificial Sequence: Synthetic oligonucleotide
gaagaacuccuuuauugua

SEQ ID NO: 2422313 - RNA, 19 nt, Artificial Sequence
  Description of Artificial Sequence: Synthetic oligonucleotide
aaacucuaucugagcaagg

SEQ ID NO: 2422314 - RNA, 19 nt, Artificial Sequence
  Description of Artificial Sequence: Synthetic oligonucleotide
gaccugaagaaguauugaa

SEQ ID NO: 2422315 - RNA, 19 nt, Artificial Sequence
  Description of Artificial Sequence: Synthetic oligonucleotide
cauagggucaucuuucucu

SEQ ID NO: 2422316 - RNA, 19 nt, Artificial Sequence
  Description of Artificial Sequence: Synthetic oligonucleotide
uggugagucucaacaucag

SEQ ID NO: 2422317 - RNA, 19 nt, Artificial Sequence
  Description of Artificial Sequence: Synthetic oligonucleotide
auugaagaacuccuuuauu

SEQ ID NO: 2422318 - RNA, 19 nt, Artificial Sequence
  Description of Artificial Sequence: Synthetic oligonucleotide
ugauauccccuucgguaug

SEQ ID NO: 2422319 - RNA, 19 nt, Artificial Sequence
  Description of Artificial Sequence: Synthetic oligonucleotide
agauguggaccugaagaag

SEQ ID NO: 2422320 - RNA, 19 nt, Artificial Sequence
  Description of Artificial Sequence: Synthetic oligonucleotide
auugcguugugugcugacg

SEQ ID NO: 2422321 - RNA, 19 nt, Artificial Sequence
  Description of Artificial Sequence: Synthetic oligonucleotide
augacaucccacucagaca

SEQ ID NO: 2422322 - RNA, 19 nt, Artificial Sequence
  Description of Artificial Sequence: Synthetic oligonucleotide
ugucacugagaaacugcga

SEQ ID NO: 2422323 - RNA, 19 nt, Artificial Sequence
  Description of Artificial Sequence: Synthetic oligonucleotide
uccugaucuuguaugcuau

SEQ ID NO: 2422324 - RNA, 19 nt, Artificial Sequence
  Description of Artificial Sequence: Synthetic oligonucleotide
auuguaaguuguccauccu

SEQ ID NO: 2422325 - RNA, 19 nt, Artificial Sequence
  Description of Artificial Sequence: Synthetic oligonucleotide
cuuaaguauguuguccauc

SEQ ID NO: 2422326 - RNA, 19 nt, Artificial Sequence
  Description of Artificial Sequence: Synthetic oligonucleotide
ucacagauacugucacuga

SEQ ID NO: 2422327 - RNA, 19 nt, Artificial Sequence
  Description of Artificial Sequence: Synthetic oligonucleotide
uuccuuuggaguuccuccu

SEQ ID NO: 2422328 - RNA, 19 nt, Artificial Sequence
  Description of Artificial Sequence: Synthetic oligonucleotide
ucgguaugaugcucaaaac

SEQ ID NO: 2422329 - RNA, 19 nt, Artificial Sequence
  Description of Artificial Sequence: Synthetic oligonucleotide
agucucaacaucagaucuc

SEQ ID NO: 2422330 - RNA, 19 nt, Artificial Sequence
  Description of Artificial Sequence: Synthetic oligonucleotide
aucuuguaugcuaucauau

SEQ ID NO: 2422331 - RNA, 19 nt, Artificial Sequence
  Description of Artificial Sequence: Synthetic oligonucleotide
ugagcaagggucuguguuu

SEQ ID NO: 2422332 - RNA, 19 nt, Artificial Sequence
  Description of Artificial Sequence: Synthetic oligonucleotide
uuuugggcacugcaaguuu

SEQ ID NO: 2422333 - RNA, 19 nt, Artificial Sequence
  Description of Artificial Sequence: Synthetic oligonucleotide
uuguuauacagagccuacu

SEQ ID NO: 2422334 - RNA, 19 nt, Artificial Sequence
  Description of Artificial Sequence: Synthetic oligonucleotide
uccauagggucaucuuucu

SEQ ID NO: 2422335 - RNA, 19 nt, Artificial Sequence
  Description of Artificial Sequence: Synthetic oligonucleotide
cagaucucuggguagguga

SEQ ID NO: 2422336 - RNA, 19 nt, Artificial Sequence
  Description of Artificial Sequence: Synthetic oligonucleotide
uuuggcuauugcguugugu

SEQ ID NO: 2422337 - RNA, 19 nt, Artificial Sequence
  Description of Artificial Sequence: Synthetic oligonucleotide
cagcuuuuagcuguuccag

SEQ ID NO: 2422338 - RNA, 19 nt, Artificial Sequence
  Description of Artificial Sequence: Synthetic oligonucleotide
ggcacugcaaguuucuauc

SEQ ID NO: 2422339 - RNA, 19 nt, Artificial Sequence
  Description of Artificial Sequence: Synthetic oligonucleotide
acagauacugucacugaga

SEQ ID NO: 2422340 - RNA, 19 nt, Artificial Sequence
  Description of Artificial Sequence: Synthetic oligonucleotide
acauuaucaucuucuugua

SEQ ID NO: 2422341 - RNA, 19 nt, Artificial Sequence
  Description of Artificial Sequence: Synthetic oligonucleotide
auagggucaucuuucucuu

SEQ ID NO: 2422342 - RNA, 19 nt, Artificial Sequence
  Description of Artificial Sequence: Synthetic oligonucleotide
uucauuucagagucccauu

SEQ ID NO: 2422343 - RNA, 19 nt, Artificial Sequence
  Description of Artificial Sequence: Synthetic oligonucleotide
uaaguauguuguccaucuc

SEQ ID NO: 2422344 - RNA, 19 nt, Artificial Sequence
  Description of Artificial Sequence: Synthetic oligonucleotide
ugcuaucauauguucugau

SEQ ID NO: 2422345 - RNA, 19 nt, Artificial Sequence
  Description of Artificial Sequence: Synthetic oligonucleotide
uccugaucgcugcugcaac

SEQ ID NO: 2422346 - RNA, 19 nt, Artificial Sequence
  Description of Artificial Sequence: Synthetic oligonucleotide
gauguggaccugaagaagu

SEQ ID NO: 2422347 - RNA, 19 nt, Artificial Sequence
  Description of Artificial Sequence: Synthetic oligonucleotide
uccaaauuccuaguuucua

SEQ ID NO: 2422348 - RNA, 19 nt, Artificial Sequence
  Description of Artificial Sequence: Synthetic oligonucleotide
agacaauuacugaucuucu

SEQ ID NO: 2422349 - RNA, 19 nt, Artificial Sequence
  Description of Artificial Sequence: Synthetic oligonucleotide
guaaguuguccauccuuga

SEQ ID NO: 2422350 - RNA, 19 nt, Artificial Sequence
  Description of Artificial Sequence: Synthetic oligonucleotide
gucuggguucuguauuaag

SEQ ID NO: 2422351 - RNA, 19 nt, Artificial Sequence
  Description of Artificial Sequence: Synthetic oligonucleotide
ucacugagaaacugcgauu

SEQ ID NO: 2422352 - RNA, 19 nt, Artificial Sequence
  Description of Artificial Sequence: Synthetic oligonucleotide
uugcuugauccaguaauuc

SEQ ID NO: 2422353 - RNA, 19 nt, Artificial Sequence
  Description of Artificial Sequence: Synthetic oligonucleotide
cagauacugucacugagaa

SEQ ID NO: 2422354 - RNA, 19 nt, Artificial Sequence
  Description of Artificial Sequence: Synthetic oligonucleotide
aaguauugaagaacuccuu

SEQ ID NO: 2422355 - RNA, 19 nt, Artificial Sequence
  Description of Artificial Sequence: Synthetic oligonucleotide
uucuuccauagggucaucu

SEQ ID NO: 2422356 - RNA, 19 nt, Artificial Sequence
  Description of Artificial Sequence: Synthetic oligonucleotide
gucacugagaaacugcgau

SEQ ID NO: 2422357 - RNA, 19 nt, Artificial Sequence
  Description of Artificial Sequence: Synthetic oligonucleotide
uauccccuucgguaugaug

SEQ ID NO: 2422358 - RNA, 19 nt, Artificial Sequence
  Description of Artificial Sequence: Synthetic oligonucleotide
aaacucuccugaucuugua

SEQ ID NO: 2422359 - RNA, 19 nt, Artificial Sequence
  Description of Artificial Sequence: Synthetic oligonucleotide
uauugcguugugugcugac

SEQ ID NO: 2422360 - RNA, 19 nt, Artificial Sequence
  Description of Artificial Sequence: Synthetic oligonucleotide
uccaucagccuugauugaa

SEQ ID NO: 2422361 - RNA, 19 nt, Artificial Sequence
  Description of Artificial Sequence: Synthetic oligonucleotide
ucagaucucuggguaggug

SEQ ID NO: 2422362 - RNA, 19 nt, Artificial Sequence
  Description of Artificial Sequence: Synthetic oligonucleotide
caucccacucagacaaaac

SEQ ID NO: 2422363 - RNA, 19 nt, Artificial Sequence
  Description of Artificial Sequence: Synthetic oligonucleotide
uagaugggguccugcucag

SEQ ID NO: 2422364 - RNA, 19 nt, Artificial Sequence
  Description of Artificial Sequence: Synthetic oligonucleotide
agauugcucugucuggguu

SEQ ID NO: 2422365 - RNA, 19 nt, Artificial Sequence
  Description of Artificial Sequence: Synthetic oligonucleotide
cagagccuacuuuuccuug

SEQ ID NO: 2422366 - RNA, 19 nt, Artificial Sequence
  Description of Artificial Sequence: Synthetic oligonucleotide
uccacuucagugagacaau

SEQ ID NO: 2422367 - RNA, 19 nt, Artificial Sequence
  Description of Artificial Sequence: Synthetic oligonucleotide
ugcaacuagaugggguccu

SEQ ID NO: 2422368 - RNA, 19 nt, Artificial Sequence
  Description of Artificial Sequence: Synthetic oligonucleotide
cugaucuuguaugcuauca

SEQ ID NO: 2422369 - RNA, 19 nt, Artificial Sequence
  Description of Artificial Sequence: Synthetic oligonucleotide
gcugcaacuagaugggguc

SEQ ID NO: 2422370 - RNA, 19 nt, Artificial Sequence
  Description of Artificial Sequence: Synthetic oligonucleotide
uccuuuggaguuccuccuc

SEQ ID NO: 2422371 - RNA, 19 nt, Artificial Sequence
  Description of Artificial Sequence: Synthetic oligonucleotide
ucugagcaagggucugugu

SEQ ID NO: 2422372 - RNA, 19 nt, Artificial Sequence
  Description of Artificial Sequence: Synthetic oligonucleotide
ucuuguacccagguucuuu

SEQ ID NO: 2422373 - RNA, 19 nt, Artificial Sequence
  Description of Artificial Sequence: Synthetic oligonucleotide
ugacguccagagagauucc

SEQ ID NO: 2422374 - RNA, 19 nt, Artificial Sequence
  Description of Artificial Sequence: Synthetic oligonucleotide
auugcucugucuggguucu

SEQ ID NO: 2422375 - RNA, 19 nt, Artificial Sequence
  Description of Artificial Sequence: Synthetic oligonucleotide
auuaagauguggaccugaa

SEQ ID NO: 2422376 - RNA, 19 nt, Artificial Sequence
  Description of Artificial Sequence: Synthetic oligonucleotide
gccuacuuuuccuugguga

SEQ ID NO: 2422377 - RNA, 19 nt, Artificial Sequence
  Description of Artificial Sequence: Synthetic oligonucleotide
uuuagcuguuccaguucuu

SEQ ID NO: 2422378 - RNA, 19 nt, Artificial Sequence
  Description of Artificial Sequence: Synthetic oligonucleotide
uccccuucgguaugaugcu

SEQ ID NO: 2422379 - RNA, 19 nt, Artificial Sequence
  Description of Artificial Sequence: Synthetic oligonucleotide
uguggaccugaagaaguau

SEQ ID NO: 2422380 - RNA, 19 nt, Artificial Sequence
  Description of Artificial Sequence: Synthetic oligonucleotide
ugccuccacuucuaagaac

SEQ ID NO: 2422381 - RNA, 19 nt, Artificial Sequence
  Description of Artificial Sequence: Synthetic oligonucleotide
agccuacuuuuccuuggug

SEQ ID NO: 2422382 - RNA, 19 nt, Artificial Sequence
  Description of Artificial Sequence: Synthetic oligonucleotide
cuccuuuauuguaaguugu

SEQ ID NO: 2422383 - RNA, 19 nt, Artificial Sequence
  Description of Artificial Sequence: Synthetic oligonucleotide
uucugugccuccacuucua

SEQ ID NO: 2422384 - RNA, 19 nt, Artificial Sequence
  Description of Artificial Sequence: Synthetic oligonucleotide
augcuaucauauguucuga

SEQ ID NO: 2422385 - RNA, 19 nt, Artificial Sequence
  Description of Artificial Sequence: Synthetic oligonucleotide
ugcguugugugcugacguc

SEQ ID NO: 2422386 - RNA, 19 nt, Artificial Sequence
  Description of Artificial Sequence: Synthetic oligonucleotide
gauauccccuucgguauga

SEQ ID NO: 2422387 - RNA, 19 nt, Artificial Sequence
  Description of Artificial Sequence: Synthetic oligonucleotide
guuauacagagccuacuuu

SEQ ID NO: 2422388 - RNA, 19 nt, Artificial Sequence
  Description of Artificial Sequence: Synthetic oligonucleotide
agauacugucacugagaaa

SEQ ID NO: 2422389 - RNA, 19 nt, Artificial Sequence
  Description of Artificial Sequence: Synthetic oligonucleotide
cugcaacuagauggggucc

SEQ ID NO: 2422390 - RNA, 19 nt, Artificial Sequence
  Description of Artificial Sequence: Synthetic oligonucleotide
gugagucucaacaucagau

SEQ ID NO: 2422391 - RNA, 19 nt, Artificial Sequence
  Description of Artificial Sequence: Synthetic oligonucleotide
guugugugcugacguccag

SEQ ID NO: 2422392 - RNA, 19 nt, Artificial Sequence
  Description of Artificial Sequence: Synthetic oligonucleotide
ggguucuguauuaagaugu

SEQ ID NO: 2422393 - RNA, 19 nt, Artificial Sequence
  Description of Artificial Sequence: Synthetic oligonucleotide
ugcucugucuggguucugu

SEQ ID NO: 2422394 - RNA, 19 nt, Artificial Sequence
  Description of Artificial Sequence: Synthetic oligonucleotide
guaugaugcucaaaacucu

SEQ ID NO: 2422395 - RNA, 19 nt, Artificial Sequence
  Description of Artificial Sequence: Synthetic oligonucleotide
caacuagaugggguccugc

SEQ ID NO: 2422396 - RNA, 19 nt, Artificial Sequence
  Description of Artificial Sequence: Synthetic oligonucleotide
cuucuuguacccagguucu

SEQ ID NO: 2422397 - RNA, 19 nt, Artificial Sequence
  Description of Artificial Sequence: Synthetic oligonucleotide
gcugaaugcaccaauuugu

SEQ ID NO: 2422398 - RNA, 19 nt, Artificial Sequence
  Description of Artificial Sequence: Synthetic oligonucleotide
guaugcuaucauauguucu

SEQ ID NO: 2422399 - RNA, 19 nt, Artificial Sequence
  Description of Artificial Sequence: Synthetic oligonucleotide
auaguaaauuuggcuggaa

SEQ ID NO: 2422400 - RNA, 19 nt, Artificial Sequence
  Description of Artificial Sequence: Synthetic oligonucleotide
cccauucuuccauaggguc

SEQ ID NO: 2422401 - RNA, 19 nt, Artificial Sequence
  Description of Artificial Sequence: Synthetic oligonucleotide
gaucgcugcugcaacuaga

SEQ ID NO: 2422402 - RNA, 19 nt, Artificial Sequence
  Description of Artificial Sequence: Synthetic oligonucleotide
gguucuguauuaagaugug

SEQ ID NO: 2422403 - RNA, 19 nt, Artificial Sequence
  Description of Artificial Sequence: Synthetic oligonucleotide
ggugagucucaacaucaga

SEQ ID NO: 2422404 - RNA, 19 nt, Artificial Sequence
  Description of Artificial Sequence: Synthetic oligonucleotide
gacaauuacugaucuucuu

SEQ ID NO: 2422405 - RNA, 19 nt, Artificial Sequence
  Description of Artificial Sequence: Synthetic oligonucleotide
ucaauacauuguugacauu

SEQ ID NO: 2422406 - RNA, 19 nt, Artificial Sequence
  Description of Artificial Sequence: Synthetic oligonucleotide
auuuggcuauugcguugug

SEQ ID NO: 2422407 - RNA, 19 nt, Artificial Sequence
  Description of Artificial Sequence: Synthetic oligonucleotide
aucgcugcugcaacuagau

SEQ ID NO: 2422408 - RNA, 19 nt, Artificial Sequence
  Description of Artificial Sequence: Synthetic oligonucleotide
caaacucucuucacagaua

SEQ ID NO: 2422409 - RNA, 19 nt, Artificial Sequence
  Description of Artificial Sequence: Synthetic oligonucleotide
gacguccagagagauucca

SEQ ID NO: 2422410 - RNA, 19 nt, Artificial Sequence
  Description of Artificial Sequence: Synthetic oligonucleotide
gcucaaaacucuccugauc

SEQ ID NO: 2422411 - RNA, 19 nt, Artificial Sequence
  Description of Artificial Sequence: Synthetic oligonucleotide
gucucaacaucagaucucu

SEQ ID NO: 2422412 - RNA, 19 nt, Artificial Sequence
  Description of Artificial Sequence: Synthetic oligonucleotide
gcuauugcguugugugcug

SEQ ID NO: 2422413 - RNA, 19 nt, Artificial Sequence
  Description of Artificial Sequence: Synthetic oligonucleotide
ugcugacguccagagagau

SEQ ID NO: 2422414 - RNA, 19 nt, Artificial Sequence
  Description of Artificial Sequence: Synthetic oligonucleotide
ugucuggguucuguauuaa

SEQ ID NO: 2422415 - RNA, 19 nt, Artificial Sequence
  Description of Artificial Sequence: Synthetic oligonucleotide
cauuucagagucccauucu

SEQ ID NO: 2422416 - RNA, 19 nt, Artificial Sequence
  Description of Artificial Sequence: Synthetic oligonucleotide
agaucucuggguaggugau

SEQ ID NO: 2422417 - RNA, 19 nt, Artificial Sequence
  Description of Artificial Sequence: Synthetic oligonucleotide
auccugaucgcugcugcaa

SEQ ID NO: 2422418 - RNA, 19 nt, Artificial Sequence
  Description of Artificial Sequence: Synthetic oligonucleotide
ccauucuuccauaggguca

SEQ ID NO: 2422419 - RNA, 19 nt, Artificial Sequence
  Description of Artificial Sequence: Synthetic oligonucleotide
cugucuggguucuguauua

SEQ ID NO: 2422420 - RNA, 19 nt, Artificial Sequence
  Description of Artificial Sequence: Synthetic oligonucleotide
cugcugcaacuagaugggg

SEQ ID NO: 2422421 - RNA, 19 nt, Artificial Sequence
  Description of Artificial Sequence: Synthetic oligonucleotide
gugccuccacuucuaagaa

SEQ ID NO: 2422422 - RNA, 19 nt, Artificial Sequence
  Description of Artificial Sequence: Synthetic oligonucleotide
cugaaugcaccaauuuguu

SEQ ID NO: 2422423 - RNA, 19 nt, Artificial Sequence
  Description of Artificial Sequence: Synthetic oligonucleotide
ggaccugaagaaguauuga

SEQ ID NO: 2422424 - RNA, 19 nt, Artificial Sequence
  Description of Artificial Sequence: Synthetic oligonucleotide
gagauuccaucagccuuga

SEQ ID NO: 2422425 - RNA, 19 nt, Artificial Sequence
  Description of Artificial Sequence: Synthetic oligonucleotide
gcguugugugcugacgucc

SEQ ID NO: 2422426 - RNA, 19 nt, Artificial Sequence
  Description of Artificial Sequence: Synthetic oligonucleotide
auucuuccauagggucauc

SEQ ID NO: 2422427 - RNA, 19 nt, Artificial Sequence
  Description of Artificial Sequence: Synthetic oligonucleotide
gagccuacuuuuccuuggu

SEQ ID NO: 2422428 - RNA, 19 nt, Artificial Sequence
  Description of Artificial Sequence: Synthetic oligonucleotide
cuuguacccagguucuuuu

SEQ ID NO: 2422429 - RNA, 19 nt, Artificial Sequence
  Description of Artificial Sequence: Synthetic oligonucleotide
cauuuggcuauugcguugu

SEQ ID NO: 2422430 - RNA, 19 nt, Artificial Sequence
  Description of Artificial Sequence: Synthetic oligonucleotide
cguccagagagauuccauc

SEQ ID NO: 2422431 - RNA, 19 nt, Artificial Sequence
  Description of Artificial Sequence: Synthetic oligonucleotide
cauucuuccauagggucau

SEQ ID NO: 2422432 - RNA, 19 nt, Artificial Sequence
  Description of Artificial Sequence: Synthetic oligonucleotide
gcuaucauauguucugauu

SEQ ID NO: 2422433 - RNA, 19 nt, Artificial Sequence
  Description of Artificial Sequence: Synthetic oligonucleotide
auguggaccugaagaagua

SEQ ID NO: 2422434 - RNA, 19 nt, Artificial Sequence
  Description of Artificial Sequence: Synthetic oligonucleotide
caaugacaucccacucaga

SEQ ID NO: 2422435 - RNA, 19 nt, Artificial Sequence
  Description of Artificial Sequence: Synthetic oligonucleotide
ccugaucuuguaugcuauc

SEQ ID NO: 2422436 - RNA, 19 nt, Artificial Sequence
  Description of Artificial Sequence: Synthetic oligonucleotide
ggcuauugcguugugugcu

SEQ ID NO: 2422437 - RNA, 19 nt, Artificial Sequence
  Description of Artificial Sequence: Synthetic oligonucleotide
ccaguaauucuucaguuuu

SEQ ID NO: 2422438 - RNA, 19 nt, Artificial Sequence
  Description of Artificial Sequence: Synthetic oligonucleotide
cuauugcguugugugcuga

SEQ ID NO: 2422439 - RNA, 19 nt, Artificial Sequence
  Description of Artificial Sequence: Synthetic oligonucleotide
gugugcugacguccagaga

SEQ ID NO: 2422440 - RNA, 19 nt, Artificial Sequence
  Description of Artificial Sequence: Synthetic oligonucleotide
uucuuguacccagguucuu

SEQ ID NO: 2422441 - RNA, 19 nt, Artificial Sequence
  Description of Artificial Sequence: Synthetic oligonucleotide
ugggcacugcaaguuucua

SEQ ID NO: 2422442 - RNA, 19 nt, Artificial Sequence
  Description of Artificial Sequence: Synthetic oligonucleotide
aacuuccuuuggaguuccu

SEQ ID NO: 2422443 - RNA, 19 nt, Artificial Sequence
  Description of Artificial Sequence: Synthetic oligonucleotide
cccuucgguaugaugcuca

SEQ ID NO: 2422444 - RNA, 19 nt, Artificial Sequence
  Description of Artificial Sequence: Synthetic oligonucleotide
cugaucgcugcugcaacua

SEQ ID NO: 2422445 - RNA, 19 nt, Artificial Sequence
  Description of Artificial Sequence: Synthetic oligonucleotide
ccauagggucaucuuucuc

SEQ ID NO: 2422446 - RNA, 19 nt, Artificial Sequence
  Description of Artificial Sequence: Synthetic oligonucleotide
gugcugacguccagagaga

SEQ ID NO: 2422447 - RNA, 19 nt, Artificial Sequence
  Description of Artificial Sequence: Synthetic oligonucleotide
cgguaugaugcucaaaacu

SEQ ID NO: 2422448 - RNA, 19 nt, Artificial Sequence
  Description of Artificial Sequence: Synthetic oligonucleotide
gcaacuagaugggguccug

SEQ ID NO: 2422449 - RNA, 19 nt, Artificial Sequence
  Description of Artificial Sequence: Synthetic oligonucleotide
auauccccuucgguaugau

SEQ ID NO: 2422450 - RNA, 19 nt, Artificial Sequence
  Description of Artificial Sequence: Synthetic oligonucleotide
gcacugcaaguuucuaucu

SEQ ID NO: 2422451 - RNA, 19 nt, Artificial Sequence
  Description of Artificial Sequence: Synthetic oligonucleotide
cagcugaaugcaccaauuu

SEQ ID NO: 2422452 - RNA, 19 nt, Artificial Sequence
  Description of Artificial Sequence: Synthetic oligonucleotide
cuucgguaugaugcucaaa

SEQ ID NO: 2422453 - RNA, 19 nt, Artificial Sequence
  Description of Artificial Sequence: Synthetic oligonucleotide
gacaucccacucagacaaa

SEQ ID NO: 2422454 - RNA, 19 nt, Artificial Sequence
  Description of Artificial Sequence: Synthetic oligonucleotide
gcaagggucuguguuuucu

SEQ ID NO: 2422455 - RNA, 19 nt, Artificial Sequence
  Description of Artificial Sequence: Synthetic oligonucleotide
cagacaaaacuugcuugau

SEQ ID NO: 2422456 - RNA, 19 nt, Artificial Sequence
  Description of Artificial Sequence: Synthetic oligonucleotide
gggcacugcaaguuucuau

SEQ ID NO: 2422457 - RNA, 19 nt, Artificial Sequence
  Description of Artificial Sequence: Synthetic oligonucleotide
cuggguaggugaugaguuu

SEQ ID NO: 2422458 - RNA, 19 nt, Artificial Sequence
  Description of Artificial Sequence: Synthetic oligonucleotide
ggcuggaagauugcucugu

SEQ ID NO: 2422459 - RNA, 19 nt, Artificial Sequence
  Description of Artificial Sequence: Synthetic oligonucleotide
gccuugauugaauccugau

SEQ ID NO: 2422460 - RNA, 19 nt, Artificial Sequence
  Description of Artificial Sequence: Synthetic oligonucleotide
cguugugugcugacgucca

SEQ ID NO: 2422461 - RNA, 19 nt, Artificial Sequence
  Description of Artificial Sequence: Synthetic oligonucleotide
ccuucgguaugaugcucaa

SEQ ID NO: 2422462 - RNA, 19 nt, Artificial Sequence
  Description of Artificial Sequence: Synthetic oligonucleotide
ccugaucgcugcugcaacu

SEQ ID NO: 2422463 - RNA, 19 nt, Artificial Sequence
  Description of Artificial Sequence: Synthetic oligonucleotide
gcugacguccagagagauu

SEQ ID NO: 2422464 - RNA, 19 nt, Artificial Sequence
  Description of Artificial Sequence: Synthetic oligonucleotide
gcgauuccauuuggcuauu

SEQ ID NO: 2422465 - RNA, 19 nt, Artificial Sequence
  Description of Artificial Sequence: Synthetic oligonucleotide
ucaacuucaauguagaggg

SEQ ID NO: 2422466 - RNA, 19 nt, Artificial Sequence
  Description of Artificial Sequence: Synthetic oligonucleotide
uugucugagacccagaucc

SEQ ID NO: 2422467 - RNA, 19 nt, Artificial Sequence
  Description of Artificial Sequence: Synthetic oligonucleotide
aauuaacugagcaaauucc

SEQ ID NO: 2422468 - RNA, 19 nt, Artificial Sequence
  Description of Artificial Sequence: Synthetic oligonucleotide
auuguauuagucuucagag

SEQ ID NO: 2422469 - RNA, 19 nt, Artificial Sequence
  Description of Artificial Sequence: Synthetic oligonucleotide
uguacauguaguuuugggg

SEQ ID NO: 2422470 - RNA, 19 nt, Artificial Sequence
  Description of Artificial Sequence: Synthetic oligonucleotide
uguauuagucuucagaguc

SEQ ID NO: 2422471 - RNA, 19 nt, Artificial Sequence
  Description of Artificial Sequence: Synthetic oligonucleotide
gauccauauaccgugagcg

SEQ ID NO: 2422472 - RNA, 19 nt, Artificial Sequence
  Description of Artificial Sequence: Synthetic oligonucleotide
aauguagaggggcuccacc

SEQ ID NO: 2422473 - RNA, 19 nt, Artificial Sequence
  Description of Artificial Sequence: Synthetic oligonucleotide
ugaucaaaauccuuuccgg

SEQ ID NO: 2422474 - RNA, 19 nt, Artificial Sequence
  Description of Artificial Sequence: Synthetic oligonucleotide
aacugaauuucacuuccac

SEQ ID NO: 2422475 - RNA, 19 nt, Artificial Sequence
  Description of Artificial Sequence: Synthetic oligonucleotide
uaauuaacugagcaaauuc

SEQ ID NO: 2422476 - RNA, 19 nt, Artificial Sequence
  Description of Artificial Sequence: Synthetic oligonucleotide
uccacuaccaacaagguuu

SEQ ID NO: 2422477 - RNA, 19 nt, Artificial Sequence
  Description of Artificial Sequence: Synthetic oligonucleotide
ugguuaauaagcucgaagu

SEQ ID NO: 2422478 - RNA, 19 nt, Artificial Sequence
  Description of Artificial Sequence: Synthetic oligonucleotide
uagugaauggcuuuguuca

SEQ ID NO: 2422479 - RNA, 19 nt, Artificial Sequence
  Description of Artificial Sequence: Synthetic oligonucleotide
cacgucaugguuaauaagc

SEQ ID NO: 2422480 - RNA, 19 nt, Artificial Sequence
  Description of Artificial Sequence: Synthetic oligonucleotide
aagcucgaaguucucaugg

SEQ ID NO: 2422481 - RNA, 19 nt, Artificial Sequence
  Description of Artificial Sequence: Synthetic oligonucleotide
agucccaacauauucaaug

SEQ ID NO: 2422482 - RNA, 19 nt, Artificial Sequence
  Description of Artificial Sequence: Synthetic oligonucleotide
uaacugagcaaauuccagg

SEQ ID NO: 2422483 - RNA, 19 nt, Artificial Sequence
  Description of Artificial Sequence: Synthetic oligonucleotide
acuuccacuaccaacaagg

SEQ ID NO: 2422484 - RNA, 19 nt, Artificial Sequence
  Description of Artificial Sequence: Synthetic oligonucleotide
gucaugguuaauaagcucg

SEQ ID NO: 2422485 - RNA, 19 nt, Artificial Sequence
  Description of Artificial Sequence: Synthetic oligonucleotide
aucaaaauccuuuccgguc

SEQ ID NO: 2422486 - RNA, 19 nt, Artificial Sequence
  Description of Artificial Sequence: Synthetic oligonucleotide
gaugggaccccacaaagcc

SEQ ID NO: 2422487 - RNA, 19 nt, Artificial Sequence
  Description of Artificial Sequence: Synthetic oligonucleotide
auccuuuccgguccgaggc

SEQ ID NO: 2422488 - RNA, 19 nt, Artificial Sequence
  Description of Artificial Sequence: Synthetic oligonucleotide
ucuggguuccccaaguuca

SEQ ID NO: 2422489 - RNA, 19 nt, Artificial Sequence
  Description of Artificial Sequence: Synthetic oligonucleotide
uuguacauguaguuuuggg

SEQ ID NO: 2422490 - RNA, 19 nt, Artificial Sequence
  Description of Artificial Sequence: Synthetic oligonucleotide
cugaucaacuucaauguag

SEQ ID NO: 2422491 - RNA, 19 nt, Artificial Sequence
  Description of Artificial Sequence: Synthetic oligonucleotide
ugaucaacuucaauguaga

SEQ ID NO: 2422492 - RNA, 19 nt, Artificial Sequence
  Description of Artificial Sequence: Synthetic oligonucleotide
aucugaucaacuucaaugu

SEQ ID NO: 2422493 - RNA, 19 nt, Artificial Sequence
  Description of Artificial Sequence: Synthetic oligonucleotide
uagugcuugacccacgcgc

SEQ ID NO: 2422494 - RNA, 19 nt, Artificial Sequence
  Description of Artificial Sequence: Synthetic oligonucleotide
augguuaauaagcucgaag

SEQ ID NO: 2422495 - RNA, 19 nt, Artificial Sequence
  Description of Artificial Sequence: Synthetic oligonucleotide
agauccauauaccgugagc

SEQ ID NO: 2422496 - RNA, 19 nt, Artificial Sequence
  Description of Artificial Sequence: Synthetic oligonucleotide
gaucguguguucuucuggg

SEQ ID NO: 2422497 - RNA, 19 nt, Artificial Sequence
  Description of Artificial Sequence: Synthetic oligonucleotide
cagaugguaaaucugauca

SEQ ID NO: 2422498 - RNA, 19 nt, Artificial Sequence
  Description of Artificial Sequence: Synthetic oligonucleotide
uucaugagugcuaccaggc

SEQ ID NO: 2422499 - RNA, 19 nt, Artificial Sequence
  Description of Artificial Sequence: Synthetic oligonucleotide
aauccuuuccgguccgagg

SEQ ID NO: 2422500 - RNA, 19 nt, Artificial Sequence
  Description of Artificial Sequence: Synthetic oligonucleotide
uguuccaauuguauuaguc

SEQ ID NO: 2422501 - RNA, 19 nt, Artificial Sequence
  Description of Artificial Sequence: Synthetic oligonucleotide
aacauauucaauguuccaa

SEQ ID NO: 2422502 - RNA, 19 nt, Artificial Sequence
  Description of Artificial Sequence: Synthetic oligonucleotide
uuugccagucccaacauau

SEQ ID NO: 2422503 - RNA, 19 nt, Artificial Sequence
  Description of Artificial Sequence: Synthetic oligonucleotide
gacccagauccauauaccg

SEQ ID NO: 2422504 - RNA, 19 nt, Artificial Sequence
  Description of Artificial Sequence: Synthetic oligonucleotide
gacggaagagaccaggcgc

SEQ ID NO: 2422505 - RNA, 19 nt, Artificial Sequence
  Description of Artificial Sequence: Synthetic oligonucleotide
uucaauguuccaauuguau

SEQ ID NO: 2422506 - RNA, 19 nt, Artificial Sequence
  Description of Artificial Sequence: Synthetic oligonucleotide
ucaacccuuccuccaaugg

SEQ ID NO: 2422507 - RNA, 19 nt, Artificial Sequence
  Description of Artificial Sequence: Synthetic oligonucleotide
gagacccagauccauauac

SEQ ID NO: 2422508 - RNA, 19 nt, Artificial Sequence
  Description of Artificial Sequence: Synthetic oligonucleotide
ugggaccccacaaagcccg

SEQ ID NO: 2422509 - RNA, 19 nt, Artificial Sequence
  Description of Artificial Sequence: Synthetic oligonucleotide
cagaucacugacauacugg

SEQ ID NO: 2422510 - RNA, 19 nt, Artificial Sequence
  Description of Artificial Sequence: Synthetic oligonucleotide
uuuguucaacccuuccucc

SEQ ID NO: 2422511 - RNA, 19 nt, Artificial Sequence
  Description of Artificial Sequence: Synthetic oligonucleotide
cugguuauuggccugguac

SEQ ID NO: 2422512 - RNA, 19 nt, Artificial Sequence
  Description of Artificial Sequence: Synthetic oligonucleotide
agaucacugacauacugga

SEQ ID NO: 2422513 - RNA, 19 nt, Artificial Sequence
  Description of Artificial Sequence: Synthetic oligonucleotide
guucaugagugcuaccagg

SEQ ID NO: 2422514 - RNA, 19 nt, Artificial Sequence
  Description of Artificial Sequence: Synthetic oligonucleotide
uuagucuucagagucuuga

SEQ ID NO: 2422515 - RNA, 19 nt, Artificial Sequence
  Description of Artificial Sequence: Synthetic oligonucleotide
acugacauacuggaacgcc

SEQ ID NO: 2422516 - RNA, 19 nt, Artificial Sequence
  Description of Artificial Sequence: Synthetic oligonucleotide
uuucacuuccacuaccaac

SEQ ID NO: 2422517 - RNA, 19 nt, Artificial Sequence
  Description of Artificial Sequence: Synthetic oligonucleotide
uccaaugggaccacgggcu

SEQ ID NO: 2422518 - RNA, 19 nt, Artificial Sequence
  Description of Artificial Sequence: Synthetic oligonucleotide
aaagcccgcaccuccagug

SEQ ID NO: 2422519 - RNA, 19 nt, Artificial Sequence
  Description of Artificial Sequence: Synthetic oligonucleotide
guuaauaagcucgaaguuc

SEQ ID NO: 2422520 - RNA, 19 nt, Artificial Sequence
  Description of Artificial Sequence: Synthetic oligonucleotide
aaguucacagggcugcuga

SEQ ID NO: 2422521 - RNA, 19 nt, Artificial Sequence
  Description of Artificial Sequence: Synthetic oligonucleotide
aaugggaccacgggcuccc

SEQ ID NO: 2422522 - RNA, 19 nt, Artificial Sequence
  Description of Artificial Sequence: Synthetic oligonucleotide
acuggaacgcccuugucug

SEQ ID NO: 2422523 - RNA, 19 nt, Artificial Sequence
  Description of Artificial Sequence: Synthetic oligonucleotide
gaugguaaaucugaucaac

SEQ ID NO: 2422524 - RNA, 19 nt, Artificial Sequence
  Description of Artificial Sequence: Synthetic oligonucleotide
acauauucaauguuccaau

SEQ ID NO: 2422525 - RNA, 19 nt, Artificial Sequence
  Description of Artificial Sequence: Synthetic oligonucleotide
acugaauuucacuuccacu

SEQ ID NO: 2422526 - RNA, 19 nt, Artificial Sequence
  Description of Artificial Sequence: Synthetic oligonucleotide
uggccauccaucaugaguu

SEQ ID NO: 2422527 - RNA, 19 nt, Artificial Sequence
  Description of Artificial Sequence: Synthetic oligonucleotide
uuuugugggucauccuggg

SEQ ID NO: 2422528 - RNA, 19 nt, Artificial Sequence
  Description of Artificial Sequence: Synthetic oligonucleotide
uccaguguuccacauuucu

SEQ ID NO: 2422529 - RNA, 19 nt, Artificial Sequence
  Description of Artificial Sequence: Synthetic oligonucleotide
aauuucacuuccacuacca

SEQ ID NO: 2422530 - RNA, 19 nt, Artificial Sequence
  Description of Artificial Sequence: Synthetic oligonucleotide
acgcccuugucugagaccc

SEQ ID NO: 2422531 - RNA, 19 nt, Artificial Sequence
  Description of Artificial Sequence: Synthetic oligonucleotide
guuccccaaguucacaggg

SEQ ID NO: 2422532 - RNA, 19 nt, Artificial Sequence
  Description of Artificial Sequence: Synthetic oligonucleotide
uguagugcuugacccacgc

SEQ ID NO: 2422533 - RNA, 19 nt, Artificial Sequence
  Description of Artificial Sequence: Synthetic oligonucleotide
aaaucugaucaacuucaau

SEQ ID NO: 2422534 - RNA, 19 nt, Artificial Sequence
  Description of Artificial Sequence: Synthetic oligonucleotide
aauuccaggaucguguguu

SEQ ID NO: 2422535 - RNA, 19 nt, Artificial Sequence
  Description of Artificial Sequence: Synthetic oligonucleotide
ucaugguuaauaagcucga

SEQ ID NO: 2422536 - RNA, 19 nt, Artificial Sequence
  Description of Artificial Sequence: Synthetic oligonucleotide
cugggcuucagagagaaac

SEQ ID NO: 2422537 - RNA, 19 nt, Artificial Sequence
  Description of Artificial Sequence: Synthetic oligonucleotide
uuccaauuguauuagucuu

SEQ ID NO: 2422538 - RNA, 19 nt, Artificial Sequence
  Description of Artificial Sequence: Synthetic oligonucleotide
guucucauggccaauccag

SEQ ID NO: 2422539 - RNA, 19 nt, Artificial Sequence
  Description of Artificial Sequence: Synthetic oligonucleotide
agcucgaaguucucauggc

SEQ ID NO: 2422540 - RNA, 19 nt, Artificial Sequence
  Description of Artificial Sequence: Synthetic oligonucleotide
uacucuagcuccuuccgga

SEQ ID NO: 2422541 - RNA, 19 nt, Artificial Sequence
  Description of Artificial Sequence: Synthetic oligonucleotide
cugacauacuggaacgccc

SEQ ID NO: 2422542 - RNA, 19 nt, Artificial Sequence
  Description of Artificial Sequence: Synthetic oligonucleotide
uuguauuagucuucagagu

SEQ ID NO: 2422543 - RNA, 19 nt, Artificial Sequence
  Description of Artificial Sequence: Synthetic oligonucleotide
aaguuguccaccacgguca

SEQ ID NO: 2422544 - RNA, 19 nt, Artificial Sequence
  Description of Artificial Sequence: Synthetic oligonucleotide
uccauauaccgugagcggc

SEQ ID NO: 2422545 - RNA, 19 nt, Artificial Sequence
  Description of Artificial Sequence: Synthetic oligonucleotide
gaucaacuucaauguagag

SEQ ID NO: 2422546 - RNA, 19 nt, Artificial Sequence
  Description of Artificial Sequence: Synthetic oligonucleotide
auggccauccaucaugagu

SEQ ID NO: 2422547 - RNA, 19 nt, Artificial Sequence
  Description of Artificial Sequence: Synthetic oligonucleotide
uccuccaaugggaccacgg

SEQ ID NO: 2422548 - RNA, 19 nt, Artificial Sequence
  Description of Artificial Sequence: Synthetic oligonucleotide
ugacauacuggaacgcccu

SEQ ID NO: 2422549 - RNA, 19 nt, Artificial Sequence
  Description of Artificial Sequence: Synthetic oligonucleotide
uuaauuaacugagcaaauu

SEQ ID NO: 2422550 - RNA, 19 nt, Artificial Sequence
  Description of Artificial Sequence: Synthetic oligonucleotide
auaagcucgaaguucucau

SEQ ID NO: 2422551 - RNA, 19 nt, Artificial Sequence
  Description of Artificial Sequence: Synthetic oligonucleotide
cugagcaaauuccaggauc

SEQ ID NO: 2422552 - RNA, 19 nt, Artificial Sequence
  Description of Artificial Sequence: Synthetic oligonucleotide
uguacugguuauuggccug

SEQ ID NO: 2422553 - RNA, 19 nt, Artificial Sequence
  Description of Artificial Sequence: Synthetic oligonucleotide
uucaauguagaggggcucc

SEQ ID NO: 2422554 - RNA, 19 nt, Artificial Sequence
  Description of Artificial Sequence: Synthetic oligonucleotide
ucaugagugcuaccaggcc

SEQ ID NO: 2422555 - RNA, 19 nt, Artificial Sequence
  Description of Artificial Sequence: Synthetic oligonucleotide
guugacggaagagaccagg

SEQ ID NO: 2422556 - RNA, 19 nt, Artificial Sequence
  Description of Artificial Sequence: Synthetic oligonucleotide
caacccuuccuccaauggg

SEQ ID NO: 2422557 - RNA, 19 nt, Artificial Sequence
  Description of Artificial Sequence: Synthetic oligonucleotide
ugguacucuagcuccuucc

SEQ ID NO: 2422558 - RNA, 19 nt, Artificial Sequence
  Description of Artificial Sequence: Synthetic oligonucleotide
aaauuccaggaucgugugu

SEQ ID NO: 2422559 - RNA, 19 nt, Artificial Sequence
  Description of Artificial Sequence: Synthetic oligonucleotide
ucuucuggguuccccaagu

SEQ ID NO: 2422560 - RNA, 19 nt, Artificial Sequence
  Description of Artificial Sequence: Synthetic oligonucleotide
uaagcucgaaguucucaug

SEQ ID NO: 2422561 - RNA, 19 nt, Artificial Sequence
  Description of Artificial Sequence: Synthetic oligonucleotide
uaggcuuggggauguacug

SEQ ID NO: 2422562 - RNA, 19 nt, Artificial Sequence
  Description of Artificial Sequence: Synthetic oligonucleotide
agacccagauccauauacc

SEQ ID NO: 2422563 - RNA, 19 nt, Artificial Sequence
  Description of Artificial Sequence: Synthetic oligonucleotide
uccggaaguagugaauggc

SEQ ID NO: 2422564 - RNA, 19 nt, Artificial Sequence
  Description of Artificial Sequence: Synthetic oligonucleotide
guuccaauuguauuagucu

SEQ ID NO: 2422565 - RNA, 19 nt, Artificial Sequence
  Description of Artificial Sequence: Synthetic oligonucleotide
ucugaucaacuucaaugua

SEQ ID NO: 2422566 - RNA, 19 nt, Artificial Sequence
  Description of Artificial Sequence: Synthetic oligonucleotide
cagaugggaccccacaaag

SEQ ID NO: 2422567 - RNA, 19 nt, Artificial Sequence
  Description of Artificial Sequence: Synthetic oligonucleotide
cagagagaaacugaauuuc

SEQ ID NO: 2422568 - RNA, 19 nt, Artificial Sequence
  Description of Artificial Sequence: Synthetic oligonucleotide
caaauuccaggaucgugug

SEQ ID NO: 2422569 - RNA, 19 nt, Artificial Sequence
  Description of Artificial Sequence: Synthetic oligonucleotide
guagaggggcuccaccacg

SEQ ID NO: 2422570 - RNA, 19 nt, Artificial Sequence
  Description of Artificial Sequence: Synthetic oligonucleotide
agaugggaccccacaaagc

SEQ ID NO: 2422571 - RNA, 19 nt, Artificial Sequence
  Description of Artificial Sequence: Synthetic oligonucleotide
uguucaacccuuccuccaa

SEQ ID NO: 2422572 - RNA, 19 nt, Artificial Sequence
  Description of Artificial Sequence: Synthetic oligonucleotide
uauaccgugagcggcuccc

SEQ ID NO: 2422573 - RNA, 19 nt, Artificial Sequence
  Description of Artificial Sequence: Synthetic oligonucleotide
ugggcuucagagagaaacu

SEQ ID NO: 2422574 - RNA, 19 nt, Artificial Sequence
  Description of Artificial Sequence: Synthetic oligonucleotide
augaguuugucagucagau

SEQ ID NO: 2422575 - RNA, 19 nt, Artificial Sequence
  Description of Artificial Sequence: Synthetic oligonucleotide
uuguucaacccuuccucca

SEQ ID NO: 2422576 - RNA, 19 nt, Artificial Sequence
  Description of Artificial Sequence: Synthetic oligonucleotide
aacccuuccuccaauggga

SEQ ID NO: 2422577 - RNA, 19 nt, Artificial Sequence
  Description of Artificial Sequence: Synthetic oligonucleotide
ugaagaaguuguccaccac

SEQ ID NO: 2422578 - RNA, 19 nt, Artificial Sequence
  Description of Artificial Sequence: Synthetic oligonucleotide
cuccaaugggaccacgggc

SEQ ID NO: 2422579 - RNA, 19 nt, Artificial Sequence
  Description of Artificial Sequence: Synthetic oligonucleotide
gguacucuagcuccuuccg

SEQ ID NO: 2422580 - RNA, 19 nt, Artificial Sequence
  Description of Artificial Sequence: Synthetic oligonucleotide
uucuggguuccccaaguuc

SEQ ID NO: 2422581 - RNA, 19 nt, Artificial Sequence
  Description of Artificial Sequence: Synthetic oligonucleotide
guacucuagcuccuuccgg

SEQ ID NO: 2422582 - RNA, 19 nt, Artificial Sequence
  Description of Artificial Sequence: Synthetic oligonucleotide
auauaccgugagcggcucc

SEQ ID NO: 2422583 - RNA, 19 nt, Artificial Sequence
  Description of Artificial Sequence: Synthetic oligonucleotide
augcccacgcagcagcuuc

SEQ ID NO: 2422584 - RNA, 19 nt, Artificial Sequence
  Description of Artificial Sequence: Synthetic oligonucleotide
gaucaaaauccuuuccggu

SEQ ID NO: 2422585 - RNA, 19 nt, Artificial Sequence
  Description of Artificial Sequence: Synthetic oligonucleotide
acauugcuguucaugagug

SEQ ID NO: 2422586 - RNA, 19 nt, Artificial Sequence
  Description of Artificial Sequence: Synthetic oligonucleotide
aguucacagggcugcugac

SEQ ID NO: 2422587 - RNA, 19 nt, Artificial Sequence
  Description of Artificial Sequence: Synthetic oligonucleotide
guuguacauguaguuuugg

SEQ ID NO: 2422588 - RNA, 19 nt, Artificial Sequence
  Description of Artificial Sequence: Synthetic oligonucleotide
agucuugaugggguuguac

SEQ ID NO: 2422589 - RNA, 19 nt, Artificial Sequence
  Description of Artificial Sequence: Synthetic oligonucleotide
agagagaaacugaauuuca

SEQ ID NO: 2422590 - RNA, 19 nt, Artificial Sequence
  Description of Artificial Sequence: Synthetic oligonucleotide
accacgucaugguuaauaa

SEQ ID NO: 2422591 - RNA, 19 nt, Artificial Sequence
  Description of Artificial Sequence: Synthetic oligonucleotide
ggaucguguguucuucugg

SEQ ID NO: 2422592 - RNA, 19 nt, Artificial Sequence
  Description of Artificial Sequence: Synthetic oligonucleotide
agcaaauuccaggaucgug

SEQ ID NO: 2422593 - RNA, 19 nt, Artificial Sequence
  Description of Artificial Sequence: Synthetic oligonucleotide
ugaguuugucagucagaug

SEQ ID NO: 2422594 - RNA, 19 nt, Artificial Sequence
  Description of Artificial Sequence: Synthetic oligonucleotide
uuuacucuggcgggcuuag

SEQ ID NO: 2422595 - RNA, 19 nt, Artificial Sequence
  Description of Artificial Sequence: Synthetic oligonucleotide
accccacaaagcccgcacc

SEQ ID NO: 2422596 - RNA, 19 nt, Artificial Sequence
  Description of Artificial Sequence: Synthetic oligonucleotide
caugagugcuaccaggcca

SEQ ID NO: 2422597 - RNA, 19 nt, Artificial Sequence
  Description of Artificial Sequence: Synthetic oligonucleotide
uccuuuccgguccgaggcg

SEQ ID NO: 2422598 - RNA, 19 nt, Artificial Sequence
  Description of Artificial Sequence: Synthetic oligonucleotide
cccaacauauucaauguuc

SEQ ID NO: 2422599 - RNA, 19 nt, Artificial Sequence
  Description of Artificial Sequence: Synthetic oligonucleotide
agaugguaaaucugaucaa

SEQ ID NO: 2422600 - RNA, 19 nt, Artificial Sequence
  Description of Artificial Sequence: Synthetic oligonucleotide
uugacccacgcgcuuugcc

SEQ ID NO: 2422601 - RNA, 19 nt, Artificial Sequence
  Description of Artificial Sequence: Synthetic oligonucleotide
gaaguucucauggccaauc

SEQ ID NO: 2422602 - RNA, 19 nt, Artificial Sequence
  Description of Artificial Sequence: Synthetic oligonucleotide
uauuagucuucagagucuu

SEQ ID NO: 2422603 - RNA, 19 nt, Artificial Sequence
  Description of Artificial Sequence: Synthetic oligonucleotide
agucagaugggaccccaca

SEQ ID NO: 2422604 - RNA, 19 nt, Artificial Sequence
  Description of Artificial Sequence: Synthetic oligonucleotide
cauugcuguucaugagugc

SEQ ID NO: 2422605 - RNA, 19 nt, Artificial Sequence
  Description of Artificial Sequence: Synthetic oligonucleotide
gacgccagaugguaaaucu

SEQ ID NO: 2422606 - RNA, 19 nt, Artificial Sequence
  Description of Artificial Sequence: Synthetic oligonucleotide
aucaugaguuugucaguca

SEQ ID NO: 2422607 - RNA, 19 nt, Artificial Sequence
  Description of Artificial Sequence: Synthetic oligonucleotide
uggccugguacucuagcuc

SEQ ID NO: 2422608 - RNA, 19 nt, Artificial Sequence
  Description of Artificial Sequence: Synthetic oligonucleotide
uuccacuaccaacaagguu

SEQ ID NO: 2422609 - RNA, 19 nt, Artificial Sequence
  Description of Artificial Sequence: Synthetic oligonucleotide
acuucaauguagaggggcu

SEQ ID NO: 2422610 - RNA, 19 nt, Artificial Sequence
  Description of Artificial Sequence: Synthetic oligonucleotide
uuauuggccugguacucua

SEQ ID NO: 2422611 - RNA, 19 nt, Artificial Sequence
  Description of Artificial Sequence: Synthetic oligonucleotide
caacuucaauguagagggg

SEQ ID NO: 2422612 - RNA, 19 nt, Artificial Sequence
  Description of Artificial Sequence: Synthetic oligonucleotide
cccagauccauauaccgug

SEQ ID NO: 2422613 - RNA, 19 nt, Artificial Sequence
  Description of Artificial Sequence: Synthetic oligonucleotide
caauuguauuagucuucag

SEQ ID NO: 2422614 - RNA, 19 nt, Artificial Sequence
  Description of Artificial Sequence: Synthetic oligonucleotide
aggaucguguguucuucug

SEQ ID NO: 2422615 - RNA, 19 nt, Artificial Sequence
  Description of Artificial Sequence: Synthetic oligonucleotide
augggaccccacaaagccc

SEQ ID NO: 2422616 - RNA, 19 nt, Artificial Sequence
  Description of Artificial Sequence: Synthetic oligonucleotide
guacugguuauuggccugg

SEQ ID NO: 2422617 - RNA, 19 nt, Artificial Sequence
  Description of Artificial Sequence: Synthetic oligonucleotide
guagugcuugacccacgcg

SEQ ID NO: 2422618 - RNA, 19 nt, Artificial Sequence
  Description of Artificial Sequence: Synthetic oligonucleotide
ugucugagacccagaucca

SEQ ID NO: 2422619 - RNA, 19 nt, Artificial Sequence
  Description of Artificial Sequence: Synthetic oligonucleotide
gaacgcccuugucugagac

SEQ ID NO: 2422620 - RNA, 19 nt, Artificial Sequence
  Description of Artificial Sequence: Synthetic oligonucleotide
uggaacgcccuugucugag

SEQ ID NO: 2422621 - RNA, 19 nt, Artificial Sequence
  Description of Artificial Sequence: Synthetic oligonucleotide
ucuggcgggcuuaggcuug

SEQ ID NO: 2422622 - RNA, 19 nt, Artificial Sequence
  Description of Artificial Sequence: Synthetic oligonucleotide
caacauauucaauguucca

SEQ ID NO: 2422623 - RNA, 19 nt, Artificial Sequence
  Description of Artificial Sequence: Synthetic oligonucleotide
ucccaacauauucaauguu

SEQ ID NO: 2422624 - RNA, 19 nt, Artificial Sequence
  Description of Artificial Sequence: Synthetic oligonucleotide
acugagcaaauuccaggau

SEQ ID NO: 2422625 - RNA, 19 nt, Artificial Sequence
  Description of Artificial Sequence: Synthetic oligonucleotide
auuucacuuccacuaccaa

SEQ ID NO: 2422626 - RNA, 19 nt, Artificial Sequence
  Description of Artificial Sequence: Synthetic oligonucleotide
agaaguuguccaccacggu

SEQ ID NO: 2422627 - RNA, 19 nt, Artificial Sequence
  Description of Artificial Sequence: Synthetic oligonucleotide
auacuggaacgcccuuguc

SEQ ID NO: 2422628 - RNA, 19 nt, Artificial Sequence
  Description of Artificial Sequence: Synthetic oligonucleotide
acauacuggaacgcccuug

SEQ ID NO: 2422629 - RNA, 19 nt, Artificial Sequence
  Description of Artificial Sequence: Synthetic oligonucleotide
agugaauggcuuuguucaa

SEQ ID NO: 2422630 - RNA, 19 nt, Artificial Sequence
  Description of Artificial Sequence: Synthetic oligonucleotide
cagauccauauaccgugag

SEQ ID NO: 2422631 - RNA, 19 nt, Artificial Sequence
  Description of Artificial Sequence: Synthetic oligonucleotide
acgucaugguuaauaagcu

SEQ ID NO: 2422632 - RNA, 19 nt, Artificial Sequence
  Description of Artificial Sequence: Synthetic oligonucleotide
ucaauguagaggggcucca

SEQ ID NO: 2422633 - RNA, 19 nt, Artificial Sequence
  Description of Artificial Sequence: Synthetic oligonucleotide
agacgccagaugguaaauc

SEQ ID NO: 2422634 - RNA, 19 nt, Artificial Sequence
  Description of Artificial Sequence: Synthetic oligonucleotide
gguuccccaaguucacagg

SEQ ID NO: 2422635 - RNA, 19 nt, Artificial Sequence
  Description of Artificial Sequence: Synthetic oligonucleotide
ucacuuccacuaccaacaa

SEQ ID NO: 2422636 - RNA, 19 nt, Artificial Sequence
  Description of Artificial Sequence: Synthetic oligonucleotide
caugaguuugucagucaga

SEQ ID NO: 2422637 - RNA, 19 nt, Artificial Sequence
  Description of Artificial Sequence: Synthetic oligonucleotide
uggagacgccagaugguaa

SEQ ID NO: 2422638 - RNA, 19 nt, Artificial Sequence
  Description of Artificial Sequence: Synthetic oligonucleotide
cuaccaggccauucaccag

SEQ ID NO: 2422639 - RNA, 19 nt, Artificial Sequence
  Description of Artificial Sequence: Synthetic oligonucleotide
aagcccgcaccuccaguga

SEQ ID NO: 2422640 - RNA, 19 nt, Artificial Sequence
  Description of Artificial Sequence: Synthetic oligonucleotide
cucuagcuccuuccggaag

SEQ ID NO: 2422641 - RNA, 19 nt, Artificial Sequence
  Description of Artificial Sequence: Synthetic oligonucleotide
gaccccacaaagcccgcac

SEQ ID NO: 2422642 - RNA, 19 nt, Artificial Sequence
  Description of Artificial Sequence: Synthetic oligonucleotide
gucccaacauauucaaugu

SEQ ID NO: 2422643 - RNA, 19 nt, Artificial Sequence
  Description of Artificial Sequence: Synthetic oligonucleotide
uuuccgguccgaggcggcg

SEQ ID NO: 2422644 - RNA, 19 nt, Artificial Sequence
  Description of Artificial Sequence: Synthetic oligonucleotide
cacuuccacuaccaacaag

SEQ ID NO: 2422645 - RNA, 19 nt, Artificial Sequence
  Description of Artificial Sequence: Synthetic oligonucleotide
uggccaauccaguguucca

SEQ ID NO: 2422646 - RNA, 19 nt, Artificial Sequence
  Description of Artificial Sequence: Synthetic oligonucleotide
agugcuugacccacgcgcu

SEQ ID NO: 2422647 - RNA, 19 nt, Artificial Sequence
  Description of Artificial Sequence: Synthetic oligonucleotide
gucagaugggaccccacaa

SEQ ID NO: 2422648 - RNA, 19 nt, Artificial Sequence
  Description of Artificial Sequence: Synthetic oligonucleotide
gguuguacauguaguuuug

SEQ ID NO: 2422649 - RNA, 19 nt, Artificial Sequence
  Description of Artificial Sequence: Synthetic oligonucleotide
cacgcgcuuugccaguccc

SEQ ID NO: 2422650 - RNA, 19 nt, Artificial Sequence
  Description of Artificial Sequence: Synthetic oligonucleotide
cacugacauacuggaacgc

SEQ ID NO: 2422651 - RNA, 19 nt, Artificial Sequence
  Description of Artificial Sequence: Synthetic oligonucleotide
ccagaucacugacauacug

SEQ ID NO: 2422652 - RNA, 19 nt, Artificial Sequence
  Description of Artificial Sequence: Synthetic oligonucleotide
auucaauguuccaauugua

SEQ ID NO: 2422653 - RNA, 19 nt, Artificial Sequence
  Description of Artificial Sequence: Synthetic oligonucleotide
acggaagagaccaggcgca

SEQ ID NO: 2422654 - RNA, 19 nt, Artificial Sequence
  Description of Artificial Sequence: Synthetic oligonucleotide
ccccuguagugcuugaccc

SEQ ID NO: 2422655 - RNA, 19 nt, Artificial Sequence
  Description of Artificial Sequence: Synthetic oligonucleotide
uccugcgguugacggaaga

SEQ ID NO: 2422656 - RNA, 19 nt, Artificial Sequence
  Description of Artificial Sequence: Synthetic oligonucleotide
auaccgugagcggcucccc

SEQ ID NO: 2422657 - RNA, 19 nt, Artificial Sequence
  Description of Artificial Sequence: Synthetic oligonucleotide
auggcuuuguucaacccuu

SEQ ID NO: 2422658 - RNA, 19 nt, Artificial Sequence
  Description of Artificial Sequence: Synthetic oligonucleotide
ugggaccacgggcucccag

SEQ ID NO: 2422659 - RNA, 19 nt, Artificial Sequence
  Description of Artificial Sequence: Synthetic oligonucleotide
auucaccagaucacugaca

SEQ ID NO: 2422660 - RNA, 19 nt, Artificial Sequence
  Description of Artificial Sequence: Synthetic oligonucleotide
acccagauccauauaccgu

SEQ ID NO: 2422661 - RNA, 19 nt, Artificial Sequence
  Description of Artificial Sequence: Synthetic oligonucleotide
ucuuuacucuggcgggcuu

SEQ ID NO: 2422662 - RNA, 19 nt, Artificial Sequence
  Description of Artificial Sequence: Synthetic oligonucleotide
ggcuuuguucaacccuucc

SEQ ID NO: 2422663 - RNA, 19 nt, Artificial Sequence
  Description of Artificial Sequence: Synthetic oligonucleotide
uggcuuuguucaacccuuc

SEQ ID NO: 2422664 - RNA, 19 nt, Artificial Sequence
  Description of Artificial Sequence: Synthetic oligonucleotide
gcaaauuccaggaucgugu

SEQ ID NO: 2422665 - RNA, 19 nt, Artificial Sequence
  Description of Artificial Sequence: Synthetic oligonucleotide
cccaaguucacagggcugc

SEQ ID NO: 2422666 - RNA, 19 nt, Artificial Sequence
  Description of Artificial Sequence: Synthetic oligonucleotide
uccggcccuucuuuacucu

SEQ ID NO: 2422667 - RNA, 19 nt, Artificial Sequence
  Description of Artificial Sequence: Synthetic oligonucleotide
ccacaaagcccgcaccucc

SEQ ID NO: 2422668 - RNA, 19 nt, Artificial Sequence
  Description of Artificial Sequence: Synthetic oligonucleotide
caaugggaccacgggcucc

SEQ ID NO: 2422669 - RNA, 19 nt, Artificial Sequence
  Description of Artificial Sequence: Synthetic oligonucleotide
guauuagucuucagagucu

SEQ ID NO: 2422670 - RNA, 19 nt, Artificial Sequence
  Description of Artificial Sequence: Synthetic oligonucleotide
cacggucaccucauggcca

SEQ ID NO: 2422671 - RNA, 19 nt, Artificial Sequence
  Description of Artificial Sequence: Synthetic oligonucleotide
ccaguguuccacauuucuc

SEQ ID NO: 2422672 - RNA, 19 nt, Artificial Sequence
  Description of Artificial Sequence: Synthetic oligonucleotide
ugcccacgcagcagcuuca

SEQ ID NO: 2422673 - RNA, 19 nt, Artificial Sequence
  Description of Artificial Sequence: Synthetic oligonucleotide
cauggccauccaucaugag

SEQ ID NO: 2422674 - RNA, 19 nt, Artificial Sequence
  Description of Artificial Sequence: Synthetic oligonucleotide
cauacuggaacgcccuugu

SEQ ID NO: 2422675 - RNA, 19 nt, Artificial Sequence
  Description of Artificial Sequence: Synthetic oligonucleotide
cugguacucuagcuccuuc

SEQ ID NO: 2422676 - RNA, 19 nt, Artificial Sequence
  Description of Artificial Sequence: Synthetic oligonucleotide
gguuaauaagcucgaaguu

SEQ ID NO: 2422677 - RNA, 19 nt, Artificial Sequence
  Description of Artificial Sequence: Synthetic oligonucleotide
acgccagaugguaaaucug

SEQ ID NO: 2422678 - RNA, 19 nt, Artificial Sequence
  Description of Artificial Sequence: Synthetic oligonucleotide
caauguagaggggcuccac

SEQ ID NO: 2422679 - RNA, 19 nt, Artificial Sequence
  Description of Artificial Sequence: Synthetic oligonucleotide
uuccuccaaugggaccacg

SEQ ID NO: 2422680 - RNA, 19 nt, Artificial Sequence
  Description of Artificial Sequence: Synthetic oligonucleotide
caaguucacagggcugcug

SEQ ID NO: 2422681 - RNA, 19 nt, Artificial Sequence
  Description of Artificial Sequence: Synthetic oligonucleotide
gugcuaccaggccauucac

SEQ ID NO: 2422682 - RNA, 19 nt, Artificial Sequence
  Description of Artificial Sequence: Synthetic oligonucleotide
ccauucaccagaucacuga

SEQ ID NO: 2422683 - RNA, 19 nt, Artificial Sequence
  Description of Artificial Sequence: Synthetic oligonucleotide
gcgaugcccacgcagcagc

SEQ ID NO: 2422684 - RNA, 19 nt, Artificial Sequence
  Description of Artificial Sequence: Synthetic oligonucleotide
ggagacgccagaugguaaa

SEQ ID NO: 2422685 - RNA, 19 nt, Artificial Sequence
  Description of Artificial Sequence: Synthetic oligonucleotide
gcgggcuuaggcuugggga

SEQ ID NO: 2422686 - RNA, 19 nt, Artificial Sequence
  Description of Artificial Sequence: Synthetic oligonucleotide
acugguuauuggccuggua

SEQ ID NO: 2422687 - RNA, 19 nt, Artificial Sequence
  Description of Artificial Sequence: Synthetic oligonucleotide
gguuauuggccugguacuc

SEQ ID NO: 2422688 - RNA, 19 nt, Artificial Sequence
  Description of Artificial Sequence: Synthetic oligonucleotide
ugaugggguuguacaugua

SEQ ID NO: 2422689 - RNA, 19 nt, Artificial Sequence
  Description of Artificial Sequence: Synthetic oligonucleotide
cauauaccgugagcggcuc

SEQ ID NO: 2422690 - RNA, 19 nt, Artificial Sequence
  Description of Artificial Sequence: Synthetic oligonucleotide
ccacggucaccucauggcc

SEQ ID NO: 2422691 - RNA, 19 nt, Artificial Sequence
  Description of Artificial Sequence: Synthetic oligonucleotide
ccacgucaugguuaauaag

SEQ ID NO: 2422692 - RNA, 19 nt, Artificial Sequence
  Description of Artificial Sequence: Synthetic oligonucleotide
ccaauuguauuagucuuca

SEQ ID NO: 2422693 - RNA, 19 nt, Artificial Sequence
  Description of Artificial Sequence: Synthetic oligonucleotide
ucauccuccugcgguugac

SEQ ID NO: 2422694 - RNA, 19 nt, Artificial Sequence
  Description of Artificial Sequence: Synthetic oligonucleotide
ggcccuucuuuacucuggc

SEQ ID NO: 2422695 - RNA, 19 nt, Artificial Sequence
  Description of Artificial Sequence: Synthetic oligonucleotide
ggcgggcuuaggcuugggg

SEQ ID NO: 2422696 - RNA, 19 nt, Artificial Sequence
  Description of Artificial Sequence: Synthetic oligonucleotide
ggccaauccaguguuccac

SEQ ID NO: 2422697 - RNA, 19 nt, Artificial Sequence
  Description of Artificial Sequence: Synthetic oligonucleotide
cugagacccagauccauau

SEQ ID NO: 2422698 - RNA, 19 nt, Artificial Sequence
  Description of Artificial Sequence: Synthetic oligonucleotide
guuauuggccugguacucu

SEQ ID NO: 2422699 - RNA, 19 nt, Artificial Sequence
  Description of Artificial Sequence: Synthetic oligonucleotide
cuuccacuaccaacaaggu

SEQ ID NO: 2422700 - RNA, 19 nt, Artificial Sequence
  Description of Artificial Sequence: Synthetic oligonucleotide
uacugguuauuggccuggu

SEQ ID NO: 2422701 - RNA, 19 nt, Artificial Sequence
  Description of Artificial Sequence: Synthetic oligonucleotide
ccuguagugcuugacccac

SEQ ID NO: 2422702 - RNA, 19 nt, Artificial Sequence
  Description of Artificial Sequence: Synthetic oligonucleotide
ggaccacgggcucccagcc

SEQ ID NO: 2422703 - RNA, 19 nt, Artificial Sequence
  Description of Artificial Sequence: Synthetic oligonucleotide
guccggcccuucuuuacuc

SEQ ID NO: 2422704 - RNA, 19 nt, Artificial Sequence
  Description of Artificial Sequence: Synthetic oligonucleotide
cuugacccacgcgcuuugc

SEQ ID NO: 2422705 - RNA, 19 nt, Artificial Sequence
  Description of Artificial Sequence: Synthetic oligonucleotide
cuucagagagaaacugaau

SEQ ID NO: 2422706 - RNA, 19 nt, Artificial Sequence
  Description of Artificial Sequence: Synthetic oligonucleotide
ggcggcguaggcgagcagc

SEQ ID NO: 2422707 - RNA, 19 nt, Artificial Sequence
  Description of Artificial Sequence: Synthetic oligonucleotide
gucagucagaugggacccc

SEQ ID NO: 2422708 - RNA, 19 nt, Artificial Sequence
  Description of Artificial Sequence: Synthetic oligonucleotide
guaggcgagcagcgcgaug

SEQ ID NO: 2422709 - RNA, 19 nt, Artificial Sequence
  Description of Artificial Sequence: Synthetic oligonucleotide
cuccagugaucaaaauccu

SEQ ID NO: 2422710 - RNA, 19 nt, Artificial Sequence
  Description of Artificial Sequence: Synthetic oligonucleotide
caugguuaauaagcucgaa

SEQ ID NO: 2422711 - RNA, 19 nt, Artificial Sequence
  Description of Artificial Sequence: Synthetic oligonucleotide
cacauuucucuuccugccu

SEQ ID NO: 2422712 - RNA, 19 nt, Artificial Sequence
  Description of Artificial Sequence: Synthetic oligonucleotide
agcccgcaccuccagugau

SEQ ID NO: 2422713 - RNA, 19 nt, Artificial Sequence
  Description of Artificial Sequence: Synthetic oligonucleotide
cgucaugguuaauaagcuc

SEQ ID NO: 2422714 - RNA, 19 nt, Artificial Sequence
  Description of Artificial Sequence: Synthetic oligonucleotide
ggaagagaccaggcgcagc

SEQ ID NO: 2422715 - RNA, 19 nt, Artificial Sequence
  Description of Artificial Sequence: Synthetic oligonucleotide
uggggauguacugguuauu

SEQ ID NO: 2422716 - RNA, 19 nt, Artificial Sequence
  Description of Artificial Sequence: Synthetic oligonucleotide
cuggagacgccagauggua

SEQ ID NO: 2422717 - RNA, 19 nt, Artificial Sequence
  Description of Artificial Sequence: Synthetic oligonucleotide
uccgguccgaggcggcgua

SEQ ID NO: 2422718 - RNA, 19 nt, Artificial Sequence
  Description of Artificial Sequence: Synthetic oligonucleotide
ccugcgguugacggaagag

SEQ ID NO: 2422719 - RNA, 19 nt, Artificial Sequence
  Description of Artificial Sequence: Synthetic oligonucleotide
cgccagaugguaaaucuga

SEQ ID NO: 2422720 - RNA, 19 nt, Artificial Sequence
  Description of Artificial Sequence: Synthetic oligonucleotide
gggcuccaccacgucaugg

SEQ ID NO: 2422721 - RNA, 19 nt, Artificial Sequence
  Description of Artificial Sequence: Synthetic oligonucleotide
cacgcagcagcuucauccu

SEQ ID NO: 2422722 - RNA, 19 nt, Artificial Sequence
  Description of Artificial Sequence: Synthetic oligonucleotide
ucacagggcugcugacauu

SEQ ID NO: 2422723 - RNA, 19 nt, Artificial Sequence
  Description of Artificial Sequence: Synthetic oligonucleotide
uuccgguccgaggcggcgu

SEQ ID NO: 2422724 - RNA, 19 nt, Artificial Sequence
  Description of Artificial Sequence: Synthetic oligonucleotide
cuuuacucuggcgggcuua

SEQ ID NO: 2422725 - RNA, 19 nt, Artificial Sequence
  Description of Artificial Sequence: Synthetic oligonucleotide
ccuuuccgguccgaggcgg

SEQ ID NO: 2422726 - RNA, 19 nt, Artificial Sequence
  Description of Artificial Sequence: Synthetic oligonucleotide
gcccuugucugagacccag

SEQ ID NO: 2422727 - RNA, 19 nt, Artificial Sequence
  Description of Artificial Sequence: Synthetic oligonucleotide
cuggaacgcccuugucuga

SEQ ID NO: 2422728 - RNA, 19 nt, Artificial Sequence
  Description of Artificial Sequence: Synthetic oligonucleotide
cuccugcgguugacggaag

SEQ ID NO: 2422729 - RNA, 19 nt, Artificial Sequence
  Description of Artificial Sequence: Synthetic oligonucleotide
cuggcgggcuuaggcuugg

SEQ ID NO: 2422730 - RNA, 19 nt, Artificial Sequence
  Description of Artificial Sequence: Synthetic oligonucleotide
gcgguugacggaagagacc

SEQ ID NO: 2422731 - RNA, 19 nt, Artificial Sequence
  Description of Artificial Sequence: Synthetic oligonucleotide
uggcgcguccggcccuucu

SEQ ID NO: 2422732 - RNA, 19 nt, Artificial Sequence
  Description of Artificial Sequence: Synthetic oligonucleotide
cgguugacggaagagacca

SEQ ID NO: 2422733 - RNA, 19 nt, Artificial Sequence
  Description of Artificial Sequence: Synthetic oligonucleotide
gguugacggaagagaccag

SEQ ID NO: 2422734 - RNA, 19 nt, Artificial Sequence
  Description of Artificial Sequence: Synthetic oligonucleotide
ccagauccauauaccguga

SEQ ID NO: 2422735 - RNA, 19 nt, Artificial Sequence
  Description of Artificial Sequence: Synthetic oligonucleotide
gacauacuggaacgcccuu

SEQ ID NO: 2422736 - RNA, 19 nt, Artificial Sequence
  Description of Artificial Sequence: Synthetic oligonucleotide
gagcaaauuccaggaucgu

SEQ ID NO: 2422737 - RNA, 19 nt, Artificial Sequence
  Description of Artificial Sequence: Synthetic oligonucleotide
gggcuuaggcuuggggaug

SEQ ID NO: 2422738 - RNA, 19 nt, Artificial Sequence
  Description of Artificial Sequence: Synthetic oligonucleotide
ccggaaguagugaauggcu

SEQ ID NO: 2422739 - RNA, 19 nt, Artificial Sequence
  Description of Artificial Sequence: Synthetic oligonucleotide
caggaucguguguucuucu

SEQ ID NO: 2422740 - RNA, 19 nt, Artificial Sequence
  Description of Artificial Sequence: Synthetic oligonucleotide
ggaacgcccuugucugaga

SEQ ID NO: 2422741 - RNA, 19 nt, Artificial Sequence
  Description of Artificial Sequence: Synthetic oligonucleotide
ccaaugggaccacgggcuc

SEQ ID NO: 2422742 - RNA, 19 nt, Artificial Sequence
  Description of Artificial Sequence: Synthetic oligonucleotide
ccauauaccgugagcggcu

SEQ ID NO: 2422743 - RNA, 19 nt, Artificial Sequence
  Description of Artificial Sequence: Synthetic oligonucleotide
uggcgggcuuaggcuuggg

SEQ ID NO: 2422744 - RNA, 19 nt, Artificial Sequence
  Description of Artificial Sequence: Synthetic oligonucleotide
ccggcccuucuuuacucug

SEQ ID NO: 2422745 - RNA, 19 nt, Artificial Sequence
  Description of Artificial Sequence: Synthetic oligonucleotide
gagacgccagaugguaaau

SEQ ID NO: 2422746 - RNA, 19 nt, Artificial Sequence
  Description of Artificial Sequence: Synthetic oligonucleotide
cucuggcgggcuuaggcuu

SEQ ID NO: 2422747 - RNA, 19 nt, Artificial Sequence
  Description of Artificial Sequence: Synthetic oligonucleotide
acgcgcuuugccaguccca

SEQ ID NO: 2422748 - RNA, 19 nt, Artificial Sequence
  Description of Artificial Sequence: Synthetic oligonucleotide
caauccaguguuccacauu

SEQ ID NO: 2422749 - RNA, 19 nt, Artificial Sequence
  Description of Artificial Sequence: Synthetic oligonucleotide
gcguccggcccuucuuuac

SEQ ID NO: 2422750 - RNA, 19 nt, Artificial Sequence
  Description of Artificial Sequence: Synthetic oligonucleotide
caaagcccgcaccuccagu

SEQ ID NO: 2422751 - RNA, 19 nt, Artificial Sequence
  Description of Artificial Sequence: Synthetic oligonucleotide
ggccauucaccagaucacu

SEQ ID NO: 2422752 - RNA, 19 nt, Artificial Sequence
  Description of Artificial Sequence: Synthetic oligonucleotide
uguggcgcguccggcccuu

SEQ ID NO: 2422753 - RNA, 19 nt, Artificial Sequence
  Description of Artificial Sequence: Synthetic oligonucleotide
gagucuugaugggguugua

SEQ ID NO: 2422754 - RNA, 19 nt, Artificial Sequence
  Description of Artificial Sequence: Synthetic oligonucleotide
cacgggcucccagcccagc

SEQ ID NO: 2422755 - RNA, 19 nt, Artificial Sequence
  Description of Artificial Sequence: Synthetic oligonucleotide
ccaucaugaguuugucagu

SEQ ID NO: 2422756 - RNA, 19 nt, Artificial Sequence
  Description of Artificial Sequence: Synthetic oligonucleotide
ccuccugcgguugacggaa

SEQ ID NO: 2422757 - RNA, 19 nt, Artificial Sequence
  Description of Artificial Sequence: Synthetic oligonucleotide
cccacaaagcccgcaccuc

SEQ ID NO: 2422758 - RNA, 19 nt, Artificial Sequence
  Description of Artificial Sequence: Synthetic oligonucleotide
cuucuggguuccccaaguu

SEQ ID NO: 2422759 - RNA, 19 nt, Artificial Sequence
  Description of Artificial Sequence: Synthetic oligonucleotide
gcgcuuugccagucccaac

SEQ ID NO: 2422760 - RNA, 19 nt, Artificial Sequence
  Description of Artificial Sequence: Synthetic oligonucleotide
gcgcgaugcccacgcagca

SEQ ID NO: 2422761 - RNA, 19 nt, Artificial Sequence
  Description of Artificial Sequence: Synthetic oligonucleotide
cgcaccuccagugaucaaa

SEQ ID NO: 2422762 - RNA, 19 nt, Artificial Sequence
  Description of Artificial Sequence: Synthetic oligonucleotide
gaugcccacgcagcagcuu

SEQ ID NO: 2422763 - RNA, 19 nt, Artificial Sequence
  Description of Artificial Sequence: Synthetic oligonucleotide
gcguaggcgagcagcgcga

SEQ ID NO: 2422764 - RNA, 19 nt, Artificial Sequence
  Description of Artificial Sequence: Synthetic oligonucleotide
ggcuuaggcuuggggaugu

SEQ ID NO: 2422765 - RNA, 19 nt, Artificial Sequence
  Description of Artificial Sequence: Synthetic oligonucleotide
gcuggagacgccagauggu

SEQ ID NO: 2422766 - RNA, 19 nt, Artificial Sequence
  Description of Artificial Sequence: Synthetic oligonucleotide
ggaccccacaaagcccgca

SEQ ID NO: 2422767 - RNA, 19 nt, Artificial Sequence
  Description of Artificial Sequence: Synthetic oligonucleotide
caccuccagugaucaaaau

SEQ ID NO: 2422768 - RNA, 19 nt, Artificial Sequence
  Description of Artificial Sequence: Synthetic oligonucleotide
ccuuccggaaguagugaau

SEQ ID NO: 2422769 - RNA, 19 nt, Artificial Sequence
  Description of Artificial Sequence: Synthetic oligonucleotide
gugcuugacccacgcgcuu

SEQ ID NO: 2422770 - RNA, 19 nt, Artificial Sequence
  Description of Artificial Sequence: Synthetic oligonucleotide
gggaccccacaaagcccgc

SEQ ID NO: 2422771 - RNA, 19 nt, Artificial Sequence
  Description of Artificial Sequence: Synthetic oligonucleotide
cccuugucugagacccaga

SEQ ID NO: 2422772 - RNA, 19 nt, Artificial Sequence
  Description of Artificial Sequence: Synthetic oligonucleotide
cggaaguagugaauggcuu

SEQ ID NO: 2422773 - RNA, 19 nt, Artificial Sequence
  Description of Artificial Sequence: Synthetic oligonucleotide
gcccgcaccuccagugauc

SEQ ID NO: 2422774 - RNA, 19 nt, Artificial Sequence
  Description of Artificial Sequence: Synthetic oligonucleotide
cgguccgaggcggcguagg

SEQ ID NO: 2422775 - RNA, 19 nt, Artificial Sequence
  Description of Artificial Sequence: Synthetic oligonucleotide
gcagcgcgaugcccacgca

SEQ ID NO: 2422776 - RNA, 19 nt, Artificial Sequence
  Description of Artificial Sequence: Synthetic oligonucleotide
cccacgcgcuuugccaguc

SEQ ID NO: 2422777 - RNA, 19 nt, Artificial Sequence
  Description of Artificial Sequence: Synthetic oligonucleotide
ggccauccaucaugaguuu

SEQ ID NO: 2422778 - RNA, 19 nt, Artificial Sequence
  Description of Artificial Sequence: Synthetic oligonucleotide
cgaggcggcguaggcgagc

SEQ ID NO: 2422779 - RNA, 19 nt, Artificial Sequence
  Description of Artificial Sequence: Synthetic oligonucleotide
cgcgcuuugccagucccaa

SEQ ID NO: 2422780 - RNA, 19 nt, Artificial Sequence
  Description of Artificial Sequence: Synthetic oligonucleotide
ggcgcguccggcccuucuu

SEQ ID NO: 2422781 - RNA, 19 nt, Artificial Sequence
  Description of Artificial Sequence: Synthetic oligonucleotide
cggcguaggcgagcagcgc

SEQ ID NO: 2422782 - RNA, 19 nt, Artificial Sequence
  Description of Artificial Sequence: Synthetic oligonucleotide
ccaaguucacagggcugcu

SEQ ID NO: 2422783 - RNA, 19 nt, Artificial Sequence
  Description of Artificial Sequence: Synthetic oligonucleotide
ccgguccgaggcggcguag

SEQ ID NO: 2422784 - RNA, 19 nt, Artificial Sequence
  Description of Artificial Sequence: Synthetic oligonucleotide
cguccggcccuucuuuacu

SEQ ID NO: 2422785 - RNA, 19 nt, Artificial Sequence
  Description of Artificial Sequence: Synthetic oligonucleotide
gcuuggggauguacugguu

SEQ ID NO: 2422786 - RNA, 19 nt, Artificial Sequence
  Description of Artificial Sequence: Synthetic oligonucleotide
gcuuaggcuuggggaugua

SEQ ID NO: 2422787 - RNA, 19 nt, Artificial Sequence
  Description of Artificial Sequence: Synthetic oligonucleotide
gcgcguccggcccuucuuu

SEQ ID NO: 2422788 - RNA, 19 nt, Artificial Sequence
  Description of Artificial Sequence: Synthetic oligonucleotide
guggcgcguccggcccuuc

SEQ ID NO: 2422789 - RNA, 19 nt, Artificial Sequence
  Description of Artificial Sequence: Synthetic oligonucleotide
cgaugcccacgcagcagcu

SEQ ID NO: 2422790 - RNA, 19 nt, Artificial Sequence
  Description of Artificial Sequence: Synthetic oligonucleotide
cgcguccggcccuucuuua

SEQ ID NO: 2422791 - RNA, 19 nt, Artificial Sequence
  Description of Artificial Sequence: Synthetic oligonucleotide
ccugguacucuagcuccuu

SEQ ID NO: 2422792 - RNA, 19 nt, Artificial Sequence
  Description of Artificial Sequence: Synthetic oligonucleotide
cgcccuugucugagaccca

SEQ ID NO: 2422793 - RNA, 19 nt, Artificial Sequence
  Description of Artificial Sequence: Synthetic oligonucleotide
ccgcaccuccagugaucaa

SEQ ID NO: 2422794 - RNA, 19 nt, Artificial Sequence
  Description of Artificial Sequence: Synthetic oligonucleotide
gcccacgcagcagcuucau

SEQ ID NO: 2422795 - RNA, 19 nt, Artificial Sequence
  Description of Artificial Sequence: Synthetic oligonucleotide
cguaggcgagcagcgcgau

SEQ ID NO: 2422796 - RNA, 19 nt, Artificial Sequence
  Description of Artificial Sequence: Synthetic oligonucleotide
ugauuaagaaccaugaggc

SEQ ID NO: 2422797 - RNA, 19 nt, Artificial Sequence
  Description of Artificial Sequence: Synthetic oligonucleotide
aauauuucaaauuucccgu

SEQ ID NO: 2422798 - RNA, 19 nt, Artificial Sequence
  Description of Artificial Sequence: Synthetic oligonucleotide
uugaaauaagaucacagcc

SEQ ID NO: 2422799 - RNA, 19 nt, Artificial Sequence
  Description of Artificial Sequence: Synthetic oligonucleotide
aaagcguguguccaaaggc

SEQ ID NO: 2422800 - RNA, 19 nt, Artificial Sequence
  Description of Artificial Sequence: Synthetic oligonucleotide
uuuagauuucugcacaccg

SEQ ID NO: 2422801 - RNA, 19 nt, Artificial Sequence
  Description of Artificial Sequence: Synthetic oligonucleotide
caauauuucaaauuucccg

SEQ ID NO: 2422802 - RNA, 19 nt, Artificial Sequence
  Description of Artificial Sequence: Synthetic oligonucleotide
aaacgcaugcuccauagcg

SEQ ID NO: 2422803 - RNA, 19 nt, Artificial Sequence
  Description of Artificial Sequence: Synthetic oligonucleotide
ugaaauaagaucacagccc

SEQ ID NO: 2422804 - RNA, 19 nt, Artificial Sequence
  Description of Artificial Sequence: Synthetic oligonucleotide
auagguuagcuuuugacgg

SEQ ID NO: 2422805 - RNA, 19 nt, Artificial Sequence
  Description of Artificial Sequence: Synthetic oligonucleotide
uuauaauuggcacaggagu

SEQ ID NO: 2422806 - RNA, 19 nt, Artificial Sequence
  Description of Artificial Sequence: Synthetic oligonucleotide
cugauuaagaaccaugagg

SEQ ID NO: 2422807 - RNA, 19 nt, Artificial Sequence
  Description of Artificial Sequence: Synthetic oligonucleotide
uggauuauuauaauuggca

SEQ ID NO: 2422808 - RNA, 19 nt, Artificial Sequence
  Description of Artificial Sequence: Synthetic oligonucleotide
cauagguuagcuuuugacg

SEQ ID NO: 2422809 - RNA, 19 nt, Artificial Sequence
  Description of Artificial Sequence: Synthetic oligonucleotide
cuuggauuauuauaauugg

SEQ ID NO: 2422810 - RNA, 19 nt, Artificial Sequence
  Description of Artificial Sequence: Synthetic oligonucleotide
uggaaaaggguguucaccg

SEQ ID NO: 2422811 - RNA, 19 nt, Artificial Sequence
  Description of Artificial Sequence: Synthetic oligonucleotide
agcacuuuaaggcacuugg

SEQ ID NO: 2422812 - RNA, 19 nt, Artificial Sequence
  Description of Artificial Sequence: Synthetic oligonucleotide
cuaauagaaucaaaguccc

SEQ ID NO: 2422813 - RNA, 19 nt, Artificial Sequence
  Description of Artificial Sequence: Synthetic oligonucleotide
uauaauuggcacaggagug

SEQ ID NO: 2422814 - RNA, 19 nt, Artificial Sequence
  Description of Artificial Sequence: Synthetic oligonucleotide
cuuuugacggccauggucc

SEQ ID NO: 2422815 - RNA, 19 nt, Artificial Sequence
  Description of Artificial Sequence: Synthetic oligonucleotide
augaauucaggcaagaauc

SEQ ID NO: 2422816 - RNA, 19 nt, Artificial Sequence
  Description of Artificial Sequence: Synthetic oligonucleotide
aagcacaucauuugucagg

SEQ ID NO: 2422817 - RNA, 19 nt, Artificial Sequence
  Description of Artificial Sequence: Synthetic oligonucleotide
acauagguuagcuuuugac

SEQ ID NO: 2422818 - RNA, 19 nt, Artificial Sequence
  Description of Artificial Sequence: Synthetic oligonucleotide
auaagaccacaccagcugc

SEQ ID NO: 2422819 - RNA, 19 nt, Artificial Sequence
  Description of Artificial Sequence: Synthetic oligonucleotide
ucaaauuucccguggguag

SEQ ID NO: 2422820 - RNA, 19 nt, Artificial Sequence
  Description of Artificial Sequence: Synthetic oligonucleotide
ucuaucuuccuuuggagca

SEQ ID NO: 2422821 - RNA, 19 nt, Artificial Sequence
  Description of Artificial Sequence: Synthetic oligonucleotide
ucuucuaucuuccuuugga

SEQ ID NO: 2422822 - RNA, 19 nt, Artificial Sequence
  Description of Artificial Sequence: Synthetic oligonucleotide
uccaaagaugacgaaagcg

SEQ ID NO: 2422823 - RNA, 19 nt, Artificial Sequence
  Description of Artificial Sequence: Synthetic oligonucleotide
aagaucacagcccuuuuca

SEQ ID NO: 2422824 - RNA, 19 nt, Artificial Sequence
  Description of Artificial Sequence: Synthetic oligonucleotide
cauacaagcaguuggcacc

SEQ ID NO: 2422825 - RNA, 19 nt, Artificial Sequence
  Description of Artificial Sequence: Synthetic oligonucleotide
aaguuuagauuucugcaca

SEQ ID NO: 2422826 - RNA, 19 nt, Artificial Sequence
  Description of Artificial Sequence: Synthetic oligonucleotide
gauuauuauaauuggcaca

SEQ ID NO: 2422827 - RNA, 19 nt, Artificial Sequence
  Description of Artificial Sequence: Synthetic oligonucleotide
aggugauugcuccuggugc

SEQ ID NO: 2422828 - RNA, 19 nt, Artificial Sequence
  Description of Artificial Sequence: Synthetic oligonucleotide
aggaguugaaauaagauca

SEQ ID NO: 2422829 - RNA, 19 nt, Artificial Sequence
  Description of Artificial Sequence: Synthetic oligonucleotide
gaaguuuagauuucugcac

SEQ ID NO: 2422830 - RNA, 19 nt, Artificial Sequence
  Description of Artificial Sequence: Synthetic oligonucleotide
uuggauuauuauaauuggc

SEQ ID NO: 2422831 - RNA, 19 nt, Artificial Sequence
  Description of Artificial Sequence: Synthetic oligonucleotide
aaggcaagcacaucauuug

SEQ ID NO: 2422832 - RNA, 19 nt, Artificial Sequence
  Description of Artificial Sequence: Synthetic oligonucleotide
agguguuagaaguacugac

SEQ ID NO: 2422833 - RNA, 19 nt, Artificial Sequence
  Description of Artificial Sequence: Synthetic oligonucleotide
ugaccaguguuccaaaggc

SEQ ID NO: 2422834 - RNA, 19 nt, Artificial Sequence
  Description of Artificial Sequence: Synthetic oligonucleotide
guuguugucaccuggcugc

SEQ ID NO: 2422835 - RNA, 19 nt, Artificial Sequence
  Description of Artificial Sequence: Synthetic oligonucleotide
auuucaaauuucccguggg

SEQ ID NO: 2422836 - RNA, 19 nt, Artificial Sequence
  Description of Artificial Sequence: Synthetic oligonucleotide
agguagaugagagauuccc

SEQ ID NO: 2422837 - RNA, 19 nt, Artificial Sequence
  Description of Artificial Sequence: Synthetic oligonucleotide
cugacuucaggccuaauag

SEQ ID NO: 2422838 - RNA, 19 nt, Artificial Sequence
  Description of Artificial Sequence: Synthetic oligonucleotide
uuugucagguuccauuuca

SEQ ID NO: 2422839 - RNA, 19 nt, Artificial Sequence
  Description of Artificial Sequence: Synthetic oligonucleotide
aaguacugaccaguguucc

SEQ ID NO: 2422840 - RNA, 19 nt, Artificial Sequence
  Description of Artificial Sequence: Synthetic oligonucleotide
gaaagcguguguccaaagg

SEQ ID NO: 2422841 - RNA, 19 nt, Artificial Sequence
  Description of Artificial Sequence: Synthetic oligonucleotide
aguugaaauaagaucacag

SEQ ID NO: 2422842 - RNA, 19 nt, Artificial Sequence
  Description of Artificial Sequence: Synthetic oligonucleotide
uccaguguccacauggagc

SEQ ID NO: 2422843 - RNA, 19 nt, Artificial Sequence
  Description of Artificial Sequence: Synthetic oligonucleotide
uuuggagcacuuuaaggca

SEQ ID NO: 2422844 - RNA, 19 nt, Artificial Sequence
  Description of Artificial Sequence: Synthetic oligonucleotide
uuagaaguacugaccagug

SEQ ID NO: 2422845 - RNA, 19 nt, Artificial Sequence
  Description of Artificial Sequence: Synthetic oligonucleotide
aguuuagauuucugcacac

SEQ ID NO: 2422846 - RNA, 19 nt, Artificial Sequence
  Description of Artificial Sequence: Synthetic oligonucleotide
acaaugaacugcugggcgg

SEQ ID NO: 2422847 - RNA, 19 nt, Artificial Sequence
  Description of Artificial Sequence: Synthetic oligonucleotide
uuucccguggguagcaggg

SEQ ID NO: 2422848 - RNA, 19 nt, Artificial Sequence
  Description of Artificial Sequence: Synthetic oligonucleotide
uccccuuggauuauuauaa

SEQ ID NO: 2422849 - RNA, 19 nt, Artificial Sequence
  Description of Artificial Sequence: Synthetic oligonucleotide
acaccgaggugauugcucc

SEQ ID NO: 2422850 - RNA, 19 nt, Artificial Sequence
  Description of Artificial Sequence: Synthetic oligonucleotide
aacgcuguccaacagggau

SEQ ID NO: 2422851 - RNA, 19 nt, Artificial Sequence
  Description of Artificial Sequence: Synthetic oligonucleotide
ugaauucaggcaagaaucu

SEQ ID NO: 2422852 - RNA, 19 nt, Artificial Sequence
  Description of Artificial Sequence: Synthetic oligonucleotide
aauaagaucacagcccuuu

SEQ ID NO: 2422853 - RNA, 19 nt, Artificial Sequence
  Description of Artificial Sequence: Synthetic oligonucleotide
uuaagaaccaugaggcaau

SEQ ID NO: 2422854 - RNA, 19 nt, Artificial Sequence
  Description of Artificial Sequence: Synthetic oligonucleotide
ugcaacgcuguccaacagg

SEQ ID NO: 2422855 - RNA, 19 nt, Artificial Sequence
  Description of Artificial Sequence: Synthetic oligonucleotide
auuauaauuggcacaggag

SEQ ID NO: 2422856 - RNA, 19 nt, Artificial Sequence
  Description of Artificial Sequence: Synthetic oligonucleotide
ucaggcaagaaucuuucuc

SEQ ID NO: 2422857 - RNA, 19 nt, Artificial Sequence
  Description of Artificial Sequence: Synthetic oligonucleotide
aguacucucugacuucagg

SEQ ID NO: 2422858 - RNA, 19 nt, Artificial Sequence
  Description of Artificial Sequence: Synthetic oligonucleotide
aaaacgcccaccaaguccu

SEQ ID NO: 2422859 - RNA, 19 nt, Artificial Sequence
  Description of Artificial Sequence: Synthetic oligonucleotide
gaugagagauuccccuugg

SEQ ID NO: 2422860 - RNA, 19 nt, Artificial Sequence
  Description of Artificial Sequence: Synthetic oligonucleotide
caggaguugaaauaagauc

SEQ ID NO: 2422861 - RNA, 19 nt, Artificial Sequence
  Description of Artificial Sequence: Synthetic oligonucleotide
caaaacgcccaccaagucc

SEQ ID NO: 2422862 - RNA, 19 nt, Artificial Sequence
  Description of Artificial Sequence: Synthetic oligonucleotide
guaaacgcaugcuccauag

SEQ ID NO: 2422863 - RNA, 19 nt, Artificial Sequence
  Description of Artificial Sequence: Synthetic oligonucleotide
uagcuuuugacggccaugg

SEQ ID NO: 2422864 - RNA, 19 nt, Artificial Sequence
  Description of Artificial Sequence: Synthetic oligonucleotide
cuucaggccuaauagaauc

SEQ ID NO: 2422865 - RNA, 19 nt, Artificial Sequence
  Description of Artificial Sequence: Synthetic oligonucleotide
aaggguguucaccgaugcc

SEQ ID NO: 2422866 - RNA, 19 nt, Artificial Sequence
  Description of Artificial Sequence: Synthetic oligonucleotide
aaccaugaggcaauauuuc

SEQ ID NO: 2422867 - RNA, 19 nt, Artificial Sequence
  Description of Artificial Sequence: Synthetic oligonucleotide
aagaugacgaaagcgugug

SEQ ID NO: 2422868 - RNA, 19 nt, Artificial Sequence
  Description of Artificial Sequence: Synthetic oligonucleotide
cacaaugaacugcugggcg

SEQ ID NO: 2422869 - RNA, 19 nt, Artificial Sequence
  Description of Artificial Sequence: Synthetic oligonucleotide
ggugaggucauacaagcag

SEQ ID NO: 2422870 - RNA, 19 nt, Artificial Sequence
  Description of Artificial Sequence: Synthetic oligonucleotide
caaagaugacgaaagcgug

SEQ ID NO: 2422871 - RNA, 19 nt, Artificial Sequence
  Description of Artificial Sequence: Synthetic oligonucleotide
auuaagaaccaugaggcaa

SEQ ID NO: 2422872 - RNA, 19 nt, Artificial Sequence
  Description of Artificial Sequence: Synthetic oligonucleotide
uccuuuggagcacuuuaag

SEQ ID NO: 2422873 - RNA, 19 nt, Artificial Sequence
  Description of Artificial Sequence: Synthetic oligonucleotide
acggccaugguccagagaa

SEQ ID NO: 2422874 - RNA, 19 nt, Artificial Sequence
  Description of Artificial Sequence: Synthetic oligonucleotide
uguuagaaguacugaccag

SEQ ID NO: 2422875 - RNA, 19 nt, Artificial Sequence
  Description of Artificial Sequence: Synthetic oligonucleotide
uuuucaguguaguacucuc

SEQ ID NO: 2422876 - RNA, 19 nt, Artificial Sequence
  Description of Artificial Sequence: Synthetic oligonucleotide
agaaccaugaggcaauauu

SEQ ID NO: 2422877 - RNA, 19 nt, Artificial Sequence
  Description of Artificial Sequence: Synthetic oligonucleotide
uuucaaauuucccgugggu

SEQ ID NO: 2422878 - RNA, 19 nt, Artificial Sequence
  Description of Artificial Sequence: Synthetic oligonucleotide
agagauuccccuuggauua

SEQ ID NO: 2422879 - RNA, 19 nt, Artificial Sequence
  Description of Artificial Sequence: Synthetic oligonucleotide
gaugccaugaucuggucaa

SEQ ID NO: 2422880 - RNA, 19 nt, Artificial Sequence
  Description of Artificial Sequence: Synthetic oligonucleotide
ucugacuucaggccuaaua

SEQ ID NO: 2422881 - RNA, 19 nt, Artificial Sequence
  Description of Artificial Sequence: Synthetic oligonucleotide
aaggcacuugguaaaauca

SEQ ID NO: 2422882 - RNA, 19 nt, Artificial Sequence
  Description of Artificial Sequence: Synthetic oligonucleotide
uaauagaaucaaagucccc

SEQ ID NO: 2422883 - RNA, 19 nt, Artificial Sequence
  Description of Artificial Sequence: Synthetic oligonucleotide
gugcacaaugaacugcugg

SEQ ID NO: 2422884 - RNA, 19 nt, Artificial Sequence
  Description of Artificial Sequence: Synthetic oligonucleotide
ugagagauuccccuuggau

SEQ ID NO: 2422885 - RNA, 19 nt, Artificial Sequence
  Description of Artificial Sequence: Synthetic oligonucleotide
uccauuucaggcccguugu

SEQ ID NO: 2422886 - RNA, 19 nt, Artificial Sequence
  Description of Artificial Sequence: Synthetic oligonucleotide
uuggaaaaggguguucacc

SEQ ID NO: 2422887 - RNA, 19 nt, Artificial Sequence
  Description of Artificial Sequence: Synthetic oligonucleotide
aacgcaugcuccauagcgg

SEQ ID NO: 2422888 - RNA, 19 nt, Artificial Sequence
  Description of Artificial Sequence: Synthetic oligonucleotide
caugacgggugccacauag

SEQ ID NO: 2422889 - RNA, 19 nt, Artificial Sequence
  Description of Artificial Sequence: Synthetic oligonucleotide
guguuagaaguacugacca

SEQ ID NO: 2422890 - RNA, 19 nt, Artificial Sequence
  Description of Artificial Sequence: Synthetic oligonucleotide
gaugugaggggcuuggaaa

SEQ ID NO: 2422891 - RNA, 19 nt, Artificial Sequence
  Description of Artificial Sequence: Synthetic oligonucleotide
aggccuaauagaaucaaag

SEQ ID NO: 2422892 - RNA, 19 nt, Artificial Sequence
  Description of Artificial Sequence: Synthetic oligonucleotide
caugguccagagaagcggg

SEQ ID NO: 2422893 - RNA, 19 nt, Artificial Sequence
  Description of Artificial Sequence: Synthetic oligonucleotide
gaugaauucaggcaagaau

SEQ ID NO: 2422894 - RNA, 19 nt, Artificial Sequence
  Description of Artificial Sequence: Synthetic oligonucleotide
ucauuugucagguuccauu

SEQ ID NO: 2422895 - RNA, 19 nt, Artificial Sequence
  Description of Artificial Sequence: Synthetic oligonucleotide
agaugagagauuccccuug

SEQ ID NO: 2422896 - RNA, 19 nt, Artificial Sequence
  Description of Artificial Sequence: Synthetic oligonucleotide
cugaccaguguuccaaagg

SEQ ID NO: 2422897 - RNA, 19 nt, Artificial Sequence
  Description of Artificial Sequence: Synthetic oligonucleotide
aaagaugacgaaagcgugu

SEQ ID NO: 2422898 - RNA, 19 nt, Artificial Sequence
  Description of Artificial Sequence: Synthetic oligonucleotide
aaaggcaagcacaucauuu

SEQ ID NO: 2422899 - RNA, 19 nt, Artificial Sequence
  Description of Artificial Sequence: Synthetic oligonucleotide
aaaucaguguggucuuggu

SEQ ID NO: 2422900 - RNA, 19 nt, Artificial Sequence
  Description of Artificial Sequence: Synthetic oligonucleotide
accaugaggcaauauuuca

SEQ ID NO: 2422901 - RNA, 19 nt, Artificial Sequence
  Description of Artificial Sequence: Synthetic oligonucleotide
ugacgggugccacauaggu

SEQ ID NO: 2422902 - RNA, 19 nt, Artificial Sequence
  Description of Artificial Sequence: Synthetic oligonucleotide
gccuaauagaaucaaaguc

SEQ ID NO: 2422903 - RNA, 19 nt, Artificial Sequence
  Description of Artificial Sequence: Synthetic oligonucleotide
gguaaaaucaguguggucu

SEQ ID NO: 2422904 - RNA, 19 nt, Artificial Sequence
  Description of Artificial Sequence: Synthetic oligonucleotide
auuucaggcccguuguugu

SEQ ID NO: 2422905 - RNA, 19 nt, Artificial Sequence
  Description of Artificial Sequence: Synthetic oligonucleotide
acgggugccacauagguua

SEQ ID NO: 2422906 - RNA, 19 nt, Artificial Sequence
  Description of Artificial Sequence: Synthetic oligonucleotide
acgcaugcuccauagcggg

SEQ ID NO: 2422907 - RNA, 19 nt, Artificial Sequence
  Description of Artificial Sequence: Synthetic oligonucleotide
uaagaccacaccagcugcc

SEQ ID NO: 2422908 - RNA, 19 nt, Artificial Sequence
  Description of Artificial Sequence: Synthetic oligonucleotide
ugacuucaggccuaauaga

SEQ ID NO: 2422909 - RNA, 19 nt, Artificial Sequence
  Description of Artificial Sequence: Synthetic oligonucleotide
uugguaaaaucaguguggu

SEQ ID NO: 2422910 - RNA, 19 nt, Artificial Sequence
  Description of Artificial Sequence: Synthetic oligonucleotide
aguguaguacucucugacu

SEQ ID NO: 2422911 - RNA, 19 nt, Artificial Sequence
  Description of Artificial Sequence: Synthetic oligonucleotide
gguagcaggggcuccagcg

SEQ ID NO: 2422912 - RNA, 19 nt, Artificial Sequence
  Description of Artificial Sequence: Synthetic oligonucleotide
gauuaagaaccaugaggca

SEQ ID NO: 2422913 - RNA, 19 nt, Artificial Sequence
  Description of Artificial Sequence: Synthetic oligonucleotide
gaugacgaaagcguguguc

SEQ ID NO: 2422914 - RNA, 19 nt, Artificial Sequence
  Description of Artificial Sequence: Synthetic oligonucleotide
uccgcacaggcucugaaaa

SEQ ID NO: 2422915 - RNA, 19 nt, Artificial Sequence
  Description of Artificial Sequence: Synthetic oligonucleotide
uuggagcacuuuaaggcac

SEQ ID NO: 2422916 - RNA, 19 nt, Artificial Sequence
  Description of Artificial Sequence: Synthetic oligonucleotide
caguguaguacucucugac

SEQ ID NO: 2422917 - RNA, 19 nt, Artificial Sequence
  Description of Artificial Sequence: Synthetic oligonucleotide
agguuagcuuuugacggcc

SEQ ID NO: 2422918 - RNA, 19 nt, Artificial Sequence
  Description of Artificial Sequence: Synthetic oligonucleotide
uucaaauuucccgugggua

SEQ ID NO: 2422919 - RNA, 19 nt, Artificial Sequence
  Description of Artificial Sequence: Synthetic oligonucleotide
uagguuagcuuuugacggc

SEQ ID NO: 2422920 - RNA, 19 nt, Artificial Sequence
  Description of Artificial Sequence: Synthetic oligonucleotide
agugaugugaggggcuugg

SEQ ID NO: 2422921 - RNA, 19 nt, Artificial Sequence
  Description of Artificial Sequence: Synthetic oligonucleotide
agaucacagcccuuuucag

SEQ ID NO: 2422922 - RNA, 19 nt, Artificial Sequence
  Description of Artificial Sequence: Synthetic oligonucleotide
aaaaggguguucaccgaug

SEQ ID NO: 2422923 - RNA, 19 nt, Artificial Sequence
  Description of Artificial Sequence: Synthetic oligonucleotide
auaauuggcacaggaguga

SEQ ID NO: 2422924 - RNA, 19 nt, Artificial Sequence
  Description of Artificial Sequence: Synthetic oligonucleotide
caagcacaucauuugucag

SEQ ID NO: 2422925 - RNA, 19 nt, Artificial Sequence
  Description of Artificial Sequence: Synthetic oligonucleotide
ucaguguaguacucucuga

SEQ ID NO: 2422926 - RNA, 19 nt, Artificial Sequence
  Description of Artificial Sequence: Synthetic oligonucleotide
uaaacgcaugcuccauagc

SEQ ID NO: 2422927 - RNA, 19 nt, Artificial Sequence
  Description of Artificial Sequence: Synthetic oligonucleotide
uuccccuuggauuauuaua

SEQ ID NO: 2422928 - RNA, 19 nt, Artificial Sequence
  Description of Artificial Sequence: Synthetic oligonucleotide
agcacaucauuugucaggu

SEQ ID NO: 2422929 - RNA, 19 nt, Artificial Sequence
  Description of Artificial Sequence: Synthetic oligonucleotide
cagguuccauuucaggccc

SEQ ID NO: 2422930 - RNA, 19 nt, Artificial Sequence
  Description of Artificial Sequence: Synthetic oligonucleotide
acugaccaguguuccaaag

SEQ ID NO: 2422931 - RNA, 19 nt, Artificial Sequence
  Description of Artificial Sequence: Synthetic oligonucleotide
uagguguuagaaguacuga

SEQ ID NO: 2422932 - RNA, 19 nt, Artificial Sequence
  Description of Artificial Sequence: Synthetic oligonucleotide
uugcuccuggugcacaaug

SEQ ID NO: 2422933 - RNA, 19 nt, Artificial Sequence
  Description of Artificial Sequence: Synthetic oligonucleotide
aacaugacgggugccacau

SEQ ID NO: 2422934 - RNA, 19 nt, Artificial Sequence
  Description of Artificial Sequence: Synthetic oligonucleotide
guagcaggggcuccagcgg

SEQ ID NO: 2422935 - RNA, 19 nt, Artificial Sequence
  Description of Artificial Sequence: Synthetic oligonucleotide
caucguagguguuagaagu

SEQ ID NO: 2422936 - RNA, 19 nt, Artificial Sequence
  Description of Artificial Sequence: Synthetic oligonucleotide
aggguguucaccgaugcca

SEQ ID NO: 2422937 - RNA, 19 nt, Artificial Sequence
  Description of Artificial Sequence: Synthetic oligonucleotide
ucaaaacgcccaccaaguc

SEQ ID NO: 2422938 - RNA, 19 nt, Artificial Sequence
  Description of Artificial Sequence: Synthetic oligonucleotide
cuuggaaaaggguguucac

SEQ ID NO: 2422939 - RNA, 19 nt, Artificial Sequence
  Description of Artificial Sequence: Synthetic oligonucleotide
caaauuucccguggguagc

SEQ ID NO: 2422940 - RNA, 19 nt, Artificial Sequence
  Description of Artificial Sequence: Synthetic oligonucleotide
aagcaguuggcaccaccgu

SEQ ID NO: 2422941 - RNA, 19 nt, Artificial Sequence
  Description of Artificial Sequence: Synthetic oligonucleotide
gaagcggguggucagucuc

SEQ ID NO: 2422942 - RNA, 19 nt, Artificial Sequence
  Description of Artificial Sequence: Synthetic oligonucleotide
aaaggcugauuaagaacca

SEQ ID NO: 2422943 - RNA, 19 nt, Artificial Sequence
  Description of Artificial Sequence: Synthetic oligonucleotide
aagcggguggucagucucc

SEQ ID NO: 2422944 - RNA, 19 nt, Artificial Sequence
  Description of Artificial Sequence: Synthetic oligonucleotide
uuggaggagguagaugaga

SEQ ID NO: 2422945 - RNA, 19 nt, Artificial Sequence
  Description of Artificial Sequence: Synthetic oligonucleotide
acugaugaauucaggcaag

SEQ ID NO: 2422946 - RNA, 19 nt, Artificial Sequence
  Description of Artificial Sequence: Synthetic oligonucleotide
aaauuucccguggguagca

SEQ ID NO: 2422947 - RNA, 19 nt, Artificial Sequence
  Description of Artificial Sequence: Synthetic oligonucleotide
augugaggggcuuggaaaa

SEQ ID NO: 2422948 - RNA, 19 nt, Artificial Sequence
  Description of Artificial Sequence: Synthetic oligonucleotide
gcugauuaagaaccaugag

SEQ ID NO: 2422949 - RNA, 19 nt, Artificial Sequence
  Description of Artificial Sequence: Synthetic oligonucleotide
ucccgguuggaggagguag

SEQ ID NO: 2422950 - RNA, 19 nt, Artificial Sequence
  Description of Artificial Sequence: Synthetic oligonucleotide
cugcacaccgaggugauug

SEQ ID NO: 2422951 - RNA, 19 nt, Artificial Sequence
  Description of Artificial Sequence: Synthetic oligonucleotide
aguacugaccaguguucca

SEQ ID NO: 2422952 - RNA, 19 nt, Artificial Sequence
  Description of Artificial Sequence: Synthetic oligonucleotide
auggagccugugcuuuccc

SEQ ID NO: 2422953 - RNA, 19 nt, Artificial Sequence
  Description of Artificial Sequence: Synthetic oligonucleotide
cauuucaggcccguuguug

SEQ ID NO: 2422954 - RNA, 19 nt, Artificial Sequence
  Description of Artificial Sequence: Synthetic oligonucleotide
cuccuggugcacaaugaac

SEQ ID NO: 2422955 - RNA, 19 nt, Artificial Sequence
  Description of Artificial Sequence: Synthetic oligonucleotide
gcaagaaucuuucucucuc

SEQ ID NO: 2422956 - RNA, 19 nt, Artificial Sequence
  Description of Artificial Sequence: Synthetic oligonucleotide
gcaacgcuguccaacaggg

SEQ ID NO: 2422957 - RNA, 19 nt, Artificial Sequence
  Description of Artificial Sequence: Synthetic oligonucleotide
gaguugaaauaagaucaca

SEQ ID NO: 2422958 - RNA, 19 nt, Artificial Sequence
  Description of Artificial Sequence: Synthetic oligonucleotide
gagagauuccccuuggauu

SEQ ID NO: 2422959 - RNA, 19 nt, Artificial Sequence
  Description of Artificial Sequence: Synthetic oligonucleotide
caccccagacccaucguag

SEQ ID NO: 2422960 - RNA, 19 nt, Artificial Sequence
  Description of Artificial Sequence: Synthetic oligonucleotide
uagaugagagauuccccuu

SEQ ID NO: 2422961 - RNA, 19 nt, Artificial Sequence
  Description of Artificial Sequence: Synthetic oligonucleotide
ucaggccuaauagaaucaa

SEQ ID NO: 2422962 - RNA, 19 nt, Artificial Sequence
  Description of Artificial Sequence: Synthetic oligonucleotide
auacaagcaguuggcacca

SEQ ID NO: 2422963 - RNA, 19 nt, Artificial Sequence
  Description of Artificial Sequence: Synthetic oligonucleotide
gaucacagcccuuuucagu

SEQ ID NO: 2422964 - RNA, 19 nt, Artificial Sequence
  Description of Artificial Sequence: Synthetic oligonucleotide
aggcugauuaagaaccaug

SEQ ID NO: 2422965 - RNA, 19 nt, Artificial Sequence
  Description of Artificial Sequence: Synthetic oligonucleotide
gucaggaguugaaauaaga

SEQ ID NO: 2422966 - RNA, 19 nt, Artificial Sequence
  Description of Artificial Sequence: Synthetic oligonucleotide
accacaccagcugccuucc

SEQ ID NO: 2422967 - RNA, 19 nt, Artificial Sequence
  Description of Artificial Sequence: Synthetic oligonucleotide
aguguccacauggagccug

SEQ ID NO: 2422968 - RNA, 19 nt, Artificial Sequence
  Description of Artificial Sequence: Synthetic oligonucleotide
ggucauacaagcaguuggc

SEQ ID NO: 2422969 - RNA, 19 nt, Artificial Sequence
  Description of Artificial Sequence: Synthetic oligonucleotide
gacccaucguagguguuag

SEQ ID NO: 2422970 - RNA, 19 nt, Artificial Sequence
  Description of Artificial Sequence: Synthetic oligonucleotide
uuuugacggccauggucca

SEQ ID NO: 2422971 - RNA, 19 nt, Artificial Sequence
  Description of Artificial Sequence: Synthetic oligonucleotide
aaggcugauuaagaaccau

SEQ ID NO: 2422972 - RNA, 19 nt, Artificial Sequence
  Description of Artificial Sequence: Synthetic oligonucleotide
ugccuuccauuccaguguc

SEQ ID NO: 2422973 - RNA, 19 nt, Artificial Sequence
  Description of Artificial Sequence: Synthetic oligonucleotide
ucuccuucggugaggucau

SEQ ID NO: 2422974 - RNA, 19 nt, Artificial Sequence
  Description of Artificial Sequence: Synthetic oligonucleotide
ugguaaaaucagugugguc

SEQ ID NO: 2422975 - RNA, 19 nt, Artificial Sequence
  Description of Artificial Sequence: Synthetic oligonucleotide
gaaaaggguguucaccgau

SEQ ID NO: 2422976 - RNA, 19 nt, Artificial Sequence
  Description of Artificial Sequence: Synthetic oligonucleotide
uaauuggcacaggagugau

SEQ ID NO: 2422977 - RNA, 19 nt, Artificial Sequence
  Description of Artificial Sequence: Synthetic oligonucleotide
gcuccagcgggguaaacgc

SEQ ID NO: 2422978 - RNA, 19 nt, Artificial Sequence
  Description of Artificial Sequence: Synthetic oligonucleotide
cuucggugaggucauacaa

SEQ ID NO: 2422979 - RNA, 19 nt, Artificial Sequence
  Description of Artificial Sequence: Synthetic oligonucleotide
cacaccgaggugauugcuc

SEQ ID NO: 2422980 - RNA, 19 nt, Artificial Sequence
  Description of Artificial Sequence: Synthetic oligonucleotide
auuccccuuggauuauuau

SEQ ID NO: 2422981 - RNA, 19 nt, Artificial Sequence
  Description of Artificial Sequence: Synthetic oligonucleotide
uggucaaaacgcccaccaa

SEQ ID NO: 2422982 - RNA, 19 nt, Artificial Sequence
  Description of Artificial Sequence: Synthetic oligonucleotide
ggcaccaccguccgcacag

SEQ ID NO: 2422983 - RNA, 19 nt, Artificial Sequence
  Description of Artificial Sequence: Synthetic oligonucleotide
auaagaucacagcccuuuu

SEQ ID NO: 2422984 - RNA, 19 nt, Artificial Sequence
  Description of Artificial Sequence: Synthetic oligonucleotide
aguuggcaccaccguccgc

SEQ ID NO: 2422985 - RNA, 19 nt, Artificial Sequence
  Description of Artificial Sequence: Synthetic oligonucleotide
ggcugauuaagaaccauga

SEQ ID NO: 2422986 - RNA, 19 nt, Artificial Sequence
  Description of Artificial Sequence: Synthetic oligonucleotide
gaacaugacgggugccaca

SEQ ID NO: 2422987 - RNA, 19 nt, Artificial Sequence
  Description of Artificial Sequence: Synthetic oligonucleotide
uuucccgguuggaggaggu

SEQ ID NO: 2422988 - RNA, 19 nt, Artificial Sequence
  Description of Artificial Sequence: Synthetic oligonucleotide
augagagauuccccuugga

SEQ ID NO: 2422989 - RNA, 19 nt, Artificial Sequence
  Description of Artificial Sequence: Synthetic oligonucleotide
accgaugccaugaucuggu

SEQ ID NO: 2422990 - RNA, 19 nt, Artificial Sequence
  Description of Artificial Sequence: Synthetic oligonucleotide
guguucaccgaugccauga

SEQ ID NO: 2422991 - RNA, 19 nt, Artificial Sequence
  Description of Artificial Sequence: Synthetic oligonucleotide
cucucucuccuucggugag

SEQ ID NO: 2422992 - RNA, 19 nt, Artificial Sequence
  Description of Artificial Sequence: Synthetic oligonucleotide
caguuggcaccaccguccg

SEQ ID NO: 2422993 - RNA, 19 nt, Artificial Sequence
  Description of Artificial Sequence: Synthetic oligonucleotide
agaugacgaaagcgugugu

SEQ ID NO: 2422994 - RNA, 19 nt, Artificial Sequence
  Description of Artificial Sequence: Synthetic oligonucleotide
cuuucccgguuggaggagg

SEQ ID NO: 2422995 - RNA, 19 nt, Artificial Sequence
  Description of Artificial Sequence: Synthetic oligonucleotide
gagguagaugagagauucc

SEQ ID NO: 2422996 - RNA, 19 nt, Artificial Sequence
  Description of Artificial Sequence: Synthetic oligonucleotide
cacagucaccaccccagac

SEQ ID NO: 2422997 - RNA, 19 nt, Artificial Sequence
  Description of Artificial Sequence: Synthetic oligonucleotide
gccaugaucuggucaaaac

SEQ ID NO: 2422998 - RNA, 19 nt, Artificial Sequence
  Description of Artificial Sequence: Synthetic oligonucleotide
uccuucggugaggucauac

SEQ ID NO: 2422999 - RNA, 19 nt, Artificial Sequence
  Description of Artificial Sequence: Synthetic oligonucleotide
aagaaccaugaggcaauau

SEQ ID NO: 2423000 - RNA, 19 nt, Artificial Sequence
  Description of Artificial Sequence: Synthetic oligonucleotide
agcguguguccaaaggcug

SEQ ID NO: 2423001 - RNA, 19 nt, Artificial Sequence
  Description of Artificial Sequence: Synthetic oligonucleotide
gagcacuuuaaggcacuug

SEQ ID NO: 2423002 - RNA, 19 nt, Artificial Sequence
  Description of Artificial Sequence: Synthetic oligonucleotide
ggucagucuccacagucac

SEQ ID NO: 2423003 - RNA, 19 nt, Artificial Sequence
  Description of Artificial Sequence: Synthetic oligonucleotide
ccaugguccagagaagcgg

SEQ ID NO: 2423004 - RNA, 19 nt, Artificial Sequence
  Description of Artificial Sequence: Synthetic oligonucleotide
ucaggcccguuguugucac

SEQ ID NO: 2423005 - RNA, 19 nt, Artificial Sequence
  Description of Artificial Sequence: Synthetic oligonucleotide
cacuugguaaaaucagugu

SEQ ID NO: 2423006 - RNA, 19 nt, Artificial Sequence
  Description of Artificial Sequence: Synthetic oligonucleotide
gcccuuuucaguguaguac

SEQ ID NO: 2423007 - RNA, 19 nt, Artificial Sequence
  Description of Artificial Sequence: Synthetic oligonucleotide
aaauaagaucacagcccuu

SEQ ID NO: 2423008 - RNA, 19 nt, Artificial Sequence
  Description of Artificial Sequence: Synthetic oligonucleotide
ggcuccagcgggguaaacg

SEQ ID NO: 2423009 - RNA, 19 nt, Artificial Sequence
  Description of Artificial Sequence: Synthetic oligonucleotide
gucaaaacgcccaccaagu

SEQ ID NO: 2423010 - RNA, 19 nt, Artificial Sequence
  Description of Artificial Sequence: Synthetic oligonucleotide
accgaggugauugcuccug

SEQ ID NO: 2423011 - RNA, 19 nt, Artificial Sequence
  Description of Artificial Sequence: Synthetic oligonucleotide
augacgggugccacauagg

SEQ ID NO: 2423012 - RNA, 19 nt, Artificial Sequence
  Description of Artificial Sequence: Synthetic oligonucleotide
cagcgggguaaacgcaugc

SEQ ID NO: 2423013 - RNA, 19 nt, Artificial Sequence
  Description of Artificial Sequence: Synthetic oligonucleotide
auuccaguguccacaugga

SEQ ID NO: 2423014 - RNA, 19 nt, Artificial Sequence
  Description of Artificial Sequence: Synthetic oligonucleotide
cauuugucagguuccauuu

SEQ ID NO: 2423015 - RNA, 19 nt, Artificial Sequence
  Description of Artificial Sequence: Synthetic oligonucleotide
guaaaaucaguguggucuu

SEQ ID NO: 2423016 - RNA, 19 nt, Artificial Sequence
  Description of Artificial Sequence: Synthetic oligonucleotide
cgggguaaacgcaugcucc

SEQ ID NO: 2423017 - RNA, 19 nt, Artificial Sequence
  Description of Artificial Sequence: Synthetic oligonucleotide
aggcccguuguugucaccu

SEQ ID NO: 2423018 - RNA, 19 nt, Artificial Sequence
  Description of Artificial Sequence: Synthetic oligonucleotide
gcugcaacgcuguccaaca

SEQ ID NO: 2423019 - RNA, 19 nt, Artificial Sequence
  Description of Artificial Sequence: Synthetic oligonucleotide
ggccaugguccagagaagc

SEQ ID NO: 2423020 - RNA, 19 nt, Artificial Sequence
  Description of Artificial Sequence: Synthetic oligonucleotide
gaggaacaugacgggugcc

SEQ ID NO: 2423021 - RNA, 19 nt, Artificial Sequence
  Description of Artificial Sequence: Synthetic oligonucleotide
ggcggaugagggaaggcag

SEQ ID NO: 2423022 - RNA, 19 nt, Artificial Sequence
  Description of Artificial Sequence: Synthetic oligonucleotide
aaguccccacugaugaauu

SEQ ID NO: 2423023 - RNA, 19 nt, Artificial Sequence
  Description of Artificial Sequence: Synthetic oligonucleotide
caaugaacugcugggcgga

SEQ ID NO: 2423024 - RNA, 19 nt, Artificial Sequence
  Description of Artificial Sequence: Synthetic oligonucleotide
ggucaggaguugaaauaag

SEQ ID NO: 2423025 - RNA, 19 nt, Artificial Sequence
  Description of Artificial Sequence: Synthetic oligonucleotide
cacauagguuagcuuuuga

SEQ ID NO: 2423026 - RNA, 19 nt, Artificial Sequence
  Description of Artificial Sequence: Synthetic oligonucleotide
ggaaaaggguguucaccga

SEQ ID NO: 2423027 - RNA, 19 nt, Artificial Sequence
  Description of Artificial Sequence: Synthetic oligonucleotide
guucaccgaugccaugauc

SEQ ID NO: 2423028 - RNA, 19 nt, Artificial Sequence
  Description of Artificial Sequence: Synthetic oligonucleotide
agagaagcggguggucagu

SEQ ID NO: 2423029 - RNA, 19 nt, Artificial Sequence
  Description of Artificial Sequence: Synthetic oligonucleotide
cugcaacgcuguccaacag

SEQ ID NO: 2423030 - RNA, 19 nt, Artificial Sequence
  Description of Artificial Sequence: Synthetic oligonucleotide
agcgggguaaacgcaugcu

SEQ ID NO: 2423031 - RNA, 19 nt, Artificial Sequence
  Description of Artificial Sequence: Synthetic oligonucleotide
gggguaaacgcaugcucca

SEQ ID NO: 2423032 - RNA, 19 nt, Artificial Sequence
  Description of Artificial Sequence: Synthetic oligonucleotide
gcccguuguugucaccugg

SEQ ID NO: 2423033 - RNA, 19 nt, Artificial Sequence
  Description of Artificial Sequence: Synthetic oligonucleotide
gagugaugugaggggcuug

SEQ ID NO: 2423034 - RNA, 19 nt, Artificial Sequence
  Description of Artificial Sequence: Synthetic oligonucleotide
caucauuugucagguucca

SEQ ID NO: 2423035 - RNA, 19 nt, Artificial Sequence
  Description of Artificial Sequence: Synthetic oligonucleotide
acgaaagcguguguccaaa

SEQ ID NO: 2423036 - RNA, 19 nt, Artificial Sequence
  Description of Artificial Sequence: Synthetic oligonucleotide
cuuuucaguguaguacucu

SEQ ID NO: 2423037 - RNA, 19 nt, Artificial Sequence
  Description of Artificial Sequence: Synthetic oligonucleotide
aucauuugucagguuccau

SEQ ID NO: 2423038 - RNA, 19 nt, Artificial Sequence
  Description of Artificial Sequence: Synthetic oligonucleotide
caggccuaauagaaucaaa

SEQ ID NO: 2423039 - RNA, 19 nt, Artificial Sequence
  Description of Artificial Sequence: Synthetic oligonucleotide
gauuccccuuggauuauua

SEQ ID NO: 2423040 - RNA, 19 nt, Artificial Sequence
  Description of Artificial Sequence: Synthetic oligonucleotide
cccguuguugucaccuggc

SEQ ID NO: 2423041 - RNA, 19 nt, Artificial Sequence
  Description of Artificial Sequence: Synthetic oligonucleotide
aaacgcccaccaaguccuc

SEQ ID NO: 2423042 - RNA, 19 nt, Artificial Sequence
  Description of Artificial Sequence: Synthetic oligonucleotide
ugggcggaugagggaaggc

SEQ ID NO: 2423043 - RNA, 19 nt, Artificial Sequence
  Description of Artificial Sequence: Synthetic oligonucleotide
aucguagguguuagaagua

SEQ ID NO: 2423044 - RNA, 19 nt, Artificial Sequence
  Description of Artificial Sequence: Synthetic oligonucleotide
ucucugacuucaggccuaa

SEQ ID NO: 2423045 - RNA, 19 nt, Artificial Sequence
  Description of Artificial Sequence: Synthetic oligonucleotide
gguaaacgcaugcuccaua

SEQ ID NO: 2423046 - RNA, 19 nt, Artificial Sequence
  Description of Artificial Sequence: Synthetic oligonucleotide
caccaccguccgcacaggc

SEQ ID NO: 2423047 - RNA, 19 nt, Artificial Sequence
  Description of Artificial Sequence: Synthetic oligonucleotide
gcgggguaaacgcaugcuc

SEQ ID NO: 2423048 - RNA, 19 nt, Artificial Sequence
  Description of Artificial Sequence: Synthetic oligonucleotide
ggaacaugacgggugccac

SEQ ID NO: 2423049 - RNA, 19 nt, Artificial Sequence
  Description of Artificial Sequence: Synthetic oligonucleotide
uccagagaagcgggugguc

SEQ ID NO: 2423050 - RNA, 19 nt, Artificial Sequence
  Description of Artificial Sequence: Synthetic oligonucleotide
gaauucaggcaagaaucuu

SEQ ID NO: 2423051 - RNA, 19 nt, Artificial Sequence
  Description of Artificial Sequence: Synthetic oligonucleotide
ccaccguccgcacaggcuc

SEQ ID NO: 2423052 - RNA, 19 nt, Artificial Sequence
  Description of Artificial Sequence: Synthetic oligonucleotide
ggcugcaacgcuguccaac

SEQ ID NO: 2423053 - RNA, 19 nt, Artificial Sequence
  Description of Artificial Sequence: Synthetic oligonucleotide
guccgcacaggcucugaaa

SEQ ID NO: 2423054 - RNA, 19 nt, Artificial Sequence
  Description of Artificial Sequence: Synthetic oligonucleotide
gccugugcuuucccgguug

SEQ ID NO: 2423055 - RNA, 19 nt, Artificial Sequence
  Description of Artificial Sequence: Synthetic oligonucleotide
agguuccauuucaggcccg

SEQ ID NO: 2423056 - RNA, 19 nt, Artificial Sequence
  Description of Artificial Sequence: Synthetic oligonucleotide
cuccagcgggguaaacgca

SEQ ID NO: 2423057 - RNA, 19 nt, Artificial Sequence
  Description of Artificial Sequence: Synthetic oligonucleotide
gucaccuggcugcaacgcu

SEQ ID NO: 2423058 - RNA, 19 nt, Artificial Sequence
  Description of Artificial Sequence: Synthetic oligonucleotide
gacggccaugguccagaga

SEQ ID NO: 2423059 - RNA, 19 nt, Artificial Sequence
  Description of Artificial Sequence: Synthetic oligonucleotide
acgcuguccaacagggaua

SEQ ID NO: 2423060 - RNA, 19 nt, Artificial Sequence
  Description of Artificial Sequence: Synthetic oligonucleotide
agcggguggucagucucca

SEQ ID NO: 2423061 - RNA, 19 nt, Artificial Sequence
  Description of Artificial Sequence: Synthetic oligonucleotide
gucuuggucaggaguugaa

SEQ ID NO: 2423062 - RNA, 19 nt, Artificial Sequence
  Description of Artificial Sequence: Synthetic oligonucleotide
caacgcuguccaacaggga

SEQ ID NO: 2423063 - RNA, 19 nt, Artificial Sequence
  Description of Artificial Sequence: Synthetic oligonucleotide
ggcacuugguaaaaucagu

SEQ ID NO: 2423064 - RNA, 19 nt, Artificial Sequence
  Description of Artificial Sequence: Synthetic oligonucleotide
gaggggcuuggaaaagggu

SEQ ID NO: 2423065 - RNA, 19 nt, Artificial Sequence
  Description of Artificial Sequence: Synthetic oligonucleotide
cgaaagcguguguccaaag

SEQ ID NO: 2423066 - RNA, 19 nt, Artificial Sequence
  Description of Artificial Sequence: Synthetic oligonucleotide
agccugugcuuucccgguu

SEQ ID NO: 2423067 - RNA, 19 nt, Artificial Sequence
  Description of Artificial Sequence: Synthetic oligonucleotide
cccaucguagguguuagaa

SEQ ID NO: 2423068 - RNA, 19 nt, Artificial Sequence
  Description of Artificial Sequence: Synthetic oligonucleotide
agauuccccuuggauuauu

SEQ ID NO: 2423069 - RNA, 19 nt, Artificial Sequence
  Description of Artificial Sequence: Synthetic oligonucleotide
ccacauagguuagcuuuug

SEQ ID NO: 2423070 - RNA, 19 nt, Artificial Sequence
  Description of Artificial Sequence: Synthetic oligonucleotide
cccagacccaucguaggug

SEQ ID NO: 2423071 - RNA, 19 nt, Artificial Sequence
  Description of Artificial Sequence: Synthetic oligonucleotide
caggcccguuguugucacc

SEQ ID NO: 2423072 - RNA, 19 nt, Artificial Sequence
  Description of Artificial Sequence: Synthetic oligonucleotide
ccagcgggguaaacgcaug

SEQ ID NO: 2423073 - RNA, 19 nt, Artificial Sequence
  Description of Artificial Sequence: Synthetic oligonucleotide
ccagagaagcgggugguca

SEQ ID NO: 2423074 - RNA, 19 nt, Artificial Sequence
  Description of Artificial Sequence: Synthetic oligonucleotide
acaugacgggugccacaua

SEQ ID NO: 2423075 - RNA, 19 nt, Artificial Sequence
  Description of Artificial Sequence: Synthetic oligonucleotide
ucugcacaccgaggugauu

SEQ ID NO: 2423076 - RNA, 19 nt, Artificial Sequence
  Description of Artificial Sequence: Synthetic oligonucleotide
ggcccguuguugucaccug

SEQ ID NO: 2423077 - RNA, 19 nt, Artificial Sequence
  Description of Artificial Sequence: Synthetic oligonucleotide
gguuagcuuuugacggcca

SEQ ID NO: 2423078 - RNA, 19 nt, Artificial Sequence
  Description of Artificial Sequence: Synthetic oligonucleotide
uucccgguuggaggaggua

SEQ ID NO: 2423079 - RNA, 19 nt, Artificial Sequence
  Description of Artificial Sequence: Synthetic oligonucleotide
cugcugggcggaugaggga

SEQ ID NO: 2423080 - RNA, 19 nt, Artificial Sequence
  Description of Artificial Sequence: Synthetic oligonucleotide
gcuuucccgguuggaggag

SEQ ID NO: 2423081 - RNA, 19 nt, Artificial Sequence
  Description of Artificial Sequence: Synthetic oligonucleotide
gcguguguccaaaggcuga

SEQ ID NO: 2423082 - RNA, 19 nt, Artificial Sequence
  Description of Artificial Sequence: Synthetic oligonucleotide
accguccgcacaggcucug

SEQ ID NO: 2423083 - RNA, 19 nt, Artificial Sequence
  Description of Artificial Sequence: Synthetic oligonucleotide
gacgggugccacauagguu

SEQ ID NO: 2423084 - RNA, 19 nt, Artificial Sequence
  Description of Artificial Sequence: Synthetic oligonucleotide
cacauggagccugugcuuu

SEQ ID NO: 2423085 - RNA, 19 nt, Artificial Sequence
  Description of Artificial Sequence: Synthetic oligonucleotide
gcggaugagggaaggcaga

SEQ ID NO: 2423086 - RNA, 19 nt, Artificial Sequence
  Description of Artificial Sequence: Synthetic oligonucleotide
uggcugcaacgcuguccaa

SEQ ID NO: 2423087 - RNA, 19 nt, Artificial Sequence
  Description of Artificial Sequence: Synthetic oligonucleotide
gagauuccccuuggauuau

SEQ ID NO: 2423088 - RNA, 19 nt, Artificial Sequence
  Description of Artificial Sequence: Synthetic oligonucleotide
ccagacccaucguaggugu

SEQ ID NO: 2423089 - RNA, 19 nt, Artificial Sequence
  Description of Artificial Sequence: Synthetic oligonucleotide
cagcccuuuucaguguagu

SEQ ID NO: 2423090 - RNA, 19 nt, Artificial Sequence
  Description of Artificial Sequence: Synthetic oligonucleotide
cccuuggauuauuauaauu

SEQ ID NO: 2423091 - RNA, 19 nt, Artificial Sequence
  Description of Artificial Sequence: Synthetic oligonucleotide
gcacuuuaaggcacuuggu

SEQ ID NO: 2423092 - RNA, 19 nt, Artificial Sequence
  Description of Artificial Sequence: Synthetic oligonucleotide
gggugccacauagguuagc

SEQ ID NO: 2423093 - RNA, 19 nt, Artificial Sequence
  Description of Artificial Sequence: Synthetic oligonucleotide
ccauuccaguguccacaug

SEQ ID NO: 2423094 - RNA, 19 nt, Artificial Sequence
  Description of Artificial Sequence: Synthetic oligonucleotide
gcaccaccguccgcacagg

SEQ ID NO: 2423095 - RNA, 19 nt, Artificial Sequence
  Description of Artificial Sequence: Synthetic oligonucleotide
ccgaugccaugaucugguc

SEQ ID NO: 2423096 - RNA, 19 nt, Artificial Sequence
  Description of Artificial Sequence: Synthetic oligonucleotide
gguuccauuucaggcccgu

SEQ ID NO: 2423097 - RNA, 19 nt, Artificial Sequence
  Description of Artificial Sequence: Synthetic oligonucleotide
cggccaugguccagagaag

SEQ ID NO: 2423098 - RNA, 19 nt, Artificial Sequence
  Description of Artificial Sequence: Synthetic oligonucleotide
caccgaggugauugcuccu

SEQ ID NO: 2423099 - RNA, 19 nt, Artificial Sequence
  Description of Artificial Sequence: Synthetic oligonucleotide
cgggugccacauagguuag

SEQ ID NO: 2423100 - RNA, 19 nt, Artificial Sequence
  Description of Artificial Sequence: Synthetic oligonucleotide
cggugaggucauacaagca

SEQ ID NO: 2423101 - RNA, 19 nt, Artificial Sequence
  Description of Artificial Sequence: Synthetic oligonucleotide
ccaccccagacccaucgua

SEQ ID NO: 2423102 - RNA, 19 nt, Artificial Sequence
  Description of Artificial Sequence: Synthetic oligonucleotide
gcuguccaacagggauaag

SEQ ID NO: 2423103 - RNA, 19 nt, Artificial Sequence
  Description of Artificial Sequence: Synthetic oligonucleotide
cguggguagcaggggcucc

SEQ ID NO: 2423104 - RNA, 19 nt, Artificial Sequence
  Description of Artificial Sequence: Synthetic oligonucleotide
gcggguggucagucuccac

SEQ ID NO: 2423105 - RNA, 19 nt, Artificial Sequence
  Description of Artificial Sequence: Synthetic oligonucleotide
caccguccgcacaggcucu

SEQ ID NO: 2423106 - RNA, 19 nt, Artificial Sequence
  Description of Artificial Sequence: Synthetic oligonucleotide
ccguggguagcaggggcuc

SEQ ID NO: 2423107 - RNA, 19 nt, Artificial Sequence
  Description of Artificial Sequence: Synthetic oligonucleotide
ggguaaacgcaugcuccau

SEQ ID NO: 2423108 - RNA, 19 nt, Artificial Sequence
  Description of Artificial Sequence: Synthetic oligonucleotide
cgcuguccaacagggauaa

SEQ ID NO: 2423109 - RNA, 19 nt, Artificial Sequence
  Description of Artificial Sequence: Synthetic oligonucleotide
ccguuguugucaccuggcu

SEQ ID NO: 2423110 - RNA, 19 nt, Artificial Sequence
  Description of Artificial Sequence: Synthetic oligonucleotide
ccccagacccaucguaggu

SEQ ID NO: 2423111 - RNA, 19 nt, Artificial Sequence
  Description of Artificial Sequence: Synthetic oligonucleotide
gcacaccgaggugauugcu

SEQ ID NO: 2423112 - RNA, 19 nt, Artificial Sequence
  Description of Artificial Sequence: Synthetic oligonucleotide
ccccuuggauuauuauaau

SEQ ID NO: 2423113 - RNA, 19 nt, Artificial Sequence
  Description of Artificial Sequence: Synthetic oligonucleotide
caguguccacauggagccu

SEQ ID NO: 2423114 - RNA, 19 nt, Artificial Sequence
  Description of Artificial Sequence: Synthetic oligonucleotide
ggggcuccagcgggguaaa

SEQ ID NO: 2423115 - RNA, 19 nt, Artificial Sequence
  Description of Artificial Sequence: Synthetic oligonucleotide
cgaggugauugcuccuggu

SEQ ID NO: 2423116 - RNA, 19 nt, Artificial Sequence
  Description of Artificial Sequence: Synthetic oligonucleotide
cguccgcacaggcucugaa

SEQ ID NO: 2423117 - RNA, 19 nt, Artificial Sequence
  Description of Artificial Sequence: Synthetic oligonucleotide
cuccuucggugaggucaua

SEQ ID NO: 2423118 - RNA, 19 nt, Artificial Sequence
  Description of Artificial Sequence: Synthetic oligonucleotide
ccguccgcacaggcucuga

SEQ ID NO: 2423119 - RNA, 19 nt, Artificial Sequence
  Description of Artificial Sequence: Synthetic oligonucleotide
aaucuuguggagcaaaucc

SEQ ID NO: 2423120 - RNA, 19 nt, Artificial Sequence
  Description of Artificial Sequence: Synthetic oligonucleotide
uugaacuugaggaagaacc

SEQ ID NO: 2423121 - RNA, 19 nt, Artificial Sequence
  Description of Artificial Sequence: Synthetic oligonucleotide
acaagcaugaacuauaucu

SEQ ID NO: 2423122 - RNA, 19 nt, Artificial Sequence
  Description of Artificial Sequence: Synthetic oligonucleotide
uuugaauugagauuugcag

SEQ ID NO: 2423123 - RNA, 19 nt, Artificial Sequence
  Description of Artificial Sequence: Synthetic oligonucleotide
uuguaaacaagcaugaacu

SEQ ID NO: 2423124 - RNA, 19 nt, Artificial Sequence
  Description of Artificial Sequence: Synthetic oligonucleotide
aaaacaaucuuguggagca

SEQ ID NO: 2423125 - RNA, 19 nt, Artificial Sequence
  Description of Artificial Sequence: Synthetic oligonucleotide
uaguuugugaaguaguacg

SEQ ID NO: 2423126 - RNA, 19 nt, Artificial Sequence
  Description of Artificial Sequence: Synthetic oligonucleotide
ucuuuuaacaccaguuccg

SEQ ID NO: 2423127 - RNA, 19 nt, Artificial Sequence
  Description of Artificial Sequence: Synthetic oligonucleotide
uauuagacaaaguuugucc

SEQ ID NO: 2423128 - RNA, 19 nt, Artificial Sequence
  Description of Artificial Sequence: Synthetic oligonucleotide
aaucugaagugcuaggaag

SEQ ID NO: 2423129 - RNA, 19 nt, Artificial Sequence
  Description of Artificial Sequence: Synthetic oligonucleotide
aaucuguguagacaucccc

SEQ ID NO: 2423130 - RNA, 19 nt, Artificial Sequence
  Description of Artificial Sequence: Synthetic oligonucleotide
ugaauugagauuugcagcc

SEQ ID NO: 2423131 - RNA, 19 nt, Artificial Sequence
  Description of Artificial Sequence: Synthetic oligonucleotide
ugaagugcuaggaagguag

SEQ ID NO: 2423132 - RNA, 19 nt, Artificial Sequence
  Description of Artificial Sequence: Synthetic oligonucleotide
aaguuuguccaauaguuug

SEQ ID NO: 2423133 - RNA, 19 nt, Artificial Sequence
  Description of Artificial Sequence: Synthetic oligonucleotide
agaggugucuuuuaacacc

SEQ ID NO: 2423134 - RNA, 19 nt, Artificial Sequence
  Description of Artificial Sequence: Synthetic oligonucleotide
aaucacaaagcuuaguaau

SEQ ID NO: 2423135 - RNA, 19 nt, Artificial Sequence
  Description of Artificial Sequence: Synthetic oligonucleotide
ucugcuauuagacaaaguu

SEQ ID NO: 2423136 - RNA, 19 nt, Artificial Sequence
  Description of Artificial Sequence: Synthetic oligonucleotide
uuaaauacgcuuuucucug

SEQ ID NO: 2423137 - RNA, 19 nt, Artificial Sequence
  Description of Artificial Sequence: Synthetic oligonucleotide
uugaauugagauuugcagc

SEQ ID NO: 2423138 - RNA, 19 nt, Artificial Sequence
  Description of Artificial Sequence: Synthetic oligonucleotide
aagaggugucuuuuaacac

SEQ ID NO: 2423139 - RNA, 19 nt, Artificial Sequence
  Description of Artificial Sequence: Synthetic oligonucleotide
aauggaauucuuuccuguc

SEQ ID NO: 2423140 - RNA, 19 nt, Artificial Sequence
  Description of Artificial Sequence: Synthetic oligonucleotide
uggguguugaacuugagga

SEQ ID NO: 2423141 - RNA, 19 nt, Artificial Sequence
  Description of Artificial Sequence: Synthetic oligonucleotide
aggucaguagaugauaucc

SEQ ID NO: 2423142 - RNA, 19 nt, Artificial Sequence
  Description of Artificial Sequence: Synthetic oligonucleotide
aacuauaucugccagcaau

SEQ ID NO: 2423143 - RNA, 19 nt, Artificial Sequence
  Description of Artificial Sequence: Synthetic oligonucleotide
aacccaaaaucacaaagcu

SEQ ID NO: 2423144 - RNA, 19 nt, Artificial Sequence
  Description of Artificial Sequence: Synthetic oligonucleotide
ugaucauacagcccaaagc

SEQ ID NO: 2423145 - RNA, 19 nt, Artificial Sequence
  Description of Artificial Sequence: Synthetic oligonucleotide
aucucaaugaucauacagc

SEQ ID NO: 2423146 - RNA, 19 nt, Artificial Sequence
  Description of Artificial Sequence: Synthetic oligonucleotide
gaugauauccucucugcag

SEQ ID NO: 2423147 - RNA, 19 nt, Artificial Sequence
  Description of Artificial Sequence: Synthetic oligonucleotide
aauccguugagcuuugggu

SEQ ID NO: 2423148 - RNA, 19 nt, Artificial Sequence
  Description of Artificial Sequence: Synthetic oligonucleotide
aaagaugggacucuuggaa

SEQ ID NO: 2423149 - RNA, 19 nt, Artificial Sequence
  Description of Artificial Sequence: Synthetic oligonucleotide
agggaaauggaauucuuuc

SEQ ID NO: 2423150 - RNA, 19 nt, Artificial Sequence
  Description of Artificial Sequence: Synthetic oligonucleotide
auuacugcuugucagguug

SEQ ID NO: 2423151 - RNA, 19 nt, Artificial Sequence
  Description of Artificial Sequence: Synthetic oligonucleotide
uucgcaaaaggucaguaga

SEQ ID NO: 2423152 - RNA, 19 nt, Artificial Sequence
  Description of Artificial Sequence: Synthetic oligonucleotide
uugauaggcggcauuauca

SEQ ID NO: 2423153 - RNA, 19 nt, Artificial Sequence
  Description of Artificial Sequence: Synthetic oligonucleotide
ucauacaaccuccagcaug

SEQ ID NO: 2423154 - RNA, 19 nt, Artificial Sequence
  Description of Artificial Sequence: Synthetic oligonucleotide
cauacaaccuccagcaugc

SEQ ID NO: 2423155 - RNA, 19 nt, Artificial Sequence
  Description of Artificial Sequence: Synthetic oligonucleotide
cugcuugucagguugauag

SEQ ID NO: 2423156 - RNA, 19 nt, Artificial Sequence
  Description of Artificial Sequence: Synthetic oligonucleotide
aaaucacaaagcuuaguaa

SEQ ID NO: 2423157 - RNA, 19 nt, Artificial Sequence
  Description of Artificial Sequence: Synthetic oligonucleotide
aguuccggagcucuguacc

SEQ ID NO: 2423158 - RNA, 19 nt, Artificial Sequence
  Description of Artificial Sequence: Synthetic oligonucleotide
auuagacaaaguuugucca

SEQ ID NO: 2423159 - RNA, 19 nt, Artificial Sequence
  Description of Artificial Sequence: Synthetic oligonucleotide
ugcucuuucaguuaaccgu

SEQ ID NO: 2423160 - RNA, 19 nt, Artificial Sequence
  Description of Artificial Sequence: Synthetic oligonucleotide
uucgugcugggauugaccg

SEQ ID NO: 2423161 - RNA, 19 nt, Artificial Sequence
  Description of Artificial Sequence: Synthetic oligonucleotide
uuggguauuucuuucuugc

SEQ ID NO: 2423162 - RNA, 19 nt, Artificial Sequence
  Description of Artificial Sequence: Synthetic oligonucleotide
augaacuauaucugccagc

SEQ ID NO: 2423163 - RNA, 19 nt, Artificial Sequence
  Description of Artificial Sequence: Synthetic oligonucleotide
uuggguguugaacuugagg

SEQ ID NO: 2423164 - RNA, 19 nt, Artificial Sequence
  Description of Artificial Sequence: Synthetic oligonucleotide
uuugugaaguaguacgucu

SEQ ID NO: 2423165 - RNA, 19 nt, Artificial Sequence
  Description of Artificial Sequence: Synthetic oligonucleotide
caucucaaugaucauacag

SEQ ID NO: 2423166 - RNA, 19 nt, Artificial Sequence
  Description of Artificial Sequence: Synthetic oligonucleotide
uauugugaauggcaguuca

SEQ ID NO: 2423167 - RNA, 19 nt, Artificial Sequence
  Description of Artificial Sequence: Synthetic oligonucleotide
auaggcggcauuaucauac

SEQ ID NO: 2423168 - RNA, 19 nt, Artificial Sequence
  Description of Artificial Sequence: Synthetic oligonucleotide
ugucuuuuaacaccaguuc

SEQ ID NO: 2423169 - RNA, 19 nt, Artificial Sequence
  Description of Artificial Sequence: Synthetic oligonucleotide
gauauugugcaggugcggg

SEQ ID NO: 2423170 - RNA, 19 nt, Artificial Sequence
  Description of Artificial Sequence: Synthetic oligonucleotide
uuucaguuaaccgugaauu

SEQ ID NO: 2423171 - RNA, 19 nt, Artificial Sequence
  Description of Artificial Sequence: Synthetic oligonucleotide
uggcaguucagggaaaugg

SEQ ID NO: 2423172 - RNA, 19 nt, Artificial Sequence
  Description of Artificial Sequence: Synthetic oligonucleotide
guugccuacuuuuaaaaca

SEQ ID NO: 2423173 - RNA, 19 nt, Artificial Sequence
  Description of Artificial Sequence: Synthetic oligonucleotide
aagauauugugcaggugcg

SEQ ID NO: 2423174 - RNA, 19 nt, Artificial Sequence
  Description of Artificial Sequence: Synthetic oligonucleotide
uuguccaauaguuugugaa

SEQ ID NO: 2423175 - RNA, 19 nt, Artificial Sequence
  Description of Artificial Sequence: Synthetic oligonucleotide
ucgaucauuaaauacgcuu

SEQ ID NO: 2423176 - RNA, 19 nt, Artificial Sequence
  Description of Artificial Sequence: Synthetic oligonucleotide
uuucgcaaaaggucaguag

SEQ ID NO: 2423177 - RNA, 19 nt, Artificial Sequence
  Description of Artificial Sequence: Synthetic oligonucleotide
ugcagggucaauuuguaaa

SEQ ID NO: 2423178 - RNA, 19 nt, Artificial Sequence
  Description of Artificial Sequence: Synthetic oligonucleotide
caguuaaccgugaauuggg

SEQ ID NO: 2423179 - RNA, 19 nt, Artificial Sequence
  Description of Artificial Sequence: Synthetic oligonucleotide
uugucagguugauaggcgg

SEQ ID NO: 2423180 - RNA, 19 nt, Artificial Sequence
  Description of Artificial Sequence: Synthetic oligonucleotide
uuaacaccaguuccggagc

SEQ ID NO: 2423181 - RNA, 19 nt, Artificial Sequence
  Description of Artificial Sequence: Synthetic oligonucleotide
aacaagcaugaacuauauc

SEQ ID NO: 2423182 - RNA, 19 nt, Artificial Sequence
  Description of Artificial Sequence: Synthetic oligonucleotide
agcaugaacuauaucugcc

SEQ ID NO: 2423183 - RNA, 19 nt, Artificial Sequence
  Description of Artificial Sequence: Synthetic oligonucleotide
aaggucaguagaugauauc

SEQ ID NO: 2423184 - RNA, 19 nt, Artificial Sequence
  Description of Artificial Sequence: Synthetic oligonucleotide
uugcucuuucaguuaaccg

SEQ ID NO: 2423185 - RNA, 19 nt, Artificial Sequence
  Description of Artificial Sequence: Synthetic oligonucleotide
guagaugauauccucucug

SEQ ID NO: 2423186 - RNA, 19 nt, Artificial Sequence
  Description of Artificial Sequence: Synthetic oligonucleotide
uccacucgccauuugauca

SEQ ID NO: 2423187 - RNA, 19 nt, Artificial Sequence
  Description of Artificial Sequence: Synthetic oligonucleotide
guaaucuguguagacaucc

SEQ ID NO: 2423188 - RNA, 19 nt, Artificial Sequence
  Description of Artificial Sequence: Synthetic oligonucleotide
uucaguuaaccgugaauug

SEQ ID NO: 2423189 - RNA, 19 nt, Artificial Sequence
  Description of Artificial Sequence: Synthetic oligonucleotide
uccaaaucugaagugcuag

SEQ ID NO: 2423190 - RNA, 19 nt, Artificial Sequence
  Description of Artificial Sequence: Synthetic oligonucleotide
ucuuuuguuuccacucgcc

SEQ ID NO: 2423191 - RNA, 19 nt, Artificial Sequence
  Description of Artificial Sequence: Synthetic oligonucleotide
uggaaaagauauugugcag

SEQ ID NO: 2423192 - RNA, 19 nt, Artificial Sequence
  Description of Artificial Sequence: Synthetic oligonucleotide
uuuggguauuucuuucuug

SEQ ID NO: 2423193 - RNA, 19 nt, Artificial Sequence
  Description of Artificial Sequence: Synthetic oligonucleotide
cuaguguccuugcaaaccc

SEQ ID NO: 2423194 - RNA, 19 nt, Artificial Sequence
  Description of Artificial Sequence: Synthetic oligonucleotide
ugguuuuccauaagaggug

SEQ ID NO: 2423195 - RNA, 19 nt, Artificial Sequence
  Description of Artificial Sequence: Synthetic oligonucleotide
auauccucucugcaggguc

SEQ ID NO: 2423196 - RNA, 19 nt, Artificial Sequence
  Description of Artificial Sequence: Synthetic oligonucleotide
augaucauacagcccaaag

SEQ ID NO: 2423197 - RNA, 19 nt, Artificial Sequence
  Description of Artificial Sequence: Synthetic oligonucleotide
uucgccuguauugugaaug

SEQ ID NO: 2423198 - RNA, 19 nt, Artificial Sequence
  Description of Artificial Sequence: Synthetic oligonucleotide
uuugcucuuucaguuaacc

SEQ ID NO: 2423199 - RNA, 19 nt, Artificial Sequence
  Description of Artificial Sequence: Synthetic oligonucleotide
ugugaaguaguacgucucu

SEQ ID NO: 2423200 - RNA, 19 nt, Artificial Sequence
  Description of Artificial Sequence: Synthetic oligonucleotide
ucagaguucgugcugggau

SEQ ID NO: 2423201 - RNA, 19 nt, Artificial Sequence
  Description of Artificial Sequence: Synthetic oligonucleotide
ggcauuaucauacaaccuc

SEQ ID NO: 2423202 - RNA, 19 nt, Artificial Sequence
  Description of Artificial Sequence: Synthetic oligonucleotide
ugagcuuuggguauuucuu

SEQ ID NO: 2423203 - RNA, 19 nt, Artificial Sequence
  Description of Artificial Sequence: Synthetic oligonucleotide
uguauugugaauggcaguu

SEQ ID NO: 2423204 - RNA, 19 nt, Artificial Sequence
  Description of Artificial Sequence: Synthetic oligonucleotide
ugauauccucucugcaggg

SEQ ID NO: 2423205 - RNA, 19 nt, Artificial Sequence
  Description of Artificial Sequence: Synthetic oligonucleotide
acguaaucuguguagacau

SEQ ID NO: 2423206 - RNA, 19 nt, Artificial Sequence
  Description of Artificial Sequence: Synthetic oligonucleotide
ucuuguggagcaaauccaa

SEQ ID NO: 2423207 - RNA, 19 nt, Artificial Sequence
  Description of Artificial Sequence: Synthetic oligonucleotide
caugaacuauaucugccag

SEQ ID NO: 2423208 - RNA, 19 nt, Artificial Sequence
  Description of Artificial Sequence: Synthetic oligonucleotide
acuauaucugccagcaauc

SEQ ID NO: 2423209 - RNA, 19 nt, Artificial Sequence
  Description of Artificial Sequence: Synthetic oligonucleotide
aauccaaaucugaagugcu

SEQ ID NO: 2423210 - RNA, 19 nt, Artificial Sequence
  Description of Artificial Sequence: Synthetic oligonucleotide
auauugugcaggugcgggg

SEQ ID NO: 2423211 - RNA, 19 nt, Artificial Sequence
  Description of Artificial Sequence: Synthetic oligonucleotide
uuuggcuuugcgugggacc

SEQ ID NO: 2423212 - RNA, 19 nt, Artificial Sequence
  Description of Artificial Sequence: Synthetic oligonucleotide
uuuuguuuccacucgccau

SEQ ID NO: 2423213 - RNA, 19 nt, Artificial Sequence
  Description of Artificial Sequence: Synthetic oligonucleotide
aagaugggacucuuggaaa

SEQ ID NO: 2423214 - RNA, 19 nt, Artificial Sequence
  Description of Artificial Sequence: Synthetic oligonucleotide
uuucauuuccuucgccugu

SEQ ID NO: 2423215 - RNA, 19 nt, Artificial Sequence
  Description of Artificial Sequence: Synthetic oligonucleotide
uugagcuuuggguauuucu

SEQ ID NO: 2423216 - RNA, 19 nt, Artificial Sequence
  Description of Artificial Sequence: Synthetic oligonucleotide
cuugucugcuauuagacaa

SEQ ID NO: 2423217 - RNA, 19 nt, Artificial Sequence
  Description of Artificial Sequence: Synthetic oligonucleotide
aucagauuacugcuuguca

SEQ ID NO: 2423218 - RNA, 19 nt, Artificial Sequence
  Description of Artificial Sequence: Synthetic oligonucleotide
guucgaucauuaaauacgc

SEQ ID NO: 2423219 - RNA, 19 nt, Artificial Sequence
  Description of Artificial Sequence: Synthetic oligonucleotide
uuuguuuccacucgccauu

SEQ ID NO: 2423220 - RNA, 19 nt, Artificial Sequence
  Description of Artificial Sequence: Synthetic oligonucleotide
uuagacaaaguuuguccaa

SEQ ID NO: 2423221 - RNA, 19 nt, Artificial Sequence
  Description of Artificial Sequence: Synthetic oligonucleotide
uuugcgugggaccuguguc

SEQ ID NO: 2423222 - RNA, 19 nt, Artificial Sequence
  Description of Artificial Sequence: Synthetic oligonucleotide
ggucaauuuguaaacaagc

SEQ ID NO: 2423223 - RNA, 19 nt, Artificial Sequence
  Description of Artificial Sequence: Synthetic oligonucleotide
aauaguuugugaaguagua

SEQ ID NO: 2423224 - RNA, 19 nt, Artificial Sequence
  Description of Artificial Sequence: Synthetic oligonucleotide
ucuugucugcuauuagaca

SEQ ID NO: 2423225 - RNA, 19 nt, Artificial Sequence
  Description of Artificial Sequence: Synthetic oligonucleotide
aucugaagugcuaggaagg

SEQ ID NO: 2423226 - RNA, 19 nt, Artificial Sequence
  Description of Artificial Sequence: Synthetic oligonucleotide
aguucagggaaauggaauu

SEQ ID NO: 2423227 - RNA, 19 nt, Artificial Sequence
  Description of Artificial Sequence: Synthetic oligonucleotide
ucgccauuugaucacucug

SEQ ID NO: 2423228 - RNA, 19 nt, Artificial Sequence
  Description of Artificial Sequence: Synthetic oligonucleotide
aaaagauauugugcaggug

SEQ ID NO: 2423229 - RNA, 19 nt, Artificial Sequence
  Description of Artificial Sequence: Synthetic oligonucleotide
uguaaacaagcaugaacua

SEQ ID NO: 2423230 - RNA, 19 nt, Artificial Sequence
  Description of Artificial Sequence: Synthetic oligonucleotide
ucgccuguauugugaaugg

SEQ ID NO: 2423231 - RNA, 19 nt, Artificial Sequence
  Description of Artificial Sequence: Synthetic oligonucleotide
uacaaccuccagcaugcag

SEQ ID NO: 2423232 - RNA, 19 nt, Artificial Sequence
  Description of Artificial Sequence: Synthetic oligonucleotide
aaaaggucaguagaugaua

SEQ ID NO: 2423233 - RNA, 19 nt, Artificial Sequence
  Description of Artificial Sequence: Synthetic oligonucleotide
uuguggagcaaauccaaau

SEQ ID NO: 2423234 - RNA, 19 nt, Artificial Sequence
  Description of Artificial Sequence: Synthetic oligonucleotide
uugugaaguaguacgucuc

SEQ ID NO: 2423235 - RNA, 19 nt, Artificial Sequence
  Description of Artificial Sequence: Synthetic oligonucleotide
accaccccggcaaagaugg

SEQ ID NO: 2423236 - RNA, 19 nt, Artificial Sequence
  Description of Artificial Sequence: Synthetic oligonucleotide
ucucuguuuggcuuugcgu

SEQ ID NO: 2423237 - RNA, 19 nt, Artificial Sequence
  Description of Artificial Sequence: Synthetic oligonucleotide
ugucagguugauaggcggc

SEQ ID NO: 2423238 - RNA, 19 nt, Artificial Sequence
  Description of Artificial Sequence: Synthetic oligonucleotide
auaucugccagcaauccgu

SEQ ID NO: 2423239 - RNA, 19 nt, Artificial Sequence
  Description of Artificial Sequence: Synthetic oligonucleotide
gcggcauuaucauacaacc

SEQ ID NO: 2423240 - RNA, 19 nt, Artificial Sequence
  Description of Artificial Sequence: Synthetic oligonucleotide
gaccggguuucgcaaaagg

SEQ ID NO: 2423241 - RNA, 19 nt, Artificial Sequence
  Description of Artificial Sequence: Synthetic oligonucleotide
acgcuuuucucuguuuggc

SEQ ID NO: 2423242 - RNA, 19 nt, Artificial Sequence
  Description of Artificial Sequence: Synthetic oligonucleotide
ugcuugucagguugauagg

SEQ ID NO: 2423243 - RNA, 19 nt, Artificial Sequence
  Description of Artificial Sequence: Synthetic oligonucleotide
cuauuagacaaaguuuguc

SEQ ID NO: 2423244 - RNA, 19 nt, Artificial Sequence
  Description of Artificial Sequence: Synthetic oligonucleotide
aguagaugauauccucucu

SEQ ID NO: 2423245 - RNA, 19 nt, Artificial Sequence
  Description of Artificial Sequence: Synthetic oligonucleotide
aaauacgcuuuucucuguu

SEQ ID NO: 2423246 - RNA, 19 nt, Artificial Sequence
  Description of Artificial Sequence: Synthetic oligonucleotide
uuuguccaauaguuuguga

SEQ ID NO: 2423247 - RNA, 19 nt, Artificial Sequence
  Description of Artificial Sequence: Synthetic oligonucleotide
agaugauauccucucugca

SEQ ID NO: 2423248 - RNA, 19 nt, Artificial Sequence
  Description of Artificial Sequence: Synthetic oligonucleotide
agauuugcagccaucagau

SEQ ID NO: 2423249 - RNA, 19 nt, Artificial Sequence
  Description of Artificial Sequence: Synthetic oligonucleotide
ucagguugccuacuuuuaa

SEQ ID NO: 2423250 - RNA, 19 nt, Artificial Sequence
  Description of Artificial Sequence: Synthetic oligonucleotide
ugucugcuauuagacaaag

SEQ ID NO: 2423251 - RNA, 19 nt, Artificial Sequence
  Description of Artificial Sequence: Synthetic oligonucleotide
cuauaucugccagcaaucc

SEQ ID NO: 2423252 - RNA, 19 nt, Artificial Sequence
  Description of Artificial Sequence: Synthetic oligonucleotide
uccagcaugcaggucuucg

SEQ ID NO: 2423253 - RNA, 19 nt, Artificial Sequence
  Description of Artificial Sequence: Synthetic oligonucleotide
caguagaugauauccucuc

SEQ ID NO: 2423254 - RNA, 19 nt, Artificial Sequence
  Description of Artificial Sequence: Synthetic oligonucleotide
caauccguugagcuuuggg

SEQ ID NO: 2423255 - RNA, 19 nt, Artificial Sequence
  Description of Artificial Sequence: Synthetic oligonucleotide
gugaauuggggugggagag

SEQ ID NO: 2423256 - RNA, 19 nt, Artificial Sequence
  Description of Artificial Sequence: Synthetic oligonucleotide
uauccucucugcaggguca

SEQ ID NO: 2423257 - RNA, 19 nt, Artificial Sequence
  Description of Artificial Sequence: Synthetic oligonucleotide
caaaguuuguccaauaguu

SEQ ID NO: 2423258 - RNA, 19 nt, Artificial Sequence
  Description of Artificial Sequence: Synthetic oligonucleotide
gucaguagaugauauccuc

SEQ ID NO: 2423259 - RNA, 19 nt, Artificial Sequence
  Description of Artificial Sequence: Synthetic oligonucleotide
ugauaggcggcauuaucau

SEQ ID NO: 2423260 - RNA, 19 nt, Artificial Sequence
  Description of Artificial Sequence: Synthetic oligonucleotide
aaaguuuguccaauaguuu

SEQ ID NO: 2423261 - RNA, 19 nt, Artificial Sequence
  Description of Artificial Sequence: Synthetic oligonucleotide
acucuggccuguucgauca

SEQ ID NO: 2423262 - RNA, 19 nt, Artificial Sequence
  Description of Artificial Sequence: Synthetic oligonucleotide
uuccuuucauuuccuucgc

SEQ ID NO: 2423263 - RNA, 19 nt, Artificial Sequence
  Description of Artificial Sequence: Synthetic oligonucleotide
gugggagagguuugaauug

SEQ ID NO: 2423264 - RNA, 19 nt, Artificial Sequence
  Description of Artificial Sequence: Synthetic oligonucleotide
agggucaauuuguaaacaa

SEQ ID NO: 2423265 - RNA, 19 nt, Artificial Sequence
  Description of Artificial Sequence: Synthetic oligonucleotide
ccuguauugugaauggcag

SEQ ID NO: 2423266 - RNA, 19 nt, Artificial Sequence
  Description of Artificial Sequence: Synthetic oligonucleotide
uaaauacgcuuuucucugu

SEQ ID NO: 2423267 - RNA, 19 nt, Artificial Sequence
  Description of Artificial Sequence: Synthetic oligonucleotide
uucgaucauuaaauacgcu

SEQ ID NO: 2423268 - RNA, 19 nt, Artificial Sequence
  Description of Artificial Sequence: Synthetic oligonucleotide
uugcgugggaccugugucc

SEQ ID NO: 2423269 - RNA, 19 nt, Artificial Sequence
  Description of Artificial Sequence: Synthetic oligonucleotide
uuuccuucgccuguauugu

SEQ ID NO: 2423270 - RNA, 19 nt, Artificial Sequence
  Description of Artificial Sequence: Synthetic oligonucleotide
uugucugcuauuagacaaa

SEQ ID NO: 2423271 - RNA, 19 nt, Artificial Sequence
  Description of Artificial Sequence: Synthetic oligonucleotide
agaugggacucuuggaaaa

SEQ ID NO: 2423272 - RNA, 19 nt, Artificial Sequence
  Description of Artificial Sequence: Synthetic oligonucleotide
ucuuucaguuaaccgugaa

SEQ ID NO: 2423273 - RNA, 19 nt, Artificial Sequence
  Description of Artificial Sequence: Synthetic oligonucleotide
gcaaaaggucaguagauga

SEQ ID NO: 2423274 - RNA, 19 nt, Artificial Sequence
  Description of Artificial Sequence: Synthetic oligonucleotide
uagggauugccaguggcca

SEQ ID NO: 2423275 - RNA, 19 nt, Artificial Sequence
  Description of Artificial Sequence: Synthetic oligonucleotide
agguugccuacuuuuaaaa

SEQ ID NO: 2423276 - RNA, 19 nt, Artificial Sequence
  Description of Artificial Sequence: Synthetic oligonucleotide
agauauugugcaggugcgg

SEQ ID NO: 2423277 - RNA, 19 nt, Artificial Sequence
  Description of Artificial Sequence: Synthetic oligonucleotide
aguuaaccgugaauugggg

SEQ ID NO: 2423278 - RNA, 19 nt, Artificial Sequence
  Description of Artificial Sequence: Synthetic oligonucleotide
aguuugugaaguaguacgu

SEQ ID NO: 2423279 - RNA, 19 nt, Artificial Sequence
  Description of Artificial Sequence: Synthetic oligonucleotide
uauugugcaggugcggggu

SEQ ID NO: 2423280 - RNA, 19 nt, Artificial Sequence
  Description of Artificial Sequence: Synthetic oligonucleotide
ucuucgcuggcaccaucag

SEQ ID NO: 2423281 - RNA, 19 nt, Artificial Sequence
  Description of Artificial Sequence: Synthetic oligonucleotide
uccaauaguuugugaagua

SEQ ID NO: 2423282 - RNA, 19 nt, Artificial Sequence
  Description of Artificial Sequence: Synthetic oligonucleotide
guuuccacucgccauuuga

SEQ ID NO: 2423283 - RNA, 19 nt, Artificial Sequence
  Description of Artificial Sequence: Synthetic oligonucleotide
gaggugucuuuuaacacca

SEQ ID NO: 2423284 - RNA, 19 nt, Artificial Sequence
  Description of Artificial Sequence: Synthetic oligonucleotide
uuccugucgcaucuggaaa

SEQ ID NO: 2423285 - RNA, 19 nt, Artificial Sequence
  Description of Artificial Sequence: Synthetic oligonucleotide
aauggcaguucagggaaau

SEQ ID NO: 2423286 - RNA, 19 nt, Artificial Sequence
  Description of Artificial Sequence: Synthetic oligonucleotide
uagacaaaguuuguccaau

SEQ ID NO: 2423287 - RNA, 19 nt, Artificial Sequence
  Description of Artificial Sequence: Synthetic oligonucleotide
uuuugcucuuucaguuaac

SEQ ID NO: 2423288 - RNA, 19 nt, Artificial Sequence
  Description of Artificial Sequence: Synthetic oligonucleotide
uaggaagguagggauugcc

SEQ ID NO: 2423289 - RNA, 19 nt, Artificial Sequence
  Description of Artificial Sequence: Synthetic oligonucleotide
uuacugcuugucagguuga

SEQ ID NO: 2423290 - RNA, 19 nt, Artificial Sequence
  Description of Artificial Sequence: Synthetic oligonucleotide
agauuacugcuugucaggu

SEQ ID NO: 2423291 - RNA, 19 nt, Artificial Sequence
  Description of Artificial Sequence: Synthetic oligonucleotide
guuuguccaauaguuugug

SEQ ID NO: 2423292 - RNA, 19 nt, Artificial Sequence
  Description of Artificial Sequence: Synthetic oligonucleotide
cuuuuguuuccacucgcca

SEQ ID NO: 2423293 - RNA, 19 nt, Artificial Sequence
  Description of Artificial Sequence: Synthetic oligonucleotide
cauaagaggugucuuuuaa

SEQ ID NO: 2423294 - RNA, 19 nt, Artificial Sequence
  Description of Artificial Sequence: Synthetic oligonucleotide
uuccauaagaggugucuuu

SEQ ID NO: 2423295 - RNA, 19 nt, Artificial Sequence
  Description of Artificial Sequence: Synthetic oligonucleotide
agcgaguggccacguaauc

SEQ ID NO: 2423296 - RNA, 19 nt, Artificial Sequence
  Description of Artificial Sequence: Synthetic oligonucleotide
uccguugagcuuuggguau

SEQ ID NO: 2423297 - RNA, 19 nt, Artificial Sequence
  Description of Artificial Sequence: Synthetic oligonucleotide
uccauaagaggugucuuuu

SEQ ID NO: 2423298 - RNA, 19 nt, Artificial Sequence
  Description of Artificial Sequence: Synthetic oligonucleotide
uuccacucgccauuugauc

SEQ ID NO: 2423299 - RNA, 19 nt, Artificial Sequence
  Description of Artificial Sequence: Synthetic oligonucleotide
caauaguuugugaaguagu

SEQ ID NO: 2423300 - RNA, 19 nt, Artificial Sequence
  Description of Artificial Sequence: Synthetic oligonucleotide
aguucgugcugggauugac

SEQ ID NO: 2423301 - RNA, 19 nt, Artificial Sequence
  Description of Artificial Sequence: Synthetic oligonucleotide
cauuaucauacaaccucca

SEQ ID NO: 2423302 - RNA, 19 nt, Artificial Sequence
  Description of Artificial Sequence: Synthetic oligonucleotide
auugugcaggugcgggguc

SEQ ID NO: 2423303 - RNA, 19 nt, Artificial Sequence
  Description of Artificial Sequence: Synthetic oligonucleotide
gguugccuacuuuuaaaac

SEQ ID NO: 2423304 - RNA, 19 nt, Artificial Sequence
  Description of Artificial Sequence: Synthetic oligonucleotide
gguagggauugccaguggc

SEQ ID NO: 2423305 - RNA, 19 nt, Artificial Sequence
  Description of Artificial Sequence: Synthetic oligonucleotide
agacauccccaggagccgc

SEQ ID NO: 2423306 - RNA, 19 nt, Artificial Sequence
  Description of Artificial Sequence: Synthetic oligonucleotide
caucagauuacugcuuguc

SEQ ID NO: 2423307 - RNA, 19 nt, Artificial Sequence
  Description of Artificial Sequence: Synthetic oligonucleotide
gauugaccggguuucgcaa

SEQ ID NO: 2423308 - RNA, 19 nt, Artificial Sequence
  Description of Artificial Sequence: Synthetic oligonucleotide
ggaaauggaauucuuuccu

SEQ ID NO: 2423309 - RNA, 19 nt, Artificial Sequence
  Description of Artificial Sequence: Synthetic oligonucleotide
gggucaauuuguaaacaag

SEQ ID NO: 2423310 - RNA, 19 nt, Artificial Sequence
  Description of Artificial Sequence: Synthetic oligonucleotide
aucacucuggccuguucga

SEQ ID NO: 2423311 - RNA, 19 nt, Artificial Sequence
  Description of Artificial Sequence: Synthetic oligonucleotide
ucgugcugggauugaccgg

SEQ ID NO: 2423312 - RNA, 19 nt, Artificial Sequence
  Description of Artificial Sequence: Synthetic oligonucleotide
uugaccggguuucgcaaaa

SEQ ID NO: 2423313 - RNA, 19 nt, Artificial Sequence
  Description of Artificial Sequence: Synthetic oligonucleotide
uuuccauaagaggugucuu

SEQ ID NO: 2423314 - RNA, 19 nt, Artificial Sequence
  Description of Artificial Sequence: Synthetic oligonucleotide
gguuugaauugagauuugc

SEQ ID NO: 2423315 - RNA, 19 nt, Artificial Sequence
  Description of Artificial Sequence: Synthetic oligonucleotide
agaguucgugcugggauug

SEQ ID NO: 2423316 - RNA, 19 nt, Artificial Sequence
  Description of Artificial Sequence: Synthetic oligonucleotide
accccggcaaagaugggac

SEQ ID NO: 2423317 - RNA, 19 nt, Artificial Sequence
  Description of Artificial Sequence: Synthetic oligonucleotide
gccaucucaaugaucauac

SEQ ID NO: 2423318 - RNA, 19 nt, Artificial Sequence
  Description of Artificial Sequence: Synthetic oligonucleotide
gcuaggaagguagggauug

SEQ ID NO: 2423319 - RNA, 19 nt, Artificial Sequence
  Description of Artificial Sequence: Synthetic oligonucleotide
ccaauaguuugugaaguag

SEQ ID NO: 2423320 - RNA, 19 nt, Artificial Sequence
  Description of Artificial Sequence: Synthetic oligonucleotide
ugcggggucagguugccua

SEQ ID NO: 2423321 - RNA, 19 nt, Artificial Sequence
  Description of Artificial Sequence: Synthetic oligonucleotide
ggccacguaaucuguguag

SEQ ID NO: 2423322 - RNA, 19 nt, Artificial Sequence
  Description of Artificial Sequence: Synthetic oligonucleotide
ggcaccaucagaguucgug

SEQ ID NO: 2423323 - RNA, 19 nt, Artificial Sequence
  Description of Artificial Sequence: Synthetic oligonucleotide
gagcaaauccaaaucugaa

SEQ ID NO: 2423324 - RNA, 19 nt, Artificial Sequence
  Description of Artificial Sequence: Synthetic oligonucleotide
gccaucagauuacugcuug

SEQ ID NO: 2423325 - RNA, 19 nt, Artificial Sequence
  Description of Artificial Sequence: Synthetic oligonucleotide
gcuaguguccuugcaaacc

SEQ ID NO: 2423326 - RNA, 19 nt, Artificial Sequence
  Description of Artificial Sequence: Synthetic oligonucleotide
uccggagcucuguaccagc

SEQ ID NO: 2423327 - RNA, 19 nt, Artificial Sequence
  Description of Artificial Sequence: Synthetic oligonucleotide
cugggauugaccggguuuc

SEQ ID NO: 2423328 - RNA, 19 nt, Artificial Sequence
  Description of Artificial Sequence: Synthetic oligonucleotide
caucagaguucgugcuggg

SEQ ID NO: 2423329 - RNA, 19 nt, Artificial Sequence
  Description of Artificial Sequence: Synthetic oligonucleotide
aaccgugaauugggguggg

SEQ ID NO: 2423330 - RNA, 19 nt, Artificial Sequence
  Description of Artificial Sequence: Synthetic oligonucleotide
gcucuuucaguuaaccgug

SEQ ID NO: 2423331 - RNA, 19 nt, Artificial Sequence
  Description of Artificial Sequence: Synthetic oligonucleotide
guucagggaaauggaauuc

SEQ ID NO: 2423332 - RNA, 19 nt, Artificial Sequence
  Description of Artificial Sequence: Synthetic oligonucleotide
agguagggauugccagugg

SEQ ID NO: 2423333 - RNA, 19 nt, Artificial Sequence
  Description of Artificial Sequence: Synthetic oligonucleotide
cacguaaucuguguagaca

SEQ ID NO: 2423334 - RNA, 19 nt, Artificial Sequence
  Description of Artificial Sequence: Synthetic oligonucleotide
caaucuuguggagcaaauc

SEQ ID NO: 2423335 - RNA, 19 nt, Artificial Sequence
  Description of Artificial Sequence: Synthetic oligonucleotide
gaaguaguacgucucuuuu

SEQ ID NO: 2423336 - RNA, 19 nt, Artificial Sequence
  Description of Artificial Sequence: Synthetic oligonucleotide
agaaccaccccggcaaaga

SEQ ID NO: 2423337 - RNA, 19 nt, Artificial Sequence
  Description of Artificial Sequence: Synthetic oligonucleotide
aaccaccccggcaaagaug

SEQ ID NO: 2423338 - RNA, 19 nt, Artificial Sequence
  Description of Artificial Sequence: Synthetic oligonucleotide
cuguuuggcuuugcguggg

SEQ ID NO: 2423339 - RNA, 19 nt, Artificial Sequence
  Description of Artificial Sequence: Synthetic oligonucleotide
guuaaccgugaauuggggu

SEQ ID NO: 2423340 - RNA, 19 nt, Artificial Sequence
  Description of Artificial Sequence: Synthetic oligonucleotide
auugaccggguuucgcaaa

SEQ ID NO: 2423341 - RNA, 19 nt, Artificial Sequence
  Description of Artificial Sequence: Synthetic oligonucleotide
uuccuucgccuguauugug

SEQ ID NO: 2423342 - RNA, 19 nt, Artificial Sequence
  Description of Artificial Sequence: Synthetic oligonucleotide
ugggauugaccggguuucg

SEQ ID NO: 2423343 - RNA, 19 nt, Artificial Sequence
  Description of Artificial Sequence: Synthetic oligonucleotide
ggagcaaauccaaaucuga

SEQ ID NO: 2423344 - RNA, 19 nt, Artificial Sequence
  Description of Artificial Sequence: Synthetic oligonucleotide
uaggcggcauuaucauaca

SEQ ID NO: 2423345 - RNA, 19 nt, Artificial Sequence
  Description of Artificial Sequence: Synthetic oligonucleotide
guucgugcugggauugacc

SEQ ID NO: 2423346 - RNA, 19 nt, Artificial Sequence
  Description of Artificial Sequence: Synthetic oligonucleotide
uuccggagcucuguaccag

SEQ ID NO: 2423347 - RNA, 19 nt, Artificial Sequence
  Description of Artificial Sequence: Synthetic oligonucleotide
cugccagcaauccguugag

SEQ ID NO: 2423348 - RNA, 19 nt, Artificial Sequence
  Description of Artificial Sequence: Synthetic oligonucleotide
gauaggcggcauuaucaua

SEQ ID NO: 2423349 - RNA, 19 nt, Artificial Sequence
  Description of Artificial Sequence: Synthetic oligonucleotide
ggauugaccggguuucgca

SEQ ID NO: 2423350 - RNA, 19 nt, Artificial Sequence
  Description of Artificial Sequence: Synthetic oligonucleotide
aaacaaucuuguggagcaa

SEQ ID NO: 2423351 - RNA, 19 nt, Artificial Sequence
  Description of Artificial Sequence: Synthetic oligonucleotide
uucauuuccuucgccugua

SEQ ID NO: 2423352 - RNA, 19 nt, Artificial Sequence
  Description of Artificial Sequence: Synthetic oligonucleotide
uggccacguaaucugugua

SEQ ID NO: 2423353 - RNA, 19 nt, Artificial Sequence
  Description of Artificial Sequence: Synthetic oligonucleotide
aucauacaaccuccagcau

SEQ ID NO: 2423354 - RNA, 19 nt, Artificial Sequence
  Description of Artificial Sequence: Synthetic oligonucleotide
cuuguggagcaaauccaaa

SEQ ID NO: 2423355 - RNA, 19 nt, Artificial Sequence
  Description of Artificial Sequence: Synthetic oligonucleotide
ggcggcauuaucauacaac

SEQ ID NO: 2423356 - RNA, 19 nt, Artificial Sequence
  Description of Artificial Sequence: Synthetic oligonucleotide
caaaaggucaguagaugau

SEQ ID NO: 2423357 - RNA, 19 nt, Artificial Sequence
  Description of Artificial Sequence: Synthetic oligonucleotide
ggacucuuggaaaagauau

SEQ ID NO: 2423358 - RNA, 19 nt, Artificial Sequence
  Description of Artificial Sequence: Synthetic oligonucleotide
guauugugaauggcaguuc

SEQ ID NO: 2423359 - RNA, 19 nt, Artificial Sequence
  Description of Artificial Sequence: Synthetic oligonucleotide
aggugcggggucagguugc

SEQ ID NO: 2423360 - RNA, 19 nt, Artificial Sequence
  Description of Artificial Sequence: Synthetic oligonucleotide
cugcuauuagacaaaguuu

SEQ ID NO: 2423361 - RNA, 19 nt, Artificial Sequence
  Description of Artificial Sequence: Synthetic oligonucleotide
cacucuggccuguucgauc

SEQ ID NO: 2423362 - RNA, 19 nt, Artificial Sequence
  Description of Artificial Sequence: Synthetic oligonucleotide
ccaucagaguucgugcugg

SEQ ID NO: 2423363 - RNA, 19 nt, Artificial Sequence
  Description of Artificial Sequence: Synthetic oligonucleotide
caugcaggucuucgcuggc

SEQ ID NO: 2423364 - RNA, 19 nt, Artificial Sequence
  Description of Artificial Sequence: Synthetic oligonucleotide
acaaucuuguggagcaaau

SEQ ID NO: 2423365 - RNA, 19 nt, Artificial Sequence
  Description of Artificial Sequence: Synthetic oligonucleotide
cuaggaagguagggauugc

SEQ ID NO: 2423366 - RNA, 19 nt, Artificial Sequence
  Description of Artificial Sequence: Synthetic oligonucleotide
cagguugccuacuuuuaaa

SEQ ID NO: 2423367 - RNA, 19 nt, Artificial Sequence
  Description of Artificial Sequence: Synthetic oligonucleotide
ugaccggguuucgcaaaag

SEQ ID NO: 2423368 - RNA, 19 nt, Artificial Sequence
  Description of Artificial Sequence: Synthetic oligonucleotide
caguuccggagcucuguac

SEQ ID NO: 2423369 - RNA, 19 nt, Artificial Sequence
  Description of Artificial Sequence: Synthetic oligonucleotide
agguugauaggcggcauua

SEQ ID NO: 2423370 - RNA, 19 nt, Artificial Sequence
  Description of Artificial Sequence: Synthetic oligonucleotide
uugugcaggugcgggguca

SEQ ID NO: 2423371 - RNA, 19 nt, Artificial Sequence
  Description of Artificial Sequence: Synthetic oligonucleotide
uccccaggagccgcuagug

SEQ ID NO: 2423372 - RNA, 19 nt, Artificial Sequence
  Description of Artificial Sequence: Synthetic oligonucleotide
gucagguugauaggcggca

SEQ ID NO: 2423373 - RNA, 19 nt, Artificial Sequence
  Description of Artificial Sequence: Synthetic oligonucleotide
gaagaaccaccccggcaaa

SEQ ID NO: 2423374 - RNA, 19 nt, Artificial Sequence
  Description of Artificial Sequence: Synthetic oligonucleotide
auccccaggagccgcuagu

SEQ ID NO: 2423375 - RNA, 19 nt, Artificial Sequence
  Description of Artificial Sequence: Synthetic oligonucleotide
ugcgugggaccuguguccu

SEQ ID NO: 2423376 - RNA, 19 nt, Artificial Sequence
  Description of Artificial Sequence: Synthetic oligonucleotide
gugucuuuuaacaccaguu

SEQ ID NO: 2423377 - RNA, 19 nt, Artificial Sequence
  Description of Artificial Sequence: Synthetic oligonucleotide
gaacuauaucugccagcaa

SEQ ID NO: 2423378 - RNA, 19 nt, Artificial Sequence
  Description of Artificial Sequence: Synthetic oligonucleotide
guuucgcaaaaggucagua

SEQ ID NO: 2423379 - RNA, 19 nt, Artificial Sequence
  Description of Artificial Sequence: Synthetic oligonucleotide
aucagaguucgugcuggga

SEQ ID NO: 2423380 - RNA, 19 nt, Artificial Sequence
  Description of Artificial Sequence: Synthetic oligonucleotide
gagccgcuaguguccuugc

SEQ ID NO: 2423381 - RNA, 19 nt, Artificial Sequence
  Description of Artificial Sequence: Synthetic oligonucleotide
cucuuucaguuaaccguga

SEQ ID NO: 2423382 - RNA, 19 nt, Artificial Sequence
  Description of Artificial Sequence: Synthetic oligonucleotide
cgugcugggauugaccggg

SEQ ID NO: 2423383 - RNA, 19 nt, Artificial Sequence
  Description of Artificial Sequence: Synthetic oligonucleotide
auggcaguucagggaaaug

SEQ ID NO: 2423384 - RNA, 19 nt, Artificial Sequence
  Description of Artificial Sequence: Synthetic oligonucleotide
gugcuaggaagguagggau

SEQ ID NO: 2423385 - RNA, 19 nt, Artificial Sequence
  Description of Artificial Sequence: Synthetic oligonucleotide
ggagccgcuaguguccuug

SEQ ID NO: 2423386 - RNA, 19 nt, Artificial Sequence
  Description of Artificial Sequence: Synthetic oligonucleotide
ggguguugaacuugaggaa

SEQ ID NO: 2423387 - RNA, 19 nt, Artificial Sequence
  Description of Artificial Sequence: Synthetic oligonucleotide
acucgccauuugaucacuc

SEQ ID NO: 2423388 - RNA, 19 nt, Artificial Sequence
  Description of Artificial Sequence: Synthetic oligonucleotide
cuucgcuggcaccaucaga

SEQ ID NO: 2423389 - RNA, 19 nt, Artificial Sequence
  Description of Artificial Sequence: Synthetic oligonucleotide
agguuugaauugagauuug

SEQ ID NO: 2423390 - RNA, 19 nt, Artificial Sequence
  Description of Artificial Sequence: Synthetic oligonucleotide
ugccagcaauccguugagc

SEQ ID NO: 2423391 - RNA, 19 nt, Artificial Sequence
  Description of Artificial Sequence: Synthetic oligonucleotide
cgaguggccacguaaucug

SEQ ID NO: 2423392 - RNA, 19 nt, Artificial Sequence
  Description of Artificial Sequence: Synthetic oligonucleotide
ggccuguucgaucauuaaa

SEQ ID NO: 2423393 - RNA, 19 nt, Artificial Sequence
  Description of Artificial Sequence: Synthetic oligonucleotide
ggugucuuuuaacaccagu

SEQ ID NO: 2423394 - RNA, 19 nt, Artificial Sequence
  Description of Artificial Sequence: Synthetic oligonucleotide
cagggucaauuuguaaaca

SEQ ID NO: 2423395 - RNA, 19 nt, Artificial Sequence
  Description of Artificial Sequence: Synthetic oligonucleotide
cauccccaggagccgcuag

SEQ ID NO: 2423396 - RNA, 19 nt, Artificial Sequence
  Description of Artificial Sequence: Synthetic oligonucleotide
ucacucuggccuguucgau

SEQ ID NO: 2423397 - RNA, 19 nt, Artificial Sequence
  Description of Artificial Sequence: Synthetic oligonucleotide
ggagagguuugaauugaga

SEQ ID NO: 2423398 - RNA, 19 nt, Artificial Sequence
  Description of Artificial Sequence: Synthetic oligonucleotide
cuguauugugaauggcagu

SEQ ID NO: 2423399 - RNA, 19 nt, Artificial Sequence
  Description of Artificial Sequence: Synthetic oligonucleotide
ccacguaaucuguguagac

SEQ ID NO: 2423400 - RNA, 19 nt, Artificial Sequence
  Description of Artificial Sequence: Synthetic oligonucleotide
gccagcaauccguugagcu

SEQ ID NO: 2423401 - RNA, 19 nt, Artificial Sequence
  Description of Artificial Sequence: Synthetic oligonucleotide
gauauccucucugcagggu

SEQ ID NO: 2423402 - RNA, 19 nt, Artificial Sequence
  Description of Artificial Sequence: Synthetic oligonucleotide
gauuacugcuugucagguu

SEQ ID NO: 2423403 - RNA, 19 nt, Artificial Sequence
  Description of Artificial Sequence: Synthetic oligonucleotide
auccaaaucugaagugcua

SEQ ID NO: 2423404 - RNA, 19 nt, Artificial Sequence
  Description of Artificial Sequence: Synthetic oligonucleotide
ggguuucgcaaaaggucag

SEQ ID NO: 2423405 - RNA, 19 nt, Artificial Sequence
  Description of Artificial Sequence: Synthetic oligonucleotide
ccggagcucuguaccagcg

SEQ ID NO: 2423406 - RNA, 19 nt, Artificial Sequence
  Description of Artificial Sequence: Synthetic oligonucleotide
guggccacguaaucugugu

SEQ ID NO: 2423407 - RNA, 19 nt, Artificial Sequence
  Description of Artificial Sequence: Synthetic oligonucleotide
cggguuucgcaaaagguca

SEQ ID NO: 2423408 - RNA, 19 nt, Artificial Sequence
  Description of Artificial Sequence: Synthetic oligonucleotide
uacugcuugucagguugau

SEQ ID NO: 2423409 - RNA, 19 nt, Artificial Sequence
  Description of Artificial Sequence: Synthetic oligonucleotide
cuuugcgugggaccugugu

SEQ ID NO: 2423410 - RNA, 19 nt, Artificial Sequence
  Description of Artificial Sequence: Synthetic oligonucleotide
ccgugaauuggggugggag

SEQ ID NO: 2423411 - RNA, 19 nt, Artificial Sequence
  Description of Artificial Sequence: Synthetic oligonucleotide
agccgcuaguguccuugca

SEQ ID NO: 2423412 - RNA, 19 nt, Artificial Sequence
  Description of Artificial Sequence: Synthetic oligonucleotide
gaaccaccccggcaaagau

SEQ ID NO: 2423413 - RNA, 19 nt, Artificial Sequence
  Description of Artificial Sequence: Synthetic oligonucleotide
gguuuuccauaagaggugu

SEQ ID NO: 2423414 - RNA, 19 nt, Artificial Sequence
  Description of Artificial Sequence: Synthetic oligonucleotide
uggccaucucaaugaucau

SEQ ID NO: 2423415 - RNA, 19 nt, Artificial Sequence
  Description of Artificial Sequence: Synthetic oligonucleotide
gccuguucgaucauuaaau

SEQ ID NO: 2423416 - RNA, 19 nt, Artificial Sequence
  Description of Artificial Sequence: Synthetic oligonucleotide
cucgccauuugaucacucu

SEQ ID NO: 2423417 - RNA, 19 nt, Artificial Sequence
  Description of Artificial Sequence: Synthetic oligonucleotide
ccacucgccauuugaucac

SEQ ID NO: 2423418 - RNA, 19 nt, Artificial Sequence
  Description of Artificial Sequence: Synthetic oligonucleotide
gucagguugccuacuuuua

SEQ ID NO: 2423419 - RNA, 19 nt, Artificial Sequence
  Description of Artificial Sequence: Synthetic oligonucleotide
cagggaaauggaauucuuu

SEQ ID NO: 2423420 - RNA, 19 nt, Artificial Sequence
  Description of Artificial Sequence: Synthetic oligonucleotide
gccacguaaucuguguaga

SEQ ID NO: 2423421 - RNA, 19 nt, Artificial Sequence
  Description of Artificial Sequence: Synthetic oligonucleotide
caccaguuccggagcucug

SEQ ID NO: 2423422 - RNA, 19 nt, Artificial Sequence
  Description of Artificial Sequence: Synthetic oligonucleotide
gcaggucuucgcuggcacc

SEQ ID NO: 2423423 - RNA, 19 nt, Artificial Sequence
  Description of Artificial Sequence: Synthetic oligonucleotide
gggauugaccggguuucgc

SEQ ID NO: 2423424 - RNA, 19 nt, Artificial Sequence
  Description of Artificial Sequence: Synthetic oligonucleotide
gccgcuaguguccuugcaa

SEQ ID NO: 2423425 - RNA, 19 nt, Artificial Sequence
  Description of Artificial Sequence: Synthetic oligonucleotide
guguccucuugucugcuau

SEQ ID NO: 2423426 - RNA, 19 nt, Artificial Sequence
  Description of Artificial Sequence: Synthetic oligonucleotide
caccccggcaaagauggga

SEQ ID NO: 2423427 - RNA, 19 nt, Artificial Sequence
  Description of Artificial Sequence: Synthetic oligonucleotide
gacucuuggaaaagauauu

SEQ ID NO: 2423428 - RNA, 19 nt, Artificial Sequence
  Description of Artificial Sequence: Synthetic oligonucleotide
cagcaugcaggucuucgcu

SEQ ID NO: 2423429 - RNA, 19 nt, Artificial Sequence
  Description of Artificial Sequence: Synthetic oligonucleotide
gcaguucagggaaauggaa

SEQ ID NO: 2423430 - RNA, 19 nt, Artificial Sequence
  Description of Artificial Sequence: Synthetic oligonucleotide
ggucaguagaugauauccu

SEQ ID NO: 2423431 - RNA, 19 nt, Artificial Sequence
  Description of Artificial Sequence: Synthetic oligonucleotide
uggcuuugcgugggaccug

SEQ ID NO: 2423432 - RNA, 19 nt, Artificial Sequence
  Description of Artificial Sequence: Synthetic oligonucleotide
cgcaaaaggucaguagaug

SEQ ID NO: 2423433 - RNA, 19 nt, Artificial Sequence
  Description of Artificial Sequence: Synthetic oligonucleotide
gauuugcagccaucagauu

SEQ ID NO: 2423434 - RNA, 19 nt, Artificial Sequence
  Description of Artificial Sequence: Synthetic oligonucleotide
cgugaauuggggugggaga

SEQ ID NO: 2423435 - RNA, 19 nt, Artificial Sequence
  Description of Artificial Sequence: Synthetic oligonucleotide
auacaaccuccagcaugca

SEQ ID NO: 2423436 - RNA, 19 nt, Artificial Sequence
  Description of Artificial Sequence: Synthetic oligonucleotide
gcuauuagacaaaguuugu

SEQ ID NO: 2423437 - RNA, 19 nt, Artificial Sequence
  Description of Artificial Sequence: Synthetic oligonucleotide
cguaaucuguguagacauc

SEQ ID NO: 2423438 - RNA, 19 nt, Artificial Sequence
  Description of Artificial Sequence: Synthetic oligonucleotide
gggauugccaguggccauc

SEQ ID NO: 2423439 - RNA, 19 nt, Artificial Sequence
  Description of Artificial Sequence: Synthetic oligonucleotide
gggacucuuggaaaagaua

SEQ ID NO: 2423440 - RNA, 19 nt, Artificial Sequence
  Description of Artificial Sequence: Synthetic oligonucleotide
ggccaucucaaugaucaua

SEQ ID NO: 2423441 - RNA, 19 nt, Artificial Sequence
  Description of Artificial Sequence: Synthetic oligonucleotide
cgaucauuaaauacgcuuu

SEQ ID NO: 2423442 - RNA, 19 nt, Artificial Sequence
  Description of Artificial Sequence: Synthetic oligonucleotide
ccagcgaguggccacguaa

SEQ ID NO: 2423443 - RNA, 19 nt, Artificial Sequence
  Description of Artificial Sequence: Synthetic oligonucleotide
cccggcaaagaugggacuc

SEQ ID NO: 2423444 - RNA, 19 nt, Artificial Sequence
  Description of Artificial Sequence: Synthetic oligonucleotide
cagaguucgugcugggauu

SEQ ID NO: 2423445 - RNA, 19 nt, Artificial Sequence
  Description of Artificial Sequence: Synthetic oligonucleotide
cuguaccagcgaguggcca

SEQ ID NO: 2423446 - RNA, 19 nt, Artificial Sequence
  Description of Artificial Sequence: Synthetic oligonucleotide
gggaccuguguccucuugu

SEQ ID NO: 2423447 - RNA, 19 nt, Artificial Sequence
  Description of Artificial Sequence: Synthetic oligonucleotide
uaccagcgaguggccacgu

SEQ ID NO: 2423448 - RNA, 19 nt, Artificial Sequence
  Description of Artificial Sequence: Synthetic oligonucleotide
gaguggccacguaaucugu

SEQ ID NO: 2423449 - RNA, 19 nt, Artificial Sequence
  Description of Artificial Sequence: Synthetic oligonucleotide
accgugaauugggguggga

SEQ ID NO: 2423450 - RNA, 19 nt, Artificial Sequence
  Description of Artificial Sequence: Synthetic oligonucleotide
cgcuaguguccuugcaaac

SEQ ID NO: 2423451 - RNA, 19 nt, Artificial Sequence
  Description of Artificial Sequence: Synthetic oligonucleotide
ccgcuaguguccuugcaaa

SEQ ID NO: 2423452 - RNA, 19 nt, Artificial Sequence
  Description of Artificial Sequence: Synthetic oligonucleotide
gcggggucagguugccuac

SEQ ID NO: 2423453 - RNA, 19 nt, Artificial Sequence
  Description of Artificial Sequence: Synthetic oligonucleotide
gucugcuauuagacaaagu

SEQ ID NO: 2423454 - RNA, 19 nt, Artificial Sequence
  Description of Artificial Sequence: Synthetic oligonucleotide
gcugggauugaccggguuu

SEQ ID NO: 2423455 - RNA, 19 nt, Artificial Sequence
  Description of Artificial Sequence: Synthetic oligonucleotide
cagcgaguggccacguaau

SEQ ID NO: 2423456 - RNA, 19 nt, Artificial Sequence
  Description of Artificial Sequence: Synthetic oligonucleotide
gcaauccguugagcuuugg

SEQ ID NO: 2423457 - RNA, 19 nt, Artificial Sequence
  Description of Artificial Sequence: Synthetic oligonucleotide
ccuucgccuguauugugaa

SEQ ID NO: 2423458 - RNA, 19 nt, Artificial Sequence
  Description of Artificial Sequence: Synthetic oligonucleotide
accagcgaguggccacgua

SEQ ID NO: 2423459 - RNA, 19 nt, Artificial Sequence
  Description of Artificial Sequence: Synthetic oligonucleotide
ccaucucaaugaucauaca

SEQ ID NO: 2423460 - RNA, 19 nt, Artificial Sequence
  Description of Artificial Sequence: Synthetic oligonucleotide
gcgaguggccacguaaucu

SEQ ID NO: 2423461 - RNA, 19 nt, Artificial Sequence
  Description of Artificial Sequence: Synthetic oligonucleotide
aggucuucgcuggcaccau

SEQ ID NO: 2423462 - RNA, 19 nt, Artificial Sequence
  Description of Artificial Sequence: Synthetic oligonucleotide
gguuucgcaaaaggucagu

SEQ ID NO: 2423463 - RNA, 19 nt, Artificial Sequence
  Description of Artificial Sequence: Synthetic oligonucleotide
ggugcggggucagguugcc

SEQ ID NO: 2423464 - RNA, 19 nt, Artificial Sequence
  Description of Artificial Sequence: Synthetic oligonucleotide
cuucgccuguauugugaau

SEQ ID NO: 2423465 - RNA, 19 nt, Artificial Sequence
  Description of Artificial Sequence: Synthetic oligonucleotide
cagguugauaggcggcauu

SEQ ID NO: 2423466 - RNA, 19 nt, Artificial Sequence
  Description of Artificial Sequence: Synthetic oligonucleotide
cuccagcaugcaggucuuc

SEQ ID NO: 2423467 - RNA, 19 nt, Artificial Sequence
  Description of Artificial Sequence: Synthetic oligonucleotide
gguugauaggcggcauuau

SEQ ID NO: 2423468 - RNA, 19 nt, Artificial Sequence
  Description of Artificial Sequence: Synthetic oligonucleotide
cgccuguauugugaauggc

SEQ ID NO: 2423469 - RNA, 19 nt, Artificial Sequence
  Description of Artificial Sequence: Synthetic oligonucleotide
ccagcaauccguugagcuu

SEQ ID NO: 2423470 - RNA, 19 nt, Artificial Sequence
  Description of Artificial Sequence: Synthetic oligonucleotide
ccaucagauuacugcuugu

SEQ ID NO: 2423471 - RNA, 19 nt, Artificial Sequence
  Description of Artificial Sequence: Synthetic oligonucleotide
aggagccgcuaguguccuu

SEQ ID NO: 2423472 - RNA, 19 nt, Artificial Sequence
  Description of Artificial Sequence: Synthetic oligonucleotide
ccaccccggcaaagauggg

SEQ ID NO: 2423473 - RNA, 19 nt, Artificial Sequence
  Description of Artificial Sequence: Synthetic oligonucleotide
cggcauuaucauacaaccu

SEQ ID NO: 2423474 - RNA, 19 nt, Artificial Sequence
  Description of Artificial Sequence: Synthetic oligonucleotide
ccaguuccggagcucugua

SEQ ID NO: 2423475 - RNA, 19 nt, Artificial Sequence
  Description of Artificial Sequence: Synthetic oligonucleotide
caggagccgcuaguguccu

SEQ ID NO: 2423476 - RNA, 19 nt, Artificial Sequence
  Description of Artificial Sequence: Synthetic oligonucleotide
gcuuugcgugggaccugug

SEQ ID NO: 2423477 - RNA, 19 nt, Artificial Sequence
  Description of Artificial Sequence: Synthetic oligonucleotide
cucuggccuguucgaucau

SEQ ID NO: 2423478 - RNA, 19 nt, Artificial Sequence
  Description of Artificial Sequence: Synthetic oligonucleotide
gugcggggucagguugccu

SEQ ID NO: 2423479 - RNA, 19 nt, Artificial Sequence
  Description of Artificial Sequence: Synthetic oligonucleotide
ccccggcaaagaugggacu

SEQ ID NO: 2423480 - RNA, 19 nt, Artificial Sequence
  Description of Artificial Sequence: Synthetic oligonucleotide
ccuccagcaugcaggucuu

SEQ ID NO: 2423481 - RNA, 19 nt, Artificial Sequence
  Description of Artificial Sequence: Synthetic oligonucleotide
ccguugagcuuuggguauu

SEQ ID NO: 2423482 - RNA, 19 nt, Artificial Sequence
  Description of Artificial Sequence: Synthetic oligonucleotide
cggggucagguugccuacu

SEQ ID NO: 2423483 - RNA, 19 nt, Artificial Sequence
  Description of Artificial Sequence: Synthetic oligonucleotide
ugaugagagacaaaggugc

SEQ ID NO: 2423484 - RNA, 19 nt, Artificial Sequence
  Description of Artificial Sequence: Synthetic oligonucleotide
acccauacagcauaggccc

SEQ ID NO: 2423485 - RNA, 19 nt, Artificial Sequence
  Description of Artificial Sequence: Synthetic oligonucleotide
uaauagucgaucacugugg

SEQ ID NO: 2423486 - RNA, 19 nt, Artificial Sequence
  Description of Artificial Sequence: Synthetic oligonucleotide
uuauaauagucgaucacug

SEQ ID NO: 2423487 - RNA, 19 nt, Artificial Sequence
  Description of Artificial Sequence: Synthetic oligonucleotide
agcauaaccucugacaccc

SEQ ID NO: 2423488 - RNA, 19 nt, Artificial Sequence
  Description of Artificial Sequence: Synthetic oligonucleotide
uccucuaccaccuuccuag

SEQ ID NO: 2423489 - RNA, 19 nt, Artificial Sequence
  Description of Artificial Sequence: Synthetic oligonucleotide
agugcuaccucucugggag

SEQ ID NO: 2423490 - RNA, 19 nt, Artificial Sequence
  Description of Artificial Sequence: Synthetic oligonucleotide
acacccauacagcauaggc

SEQ ID NO: 2423491 - RNA, 19 nt, Artificial Sequence
  Description of Artificial Sequence: Synthetic oligonucleotide
ugaguuagaccucugcacc

SEQ ID NO: 2423492 - RNA, 19 nt, Artificial Sequence
  Description of Artificial Sequence: Synthetic oligonucleotide
gauggaaacucccacaguc

SEQ ID NO: 2423493 - RNA, 19 nt, Artificial Sequence
  Description of Artificial Sequence: Synthetic oligonucleotide
cauccaucgguuauaauag

SEQ ID NO: 2423494 - RNA, 19 nt, Artificial Sequence
  Description of Artificial Sequence: Synthetic oligonucleotide
aaaggugcugcugggaucg

SEQ ID NO: 2423495 - RNA, 19 nt, Artificial Sequence
  Description of Artificial Sequence: Synthetic oligonucleotide
uguacguggcacaugaccu

SEQ ID NO: 2423496 - RNA, 19 nt, Artificial Sequence
  Description of Artificial Sequence: Synthetic oligonucleotide
ucuuggucauaccagcuga

SEQ ID NO: 2423497 - RNA, 19 nt, Artificial Sequence
  Description of Artificial Sequence: Synthetic oligonucleotide
uccucuacccaucuucucc

SEQ ID NO: 2423498 - RNA, 19 nt, Artificial Sequence
  Description of Artificial Sequence: Synthetic oligonucleotide
cuugauugaaguccccagg

SEQ ID NO: 2423499 - RNA, 19 nt, Artificial Sequence
  Description of Artificial Sequence: Synthetic oligonucleotide
agaauaguagccgaggcca

SEQ ID NO: 2423500 - RNA, 19 nt, Artificial Sequence
  Description of Artificial Sequence: Synthetic oligonucleotide
cuacccaucuucuccaagg

SEQ ID NO: 2423501 - RNA, 19 nt, Artificial Sequence
  Description of Artificial Sequence: Synthetic oligonucleotide
aggcaauggaagcaauggc

SEQ ID NO: 2423502 - RNA, 19 nt, Artificial Sequence
  Description of Artificial Sequence: Synthetic oligonucleotide
gagaauaguagccgaggcc

SEQ ID NO: 2423503 - RNA, 19 nt, Artificial Sequence
  Description of Artificial Sequence: Synthetic oligonucleotide
uaaccucugacacccauac

SEQ ID NO: 2423504 - RNA, 19 nt, Artificial Sequence
  Description of Artificial Sequence: Synthetic oligonucleotide
uauaauagucgaucacugu

SEQ ID NO: 2423505 - RNA, 19 nt, Artificial Sequence
  Description of Artificial Sequence: Synthetic oligonucleotide
uggucauaccagcugagca

SEQ ID NO: 2423506 - RNA, 19 nt, Artificial Sequence
  Description of Artificial Sequence: Synthetic oligonucleotide
agaccagcucugcaguucc

SEQ ID NO: 2423507 - RNA, 19 nt, Artificial Sequence
  Description of Artificial Sequence: Synthetic oligonucleotide
ugauugaaguccccaggcc

SEQ ID NO: 2423508 - RNA, 19 nt, Artificial Sequence
  Description of Artificial Sequence: Synthetic oligonucleotide
uagucgaucacuguggcaa

SEQ ID NO: 2423509 - RNA, 19 nt, Artificial Sequence
  Description of Artificial Sequence: Synthetic oligonucleotide
aguugguucacuuccucca

SEQ ID NO: 2423510 - RNA, 19 nt, Artificial Sequence
  Description of Artificial Sequence: Synthetic oligonucleotide
cugaguuagaccucugcac

SEQ ID NO: 2423511 - RNA, 19 nt, Artificial Sequence
  Description of Artificial Sequence: Synthetic oligonucleotide
ucgguuauaauagucgauc

SEQ ID NO: 2423512 - RNA, 19 nt, Artificial Sequence
  Description of Artificial Sequence: Synthetic oligonucleotide
gaaacucccacaguccugc

SEQ ID NO: 2423513 - RNA, 19 nt, Artificial Sequence
  Description of Artificial Sequence: Synthetic oligonucleotide
ucgagaauaguagccgagg

SEQ ID NO: 2423514 - RNA, 19 nt, Artificial Sequence
  Description of Artificial Sequence: Synthetic oligonucleotide
gaucacuguggcaacuugg

SEQ ID NO: 2423515 - RNA, 19 nt, Artificial Sequence
  Description of Artificial Sequence: Synthetic oligonucleotide
cagagugcuaccucucugg

SEQ ID NO: 2423516 - RNA, 19 nt, Artificial Sequence
  Description of Artificial Sequence: Synthetic oligonucleotide
uggaaacucccacaguccu

SEQ ID NO: 2423517 - RNA, 19 nt, Artificial Sequence
  Description of Artificial Sequence: Synthetic oligonucleotide
uccaucgguuauaauaguc

SEQ ID NO: 2423518 - RNA, 19 nt, Artificial Sequence
  Description of Artificial Sequence: Synthetic oligonucleotide
ucugagggcuccaaggcaa

SEQ ID NO: 2423519 - RNA, 19 nt, Artificial Sequence
  Description of Artificial Sequence: Synthetic oligonucleotide
ggaagcacuggccaggucc

SEQ ID NO: 2423520 - RNA, 19 nt, Artificial Sequence
  Description of Artificial Sequence: Synthetic oligonucleotide
ugagcaagguccuucggaa

SEQ ID NO: 2423521 - RNA, 19 nt, Artificial Sequence
  Description of Artificial Sequence: Synthetic oligonucleotide
agcagaccugaguuagacc

SEQ ID NO: 2423522 - RNA, 19 nt, Artificial Sequence
  Description of Artificial Sequence: Synthetic oligonucleotide
aguagccgaggccagacca

SEQ ID NO: 2423523 - RNA, 19 nt, Artificial Sequence
  Description of Artificial Sequence: Synthetic oligonucleotide
uuagaccucugcaccagca

SEQ ID NO: 2423524 - RNA, 19 nt, Artificial Sequence
  Description of Artificial Sequence: Synthetic oligonucleotide
accaauggcgcggacacgg

SEQ ID NO: 2423525 - RNA, 19 nt, Artificial Sequence
  Description of Artificial Sequence: Synthetic oligonucleotide
accuccuagcuccucuacc

SEQ ID NO: 2423526 - RNA, 19 nt, Artificial Sequence
  Description of Artificial Sequence: Synthetic oligonucleotide
auggaaacucccacagucc

SEQ ID NO: 2423527 - RNA, 19 nt, Artificial Sequence
  Description of Artificial Sequence: Synthetic oligonucleotide
gaguugguucacuuccucc

SEQ ID NO: 2423528 - RNA, 19 nt, Artificial Sequence
  Description of Artificial Sequence: Synthetic oligonucleotide
ccaucgguuauaauagucg

SEQ ID NO: 2423529 - RNA, 19 nt, Artificial Sequence
  Description of Artificial Sequence: Synthetic oligonucleotide
gaggccagaccagaguugg

SEQ ID NO: 2423530 - RNA, 19 nt, Artificial Sequence
  Description of Artificial Sequence: Synthetic oligonucleotide
ccguaaaacauucccaucc

SEQ ID NO: 2423531 - RNA, 19 nt, Artificial Sequence
  Description of Artificial Sequence: Synthetic oligonucleotide
guuauaauagucgaucacu

SEQ ID NO: 2423532 - RNA, 19 nt, Artificial Sequence
  Description of Artificial Sequence: Synthetic oligonucleotide
agagugcuaccucucuggg

SEQ ID NO: 2423533 - RNA, 19 nt, Artificial Sequence
  Description of Artificial Sequence: Synthetic oligonucleotide
gauccacuagcugaugggc

SEQ ID NO: 2423534 - RNA, 19 nt, Artificial Sequence
  Description of Artificial Sequence: Synthetic oligonucleotide
aucacuguggcaacuuggg

SEQ ID NO: 2423535 - RNA, 19 nt, Artificial Sequence
  Description of Artificial Sequence: Synthetic oligonucleotide
ucccucuugcagccgacgg

SEQ ID NO: 2423536 - RNA, 19 nt, Artificial Sequence
  Description of Artificial Sequence: Synthetic oligonucleotide
ggcaacuugggucugcugc

SEQ ID NO: 2423537 - RNA, 19 nt, Artificial Sequence
  Description of Artificial Sequence: Synthetic oligonucleotide
agcugagcaagguccuucg

SEQ ID NO: 2423538 - RNA, 19 nt, Artificial Sequence
  Description of Artificial Sequence: Synthetic oligonucleotide
uggagcguuggccacuucu

SEQ ID NO: 2423539 - RNA, 19 nt, Artificial Sequence
  Description of Artificial Sequence: Synthetic oligonucleotide
agcauaggcccgccugucc

SEQ ID NO: 2423540 - RNA, 19 nt, Artificial Sequence
  Description of Artificial Sequence: Synthetic oligonucleotide
uccaaggcaacagauggaa

SEQ ID NO: 2423541 - RNA, 19 nt, Artificial Sequence
  Description of Artificial Sequence: Synthetic oligonucleotide
cucgagaauaguagccgag

SEQ ID NO: 2423542 - RNA, 19 nt, Artificial Sequence
  Description of Artificial Sequence: Synthetic oligonucleotide
acccguaaaacauucccau

SEQ ID NO: 2423543 - RNA, 19 nt, Artificial Sequence
  Description of Artificial Sequence: Synthetic oligonucleotide
ucauaccagcugagcaagg

SEQ ID NO: 2423544 - RNA, 19 nt, Artificial Sequence
  Description of Artificial Sequence: Synthetic oligonucleotide
uguguaccgccccacgcca

SEQ ID NO: 2423545 - RNA, 19 nt, Artificial Sequence
  Description of Artificial Sequence: Synthetic oligonucleotide
ucucuuggucauaccagcu

SEQ ID NO: 2423546 - RNA, 19 nt, Artificial Sequence
  Description of Artificial Sequence: Synthetic oligonucleotide
gcagcauaaccucugacac

SEQ ID NO: 2423547 - RNA, 19 nt, Artificial Sequence
  Description of Artificial Sequence: Synthetic oligonucleotide
ucugacacccauacagcau

SEQ ID NO: 2423548 - RNA, 19 nt, Artificial Sequence
  Description of Artificial Sequence: Synthetic oligonucleotide
uguaccgccccacgccagg

SEQ ID NO: 2423549 - RNA, 19 nt, Artificial Sequence
  Description of Artificial Sequence: Synthetic oligonucleotide
ggugaugagagacaaaggu

SEQ ID NO: 2423550 - RNA, 19 nt, Artificial Sequence
  Description of Artificial Sequence: Synthetic oligonucleotide
acaaaggugcugcugggau

SEQ ID NO: 2423551 - RNA, 19 nt, Artificial Sequence
  Description of Artificial Sequence: Synthetic oligonucleotide
gguuauaauagucgaucac

SEQ ID NO: 2423552 - RNA, 19 nt, Artificial Sequence
  Description of Artificial Sequence: Synthetic oligonucleotide
ugacacccauacagcauag

SEQ ID NO: 2423553 - RNA, 19 nt, Artificial Sequence
  Description of Artificial Sequence: Synthetic oligonucleotide
ccagaguugguucacuucc

SEQ ID NO: 2423554 - RNA, 19 nt, Artificial Sequence
  Description of Artificial Sequence: Synthetic oligonucleotide
caguuaccuggccaaaggc

SEQ ID NO: 2423555 - RNA, 19 nt, Artificial Sequence
  Description of Artificial Sequence: Synthetic oligonucleotide
caucgguuauaauagucga

SEQ ID NO: 2423556 - RNA, 19 nt, Artificial Sequence
  Description of Artificial Sequence: Synthetic oligonucleotide
agucgaucacuguggcaac

SEQ ID NO: 2423557 - RNA, 19 nt, Artificial Sequence
  Description of Artificial Sequence: Synthetic oligonucleotide
gucauaccagcugagcaag

SEQ ID NO: 2423558 - RNA, 19 nt, Artificial Sequence
  Description of Artificial Sequence: Synthetic oligonucleotide
ggauccacuagcugauggg

SEQ ID NO: 2423559 - RNA, 19 nt, Artificial Sequence
  Description of Artificial Sequence: Synthetic oligonucleotide
uagggugucugcuguacgu

SEQ ID NO: 2423560 - RNA, 19 nt, Artificial Sequence
  Description of Artificial Sequence: Synthetic oligonucleotide
gcauccaucgguuauaaua

SEQ ID NO: 2423561 - RNA, 19 nt, Artificial Sequence
  Description of Artificial Sequence: Synthetic oligonucleotide
cuuggucauaccagcugag

SEQ ID NO: 2423562 - RNA, 19 nt, Artificial Sequence
  Description of Artificial Sequence: Synthetic oligonucleotide
ucuccaaggaaggucccgc

SEQ ID NO: 2423563 - RNA, 19 nt, Artificial Sequence
  Description of Artificial Sequence: Synthetic oligonucleotide
acuagcugaugggcuaggc

SEQ ID NO: 2423564 - RNA, 19 nt, Artificial Sequence
  Description of Artificial Sequence: Synthetic oligonucleotide
gggaucggcaccaauggcg

SEQ ID NO: 2423565 - RNA, 19 nt, Artificial Sequence
  Description of Artificial Sequence: Synthetic oligonucleotide
guagggugucugcuguacg

SEQ ID NO: 2423566 - RNA, 19 nt, Artificial Sequence
  Description of Artificial Sequence: Synthetic oligonucleotide
uucuccaaggaaggucccg

SEQ ID NO: 2423567 - RNA, 19 nt, Artificial Sequence
  Description of Artificial Sequence: Synthetic oligonucleotide
ugaugggcuaggcuccaga

SEQ ID NO: 2423568 - RNA, 19 nt, Artificial Sequence
  Description of Artificial Sequence: Synthetic oligonucleotide
aauaguagccgaggccaga

SEQ ID NO: 2423569 - RNA, 19 nt, Artificial Sequence
  Description of Artificial Sequence: Synthetic oligonucleotide
cuguguaccgccccacgcc

SEQ ID NO: 2423570 - RNA, 19 nt, Artificial Sequence
  Description of Artificial Sequence: Synthetic oligonucleotide
aguuaccuggccaaaggca

SEQ ID NO: 2423571 - RNA, 19 nt, Artificial Sequence
  Description of Artificial Sequence: Synthetic oligonucleotide
gaguuagaccucugcacca

SEQ ID NO: 2423572 - RNA, 19 nt, Artificial Sequence
  Description of Artificial Sequence: Synthetic oligonucleotide
ugcuguagggugucugcug

SEQ ID NO: 2423573 - RNA, 19 nt, Artificial Sequence
  Description of Artificial Sequence: Synthetic oligonucleotide
cagcauaaccucugacacc

SEQ ID NO: 2423574 - RNA, 19 nt, Artificial Sequence
  Description of Artificial Sequence: Synthetic oligonucleotide
aggcaacagauggaaacuc

SEQ ID NO: 2423575 - RNA, 19 nt, Artificial Sequence
  Description of Artificial Sequence: Synthetic oligonucleotide
ugcacagggcacuggcugc

SEQ ID NO: 2423576 - RNA, 19 nt, Artificial Sequence
  Description of Artificial Sequence: Synthetic oligonucleotide
acggccucgagaauaguag

SEQ ID NO: 2423577 - RNA, 19 nt, Artificial Sequence
  Description of Artificial Sequence: Synthetic oligonucleotide
acaccaguuaccuggccaa

SEQ ID NO: 2423578 - RNA, 19 nt, Artificial Sequence
  Description of Artificial Sequence: Synthetic oligonucleotide
uguagggugucugcuguac

SEQ ID NO: 2423579 - RNA, 19 nt, Artificial Sequence
  Description of Artificial Sequence: Synthetic oligonucleotide
ugggaucggcaccaauggc

SEQ ID NO: 2423580 - RNA, 19 nt, Artificial Sequence
  Description of Artificial Sequence: Synthetic oligonucleotide
aguuagaccucugcaccag

SEQ ID NO: 2423581 - RNA, 19 nt, Artificial Sequence
  Description of Artificial Sequence: Synthetic oligonucleotide
uacguggcacaugaccucc

SEQ ID NO: 2423582 - RNA, 19 nt, Artificial Sequence
  Description of Artificial Sequence: Synthetic oligonucleotide
gcacccguaaaacauuccc

SEQ ID NO: 2423583 - RNA, 19 nt, Artificial Sequence
  Description of Artificial Sequence: Synthetic oligonucleotide
gcuugauugaaguccccag

SEQ ID NO: 2423584 - RNA, 19 nt, Artificial Sequence
  Description of Artificial Sequence: Synthetic oligonucleotide
uccacuagcugaugggcua

SEQ ID NO: 2423585 - RNA, 19 nt, Artificial Sequence
  Description of Artificial Sequence: Synthetic oligonucleotide
agcguuggccacuucugca

SEQ ID NO: 2423586 - RNA, 19 nt, Artificial Sequence
  Description of Artificial Sequence: Synthetic oligonucleotide
cucugacacccauacagca

SEQ ID NO: 2423587 - RNA, 19 nt, Artificial Sequence
  Description of Artificial Sequence: Synthetic oligonucleotide
agauggaaacucccacagu

SEQ ID NO: 2423588 - RNA, 19 nt, Artificial Sequence
  Description of Artificial Sequence: Synthetic oligonucleotide
ggcuggauccacuagcuga

SEQ ID NO: 2423589 - RNA, 19 nt, Artificial Sequence
  Description of Artificial Sequence: Synthetic oligonucleotide
agcuguguaccgccccacg

SEQ ID NO: 2423590 - RNA, 19 nt, Artificial Sequence
  Description of Artificial Sequence: Synthetic oligonucleotide
gaggaguccagaccagcuc

SEQ ID NO: 2423591 - RNA, 19 nt, Artificial Sequence
  Description of Artificial Sequence: Synthetic oligonucleotide
guuaccuggccaaaggcaa

SEQ ID NO: 2423592 - RNA, 19 nt, Artificial Sequence
  Description of Artificial Sequence: Synthetic oligonucleotide
augagagacaaaggugcug

SEQ ID NO: 2423593 - RNA, 19 nt, Artificial Sequence
  Description of Artificial Sequence: Synthetic oligonucleotide
gaucggcaccaauggcgcg

SEQ ID NO: 2423594 - RNA, 19 nt, Artificial Sequence
  Description of Artificial Sequence: Synthetic oligonucleotide
caaguggcagagugcuacc

SEQ ID NO: 2423595 - RNA, 19 nt, Artificial Sequence
  Description of Artificial Sequence: Synthetic oligonucleotide
agcacccguaaaacauucc

SEQ ID NO: 2423596 - RNA, 19 nt, Artificial Sequence
  Description of Artificial Sequence: Synthetic oligonucleotide
caaaggugcugcugggauc

SEQ ID NO: 2423597 - RNA, 19 nt, Artificial Sequence
  Description of Artificial Sequence: Synthetic oligonucleotide
gcggacacggcacagcacc

SEQ ID NO: 2423598 - RNA, 19 nt, Artificial Sequence
  Description of Artificial Sequence: Synthetic oligonucleotide
gacacccauacagcauagg

SEQ ID NO: 2423599 - RNA, 19 nt, Artificial Sequence
  Description of Artificial Sequence: Synthetic oligonucleotide
guuagaccucugcaccagc

SEQ ID NO: 2423600 - RNA, 19 nt, Artificial Sequence
  Description of Artificial Sequence: Synthetic oligonucleotide
acauucccauccaccacac

SEQ ID NO: 2423601 - RNA, 19 nt, Artificial Sequence
  Description of Artificial Sequence: Synthetic oligonucleotide
accacaccaguuaccuggc

SEQ ID NO: 2423602 - RNA, 19 nt, Artificial Sequence
  Description of Artificial Sequence: Synthetic oligonucleotide
auccaucgguuauaauagu

SEQ ID NO: 2423603 - RNA, 19 nt, Artificial Sequence
  Description of Artificial Sequence: Synthetic oligonucleotide
cugagcaagguccuucgga

SEQ ID NO: 2423604 - RNA, 19 nt, Artificial Sequence
  Description of Artificial Sequence: Synthetic oligonucleotide
cacccguaaaacauuccca

SEQ ID NO: 2423605 - RNA, 19 nt, Artificial Sequence
  Description of Artificial Sequence: Synthetic oligonucleotide
uaguagccgaggccagacc

SEQ ID NO: 2423606 - RNA, 19 nt, Artificial Sequence
  Description of Artificial Sequence: Synthetic oligonucleotide
guggcacaugaccuccuag

SEQ ID NO: 2423607 - RNA, 19 nt, Artificial Sequence
  Description of Artificial Sequence: Synthetic oligonucleotide
ccaguuaccuggccaaagg

SEQ ID NO: 2423608 - RNA, 19 nt, Artificial Sequence
  Description of Artificial Sequence: Synthetic oligonucleotide
accaguuaccuggccaaag

SEQ ID NO: 2423609 - RNA, 19 nt, Artificial Sequence
  Description of Artificial Sequence: Synthetic oligonucleotide
gcaacagauggaaacuccc

SEQ ID NO: 2423610 - RNA, 19 nt, Artificial Sequence
  Description of Artificial Sequence: Synthetic oligonucleotide
uuaccuggccaaaggcaau

SEQ ID NO: 2423611 - RNA, 19 nt, Artificial Sequence
  Description of Artificial Sequence: Synthetic oligonucleotide
ucugcauccaucgguuaua

SEQ ID NO: 2423612 - RNA, 19 nt, Artificial Sequence
  Description of Artificial Sequence: Synthetic oligonucleotide
gccucgagaauaguagccg

SEQ ID NO: 2423613 - RNA, 19 nt, Artificial Sequence
  Description of Artificial Sequence: Synthetic oligonucleotide
gcugcuugauugaaguccc

SEQ ID NO: 2423614 - RNA, 19 nt, Artificial Sequence
  Description of Artificial Sequence: Synthetic oligonucleotide
ggucauaccagcugagcaa

SEQ ID NO: 2423615 - RNA, 19 nt, Artificial Sequence
  Description of Artificial Sequence: Synthetic oligonucleotide
cagcagaccugaguuagac

SEQ ID NO: 2423616 - RNA, 19 nt, Artificial Sequence
  Description of Artificial Sequence: Synthetic oligonucleotide
cugacacccauacagcaua

SEQ ID NO: 2423617 - RNA, 19 nt, Artificial Sequence
  Description of Artificial Sequence: Synthetic oligonucleotide
ggcaacagauggaaacucc

SEQ ID NO: 2423618 - RNA, 19 nt, Artificial Sequence
  Description of Artificial Sequence: Synthetic oligonucleotide
gcaccaauggcgcggacac

SEQ ID NO: 2423619 - RNA, 19 nt, Artificial Sequence
  Description of Artificial Sequence: Synthetic oligonucleotide
ugucugcuguacguggcac

SEQ ID NO: 2423620 - RNA, 19 nt, Artificial Sequence
  Description of Artificial Sequence: Synthetic oligonucleotide
aggcccgccuguccaaguc

SEQ ID NO: 2423621 - RNA, 19 nt, Artificial Sequence
  Description of Artificial Sequence: Synthetic oligonucleotide
gcaauggaagcaauggcuc

SEQ ID NO: 2423622 - RNA, 19 nt, Artificial Sequence
  Description of Artificial Sequence: Synthetic oligonucleotide
gagugcuaccucucuggga

SEQ ID NO: 2423623 - RNA, 19 nt, Artificial Sequence
  Description of Artificial Sequence: Synthetic oligonucleotide
uguggcaacuugggucugc

SEQ ID NO: 2423624 - RNA, 19 nt, Artificial Sequence
  Description of Artificial Sequence: Synthetic oligonucleotide
guacguggcacaugaccuc

SEQ ID NO: 2423625 - RNA, 19 nt, Artificial Sequence
  Description of Artificial Sequence: Synthetic oligonucleotide
cauacagcauaggcccgcc

SEQ ID NO: 2423626 - RNA, 19 nt, Artificial Sequence
  Description of Artificial Sequence: Synthetic oligonucleotide
acuucugcauccaucgguu

SEQ ID NO: 2423627 - RNA, 19 nt, Artificial Sequence
  Description of Artificial Sequence: Synthetic oligonucleotide
cugggcugcuccagaacac

SEQ ID NO: 2423628 - RNA, 19 nt, Artificial Sequence
  Description of Artificial Sequence: Synthetic oligonucleotide
cacagcacccguaaaacau

SEQ ID NO: 2423629 - RNA, 19 nt, Artificial Sequence
  Description of Artificial Sequence: Synthetic oligonucleotide
cuuugugcugcugcucuuc

SEQ ID NO: 2423630 - RNA, 19 nt, Artificial Sequence
  Description of Artificial Sequence: Synthetic oligonucleotide
gccagcagaccugaguuag

SEQ ID NO: 2423631 - RNA, 19 nt, Artificial Sequence
  Description of Artificial Sequence: Synthetic oligonucleotide
accgccccacgccaggcag

SEQ ID NO: 2423632 - RNA, 19 nt, Artificial Sequence
  Description of Artificial Sequence: Synthetic oligonucleotide
gcuccagaacacaaguggc

SEQ ID NO: 2423633 - RNA, 19 nt, Artificial Sequence
  Description of Artificial Sequence: Synthetic oligonucleotide
ccucugacacccauacagc

SEQ ID NO: 2423634 - RNA, 19 nt, Artificial Sequence
  Description of Artificial Sequence: Synthetic oligonucleotide
aggugcugcugggaucggc

SEQ ID NO: 2423635 - RNA, 19 nt, Artificial Sequence
  Description of Artificial Sequence: Synthetic oligonucleotide
ggaucggcaccaauggcgc

SEQ ID NO: 2423636 - RNA, 19 nt, Artificial Sequence
  Description of Artificial Sequence: Synthetic oligonucleotide
aucgguuauaauagucgau

SEQ ID NO: 2423637 - RNA, 19 nt, Artificial Sequence
  Description of Artificial Sequence: Synthetic oligonucleotide
gguccuggagcguuggcca

SEQ ID NO: 2423638 - RNA, 19 nt, Artificial Sequence
  Description of Artificial Sequence: Synthetic oligonucleotide
cgagaauaguagccgaggc

SEQ ID NO: 2423639 - RNA, 19 nt, Artificial Sequence
  Description of Artificial Sequence: Synthetic oligonucleotide
gaccuccuagcuccucuac

SEQ ID NO: 2423640 - RNA, 19 nt, Artificial Sequence
  Description of Artificial Sequence: Synthetic oligonucleotide
agggugucugcuguacgug

SEQ ID NO: 2423641 - RNA, 19 nt, Artificial Sequence
  Description of Artificial Sequence: Synthetic oligonucleotide
gaugagagacaaaggugcu

SEQ ID NO: 2423642 - RNA, 19 nt, Artificial Sequence
  Description of Artificial Sequence: Synthetic oligonucleotide
uaccucucugggaggccug

SEQ ID NO: 2423643 - RNA, 19 nt, Artificial Sequence
  Description of Artificial Sequence: Synthetic oligonucleotide
guagccgaggccagaccag

SEQ ID NO: 2423644 - RNA, 19 nt, Artificial Sequence
  Description of Artificial Sequence: Synthetic oligonucleotide
cagccgacggccucgagaa

SEQ ID NO: 2423645 - RNA, 19 nt, Artificial Sequence
  Description of Artificial Sequence: Synthetic oligonucleotide
auccacuagcugaugggcu

SEQ ID NO: 2423646 - RNA, 19 nt, Artificial Sequence
  Description of Artificial Sequence: Synthetic oligonucleotide
ucccgcuucucuuggucau

SEQ ID NO: 2423647 - RNA, 19 nt, Artificial Sequence
  Description of Artificial Sequence: Synthetic oligonucleotide
gcuguguaccgccccacgc

SEQ ID NO: 2423648 - RNA, 19 nt, Artificial Sequence
  Description of Artificial Sequence: Synthetic oligonucleotide
gugcuaccucucugggagg

SEQ ID NO: 2423649 - RNA, 19 nt, Artificial Sequence
  Description of Artificial Sequence: Synthetic oligonucleotide
ucccacaguccugccagca

SEQ ID NO: 2423650 - RNA, 19 nt, Artificial Sequence
  Description of Artificial Sequence: Synthetic oligonucleotide
ggccucgagaauaguagcc

SEQ ID NO: 2423651 - RNA, 19 nt, Artificial Sequence
  Description of Artificial Sequence: Synthetic oligonucleotide
gcagagugcuaccucucug

SEQ ID NO: 2423652 - RNA, 19 nt, Artificial Sequence
  Description of Artificial Sequence: Synthetic oligonucleotide
ccugaguuagaccucugca

SEQ ID NO: 2423653 - RNA, 19 nt, Artificial Sequence
  Description of Artificial Sequence: Synthetic oligonucleotide
ccaaggaaggucccgcuuc

SEQ ID NO: 2423654 - RNA, 19 nt, Artificial Sequence
  Description of Artificial Sequence: Synthetic oligonucleotide
cagaggugaugagagacaa

SEQ ID NO: 2423655 - RNA, 19 nt, Artificial Sequence
  Description of Artificial Sequence: Synthetic oligonucleotide
cauucccauccaccacacc

SEQ ID NO: 2423656 - RNA, 19 nt, Artificial Sequence
  Description of Artificial Sequence: Synthetic oligonucleotide
ucgaucacuguggcaacuu

SEQ ID NO: 2423657 - RNA, 19 nt, Artificial Sequence
  Description of Artificial Sequence: Synthetic oligonucleotide
uggcaacuugggucugcug

SEQ ID NO: 2423658 - RNA, 19 nt, Artificial Sequence
  Description of Artificial Sequence: Synthetic oligonucleotide
gucccgcuucucuugguca

SEQ ID NO: 2423659 - RNA, 19 nt, Artificial Sequence
  Description of Artificial Sequence: Synthetic oligonucleotide
gucugcuguacguggcaca

SEQ ID NO: 2423660 - RNA, 19 nt, Artificial Sequence
  Description of Artificial Sequence: Synthetic oligonucleotide
agaacacaaguggcagagu

SEQ ID NO: 2423661 - RNA, 19 nt, Artificial Sequence
  Description of Artificial Sequence: Synthetic oligonucleotide
gacggccucgagaauagua

SEQ ID NO: 2423662 - RNA, 19 nt, Artificial Sequence
  Description of Artificial Sequence: Synthetic oligonucleotide
gugucugcuguacguggca

SEQ ID NO: 2423663 - RNA, 19 nt, Artificial Sequence
  Description of Artificial Sequence: Synthetic oligonucleotide
cagaccagaguugguucac

SEQ ID NO: 2423664 - RNA, 19 nt, Artificial Sequence
  Description of Artificial Sequence: Synthetic oligonucleotide
auaaccucugacacccaua

SEQ ID NO: 2423665 - RNA, 19 nt, Artificial Sequence
  Description of Artificial Sequence: Synthetic oligonucleotide
auaggcccgccuguccaag

SEQ ID NO: 2423666 - RNA, 19 nt, Artificial Sequence
  Description of Artificial Sequence: Synthetic oligonucleotide
auggcgcggacacggcaca

SEQ ID NO: 2423667 - RNA, 19 nt, Artificial Sequence
  Description of Artificial Sequence: Synthetic oligonucleotide
agaccagaguugguucacu

SEQ ID NO: 2423668 - RNA, 19 nt, Artificial Sequence
  Description of Artificial Sequence: Synthetic oligonucleotide
gcugcuccagaacacaagu

SEQ ID NO: 2423669 - RNA, 19 nt, Artificial Sequence
  Description of Artificial Sequence: Synthetic oligonucleotide
cuagcugaugggcuaggcu

SEQ ID NO: 2423670 - RNA, 19 nt, Artificial Sequence
  Description of Artificial Sequence: Synthetic oligonucleotide
cacuagcugaugggcuagg

SEQ ID NO: 2423671 - RNA, 19 nt, Artificial Sequence
  Description of Artificial Sequence: Synthetic oligonucleotide
ugcauccaucgguuauaau

SEQ ID NO: 2423672 - RNA, 19 nt, Artificial Sequence
  Description of Artificial Sequence: Synthetic oligonucleotide
aaggugcugcugggaucgg

SEQ ID NO: 2423673 - RNA, 19 nt, Artificial Sequence
  Description of Artificial Sequence: Synthetic oligonucleotide
cucccucuugcagccgacg

SEQ ID NO: 2423674 - RNA, 19 nt, Artificial Sequence
  Description of Artificial Sequence: Synthetic oligonucleotide
ggcccgccuguccaagucg

SEQ ID NO: 2423675 - RNA, 19 nt, Artificial Sequence
  Description of Artificial Sequence: Synthetic oligonucleotide
acagcacccguaaaacauu

SEQ ID NO: 2423676 - RNA, 19 nt, Artificial Sequence
  Description of Artificial Sequence: Synthetic oligonucleotide
ggaaacucccacaguccug

SEQ ID NO: 2423677 - RNA, 19 nt, Artificial Sequence
  Description of Artificial Sequence: Synthetic oligonucleotide
gaagcacuggccagguccu

SEQ ID NO: 2423678 - RNA, 19 nt, Artificial Sequence
  Description of Artificial Sequence: Synthetic oligonucleotide
uaccgccccacgccaggca

SEQ ID NO: 2423679 - RNA, 19 nt, Artificial Sequence
  Description of Artificial Sequence: Synthetic oligonucleotide
ugcugggaucggcaccaau

SEQ ID NO: 2423680 - RNA, 19 nt, Artificial Sequence
  Description of Artificial Sequence: Synthetic oligonucleotide
caauggcgcggacacggca

SEQ ID NO: 2423681 - RNA, 19 nt, Artificial Sequence
  Description of Artificial Sequence: Synthetic oligonucleotide
ggacacggcacagcacccg

SEQ ID NO: 2423682 - RNA, 19 nt, Artificial Sequence
  Description of Artificial Sequence: Synthetic oligonucleotide
ggcacuggcugcagagagg

SEQ ID NO: 2423683 - RNA, 19 nt, Artificial Sequence
  Description of Artificial Sequence: Synthetic oligonucleotide
cccauacagcauaggcccg

SEQ ID NO: 2423684 - RNA, 19 nt, Artificial Sequence
  Description of Artificial Sequence: Synthetic oligonucleotide
aguuccugcaggagggcuu

SEQ ID NO: 2423685 - RNA, 19 nt, Artificial Sequence
  Description of Artificial Sequence: Synthetic oligonucleotide
ccccacgccaggcaggagc

SEQ ID NO: 2423686 - RNA, 19 nt, Artificial Sequence
  Description of Artificial Sequence: Synthetic oligonucleotide
ggcugcuccagaacacaag

SEQ ID NO: 2423687 - RNA, 19 nt, Artificial Sequence
  Description of Artificial Sequence: Synthetic oligonucleotide
gcacagcacccguaaaaca

SEQ ID NO: 2423688 - RNA, 19 nt, Artificial Sequence
  Description of Artificial Sequence: Synthetic oligonucleotide
uccuggagcguuggccacu

SEQ ID NO: 2423689 - RNA, 19 nt, Artificial Sequence
  Description of Artificial Sequence: Synthetic oligonucleotide
gcauaggcccgccugucca

SEQ ID NO: 2423690 - RNA, 19 nt, Artificial Sequence
  Description of Artificial Sequence: Synthetic oligonucleotide
ucggcaccaauggcgcgga

SEQ ID NO: 2423691 - RNA, 19 nt, Artificial Sequence
  Description of Artificial Sequence: Synthetic oligonucleotide
gacacggcacagcacccgu

SEQ ID NO: 2423692 - RNA, 19 nt, Artificial Sequence
  Description of Artificial Sequence: Synthetic oligonucleotide
agggaagcacuggccaggu

SEQ ID NO: 2423693 - RNA, 19 nt, Artificial Sequence
  Description of Artificial Sequence: Synthetic oligonucleotide
cccguaaaacauucccauc

SEQ ID NO: 2423694 - RNA, 19 nt, Artificial Sequence
  Description of Artificial Sequence: Synthetic oligonucleotide
cacggcacagcacccguaa

SEQ ID NO: 2423695 - RNA, 19 nt, Artificial Sequence
  Description of Artificial Sequence: Synthetic oligonucleotide
uaggcccgccuguccaagu

SEQ ID NO: 2423696 - RNA, 19 nt, Artificial Sequence
  Description of Artificial Sequence: Synthetic oligonucleotide
ccauacagcauaggcccgc

SEQ ID NO: 2423697 - RNA, 19 nt, Artificial Sequence
  Description of Artificial Sequence: Synthetic oligonucleotide
cauaccagcugagcaaggu

SEQ ID NO: 2423698 - RNA, 19 nt, Artificial Sequence
  Description of Artificial Sequence: Synthetic oligonucleotide
ggcuuugugcugcugcucu

SEQ ID NO: 2423699 - RNA, 19 nt, Artificial Sequence
  Description of Artificial Sequence: Synthetic oligonucleotide
cgguuauaauagucgauca

SEQ ID NO: 2423700 - RNA, 19 nt, Artificial Sequence
  Description of Artificial Sequence: Synthetic oligonucleotide
cguaaaacauucccaucca

SEQ ID NO: 2423701 - RNA, 19 nt, Artificial Sequence
  Description of Artificial Sequence: Synthetic oligonucleotide
gcagccgacggccucgaga

SEQ ID NO: 2423702 - RNA, 19 nt, Artificial Sequence
  Description of Artificial Sequence: Synthetic oligonucleotide
ccucuacccaucuucucca

SEQ ID NO: 2423703 - RNA, 19 nt, Artificial Sequence
  Description of Artificial Sequence: Synthetic oligonucleotide
ccgacggccucgagaauag

SEQ ID NO: 2423704 - RNA, 19 nt, Artificial Sequence
  Description of Artificial Sequence: Synthetic oligonucleotide
caccaauggcgcggacacg

SEQ ID NO: 2423705 - RNA, 19 nt, Artificial Sequence
  Description of Artificial Sequence: Synthetic oligonucleotide
ugcagccgacggccucgag

SEQ ID NO: 2423706 - RNA, 19 nt, Artificial Sequence
  Description of Artificial Sequence: Synthetic oligonucleotide
ggcuaggcuccagagguga

SEQ ID NO: 2423707 - RNA, 19 nt, Artificial Sequence
  Description of Artificial Sequence: Synthetic oligonucleotide
ccucgagaauaguagccga

SEQ ID NO: 2423708 - RNA, 19 nt, Artificial Sequence
  Description of Artificial Sequence: Synthetic oligonucleotide
caaggaaggucccgcuucu

SEQ ID NO: 2423709 - RNA, 19 nt, Artificial Sequence
  Description of Artificial Sequence: Synthetic oligonucleotide
agaggugaugagagacaaa

SEQ ID NO: 2423710 - RNA, 19 nt, Artificial Sequence
  Description of Artificial Sequence: Synthetic oligonucleotide
acggcacagcacccguaaa

SEQ ID NO: 2423711 - RNA, 19 nt, Artificial Sequence
  Description of Artificial Sequence: Synthetic oligonucleotide
ccacuucugcauccaucgg

SEQ ID NO: 2423712 - RNA, 19 nt, Artificial Sequence
  Description of Artificial Sequence: Synthetic oligonucleotide
cagaguugguucacuuccu

SEQ ID NO: 2423713 - RNA, 19 nt, Artificial Sequence
  Description of Artificial Sequence: Synthetic oligonucleotide
cauaggcccgccuguccaa

SEQ ID NO: 2423714 - RNA, 19 nt, Artificial Sequence
  Description of Artificial Sequence: Synthetic oligonucleotide
ggcuccagcuguguaccgc

SEQ ID NO: 2423715 - RNA, 19 nt, Artificial Sequence
  Description of Artificial Sequence: Synthetic oligonucleotide
aggucccgcuucucuuggu

SEQ ID NO: 2423716 - RNA, 19 nt, Artificial Sequence
  Description of Artificial Sequence: Synthetic oligonucleotide
caugaccuccuagcuccuc

SEQ ID NO: 2423717 - RNA, 19 nt, Artificial Sequence
  Description of Artificial Sequence: Synthetic oligonucleotide
uggcgcggacacggcacag

SEQ ID NO: 2423718 - RNA, 19 nt, Artificial Sequence
  Description of Artificial Sequence: Synthetic oligonucleotide
gggcuggauccacuagcug

SEQ ID NO: 2423719 - RNA, 19 nt, Artificial Sequence
  Description of Artificial Sequence: Synthetic oligonucleotide
cggccucgagaauaguagc

SEQ ID NO: 2423720 - RNA, 19 nt, Artificial Sequence
  Description of Artificial Sequence: Synthetic oligonucleotide
guguaccgccccacgccag

SEQ ID NO: 2423721 - RNA, 19 nt, Artificial Sequence
  Description of Artificial Sequence: Synthetic oligonucleotide
cugcauccaucgguuauaa

SEQ ID NO: 2423722 - RNA, 19 nt, Artificial Sequence
  Description of Artificial Sequence: Synthetic oligonucleotide
cagcauaggcccgccuguc

SEQ ID NO: 2423723 - RNA, 19 nt, Artificial Sequence
  Description of Artificial Sequence: Synthetic oligonucleotide
guaccgccccacgccaggc

SEQ ID NO: 2423724 - RNA, 19 nt, Artificial Sequence
  Description of Artificial Sequence: Synthetic oligonucleotide
cacagggcacuggcugcag

SEQ ID NO: 2423725 - RNA, 19 nt, Artificial Sequence
  Description of Artificial Sequence: Synthetic oligonucleotide
gcccgccuguccaagucgg

SEQ ID NO: 2423726 - RNA, 19 nt, Artificial Sequence
  Description of Artificial Sequence: Synthetic oligonucleotide
ccaauggcgcggacacggc

SEQ ID NO: 2423727 - RNA, 19 nt, Artificial Sequence
  Description of Artificial Sequence: Synthetic oligonucleotide
aggccugcggcuggcucug

SEQ ID NO: 2423728 - RNA, 19 nt, Artificial Sequence
  Description of Artificial Sequence: Synthetic oligonucleotide
ccacuagcugaugggcuag

SEQ ID NO: 2423729 - RNA, 19 nt, Artificial Sequence
  Description of Artificial Sequence: Synthetic oligonucleotide
cgaucacuguggcaacuug

SEQ ID NO: 2423730 - RNA, 19 nt, Artificial Sequence
  Description of Artificial Sequence: Synthetic oligonucleotide
uugcagccgacggccucga

SEQ ID NO: 2423731 - RNA, 19 nt, Artificial Sequence
  Description of Artificial Sequence: Synthetic oligonucleotide
acaugaccuccuagcuccu

SEQ ID NO: 2423732 - RNA, 19 nt, Artificial Sequence
  Description of Artificial Sequence: Synthetic oligonucleotide
ccaccuuccuagcucccuc

SEQ ID NO: 2423733 - RNA, 19 nt, Artificial Sequence
  Description of Artificial Sequence: Synthetic oligonucleotide
cuaccucucugggaggccu

SEQ ID NO: 2423734 - RNA, 19 nt, Artificial Sequence
  Description of Artificial Sequence: Synthetic oligonucleotide
cacaaguggcagagugcua

SEQ ID NO: 2423735 - RNA, 19 nt, Artificial Sequence
  Description of Artificial Sequence: Synthetic oligonucleotide
ggcagagugcuaccucucu

SEQ ID NO: 2423736 - RNA, 19 nt, Artificial Sequence
  Description of Artificial Sequence: Synthetic oligonucleotide
ccagcaggaugaggggacc

SEQ ID NO: 2423737 - RNA, 19 nt, Artificial Sequence
  Description of Artificial Sequence: Synthetic oligonucleotide
cuguagggugucugcugua

SEQ ID NO: 2423738 - RNA, 19 nt, Artificial Sequence
  Description of Artificial Sequence: Synthetic oligonucleotide
ggaggaguccagaccagcu

SEQ ID NO: 2423739 - RNA, 19 nt, Artificial Sequence
  Description of Artificial Sequence: Synthetic oligonucleotide
gucgaucacuguggcaacu

SEQ ID NO: 2423740 - RNA, 19 nt, Artificial Sequence
  Description of Artificial Sequence: Synthetic oligonucleotide
caggccgggcuggauccac

SEQ ID NO: 2423741 - RNA, 19 nt, Artificial Sequence
  Description of Artificial Sequence: Synthetic oligonucleotide
gcuaccucucugggaggcc

SEQ ID NO: 2423742 - RNA, 19 nt, Artificial Sequence
  Description of Artificial Sequence: Synthetic oligonucleotide
ccaccacaccaguuaccug

SEQ ID NO: 2423743 - RNA, 19 nt, Artificial Sequence
  Description of Artificial Sequence: Synthetic oligonucleotide
acguggcacaugaccuccu

SEQ ID NO: 2423744 - RNA, 19 nt, Artificial Sequence
  Description of Artificial Sequence: Synthetic oligonucleotide
ggcgcggacacggcacagc

SEQ ID NO: 2423745 - RNA, 19 nt, Artificial Sequence
  Description of Artificial Sequence: Synthetic oligonucleotide
gccgacggccucgagaaua

SEQ ID NO: 2423746 - RNA, 19 nt, Artificial Sequence
  Description of Artificial Sequence: Synthetic oligonucleotide
ccagcuguguaccgcccca

SEQ ID NO: 2423747 - RNA, 19 nt, Artificial Sequence
  Description of Artificial Sequence: Synthetic oligonucleotide
gcguuggccacuucugcau

SEQ ID NO: 2423748 - RNA, 19 nt, Artificial Sequence
  Description of Artificial Sequence: Synthetic oligonucleotide
ccuccucuacccaucuucu

SEQ ID NO: 2423749 - RNA, 19 nt, Artificial Sequence
  Description of Artificial Sequence: Synthetic oligonucleotide
aggccagaccagaguuggu

SEQ ID NO: 2423750 - RNA, 19 nt, Artificial Sequence
  Description of Artificial Sequence: Synthetic oligonucleotide
guuccugcaggagggcuuu

SEQ ID NO: 2423751 - RNA, 19 nt, Artificial Sequence
  Description of Artificial Sequence: Synthetic oligonucleotide
gcuguacguggcacaugac

SEQ ID NO: 2423752 - RNA, 19 nt, Artificial Sequence
  Description of Artificial Sequence: Synthetic oligonucleotide
agccgacggccucgagaau

SEQ ID NO: 2423753 - RNA, 19 nt, Artificial Sequence
  Description of Artificial Sequence: Synthetic oligonucleotide
caccaguuaccuggccaaa

SEQ ID NO: 2423754 - RNA, 19 nt, Artificial Sequence
  Description of Artificial Sequence: Synthetic oligonucleotide
gcacagggcacuggcugca

SEQ ID NO: 2423755 - RNA, 19 nt, Artificial Sequence
  Description of Artificial Sequence: Synthetic oligonucleotide
acacggcacagcacccgua

SEQ ID NO: 2423756 - RNA, 19 nt, Artificial Sequence
  Description of Artificial Sequence: Synthetic oligonucleotide
ccaagucggccuccuccuc

SEQ ID NO: 2423757 - RNA, 19 nt, Artificial Sequence
  Description of Artificial Sequence: Synthetic oligonucleotide
cccgccuguccaagucggc

SEQ ID NO: 2423758 - RNA, 19 nt, Artificial Sequence
  Description of Artificial Sequence: Synthetic oligonucleotide
cuggagcguuggccacuuc

SEQ ID NO: 2423759 - RNA, 19 nt, Artificial Sequence
  Description of Artificial Sequence: Synthetic oligonucleotide
gggaagcacuggccagguc

SEQ ID NO: 2423760 - RNA, 19 nt, Artificial Sequence
  Description of Artificial Sequence: Synthetic oligonucleotide
ccgccccacgccaggcagg

SEQ ID NO: 2423761 - RNA, 19 nt, Artificial Sequence
  Description of Artificial Sequence: Synthetic oligonucleotide
ggccagaccagaguugguu

SEQ ID NO: 2423762 - RNA, 19 nt, Artificial Sequence
  Description of Artificial Sequence: Synthetic oligonucleotide
cggcacagcacccguaaaa

SEQ ID NO: 2423763 - RNA, 19 nt, Artificial Sequence
  Description of Artificial Sequence: Synthetic oligonucleotide
ggccgggcuggauccacua

SEQ ID NO: 2423764 - RNA, 19 nt, Artificial Sequence
  Description of Artificial Sequence: Synthetic oligonucleotide
gcucccucuugcagccgac

SEQ ID NO: 2423765 - RNA, 19 nt, Artificial Sequence
  Description of Artificial Sequence: Synthetic oligonucleotide
gcauaaccucugacaccca

SEQ ID NO: 2423766 - RNA, 19 nt, Artificial Sequence
  Description of Artificial Sequence: Synthetic oligonucleotide
cgcggacacggcacagcac

SEQ ID NO: 2423767 - RNA, 19 nt, Artificial Sequence
  Description of Artificial Sequence: Synthetic oligonucleotide
cccacgccaggcaggagcu

SEQ ID NO: 2423768 - RNA, 19 nt, Artificial Sequence
  Description of Artificial Sequence: Synthetic oligonucleotide
gcuuugugcugcugcucuu

SEQ ID NO: 2423769 - RNA, 19 nt, Artificial Sequence
  Description of Artificial Sequence: Synthetic oligonucleotide
cgggcuggauccacuagcu

SEQ ID NO: 2423770 - RNA, 19 nt, Artificial Sequence
  Description of Artificial Sequence: Synthetic oligonucleotide
cguggcacaugaccuccua

SEQ ID NO: 2423771 - RNA, 19 nt, Artificial Sequence
  Description of Artificial Sequence: Synthetic oligonucleotide
gcuaggcuccagaggugau

SEQ ID NO: 2423772 - RNA, 19 nt, Artificial Sequence
  Description of Artificial Sequence: Synthetic oligonucleotide
ccacgccaggcaggagcug

SEQ ID NO: 2423773 - RNA, 19 nt, Artificial Sequence
  Description of Artificial Sequence: Synthetic oligonucleotide
gccccacgccaggcaggag

SEQ ID NO: 2423774 - RNA, 19 nt, Artificial Sequence
  Description of Artificial Sequence: Synthetic oligonucleotide
cgccccacgccaggcagga

SEQ ID NO: 2423775 - RNA, 19 nt, Artificial Sequence
  Description of Artificial Sequence: Synthetic oligonucleotide
ccuggagcguuggccacuu

SEQ ID NO: 2423776 - RNA, 19 nt, Artificial Sequence
  Description of Artificial Sequence: Synthetic oligonucleotide
cgacggccucgagaauagu

SEQ ID NO: 2423777 - RNA, 19 nt, Artificial Sequence
  Description of Artificial Sequence: Synthetic oligonucleotide
aauggagggagccagaacc

SEQ ID NO: 2423778 - RNA, 19 nt, Artificial Sequence
  Description of Artificial Sequence: Synthetic oligonucleotide
agagcugugacucaccacc

SEQ ID NO: 2423779 - RNA, 19 nt, Artificial Sequence
  Description of Artificial Sequence: Synthetic oligonucleotide
guauauaucauacaggaca

SEQ ID NO: 2423780 - RNA, 19 nt, Artificial Sequence
  Description of Artificial Sequence: Synthetic oligonucleotide
aaauagaaggccuggaggu

SEQ ID NO: 2423781 - RNA, 19 nt, Artificial Sequence
  Description of Artificial Sequence: Synthetic oligonucleotide
aacacaaggugccauguag

SEQ ID NO: 2423782 - RNA, 19 nt, Artificial Sequence
  Description of Artificial Sequence: Synthetic oligonucleotide
uagauauucuuuuauauau

SEQ ID NO: 2423783 - RNA, 19 nt, Artificial Sequence
  Description of Artificial Sequence: Synthetic oligonucleotide
agaaguuauagcucccacc

SEQ ID NO: 2423784 - RNA, 19 nt, Artificial Sequence
  Description of Artificial Sequence: Synthetic oligonucleotide
uuucugauagaaguuauag

SEQ ID NO: 2423785 - RNA, 19 nt, Artificial Sequence
  Description of Artificial Sequence: Synthetic oligonucleotide
uuugccugccuccauauag

SEQ ID NO: 2423786 - RNA, 19 nt, Artificial Sequence
  Description of Artificial Sequence: Synthetic oligonucleotide
aguuauagcucccaccuuc

SEQ ID NO: 2423787 - RNA, 19 nt, Artificial Sequence
  Description of Artificial Sequence: Synthetic oligonucleotide
aggacaucuauuuauauaa

SEQ ID NO: 2423788 - RNA, 19 nt, Artificial Sequence
  Description of Artificial Sequence: Synthetic oligonucleotide
cguaauuucagucugaggg

SEQ ID NO: 2423789 - RNA, 19 nt, Artificial Sequence
  Description of Artificial Sequence: Synthetic oligonucleotide
uauaucauacaggacaucu

SEQ ID NO: 2423790 - RNA, 19 nt, Artificial Sequence
  Description of Artificial Sequence: Synthetic oligonucleotide
gacacacacacacaggaag

SEQ ID NO: 2423791 - RNA, 19 nt, Artificial Sequence
  Description of Artificial Sequence: Synthetic oligonucleotide
aaaucaugggugaacacag

SEQ ID NO: 2423792 - RNA, 19 nt, Artificial Sequence
  Description of Artificial Sequence: Synthetic oligonucleotide
ucuacaauggucccuggga

SEQ ID NO: 2423793 - RNA, 19 nt, Artificial Sequence
  Description of Artificial Sequence: Synthetic oligonucleotide
ugguccaucacacugggcu

SEQ ID NO: 2423794 - RNA, 19 nt, Artificial Sequence
  Description of Artificial Sequence: Synthetic oligonucleotide
uauuguugguccaucacac

SEQ ID NO: 2423795 - RNA, 19 nt, Artificial Sequence
  Description of Artificial Sequence: Synthetic oligonucleotide
uauauaucauacaggacau

SEQ ID NO: 2423796 - RNA, 19 nt, Artificial Sequence
  Description of Artificial Sequence: Synthetic oligonucleotide
ugacucaccaccaaacaca

SEQ ID NO: 2423797 - RNA, 19 nt, Artificial Sequence
  Description of Artificial Sequence: Synthetic oligonucleotide
aauguacauuuguuucugg

SEQ ID NO: 2423798 - RNA, 19 nt, Artificial Sequence
  Description of Artificial Sequence: Synthetic oligonucleotide
uauagcucccaccuucagg

SEQ ID NO: 2423799 - RNA, 19 nt, Artificial Sequence
  Description of Artificial Sequence: Synthetic oligonucleotide
uguugguccaucacacugg

SEQ ID NO: 2423800 - RNA, 19 nt, Artificial Sequence
  Description of Artificial Sequence: Synthetic oligonucleotide
aaguccugucuauuguugg

SEQ ID NO: 2423801 - RNA, 19 nt, Artificial Sequence
  Description of Artificial Sequence: Synthetic oligonucleotide
uaucauacaggacaucuau

SEQ ID NO: 2423802 - RNA, 19 nt, Artificial Sequence
  Description of Artificial Sequence: Synthetic oligonucleotide
aaagcuccuugcuucuugg

SEQ ID NO: 2423803 - RNA, 19 nt, Artificial Sequence
  Description of Artificial Sequence: Synthetic oligonucleotide
agcagagcgggcuagguuc

SEQ ID NO: 2423804 - RNA, 19 nt, Artificial Sequence
  Description of Artificial Sequence: Synthetic oligonucleotide
auagcucccaccuucaggu

SEQ ID NO: 2423805 - RNA, 19 nt, Artificial Sequence
  Description of Artificial Sequence: Synthetic oligonucleotide
cauuuggugcuccugaccc

SEQ ID NO: 2423806 - RNA, 19 nt, Artificial Sequence
  Description of Artificial Sequence: Synthetic oligonucleotide
acaucuauuuauauaaaug

SEQ ID NO: 2423807 - RNA, 19 nt, Artificial Sequence
  Description of Artificial Sequence: Synthetic oligonucleotide
agaggcucgccacauaggg

SEQ ID NO: 2423808 - RNA, 19 nt, Artificial Sequence
  Description of Artificial Sequence: Synthetic oligonucleotide
ugccauguagaagagaggc

SEQ ID NO: 2423809 - RNA, 19 nt, Artificial Sequence
  Description of Artificial Sequence: Synthetic oligonucleotide
aaauggagggagccagaac

SEQ ID NO: 2423810 - RNA, 19 nt, Artificial Sequence
  Description of Artificial Sequence: Synthetic oligonucleotide
ucagcuuuaggcaccaaaa

SEQ ID NO: 2423811 - RNA, 19 nt, Artificial Sequence
  Description of Artificial Sequence: Synthetic oligonucleotide
uguggugccagaaaagcuc

SEQ ID NO: 2423812 - RNA, 19 nt, Artificial Sequence
  Description of Artificial Sequence: Synthetic oligonucleotide
caaggugccauguagaaga

SEQ ID NO: 2423813 - RNA, 19 nt, Artificial Sequence
  Description of Artificial Sequence: Synthetic oligonucleotide
uaaacauuggcuagggcuu

SEQ ID NO: 2423814 - RNA, 19 nt, Artificial Sequence
  Description of Artificial Sequence: Synthetic oligonucleotide
accagugagcccuaugggg

SEQ ID NO: 2423815 - RNA, 19 nt, Artificial Sequence
  Description of Artificial Sequence: Synthetic oligonucleotide
ugcaggcucagcuuuaggc

SEQ ID NO: 2423816 - RNA, 19 nt, Artificial Sequence
  Description of Artificial Sequence: Synthetic oligonucleotide
aucaugggugaacacagag

SEQ ID NO: 2423817 - RNA, 19 nt, Artificial Sequence
  Description of Artificial Sequence: Synthetic oligonucleotide
caaggacacacacacacag

SEQ ID NO: 2423818 - RNA, 19 nt, Artificial Sequence
  Description of Artificial Sequence: Synthetic oligonucleotide
uguauauaucauacaggac

SEQ ID NO: 2423819 - RNA, 19 nt, Artificial Sequence
  Description of Artificial Sequence: Synthetic oligonucleotide
auagauauucuuuuauaua

SEQ ID NO: 2423820 - RNA, 19 nt, Artificial Sequence
  Description of Artificial Sequence: Synthetic oligonucleotide
uggaauaaaccuuucugau

SEQ ID NO: 2423821 - RNA, 19 nt, Artificial Sequence
  Description of Artificial Sequence: Synthetic oligonucleotide
gaaguuauagcucccaccu

SEQ ID NO: 2423822 - RNA, 19 nt, Artificial Sequence
  Description of Artificial Sequence: Synthetic oligonucleotide
caucuauuuauauaaaugu

SEQ ID NO: 2423823 - RNA, 19 nt, Artificial Sequence
  Description of Artificial Sequence: Synthetic oligonucleotide
aacacagagucgucucccg

SEQ ID NO: 2423824 - RNA, 19 nt, Artificial Sequence
  Description of Artificial Sequence: Synthetic oligonucleotide
aggacacacacacacagga

SEQ ID NO: 2423825 - RNA, 19 nt, Artificial Sequence
  Description of Artificial Sequence: Synthetic oligonucleotide
caaacaaaacuguggugcc

SEQ ID NO: 2423826 - RNA, 19 nt, Artificial Sequence
  Description of Artificial Sequence: Synthetic oligonucleotide
uggaccucaguuuugccug

SEQ ID NO: 2423827 - RNA, 19 nt, Artificial Sequence
  Description of Artificial Sequence: Synthetic oligonucleotide
ucuguaggauuguuggccc

SEQ ID NO: 2423828 - RNA, 19 nt, Artificial Sequence
  Description of Artificial Sequence: Synthetic oligonucleotide
agagaggcucgccacauag

SEQ ID NO: 2423829 - RNA, 19 nt, Artificial Sequence
  Description of Artificial Sequence: Synthetic oligonucleotide
agucagaagaccacuguac

SEQ ID NO: 2423830 - RNA, 19 nt, Artificial Sequence
  Description of Artificial Sequence: Synthetic oligonucleotide
ucuauuguugguccaucac

SEQ ID NO: 2423831 - RNA, 19 nt, Artificial Sequence
  Description of Artificial Sequence: Synthetic oligonucleotide
uacaauggucccugggagg

SEQ ID NO: 2423832 - RNA, 19 nt, Artificial Sequence
  Description of Artificial Sequence: Synthetic oligonucleotide
ugugacucaccaccaaaca

SEQ ID NO: 2423833 - RNA, 19 nt, Artificial Sequence
  Description of Artificial Sequence: Synthetic oligonucleotide
uggcauuuuaccagugagc

SEQ ID NO: 2423834 - RNA, 19 nt, Artificial Sequence
  Description of Artificial Sequence: Synthetic oligonucleotide
gauauucuuuuauauauau

SEQ ID NO: 2423835 - RNA, 19 nt, Artificial Sequence
  Description of Artificial Sequence: Synthetic oligonucleotide
cauguagaagagaggcucg

SEQ ID NO: 2423836 - RNA, 19 nt, Artificial Sequence
  Description of Artificial Sequence: Synthetic oligonucleotide
uacaaacaaaacuguggug

SEQ ID NO: 2423837 - RNA, 19 nt, Artificial Sequence
  Description of Artificial Sequence: Synthetic oligonucleotide
cuggaauaaaccuuucuga

SEQ ID NO: 2423838 - RNA, 19 nt, Artificial Sequence
  Description of Artificial Sequence: Synthetic oligonucleotide
aauuucagucugagggucg

SEQ ID NO: 2423839 - RNA, 19 nt, Artificial Sequence
  Description of Artificial Sequence: Synthetic oligonucleotide
cugauagaaguuauagcuc

SEQ ID NO: 2423840 - RNA, 19 nt, Artificial Sequence
  Description of Artificial Sequence: Synthetic oligonucleotide
acagagucgucucccgccc

SEQ ID NO: 2423841 - RNA, 19 nt, Artificial Sequence
  Description of Artificial Sequence: Synthetic oligonucleotide
uuccgcguaaacauuggcu

SEQ ID NO: 2423842 - RNA, 19 nt, Artificial Sequence
  Description of Artificial Sequence: Synthetic oligonucleotide
cugcacaccagcaauagca

SEQ ID NO: 2423843 - RNA, 19 nt, Artificial Sequence
  Description of Artificial Sequence: Synthetic oligonucleotide
aggagccaaggacacacac

SEQ ID NO: 2423844 - RNA, 19 nt, Artificial Sequence
  Description of Artificial Sequence: Synthetic oligonucleotide
cagaagaccacuguacagc

SEQ ID NO: 2423845 - RNA, 19 nt, Artificial Sequence
  Description of Artificial Sequence: Synthetic oligonucleotide
agcccuaugggguaucuug

SEQ ID NO: 2423846 - RNA, 19 nt, Artificial Sequence
  Description of Artificial Sequence: Synthetic oligonucleotide
uacccguaauuucagucug

SEQ ID NO: 2423847 - RNA, 19 nt, Artificial Sequence
  Description of Artificial Sequence: Synthetic oligonucleotide
cuacaauggucccugggag

SEQ ID NO: 2423848 - RNA, 19 nt, Artificial Sequence
  Description of Artificial Sequence: Synthetic oligonucleotide
ugggaguauagccuucucu

SEQ ID NO: 2423849 - RNA, 19 nt, Artificial Sequence
  Description of Artificial Sequence: Synthetic oligonucleotide
uuggcuagggcuuggucug

SEQ ID NO: 2423850 - RNA, 19 nt, Artificial Sequence
  Description of Artificial Sequence: Synthetic oligonucleotide
uccgcguaaacauuggcua

SEQ ID NO: 2423851 - RNA, 19 nt, Artificial Sequence
  Description of Artificial Sequence: Synthetic oligonucleotide
acugcacaccagcaauagc

SEQ ID NO: 2423852 - RNA, 19 nt, Artificial Sequence
  Description of Artificial Sequence: Synthetic oligonucleotide
ggcauuuuaccagugagcc

SEQ ID NO: 2423853 - RNA, 19 nt, Artificial Sequence
  Description of Artificial Sequence: Synthetic oligonucleotide
agaaccccaggguugcacg

SEQ ID NO: 2423854 - RNA, 19 nt, Artificial Sequence
  Description of Artificial Sequence: Synthetic oligonucleotide
uucucuacaauggucccug

SEQ ID NO: 2423855 - RNA, 19 nt, Artificial Sequence
  Description of Artificial Sequence: Synthetic oligonucleotide
aggauuguuggcccucacg

SEQ ID NO: 2423856 - RNA, 19 nt, Artificial Sequence
  Description of Artificial Sequence: Synthetic oligonucleotide
aauagaaggccuggaggug

SEQ ID NO: 2423857 - RNA, 19 nt, Artificial Sequence
  Description of Artificial Sequence: Synthetic oligonucleotide
ugccagaaaagcuccuugc

SEQ ID NO: 2423858 - RNA, 19 nt, Artificial Sequence
  Description of Artificial Sequence: Synthetic oligonucleotide
uccugucuauuguuggucc

SEQ ID NO: 2423859 - RNA, 19 nt, Artificial Sequence
  Description of Artificial Sequence: Synthetic oligonucleotide
agcucccaccuucagguac

SEQ ID NO: 2423860 - RNA, 19 nt, Artificial Sequence
  Description of Artificial Sequence: Synthetic oligonucleotide
accacuguacagcagugca

SEQ ID NO: 2423861 - RNA, 19 nt, Artificial Sequence
  Description of Artificial Sequence: Synthetic oligonucleotide
gaguccacugcacaccagc

SEQ ID NO: 2423862 - RNA, 19 nt, Artificial Sequence
  Description of Artificial Sequence: Synthetic oligonucleotide
aauagcagagcgggcuagg

SEQ ID NO: 2423863 - RNA, 19 nt, Artificial Sequence
  Description of Artificial Sequence: Synthetic oligonucleotide
gucuguaggauuguuggcc

SEQ ID NO: 2423864 - RNA, 19 nt, Artificial Sequence
  Description of Artificial Sequence: Synthetic oligonucleotide
uuaguggguggaccugagg

SEQ ID NO: 2423865 - RNA, 19 nt, Artificial Sequence
  Description of Artificial Sequence: Synthetic oligonucleotide
ucggggugagaaauagaag

SEQ ID NO: 2423866 - RNA, 19 nt, Artificial Sequence
  Description of Artificial Sequence: Synthetic oligonucleotide
uacaggacaucuauuuaua

SEQ ID NO: 2423867 - RNA, 19 nt, Artificial Sequence
  Description of Artificial Sequence: Synthetic oligonucleotide
guugguccaucacacuggg

SEQ ID NO: 2423868 - RNA, 19 nt, Artificial Sequence
  Description of Artificial Sequence: Synthetic oligonucleotide
uagaagagaggcucgccac

SEQ ID NO: 2423869 - RNA, 19 nt, Artificial Sequence
  Description of Artificial Sequence: Synthetic oligonucleotide
cggggugagaaauagaagg

SEQ ID NO: 2423870 - RNA, 19 nt, Artificial Sequence
  Description of Artificial Sequence: Synthetic oligonucleotide
cuauuguugguccaucaca

SEQ ID NO: 2423871 - RNA, 19 nt, Artificial Sequence
  Description of Artificial Sequence: Synthetic oligonucleotide
caggguugcacgagggugg

SEQ ID NO: 2423872 - RNA, 19 nt, Artificial Sequence
  Description of Artificial Sequence: Synthetic oligonucleotide
uaauuucagucugaggguc

SEQ ID NO: 2423873 - RNA, 19 nt, Artificial Sequence
  Description of Artificial Sequence: Synthetic oligonucleotide
gauagaaguuauagcuccc

SEQ ID NO: 2423874 - RNA, 19 nt, Artificial Sequence
  Description of Artificial Sequence: Synthetic oligonucleotide
cugugacucaccaccaaac

SEQ ID NO: 2423875 - RNA, 19 nt, Artificial Sequence
  Description of Artificial Sequence: Synthetic oligonucleotide
aaggacacacacacacagg

SEQ ID NO: 2423876 - RNA, 19 nt, Artificial Sequence
  Description of Artificial Sequence: Synthetic oligonucleotide
ucuacauuuggugcuccug

SEQ ID NO: 2423877 - RNA, 19 nt, Artificial Sequence
  Description of Artificial Sequence: Synthetic oligonucleotide
uuauagcucccaccuucag

SEQ ID NO: 2423878 - RNA, 19 nt, Artificial Sequence
  Description of Artificial Sequence: Synthetic oligonucleotide
gaaguccugucuauuguug

SEQ ID NO: 2423879 - RNA, 19 nt, Artificial Sequence
  Description of Artificial Sequence: Synthetic oligonucleotide
agcaaaucaugggugaaca

SEQ ID NO: 2423880 - RNA, 19 nt, Artificial Sequence
  Description of Artificial Sequence: Synthetic oligonucleotide
aaacaaaacuguggugcca

SEQ ID NO: 2423881 - RNA, 19 nt, Artificial Sequence
  Description of Artificial Sequence: Synthetic oligonucleotide
guagaagagaggcucgcca

SEQ ID NO: 2423882 - RNA, 19 nt, Artificial Sequence
  Description of Artificial Sequence: Synthetic oligonucleotide
cuagggcuuggucuguagg

SEQ ID NO: 2423883 - RNA, 19 nt, Artificial Sequence
  Description of Artificial Sequence: Synthetic oligonucleotide
gccaaggacacacacacac

SEQ ID NO: 2423884 - RNA, 19 nt, Artificial Sequence
  Description of Artificial Sequence: Synthetic oligonucleotide
auuucagucugagggucgg

SEQ ID NO: 2423885 - RNA, 19 nt, Artificial Sequence
  Description of Artificial Sequence: Synthetic oligonucleotide
uggaguccacugcacacca

SEQ ID NO: 2423886 - RNA, 19 nt, Artificial Sequence
  Description of Artificial Sequence: Synthetic oligonucleotide
auguacaaacaaaacugug

SEQ ID NO: 2423887 - RNA, 19 nt, Artificial Sequence
  Description of Artificial Sequence: Synthetic oligonucleotide
auucuacauuuggugcucc

SEQ ID NO: 2423888 - RNA, 19 nt, Artificial Sequence
  Description of Artificial Sequence: Synthetic oligonucleotide
guaucuugcuccucuggac

SEQ ID NO: 2423889 - RNA, 19 nt, Artificial Sequence
  Description of Artificial Sequence: Synthetic oligonucleotide
cauuuuaccagugagcccu

SEQ ID NO: 2423890 - RNA, 19 nt, Artificial Sequence
  Description of Artificial Sequence: Synthetic oligonucleotide
uccucuggaccucaguuuu

SEQ ID NO: 2423891 - RNA, 19 nt, Artificial Sequence
  Description of Artificial Sequence: Synthetic oligonucleotide
auagggcagagcuucccug

SEQ ID NO: 2423892 - RNA, 19 nt, Artificial Sequence
  Description of Artificial Sequence: Synthetic oligonucleotide
aaacauuggcuagggcuug

SEQ ID NO: 2423893 - RNA, 19 nt, Artificial Sequence
  Description of Artificial Sequence: Synthetic oligonucleotide
uugccugccuccauauaga

SEQ ID NO: 2423894 - RNA, 19 nt, Artificial Sequence
  Description of Artificial Sequence: Synthetic oligonucleotide
acauagggcagagcuuccc

SEQ ID NO: 2423895 - RNA, 19 nt, Artificial Sequence
  Description of Artificial Sequence: Synthetic oligonucleotide
auggagggagccagaaccc

SEQ ID NO: 2423896 - RNA, 19 nt, Artificial Sequence
  Description of Artificial Sequence: Synthetic oligonucleotide
auauaucauacaggacauc

SEQ ID NO: 2423897 - RNA, 19 nt, Artificial Sequence
  Description of Artificial Sequence: Synthetic oligonucleotide
agaagagaggcucgccaca

SEQ ID NO: 2423898 - RNA, 19 nt, Artificial Sequence
  Description of Artificial Sequence: Synthetic oligonucleotide
agcagugcauguucccaag

SEQ ID NO: 2423899 - RNA, 19 nt, Artificial Sequence
  Description of Artificial Sequence: Synthetic oligonucleotide
cuacauuuggugcuccuga

SEQ ID NO: 2423900 - RNA, 19 nt, Artificial Sequence
  Description of Artificial Sequence: Synthetic oligonucleotide
aguccugucuauuguuggu

SEQ ID NO: 2423901 - RNA, 19 nt, Artificial Sequence
  Description of Artificial Sequence: Synthetic oligonucleotide
uggaccugagggcagcaaa

SEQ ID NO: 2423902 - RNA, 19 nt, Artificial Sequence
  Description of Artificial Sequence: Synthetic oligonucleotide
agagucgucucccgcccgg

SEQ ID NO: 2423903 - RNA, 19 nt, Artificial Sequence
  Description of Artificial Sequence: Synthetic oligonucleotide
acaauggucccugggaggu

SEQ ID NO: 2423904 - RNA, 19 nt, Artificial Sequence
  Description of Artificial Sequence: Synthetic oligonucleotide
auuguugguccaucacacu

SEQ ID NO: 2423905 - RNA, 19 nt, Artificial Sequence
  Description of Artificial Sequence: Synthetic oligonucleotide
guaauuucagucugagggu

SEQ ID NO: 2423906 - RNA, 19 nt, Artificial Sequence
  Description of Artificial Sequence: Synthetic oligonucleotide
gguacccguaauuucaguc

SEQ ID NO: 2423907 - RNA, 19 nt, Artificial Sequence
  Description of Artificial Sequence: Synthetic oligonucleotide
guacauuuguuucuggaau

SEQ ID NO: 2423908 - RNA, 19 nt, Artificial Sequence
  Description of Artificial Sequence: Synthetic oligonucleotide
accagcaauagcagagcgg

SEQ ID NO: 2423909 - RNA, 19 nt, Artificial Sequence
  Description of Artificial Sequence: Synthetic oligonucleotide
ucagucugagggucggggu

SEQ ID NO: 2423910 - RNA, 19 nt, Artificial Sequence
  Description of Artificial Sequence: Synthetic oligonucleotide
ucugcacccaggagccaag

SEQ ID NO: 2423911 - RNA, 19 nt, Artificial Sequence
  Description of Artificial Sequence: Synthetic oligonucleotide
cuagguuccgcguaaacau

SEQ ID NO: 2423912 - RNA, 19 nt, Artificial Sequence
  Description of Artificial Sequence: Synthetic oligonucleotide
gagcgggcuagguuccgcg

SEQ ID NO: 2423913 - RNA, 19 nt, Artificial Sequence
  Description of Artificial Sequence: Synthetic oligonucleotide
aaguuauagcucccaccuu

SEQ ID NO: 2423914 - RNA, 19 nt, Artificial Sequence
  Description of Artificial Sequence: Synthetic oligonucleotide
cagguacccguaauuucag

SEQ ID NO: 2423915 - RNA, 19 nt, Artificial Sequence
  Description of Artificial Sequence: Synthetic oligonucleotide
cuggccagucagaagacca

SEQ ID NO: 2423916 - RNA, 19 nt, Artificial Sequence
  Description of Artificial Sequence: Synthetic oligonucleotide
uggagagcugugacucacc

SEQ ID NO: 2423917 - RNA, 19 nt, Artificial Sequence
  Description of Artificial Sequence: Synthetic oligonucleotide
uucuacauuuggugcuccu

SEQ ID NO: 2423918 - RNA, 19 nt, Artificial Sequence
  Description of Artificial Sequence: Synthetic oligonucleotide
guuccgcguaaacauuggc

SEQ ID NO: 2423919 - RNA, 19 nt, Artificial Sequence
  Description of Artificial Sequence: Synthetic oligonucleotide
augggaguauagccuucuc

SEQ ID NO: 2423920 - RNA, 19 nt, Artificial Sequence
  Description of Artificial Sequence: Synthetic oligonucleotide
ucgucucccgcccggccgg

SEQ ID NO: 2423921 - RNA, 19 nt, Artificial Sequence
  Description of Artificial Sequence: Synthetic oligonucleotide
gucuauuguugguccauca

SEQ ID NO: 2423922 - RNA, 19 nt, Artificial Sequence
  Description of Artificial Sequence: Synthetic oligonucleotide
guacccguaauuucagucu

SEQ ID NO: 2423923 - RNA, 19 nt, Artificial Sequence
  Description of Artificial Sequence: Synthetic oligonucleotide
ggaguauagccuucucuac

SEQ ID NO: 2423924 - RNA, 19 nt, Artificial Sequence
  Description of Artificial Sequence: Synthetic oligonucleotide
cuggaguccacugcacacc

SEQ ID NO: 2423925 - RNA, 19 nt, Artificial Sequence
  Description of Artificial Sequence: Synthetic oligonucleotide
agauauucuuuuauauaua

SEQ ID NO: 2423926 - RNA, 19 nt, Artificial Sequence
  Description of Artificial Sequence: Synthetic oligonucleotide
uguaggauuguuggcccuc

SEQ ID NO: 2423927 - RNA, 19 nt, Artificial Sequence
  Description of Artificial Sequence: Synthetic oligonucleotide
cauucuacauuuggugcuc

SEQ ID NO: 2423928 - RNA, 19 nt, Artificial Sequence
  Description of Artificial Sequence: Synthetic oligonucleotide
acacacacacacaggaagu

SEQ ID NO: 2423929 - RNA, 19 nt, Artificial Sequence
  Description of Artificial Sequence: Synthetic oligonucleotide
auuuggugcuccugacccu

SEQ ID NO: 2423930 - RNA, 19 nt, Artificial Sequence
  Description of Artificial Sequence: Synthetic oligonucleotide
gguugcacgagggugggcc

SEQ ID NO: 2423931 - RNA, 19 nt, Artificial Sequence
  Description of Artificial Sequence: Synthetic oligonucleotide
gagaggcucgccacauagg

SEQ ID NO: 2423932 - RNA, 19 nt, Artificial Sequence
  Description of Artificial Sequence: Synthetic oligonucleotide
guggugccagaaaagcucc

SEQ ID NO: 2423933 - RNA, 19 nt, Artificial Sequence
  Description of Artificial Sequence: Synthetic oligonucleotide
gggaguauagccuucucua

SEQ ID NO: 2423934 - RNA, 19 nt, Artificial Sequence
  Description of Artificial Sequence: Synthetic oligonucleotide
accuuucugauagaaguua

SEQ ID NO: 2423935 - RNA, 19 nt, Artificial Sequence
  Description of Artificial Sequence: Synthetic oligonucleotide
caggacaucuauuuauaua

SEQ ID NO: 2423936 - RNA, 19 nt, Artificial Sequence
  Description of Artificial Sequence: Synthetic oligonucleotide
ugggaaauggagggagcca

SEQ ID NO: 2423937 - RNA, 19 nt, Artificial Sequence
  Description of Artificial Sequence: Synthetic oligonucleotide
ugccuccauauagauauuc

SEQ ID NO: 2423938 - RNA, 19 nt, Artificial Sequence
  Description of Artificial Sequence: Synthetic oligonucleotide
gucgucucccgcccggccg

SEQ ID NO: 2423939 - RNA, 19 nt, Artificial Sequence
  Description of Artificial Sequence: Synthetic oligonucleotide
ggaauaaaccuuucugaua

SEQ ID NO: 2423940 - RNA, 19 nt, Artificial Sequence
  Description of Artificial Sequence: Synthetic oligonucleotide
cacugcacaccagcaauag

SEQ ID NO: 2423941 - RNA, 19 nt, Artificial Sequence
  Description of Artificial Sequence: Synthetic oligonucleotide
uggcccucacguccgaggu

SEQ ID NO: 2423942 - RNA, 19 nt, Artificial Sequence
  Description of Artificial Sequence: Synthetic oligonucleotide
aaucaugggugaacacaga

SEQ ID NO: 2423943 - RNA, 19 nt, Artificial Sequence
  Description of Artificial Sequence: Synthetic oligonucleotide
ccauguagaagagaggcuc

SEQ ID NO: 2423944 - RNA, 19 nt, Artificial Sequence
  Description of Artificial Sequence: Synthetic oligonucleotide
aaggugccauguagaagag

SEQ ID NO: 2423945 - RNA, 19 nt, Artificial Sequence
  Description of Artificial Sequence: Synthetic oligonucleotide
agguuccgcguaaacauug

SEQ ID NO: 2423946 - RNA, 19 nt, Artificial Sequence
  Description of Artificial Sequence: Synthetic oligonucleotide
ugucuauuguugguccauc

SEQ ID NO: 2423947 - RNA, 19 nt, Artificial Sequence
  Description of Artificial Sequence: Synthetic oligonucleotide
ggauuguuggcccucacgu

SEQ ID NO: 2423948 - RNA, 19 nt, Artificial Sequence
  Description of Artificial Sequence: Synthetic oligonucleotide
acacaaggugccauguaga

SEQ ID NO: 2423949 - RNA, 19 nt, Artificial Sequence
  Description of Artificial Sequence: Synthetic oligonucleotide
uggguggaccugagggcag

SEQ ID NO: 2423950 - RNA, 19 nt, Artificial Sequence
  Description of Artificial Sequence: Synthetic oligonucleotide
guacagcagugcauguucc

SEQ ID NO: 2423951 - RNA, 19 nt, Artificial Sequence
  Description of Artificial Sequence: Synthetic oligonucleotide
cacauagggcagagcuucc

SEQ ID NO: 2423952 - RNA, 19 nt, Artificial Sequence
  Description of Artificial Sequence: Synthetic oligonucleotide
cagcaaaucaugggugaac

SEQ ID NO: 2423953 - RNA, 19 nt, Artificial Sequence
  Description of Artificial Sequence: Synthetic oligonucleotide
caauagcagagcgggcuag

SEQ ID NO: 2423954 - RNA, 19 nt, Artificial Sequence
  Description of Artificial Sequence: Synthetic oligonucleotide
agguccauguacaaacaaa

SEQ ID NO: 2423955 - RNA, 19 nt, Artificial Sequence
  Description of Artificial Sequence: Synthetic oligonucleotide
guuauagcucccaccuuca

SEQ ID NO: 2423956 - RNA, 19 nt, Artificial Sequence
  Description of Artificial Sequence: Synthetic oligonucleotide
agagcgggcuagguuccgc

SEQ ID NO: 2423957 - RNA, 19 nt, Artificial Sequence
  Description of Artificial Sequence: Synthetic oligonucleotide
gacaugggaguauagccuu

SEQ ID NO: 2423958 - RNA, 19 nt, Artificial Sequence
  Description of Artificial Sequence: Synthetic oligonucleotide
uagguuccgcguaaacauu

SEQ ID NO: 2423959 - RNA, 19 nt, Artificial Sequence
  Description of Artificial Sequence: Synthetic oligonucleotide
gagggugggcccucuuuac

SEQ ID NO: 2423960 - RNA, 19 nt, Artificial Sequence
  Description of Artificial Sequence: Synthetic oligonucleotide
cacacacacacaggaaguc

SEQ ID NO: 2423961 - RNA, 19 nt, Artificial Sequence
  Description of Artificial Sequence: Synthetic oligonucleotide
gcaggcucagcuuuaggca

SEQ ID NO: 2423962 - RNA, 19 nt, Artificial Sequence
  Description of Artificial Sequence: Synthetic oligonucleotide
gugccauguagaagagagg

SEQ ID NO: 2423963 - RNA, 19 nt, Artificial Sequence
  Description of Artificial Sequence: Synthetic oligonucleotide
guugcacgagggugggccc

SEQ ID NO: 2423964 - RNA, 19 nt, Artificial Sequence
  Description of Artificial Sequence: Synthetic oligonucleotide
gacccuggccagucagaag

SEQ ID NO: 2423965 - RNA, 19 nt, Artificial Sequence
  Description of Artificial Sequence: Synthetic oligonucleotide
ggcagcaaaucauggguga

SEQ ID NO: 2423966 - RNA, 19 nt, Artificial Sequence
  Description of Artificial Sequence: Synthetic oligonucleotide
ugggcccucuuuacauucu

SEQ ID NO: 2423967 - RNA, 19 nt, Artificial Sequence
  Description of Artificial Sequence: Synthetic oligonucleotide
gugggcccucuuuacauuc

SEQ ID NO: 2423968 - RNA, 19 nt, Artificial Sequence
  Description of Artificial Sequence: Synthetic oligonucleotide
auaucauacaggacaucua

SEQ ID NO: 2423969 - RNA, 19 nt, Artificial Sequence
  Description of Artificial Sequence: Synthetic oligonucleotide
accaaacacaaggugccau

SEQ ID NO: 2423970 - RNA, 19 nt, Artificial Sequence
  Description of Artificial Sequence: Synthetic oligonucleotide
uagcagagcgggcuagguu

SEQ ID NO: 2423971 - RNA, 19 nt, Artificial Sequence
  Description of Artificial Sequence: Synthetic oligonucleotide
agguacccguaauuucagu

SEQ ID NO: 2423972 - RNA, 19 nt, Artificial Sequence
  Description of Artificial Sequence: Synthetic oligonucleotide
gaggcucgccacauagggc

SEQ ID NO: 2423973 - RNA, 19 nt, Artificial Sequence
  Description of Artificial Sequence: Synthetic oligonucleotide
gaaccccaggguugcacga

SEQ ID NO: 2423974 - RNA, 19 nt, Artificial Sequence
  Description of Artificial Sequence: Synthetic oligonucleotide
acaugggaguauagccuuc

SEQ ID NO: 2423975 - RNA, 19 nt, Artificial Sequence
  Description of Artificial Sequence: Synthetic oligonucleotide
cacacacacaggaaguccu

SEQ ID NO: 2423976 - RNA, 19 nt, Artificial Sequence
  Description of Artificial Sequence: Synthetic oligonucleotide
cagcaauagcagagcgggc

SEQ ID NO: 2423977 - RNA, 19 nt, Artificial Sequence
  Description of Artificial Sequence: Synthetic oligonucleotide
accuucagguacccguaau

SEQ ID NO: 2423978 - RNA, 19 nt, Artificial Sequence
  Description of Artificial Sequence: Synthetic oligonucleotide
gcguaaacauuggcuaggg

SEQ ID NO: 2423979 - RNA, 19 nt, Artificial Sequence
  Description of Artificial Sequence: Synthetic oligonucleotide
auagcagagcgggcuaggu

SEQ ID NO: 2423980 - RNA, 19 nt, Artificial Sequence
  Description of Artificial Sequence: Synthetic oligonucleotide
gcuagguuccgcguaaaca

SEQ ID NO: 2423981 - RNA, 19 nt, Artificial Sequence
  Description of Artificial Sequence: Synthetic oligonucleotide
cauuaguggguggaccuga

SEQ ID NO: 2423982 - RNA, 19 nt, Artificial Sequence
  Description of Artificial Sequence: Synthetic oligonucleotide
cuggaccucaguuuugccu

SEQ ID NO: 2423983 - RNA, 19 nt, Artificial Sequence
  Description of Artificial Sequence: Synthetic oligonucleotide
gguuccgcguaaacauugg

SEQ ID NO: 2423984 - RNA, 19 nt, Artificial Sequence
  Description of Artificial Sequence: Synthetic oligonucleotide
ggagagcugugacucacca

SEQ ID NO: 2423985 - RNA, 19 nt, Artificial Sequence
  Description of Artificial Sequence: Synthetic oligonucleotide
guccugucuauuguugguc

SEQ ID NO: 2423986 - RNA, 19 nt, Artificial Sequence
  Description of Artificial Sequence: Synthetic oligonucleotide
gaccugagggcagcaaauc

SEQ ID NO: 2423987 - RNA, 19 nt, Artificial Sequence
  Description of Artificial Sequence: Synthetic oligonucleotide
gcaaaucaugggugaacac

SEQ ID NO: 2423988 - RNA, 19 nt, Artificial Sequence
  Description of Artificial Sequence: Synthetic oligonucleotide
aggguugcacgaggguggg

SEQ ID NO: 2423989 - RNA, 19 nt, Artificial Sequence
  Description of Artificial Sequence: Synthetic oligonucleotide
ccacauagggcagagcuuc

SEQ ID NO: 2423990 - RNA, 19 nt, Artificial Sequence
  Description of Artificial Sequence: Synthetic oligonucleotide
gcccucuuuacauucuaca

SEQ ID NO: 2423991 - RNA, 19 nt, Artificial Sequence
  Description of Artificial Sequence: Synthetic oligonucleotide
guggguggaccugagggca

SEQ ID NO: 2423992 - RNA, 19 nt, Artificial Sequence
  Description of Artificial Sequence: Synthetic oligonucleotide
ccguaauuucagucugagg

SEQ ID NO: 2423993 - RNA, 19 nt, Artificial Sequence
  Description of Artificial Sequence: Synthetic oligonucleotide
agggcagagcuucccugca

SEQ ID NO: 2423994 - RNA, 19 nt, Artificial Sequence
  Description of Artificial Sequence: Synthetic oligonucleotide
aggccaagguccacccugg

SEQ ID NO: 2423995 - RNA, 19 nt, Artificial Sequence
  Description of Artificial Sequence: Synthetic oligonucleotide
cugcaggcucagcuuuagg

SEQ ID NO: 2423996 - RNA, 19 nt, Artificial Sequence
  Description of Artificial Sequence: Synthetic oligonucleotide
cucgccacauagggcagag

SEQ ID NO: 2423997 - RNA, 19 nt, Artificial Sequence
  Description of Artificial Sequence: Synthetic oligonucleotide
aucauacaggacaucuauu

SEQ ID NO: 2423998 - RNA, 19 nt, Artificial Sequence
  Description of Artificial Sequence: Synthetic oligonucleotide
aguccacugcacaccagca

SEQ ID NO: 2423999 - RNA, 19 nt, Artificial Sequence
  Description of Artificial Sequence: Synthetic oligonucleotide
cagagucgucucccgcccg

SEQ ID NO: 2424000 - RNA, 19 nt, Artificial Sequence
  Description of Artificial Sequence: Synthetic oligonucleotide
cugagggucggggugagaa

SEQ ID NO: 2424001 - RNA, 19 nt, Artificial Sequence
  Description of Artificial Sequence: Synthetic oligonucleotide
ugagcccuaugggguaucu

SEQ ID NO: 2424002 - RNA, 19 nt, Artificial Sequence
  Description of Artificial Sequence: Synthetic oligonucleotide
gggucggggugagaaauag

SEQ ID NO: 2424003 - RNA, 19 nt, Artificial Sequence
  Description of Artificial Sequence: Synthetic oligonucleotide
ccgcguaaacauuggcuag

SEQ ID NO: 2424004 - RNA, 19 nt, Artificial Sequence
  Description of Artificial Sequence: Synthetic oligonucleotide
gggcagcaaaucaugggug

SEQ ID NO: 2424005 - RNA, 19 nt, Artificial Sequence
  Description of Artificial Sequence: Synthetic oligonucleotide
gaccucaguuuugccugcc

SEQ ID NO: 2424006 - RNA, 19 nt, Artificial Sequence
  Description of Artificial Sequence: Synthetic oligonucleotide
agcgggcuagguuccgcgu

SEQ ID NO: 2424007 - RNA, 19 nt, Artificial Sequence
  Description of Artificial Sequence: Synthetic oligonucleotide
uccugacccuggccaguca

SEQ ID NO: 2424008 - RNA, 19 nt, Artificial Sequence
  Description of Artificial Sequence: Synthetic oligonucleotide
gagccagaaccccaggguu

SEQ ID NO: 2424009 - RNA, 19 nt, Artificial Sequence
  Description of Artificial Sequence: Synthetic oligonucleotide
ucucccgcccggccgguau

SEQ ID NO: 2424010 - RNA, 19 nt, Artificial Sequence
  Description of Artificial Sequence: Synthetic oligonucleotide
cccguaauuucagucugag

SEQ ID NO: 2424011 - RNA, 19 nt, Artificial Sequence
  Description of Artificial Sequence: Synthetic oligonucleotide
ccaaggggccucugcaccc

SEQ ID NO: 2424012 - RNA, 19 nt, Artificial Sequence
  Description of Artificial Sequence: Synthetic oligonucleotide
gcuagggcuuggucuguag

SEQ ID NO: 2424013 - RNA, 19 nt, Artificial Sequence
  Description of Artificial Sequence: Synthetic oligonucleotide
ccuaugggguaucuugcuc

SEQ ID NO: 2424014 - RNA, 19 nt, Artificial Sequence
  Description of Artificial Sequence: Synthetic oligonucleotide
augggguaucuugcuccuc

SEQ ID NO: 2424015 - RNA, 19 nt, Artificial Sequence
  Description of Artificial Sequence: Synthetic oligonucleotide
ccaggguugcacgagggug

SEQ ID NO: 2424016 - RNA, 19 nt, Artificial Sequence
  Description of Artificial Sequence: Synthetic oligonucleotide
acgagggugggcccucuuu

SEQ ID NO: 2424017 - RNA, 19 nt, Artificial Sequence
  Description of Artificial Sequence: Synthetic oligonucleotide
ccugacccuggccagucag

SEQ ID NO: 2424018 - RNA, 19 nt, Artificial Sequence
  Description of Artificial Sequence: Synthetic oligonucleotide
cagcagugcauguucccaa

SEQ ID NO: 2424019 - RNA, 19 nt, Artificial Sequence
  Description of Artificial Sequence: Synthetic oligonucleotide
ucccaccuucagguacccg

SEQ ID NO: 2424020 - RNA, 19 nt, Artificial Sequence
  Description of Artificial Sequence: Synthetic oligonucleotide
ggaccucaguuuugccugc

SEQ ID NO: 2424021 - RNA, 19 nt, Artificial Sequence
  Description of Artificial Sequence: Synthetic oligonucleotide
ggagccaaggacacacaca

SEQ ID NO: 2424022 - RNA, 19 nt, Artificial Sequence
  Description of Artificial Sequence: Synthetic oligonucleotide
uugcacgagggugggcccu

SEQ ID NO: 2424023 - RNA, 19 nt, Artificial Sequence
  Description of Artificial Sequence: Synthetic oligonucleotide
cauagggcagagcuucccu

SEQ ID NO: 2424024 - RNA, 19 nt, Artificial Sequence
  Description of Artificial Sequence: Synthetic oligonucleotide
gagggucggggugagaaau

SEQ ID NO: 2424025 - RNA, 19 nt, Artificial Sequence
  Description of Artificial Sequence: Synthetic oligonucleotide
ggucccugggagguggcag

SEQ ID NO: 2424026 - RNA, 19 nt, Artificial Sequence
  Description of Artificial Sequence: Synthetic oligonucleotide
auggucccugggagguggc

SEQ ID NO: 2424027 - RNA, 19 nt, Artificial Sequence
  Description of Artificial Sequence: Synthetic oligonucleotide
gggguaucuugcuccucug

SEQ ID NO: 2424028 - RNA, 19 nt, Artificial Sequence
  Description of Artificial Sequence: Synthetic oligonucleotide
cgcguaaacauuggcuagg

SEQ ID NO: 2424029 - RNA, 19 nt, Artificial Sequence
  Description of Artificial Sequence: Synthetic oligonucleotide
gcccuaugggguaucuugc

SEQ ID NO: 2424030 - RNA, 19 nt, Artificial Sequence
  Description of Artificial Sequence: Synthetic oligonucleotide
cugacccuggccagucaga

SEQ ID NO: 2424031 - RNA, 19 nt, Artificial Sequence
  Description of Artificial Sequence: Synthetic oligonucleotide
gccagaaccccaggguugc

SEQ ID NO: 2424032 - RNA, 19 nt, Artificial Sequence
  Description of Artificial Sequence: Synthetic oligonucleotide
gcccggccgguauacaccc

SEQ ID NO: 2424033 - RNA, 19 nt, Artificial Sequence
  Description of Artificial Sequence: Synthetic oligonucleotide
acccguaauuucagucuga

SEQ ID NO: 2424034 - RNA, 19 nt, Artificial Sequence
  Description of Artificial Sequence: Synthetic oligonucleotide
ggcuggaguccacugcaca

SEQ ID NO: 2424035 - RNA, 19 nt, Artificial Sequence
  Description of Artificial Sequence: Synthetic oligonucleotide
ggacaucuauuuauauaaa

SEQ ID NO: 2424036 - RNA, 19 nt, Artificial Sequence
  Description of Artificial Sequence: Synthetic oligonucleotide
ggcuagguuccgcguaaac

SEQ ID NO: 2424037 - RNA, 19 nt, Artificial Sequence
  Description of Artificial Sequence: Synthetic oligonucleotide
uguucccaaggggccucug

SEQ ID NO: 2424038 - RNA, 19 nt, Artificial Sequence
  Description of Artificial Sequence: Synthetic oligonucleotide
gagucgucucccgcccggc

SEQ ID NO: 2424039 - RNA, 19 nt, Artificial Sequence
  Description of Artificial Sequence: Synthetic oligonucleotide
gggcagagcuucccugcag

SEQ ID NO: 2424040 - RNA, 19 nt, Artificial Sequence
  Description of Artificial Sequence: Synthetic oligonucleotide
cguaaacauuggcuagggc

SEQ ID NO: 2424041 - RNA, 19 nt, Artificial Sequence
  Description of Artificial Sequence: Synthetic oligonucleotide
gcuuguucuuggcauuuua

SEQ ID NO: 2424042 - RNA, 19 nt, Artificial Sequence
  Description of Artificial Sequence: Synthetic oligonucleotide
gcucccaccuucagguacc

SEQ ID NO: 2424043 - RNA, 19 nt, Artificial Sequence
  Description of Artificial Sequence: Synthetic oligonucleotide
cuugcuccucuggaccuca

SEQ ID NO: 2424044 - RNA, 19 nt, Artificial Sequence
  Description of Artificial Sequence: Synthetic oligonucleotide
gguggagagcugugacuca

SEQ ID NO: 2424045 - RNA, 19 nt, Artificial Sequence
  Description of Artificial Sequence: Synthetic oligonucleotide
ccaaggacacacacacaca

SEQ ID NO: 2424046 - RNA, 19 nt, Artificial Sequence
  Description of Artificial Sequence: Synthetic oligonucleotide
caauggucccugggaggug

SEQ ID NO: 2424047 - RNA, 19 nt, Artificial Sequence
  Description of Artificial Sequence: Synthetic oligonucleotide
gcaauagcagagcgggcua

SEQ ID NO: 2424048 - RNA, 19 nt, Artificial Sequence
  Description of Artificial Sequence: Synthetic oligonucleotide
ccccauuaguggguggacc

SEQ ID NO: 2424049 - RNA, 19 nt, Artificial Sequence
  Description of Artificial Sequence: Synthetic oligonucleotide
cucccaccuucagguaccc

SEQ ID NO: 2424050 - RNA, 19 nt, Artificial Sequence
  Description of Artificial Sequence: Synthetic oligonucleotide
cuccugacccuggccaguc

SEQ ID NO: 2424051 - RNA, 19 nt, Artificial Sequence
  Description of Artificial Sequence: Synthetic oligonucleotide
cuucucuacaauggucccu

SEQ ID NO: 2424052 - RNA, 19 nt, Artificial Sequence
  Description of Artificial Sequence: Synthetic oligonucleotide
caugggaguauagccuucu

SEQ ID NO: 2424053 - RNA, 19 nt, Artificial Sequence
  Description of Artificial Sequence: Synthetic oligonucleotide
ucgccacauagggcagagc

SEQ ID NO: 2424054 - RNA, 19 nt, Artificial Sequence
  Description of Artificial Sequence: Synthetic oligonucleotide
cagugagcccuauggggua

SEQ ID NO: 2424055 - RNA, 19 nt, Artificial Sequence
  Description of Artificial Sequence: Synthetic oligonucleotide
gucugagggucggggugag

SEQ ID NO: 2424056 - RNA, 19 nt, Artificial Sequence
  Description of Artificial Sequence: Synthetic oligonucleotide
cagagcgggcuagguuccg

SEQ ID NO: 2424057 - RNA, 19 nt, Artificial Sequence
  Description of Artificial Sequence: Synthetic oligonucleotide
ccagugagcccuauggggu

SEQ ID NO: 2424058 - RNA, 19 nt, Artificial Sequence
  Description of Artificial Sequence: Synthetic oligonucleotide
ggaaauggagggagccaga

SEQ ID NO: 2424059 - RNA, 19 nt, Artificial Sequence
  Description of Artificial Sequence: Synthetic oligonucleotide
caccaaacacaaggugcca

SEQ ID NO: 2424060 - RNA, 19 nt, Artificial Sequence
  Description of Artificial Sequence: Synthetic oligonucleotide
caggagccaaggacacaca

SEQ ID NO: 2424061 - RNA, 19 nt, Artificial Sequence
  Description of Artificial Sequence: Synthetic oligonucleotide
ccugucuauuguuggucca

SEQ ID NO: 2424062 - RNA, 19 nt, Artificial Sequence
  Description of Artificial Sequence: Synthetic oligonucleotide
agccaaggacacacacaca

SEQ ID NO: 2424063 - RNA, 19 nt, Artificial Sequence
  Description of Artificial Sequence: Synthetic oligonucleotide
cuguaggauuguuggcccu

SEQ ID NO: 2424064 - RNA, 19 nt, Artificial Sequence
  Description of Artificial Sequence: Synthetic oligonucleotide
auuuuaccagugagcccua

SEQ ID NO: 2424065 - RNA, 19 nt, Artificial Sequence
  Description of Artificial Sequence: Synthetic oligonucleotide
ccuggccagucagaagacc

SEQ ID NO: 2424066 - RNA, 19 nt, Artificial Sequence
  Description of Artificial Sequence: Synthetic oligonucleotide
uggcuagggcuuggucugu

SEQ ID NO: 2424067 - RNA, 19 nt, Artificial Sequence
  Description of Artificial Sequence: Synthetic oligonucleotide
ccauuaguggguggaccug

SEQ ID NO: 2424068 - RNA, 19 nt, Artificial Sequence
  Description of Artificial Sequence: Synthetic oligonucleotide
cccaccuucagguacccgu

SEQ ID NO: 2424069 - RNA, 19 nt, Artificial Sequence
  Description of Artificial Sequence: Synthetic oligonucleotide
auguucccaaggggccucu

SEQ ID NO: 2424070 - RNA, 19 nt, Artificial Sequence
  Description of Artificial Sequence: Synthetic oligonucleotide
cuccucuggaccucaguuu

SEQ ID NO: 2424071 - RNA, 19 nt, Artificial Sequence
  Description of Artificial Sequence: Synthetic oligonucleotide
ggacacacacacacaggaa

SEQ ID NO: 2424072 - RNA, 19 nt, Artificial Sequence
  Description of Artificial Sequence: Synthetic oligonucleotide
cccauuaguggguggaccu

SEQ ID NO: 2424073 - RNA, 19 nt, Artificial Sequence
  Description of Artificial Sequence: Synthetic oligonucleotide
caccuucagguacccguaa

SEQ ID NO: 2424074 - RNA, 19 nt, Artificial Sequence
  Description of Artificial Sequence: Synthetic oligonucleotide
gcagcaaaucaugggugaa

SEQ ID NO: 2424075 - RNA, 19 nt, Artificial Sequence
  Description of Artificial Sequence: Synthetic oligonucleotide
gcuccucuggaccucaguu

SEQ ID NO: 2424076 - RNA, 19 nt, Artificial Sequence
  Description of Artificial Sequence: Synthetic oligonucleotide
cugucuauuguugguccau

SEQ ID NO: 2424077 - RNA, 19 nt, Artificial Sequence
  Description of Artificial Sequence: Synthetic oligonucleotide
gggugggcccucuuuacau

SEQ ID NO: 2424078 - RNA, 19 nt, Artificial Sequence
  Description of Artificial Sequence: Synthetic oligonucleotide
cccuggccagucagaagac

SEQ ID NO: 2424079 - RNA, 19 nt, Artificial Sequence
  Description of Artificial Sequence: Synthetic oligonucleotide
ggcucgccacauagggcag

SEQ ID NO: 2424080 - RNA, 19 nt, Artificial Sequence
  Description of Artificial Sequence: Synthetic oligonucleotide
agggucggggugagaaaua

SEQ ID NO: 2424081 - RNA, 19 nt, Artificial Sequence
  Description of Artificial Sequence: Synthetic oligonucleotide
ggucggggugagaaauaga

SEQ ID NO: 2424082 - RNA, 19 nt, Artificial Sequence
  Description of Artificial Sequence: Synthetic oligonucleotide
cgcccggccgguauacacc

SEQ ID NO: 2424083 - RNA, 19 nt, Artificial Sequence
  Description of Artificial Sequence: Synthetic oligonucleotide
ccgcccggccgguauacac

SEQ ID NO: 2424084 - RNA, 19 nt, Artificial Sequence
  Description of Artificial Sequence: Synthetic oligonucleotide
cuguacagcagugcauguu

SEQ ID NO: 2424085 - RNA, 19 nt, Artificial Sequence
  Description of Artificial Sequence: Synthetic oligonucleotide
guggaccugagggcagcaa

SEQ ID NO: 2424086 - RNA, 19 nt, Artificial Sequence
  Description of Artificial Sequence: Synthetic oligonucleotide
ggaccugagggcagcaaau

SEQ ID NO: 2424087 - RNA, 19 nt, Artificial Sequence
  Description of Artificial Sequence: Synthetic oligonucleotide
ggcccucacguccgagguc

SEQ ID NO: 2424088 - RNA, 19 nt, Artificial Sequence
  Description of Artificial Sequence: Synthetic oligonucleotide
ccacccuggacaugggagu

SEQ ID NO: 2424089 - RNA, 19 nt, Artificial Sequence
  Description of Artificial Sequence: Synthetic oligonucleotide
gguggaccugagggcagca

SEQ ID NO: 2424090 - RNA, 19 nt, Artificial Sequence
  Description of Artificial Sequence: Synthetic oligonucleotide
gcgggcuagguuccgcgua

SEQ ID NO: 2424091 - RNA, 19 nt, Artificial Sequence
  Description of Artificial Sequence: Synthetic oligonucleotide
ccuucagguacccguaauu

SEQ ID NO: 2424092 - RNA, 19 nt, Artificial Sequence
  Description of Artificial Sequence: Synthetic oligonucleotide
ggugccagaaaagcuccuu

SEQ ID NO: 2424093 - RNA, 19 nt, Artificial Sequence
  Description of Artificial Sequence: Synthetic oligonucleotide
ccucacguccgaggucccc

SEQ ID NO: 2424094 - RNA, 19 nt, Artificial Sequence
  Description of Artificial Sequence: Synthetic oligonucleotide
cccuaugggguaucuugcu

SEQ ID NO: 2424095 - RNA, 19 nt, Artificial Sequence
  Description of Artificial Sequence: Synthetic oligonucleotide
caguuuugccugccuccau

SEQ ID NO: 2424096 - RNA, 19 nt, Artificial Sequence
  Description of Artificial Sequence: Synthetic oligonucleotide
cccucacguccgagguccc

SEQ ID NO: 2424097 - RNA, 19 nt, Artificial Sequence
  Description of Artificial Sequence: Synthetic oligonucleotide
ggguugcacgagggugggc

SEQ ID NO: 2424098 - RNA, 19 nt, Artificial Sequence
  Description of Artificial Sequence: Synthetic oligonucleotide
gcucgccacauagggcaga

SEQ ID NO: 2424099 - RNA, 19 nt, Artificial Sequence
  Description of Artificial Sequence: Synthetic oligonucleotide
gagcccuaugggguaucuu

SEQ ID NO: 2424100 - RNA, 19 nt, Artificial Sequence
  Description of Artificial Sequence: Synthetic oligonucleotide
gccacauagggcagagcuu

SEQ ID NO: 2424101 - RNA, 19 nt, Artificial Sequence
  Description of Artificial Sequence: Synthetic oligonucleotide
cccuggacaugggaguaua

SEQ ID NO: 2424102 - RNA, 19 nt, Artificial Sequence
  Description of Artificial Sequence: Synthetic oligonucleotide
ggcuagggcuuggucugua

SEQ ID NO: 2424103 - RNA, 19 nt, Artificial Sequence
  Description of Artificial Sequence: Synthetic oligonucleotide
cucccgcccggccgguaua

SEQ ID NO: 2424104 - RNA, 19 nt, Artificial Sequence
  Description of Artificial Sequence: Synthetic oligonucleotide
gggcuagguuccgcguaaa

SEQ ID NO: 2424105 - RNA, 19 nt, Artificial Sequence
  Description of Artificial Sequence: Synthetic oligonucleotide
cgggcuagguuccgcguaa

SEQ ID NO: 2424106 - RNA, 19 nt, Artificial Sequence
  Description of Artificial Sequence: Synthetic oligonucleotide
cccaggguugcacgagggu

SEQ ID NO: 2424107 - RNA, 19 nt, Artificial Sequence
  Description of Artificial Sequence: Synthetic oligonucleotide
ccagaaccccaggguugca

SEQ ID NO: 2424108 - RNA, 19 nt, Artificial Sequence
  Description of Artificial Sequence: Synthetic oligonucleotide
cacgagggugggcccucuu

SEQ ID NO: 2424109 - RNA, 19 nt, Artificial Sequence
  Description of Artificial Sequence: Synthetic oligonucleotide
gucucccgcccggccggua

SEQ ID NO: 2424110 - RNA, 19 nt, Artificial Sequence
  Description of Artificial Sequence: Synthetic oligonucleotide
gcacgagggugggcccucu

SEQ ID NO: 2424111 - RNA, 19 nt, Artificial Sequence
  Description of Artificial Sequence: Synthetic oligonucleotide
cccgcccggccgguauaca

SEQ ID NO: 2424112 - RNA, 19 nt, Artificial Sequence
  Description of Artificial Sequence: Synthetic oligonucleotide
cgucucccgcccggccggu

SEQ ID NO: 2424113 - RNA, 19 nt, Artificial Sequence
  Description of Artificial Sequence: Synthetic oligonucleotide
uuauaauagacuauugugg

SEQ ID NO: 2424114 - RNA, 19 nt, Artificial Sequence
  Description of Artificial Sequence: Synthetic oligonucleotide
uuuauaauagacuauugug

SEQ ID NO: 2424115 - RNA, 19 nt, Artificial Sequence
  Description of Artificial Sequence: Synthetic oligonucleotide
aagagaaauauucugcggg

SEQ ID NO: 2424116 - RNA, 19 nt, Artificial Sequence
  Description of Artificial Sequence: Synthetic oligonucleotide
aaugaaaucagcaucagga

SEQ ID NO: 2424117 - RNA, 19 nt, Artificial Sequence
  Description of Artificial Sequence: Synthetic oligonucleotide
aaaguucuaggcuaacuac

SEQ ID NO: 2424118 - RNA, 19 nt, Artificial Sequence
  Description of Artificial Sequence: Synthetic oligonucleotide
aagcaauauagauucuucc

SEQ ID NO: 2424119 - RNA, 19 nt, Artificial Sequence
  Description of Artificial Sequence: Synthetic oligonucleotide
aaguaaaagacaucggcag

SEQ ID NO: 2424120 - RNA, 19 nt, Artificial Sequence
  Description of Artificial Sequence: Synthetic oligonucleotide
acugauggcccucaaaucc

SEQ ID NO: 2424121 - RNA, 19 nt, Artificial Sequence
  Description of Artificial Sequence: Synthetic oligonucleotide
uuucuaaguacuuagggug

SEQ ID NO: 2424122 - RNA, 19 nt, Artificial Sequence
  Description of Artificial Sequence: Synthetic oligonucleotide
aucuccuauaucuaauucc

SEQ ID NO: 2424123 - RNA, 19 nt, Artificial Sequence
  Description of Artificial Sequence: Synthetic oligonucleotide
ucaaauccaaucuuucacg

SEQ ID NO: 2424124 - RNA, 19 nt, Artificial Sequence
  Description of Artificial Sequence: Synthetic oligonucleotide
uguaaguuuauaauagacu

SEQ ID NO: 2424125 - RNA, 19 nt, Artificial Sequence
  Description of Artificial Sequence: Synthetic oligonucleotide
uauaauagacuauugugga

SEQ ID NO: 2424126 - RNA, 19 nt, Artificial Sequence
  Description of Artificial Sequence: Synthetic oligonucleotide
ugcuauguaaacuugggug

SEQ ID NO: 2424127 - RNA, 19 nt, Artificial Sequence
  Description of Artificial Sequence: Synthetic oligonucleotide
cuaacuacccuauauuugc

SEQ ID NO: 2424128 - RNA, 19 nt, Artificial Sequence
  Description of Artificial Sequence: Synthetic oligonucleotide
caaaguaaaagacaucggc

SEQ ID NO: 2424129 - RNA, 19 nt, Artificial Sequence
  Description of Artificial Sequence: Synthetic oligonucleotide
ucuuucacgaaugaaauca

SEQ ID NO: 2424130 - RNA, 19 nt, Artificial Sequence
  Description of Artificial Sequence: Synthetic oligonucleotide
uaucucagugccaaggagg

SEQ ID NO: 2424131 - RNA, 19 nt, Artificial Sequence
  Description of Artificial Sequence: Synthetic oligonucleotide
uauagauucuuccacuuga

SEQ ID NO: 2424132 - RNA, 19 nt, Artificial Sequence
  Description of Artificial Sequence: Synthetic oligonucleotide
ucugauaagaaaguucuag

SEQ ID NO: 2424133 - RNA, 19 nt, Artificial Sequence
  Description of Artificial Sequence: Synthetic oligonucleotide
aauagacuauuguggaauc

SEQ ID NO: 2424134 - RNA, 19 nt, Artificial Sequence
  Description of Artificial Sequence: Synthetic oligonucleotide
aaagaaagcuuauggguug

SEQ ID NO: 2424135 - RNA, 19 nt, Artificial Sequence
  Description of Artificial Sequence: Synthetic oligonucleotide
auauccuugguauaaaccu

SEQ ID NO: 2424136 - RNA, 19 nt, Artificial Sequence
  Description of Artificial Sequence: Synthetic oligonucleotide
uccacuauggccaaaguaa

SEQ ID NO: 2424137 - RNA, 19 nt, Artificial Sequence
  Description of Artificial Sequence: Synthetic oligonucleotide
aguacuuagggugugugcc

SEQ ID NO: 2424138 - RNA, 19 nt, Artificial Sequence
  Description of Artificial Sequence: Synthetic oligonucleotide
uaugcugaaagaaagcuua

SEQ ID NO: 2424139 - RNA, 19 nt, Artificial Sequence
  Description of Artificial Sequence: Synthetic oligonucleotide
uucacgaaugaaaucagca

SEQ ID NO: 2424140 - RNA, 19 nt, Artificial Sequence
  Description of Artificial Sequence: Synthetic oligonucleotide
uauucugcgggucuggcag

SEQ ID NO: 2424141 - RNA, 19 nt, Artificial Sequence
  Description of Artificial Sequence: Synthetic oligonucleotide
ucuccuauaucuaauucca

SEQ ID NO: 2424142 - RNA, 19 nt, Artificial Sequence
  Description of Artificial Sequence: Synthetic oligonucleotide
cauuucuaaguacuuaggg

SEQ ID NO: 2424143 - RNA, 19 nt, Artificial Sequence
  Description of Artificial Sequence: Synthetic oligonucleotide
uaaaccugcauauaacugu

SEQ ID NO: 2424144 - RNA, 19 nt, Artificial Sequence
  Description of Artificial Sequence: Synthetic oligonucleotide
cugaaagaaagcuuauggg

SEQ ID NO: 2424145 - RNA, 19 nt, Artificial Sequence
  Description of Artificial Sequence: Synthetic oligonucleotide
uucuaagagaaauauucug

SEQ ID NO: 2424146 - RNA, 19 nt, Artificial Sequence
  Description of Artificial Sequence: Synthetic oligonucleotide
aaguucuaggcuaacuacc

SEQ ID NO: 2424147 - RNA, 19 nt, Artificial Sequence
  Description of Artificial Sequence: Synthetic oligonucleotide
aauccgacuccacuauggc

SEQ ID NO: 2424148 - RNA, 19 nt, Artificial Sequence
  Description of Artificial Sequence: Synthetic oligonucleotide
aauccaaucuuucacgaau

SEQ ID NO: 2424149 - RNA, 19 nt, Artificial Sequence
  Description of Artificial Sequence: Synthetic oligonucleotide
aaacuuggguggcaucucc

SEQ ID NO: 2424150 - RNA, 19 nt, Artificial Sequence
  Description of Artificial Sequence: Synthetic oligonucleotide
uuuuaugcugaaagaaagc

SEQ ID NO: 2424151 - RNA, 19 nt, Artificial Sequence
  Description of Artificial Sequence: Synthetic oligonucleotide
ugagacaaaagaugaagca

SEQ ID NO: 2424152 - RNA, 19 nt, Artificial Sequence
  Description of Artificial Sequence: Synthetic oligonucleotide
ucaccuugcaauuuucuag

SEQ ID NO: 2424153 - RNA, 19 nt, Artificial Sequence
  Description of Artificial Sequence: Synthetic oligonucleotide
uuuucuagaugccuucaag

SEQ ID NO: 2424154 - RNA, 19 nt, Artificial Sequence
  Description of Artificial Sequence: Synthetic oligonucleotide
aguucugguauuccuacac

SEQ ID NO: 2424155 - RNA, 19 nt, Artificial Sequence
  Description of Artificial Sequence: Synthetic oligonucleotide
aaugcuauguaaacuuggg

SEQ ID NO: 2424156 - RNA, 19 nt, Artificial Sequence
  Description of Artificial Sequence: Synthetic oligonucleotide
aaaguaaaagacaucggca

SEQ ID NO: 2424157 - RNA, 19 nt, Artificial Sequence
  Description of Artificial Sequence: Synthetic oligonucleotide
uuugcaagcaauauagauu

SEQ ID NO: 2424158 - RNA, 19 nt, Artificial Sequence
  Description of Artificial Sequence: Synthetic oligonucleotide
auuucuaaguacuuagggu

SEQ ID NO: 2424159 - RNA, 19 nt, Artificial Sequence
  Description of Artificial Sequence: Synthetic oligonucleotide
uguagugucucugauaaga

SEQ ID NO: 2424160 - RNA, 19 nt, Artificial Sequence
  Description of Artificial Sequence: Synthetic oligonucleotide
uauggccaaaguaaaagac

SEQ ID NO: 2424161 - RNA, 19 nt, Artificial Sequence
  Description of Artificial Sequence: Synthetic oligonucleotide
uuuaugcugaaagaaagcu

SEQ ID NO: 2424162 - RNA, 19 nt, Artificial Sequence
  Description of Artificial Sequence: Synthetic oligonucleotide
uuucuagaugccuucaaga

SEQ ID NO: 2424163 - RNA, 19 nt, Artificial Sequence
  Description of Artificial Sequence: Synthetic oligonucleotide
auaagaaaguucuaggcua

SEQ ID NO: 2424164 - RNA, 19 nt, Artificial Sequence
  Description of Artificial Sequence: Synthetic oligonucleotide
caagauuucccuuauccug

SEQ ID NO: 2424165 - RNA, 19 nt, Artificial Sequence
  Description of Artificial Sequence: Synthetic oligonucleotide
cauauccuugguauaaacc

SEQ ID NO: 2424166 - RNA, 19 nt, Artificial Sequence
  Description of Artificial Sequence: Synthetic oligonucleotide
cuguaaguuuauaauagac

SEQ ID NO: 2424167 - RNA, 19 nt, Artificial Sequence
  Description of Artificial Sequence: Synthetic oligonucleotide
uccgacuccacuauggcca

SEQ ID NO: 2424168 - RNA, 19 nt, Artificial Sequence
  Description of Artificial Sequence: Synthetic oligonucleotide
uagacuauuguggaauccg

SEQ ID NO: 2424169 - RNA, 19 nt, Artificial Sequence
  Description of Artificial Sequence: Synthetic oligonucleotide
aauauagauucuuccacuu

SEQ ID NO: 2424170 - RNA, 19 nt, Artificial Sequence
  Description of Artificial Sequence: Synthetic oligonucleotide
uccuacacaguuuacuuca

SEQ ID NO: 2424171 - RNA, 19 nt, Artificial Sequence
  Description of Artificial Sequence: Synthetic oligonucleotide
agugucucugauaagaaag

SEQ ID NO: 2424172 - RNA, 19 nt, Artificial Sequence
  Description of Artificial Sequence: Synthetic oligonucleotide
acucugaacauauccuugg

SEQ ID NO: 2424173 - RNA, 19 nt, Artificial Sequence
  Description of Artificial Sequence: Synthetic oligonucleotide
cugagacaaaagaugaagc

SEQ ID NO: 2424174 - RNA, 19 nt, Artificial Sequence
  Description of Artificial Sequence: Synthetic oligonucleotide
agcaauauagauucuucca

SEQ ID NO: 2424175 - RNA, 19 nt, Artificial Sequence
  Description of Artificial Sequence: Synthetic oligonucleotide
aacuuuuacucuccaugag

SEQ ID NO: 2424176 - RNA, 19 nt, Artificial Sequence
  Description of Artificial Sequence: Synthetic oligonucleotide
aagcuuauggguugggacu

SEQ ID NO: 2424177 - RNA, 19 nt, Artificial Sequence
  Description of Artificial Sequence: Synthetic oligonucleotide
agcagaaauggguguaggc

SEQ ID NO: 2424178 - RNA, 19 nt, Artificial Sequence
  Description of Artificial Sequence: Synthetic oligonucleotide
uucugguauuccuacacag

SEQ ID NO: 2424179 - RNA, 19 nt, Artificial Sequence
  Description of Artificial Sequence: Synthetic oligonucleotide
uccaugagauccaaguaca

SEQ ID NO: 2424180 - RNA, 19 nt, Artificial Sequence
  Description of Artificial Sequence: Synthetic oligonucleotide
gccaaaguaaaagacaucg

SEQ ID NO: 2424181 - RNA, 19 nt, Artificial Sequence
  Description of Artificial Sequence: Synthetic oligonucleotide
acuauggccaaaguaaaag

SEQ ID NO: 2424182 - RNA, 19 nt, Artificial Sequence
  Description of Artificial Sequence: Synthetic oligonucleotide
aucuguaaguuuauaauag

SEQ ID NO: 2424183 - RNA, 19 nt, Artificial Sequence
  Description of Artificial Sequence: Synthetic oligonucleotide
cucaaauccaaucuuucac

SEQ ID NO: 2424184 - RNA, 19 nt, Artificial Sequence
  Description of Artificial Sequence: Synthetic oligonucleotide
gaaugcuauguaaacuugg

SEQ ID NO: 2424185 - RNA, 19 nt, Artificial Sequence
  Description of Artificial Sequence: Synthetic oligonucleotide
uuuacuucaugccaacuuu

SEQ ID NO: 2424186 - RNA, 19 nt, Artificial Sequence
  Description of Artificial Sequence: Synthetic oligonucleotide
aauauucugcgggucuggc

SEQ ID NO: 2424187 - RNA, 19 nt, Artificial Sequence
  Description of Artificial Sequence: Synthetic oligonucleotide
ucuguaaguuuauaauaga

SEQ ID NO: 2424188 - RNA, 19 nt, Artificial Sequence
  Description of Artificial Sequence: Synthetic oligonucleotide
augaagcagacugauggcc

SEQ ID NO: 2424189 - RNA, 19 nt, Artificial Sequence
  Description of Artificial Sequence: Synthetic oligonucleotide
aguucuaggcuaacuaccc

SEQ ID NO: 2424190 - RNA, 19 nt, Artificial Sequence
  Description of Artificial Sequence: Synthetic oligonucleotide
uucuaucucagugccaagg

SEQ ID NO: 2424191 - RNA, 19 nt, Artificial Sequence
  Description of Artificial Sequence: Synthetic oligonucleotide
uauccuugguauaaaccug

SEQ ID NO: 2424192 - RNA, 19 nt, Artificial Sequence
  Description of Artificial Sequence: Synthetic oligonucleotide
ugaagcagacugauggccc

SEQ ID NO: 2424193 - RNA, 19 nt, Artificial Sequence
  Description of Artificial Sequence: Synthetic oligonucleotide
auaggcauauacagguucc

SEQ ID NO: 2424194 - RNA, 19 nt, Artificial Sequence
  Description of Artificial Sequence: Synthetic oligonucleotide
acuacccuauauuugcaag

SEQ ID NO: 2424195 - RNA, 19 nt, Artificial Sequence
  Description of Artificial Sequence: Synthetic oligonucleotide
acuauuguggaauccgacu

SEQ ID NO: 2424196 - RNA, 19 nt, Artificial Sequence
  Description of Artificial Sequence: Synthetic oligonucleotide
acaucggcaguucuggguc

SEQ ID NO: 2424197 - RNA, 19 nt, Artificial Sequence
  Description of Artificial Sequence: Synthetic oligonucleotide
guugggacuagcuaaguca

SEQ ID NO: 2424198 - RNA, 19 nt, Artificial Sequence
  Description of Artificial Sequence: Synthetic oligonucleotide
uggccaaaguaaaagacau

SEQ ID NO: 2424199 - RNA, 19 nt, Artificial Sequence
  Description of Artificial Sequence: Synthetic oligonucleotide
uuucacgaaugaaaucagc

SEQ ID NO: 2424200 - RNA, 19 nt, Artificial Sequence
  Description of Artificial Sequence: Synthetic oligonucleotide
uccuauaucuaauuccauc

SEQ ID NO: 2424201 - RNA, 19 nt, Artificial Sequence
  Description of Artificial Sequence: Synthetic oligonucleotide
uccaucuguaaguuuauaa

SEQ ID NO: 2424202 - RNA, 19 nt, Artificial Sequence
  Description of Artificial Sequence: Synthetic oligonucleotide
auagacuauuguggaaucc

SEQ ID NO: 2424203 - RNA, 19 nt, Artificial Sequence
  Description of Artificial Sequence: Synthetic oligonucleotide
uucuaaguacuuagggugu

SEQ ID NO: 2424204 - RNA, 19 nt, Artificial Sequence
  Description of Artificial Sequence: Synthetic oligonucleotide
gaauccgacuccacuaugg

SEQ ID NO: 2424205 - RNA, 19 nt, Artificial Sequence
  Description of Artificial Sequence: Synthetic oligonucleotide
cuacccuauauuugcaagc

SEQ ID NO: 2424206 - RNA, 19 nt, Artificial Sequence
  Description of Artificial Sequence: Synthetic oligonucleotide
gcauaaauccaucuguaag

SEQ ID NO: 2424207 - RNA, 19 nt, Artificial Sequence
  Description of Artificial Sequence: Synthetic oligonucleotide
ucuggcagcauaaauccau

SEQ ID NO: 2424208 - RNA, 19 nt, Artificial Sequence
  Description of Artificial Sequence: Synthetic oligonucleotide
uauaacuguagugucucug

SEQ ID NO: 2424209 - RNA, 19 nt, Artificial Sequence
  Description of Artificial Sequence: Synthetic oligonucleotide
uguggaauccgacuccacu

SEQ ID NO: 2424210 - RNA, 19 nt, Artificial Sequence
  Description of Artificial Sequence: Synthetic oligonucleotide
aaauauucugcgggucugg

SEQ ID NO: 2424211 - RNA, 19 nt, Artificial Sequence
  Description of Artificial Sequence: Synthetic oligonucleotide
cacgaaugaaaucagcauc

SEQ ID NO: 2424212 - RNA, 19 nt, Artificial Sequence
  Description of Artificial Sequence: Synthetic oligonucleotide
gaugaagcagacugauggc

SEQ ID NO: 2424213 - RNA, 19 nt, Artificial Sequence
  Description of Artificial Sequence: Synthetic oligonucleotide
agagaaauauucugcgggu

SEQ ID NO: 2424214 - RNA, 19 nt, Artificial Sequence
  Description of Artificial Sequence: Synthetic oligonucleotide
cagaaauggguguaggcac

SEQ ID NO: 2424215 - RNA, 19 nt, Artificial Sequence
  Description of Artificial Sequence: Synthetic oligonucleotide
cuauuguggaauccgacuc

SEQ ID NO: 2424216 - RNA, 19 nt, Artificial Sequence
  Description of Artificial Sequence: Synthetic oligonucleotide
ugugugcccauccaggcgu

SEQ ID NO: 2424217 - RNA, 19 nt, Artificial Sequence
  Description of Artificial Sequence: Synthetic oligonucleotide
gaaaguucuaggcuaacua

SEQ ID NO: 2424218 - RNA, 19 nt, Artificial Sequence
  Description of Artificial Sequence: Synthetic oligonucleotide
uucuagaugccuucaagau

SEQ ID NO: 2424219 - RNA, 19 nt, Artificial Sequence
  Description of Artificial Sequence: Synthetic oligonucleotide
auauagauucuuccacuug

SEQ ID NO: 2424220 - RNA, 19 nt, Artificial Sequence
  Description of Artificial Sequence: Synthetic oligonucleotide
ugcauauaacuguaguguc

SEQ ID NO: 2424221 - RNA, 19 nt, Artificial Sequence
  Description of Artificial Sequence: Synthetic oligonucleotide
guuuauaauagacuauugu

SEQ ID NO: 2424222 - RNA, 19 nt, Artificial Sequence
  Description of Artificial Sequence: Synthetic oligonucleotide
aguaaaagacaucggcagu

SEQ ID NO: 2424223 - RNA, 19 nt, Artificial Sequence
  Description of Artificial Sequence: Synthetic oligonucleotide
uaggcuaacuacccuauau

SEQ ID NO: 2424224 - RNA, 19 nt, Artificial Sequence
  Description of Artificial Sequence: Synthetic oligonucleotide
aaggccgcuacaucccggg

SEQ ID NO: 2424225 - RNA, 19 nt, Artificial Sequence
  Description of Artificial Sequence: Synthetic oligonucleotide
uauuugcaagcaauauaga

SEQ ID NO: 2424226 - RNA, 19 nt, Artificial Sequence
  Description of Artificial Sequence: Synthetic oligonucleotide
aucucagugccaaggaggc

SEQ ID NO: 2424227 - RNA, 19 nt, Artificial Sequence
  Description of Artificial Sequence: Synthetic oligonucleotide
caugccaacuuuuacucuc

SEQ ID NO: 2424228 - RNA, 19 nt, Artificial Sequence
  Description of Artificial Sequence: Synthetic oligonucleotide
cuuucacgaaugaaaucag

SEQ ID NO: 2424229 - RNA, 19 nt, Artificial Sequence
  Description of Artificial Sequence: Synthetic oligonucleotide
ucacgaaugaaaucagcau

SEQ ID NO: 2424230 - RNA, 19 nt, Artificial Sequence
  Description of Artificial Sequence: Synthetic oligonucleotide
uuaugcugaaagaaagcuu

SEQ ID NO: 2424231 - RNA, 19 nt, Artificial Sequence
  Description of Artificial Sequence: Synthetic oligonucleotide
ucaucuucuaagagaaaua

SEQ ID NO: 2424232 - RNA, 19 nt, Artificial Sequence
  Description of Artificial Sequence: Synthetic oligonucleotide
ggucuggcagcauaaaucc

SEQ ID NO: 2424233 - RNA, 19 nt, Artificial Sequence
  Description of Artificial Sequence: Synthetic oligonucleotide
ucuagaugccuucaagauu

SEQ ID NO: 2424234 - RNA, 19 nt, Artificial Sequence
  Description of Artificial Sequence: Synthetic oligonucleotide
agaaauggguguaggcacc

SEQ ID NO: 2424235 - RNA, 19 nt, Artificial Sequence
  Description of Artificial Sequence: Synthetic oligonucleotide
aaauccaaucuuucacgaa

SEQ ID NO: 2424236 - RNA, 19 nt, Artificial Sequence
  Description of Artificial Sequence: Synthetic oligonucleotide
uugggacuagcuaagucaa

SEQ ID NO: 2424237 - RNA, 19 nt, Artificial Sequence
  Description of Artificial Sequence: Synthetic oligonucleotide
auaucuaauuccaucauuu

SEQ ID NO: 2424238 - RNA, 19 nt, Artificial Sequence
  Description of Artificial Sequence: Synthetic oligonucleotide
cauauaacuguagugucuc

SEQ ID NO: 2424239 - RNA, 19 nt, Artificial Sequence
  Description of Artificial Sequence: Synthetic oligonucleotide
cauaaauccaucuguaagu

SEQ ID NO: 2424240 - RNA, 19 nt, Artificial Sequence
  Description of Artificial Sequence: Synthetic oligonucleotide
uaccucugagacaaaagau

SEQ ID NO: 2424241 - RNA, 19 nt, Artificial Sequence
  Description of Artificial Sequence: Synthetic oligonucleotide
auuucccuuauccugcuau

SEQ ID NO: 2424242 - RNA, 19 nt, Artificial Sequence
  Description of Artificial Sequence: Synthetic oligonucleotide
guaguucugguauuccuac

SEQ ID NO: 2424243 - RNA, 19 nt, Artificial Sequence
  Description of Artificial Sequence: Synthetic oligonucleotide
ucaagccugacuaccucug

SEQ ID NO: 2424244 - RNA, 19 nt, Artificial Sequence
  Description of Artificial Sequence: Synthetic oligonucleotide
uccaaucuuucacgaauga

SEQ ID NO: 2424245 - RNA, 19 nt, Artificial Sequence
  Description of Artificial Sequence: Synthetic oligonucleotide
gguauaaaccugcauauaa

SEQ ID NO: 2424246 - RNA, 19 nt, Artificial Sequence
  Description of Artificial Sequence: Synthetic oligonucleotide
uuagggugugugcccaucc

SEQ ID NO: 2424247 - RNA, 19 nt, Artificial Sequence
  Description of Artificial Sequence: Synthetic oligonucleotide
ucccuuauccugcuauggc

SEQ ID NO: 2424248 - RNA, 19 nt, Artificial Sequence
  Description of Artificial Sequence: Synthetic oligonucleotide
aacuacccuauauuugcaa

SEQ ID NO: 2424249 - RNA, 19 nt, Artificial Sequence
  Description of Artificial Sequence: Synthetic oligonucleotide
caugagauccaaguacacc

SEQ ID NO: 2424250 - RNA, 19 nt, Artificial Sequence
  Description of Artificial Sequence: Synthetic oligonucleotide
auaauagacuauuguggaa

SEQ ID NO: 2424251 - RNA, 19 nt, Artificial Sequence
  Description of Artificial Sequence: Synthetic oligonucleotide
uggguugggacuagcuaag

SEQ ID NO: 2424252 - RNA, 19 nt, Artificial Sequence
  Description of Artificial Sequence: Synthetic oligonucleotide
uuauggguugggacuagcu

SEQ ID NO: 2424253 - RNA, 19 nt, Artificial Sequence
  Description of Artificial Sequence: Synthetic oligonucleotide
gaaauauucugcgggucug

SEQ ID NO: 2424254 - RNA, 19 nt, Artificial Sequence
  Description of Artificial Sequence: Synthetic oligonucleotide
uucccuuauccugcuaugg

SEQ ID NO: 2424255 - RNA, 19 nt, Artificial Sequence
  Description of Artificial Sequence: Synthetic oligonucleotide
uugcaauuuucuagaugcc

SEQ ID NO: 2424256 - RNA, 19 nt, Artificial Sequence
  Description of Artificial Sequence: Synthetic oligonucleotide
aaguacaccaagaaugcua

SEQ ID NO: 2424257 - RNA, 19 nt, Artificial Sequence
  Description of Artificial Sequence: Synthetic oligonucleotide
uacccuauauuugcaagca

SEQ ID NO: 2424258 - RNA, 19 nt, Artificial Sequence
  Description of Artificial Sequence: Synthetic oligonucleotide
cuaccucugagacaaaaga

SEQ ID NO: 2424259 - RNA, 19 nt, Artificial Sequence
  Description of Artificial Sequence: Synthetic oligonucleotide
agcccgcccggccagaagc

SEQ ID NO: 2424260 - RNA, 19 nt, Artificial Sequence
  Description of Artificial Sequence: Synthetic oligonucleotide
cucggauucgccgugcucc

SEQ ID NO: 2424261 - RNA, 19 nt, Artificial Sequence
  Description of Artificial Sequence: Synthetic oligonucleotide
ucuaggcuaacuacccuau

SEQ ID NO: 2424262 - RNA, 19 nt, Artificial Sequence
  Description of Artificial Sequence: Synthetic oligonucleotide
uaaguacuuagggugugug

SEQ ID NO: 2424263 - RNA, 19 nt, Artificial Sequence
  Description of Artificial Sequence: Synthetic oligonucleotide
accugcauauaacuguagu

SEQ ID NO: 2424264 - RNA, 19 nt, Artificial Sequence
  Description of Artificial Sequence: Synthetic oligonucleotide
uaacuacccuauauuugca

SEQ ID NO: 2424265 - RNA, 19 nt, Artificial Sequence
  Description of Artificial Sequence: Synthetic oligonucleotide
uucuaggcuaacuacccua

SEQ ID NO: 2424266 - RNA, 19 nt, Artificial Sequence
  Description of Artificial Sequence: Synthetic oligonucleotide
cuaucucagugccaaggag

SEQ ID NO: 2424267 - RNA, 19 nt, Artificial Sequence
  Description of Artificial Sequence: Synthetic oligonucleotide
cacaguuuacuucaugcca

SEQ ID NO: 2424268 - RNA, 19 nt, Artificial Sequence
  Description of Artificial Sequence: Synthetic oligonucleotide
ugaacauauccuugguaua

SEQ ID NO: 2424269 - RNA, 19 nt, Artificial Sequence
  Description of Artificial Sequence: Synthetic oligonucleotide
cugacuaccucugagacaa

SEQ ID NO: 2424270 - RNA, 19 nt, Artificial Sequence
  Description of Artificial Sequence: Synthetic oligonucleotide
ccaaguacaccaagaaugc

SEQ ID NO: 2424271 - RNA, 19 nt, Artificial Sequence
  Description of Artificial Sequence: Synthetic oligonucleotide
uuucccuuauccugcuaug

SEQ ID NO: 2424272 - RNA, 19 nt, Artificial Sequence
  Description of Artificial Sequence: Synthetic oligonucleotide
agcuaagucaagccugacu

SEQ ID NO: 2424273 - RNA, 19 nt, Artificial Sequence
  Description of Artificial Sequence: Synthetic oligonucleotide
cuauggccaaaguaaaaga

SEQ ID NO: 2424274 - RNA, 19 nt, Artificial Sequence
  Description of Artificial Sequence: Synthetic oligonucleotide
ccuauaucuaauuccauca

SEQ ID NO: 2424275 - RNA, 19 nt, Artificial Sequence
  Description of Artificial Sequence: Synthetic oligonucleotide
ucuaaguacuuagggugug

SEQ ID NO: 2424276 - RNA, 19 nt, Artificial Sequence
  Description of Artificial Sequence: Synthetic oligonucleotide
cuaagucaagccugacuac

SEQ ID NO: 2424277 - RNA, 19 nt, Artificial Sequence
  Description of Artificial Sequence: Synthetic oligonucleotide
uauccugcuauggcugagg

SEQ ID NO: 2424278 - RNA, 19 nt, Artificial Sequence
  Description of Artificial Sequence: Synthetic oligonucleotide
ugcugaaagaaagcuuaug

SEQ ID NO: 2424279 - RNA, 19 nt, Artificial Sequence
  Description of Artificial Sequence: Synthetic oligonucleotide
gcuaagucaagccugacua

SEQ ID NO: 2424280 - RNA, 19 nt, Artificial Sequence
  Description of Artificial Sequence: Synthetic oligonucleotide
caucuccuauaucuaauuc

SEQ ID NO: 2424281 - RNA, 19 nt, Artificial Sequence
  Description of Artificial Sequence: Synthetic oligonucleotide
auggccaaaguaaaagaca

SEQ ID NO: 2424282 - RNA, 19 nt, Artificial Sequence
  Description of Artificial Sequence: Synthetic oligonucleotide
aggcagauaagcuguaguu

SEQ ID NO: 2424283 - RNA, 19 nt, Artificial Sequence
  Description of Artificial Sequence: Synthetic oligonucleotide
auaaauccaucuguaaguu

SEQ ID NO: 2424284 - RNA, 19 nt, Artificial Sequence
  Description of Artificial Sequence: Synthetic oligonucleotide
agagccguggugucccgcg

SEQ ID NO: 2424285 - RNA, 19 nt, Artificial Sequence
  Description of Artificial Sequence: Synthetic oligonucleotide
aguacaccaagaaugcuau

SEQ ID NO: 2424286 - RNA, 19 nt, Artificial Sequence
  Description of Artificial Sequence: Synthetic oligonucleotide
agaaugcuauguaaacuug

SEQ ID NO: 2424287 - RNA, 19 nt, Artificial Sequence
  Description of Artificial Sequence: Synthetic oligonucleotide
auaagcuguaguucuggua

SEQ ID NO: 2424288 - RNA, 19 nt, Artificial Sequence
  Description of Artificial Sequence: Synthetic oligonucleotide
uggaauccgacuccacuau

SEQ ID NO: 2424289 - RNA, 19 nt, Artificial Sequence
  Description of Artificial Sequence: Synthetic oligonucleotide
uccucgggagcccacgugu

SEQ ID NO: 2424290 - RNA, 19 nt, Artificial Sequence
  Description of Artificial Sequence: Synthetic oligonucleotide
auucugcgggucuggcagc

SEQ ID NO: 2424291 - RNA, 19 nt, Artificial Sequence
  Description of Artificial Sequence: Synthetic oligonucleotide
auuuucuagaugccuucaa

SEQ ID NO: 2424292 - RNA, 19 nt, Artificial Sequence
  Description of Artificial Sequence: Synthetic oligonucleotide
uucgccgugcuccuccaug

SEQ ID NO: 2424293 - RNA, 19 nt, Artificial Sequence
  Description of Artificial Sequence: Synthetic oligonucleotide
acuaccucugagacaaaag

SEQ ID NO: 2424294 - RNA, 19 nt, Artificial Sequence
  Description of Artificial Sequence: Synthetic oligonucleotide
ccaaaguaaaagacaucgg

SEQ ID NO: 2424295 - RNA, 19 nt, Artificial Sequence
  Description of Artificial Sequence: Synthetic oligonucleotide
guacuuagggugugugccc

SEQ ID NO: 2424296 - RNA, 19 nt, Artificial Sequence
  Description of Artificial Sequence: Synthetic oligonucleotide
augccaacuuuuacucucc

SEQ ID NO: 2424297 - RNA, 19 nt, Artificial Sequence
  Description of Artificial Sequence: Synthetic oligonucleotide
uaacuguagugucucugau

SEQ ID NO: 2424298 - RNA, 19 nt, Artificial Sequence
  Description of Artificial Sequence: Synthetic oligonucleotide
aaaccugcauauaacugua

SEQ ID NO: 2424299 - RNA, 19 nt, Artificial Sequence
  Description of Artificial Sequence: Synthetic oligonucleotide
accaagaaugcuauguaaa

SEQ ID NO: 2424300 - RNA, 19 nt, Artificial Sequence
  Description of Artificial Sequence: Synthetic oligonucleotide
uaaaagacaucggcaguuc

SEQ ID NO: 2424301 - RNA, 19 nt, Artificial Sequence
  Description of Artificial Sequence: Synthetic oligonucleotide
ggcagcauaaauccaucug

SEQ ID NO: 2424302 - RNA, 19 nt, Artificial Sequence
  Description of Artificial Sequence: Synthetic oligonucleotide
ugguauuccuacacaguuu

SEQ ID NO: 2424303 - RNA, 19 nt, Artificial Sequence
  Description of Artificial Sequence: Synthetic oligonucleotide
gacugauggcccucaaauc

SEQ ID NO: 2424304 - RNA, 19 nt, Artificial Sequence
  Description of Artificial Sequence: Synthetic oligonucleotide
gacuauuguggaauccgac

SEQ ID NO: 2424305 - RNA, 19 nt, Artificial Sequence
  Description of Artificial Sequence: Synthetic oligonucleotide
auggguguaggcaccacag

SEQ ID NO: 2424306 - RNA, 19 nt, Artificial Sequence
  Description of Artificial Sequence: Synthetic oligonucleotide
cuaauuccaucauuucuaa

SEQ ID NO: 2424307 - RNA, 19 nt, Artificial Sequence
  Description of Artificial Sequence: Synthetic oligonucleotide
uccuugguauaaaccugca

SEQ ID NO: 2424308 - RNA, 19 nt, Artificial Sequence
  Description of Artificial Sequence: Synthetic oligonucleotide
ggacuagcuaagucaagcc

SEQ ID NO: 2424309 - RNA, 19 nt, Artificial Sequence
  Description of Artificial Sequence: Synthetic oligonucleotide
caccuugcaauuuucuaga

SEQ ID NO: 2424310 - RNA, 19 nt, Artificial Sequence
  Description of Artificial Sequence: Synthetic oligonucleotide
caauauagauucuuccacu

SEQ ID NO: 2424311 - RNA, 19 nt, Artificial Sequence
  Description of Artificial Sequence: Synthetic oligonucleotide
auauaacuguagugucucu

SEQ ID NO: 2424312 - RNA, 19 nt, Artificial Sequence
  Description of Artificial Sequence: Synthetic oligonucleotide
gacuagcuaagucaagccu

SEQ ID NO: 2424313 - RNA, 19 nt, Artificial Sequence
  Description of Artificial Sequence: Synthetic oligonucleotide
auauucugcgggucuggca

SEQ ID NO: 2424314 - RNA, 19 nt, Artificial Sequence
  Description of Artificial Sequence: Synthetic oligonucleotide
gguauuccuacacaguuua

SEQ ID NO: 2424315 - RNA, 19 nt, Artificial Sequence
  Description of Artificial Sequence: Synthetic oligonucleotide
cagucuguagccccucccc

SEQ ID NO: 2424316 - RNA, 19 nt, Artificial Sequence
  Description of Artificial Sequence: Synthetic oligonucleotide
acaccaagaaugcuaugua

SEQ ID NO: 2424317 - RNA, 19 nt, Artificial Sequence
  Description of Artificial Sequence: Synthetic oligonucleotide
ugggacuagcuaagucaag

SEQ ID NO: 2424318 - RNA, 19 nt, Artificial Sequence
  Description of Artificial Sequence: Synthetic oligonucleotide
agacaucggcaguucuggg

SEQ ID NO: 2424319 - RNA, 19 nt, Artificial Sequence
  Description of Artificial Sequence: Synthetic oligonucleotide
aggcuaacuacccuauauu

SEQ ID NO: 2424320 - RNA, 19 nt, Artificial Sequence
  Description of Artificial Sequence: Synthetic oligonucleotide
uggcagcauaaauccaucu

SEQ ID NO: 2424321 - RNA, 19 nt, Artificial Sequence
  Description of Artificial Sequence: Synthetic oligonucleotide
uggcaucuccuauaucuaa

SEQ ID NO: 2424322 - RNA, 19 nt, Artificial Sequence
  Description of Artificial Sequence: Synthetic oligonucleotide
cagauaagcuguaguucug

SEQ ID NO: 2424323 - RNA, 19 nt, Artificial Sequence
  Description of Artificial Sequence: Synthetic oligonucleotide
acaucccgggguuggcucg

SEQ ID NO: 2424324 - RNA, 19 nt, Artificial Sequence
  Description of Artificial Sequence: Synthetic oligonucleotide
cuacacaguuuacuucaug

SEQ ID NO: 2424325 - RNA, 19 nt, Artificial Sequence
  Description of Artificial Sequence: Synthetic oligonucleotide
augccgcccgcgcagagag

SEQ ID NO: 2424326 - RNA, 19 nt, Artificial Sequence
  Description of Artificial Sequence: Synthetic oligonucleotide
gguuggcucggauucgccg

SEQ ID NO: 2424327 - RNA, 19 nt, Artificial Sequence
  Description of Artificial Sequence: Synthetic oligonucleotide
gcuaacuacccuauauuug

SEQ ID NO: 2424328 - RNA, 19 nt, Artificial Sequence
  Description of Artificial Sequence: Synthetic oligonucleotide
ugcuauggcugagggaagc

SEQ ID NO: 2424329 - RNA, 19 nt, Artificial Sequence
  Description of Artificial Sequence: Synthetic oligonucleotide
aacgggacccgggccaagg

SEQ ID NO: 2424330 - RNA, 19 nt, Artificial Sequence
  Description of Artificial Sequence: Synthetic oligonucleotide
acaaaagaugaagcagacu

SEQ ID NO: 2424331 - RNA, 19 nt, Artificial Sequence
  Description of Artificial Sequence: Synthetic oligonucleotide
gggacuagcuaagucaagc

SEQ ID NO: 2424332 - RNA, 19 nt, Artificial Sequence
  Description of Artificial Sequence: Synthetic oligonucleotide
auccaaucuuucacgaaug

SEQ ID NO: 2424333 - RNA, 19 nt, Artificial Sequence
  Description of Artificial Sequence: Synthetic oligonucleotide
uggguggcaucuccuauau

SEQ ID NO: 2424334 - RNA, 19 nt, Artificial Sequence
  Description of Artificial Sequence: Synthetic oligonucleotide
gacagaugucaucuucuaa

SEQ ID NO: 2424335 - RNA, 19 nt, Artificial Sequence
  Description of Artificial Sequence: Synthetic oligonucleotide
caguuuacuucaugccaac

SEQ ID NO: 2424336 - RNA, 19 nt, Artificial Sequence
  Description of Artificial Sequence: Synthetic oligonucleotide
auccaggcguccucgggag

SEQ ID NO: 2424337 - RNA, 19 nt, Artificial Sequence
  Description of Artificial Sequence: Synthetic oligonucleotide
uagggugugugcccaucca

SEQ ID NO: 2424338 - RNA, 19 nt, Artificial Sequence
  Description of Artificial Sequence: Synthetic oligonucleotide
ugcaagcaauauagauucu

SEQ ID NO: 2424339 - RNA, 19 nt, Artificial Sequence
  Description of Artificial Sequence: Synthetic oligonucleotide
ugucccgcgaagcccgccc

SEQ ID NO: 2424340 - RNA, 19 nt, Artificial Sequence
  Description of Artificial Sequence: Synthetic oligonucleotide
agaaagcuuauggguuggg

SEQ ID NO: 2424341 - RNA, 19 nt, Artificial Sequence
  Description of Artificial Sequence: Synthetic oligonucleotide
caguucugggucaccuugc

SEQ ID NO: 2424342 - RNA, 19 nt, Artificial Sequence
  Description of Artificial Sequence: Synthetic oligonucleotide
gagggaagcagaaaugggu

SEQ ID NO: 2424343 - RNA, 19 nt, Artificial Sequence
  Description of Artificial Sequence: Synthetic oligonucleotide
ugggucaccuugcaauuuu

SEQ ID NO: 2424344 - RNA, 19 nt, Artificial Sequence
  Description of Artificial Sequence: Synthetic oligonucleotide
uacuuagggugugugccca

SEQ ID NO: 2424345 - RNA, 19 nt, Artificial Sequence
  Description of Artificial Sequence: Synthetic oligonucleotide
guucugguauuccuacaca

SEQ ID NO: 2424346 - RNA, 19 nt, Artificial Sequence
  Description of Artificial Sequence: Synthetic oligonucleotide
aggacagaugucaucuucu

SEQ ID NO: 2424347 - RNA, 19 nt, Artificial Sequence
  Description of Artificial Sequence: Synthetic oligonucleotide
ucgccgugcuccuccaugc

SEQ ID NO: 2424348 - RNA, 19 nt, Artificial Sequence
  Description of Artificial Sequence: Synthetic oligonucleotide
agauuucccuuauccugcu

SEQ ID NO: 2424349 - RNA, 19 nt, Artificial Sequence
  Description of Artificial Sequence: Synthetic oligonucleotide
uuauccugcuauggcugag

SEQ ID NO: 2424350 - RNA, 19 nt, Artificial Sequence
  Description of Artificial Sequence: Synthetic oligonucleotide
cuauggcugagggaagcag

SEQ ID NO: 2424351 - RNA, 19 nt, Artificial Sequence
  Description of Artificial Sequence: Synthetic oligonucleotide
uuggcucggauucgccgug

SEQ ID NO: 2424352 - RNA, 19 nt, Artificial Sequence
  Description of Artificial Sequence: Synthetic oligonucleotide
uuggguggcaucuccuaua

SEQ ID NO: 2424353 - RNA, 19 nt, Artificial Sequence
  Description of Artificial Sequence: Synthetic oligonucleotide
cuggcagcauaaauccauc

SEQ ID NO: 2424354 - RNA, 19 nt, Artificial Sequence
  Description of Artificial Sequence: Synthetic oligonucleotide
gcagauaagcuguaguucu

SEQ ID NO: 2424355 - RNA, 19 nt, Artificial Sequence
  Description of Artificial Sequence: Synthetic oligonucleotide
ugccaacuuuuacucucca

SEQ ID NO: 2424356 - RNA, 19 nt, Artificial Sequence
  Description of Artificial Sequence: Synthetic oligonucleotide
gguuuuaugcugaaagaaa

SEQ ID NO: 2424357 - RNA, 19 nt, Artificial Sequence
  Description of Artificial Sequence: Synthetic oligonucleotide
guuuacuucaugccaacuu

SEQ ID NO: 2424358 - RNA, 19 nt, Artificial Sequence
  Description of Artificial Sequence: Synthetic oligonucleotide
guaaacuuggguggcaucu

SEQ ID NO: 2424359 - RNA, 19 nt, Artificial Sequence
  Description of Artificial Sequence: Synthetic oligonucleotide
gauaagcuguaguucuggu

SEQ ID NO: 2424360 - RNA, 19 nt, Artificial Sequence
  Description of Artificial Sequence: Synthetic oligonucleotide
uacaucccgggguuggcuc

SEQ ID NO: 2424361 - RNA, 19 nt, Artificial Sequence
  Description of Artificial Sequence: Synthetic oligonucleotide
ccucugagacaaaagauga

SEQ ID NO: 2424362 - RNA, 19 nt, Artificial Sequence
  Description of Artificial Sequence: Synthetic oligonucleotide
guggaauccgacuccacua

SEQ ID NO: 2424363 - RNA, 19 nt, Artificial Sequence
  Description of Artificial Sequence: Synthetic oligonucleotide
ugcgggucuggcagcauaa

SEQ ID NO: 2424364 - RNA, 19 nt, Artificial Sequence
  Description of Artificial Sequence: Synthetic oligonucleotide
cugauggcccucaaaucca

SEQ ID NO: 2424365 - RNA, 19 nt, Artificial Sequence
  Description of Artificial Sequence: Synthetic oligonucleotide
aguuuacuucaugccaacu

SEQ ID NO: 2424366 - RNA, 19 nt, Artificial Sequence
  Description of Artificial Sequence: Synthetic oligonucleotide
gcagcauaaauccaucugu

SEQ ID NO: 2424367 - RNA, 19 nt, Artificial Sequence
  Description of Artificial Sequence: Synthetic oligonucleotide
ugucaucuucuaagagaaa

SEQ ID NO: 2424368 - RNA, 19 nt, Artificial Sequence
  Description of Artificial Sequence: Synthetic oligonucleotide
ggguguaggcaccacaguc

SEQ ID NO: 2424369 - RNA, 19 nt, Artificial Sequence
  Description of Artificial Sequence: Synthetic oligonucleotide
acgggacccgggccaaggc

SEQ ID NO: 2424370 - RNA, 19 nt, Artificial Sequence
  Description of Artificial Sequence: Synthetic oligonucleotide
cagagagccgugguguccc

SEQ ID NO: 2424371 - RNA, 19 nt, Artificial Sequence
  Description of Artificial Sequence: Synthetic oligonucleotide
uaaacuuggguggcaucuc

SEQ ID NO: 2424372 - RNA, 19 nt, Artificial Sequence
  Description of Artificial Sequence: Synthetic oligonucleotide
uguaggcaccacagucugu

SEQ ID NO: 2424373 - RNA, 19 nt, Artificial Sequence
  Description of Artificial Sequence: Synthetic oligonucleotide
agacuauuguggaauccga

SEQ ID NO: 2424374 - RNA, 19 nt, Artificial Sequence
  Description of Artificial Sequence: Synthetic oligonucleotide
cuuauggguugggacuagc

SEQ ID NO: 2424375 - RNA, 19 nt, Artificial Sequence
  Description of Artificial Sequence: Synthetic oligonucleotide
cuucuaucucagugccaag

SEQ ID NO: 2424376 - RNA, 19 nt, Artificial Sequence
  Description of Artificial Sequence: Synthetic oligonucleotide
gacaucggcaguucugggu

SEQ ID NO: 2424377 - RNA, 19 nt, Artificial Sequence
  Description of Artificial Sequence: Synthetic oligonucleotide
uccugcuauggcugaggga

SEQ ID NO: 2424378 - RNA, 19 nt, Artificial Sequence
  Description of Artificial Sequence: Synthetic oligonucleotide
ggauucgccgugcuccucc

SEQ ID NO: 2424379 - RNA, 19 nt, Artificial Sequence
  Description of Artificial Sequence: Synthetic oligonucleotide
uuguggaauccgacuccac

SEQ ID NO: 2424380 - RNA, 19 nt, Artificial Sequence
  Description of Artificial Sequence: Synthetic oligonucleotide
cagcauaaauccaucugua

SEQ ID NO: 2424381 - RNA, 19 nt, Artificial Sequence
  Description of Artificial Sequence: Synthetic oligonucleotide
ggcagauaagcuguaguuc

SEQ ID NO: 2424382 - RNA, 19 nt, Artificial Sequence
  Description of Artificial Sequence: Synthetic oligonucleotide
gggucuggcagcauaaauc

SEQ ID NO: 2424383 - RNA, 19 nt, Artificial Sequence
  Description of Artificial Sequence: Synthetic oligonucleotide
acuuggguggcaucuccua

SEQ ID NO: 2424384 - RNA, 19 nt, Artificial Sequence
  Description of Artificial Sequence: Synthetic oligonucleotide
gccugacuaccucugagac

SEQ ID NO: 2424385 - RNA, 19 nt, Artificial Sequence
  Description of Artificial Sequence: Synthetic oligonucleotide
gaagcagacugauggcccu

SEQ ID NO: 2424386 - RNA, 19 nt, Artificial Sequence
  Description of Artificial Sequence: Synthetic oligonucleotide
gacuaccucugagacaaaa

SEQ ID NO: 2424387 - RNA, 19 nt, Artificial Sequence
  Description of Artificial Sequence: Synthetic oligonucleotide
accuugcaauuuucuagau

SEQ ID NO: 2424388 - RNA, 19 nt, Artificial Sequence
  Description of Artificial Sequence: Synthetic oligonucleotide
acccuauauuugcaagcaa

SEQ ID NO: 2424389 - RNA, 19 nt, Artificial Sequence
  Description of Artificial Sequence: Synthetic oligonucleotide
guaaaagacaucggcaguu

SEQ ID NO: 2424390 - RNA, 19 nt, Artificial Sequence
  Description of Artificial Sequence: Synthetic oligonucleotide
aucggcaguucugggucac

SEQ ID NO: 2424391 - RNA, 19 nt, Artificial Sequence
  Description of Artificial Sequence: Synthetic oligonucleotide
guaggcaccacagucugua

SEQ ID NO: 2424392 - RNA, 19 nt, Artificial Sequence
  Description of Artificial Sequence: Synthetic oligonucleotide
ccugcuauggcugagggaa

SEQ ID NO: 2424393 - RNA, 19 nt, Artificial Sequence
  Description of Artificial Sequence: Synthetic oligonucleotide
ccuugcaauuuucuagaug

SEQ ID NO: 2424394 - RNA, 19 nt, Artificial Sequence
  Description of Artificial Sequence: Synthetic oligonucleotide
gguugggacuagcuaaguc

SEQ ID NO: 2424395 - RNA, 19 nt, Artificial Sequence
  Description of Artificial Sequence: Synthetic oligonucleotide
caucauuucuaaguacuua

SEQ ID NO: 2424396 - RNA, 19 nt, Artificial Sequence
  Description of Artificial Sequence: Synthetic oligonucleotide
ucggauucgccgugcuccu

SEQ ID NO: 2424397 - RNA, 19 nt, Artificial Sequence
  Description of Artificial Sequence: Synthetic oligonucleotide
guacaccaagaaugcuaug

SEQ ID NO: 2424398 - RNA, 19 nt, Artificial Sequence
  Description of Artificial Sequence: Synthetic oligonucleotide
gggugugugcccauccagg

SEQ ID NO: 2424399 - RNA, 19 nt, Artificial Sequence
  Description of Artificial Sequence: Synthetic oligonucleotide
cacagucuguagccccucc

SEQ ID NO: 2424400 - RNA, 19 nt, Artificial Sequence
  Description of Artificial Sequence: Synthetic oligonucleotide
cugguauuccuacacaguu

SEQ ID NO: 2424401 - RNA, 19 nt, Artificial Sequence
  Description of Artificial Sequence: Synthetic oligonucleotide
aucuucuaagagaaauauu

SEQ ID NO: 2424402 - RNA, 19 nt, Artificial Sequence
  Description of Artificial Sequence: Synthetic oligonucleotide
cugcuauggcugagggaag

SEQ ID NO: 2424403 - RNA, 19 nt, Artificial Sequence
  Description of Artificial Sequence: Synthetic oligonucleotide
ggcgccgccagcgcgaacg

SEQ ID NO: 2424404 - RNA, 19 nt, Artificial Sequence
  Description of Artificial Sequence: Synthetic oligonucleotide
ucccgcgaagcccgcccgg

SEQ ID NO: 2424405 - RNA, 19 nt, Artificial Sequence
  Description of Artificial Sequence: Synthetic oligonucleotide
cacuauggccaaaguaaaa

SEQ ID NO: 2424406 - RNA, 19 nt, Artificial Sequence
  Description of Artificial Sequence: Synthetic oligonucleotide
ccuauauuugcaagcaaua

SEQ ID NO: 2424407 - RNA, 19 nt, Artificial Sequence
  Description of Artificial Sequence: Synthetic oligonucleotide
agcuuauggguugggacua

SEQ ID NO: 2424408 - RNA, 19 nt, Artificial Sequence
  Description of Artificial Sequence: Synthetic oligonucleotide
ggaauccgacuccacuaug

SEQ ID NO: 2424409 - RNA, 19 nt, Artificial Sequence
  Description of Artificial Sequence: Synthetic oligonucleotide
ccccuucuaucucagugcc

SEQ ID NO: 2424410 - RNA, 19 nt, Artificial Sequence
  Description of Artificial Sequence: Synthetic oligonucleotide
uucugcgggucuggcagca

SEQ ID NO: 2424411 - RNA, 19 nt, Artificial Sequence
  Description of Artificial Sequence: Synthetic oligonucleotide
cccucaaauccaaucuuuc

SEQ ID NO: 2424412 - RNA, 19 nt, Artificial Sequence
  Description of Artificial Sequence: Synthetic oligonucleotide
guauuccuacacaguuuac

SEQ ID NO: 2424413 - RNA, 19 nt, Artificial Sequence
  Description of Artificial Sequence: Synthetic oligonucleotide
cuuagggugugugcccauc

SEQ ID NO: 2424414 - RNA, 19 nt, Artificial Sequence
  Description of Artificial Sequence: Synthetic oligonucleotide
uccaggcguccucgggagc

SEQ ID NO: 2424415 - RNA, 19 nt, Artificial Sequence
  Description of Artificial Sequence: Synthetic oligonucleotide
gauucgccgugcuccucca

SEQ ID NO: 2424416 - RNA, 19 nt, Artificial Sequence
  Description of Artificial Sequence: Synthetic oligonucleotide
uguagccccuccccuucua

SEQ ID NO: 2424417 - RNA, 19 nt, Artificial Sequence
  Description of Artificial Sequence: Synthetic oligonucleotide
aggccgcuacaucccgggg

SEQ ID NO: 2424418 - RNA, 19 nt, Artificial Sequence
  Description of Artificial Sequence: Synthetic oligonucleotide
agcgcgaacgggacccggg

SEQ ID NO: 2424419 - RNA, 19 nt, Artificial Sequence
  Description of Artificial Sequence: Synthetic oligonucleotide
ccaugagauccaaguacac

SEQ ID NO: 2424420 - RNA, 19 nt, Artificial Sequence
  Description of Artificial Sequence: Synthetic oligonucleotide
ggcuaacuacccuauauuu

SEQ ID NO: 2424421 - RNA, 19 nt, Artificial Sequence
  Description of Artificial Sequence: Synthetic oligonucleotide
ggaggcagauaagcuguag

SEQ ID NO: 2424422 - RNA, 19 nt, Artificial Sequence
  Description of Artificial Sequence: Synthetic oligonucleotide
ggcugagggaagcagaaau

SEQ ID NO: 2424423 - RNA, 19 nt, Artificial Sequence
  Description of Artificial Sequence: Synthetic oligonucleotide
guucuaggcuaacuacccu

SEQ ID NO: 2424424 - RNA, 19 nt, Artificial Sequence
  Description of Artificial Sequence: Synthetic oligonucleotide
gucccgcgaagcccgcccg

SEQ ID NO: 2424425 - RNA, 19 nt, Artificial Sequence
  Description of Artificial Sequence: Synthetic oligonucleotide
cucugauaagaaaguucua

SEQ ID NO: 2424426 - RNA, 19 nt, Artificial Sequence
  Description of Artificial Sequence: Synthetic oligonucleotide
cuuccacuugagaagguuu

SEQ ID NO: 2424427 - RNA, 19 nt, Artificial Sequence
  Description of Artificial Sequence: Synthetic oligonucleotide
acuuagggugugugcccau

SEQ ID NO: 2424428 - RNA, 19 nt, Artificial Sequence
  Description of Artificial Sequence: Synthetic oligonucleotide
ccgugcuccuccaugccgc

SEQ ID NO: 2424429 - RNA, 19 nt, Artificial Sequence
  Description of Artificial Sequence: Synthetic oligonucleotide
gccagcgcgaacgggaccc

SEQ ID NO: 2424430 - RNA, 19 nt, Artificial Sequence
  Description of Artificial Sequence: Synthetic oligonucleotide
uagcuaagucaagccugac

SEQ ID NO: 2424431 - RNA, 19 nt, Artificial Sequence
  Description of Artificial Sequence: Synthetic oligonucleotide
ccuucuaucucagugccaa

SEQ ID NO: 2424432 - RNA, 19 nt, Artificial Sequence
  Description of Artificial Sequence: Synthetic oligonucleotide
ugugcccauccaggcgucc

SEQ ID NO: 2424433 - RNA, 19 nt, Artificial Sequence
  Description of Artificial Sequence: Synthetic oligonucleotide
agugccaaggaggcagaua

SEQ ID NO: 2424434 - RNA, 19 nt, Artificial Sequence
  Description of Artificial Sequence: Synthetic oligonucleotide
ccgggguuggcucggauuc

SEQ ID NO: 2424435 - RNA, 19 nt, Artificial Sequence
  Description of Artificial Sequence: Synthetic oligonucleotide
gcauauaacuguagugucu

SEQ ID NO: 2424436 - RNA, 19 nt, Artificial Sequence
  Description of Artificial Sequence: Synthetic oligonucleotide
caucggcaguucuggguca

SEQ ID NO: 2424437 - RNA, 19 nt, Artificial Sequence
  Description of Artificial Sequence: Synthetic oligonucleotide
caucccgggguuggcucgg

SEQ ID NO: 2424438 - RNA, 19 nt, Artificial Sequence
  Description of Artificial Sequence: Synthetic oligonucleotide
uggcugagggaagcagaaa

SEQ ID NO: 2424439 - RNA, 19 nt, Artificial Sequence
  Description of Artificial Sequence: Synthetic oligonucleotide
cccuauauuugcaagcaau

SEQ ID NO: 2424440 - RNA, 19 nt, Artificial Sequence
  Description of Artificial Sequence: Synthetic oligonucleotide
ucggcaguucugggucacc

SEQ ID NO: 2424441 - RNA, 19 nt, Artificial Sequence
  Description of Artificial Sequence: Synthetic oligonucleotide
ccacuauggccaaaguaaa

SEQ ID NO: 2424442 - RNA, 19 nt, Artificial Sequence
  Description of Artificial Sequence: Synthetic oligonucleotide
gucuggcagcauaaaucca

SEQ ID NO: 2424443 - RNA, 19 nt, Artificial Sequence
  Description of Artificial Sequence: Synthetic oligonucleotide
agccguggugucccgcgaa

SEQ ID NO: 2424444 - RNA, 19 nt, Artificial Sequence
  Description of Artificial Sequence: Synthetic oligonucleotide
uggcucggauucgccgugc

SEQ ID NO: 2424445 - RNA, 19 nt, Artificial Sequence
  Description of Artificial Sequence: Synthetic oligonucleotide
ugacuaccucugagacaaa

SEQ ID NO: 2424446 - RNA, 19 nt, Artificial Sequence
  Description of Artificial Sequence: Synthetic oligonucleotide
cuaaguacuuagggugugu

SEQ ID NO: 2424447 - RNA, 19 nt, Artificial Sequence
  Description of Artificial Sequence: Synthetic oligonucleotide
gcagagagccguggugucc

SEQ ID NO: 2424448 - RNA, 19 nt, Artificial Sequence
  Description of Artificial Sequence: Synthetic oligonucleotide
cgaaugaaaucagcaucag

SEQ ID NO: 2424449 - RNA, 19 nt, Artificial Sequence
  Description of Artificial Sequence: Synthetic oligonucleotide
cuaggcuaacuacccuaua

SEQ ID NO: 2424450 - RNA, 19 nt, Artificial Sequence
  Description of Artificial Sequence: Synthetic oligonucleotide
ggccaaaguaaaagacauc

SEQ ID NO: 2424451 - RNA, 19 nt, Artificial Sequence
  Description of Artificial Sequence: Synthetic oligonucleotide
ccugacuaccucugagaca

SEQ ID NO: 2424452 - RNA, 19 nt, Artificial Sequence
  Description of Artificial Sequence: Synthetic oligonucleotide
cuuggguggcaucuccuau

SEQ ID NO: 2424453 - RNA, 19 nt, Artificial Sequence
  Description of Artificial Sequence: Synthetic oligonucleotide
gggguuggcucggauucgc

SEQ ID NO: 2424454 - RNA, 19 nt, Artificial Sequence
  Description of Artificial Sequence: Synthetic oligonucleotide
cccacucugaacauauccu

SEQ ID NO: 2424455 - RNA, 19 nt, Artificial Sequence
  Description of Artificial Sequence: Synthetic oligonucleotide
ccaaggaggcagauaagcu

SEQ ID NO: 2424456 - RNA, 19 nt, Artificial Sequence
  Description of Artificial Sequence: Synthetic oligonucleotide
gccguggugucccgcgaag

SEQ ID NO: 2424457 - RNA, 19 nt, Artificial Sequence
  Description of Artificial Sequence: Synthetic oligonucleotide
cuccuauaucuaauuccau

SEQ ID NO: 2424458 - RNA, 19 nt, Artificial Sequence
  Description of Artificial Sequence: Synthetic oligonucleotide
gcccauccaggcguccucg

SEQ ID NO: 2424459 - RNA, 19 nt, Artificial Sequence
  Description of Artificial Sequence: Synthetic oligonucleotide
auucgccgugcuccuccau

SEQ ID NO: 2424460 - RNA, 19 nt, Artificial Sequence
  Description of Artificial Sequence: Synthetic oligonucleotide
ccaaucuuucacgaaugaa

SEQ ID NO: 2424461 - RNA, 19 nt, Artificial Sequence
  Description of Artificial Sequence: Synthetic oligonucleotide
cccuuauccugcuauggcu

SEQ ID NO: 2424462 - RNA, 19 nt, Artificial Sequence
  Description of Artificial Sequence: Synthetic oligonucleotide
gcuauggcugagggaagca

SEQ ID NO: 2424463 - RNA, 19 nt, Artificial Sequence
  Description of Artificial Sequence: Synthetic oligonucleotide
gcgcgaacgggacccgggc

SEQ ID NO: 2424464 - RNA, 19 nt, Artificial Sequence
  Description of Artificial Sequence: Synthetic oligonucleotide
gcuacaucccgggguuggc

SEQ ID NO: 2424465 - RNA, 19 nt, Artificial Sequence
  Description of Artificial Sequence: Synthetic oligonucleotide
cccauccaggcguccucgg

SEQ ID NO: 2424466 - RNA, 19 nt, Artificial Sequence
  Description of Artificial Sequence: Synthetic oligonucleotide
ggucaccuugcaauuuucu

SEQ ID NO: 2424467 - RNA, 19 nt, Artificial Sequence
  Description of Artificial Sequence: Synthetic oligonucleotide
gggccaaggccgcuacauc

SEQ ID NO: 2424468 - RNA, 19 nt, Artificial Sequence
  Description of Artificial Sequence: Synthetic oligonucleotide
ccucgggagcccacgugug

SEQ ID NO: 2424469 - RNA, 19 nt, Artificial Sequence
  Description of Artificial Sequence: Synthetic oligonucleotide
cgcuacaucccgggguugg

SEQ ID NO: 2424470 - RNA, 19 nt, Artificial Sequence
  Description of Artificial Sequence: Synthetic oligonucleotide
cugcgggucuggcagcaua

SEQ ID NO: 2424471 - RNA, 19 nt, Artificial Sequence
  Description of Artificial Sequence: Synthetic oligonucleotide
gccgccagcgcgaacggga

SEQ ID NO: 2424472 - RNA, 19 nt, Artificial Sequence
  Description of Artificial Sequence: Synthetic oligonucleotide
ggcaucuccuauaucuaau

SEQ ID NO: 2424473 - RNA, 19 nt, Artificial Sequence
  Description of Artificial Sequence: Synthetic oligonucleotide
gugggauggcauaggcaua

SEQ ID NO: 2424474 - RNA, 19 nt, Artificial Sequence
  Description of Artificial Sequence: Synthetic oligonucleotide
guagccccuccccuucuau

SEQ ID NO: 2424475 - RNA, 19 nt, Artificial Sequence
  Description of Artificial Sequence: Synthetic oligonucleotide
ggccgcuacaucccggggu

SEQ ID NO: 2424476 - RNA, 19 nt, Artificial Sequence
  Description of Artificial Sequence: Synthetic oligonucleotide
caugccgcccgcgcagaga

SEQ ID NO: 2424477 - RNA, 19 nt, Artificial Sequence
  Description of Artificial Sequence: Synthetic oligonucleotide
ucugcgggucuggcagcau

SEQ ID NO: 2424478 - RNA, 19 nt, Artificial Sequence
  Description of Artificial Sequence: Synthetic oligonucleotide
gcucggauucgccgugcuc

SEQ ID NO: 2424479 - RNA, 19 nt, Artificial Sequence
  Description of Artificial Sequence: Synthetic oligonucleotide
gcguccucgggagcccacg

SEQ ID NO: 2424480 - RNA, 19 nt, Artificial Sequence
  Description of Artificial Sequence: Synthetic oligonucleotide
gccaacuuuuacucuccau

SEQ ID NO: 2424481 - RNA, 19 nt, Artificial Sequence
  Description of Artificial Sequence: Synthetic oligonucleotide
cuacaucccgggguuggcu

SEQ ID NO: 2424482 - RNA, 19 nt, Artificial Sequence
  Description of Artificial Sequence: Synthetic oligonucleotide
ccguggugucccgcgaagc

SEQ ID NO: 2424483 - RNA, 19 nt, Artificial Sequence
  Description of Artificial Sequence: Synthetic oligonucleotide
cgggacccgggccaaggcc

SEQ ID NO: 2424484 - RNA, 19 nt, Artificial Sequence
  Description of Artificial Sequence: Synthetic oligonucleotide
gguggcgccgccagcgcga

SEQ ID NO: 2424485 - RNA, 19 nt, Artificial Sequence
  Description of Artificial Sequence: Synthetic oligonucleotide
gugugcccauccaggcguc

SEQ ID NO: 2424486 - RNA, 19 nt, Artificial Sequence
  Description of Artificial Sequence: Synthetic oligonucleotide
gggguggcgccgccagcgc

SEQ ID NO: 2424487 - RNA, 19 nt, Artificial Sequence
  Description of Artificial Sequence: Synthetic oligonucleotide
ccgccagcgcgaacgggac

SEQ ID NO: 2424488 - RNA, 19 nt, Artificial Sequence
  Description of Artificial Sequence: Synthetic oligonucleotide
cccgcgcagagagccgugg

SEQ ID NO: 2424489 - RNA, 19 nt, Artificial Sequence
  Description of Artificial Sequence: Synthetic oligonucleotide
gccgcuacaucccgggguu

SEQ ID NO: 2424490 - RNA, 19 nt, Artificial Sequence
  Description of Artificial Sequence: Synthetic oligonucleotide
ccuugguauaaaccugcau

SEQ ID NO: 2424491 - RNA, 19 nt, Artificial Sequence
  Description of Artificial Sequence: Synthetic oligonucleotide
gugcccauccaggcguccu

SEQ ID NO: 2424492 - RNA, 19 nt, Artificial Sequence
  Description of Artificial Sequence: Synthetic oligonucleotide
ccgcgaagcccgcccggcc

SEQ ID NO: 2424493 - RNA, 19 nt, Artificial Sequence
  Description of Artificial Sequence: Synthetic oligonucleotide
ccaugccgcccgcgcagag

SEQ ID NO: 2424494 - RNA, 19 nt, Artificial Sequence
  Description of Artificial Sequence: Synthetic oligonucleotide
cccgcgaagcccgcccggc

SEQ ID NO: 2424495 - RNA, 19 nt, Artificial Sequence
  Description of Artificial Sequence: Synthetic oligonucleotide
ccagcgcgaacgggacccg

SEQ ID NO: 2424496 - RNA, 19 nt, Artificial Sequence
  Description of Artificial Sequence: Synthetic oligonucleotide
aucccgggguuggcucgga

SEQ ID NO: 2424497 - RNA, 19 nt, Artificial Sequence
  Description of Artificial Sequence: Synthetic oligonucleotide
ccuacacaguuuacuucau

SEQ ID NO: 2424498 - RNA, 19 nt, Artificial Sequence
  Description of Artificial Sequence: Synthetic oligonucleotide
ccgacuccacuauggccaa

SEQ ID NO: 2424499 - RNA, 19 nt, Artificial Sequence
  Description of Artificial Sequence: Synthetic oligonucleotide
ccgcccgcgcagagagccg

SEQ ID NO: 2424500 - RNA, 19 nt, Artificial Sequence
  Description of Artificial Sequence: Synthetic oligonucleotide
ggcucggauucgccgugcu

SEQ ID NO: 2424501 - RNA, 19 nt, Artificial Sequence
  Description of Artificial Sequence: Synthetic oligonucleotide
cgccagcgcgaacgggacc

SEQ ID NO: 2424502 - RNA, 19 nt, Artificial Sequence
  Description of Artificial Sequence: Synthetic oligonucleotide
ggcguccucgggagcccac

SEQ ID NO: 2424503 - RNA, 19 nt, Artificial Sequence
  Description of Artificial Sequence: Synthetic oligonucleotide
guggcgccgccagcgcgaa

SEQ ID NO: 2424504 - RNA, 19 nt, Artificial Sequence
  Description of Artificial Sequence: Synthetic oligonucleotide
ccgcuacaucccgggguug

SEQ ID NO: 2424505 - RNA, 19 nt, Artificial Sequence
  Description of Artificial Sequence: Synthetic oligonucleotide
gcccgcgcagagagccgug

SEQ ID NO: 2424506 - RNA, 19 nt, Artificial Sequence
  Description of Artificial Sequence: Synthetic oligonucleotide
cggauucgccgugcuccuc

SEQ ID NO: 2424507 - RNA, 19 nt, Artificial Sequence
  Description of Artificial Sequence: Synthetic oligonucleotide
cgaagcccgcccggccaga

SEQ ID NO: 2424508 - RNA, 19 nt, Artificial Sequence
  Description of Artificial Sequence: Synthetic oligonucleotide
cgacuccacuauggccaaa

SEQ ID NO: 2424509 - RNA, 19 nt, Artificial Sequence
  Description of Artificial Sequence: Synthetic oligonucleotide
cgcccgcgcagagagccgu

SEQ ID NO: 2424510 - RNA, 19 nt, Artificial Sequence
  Description of Artificial Sequence: Synthetic oligonucleotide
cauucuuugacccacacag

SEQ ID NO: 2424511 - RNA, 19 nt, Artificial Sequence
  Description of Artificial Sequence: Synthetic oligonucleotide
aaagguggagcguaugguc

SEQ ID NO: 2424512 - RNA, 19 nt, Artificial Sequence
  Description of Artificial Sequence: Synthetic oligonucleotide
agugaaaaccucuuuccac

SEQ ID NO: 2424513 - RNA, 19 nt, Artificial Sequence
  Description of Artificial Sequence: Synthetic oligonucleotide
acagagcaagaauagggcc

SEQ ID NO: 2424514 - RNA, 19 nt, Artificial Sequence
  Description of Artificial Sequence: Synthetic oligonucleotide
guaugguccauccaggcgg

SEQ ID NO: 2424515 - RNA, 19 nt, Artificial Sequence
  Description of Artificial Sequence: Synthetic oligonucleotide
gauccucuggucuugaggc

SEQ ID NO: 2424516 - RNA, 19 nt, Artificial Sequence
  Description of Artificial Sequence: Synthetic oligonucleotide
aaugccauaucugggcggc

SEQ ID NO: 2424517 - RNA, 19 nt, Artificial Sequence
  Description of Artificial Sequence: Synthetic oligonucleotide
uaaagcagaguguugguga

SEQ ID NO: 2424518 - RNA, 19 nt, Artificial Sequence
  Description of Artificial Sequence: Synthetic oligonucleotide
ugauucugacuccagagac

SEQ ID NO: 2424519 - RNA, 19 nt, Artificial Sequence
  Description of Artificial Sequence: Synthetic oligonucleotide
agaaagguggagcguaugg

SEQ ID NO: 2424520 - RNA, 19 nt, Artificial Sequence
  Description of Artificial Sequence: Synthetic oligonucleotide
caagaauagggccggagcg

SEQ ID NO: 2424521 - RNA, 19 nt, Artificial Sequence
  Description of Artificial Sequence: Synthetic oligonucleotide
agauggacagcucagugug

SEQ ID NO: 2424522 - RNA, 19 nt, Artificial Sequence
  Description of Artificial Sequence: Synthetic oligonucleotide
uucuuugacccacacaggu

SEQ ID NO: 2424523 - RNA, 19 nt, Artificial Sequence
  Description of Artificial Sequence: Synthetic oligonucleotide
aaagcagaguguuggugag

SEQ ID NO: 2424524 - RNA, 19 nt, Artificial Sequence
  Description of Artificial Sequence: Synthetic oligonucleotide
agacagagcaagaauaggg

SEQ ID NO: 2424525 - RNA, 19 nt, Artificial Sequence
  Description of Artificial Sequence: Synthetic oligonucleotide
aagguggagcguauggucc

SEQ ID NO: 2424526 - RNA, 19 nt, Artificial Sequence
  Description of Artificial Sequence: Synthetic oligonucleotide
cagagcaagaauagggccg

SEQ ID NO: 2424527 - RNA, 19 nt, Artificial Sequence
  Description of Artificial Sequence: Synthetic oligonucleotide
aauggccacgcaugugagc

SEQ ID NO: 2424528 - RNA, 19 nt, Artificial Sequence
  Description of Artificial Sequence: Synthetic oligonucleotide
acgaagacacuccucagag

SEQ ID NO: 2424529 - RNA, 19 nt, Artificial Sequence
  Description of Artificial Sequence: Synthetic oligonucleotide
uggugcuugagugaaaacc

SEQ ID NO: 2424530 - RNA, 19 nt, Artificial Sequence
  Description of Artificial Sequence: Synthetic oligonucleotide
cuuugacccacacagguug

SEQ ID NO: 2424531 - RNA, 19 nt, Artificial Sequence
  Description of Artificial Sequence: Synthetic oligonucleotide
ugcauggaagccaggcugg

SEQ ID NO: 2424532 - RNA, 19 nt, Artificial Sequence
  Description of Artificial Sequence: Synthetic oligonucleotide
uuggaguggcucaagguca

SEQ ID NO: 2424533 - RNA, 19 nt, Artificial Sequence
  Description of Artificial Sequence: Synthetic oligonucleotide
gagcguaugguccauccag

SEQ ID NO: 2424534 - RNA, 19 nt, Artificial Sequence
  Description of Artificial Sequence: Synthetic oligonucleotide
cucaaggucagugggaucc

SEQ ID NO: 2424535 - RNA, 19 nt, Artificial Sequence
  Description of Artificial Sequence: Synthetic oligonucleotide
agaggaggccagcugauuc

SEQ ID NO: 2424536 - RNA, 19 nt, Artificial Sequence
  Description of Artificial Sequence: Synthetic oligonucleotide
ucauucuuuggguggacgc

SEQ ID NO: 2424537 - RNA, 19 nt, Artificial Sequence
  Description of Artificial Sequence: Synthetic oligonucleotide
gaaccugguagggaaaggg

SEQ ID NO: 2424538 - RNA, 19 nt, Artificial Sequence
  Description of Artificial Sequence: Synthetic oligonucleotide
augcgucuccaucuggugc

SEQ ID NO: 2424539 - RNA, 19 nt, Artificial Sequence
  Description of Artificial Sequence: Synthetic oligonucleotide
acgcaugugagcuugcaug

SEQ ID NO: 2424540 - RNA, 19 nt, Artificial Sequence
  Description of Artificial Sequence: Synthetic oligonucleotide
aguggcucaaggucagugg

SEQ ID NO: 2424541 - RNA, 19 nt, Artificial Sequence
  Description of Artificial Sequence: Synthetic oligonucleotide
gaagaugcuccacaggcca

SEQ ID NO: 2424542 - RNA, 19 nt, Artificial Sequence
  Description of Artificial Sequence: Synthetic oligonucleotide
ucuauaccuuguauggccu

SEQ ID NO: 2424543 - RNA, 19 nt, Artificial Sequence
  Description of Artificial Sequence: Synthetic oligonucleotide
gacagagcaagaauagggc

SEQ ID NO: 2424544 - RNA, 19 nt, Artificial Sequence
  Description of Artificial Sequence: Synthetic oligonucleotide
uuuccacagacagagcaag

SEQ ID NO: 2424545 - RNA, 19 nt, Artificial Sequence
  Description of Artificial Sequence: Synthetic oligonucleotide
caaccaaggggccucagcc

SEQ ID NO: 2424546 - RNA, 19 nt, Artificial Sequence
  Description of Artificial Sequence: Synthetic oligonucleotide
uguggacucgguaaugcgu

SEQ ID NO: 2424547 - RNA, 19 nt, Artificial Sequence
  Description of Artificial Sequence: Synthetic oligonucleotide
aaugcgucuccaucuggug

SEQ ID NO: 2424548 - RNA, 19 nt, Artificial Sequence
  Description of Artificial Sequence: Synthetic oligonucleotide
gaaugccauaucugggcgg

SEQ ID NO: 2424549 - RNA, 19 nt, Artificial Sequence
  Description of Artificial Sequence: Synthetic oligonucleotide
agaagcugccaacacccgg

SEQ ID NO: 2424550 - RNA, 19 nt, Artificial Sequence
  Description of Artificial Sequence: Synthetic oligonucleotide
uaaugcgucuccaucuggu

SEQ ID NO: 2424551 - RNA, 19 nt, Artificial Sequence
  Description of Artificial Sequence: Synthetic oligonucleotide
aauagggccggagcgagca

SEQ ID NO: 2424552 - RNA, 19 nt, Artificial Sequence
  Description of Artificial Sequence: Synthetic oligonucleotide
ugagcuugcauggaagcca

SEQ ID NO: 2424553 - RNA, 19 nt, Artificial Sequence
  Description of Artificial Sequence: Synthetic oligonucleotide
agcgauagggagcggcccc

SEQ ID NO: 2424554 - RNA, 19 nt, Artificial Sequence
  Description of Artificial Sequence: Synthetic oligonucleotide
ucggccucgaggaagagua

SEQ ID NO: 2424555 - RNA, 19 nt, Artificial Sequence
  Description of Artificial Sequence: Synthetic oligonucleotide
aggagggaaugccauaucu

SEQ ID NO: 2424556 - RNA, 19 nt, Artificial Sequence
  Description of Artificial Sequence: Synthetic oligonucleotide
agagcaagaauagggccgg

SEQ ID NO: 2424557 - RNA, 19 nt, Artificial Sequence
  Description of Artificial Sequence: Synthetic oligonucleotide
ugugcauucuuugacccac

SEQ ID NO: 2424558 - RNA, 19 nt, Artificial Sequence
  Description of Artificial Sequence: Synthetic oligonucleotide
gaccagggcacccacgaag

SEQ ID NO: 2424559 - RNA, 19 nt, Artificial Sequence
  Description of Artificial Sequence: Synthetic oligonucleotide
guggcucaaggucaguggg

SEQ ID NO: 2424560 - RNA, 19 nt, Artificial Sequence
  Description of Artificial Sequence: Synthetic oligonucleotide
uucauucuuuggguggacg

SEQ ID NO: 2424561 - RNA, 19 nt, Artificial Sequence
  Description of Artificial Sequence: Synthetic oligonucleotide
agggcacccacgaagacac

SEQ ID NO: 2424562 - RNA, 19 nt, Artificial Sequence
  Description of Artificial Sequence: Synthetic oligonucleotide
aaccugguagggaaagggg

SEQ ID NO: 2424563 - RNA, 19 nt, Artificial Sequence
  Description of Artificial Sequence: Synthetic oligonucleotide
agagaaaucccgggagcgc

SEQ ID NO: 2424564 - RNA, 19 nt, Artificial Sequence
  Description of Artificial Sequence: Synthetic oligonucleotide
aagacacuccucagagccc

SEQ ID NO: 2424565 - RNA, 19 nt, Artificial Sequence
  Description of Artificial Sequence: Synthetic oligonucleotide
aagaguagagaaaggugga

SEQ ID NO: 2424566 - RNA, 19 nt, Artificial Sequence
  Description of Artificial Sequence: Synthetic oligonucleotide
ggguaaagcagaguguugg

SEQ ID NO: 2424567 - RNA, 19 nt, Artificial Sequence
  Description of Artificial Sequence: Synthetic oligonucleotide
uccuguguggacucgguaa

SEQ ID NO: 2424568 - RNA, 19 nt, Artificial Sequence
  Description of Artificial Sequence: Synthetic oligonucleotide
uggacgcuugucaaagcca

SEQ ID NO: 2424569 - RNA, 19 nt, Artificial Sequence
  Description of Artificial Sequence: Synthetic oligonucleotide
gauucugacuccagagacc

SEQ ID NO: 2424570 - RNA, 19 nt, Artificial Sequence
  Description of Artificial Sequence: Synthetic oligonucleotide
aucccgggagcgcugaggg

SEQ ID NO: 2424571 - RNA, 19 nt, Artificial Sequence
  Description of Artificial Sequence: Synthetic oligonucleotide
ucgguaaugcgucuccauc

SEQ ID NO: 2424572 - RNA, 19 nt, Artificial Sequence
  Description of Artificial Sequence: Synthetic oligonucleotide
aagaauagggccggagcga

SEQ ID NO: 2424573 - RNA, 19 nt, Artificial Sequence
  Description of Artificial Sequence: Synthetic oligonucleotide
guggacgcuugucaaagcc

SEQ ID NO: 2424574 - RNA, 19 nt, Artificial Sequence
  Description of Artificial Sequence: Synthetic oligonucleotide
uggagcguaugguccaucc

SEQ ID NO: 2424575 - RNA, 19 nt, Artificial Sequence
  Description of Artificial Sequence: Synthetic oligonucleotide
agaccuuuggaguggcuca

SEQ ID NO: 2424576 - RNA, 19 nt, Artificial Sequence
  Description of Artificial Sequence: Synthetic oligonucleotide
guaaugcgucuccaucugg

SEQ ID NO: 2424577 - RNA, 19 nt, Artificial Sequence
  Description of Artificial Sequence: Synthetic oligonucleotide
ugcgucuccaucuggugcu

SEQ ID NO: 2424578 - RNA, 19 nt, Artificial Sequence
  Description of Artificial Sequence: Synthetic oligonucleotide
gaggaggcaggacucccgg

SEQ ID NO: 2424579 - RNA, 19 nt, Artificial Sequence
  Description of Artificial Sequence: Synthetic oligonucleotide
uggaguggcucaaggucag

SEQ ID NO: 2424580 - RNA, 19 nt, Artificial Sequence
  Description of Artificial Sequence: Synthetic oligonucleotide
uaugguccauccaggcggc

SEQ ID NO: 2424581 - RNA, 19 nt, Artificial Sequence
  Description of Artificial Sequence: Synthetic oligonucleotide
cucgaggaagaguagagaa

SEQ ID NO: 2424582 - RNA, 19 nt, Artificial Sequence
  Description of Artificial Sequence: Synthetic oligonucleotide
guaaagcagaguguuggug

SEQ ID NO: 2424583 - RNA, 19 nt, Artificial Sequence
  Description of Artificial Sequence: Synthetic oligonucleotide
gagcgcugagggcagaggc

SEQ ID NO: 2424584 - RNA, 19 nt, Artificial Sequence
  Description of Artificial Sequence: Synthetic oligonucleotide
agaguagagaaagguggag

SEQ ID NO: 2424585 - RNA, 19 nt, Artificial Sequence
  Description of Artificial Sequence: Synthetic oligonucleotide
agaccugccaggcugcagu

SEQ ID NO: 2424586 - RNA, 19 nt, Artificial Sequence
  Description of Artificial Sequence: Synthetic oligonucleotide
gacucgguaaugcgucucc

SEQ ID NO: 2424587 - RNA, 19 nt, Artificial Sequence
  Description of Artificial Sequence: Synthetic oligonucleotide
ucugacuccagagaccuuu

SEQ ID NO: 2424588 - RNA, 19 nt, Artificial Sequence
  Description of Artificial Sequence: Synthetic oligonucleotide
uagagaaagguggagcgua

SEQ ID NO: 2424589 - RNA, 19 nt, Artificial Sequence
  Description of Artificial Sequence: Synthetic oligonucleotide
agaauagggccggagcgag

SEQ ID NO: 2424590 - RNA, 19 nt, Artificial Sequence
  Description of Artificial Sequence: Synthetic oligonucleotide
guguggacucgguaaugcg

SEQ ID NO: 2424591 - RNA, 19 nt, Artificial Sequence
  Description of Artificial Sequence: Synthetic oligonucleotide
ugugccugccuugagugga

SEQ ID NO: 2424592 - RNA, 19 nt, Artificial Sequence
  Description of Artificial Sequence: Synthetic oligonucleotide
gacuccagagaccuuugga

SEQ ID NO: 2424593 - RNA, 19 nt, Artificial Sequence
  Description of Artificial Sequence: Synthetic oligonucleotide
cagacagagcaagaauagg

SEQ ID NO: 2424594 - RNA, 19 nt, Artificial Sequence
  Description of Artificial Sequence: Synthetic oligonucleotide
uucuuuggguggacgcuug

SEQ ID NO: 2424595 - RNA, 19 nt, Artificial Sequence
  Description of Artificial Sequence: Synthetic oligonucleotide
ggucagguggcagaggagg

SEQ ID NO: 2424596 - RNA, 19 nt, Artificial Sequence
  Description of Artificial Sequence: Synthetic oligonucleotide
gcaagaauagggccggagc

SEQ ID NO: 2424597 - RNA, 19 nt, Artificial Sequence
  Description of Artificial Sequence: Synthetic oligonucleotide
ccaacacccggucaggugg

SEQ ID NO: 2424598 - RNA, 19 nt, Artificial Sequence
  Description of Artificial Sequence: Synthetic oligonucleotide
ggaaugaggcugguuaggg

SEQ ID NO: 2424599 - RNA, 19 nt, Artificial Sequence
  Description of Artificial Sequence: Synthetic oligonucleotide
cacagguugccagugugcc

SEQ ID NO: 2424600 - RNA, 19 nt, Artificial Sequence
  Description of Artificial Sequence: Synthetic oligonucleotide
gcuugucaaagccagagaa

SEQ ID NO: 2424601 - RNA, 19 nt, Artificial Sequence
  Description of Artificial Sequence: Synthetic oligonucleotide
aagggguaaagcagagugu

SEQ ID NO: 2424602 - RNA, 19 nt, Artificial Sequence
  Description of Artificial Sequence: Synthetic oligonucleotide
ugggcgaauggccacgcau

SEQ ID NO: 2424603 - RNA, 19 nt, Artificial Sequence
  Description of Artificial Sequence: Synthetic oligonucleotide
auucuuugacccacacagg

SEQ ID NO: 2424604 - RNA, 19 nt, Artificial Sequence
  Description of Artificial Sequence: Synthetic oligonucleotide
gaggccagcugauucugac

SEQ ID NO: 2424605 - RNA, 19 nt, Artificial Sequence
  Description of Artificial Sequence: Synthetic oligonucleotide
cagaggcuacaggagaagg

SEQ ID NO: 2424606 - RNA, 19 nt, Artificial Sequence
  Description of Artificial Sequence: Synthetic oligonucleotide
gagaccuuuggaguggcuc

SEQ ID NO: 2424607 - RNA, 19 nt, Artificial Sequence
  Description of Artificial Sequence: Synthetic oligonucleotide
cugggaaugaggcugguua

SEQ ID NO: 2424608 - RNA, 19 nt, Artificial Sequence
  Description of Artificial Sequence: Synthetic oligonucleotide
cuaagggaggagggaaugc

SEQ ID NO: 2424609 - RNA, 19 nt, Artificial Sequence
  Description of Artificial Sequence: Synthetic oligonucleotide
auagggagcggccccgugu

SEQ ID NO: 2424610 - RNA, 19 nt, Artificial Sequence
  Description of Artificial Sequence: Synthetic oligonucleotide
gagcuugcauggaagccag

SEQ ID NO: 2424611 - RNA, 19 nt, Artificial Sequence
  Description of Artificial Sequence: Synthetic oligonucleotide
guuggugagauggacagcu

SEQ ID NO: 2424612 - RNA, 19 nt, Artificial Sequence
  Description of Artificial Sequence: Synthetic oligonucleotide
agcguaugguccauccagg

SEQ ID NO: 2424613 - RNA, 19 nt, Artificial Sequence
  Description of Artificial Sequence: Synthetic oligonucleotide
gguaaugcgucuccaucug

SEQ ID NO: 2424614 - RNA, 19 nt, Artificial Sequence
  Description of Artificial Sequence: Synthetic oligonucleotide
agcaagaauagggccggag

SEQ ID NO: 2424615 - RNA, 19 nt, Artificial Sequence
  Description of Artificial Sequence: Synthetic oligonucleotide
cauaucugggcggccacag

SEQ ID NO: 2424616 - RNA, 19 nt, Artificial Sequence
  Description of Artificial Sequence: Synthetic oligonucleotide
ugcuaagggaggagggaau

SEQ ID NO: 2424617 - RNA, 19 nt, Artificial Sequence
  Description of Artificial Sequence: Synthetic oligonucleotide
agggguaaagcagaguguu

SEQ ID NO: 2424618 - RNA, 19 nt, Artificial Sequence
  Description of Artificial Sequence: Synthetic oligonucleotide
agcagaguguuggugagau

SEQ ID NO: 2424619 - RNA, 19 nt, Artificial Sequence
  Description of Artificial Sequence: Synthetic oligonucleotide
gaauggccacgcaugugag

SEQ ID NO: 2424620 - RNA, 19 nt, Artificial Sequence
  Description of Artificial Sequence: Synthetic oligonucleotide
gagggcagcgauagggagc

SEQ ID NO: 2424621 - RNA, 19 nt, Artificial Sequence
  Description of Artificial Sequence: Synthetic oligonucleotide
agguuggcccucucccaac

SEQ ID NO: 2424622 - RNA, 19 nt, Artificial Sequence
  Description of Artificial Sequence: Synthetic oligonucleotide
ccuugaguggagcuagagg

SEQ ID NO: 2424623 - RNA, 19 nt, Artificial Sequence
  Description of Artificial Sequence: Synthetic oligonucleotide
ugguagggaaaggggacca

SEQ ID NO: 2424624 - RNA, 19 nt, Artificial Sequence
  Description of Artificial Sequence: Synthetic oligonucleotide
gugagcuugcauggaagcc

SEQ ID NO: 2424625 - RNA, 19 nt, Artificial Sequence
  Description of Artificial Sequence: Synthetic oligonucleotide
cagggcucucuauaccuug

SEQ ID NO: 2424626 - RNA, 19 nt, Artificial Sequence
  Description of Artificial Sequence: Synthetic oligonucleotide
aaaucccgggagcgcugag

SEQ ID NO: 2424627 - RNA, 19 nt, Artificial Sequence
  Description of Artificial Sequence: Synthetic oligonucleotide
cagccagcccugcacagag

SEQ ID NO: 2424628 - RNA, 19 nt, Artificial Sequence
  Description of Artificial Sequence: Synthetic oligonucleotide
agggacggaggcccguguc

SEQ ID NO: 2424629 - RNA, 19 nt, Artificial Sequence
  Description of Artificial Sequence: Synthetic oligonucleotide
uuggcccucucccaaccaa

SEQ ID NO: 2424630 - RNA, 19 nt, Artificial Sequence
  Description of Artificial Sequence: Synthetic oligonucleotide
ucuuuggguggacgcuugu

SEQ ID NO: 2424631 - RNA, 19 nt, Artificial Sequence
  Description of Artificial Sequence: Synthetic oligonucleotide
acggaggcccgugucggcc

SEQ ID NO: 2424632 - RNA, 19 nt, Artificial Sequence
  Description of Artificial Sequence: Synthetic oligonucleotide
ggacgcuugucaaagccag

SEQ ID NO: 2424633 - RNA, 19 nt, Artificial Sequence
  Description of Artificial Sequence: Synthetic oligonucleotide
ugguccauccaggcggcag

SEQ ID NO: 2424634 - RNA, 19 nt, Artificial Sequence
  Description of Artificial Sequence: Synthetic oligonucleotide
ugccauaucugggcggcca

SEQ ID NO: 2424635 - RNA, 19 nt, Artificial Sequence
  Description of Artificial Sequence: Synthetic oligonucleotide
agguugccagugugccugc

SEQ ID NO: 2424636 - RNA, 19 nt, Artificial Sequence
  Description of Artificial Sequence: Synthetic oligonucleotide
gauggacagcucagugugc

SEQ ID NO: 2424637 - RNA, 19 nt, Artificial Sequence
  Description of Artificial Sequence: Synthetic oligonucleotide
gugugccugccuugagugg

SEQ ID NO: 2424638 - RNA, 19 nt, Artificial Sequence
  Description of Artificial Sequence: Synthetic oligonucleotide
ucagggcucucuauaccuu

SEQ ID NO: 2424639 - RNA, 19 nt, Artificial Sequence
  Description of Artificial Sequence: Synthetic oligonucleotide
cccucucccaaccaagggg

SEQ ID NO: 2424640 - RNA, 19 nt, Artificial Sequence
  Description of Artificial Sequence: Synthetic oligonucleotide
guggacucgguaaugcguc

SEQ ID NO: 2424641 - RNA, 19 nt, Artificial Sequence
  Description of Artificial Sequence: Synthetic oligonucleotide
gcuugcauggaagccaggc

SEQ ID NO: 2424642 - RNA, 19 nt, Artificial Sequence
  Description of Artificial Sequence: Synthetic oligonucleotide
cugacuccagagaccuuug

SEQ ID NO: 2424643 - RNA, 19 nt, Artificial Sequence
  Description of Artificial Sequence: Synthetic oligonucleotide
caugugagcuugcauggaa

SEQ ID NO: 2424644 - RNA, 19 nt, Artificial Sequence
  Description of Artificial Sequence: Synthetic oligonucleotide
gaaagguggagcguauggu

SEQ ID NO: 2424645 - RNA, 19 nt, Artificial Sequence
  Description of Artificial Sequence: Synthetic oligonucleotide
ccuuuggaguggcucaagg

SEQ ID NO: 2424646 - RNA, 19 nt, Artificial Sequence
  Description of Artificial Sequence: Synthetic oligonucleotide
gaaaggggaccagggcacc

SEQ ID NO: 2424647 - RNA, 19 nt, Artificial Sequence
  Description of Artificial Sequence: Synthetic oligonucleotide
ggagggaaugccauaucug

SEQ ID NO: 2424648 - RNA, 19 nt, Artificial Sequence
  Description of Artificial Sequence: Synthetic oligonucleotide
acagguugccagugugccu

SEQ ID NO: 2424649 - RNA, 19 nt, Artificial Sequence
  Description of Artificial Sequence: Synthetic oligonucleotide
cgcaugugagcuugcaugg

SEQ ID NO: 2424650 - RNA, 19 nt, Artificial Sequence
  Description of Artificial Sequence: Synthetic oligonucleotide
gauagggagcggccccgug

SEQ ID NO: 2424651 - RNA, 19 nt, Artificial Sequence
  Description of Artificial Sequence: Synthetic oligonucleotide
ccugguagggaaaggggac

SEQ ID NO: 2424652 - RNA, 19 nt, Artificial Sequence
  Description of Artificial Sequence: Synthetic oligonucleotide
gccucagcccaccagggcc

SEQ ID NO: 2424653 - RNA, 19 nt, Artificial Sequence
  Description of Artificial Sequence: Synthetic oligonucleotide
uuggugagauggacagcuc

SEQ ID NO: 2424654 - RNA, 19 nt, Artificial Sequence
  Description of Artificial Sequence: Synthetic oligonucleotide
caacacccggucagguggc

SEQ ID NO: 2424655 - RNA, 19 nt, Artificial Sequence
  Description of Artificial Sequence: Synthetic oligonucleotide
ggaagaugcuccacaggcc

SEQ ID NO: 2424656 - RNA, 19 nt, Artificial Sequence
  Description of Artificial Sequence: Synthetic oligonucleotide
ucucccaaccaaggggccu

SEQ ID NO: 2424657 - RNA, 19 nt, Artificial Sequence
  Description of Artificial Sequence: Synthetic oligonucleotide
gggacggaggcccgugucg

SEQ ID NO: 2424658 - RNA, 19 nt, Artificial Sequence
  Description of Artificial Sequence: Synthetic oligonucleotide
ggaaaggggaccagggcac

SEQ ID NO: 2424659 - RNA, 19 nt, Artificial Sequence
  Description of Artificial Sequence: Synthetic oligonucleotide
aaggggaccagggcaccca

SEQ ID NO: 2424660 - RNA, 19 nt, Artificial Sequence
  Description of Artificial Sequence: Synthetic oligonucleotide
gccggagcgagcaggaagg

SEQ ID NO: 2424661 - RNA, 19 nt, Artificial Sequence
  Description of Artificial Sequence: Synthetic oligonucleotide
cuuuggaguggcucaaggu

SEQ ID NO: 2424662 - RNA, 19 nt, Artificial Sequence
  Description of Artificial Sequence: Synthetic oligonucleotide
auucuuuggguggacgcuu

SEQ ID NO: 2424663 - RNA, 19 nt, Artificial Sequence
  Description of Artificial Sequence: Synthetic oligonucleotide
ggguggacgcuugucaaag

SEQ ID NO: 2424664 - RNA, 19 nt, Artificial Sequence
  Description of Artificial Sequence: Synthetic oligonucleotide
uccgcaggugcuuggucau

SEQ ID NO: 2424665 - RNA, 19 nt, Artificial Sequence
  Description of Artificial Sequence: Synthetic oligonucleotide
cagaggaggaggcaggacu

SEQ ID NO: 2424666 - RNA, 19 nt, Artificial Sequence
  Description of Artificial Sequence: Synthetic oligonucleotide
uguccgcaggugcuugguc

SEQ ID NO: 2424667 - RNA, 19 nt, Artificial Sequence
  Description of Artificial Sequence: Synthetic oligonucleotide
ggugcuugagugaaaaccu

SEQ ID NO: 2424668 - RNA, 19 nt, Artificial Sequence
  Description of Artificial Sequence: Synthetic oligonucleotide
gagaaaucccgggagcgcu

SEQ ID NO: 2424669 - RNA, 19 nt, Artificial Sequence
  Description of Artificial Sequence: Synthetic oligonucleotide
gcccgugucggccucgagg

SEQ ID NO: 2424670 - RNA, 19 nt, Artificial Sequence
  Description of Artificial Sequence: Synthetic oligonucleotide
ggccggagcgagcaggaag

SEQ ID NO: 2424671 - RNA, 19 nt, Artificial Sequence
  Description of Artificial Sequence: Synthetic oligonucleotide
gugugcauucuuugaccca

SEQ ID NO: 2424672 - RNA, 19 nt, Artificial Sequence
  Description of Artificial Sequence: Synthetic oligonucleotide
ggcaggacucccgggaggg

SEQ ID NO: 2424673 - RNA, 19 nt, Artificial Sequence
  Description of Artificial Sequence: Synthetic oligonucleotide
ggaaccugguagggaaagg

SEQ ID NO: 2424674 - RNA, 19 nt, Artificial Sequence
  Description of Artificial Sequence: Synthetic oligonucleotide
cguaugguccauccaggcg

SEQ ID NO: 2424675 - RNA, 19 nt, Artificial Sequence
  Description of Artificial Sequence: Synthetic oligonucleotide
cuuuggguggacgcuuguc

SEQ ID NO: 2424676 - RNA, 19 nt, Artificial Sequence
  Description of Artificial Sequence: Synthetic oligonucleotide
cccacgaagacacuccuca

SEQ ID NO: 2424677 - RNA, 19 nt, Artificial Sequence
  Description of Artificial Sequence: Synthetic oligonucleotide
cagcugauucugacuccag

SEQ ID NO: 2424678 - RNA, 19 nt, Artificial Sequence
  Description of Artificial Sequence: Synthetic oligonucleotide
gggugcuaagggaggaggg

SEQ ID NO: 2424679 - RNA, 19 nt, Artificial Sequence
  Description of Artificial Sequence: Synthetic oligonucleotide
aggacucccgggagggacg

SEQ ID NO: 2424680 - RNA, 19 nt, Artificial Sequence
  Description of Artificial Sequence: Synthetic oligonucleotide
gcuaagggaggagggaaug

SEQ ID NO: 2424681 - RNA, 19 nt, Artificial Sequence
  Description of Artificial Sequence: Synthetic oligonucleotide
gaaaucccgggagcgcuga

SEQ ID NO: 2424682 - RNA, 19 nt, Artificial Sequence
  Description of Artificial Sequence: Synthetic oligonucleotide
cucccgggagggacggagg

SEQ ID NO: 2424683 - RNA, 19 nt, Artificial Sequence
  Description of Artificial Sequence: Synthetic oligonucleotide
augccauaucugggcggcc

SEQ ID NO: 2424684 - RNA, 19 nt, Artificial Sequence
  Description of Artificial Sequence: Synthetic oligonucleotide
gggaaccugguagggaaag

SEQ ID NO: 2424685 - RNA, 19 nt, Artificial Sequence
  Description of Artificial Sequence: Synthetic oligonucleotide
cagagaccuuuggaguggc

SEQ ID NO: 2424686 - RNA, 19 nt, Artificial Sequence
  Description of Artificial Sequence: Synthetic oligonucleotide
agaaaucccgggagcgcug

SEQ ID NO: 2424687 - RNA, 19 nt, Artificial Sequence
  Description of Artificial Sequence: Synthetic oligonucleotide
auagggccggagcgagcag

SEQ ID NO: 2424688 - RNA, 19 nt, Artificial Sequence
  Description of Artificial Sequence: Synthetic oligonucleotide
gguuggcccucucccaacc

SEQ ID NO: 2424689 - RNA, 19 nt, Artificial Sequence
  Description of Artificial Sequence: Synthetic oligonucleotide
caucuggugcuugagugaa

SEQ ID NO: 2424690 - RNA, 19 nt, Artificial Sequence
  Description of Artificial Sequence: Synthetic oligonucleotide
cuugcauggaagccaggcu

SEQ ID NO: 2424691 - RNA, 19 nt, Artificial Sequence
  Description of Artificial Sequence: Synthetic oligonucleotide
agcucagugugcauucuuu

SEQ ID NO: 2424692 - RNA, 19 nt, Artificial Sequence
  Description of Artificial Sequence: Synthetic oligonucleotide
cagcgauagggagcggccc

SEQ ID NO: 2424693 - RNA, 19 nt, Artificial Sequence
  Description of Artificial Sequence: Synthetic oligonucleotide
gguggacgcuugucaaagc

SEQ ID NO: 2424694 - RNA, 19 nt, Artificial Sequence
  Description of Artificial Sequence: Synthetic oligonucleotide
gacggaggcccgugucggc

SEQ ID NO: 2424695 - RNA, 19 nt, Artificial Sequence
  Description of Artificial Sequence: Synthetic oligonucleotide
gugcuaagggaggagggaa

SEQ ID NO: 2424696 - RNA, 19 nt, Artificial Sequence
  Description of Artificial Sequence: Synthetic oligonucleotide
agagaaagguggagcguau

SEQ ID NO: 2424697 - RNA, 19 nt, Artificial Sequence
  Description of Artificial Sequence: Synthetic oligonucleotide
cuguguggacucgguaaug

SEQ ID NO: 2424698 - RNA, 19 nt, Artificial Sequence
  Description of Artificial Sequence: Synthetic oligonucleotide
ggcagcgauagggagcggc

SEQ ID NO: 2424699 - RNA, 19 nt, Artificial Sequence
  Description of Artificial Sequence: Synthetic oligonucleotide
uggcugggcgaauggccac

SEQ ID NO: 2424700 - RNA, 19 nt, Artificial Sequence
  Description of Artificial Sequence: Synthetic oligonucleotide
acucgguaaugcgucucca

SEQ ID NO: 2424701 - RNA, 19 nt, Artificial Sequence
  Description of Artificial Sequence: Synthetic oligonucleotide
uggacagcucagugugcau

SEQ ID NO: 2424702 - RNA, 19 nt, Artificial Sequence
  Description of Artificial Sequence: Synthetic oligonucleotide
gcauucuuugacccacaca

SEQ ID NO: 2424703 - RNA, 19 nt, Artificial Sequence
  Description of Artificial Sequence: Synthetic oligonucleotide
ggacggaggcccgugucgg

SEQ ID NO: 2424704 - RNA, 19 nt, Artificial Sequence
  Description of Artificial Sequence: Synthetic oligonucleotide
gggcgaauggccacgcaug

SEQ ID NO: 2424705 - RNA, 19 nt, Artificial Sequence
  Description of Artificial Sequence: Synthetic oligonucleotide
cucccaaccaaggggccuc

SEQ ID NO: 2424706 - RNA, 19 nt, Artificial Sequence
  Description of Artificial Sequence: Synthetic oligonucleotide
cgaauggccacgcauguga

SEQ ID NO: 2424707 - RNA, 19 nt, Artificial Sequence
  Description of Artificial Sequence: Synthetic oligonucleotide
gugcuuggucauggcagag

SEQ ID NO: 2424708 - RNA, 19 nt, Artificial Sequence
  Description of Artificial Sequence: Synthetic oligonucleotide
acccggucagguggcagag

SEQ ID NO: 2424709 - RNA, 19 nt, Artificial Sequence
  Description of Artificial Sequence: Synthetic oligonucleotide
gcacccacgaagacacucc

SEQ ID NO: 2424710 - RNA, 19 nt, Artificial Sequence
  Description of Artificial Sequence: Synthetic oligonucleotide
gguaaagcagaguguuggu

SEQ ID NO: 2424711 - RNA, 19 nt, Artificial Sequence
  Description of Artificial Sequence: Synthetic oligonucleotide
cugggcggccacaggaaga

SEQ ID NO: 2424712 - RNA, 19 nt, Artificial Sequence
  Description of Artificial Sequence: Synthetic oligonucleotide
guagagaaagguggagcgu

SEQ ID NO: 2424713 - RNA, 19 nt, Artificial Sequence
  Description of Artificial Sequence: Synthetic oligonucleotide
guuggcccucucccaacca

SEQ ID NO: 2424714 - RNA, 19 nt, Artificial Sequence
  Description of Artificial Sequence: Synthetic oligonucleotide
cccucagggcucucuauac

SEQ ID NO: 2424715 - RNA, 19 nt, Artificial Sequence
  Description of Artificial Sequence: Synthetic oligonucleotide
ggcccucucccaaccaagg

SEQ ID NO: 2424716 - RNA, 19 nt, Artificial Sequence
  Description of Artificial Sequence: Synthetic oligonucleotide
aacacccggucagguggca

SEQ ID NO: 2424717 - RNA, 19 nt, Artificial Sequence
  Description of Artificial Sequence: Synthetic oligonucleotide
gcagcgauagggagcggcc

SEQ ID NO: 2424718 - RNA, 19 nt, Artificial Sequence
  Description of Artificial Sequence: Synthetic oligonucleotide
ggagcggccccgugugucc

SEQ ID NO: 2424719 - RNA, 19 nt, Artificial Sequence
  Description of Artificial Sequence: Synthetic oligonucleotide
acacccggucagguggcag

SEQ ID NO: 2424720 - RNA, 19 nt, Artificial Sequence
  Description of Artificial Sequence: Synthetic oligonucleotide
ucccgggagcgcugagggc

SEQ ID NO: 2424721 - RNA, 19 nt, Artificial Sequence
  Description of Artificial Sequence: Synthetic oligonucleotide
cauucuuuggguggacgcu

SEQ ID NO: 2424722 - RNA, 19 nt, Artificial Sequence
  Description of Artificial Sequence: Synthetic oligonucleotide
ggagcguaugguccaucca

SEQ ID NO: 2424723 - RNA, 19 nt, Artificial Sequence
  Description of Artificial Sequence: Synthetic oligonucleotide
ggccccguguguccgcagg

SEQ ID NO: 2424724 - RNA, 19 nt, Artificial Sequence
  Description of Artificial Sequence: Synthetic oligonucleotide
gggguaaagcagaguguug

SEQ ID NO: 2424725 - RNA, 19 nt, Artificial Sequence
  Description of Artificial Sequence: Synthetic oligonucleotide
caggcggcagcuggcuggg

SEQ ID NO: 2424726 - RNA, 19 nt, Artificial Sequence
  Description of Artificial Sequence: Synthetic oligonucleotide
agcccucagggcucucuau

SEQ ID NO: 2424727 - RNA, 19 nt, Artificial Sequence
  Description of Artificial Sequence: Synthetic oligonucleotide
gacgcuugucaaagccaga

SEQ ID NO: 2424728 - RNA, 19 nt, Artificial Sequence
  Description of Artificial Sequence: Synthetic oligonucleotide
cacccggucagguggcaga

SEQ ID NO: 2424729 - RNA, 19 nt, Artificial Sequence
  Description of Artificial Sequence: Synthetic oligonucleotide
ggccacgcaugugagcuug

SEQ ID NO: 2424730 - RNA, 19 nt, Artificial Sequence
  Description of Artificial Sequence: Synthetic oligonucleotide
gccuugaguggagcuagag

SEQ ID NO: 2424731 - RNA, 19 nt, Artificial Sequence
  Description of Artificial Sequence: Synthetic oligonucleotide
cgaagacacuccucagagc

SEQ ID NO: 2424732 - RNA, 19 nt, Artificial Sequence
  Description of Artificial Sequence: Synthetic oligonucleotide
cagugggauccucuggucu

SEQ ID NO: 2424733 - RNA, 19 nt, Artificial Sequence
  Description of Artificial Sequence: Synthetic oligonucleotide
gcuacaggagaagggcuuc

SEQ ID NO: 2424734 - RNA, 19 nt, Artificial Sequence
  Description of Artificial Sequence: Synthetic oligonucleotide
cccgugucggccucgagga

SEQ ID NO: 2424735 - RNA, 19 nt, Artificial Sequence
  Description of Artificial Sequence: Synthetic oligonucleotide
ggcugggcgaauggccacg

SEQ ID NO: 2424736 - RNA, 19 nt, Artificial Sequence
  Description of Artificial Sequence: Synthetic oligonucleotide
agcuugcauggaagccagg

SEQ ID NO: 2424737 - RNA, 19 nt, Artificial Sequence
  Description of Artificial Sequence: Synthetic oligonucleotide
gcgauagggagcggccccg

SEQ ID NO: 2424738 - RNA, 19 nt, Artificial Sequence
  Description of Artificial Sequence: Synthetic oligonucleotide
ucccaaccaaggggccuca

SEQ ID NO: 2424739 - RNA, 19 nt, Artificial Sequence
  Description of Artificial Sequence: Synthetic oligonucleotide
agcccgcaugccuuucauu

SEQ ID NO: 2424740 - RNA, 19 nt, Artificial Sequence
  Description of Artificial Sequence: Synthetic oligonucleotide
ggacucccgggagggacgg

SEQ ID NO: 2424741 - RNA, 19 nt, Artificial Sequence
  Description of Artificial Sequence: Synthetic oligonucleotide
gaggcccgugucggccucg

SEQ ID NO: 2424742 - RNA, 19 nt, Artificial Sequence
  Description of Artificial Sequence: Synthetic oligonucleotide
gccauaucugggcggccac

SEQ ID NO: 2424743 - RNA, 19 nt, Artificial Sequence
  Description of Artificial Sequence: Synthetic oligonucleotide
cagugugccugccuugagu

SEQ ID NO: 2424744 - RNA, 19 nt, Artificial Sequence
  Description of Artificial Sequence: Synthetic oligonucleotide
agcgagcaggaagggguaa

SEQ ID NO: 2424745 - RNA, 19 nt, Artificial Sequence
  Description of Artificial Sequence: Synthetic oligonucleotide
ggccucgaggaagaguaga

SEQ ID NO: 2424746 - RNA, 19 nt, Artificial Sequence
  Description of Artificial Sequence: Synthetic oligonucleotide
cucgguaaugcgucuccau

SEQ ID NO: 2424747 - RNA, 19 nt, Artificial Sequence
  Description of Artificial Sequence: Synthetic oligonucleotide
agagaccuuuggaguggcu

SEQ ID NO: 2424748 - RNA, 19 nt, Artificial Sequence
  Description of Artificial Sequence: Synthetic oligonucleotide
cgugucggccucgaggaag

SEQ ID NO: 2424749 - RNA, 19 nt, Artificial Sequence
  Description of Artificial Sequence: Synthetic oligonucleotide
ggcucucuauaccuuguau

SEQ ID NO: 2424750 - RNA, 19 nt, Artificial Sequence
  Description of Artificial Sequence: Synthetic oligonucleotide
gagcgagcaggaaggggua

SEQ ID NO: 2424751 - RNA, 19 nt, Artificial Sequence
  Description of Artificial Sequence: Synthetic oligonucleotide
agggccggagcgagcagga

SEQ ID NO: 2424752 - RNA, 19 nt, Artificial Sequence
  Description of Artificial Sequence: Synthetic oligonucleotide
uggccacgcaugugagcuu

SEQ ID NO: 2424753 - RNA, 19 nt, Artificial Sequence
  Description of Artificial Sequence: Synthetic oligonucleotide
cacccacgaagacacuccu

SEQ ID NO: 2424754 - RNA, 19 nt, Artificial Sequence
  Description of Artificial Sequence: Synthetic oligonucleotide
gggagcgcugagggcagag

SEQ ID NO: 2424755 - RNA, 19 nt, Artificial Sequence
  Description of Artificial Sequence: Synthetic oligonucleotide
gcgaauggccacgcaugug

SEQ ID NO: 2424756 - RNA, 19 nt, Artificial Sequence
  Description of Artificial Sequence: Synthetic oligonucleotide
ggagggacggaggcccgug

SEQ ID NO: 2424757 - RNA, 19 nt, Artificial Sequence
  Description of Artificial Sequence: Synthetic oligonucleotide
guggagcguaugguccauc

SEQ ID NO: 2424758 - RNA, 19 nt, Artificial Sequence
  Description of Artificial Sequence: Synthetic oligonucleotide
ccagugugccugccuugag

SEQ ID NO: 2424759 - RNA, 19 nt, Artificial Sequence
  Description of Artificial Sequence: Synthetic oligonucleotide
cccgggagcgcugagggca

SEQ ID NO: 2424760 - RNA, 19 nt, Artificial Sequence
  Description of Artificial Sequence: Synthetic oligonucleotide
aucuggugcuugagugaaa

SEQ ID NO: 2424761 - RNA, 19 nt, Artificial Sequence
  Description of Artificial Sequence: Synthetic oligonucleotide
ggcucaaggucagugggau

SEQ ID NO: 2424762 - RNA, 19 nt, Artificial Sequence
  Description of Artificial Sequence: Synthetic oligonucleotide
gcaugugagcuugcaugga

SEQ ID NO: 2424763 - RNA, 19 nt, Artificial Sequence
  Description of Artificial Sequence: Synthetic oligonucleotide
gcugggcgaauggccacgc

SEQ ID NO: 2424764 - RNA, 19 nt, Artificial Sequence
  Description of Artificial Sequence: Synthetic oligonucleotide
ccucgaggaagaguagaga

SEQ ID NO: 2424765 - RNA, 19 nt, Artificial Sequence
  Description of Artificial Sequence: Synthetic oligonucleotide
cugagcccgcaugccuuuc

SEQ ID NO: 2424766 - RNA, 19 nt, Artificial Sequence
  Description of Artificial Sequence: Synthetic oligonucleotide
cgguaaugcgucuccaucu

SEQ ID NO: 2424767 - RNA, 19 nt, Artificial Sequence
  Description of Artificial Sequence: Synthetic oligonucleotide
ccaaggggccucagcccac

SEQ ID NO: 2424768 - RNA, 19 nt, Artificial Sequence
  Description of Artificial Sequence: Synthetic oligonucleotide
ccagggcacccacgaagac

SEQ ID NO: 2424769 - RNA, 19 nt, Artificial Sequence
  Description of Artificial Sequence: Synthetic oligonucleotide
gguugccagugugccugcc

SEQ ID NO: 2424770 - RNA, 19 nt, Artificial Sequence
  Description of Artificial Sequence: Synthetic oligonucleotide
augguccauccaggcggca

SEQ ID NO: 2424771 - RNA, 19 nt, Artificial Sequence
  Description of Artificial Sequence: Synthetic oligonucleotide
gggcucucuauaccuugua

SEQ ID NO: 2424772 - RNA, 19 nt, Artificial Sequence
  Description of Artificial Sequence: Synthetic oligonucleotide
cugggcgaauggccacgca

SEQ ID NO: 2424773 - RNA, 19 nt, Artificial Sequence
  Description of Artificial Sequence: Synthetic oligonucleotide
ccgggagcgcugagggcag

SEQ ID NO: 2424774 - RNA, 19 nt, Artificial Sequence
  Description of Artificial Sequence: Synthetic oligonucleotide
gucggccucgaggaagagu

SEQ ID NO: 2424775 - RNA, 19 nt, Artificial Sequence
  Description of Artificial Sequence: Synthetic oligonucleotide
ggaggccagcugauucuga

SEQ ID NO: 2424776 - RNA, 19 nt, Artificial Sequence
  Description of Artificial Sequence: Synthetic oligonucleotide
ggcuacaggagaagggcuu

SEQ ID NO: 2424777 - RNA, 19 nt, Artificial Sequence
  Description of Artificial Sequence: Synthetic oligonucleotide
ccggagcgagcaggaaggg

SEQ ID NO: 2424778 - RNA, 19 nt, Artificial Sequence
  Description of Artificial Sequence: Synthetic oligonucleotide
gcgcugagggcagaggcua

SEQ ID NO: 2424779 - RNA, 19 nt, Artificial Sequence
  Description of Artificial Sequence: Synthetic oligonucleotide
ccuguguggacucgguaau

SEQ ID NO: 2424780 - RNA, 19 nt, Artificial Sequence
  Description of Artificial Sequence: Synthetic oligonucleotide
ggaccagggcacccacgaa

SEQ ID NO: 2424781 - RNA, 19 nt, Artificial Sequence
  Description of Artificial Sequence: Synthetic oligonucleotide
gcgagcaggaagggguaaa

SEQ ID NO: 2424782 - RNA, 19 nt, Artificial Sequence
  Description of Artificial Sequence: Synthetic oligonucleotide
caccagggccugggaauga

SEQ ID NO: 2424783 - RNA, 19 nt, Artificial Sequence
  Description of Artificial Sequence: Synthetic oligonucleotide
cgcuugucaaagccagaga

SEQ ID NO: 2424784 - RNA, 19 nt, Artificial Sequence
  Description of Artificial Sequence: Synthetic oligonucleotide
cagcucagugugcauucuu

SEQ ID NO: 2424785 - RNA, 19 nt, Artificial Sequence
  Description of Artificial Sequence: Synthetic oligonucleotide
ggggaaccugguagggaaa

SEQ ID NO: 2424786 - RNA, 19 nt, Artificial Sequence
  Description of Artificial Sequence: Synthetic oligonucleotide
aggcccgugucggccucga

SEQ ID NO: 2424787 - RNA, 19 nt, Artificial Sequence
  Description of Artificial Sequence: Synthetic oligonucleotide
ggaggcccgugucggccuc

SEQ ID NO: 2424788 - RNA, 19 nt, Artificial Sequence
  Description of Artificial Sequence: Synthetic oligonucleotide
gccacgcaugugagcuugc

SEQ ID NO: 2424789 - RNA, 19 nt, Artificial Sequence
  Description of Artificial Sequence: Synthetic oligonucleotide
ccauaucugggcggccaca

SEQ ID NO: 2424790 - RNA, 19 nt, Artificial Sequence
  Description of Artificial Sequence: Synthetic oligonucleotide
cccggucagguggcagagg

SEQ ID NO: 2424791 - RNA, 19 nt, Artificial Sequence
  Description of Artificial Sequence: Synthetic oligonucleotide
cccgcaugccuuucauucu

SEQ ID NO: 2424792 - RNA, 19 nt, Artificial Sequence
  Description of Artificial Sequence: Synthetic oligonucleotide
gacucccgggagggacgga

SEQ ID NO: 2424793 - RNA, 19 nt, Artificial Sequence
  Description of Artificial Sequence: Synthetic oligonucleotide
cggccucgaggaagaguag

SEQ ID NO: 2424794 - RNA, 19 nt, Artificial Sequence
  Description of Artificial Sequence: Synthetic oligonucleotide
ccacgcaugugagcuugca

SEQ ID NO: 2424795 - RNA, 19 nt, Artificial Sequence
  Description of Artificial Sequence: Synthetic oligonucleotide
cccaaccaaggggccucag

SEQ ID NO: 2424796 - RNA, 19 nt, Artificial Sequence
  Description of Artificial Sequence: Synthetic oligonucleotide
gcugagcccgcaugccuuu

SEQ ID NO: 2424797 - RNA, 19 nt, Artificial Sequence
  Description of Artificial Sequence: Synthetic oligonucleotide
gcggccacaggaagaugcu

SEQ ID NO: 2424798 - RNA, 19 nt, Artificial Sequence
  Description of Artificial Sequence: Synthetic oligonucleotide
gccccguguguccgcaggu

SEQ ID NO: 2424799 - RNA, 19 nt, Artificial Sequence
  Description of Artificial Sequence: Synthetic oligonucleotide
gguggagcguaugguccau

SEQ ID NO: 2424800 - RNA, 19 nt, Artificial Sequence
  Description of Artificial Sequence: Synthetic oligonucleotide
ccgcaugccuuucauucuu

SEQ ID NO: 2424801 - RNA, 19 nt, Artificial Sequence
  Description of Artificial Sequence: Synthetic oligonucleotide
ggaguggcucaaggucagu

SEQ ID NO: 2424802 - RNA, 19 nt, Artificial Sequence
  Description of Artificial Sequence: Synthetic oligonucleotide
gggagggacggaggcccgu

SEQ ID NO: 2424803 - RNA, 19 nt, Artificial Sequence
  Description of Artificial Sequence: Synthetic oligonucleotide
gggccggagcgagcaggaa

SEQ ID NO: 2424804 - RNA, 19 nt, Artificial Sequence
  Description of Artificial Sequence: Synthetic oligonucleotide
ccgugucggccucgaggaa

SEQ ID NO: 2424805 - RNA, 19 nt, Artificial Sequence
  Description of Artificial Sequence: Synthetic oligonucleotide
ccugggaaugaggcugguu

SEQ ID NO: 2424806 - RNA, 19 nt, Artificial Sequence
  Description of Artificial Sequence: Synthetic oligonucleotide
cggaggcccgugucggccu

SEQ ID NO: 2424807 - RNA, 19 nt, Artificial Sequence
  Description of Artificial Sequence: Synthetic oligonucleotide
gggcacccacgaagacacu

SEQ ID NO: 2424808 - RNA, 19 nt, Artificial Sequence
  Description of Artificial Sequence: Synthetic oligonucleotide
cgauagggagcggccccgu

SEQ ID NO: 2424809 - RNA, 19 nt, Artificial Sequence
  Description of Artificial Sequence: Synthetic oligonucleotide
aacacuagaaacugugucc

SEQ ID NO: 2424810 - RNA, 19 nt, Artificial Sequence
  Description of Artificial Sequence: Synthetic oligonucleotide
ucuuuuacaugacuuaugg

SEQ ID NO: 2424811 - RNA, 19 nt, Artificial Sequence
  Description of Artificial Sequence: Synthetic oligonucleotide
uucauugucucuaaagucg

SEQ ID NO: 2424812 - RNA, 19 nt, Artificial Sequence
  Description of Artificial Sequence: Synthetic oligonucleotide
uuuacaugacuuauggugg

SEQ ID NO: 2424813 - RNA, 19 nt, Artificial Sequence
  Description of Artificial Sequence: Synthetic oligonucleotide
aacguaauggcucaguucu

SEQ ID NO: 2424814 - RNA, 19 nt, Artificial Sequence
  Description of Artificial Sequence: Synthetic oligonucleotide
aaucauaucuucaucaauc

SEQ ID NO: 2424815 - RNA, 19 nt, Artificial Sequence
  Description of Artificial Sequence: Synthetic oligonucleotide
uuugcaaauucaaccaugg

SEQ ID NO: 2424816 - RNA, 19 nt, Artificial Sequence
  Description of Artificial Sequence: Synthetic oligonucleotide
cugaauuugaaccggaacg

SEQ ID NO: 2424817 - RNA, 19 nt, Artificial Sequence
  Description of Artificial Sequence: Synthetic oligonucleotide
uuuuaaggaggagagagcg

SEQ ID NO: 2424818 - RNA, 19 nt, Artificial Sequence
  Description of Artificial Sequence: Synthetic oligonucleotide
auauguagcgaguggaacc

SEQ ID NO: 2424819 - RNA, 19 nt, Artificial Sequence
  Description of Artificial Sequence: Synthetic oligonucleotide
uggaaccugaauuugaacc

SEQ ID NO: 2424820 - RNA, 19 nt, Artificial Sequence
  Description of Artificial Sequence: Synthetic oligonucleotide
ucuaaagucggcaucagaa

SEQ ID NO: 2424821 - RNA, 19 nt, Artificial Sequence
  Description of Artificial Sequence: Synthetic oligonucleotide
ucuaucaugcggacaaugg

SEQ ID NO: 2424822 - RNA, 19 nt, Artificial Sequence
  Description of Artificial Sequence: Synthetic oligonucleotide
uggguuauggggcagauga

SEQ ID NO: 2424823 - RNA, 19 nt, Artificial Sequence
  Description of Artificial Sequence: Synthetic oligonucleotide
aggcauaccauauugcuuc

SEQ ID NO: 2424824 - RNA, 19 nt, Artificial Sequence
  Description of Artificial Sequence: Synthetic oligonucleotide
uccacuaguaguuuuaagu

SEQ ID NO: 2424825 - RNA, 19 nt, Artificial Sequence
  Description of Artificial Sequence: Synthetic oligonucleotide
cuuaugguggacuggacgg

SEQ ID NO: 2424826 - RNA, 19 nt, Artificial Sequence
  Description of Artificial Sequence: Synthetic oligonucleotide
aauggcucaguucucgcuc

SEQ ID NO: 2424827 - RNA, 19 nt, Artificial Sequence
  Description of Artificial Sequence: Synthetic oligonucleotide
caauuuuggggcaacaggc

SEQ ID NO: 2424828 - RNA, 19 nt, Artificial Sequence
  Description of Artificial Sequence: Synthetic oligonucleotide
auuguuacccggcugcccc

SEQ ID NO: 2424829 - RNA, 19 nt, Artificial Sequence
  Description of Artificial Sequence: Synthetic oligonucleotide
aauuugaaccggaacgccc

SEQ ID NO: 2424830 - RNA, 19 nt, Artificial Sequence
  Description of Artificial Sequence: Synthetic oligonucleotide
uuaugcuuggauucuauca

SEQ ID NO: 2424831 - RNA, 19 nt, Artificial Sequence
  Description of Artificial Sequence: Synthetic oligonucleotide
auuggucuggcuuuggguc

SEQ ID NO: 2424832 - RNA, 19 nt, Artificial Sequence
  Description of Artificial Sequence: Synthetic oligonucleotide
aaggauauguagcgagugg

SEQ ID NO: 2424833 - RNA, 19 nt, Artificial Sequence
  Description of Artificial Sequence: Synthetic oligonucleotide
gaauucuuauccuguaaag

SEQ ID NO: 2424834 - RNA, 19 nt, Artificial Sequence
  Description of Artificial Sequence: Synthetic oligonucleotide
ucauugucucuaaagucgg

SEQ ID NO: 2424835 - RNA, 19 nt, Artificial Sequence
  Description of Artificial Sequence: Synthetic oligonucleotide
acggccuuaacguaauggc

SEQ ID NO: 2424836 - RNA, 19 nt, Artificial Sequence
  Description of Artificial Sequence: Synthetic oligonucleotide
ucgauugcccuccucaggg

SEQ ID NO: 2424837 - RNA, 19 nt, Artificial Sequence
  Description of Artificial Sequence: Synthetic oligonucleotide
acuuaugguggacuggacg

SEQ ID NO: 2424838 - RNA, 19 nt, Artificial Sequence
  Description of Artificial Sequence: Synthetic oligonucleotide
gauucuaucaugcggacaa

SEQ ID NO: 2424839 - RNA, 19 nt, Artificial Sequence
  Description of Artificial Sequence: Synthetic oligonucleotide
ucuuggaauuguuacccgg

SEQ ID NO: 2424840 - RNA, 19 nt, Artificial Sequence
  Description of Artificial Sequence: Synthetic oligonucleotide
acuaguaguuuuaaguccg

SEQ ID NO: 2424841 - RNA, 19 nt, Artificial Sequence
  Description of Artificial Sequence: Synthetic oligonucleotide
ucuggaaugaggucggaca

SEQ ID NO: 2424842 - RNA, 19 nt, Artificial Sequence
  Description of Artificial Sequence: Synthetic oligonucleotide
guaguuuuaaguccggcac

SEQ ID NO: 2424843 - RNA, 19 nt, Artificial Sequence
  Description of Artificial Sequence: Synthetic oligonucleotide
aaagucggcaucagaauuc

SEQ ID NO: 2424844 - RNA, 19 nt, Artificial Sequence
  Description of Artificial Sequence: Synthetic oligonucleotide
cauacuguagucacuacuc

SEQ ID NO: 2424845 - RNA, 19 nt, Artificial Sequence
  Description of Artificial Sequence: Synthetic oligonucleotide
uuuaaggaggagagagcgg

SEQ ID NO: 2424846 - RNA, 19 nt, Artificial Sequence
  Description of Artificial Sequence: Synthetic oligonucleotide
uccauucccgagcugaugc

SEQ ID NO: 2424847 - RNA, 19 nt, Artificial Sequence
  Description of Artificial Sequence: Synthetic oligonucleotide
uaugcuuggauucuaucau

SEQ ID NO: 2424848 - RNA, 19 nt, Artificial Sequence
  Description of Artificial Sequence: Synthetic oligonucleotide
cacuaguaguuuuaagucc

SEQ ID NO: 2424849 - RNA, 19 nt, Artificial Sequence
  Description of Artificial Sequence: Synthetic oligonucleotide
agucauacucucugucugc

SEQ ID NO: 2424850 - RNA, 19 nt, Artificial Sequence
  Description of Artificial Sequence: Synthetic oligonucleotide
aguaguuuuaaguccggca

SEQ ID NO: 2424851 - RNA, 19 nt, Artificial Sequence
  Description of Artificial Sequence: Synthetic oligonucleotide
uuaaggaggagagagcgga

SEQ ID NO: 2424852 - RNA, 19 nt, Artificial Sequence
  Description of Artificial Sequence: Synthetic oligonucleotide
gacuacagccaauuuuggg

SEQ ID NO: 2424853 - RNA, 19 nt, Artificial Sequence
  Description of Artificial Sequence: Synthetic oligonucleotide
ugugacuacagccaauuuu

SEQ ID NO: 2424854 - RNA, 19 nt, Artificial Sequence
  Description of Artificial Sequence: Synthetic oligonucleotide
cugaaggauauguagcgag

SEQ ID NO: 2424855 - RNA, 19 nt, Artificial Sequence
  Description of Artificial Sequence: Synthetic oligonucleotide
uaccauauugcuucuucag

SEQ ID NO: 2424856 - RNA, 19 nt, Artificial Sequence
  Description of Artificial Sequence: Synthetic oligonucleotide
ugcuuggauucuaucaugc

SEQ ID NO: 2424857 - RNA, 19 nt, Artificial Sequence
  Description of Artificial Sequence: Synthetic oligonucleotide
ggaaccugaauuugaaccg

SEQ ID NO: 2424858 - RNA, 19 nt, Artificial Sequence
  Description of Artificial Sequence: Synthetic oligonucleotide
cauacucucugucugcagg

SEQ ID NO: 2424859 - RNA, 19 nt, Artificial Sequence
  Description of Artificial Sequence: Synthetic oligonucleotide
aauuguuacccggcugccc

SEQ ID NO: 2424860 - RNA, 19 nt, Artificial Sequence
  Description of Artificial Sequence: Synthetic oligonucleotide
uucauuuccagcuggguua

SEQ ID NO: 2424861 - RNA, 19 nt, Artificial Sequence
  Description of Artificial Sequence: Synthetic oligonucleotide
guagucacuacucacuuca

SEQ ID NO: 2424862 - RNA, 19 nt, Artificial Sequence
  Description of Artificial Sequence: Synthetic oligonucleotide
agaauucuuauccuguaaa

SEQ ID NO: 2424863 - RNA, 19 nt, Artificial Sequence
  Description of Artificial Sequence: Synthetic oligonucleotide
aaguccggcaccuuuucug

SEQ ID NO: 2424864 - RNA, 19 nt, Artificial Sequence
  Description of Artificial Sequence: Synthetic oligonucleotide
cuuggaauuguuacccggc

SEQ ID NO: 2424865 - RNA, 19 nt, Artificial Sequence
  Description of Artificial Sequence: Synthetic oligonucleotide
cuacagccaauuuuggggc

SEQ ID NO: 2424866 - RNA, 19 nt, Artificial Sequence
  Description of Artificial Sequence: Synthetic oligonucleotide
aacuguguccauucccgag

SEQ ID NO: 2424867 - RNA, 19 nt, Artificial Sequence
  Description of Artificial Sequence: Synthetic oligonucleotide
uaguuuuaaguccggcacc

SEQ ID NO: 2424868 - RNA, 19 nt, Artificial Sequence
  Description of Artificial Sequence: Synthetic oligonucleotide
cacaaucauaucuucauca

SEQ ID NO: 2424869 - RNA, 19 nt, Artificial Sequence
  Description of Artificial Sequence: Synthetic oligonucleotide
ugagucuccacaaggucca

SEQ ID NO: 2424870 - RNA, 19 nt, Artificial Sequence
  Description of Artificial Sequence: Synthetic oligonucleotide
uccucuuaugcuuggauuc

SEQ ID NO: 2424871 - RNA, 19 nt, Artificial Sequence
  Description of Artificial Sequence: Synthetic oligonucleotide
cuagaaacuguguccauuc

SEQ ID NO: 2424872 - RNA, 19 nt, Artificial Sequence
  Description of Artificial Sequence: Synthetic oligonucleotide
uaaagucggcaucagaauu

SEQ ID NO: 2424873 - RNA, 19 nt, Artificial Sequence
  Description of Artificial Sequence: Synthetic oligonucleotide
aggucggacauucucaugu

SEQ ID NO: 2424874 - RNA, 19 nt, Artificial Sequence
  Description of Artificial Sequence: Synthetic oligonucleotide
cuaucaugcggacaauggc

SEQ ID NO: 2424875 - RNA, 19 nt, Artificial Sequence
  Description of Artificial Sequence: Synthetic oligonucleotide
gucacuacucacuucaguc

SEQ ID NO: 2424876 - RNA, 19 nt, Artificial Sequence
  Description of Artificial Sequence: Synthetic oligonucleotide
ucuuauccuguaaagccaa

SEQ ID NO: 2424877 - RNA, 19 nt, Artificial Sequence
  Description of Artificial Sequence: Synthetic oligonucleotide
auuuccagcuggguuaugg

SEQ ID NO: 2424878 - RNA, 19 nt, Artificial Sequence
  Description of Artificial Sequence: Synthetic oligonucleotide
aauucaaccauggcccugu

SEQ ID NO: 2424879 - RNA, 19 nt, Artificial Sequence
  Description of Artificial Sequence: Synthetic oligonucleotide
uguuccuacucagaguggc

SEQ ID NO: 2424880 - RNA, 19 nt, Artificial Sequence
  Description of Artificial Sequence: Synthetic oligonucleotide
uuaacguaauggcucaguu

SEQ ID NO: 2424881 - RNA, 19 nt, Artificial Sequence
  Description of Artificial Sequence: Synthetic oligonucleotide
agagagcggacuccacucc

SEQ ID NO: 2424882 - RNA, 19 nt, Artificial Sequence
  Description of Artificial Sequence: Synthetic oligonucleotide
ggaauuguuacccggcugc

SEQ ID NO: 2424883 - RNA, 19 nt, Artificial Sequence
  Description of Artificial Sequence: Synthetic oligonucleotide
gaaccugaauuugaaccgg

SEQ ID NO: 2424884 - RNA, 19 nt, Artificial Sequence
  Description of Artificial Sequence: Synthetic oligonucleotide
acauucucaugucugugug

SEQ ID NO: 2424885 - RNA, 19 nt, Artificial Sequence
  Description of Artificial Sequence: Synthetic oligonucleotide
ucacuacucacuucagucu

SEQ ID NO: 2424886 - RNA, 19 nt, Artificial Sequence
  Description of Artificial Sequence: Synthetic oligonucleotide
aaucccuuccguccaguca

SEQ ID NO: 2424887 - RNA, 19 nt, Artificial Sequence
  Description of Artificial Sequence: Synthetic oligonucleotide
gaaggauauguagcgagug

SEQ ID NO: 2424888 - RNA, 19 nt, Artificial Sequence
  Description of Artificial Sequence: Synthetic oligonucleotide
gacggccuuaacguaaugg

SEQ ID NO: 2424889 - RNA, 19 nt, Artificial Sequence
  Description of Artificial Sequence: Synthetic oligonucleotide
caugacuuaugguggacug

SEQ ID NO: 2424890 - RNA, 19 nt, Artificial Sequence
  Description of Artificial Sequence: Synthetic oligonucleotide
caacacuagaaacuguguc

SEQ ID NO: 2424891 - RNA, 19 nt, Artificial Sequence
  Description of Artificial Sequence: Synthetic oligonucleotide
ucgucuggaaugaggucgg

SEQ ID NO: 2424892 - RNA, 19 nt, Artificial Sequence
  Description of Artificial Sequence: Synthetic oligonucleotide
aguccggcaccuuuucugg

SEQ ID NO: 2424893 - RNA, 19 nt, Artificial Sequence
  Description of Artificial Sequence: Synthetic oligonucleotide
uucacugguuucuucauuu

SEQ ID NO: 2424894 - RNA, 19 nt, Artificial Sequence
  Description of Artificial Sequence: Synthetic oligonucleotide
cuguccauacuguagucac

SEQ ID NO: 2424895 - RNA, 19 nt, Artificial Sequence
  Description of Artificial Sequence: Synthetic oligonucleotide
uuacaugacuuauggugga

SEQ ID NO: 2424896 - RNA, 19 nt, Artificial Sequence
  Description of Artificial Sequence: Synthetic oligonucleotide
acaagguccaaggcaacac

SEQ ID NO: 2424897 - RNA, 19 nt, Artificial Sequence
  Description of Artificial Sequence: Synthetic oligonucleotide
uauguagcgaguggaaccu

SEQ ID NO: 2424898 - RNA, 19 nt, Artificial Sequence
  Description of Artificial Sequence: Synthetic oligonucleotide
gauauguagcgaguggaac

SEQ ID NO: 2424899 - RNA, 19 nt, Artificial Sequence
  Description of Artificial Sequence: Synthetic oligonucleotide
augaaauuggucuggcuuu

SEQ ID NO: 2424900 - RNA, 19 nt, Artificial Sequence
  Description of Artificial Sequence: Synthetic oligonucleotide
uggcuuugggucacaauca

SEQ ID NO: 2424901 - RNA, 19 nt, Artificial Sequence
  Description of Artificial Sequence: Synthetic oligonucleotide
agcgaguggaaccugaauu

SEQ ID NO: 2424902 - RNA, 19 nt, Artificial Sequence
  Description of Artificial Sequence: Synthetic oligonucleotide
ugacuuaugguggacugga

SEQ ID NO: 2424903 - RNA, 19 nt, Artificial Sequence
  Description of Artificial Sequence: Synthetic oligonucleotide
uacuguagucacuacucac

SEQ ID NO: 2424904 - RNA, 19 nt, Artificial Sequence
  Description of Artificial Sequence: Synthetic oligonucleotide
uguagcgaguggaaccuga

SEQ ID NO: 2424905 - RNA, 19 nt, Artificial Sequence
  Description of Artificial Sequence: Synthetic oligonucleotide
uuuaaguccggcaccuuuu

SEQ ID NO: 2424906 - RNA, 19 nt, Artificial Sequence
  Description of Artificial Sequence: Synthetic oligonucleotide
aauuuuggggcaacaggcu

SEQ ID NO: 2424907 - RNA, 19 nt, Artificial Sequence
  Description of Artificial Sequence: Synthetic oligonucleotide
gaauuugaaccggaacgcc

SEQ ID NO: 2424908 - RNA, 19 nt, Artificial Sequence
  Description of Artificial Sequence: Synthetic oligonucleotide
cuaguaguuuuaaguccgg

SEQ ID NO: 2424909 - RNA, 19 nt, Artificial Sequence
  Description of Artificial Sequence: Synthetic oligonucleotide
uaacguaauggcucaguuc

SEQ ID NO: 2424910 - RNA, 19 nt, Artificial Sequence
  Description of Artificial Sequence: Synthetic oligonucleotide
uguuguggcucucgauugc

SEQ ID NO: 2424911 - RNA, 19 nt, Artificial Sequence
  Description of Artificial Sequence: Synthetic oligonucleotide
auugucucuaaagucggca

SEQ ID NO: 2424912 - RNA, 19 nt, Artificial Sequence
  Description of Artificial Sequence: Synthetic oligonucleotide
acacuagaaacugugucca

SEQ ID NO: 2424913 - RNA, 19 nt, Artificial Sequence
  Description of Artificial Sequence: Synthetic oligonucleotide
ugucucuaaagucggcauc

SEQ ID NO: 2424914 - RNA, 19 nt, Artificial Sequence
  Description of Artificial Sequence: Synthetic oligonucleotide
auacuguagucacuacuca

SEQ ID NO: 2424915 - RNA, 19 nt, Artificial Sequence
  Description of Artificial Sequence: Synthetic oligonucleotide
uucuaucaugcggacaaug

SEQ ID NO: 2424916 - RNA, 19 nt, Artificial Sequence
  Description of Artificial Sequence: Synthetic oligonucleotide
ucagaauucuuauccugua

SEQ ID NO: 2424917 - RNA, 19 nt, Artificial Sequence
  Description of Artificial Sequence: Synthetic oligonucleotide
aguuuuaaguccggcaccu

SEQ ID NO: 2424918 - RNA, 19 nt, Artificial Sequence
  Description of Artificial Sequence: Synthetic oligonucleotide
cuuugggucacaaucauau

SEQ ID NO: 2424919 - RNA, 19 nt, Artificial Sequence
  Description of Artificial Sequence: Synthetic oligonucleotide
ugaaccggaacgcccuggc

SEQ ID NO: 2424920 - RNA, 19 nt, Artificial Sequence
  Description of Artificial Sequence: Synthetic oligonucleotide
uccagucauacucucuguc

SEQ ID NO: 2424921 - RNA, 19 nt, Artificial Sequence
  Description of Artificial Sequence: Synthetic oligonucleotide
ugaaauuggucuggcuuug

SEQ ID NO: 2424922 - RNA, 19 nt, Artificial Sequence
  Description of Artificial Sequence: Synthetic oligonucleotide
ucuuaugcuuggauucuau

SEQ ID NO: 2424923 - RNA, 19 nt, Artificial Sequence
  Description of Artificial Sequence: Synthetic oligonucleotide
cagggcuucgucuggaaug

SEQ ID NO: 2424924 - RNA, 19 nt, Artificial Sequence
  Description of Artificial Sequence: Synthetic oligonucleotide
cacuacucacuucagucug

SEQ ID NO: 2424925 - RNA, 19 nt, Artificial Sequence
  Description of Artificial Sequence: Synthetic oligonucleotide
aucagaauucuuauccugu

SEQ ID NO: 2424926 - RNA, 19 nt, Artificial Sequence
  Description of Artificial Sequence: Synthetic oligonucleotide
aggauauguagcgagugga

SEQ ID NO: 2424927 - RNA, 19 nt, Artificial Sequence
  Description of Artificial Sequence: Synthetic oligonucleotide
ucggcaucagaauucuuau

SEQ ID NO: 2424928 - RNA, 19 nt, Artificial Sequence
  Description of Artificial Sequence: Synthetic oligonucleotide
caacaggcuuucuucuucc

SEQ ID NO: 2424929 - RNA, 19 nt, Artificial Sequence
  Description of Artificial Sequence: Synthetic oligonucleotide
uaauggcucaguucucgcu

SEQ ID NO: 2424930 - RNA, 19 nt, Artificial Sequence
  Description of Artificial Sequence: Synthetic oligonucleotide
acuguagucacuacucacu

SEQ ID NO: 2424931 - RNA, 19 nt, Artificial Sequence
  Description of Artificial Sequence: Synthetic oligonucleotide
gagagagcggacuccacuc

SEQ ID NO: 2424932 - RNA, 19 nt, Artificial Sequence
  Description of Artificial Sequence: Synthetic oligonucleotide
aaauucaaccauggcccug

SEQ ID NO: 2424933 - RNA, 19 nt, Artificial Sequence
  Description of Artificial Sequence: Synthetic oligonucleotide
cuuaugcuuggauucuauc

SEQ ID NO: 2424934 - RNA, 19 nt, Artificial Sequence
  Description of Artificial Sequence: Synthetic oligonucleotide
augcuuggauucuaucaug

SEQ ID NO: 2424935 - RNA, 19 nt, Artificial Sequence
  Description of Artificial Sequence: Synthetic oligonucleotide
uuaaguccggcaccuuuuc

SEQ ID NO: 2424936 - RNA, 19 nt, Artificial Sequence
  Description of Artificial Sequence: Synthetic oligonucleotide
cugcaggcauaccauauug

SEQ ID NO: 2424937 - RNA, 19 nt, Artificial Sequence
  Description of Artificial Sequence: Synthetic oligonucleotide
uccucuucguacguguggc

SEQ ID NO: 2424938 - RNA, 19 nt, Artificial Sequence
  Description of Artificial Sequence: Synthetic oligonucleotide
gguagggaggcugacaacc

SEQ ID NO: 2424939 - RNA, 19 nt, Artificial Sequence
  Description of Artificial Sequence: Synthetic oligonucleotide
uuauccuguaaagccaaaa

SEQ ID NO: 2424940 - RNA, 19 nt, Artificial Sequence
  Description of Artificial Sequence: Synthetic oligonucleotide
uucuuguuguggcucucga

SEQ ID NO: 2424941 - RNA, 19 nt, Artificial Sequence
  Description of Artificial Sequence: Synthetic oligonucleotide
uugucucuaaagucggcau

SEQ ID NO: 2424942 - RNA, 19 nt, Artificial Sequence
  Description of Artificial Sequence: Synthetic oligonucleotide
uucaaccauggcccugucc

SEQ ID NO: 2424943 - RNA, 19 nt, Artificial Sequence
  Description of Artificial Sequence: Synthetic oligonucleotide
agucacuacucacuucagu

SEQ ID NO: 2424944 - RNA, 19 nt, Artificial Sequence
  Description of Artificial Sequence: Synthetic oligonucleotide
gacuggacggccuuaacgu

SEQ ID NO: 2424945 - RNA, 19 nt, Artificial Sequence
  Description of Artificial Sequence: Synthetic oligonucleotide
augacuuaugguggacugg

SEQ ID NO: 2424946 - RNA, 19 nt, Artificial Sequence
  Description of Artificial Sequence: Synthetic oligonucleotide
ugcuuauacugcacaaauu

SEQ ID NO: 2424947 - RNA, 19 nt, Artificial Sequence
  Description of Artificial Sequence: Synthetic oligonucleotide
uuccucuuaugcuuggauu

SEQ ID NO: 2424948 - RNA, 19 nt, Artificial Sequence
  Description of Artificial Sequence: Synthetic oligonucleotide
ugugugacuacagccaauu

SEQ ID NO: 2424949 - RNA, 19 nt, Artificial Sequence
  Description of Artificial Sequence: Synthetic oligonucleotide
aagucggcaucagaauucu

SEQ ID NO: 2424950 - RNA, 19 nt, Artificial Sequence
  Description of Artificial Sequence: Synthetic oligonucleotide
ccacuaguaguuuuaaguc

SEQ ID NO: 2424951 - RNA, 19 nt, Artificial Sequence
  Description of Artificial Sequence: Synthetic oligonucleotide
gaaauuggucuggcuuugg

SEQ ID NO: 2424952 - RNA, 19 nt, Artificial Sequence
  Description of Artificial Sequence: Synthetic oligonucleotide
uaguaguuuuaaguccggc

SEQ ID NO: 2424953 - RNA, 19 nt, Artificial Sequence
  Description of Artificial Sequence: Synthetic oligonucleotide
uuugaaccggaacgcccug

SEQ ID NO: 2424954 - RNA, 19 nt, Artificial Sequence
  Description of Artificial Sequence: Synthetic oligonucleotide
guaauggcucaguucucgc

SEQ ID NO: 2424955 - RNA, 19 nt, Artificial Sequence
  Description of Artificial Sequence: Synthetic oligonucleotide
auuugaaccggaacgcccu

SEQ ID NO: 2424956 - RNA, 19 nt, Artificial Sequence
  Description of Artificial Sequence: Synthetic oligonucleotide
ucuucguacguguggccac

SEQ ID NO: 2424957 - RNA, 19 nt, Artificial Sequence
  Description of Artificial Sequence: Synthetic oligonucleotide
uacguguggccacacacuu

SEQ ID NO: 2424958 - RNA, 19 nt, Artificial Sequence
  Description of Artificial Sequence: Synthetic oligonucleotide
uggggcagaugaaauuggu

SEQ ID NO: 2424959 - RNA, 19 nt, Artificial Sequence
  Description of Artificial Sequence: Synthetic oligonucleotide
ugaggucggacauucucau

SEQ ID NO: 2424960 - RNA, 19 nt, Artificial Sequence
  Description of Artificial Sequence: Synthetic oligonucleotide
uagucacuacucacuucag

SEQ ID NO: 2424961 - RNA, 19 nt, Artificial Sequence
  Description of Artificial Sequence: Synthetic oligonucleotide
caaggcaacacuagaaacu

SEQ ID NO: 2424962 - RNA, 19 nt, Artificial Sequence
  Description of Artificial Sequence: Synthetic oligonucleotide
gcguucuucuuuuacauga

SEQ ID NO: 2424963 - RNA, 19 nt, Artificial Sequence
  Description of Artificial Sequence: Synthetic oligonucleotide
uguccauacuguagucacu

SEQ ID NO: 2424964 - RNA, 19 nt, Artificial Sequence
  Description of Artificial Sequence: Synthetic oligonucleotide
aacaggcuuucuucuuccu

SEQ ID NO: 2424965 - RNA, 19 nt, Artificial Sequence
  Description of Artificial Sequence: Synthetic oligonucleotide
uuaugguggacuggacggc

SEQ ID NO: 2424966 - RNA, 19 nt, Artificial Sequence
  Description of Artificial Sequence: Synthetic oligonucleotide
ucaguucucgcuccauuuu

SEQ ID NO: 2424967 - RNA, 19 nt, Artificial Sequence
  Description of Artificial Sequence: Synthetic oligonucleotide
caugcggacaauggcgucc

SEQ ID NO: 2424968 - RNA, 19 nt, Artificial Sequence
  Description of Artificial Sequence: Synthetic oligonucleotide
cauugucucuaaagucggc

SEQ ID NO: 2424969 - RNA, 19 nt, Artificial Sequence
  Description of Artificial Sequence: Synthetic oligonucleotide
uggauucuaucaugcggac

SEQ ID NO: 2424970 - RNA, 19 nt, Artificial Sequence
  Description of Artificial Sequence: Synthetic oligonucleotide
ucaugucugugugacuaca

SEQ ID NO: 2424971 - RNA, 19 nt, Artificial Sequence
  Description of Artificial Sequence: Synthetic oligonucleotide
ucugcaggcauaccauauu

SEQ ID NO: 2424972 - RNA, 19 nt, Artificial Sequence
  Description of Artificial Sequence: Synthetic oligonucleotide
gaauuguuacccggcugcc

SEQ ID NO: 2424973 - RNA, 19 nt, Artificial Sequence
  Description of Artificial Sequence: Synthetic oligonucleotide
gucucuaaagucggcauca

SEQ ID NO: 2424974 - RNA, 19 nt, Artificial Sequence
  Description of Artificial Sequence: Synthetic oligonucleotide
uucccgagcugaugcaggc

SEQ ID NO: 2424975 - RNA, 19 nt, Artificial Sequence
  Description of Artificial Sequence: Synthetic oligonucleotide
gacauucucaugucugugu

SEQ ID NO: 2424976 - RNA, 19 nt, Artificial Sequence
  Description of Artificial Sequence: Synthetic oligonucleotide
uaaguccggcaccuuuucu

SEQ ID NO: 2424977 - RNA, 19 nt, Artificial Sequence
  Description of Artificial Sequence: Synthetic oligonucleotide
aacgcccuggcaucuugga

SEQ ID NO: 2424978 - RNA, 19 nt, Artificial Sequence
  Description of Artificial Sequence: Synthetic oligonucleotide
cuccacuaguaguuuuaag

SEQ ID NO: 2424979 - RNA, 19 nt, Artificial Sequence
  Description of Artificial Sequence: Synthetic oligonucleotide
uguggccacacacuuuauu

SEQ ID NO: 2424980 - RNA, 19 nt, Artificial Sequence
  Description of Artificial Sequence: Synthetic oligonucleotide
uugaaccggaacgcccugg

SEQ ID NO: 2424981 - RNA, 19 nt, Artificial Sequence
  Description of Artificial Sequence: Synthetic oligonucleotide
gcuuggauucuaucaugcg

SEQ ID NO: 2424982 - RNA, 19 nt, Artificial Sequence
  Description of Artificial Sequence: Synthetic oligonucleotide
acaugacuuaugguggacu

SEQ ID NO: 2424983 - RNA, 19 nt, Artificial Sequence
  Description of Artificial Sequence: Synthetic oligonucleotide
acaauggcguccucuucgu

SEQ ID NO: 2424984 - RNA, 19 nt, Artificial Sequence
  Description of Artificial Sequence: Synthetic oligonucleotide
acugaaggauauguagcga

SEQ ID NO: 2424985 - RNA, 19 nt, Artificial Sequence
  Description of Artificial Sequence: Synthetic oligonucleotide
gcuuauacugcacaaauuu

SEQ ID NO: 2424986 - RNA, 19 nt, Artificial Sequence
  Description of Artificial Sequence: Synthetic oligonucleotide
ucucuaaagucggcaucag

SEQ ID NO: 2424987 - RNA, 19 nt, Artificial Sequence
  Description of Artificial Sequence: Synthetic oligonucleotide
uccuacucagaguggcgcu

SEQ ID NO: 2424988 - RNA, 19 nt, Artificial Sequence
  Description of Artificial Sequence: Synthetic oligonucleotide
guggaaccugaauuugaac

SEQ ID NO: 2424989 - RNA, 19 nt, Artificial Sequence
  Description of Artificial Sequence: Synthetic oligonucleotide
augaggucggacauucuca

SEQ ID NO: 2424990 - RNA, 19 nt, Artificial Sequence
  Description of Artificial Sequence: Synthetic oligonucleotide
caacccugugggcaggcag

SEQ ID NO: 2424991 - RNA, 19 nt, Artificial Sequence
  Description of Artificial Sequence: Synthetic oligonucleotide
auucccgagcugaugcagg

SEQ ID NO: 2424992 - RNA, 19 nt, Artificial Sequence
  Description of Artificial Sequence: Synthetic oligonucleotide
acuagaaacuguguccauu

SEQ ID NO: 2424993 - RNA, 19 nt, Artificial Sequence
  Description of Artificial Sequence: Synthetic oligonucleotide
uggcuuguuccuacucaga

SEQ ID NO: 2424994 - RNA, 19 nt, Artificial Sequence
  Description of Artificial Sequence: Synthetic oligonucleotide
uccauacuguagucacuac

SEQ ID NO: 2424995 - RNA, 19 nt, Artificial Sequence
  Description of Artificial Sequence: Synthetic oligonucleotide
uggggcaacaggcuuucuu

SEQ ID NO: 2424996 - RNA, 19 nt, Artificial Sequence
  Description of Artificial Sequence: Synthetic oligonucleotide
aguggaaccugaauuugaa

SEQ ID NO: 2424997 - RNA, 19 nt, Artificial Sequence
  Description of Artificial Sequence: Synthetic oligonucleotide
ucucugucugcaggcauac

SEQ ID NO: 2424998 - RNA, 19 nt, Artificial Sequence
  Description of Artificial Sequence: Synthetic oligonucleotide
cucaugucugugugacuac

SEQ ID NO: 2424999 - RNA, 19 nt, Artificial Sequence
  Description of Artificial Sequence: Synthetic oligonucleotide
gaguggaaccugaauuuga

SEQ ID NO: 2425000 - RNA, 19 nt, Artificial Sequence
  Description of Artificial Sequence: Synthetic oligonucleotide
ucuccacuaguaguuuuaa

SEQ ID NO: 2425001 - RNA, 19 nt, Artificial Sequence
  Description of Artificial Sequence: Synthetic oligonucleotide
cauucccgagcugaugcag

SEQ ID NO: 2425002 - RNA, 19 nt, Artificial Sequence
  Description of Artificial Sequence: Synthetic oligonucleotide
cagucugagucuccacaag

SEQ ID NO: 2425003 - RNA, 19 nt, Artificial Sequence
  Description of Artificial Sequence: Synthetic oligonucleotide
guguccauucccgagcuga

SEQ ID NO: 2425004 - RNA, 19 nt, Artificial Sequence
  Description of Artificial Sequence: Synthetic oligonucleotide
cugggcguucuucuuuuac

SEQ ID NO: 2425005 - RNA, 19 nt, Artificial Sequence
  Description of Artificial Sequence: Synthetic oligonucleotide
ggggcaacaggcuuucuuc

SEQ ID NO: 2425006 - RNA, 19 nt, Artificial Sequence
  Description of Artificial Sequence: Synthetic oligonucleotide
uggacggccuuaacguaau

SEQ ID NO: 2425007 - RNA, 19 nt, Artificial Sequence
  Description of Artificial Sequence: Synthetic oligonucleotide
gaacgcccuggcaucuugg

SEQ ID NO: 2425008 - RNA, 19 nt, Artificial Sequence
  Description of Artificial Sequence: Synthetic oligonucleotide
cuucgucuggaaugagguc

SEQ ID NO: 2425009 - RNA, 19 nt, Artificial Sequence
  Description of Artificial Sequence: Synthetic oligonucleotide
uagcgaguggaaccugaau

SEQ ID NO: 2425010 - RNA, 19 nt, Artificial Sequence
  Description of Artificial Sequence: Synthetic oligonucleotide
gaggucggacauucucaug

SEQ ID NO: 2425011 - RNA, 19 nt, Artificial Sequence
  Description of Artificial Sequence: Synthetic oligonucleotide
uucugggcguucuucuuuu

SEQ ID NO: 2425012 - RNA, 19 nt, Artificial Sequence
  Description of Artificial Sequence: Synthetic oligonucleotide
caucaaucccuuccgucca

SEQ ID NO: 2425013 - RNA, 19 nt, Artificial Sequence
  Description of Artificial Sequence: Synthetic oligonucleotide
cauucucaugucuguguga

SEQ ID NO: 2425014 - RNA, 19 nt, Artificial Sequence
  Description of Artificial Sequence: Synthetic oligonucleotide
uguguccauucccgagcug

SEQ ID NO: 2425015 - RNA, 19 nt, Artificial Sequence
  Description of Artificial Sequence: Synthetic oligonucleotide
agagcggacuccacuccac

SEQ ID NO: 2425016 - RNA, 19 nt, Artificial Sequence
  Description of Artificial Sequence: Synthetic oligonucleotide
auucaaccauggcccuguc

SEQ ID NO: 2425017 - RNA, 19 nt, Artificial Sequence
  Description of Artificial Sequence: Synthetic oligonucleotide
agggcuucgucuggaauga

SEQ ID NO: 2425018 - RNA, 19 nt, Artificial Sequence
  Description of Artificial Sequence: Synthetic oligonucleotide
gauugcccuccucagggcu

SEQ ID NO: 2425019 - RNA, 19 nt, Artificial Sequence
  Description of Artificial Sequence: Synthetic oligonucleotide
ggcuucgucuggaaugagg

SEQ ID NO: 2425020 - RNA, 19 nt, Artificial Sequence
  Description of Artificial Sequence: Synthetic oligonucleotide
gcaacaggcuuucuucuuc

SEQ ID NO: 2425021 - RNA, 19 nt, Artificial Sequence
  Description of Artificial Sequence: Synthetic oligonucleotide
cuaaagucggcaucagaau

SEQ ID NO: 2425022 - RNA, 19 nt, Artificial Sequence
  Description of Artificial Sequence: Synthetic oligonucleotide
ucaugcggacaauggcguc

SEQ ID NO: 2425023 - RNA, 19 nt, Artificial Sequence
  Description of Artificial Sequence: Synthetic oligonucleotide
guccauacuguagucacua

SEQ ID NO: 2425024 - RNA, 19 nt, Artificial Sequence
  Description of Artificial Sequence: Synthetic oligonucleotide
cucuaaagucggcaucaga

SEQ ID NO: 2425025 - RNA, 19 nt, Artificial Sequence
  Description of Artificial Sequence: Synthetic oligonucleotide
cuggacggccuuaacguaa

SEQ ID NO: 2425026 - RNA, 19 nt, Artificial Sequence
  Description of Artificial Sequence: Synthetic oligonucleotide
caaucccuuccguccaguc

SEQ ID NO: 2425027 - RNA, 19 nt, Artificial Sequence
  Description of Artificial Sequence: Synthetic oligonucleotide
ggcguucuucuuuuacaug

SEQ ID NO: 2425028 - RNA, 19 nt, Artificial Sequence
  Description of Artificial Sequence: Synthetic oligonucleotide
cguaauggcucaguucucg

SEQ ID NO: 2425029 - RNA, 19 nt, Artificial Sequence
  Description of Artificial Sequence: Synthetic oligonucleotide
gguccaaggcaacacuaga

SEQ ID NO: 2425030 - RNA, 19 nt, Artificial Sequence
  Description of Artificial Sequence: Synthetic oligonucleotide
cacucuuggguggcugggg

SEQ ID NO: 2425031 - RNA, 19 nt, Artificial Sequence
  Description of Artificial Sequence: Synthetic oligonucleotide
ucaaucccuuccguccagu

SEQ ID NO: 2425032 - RNA, 19 nt, Artificial Sequence
  Description of Artificial Sequence: Synthetic oligonucleotide
acuacucacuucagucuga

SEQ ID NO: 2425033 - RNA, 19 nt, Artificial Sequence
  Description of Artificial Sequence: Synthetic oligonucleotide
cguacguguggccacacac

SEQ ID NO: 2425034 - RNA, 19 nt, Artificial Sequence
  Description of Artificial Sequence: Synthetic oligonucleotide
gguuauggggcagaugaaa

SEQ ID NO: 2425035 - RNA, 19 nt, Artificial Sequence
  Description of Artificial Sequence: Synthetic oligonucleotide
cucuucguacguguggcca

SEQ ID NO: 2425036 - RNA, 19 nt, Artificial Sequence
  Description of Artificial Sequence: Synthetic oligonucleotide
gcaggcauaccauauugcu

SEQ ID NO: 2425037 - RNA, 19 nt, Artificial Sequence
  Description of Artificial Sequence: Synthetic oligonucleotide
gacuuaugguggacuggac

SEQ ID NO: 2425038 - RNA, 19 nt, Artificial Sequence
  Description of Artificial Sequence: Synthetic oligonucleotide
guuauggggcagaugaaau

SEQ ID NO: 2425039 - RNA, 19 nt, Artificial Sequence
  Description of Artificial Sequence: Synthetic oligonucleotide
gccuuaacguaauggcuca

SEQ ID NO: 2425040 - RNA, 19 nt, Artificial Sequence
  Description of Artificial Sequence: Synthetic oligonucleotide
gaaccggaacgcccuggca

SEQ ID NO: 2425041 - RNA, 19 nt, Artificial Sequence
  Description of Artificial Sequence: Synthetic oligonucleotide
acguaauggcucaguucuc

SEQ ID NO: 2425042 - RNA, 19 nt, Artificial Sequence
  Description of Artificial Sequence: Synthetic oligonucleotide
gucuggaaugaggucggac

SEQ ID NO: 2425043 - RNA, 19 nt, Artificial Sequence
  Description of Artificial Sequence: Synthetic oligonucleotide
gacaacccugugggcaggc

SEQ ID NO: 2425044 - RNA, 19 nt, Artificial Sequence
  Description of Artificial Sequence: Synthetic oligonucleotide
caaauucaaccauggcccu

SEQ ID NO: 2425045 - RNA, 19 nt, Artificial Sequence
  Description of Artificial Sequence: Synthetic oligonucleotide
cuuauccuguaaagccaaa

SEQ ID NO: 2425046 - RNA, 19 nt, Artificial Sequence
  Description of Artificial Sequence: Synthetic oligonucleotide
uggucuggcuuugggucac

SEQ ID NO: 2425047 - RNA, 19 nt, Artificial Sequence
  Description of Artificial Sequence: Synthetic oligonucleotide
aggagagagcggacuccac

SEQ ID NO: 2425048 - RNA, 19 nt, Artificial Sequence
  Description of Artificial Sequence: Synthetic oligonucleotide
ggaacgcccuggcaucuug

SEQ ID NO: 2425049 - RNA, 19 nt, Artificial Sequence
  Description of Artificial Sequence: Synthetic oligonucleotide
cuuaacguaauggcucagu

SEQ ID NO: 2425050 - RNA, 19 nt, Artificial Sequence
  Description of Artificial Sequence: Synthetic oligonucleotide
augcggacaauggcguccu

SEQ ID NO: 2425051 - RNA, 19 nt, Artificial Sequence
  Description of Artificial Sequence: Synthetic oligonucleotide
uacucagaguggcgcuuuu

SEQ ID NO: 2425052 - RNA, 19 nt, Artificial Sequence
  Description of Artificial Sequence: Synthetic oligonucleotide
accugaauuugaaccggaa

SEQ ID NO: 2425053 - RNA, 19 nt, Artificial Sequence
  Description of Artificial Sequence: Synthetic oligonucleotide
agccaauuuuggggcaaca

SEQ ID NO: 2425054 - RNA, 19 nt, Artificial Sequence
  Description of Artificial Sequence: Synthetic oligonucleotide
cuccacugaaggauaugua

SEQ ID NO: 2425055 - RNA, 19 nt, Artificial Sequence
  Description of Artificial Sequence: Synthetic oligonucleotide
gucugagucuccacaaggu

SEQ ID NO: 2425056 - RNA, 19 nt, Artificial Sequence
  Description of Artificial Sequence: Synthetic oligonucleotide
uggcguccucuucguacgu

SEQ ID NO: 2425057 - RNA, 19 nt, Artificial Sequence
  Description of Artificial Sequence: Synthetic oligonucleotide
cuggaaugaggucggacau

SEQ ID NO: 2425058 - RNA, 19 nt, Artificial Sequence
  Description of Artificial Sequence: Synthetic oligonucleotide
ggauauguagcgaguggaa

SEQ ID NO: 2425059 - RNA, 19 nt, Artificial Sequence
  Description of Artificial Sequence: Synthetic oligonucleotide
acgcccuggcaucuuggaa

SEQ ID NO: 2425060 - RNA, 19 nt, Artificial Sequence
  Description of Artificial Sequence: Synthetic oligonucleotide
cacuccacugaaggauaug

SEQ ID NO: 2425061 - RNA, 19 nt, Artificial Sequence
  Description of Artificial Sequence: Synthetic oligonucleotide
ucugggcguucuucuuuua

SEQ ID NO: 2425062 - RNA, 19 nt, Artificial Sequence
  Description of Artificial Sequence: Synthetic oligonucleotide
auguagcgaguggaaccug

SEQ ID NO: 2425063 - RNA, 19 nt, Artificial Sequence
  Description of Artificial Sequence: Synthetic oligonucleotide
uucguacguguggccacac

SEQ ID NO: 2425064 - RNA, 19 nt, Artificial Sequence
  Description of Artificial Sequence: Synthetic oligonucleotide
gcggacuccacuccacuga

SEQ ID NO: 2425065 - RNA, 19 nt, Artificial Sequence
  Description of Artificial Sequence: Synthetic oligonucleotide
ggagagagcggacuccacu

SEQ ID NO: 2425066 - RNA, 19 nt, Artificial Sequence
  Description of Artificial Sequence: Synthetic oligonucleotide
cuggguuauggggcagaug

SEQ ID NO: 2425067 - RNA, 19 nt, Artificial Sequence
  Description of Artificial Sequence: Synthetic oligonucleotide
ggauucuaucaugcggaca

SEQ ID NO: 2425068 - RNA, 19 nt, Artificial Sequence
  Description of Artificial Sequence: Synthetic oligonucleotide
ggggcagaugaaauugguc

SEQ ID NO: 2425069 - RNA, 19 nt, Artificial Sequence
  Description of Artificial Sequence: Synthetic oligonucleotide
ccggcaccuuuucugggcg

SEQ ID NO: 2425070 - RNA, 19 nt, Artificial Sequence
  Description of Artificial Sequence: Synthetic oligonucleotide
ccucagcugcugcuuauac

SEQ ID NO: 2425071 - RNA, 19 nt, Artificial Sequence
  Description of Artificial Sequence: Synthetic oligonucleotide
ucccgagcugaugcaggcu

SEQ ID NO: 2425072 - RNA, 19 nt, Artificial Sequence
  Description of Artificial Sequence: Synthetic oligonucleotide
cuguagucacuacucacuu

SEQ ID NO: 2425073 - RNA, 19 nt, Artificial Sequence
  Description of Artificial Sequence: Synthetic oligonucleotide
cagccaauuuuggggcaac

SEQ ID NO: 2425074 - RNA, 19 nt, Artificial Sequence
  Description of Artificial Sequence: Synthetic oligonucleotide
gcugcuuauacugcacaaa

SEQ ID NO: 2425075 - RNA, 19 nt, Artificial Sequence
  Description of Artificial Sequence: Synthetic oligonucleotide
caggcauaccauauugcuu

SEQ ID NO: 2425076 - RNA, 19 nt, Artificial Sequence
  Description of Artificial Sequence: Synthetic oligonucleotide
guagcgaguggaaccugaa

SEQ ID NO: 2425077 - RNA, 19 nt, Artificial Sequence
  Description of Artificial Sequence: Synthetic oligonucleotide
guacguguggccacacacu

SEQ ID NO: 2425078 - RNA, 19 nt, Artificial Sequence
  Description of Artificial Sequence: Synthetic oligonucleotide
cuucguacguguggccaca

SEQ ID NO: 2425079 - RNA, 19 nt, Artificial Sequence
  Description of Artificial Sequence: Synthetic oligonucleotide
cucugucugcaggcauacc

SEQ ID NO: 2425080 - RNA, 19 nt, Artificial Sequence
  Description of Artificial Sequence: Synthetic oligonucleotide
ccucuucguacguguggcc

SEQ ID NO: 2425081 - RNA, 19 nt, Artificial Sequence
  Description of Artificial Sequence: Synthetic oligonucleotide
gagcggacuccacuccacu

SEQ ID NO: 2425082 - RNA, 19 nt, Artificial Sequence
  Description of Artificial Sequence: Synthetic oligonucleotide
gcgaguggaaccugaauuu

SEQ ID NO: 2425083 - RNA, 19 nt, Artificial Sequence
  Description of Artificial Sequence: Synthetic oligonucleotide
gggcguucuucuuuuacau

SEQ ID NO: 2425084 - RNA, 19 nt, Artificial Sequence
  Description of Artificial Sequence: Synthetic oligonucleotide
ccagucauacucucugucu

SEQ ID NO: 2425085 - RNA, 19 nt, Artificial Sequence
  Description of Artificial Sequence: Synthetic oligonucleotide
ucccuuccguccagucaua

SEQ ID NO: 2425086 - RNA, 19 nt, Artificial Sequence
  Description of Artificial Sequence: Synthetic oligonucleotide
acaacccugugggcaggca

SEQ ID NO: 2425087 - RNA, 19 nt, Artificial Sequence
  Description of Artificial Sequence: Synthetic oligonucleotide
cucuuaugcuuggauucua

SEQ ID NO: 2425088 - RNA, 19 nt, Artificial Sequence
  Description of Artificial Sequence: Synthetic oligonucleotide
gcccuguccauacuguagu

SEQ ID NO: 2425089 - RNA, 19 nt, Artificial Sequence
  Description of Artificial Sequence: Synthetic oligonucleotide
cucagggcuucgucuggaa

SEQ ID NO: 2425090 - RNA, 19 nt, Artificial Sequence
  Description of Artificial Sequence: Synthetic oligonucleotide
guggacuggacggccuuaa

SEQ ID NO: 2425091 - RNA, 19 nt, Artificial Sequence
  Description of Artificial Sequence: Synthetic oligonucleotide
ugcccuccucagggcuucg

SEQ ID NO: 2425092 - RNA, 19 nt, Artificial Sequence
  Description of Artificial Sequence: Synthetic oligonucleotide
ccuuaacguaauggcucag

SEQ ID NO: 2425093 - RNA, 19 nt, Artificial Sequence
  Description of Artificial Sequence: Synthetic oligonucleotide
ccgagcugaugcaggcuug

SEQ ID NO: 2425094 - RNA, 19 nt, Artificial Sequence
  Description of Artificial Sequence: Synthetic oligonucleotide
ugcggacaauggcguccuc

SEQ ID NO: 2425095 - RNA, 19 nt, Artificial Sequence
  Description of Artificial Sequence: Synthetic oligonucleotide
ggacggccuuaacguaaug

SEQ ID NO: 2425096 - RNA, 19 nt, Artificial Sequence
  Description of Artificial Sequence: Synthetic oligonucleotide
ggcuuugggucacaaucau

SEQ ID NO: 2425097 - RNA, 19 nt, Artificial Sequence
  Description of Artificial Sequence: Synthetic oligonucleotide
cauuuccagcuggguuaug

SEQ ID NO: 2425098 - RNA, 19 nt, Artificial Sequence
  Description of Artificial Sequence: Synthetic oligonucleotide
uuggggcaacaggcuuucu

SEQ ID NO: 2425099 - RNA, 19 nt, Artificial Sequence
  Description of Artificial Sequence: Synthetic oligonucleotide
cgauugcccuccucagggc

SEQ ID NO: 2425100 - RNA, 19 nt, Artificial Sequence
  Description of Artificial Sequence: Synthetic oligonucleotide
gugugacuacagccaauuu

SEQ ID NO: 2425101 - RNA, 19 nt, Artificial Sequence
  Description of Artificial Sequence: Synthetic oligonucleotide
cugugugacuacagccaau

SEQ ID NO: 2425102 - RNA, 19 nt, Artificial Sequence
  Description of Artificial Sequence: Synthetic oligonucleotide
ccauucccgagcugaugca

SEQ ID NO: 2425103 - RNA, 19 nt, Artificial Sequence
  Description of Artificial Sequence: Synthetic oligonucleotide
caauggcguccucuucgua

SEQ ID NO: 2425104 - RNA, 19 nt, Artificial Sequence
  Description of Artificial Sequence: Synthetic oligonucleotide
gucuggcuuugggucacaa

SEQ ID NO: 2425105 - RNA, 19 nt, Artificial Sequence
  Description of Artificial Sequence: Synthetic oligonucleotide
caccuuuucugggcguucu

SEQ ID NO: 2425106 - RNA, 19 nt, Artificial Sequence
  Description of Artificial Sequence: Synthetic oligonucleotide
gagucuccacaagguccaa

SEQ ID NO: 2425107 - RNA, 19 nt, Artificial Sequence
  Description of Artificial Sequence: Synthetic oligonucleotide
ggguuauggggcagaugaa

SEQ ID NO: 2425108 - RNA, 19 nt, Artificial Sequence
  Description of Artificial Sequence: Synthetic oligonucleotide
agucggcaucagaauucuu

SEQ ID NO: 2425109 - RNA, 19 nt, Artificial Sequence
  Description of Artificial Sequence: Synthetic oligonucleotide
guuuuaaguccggcaccuu

SEQ ID NO: 2425110 - RNA, 19 nt, Artificial Sequence
  Description of Artificial Sequence: Synthetic oligonucleotide
gcggacaauggcguccucu

SEQ ID NO: 2425111 - RNA, 19 nt, Artificial Sequence
  Description of Artificial Sequence: Synthetic oligonucleotide
cccuuccguccagucauac

SEQ ID NO: 2425112 - RNA, 19 nt, Artificial Sequence
  Description of Artificial Sequence: Synthetic oligonucleotide
cggccuuaacguaauggcu

SEQ ID NO: 2425113 - RNA, 19 nt, Artificial Sequence
  Description of Artificial Sequence: Synthetic oligonucleotide
gguggacuggacggccuua

SEQ ID NO: 2425114 - RNA, 19 nt, Artificial Sequence
  Description of Artificial Sequence: Synthetic oligonucleotide
cgcccuggcaucuuggaau

SEQ ID NO: 2425115 - RNA, 19 nt, Artificial Sequence
  Description of Artificial Sequence: Synthetic oligonucleotide
ccuuccguccagucauacu

SEQ ID NO: 2425116 - RNA, 19 nt, Artificial Sequence
  Description of Artificial Sequence: Synthetic oligonucleotide
cccgagcugaugcaggcuu

SEQ ID NO: 2425117 - RNA, 19 nt, Artificial Sequence
  Description of Artificial Sequence: Synthetic oligonucleotide
ggcaccuuuucugggcguu

SEQ ID NO: 2425118 - RNA, 19 nt, Artificial Sequence
  Description of Artificial Sequence: Synthetic oligonucleotide
gcuggguuauggggcagau

SEQ ID NO: 2425119 - RNA, 19 nt, Artificial Sequence
  Description of Artificial Sequence: Synthetic oligonucleotide
ccacuccacugaaggauau

SEQ ID NO: 2425120 - RNA, 19 nt, Artificial Sequence
  Description of Artificial Sequence: Synthetic oligonucleotide
cggacaauggcguccucuu

SEQ ID NO: 2425121 - RNA, 19 nt, Artificial Sequence
  Description of Artificial Sequence: Synthetic oligonucleotide
gcauaccauauugcuucuu

SEQ ID NO: 2425122 - RNA, 19 nt, Artificial Sequence
  Description of Artificial Sequence: Synthetic oligonucleotide
ccuacucagaguggcgcuu

SEQ ID NO: 2425123 - RNA, 19 nt, Artificial Sequence
  Description of Artificial Sequence: Synthetic oligonucleotide
gggcaggcagguggcuugu

SEQ ID NO: 2425124 - RNA, 19 nt, Artificial Sequence
  Description of Artificial Sequence: Synthetic oligonucleotide
cgucuggaaugaggucgga

SEQ ID NO: 2425125 - RNA, 19 nt, Artificial Sequence
  Description of Artificial Sequence: Synthetic oligonucleotide
ccggaacgcccuggcaucu

SEQ ID NO: 2425126 - RNA, 19 nt, Artificial Sequence
  Description of Artificial Sequence: Synthetic oligonucleotide
gcccuccucagggcuucgu

SEQ ID NO: 2425127 - RNA, 19 nt, Artificial Sequence
  Description of Artificial Sequence: Synthetic oligonucleotide
cggcaccuuuucugggcgu

SEQ ID NO: 2425128 - RNA, 19 nt, Artificial Sequence
  Description of Artificial Sequence: Synthetic oligonucleotide
cggaacgcccuggcaucuu

SEQ ID NO: 2425129 - RNA, 19 nt, Artificial Sequence
  Description of Artificial Sequence: Synthetic oligonucleotide
uuaauguugaccauagugg

SEQ ID NO: 2425130 - RNA, 19 nt, Artificial Sequence
  Description of Artificial Sequence: Synthetic oligonucleotide
guuaauguugaccauagug

SEQ ID NO: 2425131 - RNA, 19 nt, Artificial Sequence
  Description of Artificial Sequence: Synthetic oligonucleotide
aagacaauguaguuggcug

SEQ ID NO: 2425132 - RNA, 19 nt, Artificial Sequence
  Description of Artificial Sequence: Synthetic oligonucleotide
auaaugaugcugcuguugg

SEQ ID NO: 2425133 - RNA, 19 nt, Artificial Sequence
  Description of Artificial Sequence: Synthetic oligonucleotide
uuuccuucuauuacuacag

SEQ ID NO: 2425134 - RNA, 19 nt, Artificial Sequence
  Description of Artificial Sequence: Synthetic oligonucleotide
ucaaaggaggccaagacaa

SEQ ID NO: 2425135 - RNA, 19 nt, Artificial Sequence
  Description of Artificial Sequence: Synthetic oligonucleotide
aaagcuggauguuuccuuc

SEQ ID NO: 2425136 - RNA, 19 nt, Artificial Sequence
  Description of Artificial Sequence: Synthetic oligonucleotide
auuacuacagugucuuccg

SEQ ID NO: 2425137 - RNA, 19 nt, Artificial Sequence
  Description of Artificial Sequence: Synthetic oligonucleotide
aaagauauggcggacgccu

SEQ ID NO: 2425138 - RNA, 19 nt, Artificial Sequence
  Description of Artificial Sequence: Synthetic oligonucleotide
gauaggugcagccacaguc

SEQ ID NO: 2425139 - RNA, 19 nt, Artificial Sequence
  Description of Artificial Sequence: Synthetic oligonucleotide
uauuacuacagugucuucc

SEQ ID NO: 2425140 - RNA, 19 nt, Artificial Sequence
  Description of Artificial Sequence: Synthetic oligonucleotide
agcucguuaauguugacca

SEQ ID NO: 2425141 - RNA, 19 nt, Artificial Sequence
  Description of Artificial Sequence: Synthetic oligonucleotide
uaaucagagaagguguggg

SEQ ID NO: 2425142 - RNA, 19 nt, Artificial Sequence
  Description of Artificial Sequence: Synthetic oligonucleotide
ucguuaauguugaccauag

SEQ ID NO: 2425143 - RNA, 19 nt, Artificial Sequence
  Description of Artificial Sequence: Synthetic oligonucleotide
uggcugauaaugaugcugc

SEQ ID NO: 2425144 - RNA, 19 nt, Artificial Sequence
  Description of Artificial Sequence: Synthetic oligonucleotide
cuguggcugauaaugaugc

SEQ ID NO: 2425145 - RNA, 19 nt, Artificial Sequence
  Description of Artificial Sequence: Synthetic oligonucleotide
aaaagauauggcggacgcc

SEQ ID NO: 2425146 - RNA, 19 nt, Artificial Sequence
  Description of Artificial Sequence: Synthetic oligonucleotide
gccaagacaauguaguugg

SEQ ID NO: 2425147 - RNA, 19 nt, Artificial Sequence
  Description of Artificial Sequence: Synthetic oligonucleotide
aaugaugcugcuguuggug

SEQ ID NO: 2425148 - RNA, 19 nt, Artificial Sequence
  Description of Artificial Sequence: Synthetic oligonucleotide
ucauuccacuguucgaugg

SEQ ID NO: 2425149 - RNA, 19 nt, Artificial Sequence
  Description of Artificial Sequence: Synthetic oligonucleotide
uguucgauggucacaggug

SEQ ID NO: 2425150 - RNA, 19 nt, Artificial Sequence
  Description of Artificial Sequence: Synthetic oligonucleotide
uguggcaucauuccacugu

SEQ ID NO: 2425151 - RNA, 19 nt, Artificial Sequence
  Description of Artificial Sequence: Synthetic oligonucleotide
ucuguggcugauaaugaug

SEQ ID NO: 2425152 - RNA, 19 nt, Artificial Sequence
  Description of Artificial Sequence: Synthetic oligonucleotide
uccuucuauuacuacagug

SEQ ID NO: 2425153 - RNA, 19 nt, Artificial Sequence
  Description of Artificial Sequence: Synthetic oligonucleotide
guucgauggucacaggugg

SEQ ID NO: 2425154 - RNA, 19 nt, Artificial Sequence
  Description of Artificial Sequence: Synthetic oligonucleotide
ucuauuacuacagugucuu

SEQ ID NO: 2425155 - RNA, 19 nt, Artificial Sequence
  Description of Artificial Sequence: Synthetic oligonucleotide
uggucuguggcugauaaug

SEQ ID NO: 2425156 - RNA, 19 nt, Artificial Sequence
  Description of Artificial Sequence: Synthetic oligonucleotide
agaacuggguguccuggcc

SEQ ID NO: 2425157 - RNA, 19 nt, Artificial Sequence
  Description of Artificial Sequence: Synthetic oligonucleotide
agugucuuccggcagaggu

SEQ ID NO: 2425158 - RNA, 19 nt, Artificial Sequence
  Description of Artificial Sequence: Synthetic oligonucleotide
acagguggaggaucaaagg

SEQ ID NO: 2425159 - RNA, 19 nt, Artificial Sequence
  Description of Artificial Sequence: Synthetic oligonucleotide
ugggugaacagcuccagca

SEQ ID NO: 2425160 - RNA, 19 nt, Artificial Sequence
  Description of Artificial Sequence: Synthetic oligonucleotide
gaucaaaggaggccaagac

SEQ ID NO: 2425161 - RNA, 19 nt, Artificial Sequence
  Description of Artificial Sequence: Synthetic oligonucleotide
gauaaugaugcugcuguug

SEQ ID NO: 2425162 - RNA, 19 nt, Artificial Sequence
  Description of Artificial Sequence: Synthetic oligonucleotide
aaaggaggccaagacaaug

SEQ ID NO: 2425163 - RNA, 19 nt, Artificial Sequence
  Description of Artificial Sequence: Synthetic oligonucleotide
uauggcggacgccuggagg

SEQ ID NO: 2425164 - RNA, 19 nt, Artificial Sequence
  Description of Artificial Sequence: Synthetic oligonucleotide
aggugauaggugcagccac

SEQ ID NO: 2425165 - RNA, 19 nt, Artificial Sequence
  Description of Artificial Sequence: Synthetic oligonucleotide
uucuauuacuacagugucu

SEQ ID NO: 2425166 - RNA, 19 nt, Artificial Sequence
  Description of Artificial Sequence: Synthetic oligonucleotide
aggguaaucagagaaggug

SEQ ID NO: 2425167 - RNA, 19 nt, Artificial Sequence
  Description of Artificial Sequence: Synthetic oligonucleotide
acccggaggugauaggugc

SEQ ID NO: 2425168 - RNA, 19 nt, Artificial Sequence
  Description of Artificial Sequence: Synthetic oligonucleotide
aaucagagaagguguggga

SEQ ID NO: 2425169 - RNA, 19 nt, Artificial Sequence
  Description of Artificial Sequence: Synthetic oligonucleotide
uggaggguaaucagagaag

SEQ ID NO: 2425170 - RNA, 19 nt, Artificial Sequence
  Description of Artificial Sequence: Synthetic oligonucleotide
auaggugcagccacagucc

SEQ ID NO: 2425171 - RNA, 19 nt, Artificial Sequence
  Description of Artificial Sequence: Synthetic oligonucleotide
cuucuauuacuacaguguc

SEQ ID NO: 2425172 - RNA, 19 nt, Artificial Sequence
  Description of Artificial Sequence: Synthetic oligonucleotide
aucaaaggaggccaagaca

SEQ ID NO: 2425173 - RNA, 19 nt, Artificial Sequence
  Description of Artificial Sequence: Synthetic oligonucleotide
guuuccuucuauuacuaca

SEQ ID NO: 2425174 - RNA, 19 nt, Artificial Sequence
  Description of Artificial Sequence: Synthetic oligonucleotide
uuccauguggcaucauucc

SEQ ID NO: 2425175 - RNA, 19 nt, Artificial Sequence
  Description of Artificial Sequence: Synthetic oligonucleotide
auguaguuggcugagguca

SEQ ID NO: 2425176 - RNA, 19 nt, Artificial Sequence
  Description of Artificial Sequence: Synthetic oligonucleotide
ggcaucauuccacuguucg

SEQ ID NO: 2425177 - RNA, 19 nt, Artificial Sequence
  Description of Artificial Sequence: Synthetic oligonucleotide
uacuacagugucuuccggc

SEQ ID NO: 2425178 - RNA, 19 nt, Artificial Sequence
  Description of Artificial Sequence: Synthetic oligonucleotide
auggcggacgccuggaggg

SEQ ID NO: 2425179 - RNA, 19 nt, Artificial Sequence
  Description of Artificial Sequence: Synthetic oligonucleotide
gaaggugugggagaccucc

SEQ ID NO: 2425180 - RNA, 19 nt, Artificial Sequence
  Description of Artificial Sequence: Synthetic oligonucleotide
acuacagugucuuccggca

SEQ ID NO: 2425181 - RNA, 19 nt, Artificial Sequence
  Description of Artificial Sequence: Synthetic oligonucleotide
uccggcagaggucuggcag

SEQ ID NO: 2425182 - RNA, 19 nt, Artificial Sequence
  Description of Artificial Sequence: Synthetic oligonucleotide
uuacuacagugucuuccgg

SEQ ID NO: 2425183 - RNA, 19 nt, Artificial Sequence
  Description of Artificial Sequence: Synthetic oligonucleotide
gauguuuccuucuauuacu

SEQ ID NO: 2425184 - RNA, 19 nt, Artificial Sequence
  Description of Artificial Sequence: Synthetic oligonucleotide
cacagguggaggaucaaag

SEQ ID NO: 2425185 - RNA, 19 nt, Artificial Sequence
  Description of Artificial Sequence: Synthetic oligonucleotide
gaacagcuccagcagaaug

SEQ ID NO: 2425186 - RNA, 19 nt, Artificial Sequence
  Description of Artificial Sequence: Synthetic oligonucleotide
ugaggucagguguacccgg

SEQ ID NO: 2425187 - RNA, 19 nt, Artificial Sequence
  Description of Artificial Sequence: Synthetic oligonucleotide
cuuccauguggcaucauuc

SEQ ID NO: 2425188 - RNA, 19 nt, Artificial Sequence
  Description of Artificial Sequence: Synthetic oligonucleotide
uucuuggcuggucuguggc

SEQ ID NO: 2425189 - RNA, 19 nt, Artificial Sequence
  Description of Artificial Sequence: Synthetic oligonucleotide
uggauccaaagcuggaugu

SEQ ID NO: 2425190 - RNA, 19 nt, Artificial Sequence
  Description of Artificial Sequence: Synthetic oligonucleotide
ucagagaaggugugggaga

SEQ ID NO: 2425191 - RNA, 19 nt, Artificial Sequence
  Description of Artificial Sequence: Synthetic oligonucleotide
uguaguuggcugaggucag

SEQ ID NO: 2425192 - RNA, 19 nt, Artificial Sequence
  Description of Artificial Sequence: Synthetic oligonucleotide
aucagagaaggugugggag

SEQ ID NO: 2425193 - RNA, 19 nt, Artificial Sequence
  Description of Artificial Sequence: Synthetic oligonucleotide
uaggugcagccacaguccg

SEQ ID NO: 2425194 - RNA, 19 nt, Artificial Sequence
  Description of Artificial Sequence: Synthetic oligonucleotide
guaaucagagaaggugugg

SEQ ID NO: 2425195 - RNA, 19 nt, Artificial Sequence
  Description of Artificial Sequence: Synthetic oligonucleotide
agauauggcggacgccugg

SEQ ID NO: 2425196 - RNA, 19 nt, Artificial Sequence
  Description of Artificial Sequence: Synthetic oligonucleotide
auaccagccuuuccagaac

SEQ ID NO: 2425197 - RNA, 19 nt, Artificial Sequence
  Description of Artificial Sequence: Synthetic oligonucleotide
agacaauguaguuggcuga

SEQ ID NO: 2425198 - RNA, 19 nt, Artificial Sequence
  Description of Artificial Sequence: Synthetic oligonucleotide
uccauguggcaucauucca

SEQ ID NO: 2425199 - RNA, 19 nt, Artificial Sequence
  Description of Artificial Sequence: Synthetic oligonucleotide
ggaggguaaucagagaagg

SEQ ID NO: 2425200 - RNA, 19 nt, Artificial Sequence
  Description of Artificial Sequence: Synthetic oligonucleotide
uacagugucuuccggcaga

SEQ ID NO: 2425201 - RNA, 19 nt, Artificial Sequence
  Description of Artificial Sequence: Synthetic oligonucleotide
gacaauguaguuggcugag

SEQ ID NO: 2425202 - RNA, 19 nt, Artificial Sequence
  Description of Artificial Sequence: Synthetic oligonucleotide
gauggucacagguggagga

SEQ ID NO: 2425203 - RNA, 19 nt, Artificial Sequence
  Description of Artificial Sequence: Synthetic oligonucleotide
aauguugaccauaguggca

SEQ ID NO: 2425204 - RNA, 19 nt, Artificial Sequence
  Description of Artificial Sequence: Synthetic oligonucleotide
uggauguuuccuucuauua

SEQ ID NO: 2425205 - RNA, 19 nt, Artificial Sequence
  Description of Artificial Sequence: Synthetic oligonucleotide
uccaaagcuggauguuucc

SEQ ID NO: 2425206 - RNA, 19 nt, Artificial Sequence
  Description of Artificial Sequence: Synthetic oligonucleotide
uggaggaucaaaggaggcc

SEQ ID NO: 2425207 - RNA, 19 nt, Artificial Sequence
  Description of Artificial Sequence: Synthetic oligonucleotide
cagccuuuccagaacuggg

SEQ ID NO: 2425208 - RNA, 19 nt, Artificial Sequence
  Description of Artificial Sequence: Synthetic oligonucleotide
cugauaaugaugcugcugu

SEQ ID NO: 2425209 - RNA, 19 nt, Artificial Sequence
  Description of Artificial Sequence: Synthetic oligonucleotide
gcugcuguuggugacacgg

SEQ ID NO: 2425210 - RNA, 19 nt, Artificial Sequence
  Description of Artificial Sequence: Synthetic oligonucleotide
uuccacuguucgaugguca

SEQ ID NO: 2425211 - RNA, 19 nt, Artificial Sequence
  Description of Artificial Sequence: Synthetic oligonucleotide
uguuuccuucuauuacuac

SEQ ID NO: 2425212 - RNA, 19 nt, Artificial Sequence
  Description of Artificial Sequence: Synthetic oligonucleotide
ggauguuuccuucuauuac

SEQ ID NO: 2425213 - RNA, 19 nt, Artificial Sequence
  Description of Artificial Sequence: Synthetic oligonucleotide
gagcucguuaauguugacc

SEQ ID NO: 2425214 - RNA, 19 nt, Artificial Sequence
  Description of Artificial Sequence: Synthetic oligonucleotide
uaccagccuuuccagaacu

SEQ ID NO: 2425215 - RNA, 19 nt, Artificial Sequence
  Description of Artificial Sequence: Synthetic oligonucleotide
ugucuuccggcagaggucu

SEQ ID NO: 2425216 - RNA, 19 nt, Artificial Sequence
  Description of Artificial Sequence: Synthetic oligonucleotide
auguugaccauaguggcaa

SEQ ID NO: 2425217 - RNA, 19 nt, Artificial Sequence
  Description of Artificial Sequence: Synthetic oligonucleotide
gguggaggaucaaaggagg

SEQ ID NO: 2425218 - RNA, 19 nt, Artificial Sequence
  Description of Artificial Sequence: Synthetic oligonucleotide
cuggaggguaaucagagaa

SEQ ID NO: 2425219 - RNA, 19 nt, Artificial Sequence
  Description of Artificial Sequence: Synthetic oligonucleotide
aucauuccacuguucgaug

SEQ ID NO: 2425220 - RNA, 19 nt, Artificial Sequence
  Description of Artificial Sequence: Synthetic oligonucleotide
uguacccggaggugauagg

SEQ ID NO: 2425221 - RNA, 19 nt, Artificial Sequence
  Description of Artificial Sequence: Synthetic oligonucleotide
aagcuggauguuuccuucu

SEQ ID NO: 2425222 - RNA, 19 nt, Artificial Sequence
  Description of Artificial Sequence: Synthetic oligonucleotide
auuccacuguucgaugguc

SEQ ID NO: 2425223 - RNA, 19 nt, Artificial Sequence
  Description of Artificial Sequence: Synthetic oligonucleotide
guucuuggcuggucugugg

SEQ ID NO: 2425224 - RNA, 19 nt, Artificial Sequence
  Description of Artificial Sequence: Synthetic oligonucleotide
auccaaagcuggauguuuc

SEQ ID NO: 2425225 - RNA, 19 nt, Artificial Sequence
  Description of Artificial Sequence: Synthetic oligonucleotide
cauaccagccuuuccagaa

SEQ ID NO: 2425226 - RNA, 19 nt, Artificial Sequence
  Description of Artificial Sequence: Synthetic oligonucleotide
uuccuucuauuacuacagu

SEQ ID NO: 2425227 - RNA, 19 nt, Artificial Sequence
  Description of Artificial Sequence: Synthetic oligonucleotide
cagaggucuggcaggggcg

SEQ ID NO: 2425228 - RNA, 19 nt, Artificial Sequence
  Description of Artificial Sequence: Synthetic oligonucleotide
agaccuccuuccauguggc

SEQ ID NO: 2425229 - RNA, 19 nt, Artificial Sequence
  Description of Artificial Sequence: Synthetic oligonucleotide
ucuuccggcagaggucugg

SEQ ID NO: 2425230 - RNA, 19 nt, Artificial Sequence
  Description of Artificial Sequence: Synthetic oligonucleotide
gugugggagaccuccuucc

SEQ ID NO: 2425231 - RNA, 19 nt, Artificial Sequence
  Description of Artificial Sequence: Synthetic oligonucleotide
cuuuccagaacuggguguc

SEQ ID NO: 2425232 - RNA, 19 nt, Artificial Sequence
  Description of Artificial Sequence: Synthetic oligonucleotide
uccacuguucgauggucac

SEQ ID NO: 2425233 - RNA, 19 nt, Artificial Sequence
  Description of Artificial Sequence: Synthetic oligonucleotide
uucgauggucacaggugga

SEQ ID NO: 2425234 - RNA, 19 nt, Artificial Sequence
  Description of Artificial Sequence: Synthetic oligonucleotide
uaaugaugcugcuguuggu

SEQ ID NO: 2425235 - RNA, 19 nt, Artificial Sequence
  Description of Artificial Sequence: Synthetic oligonucleotide
gcugaggucagguguaccc

SEQ ID NO: 2425236 - RNA, 19 nt, Artificial Sequence
  Description of Artificial Sequence: Synthetic oligonucleotide
ggaggugauaggugcagcc

SEQ ID NO: 2425237 - RNA, 19 nt, Artificial Sequence
  Description of Artificial Sequence: Synthetic oligonucleotide
uacccggaggugauaggug

SEQ ID NO: 2425238 - RNA, 19 nt, Artificial Sequence
  Description of Artificial Sequence: Synthetic oligonucleotide
cugaggucagguguacccg

SEQ ID NO: 2425239 - RNA, 19 nt, Artificial Sequence
  Description of Artificial Sequence: Synthetic oligonucleotide
gaggccaagacaauguagu

SEQ ID NO: 2425240 - RNA, 19 nt, Artificial Sequence
  Description of Artificial Sequence: Synthetic oligonucleotide
acaauguaguuggcugagg

SEQ ID NO: 2425241 - RNA, 19 nt, Artificial Sequence
  Description of Artificial Sequence: Synthetic oligonucleotide
uuggcugaggucaggugua

SEQ ID NO: 2425242 - RNA, 19 nt, Artificial Sequence
  Description of Artificial Sequence: Synthetic oligonucleotide
aguuggcugaggucaggug

SEQ ID NO: 2425243 - RNA, 19 nt, Artificial Sequence
  Description of Artificial Sequence: Synthetic oligonucleotide
guuggcugaggucaggugu

SEQ ID NO: 2425244 - RNA, 19 nt, Artificial Sequence
  Description of Artificial Sequence: Synthetic oligonucleotide
agagaaggugugggagacc

SEQ ID NO: 2425245 - RNA, 19 nt, Artificial Sequence
  Description of Artificial Sequence: Synthetic oligonucleotide
ggcgaaccaguccuuaacc

SEQ ID NO: 2425246 - RNA, 19 nt, Artificial Sequence
  Description of Artificial Sequence: Synthetic oligonucleotide
gacgccuggaggguaauca

SEQ ID NO: 2425247 - RNA, 19 nt, Artificial Sequence
  Description of Artificial Sequence: Synthetic oligonucleotide
ugauaggugcagccacagu

SEQ ID NO: 2425248 - RNA, 19 nt, Artificial Sequence
  Description of Artificial Sequence: Synthetic oligonucleotide
ggucagguguacccggagg

SEQ ID NO: 2425249 - RNA, 19 nt, Artificial Sequence
  Description of Artificial Sequence: Synthetic oligonucleotide
uguggcugauaaugaugcu

SEQ ID NO: 2425250 - RNA, 19 nt, Artificial Sequence
  Description of Artificial Sequence: Synthetic oligonucleotide
acgccuggaggguaaucag

SEQ ID NO: 2425251 - RNA, 19 nt, Artificial Sequence
  Description of Artificial Sequence: Synthetic oligonucleotide
gguaaucagagaaggugug

SEQ ID NO: 2425252 - RNA, 19 nt, Artificial Sequence
  Description of Artificial Sequence: Synthetic oligonucleotide
ucuuggcuggucuguggcu

SEQ ID NO: 2425253 - RNA, 19 nt, Artificial Sequence
  Description of Artificial Sequence: Synthetic oligonucleotide
agaggucuggcaggggcgg

SEQ ID NO: 2425254 - RNA, 19 nt, Artificial Sequence
  Description of Artificial Sequence: Synthetic oligonucleotide
acuguucgauggucacagg

SEQ ID NO: 2425255 - RNA, 19 nt, Artificial Sequence
  Description of Artificial Sequence: Synthetic oligonucleotide
cagagaaggugugggagac

SEQ ID NO: 2425256 - RNA, 19 nt, Artificial Sequence
  Description of Artificial Sequence: Synthetic oligonucleotide
aagauauggcggacgccug

SEQ ID NO: 2425257 - RNA, 19 nt, Artificial Sequence
  Description of Artificial Sequence: Synthetic oligonucleotide
ucagguguacccggaggug

SEQ ID NO: 2425258 - RNA, 19 nt, Artificial Sequence
  Description of Artificial Sequence: Synthetic oligonucleotide
cuacagugucuuccggcag

SEQ ID NO: 2425259 - RNA, 19 nt, Artificial Sequence
  Description of Artificial Sequence: Synthetic oligonucleotide
guguacccggaggugauag

SEQ ID NO: 2425260 - RNA, 19 nt, Artificial Sequence
  Description of Artificial Sequence: Synthetic oligonucleotide
ugauaaugaugcugcuguu

SEQ ID NO: 2425261 - RNA, 19 nt, Artificial Sequence
  Description of Artificial Sequence: Synthetic oligonucleotide
gugauaggugcagccacag

SEQ ID NO: 2425262 - RNA, 19 nt, Artificial Sequence
  Description of Artificial Sequence: Synthetic oligonucleotide
cugcuguuggugacacggg

SEQ ID NO: 2425263 - RNA, 19 nt, Artificial Sequence
  Description of Artificial Sequence: Synthetic oligonucleotide
auauggcggacgccuggag

SEQ ID NO: 2425264 - RNA, 19 nt, Artificial Sequence
  Description of Artificial Sequence: Synthetic oligonucleotide
ggaggaucaaaggaggcca

SEQ ID NO: 2425265 - RNA, 19 nt, Artificial Sequence
  Description of Artificial Sequence: Synthetic oligonucleotide
ggccauaccagccuuucca

SEQ ID NO: 2425266 - RNA, 19 nt, Artificial Sequence
  Description of Artificial Sequence: Synthetic oligonucleotide
gagaaggugugggagaccu

SEQ ID NO: 2425267 - RNA, 19 nt, Artificial Sequence
  Description of Artificial Sequence: Synthetic oligonucleotide
ccauguggcaucauuccac

SEQ ID NO: 2425268 - RNA, 19 nt, Artificial Sequence
  Description of Artificial Sequence: Synthetic oligonucleotide
gcagaggucuggcaggggc

SEQ ID NO: 2425269 - RNA, 19 nt, Artificial Sequence
  Description of Artificial Sequence: Synthetic oligonucleotide
ggccaagacaauguaguug

SEQ ID NO: 2425270 - RNA, 19 nt, Artificial Sequence
  Description of Artificial Sequence: Synthetic oligonucleotide
acagugucuuccggcagag

SEQ ID NO: 2425271 - RNA, 19 nt, Artificial Sequence
  Description of Artificial Sequence: Synthetic oligonucleotide
uaguuggcugaggucaggu

SEQ ID NO: 2425272 - RNA, 19 nt, Artificial Sequence
  Description of Artificial Sequence: Synthetic oligonucleotide
cuauuacuacagugucuuc

SEQ ID NO: 2425273 - RNA, 19 nt, Artificial Sequence
  Description of Artificial Sequence: Synthetic oligonucleotide
aggucagguguacccggag

SEQ ID NO: 2425274 - RNA, 19 nt, Artificial Sequence
  Description of Artificial Sequence: Synthetic oligonucleotide
uuuccagaacugggugucc

SEQ ID NO: 2425275 - RNA, 19 nt, Artificial Sequence
  Description of Artificial Sequence: Synthetic oligonucleotide
gaggugauaggugcagcca

SEQ ID NO: 2425276 - RNA, 19 nt, Artificial Sequence
  Description of Artificial Sequence: Synthetic oligonucleotide
caauguaguuggcugaggu

SEQ ID NO: 2425277 - RNA, 19 nt, Artificial Sequence
  Description of Artificial Sequence: Synthetic oligonucleotide
uuccagaacuggguguccu

SEQ ID NO: 2425278 - RNA, 19 nt, Artificial Sequence
  Description of Artificial Sequence: Synthetic oligonucleotide
gaugcugcuguuggugaca

SEQ ID NO: 2425279 - RNA, 19 nt, Artificial Sequence
  Description of Artificial Sequence: Synthetic oligonucleotide
ucacagguggaggaucaaa

SEQ ID NO: 2425280 - RNA, 19 nt, Artificial Sequence
  Description of Artificial Sequence: Synthetic oligonucleotide
aggaucaaaggaggccaag

SEQ ID NO: 2425281 - RNA, 19 nt, Artificial Sequence
  Description of Artificial Sequence: Synthetic oligonucleotide
gcugauaaugaugcugcug

SEQ ID NO: 2425282 - RNA, 19 nt, Artificial Sequence
  Description of Artificial Sequence: Synthetic oligonucleotide
guggaggaucaaaggaggc

SEQ ID NO: 2425283 - RNA, 19 nt, Artificial Sequence
  Description of Artificial Sequence: Synthetic oligonucleotide
ggaggccaagacaauguag

SEQ ID NO: 2425284 - RNA, 19 nt, Artificial Sequence
  Description of Artificial Sequence: Synthetic oligonucleotide
gugggugaacagcuccagc

SEQ ID NO: 2425285 - RNA, 19 nt, Artificial Sequence
  Description of Artificial Sequence: Synthetic oligonucleotide
auguggcaucauuccacug

SEQ ID NO: 2425286 - RNA, 19 nt, Artificial Sequence
  Description of Artificial Sequence: Synthetic oligonucleotide
gccauaccagccuuuccag

SEQ ID NO: 2425287 - RNA, 19 nt, Artificial Sequence
  Description of Artificial Sequence: Synthetic oligonucleotide
ccuucuauuacuacagugu

SEQ ID NO: 2425288 - RNA, 19 nt, Artificial Sequence
  Description of Artificial Sequence: Synthetic oligonucleotide
gauauggcggacgccugga

SEQ ID NO: 2425289 - RNA, 19 nt, Artificial Sequence
  Description of Artificial Sequence: Synthetic oligonucleotide
aggggcgggguucuuggcu

SEQ ID NO: 2425290 - RNA, 19 nt, Artificial Sequence
  Description of Artificial Sequence: Synthetic oligonucleotide
guaguuggcugaggucagg

SEQ ID NO: 2425291 - RNA, 19 nt, Artificial Sequence
  Description of Artificial Sequence: Synthetic oligonucleotide
aggaggccaagacaaugua

SEQ ID NO: 2425292 - RNA, 19 nt, Artificial Sequence
  Description of Artificial Sequence: Synthetic oligonucleotide
gucagguguacccggaggu

SEQ ID NO: 2425293 - RNA, 19 nt, Artificial Sequence
  Description of Artificial Sequence: Synthetic oligonucleotide
accuccuuccauguggcau

SEQ ID NO: 2425294 - RNA, 19 nt, Artificial Sequence
  Description of Artificial Sequence: Synthetic oligonucleotide
aggccaagacaauguaguu

SEQ ID NO: 2425295 - RNA, 19 nt, Artificial Sequence
  Description of Artificial Sequence: Synthetic oligonucleotide
gccuuuccagaacugggug

SEQ ID NO: 2425296 - RNA, 19 nt, Artificial Sequence
  Description of Artificial Sequence: Synthetic oligonucleotide
cucguuaauguugaccaua

SEQ ID NO: 2425297 - RNA, 19 nt, Artificial Sequence
  Description of Artificial Sequence: Synthetic oligonucleotide
ucuggcaggggcgggguuc

SEQ ID NO: 2425298 - RNA, 19 nt, Artificial Sequence
  Description of Artificial Sequence: Synthetic oligonucleotide
ugcugcuguuggugacacg

SEQ ID NO: 2425299 - RNA, 19 nt, Artificial Sequence
  Description of Artificial Sequence: Synthetic oligonucleotide
ugaacagcuccagcagaau

SEQ ID NO: 2425300 - RNA, 19 nt, Artificial Sequence
  Description of Artificial Sequence: Synthetic oligonucleotide
gcaggggcgggguucuugg

SEQ ID NO: 2425301 - RNA, 19 nt, Artificial Sequence
  Description of Artificial Sequence: Synthetic oligonucleotide
uggcaucauuccacuguuc

SEQ ID NO: 2425302 - RNA, 19 nt, Artificial Sequence
  Description of Artificial Sequence: Synthetic oligonucleotide
uggucacagguggaggauc

SEQ ID NO: 2425303 - RNA, 19 nt, Artificial Sequence
  Description of Artificial Sequence: Synthetic oligonucleotide
cuguucgauggucacaggu

SEQ ID NO: 2425304 - RNA, 19 nt, Artificial Sequence
  Description of Artificial Sequence: Synthetic oligonucleotide
agcuggauguuuccuucua

SEQ ID NO: 2425305 - RNA, 19 nt, Artificial Sequence
  Description of Artificial Sequence: Synthetic oligonucleotide
cuuccggcagaggucuggc

SEQ ID NO: 2425306 - RNA, 19 nt, Artificial Sequence
  Description of Artificial Sequence: Synthetic oligonucleotide
ccagccuuuccagaacugg

SEQ ID NO: 2425307 - RNA, 19 nt, Artificial Sequence
  Description of Artificial Sequence: Synthetic oligonucleotide
auguuuccuucuauuacua

SEQ ID NO: 2425308 - RNA, 19 nt, Artificial Sequence
  Description of Artificial Sequence: Synthetic oligonucleotide
cgaaccaguccuuaaccac

SEQ ID NO: 2425309 - RNA, 19 nt, Artificial Sequence
  Description of Artificial Sequence: Synthetic oligonucleotide
ggugugggagaccuccuuc

SEQ ID NO: 2425310 - RNA, 19 nt, Artificial Sequence
  Description of Artificial Sequence: Synthetic oligonucleotide
aggugcagccacaguccgc

SEQ ID NO: 2425311 - RNA, 19 nt, Artificial Sequence
  Description of Artificial Sequence: Synthetic oligonucleotide
ggaucaaaggaggccaaga

SEQ ID NO: 2425312 - RNA, 19 nt, Artificial Sequence
  Description of Artificial Sequence: Synthetic oligonucleotide
caagacaauguaguuggcu

SEQ ID NO: 2425313 - RNA, 19 nt, Artificial Sequence
  Description of Artificial Sequence: Synthetic oligonucleotide
caucauuccacuguucgau

SEQ ID NO: 2425314 - RNA, 19 nt, Artificial Sequence
  Description of Artificial Sequence: Synthetic oligonucleotide
cauguggcaucauuccacu

SEQ ID NO: 2425315 - RNA, 19 nt, Artificial Sequence
  Description of Artificial Sequence: Synthetic oligonucleotide
aggucuggcaggggcgggg

SEQ ID NO: 2425316 - RNA, 19 nt, Artificial Sequence
  Description of Artificial Sequence: Synthetic oligonucleotide
gcgaaccaguccuuaacca

SEQ ID NO: 2425317 - RNA, 19 nt, Artificial Sequence
  Description of Artificial Sequence: Synthetic oligonucleotide
gcaucauuccacuguucga

SEQ ID NO: 2425318 - RNA, 19 nt, Artificial Sequence
  Description of Artificial Sequence: Synthetic oligonucleotide
uuccggcagaggucuggca

SEQ ID NO: 2425319 - RNA, 19 nt, Artificial Sequence
  Description of Artificial Sequence: Synthetic oligonucleotide
ggguaaucagagaaggugu

SEQ ID NO: 2425320 - RNA, 19 nt, Artificial Sequence
  Description of Artificial Sequence: Synthetic oligonucleotide
ggggacgugggugaacagc

SEQ ID NO: 2425321 - RNA, 19 nt, Artificial Sequence
  Description of Artificial Sequence: Synthetic oligonucleotide
gauccaaagcuggauguuu

SEQ ID NO: 2425322 - RNA, 19 nt, Artificial Sequence
  Description of Artificial Sequence: Synthetic oligonucleotide
gggcgaaccaguccuuaac

SEQ ID NO: 2425323 - RNA, 19 nt, Artificial Sequence
  Description of Artificial Sequence: Synthetic oligonucleotide
agaaggugugggagaccuc

SEQ ID NO: 2425324 - RNA, 19 nt, Artificial Sequence
  Description of Artificial Sequence: Synthetic oligonucleotide
gugucuuccggcagagguc

SEQ ID NO: 2425325 - RNA, 19 nt, Artificial Sequence
  Description of Artificial Sequence: Synthetic oligonucleotide
cagguguacccggagguga

SEQ ID NO: 2425326 - RNA, 19 nt, Artificial Sequence
  Description of Artificial Sequence: Synthetic oligonucleotide
ccuccuuccauguggcauc

SEQ ID NO: 2425327 - RNA, 19 nt, Artificial Sequence
  Description of Artificial Sequence: Synthetic oligonucleotide
ggggcgggguucuuggcug

SEQ ID NO: 2425328 - RNA, 19 nt, Artificial Sequence
  Description of Artificial Sequence: Synthetic oligonucleotide
caaagcuggauguuuccuu

SEQ ID NO: 2425329 - RNA, 19 nt, Artificial Sequence
  Description of Artificial Sequence: Synthetic oligonucleotide
aggugugggagaccuccuu

SEQ ID NO: 2425330 - RNA, 19 nt, Artificial Sequence
  Description of Artificial Sequence: Synthetic oligonucleotide
auggucacagguggaggau

SEQ ID NO: 2425331 - RNA, 19 nt, Artificial Sequence
  Description of Artificial Sequence: Synthetic oligonucleotide
gaggucuggcaggggcggg

SEQ ID NO: 2425332 - RNA, 19 nt, Artificial Sequence
  Description of Artificial Sequence: Synthetic oligonucleotide
gcagccacaguccgcucug

SEQ ID NO: 2425333 - RNA, 19 nt, Artificial Sequence
  Description of Artificial Sequence: Synthetic oligonucleotide
gaggaucaaaggaggccaa

SEQ ID NO: 2425334 - RNA, 19 nt, Artificial Sequence
  Description of Artificial Sequence: Synthetic oligonucleotide
gguucuuggcuggucugug

SEQ ID NO: 2425335 - RNA, 19 nt, Artificial Sequence
  Description of Artificial Sequence: Synthetic oligonucleotide
gaggguaaucagagaaggu

SEQ ID NO: 2425336 - RNA, 19 nt, Artificial Sequence
  Description of Artificial Sequence: Synthetic oligonucleotide
guacccggaggugauaggu

SEQ ID NO: 2425337 - RNA, 19 nt, Artificial Sequence
  Description of Artificial Sequence: Synthetic oligonucleotide
acgugggugaacagcucca

SEQ ID NO: 2425338 - RNA, 19 nt, Artificial Sequence
  Description of Artificial Sequence: Synthetic oligonucleotide
ggagaccuccuuccaugug

SEQ ID NO: 2425339 - RNA, 19 nt, Artificial Sequence
  Description of Artificial Sequence: Synthetic oligonucleotide
cuggauguuuccuucuauu

SEQ ID NO: 2425340 - RNA, 19 nt, Artificial Sequence
  Description of Artificial Sequence: Synthetic oligonucleotide
ccaagacaauguaguuggc

SEQ ID NO: 2425341 - RNA, 19 nt, Artificial Sequence
  Description of Artificial Sequence: Synthetic oligonucleotide
gucuguggcugauaaugau

SEQ ID NO: 2425342 - RNA, 19 nt, Artificial Sequence
  Description of Artificial Sequence: Synthetic oligonucleotide
gaggucagguguacccgga

SEQ ID NO: 2425343 - RNA, 19 nt, Artificial Sequence
  Description of Artificial Sequence: Synthetic oligonucleotide
accagccuuuccagaacug

SEQ ID NO: 2425344 - RNA, 19 nt, Artificial Sequence
  Description of Artificial Sequence: Synthetic oligonucleotide
cauuccacuguucgauggu

SEQ ID NO: 2425345 - RNA, 19 nt, Artificial Sequence
  Description of Artificial Sequence: Synthetic oligonucleotide
ggucacagguggaggauca

SEQ ID NO: 2425346 - RNA, 19 nt, Artificial Sequence
  Description of Artificial Sequence: Synthetic oligonucleotide
ggugauaggugcagccaca

SEQ ID NO: 2425347 - RNA, 19 nt, Artificial Sequence
  Description of Artificial Sequence: Synthetic oligonucleotide
uggcugaggucagguguac

SEQ ID NO: 2425348 - RNA, 19 nt, Artificial Sequence
  Description of Artificial Sequence: Synthetic oligonucleotide
guggcaucauuccacuguu

SEQ ID NO: 2425349 - RNA, 19 nt, Artificial Sequence
  Description of Artificial Sequence: Synthetic oligonucleotide
gaccuccuuccauguggca

SEQ ID NO: 2425350 - RNA, 19 nt, Artificial Sequence
  Description of Artificial Sequence: Synthetic oligonucleotide
caggggcgggguucuuggc

SEQ ID NO: 2425351 - RNA, 19 nt, Artificial Sequence
  Description of Artificial Sequence: Synthetic oligonucleotide
ggugcagccacaguccgcu

SEQ ID NO: 2425352 - RNA, 19 nt, Artificial Sequence
  Description of Artificial Sequence: Synthetic oligonucleotide
cagugucuuccggcagagg

SEQ ID NO: 2425353 - RNA, 19 nt, Artificial Sequence
  Description of Artificial Sequence: Synthetic oligonucleotide
gggccauaccagccuuucc

SEQ ID NO: 2425354 - RNA, 19 nt, Artificial Sequence
  Description of Artificial Sequence: Synthetic oligonucleotide
gggcgggguucuuggcugg

SEQ ID NO: 2425355 - RNA, 19 nt, Artificial Sequence
  Description of Artificial Sequence: Synthetic oligonucleotide
agguguacccggaggugau

SEQ ID NO: 2425356 - RNA, 19 nt, Artificial Sequence
  Description of Artificial Sequence: Synthetic oligonucleotide
gggacgugggugaacagcu

SEQ ID NO: 2425357 - RNA, 19 nt, Artificial Sequence
  Description of Artificial Sequence: Synthetic oligonucleotide
cgauggucacagguggagg

SEQ ID NO: 2425358 - RNA, 19 nt, Artificial Sequence
  Description of Artificial Sequence: Synthetic oligonucleotide
caaaggaggccaagacaau

SEQ ID NO: 2425359 - RNA, 19 nt, Artificial Sequence
  Description of Artificial Sequence: Synthetic oligonucleotide
uggcggacgccuggagggu

SEQ ID NO: 2425360 - RNA, 19 nt, Artificial Sequence
  Description of Artificial Sequence: Synthetic oligonucleotide
cuccuuccauguggcauca

SEQ ID NO: 2425361 - RNA, 19 nt, Artificial Sequence
  Description of Artificial Sequence: Synthetic oligonucleotide
ggcugaggucagguguacc

SEQ ID NO: 2425362 - RNA, 19 nt, Artificial Sequence
  Description of Artificial Sequence: Synthetic oligonucleotide
ccauaccagccuuuccaga

SEQ ID NO: 2425363 - RNA, 19 nt, Artificial Sequence
  Description of Artificial Sequence: Synthetic oligonucleotide
ccggaggugauaggugcag

SEQ ID NO: 2425364 - RNA, 19 nt, Artificial Sequence
  Description of Artificial Sequence: Synthetic oligonucleotide
ccuuuccagaacugggugu

SEQ ID NO: 2425365 - RNA, 19 nt, Artificial Sequence
  Description of Artificial Sequence: Synthetic oligonucleotide
ggggccauaccagccuuuc

SEQ ID NO: 2425366 - RNA, 19 nt, Artificial Sequence
  Description of Artificial Sequence: Synthetic oligonucleotide
gggagaccuccuuccaugu

SEQ ID NO: 2425367 - RNA, 19 nt, Artificial Sequence
  Description of Artificial Sequence: Synthetic oligonucleotide
ccuggaggguaaucagaga

SEQ ID NO: 2425368 - RNA, 19 nt, Artificial Sequence
  Description of Artificial Sequence: Synthetic oligonucleotide
ggggcgaaccaguccuuaa

SEQ ID NO: 2425369 - RNA, 19 nt, Artificial Sequence
  Description of Artificial Sequence: Synthetic oligonucleotide
gcuggauguuuccuucuau

SEQ ID NO: 2425370 - RNA, 19 nt, Artificial Sequence
  Description of Artificial Sequence: Synthetic oligonucleotide
ggcagaggucuggcagggg

SEQ ID NO: 2425371 - RNA, 19 nt, Artificial Sequence
  Description of Artificial Sequence: Synthetic oligonucleotide
ggcugauaaugaugcugcu

SEQ ID NO: 2425372 - RNA, 19 nt, Artificial Sequence
  Description of Artificial Sequence: Synthetic oligonucleotide
ggcaggggcgggguucuug

SEQ ID NO: 2425373 - RNA, 19 nt, Artificial Sequence
  Description of Artificial Sequence: Synthetic oligonucleotide
gucacagguggaggaucaa

SEQ ID NO: 2425374 - RNA, 19 nt, Artificial Sequence
  Description of Artificial Sequence: Synthetic oligonucleotide
gucuuccggcagaggucug

SEQ ID NO: 2425375 - RNA, 19 nt, Artificial Sequence
  Description of Artificial Sequence: Synthetic oligonucleotide
uccuuccauguggcaucau

SEQ ID NO: 2425376 - RNA, 19 nt, Artificial Sequence
  Description of Artificial Sequence: Synthetic oligonucleotide
ggacgugggugaacagcuc

SEQ ID NO: 2425377 - RNA, 19 nt, Artificial Sequence
  Description of Artificial Sequence: Synthetic oligonucleotide
cccggaggugauaggugca

SEQ ID NO: 2425378 - RNA, 19 nt, Artificial Sequence
  Description of Artificial Sequence: Synthetic oligonucleotide
cuggucuguggcugauaau

SEQ ID NO: 2425379 - RNA, 19 nt, Artificial Sequence
  Description of Artificial Sequence: Synthetic oligonucleotide
gcucguuaauguugaccau

SEQ ID NO: 2425380 - RNA, 19 nt, Artificial Sequence
  Description of Artificial Sequence: Synthetic oligonucleotide
cggaggugauaggugcagc

SEQ ID NO: 2425381 - RNA, 19 nt, Artificial Sequence
  Description of Artificial Sequence: Synthetic oligonucleotide
ccaaagcuggauguuuccu

SEQ ID NO: 2425382 - RNA, 19 nt, Artificial Sequence
  Description of Artificial Sequence: Synthetic oligonucleotide
ccacuguucgauggucaca

SEQ ID NO: 2425383 - RNA, 19 nt, Artificial Sequence
  Description of Artificial Sequence: Synthetic oligonucleotide
ggacgccuggaggguaauc

SEQ ID NO: 2425384 - RNA, 19 nt, Artificial Sequence
  Description of Artificial Sequence: Synthetic oligonucleotide
gguguacccggaggugaua

SEQ ID NO: 2425385 - RNA, 19 nt, Artificial Sequence
  Description of Artificial Sequence: Synthetic oligonucleotide
gcgggguucuuggcugguc

SEQ ID NO: 2425386 - RNA, 19 nt, Artificial Sequence
  Description of Artificial Sequence: Synthetic oligonucleotide
cguuaauguugaccauagu

SEQ ID NO: 2425387 - RNA, 19 nt, Artificial Sequence
  Description of Artificial Sequence: Synthetic oligonucleotide
gcggacgccuggaggguaa

SEQ ID NO: 2425388 - RNA, 19 nt, Artificial Sequence
  Description of Artificial Sequence: Synthetic oligonucleotide
ggucuggcaggggcggggu

SEQ ID NO: 2425389 - RNA, 19 nt, Artificial Sequence
  Description of Artificial Sequence: Synthetic oligonucleotide
cgggguucuuggcuggucu

SEQ ID NO: 2425390 - RNA, 19 nt, Artificial Sequence
  Description of Artificial Sequence: Synthetic oligonucleotide
ggcggacgccuggagggua

SEQ ID NO: 2425391 - RNA, 19 nt, Artificial Sequence
  Description of Artificial Sequence: Synthetic oligonucleotide
gucuggcaggggcgggguu

SEQ ID NO: 2425392 - RNA, 19 nt, Artificial Sequence
  Description of Artificial Sequence: Synthetic oligonucleotide
ggcuggucuguggcugaua

SEQ ID NO: 2425393 - RNA, 19 nt, Artificial Sequence
  Description of Artificial Sequence: Synthetic oligonucleotide
cggacgccuggaggguaau

SEQ ID NO: 2425394 - RNA, 19 nt, Artificial Sequence
  Description of Artificial Sequence: Synthetic oligonucleotide
aacuuuaucuggcugaagc

SEQ ID NO: 2425395 - RNA, 19 nt, Artificial Sequence
  Description of Artificial Sequence: Synthetic oligonucleotide
uuuacgaugaguaugugag

SEQ ID NO: 2425396 - RNA, 19 nt, Artificial Sequence
  Description of Artificial Sequence: Synthetic oligonucleotide
caaaucaaaaggaaaagcc

SEQ ID NO: 2425397 - RNA, 19 nt, Artificial Sequence
  Description of Artificial Sequence: Synthetic oligonucleotide
aagacagucacacaugcca

SEQ ID NO: 2425398 - RNA, 19 nt, Artificial Sequence
  Description of Artificial Sequence: Synthetic oligonucleotide
agggaugagaaacuggacc

SEQ ID NO: 2425399 - RNA, 19 nt, Artificial Sequence
  Description of Artificial Sequence: Synthetic oligonucleotide
uauaucacuacuuccaaga

SEQ ID NO: 2425400 - RNA, 19 nt, Artificial Sequence
  Description of Artificial Sequence: Synthetic oligonucleotide
uaaccgauacauuauauca

SEQ ID NO: 2425401 - RNA, 19 nt, Artificial Sequence
  Description of Artificial Sequence: Synthetic oligonucleotide
augaguaugugagaaagcc

SEQ ID NO: 2425402 - RNA, 19 nt, Artificial Sequence
  Description of Artificial Sequence: Synthetic oligonucleotide
uuuauuguucuccugccgc

SEQ ID NO: 2425403 - RNA, 19 nt, Artificial Sequence
  Description of Artificial Sequence: Synthetic oligonucleotide
agucacacaugccagcucc

SEQ ID NO: 2425404 - RNA, 19 nt, Artificial Sequence
  Description of Artificial Sequence: Synthetic oligonucleotide
ugagaaagccccacaaggg

SEQ ID NO: 2425405 - RNA, 19 nt, Artificial Sequence
  Description of Artificial Sequence: Synthetic oligonucleotide
aaacacuaaaccauauuuc

SEQ ID NO: 2425406 - RNA, 19 nt, Artificial Sequence
  Description of Artificial Sequence: Synthetic oligonucleotide
gaaugcgugacacacacac

SEQ ID NO: 2425407 - RNA, 19 nt, Artificial Sequence
  Description of Artificial Sequence: Synthetic oligonucleotide
aacuggaccuccucugugc

SEQ ID NO: 2425408 - RNA, 19 nt, Artificial Sequence
  Description of Artificial Sequence: Synthetic oligonucleotide
augcgugacacacacacac

SEQ ID NO: 2425409 - RNA, 19 nt, Artificial Sequence
  Description of Artificial Sequence: Synthetic oligonucleotide
cuggauuucucuuugcugc

SEQ ID NO: 2425410 - RNA, 19 nt, Artificial Sequence
  Description of Artificial Sequence: Synthetic oligonucleotide
aaucaaaaggaaaagcccu

SEQ ID NO: 2425411 - RNA, 19 nt, Artificial Sequence
  Description of Artificial Sequence: Synthetic oligonucleotide
uacauuauaucacuacuuc

SEQ ID NO: 2425412 - RNA, 19 nt, Artificial Sequence
  Description of Artificial Sequence: Synthetic oligonucleotide
uugugucaaacacuaaacc

SEQ ID NO: 2425413 - RNA, 19 nt, Artificial Sequence
  Description of Artificial Sequence: Synthetic oligonucleotide
uuggaacuaaucaagaguu

SEQ ID NO: 2425414 - RNA, 19 nt, Artificial Sequence
  Description of Artificial Sequence: Synthetic oligonucleotide
aucacuacuuccaagacag

SEQ ID NO: 2425415 - RNA, 19 nt, Artificial Sequence
  Description of Artificial Sequence: Synthetic oligonucleotide
uggauuggaagucugggca

SEQ ID NO: 2425416 - RNA, 19 nt, Artificial Sequence
  Description of Artificial Sequence: Synthetic oligonucleotide
auacacuucugaaucaugc

SEQ ID NO: 2425417 - RNA, 19 nt, Artificial Sequence
  Description of Artificial Sequence: Synthetic oligonucleotide
uuuuccccuauuuugacac

SEQ ID NO: 2425418 - RNA, 19 nt, Artificial Sequence
  Description of Artificial Sequence: Synthetic oligonucleotide
uuagcuauggaaugcguga

SEQ ID NO: 2425419 - RNA, 19 nt, Artificial Sequence
  Description of Artificial Sequence: Synthetic oligonucleotide
gaguaugugagaaagcccc

SEQ ID NO: 2425420 - RNA, 19 nt, Artificial Sequence
  Description of Artificial Sequence: Synthetic oligonucleotide
agcccuuuccccuugaguc

SEQ ID NO: 2425421 - RNA, 19 nt, Artificial Sequence
  Description of Artificial Sequence: Synthetic oligonucleotide
acuaaucaagaguuguguc

SEQ ID NO: 2425422 - RNA, 19 nt, Artificial Sequence
  Description of Artificial Sequence: Synthetic oligonucleotide
aaguuuggaacuaaucaag

SEQ ID NO: 2425423 - RNA, 19 nt, Artificial Sequence
  Description of Artificial Sequence: Synthetic oligonucleotide
acuacuuagcuauggaaug

SEQ ID NO: 2425424 - RNA, 19 nt, Artificial Sequence
  Description of Artificial Sequence: Synthetic oligonucleotide
ucuguuuacgaugaguaug

SEQ ID NO: 2425425 - RNA, 19 nt, Artificial Sequence
  Description of Artificial Sequence: Synthetic oligonucleotide
aaauguuccaaggugcucu

SEQ ID NO: 2425426 - RNA, 19 nt, Artificial Sequence
  Description of Artificial Sequence: Synthetic oligonucleotide
acuucugaaucaugcaagg

SEQ ID NO: 2425427 - RNA, 19 nt, Artificial Sequence
  Description of Artificial Sequence: Synthetic oligonucleotide
gacacacacacacauauga

SEQ ID NO: 2425428 - RNA, 19 nt, Artificial Sequence
  Description of Artificial Sequence: Synthetic oligonucleotide
aaccgauacauuauaucac

SEQ ID NO: 2425429 - RNA, 19 nt, Artificial Sequence
  Description of Artificial Sequence: Synthetic oligonucleotide
uccaagcaagcccucaggg

SEQ ID NO: 2425430 - RNA, 19 nt, Artificial Sequence
  Description of Artificial Sequence: Synthetic oligonucleotide
auuuauuguucuccugccg

SEQ ID NO: 2425431 - RNA, 19 nt, Artificial Sequence
  Description of Artificial Sequence: Synthetic oligonucleotide
uauggaaugcgugacacac

SEQ ID NO: 2425432 - RNA, 19 nt, Artificial Sequence
  Description of Artificial Sequence: Synthetic oligonucleotide
aacuaaucaagaguugugu

SEQ ID NO: 2425433 - RNA, 19 nt, Artificial Sequence
  Description of Artificial Sequence: Synthetic oligonucleotide
auaucacuacuuccaagac

SEQ ID NO: 2425434 - RNA, 19 nt, Artificial Sequence
  Description of Artificial Sequence: Synthetic oligonucleotide
uuauaucacuacuuccaag

SEQ ID NO: 2425435 - RNA, 19 nt, Artificial Sequence
  Description of Artificial Sequence: Synthetic oligonucleotide
uuaaccgauacauuauauc

SEQ ID NO: 2425436 - RNA, 19 nt, Artificial Sequence
  Description of Artificial Sequence: Synthetic oligonucleotide
cagaguucgaagcaugucc

SEQ ID NO: 2425437 - RNA, 19 nt, Artificial Sequence
  Description of Artificial Sequence: Synthetic oligonucleotide
caagaguugugucaaacac

SEQ ID NO: 2425438 - RNA, 19 nt, Artificial Sequence
  Description of Artificial Sequence: Synthetic oligonucleotide
ugaguaugugagaaagccc

SEQ ID NO: 2425439 - RNA, 19 nt, Artificial Sequence
  Description of Artificial Sequence: Synthetic oligonucleotide
acauaugaagacccggaag

SEQ ID NO: 2425440 - RNA, 19 nt, Artificial Sequence
  Description of Artificial Sequence: Synthetic oligonucleotide
aguugugucaaacacuaaa

SEQ ID NO: 2425441 - RNA, 19 nt, Artificial Sequence
  Description of Artificial Sequence: Synthetic oligonucleotide
ugugagaaagccccacaag

SEQ ID NO: 2425442 - RNA, 19 nt, Artificial Sequence
  Description of Artificial Sequence: Synthetic oligonucleotide
uuaugugugugucauuuau

SEQ ID NO: 2425443 - RNA, 19 nt, Artificial Sequence
  Description of Artificial Sequence: Synthetic oligonucleotide
aaaacucggacgcuaacuu

SEQ ID NO: 2425444 - RNA, 19 nt, Artificial Sequence
  Description of Artificial Sequence: Synthetic oligonucleotide
aaaauauggcuugcuuaac

SEQ ID NO: 2425445 - RNA, 19 nt, Artificial Sequence
  Description of Artificial Sequence: Synthetic oligonucleotide
uggaaugcgugacacacac

SEQ ID NO: 2425446 - RNA, 19 nt, Artificial Sequence
  Description of Artificial Sequence: Synthetic oligonucleotide
cacacacacacauaugaag

SEQ ID NO: 2425447 - RNA, 19 nt, Artificial Sequence
  Description of Artificial Sequence: Synthetic oligonucleotide
uuccuucuuagcuugggcc

SEQ ID NO: 2425448 - RNA, 19 nt, Artificial Sequence
  Description of Artificial Sequence: Synthetic oligonucleotide
cauaugaagacccggaaga

SEQ ID NO: 2425449 - RNA, 19 nt, Artificial Sequence
  Description of Artificial Sequence: Synthetic oligonucleotide
gauuucucuuugcugcggg

SEQ ID NO: 2425450 - RNA, 19 nt, Artificial Sequence
  Description of Artificial Sequence: Synthetic oligonucleotide
ucaagaguugugucaaaca

SEQ ID NO: 2425451 - RNA, 19 nt, Artificial Sequence
  Description of Artificial Sequence: Synthetic oligonucleotide
aauguuccaaggugcucuc

SEQ ID NO: 2425452 - RNA, 19 nt, Artificial Sequence
  Description of Artificial Sequence: Synthetic oligonucleotide
uuugcuuuguggauuggaa

SEQ ID NO: 2425453 - RNA, 19 nt, Artificial Sequence
  Description of Artificial Sequence: Synthetic oligonucleotide
cauuuauuguucuccugcc

SEQ ID NO: 2425454 - RNA, 19 nt, Artificial Sequence
  Description of Artificial Sequence: Synthetic oligonucleotide
uugcuuaaccgauacauua

SEQ ID NO: 2425455 - RNA, 19 nt, Artificial Sequence
  Description of Artificial Sequence: Synthetic oligonucleotide
aaucaugcaagggagccca

SEQ ID NO: 2425456 - RNA, 19 nt, Artificial Sequence
  Description of Artificial Sequence: Synthetic oligonucleotide
gagaaagccccacaagggc

SEQ ID NO: 2425457 - RNA, 19 nt, Artificial Sequence
  Description of Artificial Sequence: Synthetic oligonucleotide
ugugugucauuuauuguuc

SEQ ID NO: 2425458 - RNA, 19 nt, Artificial Sequence
  Description of Artificial Sequence: Synthetic oligonucleotide
uugcuuuguggauuggaag

SEQ ID NO: 2425459 - RNA, 19 nt, Artificial Sequence
  Description of Artificial Sequence: Synthetic oligonucleotide
ugcuaaauacacuucugaa

SEQ ID NO: 2425460 - RNA, 19 nt, Artificial Sequence
  Description of Artificial Sequence: Synthetic oligonucleotide
ugauggcaacuuuaucugg

SEQ ID NO: 2425461 - RNA, 19 nt, Artificial Sequence
  Description of Artificial Sequence: Synthetic oligonucleotide
accgauacauuauaucacu

SEQ ID NO: 2425462 - RNA, 19 nt, Artificial Sequence
  Description of Artificial Sequence: Synthetic oligonucleotide
cuuagcuauggaaugcgug

SEQ ID NO: 2425463 - RNA, 19 nt, Artificial Sequence
  Description of Artificial Sequence: Synthetic oligonucleotide
aucaagaguugugucaaac

SEQ ID NO: 2425464 - RNA, 19 nt, Artificial Sequence
  Description of Artificial Sequence: Synthetic oligonucleotide
agucugggcauuuucucuc

SEQ ID NO: 2425465 - RNA, 19 nt, Artificial Sequence
  Description of Artificial Sequence: Synthetic oligonucleotide
uuuguggauuggaagucug

SEQ ID NO: 2425466 - RNA, 19 nt, Artificial Sequence
  Description of Artificial Sequence: Synthetic oligonucleotide
uacuuagcuauggaaugcg

SEQ ID NO: 2425467 - RNA, 19 nt, Artificial Sequence
  Description of Artificial Sequence: Synthetic oligonucleotide
ucuucucuagagaugcuaa

SEQ ID NO: 2425468 - RNA, 19 nt, Artificial Sequence
  Description of Artificial Sequence: Synthetic oligonucleotide
augcuaaauacacuucuga

SEQ ID NO: 2425469 - RNA, 19 nt, Artificial Sequence
  Description of Artificial Sequence: Synthetic oligonucleotide
cugccugcgacucuggagg

SEQ ID NO: 2425470 - RNA, 19 nt, Artificial Sequence
  Description of Artificial Sequence: Synthetic oligonucleotide
guucgaagcauguccuugg

SEQ ID NO: 2425471 - RNA, 19 nt, Artificial Sequence
  Description of Artificial Sequence: Synthetic oligonucleotide
uaaucaagaguugugucaa

SEQ ID NO: 2425472 - RNA, 19 nt, Artificial Sequence
  Description of Artificial Sequence: Synthetic oligonucleotide
gcaaguuuggaacuaauca

SEQ ID NO: 2425473 - RNA, 19 nt, Artificial Sequence
  Description of Artificial Sequence: Synthetic oligonucleotide
uggauuucucuuugcugcg

SEQ ID NO: 2425474 - RNA, 19 nt, Artificial Sequence
  Description of Artificial Sequence: Synthetic oligonucleotide
uaugugagaaagccccaca

SEQ ID NO: 2425475 - RNA, 19 nt, Artificial Sequence
  Description of Artificial Sequence: Synthetic oligonucleotide
ugucaaacacuaaaccaua

SEQ ID NO: 2425476 - RNA, 19 nt, Artificial Sequence
  Description of Artificial Sequence: Synthetic oligonucleotide
ugugcugauggcaacuuua

SEQ ID NO: 2425477 - RNA, 19 nt, Artificial Sequence
  Description of Artificial Sequence: Synthetic oligonucleotide
gaugagaaacuggaccucc

SEQ ID NO: 2425478 - RNA, 19 nt, Artificial Sequence
  Description of Artificial Sequence: Synthetic oligonucleotide
uacgaugaguaugugagaa

SEQ ID NO: 2425479 - RNA, 19 nt, Artificial Sequence
  Description of Artificial Sequence: Synthetic oligonucleotide
ugacuacuuagcuauggaa

SEQ ID NO: 2425480 - RNA, 19 nt, Artificial Sequence
  Description of Artificial Sequence: Synthetic oligonucleotide
uccuucuuagcuugggcca

SEQ ID NO: 2425481 - RNA, 19 nt, Artificial Sequence
  Description of Artificial Sequence: Synthetic oligonucleotide
gugucauuuauuguucucc

SEQ ID NO: 2425482 - RNA, 19 nt, Artificial Sequence
  Description of Artificial Sequence: Synthetic oligonucleotide
uggaacuaaucaagaguug

SEQ ID NO: 2425483 - RNA, 19 nt, Artificial Sequence
  Description of Artificial Sequence: Synthetic oligonucleotide
guugugucaaacacuaaac

SEQ ID NO: 2425484 - RNA, 19 nt, Artificial Sequence
  Description of Artificial Sequence: Synthetic oligonucleotide
caaguuuggaacuaaucaa

SEQ ID NO: 2425485 - RNA, 19 nt, Artificial Sequence
  Description of Artificial Sequence: Synthetic oligonucleotide
gaacuaaucaagaguugug

SEQ ID NO: 2425486 - RNA, 19 nt, Artificial Sequence
  Description of Artificial Sequence: Synthetic oligonucleotide
aagaguugugucaaacacu

SEQ ID NO: 2425487 - RNA, 19 nt, Artificial Sequence
  Description of Artificial Sequence: Synthetic oligonucleotide
uuagcuugggccagaguuc

SEQ ID NO: 2425488 - RNA, 19 nt, Artificial Sequence
  Description of Artificial Sequence: Synthetic oligonucleotide
uucucuuggaggaaccgau

SEQ ID NO: 2425489 - RNA, 19 nt, Artificial Sequence
  Description of Artificial Sequence: Synthetic oligonucleotide
cuacuuccaagacagucac

SEQ ID NO: 2425490 - RNA, 19 nt, Artificial Sequence
  Description of Artificial Sequence: Synthetic oligonucleotide
aacucggacgcuaacuucu

SEQ ID NO: 2425491 - RNA, 19 nt, Artificial Sequence
  Description of Artificial Sequence: Synthetic oligonucleotide
aaucaaguccauccacaaa

SEQ ID NO: 2425492 - RNA, 19 nt, Artificial Sequence
  Description of Artificial Sequence: Synthetic oligonucleotide
ugcuuaaccgauacauuau

SEQ ID NO: 2425493 - RNA, 19 nt, Artificial Sequence
  Description of Artificial Sequence: Synthetic oligonucleotide
augcaagggagcccagggc

SEQ ID NO: 2425494 - RNA, 19 nt, Artificial Sequence
  Description of Artificial Sequence: Synthetic oligonucleotide
guuuacgaugaguauguga

SEQ ID NO: 2425495 - RNA, 19 nt, Artificial Sequence
  Description of Artificial Sequence: Synthetic oligonucleotide
cucucaucagaaucaaguc

SEQ ID NO: 2425496 - RNA, 19 nt, Artificial Sequence
  Description of Artificial Sequence: Synthetic oligonucleotide
auuucucuuugcugcgggg

SEQ ID NO: 2425497 - RNA, 19 nt, Artificial Sequence
  Description of Artificial Sequence: Synthetic oligonucleotide
agcaaguuuggaacuaauc

SEQ ID NO: 2425498 - RNA, 19 nt, Artificial Sequence
  Description of Artificial Sequence: Synthetic oligonucleotide
agggcuuggacuccaggag

SEQ ID NO: 2425499 - RNA, 19 nt, Artificial Sequence
  Description of Artificial Sequence: Synthetic oligonucleotide
agggcuuuacagcuggcug

SEQ ID NO: 2425500 - RNA, 19 nt, Artificial Sequence
  Description of Artificial Sequence: Synthetic oligonucleotide
ugcuccugacuacuuagcu

SEQ ID NO: 2425501 - RNA, 19 nt, Artificial Sequence
  Description of Artificial Sequence: Synthetic oligonucleotide
uuucucuuugcugcggggc

SEQ ID NO: 2425502 - RNA, 19 nt, Artificial Sequence
  Description of Artificial Sequence: Synthetic oligonucleotide
auuuucucucccuggauuu

SEQ ID NO: 2425503 - RNA, 19 nt, Artificial Sequence
  Description of Artificial Sequence: Synthetic oligonucleotide
uaaaccuuugauucuucuu

SEQ ID NO: 2425504 - RNA, 19 nt, Artificial Sequence
  Description of Artificial Sequence: Synthetic oligonucleotide
cuacuuagcuauggaaugc

SEQ ID NO: 2425505 - RNA, 19 nt, Artificial Sequence
  Description of Artificial Sequence: Synthetic oligonucleotide
cacacauaugaagacccgg

SEQ ID NO: 2425506 - RNA, 19 nt, Artificial Sequence
  Description of Artificial Sequence: Synthetic oligonucleotide
auauggcuugcuuaaccga

SEQ ID NO: 2425507 - RNA, 19 nt, Artificial Sequence
  Description of Artificial Sequence: Synthetic oligonucleotide
acgcuaacuucucuuggag

SEQ ID NO: 2425508 - RNA, 19 nt, Artificial Sequence
  Description of Artificial Sequence: Synthetic oligonucleotide
gacagucacacaugccagc

SEQ ID NO: 2425509 - RNA, 19 nt, Artificial Sequence
  Description of Artificial Sequence: Synthetic oligonucleotide
ugacacacacacacauaug

SEQ ID NO: 2425510 - RNA, 19 nt, Artificial Sequence
  Description of Artificial Sequence: Synthetic oligonucleotide
ugucuucucugccugcgac

SEQ ID NO: 2425511 - RNA, 19 nt, Artificial Sequence
  Description of Artificial Sequence: Synthetic oligonucleotide
auuuaaaccuuugauucuu

SEQ ID NO: 2425512 - RNA, 19 nt, Artificial Sequence
  Description of Artificial Sequence: Synthetic oligonucleotide
uugacacaaggaacaaauc

SEQ ID NO: 2425513 - RNA, 19 nt, Artificial Sequence
  Description of Artificial Sequence: Synthetic oligonucleotide
cuuguccccggccucagcc

SEQ ID NO: 2425514 - RNA, 19 nt, Artificial Sequence
  Description of Artificial Sequence: Synthetic oligonucleotide
aaagcccuuuccccuugag

SEQ ID NO: 2425515 - RNA, 19 nt, Artificial Sequence
  Description of Artificial Sequence: Synthetic oligonucleotide
ugugucauuuauuguucuc

SEQ ID NO: 2425516 - RNA, 19 nt, Artificial Sequence
  Description of Artificial Sequence: Synthetic oligonucleotide
agaaucaaguccauccaca

SEQ ID NO: 2425517 - RNA, 19 nt, Artificial Sequence
  Description of Artificial Sequence: Synthetic oligonucleotide
uugagucccucuguuuacg

SEQ ID NO: 2425518 - RNA, 19 nt, Artificial Sequence
  Description of Artificial Sequence: Synthetic oligonucleotide
gcugucaagcucuccaccg

SEQ ID NO: 2425519 - RNA, 19 nt, Artificial Sequence
  Description of Artificial Sequence: Synthetic oligonucleotide
uccucugugcugauggcaa

SEQ ID NO: 2425520 - RNA, 19 nt, Artificial Sequence
  Description of Artificial Sequence: Synthetic oligonucleotide
uucucuuugcugcggggcu

SEQ ID NO: 2425521 - RNA, 19 nt, Artificial Sequence
  Description of Artificial Sequence: Synthetic oligonucleotide
aagcccuuuccccuugagu

SEQ ID NO: 2425522 - RNA, 19 nt, Artificial Sequence
  Description of Artificial Sequence: Synthetic oligonucleotide
cuucugaaucaugcaaggg

SEQ ID NO: 2425523 - RNA, 19 nt, Artificial Sequence
  Description of Artificial Sequence: Synthetic oligonucleotide
cagaaucaaguccauccac

SEQ ID NO: 2425524 - RNA, 19 nt, Artificial Sequence
  Description of Artificial Sequence: Synthetic oligonucleotide
uuacgaugaguaugugaga

SEQ ID NO: 2425525 - RNA, 19 nt, Artificial Sequence
  Description of Artificial Sequence: Synthetic oligonucleotide
cugaccucacucuccuugg

SEQ ID NO: 2425526 - RNA, 19 nt, Artificial Sequence
  Description of Artificial Sequence: Synthetic oligonucleotide
uggcuugcuuaaccgauac

SEQ ID NO: 2425527 - RNA, 19 nt, Artificial Sequence
  Description of Artificial Sequence: Synthetic oligonucleotide
uggcaacuuuaucuggcug

SEQ ID NO: 2425528 - RNA, 19 nt, Artificial Sequence
  Description of Artificial Sequence: Synthetic oligonucleotide
ccuauuuugacacaaggaa

SEQ ID NO: 2425529 - RNA, 19 nt, Artificial Sequence
  Description of Artificial Sequence: Synthetic oligonucleotide
gacgcuaacuucucuugga

SEQ ID NO: 2425530 - RNA, 19 nt, Artificial Sequence
  Description of Artificial Sequence: Synthetic oligonucleotide
caagacagucacacaugcc

SEQ ID NO: 2425531 - RNA, 19 nt, Artificial Sequence
  Description of Artificial Sequence: Synthetic oligonucleotide
gcugauggcaacuuuaucu

SEQ ID NO: 2425532 - RNA, 19 nt, Artificial Sequence
  Description of Artificial Sequence: Synthetic oligonucleotide
aguuuggaacuaaucaaga

SEQ ID NO: 2425533 - RNA, 19 nt, Artificial Sequence
  Description of Artificial Sequence: Synthetic oligonucleotide
aguucgaagcauguccuug

SEQ ID NO: 2425534 - RNA, 19 nt, Artificial Sequence
  Description of Artificial Sequence: Synthetic oligonucleotide
aaccgaucccagcauuccu

SEQ ID NO: 2425535 - RNA, 19 nt, Artificial Sequence
  Description of Artificial Sequence: Synthetic oligonucleotide
augugagaaagccccacaa

SEQ ID NO: 2425536 - RNA, 19 nt, Artificial Sequence
  Description of Artificial Sequence: Synthetic oligonucleotide
cuugagucccucuguuuac

SEQ ID NO: 2425537 - RNA, 19 nt, Artificial Sequence
  Description of Artificial Sequence: Synthetic oligonucleotide
gggcuuuacagcuggcugg

SEQ ID NO: 2425538 - RNA, 19 nt, Artificial Sequence
  Description of Artificial Sequence: Synthetic oligonucleotide
agcccagggcuuuacagcu

SEQ ID NO: 2425539 - RNA, 19 nt, Artificial Sequence
  Description of Artificial Sequence: Synthetic oligonucleotide
uuggagguuacuuccucau

SEQ ID NO: 2425540 - RNA, 19 nt, Artificial Sequence
  Description of Artificial Sequence: Synthetic oligonucleotide
uccccuauuuugacacaag

SEQ ID NO: 2425541 - RNA, 19 nt, Artificial Sequence
  Description of Artificial Sequence: Synthetic oligonucleotide
gaaucaugcaagggagccc

SEQ ID NO: 2425542 - RNA, 19 nt, Artificial Sequence
  Description of Artificial Sequence: Synthetic oligonucleotide
cacuacuuccaagacaguc

SEQ ID NO: 2425543 - RNA, 19 nt, Artificial Sequence
  Description of Artificial Sequence: Synthetic oligonucleotide
uucgaagcauguccuugga

SEQ ID NO: 2425544 - RNA, 19 nt, Artificial Sequence
  Description of Artificial Sequence: Synthetic oligonucleotide
auggcaacuuuaucuggcu

SEQ ID NO: 2425545 - RNA, 19 nt, Artificial Sequence
  Description of Artificial Sequence: Synthetic oligonucleotide
ugcucucaucagaaucaag

SEQ ID NO: 2425546 - RNA, 19 nt, Artificial Sequence
  Description of Artificial Sequence: Synthetic oligonucleotide
ucaugcaagggagcccagg

SEQ ID NO: 2425547 - RNA, 19 nt, Artificial Sequence
  Description of Artificial Sequence: Synthetic oligonucleotide
cuuagcuugggccagaguu

SEQ ID NO: 2425548 - RNA, 19 nt, Artificial Sequence
  Description of Artificial Sequence: Synthetic oligonucleotide
aaucaagaguugugucaaa

SEQ ID NO: 2425549 - RNA, 19 nt, Artificial Sequence
  Description of Artificial Sequence: Synthetic oligonucleotide
gaagacccggaagagagaa

SEQ ID NO: 2425550 - RNA, 19 nt, Artificial Sequence
  Description of Artificial Sequence: Synthetic oligonucleotide
cacaaggaacaaaucaaaa

SEQ ID NO: 2425551 - RNA, 19 nt, Artificial Sequence
  Description of Artificial Sequence: Synthetic oligonucleotide
acacauaugaagacccgga

SEQ ID NO: 2425552 - RNA, 19 nt, Artificial Sequence
  Description of Artificial Sequence: Synthetic oligonucleotide
ugcgugacacacacacaca

SEQ ID NO: 2425553 - RNA, 19 nt, Artificial Sequence
  Description of Artificial Sequence: Synthetic oligonucleotide
agacccggaagagagaaaa

SEQ ID NO: 2425554 - RNA, 19 nt, Artificial Sequence
  Description of Artificial Sequence: Synthetic oligonucleotide
uauuguucuccugccgcug

SEQ ID NO: 2425555 - RNA, 19 nt, Artificial Sequence
  Description of Artificial Sequence: Synthetic oligonucleotide
gugacacacacacacauau

SEQ ID NO: 2425556 - RNA, 19 nt, Artificial Sequence
  Description of Artificial Sequence: Synthetic oligonucleotide
cuuggcuuauguguguguc

SEQ ID NO: 2425557 - RNA, 19 nt, Artificial Sequence
  Description of Artificial Sequence: Synthetic oligonucleotide
gaaccgaucccagcauucc

SEQ ID NO: 2425558 - RNA, 19 nt, Artificial Sequence
  Description of Artificial Sequence: Synthetic oligonucleotide
ccaagacagucacacaugc

SEQ ID NO: 2425559 - RNA, 19 nt, Artificial Sequence
  Description of Artificial Sequence: Synthetic oligonucleotide
aaaagcccuuuccccuuga

SEQ ID NO: 2425560 - RNA, 19 nt, Artificial Sequence
  Description of Artificial Sequence: Synthetic oligonucleotide
gacuacuuagcuauggaau

SEQ ID NO: 2425561 - RNA, 19 nt, Artificial Sequence
  Description of Artificial Sequence: Synthetic oligonucleotide
ggcaacuuuaucuggcuga

SEQ ID NO: 2425562 - RNA, 19 nt, Artificial Sequence
  Description of Artificial Sequence: Synthetic oligonucleotide
uggaggaaccgaucccagc

SEQ ID NO: 2425563 - RNA, 19 nt, Artificial Sequence
  Description of Artificial Sequence: Synthetic oligonucleotide
cuguuuacgaugaguaugu

SEQ ID NO: 2425564 - RNA, 19 nt, Artificial Sequence
  Description of Artificial Sequence: Synthetic oligonucleotide
agcuauggaaugcgugaca

SEQ ID NO: 2425565 - RNA, 19 nt, Artificial Sequence
  Description of Artificial Sequence: Synthetic oligonucleotide
ucaucagaaucaaguccau

SEQ ID NO: 2425566 - RNA, 19 nt, Artificial Sequence
  Description of Artificial Sequence: Synthetic oligonucleotide
ucucuuggaggaaccgauc

SEQ ID NO: 2425567 - RNA, 19 nt, Artificial Sequence
  Description of Artificial Sequence: Synthetic oligonucleotide
ggaggaaccgaucccagca

SEQ ID NO: 2425568 - RNA, 19 nt, Artificial Sequence
  Description of Artificial Sequence: Synthetic oligonucleotide
acacacauaugaagacccg

SEQ ID NO: 2425569 - RNA, 19 nt, Artificial Sequence
  Description of Artificial Sequence: Synthetic oligonucleotide
ggacgcuaacuucucuugg

SEQ ID NO: 2425570 - RNA, 19 nt, Artificial Sequence
  Description of Artificial Sequence: Synthetic oligonucleotide
uggcuuaugugugugucau

SEQ ID NO: 2425571 - RNA, 19 nt, Artificial Sequence
  Description of Artificial Sequence: Synthetic oligonucleotide
uuucuucucuagagaugcu

SEQ ID NO: 2425572 - RNA, 19 nt, Artificial Sequence
  Description of Artificial Sequence: Synthetic oligonucleotide
ugaccucacucuccuuggc

SEQ ID NO: 2425573 - RNA, 19 nt, Artificial Sequence
  Description of Artificial Sequence: Synthetic oligonucleotide
ugcugcggggcugucaagc

SEQ ID NO: 2425574 - RNA, 19 nt, Artificial Sequence
  Description of Artificial Sequence: Synthetic oligonucleotide
ugcugauggcaacuuuauc

SEQ ID NO: 2425575 - RNA, 19 nt, Artificial Sequence
  Description of Artificial Sequence: Synthetic oligonucleotide
caaggugcucucaucagaa

SEQ ID NO: 2425576 - RNA, 19 nt, Artificial Sequence
  Description of Artificial Sequence: Synthetic oligonucleotide
accuuugauucuucuuagu

SEQ ID NO: 2425577 - RNA, 19 nt, Artificial Sequence
  Description of Artificial Sequence: Synthetic oligonucleotide
uagcuauggaaugcgugac

SEQ ID NO: 2425578 - RNA, 19 nt, Artificial Sequence
  Description of Artificial Sequence: Synthetic oligonucleotide
uaucuggcugaagccaucu

SEQ ID NO: 2425579 - RNA, 19 nt, Artificial Sequence
  Description of Artificial Sequence: Synthetic oligonucleotide
ugucaagcucuccaccguu

SEQ ID NO: 2425580 - RNA, 19 nt, Artificial Sequence
  Description of Artificial Sequence: Synthetic oligonucleotide
cacuaaaccauauuucuuu

SEQ ID NO: 2425581 - RNA, 19 nt, Artificial Sequence
  Description of Artificial Sequence: Synthetic oligonucleotide
ggagggaugagaaacugga

SEQ ID NO: 2425582 - RNA, 19 nt, Artificial Sequence
  Description of Artificial Sequence: Synthetic oligonucleotide
cuuggagguuacuuccuca

SEQ ID NO: 2425583 - RNA, 19 nt, Artificial Sequence
  Description of Artificial Sequence: Synthetic oligonucleotide
ucucccuggauuucucuuu

SEQ ID NO: 2425584 - RNA, 19 nt, Artificial Sequence
  Description of Artificial Sequence: Synthetic oligonucleotide
gaaauguuccaaggugcuc

SEQ ID NO: 2425585 - RNA, 19 nt, Artificial Sequence
  Description of Artificial Sequence: Synthetic oligonucleotide
ugcgacucuggagggauga

SEQ ID NO: 2425586 - RNA, 19 nt, Artificial Sequence
  Description of Artificial Sequence: Synthetic oligonucleotide
aaugcgugacacacacaca

SEQ ID NO: 2425587 - RNA, 19 nt, Artificial Sequence
  Description of Artificial Sequence: Synthetic oligonucleotide
uuccccuauuuugacacaa

SEQ ID NO: 2425588 - RNA, 19 nt, Artificial Sequence
  Description of Artificial Sequence: Synthetic oligonucleotide
agguuacuuccucauuuaa

SEQ ID NO: 2425589 - RNA, 19 nt, Artificial Sequence
  Description of Artificial Sequence: Synthetic oligonucleotide
cacacaugccagcuccaag

SEQ ID NO: 2425590 - RNA, 19 nt, Artificial Sequence
  Description of Artificial Sequence: Synthetic oligonucleotide
ccccuauuuugacacaagg

SEQ ID NO: 2425591 - RNA, 19 nt, Artificial Sequence
  Description of Artificial Sequence: Synthetic oligonucleotide
cauuuaaaccuuugauucu

SEQ ID NO: 2425592 - RNA, 19 nt, Artificial Sequence
  Description of Artificial Sequence: Synthetic oligonucleotide
ucggacgcuaacuucucuu

SEQ ID NO: 2425593 - RNA, 19 nt, Artificial Sequence
  Description of Artificial Sequence: Synthetic oligonucleotide
cgauacauuauaucacuac

SEQ ID NO: 2425594 - RNA, 19 nt, Artificial Sequence
  Description of Artificial Sequence: Synthetic oligonucleotide
cugcuccugacuacuuagc

SEQ ID NO: 2425595 - RNA, 19 nt, Artificial Sequence
  Description of Artificial Sequence: Synthetic oligonucleotide
gagguuacuuccucauuua

SEQ ID NO: 2425596 - RNA, 19 nt, Artificial Sequence
  Description of Artificial Sequence: Synthetic oligonucleotide
uuuccccuauuuugacaca

SEQ ID NO: 2425597 - RNA, 19 nt, Artificial Sequence
  Description of Artificial Sequence: Synthetic oligonucleotide
ucccagcauuccuucuuag

SEQ ID NO: 2425598 - RNA, 19 nt, Artificial Sequence
  Description of Artificial Sequence: Synthetic oligonucleotide
uguuuacgaugaguaugug

SEQ ID NO: 2425599 - RNA, 19 nt, Artificial Sequence
  Description of Artificial Sequence: Synthetic oligonucleotide
acgaugaguaugugagaaa

SEQ ID NO: 2425600 - RNA, 19 nt, Artificial Sequence
  Description of Artificial Sequence: Synthetic oligonucleotide
gggaugagaaacuggaccu

SEQ ID NO: 2425601 - RNA, 19 nt, Artificial Sequence
  Description of Artificial Sequence: Synthetic oligonucleotide
gcuauggaaugcgugacac

SEQ ID NO: 2425602 - RNA, 19 nt, Artificial Sequence
  Description of Artificial Sequence: Synthetic oligonucleotide
cuuggacuccaggaggcug

SEQ ID NO: 2425603 - RNA, 19 nt, Artificial Sequence
  Description of Artificial Sequence: Synthetic oligonucleotide
cuuaaccgauacauuauau

SEQ ID NO: 2425604 - RNA, 19 nt, Artificial Sequence
  Description of Artificial Sequence: Synthetic oligonucleotide
ucucuuugcugcggggcug

SEQ ID NO: 2425605 - RNA, 19 nt, Artificial Sequence
  Description of Artificial Sequence: Synthetic oligonucleotide
ggaacuaaucaagaguugu

SEQ ID NO: 2425606 - RNA, 19 nt, Artificial Sequence
  Description of Artificial Sequence: Synthetic oligonucleotide
uggagguuacuuccucauu

SEQ ID NO: 2425607 - RNA, 19 nt, Artificial Sequence
  Description of Artificial Sequence: Synthetic oligonucleotide
cacauaugaagacccggaa

SEQ ID NO: 2425608 - RNA, 19 nt, Artificial Sequence
  Description of Artificial Sequence: Synthetic oligonucleotide
aguaugugagaaagcccca

SEQ ID NO: 2425609 - RNA, 19 nt, Artificial Sequence
  Description of Artificial Sequence: Synthetic oligonucleotide
acacuaaaccauauuucuu

SEQ ID NO: 2425610 - RNA, 19 nt, Artificial Sequence
  Description of Artificial Sequence: Synthetic oligonucleotide
uuuccccuugagucccucu

SEQ ID NO: 2425611 - RNA, 19 nt, Artificial Sequence
  Description of Artificial Sequence: Synthetic oligonucleotide
ggauuucucuuugcugcgg

SEQ ID NO: 2425612 - RNA, 19 nt, Artificial Sequence
  Description of Artificial Sequence: Synthetic oligonucleotide
ucacuacuuccaagacagu

SEQ ID NO: 2425613 - RNA, 19 nt, Artificial Sequence
  Description of Artificial Sequence: Synthetic oligonucleotide
caucagaaucaaguccauc

SEQ ID NO: 2425614 - RNA, 19 nt, Artificial Sequence
  Description of Artificial Sequence: Synthetic oligonucleotide
acacacacacacauaugaa

SEQ ID NO: 2425615 - RNA, 19 nt, Artificial Sequence
  Description of Artificial Sequence: Synthetic oligonucleotide
aucccagcauuccuucuua

SEQ ID NO: 2425616 - RNA, 19 nt, Artificial Sequence
  Description of Artificial Sequence: Synthetic oligonucleotide
aggaaccgaucccagcauu

SEQ ID NO: 2425617 - RNA, 19 nt, Artificial Sequence
  Description of Artificial Sequence: Synthetic oligonucleotide
ggcugucaagcucuccacc

SEQ ID NO: 2425618 - RNA, 19 nt, Artificial Sequence
  Description of Artificial Sequence: Synthetic oligonucleotide
ccucuguuuacgaugagua

SEQ ID NO: 2425619 - RNA, 19 nt, Artificial Sequence
  Description of Artificial Sequence: Synthetic oligonucleotide
cuuccaagacagucacaca

SEQ ID NO: 2425620 - RNA, 19 nt, Artificial Sequence
  Description of Artificial Sequence: Synthetic oligonucleotide
gucccucuguuuacgauga

SEQ ID NO: 2425621 - RNA, 19 nt, Artificial Sequence
  Description of Artificial Sequence: Synthetic oligonucleotide
ucugugcugauggcaacuu

SEQ ID NO: 2425622 - RNA, 19 nt, Artificial Sequence
  Description of Artificial Sequence: Synthetic oligonucleotide
cacaugccagcuccaagca

SEQ ID NO: 2425623 - RNA, 19 nt, Artificial Sequence
  Description of Artificial Sequence: Synthetic oligonucleotide
gcuccaagcaagcccucag

SEQ ID NO: 2425624 - RNA, 19 nt, Artificial Sequence
  Description of Artificial Sequence: Synthetic oligonucleotide
cuuaugugugugucauuua

SEQ ID NO: 2425625 - RNA, 19 nt, Artificial Sequence
  Description of Artificial Sequence: Synthetic oligonucleotide
cuuggcuacaccugcuccu

SEQ ID NO: 2425626 - RNA, 19 nt, Artificial Sequence
  Description of Artificial Sequence: Synthetic oligonucleotide
cuacaccugcuccugacua

SEQ ID NO: 2425627 - RNA, 19 nt, Artificial Sequence
  Description of Artificial Sequence: Synthetic oligonucleotide
gguuacuuccucauuuaaa

SEQ ID NO: 2425628 - RNA, 19 nt, Artificial Sequence
  Description of Artificial Sequence: Synthetic oligonucleotide
gcuugcuuaaccgauacau

SEQ ID NO: 2425629 - RNA, 19 nt, Artificial Sequence
  Description of Artificial Sequence: Synthetic oligonucleotide
caacuuuaucuggcugaag

SEQ ID NO: 2425630 - RNA, 19 nt, Artificial Sequence
  Description of Artificial Sequence: Synthetic oligonucleotide
cccagcauuccuucuuagc

SEQ ID NO: 2425631 - RNA, 19 nt, Artificial Sequence
  Description of Artificial Sequence: Synthetic oligonucleotide
cgcuaacuucucuuggagg

SEQ ID NO: 2425632 - RNA, 19 nt, Artificial Sequence
  Description of Artificial Sequence: Synthetic oligonucleotide
uccugccgcuggcuugucc

SEQ ID NO: 2425633 - RNA, 19 nt, Artificial Sequence
  Description of Artificial Sequence: Synthetic oligonucleotide
ggagguuacuuccucauuu

SEQ ID NO: 2425634 - RNA, 19 nt, Artificial Sequence
  Description of Artificial Sequence: Synthetic oligonucleotide
gcuuaaccgauacauuaua

SEQ ID NO: 2425635 - RNA, 19 nt, Artificial Sequence
  Description of Artificial Sequence: Synthetic oligonucleotide
acucggacgcuaacuucuc

SEQ ID NO: 2425636 - RNA, 19 nt, Artificial Sequence
  Description of Artificial Sequence: Synthetic oligonucleotide
uggcuacaccugcuccuga

SEQ ID NO: 2425637 - RNA, 19 nt, Artificial Sequence
  Description of Artificial Sequence: Synthetic oligonucleotide
cagcugcuuggcuuaugug

SEQ ID NO: 2425638 - RNA, 19 nt, Artificial Sequence
  Description of Artificial Sequence: Synthetic oligonucleotide
ccuuggcuacaccugcucc

SEQ ID NO: 2425639 - RNA, 19 nt, Artificial Sequence
  Description of Artificial Sequence: Synthetic oligonucleotide
gugugucauuuauuguucu

SEQ ID NO: 2425640 - RNA, 19 nt, Artificial Sequence
  Description of Artificial Sequence: Synthetic oligonucleotide
gaucccagcauuccuucuu

SEQ ID NO: 2425641 - RNA, 19 nt, Artificial Sequence
  Description of Artificial Sequence: Synthetic oligonucleotide
cacucuccuuggcuacacc

SEQ ID NO: 2425642 - RNA, 19 nt, Artificial Sequence
  Description of Artificial Sequence: Synthetic oligonucleotide
gcuuuguggauuggaaguc

SEQ ID NO: 2425643 - RNA, 19 nt, Artificial Sequence
  Description of Artificial Sequence: Synthetic oligonucleotide
auggaaugcgugacacaca

SEQ ID NO: 2425644 - RNA, 19 nt, Artificial Sequence
  Description of Artificial Sequence: Synthetic oligonucleotide
ggaggcugaccucacucuc

SEQ ID NO: 2425645 - RNA, 19 nt, Artificial Sequence
  Description of Artificial Sequence: Synthetic oligonucleotide
cuugcuuaaccgauacauu

SEQ ID NO: 2425646 - RNA, 19 nt, Artificial Sequence
  Description of Artificial Sequence: Synthetic oligonucleotide
cuaacuucucuuggaggaa

SEQ ID NO: 2425647 - RNA, 19 nt, Artificial Sequence
  Description of Artificial Sequence: Synthetic oligonucleotide
cagucacacaugccagcuc

SEQ ID NO: 2425648 - RNA, 19 nt, Artificial Sequence
  Description of Artificial Sequence: Synthetic oligonucleotide
ggcuacaccugcuccugac

SEQ ID NO: 2425649 - RNA, 19 nt, Artificial Sequence
  Description of Artificial Sequence: Synthetic oligonucleotide
ccagcauuccuucuuagcu

SEQ ID NO: 2425650 - RNA, 19 nt, Artificial Sequence
  Description of Artificial Sequence: Synthetic oligonucleotide
gucaagcucuccaccguuc

SEQ ID NO: 2425651 - RNA, 19 nt, Artificial Sequence
  Description of Artificial Sequence: Synthetic oligonucleotide
agggagcccagggcuuuac

SEQ ID NO: 2425652 - RNA, 19 nt, Artificial Sequence
  Description of Artificial Sequence: Synthetic oligonucleotide
agcuccaagcaagcccuca

SEQ ID NO: 2425653 - RNA, 19 nt, Artificial Sequence
  Description of Artificial Sequence: Synthetic oligonucleotide
ggaaccgaucccagcauuc

SEQ ID NO: 2425654 - RNA, 19 nt, Artificial Sequence
  Description of Artificial Sequence: Synthetic oligonucleotide
cuuuguggauuggaagucu

SEQ ID NO: 2425655 - RNA, 19 nt, Artificial Sequence
  Description of Artificial Sequence: Synthetic oligonucleotide
aagacccggaagagagaaa

SEQ ID NO: 2425656 - RNA, 19 nt, Artificial Sequence
  Description of Artificial Sequence: Synthetic oligonucleotide
uugcugcggggcugucaag

SEQ ID NO: 2425657 - RNA, 19 nt, Artificial Sequence
  Description of Artificial Sequence: Synthetic oligonucleotide
ggaugagaaacuggaccuc

SEQ ID NO: 2425658 - RNA, 19 nt, Artificial Sequence
  Description of Artificial Sequence: Synthetic oligonucleotide
accgaucccagcauuccuu

SEQ ID NO: 2425659 - RNA, 19 nt, Artificial Sequence
  Description of Artificial Sequence: Synthetic oligonucleotide
cucuguuuacgaugaguau

SEQ ID NO: 2425660 - RNA, 19 nt, Artificial Sequence
  Description of Artificial Sequence: Synthetic oligonucleotide
gggcugucaagcucuccac

SEQ ID NO: 2425661 - RNA, 19 nt, Artificial Sequence
  Description of Artificial Sequence: Synthetic oligonucleotide
agcccucaggggccagcag

SEQ ID NO: 2425662 - RNA, 19 nt, Artificial Sequence
  Description of Artificial Sequence: Synthetic oligonucleotide
ccuucuuagcuugggccag

SEQ ID NO: 2425663 - RNA, 19 nt, Artificial Sequence
  Description of Artificial Sequence: Synthetic oligonucleotide
gcuuaugugugugucauuu

SEQ ID NO: 2425664 - RNA, 19 nt, Artificial Sequence
  Description of Artificial Sequence: Synthetic oligonucleotide
gaggaaccgaucccagcau

SEQ ID NO: 2425665 - RNA, 19 nt, Artificial Sequence
  Description of Artificial Sequence: Synthetic oligonucleotide
gagucccucuguuuacgau

SEQ ID NO: 2425666 - RNA, 19 nt, Artificial Sequence
  Description of Artificial Sequence: Synthetic oligonucleotide
auguuccaaggugcucuca

SEQ ID NO: 2425667 - RNA, 19 nt, Artificial Sequence
  Description of Artificial Sequence: Synthetic oligonucleotide
gcaacuuuaucuggcugaa

SEQ ID NO: 2425668 - RNA, 19 nt, Artificial Sequence
  Description of Artificial Sequence: Synthetic oligonucleotide
gauuggaagucugggcauu

SEQ ID NO: 2425669 - RNA, 19 nt, Artificial Sequence
  Description of Artificial Sequence: Synthetic oligonucleotide
gaaagccccacaagggcuu

SEQ ID NO: 2425670 - RNA, 19 nt, Artificial Sequence
  Description of Artificial Sequence: Synthetic oligonucleotide
auggcuugcuuaaccgaua

SEQ ID NO: 2425671 - RNA, 19 nt, Artificial Sequence
  Description of Artificial Sequence: Synthetic oligonucleotide
cggacgcuaacuucucuug

SEQ ID NO: 2425672 - RNA, 19 nt, Artificial Sequence
  Description of Artificial Sequence: Synthetic oligonucleotide
gaguugugucaaacacuaa

SEQ ID NO: 2425673 - RNA, 19 nt, Artificial Sequence
  Description of Artificial Sequence: Synthetic oligonucleotide
gaguucgaagcauguccuu

SEQ ID NO: 2425674 - RNA, 19 nt, Artificial Sequence
  Description of Artificial Sequence: Synthetic oligonucleotide
gcgugacacacacacacau

SEQ ID NO: 2425675 - RNA, 19 nt, Artificial Sequence
  Description of Artificial Sequence: Synthetic oligonucleotide
cuuuccccuugagucccuc

SEQ ID NO: 2425676 - RNA, 19 nt, Artificial Sequence
  Description of Artificial Sequence: Synthetic oligonucleotide
cugucaagcucuccaccgu

SEQ ID NO: 2425677 - RNA, 19 nt, Artificial Sequence
  Description of Artificial Sequence: Synthetic oligonucleotide
cucugccugcgacucugga

SEQ ID NO: 2425678 - RNA, 19 nt, Artificial Sequence
  Description of Artificial Sequence: Synthetic oligonucleotide
aagggagcccagggcuuua

SEQ ID NO: 2425679 - RNA, 19 nt, Artificial Sequence
  Description of Artificial Sequence: Synthetic oligonucleotide
ccgauacauuauaucacua

SEQ ID NO: 2425680 - RNA, 19 nt, Artificial Sequence
  Description of Artificial Sequence: Synthetic oligonucleotide
ccccacaagggcuuggacu

SEQ ID NO: 2425681 - RNA, 19 nt, Artificial Sequence
  Description of Artificial Sequence: Synthetic oligonucleotide
gcuguuugcuuuguggauu

SEQ ID NO: 2425682 - RNA, 19 nt, Artificial Sequence
  Description of Artificial Sequence: Synthetic oligonucleotide
gcuacaccugcuccugacu

SEQ ID NO: 2425683 - RNA, 19 nt, Artificial Sequence
  Description of Artificial Sequence: Synthetic oligonucleotide
ucuuugcugcggggcuguc

SEQ ID NO: 2425684 - RNA, 19 nt, Artificial Sequence
  Description of Artificial Sequence: Synthetic oligonucleotide
ccagggcuuuacagcuggc

SEQ ID NO: 2425685 - RNA, 19 nt, Artificial Sequence
  Description of Artificial Sequence: Synthetic oligonucleotide
cucggacgcuaacuucucu

SEQ ID NO: 2425686 - RNA, 19 nt, Artificial Sequence
  Description of Artificial Sequence: Synthetic oligonucleotide
ggaaugcgugacacacaca

SEQ ID NO: 2425687 - RNA, 19 nt, Artificial Sequence
  Description of Artificial Sequence: Synthetic oligonucleotide
gggagcccagggcuuuaca

SEQ ID NO: 2425688 - RNA, 19 nt, Artificial Sequence
  Description of Artificial Sequence: Synthetic oligonucleotide
gcgacucuggagggaugag

SEQ ID NO: 2425689 - RNA, 19 nt, Artificial Sequence
  Description of Artificial Sequence: Synthetic oligonucleotide
ccacaagggcuuggacucc

SEQ ID NO: 2425690 - RNA, 19 nt, Artificial Sequence
  Description of Artificial Sequence: Synthetic oligonucleotide
gccccacaagggcuuggac

SEQ ID NO: 2425691 - RNA, 19 nt, Artificial Sequence
  Description of Artificial Sequence: Synthetic oligonucleotide
cccuggauuucucuuugcu

SEQ ID NO: 2425692 - RNA, 19 nt, Artificial Sequence
  Description of Artificial Sequence: Synthetic oligonucleotide
agcuugggccagaguucga

SEQ ID NO: 2425693 - RNA, 19 nt, Artificial Sequence
  Description of Artificial Sequence: Synthetic oligonucleotide
gccagaguucgaagcaugu

SEQ ID NO: 2425694 - RNA, 19 nt, Artificial Sequence
  Description of Artificial Sequence: Synthetic oligonucleotide
gcugcggggcugucaagcu

SEQ ID NO: 2425695 - RNA, 19 nt, Artificial Sequence
  Description of Artificial Sequence: Synthetic oligonucleotide
cugugcugauggcaacuuu

SEQ ID NO: 2425696 - RNA, 19 nt, Artificial Sequence
  Description of Artificial Sequence: Synthetic oligonucleotide
gcauguccuuggagguuac

SEQ ID NO: 2425697 - RNA, 19 nt, Artificial Sequence
  Description of Artificial Sequence: Synthetic oligonucleotide
cgugacacacacacacaua

SEQ ID NO: 2425698 - RNA, 19 nt, Artificial Sequence
  Description of Artificial Sequence: Synthetic oligonucleotide
caagggagcccagggcuuu

SEQ ID NO: 2425699 - RNA, 19 nt, Artificial Sequence
  Description of Artificial Sequence: Synthetic oligonucleotide
ggcuuaugugugugucauu

SEQ ID NO: 2425700 - RNA, 19 nt, Artificial Sequence
  Description of Artificial Sequence: Synthetic oligonucleotide
gcaagcccucaggggccag

SEQ ID NO: 2425701 - RNA, 19 nt, Artificial Sequence
  Description of Artificial Sequence: Synthetic oligonucleotide
caccugcuccugacuacuu

SEQ ID NO: 2425702 - RNA, 19 nt, Artificial Sequence
  Description of Artificial Sequence: Synthetic oligonucleotide
ggaccuccucugugcugau

SEQ ID NO: 2425703 - RNA, 19 nt, Artificial Sequence
  Description of Artificial Sequence: Synthetic oligonucleotide
ggcugaccucacucuccuu

SEQ ID NO: 2425704 - RNA, 19 nt, Artificial Sequence
  Description of Artificial Sequence: Synthetic oligonucleotide
ccuuuccccuugagucccu

SEQ ID NO: 2425705 - RNA, 19 nt, Artificial Sequence
  Description of Artificial Sequence: Synthetic oligonucleotide
aauaaacuauaauuaaacc

SEQ ID NO: 2425706 - RNA, 19 nt, Artificial Sequence
  Description of Artificial Sequence: Synthetic oligonucleotide
uuuuguuaaagucagacag

SEQ ID NO: 2425707 - RNA, 19 nt, Artificial Sequence
  Description of Artificial Sequence: Synthetic oligonucleotide
aauaaauuaguccauauau

SEQ ID NO: 2425708 - RNA, 19 nt, Artificial Sequence
  Description of Artificial Sequence: Synthetic oligonucleotide
auuauaacuucucaaaugg

SEQ ID NO: 2425709 - RNA, 19 nt, Artificial Sequence
  Description of Artificial Sequence: Synthetic oligonucleotide
aauagaaccucaaacaagc

SEQ ID NO: 2425710 - RNA, 19 nt, Artificial Sequence
  Description of Artificial Sequence: Synthetic oligonucleotide
aaauaaacuauaauuaaac

SEQ ID NO: 2425711 - RNA, 19 nt, Artificial Sequence
  Description of Artificial Sequence: Synthetic oligonucleotide
ucuaaugucaccauuauaa

SEQ ID NO: 2425712 - RNA, 19 nt, Artificial Sequence
  Description of Artificial Sequence: Synthetic oligonucleotide
auauaugucuuccuaaacc

SEQ ID NO: 2425713 - RNA, 19 nt, Artificial Sequence
  Description of Artificial Sequence: Synthetic oligonucleotide
aauuaaaccacgggaaucc

SEQ ID NO: 2425714 - RNA, 19 nt, Artificial Sequence
  Description of Artificial Sequence: Synthetic oligonucleotide
aauuaguccauauaugucu

SEQ ID NO: 2425715 - RNA, 19 nt, Artificial Sequence
  Description of Artificial Sequence: Synthetic oligonucleotide
aauguauucagcaacgagg

SEQ ID NO: 2425716 - RNA, 19 nt, Artificial Sequence
  Description of Artificial Sequence: Synthetic oligonucleotide
auaaacuauaauuaaacca

SEQ ID NO: 2425717 - RNA, 19 nt, Artificial Sequence
  Description of Artificial Sequence: Synthetic oligonucleotide
aaaagaccggauuagagug

SEQ ID NO: 2425718 - RNA, 19 nt, Artificial Sequence
  Description of Artificial Sequence: Synthetic oligonucleotide
aguagaaauauauuauaac

SEQ ID NO: 2425719 - RNA, 19 nt, Artificial Sequence
  Description of Artificial Sequence: Synthetic oligonucleotide
uugucaauaaauuagucca

SEQ ID NO: 2425720 - RNA, 19 nt, Artificial Sequence
  Description of Artificial Sequence: Synthetic oligonucleotide
uaaauuaguccauauaugu

SEQ ID NO: 2425721 - RNA, 19 nt, Artificial Sequence
  Description of Artificial Sequence: Synthetic oligonucleotide
aaaccuugcuuccuggccc

SEQ ID NO: 2425722 - RNA, 19 nt, Artificial Sequence
  Description of Artificial Sequence: Synthetic oligonucleotide
uauauuauaacuucucaaa

SEQ ID NO: 2425723 - RNA, 19 nt, Artificial Sequence
  Description of Artificial Sequence: Synthetic oligonucleotide
cauuauaagaaacugcaag

SEQ ID NO: 2425724 - RNA, 19 nt, Artificial Sequence
  Description of Artificial Sequence: Synthetic oligonucleotide
aaaauagaaccucaaacaa

SEQ ID NO: 2425725 - RNA, 19 nt, Artificial Sequence
  Description of Artificial Sequence: Synthetic oligonucleotide
aauucuuuuaacaauggcu

SEQ ID NO: 2425726 - RNA, 19 nt, Artificial Sequence
  Description of Artificial Sequence: Synthetic oligonucleotide
aaaauaagucccaaacuac

SEQ ID NO: 2425727 - RNA, 19 nt, Artificial Sequence
  Description of Artificial Sequence: Synthetic oligonucleotide
ugcaagaagacuauuagaa

SEQ ID NO: 2425728 - RNA, 19 nt, Artificial Sequence
  Description of Artificial Sequence: Synthetic oligonucleotide
auagcuuuggguuuacgac

SEQ ID NO: 2425729 - RNA, 19 nt, Artificial Sequence
  Description of Artificial Sequence: Synthetic oligonucleotide
acuauaauuaaaccacggg

SEQ ID NO: 2425730 - RNA, 19 nt, Artificial Sequence
  Description of Artificial Sequence: Synthetic oligonucleotide
uuuauuagcaucugcagaa

SEQ ID NO: 2425731 - RNA, 19 nt, Artificial Sequence
  Description of Artificial Sequence: Synthetic oligonucleotide
uacaauguauucagcaacg

SEQ ID NO: 2425732 - RNA, 19 nt, Artificial Sequence
  Description of Artificial Sequence: Synthetic oligonucleotide
auuauaagaaacugcaaga

SEQ ID NO: 2425733 - RNA, 19 nt, Artificial Sequence
  Description of Artificial Sequence: Synthetic oligonucleotide
uugauuuacaguuagcauc

SEQ ID NO: 2425734 - RNA, 19 nt, Artificial Sequence
  Description of Artificial Sequence: Synthetic oligonucleotide
aaaaggugauggaugaacc

SEQ ID NO: 2425735 - RNA, 19 nt, Artificial Sequence
  Description of Artificial Sequence: Synthetic oligonucleotide
uuggcaaggaacacaaagg

SEQ ID NO: 2425736 - RNA, 19 nt, Artificial Sequence
  Description of Artificial Sequence: Synthetic oligonucleotide
aagcaugagauaauguacc

SEQ ID NO: 2425737 - RNA, 19 nt, Artificial Sequence
  Description of Artificial Sequence: Synthetic oligonucleotide
aauagcuuuggguuuacga

SEQ ID NO: 2425738 - RNA, 19 nt, Artificial Sequence
  Description of Artificial Sequence: Synthetic oligonucleotide
auucuuuuaacaauggcuc

SEQ ID NO: 2425739 - RNA, 19 nt, Artificial Sequence
  Description of Artificial Sequence: Synthetic oligonucleotide
uguaccacaaaauagcuuu

SEQ ID NO: 2425740 - RNA, 19 nt, Artificial Sequence
  Description of Artificial Sequence: Synthetic oligonucleotide
agauauauacaauuuacau

SEQ ID NO: 2425741 - RNA, 19 nt, Artificial Sequence
  Description of Artificial Sequence: Synthetic oligonucleotide
uauaugucuuccuaaaccu

SEQ ID NO: 2425742 - RNA, 19 nt, Artificial Sequence
  Description of Artificial Sequence: Synthetic oligonucleotide
uuuaacaauggcuccaugu

SEQ ID NO: 2425743 - RNA, 19 nt, Artificial Sequence
  Description of Artificial Sequence: Synthetic oligonucleotide
gaaaauaagucccaaacua

SEQ ID NO: 2425744 - RNA, 19 nt, Artificial Sequence
  Description of Artificial Sequence: Synthetic oligonucleotide
uuagcaucagaguuaaucu

SEQ ID NO: 2425745 - RNA, 19 nt, Artificial Sequence
  Description of Artificial Sequence: Synthetic oligonucleotide
acauguaacagaaugguuc

SEQ ID NO: 2425746 - RNA, 19 nt, Artificial Sequence
  Description of Artificial Sequence: Synthetic oligonucleotide
ugauggaugaaccugcgcu

SEQ ID NO: 2425747 - RNA, 19 nt, Artificial Sequence
  Description of Artificial Sequence: Synthetic oligonucleotide
acaaagguaacccuuguca

SEQ ID NO: 2425748 - RNA, 19 nt, Artificial Sequence
  Description of Artificial Sequence: Synthetic oligonucleotide
uucaguagaaauauauuau

SEQ ID NO: 2425749 - RNA, 19 nt, Artificial Sequence
  Description of Artificial Sequence: Synthetic oligonucleotide
ucagaguuaaucuaauguc

SEQ ID NO: 2425750 - RNA, 19 nt, Artificial Sequence
  Description of Artificial Sequence: Synthetic oligonucleotide
auaauguaccacaaaauag

SEQ ID NO: 2425751 - RNA, 19 nt, Artificial Sequence
  Description of Artificial Sequence: Synthetic oligonucleotide
gauaauguaccacaaaaua

SEQ ID NO: 2425752 - RNA, 19 nt, Artificial Sequence
  Description of Artificial Sequence: Synthetic oligonucleotide
acgggaauccagcagagac

SEQ ID NO: 2425753 - RNA, 19 nt, Artificial Sequence
  Description of Artificial Sequence: Synthetic oligonucleotide
acugcaagaagacuauuag

SEQ ID NO: 2425754 - RNA, 19 nt, Artificial Sequence
  Description of Artificial Sequence: Synthetic oligonucleotide
aaauuaguccauauauguc

SEQ ID NO: 2425755 - RNA, 19 nt, Artificial Sequence
  Description of Artificial Sequence: Synthetic oligonucleotide
ucuuccuaaaccuugcuuc

SEQ ID NO: 2425756 - RNA, 19 nt, Artificial Sequence
  Description of Artificial Sequence: Synthetic oligonucleotide
ucacuaugucccaagaccc

SEQ ID NO: 2425757 - RNA, 19 nt, Artificial Sequence
  Description of Artificial Sequence: Synthetic oligonucleotide
aacuauaauuaaaccacgg

SEQ ID NO: 2425758 - RNA, 19 nt, Artificial Sequence
  Description of Artificial Sequence: Synthetic oligonucleotide
aaacuauaauuaaaccacg

SEQ ID NO: 2425759 - RNA, 19 nt, Artificial Sequence
  Description of Artificial Sequence: Synthetic oligonucleotide
aaauagaaccucaaacaag

SEQ ID NO: 2425760 - RNA, 19 nt, Artificial Sequence
  Description of Artificial Sequence: Synthetic oligonucleotide
guagaaauauauuauaacu

SEQ ID NO: 2425761 - RNA, 19 nt, Artificial Sequence
  Description of Artificial Sequence: Synthetic oligonucleotide
cacaauucuuuuaacaaug

SEQ ID NO: 2425762 - RNA, 19 nt, Artificial Sequence
  Description of Artificial Sequence: Synthetic oligonucleotide
gucacuaugucccaagacc

SEQ ID NO: 2425763 - RNA, 19 nt, Artificial Sequence
  Description of Artificial Sequence: Synthetic oligonucleotide
ugagaauauguauggaugu

SEQ ID NO: 2425764 - RNA, 19 nt, Artificial Sequence
  Description of Artificial Sequence: Synthetic oligonucleotide
cuauaauuaaaccacggga

SEQ ID NO: 2425765 - RNA, 19 nt, Artificial Sequence
  Description of Artificial Sequence: Synthetic oligonucleotide
caacacauguaacagaaug

SEQ ID NO: 2425766 - RNA, 19 nt, Artificial Sequence
  Description of Artificial Sequence: Synthetic oligonucleotide
auauguauggauguggucu

SEQ ID NO: 2425767 - RNA, 19 nt, Artificial Sequence
  Description of Artificial Sequence: Synthetic oligonucleotide
auauauuauaacuucucaa

SEQ ID NO: 2425768 - RNA, 19 nt, Artificial Sequence
  Description of Artificial Sequence: Synthetic oligonucleotide
uaaaccacgggaauccagc

SEQ ID NO: 2425769 - RNA, 19 nt, Artificial Sequence
  Description of Artificial Sequence: Synthetic oligonucleotide
uucucaaaugggaaaauaa

SEQ ID NO: 2425770 - RNA, 19 nt, Artificial Sequence
  Description of Artificial Sequence: Synthetic oligonucleotide
uguaacagaaugguucagg

SEQ ID NO: 2425771 - RNA, 19 nt, Artificial Sequence
  Description of Artificial Sequence: Synthetic oligonucleotide
auuuauuagcaucugcaga

SEQ ID NO: 2425772 - RNA, 19 nt, Artificial Sequence
  Description of Artificial Sequence: Synthetic oligonucleotide
gagauaauguaccacaaaa

SEQ ID NO: 2425773 - RNA, 19 nt, Artificial Sequence
  Description of Artificial Sequence: Synthetic oligonucleotide
uuaaagucagacaggauuu

SEQ ID NO: 2425774 - RNA, 19 nt, Artificial Sequence
  Description of Artificial Sequence: Synthetic oligonucleotide
gauguggucuuucaucucc

SEQ ID NO: 2425775 - RNA, 19 nt, Artificial Sequence
  Description of Artificial Sequence: Synthetic oligonucleotide
uacaguuagcaucagaguu

SEQ ID NO: 2425776 - RNA, 19 nt, Artificial Sequence
  Description of Artificial Sequence: Synthetic oligonucleotide
agaauauguauggaugugg

SEQ ID NO: 2425777 - RNA, 19 nt, Artificial Sequence
  Description of Artificial Sequence: Synthetic oligonucleotide
auauuccccagcucaaugg

SEQ ID NO: 2425778 - RNA, 19 nt, Artificial Sequence
  Description of Artificial Sequence: Synthetic oligonucleotide
aaggaacacaaagguaacc

SEQ ID NO: 2425779 - RNA, 19 nt, Artificial Sequence
  Description of Artificial Sequence: Synthetic oligonucleotide
auggauguggucuuucauc

SEQ ID NO: 2425780 - RNA, 19 nt, Artificial Sequence
  Description of Artificial Sequence: Synthetic oligonucleotide
aaaagcuuggcaaggaaca

SEQ ID NO: 2425781 - RNA, 19 nt, Artificial Sequence
  Description of Artificial Sequence: Synthetic oligonucleotide
uuuggguuuacgacacagg

SEQ ID NO: 2425782 - RNA, 19 nt, Artificial Sequence
  Description of Artificial Sequence: Synthetic oligonucleotide
agaagcaugagauaaugua

SEQ ID NO: 2425783 - RNA, 19 nt, Artificial Sequence
  Description of Artificial Sequence: Synthetic oligonucleotide
aaccacacaauucuuuuaa

SEQ ID NO: 2425784 - RNA, 19 nt, Artificial Sequence
  Description of Artificial Sequence: Synthetic oligonucleotide
auauuauaacuucucaaau

SEQ ID NO: 2425785 - RNA, 19 nt, Artificial Sequence
  Description of Artificial Sequence: Synthetic oligonucleotide
aguuaaucuaaugucacca

SEQ ID NO: 2425786 - RNA, 19 nt, Artificial Sequence
  Description of Artificial Sequence: Synthetic oligonucleotide
aaauaagucccaaacuaca

SEQ ID NO: 2425787 - RNA, 19 nt, Artificial Sequence
  Description of Artificial Sequence: Synthetic oligonucleotide
gaccggauuagagugaggg

SEQ ID NO: 2425788 - RNA, 19 nt, Artificial Sequence
  Description of Artificial Sequence: Synthetic oligonucleotide
uuacgacacaggcauauca

SEQ ID NO: 2425789 - RNA, 19 nt, Artificial Sequence
  Description of Artificial Sequence: Synthetic oligonucleotide
auguauucagcaacgaggg

SEQ ID NO: 2425790 - RNA, 19 nt, Artificial Sequence
  Description of Artificial Sequence: Synthetic oligonucleotide
accauuauaagaaacugca

SEQ ID NO: 2425791 - RNA, 19 nt, Artificial Sequence
  Description of Artificial Sequence: Synthetic oligonucleotide
caguguacaauguauucag

SEQ ID NO: 2425792 - RNA, 19 nt, Artificial Sequence
  Description of Artificial Sequence: Synthetic oligonucleotide
uacgacacaggcauaucag

SEQ ID NO: 2425793 - RNA, 19 nt, Artificial Sequence
  Description of Artificial Sequence: Synthetic oligonucleotide
uauuagcaucugcagaagc

SEQ ID NO: 2425794 - RNA, 19 nt, Artificial Sequence
  Description of Artificial Sequence: Synthetic oligonucleotide
agaguuaaucuaaugucac

SEQ ID NO: 2425795 - RNA, 19 nt, Artificial Sequence
  Description of Artificial Sequence: Synthetic oligonucleotide
gaagcaugagauaauguac

SEQ ID NO: 2425796 - RNA, 19 nt, Artificial Sequence
  Description of Artificial Sequence: Synthetic oligonucleotide
caugagauaauguaccaca

SEQ ID NO: 2425797 - RNA, 19 nt, Artificial Sequence
  Description of Artificial Sequence: Synthetic oligonucleotide
uuguuaaagucagacagga

SEQ ID NO: 2425798 - RNA, 19 nt, Artificial Sequence
  Description of Artificial Sequence: Synthetic oligonucleotide
guuagcaucagaguuaauc

SEQ ID NO: 2425799 - RNA, 19 nt, Artificial Sequence
  Description of Artificial Sequence: Synthetic oligonucleotide
uggcaaggaacacaaaggu

SEQ ID NO: 2425800 - RNA, 19 nt, Artificial Sequence
  Description of Artificial Sequence: Synthetic oligonucleotide
ucuuucaucuccccugggc

SEQ ID NO: 2425801 - RNA, 19 nt, Artificial Sequence
  Description of Artificial Sequence: Synthetic oligonucleotide
guucaguagaaauauauua

SEQ ID NO: 2425802 - RNA, 19 nt, Artificial Sequence
  Description of Artificial Sequence: Synthetic oligonucleotide
uucuuuuaacaauggcucc

SEQ ID NO: 2425803 - RNA, 19 nt, Artificial Sequence
  Description of Artificial Sequence: Synthetic oligonucleotide
guacaauguauucagcaac

SEQ ID NO: 2425804 - RNA, 19 nt, Artificial Sequence
  Description of Artificial Sequence: Synthetic oligonucleotide
accacaaaauagcuuuggg

SEQ ID NO: 2425805 - RNA, 19 nt, Artificial Sequence
  Description of Artificial Sequence: Synthetic oligonucleotide
ucaccauuauaagaaacug

SEQ ID NO: 2425806 - RNA, 19 nt, Artificial Sequence
  Description of Artificial Sequence: Synthetic oligonucleotide
caccauuauaagaaacugc

SEQ ID NO: 2425807 - RNA, 19 nt, Artificial Sequence
  Description of Artificial Sequence: Synthetic oligonucleotide
uuaaaccacgggaauccag

SEQ ID NO: 2425808 - RNA, 19 nt, Artificial Sequence
  Description of Artificial Sequence: Synthetic oligonucleotide
uggauguggucuuucaucu

SEQ ID NO: 2425809 - RNA, 19 nt, Artificial Sequence
  Description of Artificial Sequence: Synthetic oligonucleotide
auaauuaaaccacgggaau

SEQ ID NO: 2425810 - RNA, 19 nt, Artificial Sequence
  Description of Artificial Sequence: Synthetic oligonucleotide
aauguaccacaaaauagcu

SEQ ID NO: 2425811 - RNA, 19 nt, Artificial Sequence
  Description of Artificial Sequence: Synthetic oligonucleotide
uuuagccagccauucaaca

SEQ ID NO: 2425812 - RNA, 19 nt, Artificial Sequence
  Description of Artificial Sequence: Synthetic oligonucleotide
uagaaccucaaacaagcaa

SEQ ID NO: 2425813 - RNA, 19 nt, Artificial Sequence
  Description of Artificial Sequence: Synthetic oligonucleotide
ugucaccauuauaagaaac

SEQ ID NO: 2425814 - RNA, 19 nt, Artificial Sequence
  Description of Artificial Sequence: Synthetic oligonucleotide
uaacagaaugguucaggag

SEQ ID NO: 2425815 - RNA, 19 nt, Artificial Sequence
  Description of Artificial Sequence: Synthetic oligonucleotide
uccauguucaguagaaaua

SEQ ID NO: 2425816 - RNA, 19 nt, Artificial Sequence
  Description of Artificial Sequence: Synthetic oligonucleotide
gggaaaauaagucccaaac

SEQ ID NO: 2425817 - RNA, 19 nt, Artificial Sequence
  Description of Artificial Sequence: Synthetic oligonucleotide
gaguuaaucuaaugucacc

SEQ ID NO: 2425818 - RNA, 19 nt, Artificial Sequence
  Description of Artificial Sequence: Synthetic oligonucleotide
ucuuuuaacaauggcucca

SEQ ID NO: 2425819 - RNA, 19 nt, Artificial Sequence
  Description of Artificial Sequence: Synthetic oligonucleotide
aaagguaacccuugucaau

SEQ ID NO: 2425820 - RNA, 19 nt, Artificial Sequence
  Description of Artificial Sequence: Synthetic oligonucleotide
agucagacaggauuuauua

SEQ ID NO: 2425821 - RNA, 19 nt, Artificial Sequence
  Description of Artificial Sequence: Synthetic oligonucleotide
uggucuuucaucuccccug

SEQ ID NO: 2425822 - RNA, 19 nt, Artificial Sequence
  Description of Artificial Sequence: Synthetic oligonucleotide
uuaaucuaaugucaccauu

SEQ ID NO: 2425823 - RNA, 19 nt, Artificial Sequence
  Description of Artificial Sequence: Synthetic oligonucleotide
aacccuugucaauaaauua

SEQ ID NO: 2425824 - RNA, 19 nt, Artificial Sequence
  Description of Artificial Sequence: Synthetic oligonucleotide
cuuccuaaaccuugcuucc

SEQ ID NO: 2425825 - RNA, 19 nt, Artificial Sequence
  Description of Artificial Sequence: Synthetic oligonucleotide
uguucaguagaaauauauu

SEQ ID NO: 2425826 - RNA, 19 nt, Artificial Sequence
  Description of Artificial Sequence: Synthetic oligonucleotide
uagcuuuggguuuacgaca

SEQ ID NO: 2425827 - RNA, 19 nt, Artificial Sequence
  Description of Artificial Sequence: Synthetic oligonucleotide
uaugucccaagacccuugg

SEQ ID NO: 2425828 - RNA, 19 nt, Artificial Sequence
  Description of Artificial Sequence: Synthetic oligonucleotide
uuugggaugugugugugug

SEQ ID NO: 2425829 - RNA, 19 nt, Artificial Sequence
  Description of Artificial Sequence: Synthetic oligonucleotide
uguauucagcaacgagggg

SEQ ID NO: 2425830 - RNA, 19 nt, Artificial Sequence
  Description of Artificial Sequence: Synthetic oligonucleotide
uguguguguguguuguuug

SEQ ID NO: 2425831 - RNA, 19 nt, Artificial Sequence
  Description of Artificial Sequence: Synthetic oligonucleotide
aacacaaagguaacccuug

SEQ ID NO: 2425832 - RNA, 19 nt, Artificial Sequence
  Description of Artificial Sequence: Synthetic oligonucleotide
uuagccagccauucaacac

SEQ ID NO: 2425833 - RNA, 19 nt, Artificial Sequence
  Description of Artificial Sequence: Synthetic oligonucleotide
uccauauaugucuuccuaa

SEQ ID NO: 2425834 - RNA, 19 nt, Artificial Sequence
  Description of Artificial Sequence: Synthetic oligonucleotide
uaacaauggcuccauguuc

SEQ ID NO: 2425835 - RNA, 19 nt, Artificial Sequence
  Description of Artificial Sequence: Synthetic oligonucleotide
acccuugucaauaaauuag

SEQ ID NO: 2425836 - RNA, 19 nt, Artificial Sequence
  Description of Artificial Sequence: Synthetic oligonucleotide
gaauccagcagagaccagc

SEQ ID NO: 2425837 - RNA, 19 nt, Artificial Sequence
  Description of Artificial Sequence: Synthetic oligonucleotide
guuaaagucagacaggauu

SEQ ID NO: 2425838 - RNA, 19 nt, Artificial Sequence
  Description of Artificial Sequence: Synthetic oligonucleotide
acacaauucuuuuaacaau

SEQ ID NO: 2425839 - RNA, 19 nt, Artificial Sequence
  Description of Artificial Sequence: Synthetic oligonucleotide
cagaguuaaucuaauguca

SEQ ID NO: 2425840 - RNA, 19 nt, Artificial Sequence
  Description of Artificial Sequence: Synthetic oligonucleotide
ugagauaauguaccacaaa

SEQ ID NO: 2425841 - RNA, 19 nt, Artificial Sequence
  Description of Artificial Sequence: Synthetic oligonucleotide
guguuguuuguguuugggg

SEQ ID NO: 2425842 - RNA, 19 nt, Artificial Sequence
  Description of Artificial Sequence: Synthetic oligonucleotide
uaacccuugucaauaaauu

SEQ ID NO: 2425843 - RNA, 19 nt, Artificial Sequence
  Description of Artificial Sequence: Synthetic oligonucleotide
uaauuaaaccacgggaauc

SEQ ID NO: 2425844 - RNA, 19 nt, Artificial Sequence
  Description of Artificial Sequence: Synthetic oligonucleotide
ugcuggacaugccagcgcc

SEQ ID NO: 2425845 - RNA, 19 nt, Artificial Sequence
  Description of Artificial Sequence: Synthetic oligonucleotide
uaccacaaaauagcuuugg

SEQ ID NO: 2425846 - RNA, 19 nt, Artificial Sequence
  Description of Artificial Sequence: Synthetic oligonucleotide
aacuucucaaaugggaaaa

SEQ ID NO: 2425847 - RNA, 19 nt, Artificial Sequence
  Description of Artificial Sequence: Synthetic oligonucleotide
uauuccccagcucaaugga

SEQ ID NO: 2425848 - RNA, 19 nt, Artificial Sequence
  Description of Artificial Sequence: Synthetic oligonucleotide
uuuuagccagccauucaac

SEQ ID NO: 2425849 - RNA, 19 nt, Artificial Sequence
  Description of Artificial Sequence: Synthetic oligonucleotide
agaaccucaaacaagcaaa

SEQ ID NO: 2425850 - RNA, 19 nt, Artificial Sequence
  Description of Artificial Sequence: Synthetic oligonucleotide
uaguccauauaugucuucc

SEQ ID NO: 2425851 - RNA, 19 nt, Artificial Sequence
  Description of Artificial Sequence: Synthetic oligonucleotide
auucaacacauguaacaga

SEQ ID NO: 2425852 - RNA, 19 nt, Artificial Sequence
  Description of Artificial Sequence: Synthetic oligonucleotide
guaacagaaugguucagga

SEQ ID NO: 2425853 - RNA, 19 nt, Artificial Sequence
  Description of Artificial Sequence: Synthetic oligonucleotide
cauauaugucuuccuaaac

SEQ ID NO: 2425854 - RNA, 19 nt, Artificial Sequence
  Description of Artificial Sequence: Synthetic oligonucleotide
uuccccagcucaauggagc

SEQ ID NO: 2425855 - RNA, 19 nt, Artificial Sequence
  Description of Artificial Sequence: Synthetic oligonucleotide
ugucaauaaauuaguccau

SEQ ID NO: 2425856 - RNA, 19 nt, Artificial Sequence
  Description of Artificial Sequence: Synthetic oligonucleotide
aaugggaaaauaaguccca

SEQ ID NO: 2425857 - RNA, 19 nt, Artificial Sequence
  Description of Artificial Sequence: Synthetic oligonucleotide
aaaauagcuuuggguuuac

SEQ ID NO: 2425858 - RNA, 19 nt, Artificial Sequence
  Description of Artificial Sequence: Synthetic oligonucleotide
cauguaacagaaugguuca

SEQ ID NO: 2425859 - RNA, 19 nt, Artificial Sequence
  Description of Artificial Sequence: Synthetic oligonucleotide
aggugauggaugaaccugc

SEQ ID NO: 2425860 - RNA, 19 nt, Artificial Sequence
  Description of Artificial Sequence: Synthetic oligonucleotide
acaggauuuauuagcaucu

SEQ ID NO: 2425861 - RNA, 19 nt, Artificial Sequence
  Description of Artificial Sequence: Synthetic oligonucleotide
uggguuuacgacacaggca

SEQ ID NO: 2425862 - RNA, 19 nt, Artificial Sequence
  Description of Artificial Sequence: Synthetic oligonucleotide
aagaccggauuagagugag

SEQ ID NO: 2425863 - RNA, 19 nt, Artificial Sequence
  Description of Artificial Sequence: Synthetic oligonucleotide
ugcgcuuggccuuaaaaua

SEQ ID NO: 2425864 - RNA, 19 nt, Artificial Sequence
  Description of Artificial Sequence: Synthetic oligonucleotide
gucagacaggauuuauuag

SEQ ID NO: 2425865 - RNA, 19 nt, Artificial Sequence
  Description of Artificial Sequence: Synthetic oligonucleotide
uccuaaaccuugcuuccug

SEQ ID NO: 2425866 - RNA, 19 nt, Artificial Sequence
  Description of Artificial Sequence: Synthetic oligonucleotide
aaccacgggaauccagcag

SEQ ID NO: 2425867 - RNA, 19 nt, Artificial Sequence
  Description of Artificial Sequence: Synthetic oligonucleotide
ugagaaccagcuguaaaac

SEQ ID NO: 2425868 - RNA, 19 nt, Artificial Sequence
  Description of Artificial Sequence: Synthetic oligonucleotide
uuuuaacaauggcuccaug

SEQ ID NO: 2425869 - RNA, 19 nt, Artificial Sequence
  Description of Artificial Sequence: Synthetic oligonucleotide
uuauuagcaucugcagaag

SEQ ID NO: 2425870 - RNA, 19 nt, Artificial Sequence
  Description of Artificial Sequence: Synthetic oligonucleotide
aaaccacgggaauccagca

SEQ ID NO: 2425871 - RNA, 19 nt, Artificial Sequence
  Description of Artificial Sequence: Synthetic oligonucleotide
gagaauauguauggaugug

SEQ ID NO: 2425872 - RNA, 19 nt, Artificial Sequence
  Description of Artificial Sequence: Synthetic oligonucleotide
accacgggaauccagcaga

SEQ ID NO: 2425873 - RNA, 19 nt, Artificial Sequence
  Description of Artificial Sequence: Synthetic oligonucleotide
cuuuggguuuacgacacag

SEQ ID NO: 2425874 - RNA, 19 nt, Artificial Sequence
  Description of Artificial Sequence: Synthetic oligonucleotide
aguguacaauguauucagc

SEQ ID NO: 2425875 - RNA, 19 nt, Artificial Sequence
  Description of Artificial Sequence: Synthetic oligonucleotide
auguucaguagaaauauau

SEQ ID NO: 2425876 - RNA, 19 nt, Artificial Sequence
  Description of Artificial Sequence: Synthetic oligonucleotide
aaaccacacaauucuuuua

SEQ ID NO: 2425877 - RNA, 19 nt, Artificial Sequence
  Description of Artificial Sequence: Synthetic oligonucleotide
auuagcaucugcagaagca

SEQ ID NO: 2425878 - RNA, 19 nt, Artificial Sequence
  Description of Artificial Sequence: Synthetic oligonucleotide
gaugaaccugcgcuuggcc

SEQ ID NO: 2425879 - RNA, 19 nt, Artificial Sequence
  Description of Artificial Sequence: Synthetic oligonucleotide
aagguaacccuugucaaua

SEQ ID NO: 2425880 - RNA, 19 nt, Artificial Sequence
  Description of Artificial Sequence: Synthetic oligonucleotide
guucaggaggacuccuugg

SEQ ID NO: 2425881 - RNA, 19 nt, Artificial Sequence
  Description of Artificial Sequence: Synthetic oligonucleotide
agcaugagauaauguacca

SEQ ID NO: 2425882 - RNA, 19 nt, Artificial Sequence
  Description of Artificial Sequence: Synthetic oligonucleotide
gaggggaaacauaagguuc

SEQ ID NO: 2425883 - RNA, 19 nt, Artificial Sequence
  Description of Artificial Sequence: Synthetic oligonucleotide
ucagcaacgaggggaaaca

SEQ ID NO: 2425884 - RNA, 19 nt, Artificial Sequence
  Description of Artificial Sequence: Synthetic oligonucleotide
gugagaaccagcuguaaaa

SEQ ID NO: 2425885 - RNA, 19 nt, Artificial Sequence
  Description of Artificial Sequence: Synthetic oligonucleotide
uauggauguggucuuucau

SEQ ID NO: 2425886 - RNA, 19 nt, Artificial Sequence
  Description of Artificial Sequence: Synthetic oligonucleotide
cacaaaauagcuuuggguu

SEQ ID NO: 2425887 - RNA, 19 nt, Artificial Sequence
  Description of Artificial Sequence: Synthetic oligonucleotide
uggagcaguggguacaaaa

SEQ ID NO: 2425888 - RNA, 19 nt, Artificial Sequence
  Description of Artificial Sequence: Synthetic oligonucleotide
aaauagcuuuggguuuacg

SEQ ID NO: 2425889 - RNA, 19 nt, Artificial Sequence
  Description of Artificial Sequence: Synthetic oligonucleotide
augucuuccuaaaccuugc

SEQ ID NO: 2425890 - RNA, 19 nt, Artificial Sequence
  Description of Artificial Sequence: Synthetic oligonucleotide
caucagaguuaaucuaaug

SEQ ID NO: 2425891 - RNA, 19 nt, Artificial Sequence
  Description of Artificial Sequence: Synthetic oligonucleotide
uuagcaucugcagaagcau

SEQ ID NO: 2425892 - RNA, 19 nt, Artificial Sequence
  Description of Artificial Sequence: Synthetic oligonucleotide
uagcaucugcagaagcaug

SEQ ID NO: 2425893 - RNA, 19 nt, Artificial Sequence
  Description of Artificial Sequence: Synthetic oligonucleotide
cagacaggauuuauuagca

SEQ ID NO: 2425894 - RNA, 19 nt, Artificial Sequence
  Description of Artificial Sequence: Synthetic oligonucleotide
agauaauguaccacaaaau

SEQ ID NO: 2425895 - RNA, 19 nt, Artificial Sequence
  Description of Artificial Sequence: Synthetic oligonucleotide
ugggaugugugugugugug

SEQ ID NO: 2425896 - RNA, 19 nt, Artificial Sequence
  Description of Artificial Sequence: Synthetic oligonucleotide
ggaaacauaagguucacau

SEQ ID NO: 2425897 - RNA, 19 nt, Artificial Sequence
  Description of Artificial Sequence: Synthetic oligonucleotide
uauguauggauguggucuu

SEQ ID NO: 2425898 - RNA, 19 nt, Artificial Sequence
  Description of Artificial Sequence: Synthetic oligonucleotide
aacugcaagaagacuauua

SEQ ID NO: 2425899 - RNA, 19 nt, Artificial Sequence
  Description of Artificial Sequence: Synthetic oligonucleotide
caccauauuccccagcuca

SEQ ID NO: 2425900 - RNA, 19 nt, Artificial Sequence
  Description of Artificial Sequence: Synthetic oligonucleotide
aaagucagacaggauuuau

SEQ ID NO: 2425901 - RNA, 19 nt, Artificial Sequence
  Description of Artificial Sequence: Synthetic oligonucleotide
augaaccugcgcuuggccu

SEQ ID NO: 2425902 - RNA, 19 nt, Artificial Sequence
  Description of Artificial Sequence: Synthetic oligonucleotide
uucagcaacgaggggaaac

SEQ ID NO: 2425903 - RNA, 19 nt, Artificial Sequence
  Description of Artificial Sequence: Synthetic oligonucleotide
uagcaucagaguuaaucua

SEQ ID NO: 2425904 - RNA, 19 nt, Artificial Sequence
  Description of Artificial Sequence: Synthetic oligonucleotide
uguguguguguuguuugug

SEQ ID NO: 2425905 - RNA, 19 nt, Artificial Sequence
  Description of Artificial Sequence: Synthetic oligonucleotide
acgacacaggcauaucaga

SEQ ID NO: 2425906 - RNA, 19 nt, Artificial Sequence
  Description of Artificial Sequence: Synthetic oligonucleotide
aagcuuggcaaggaacaca

SEQ ID NO: 2425907 - RNA, 19 nt, Artificial Sequence
  Description of Artificial Sequence: Synthetic oligonucleotide
acaccauauuccccagcuc

SEQ ID NO: 2425908 - RNA, 19 nt, Artificial Sequence
  Description of Artificial Sequence: Synthetic oligonucleotide
gcccugagaauauguaugg

SEQ ID NO: 2425909 - RNA, 19 nt, Artificial Sequence
  Description of Artificial Sequence: Synthetic oligonucleotide
agaaugguucaggaggacu

SEQ ID NO: 2425910 - RNA, 19 nt, Artificial Sequence
  Description of Artificial Sequence: Synthetic oligonucleotide
ugcagaagcaugagauaau

SEQ ID NO: 2425911 - RNA, 19 nt, Artificial Sequence
  Description of Artificial Sequence: Synthetic oligonucleotide
gcuugauuuacaguuagca

SEQ ID NO: 2425912 - RNA, 19 nt, Artificial Sequence
  Description of Artificial Sequence: Synthetic oligonucleotide
ucugcagaagcaugagaua

SEQ ID NO: 2425913 - RNA, 19 nt, Artificial Sequence
  Description of Artificial Sequence: Synthetic oligonucleotide
uguguguguguguguguug

SEQ ID NO: 2425914 - RNA, 19 nt, Artificial Sequence
  Description of Artificial Sequence: Synthetic oligonucleotide
caaagguaacccuugucaa

SEQ ID NO: 2425915 - RNA, 19 nt, Artificial Sequence
  Description of Artificial Sequence: Synthetic oligonucleotide
augucccaagacccuuggc

SEQ ID NO: 2425916 - RNA, 19 nt, Artificial Sequence
  Description of Artificial Sequence: Synthetic oligonucleotide
aaagaccggauuagaguga

SEQ ID NO: 2425917 - RNA, 19 nt, Artificial Sequence
  Description of Artificial Sequence: Synthetic oligonucleotide
aggggaaacauaagguuca

SEQ ID NO: 2425918 - RNA, 19 nt, Artificial Sequence
  Description of Artificial Sequence: Synthetic oligonucleotide
auguggucuuucaucuccc

SEQ ID NO: 2425919 - RNA, 19 nt, Artificial Sequence
  Description of Artificial Sequence: Synthetic oligonucleotide
ucaacacauguaacagaau

SEQ ID NO: 2425920 - RNA, 19 nt, Artificial Sequence
  Description of Artificial Sequence: Synthetic oligonucleotide
ugagggaggugagaaccag

SEQ ID NO: 2425921 - RNA, 19 nt, Artificial Sequence
  Description of Artificial Sequence: Synthetic oligonucleotide
acgaggggaaacauaaggu

SEQ ID NO: 2425922 - RNA, 19 nt, Artificial Sequence
  Description of Artificial Sequence: Synthetic oligonucleotide
cugcaagaagacuauuaga

SEQ ID NO: 2425923 - RNA, 19 nt, Artificial Sequence
  Description of Artificial Sequence: Synthetic oligonucleotide
gaauauguauggauguggu

SEQ ID NO: 2425924 - RNA, 19 nt, Artificial Sequence
  Description of Artificial Sequence: Synthetic oligonucleotide
augugugugugugugugug

SEQ ID NO: 2425925 - RNA, 19 nt, Artificial Sequence
  Description of Artificial Sequence: Synthetic oligonucleotide
acaauggcuccauguucag

SEQ ID NO: 2425926 - RNA, 19 nt, Artificial Sequence
  Description of Artificial Sequence: Synthetic oligonucleotide
auggcuccauguucaguag

SEQ ID NO: 2425927 - RNA, 19 nt, Artificial Sequence
  Description of Artificial Sequence: Synthetic oligonucleotide
acacaaagguaacccuugu

SEQ ID NO: 2425928 - RNA, 19 nt, Artificial Sequence
  Description of Artificial Sequence: Synthetic oligonucleotide
ugaaccugcgcuuggccuu

SEQ ID NO: 2425929 - RNA, 19 nt, Artificial Sequence
  Description of Artificial Sequence: Synthetic oligonucleotide
cuuggccuuaaaauaaacu

SEQ ID NO: 2425930 - RNA, 19 nt, Artificial Sequence
  Description of Artificial Sequence: Synthetic oligonucleotide
gcagagaccagcuugauuu

SEQ ID NO: 2425931 - RNA, 19 nt, Artificial Sequence
  Description of Artificial Sequence: Synthetic oligonucleotide
ccggauuagagugagggag

SEQ ID NO: 2425932 - RNA, 19 nt, Artificial Sequence
  Description of Artificial Sequence: Synthetic oligonucleotide
acaauguauucagcaacga

SEQ ID NO: 2425933 - RNA, 19 nt, Artificial Sequence
  Description of Artificial Sequence: Synthetic oligonucleotide
aagucagacaggauuuauu

SEQ ID NO: 2425934 - RNA, 19 nt, Artificial Sequence
  Description of Artificial Sequence: Synthetic oligonucleotide
ugugugugugugugugugu

SEQ ID NO: 2425935 - RNA, 19 nt, Artificial Sequence
  Description of Artificial Sequence: Synthetic oligonucleotide
acaguuagcaucagaguua

SEQ ID NO: 2425936 - RNA, 19 nt, Artificial Sequence
  Description of Artificial Sequence: Synthetic oligonucleotide
uguauggauguggucuuuc

SEQ ID NO: 2425937 - RNA, 19 nt, Artificial Sequence
  Description of Artificial Sequence: Synthetic oligonucleotide
uggcuccauguucaguaga

SEQ ID NO: 2425938 - RNA, 19 nt, Artificial Sequence
  Description of Artificial Sequence: Synthetic oligonucleotide
ggaggugagaaccagcugu

SEQ ID NO: 2425939 - RNA, 19 nt, Artificial Sequence
  Description of Artificial Sequence: Synthetic oligonucleotide
cuugauuuacaguuagcau

SEQ ID NO: 2425940 - RNA, 19 nt, Artificial Sequence
  Description of Artificial Sequence: Synthetic oligonucleotide
uuucaucuccccugggcuu

SEQ ID NO: 2425941 - RNA, 19 nt, Artificial Sequence
  Description of Artificial Sequence: Synthetic oligonucleotide
agacaggauuuauuagcau

SEQ ID NO: 2425942 - RNA, 19 nt, Artificial Sequence
  Description of Artificial Sequence: Synthetic oligonucleotide
gucaccauuauaagaaacu

SEQ ID NO: 2425943 - RNA, 19 nt, Artificial Sequence
  Description of Artificial Sequence: Synthetic oligonucleotide
agggaggugagaaccagcu

SEQ ID NO: 2425944 - RNA, 19 nt, Artificial Sequence
  Description of Artificial Sequence: Synthetic oligonucleotide
gugugugugugugugugug

SEQ ID NO: 2425945 - RNA, 19 nt, Artificial Sequence
  Description of Artificial Sequence: Synthetic oligonucleotide
gguucaggaggacuccuug

SEQ ID NO: 2425946 - RNA, 19 nt, Artificial Sequence
  Description of Artificial Sequence: Synthetic oligonucleotide
accggauuagagugaggga

SEQ ID NO: 2425947 - RNA, 19 nt, Artificial Sequence
  Description of Artificial Sequence: Synthetic oligonucleotide
uaaagucagacaggauuua

SEQ ID NO: 2425948 - RNA, 19 nt, Artificial Sequence
  Description of Artificial Sequence: Synthetic oligonucleotide
cugcagaagcaugagauaa

SEQ ID NO: 2425949 - RNA, 19 nt, Artificial Sequence
  Description of Artificial Sequence: Synthetic oligonucleotide
guugccaguguacaaugua

SEQ ID NO: 2425950 - RNA, 19 nt, Artificial Sequence
  Description of Artificial Sequence: Synthetic oligonucleotide
gcagaagcaugagauaaug

SEQ ID NO: 2425951 - RNA, 19 nt, Artificial Sequence
  Description of Artificial Sequence: Synthetic oligonucleotide
caacgaggggaaacauaag

SEQ ID NO: 2425952 - RNA, 19 nt, Artificial Sequence
  Description of Artificial Sequence: Synthetic oligonucleotide
ccuaaaccuugcuuccugg

SEQ ID NO: 2425953 - RNA, 19 nt, Artificial Sequence
  Description of Artificial Sequence: Synthetic oligonucleotide
ggguuuacgacacaggcau

SEQ ID NO: 2425954 - RNA, 19 nt, Artificial Sequence
  Description of Artificial Sequence: Synthetic oligonucleotide
auuaaaccacgggaaucca

SEQ ID NO: 2425955 - RNA, 19 nt, Artificial Sequence
  Description of Artificial Sequence: Synthetic oligonucleotide
guccauauaugucuuccua

SEQ ID NO: 2425956 - RNA, 19 nt, Artificial Sequence
  Description of Artificial Sequence: Synthetic oligonucleotide
augagauaauguaccacaa

SEQ ID NO: 2425957 - RNA, 19 nt, Artificial Sequence
  Description of Artificial Sequence: Synthetic oligonucleotide
auguaacagaaugguucag

SEQ ID NO: 2425958 - RNA, 19 nt, Artificial Sequence
  Description of Artificial Sequence: Synthetic oligonucleotide
ggaugugugugugugugug

SEQ ID NO: 2425959 - RNA, 19 nt, Artificial Sequence
  Description of Artificial Sequence: Synthetic oligonucleotide
gucaauaaauuaguccaua

SEQ ID NO: 2425960 - RNA, 19 nt, Artificial Sequence
  Description of Artificial Sequence: Synthetic oligonucleotide
uugggaugugugugugugu

SEQ ID NO: 2425961 - RNA, 19 nt, Artificial Sequence
  Description of Artificial Sequence: Synthetic oligonucleotide
cuuucaucuccccugggcu

SEQ ID NO: 2425962 - RNA, 19 nt, Artificial Sequence
  Description of Artificial Sequence: Synthetic oligonucleotide
ucccaagacccuuggccac

SEQ ID NO: 2425963 - RNA, 19 nt, Artificial Sequence
  Description of Artificial Sequence: Synthetic oligonucleotide
gcaacgaggggaaacauaa

SEQ ID NO: 2425964 - RNA, 19 nt, Artificial Sequence
  Description of Artificial Sequence: Synthetic oligonucleotide
guaccacaaaauagcuuug

SEQ ID NO: 2425965 - RNA, 19 nt, Artificial Sequence
  Description of Artificial Sequence: Synthetic oligonucleotide
ggucacuaugucccaagac

SEQ ID NO: 2425966 - RNA, 19 nt, Artificial Sequence
  Description of Artificial Sequence: Synthetic oligonucleotide
ccacacaauucuuuuaaca

SEQ ID NO: 2425967 - RNA, 19 nt, Artificial Sequence
  Description of Artificial Sequence: Synthetic oligonucleotide
auagaaccucaaacaagca

SEQ ID NO: 2425968 - RNA, 19 nt, Artificial Sequence
  Description of Artificial Sequence: Synthetic oligonucleotide
uuccuaaaccuugcuuccu

SEQ ID NO: 2425969 - RNA, 19 nt, Artificial Sequence
  Description of Artificial Sequence: Synthetic oligonucleotide
auuccccagcucaauggag

SEQ ID NO: 2425970 - RNA, 19 nt, Artificial Sequence
  Description of Artificial Sequence: Synthetic oligonucleotide
gagggaggugagaaccagc

SEQ ID NO: 2425971 - RNA, 19 nt, Artificial Sequence
  Description of Artificial Sequence: Synthetic oligonucleotide
aaacugcaagaagacuauu

SEQ ID NO: 2425972 - RNA, 19 nt, Artificial Sequence
  Description of Artificial Sequence: Synthetic oligonucleotide
gucuuucaucuccccuggg

SEQ ID NO: 2425973 - RNA, 19 nt, Artificial Sequence
  Description of Artificial Sequence: Synthetic oligonucleotide
ggugauggaugaaccugcg

SEQ ID NO: 2425974 - RNA, 19 nt, Artificial Sequence
  Description of Artificial Sequence: Synthetic oligonucleotide
guaacccuugucaauaaau

SEQ ID NO: 2425975 - RNA, 19 nt, Artificial Sequence
  Description of Artificial Sequence: Synthetic oligonucleotide
agguaacccuugucaauaa

SEQ ID NO: 2425976 - RNA, 19 nt, Artificial Sequence
  Description of Artificial Sequence: Synthetic oligonucleotide
gacaugccagcgcccugag

SEQ ID NO: 2425977 - RNA, 19 nt, Artificial Sequence
  Description of Artificial Sequence: Synthetic oligonucleotide
ggguugccaguguacaaug

SEQ ID NO: 2425978 - RNA, 19 nt, Artificial Sequence
  Description of Artificial Sequence: Synthetic oligonucleotide
cacaccauauuccccagcu

SEQ ID NO: 2425979 - RNA, 19 nt, Artificial Sequence
  Description of Artificial Sequence: Synthetic oligonucleotide
acuaugucccaagacccuu

SEQ ID NO: 2425980 - RNA, 19 nt, Artificial Sequence
  Description of Artificial Sequence: Synthetic oligonucleotide
agcagagaccagcuugauu

SEQ ID NO: 2425981 - RNA, 19 nt, Artificial Sequence
  Description of Artificial Sequence: Synthetic oligonucleotide
ggugagaaccagcuguaaa

SEQ ID NO: 2425982 - RNA, 19 nt, Artificial Sequence
  Description of Artificial Sequence: Synthetic oligonucleotide
cucaauggagcagugggua

SEQ ID NO: 2425983 - RNA, 19 nt, Artificial Sequence
  Description of Artificial Sequence: Synthetic oligonucleotide
caucugcagaagcaugaga

SEQ ID NO: 2425984 - RNA, 19 nt, Artificial Sequence
  Description of Artificial Sequence: Synthetic oligonucleotide
gaacacaaagguaacccuu

SEQ ID NO: 2425985 - RNA, 19 nt, Artificial Sequence
  Description of Artificial Sequence: Synthetic oligonucleotide
uggacaugccagcgcccug

SEQ ID NO: 2425986 - RNA, 19 nt, Artificial Sequence
  Description of Artificial Sequence: Synthetic oligonucleotide
guguguguguuguuugugu

SEQ ID NO: 2425987 - RNA, 19 nt, Artificial Sequence
  Description of Artificial Sequence: Synthetic oligonucleotide
cagcucaauggagcagugg

SEQ ID NO: 2425988 - RNA, 19 nt, Artificial Sequence
  Description of Artificial Sequence: Synthetic oligonucleotide
cggauuagagugagggagg

SEQ ID NO: 2425989 - RNA, 19 nt, Artificial Sequence
  Description of Artificial Sequence: Synthetic oligonucleotide
ggccuuaaaauaaacuaua

SEQ ID NO: 2425990 - RNA, 19 nt, Artificial Sequence
  Description of Artificial Sequence: Synthetic oligonucleotide
aaccagcuguaaaacuuuu

SEQ ID NO: 2425991 - RNA, 19 nt, Artificial Sequence
  Description of Artificial Sequence: Synthetic oligonucleotide
ggaacacaaagguaacccu

SEQ ID NO: 2425992 - RNA, 19 nt, Artificial Sequence
  Description of Artificial Sequence: Synthetic oligonucleotide
ccauauaugucuuccuaaa

SEQ ID NO: 2425993 - RNA, 19 nt, Artificial Sequence
  Description of Artificial Sequence: Synthetic oligonucleotide
gaugugugugugugugugu

SEQ ID NO: 2425994 - RNA, 19 nt, Artificial Sequence
  Description of Artificial Sequence: Synthetic oligonucleotide
gcaugagauaauguaccac

SEQ ID NO: 2425995 - RNA, 19 nt, Artificial Sequence
  Description of Artificial Sequence: Synthetic oligonucleotide
cauguucaguagaaauaua

SEQ ID NO: 2425996 - RNA, 19 nt, Artificial Sequence
  Description of Artificial Sequence: Synthetic oligonucleotide
caguuagcaucagaguuaa

SEQ ID NO: 2425997 - RNA, 19 nt, Artificial Sequence
  Description of Artificial Sequence: Synthetic oligonucleotide
uucaucuccccugggcuuu

SEQ ID NO: 2425998 - RNA, 19 nt, Artificial Sequence
  Description of Artificial Sequence: Synthetic oligonucleotide
auguaccacaaaauagcuu

SEQ ID NO: 2425999 - RNA, 19 nt, Artificial Sequence
  Description of Artificial Sequence: Synthetic oligonucleotide
cgcccugagaauauguaug

SEQ ID NO: 2426000 - RNA, 19 nt, Artificial Sequence
  Description of Artificial Sequence: Synthetic oligonucleotide
uguguguguguguguuguu

SEQ ID NO: 2426001 - RNA, 19 nt, Artificial Sequence
  Description of Artificial Sequence: Synthetic oligonucleotide
cugcgcuuggccuuaaaau

SEQ ID NO: 2426002 - RNA, 19 nt, Artificial Sequence
  Description of Artificial Sequence: Synthetic oligonucleotide
augguucaggaggacuccu

SEQ ID NO: 2426003 - RNA, 19 nt, Artificial Sequence
  Description of Artificial Sequence: Synthetic oligonucleotide
ccacaaaauagcuuugggu

SEQ ID NO: 2426004 - RNA, 19 nt, Artificial Sequence
  Description of Artificial Sequence: Synthetic oligonucleotide
gaggugagaaccagcugua

SEQ ID NO: 2426005 - RNA, 19 nt, Artificial Sequence
  Description of Artificial Sequence: Synthetic oligonucleotide
gaccagcuugauuuacagu

SEQ ID NO: 2426006 - RNA, 19 nt, Artificial Sequence
  Description of Artificial Sequence: Synthetic oligonucleotide
ccaguguacaauguauuca

SEQ ID NO: 2426007 - RNA, 19 nt, Artificial Sequence
  Description of Artificial Sequence: Synthetic oligonucleotide
ccugcuggacaugccagcg

SEQ ID NO: 2426008 - RNA, 19 nt, Artificial Sequence
  Description of Artificial Sequence: Synthetic oligonucleotide
cagaaugguucaggaggac

SEQ ID NO: 2426009 - RNA, 19 nt, Artificial Sequence
  Description of Artificial Sequence: Synthetic oligonucleotide
cgggaauccagcagagacc

SEQ ID NO: 2426010 - RNA, 19 nt, Artificial Sequence
  Description of Artificial Sequence: Synthetic oligonucleotide
gaggacuccuuggucacua

SEQ ID NO: 2426011 - RNA, 19 nt, Artificial Sequence
  Description of Artificial Sequence: Synthetic oligonucleotide
gaaccagcuguaaaacuuu

SEQ ID NO: 2426012 - RNA, 19 nt, Artificial Sequence
  Description of Artificial Sequence: Synthetic oligonucleotide
ugccagcgcccugagaaua

SEQ ID NO: 2426013 - RNA, 19 nt, Artificial Sequence
  Description of Artificial Sequence: Synthetic oligonucleotide
agcaacgaggggaaacaua

SEQ ID NO: 2426014 - RNA, 19 nt, Artificial Sequence
  Description of Artificial Sequence: Synthetic oligonucleotide
ggaugaaccugcgcuuggc

SEQ ID NO: 2426015 - RNA, 19 nt, Artificial Sequence
  Description of Artificial Sequence: Synthetic oligonucleotide
guguguguguguguguugu

SEQ ID NO: 2426016 - RNA, 19 nt, Artificial Sequence
  Description of Artificial Sequence: Synthetic oligonucleotide
ccuuggccacaccauauuc

SEQ ID NO: 2426017 - RNA, 19 nt, Artificial Sequence
  Description of Artificial Sequence: Synthetic oligonucleotide
gguaacccuugucaauaaa

SEQ ID NO: 2426018 - RNA, 19 nt, Artificial Sequence
  Description of Artificial Sequence: Synthetic oligonucleotide
guguguguguguuguuugu

SEQ ID NO: 2426019 - RNA, 19 nt, Artificial Sequence
  Description of Artificial Sequence: Synthetic oligonucleotide
ccugagaauauguauggau

SEQ ID NO: 2426020 - RNA, 19 nt, Artificial Sequence
  Description of Artificial Sequence: Synthetic oligonucleotide
ccauuauaagaaacugcaa

SEQ ID NO: 2426021 - RNA, 19 nt, Artificial Sequence
  Description of Artificial Sequence: Synthetic oligonucleotide
agaccggauuagagugagg

SEQ ID NO: 2426022 - RNA, 19 nt, Artificial Sequence
  Description of Artificial Sequence: Synthetic oligonucleotide
gcuuggccuuaaaauaaac

SEQ ID NO: 2426023 - RNA, 19 nt, Artificial Sequence
  Description of Artificial Sequence: Synthetic oligonucleotide
augccagcgcccugagaau

SEQ ID NO: 2426024 - RNA, 19 nt, Artificial Sequence
  Description of Artificial Sequence: Synthetic oligonucleotide
gugagggaggugagaacca

SEQ ID NO: 2426025 - RNA, 19 nt, Artificial Sequence
  Description of Artificial Sequence: Synthetic oligonucleotide
cuuuuaacaauggcuccau

SEQ ID NO: 2426026 - RNA, 19 nt, Artificial Sequence
  Description of Artificial Sequence: Synthetic oligonucleotide
ggauguggucuuucaucuc

SEQ ID NO: 2426027 - RNA, 19 nt, Artificial Sequence
  Description of Artificial Sequence: Synthetic oligonucleotide
agccagccauucaacacau

SEQ ID NO: 2426028 - RNA, 19 nt, Artificial Sequence
  Description of Artificial Sequence: Synthetic oligonucleotide
cacuaugucccaagacccu

SEQ ID NO: 2426029 - RNA, 19 nt, Artificial Sequence
  Description of Artificial Sequence: Synthetic oligonucleotide
caagacccuuggccacacc

SEQ ID NO: 2426030 - RNA, 19 nt, Artificial Sequence
  Description of Artificial Sequence: Synthetic oligonucleotide
ccacgggaauccagcagag

SEQ ID NO: 2426031 - RNA, 19 nt, Artificial Sequence
  Description of Artificial Sequence: Synthetic oligonucleotide
aggacuccuuggucacuau

SEQ ID NO: 2426032 - RNA, 19 nt, Artificial Sequence
  Description of Artificial Sequence: Synthetic oligonucleotide
agcgcccugagaauaugua

SEQ ID NO: 2426033 - RNA, 19 nt, Artificial Sequence
  Description of Artificial Sequence: Synthetic oligonucleotide
ggcuccauguucaguagaa

SEQ ID NO: 2426034 - RNA, 19 nt, Artificial Sequence
  Description of Artificial Sequence: Synthetic oligonucleotide
aggugagaaccagcuguaa

SEQ ID NO: 2426035 - RNA, 19 nt, Artificial Sequence
  Description of Artificial Sequence: Synthetic oligonucleotide
cuuggucacuaugucccaa

SEQ ID NO: 2426036 - RNA, 19 nt, Artificial Sequence
  Description of Artificial Sequence: Synthetic oligonucleotide
cccuugucaauaaauuagu

SEQ ID NO: 2426037 - RNA, 19 nt, Artificial Sequence
  Description of Artificial Sequence: Synthetic oligonucleotide
gggaaacauaagguucaca

SEQ ID NO: 2426038 - RNA, 19 nt, Artificial Sequence
  Description of Artificial Sequence: Synthetic oligonucleotide
gcgcuuggccuuaaaauaa

SEQ ID NO: 2426039 - RNA, 19 nt, Artificial Sequence
  Description of Artificial Sequence: Synthetic oligonucleotide
ggacaugccagcgcccuga

SEQ ID NO: 2426040 - RNA, 19 nt, Artificial Sequence
  Description of Artificial Sequence: Synthetic oligonucleotide
auguauggauguggucuuu

SEQ ID NO: 2426041 - RNA, 19 nt, Artificial Sequence
  Description of Artificial Sequence: Synthetic oligonucleotide
ggggaaacauaagguucac

SEQ ID NO: 2426042 - RNA, 19 nt, Artificial Sequence
  Description of Artificial Sequence: Synthetic oligonucleotide
ccagcucaauggagcagug

SEQ ID NO: 2426043 - RNA, 19 nt, Artificial Sequence
  Description of Artificial Sequence: Synthetic oligonucleotide
ggauuagagugagggaggu

SEQ ID NO: 2426044 - RNA, 19 nt, Artificial Sequence
  Description of Artificial Sequence: Synthetic oligonucleotide
auucagcaacgaggggaaa

SEQ ID NO: 2426045 - RNA, 19 nt, Artificial Sequence
  Description of Artificial Sequence: Synthetic oligonucleotide
guguguguguguguuguuu

SEQ ID NO: 2426046 - RNA, 19 nt, Artificial Sequence
  Description of Artificial Sequence: Synthetic oligonucleotide
gaaccugcgcuuggccuua

SEQ ID NO: 2426047 - RNA, 19 nt, Artificial Sequence
  Description of Artificial Sequence: Synthetic oligonucleotide
guguguguguguguguguu

SEQ ID NO: 2426048 - RNA, 19 nt, Artificial Sequence
  Description of Artificial Sequence: Synthetic oligonucleotide
ccugcgcuuggccuuaaaa

SEQ ID NO: 2426049 - RNA, 19 nt, Artificial Sequence
  Description of Artificial Sequence: Synthetic oligonucleotide
cuggacaugccagcgcccu

SEQ ID NO: 2426050 - RNA, 19 nt, Artificial Sequence
  Description of Artificial Sequence: Synthetic oligonucleotide
ggaauccagcagagaccag

SEQ ID NO: 2426051 - RNA, 19 nt, Artificial Sequence
  Description of Artificial Sequence: Synthetic oligonucleotide
cagcgcccugagaauaugu

SEQ ID NO: 2426052 - RNA, 19 nt, Artificial Sequence
  Description of Artificial Sequence: Synthetic oligonucleotide
cacgggaauccagcagaga

SEQ ID NO: 2426053 - RNA, 19 nt, Artificial Sequence
  Description of Artificial Sequence: Synthetic oligonucleotide
gcuggacaugccagcgccc

SEQ ID NO: 2426054 - RNA, 19 nt, Artificial Sequence
  Description of Artificial Sequence: Synthetic oligonucleotide
gcuuuggguuuacgacaca

SEQ ID NO: 2426055 - RNA, 19 nt, Artificial Sequence
  Description of Artificial Sequence: Synthetic oligonucleotide
gggguugccaguguacaau

SEQ ID NO: 2426056 - RNA, 19 nt, Artificial Sequence
  Description of Artificial Sequence: Synthetic oligonucleotide
gcgcccugagaauauguau

SEQ ID NO: 2426057 - RNA, 19 nt, Artificial Sequence
  Description of Artificial Sequence: Synthetic oligonucleotide
aguuagcaucagaguuaau

SEQ ID NO: 2426058 - RNA, 19 nt, Artificial Sequence
  Description of Artificial Sequence: Synthetic oligonucleotide
ccuuggucacuauguccca

SEQ ID NO: 2426059 - RNA, 19 nt, Artificial Sequence
  Description of Artificial Sequence: Synthetic oligonucleotide
accuugcuuccuggcccug

SEQ ID NO: 2426060 - RNA, 19 nt, Artificial Sequence
  Description of Artificial Sequence: Synthetic oligonucleotide
gggaugugugugugugugu

SEQ ID NO: 2426061 - RNA, 19 nt, Artificial Sequence
  Description of Artificial Sequence: Synthetic oligonucleotide
gcaucagaguuaaucuaau

SEQ ID NO: 2426062 - RNA, 19 nt, Artificial Sequence
  Description of Artificial Sequence: Synthetic oligonucleotide
gguugccaguguacaaugu

SEQ ID NO: 2426063 - RNA, 19 nt, Artificial Sequence
  Description of Artificial Sequence: Synthetic oligonucleotide
cgaggggaaacauaagguu

SEQ ID NO: 2426064 - RNA, 19 nt, Artificial Sequence
  Description of Artificial Sequence: Synthetic oligonucleotide
aaccugcgcuuggccuuaa

SEQ ID NO: 2426065 - RNA, 19 nt, Artificial Sequence
  Description of Artificial Sequence: Synthetic oligonucleotide
ccagcgcccugagaauaug

SEQ ID NO: 2426066 - RNA, 19 nt, Artificial Sequence
  Description of Artificial Sequence: Synthetic oligonucleotide
gguuuacgacacaggcaua

SEQ ID NO: 2426067 - RNA, 19 nt, Artificial Sequence
  Description of Artificial Sequence: Synthetic oligonucleotide
cagcaacgaggggaaacau

SEQ ID NO: 2426068 - RNA, 19 nt, Artificial Sequence
  Description of Artificial Sequence: Synthetic oligonucleotide
cccaagacccuuggccaca

SEQ ID NO: 2426069 - RNA, 19 nt, Artificial Sequence
  Description of Artificial Sequence: Synthetic oligonucleotide
ggaggacuccuuggucacu

SEQ ID NO: 2426070 - RNA, 19 nt, Artificial Sequence
  Description of Artificial Sequence: Synthetic oligonucleotide
cagcagagaccagcuugau

SEQ ID NO: 2426071 - RNA, 19 nt, Artificial Sequence
  Description of Artificial Sequence: Synthetic oligonucleotide
gccagcgcccugagaauau

SEQ ID NO: 2426072 - RNA, 19 nt, Artificial Sequence
  Description of Artificial Sequence: Synthetic oligonucleotide
cccuuggccacaccauauu

SEQ ID NO: 2426073 - RNA, 19 nt, Artificial Sequence
  Description of Artificial Sequence: Synthetic oligonucleotide
uaaauaaacauaaaguccg

SEQ ID NO: 2426074 - RNA, 19 nt, Artificial Sequence
  Description of Artificial Sequence: Synthetic oligonucleotide
ugauuaaauaaacauaaag

SEQ ID NO: 2426075 - RNA, 19 nt, Artificial Sequence
  Description of Artificial Sequence: Synthetic oligonucleotide
aagaacaacauguaauaac

SEQ ID NO: 2426076 - RNA, 19 nt, Artificial Sequence
  Description of Artificial Sequence: Synthetic oligonucleotide
uacaacaagaacaacaugu

SEQ ID NO: 2426077 - RNA, 19 nt, Artificial Sequence
  Description of Artificial Sequence: Synthetic oligonucleotide
acuguagagaaucaucucc

SEQ ID NO: 2426078 - RNA, 19 nt, Artificial Sequence
  Description of Artificial Sequence: Synthetic oligonucleotide
auaaacauaaaguccgucg

SEQ ID NO: 2426079 - RNA, 19 nt, Artificial Sequence
  Description of Artificial Sequence: Synthetic oligonucleotide
aaccauuuaagaaacuugc

SEQ ID NO: 2426080 - RNA, 19 nt, Artificial Sequence
  Description of Artificial Sequence: Synthetic oligonucleotide
ugaaugauuaaauaaacau

SEQ ID NO: 2426081 - RNA, 19 nt, Artificial Sequence
  Description of Artificial Sequence: Synthetic oligonucleotide
agaacaacauguaauaacc

SEQ ID NO: 2426082 - RNA, 19 nt, Artificial Sequence
  Description of Artificial Sequence: Synthetic oligonucleotide
uuggaaacauguuaggacg

SEQ ID NO: 2426083 - RNA, 19 nt, Artificial Sequence
  Description of Artificial Sequence: Synthetic oligonucleotide
uuuuccauuggaaacaugu

SEQ ID NO: 2426084 - RNA, 19 nt, Artificial Sequence
  Description of Artificial Sequence: Synthetic oligonucleotide
aaacggaaaucaaugaggc

SEQ ID NO: 2426085 - RNA, 19 nt, Artificial Sequence
  Description of Artificial Sequence: Synthetic oligonucleotide
aaccuuuuccauuggaaac

SEQ ID NO: 2426086 - RNA, 19 nt, Artificial Sequence
  Description of Artificial Sequence: Synthetic oligonucleotide
uuaagcugcaacauacacg

SEQ ID NO: 2426087 - RNA, 19 nt, Artificial Sequence
  Description of Artificial Sequence: Synthetic oligonucleotide
uaagcugcaacauacacgu

SEQ ID NO: 2426088 - RNA, 19 nt, Artificial Sequence
  Description of Artificial Sequence: Synthetic oligonucleotide
aaauguucuuccuuugguc

SEQ ID NO: 2426089 - RNA, 19 nt, Artificial Sequence
  Description of Artificial Sequence: Synthetic oligonucleotide
uccauuggaaacauguuag

SEQ ID NO: 2426090 - RNA, 19 nt, Artificial Sequence
  Description of Artificial Sequence: Synthetic oligonucleotide
aauccgugaaccuucagcu

SEQ ID NO: 2426091 - RNA, 19 nt, Artificial Sequence
  Description of Artificial Sequence: Synthetic oligonucleotide
accaauaaacacucaaaac

SEQ ID NO: 2426092 - RNA, 19 nt, Artificial Sequence
  Description of Artificial Sequence: Synthetic oligonucleotide
agaacaaaaccauuuaaga

SEQ ID NO: 2426093 - RNA, 19 nt, Artificial Sequence
  Description of Artificial Sequence: Synthetic oligonucleotide
auaaaauuccugcggggcc

SEQ ID NO: 2426094 - RNA, 19 nt, Artificial Sequence
  Description of Artificial Sequence: Synthetic oligonucleotide
uuacuguagagaaucaucu

SEQ ID NO: 2426095 - RNA, 19 nt, Artificial Sequence
  Description of Artificial Sequence: Synthetic oligonucleotide
aacauguuaggacgaacuc

SEQ ID NO: 2426096 - RNA, 19 nt, Artificial Sequence
  Description of Artificial Sequence: Synthetic oligonucleotide
cauguuaggacgaacucgg

SEQ ID NO: 2426097 - RNA, 19 nt, Artificial Sequence
  Description of Artificial Sequence: Synthetic oligonucleotide
acauguaauaaccaaguga

SEQ ID NO: 2426098 - RNA, 19 nt, Artificial Sequence
  Description of Artificial Sequence: Synthetic oligonucleotide
aaacuugccacacguuugg

SEQ ID NO: 2426099 - RNA, 19 nt, Artificial Sequence
  Description of Artificial Sequence: Synthetic oligonucleotide
uguaauaaccaagugaaaa

SEQ ID NO: 2426100 - RNA, 19 nt, Artificial Sequence
  Description of Artificial Sequence: Synthetic oligonucleotide
uaagaaacuugccacacgu

SEQ ID NO: 2426101 - RNA, 19 nt, Artificial Sequence
  Description of Artificial Sequence: Synthetic oligonucleotide
aaacugacaaauguucuuc

SEQ ID NO: 2426102 - RNA, 19 nt, Artificial Sequence
  Description of Artificial Sequence: Synthetic oligonucleotide
uaaacauaaaguccgucgu

SEQ ID NO: 2426103 - RNA, 19 nt, Artificial Sequence
  Description of Artificial Sequence: Synthetic oligonucleotide
aaacuaaccaauaaacacu

SEQ ID NO: 2426104 - RNA, 19 nt, Artificial Sequence
  Description of Artificial Sequence: Synthetic oligonucleotide
uuguuaagcugcaacauac

SEQ ID NO: 2426105 - RNA, 19 nt, Artificial Sequence
  Description of Artificial Sequence: Synthetic oligonucleotide
uagagaaucaucucccgag

SEQ ID NO: 2426106 - RNA, 19 nt, Artificial Sequence
  Description of Artificial Sequence: Synthetic oligonucleotide
uuuacuguagagaaucauc

SEQ ID NO: 2426107 - RNA, 19 nt, Artificial Sequence
  Description of Artificial Sequence: Synthetic oligonucleotide
ucuguagccaugcaggugu

SEQ ID NO: 2426108 - RNA, 19 nt, Artificial Sequence
  Description of Artificial Sequence: Synthetic oligonucleotide
uacacguuuuaauacaaca

SEQ ID NO: 2426109 - RNA, 19 nt, Artificial Sequence
  Description of Artificial Sequence: Synthetic oligonucleotide
gaggggauaaaauuccugc

SEQ ID NO: 2426110 - RNA, 19 nt, Artificial Sequence
  Description of Artificial Sequence: Synthetic oligonucleotide
uuuucuuaugacucaggag

SEQ ID NO: 2426111 - RNA, 19 nt, Artificial Sequence
  Description of Artificial Sequence: Synthetic oligonucleotide
uuggguucaucuuagaauc

SEQ ID NO: 2426112 - RNA, 19 nt, Artificial Sequence
  Description of Artificial Sequence: Synthetic oligonucleotide
uuaagaaacuugccacacg

SEQ ID NO: 2426113 - RNA, 19 nt, Artificial Sequence
  Description of Artificial Sequence: Synthetic oligonucleotide
uaagucgucacccuuaguu

SEQ ID NO: 2426114 - RNA, 19 nt, Artificial Sequence
  Description of Artificial Sequence: Synthetic oligonucleotide
cacguuuuaauacaacaag

SEQ ID NO: 2426115 - RNA, 19 nt, Artificial Sequence
  Description of Artificial Sequence: Synthetic oligonucleotide
aaccaagugaaaauaaacu

SEQ ID NO: 2426116 - RNA, 19 nt, Artificial Sequence
  Description of Artificial Sequence: Synthetic oligonucleotide
aauaaccucuccguacucg

SEQ ID NO: 2426117 - RNA, 19 nt, Artificial Sequence
  Description of Artificial Sequence: Synthetic oligonucleotide
uuuggguucaucuuagaau

SEQ ID NO: 2426118 - RNA, 19 nt, Artificial Sequence
  Description of Artificial Sequence: Synthetic oligonucleotide
ugagagaacaaaaccauuu

SEQ ID NO: 2426119 - RNA, 19 nt, Artificial Sequence
  Description of Artificial Sequence: Synthetic oligonucleotide
agucugaaugauuaaauaa

SEQ ID NO: 2426120 - RNA, 19 nt, Artificial Sequence
  Description of Artificial Sequence: Synthetic oligonucleotide
aaaccauuuaagaaacuug

SEQ ID NO: 2426121 - RNA, 19 nt, Artificial Sequence
  Description of Artificial Sequence: Synthetic oligonucleotide
gauaaaauuccugcggggc

SEQ ID NO: 2426122 - RNA, 19 nt, Artificial Sequence
  Description of Artificial Sequence: Synthetic oligonucleotide
auuuucuuaugacucagga

SEQ ID NO: 2426123 - RNA, 19 nt, Artificial Sequence
  Description of Artificial Sequence: Synthetic oligonucleotide
gaauccgugaaccuucagc

SEQ ID NO: 2426124 - RNA, 19 nt, Artificial Sequence
  Description of Artificial Sequence: Synthetic oligonucleotide
ucuuccuuuggucaccuug

SEQ ID NO: 2426125 - RNA, 19 nt, Artificial Sequence
  Description of Artificial Sequence: Synthetic oligonucleotide
gacucaggagccuacauac

SEQ ID NO: 2426126 - RNA, 19 nt, Artificial Sequence
  Description of Artificial Sequence: Synthetic oligonucleotide
uucgaucacaguaccauug

SEQ ID NO: 2426127 - RNA, 19 nt, Artificial Sequence
  Description of Artificial Sequence: Synthetic oligonucleotide
ucaucuuagaauccgugaa

SEQ ID NO: 2426128 - RNA, 19 nt, Artificial Sequence
  Description of Artificial Sequence: Synthetic oligonucleotide
aaaaccauuuaagaaacuu

SEQ ID NO: 2426129 - RNA, 19 nt, Artificial Sequence
  Description of Artificial Sequence: Synthetic oligonucleotide
aacggaaaucaaugaggcg

SEQ ID NO: 2426130 - RNA, 19 nt, Artificial Sequence
  Description of Artificial Sequence: Synthetic oligonucleotide
uuagaauccgugaaccuuc

SEQ ID NO: 2426131 - RNA, 19 nt, Artificial Sequence
  Description of Artificial Sequence: Synthetic oligonucleotide
uggauaguggacaugcgac

SEQ ID NO: 2426132 - RNA, 19 nt, Artificial Sequence
  Description of Artificial Sequence: Synthetic oligonucleotide
uguagagaaucaucucccg

SEQ ID NO: 2426133 - RNA, 19 nt, Artificial Sequence
  Description of Artificial Sequence: Synthetic oligonucleotide
uaaccaauaaacacucaaa

SEQ ID NO: 2426134 - RNA, 19 nt, Artificial Sequence
  Description of Artificial Sequence: Synthetic oligonucleotide
uccgugaaccuucagcugc

SEQ ID NO: 2426135 - RNA, 19 nt, Artificial Sequence
  Description of Artificial Sequence: Synthetic oligonucleotide
uguuaggacgaacucgggc

SEQ ID NO: 2426136 - RNA, 19 nt, Artificial Sequence
  Description of Artificial Sequence: Synthetic oligonucleotide
ugcgacacuagugugaggc

SEQ ID NO: 2426137 - RNA, 19 nt, Artificial Sequence
  Description of Artificial Sequence: Synthetic oligonucleotide
cuugacgaugccaaccucc

SEQ ID NO: 2426138 - RNA, 19 nt, Artificial Sequence
  Description of Artificial Sequence: Synthetic oligonucleotide
ucucuuuauuguuaagcug

SEQ ID NO: 2426139 - RNA, 19 nt, Artificial Sequence
  Description of Artificial Sequence: Synthetic oligonucleotide
uucuuaugacucaggagcc

SEQ ID NO: 2426140 - RNA, 19 nt, Artificial Sequence
  Description of Artificial Sequence: Synthetic oligonucleotide
aaacauguuaggacgaacu

SEQ ID NO: 2426141 - RNA, 19 nt, Artificial Sequence
  Description of Artificial Sequence: Synthetic oligonucleotide
aagucgucacccuuaguug

SEQ ID NO: 2426142 - RNA, 19 nt, Artificial Sequence
  Description of Artificial Sequence: Synthetic oligonucleotide
ugaauguaguccucagucc

SEQ ID NO: 2426143 - RNA, 19 nt, Artificial Sequence
  Description of Artificial Sequence: Synthetic oligonucleotide
cuucguucccaucucaccg

SEQ ID NO: 2426144 - RNA, 19 nt, Artificial Sequence
  Description of Artificial Sequence: Synthetic oligonucleotide
uaaucguccgcaaugcccu

SEQ ID NO: 2426145 - RNA, 19 nt, Artificial Sequence
  Description of Artificial Sequence: Synthetic oligonucleotide
cuguagagaaucaucuccc

SEQ ID NO: 2426146 - RNA, 19 nt, Artificial Sequence
  Description of Artificial Sequence: Synthetic oligonucleotide
acauacacguuuuaauaca

SEQ ID NO: 2426147 - RNA, 19 nt, Artificial Sequence
  Description of Artificial Sequence: Synthetic oligonucleotide
agccaaacuggguugagag

SEQ ID NO: 2426148 - RNA, 19 nt, Artificial Sequence
  Description of Artificial Sequence: Synthetic oligonucleotide
acauguuaggacgaacucg

SEQ ID NO: 2426149 - RNA, 19 nt, Artificial Sequence
  Description of Artificial Sequence: Synthetic oligonucleotide
aggggauaaaauuccugcg

SEQ ID NO: 2426150 - RNA, 19 nt, Artificial Sequence
  Description of Artificial Sequence: Synthetic oligonucleotide
accaagugaaaauaaacua

SEQ ID NO: 2426151 - RNA, 19 nt, Artificial Sequence
  Description of Artificial Sequence: Synthetic oligonucleotide
auaaccucuccguacucgg

SEQ ID NO: 2426152 - RNA, 19 nt, Artificial Sequence
  Description of Artificial Sequence: Synthetic oligonucleotide
agagaaucaucucccgagg

SEQ ID NO: 2426153 - RNA, 19 nt, Artificial Sequence
  Description of Artificial Sequence: Synthetic oligonucleotide
auaaacuaaccaauaaaca

SEQ ID NO: 2426154 - RNA, 19 nt, Artificial Sequence
  Description of Artificial Sequence: Synthetic oligonucleotide
aagucugaaugauuaaaua

SEQ ID NO: 2426155 - RNA, 19 nt, Artificial Sequence
  Description of Artificial Sequence: Synthetic oligonucleotide
gauguucgaucacaguacc

SEQ ID NO: 2426156 - RNA, 19 nt, Artificial Sequence
  Description of Artificial Sequence: Synthetic oligonucleotide
acgaacucgggcuucguuc

SEQ ID NO: 2426157 - RNA, 19 nt, Artificial Sequence
  Description of Artificial Sequence: Synthetic oligonucleotide
uggacaugcgacacuagug

SEQ ID NO: 2426158 - RNA, 19 nt, Artificial Sequence
  Description of Artificial Sequence: Synthetic oligonucleotide
uccguacucgggauguucg

SEQ ID NO: 2426159 - RNA, 19 nt, Artificial Sequence
  Description of Artificial Sequence: Synthetic oligonucleotide
uggguugagagaacaaaac

SEQ ID NO: 2426160 - RNA, 19 nt, Artificial Sequence
  Description of Artificial Sequence: Synthetic oligonucleotide
accgcgauuuucuuaugac

SEQ ID NO: 2426161 - RNA, 19 nt, Artificial Sequence
  Description of Artificial Sequence: Synthetic oligonucleotide
cugaauaaccucuccguac

SEQ ID NO: 2426162 - RNA, 19 nt, Artificial Sequence
  Description of Artificial Sequence: Synthetic oligonucleotide
acuagugugaggccgguga

SEQ ID NO: 2426163 - RNA, 19 nt, Artificial Sequence
  Description of Artificial Sequence: Synthetic oligonucleotide
uucuucuugucauaaucgu

SEQ ID NO: 2426164 - RNA, 19 nt, Artificial Sequence
  Description of Artificial Sequence: Synthetic oligonucleotide
guuaagcugcaacauacac

SEQ ID NO: 2426165 - RNA, 19 nt, Artificial Sequence
  Description of Artificial Sequence: Synthetic oligonucleotide
ugaguggaagucugaauga

SEQ ID NO: 2426166 - RNA, 19 nt, Artificial Sequence
  Description of Artificial Sequence: Synthetic oligonucleotide
accauuuaagaaacuugcc

SEQ ID NO: 2426167 - RNA, 19 nt, Artificial Sequence
  Description of Artificial Sequence: Synthetic oligonucleotide
gggauaaaauuccugcggg

SEQ ID NO: 2426168 - RNA, 19 nt, Artificial Sequence
  Description of Artificial Sequence: Synthetic oligonucleotide
gaaaucaaugaggcggcgg

SEQ ID NO: 2426169 - RNA, 19 nt, Artificial Sequence
  Description of Artificial Sequence: Synthetic oligonucleotide
agaaacuugccacacguuu

SEQ ID NO: 2426170 - RNA, 19 nt, Artificial Sequence
  Description of Artificial Sequence: Synthetic oligonucleotide
gaugccaaccuccaagaga

SEQ ID NO: 2426171 - RNA, 19 nt, Artificial Sequence
  Description of Artificial Sequence: Synthetic oligonucleotide
cuuauaugaauguaguccu

SEQ ID NO: 2426172 - RNA, 19 nt, Artificial Sequence
  Description of Artificial Sequence: Synthetic oligonucleotide
ggggauaaaauuccugcgg

SEQ ID NO: 2426173 - RNA, 19 nt, Artificial Sequence
  Description of Artificial Sequence: Synthetic oligonucleotide
aaguccgucguuuacugua

SEQ ID NO: 2426174 - RNA, 19 nt, Artificial Sequence
  Description of Artificial Sequence: Synthetic oligonucleotide
ucgaucacaguaccauugc

SEQ ID NO: 2426175 - RNA, 19 nt, Artificial Sequence
  Description of Artificial Sequence: Synthetic oligonucleotide
uguuaagcugcaacauaca

SEQ ID NO: 2426176 - RNA, 19 nt, Artificial Sequence
  Description of Artificial Sequence: Synthetic oligonucleotide
ucaaugaggcggcggaagc

SEQ ID NO: 2426177 - RNA, 19 nt, Artificial Sequence
  Description of Artificial Sequence: Synthetic oligonucleotide
accuccaagagaaacugac

SEQ ID NO: 2426178 - RNA, 19 nt, Artificial Sequence
  Description of Artificial Sequence: Synthetic oligonucleotide
aguaagucgucacccuuag

SEQ ID NO: 2426179 - RNA, 19 nt, Artificial Sequence
  Description of Artificial Sequence: Synthetic oligonucleotide
ccuuuggucaccuuggagc

SEQ ID NO: 2426180 - RNA, 19 nt, Artificial Sequence
  Description of Artificial Sequence: Synthetic oligonucleotide
gagaaacggaaaucaauga

SEQ ID NO: 2426181 - RNA, 19 nt, Artificial Sequence
  Description of Artificial Sequence: Synthetic oligonucleotide
aaacauaaaguccgucguu

SEQ ID NO: 2426182 - RNA, 19 nt, Artificial Sequence
  Description of Artificial Sequence: Synthetic oligonucleotide
ucaccuuggagcugaauaa

SEQ ID NO: 2426183 - RNA, 19 nt, Artificial Sequence
  Description of Artificial Sequence: Synthetic oligonucleotide
gauuuucuuaugacucagg

SEQ ID NO: 2426184 - RNA, 19 nt, Artificial Sequence
  Description of Artificial Sequence: Synthetic oligonucleotide
uggaaacauguuaggacga

SEQ ID NO: 2426185 - RNA, 19 nt, Artificial Sequence
  Description of Artificial Sequence: Synthetic oligonucleotide
uguucgaucacaguaccau

SEQ ID NO: 2426186 - RNA, 19 nt, Artificial Sequence
  Description of Artificial Sequence: Synthetic oligonucleotide
uacccuguguuuucuguag

SEQ ID NO: 2426187 - RNA, 19 nt, Artificial Sequence
  Description of Artificial Sequence: Synthetic oligonucleotide
uauuguuaagcugcaacau

SEQ ID NO: 2426188 - RNA, 19 nt, Artificial Sequence
  Description of Artificial Sequence: Synthetic oligonucleotide
aaauaaacauaaaguccgu

SEQ ID NO: 2426189 - RNA, 19 nt, Artificial Sequence
  Description of Artificial Sequence: Synthetic oligonucleotide
cuaaccaauaaacacucaa

SEQ ID NO: 2426190 - RNA, 19 nt, Artificial Sequence
  Description of Artificial Sequence: Synthetic oligonucleotide
ucuuagaauccgugaaccu

SEQ ID NO: 2426191 - RNA, 19 nt, Artificial Sequence
  Description of Artificial Sequence: Synthetic oligonucleotide
ugcacaguggucagcgucu

SEQ ID NO: 2426192 - RNA, 19 nt, Artificial Sequence
  Description of Artificial Sequence: Synthetic oligonucleotide
agcugcaacauacacguuu

SEQ ID NO: 2426193 - RNA, 19 nt, Artificial Sequence
  Description of Artificial Sequence: Synthetic oligonucleotide
ggauaaaauuccugcgggg

SEQ ID NO: 2426194 - RNA, 19 nt, Artificial Sequence
  Description of Artificial Sequence: Synthetic oligonucleotide
uuauaugaauguaguccuc

SEQ ID NO: 2426195 - RNA, 19 nt, Artificial Sequence
  Description of Artificial Sequence: Synthetic oligonucleotide
auuguuaagcugcaacaua

SEQ ID NO: 2426196 - RNA, 19 nt, Artificial Sequence
  Description of Artificial Sequence: Synthetic oligonucleotide
ucgggcuucguucccaucu

SEQ ID NO: 2426197 - RNA, 19 nt, Artificial Sequence
  Description of Artificial Sequence: Synthetic oligonucleotide
gauaguggacaugcgacac

SEQ ID NO: 2426198 - RNA, 19 nt, Artificial Sequence
  Description of Artificial Sequence: Synthetic oligonucleotide
agcgucuuccugccguugc

SEQ ID NO: 2426199 - RNA, 19 nt, Artificial Sequence
  Description of Artificial Sequence: Synthetic oligonucleotide
ggguugagagaacaaaacc

SEQ ID NO: 2426200 - RNA, 19 nt, Artificial Sequence
  Description of Artificial Sequence: Synthetic oligonucleotide
acguuuuaauacaacaaga

SEQ ID NO: 2426201 - RNA, 19 nt, Artificial Sequence
  Description of Artificial Sequence: Synthetic oligonucleotide
aaacuggguugagagaaca

SEQ ID NO: 2426202 - RNA, 19 nt, Artificial Sequence
  Description of Artificial Sequence: Synthetic oligonucleotide
uccuuuggucaccuuggag

SEQ ID NO: 2426203 - RNA, 19 nt, Artificial Sequence
  Description of Artificial Sequence: Synthetic oligonucleotide
accuuggagcugaauaacc

SEQ ID NO: 2426204 - RNA, 19 nt, Artificial Sequence
  Description of Artificial Sequence: Synthetic oligonucleotide
aaccucuccguacucggga

SEQ ID NO: 2426205 - RNA, 19 nt, Artificial Sequence
  Description of Artificial Sequence: Synthetic oligonucleotide
ugugaggccggugagggga

SEQ ID NO: 2426206 - RNA, 19 nt, Artificial Sequence
  Description of Artificial Sequence: Synthetic oligonucleotide
ucgggauguucgaucacag

SEQ ID NO: 2426207 - RNA, 19 nt, Artificial Sequence
  Description of Artificial Sequence: Synthetic oligonucleotide
auaaaguccgucguuuacu

SEQ ID NO: 2426208 - RNA, 19 nt, Artificial Sequence
  Description of Artificial Sequence: Synthetic oligonucleotide
cuuggagcugaauaaccuc

SEQ ID NO: 2426209 - RNA, 19 nt, Artificial Sequence
  Description of Artificial Sequence: Synthetic oligonucleotide
gguugagagaacaaaacca

SEQ ID NO: 2426210 - RNA, 19 nt, Artificial Sequence
  Description of Artificial Sequence: Synthetic oligonucleotide
ucuugucauaaucguccgc

SEQ ID NO: 2426211 - RNA, 19 nt, Artificial Sequence
  Description of Artificial Sequence: Synthetic oligonucleotide
cuugucauaaucguccgca

SEQ ID NO: 2426212 - RNA, 19 nt, Artificial Sequence
  Description of Artificial Sequence: Synthetic oligonucleotide
uccgucguuuacuguagag

SEQ ID NO: 2426213 - RNA, 19 nt, Artificial Sequence
  Description of Artificial Sequence: Synthetic oligonucleotide
uaaccucuccguacucggg

SEQ ID NO: 2426214 - RNA, 19 nt, Artificial Sequence
  Description of Artificial Sequence: Synthetic oligonucleotide
guuaggacgaacucgggcu

SEQ ID NO: 2426215 - RNA, 19 nt, Artificial Sequence
  Description of Artificial Sequence: Synthetic oligonucleotide
caacauacacguuuuaaua

SEQ ID NO: 2426216 - RNA, 19 nt, Artificial Sequence
  Description of Artificial Sequence: Synthetic oligonucleotide
gaagacgcggaggacgcgg

SEQ ID NO: 2426217 - RNA, 19 nt, Artificial Sequence
  Description of Artificial Sequence: Synthetic oligonucleotide
gacaugcgacacuagugug

SEQ ID NO: 2426218 - RNA, 19 nt, Artificial Sequence
  Description of Artificial Sequence: Synthetic oligonucleotide
ucguucccaucucaccgcg

SEQ ID NO: 2426219 - RNA, 19 nt, Artificial Sequence
  Description of Artificial Sequence: Synthetic oligonucleotide
guggucagcgucuuccugc

SEQ ID NO: 2426220 - RNA, 19 nt, Artificial Sequence
  Description of Artificial Sequence: Synthetic oligonucleotide
aauuccugcggggcccgcc

SEQ ID NO: 2426221 - RNA, 19 nt, Artificial Sequence
  Description of Artificial Sequence: Synthetic oligonucleotide
uuuccauuggaaacauguu

SEQ ID NO: 2426222 - RNA, 19 nt, Artificial Sequence
  Description of Artificial Sequence: Synthetic oligonucleotide
caggaagacgcggaggacg

SEQ ID NO: 2426223 - RNA, 19 nt, Artificial Sequence
  Description of Artificial Sequence: Synthetic oligonucleotide
gacacuagugugaggccgg

SEQ ID NO: 2426224 - RNA, 19 nt, Artificial Sequence
  Description of Artificial Sequence: Synthetic oligonucleotide
auuccugcggggcccgccc

SEQ ID NO: 2426225 - RNA, 19 nt, Artificial Sequence
  Description of Artificial Sequence: Synthetic oligonucleotide
gagagaacaaaaccauuua

SEQ ID NO: 2426226 - RNA, 19 nt, Artificial Sequence
  Description of Artificial Sequence: Synthetic oligonucleotide
uggguucaucuuagaaucc

SEQ ID NO: 2426227 - RNA, 19 nt, Artificial Sequence
  Description of Artificial Sequence: Synthetic oligonucleotide
uucguucccaucucaccgc

SEQ ID NO: 2426228 - RNA, 19 nt, Artificial Sequence
  Description of Artificial Sequence: Synthetic oligonucleotide
uuaugacucaggagccuac

SEQ ID NO: 2426229 - RNA, 19 nt, Artificial Sequence
  Description of Artificial Sequence: Synthetic oligonucleotide
auacacguuuuaauacaac

SEQ ID NO: 2426230 - RNA, 19 nt, Artificial Sequence
  Description of Artificial Sequence: Synthetic oligonucleotide
aaaguccgucguuuacugu

SEQ ID NO: 2426231 - RNA, 19 nt, Artificial Sequence
  Description of Artificial Sequence: Synthetic oligonucleotide
ugacucaggagccuacaua

SEQ ID NO: 2426232 - RNA, 19 nt, Artificial Sequence
  Description of Artificial Sequence: Synthetic oligonucleotide
accuuuuccauuggaaaca

SEQ ID NO: 2426233 - RNA, 19 nt, Artificial Sequence
  Description of Artificial Sequence: Synthetic oligonucleotide
gaaacauguuaggacgaac

SEQ ID NO: 2426234 - RNA, 19 nt, Artificial Sequence
  Description of Artificial Sequence: Synthetic oligonucleotide
auaaccaagugaaaauaaa

SEQ ID NO: 2426235 - RNA, 19 nt, Artificial Sequence
  Description of Artificial Sequence: Synthetic oligonucleotide
uacuguagagaaucaucuc

SEQ ID NO: 2426236 - RNA, 19 nt, Artificial Sequence
  Description of Artificial Sequence: Synthetic oligonucleotide
caugcgacacuagugugag

SEQ ID NO: 2426237 - RNA, 19 nt, Artificial Sequence
  Description of Artificial Sequence: Synthetic oligonucleotide
aauguaguccucagucccu

SEQ ID NO: 2426238 - RNA, 19 nt, Artificial Sequence
  Description of Artificial Sequence: Synthetic oligonucleotide
ugaaggcuuucacaaguuu

SEQ ID NO: 2426239 - RNA, 19 nt, Artificial Sequence
  Description of Artificial Sequence: Synthetic oligonucleotide
ggaucaccgugucaggagg

SEQ ID NO: 2426240 - RNA, 19 nt, Artificial Sequence
  Description of Artificial Sequence: Synthetic oligonucleotide
caaccuccaagagaaacug

SEQ ID NO: 2426241 - RNA, 19 nt, Artificial Sequence
  Description of Artificial Sequence: Synthetic oligonucleotide
acuugccacacguuugggu

SEQ ID NO: 2426242 - RNA, 19 nt, Artificial Sequence
  Description of Artificial Sequence: Synthetic oligonucleotide
aaggcgcaggaagacgcgg

SEQ ID NO: 2426243 - RNA, 19 nt, Artificial Sequence
  Description of Artificial Sequence: Synthetic oligonucleotide
acacguuuuaauacaacaa

SEQ ID NO: 2426244 - RNA, 19 nt, Artificial Sequence
  Description of Artificial Sequence: Synthetic oligonucleotide
uagaauccgugaaccuuca

SEQ ID NO: 2426245 - RNA, 19 nt, Artificial Sequence
  Description of Artificial Sequence: Synthetic oligonucleotide
cauacacguuuuaauacaa

SEQ ID NO: 2426246 - RNA, 19 nt, Artificial Sequence
  Description of Artificial Sequence: Synthetic oligonucleotide
guaguccucagucccugcc

SEQ ID NO: 2426247 - RNA, 19 nt, Artificial Sequence
  Description of Artificial Sequence: Synthetic oligonucleotide
uugaaggcuuucacaaguu

SEQ ID NO: 2426248 - RNA, 19 nt, Artificial Sequence
  Description of Artificial Sequence: Synthetic oligonucleotide
aagacgcggaggacgcggc

SEQ ID NO: 2426249 - RNA, 19 nt, Artificial Sequence
  Description of Artificial Sequence: Synthetic oligonucleotide
ugcagcggcgagaaacgga

SEQ ID NO: 2426250 - RNA, 19 nt, Artificial Sequence
  Description of Artificial Sequence: Synthetic oligonucleotide
ccaagugaaaauaaacuaa

SEQ ID NO: 2426251 - RNA, 19 nt, Artificial Sequence
  Description of Artificial Sequence: Synthetic oligonucleotide
auaguggacaugcgacacu

SEQ ID NO: 2426252 - RNA, 19 nt, Artificial Sequence
  Description of Artificial Sequence: Synthetic oligonucleotide
uagugugaggccggugagg

SEQ ID NO: 2426253 - RNA, 19 nt, Artificial Sequence
  Description of Artificial Sequence: Synthetic oligonucleotide
uggagcugaauaaccucuc

SEQ ID NO: 2426254 - RNA, 19 nt, Artificial Sequence
  Description of Artificial Sequence: Synthetic oligonucleotide
uggaagucugaaugauuaa

SEQ ID NO: 2426255 - RNA, 19 nt, Artificial Sequence
  Description of Artificial Sequence: Synthetic oligonucleotide
cuggauaguggacaugcga

SEQ ID NO: 2426256 - RNA, 19 nt, Artificial Sequence
  Description of Artificial Sequence: Synthetic oligonucleotide
guggaagucugaaugauua

SEQ ID NO: 2426257 - RNA, 19 nt, Artificial Sequence
  Description of Artificial Sequence: Synthetic oligonucleotide
cuacauacccuguguuuuc

SEQ ID NO: 2426258 - RNA, 19 nt, Artificial Sequence
  Description of Artificial Sequence: Synthetic oligonucleotide
cuagugugaggccggugag

SEQ ID NO: 2426259 - RNA, 19 nt, Artificial Sequence
  Description of Artificial Sequence: Synthetic oligonucleotide
acuggguugagagaacaaa

SEQ ID NO: 2426260 - RNA, 19 nt, Artificial Sequence
  Description of Artificial Sequence: Synthetic oligonucleotide
caccgugucaggaggcugc

SEQ ID NO: 2426261 - RNA, 19 nt, Artificial Sequence
  Description of Artificial Sequence: Synthetic oligonucleotide
uuaggacgaacucgggcuu

SEQ ID NO: 2426262 - RNA, 19 nt, Artificial Sequence
  Description of Artificial Sequence: Synthetic oligonucleotide
gggauguucgaucacagua

SEQ ID NO: 2426263 - RNA, 19 nt, Artificial Sequence
  Description of Artificial Sequence: Synthetic oligonucleotide
acaacaagaacaacaugua

SEQ ID NO: 2426264 - RNA, 19 nt, Artificial Sequence
  Description of Artificial Sequence: Synthetic oligonucleotide
uaugacucaggagccuaca

SEQ ID NO: 2426265 - RNA, 19 nt, Artificial Sequence
  Description of Artificial Sequence: Synthetic oligonucleotide
ggguucaucuuagaauccg

SEQ ID NO: 2426266 - RNA, 19 nt, Artificial Sequence
  Description of Artificial Sequence: Synthetic oligonucleotide
ucuuaugacucaggagccu

SEQ ID NO: 2426267 - RNA, 19 nt, Artificial Sequence
  Description of Artificial Sequence: Synthetic oligonucleotide
aaugcccugcacagugguc

SEQ ID NO: 2426268 - RNA, 19 nt, Artificial Sequence
  Description of Artificial Sequence: Synthetic oligonucleotide
ugcgcugcuggauucuuau

SEQ ID NO: 2426269 - RNA, 19 nt, Artificial Sequence
  Description of Artificial Sequence: Synthetic oligonucleotide
acauaaaguccgucguuua

SEQ ID NO: 2426270 - RNA, 19 nt, Artificial Sequence
  Description of Artificial Sequence: Synthetic oligonucleotide
agcggcgagaaacggaaau

SEQ ID NO: 2426271 - RNA, 19 nt, Artificial Sequence
  Description of Artificial Sequence: Synthetic oligonucleotide
acucaggagccuacauacc

SEQ ID NO: 2426272 - RNA, 19 nt, Artificial Sequence
  Description of Artificial Sequence: Synthetic oligonucleotide
acucaaaacaaaaccuuuu

SEQ ID NO: 2426273 - RNA, 19 nt, Artificial Sequence
  Description of Artificial Sequence: Synthetic oligonucleotide
uuccuuuggucaccuugga

SEQ ID NO: 2426274 - RNA, 19 nt, Artificial Sequence
  Description of Artificial Sequence: Synthetic oligonucleotide
caaacuggguugagagaac

SEQ ID NO: 2426275 - RNA, 19 nt, Artificial Sequence
  Description of Artificial Sequence: Synthetic oligonucleotide
ggauguucgaucacaguac

SEQ ID NO: 2426276 - RNA, 19 nt, Artificial Sequence
  Description of Artificial Sequence: Synthetic oligonucleotide
gugaaggcgcaggaagacg

SEQ ID NO: 2426277 - RNA, 19 nt, Artificial Sequence
  Description of Artificial Sequence: Synthetic oligonucleotide
uaguggacaugcgacacua

SEQ ID NO: 2426278 - RNA, 19 nt, Artificial Sequence
  Description of Artificial Sequence: Synthetic oligonucleotide
auccgugaaccuucagcug

SEQ ID NO: 2426279 - RNA, 19 nt, Artificial Sequence
  Description of Artificial Sequence: Synthetic oligonucleotide
guugagagaacaaaaccau

SEQ ID NO: 2426280 - RNA, 19 nt, Artificial Sequence
  Description of Artificial Sequence: Synthetic oligonucleotide
aaucguccgcaaugcccug

SEQ ID NO: 2426281 - RNA, 19 nt, Artificial Sequence
  Description of Artificial Sequence: Synthetic oligonucleotide
caaaaccuuuuccauugga

SEQ ID NO: 2426282 - RNA, 19 nt, Artificial Sequence
  Description of Artificial Sequence: Synthetic oligonucleotide
uacauacccuguguuuucu

SEQ ID NO: 2426283 - RNA, 19 nt, Artificial Sequence
  Description of Artificial Sequence: Synthetic oligonucleotide
ucccaucucaccgcgauuu

SEQ ID NO: 2426284 - RNA, 19 nt, Artificial Sequence
  Description of Artificial Sequence: Synthetic oligonucleotide
guacucgggauguucgauc

SEQ ID NO: 2426285 - RNA, 19 nt, Artificial Sequence
  Description of Artificial Sequence: Synthetic oligonucleotide
acaugcgacacuaguguga

SEQ ID NO: 2426286 - RNA, 19 nt, Artificial Sequence
  Description of Artificial Sequence: Synthetic oligonucleotide
agaauccgugaaccuucag

SEQ ID NO: 2426287 - RNA, 19 nt, Artificial Sequence
  Description of Artificial Sequence: Synthetic oligonucleotide
auacccuguguuuucugua

SEQ ID NO: 2426288 - RNA, 19 nt, Artificial Sequence
  Description of Artificial Sequence: Synthetic oligonucleotide
aaucaaugaggcggcggaa

SEQ ID NO: 2426289 - RNA, 19 nt, Artificial Sequence
  Description of Artificial Sequence: Synthetic oligonucleotide
acguuuggguucaucuuag

SEQ ID NO: 2426290 - RNA, 19 nt, Artificial Sequence
  Description of Artificial Sequence: Synthetic oligonucleotide
caaugaggcggcggaagcc

SEQ ID NO: 2426291 - RNA, 19 nt, Artificial Sequence
  Description of Artificial Sequence: Synthetic oligonucleotide
gaucaccgugucaggaggc

SEQ ID NO: 2426292 - RNA, 19 nt, Artificial Sequence
  Description of Artificial Sequence: Synthetic oligonucleotide
cgcgauuuucuuaugacuc

SEQ ID NO: 2426293 - RNA, 19 nt, Artificial Sequence
  Description of Artificial Sequence: Synthetic oligonucleotide
aucguccgcaaugcccugc

SEQ ID NO: 2426294 - RNA, 19 nt, Artificial Sequence
  Description of Artificial Sequence: Synthetic oligonucleotide
ggagccuacauacccugug

SEQ ID NO: 2426295 - RNA, 19 nt, Artificial Sequence
  Description of Artificial Sequence: Synthetic oligonucleotide
ucucaccgcgauuuucuua

SEQ ID NO: 2426296 - RNA, 19 nt, Artificial Sequence
  Description of Artificial Sequence: Synthetic oligonucleotide
ucguccgcaaugcccugca

SEQ ID NO: 2426297 - RNA, 19 nt, Artificial Sequence
  Description of Artificial Sequence: Synthetic oligonucleotide
uugccacacguuuggguuc

SEQ ID NO: 2426298 - RNA, 19 nt, Artificial Sequence
  Description of Artificial Sequence: Synthetic oligonucleotide
ggauaguggacaugcgaca

SEQ ID NO: 2426299 - RNA, 19 nt, Artificial Sequence
  Description of Artificial Sequence: Synthetic oligonucleotide
ggcggaagcccggugaagg

SEQ ID NO: 2426300 - RNA, 19 nt, Artificial Sequence
  Description of Artificial Sequence: Synthetic oligonucleotide
caccuuggagcugaauaac

SEQ ID NO: 2426301 - RNA, 19 nt, Artificial Sequence
  Description of Artificial Sequence: Synthetic oligonucleotide
aggacgaacucgggcuucg

SEQ ID NO: 2426302 - RNA, 19 nt, Artificial Sequence
  Description of Artificial Sequence: Synthetic oligonucleotide
ucucccgaggcagccaaac

SEQ ID NO: 2426303 - RNA, 19 nt, Artificial Sequence
  Description of Artificial Sequence: Synthetic oligonucleotide
ggaagucugaaugauuaaa

SEQ ID NO: 2426304 - RNA, 19 nt, Artificial Sequence
  Description of Artificial Sequence: Synthetic oligonucleotide
gcuucguucccaucucacc

SEQ ID NO: 2426305 - RNA, 19 nt, Artificial Sequence
  Description of Artificial Sequence: Synthetic oligonucleotide
agccuacauacccuguguu

SEQ ID NO: 2426306 - RNA, 19 nt, Artificial Sequence
  Description of Artificial Sequence: Synthetic oligonucleotide
ggacaugcgacacuagugu

SEQ ID NO: 2426307 - RNA, 19 nt, Artificial Sequence
  Description of Artificial Sequence: Synthetic oligonucleotide
ccugccguugcgcugcugg

SEQ ID NO: 2426308 - RNA, 19 nt, Artificial Sequence
  Description of Artificial Sequence: Synthetic oligonucleotide
aagaaacuugccacacguu

SEQ ID NO: 2426309 - RNA, 19 nt, Artificial Sequence
  Description of Artificial Sequence: Synthetic oligonucleotide
uuuggucaccuuggagcug

SEQ ID NO: 2426310 - RNA, 19 nt, Artificial Sequence
  Description of Artificial Sequence: Synthetic oligonucleotide
cucaccgcgauuuucuuau

SEQ ID NO: 2426311 - RNA, 19 nt, Artificial Sequence
  Description of Artificial Sequence: Synthetic oligonucleotide
aacuggguugagagaacaa

SEQ ID NO: 2426312 - RNA, 19 nt, Artificial Sequence
  Description of Artificial Sequence: Synthetic oligonucleotide
ucaccgugucaggaggcug

SEQ ID NO: 2426313 - RNA, 19 nt, Artificial Sequence
  Description of Artificial Sequence: Synthetic oligonucleotide
caucucaccgcgauuuucu

SEQ ID NO: 2426314 - RNA, 19 nt, Artificial Sequence
  Description of Artificial Sequence: Synthetic oligonucleotide
gaguaagucgucacccuua

SEQ ID NO: 2426315 - RNA, 19 nt, Artificial Sequence
  Description of Artificial Sequence: Synthetic oligonucleotide
cccuguguuuucuguagcc

SEQ ID NO: 2426316 - RNA, 19 nt, Artificial Sequence
  Description of Artificial Sequence: Synthetic oligonucleotide
gcgauuuucuuaugacuca

SEQ ID NO: 2426317 - RNA, 19 nt, Artificial Sequence
  Description of Artificial Sequence: Synthetic oligonucleotide
gcugcagcggcgagaaacg

SEQ ID NO: 2426318 - RNA, 19 nt, Artificial Sequence
  Description of Artificial Sequence: Synthetic oligonucleotide
auguuaggacgaacucggg

SEQ ID NO: 2426319 - RNA, 19 nt, Artificial Sequence
  Description of Artificial Sequence: Synthetic oligonucleotide
uccucagucccugccggga

SEQ ID NO: 2426320 - RNA, 19 nt, Artificial Sequence
  Description of Artificial Sequence: Synthetic oligonucleotide
acuaaccaauaaacacuca

SEQ ID NO: 2426321 - RNA, 19 nt, Artificial Sequence
  Description of Artificial Sequence: Synthetic oligonucleotide
guggacaugcgacacuagu

SEQ ID NO: 2426322 - RNA, 19 nt, Artificial Sequence
  Description of Artificial Sequence: Synthetic oligonucleotide
uuccugcggggcccgcccg

SEQ ID NO: 2426323 - RNA, 19 nt, Artificial Sequence
  Description of Artificial Sequence: Synthetic oligonucleotide
uguagccaugcagguguga

SEQ ID NO: 2426324 - RNA, 19 nt, Artificial Sequence
  Description of Artificial Sequence: Synthetic oligonucleotide
gcccggaucaccgugucag

SEQ ID NO: 2426325 - RNA, 19 nt, Artificial Sequence
  Description of Artificial Sequence: Synthetic oligonucleotide
gagccuacauacccugugu

SEQ ID NO: 2426326 - RNA, 19 nt, Artificial Sequence
  Description of Artificial Sequence: Synthetic oligonucleotide
aguggaagucugaaugauu

SEQ ID NO: 2426327 - RNA, 19 nt, Artificial Sequence
  Description of Artificial Sequence: Synthetic oligonucleotide
augcgacacuagugugagg

SEQ ID NO: 2426328 - RNA, 19 nt, Artificial Sequence
  Description of Artificial Sequence: Synthetic oligonucleotide
cuuaugacucaggagccua

SEQ ID NO: 2426329 - RNA, 19 nt, Artificial Sequence
  Description of Artificial Sequence: Synthetic oligonucleotide
gccaaccuccaagagaaac

SEQ ID NO: 2426330 - RNA, 19 nt, Artificial Sequence
  Description of Artificial Sequence: Synthetic oligonucleotide
caccgcgauuuucuuauga

SEQ ID NO: 2426331 - RNA, 19 nt, Artificial Sequence
  Description of Artificial Sequence: Synthetic oligonucleotide
gcuggauucuuauaugaau

SEQ ID NO: 2426332 - RNA, 19 nt, Artificial Sequence
  Description of Artificial Sequence: Synthetic oligonucleotide
ucaccgcgauuuucuuaug

SEQ ID NO: 2426333 - RNA, 19 nt, Artificial Sequence
  Description of Artificial Sequence: Synthetic oligonucleotide
cgaacucgggcuucguucc

SEQ ID NO: 2426334 - RNA, 19 nt, Artificial Sequence
  Description of Artificial Sequence: Synthetic oligonucleotide
cuuagaauccgugaaccuu

SEQ ID NO: 2426335 - RNA, 19 nt, Artificial Sequence
  Description of Artificial Sequence: Synthetic oligonucleotide
aucaccgugucaggaggcu

SEQ ID NO: 2426336 - RNA, 19 nt, Artificial Sequence
  Description of Artificial Sequence: Synthetic oligonucleotide
auguucgaucacaguacca

SEQ ID NO: 2426337 - RNA, 19 nt, Artificial Sequence
  Description of Artificial Sequence: Synthetic oligonucleotide
ugccgggaguaagucguca

SEQ ID NO: 2426338 - RNA, 19 nt, Artificial Sequence
  Description of Artificial Sequence: Synthetic oligonucleotide
cugacaaauguucuuccuu

SEQ ID NO: 2426339 - RNA, 19 nt, Artificial Sequence
  Description of Artificial Sequence: Synthetic oligonucleotide
aguggacaugcgacacuag

SEQ ID NO: 2426340 - RNA, 19 nt, Artificial Sequence
  Description of Artificial Sequence: Synthetic oligonucleotide
ucagcgucuuccugccguu

SEQ ID NO: 2426341 - RNA, 19 nt, Artificial Sequence
  Description of Artificial Sequence: Synthetic oligonucleotide
cuguagccaugcaggugug

SEQ ID NO: 2426342 - RNA, 19 nt, Artificial Sequence
  Description of Artificial Sequence: Synthetic oligonucleotide
aucucaccgcgauuuucuu

SEQ ID NO: 2426343 - RNA, 19 nt, Artificial Sequence
  Description of Artificial Sequence: Synthetic oligonucleotide
cuccguacucgggauguuc

SEQ ID NO: 2426344 - RNA, 19 nt, Artificial Sequence
  Description of Artificial Sequence: Synthetic oligonucleotide
uaggacgaacucgggcuuc

SEQ ID NO: 2426345 - RNA, 19 nt, Artificial Sequence
  Description of Artificial Sequence: Synthetic oligonucleotide
uugcgcugcuggauucuua

SEQ ID NO: 2426346 - RNA, 19 nt, Artificial Sequence
  Description of Artificial Sequence: Synthetic oligonucleotide
auuggagguucuggauagu

SEQ ID NO: 2426347 - RNA, 19 nt, Artificial Sequence
  Description of Artificial Sequence: Synthetic oligonucleotide
cgacacuagugugaggccg

SEQ ID NO: 2426348 - RNA, 19 nt, Artificial Sequence
  Description of Artificial Sequence: Synthetic oligonucleotide
guucccaucucaccgcgau

SEQ ID NO: 2426349 - RNA, 19 nt, Artificial Sequence
  Description of Artificial Sequence: Synthetic oligonucleotide
uucccaucucaccgcgauu

SEQ ID NO: 2426350 - RNA, 19 nt, Artificial Sequence
  Description of Artificial Sequence: Synthetic oligonucleotide
gcgacacuagugugaggcc

SEQ ID NO: 2426351 - RNA, 19 nt, Artificial Sequence
  Description of Artificial Sequence: Synthetic oligonucleotide
ugcggggcccgcccggauc

SEQ ID NO: 2426352 - RNA, 19 nt, Artificial Sequence
  Description of Artificial Sequence: Synthetic oligonucleotide
caucucccgaggcagccaa

SEQ ID NO: 2426353 - RNA, 19 nt, Artificial Sequence
  Description of Artificial Sequence: Synthetic oligonucleotide
acucgggcuucguucccau

SEQ ID NO: 2426354 - RNA, 19 nt, Artificial Sequence
  Description of Artificial Sequence: Synthetic oligonucleotide
gccaaacuggguugagaga

SEQ ID NO: 2426355 - RNA, 19 nt, Artificial Sequence
  Description of Artificial Sequence: Synthetic oligonucleotide
ggaaacauguuaggacgaa

SEQ ID NO: 2426356 - RNA, 19 nt, Artificial Sequence
  Description of Artificial Sequence: Synthetic oligonucleotide
caugcaggugugaguggaa

SEQ ID NO: 2426357 - RNA, 19 nt, Artificial Sequence
  Description of Artificial Sequence: Synthetic oligonucleotide
ugccguugcgcugcuggau

SEQ ID NO: 2426358 - RNA, 19 nt, Artificial Sequence
  Description of Artificial Sequence: Synthetic oligonucleotide
guucgaucacaguaccauu

SEQ ID NO: 2426359 - RNA, 19 nt, Artificial Sequence
  Description of Artificial Sequence: Synthetic oligonucleotide
ccgaggcagccaaacuggg

SEQ ID NO: 2426360 - RNA, 19 nt, Artificial Sequence
  Description of Artificial Sequence: Synthetic oligonucleotide
ucccugccgggaguaaguc

SEQ ID NO: 2426361 - RNA, 19 nt, Artificial Sequence
  Description of Artificial Sequence: Synthetic oligonucleotide
cccugccgggaguaagucg

SEQ ID NO: 2426362 - RNA, 19 nt, Artificial Sequence
  Description of Artificial Sequence: Synthetic oligonucleotide
gcggaagcccggugaaggc

SEQ ID NO: 2426363 - RNA, 19 nt, Artificial Sequence
  Description of Artificial Sequence: Synthetic oligonucleotide
gccgggaguaagucgucac

SEQ ID NO: 2426364 - RNA, 19 nt, Artificial Sequence
  Description of Artificial Sequence: Synthetic oligonucleotide
acacuagugugaggccggu

SEQ ID NO: 2426365 - RNA, 19 nt, Artificial Sequence
  Description of Artificial Sequence: Synthetic oligonucleotide
guccgucguuuacuguaga

SEQ ID NO: 2426366 - RNA, 19 nt, Artificial Sequence
  Description of Artificial Sequence: Synthetic oligonucleotide
ccuuggagcugaauaaccu

SEQ ID NO: 2426367 - RNA, 19 nt, Artificial Sequence
  Description of Artificial Sequence: Synthetic oligonucleotide
aggagccuacauacccugu

SEQ ID NO: 2426368 - RNA, 19 nt, Artificial Sequence
  Description of Artificial Sequence: Synthetic oligonucleotide
ggcggcggaagcccgguga

SEQ ID NO: 2426369 - RNA, 19 nt, Artificial Sequence
  Description of Artificial Sequence: Synthetic oligonucleotide
cacuagugugaggccggug

SEQ ID NO: 2426370 - RNA, 19 nt, Artificial Sequence
  Description of Artificial Sequence: Synthetic oligonucleotide
gacgaacucgggcuucguu

SEQ ID NO: 2426371 - RNA, 19 nt, Artificial Sequence
  Description of Artificial Sequence: Synthetic oligonucleotide
ggugugaguggaagucuga

SEQ ID NO: 2426372 - RNA, 19 nt, Artificial Sequence
  Description of Artificial Sequence: Synthetic oligonucleotide
cugccgggaguaagucguc

SEQ ID NO: 2426373 - RNA, 19 nt, Artificial Sequence
  Description of Artificial Sequence: Synthetic oligonucleotide
ggaagacgcggaggacgcg

SEQ ID NO: 2426374 - RNA, 19 nt, Artificial Sequence
  Description of Artificial Sequence: Synthetic oligonucleotide
ccugccgggaguaagucgu

SEQ ID NO: 2426375 - RNA, 19 nt, Artificial Sequence
  Description of Artificial Sequence: Synthetic oligonucleotide
gaggccggugaggggauaa

SEQ ID NO: 2426376 - RNA, 19 nt, Artificial Sequence
  Description of Artificial Sequence: Synthetic oligonucleotide
accgugucaggaggcugca

SEQ ID NO: 2426377 - RNA, 19 nt, Artificial Sequence
  Description of Artificial Sequence: Synthetic oligonucleotide
gcggcgagaaacggaaauc

SEQ ID NO: 2426378 - RNA, 19 nt, Artificial Sequence
  Description of Artificial Sequence: Synthetic oligonucleotide
gguucaucuuagaauccgu

SEQ ID NO: 2426379 - RNA, 19 nt, Artificial Sequence
  Description of Artificial Sequence: Synthetic oligonucleotide
ccgucguuuacuguagaga

SEQ ID NO: 2426380 - RNA, 19 nt, Artificial Sequence
  Description of Artificial Sequence: Synthetic oligonucleotide
gggaguaagucgucacccu

SEQ ID NO: 2426381 - RNA, 19 nt, Artificial Sequence
  Description of Artificial Sequence: Synthetic oligonucleotide
gaagcccggugaaggcgca

SEQ ID NO: 2426382 - RNA, 19 nt, Artificial Sequence
  Description of Artificial Sequence: Synthetic oligonucleotide
cucgggcuucguucccauc

SEQ ID NO: 2426383 - RNA, 19 nt, Artificial Sequence
  Description of Artificial Sequence: Synthetic oligonucleotide
ccucagucccugccgggag

SEQ ID NO: 2426384 - RNA, 19 nt, Artificial Sequence
  Description of Artificial Sequence: Synthetic oligonucleotide
ggaguaagucgucacccuu

SEQ ID NO: 2426385 - RNA, 19 nt, Artificial Sequence
  Description of Artificial Sequence: Synthetic oligonucleotide
gcgagaaacggaaaucaau

SEQ ID NO: 2426386 - RNA, 19 nt, Artificial Sequence
  Description of Artificial Sequence: Synthetic oligonucleotide
gucguuuacuguagagaau

SEQ ID NO: 2426387 - RNA, 19 nt, Artificial Sequence
  Description of Artificial Sequence: Synthetic oligonucleotide
cugccguugcgcugcugga

SEQ ID NO: 2426388 - RNA, 19 nt, Artificial Sequence
  Description of Artificial Sequence: Synthetic oligonucleotide
cccggaucaccgugucagg

SEQ ID NO: 2426389 - RNA, 19 nt, Artificial Sequence
  Description of Artificial Sequence: Synthetic oligonucleotide
guaagucgucacccuuagu

SEQ ID NO: 2426390 - RNA, 19 nt, Artificial Sequence
  Description of Artificial Sequence: Synthetic oligonucleotide
uggucaccuuggagcugaa

SEQ ID NO: 2426391 - RNA, 19 nt, Artificial Sequence
  Description of Artificial Sequence: Synthetic oligonucleotide
ggcagccaaacuggguuga

SEQ ID NO: 2426392 - RNA, 19 nt, Artificial Sequence
  Description of Artificial Sequence: Synthetic oligonucleotide
ccaucucaccgcgauuuuc

SEQ ID NO: 2426393 - RNA, 19 nt, Artificial Sequence
  Description of Artificial Sequence: Synthetic oligonucleotide
cgaugccaaccuccaagag

SEQ ID NO: 2426394 - RNA, 19 nt, Artificial Sequence
  Description of Artificial Sequence: Synthetic oligonucleotide
gggcuucguucccaucuca

SEQ ID NO: 2426395 - RNA, 19 nt, Artificial Sequence
  Description of Artificial Sequence: Synthetic oligonucleotide
cggaagcccggugaaggcg

SEQ ID NO: 2426396 - RNA, 19 nt, Artificial Sequence
  Description of Artificial Sequence: Synthetic oligonucleotide
caggaggcugcagcggcga

SEQ ID NO: 2426397 - RNA, 19 nt, Artificial Sequence
  Description of Artificial Sequence: Synthetic oligonucleotide
aagcugcaacauacacguu

SEQ ID NO: 2426398 - RNA, 19 nt, Artificial Sequence
  Description of Artificial Sequence: Synthetic oligonucleotide
cagcgucuuccugccguug

SEQ ID NO: 2426399 - RNA, 19 nt, Artificial Sequence
  Description of Artificial Sequence: Synthetic oligonucleotide
ucuccguacucgggauguu

SEQ ID NO: 2426400 - RNA, 19 nt, Artificial Sequence
  Description of Artificial Sequence: Synthetic oligonucleotide
aggcggcggaagcccggug

SEQ ID NO: 2426401 - RNA, 19 nt, Artificial Sequence
  Description of Artificial Sequence: Synthetic oligonucleotide
gcugcaacauacacguuuu

SEQ ID NO: 2426402 - RNA, 19 nt, Artificial Sequence
  Description of Artificial Sequence: Synthetic oligonucleotide
ccgcgauuuucuuaugacu

SEQ ID NO: 2426403 - RNA, 19 nt, Artificial Sequence
  Description of Artificial Sequence: Synthetic oligonucleotide
gccuacauacccuguguuu

SEQ ID NO: 2426404 - RNA, 19 nt, Artificial Sequence
  Description of Artificial Sequence: Synthetic oligonucleotide
cgaucacaguaccauugca

SEQ ID NO: 2426405 - RNA, 19 nt, Artificial Sequence
  Description of Artificial Sequence: Synthetic oligonucleotide
ccuacauacccuguguuuu

SEQ ID NO: 2426406 - RNA, 19 nt, Artificial Sequence
  Description of Artificial Sequence: Synthetic oligonucleotide
ccggugaggggauaaaauu

SEQ ID NO: 2426407 - RNA, 19 nt, Artificial Sequence
  Description of Artificial Sequence: Synthetic oligonucleotide
ccguugcgcugcuggauuc

SEQ ID NO: 2426408 - RNA, 19 nt, Artificial Sequence
  Description of Artificial Sequence: Synthetic oligonucleotide
ugaggccggugaggggaua

SEQ ID NO: 2426409 - RNA, 19 nt, Artificial Sequence
  Description of Artificial Sequence: Synthetic oligonucleotide
cucccgaggcagccaaacu

SEQ ID NO: 2426410 - RNA, 19 nt, Artificial Sequence
  Description of Artificial Sequence: Synthetic oligonucleotide
aggccggugaggggauaaa

SEQ ID NO: 2426411 - RNA, 19 nt, Artificial Sequence
  Description of Artificial Sequence: Synthetic oligonucleotide
gcggggcccgcccggauca

SEQ ID NO: 2426412 - RNA, 19 nt, Artificial Sequence
  Description of Artificial Sequence: Synthetic oligonucleotide
cagcggcgagaaacggaaa

SEQ ID NO: 2426413 - RNA, 19 nt, Artificial Sequence
  Description of Artificial Sequence: Synthetic oligonucleotide
ggccggugaggggauaaaa

SEQ ID NO: 2426414 - RNA, 19 nt, Artificial Sequence
  Description of Artificial Sequence: Synthetic oligonucleotide
ccguacucgggauguucga

SEQ ID NO: 2426415 - RNA, 19 nt, Artificial Sequence
  Description of Artificial Sequence: Synthetic oligonucleotide
ccggaucaccgugucagga

SEQ ID NO: 2426416 - RNA, 19 nt, Artificial Sequence
  Description of Artificial Sequence: Synthetic oligonucleotide
gccggugaggggauaaaau

SEQ ID NO: 2426417 - RNA, 19 nt, Artificial Sequence
  Description of Artificial Sequence: Synthetic oligonucleotide
gcggcggaagcccggugaa

SEQ ID NO: 2426418 - RNA, 19 nt, Artificial Sequence
  Description of Artificial Sequence: Synthetic oligonucleotide
aucucccgaggcagccaaa

SEQ ID NO: 2426419 - RNA, 19 nt, Artificial Sequence
  Description of Artificial Sequence: Synthetic oligonucleotide
ccacacguuuggguucauc

SEQ ID NO: 2426420 - RNA, 19 nt, Artificial Sequence
  Description of Artificial Sequence: Synthetic oligonucleotide
guugcgcugcuggauucuu

SEQ ID NO: 2426421 - RNA, 19 nt, Artificial Sequence
  Description of Artificial Sequence: Synthetic oligonucleotide
cgggcuucguucccaucuc

SEQ ID NO: 2426422 - RNA, 19 nt, Artificial Sequence
  Description of Artificial Sequence: Synthetic oligonucleotide
gccguugcgcugcuggauu

SEQ ID NO: 2426423 - RNA, 19 nt, Artificial Sequence
  Description of Artificial Sequence: Synthetic oligonucleotide
gcgcugcuggauucuuaua

SEQ ID NO: 2426424 - RNA, 19 nt, Artificial Sequence
  Description of Artificial Sequence: Synthetic oligonucleotide
ccgugucaggaggcugcag

SEQ ID NO: 2426425 - RNA, 19 nt, Artificial Sequence
  Description of Artificial Sequence: Synthetic oligonucleotide
gugaggccggugaggggau

SEQ ID NO: 2426426 - RNA, 19 nt, Artificial Sequence
  Description of Artificial Sequence: Synthetic oligonucleotide
cguucccaucucaccgcga

SEQ ID NO: 2426427 - RNA, 19 nt, Artificial Sequence
  Description of Artificial Sequence: Synthetic oligonucleotide
cgggauguucgaucacagu

SEQ ID NO: 2426428 - RNA, 19 nt, Artificial Sequence
  Description of Artificial Sequence: Synthetic oligonucleotide
ggacgaacucgggcuucgu

SEQ ID NO: 2426429 - RNA, 19 nt, Artificial Sequence
  Description of Artificial Sequence: Synthetic oligonucleotide
cggcggaagcccggugaag

SEQ ID NO: 2426430 - RNA, 19 nt, Artificial Sequence
  Description of Artificial Sequence: Synthetic oligonucleotide
cccgcccggaucaccgugu

SEQ ID NO: 2426431 - RNA, 19 nt, Artificial Sequence
  Description of Artificial Sequence: Synthetic oligonucleotide
cguacucgggauguucgau

SEQ ID NO: 2426432 - RNA, 19 nt, Artificial Sequence
  Description of Artificial Sequence: Synthetic oligonucleotide
cccaucucaccgcgauuuu

SEQ ID NO: 2426433 - RNA, 19 nt, Artificial Sequence
  Description of Artificial Sequence: Synthetic oligonucleotide
cguugcgcugcuggauucu

SEQ ID NO: 2426434 - RNA, 19 nt, Artificial Sequence
  Description of Artificial Sequence: Synthetic oligonucleotide
cugcggggcccgcccggau

SEQ ID NO: 2426435 - RNA, 19 nt, Artificial Sequence
  Description of Artificial Sequence: Synthetic oligonucleotide
gccacacguuuggguucau

SEQ ID NO: 2426436 - RNA, 19 nt, Artificial Sequence
  Description of Artificial Sequence: Synthetic oligonucleotide
cggggcccgcccggaucac

SEQ ID NO: 2426437 - RNA, 19 nt, Artificial Sequence
  Description of Artificial Sequence: Synthetic oligonucleotide
aaugaaaggauacauuggg

SEQ ID NO: 2426438 - RNA, 19 nt, Artificial Sequence
  Description of Artificial Sequence: Synthetic oligonucleotide
aauaauauuugacauccag

SEQ ID NO: 2426439 - RNA, 19 nt, Artificial Sequence
  Description of Artificial Sequence: Synthetic oligonucleotide
auauuugacauccaguuuc

SEQ ID NO: 2426440 - RNA, 19 nt, Artificial Sequence
  Description of Artificial Sequence: Synthetic oligonucleotide
auaaugaaaggauacauug

SEQ ID NO: 2426441 - RNA, 19 nt, Artificial Sequence
  Description of Artificial Sequence: Synthetic oligonucleotide
uuuaagacacugcuaagcg

SEQ ID NO: 2426442 - RNA, 19 nt, Artificial Sequence
  Description of Artificial Sequence: Synthetic oligonucleotide
uucaagaauucacugaggg

SEQ ID NO: 2426443 - RNA, 19 nt, Artificial Sequence
  Description of Artificial Sequence: Synthetic oligonucleotide
acaauuuuguucuuggcuc

SEQ ID NO: 2426444 - RNA, 19 nt, Artificial Sequence
  Description of Artificial Sequence: Synthetic oligonucleotide
uggcaugucacucaggucc

SEQ ID NO: 2426445 - RNA, 19 nt, Artificial Sequence
  Description of Artificial Sequence: Synthetic oligonucleotide
ugaaaggauacauuggggc

SEQ ID NO: 2426446 - RNA, 19 nt, Artificial Sequence
  Description of Artificial Sequence: Synthetic oligonucleotide
uaaugaaaggauacauugg

SEQ ID NO: 2426447 - RNA, 19 nt, Artificial Sequence
  Description of Artificial Sequence: Synthetic oligonucleotide
uaagacacugcuaagcggc

SEQ ID NO: 2426448 - RNA, 19 nt, Artificial Sequence
  Description of Artificial Sequence: Synthetic oligonucleotide
uucuuuaagacacugcuaa

SEQ ID NO: 2426449 - RNA, 19 nt, Artificial Sequence
  Description of Artificial Sequence: Synthetic oligonucleotide
ucuuuguccaguuucaaga

SEQ ID NO: 2426450 - RNA, 19 nt, Artificial Sequence
  Description of Artificial Sequence: Synthetic oligonucleotide
agagggaacaguuuauuuc

SEQ ID NO: 2426451 - RNA, 19 nt, Artificial Sequence
  Description of Artificial Sequence: Synthetic oligonucleotide
guuuauuuccagcugggcg

SEQ ID NO: 2426452 - RNA, 19 nt, Artificial Sequence
  Description of Artificial Sequence: Synthetic oligonucleotide
uggaauaaugaaaggauac

SEQ ID NO: 2426453 - RNA, 19 nt, Artificial Sequence
  Description of Artificial Sequence: Synthetic oligonucleotide
agauacagcugccaggucg

SEQ ID NO: 2426454 - RNA, 19 nt, Artificial Sequence
  Description of Artificial Sequence: Synthetic oligonucleotide
acaguuuauuuccagcugg

SEQ ID NO: 2426455 - RNA, 19 nt, Artificial Sequence
  Description of Artificial Sequence: Synthetic oligonucleotide
aaaacacugggccaaguca

SEQ ID NO: 2426456 - RNA, 19 nt, Artificial Sequence
  Description of Artificial Sequence: Synthetic oligonucleotide
uuuauuuccagcugggcgu

SEQ ID NO: 2426457 - RNA, 19 nt, Artificial Sequence
  Description of Artificial Sequence: Synthetic oligonucleotide
ucaaaauaucauuauuucu

SEQ ID NO: 2426458 - RNA, 19 nt, Artificial Sequence
  Description of Artificial Sequence: Synthetic oligonucleotide
gagggaacaguuuauuucc

SEQ ID NO: 2426459 - RNA, 19 nt, Artificial Sequence
  Description of Artificial Sequence: Synthetic oligonucleotide
aaaauaucauuauuucuuu

SEQ ID NO: 2426460 - RNA, 19 nt, Artificial Sequence
  Description of Artificial Sequence: Synthetic oligonucleotide
uuauuucuuucuuuaagac

SEQ ID NO: 2426461 - RNA, 19 nt, Artificial Sequence
  Description of Artificial Sequence: Synthetic oligonucleotide
uuaagacacugcuaagcgg

SEQ ID NO: 2426462 - RNA, 19 nt, Artificial Sequence
  Description of Artificial Sequence: Synthetic oligonucleotide
uuugccuggaauaaugaaa

SEQ ID NO: 2426463 - RNA, 19 nt, Artificial Sequence
  Description of Artificial Sequence: Synthetic oligonucleotide
ucuuucuuuguccaguuuc

SEQ ID NO: 2426464 - RNA, 19 nt, Artificial Sequence
  Description of Artificial Sequence: Synthetic oligonucleotide
ugcaguuucuucaaauucu

SEQ ID NO: 2426465 - RNA, 19 nt, Artificial Sequence
  Description of Artificial Sequence: Synthetic oligonucleotide
caagaauucacugaggguc

SEQ ID NO: 2426466 - RNA, 19 nt, Artificial Sequence
  Description of Artificial Sequence: Synthetic oligonucleotide
caaaggcucacuucgaggc

SEQ ID NO: 2426467 - RNA, 19 nt, Artificial Sequence
  Description of Artificial Sequence: Synthetic oligonucleotide
aauguggcaugucacucag

SEQ ID NO: 2426468 - RNA, 19 nt, Artificial Sequence
  Description of Artificial Sequence: Synthetic oligonucleotide
uucuugaagguggagaugc

SEQ ID NO: 2426469 - RNA, 19 nt, Artificial Sequence
  Description of Artificial Sequence: Synthetic oligonucleotide
aagggccaguucuugaagg

SEQ ID NO: 2426470 - RNA, 19 nt, Artificial Sequence
  Description of Artificial Sequence: Synthetic oligonucleotide
uguggcaugucacucaggu

SEQ ID NO: 2426471 - RNA, 19 nt, Artificial Sequence
  Description of Artificial Sequence: Synthetic oligonucleotide
cuuaaauguggcaugucac

SEQ ID NO: 2426472 - RNA, 19 nt, Artificial Sequence
  Description of Artificial Sequence: Synthetic oligonucleotide
uuaaauguggcaugucacu

SEQ ID NO: 2426473 - RNA, 19 nt, Artificial Sequence
  Description of Artificial Sequence: Synthetic oligonucleotide
uccaguuucaaaauaucau

SEQ ID NO: 2426474 - RNA, 19 nt, Artificial Sequence
  Description of Artificial Sequence: Synthetic oligonucleotide
aguuucaagaauucacuga

SEQ ID NO: 2426475 - RNA, 19 nt, Artificial Sequence
  Description of Artificial Sequence: Synthetic oligonucleotide
ucuuucuuuaagacacugc

SEQ ID NO: 2426476 - RNA, 19 nt, Artificial Sequence
  Description of Artificial Sequence: Synthetic oligonucleotide
acugcuaagcggcccaggc

SEQ ID NO: 2426477 - RNA, 19 nt, Artificial Sequence
  Description of Artificial Sequence: Synthetic oligonucleotide
aaaggauacauuggggcug

SEQ ID NO: 2426478 - RNA, 19 nt, Artificial Sequence
  Description of Artificial Sequence: Synthetic oligonucleotide
ugcuaagcggcccaggcug

SEQ ID NO: 2426479 - RNA, 19 nt, Artificial Sequence
  Description of Artificial Sequence: Synthetic oligonucleotide
aauggagcagcgaacgguc

SEQ ID NO: 2426480 - RNA, 19 nt, Artificial Sequence
  Description of Artificial Sequence: Synthetic oligonucleotide
aucauuauuucuuucuuua

SEQ ID NO: 2426481 - RNA, 19 nt, Artificial Sequence
  Description of Artificial Sequence: Synthetic oligonucleotide
gaaggcacacuuuaggcga

SEQ ID NO: 2426482 - RNA, 19 nt, Artificial Sequence
  Description of Artificial Sequence: Synthetic oligonucleotide
aaacacugggccaagucag

SEQ ID NO: 2426483 - RNA, 19 nt, Artificial Sequence
  Description of Artificial Sequence: Synthetic oligonucleotide
cuucgaggcaaccagcugc

SEQ ID NO: 2426484 - RNA, 19 nt, Artificial Sequence
  Description of Artificial Sequence: Synthetic oligonucleotide
aauaaugaaaggauacauu

SEQ ID NO: 2426485 - RNA, 19 nt, Artificial Sequence
  Description of Artificial Sequence: Synthetic oligonucleotide
aguuucaaaauaucauuau

SEQ ID NO: 2426486 - RNA, 19 nt, Artificial Sequence
  Description of Artificial Sequence: Synthetic oligonucleotide
ugucaucuggcucccagcc

SEQ ID NO: 2426487 - RNA, 19 nt, Artificial Sequence
  Description of Artificial Sequence: Synthetic oligonucleotide
uucuuuguccaguuucaag

SEQ ID NO: 2426488 - RNA, 19 nt, Artificial Sequence
  Description of Artificial Sequence: Synthetic oligonucleotide
ugcuucuugacagucagga

SEQ ID NO: 2426489 - RNA, 19 nt, Artificial Sequence
  Description of Artificial Sequence: Synthetic oligonucleotide
uuugacauccaguuucaaa

SEQ ID NO: 2426490 - RNA, 19 nt, Artificial Sequence
  Description of Artificial Sequence: Synthetic oligonucleotide
uugaagguggagaugcggu

SEQ ID NO: 2426491 - RNA, 19 nt, Artificial Sequence
  Description of Artificial Sequence: Synthetic oligonucleotide
aagucaggcucguucucgg

SEQ ID NO: 2426492 - RNA, 19 nt, Artificial Sequence
  Description of Artificial Sequence: Synthetic oligonucleotide
cuuggcucuuucuuugucc

SEQ ID NO: 2426493 - RNA, 19 nt, Artificial Sequence
  Description of Artificial Sequence: Synthetic oligonucleotide
ucuuuaagacacugcuaag

SEQ ID NO: 2426494 - RNA, 19 nt, Artificial Sequence
  Description of Artificial Sequence: Synthetic oligonucleotide
acugggccaagucaggcuc

SEQ ID NO: 2426495 - RNA, 19 nt, Artificial Sequence
  Description of Artificial Sequence: Synthetic oligonucleotide
cucaauggagcagcgaacg

SEQ ID NO: 2426496 - RNA, 19 nt, Artificial Sequence
  Description of Artificial Sequence: Synthetic oligonucleotide
ucaauggagcagcgaacgg

SEQ ID NO: 2426497 - RNA, 19 nt, Artificial Sequence
  Description of Artificial Sequence: Synthetic oligonucleotide
auaauauuugacauccagu

SEQ ID NO: 2426498 - RNA, 19 nt, Artificial Sequence
  Description of Artificial Sequence: Synthetic oligonucleotide
ucaagaauucacugagggu

SEQ ID NO: 2426499 - RNA, 19 nt, Artificial Sequence
  Description of Artificial Sequence: Synthetic oligonucleotide
gauacagcugccaggucgg

SEQ ID NO: 2426500 - RNA, 19 nt, Artificial Sequence
  Description of Artificial Sequence: Synthetic oligonucleotide
cucacuucgaggcaaccag

SEQ ID NO: 2426501 - RNA, 19 nt, Artificial Sequence
  Description of Artificial Sequence: Synthetic oligonucleotide
uccagcuccuuaaagcaga

SEQ ID NO: 2426502 - RNA, 19 nt, Artificial Sequence
  Description of Artificial Sequence: Synthetic oligonucleotide
ggaaggcacacuuuaggcg

SEQ ID NO: 2426503 - RNA, 19 nt, Artificial Sequence
  Description of Artificial Sequence: Synthetic oligonucleotide
aaggauacauuggggcugg

SEQ ID NO: 2426504 - RNA, 19 nt, Artificial Sequence
  Description of Artificial Sequence: Synthetic oligonucleotide
uuugcaguuucuucaaauu

SEQ ID NO: 2426505 - RNA, 19 nt, Artificial Sequence
  Description of Artificial Sequence: Synthetic oligonucleotide
caggaaggcacacuuuagg

SEQ ID NO: 2426506 - RNA, 19 nt, Artificial Sequence
  Description of Artificial Sequence: Synthetic oligonucleotide
ucaggcucguucucgguag

SEQ ID NO: 2426507 - RNA, 19 nt, Artificial Sequence
  Description of Artificial Sequence: Synthetic oligonucleotide
gauacauuggggcuggggu

SEQ ID NO: 2426508 - RNA, 19 nt, Artificial Sequence
  Description of Artificial Sequence: Synthetic oligonucleotide
uuucuuuaagacacugcua

SEQ ID NO: 2426509 - RNA, 19 nt, Artificial Sequence
  Description of Artificial Sequence: Synthetic oligonucleotide
augaaaggauacauugggg

SEQ ID NO: 2426510 - RNA, 19 nt, Artificial Sequence
  Description of Artificial Sequence: Synthetic oligonucleotide
ucuugaagguggagaugcg

SEQ ID NO: 2426511 - RNA, 19 nt, Artificial Sequence
  Description of Artificial Sequence: Synthetic oligonucleotide
auacauuggggcuggggug

SEQ ID NO: 2426512 - RNA, 19 nt, Artificial Sequence
  Description of Artificial Sequence: Synthetic oligonucleotide
uucucgguagggcagcgga

SEQ ID NO: 2426513 - RNA, 19 nt, Artificial Sequence
  Description of Artificial Sequence: Synthetic oligonucleotide
uuggcucuuucuuugucca

SEQ ID NO: 2426514 - RNA, 19 nt, Artificial Sequence
  Description of Artificial Sequence: Synthetic oligonucleotide
ggaaagcugggacacgugg

SEQ ID NO: 2426515 - RNA, 19 nt, Artificial Sequence
  Description of Artificial Sequence: Synthetic oligonucleotide
agcaaaggcucacuucgag

SEQ ID NO: 2426516 - RNA, 19 nt, Artificial Sequence
  Description of Artificial Sequence: Synthetic oligonucleotide
aauucacugagggucaguu

SEQ ID NO: 2426517 - RNA, 19 nt, Artificial Sequence
  Description of Artificial Sequence: Synthetic oligonucleotide
ggaacaguuuauuuccagc

SEQ ID NO: 2426518 - RNA, 19 nt, Artificial Sequence
  Description of Artificial Sequence: Synthetic oligonucleotide
guugucaucuggcucccag

SEQ ID NO: 2426519 - RNA, 19 nt, Artificial Sequence
  Description of Artificial Sequence: Synthetic oligonucleotide
gaaaggauacauuggggcu

SEQ ID NO: 2426520 - RNA, 19 nt, Artificial Sequence
  Description of Artificial Sequence: Synthetic oligonucleotide
uaaauguggcaugucacuc

SEQ ID NO: 2426521 - RNA, 19 nt, Artificial Sequence
  Description of Artificial Sequence: Synthetic oligonucleotide
aagaauucacugaggguca

SEQ ID NO: 2426522 - RNA, 19 nt, Artificial Sequence
  Description of Artificial Sequence: Synthetic oligonucleotide
aagacacugcuaagcggcc

SEQ ID NO: 2426523 - RNA, 19 nt, Artificial Sequence
  Description of Artificial Sequence: Synthetic oligonucleotide
cuuccagcuccuuaaagca

SEQ ID NO: 2426524 - RNA, 19 nt, Artificial Sequence
  Description of Artificial Sequence: Synthetic oligonucleotide
auucacugagggucaguuc

SEQ ID NO: 2426525 - RNA, 19 nt, Artificial Sequence
  Description of Artificial Sequence: Synthetic oligonucleotide
gaugcggugcuccaugaga

SEQ ID NO: 2426526 - RNA, 19 nt, Artificial Sequence
  Description of Artificial Sequence: Synthetic oligonucleotide
ugagggucaguucuucaaa

SEQ ID NO: 2426527 - RNA, 19 nt, Artificial Sequence
  Description of Artificial Sequence: Synthetic oligonucleotide
aaaggcucacuucgaggca

SEQ ID NO: 2426528 - RNA, 19 nt, Artificial Sequence
  Description of Artificial Sequence: Synthetic oligonucleotide
gaagggccaguucuugaag

SEQ ID NO: 2426529 - RNA, 19 nt, Artificial Sequence
  Description of Artificial Sequence: Synthetic oligonucleotide
ucgguagggcagcggaugg

SEQ ID NO: 2426530 - RNA, 19 nt, Artificial Sequence
  Description of Artificial Sequence: Synthetic oligonucleotide
ugccuggaauaaugaaagg

SEQ ID NO: 2426531 - RNA, 19 nt, Artificial Sequence
  Description of Artificial Sequence: Synthetic oligonucleotide
uuguucuuggcucuuucuu

SEQ ID NO: 2426532 - RNA, 19 nt, Artificial Sequence
  Description of Artificial Sequence: Synthetic oligonucleotide
uuuguccaguuucaagaau

SEQ ID NO: 2426533 - RNA, 19 nt, Artificial Sequence
  Description of Artificial Sequence: Synthetic oligonucleotide
ucacuucgaggcaaccagc

SEQ ID NO: 2426534 - RNA, 19 nt, Artificial Sequence
  Description of Artificial Sequence: Synthetic oligonucleotide
gagggucaguucuucaaac

SEQ ID NO: 2426535 - RNA, 19 nt, Artificial Sequence
  Description of Artificial Sequence: Synthetic oligonucleotide
guggcuuaaauguggcaug

SEQ ID NO: 2426536 - RNA, 19 nt, Artificial Sequence
  Description of Artificial Sequence: Synthetic oligonucleotide
ucaucuggcucccagccuu

SEQ ID NO: 2426537 - RNA, 19 nt, Artificial Sequence
  Description of Artificial Sequence: Synthetic oligonucleotide
cagcgaacggucuuugcag

SEQ ID NO: 2426538 - RNA, 19 nt, Artificial Sequence
  Description of Artificial Sequence: Synthetic oligonucleotide
uccugggguugucaucugg

SEQ ID NO: 2426539 - RNA, 19 nt, Artificial Sequence
  Description of Artificial Sequence: Synthetic oligonucleotide
caguuucaaaauaucauua

SEQ ID NO: 2426540 - RNA, 19 nt, Artificial Sequence
  Description of Artificial Sequence: Synthetic oligonucleotide
uucgaggcaaccagcugcu

SEQ ID NO: 2426541 - RNA, 19 nt, Artificial Sequence
  Description of Artificial Sequence: Synthetic oligonucleotide
ugacagucaggaaggcaca

SEQ ID NO: 2426542 - RNA, 19 nt, Artificial Sequence
  Description of Artificial Sequence: Synthetic oligonucleotide
ugacauccaguuucaaaau

SEQ ID NO: 2426543 - RNA, 19 nt, Artificial Sequence
  Description of Artificial Sequence: Synthetic oligonucleotide
ugcuguuggucuccuuugc

SEQ ID NO: 2426544 - RNA, 19 nt, Artificial Sequence
  Description of Artificial Sequence: Synthetic oligonucleotide
acacguggcuuaaaugugg

SEQ ID NO: 2426545 - RNA, 19 nt, Artificial Sequence
  Description of Artificial Sequence: Synthetic oligonucleotide
aagccggcuuccgccaucc

SEQ ID NO: 2426546 - RNA, 19 nt, Artificial Sequence
  Description of Artificial Sequence: Synthetic oligonucleotide
uggccuagagggaacaguu

SEQ ID NO: 2426547 - RNA, 19 nt, Artificial Sequence
  Description of Artificial Sequence: Synthetic oligonucleotide
gacacguggcuuaaaugug

SEQ ID NO: 2426548 - RNA, 19 nt, Artificial Sequence
  Description of Artificial Sequence: Synthetic oligonucleotide
uugucaucuggcucccagc

SEQ ID NO: 2426549 - RNA, 19 nt, Artificial Sequence
  Description of Artificial Sequence: Synthetic oligonucleotide
ugggacacguggcuuaaau

SEQ ID NO: 2426550 - RNA, 19 nt, Artificial Sequence
  Description of Artificial Sequence: Synthetic oligonucleotide
agcagcgaacggucuuugc

SEQ ID NO: 2426551 - RNA, 19 nt, Artificial Sequence
  Description of Artificial Sequence: Synthetic oligonucleotide
agggucaguucuucaaacu

SEQ ID NO: 2426552 - RNA, 19 nt, Artificial Sequence
  Description of Artificial Sequence: Synthetic oligonucleotide
aacacugggccaagucagg

SEQ ID NO: 2426553 - RNA, 19 nt, Artificial Sequence
  Description of Artificial Sequence: Synthetic oligonucleotide
ucuccuuugccuggaauaa

SEQ ID NO: 2426554 - RNA, 19 nt, Artificial Sequence
  Description of Artificial Sequence: Synthetic oligonucleotide
gcaaaggcucacuucgagg

SEQ ID NO: 2426555 - RNA, 19 nt, Artificial Sequence
  Description of Artificial Sequence: Synthetic oligonucleotide
cacguggcuuaaauguggc

SEQ ID NO: 2426556 - RNA, 19 nt, Artificial Sequence
  Description of Artificial Sequence: Synthetic oligonucleotide
gggucaguucuucaaacug

SEQ ID NO: 2426557 - RNA, 19 nt, Artificial Sequence
  Description of Artificial Sequence: Synthetic oligonucleotide
cucguucucgguagggcag

SEQ ID NO: 2426558 - RNA, 19 nt, Artificial Sequence
  Description of Artificial Sequence: Synthetic oligonucleotide
uuauuuccagcugggcgug

SEQ ID NO: 2426559 - RNA, 19 nt, Artificial Sequence
  Description of Artificial Sequence: Synthetic oligonucleotide
cuggaauaaugaaaggaua

SEQ ID NO: 2426560 - RNA, 19 nt, Artificial Sequence
  Description of Artificial Sequence: Synthetic oligonucleotide
uacauuggggcuggggugu

SEQ ID NO: 2426561 - RNA, 19 nt, Artificial Sequence
  Description of Artificial Sequence: Synthetic oligonucleotide
agacacugcuaagcggccc

SEQ ID NO: 2426562 - RNA, 19 nt, Artificial Sequence
  Description of Artificial Sequence: Synthetic oligonucleotide
ugggguugucaucuggcuc

SEQ ID NO: 2426563 - RNA, 19 nt, Artificial Sequence
  Description of Artificial Sequence: Synthetic oligonucleotide
ucuuggcucuuucuuuguc

SEQ ID NO: 2426564 - RNA, 19 nt, Artificial Sequence
  Description of Artificial Sequence: Synthetic oligonucleotide
ugucacucagguccagguc

SEQ ID NO: 2426565 - RNA, 19 nt, Artificial Sequence
  Description of Artificial Sequence: Synthetic oligonucleotide
ugggaaagcugggacacgu

SEQ ID NO: 2426566 - RNA, 19 nt, Artificial Sequence
  Description of Artificial Sequence: Synthetic oligonucleotide
ucuuugcaguuucuucaaa

SEQ ID NO: 2426567 - RNA, 19 nt, Artificial Sequence
  Description of Artificial Sequence: Synthetic oligonucleotide
ggacacguggcuuaaaugu

SEQ ID NO: 2426568 - RNA, 19 nt, Artificial Sequence
  Description of Artificial Sequence: Synthetic oligonucleotide
ggucaguucuucaaacugc

SEQ ID NO: 2426569 - RNA, 19 nt, Artificial Sequence
  Description of Artificial Sequence: Synthetic oligonucleotide
ggaauaaugaaaggauaca

SEQ ID NO: 2426570 - RNA, 19 nt, Artificial Sequence
  Description of Artificial Sequence: Synthetic oligonucleotide
cuuccaagcgaagacaaaa

SEQ ID NO: 2426571 - RNA, 19 nt, Artificial Sequence
  Description of Artificial Sequence: Synthetic oligonucleotide
gacacugcuaagcggccca

SEQ ID NO: 2426572 - RNA, 19 nt, Artificial Sequence
  Description of Artificial Sequence: Synthetic oligonucleotide
gggaacaguuuauuuccag

SEQ ID NO: 2426573 - RNA, 19 nt, Artificial Sequence
  Description of Artificial Sequence: Synthetic oligonucleotide
acuucgaggcaaccagcug

SEQ ID NO: 2426574 - RNA, 19 nt, Artificial Sequence
  Description of Artificial Sequence: Synthetic oligonucleotide
uggcuuaaauguggcaugu

SEQ ID NO: 2426575 - RNA, 19 nt, Artificial Sequence
  Description of Artificial Sequence: Synthetic oligonucleotide
gaggcaaccagcugcucaa

SEQ ID NO: 2426576 - RNA, 19 nt, Artificial Sequence
  Description of Artificial Sequence: Synthetic oligonucleotide
ggccaguucuugaaggugg

SEQ ID NO: 2426577 - RNA, 19 nt, Artificial Sequence
  Description of Artificial Sequence: Synthetic oligonucleotide
aaggcucacuucgaggcaa

SEQ ID NO: 2426578 - RNA, 19 nt, Artificial Sequence
  Description of Artificial Sequence: Synthetic oligonucleotide
agcgaacggucuuugcagu

SEQ ID NO: 2426579 - RNA, 19 nt, Artificial Sequence
  Description of Artificial Sequence: Synthetic oligonucleotide
uacagcugccaggucgggg

SEQ ID NO: 2426580 - RNA, 19 nt, Artificial Sequence
  Description of Artificial Sequence: Synthetic oligonucleotide
agaugcggugcuccaugag

SEQ ID NO: 2426581 - RNA, 19 nt, Artificial Sequence
  Description of Artificial Sequence: Synthetic oligonucleotide
aauuuuguucuuggcucuu

SEQ ID NO: 2426582 - RNA, 19 nt, Artificial Sequence
  Description of Artificial Sequence: Synthetic oligonucleotide
cuuugccuggaauaaugaa

SEQ ID NO: 2426583 - RNA, 19 nt, Artificial Sequence
  Description of Artificial Sequence: Synthetic oligonucleotide
acuuuaggcgaaugcuuuu

SEQ ID NO: 2426584 - RNA, 19 nt, Artificial Sequence
  Description of Artificial Sequence: Synthetic oligonucleotide
gcacacuuuaggcgaaugc

SEQ ID NO: 2426585 - RNA, 19 nt, Artificial Sequence
  Description of Artificial Sequence: Synthetic oligonucleotide
cagcggauggcggaagccg

SEQ ID NO: 2426586 - RNA, 19 nt, Artificial Sequence
  Description of Artificial Sequence: Synthetic oligonucleotide
uggcucuuucuuuguccag

SEQ ID NO: 2426587 - RNA, 19 nt, Artificial Sequence
  Description of Artificial Sequence: Synthetic oligonucleotide
agaauucacugagggucag

SEQ ID NO: 2426588 - RNA, 19 nt, Artificial Sequence
  Description of Artificial Sequence: Synthetic oligonucleotide
cugggccaagucaggcucg

SEQ ID NO: 2426589 - RNA, 19 nt, Artificial Sequence
  Description of Artificial Sequence: Synthetic oligonucleotide
cacuuccaagcgaagacaa

SEQ ID NO: 2426590 - RNA, 19 nt, Artificial Sequence
  Description of Artificial Sequence: Synthetic oligonucleotide
ggagaugcggugcuccaug

SEQ ID NO: 2426591 - RNA, 19 nt, Artificial Sequence
  Description of Artificial Sequence: Synthetic oligonucleotide
ggugcuccaugagauacag

SEQ ID NO: 2426592 - RNA, 19 nt, Artificial Sequence
  Description of Artificial Sequence: Synthetic oligonucleotide
cuuugcaguuucuucaaau

SEQ ID NO: 2426593 - RNA, 19 nt, Artificial Sequence
  Description of Artificial Sequence: Synthetic oligonucleotide
gggacacguggcuuaaaug

SEQ ID NO: 2426594 - RNA, 19 nt, Artificial Sequence
  Description of Artificial Sequence: Synthetic oligonucleotide
gccuggaauaaugaaagga

SEQ ID NO: 2426595 - RNA, 19 nt, Artificial Sequence
  Description of Artificial Sequence: Synthetic oligonucleotide
ggauacauuggggcugggg

SEQ ID NO: 2426596 - RNA, 19 nt, Artificial Sequence
  Description of Artificial Sequence: Synthetic oligonucleotide
cucgguagggcagcggaug

SEQ ID NO: 2426597 - RNA, 19 nt, Artificial Sequence
  Description of Artificial Sequence: Synthetic oligonucleotide
acacuuuaggcgaaugcuu

SEQ ID NO: 2426598 - RNA, 19 nt, Artificial Sequence
  Description of Artificial Sequence: Synthetic oligonucleotide
gagaugcggugcuccauga

SEQ ID NO: 2426599 - RNA, 19 nt, Artificial Sequence
  Description of Artificial Sequence: Synthetic oligonucleotide
caauuuuguucuuggcucu

SEQ ID NO: 2426600 - RNA, 19 nt, Artificial Sequence
  Description of Artificial Sequence: Synthetic oligonucleotide
agcggauggcggaagccgg

SEQ ID NO: 2426601 - RNA, 19 nt, Artificial Sequence
  Description of Artificial Sequence: Synthetic oligonucleotide
uauuuccagcugggcgugg

SEQ ID NO: 2426602 - RNA, 19 nt, Artificial Sequence
  Description of Artificial Sequence: Synthetic oligonucleotide
agccacuuccaagcgaaga

SEQ ID NO: 2426603 - RNA, 19 nt, Artificial Sequence
  Description of Artificial Sequence: Synthetic oligonucleotide
gcagcgaacggucuuugca

SEQ ID NO: 2426604 - RNA, 19 nt, Artificial Sequence
  Description of Artificial Sequence: Synthetic oligonucleotide
ccugggguugucaucuggc

SEQ ID NO: 2426605 - RNA, 19 nt, Artificial Sequence
  Description of Artificial Sequence: Synthetic oligonucleotide
acguggcuuaaauguggca

SEQ ID NO: 2426606 - RNA, 19 nt, Artificial Sequence
  Description of Artificial Sequence: Synthetic oligonucleotide
ucguucucgguagggcagc

SEQ ID NO: 2426607 - RNA, 19 nt, Artificial Sequence
  Description of Artificial Sequence: Synthetic oligonucleotide
gcuuccgccauccgcucgg

SEQ ID NO: 2426608 - RNA, 19 nt, Artificial Sequence
  Description of Artificial Sequence: Synthetic oligonucleotide
ucacugagggucaguucuu

SEQ ID NO: 2426609 - RNA, 19 nt, Artificial Sequence
  Description of Artificial Sequence: Synthetic oligonucleotide
acagucaggaaggcacacu

SEQ ID NO: 2426610 - RNA, 19 nt, Artificial Sequence
  Description of Artificial Sequence: Synthetic oligonucleotide
gguggagaugcggugcucc

SEQ ID NO: 2426611 - RNA, 19 nt, Artificial Sequence
  Description of Artificial Sequence: Synthetic oligonucleotide
ggccaagucaggcucguuc

SEQ ID NO: 2426612 - RNA, 19 nt, Artificial Sequence
  Description of Artificial Sequence: Synthetic oligonucleotide
uuccgccauccgcucgggg

SEQ ID NO: 2426613 - RNA, 19 nt, Artificial Sequence
  Description of Artificial Sequence: Synthetic oligonucleotide
gcugggaaagcugggacac

SEQ ID NO: 2426614 - RNA, 19 nt, Artificial Sequence
  Description of Artificial Sequence: Synthetic oligonucleotide
aggagcagcccuccaggaa

SEQ ID NO: 2426615 - RNA, 19 nt, Artificial Sequence
  Description of Artificial Sequence: Synthetic oligonucleotide
agucaggcucguucucggu

SEQ ID NO: 2426616 - RNA, 19 nt, Artificial Sequence
  Description of Artificial Sequence: Synthetic oligonucleotide
ccuggaauaaugaaaggau

SEQ ID NO: 2426617 - RNA, 19 nt, Artificial Sequence
  Description of Artificial Sequence: Synthetic oligonucleotide
gcggaagccggcuuccgcc

SEQ ID NO: 2426618 - RNA, 19 nt, Artificial Sequence
  Description of Artificial Sequence: Synthetic oligonucleotide
augcggugcuccaugagau

SEQ ID NO: 2426619 - RNA, 19 nt, Artificial Sequence
  Description of Artificial Sequence: Synthetic oligonucleotide
ggaagggccaguucuugaa

SEQ ID NO: 2426620 - RNA, 19 nt, Artificial Sequence
  Description of Artificial Sequence: Synthetic oligonucleotide
aggcucguucucgguaggg

SEQ ID NO: 2426621 - RNA, 19 nt, Artificial Sequence
  Description of Artificial Sequence: Synthetic oligonucleotide
agggaacaguuuauuucca

SEQ ID NO: 2426622 - RNA, 19 nt, Artificial Sequence
  Description of Artificial Sequence: Synthetic oligonucleotide
caggcucguucucgguagg

SEQ ID NO: 2426623 - RNA, 19 nt, Artificial Sequence
  Description of Artificial Sequence: Synthetic oligonucleotide
gccuagagggaacaguuua

SEQ ID NO: 2426624 - RNA, 19 nt, Artificial Sequence
  Description of Artificial Sequence: Synthetic oligonucleotide
gagauacagcugccagguc

SEQ ID NO: 2426625 - RNA, 19 nt, Artificial Sequence
  Description of Artificial Sequence: Synthetic oligonucleotide
guucucgguagggcagcgg

SEQ ID NO: 2426626 - RNA, 19 nt, Artificial Sequence
  Description of Artificial Sequence: Synthetic oligonucleotide
gcucguucucgguagggca

SEQ ID NO: 2426627 - RNA, 19 nt, Artificial Sequence
  Description of Artificial Sequence: Synthetic oligonucleotide
gucaggcucguucucggua

SEQ ID NO: 2426628 - RNA, 19 nt, Artificial Sequence
  Description of Artificial Sequence: Synthetic oligonucleotide
ggcugggaaagcugggaca

SEQ ID NO: 2426629 - RNA, 19 nt, Artificial Sequence
  Description of Artificial Sequence: Synthetic oligonucleotide
cacuuuaggcgaaugcuuu

SEQ ID NO: 2426630 - RNA, 19 nt, Artificial Sequence
  Description of Artificial Sequence: Synthetic oligonucleotide
auacagcugccaggucggg

SEQ ID NO: 2426631 - RNA, 19 nt, Artificial Sequence
  Description of Artificial Sequence: Synthetic oligonucleotide
caauggagcagcgaacggu

SEQ ID NO: 2426632 - RNA, 19 nt, Artificial Sequence
  Description of Artificial Sequence: Synthetic oligonucleotide
gagcagcgaacggucuuug

SEQ ID NO: 2426633 - RNA, 19 nt, Artificial Sequence
  Description of Artificial Sequence: Synthetic oligonucleotide
cacuucgaggcaaccagcu

SEQ ID NO: 2426634 - RNA, 19 nt, Artificial Sequence
  Description of Artificial Sequence: Synthetic oligonucleotide
guggagaugcggugcucca

SEQ ID NO: 2426635 - RNA, 19 nt, Artificial Sequence
  Description of Artificial Sequence: Synthetic oligonucleotide
aggcucacuucgaggcaac

SEQ ID NO: 2426636 - RNA, 19 nt, Artificial Sequence
  Description of Artificial Sequence: Synthetic oligonucleotide
cacugcuaagcggcccagg

SEQ ID NO: 2426637 - RNA, 19 nt, Artificial Sequence
  Description of Artificial Sequence: Synthetic oligonucleotide
gcggugcuccaugagauac

SEQ ID NO: 2426638 - RNA, 19 nt, Artificial Sequence
  Description of Artificial Sequence: Synthetic oligonucleotide
uaagcggcccaggcuggga

SEQ ID NO: 2426639 - RNA, 19 nt, Artificial Sequence
  Description of Artificial Sequence: Synthetic oligonucleotide
uggagaugcggugcuccau

SEQ ID NO: 2426640 - RNA, 19 nt, Artificial Sequence
  Description of Artificial Sequence: Synthetic oligonucleotide
cacugagggucaguucuuc

SEQ ID NO: 2426641 - RNA, 19 nt, Artificial Sequence
  Description of Artificial Sequence: Synthetic oligonucleotide
caucuggcucccagccuuc

SEQ ID NO: 2426642 - RNA, 19 nt, Artificial Sequence
  Description of Artificial Sequence: Synthetic oligonucleotide
acacugcuaagcggcccag

SEQ ID NO: 2426643 - RNA, 19 nt, Artificial Sequence
  Description of Artificial Sequence: Synthetic oligonucleotide
ccuuugccuggaauaauga

SEQ ID NO: 2426644 - RNA, 19 nt, Artificial Sequence
  Description of Artificial Sequence: Synthetic oligonucleotide
acggucuuugcaguuucuu

SEQ ID NO: 2426645 - RNA, 19 nt, Artificial Sequence
  Description of Artificial Sequence: Synthetic oligonucleotide
agguggagaugcggugcuc

SEQ ID NO: 2426646 - RNA, 19 nt, Artificial Sequence
  Description of Artificial Sequence: Synthetic oligonucleotide
auguggcaugucacucagg

SEQ ID NO: 2426647 - RNA, 19 nt, Artificial Sequence
  Description of Artificial Sequence: Synthetic oligonucleotide
cccagcaaaggcucacuuc

SEQ ID NO: 2426648 - RNA, 19 nt, Artificial Sequence
  Description of Artificial Sequence: Synthetic oligonucleotide
ggugcaggagcagcccucc

SEQ ID NO: 2426649 - RNA, 19 nt, Artificial Sequence
  Description of Artificial Sequence: Synthetic oligonucleotide
acuuccaagcgaagacaaa

SEQ ID NO: 2426650 - RNA, 19 nt, Artificial Sequence
  Description of Artificial Sequence: Synthetic oligonucleotide
gccggcuuccgccauccgc

SEQ ID NO: 2426651 - RNA, 19 nt, Artificial Sequence
  Description of Artificial Sequence: Synthetic oligonucleotide
gcucaauggagcagcgaac

SEQ ID NO: 2426652 - RNA, 19 nt, Artificial Sequence
  Description of Artificial Sequence: Synthetic oligonucleotide
ggcuuccgccauccgcucg

SEQ ID NO: 2426653 - RNA, 19 nt, Artificial Sequence
  Description of Artificial Sequence: Synthetic oligonucleotide
uggucuccuuugccuggaa

SEQ ID NO: 2426654 - RNA, 19 nt, Artificial Sequence
  Description of Artificial Sequence: Synthetic oligonucleotide
ugggccaagucaggcucgu

SEQ ID NO: 2426655 - RNA, 19 nt, Artificial Sequence
  Description of Artificial Sequence: Synthetic oligonucleotide
cagucaggaaggcacacuu

SEQ ID NO: 2426656 - RNA, 19 nt, Artificial Sequence
  Description of Artificial Sequence: Synthetic oligonucleotide
ugcuugcuguuggucuccu

SEQ ID NO: 2426657 - RNA, 19 nt, Artificial Sequence
  Description of Artificial Sequence: Synthetic oligonucleotide
gggccaguucuugaaggug

SEQ ID NO: 2426658 - RNA, 19 nt, Artificial Sequence
  Description of Artificial Sequence: Synthetic oligonucleotide
ggcagcggauggcggaagc

SEQ ID NO: 2426659 - RNA, 19 nt, Artificial Sequence
  Description of Artificial Sequence: Synthetic oligonucleotide
ggcacacuuuaggcgaaug

SEQ ID NO: 2426660 - RNA, 19 nt, Artificial Sequence
  Description of Artificial Sequence: Synthetic oligonucleotide
gcuaagcggcccaggcugg

SEQ ID NO: 2426661 - RNA, 19 nt, Artificial Sequence
  Description of Artificial Sequence: Synthetic oligonucleotide
ggcggaagccggcuuccgc

SEQ ID NO: 2426662 - RNA, 19 nt, Artificial Sequence
  Description of Artificial Sequence: Synthetic oligonucleotide
cggucuuugcaguuucuuc

SEQ ID NO: 2426663 - RNA, 19 nt, Artificial Sequence
  Description of Artificial Sequence: Synthetic oligonucleotide
gaauucacugagggucagu

SEQ ID NO: 2426664 - RNA, 19 nt, Artificial Sequence
  Description of Artificial Sequence: Synthetic oligonucleotide
gcuucuugacagucaggaa

SEQ ID NO: 2426665 - RNA, 19 nt, Artificial Sequence
  Description of Artificial Sequence: Synthetic oligonucleotide
aggauacauuggggcuggg

SEQ ID NO: 2426666 - RNA, 19 nt, Artificial Sequence
  Description of Artificial Sequence: Synthetic oligonucleotide
cuuccgccauccgcucggg

SEQ ID NO: 2426667 - RNA, 19 nt, Artificial Sequence
  Description of Artificial Sequence: Synthetic oligonucleotide
agcggcccaggcugggaaa

SEQ ID NO: 2426668 - RNA, 19 nt, Artificial Sequence
  Description of Artificial Sequence: Synthetic oligonucleotide
gcucacuucgaggcaacca

SEQ ID NO: 2426669 - RNA, 19 nt, Artificial Sequence
  Description of Artificial Sequence: Synthetic oligonucleotide
guguggccuagagggaaca

SEQ ID NO: 2426670 - RNA, 19 nt, Artificial Sequence
  Description of Artificial Sequence: Synthetic oligonucleotide
ggggcagagccggagcccc

SEQ ID NO: 2426671 - RNA, 19 nt, Artificial Sequence
  Description of Artificial Sequence: Synthetic oligonucleotide
acauuggggcuggggugug

SEQ ID NO: 2426672 - RNA, 19 nt, Artificial Sequence
  Description of Artificial Sequence: Synthetic oligonucleotide
cuagagggaacaguuuauu

SEQ ID NO: 2426673 - RNA, 19 nt, Artificial Sequence
  Description of Artificial Sequence: Synthetic oligonucleotide
guggccuagagggaacagu

SEQ ID NO: 2426674 - RNA, 19 nt, Artificial Sequence
  Description of Artificial Sequence: Synthetic oligonucleotide
gcagcggauggcggaagcc

SEQ ID NO: 2426675 - RNA, 19 nt, Artificial Sequence
  Description of Artificial Sequence: Synthetic oligonucleotide
gguguggccuagagggaac

SEQ ID NO: 2426676 - RNA, 19 nt, Artificial Sequence
  Description of Artificial Sequence: Synthetic oligonucleotide
agccggcuuccgccauccg

SEQ ID NO: 2426677 - RNA, 19 nt, Artificial Sequence
  Description of Artificial Sequence: Synthetic oligonucleotide
gggaaagcugggacacgug

SEQ ID NO: 2426678 - RNA, 19 nt, Artificial Sequence
  Description of Artificial Sequence: Synthetic oligonucleotide
cacugggccaagucaggcu

SEQ ID NO: 2426679 - RNA, 19 nt, Artificial Sequence
  Description of Artificial Sequence: Synthetic oligonucleotide
ggcucuuucuuuguccagu

SEQ ID NO: 2426680 - RNA, 19 nt, Artificial Sequence
  Description of Artificial Sequence: Synthetic oligonucleotide
agggcagcggauggcggaa

SEQ ID NO: 2426681 - RNA, 19 nt, Artificial Sequence
  Description of Artificial Sequence: Synthetic oligonucleotide
ccaagucaggcucguucuc

SEQ ID NO: 2426682 - RNA, 19 nt, Artificial Sequence
  Description of Artificial Sequence: Synthetic oligonucleotide
cugcuaagcggcccaggcu

SEQ ID NO: 2426683 - RNA, 19 nt, Artificial Sequence
  Description of Artificial Sequence: Synthetic oligonucleotide
cagcugggcgugguggcuc

SEQ ID NO: 2426684 - RNA, 19 nt, Artificial Sequence
  Description of Artificial Sequence: Synthetic oligonucleotide
ggguugucaucuggcuccc

SEQ ID NO: 2426685 - RNA, 19 nt, Artificial Sequence
  Description of Artificial Sequence: Synthetic oligonucleotide
cugcucaauggagcagcga

SEQ ID NO: 2426686 - RNA, 19 nt, Artificial Sequence
  Description of Artificial Sequence: Synthetic oligonucleotide
ucgaggcaaccagcugcuc

SEQ ID NO: 2426687 - RNA, 19 nt, Artificial Sequence
  Description of Artificial Sequence: Synthetic oligonucleotide
ggcucacuucgaggcaacc

SEQ ID NO: 2426688 - RNA, 19 nt, Artificial Sequence
  Description of Artificial Sequence: Synthetic oligonucleotide
ccaugagauacagcugcca

SEQ ID NO: 2426689 - RNA, 19 nt, Artificial Sequence
  Description of Artificial Sequence: Synthetic oligonucleotide
gcggcccaggcugggaaag

SEQ ID NO: 2426690 - RNA, 19 nt, Artificial Sequence
  Description of Artificial Sequence: Synthetic oligonucleotide
aggcacacuuuaggcgaau

SEQ ID NO: 2426691 - RNA, 19 nt, Artificial Sequence
  Description of Artificial Sequence: Synthetic oligonucleotide
ccuagagggaacaguuuau

SEQ ID NO: 2426692 - RNA, 19 nt, Artificial Sequence
  Description of Artificial Sequence: Synthetic oligonucleotide
aggcaaccagcugcucaau

SEQ ID NO: 2426693 - RNA, 19 nt, Artificial Sequence
  Description of Artificial Sequence: Synthetic oligonucleotide
gcggauggcggaagccggc

SEQ ID NO: 2426694 - RNA, 19 nt, Artificial Sequence
  Description of Artificial Sequence: Synthetic oligonucleotide
cguggcuuaaauguggcau

SEQ ID NO: 2426695 - RNA, 19 nt, Artificial Sequence
  Description of Artificial Sequence: Synthetic oligonucleotide
ccggcuuccgccauccgcu

SEQ ID NO: 2426696 - RNA, 19 nt, Artificial Sequence
  Description of Artificial Sequence: Synthetic oligonucleotide
cagcuccuuaaagcagaaa

SEQ ID NO: 2426697 - RNA, 19 nt, Artificial Sequence
  Description of Artificial Sequence: Synthetic oligonucleotide
cguucucgguagggcagcg

SEQ ID NO: 2426698 - RNA, 19 nt, Artificial Sequence
  Description of Artificial Sequence: Synthetic oligonucleotide
ggggugcaggagcagcccu

SEQ ID NO: 2426699 - RNA, 19 nt, Artificial Sequence
  Description of Artificial Sequence: Synthetic oligonucleotide
gggcagcggauggcggaag

SEQ ID NO: 2426700 - RNA, 19 nt, Artificial Sequence
  Description of Artificial Sequence: Synthetic oligonucleotide
cuccuuugccuggaauaau

SEQ ID NO: 2426701 - RNA, 19 nt, Artificial Sequence
  Description of Artificial Sequence: Synthetic oligonucleotide
ggagcagcgaacggucuuu

SEQ ID NO: 2426702 - RNA, 19 nt, Artificial Sequence
  Description of Artificial Sequence: Synthetic oligonucleotide
gcgaacggucuuugcaguu

SEQ ID NO: 2426703 - RNA, 19 nt, Artificial Sequence
  Description of Artificial Sequence: Synthetic oligonucleotide
gguugucaucuggcuccca

SEQ ID NO: 2426704 - RNA, 19 nt, Artificial Sequence
  Description of Artificial Sequence: Synthetic oligonucleotide
cugggacacguggcuuaaa

SEQ ID NO: 2426705 - RNA, 19 nt, Artificial Sequence
  Description of Artificial Sequence: Synthetic oligonucleotide
cgguagggcagcggauggc

SEQ ID NO: 2426706 - RNA, 19 nt, Artificial Sequence
  Description of Artificial Sequence: Synthetic oligonucleotide
gggcugggguguggccuag

SEQ ID NO: 2426707 - RNA, 19 nt, Artificial Sequence
  Description of Artificial Sequence: Synthetic oligonucleotide
ggccuagagggaacaguuu

SEQ ID NO: 2426708 - RNA, 19 nt, Artificial Sequence
  Description of Artificial Sequence: Synthetic oligonucleotide
cggcuuccgccauccgcuc

SEQ ID NO: 2426709 - RNA, 19 nt, Artificial Sequence
  Description of Artificial Sequence: Synthetic oligonucleotide
ggcugggguguggccuaga

SEQ ID NO: 2426710 - RNA, 19 nt, Artificial Sequence
  Description of Artificial Sequence: Synthetic oligonucleotide
ccccagcaaaggcucacuu

SEQ ID NO: 2426711 - RNA, 19 nt, Artificial Sequence
  Description of Artificial Sequence: Synthetic oligonucleotide
cgaacggucuuugcaguuu

SEQ ID NO: 2426712 - RNA, 19 nt, Artificial Sequence
  Description of Artificial Sequence: Synthetic oligonucleotide
cggauggcggaagccggcu

SEQ ID NO: 2426713 - RNA, 19 nt, Artificial Sequence
  Description of Artificial Sequence: Synthetic oligonucleotide
gggccaagucaggcucguu

SEQ ID NO: 2426714 - RNA, 19 nt, Artificial Sequence
  Description of Artificial Sequence: Synthetic oligonucleotide
agaaaauugaauuugaggg

SEQ ID NO: 2426715 - RNA, 19 nt, Artificial Sequence
  Description of Artificial Sequence: Synthetic oligonucleotide
aaguauaucgcucaggagg

SEQ ID NO: 2426716 - RNA, 19 nt, Artificial Sequence
  Description of Artificial Sequence: Synthetic oligonucleotide
aguaucgagaaguauaucg

SEQ ID NO: 2426717 - RNA, 19 nt, Artificial Sequence
  Description of Artificial Sequence: Synthetic oligonucleotide
uuaacagccaacaucuugg

SEQ ID NO: 2426718 - RNA, 19 nt, Artificial Sequence
  Description of Artificial Sequence: Synthetic oligonucleotide
uuugacaugagucauugcc

SEQ ID NO: 2426719 - RNA, 19 nt, Artificial Sequence
  Description of Artificial Sequence: Synthetic oligonucleotide
uguagucuaggacauaacg

SEQ ID NO: 2426720 - RNA, 19 nt, Artificial Sequence
  Description of Artificial Sequence: Synthetic oligonucleotide
ucugcucucauucagagug

SEQ ID NO: 2426721 - RNA, 19 nt, Artificial Sequence
  Description of Artificial Sequence: Synthetic oligonucleotide
uucuagaucaauuugacau

SEQ ID NO: 2426722 - RNA, 19 nt, Artificial Sequence
  Description of Artificial Sequence: Synthetic oligonucleotide
acuuaaaguauucugcuuc

SEQ ID NO: 2426723 - RNA, 19 nt, Artificial Sequence
  Description of Artificial Sequence: Synthetic oligonucleotide
gaauuuagcaucuguuugg

SEQ ID NO: 2426724 - RNA, 19 nt, Artificial Sequence
  Description of Artificial Sequence: Synthetic oligonucleotide
aucucaggaaaauugcugc

SEQ ID NO: 2426725 - RNA, 19 nt, Artificial Sequence
  Description of Artificial Sequence: Synthetic oligonucleotide
cacaacuugacuuuucugg

SEQ ID NO: 2426726 - RNA, 19 nt, Artificial Sequence
  Description of Artificial Sequence: Synthetic oligonucleotide
ugcugcaauccucagaugg

SEQ ID NO: 2426727 - RNA, 19 nt, Artificial Sequence
  Description of Artificial Sequence: Synthetic oligonucleotide
uuuacacugaacauuuccc

SEQ ID NO: 2426728 - RNA, 19 nt, Artificial Sequence
  Description of Artificial Sequence: Synthetic oligonucleotide
agaacuacagaauuaucag

SEQ ID NO: 2426729 - RNA, 19 nt, Artificial Sequence
  Description of Artificial Sequence: Synthetic oligonucleotide
cagaaaauugaauuugagg

SEQ ID NO: 2426730 - RNA, 19 nt, Artificial Sequence
  Description of Artificial Sequence: Synthetic oligonucleotide
aguuauauauaccuggcca

SEQ ID NO: 2426731 - RNA, 19 nt, Artificial Sequence
  Description of Artificial Sequence: Synthetic oligonucleotide
cugaacauuucccagagcc

SEQ ID NO: 2426732 - RNA, 19 nt, Artificial Sequence
  Description of Artificial Sequence: Synthetic oligonucleotide
uugaguucaauaaucucag

SEQ ID NO: 2426733 - RNA, 19 nt, Artificial Sequence
  Description of Artificial Sequence: Synthetic oligonucleotide
acaacuugacuuuucuggc

SEQ ID NO: 2426734 - RNA, 19 nt, Artificial Sequence
  Description of Artificial Sequence: Synthetic oligonucleotide
aaaggcuuguuccagaaaa

SEQ ID NO: 2426735 - RNA, 19 nt, Artificial Sequence
  Description of Artificial Sequence: Synthetic oligonucleotide
aauuuagcaucuguuuggc

SEQ ID NO: 2426736 - RNA, 19 nt, Artificial Sequence
  Description of Artificial Sequence: Synthetic oligonucleotide
ugagucauugccaacugag

SEQ ID NO: 2426737 - RNA, 19 nt, Artificial Sequence
  Description of Artificial Sequence: Synthetic oligonucleotide
uuuaacagccaacaucuug

SEQ ID NO: 2426738 - RNA, 19 nt, Artificial Sequence
  Description of Artificial Sequence: Synthetic oligonucleotide
ugcuccaauucacagaucc

SEQ ID NO: 2426739 - RNA, 19 nt, Artificial Sequence
  Description of Artificial Sequence: Synthetic oligonucleotide
gaucuuaccacacaccaug

SEQ ID NO: 2426740 - RNA, 19 nt, Artificial Sequence
  Description of Artificial Sequence: Synthetic oligonucleotide
ucagcuaguugucaaaggc

SEQ ID NO: 2426741 - RNA, 19 nt, Artificial Sequence
  Description of Artificial Sequence: Synthetic oligonucleotide
gauagcgaguuauauauac

SEQ ID NO: 2426742 - RNA, 19 nt, Artificial Sequence
  Description of Artificial Sequence: Synthetic oligonucleotide
caugauucuggccacacgg

SEQ ID NO: 2426743 - RNA, 19 nt, Artificial Sequence
  Description of Artificial Sequence: Synthetic oligonucleotide
aguucuggcaacuuaaagu

SEQ ID NO: 2426744 - RNA, 19 nt, Artificial Sequence
  Description of Artificial Sequence: Synthetic oligonucleotide
cauaacgaaagagaaaacc

SEQ ID NO: 2426745 - RNA, 19 nt, Artificial Sequence
  Description of Artificial Sequence: Synthetic oligonucleotide
gaauuaucaggucuucuag

SEQ ID NO: 2426746 - RNA, 19 nt, Artificial Sequence
  Description of Artificial Sequence: Synthetic oligonucleotide
uagccaauggugaugaagc

SEQ ID NO: 2426747 - RNA, 19 nt, Artificial Sequence
  Description of Artificial Sequence: Synthetic oligonucleotide
aauggugaugaagccagcc

SEQ ID NO: 2426748 - RNA, 19 nt, Artificial Sequence
  Description of Artificial Sequence: Synthetic oligonucleotide
aucaauuugacaugaguca

SEQ ID NO: 2426749 - RNA, 19 nt, Artificial Sequence
  Description of Artificial Sequence: Synthetic oligonucleotide
agagaaaaccaucucgauc

SEQ ID NO: 2426750 - RNA, 19 nt, Artificial Sequence
  Description of Artificial Sequence: Synthetic oligonucleotide
augagaucuuaccacacac

SEQ ID NO: 2426751 - RNA, 19 nt, Artificial Sequence
  Description of Artificial Sequence: Synthetic oligonucleotide
agaaguauaucgcucagga

SEQ ID NO: 2426752 - RNA, 19 nt, Artificial Sequence
  Description of Artificial Sequence: Synthetic oligonucleotide
ucuccgaacacuucuuugg

SEQ ID NO: 2426753 - RNA, 19 nt, Artificial Sequence
  Description of Artificial Sequence: Synthetic oligonucleotide
uacauugaguucaauaauc

SEQ ID NO: 2426754 - RNA, 19 nt, Artificial Sequence
  Description of Artificial Sequence: Synthetic oligonucleotide
uggaaaguggucaggaagc

SEQ ID NO: 2426755 - RNA, 19 nt, Artificial Sequence
  Description of Artificial Sequence: Synthetic oligonucleotide
aacuacagaauuaucaggu

SEQ ID NO: 2426756 - RNA, 19 nt, Artificial Sequence
  Description of Artificial Sequence: Synthetic oligonucleotide
gaauuugaggguaguaucg

SEQ ID NO: 2426757 - RNA, 19 nt, Artificial Sequence
  Description of Artificial Sequence: Synthetic oligonucleotide
gagagagagagagagagag

SEQ ID NO: 2426758 - RNA, 19 nt, Artificial Sequence
  Description of Artificial Sequence: Synthetic oligonucleotide
aguguaggagccucgauag

SEQ ID NO: 2426759 - RNA, 19 nt, Artificial Sequence
  Description of Artificial Sequence: Synthetic oligonucleotide
agagagaggagagagagag

SEQ ID NO: 2426760 - RNA, 19 nt, Artificial Sequence
  Description of Artificial Sequence: Synthetic oligonucleotide
gagaaaaccaucucgaucu

SEQ ID NO: 2426761 - RNA, 19 nt, Artificial Sequence
  Description of Artificial Sequence: Synthetic oligonucleotide
aggauagcgaguuauauau

SEQ ID NO: 2426762 - RNA, 19 nt, Artificial Sequence
  Description of Artificial Sequence: Synthetic oligonucleotide
aggaauacugaucagagua

SEQ ID NO: 2426763 - RNA, 19 nt, Artificial Sequence
  Description of Artificial Sequence: Synthetic oligonucleotide
acagccaacaucuuggcca

SEQ ID NO: 2426764 - RNA, 19 nt, Artificial Sequence
  Description of Artificial Sequence: Synthetic oligonucleotide
aaagagaaaaccaucucga

SEQ ID NO: 2426765 - RNA, 19 nt, Artificial Sequence
  Description of Artificial Sequence: Synthetic oligonucleotide
gacauaacgaaagagaaaa

SEQ ID NO: 2426766 - RNA, 19 nt, Artificial Sequence
  Description of Artificial Sequence: Synthetic oligonucleotide
aauuaucaggucuucuaga

SEQ ID NO: 2426767 - RNA, 19 nt, Artificial Sequence
  Description of Artificial Sequence: Synthetic oligonucleotide
gaaccaggaauacugauca

SEQ ID NO: 2426768 - RNA, 19 nt, Artificial Sequence
  Description of Artificial Sequence: Synthetic oligonucleotide
ucucgaucuaugaagaauc

SEQ ID NO: 2426769 - RNA, 19 nt, Artificial Sequence
  Description of Artificial Sequence: Synthetic oligonucleotide
aacugaguugagcuuguuc

SEQ ID NO: 2426770 - RNA, 19 nt, Artificial Sequence
  Description of Artificial Sequence: Synthetic oligonucleotide
aacgaaagagaaaaccauc

SEQ ID NO: 2426771 - RNA, 19 nt, Artificial Sequence
  Description of Artificial Sequence: Synthetic oligonucleotide
auugaguucaauaaucuca

SEQ ID NO: 2426772 - RNA, 19 nt, Artificial Sequence
  Description of Artificial Sequence: Synthetic oligonucleotide
uaaaguauucugcuucucu

SEQ ID NO: 2426773 - RNA, 19 nt, Artificial Sequence
  Description of Artificial Sequence: Synthetic oligonucleotide
gaagaaucucccuuuguug

SEQ ID NO: 2426774 - RNA, 19 nt, Artificial Sequence
  Description of Artificial Sequence: Synthetic oligonucleotide
aacagccaacaucuuggcc

SEQ ID NO: 2426775 - RNA, 19 nt, Artificial Sequence
  Description of Artificial Sequence: Synthetic oligonucleotide
gaucaauuugacaugaguc

SEQ ID NO: 2426776 - RNA, 19 nt, Artificial Sequence
  Description of Artificial Sequence: Synthetic oligonucleotide
uaccuggccaccuacauug

SEQ ID NO: 2426777 - RNA, 19 nt, Artificial Sequence
  Description of Artificial Sequence: Synthetic oligonucleotide
ucuagaucaauuugacaug

SEQ ID NO: 2426778 - RNA, 19 nt, Artificial Sequence
  Description of Artificial Sequence: Synthetic oligonucleotide
agagaggagagagagagag

SEQ ID NO: 2426779 - RNA, 19 nt, Artificial Sequence
  Description of Artificial Sequence: Synthetic oligonucleotide
agaggagagagagagagag

SEQ ID NO: 2426780 - RNA, 19 nt, Artificial Sequence
  Description of Artificial Sequence: Synthetic oligonucleotide
gaacauuucccagagccgg

SEQ ID NO: 2426781 - RNA, 19 nt, Artificial Sequence
  Description of Artificial Sequence: Synthetic oligonucleotide
aaaauugaauuugagggua

SEQ ID NO: 2426782 - RNA, 19 nt, Artificial Sequence
  Description of Artificial Sequence: Synthetic oligonucleotide
aaugagaucuuaccacaca

SEQ ID NO: 2426783 - RNA, 19 nt, Artificial Sequence
  Description of Artificial Sequence: Synthetic oligonucleotide
uagcgaguuauauauaccu

SEQ ID NO: 2426784 - RNA, 19 nt, Artificial Sequence
  Description of Artificial Sequence: Synthetic oligonucleotide
ugauucuggccacacggcg

SEQ ID NO: 2426785 - RNA, 19 nt, Artificial Sequence
  Description of Artificial Sequence: Synthetic oligonucleotide
ugaauuugaggguaguauc

SEQ ID NO: 2426786 - RNA, 19 nt, Artificial Sequence
  Description of Artificial Sequence: Synthetic oligonucleotide
uagucuaggacauaacgaa

SEQ ID NO: 2426787 - RNA, 19 nt, Artificial Sequence
  Description of Artificial Sequence: Synthetic oligonucleotide
uuugaggguaguaucgaga

SEQ ID NO: 2426788 - RNA, 19 nt, Artificial Sequence
  Description of Artificial Sequence: Synthetic oligonucleotide
uugacaugagucauugcca

SEQ ID NO: 2426789 - RNA, 19 nt, Artificial Sequence
  Description of Artificial Sequence: Synthetic oligonucleotide
guuauauauaccuggccac

SEQ ID NO: 2426790 - RNA, 19 nt, Artificial Sequence
  Description of Artificial Sequence: Synthetic oligonucleotide
ugagcaaggguucuuuaca

SEQ ID NO: 2426791 - RNA, 19 nt, Artificial Sequence
  Description of Artificial Sequence: Synthetic oligonucleotide
uaacgaaagagaaaaccau

SEQ ID NO: 2426792 - RNA, 19 nt, Artificial Sequence
  Description of Artificial Sequence: Synthetic oligonucleotide
aaaguauucugcuucucua

SEQ ID NO: 2426793 - RNA, 19 nt, Artificial Sequence
  Description of Artificial Sequence: Synthetic oligonucleotide
gaauacugaucagaguagg

SEQ ID NO: 2426794 - RNA, 19 nt, Artificial Sequence
  Description of Artificial Sequence: Synthetic oligonucleotide
aggagagagagagagagag

SEQ ID NO: 2426795 - RNA, 19 nt, Artificial Sequence
  Description of Artificial Sequence: Synthetic oligonucleotide
uacacugaacauuucccag

SEQ ID NO: 2426796 - RNA, 19 nt, Artificial Sequence
  Description of Artificial Sequence: Synthetic oligonucleotide
auaacgaaagagaaaacca

SEQ ID NO: 2426797 - RNA, 19 nt, Artificial Sequence
  Description of Artificial Sequence: Synthetic oligonucleotide
cagaacuacagaauuauca

SEQ ID NO: 2426798 - RNA, 19 nt, Artificial Sequence
  Description of Artificial Sequence: Synthetic oligonucleotide
ugacuuuucuggcauggcc

SEQ ID NO: 2426799 - RNA, 19 nt, Artificial Sequence
  Description of Artificial Sequence: Synthetic oligonucleotide
guauucugcuucucuaugg

SEQ ID NO: 2426800 - RNA, 19 nt, Artificial Sequence
  Description of Artificial Sequence: Synthetic oligonucleotide
agagaugugugacagugca

SEQ ID NO: 2426801 - RNA, 19 nt, Artificial Sequence
  Description of Artificial Sequence: Synthetic oligonucleotide
ucaggaagcacuacuugca

SEQ ID NO: 2426802 - RNA, 19 nt, Artificial Sequence
  Description of Artificial Sequence: Synthetic oligonucleotide
aaaguggucaggaagcacu

SEQ ID NO: 2426803 - RNA, 19 nt, Artificial Sequence
  Description of Artificial Sequence: Synthetic oligonucleotide
uccuggaucagugagcaag

SEQ ID NO: 2426804 - RNA, 19 nt, Artificial Sequence
  Description of Artificial Sequence: Synthetic oligonucleotide
agaucaauuugacaugagu

SEQ ID NO: 2426805 - RNA, 19 nt, Artificial Sequence
  Description of Artificial Sequence: Synthetic oligonucleotide
uaugaagaaucucccuuug

SEQ ID NO: 2426806 - RNA, 19 nt, Artificial Sequence
  Description of Artificial Sequence: Synthetic oligonucleotide
aguauaucgcucaggaggg

SEQ ID NO: 2426807 - RNA, 19 nt, Artificial Sequence
  Description of Artificial Sequence: Synthetic oligonucleotide
acuacagaauuaucagguc

SEQ ID NO: 2426808 - RNA, 19 nt, Artificial Sequence
  Description of Artificial Sequence: Synthetic oligonucleotide
uugagcucagaaccagugg

SEQ ID NO: 2426809 - RNA, 19 nt, Artificial Sequence
  Description of Artificial Sequence: Synthetic oligonucleotide
uccaauucacagauccaag

SEQ ID NO: 2426810 - RNA, 19 nt, Artificial Sequence
  Description of Artificial Sequence: Synthetic oligonucleotide
aguugucaaaggcuuguuc

SEQ ID NO: 2426811 - RNA, 19 nt, Artificial Sequence
  Description of Artificial Sequence: Synthetic oligonucleotide
agagagaugugugacagug

SEQ ID NO: 2426812 - RNA, 19 nt, Artificial Sequence
  Description of Artificial Sequence: Synthetic oligonucleotide
auuaucaggucuucuagau

SEQ ID NO: 2426813 - RNA, 19 nt, Artificial Sequence
  Description of Artificial Sequence: Synthetic oligonucleotide
uucucuauggagccggcca

SEQ ID NO: 2426814 - RNA, 19 nt, Artificial Sequence
  Description of Artificial Sequence: Synthetic oligonucleotide
ucgagaaguauaucgcuca

SEQ ID NO: 2426815 - RNA, 19 nt, Artificial Sequence
  Description of Artificial Sequence: Synthetic oligonucleotide
uuauauauaccuggccacc

SEQ ID NO: 2426816 - RNA, 19 nt, Artificial Sequence
  Description of Artificial Sequence: Synthetic oligonucleotide
ccuucuugagcucagaacc

SEQ ID NO: 2426817 - RNA, 19 nt, Artificial Sequence
  Description of Artificial Sequence: Synthetic oligonucleotide
gaguuauauauaccuggcc

SEQ ID NO: 2426818 - RNA, 19 nt, Artificial Sequence
  Description of Artificial Sequence: Synthetic oligonucleotide
uauaucgcucaggagggcg

SEQ ID NO: 2426819 - RNA, 19 nt, Artificial Sequence
  Description of Artificial Sequence: Synthetic oligonucleotide
uaucgagaaguauaucgcu

SEQ ID NO: 2426820 - RNA, 19 nt, Artificial Sequence
  Description of Artificial Sequence: Synthetic oligonucleotide
ggaauuuagcaucuguuug

SEQ ID NO: 2426821 - RNA, 19 nt, Artificial Sequence
  Description of Artificial Sequence: Synthetic oligonucleotide
aacuugacuuuucuggcau

SEQ ID NO: 2426822 - RNA, 19 nt, Artificial Sequence
  Description of Artificial Sequence: Synthetic oligonucleotide
auucagagugucuccgaac

SEQ ID NO: 2426823 - RNA, 19 nt, Artificial Sequence
  Description of Artificial Sequence: Synthetic oligonucleotide
gaaaauugaauuugagggu

SEQ ID NO: 2426824 - RNA, 19 nt, Artificial Sequence
  Description of Artificial Sequence: Synthetic oligonucleotide
aaguauucugcuucucuau

SEQ ID NO: 2426825 - RNA, 19 nt, Artificial Sequence
  Description of Artificial Sequence: Synthetic oligonucleotide
auagcgaguuauauauacc

SEQ ID NO: 2426826 - RNA, 19 nt, Artificial Sequence
  Description of Artificial Sequence: Synthetic oligonucleotide
uugaggguaguaucgagaa

SEQ ID NO: 2426827 - RNA, 19 nt, Artificial Sequence
  Description of Artificial Sequence: Synthetic oligonucleotide
uugaauuugaggguaguau

SEQ ID NO: 2426828 - RNA, 19 nt, Artificial Sequence
  Description of Artificial Sequence: Synthetic oligonucleotide
acugaucagaguaggauag

SEQ ID NO: 2426829 - RNA, 19 nt, Artificial Sequence
  Description of Artificial Sequence: Synthetic oligonucleotide
aauccucagaugguuugac

SEQ ID NO: 2426830 - RNA, 19 nt, Artificial Sequence
  Description of Artificial Sequence: Synthetic oligonucleotide
gucauugccaacugaguug

SEQ ID NO: 2426831 - RNA, 19 nt, Artificial Sequence
  Description of Artificial Sequence: Synthetic oligonucleotide
gaaguauaucgcucaggag

SEQ ID NO: 2426832 - RNA, 19 nt, Artificial Sequence
  Description of Artificial Sequence: Synthetic oligonucleotide
aucagcuaguugucaaagg

SEQ ID NO: 2426833 - RNA, 19 nt, Artificial Sequence
  Description of Artificial Sequence: Synthetic oligonucleotide
aguauucugcuucucuaug

SEQ ID NO: 2426834 - RNA, 19 nt, Artificial Sequence
  Description of Artificial Sequence: Synthetic oligonucleotide
aaauugaauuugaggguag

SEQ ID NO: 2426835 - RNA, 19 nt, Artificial Sequence
  Description of Artificial Sequence: Synthetic oligonucleotide
cuaaugagaucuuaccaca

SEQ ID NO: 2426836 - RNA, 19 nt, Artificial Sequence
  Description of Artificial Sequence: Synthetic oligonucleotide
ucuggcaacuuaaaguauu

SEQ ID NO: 2426837 - RNA, 19 nt, Artificial Sequence
  Description of Artificial Sequence: Synthetic oligonucleotide
auuugacaugagucauugc

SEQ ID NO: 2426838 - RNA, 19 nt, Artificial Sequence
  Description of Artificial Sequence: Synthetic oligonucleotide
uaaugagaucuuaccacac

SEQ ID NO: 2426839 - RNA, 19 nt, Artificial Sequence
  Description of Artificial Sequence: Synthetic oligonucleotide
aacuuaaaguauucugcuu

SEQ ID NO: 2426840 - RNA, 19 nt, Artificial Sequence
  Description of Artificial Sequence: Synthetic oligonucleotide
auuugaggguaguaucgag

SEQ ID NO: 2426841 - RNA, 19 nt, Artificial Sequence
  Description of Artificial Sequence: Synthetic oligonucleotide
cacuucuuuggcuaaugag

SEQ ID NO: 2426842 - RNA, 19 nt, Artificial Sequence
  Description of Artificial Sequence: Synthetic oligonucleotide
uugagcuuguucauuuuaa

SEQ ID NO: 2426843 - RNA, 19 nt, Artificial Sequence
  Description of Artificial Sequence: Synthetic oligonucleotide
aagagaaaaccaucucgau

SEQ ID NO: 2426844 - RNA, 19 nt, Artificial Sequence
  Description of Artificial Sequence: Synthetic oligonucleotide
aauuugaggguaguaucga

SEQ ID NO: 2426845 - RNA, 19 nt, Artificial Sequence
  Description of Artificial Sequence: Synthetic oligonucleotide
auuucccagagccgggaac

SEQ ID NO: 2426846 - RNA, 19 nt, Artificial Sequence
  Description of Artificial Sequence: Synthetic oligonucleotide
gaaaauugcugcaauccuc

SEQ ID NO: 2426847 - RNA, 19 nt, Artificial Sequence
  Description of Artificial Sequence: Synthetic oligonucleotide
guaucgagaaguauaucgc

SEQ ID NO: 2426848 - RNA, 19 nt, Artificial Sequence
  Description of Artificial Sequence: Synthetic oligonucleotide
gcuaaugagaucuuaccac

SEQ ID NO: 2426849 - RNA, 19 nt, Artificial Sequence
  Description of Artificial Sequence: Synthetic oligonucleotide
cuaggacauaacgaaagag

SEQ ID NO: 2426850 - RNA, 19 nt, Artificial Sequence
  Description of Artificial Sequence: Synthetic oligonucleotide
cgaucuaugaagaaucucc

SEQ ID NO: 2426851 - RNA, 19 nt, Artificial Sequence
  Description of Artificial Sequence: Synthetic oligonucleotide
ggcaacuuaaaguauucug

SEQ ID NO: 2426852 - RNA, 19 nt, Artificial Sequence
  Description of Artificial Sequence: Synthetic oligonucleotide
agaaucucccuuuguuguc

SEQ ID NO: 2426853 - RNA, 19 nt, Artificial Sequence
  Description of Artificial Sequence: Synthetic oligonucleotide
ucauugccaacugaguuga

SEQ ID NO: 2426854 - RNA, 19 nt, Artificial Sequence
  Description of Artificial Sequence: Synthetic oligonucleotide
ugguuugacacaacuugac

SEQ ID NO: 2426855 - RNA, 19 nt, Artificial Sequence
  Description of Artificial Sequence: Synthetic oligonucleotide
gcaacuuaaaguauucugc

SEQ ID NO: 2426856 - RNA, 19 nt, Artificial Sequence
  Description of Artificial Sequence: Synthetic oligonucleotide
aaauugcugcaauccucag

SEQ ID NO: 2426857 - RNA, 19 nt, Artificial Sequence
  Description of Artificial Sequence: Synthetic oligonucleotide
ugaguucaauaaucucagg

SEQ ID NO: 2426858 - RNA, 19 nt, Artificial Sequence
  Description of Artificial Sequence: Synthetic oligonucleotide
ucaauuugacaugagucau

SEQ ID NO: 2426859 - RNA, 19 nt, Artificial Sequence
  Description of Artificial Sequence: Synthetic oligonucleotide
uacugaucagaguaggaua

SEQ ID NO: 2426860 - RNA, 19 nt, Artificial Sequence
  Description of Artificial Sequence: Synthetic oligonucleotide
ucucauucagagugucucc

SEQ ID NO: 2426861 - RNA, 19 nt, Artificial Sequence
  Description of Artificial Sequence: Synthetic oligonucleotide
ugacaugagucauugccaa

SEQ ID NO: 2426862 - RNA, 19 nt, Artificial Sequence
  Description of Artificial Sequence: Synthetic oligonucleotide
ugcuucucuauggagccgg

SEQ ID NO: 2426863 - RNA, 19 nt, Artificial Sequence
  Description of Artificial Sequence: Synthetic oligonucleotide
agucauugccaacugaguu

SEQ ID NO: 2426864 - RNA, 19 nt, Artificial Sequence
  Description of Artificial Sequence: Synthetic oligonucleotide
ugucagaacuacagaauua

SEQ ID NO: 2426865 - RNA, 19 nt, Artificial Sequence
  Description of Artificial Sequence: Synthetic oligonucleotide
gauucuggccacacggcgg

SEQ ID NO: 2426866 - RNA, 19 nt, Artificial Sequence
  Description of Artificial Sequence: Synthetic oligonucleotide
aauugaauuugaggguagu

SEQ ID NO: 2426867 - RNA, 19 nt, Artificial Sequence
  Description of Artificial Sequence: Synthetic oligonucleotide
gagaaguauaucgcucagg

SEQ ID NO: 2426868 - RNA, 19 nt, Artificial Sequence
  Description of Artificial Sequence: Synthetic oligonucleotide
uguccuggaucagugagca

SEQ ID NO: 2426869 - RNA, 19 nt, Artificial Sequence
  Description of Artificial Sequence: Synthetic oligonucleotide
acgaaagagaaaaccaucu

SEQ ID NO: 2426870 - RNA, 19 nt, Artificial Sequence
  Description of Artificial Sequence: Synthetic oligonucleotide
agagccgggaaccaggaau

SEQ ID NO: 2426871 - RNA, 19 nt, Artificial Sequence
  Description of Artificial Sequence: Synthetic oligonucleotide
gagagagagagagagaugu

SEQ ID NO: 2426872 - RNA, 19 nt, Artificial Sequence
  Description of Artificial Sequence: Synthetic oligonucleotide
uauauauaccuggccaccu

SEQ ID NO: 2426873 - RNA, 19 nt, Artificial Sequence
  Description of Artificial Sequence: Synthetic oligonucleotide
uggaucagugagcaagggu

SEQ ID NO: 2426874 - RNA, 19 nt, Artificial Sequence
  Description of Artificial Sequence: Synthetic oligonucleotide
cucucauguagucuaggac

SEQ ID NO: 2426875 - RNA, 19 nt, Artificial Sequence
  Description of Artificial Sequence: Synthetic oligonucleotide
aucgagaaguauaucgcuc

SEQ ID NO: 2426876 - RNA, 19 nt, Artificial Sequence
  Description of Artificial Sequence: Synthetic oligonucleotide
accuacauugaguucaaua

SEQ ID NO: 2426877 - RNA, 19 nt, Artificial Sequence
  Description of Artificial Sequence: Synthetic oligonucleotide
uauaccuggccaccuacau

SEQ ID NO: 2426878 - RNA, 19 nt, Artificial Sequence
  Description of Artificial Sequence: Synthetic oligonucleotide
aucuaugaagaaucucccu

SEQ ID NO: 2426879 - RNA, 19 nt, Artificial Sequence
  Description of Artificial Sequence: Synthetic oligonucleotide
acacaccaugauucuggcc

SEQ ID NO: 2426880 - RNA, 19 nt, Artificial Sequence
  Description of Artificial Sequence: Synthetic oligonucleotide
ugaggguaguaucgagaag

SEQ ID NO: 2426881 - RNA, 19 nt, Artificial Sequence
  Description of Artificial Sequence: Synthetic oligonucleotide
cucauucagagugucuccg

SEQ ID NO: 2426882 - RNA, 19 nt, Artificial Sequence
  Description of Artificial Sequence: Synthetic oligonucleotide
aggacauaacgaaagagaa

SEQ ID NO: 2426883 - RNA, 19 nt, Artificial Sequence
  Description of Artificial Sequence: Synthetic oligonucleotide
guagucuaggacauaacga

SEQ ID NO: 2426884 - RNA, 19 nt, Artificial Sequence
  Description of Artificial Sequence: Synthetic oligonucleotide
gagagagagagauguguga

SEQ ID NO: 2426885 - RNA, 19 nt, Artificial Sequence
  Description of Artificial Sequence: Synthetic oligonucleotide
gaaucucccuuuguugucc

SEQ ID NO: 2426886 - RNA, 19 nt, Artificial Sequence
  Description of Artificial Sequence: Synthetic oligonucleotide
aggucuucuagaucaauuu

SEQ ID NO: 2426887 - RNA, 19 nt, Artificial Sequence
  Description of Artificial Sequence: Synthetic oligonucleotide
uaggauagcgaguuauaua

SEQ ID NO: 2426888 - RNA, 19 nt, Artificial Sequence
  Description of Artificial Sequence: Synthetic oligonucleotide
uucuugagcucagaaccag

SEQ ID NO: 2426889 - RNA, 19 nt, Artificial Sequence
  Description of Artificial Sequence: Synthetic oligonucleotide
cucucauucagagugucuc

SEQ ID NO: 2426890 - RNA, 19 nt, Artificial Sequence
  Description of Artificial Sequence: Synthetic oligonucleotide
gaggguaguaucgagaagu

SEQ ID NO: 2426891 - RNA, 19 nt, Artificial Sequence
  Description of Artificial Sequence: Synthetic oligonucleotide
aacauuucccagagccggg

SEQ ID NO: 2426892 - RNA, 19 nt, Artificial Sequence
  Description of Artificial Sequence: Synthetic oligonucleotide
auggugaugaagccagccu

SEQ ID NO: 2426893 - RNA, 19 nt, Artificial Sequence
  Description of Artificial Sequence: Synthetic oligonucleotide
gcaaggguucuuuacacug

SEQ ID NO: 2426894 - RNA, 19 nt, Artificial Sequence
  Description of Artificial Sequence: Synthetic oligonucleotide
augauucuggccacacggc

SEQ ID NO: 2426895 - RNA, 19 nt, Artificial Sequence
  Description of Artificial Sequence: Synthetic oligonucleotide
gacuuuucuggcauggcca

SEQ ID NO: 2426896 - RNA, 19 nt, Artificial Sequence
  Description of Artificial Sequence: Synthetic oligonucleotide
acauaacgaaagagaaaac

SEQ ID NO: 2426897 - RNA, 19 nt, Artificial Sequence
  Description of Artificial Sequence: Synthetic oligonucleotide
cacggcggaauuuagcauc

SEQ ID NO: 2426898 - RNA, 19 nt, Artificial Sequence
  Description of Artificial Sequence: Synthetic oligonucleotide
ucucuauggagccggccac

SEQ ID NO: 2426899 - RNA, 19 nt, Artificial Sequence
  Description of Artificial Sequence: Synthetic oligonucleotide
aaccaggaauacugaucag

SEQ ID NO: 2426900 - RNA, 19 nt, Artificial Sequence
  Description of Artificial Sequence: Synthetic oligonucleotide
aguugcaugcuaccaugug

SEQ ID NO: 2426901 - RNA, 19 nt, Artificial Sequence
  Description of Artificial Sequence: Synthetic oligonucleotide
gucuucuagaucaauuuga

SEQ ID NO: 2426902 - RNA, 19 nt, Artificial Sequence
  Description of Artificial Sequence: Synthetic oligonucleotide
agagagagagagaugugug

SEQ ID NO: 2426903 - RNA, 19 nt, Artificial Sequence
  Description of Artificial Sequence: Synthetic oligonucleotide
caguucuggcaacuuaaag

SEQ ID NO: 2426904 - RNA, 19 nt, Artificial Sequence
  Description of Artificial Sequence: Synthetic oligonucleotide
accaggaauacugaucaga

SEQ ID NO: 2426905 - RNA, 19 nt, Artificial Sequence
  Description of Artificial Sequence: Synthetic oligonucleotide
cuggcaacuuaaaguauuc

SEQ ID NO: 2426906 - RNA, 19 nt, Artificial Sequence
  Description of Artificial Sequence: Synthetic oligonucleotide
cacacggcggaauuuagca

SEQ ID NO: 2426907 - RNA, 19 nt, Artificial Sequence
  Description of Artificial Sequence: Synthetic oligonucleotide
ucuugagcucagaaccagu

SEQ ID NO: 2426908 - RNA, 19 nt, Artificial Sequence
  Description of Artificial Sequence: Synthetic oligonucleotide
ccuacauugaguucaauaa

SEQ ID NO: 2426909 - RNA, 19 nt, Artificial Sequence
  Description of Artificial Sequence: Synthetic oligonucleotide
ucgauagccaauggugaug

SEQ ID NO: 2426910 - RNA, 19 nt, Artificial Sequence
  Description of Artificial Sequence: Synthetic oligonucleotide
ucauucagagugucuccga

SEQ ID NO: 2426911 - RNA, 19 nt, Artificial Sequence
  Description of Artificial Sequence: Synthetic oligonucleotide
augaagaaucucccuuugu

SEQ ID NO: 2426912 - RNA, 19 nt, Artificial Sequence
  Description of Artificial Sequence: Synthetic oligonucleotide
agcaucuguuuggcuaucc

SEQ ID NO: 2426913 - RNA, 19 nt, Artificial Sequence
  Description of Artificial Sequence: Synthetic oligonucleotide
aaucucccuuuguuguccu

SEQ ID NO: 2426914 - RNA, 19 nt, Artificial Sequence
  Description of Artificial Sequence: Synthetic oligonucleotide
gagagagagaugugugaca

SEQ ID NO: 2426915 - RNA, 19 nt, Artificial Sequence
  Description of Artificial Sequence: Synthetic oligonucleotide
gugagcaaggguucuuuac

SEQ ID NO: 2426916 - RNA, 19 nt, Artificial Sequence
  Description of Artificial Sequence: Synthetic oligonucleotide
gaguguaggagccucgaua

SEQ ID NO: 2426917 - RNA, 19 nt, Artificial Sequence
  Description of Artificial Sequence: Synthetic oligonucleotide
uccgaacacuucuuuggcu

SEQ ID NO: 2426918 - RNA, 19 nt, Artificial Sequence
  Description of Artificial Sequence: Synthetic oligonucleotide
gagagagagagagagagau

SEQ ID NO: 2426919 - RNA, 19 nt, Artificial Sequence
  Description of Artificial Sequence: Synthetic oligonucleotide
ggcuaaugagaucuuacca

SEQ ID NO: 2426920 - RNA, 19 nt, Artificial Sequence
  Description of Artificial Sequence: Synthetic oligonucleotide
ggaauacugaucagaguag

SEQ ID NO: 2426921 - RNA, 19 nt, Artificial Sequence
  Description of Artificial Sequence: Synthetic oligonucleotide
agcaaggguucuuuacacu

SEQ ID NO: 2426922 - RNA, 19 nt, Artificial Sequence
  Description of Artificial Sequence: Synthetic oligonucleotide
ucuuaccacacaccaugau

SEQ ID NO: 2426923 - RNA, 19 nt, Artificial Sequence
  Description of Artificial Sequence: Synthetic oligonucleotide
ucuggaaaguggucaggaa

SEQ ID NO: 2426924 - RNA, 19 nt, Artificial Sequence
  Description of Artificial Sequence: Synthetic oligonucleotide
auucuggccacacggcgga

SEQ ID NO: 2426925 - RNA, 19 nt, Artificial Sequence
  Description of Artificial Sequence: Synthetic oligonucleotide
uguuguccuggaucaguga

SEQ ID NO: 2426926 - RNA, 19 nt, Artificial Sequence
  Description of Artificial Sequence: Synthetic oligonucleotide
caggaagcacuacuugcag

SEQ ID NO: 2426927 - RNA, 19 nt, Artificial Sequence
  Description of Artificial Sequence: Synthetic oligonucleotide
caacuuaaaguauucugcu

SEQ ID NO: 2426928 - RNA, 19 nt, Artificial Sequence
  Description of Artificial Sequence: Synthetic oligonucleotide
gucuccgaacacuucuuug

SEQ ID NO: 2426929 - RNA, 19 nt, Artificial Sequence
  Description of Artificial Sequence: Synthetic oligonucleotide
ccagaaaauugaauuugag

SEQ ID NO: 2426930 - RNA, 19 nt, Artificial Sequence
  Description of Artificial Sequence: Synthetic oligonucleotide
gguaguaucgagaaguaua

SEQ ID NO: 2426931 - RNA, 19 nt, Artificial Sequence
  Description of Artificial Sequence: Synthetic oligonucleotide
cuacagaauuaucaggucu

SEQ ID NO: 2426932 - RNA, 19 nt, Artificial Sequence
  Description of Artificial Sequence: Synthetic oligonucleotide
gaucagaguaggauagcga

SEQ ID NO: 2426933 - RNA, 19 nt, Artificial Sequence
  Description of Artificial Sequence: Synthetic oligonucleotide
acuuuucuggcauggccau

SEQ ID NO: 2426934 - RNA, 19 nt, Artificial Sequence
  Description of Artificial Sequence: Synthetic oligonucleotide
cuuaaaguauucugcuucu

SEQ ID NO: 2426935 - RNA, 19 nt, Artificial Sequence
  Description of Artificial Sequence: Synthetic oligonucleotide
agcgaguuauauauaccug

SEQ ID NO: 2426936 - RNA, 19 nt, Artificial Sequence
  Description of Artificial Sequence: Synthetic oligonucleotide
cauguagucuaggacauaa

SEQ ID NO: 2426937 - RNA, 19 nt, Artificial Sequence
  Description of Artificial Sequence: Synthetic oligonucleotide
agcacuacuugcaggucuc

SEQ ID NO: 2426938 - RNA, 19 nt, Artificial Sequence
  Description of Artificial Sequence: Synthetic oligonucleotide
auaucgcucaggagggcgg

SEQ ID NO: 2426939 - RNA, 19 nt, Artificial Sequence
  Description of Artificial Sequence: Synthetic oligonucleotide
ucgaucuaugaagaaucuc

SEQ ID NO: 2426940 - RNA, 19 nt, Artificial Sequence
  Description of Artificial Sequence: Synthetic oligonucleotide
agccucgauagccaauggu

SEQ ID NO: 2426941 - RNA, 19 nt, Artificial Sequence
  Description of Artificial Sequence: Synthetic oligonucleotide
gagagagagagagaugugu

SEQ ID NO: 2426942 - RNA, 19 nt, Artificial Sequence
  Description of Artificial Sequence: Synthetic oligonucleotide
auguagucuaggacauaac

SEQ ID NO: 2426943 - RNA, 19 nt, Artificial Sequence
  Description of Artificial Sequence: Synthetic oligonucleotide
auugaauuugaggguagua

SEQ ID NO: 2426944 - RNA, 19 nt, Artificial Sequence
  Description of Artificial Sequence: Synthetic oligonucleotide
uugacuuuucuggcauggc

SEQ ID NO: 2426945 - RNA, 19 nt, Artificial Sequence
  Description of Artificial Sequence: Synthetic oligonucleotide
gcaauccucagaugguuug

SEQ ID NO: 2426946 - RNA, 19 nt, Artificial Sequence
  Description of Artificial Sequence: Synthetic oligonucleotide
gagagaugugugacagugc

SEQ ID NO: 2426947 - RNA, 19 nt, Artificial Sequence
  Description of Artificial Sequence: Synthetic oligonucleotide
auauauaccuggccaccua

SEQ ID NO: 2426948 - RNA, 19 nt, Artificial Sequence
  Description of Artificial Sequence: Synthetic oligonucleotide
gagaugugugacagugcag

SEQ ID NO: 2426949 - RNA, 19 nt, Artificial Sequence
  Description of Artificial Sequence: Synthetic oligonucleotide
auccucagaugguuugaca

SEQ ID NO: 2426950 - RNA, 19 nt, Artificial Sequence
  Description of Artificial Sequence: Synthetic oligonucleotide
uggcaacuuaaaguauucu

SEQ ID NO: 2426951 - RNA, 19 nt, Artificial Sequence
  Description of Artificial Sequence: Synthetic oligonucleotide
gagccucgauagccaaugg

SEQ ID NO: 2426952 - RNA, 19 nt, Artificial Sequence
  Description of Artificial Sequence: Synthetic oligonucleotide
agcuaguugucaaaggcuu

SEQ ID NO: 2426953 - RNA, 19 nt, Artificial Sequence
  Description of Artificial Sequence: Synthetic oligonucleotide
caacuugacuuuucuggca

SEQ ID NO: 2426954 - RNA, 19 nt, Artificial Sequence
  Description of Artificial Sequence: Synthetic oligonucleotide
ugugacagugcaggugcca

SEQ ID NO: 2426955 - RNA, 19 nt, Artificial Sequence
  Description of Artificial Sequence: Synthetic oligonucleotide
ugucuccgaacacuucuuu

SEQ ID NO: 2426956 - RNA, 19 nt, Artificial Sequence
  Description of Artificial Sequence: Synthetic oligonucleotide
caaggguucuuuacacuga

SEQ ID NO: 2426957 - RNA, 19 nt, Artificial Sequence
  Description of Artificial Sequence: Synthetic oligonucleotide
gccucgauagccaauggug

SEQ ID NO: 2426958 - RNA, 19 nt, Artificial Sequence
  Description of Artificial Sequence: Synthetic oligonucleotide
ggaagcacuacuugcaggu

SEQ ID NO: 2426959 - RNA, 19 nt, Artificial Sequence
  Description of Artificial Sequence: Synthetic oligonucleotide
cuaccauguggaagccagc

SEQ ID NO: 2426960 - RNA, 19 nt, Artificial Sequence
  Description of Artificial Sequence: Synthetic oligonucleotide
ccuggaucagugagcaagg

SEQ ID NO: 2426961 - RNA, 19 nt, Artificial Sequence
  Description of Artificial Sequence: Synthetic oligonucleotide
gaaccaguggcagcuguca

SEQ ID NO: 2426962 - RNA, 19 nt, Artificial Sequence
  Description of Artificial Sequence: Synthetic oligonucleotide
gccaccuacauugaguuca

SEQ ID NO: 2426963 - RNA, 19 nt, Artificial Sequence
  Description of Artificial Sequence: Synthetic oligonucleotide
ucuauggagccggccacac

SEQ ID NO: 2426964 - RNA, 19 nt, Artificial Sequence
  Description of Artificial Sequence: Synthetic oligonucleotide
ugaguugagcuuguucauu

SEQ ID NO: 2426965 - RNA, 19 nt, Artificial Sequence
  Description of Artificial Sequence: Synthetic oligonucleotide
guaguaucgagaaguauau

SEQ ID NO: 2426966 - RNA, 19 nt, Artificial Sequence
  Description of Artificial Sequence: Synthetic oligonucleotide
augcuaccauguggaagcc

SEQ ID NO: 2426967 - RNA, 19 nt, Artificial Sequence
  Description of Artificial Sequence: Synthetic oligonucleotide
gucagaacuacagaauuau

SEQ ID NO: 2426968 - RNA, 19 nt, Artificial Sequence
  Description of Artificial Sequence: Synthetic oligonucleotide
ccauguggaagccagcauc

SEQ ID NO: 2426969 - RNA, 19 nt, Artificial Sequence
  Description of Artificial Sequence: Synthetic oligonucleotide
ggaaaauugcugcaauccu

SEQ ID NO: 2426970 - RNA, 19 nt, Artificial Sequence
  Description of Artificial Sequence: Synthetic oligonucleotide
gagccggccacacucugga

SEQ ID NO: 2426971 - RNA, 19 nt, Artificial Sequence
  Description of Artificial Sequence: Synthetic oligonucleotide
cuggaucagugagcaaggg

SEQ ID NO: 2426972 - RNA, 19 nt, Artificial Sequence
  Description of Artificial Sequence: Synthetic oligonucleotide
cucagaugguuugacacaa

SEQ ID NO: 2426973 - RNA, 19 nt, Artificial Sequence
  Description of Artificial Sequence: Synthetic oligonucleotide
agagagagagagagagaug

SEQ ID NO: 2426974 - RNA, 19 nt, Artificial Sequence
  Description of Artificial Sequence: Synthetic oligonucleotide
agugagcaaggguucuuua

SEQ ID NO: 2426975 - RNA, 19 nt, Artificial Sequence
  Description of Artificial Sequence: Synthetic oligonucleotide
uaucccugcccagagugua

SEQ ID NO: 2426976 - RNA, 19 nt, Artificial Sequence
  Description of Artificial Sequence: Synthetic oligonucleotide
ggagccucgauagccaaug

SEQ ID NO: 2426977 - RNA, 19 nt, Artificial Sequence
  Description of Artificial Sequence: Synthetic oligonucleotide
aggguucuuuacacugaac

SEQ ID NO: 2426978 - RNA, 19 nt, Artificial Sequence
  Description of Artificial Sequence: Synthetic oligonucleotide
cuuaccacacaccaugauu

SEQ ID NO: 2426979 - RNA, 19 nt, Artificial Sequence
  Description of Artificial Sequence: Synthetic oligonucleotide
cuacauugaguucaauaau

SEQ ID NO: 2426980 - RNA, 19 nt, Artificial Sequence
  Description of Artificial Sequence: Synthetic oligonucleotide
acacggcggaauuuagcau

SEQ ID NO: 2426981 - RNA, 19 nt, Artificial Sequence
  Description of Artificial Sequence: Synthetic oligonucleotide
auaccuggccaccuacauu

SEQ ID NO: 2426982 - RNA, 19 nt, Artificial Sequence
  Description of Artificial Sequence: Synthetic oligonucleotide
cauucagagugucuccgaa

SEQ ID NO: 2426983 - RNA, 19 nt, Artificial Sequence
  Description of Artificial Sequence: Synthetic oligonucleotide
uaguaucgagaaguauauc

SEQ ID NO: 2426984 - RNA, 19 nt, Artificial Sequence
  Description of Artificial Sequence: Synthetic oligonucleotide
gcaugcuaccauguggaag

SEQ ID NO: 2426985 - RNA, 19 nt, Artificial Sequence
  Description of Artificial Sequence: Synthetic oligonucleotide
ugcaugcuaccauguggaa

SEQ ID NO: 2426986 - RNA, 19 nt, Artificial Sequence
  Description of Artificial Sequence: Synthetic oligonucleotide
cuucucuauggagccggcc

SEQ ID NO: 2426987 - RNA, 19 nt, Artificial Sequence
  Description of Artificial Sequence: Synthetic oligonucleotide
ugcucucauucagaguguc

SEQ ID NO: 2426988 - RNA, 19 nt, Artificial Sequence
  Description of Artificial Sequence: Synthetic oligonucleotide
agagagagagagagaugug

SEQ ID NO: 2426989 - RNA, 19 nt, Artificial Sequence
  Description of Artificial Sequence: Synthetic oligonucleotide
gaugugugacagugcaggu

SEQ ID NO: 2426990 - RNA, 19 nt, Artificial Sequence
  Description of Artificial Sequence: Synthetic oligonucleotide
gaguaggauagcgaguuau

SEQ ID NO: 2426991 - RNA, 19 nt, Artificial Sequence
  Description of Artificial Sequence: Synthetic oligonucleotide
guggucaggaagcacuacu

SEQ ID NO: 2426992 - RNA, 19 nt, Artificial Sequence
  Description of Artificial Sequence: Synthetic oligonucleotide
agagagagagagagagaga

SEQ ID NO: 2426993 - RNA, 19 nt, Artificial Sequence
  Description of Artificial Sequence: Synthetic oligonucleotide
aaguggucaggaagcacua

SEQ ID NO: 2426994 - RNA, 19 nt, Artificial Sequence
  Description of Artificial Sequence: Synthetic oligonucleotide
aguaggauagcgaguuaua

SEQ ID NO: 2426995 - RNA, 19 nt, Artificial Sequence
  Description of Artificial Sequence: Synthetic oligonucleotide
agaucuuaccacacaccau

SEQ ID NO: 2426996 - RNA, 19 nt, Artificial Sequence
  Description of Artificial Sequence: Synthetic oligonucleotide
cugucagaacuacagaauu

SEQ ID NO: 2426997 - RNA, 19 nt, Artificial Sequence
  Description of Artificial Sequence: Synthetic oligonucleotide
gaagccagcaucagcuagu

SEQ ID NO: 2426998 - RNA, 19 nt, Artificial Sequence
  Description of Artificial Sequence: Synthetic oligonucleotide
gguuugacacaacuugacu

SEQ ID NO: 2426999 - RNA, 19 nt, Artificial Sequence
  Description of Artificial Sequence: Synthetic oligonucleotide
agccgggaaccaggaauac

SEQ ID NO: 2427000 - RNA, 19 nt, Artificial Sequence
  Description of Artificial Sequence: Synthetic oligonucleotide
ggaucagugagcaaggguu

SEQ ID NO: 2427001 - RNA, 19 nt, Artificial Sequence
  Description of Artificial Sequence: Synthetic oligonucleotide
aagccagcaucagcuaguu

SEQ ID NO: 2427002 - RNA, 19 nt, Artificial Sequence
  Description of Artificial Sequence: Synthetic oligonucleotide
ugcuaccauguggaagcca

SEQ ID NO: 2427003 - RNA, 19 nt, Artificial Sequence
  Description of Artificial Sequence: Synthetic oligonucleotide
caggugccaguggaguugc

SEQ ID NO: 2427004 - RNA, 19 nt, Artificial Sequence
  Description of Artificial Sequence: Synthetic oligonucleotide
guaggauagcgaguuauau

SEQ ID NO: 2427005 - RNA, 19 nt, Artificial Sequence
  Description of Artificial Sequence: Synthetic oligonucleotide
uaucgcucaggagggcggu

SEQ ID NO: 2427006 - RNA, 19 nt, Artificial Sequence
  Description of Artificial Sequence: Synthetic oligonucleotide
cucgaucuaugaagaaucu

SEQ ID NO: 2427007 - RNA, 19 nt, Artificial Sequence
  Description of Artificial Sequence: Synthetic oligonucleotide
agaguaggauagcgaguua

SEQ ID NO: 2427008 - RNA, 19 nt, Artificial Sequence
  Description of Artificial Sequence: Synthetic oligonucleotide
gagaggagagagagagaga

SEQ ID NO: 2427009 - RNA, 19 nt, Artificial Sequence
  Description of Artificial Sequence: Synthetic oligonucleotide
guauaucgcucaggagggc

SEQ ID NO: 2427010 - RNA, 19 nt, Artificial Sequence
  Description of Artificial Sequence: Synthetic oligonucleotide
ccagaguguaggagccucg

SEQ ID NO: 2427011 - RNA, 19 nt, Artificial Sequence
  Description of Artificial Sequence: Synthetic oligonucleotide
gaggagagagagagagaga

SEQ ID NO: 2427012 - RNA, 19 nt, Artificial Sequence
  Description of Artificial Sequence: Synthetic oligonucleotide
acggcggaauuuagcaucu

SEQ ID NO: 2427013 - RNA, 19 nt, Artificial Sequence
  Description of Artificial Sequence: Synthetic oligonucleotide
ccucgauagccaaugguga

SEQ ID NO: 2427014 - RNA, 19 nt, Artificial Sequence
  Description of Artificial Sequence: Synthetic oligonucleotide
gcuaguugucaaaggcuug

SEQ ID NO: 2427015 - RNA, 19 nt, Artificial Sequence
  Description of Artificial Sequence: Synthetic oligonucleotide
cauugccaacugaguugag

SEQ ID NO: 2427016 - RNA, 19 nt, Artificial Sequence
  Description of Artificial Sequence: Synthetic oligonucleotide
ccaugauucuggccacacg

SEQ ID NO: 2427017 - RNA, 19 nt, Artificial Sequence
  Description of Artificial Sequence: Synthetic oligonucleotide
ggacauaacgaaagagaaa

SEQ ID NO: 2427018 - RNA, 19 nt, Artificial Sequence
  Description of Artificial Sequence: Synthetic oligonucleotide
gagagaggagagagagaga

SEQ ID NO: 2427019 - RNA, 19 nt, Artificial Sequence
  Description of Artificial Sequence: Synthetic oligonucleotide
gagccgggaaccaggaaua

SEQ ID NO: 2427020 - RNA, 19 nt, Artificial Sequence
  Description of Artificial Sequence: Synthetic oligonucleotide
ccacacggcggaauuuagc

SEQ ID NO: 2427021 - RNA, 19 nt, Artificial Sequence
  Description of Artificial Sequence: Synthetic oligonucleotide
cagaguaggauagcgaguu

SEQ ID NO: 2427022 - RNA, 19 nt, Artificial Sequence
  Description of Artificial Sequence: Synthetic oligonucleotide
ggccacacucuggaaagug

SEQ ID NO: 2427023 - RNA, 19 nt, Artificial Sequence
  Description of Artificial Sequence: Synthetic oligonucleotide
gagagagaugugugacagu

SEQ ID NO: 2427024 - RNA, 19 nt, Artificial Sequence
  Description of Artificial Sequence: Synthetic oligonucleotide
caggaauacugaucagagu

SEQ ID NO: 2427025 - RNA, 19 nt, Artificial Sequence
  Description of Artificial Sequence: Synthetic oligonucleotide
cucgauagccaauggugau

SEQ ID NO: 2427026 - RNA, 19 nt, Artificial Sequence
  Description of Artificial Sequence: Synthetic oligonucleotide
cagagugucuccgaacacu

SEQ ID NO: 2427027 - RNA, 19 nt, Artificial Sequence
  Description of Artificial Sequence: Synthetic oligonucleotide
aggguaguaucgagaagua

SEQ ID NO: 2427028 - RNA, 19 nt, Artificial Sequence
  Description of Artificial Sequence: Synthetic oligonucleotide
aucccugcccagaguguag

SEQ ID NO: 2427029 - RNA, 19 nt, Artificial Sequence
  Description of Artificial Sequence: Synthetic oligonucleotide
gaguugcaugcuaccaugu

SEQ ID NO: 2427030 - RNA, 19 nt, Artificial Sequence
  Description of Artificial Sequence: Synthetic oligonucleotide
ccgaacacuucuuuggcua

SEQ ID NO: 2427031 - RNA, 19 nt, Artificial Sequence
  Description of Artificial Sequence: Synthetic oligonucleotide
cgagaaguauaucgcucag

SEQ ID NO: 2427032 - RNA, 19 nt, Artificial Sequence
  Description of Artificial Sequence: Synthetic oligonucleotide
aucgcucaggagggcgguc

SEQ ID NO: 2427033 - RNA, 19 nt, Artificial Sequence
  Description of Artificial Sequence: Synthetic oligonucleotide
ggcggaauuuagcaucugu

SEQ ID NO: 2427034 - RNA, 19 nt, Artificial Sequence
  Description of Artificial Sequence: Synthetic oligonucleotide
auggccauggugaccuuuu

SEQ ID NO: 2427035 - RNA, 19 nt, Artificial Sequence
  Description of Artificial Sequence: Synthetic oligonucleotide
cugaguugagcuuguucau

SEQ ID NO: 2427036 - RNA, 19 nt, Artificial Sequence
  Description of Artificial Sequence: Synthetic oligonucleotide
cuugcaggucucucaugua

SEQ ID NO: 2427037 - RNA, 19 nt, Artificial Sequence
  Description of Artificial Sequence: Synthetic oligonucleotide
ggagccggccacacucugg

SEQ ID NO: 2427038 - RNA, 19 nt, Artificial Sequence
  Description of Artificial Sequence: Synthetic oligonucleotide
cagaguguaggagccucga

SEQ ID NO: 2427039 - RNA, 19 nt, Artificial Sequence
  Description of Artificial Sequence: Synthetic oligonucleotide
cauuucccagagccgggaa

SEQ ID NO: 2427040 - RNA, 19 nt, Artificial Sequence
  Description of Artificial Sequence: Synthetic oligonucleotide
aucaggucuucuagaucaa

SEQ ID NO: 2427041 - RNA, 19 nt, Artificial Sequence
  Description of Artificial Sequence: Synthetic oligonucleotide
ggagagagagagagagaga

SEQ ID NO: 2427042 - RNA, 19 nt, Artificial Sequence
  Description of Artificial Sequence: Synthetic oligonucleotide
auggagccggccacacucu

SEQ ID NO: 2427043 - RNA, 19 nt, Artificial Sequence
  Description of Artificial Sequence: Synthetic oligonucleotide
gccggccacacucuggaaa

SEQ ID NO: 2427044 - RNA, 19 nt, Artificial Sequence
  Description of Artificial Sequence: Synthetic oligonucleotide
gaacacuucuuuggcuaau

SEQ ID NO: 2427045 - RNA, 19 nt, Artificial Sequence
  Description of Artificial Sequence: Synthetic oligonucleotide
gcuccaauucacagaucca

SEQ ID NO: 2427046 - RNA, 19 nt, Artificial Sequence
  Description of Artificial Sequence: Synthetic oligonucleotide
cucugcucucauucagagu

SEQ ID NO: 2427047 - RNA, 19 nt, Artificial Sequence
  Description of Artificial Sequence: Synthetic oligonucleotide
gggaaccaggaauacugau

SEQ ID NO: 2427048 - RNA, 19 nt, Artificial Sequence
  Description of Artificial Sequence: Synthetic oligonucleotide
cccagaguguaggagccuc

SEQ ID NO: 2427049 - RNA, 19 nt, Artificial Sequence
  Description of Artificial Sequence: Synthetic oligonucleotide
ggccaguucuggcaacuua

SEQ ID NO: 2427050 - RNA, 19 nt, Artificial Sequence
  Description of Artificial Sequence: Synthetic oligonucleotide
uggccacacggcggaauuu

SEQ ID NO: 2427051 - RNA, 19 nt, Artificial Sequence
  Description of Artificial Sequence: Synthetic oligonucleotide
cugcucucauucagagugu

SEQ ID NO: 2427052 - RNA, 19 nt, Artificial Sequence
  Description of Artificial Sequence: Synthetic oligonucleotide
aggagccucgauagccaau

SEQ ID NO: 2427053 - RNA, 19 nt, Artificial Sequence
  Description of Artificial Sequence: Synthetic oligonucleotide
ggauagcgaguuauauaua

SEQ ID NO: 2427054 - RNA, 19 nt, Artificial Sequence
  Description of Artificial Sequence: Synthetic oligonucleotide
ccaguucuggcaacuuaaa

SEQ ID NO: 2427055 - RNA, 19 nt, Artificial Sequence
  Description of Artificial Sequence: Synthetic oligonucleotide
ggccaccuacauugaguuc

SEQ ID NO: 2427056 - RNA, 19 nt, Artificial Sequence
  Description of Artificial Sequence: Synthetic oligonucleotide
gcugcaauccucagauggu

SEQ ID NO: 2427057 - RNA, 19 nt, Artificial Sequence
  Description of Artificial Sequence: Synthetic oligonucleotide
gcggaauuuagcaucuguu

SEQ ID NO: 2427058 - RNA, 19 nt, Artificial Sequence
  Description of Artificial Sequence: Synthetic oligonucleotide
gcuucucuauggagccggc

SEQ ID NO: 2427059 - RNA, 19 nt, Artificial Sequence
  Description of Artificial Sequence: Synthetic oligonucleotide
caccaugauucuggccaca

SEQ ID NO: 2427060 - RNA, 19 nt, Artificial Sequence
  Description of Artificial Sequence: Synthetic oligonucleotide
ggcggucugggucucugcu

SEQ ID NO: 2427061 - RNA, 19 nt, Artificial Sequence
  Description of Artificial Sequence: Synthetic oligonucleotide
cugcaauccucagaugguu

SEQ ID NO: 2427062 - RNA, 19 nt, Artificial Sequence
  Description of Artificial Sequence: Synthetic oligonucleotide
agccggccacacucuggaa

SEQ ID NO: 2427063 - RNA, 19 nt, Artificial Sequence
  Description of Artificial Sequence: Synthetic oligonucleotide
gggcggucugggucucugc

SEQ ID NO: 2427064 - RNA, 19 nt, Artificial Sequence
  Description of Artificial Sequence: Synthetic oligonucleotide
cggaauuuagcaucuguuu

SEQ ID NO: 2427065 - RNA, 19 nt, Artificial Sequence
  Description of Artificial Sequence: Synthetic oligonucleotide
uucuggccacacggcggaa

SEQ ID NO: 2427066 - RNA, 19 nt, Artificial Sequence
  Description of Artificial Sequence: Synthetic oligonucleotide
ggccacacggcggaauuua

SEQ ID NO: 2427067 - RNA, 19 nt, Artificial Sequence
  Description of Artificial Sequence: Synthetic oligonucleotide
cuauggagccggccacacu

SEQ ID NO: 2427068 - RNA, 19 nt, Artificial Sequence
  Description of Artificial Sequence: Synthetic oligonucleotide
ggugaccuuuucugcugcu

SEQ ID NO: 2427069 - RNA, 19 nt, Artificial Sequence
  Description of Artificial Sequence: Synthetic oligonucleotide
cgaacacuucuuuggcuaa

SEQ ID NO: 2427070 - RNA, 19 nt, Artificial Sequence
  Description of Artificial Sequence: Synthetic oligonucleotide
guccuggaucagugagcaa

SEQ ID NO: 2427071 - RNA, 19 nt, Artificial Sequence
  Description of Artificial Sequence: Synthetic oligonucleotide
ggucugggucucugcucuc

SEQ ID NO: 2427072 - RNA, 19 nt, Artificial Sequence
  Description of Artificial Sequence: Synthetic oligonucleotide
cuggccacacggcggaauu

SEQ ID NO: 2427073 - RNA, 19 nt, Artificial Sequence
  Description of Artificial Sequence: Synthetic oligonucleotide
ggugccaguggaguugcau

SEQ ID NO: 2427074 - RNA, 19 nt, Artificial Sequence
  Description of Artificial Sequence: Synthetic oligonucleotide
agccaacaucuuggccagu

SEQ ID NO: 2427075 - RNA, 19 nt, Artificial Sequence
  Description of Artificial Sequence: Synthetic oligonucleotide
ggguaguaucgagaaguau

SEQ ID NO: 2427076 - RNA, 19 nt, Artificial Sequence
  Description of Artificial Sequence: Synthetic oligonucleotide
ccaccuacauugaguucaa

SEQ ID NO: 2427077 - RNA, 19 nt, Artificial Sequence
  Description of Artificial Sequence: Synthetic oligonucleotide
ccaguggaguugcaugcua

SEQ ID NO: 2427078 - RNA, 19 nt, Artificial Sequence
  Description of Artificial Sequence: Synthetic oligonucleotide
cagugagcaaggguucuuu

SEQ ID NO: 2427079 - RNA, 19 nt, Artificial Sequence
  Description of Artificial Sequence: Synthetic oligonucleotide
gcucucauucagagugucu

SEQ ID NO: 2427080 - RNA, 19 nt, Artificial Sequence
  Description of Artificial Sequence: Synthetic oligonucleotide
gccaacaucuuggccaguu

SEQ ID NO: 2427081 - RNA, 19 nt, Artificial Sequence
  Description of Artificial Sequence: Synthetic oligonucleotide
ggcuaucccugcccagagu

SEQ ID NO: 2427082 - RNA, 19 nt, Artificial Sequence
  Description of Artificial Sequence: Synthetic oligonucleotide
gccaguggaguugcaugcu

SEQ ID NO: 2427083 - RNA, 19 nt, Artificial Sequence
  Description of Artificial Sequence: Synthetic oligonucleotide
aggugccaguggaguugca

SEQ ID NO: 2427084 - RNA, 19 nt, Artificial Sequence
  Description of Artificial Sequence: Synthetic oligonucleotide
gccgggaaccaggaauacu

SEQ ID NO: 2427085 - RNA, 19 nt, Artificial Sequence
  Description of Artificial Sequence: Synthetic oligonucleotide
cggucugggucucugcucu

SEQ ID NO: 2427086 - RNA, 19 nt, Artificial Sequence
  Description of Artificial Sequence: Synthetic oligonucleotide
ggagggcggucugggucuc

SEQ ID NO: 2427087 - RNA, 19 nt, Artificial Sequence
  Description of Artificial Sequence: Synthetic oligonucleotide
gagggcggucugggucucu

SEQ ID NO: 2427088 - RNA, 19 nt, Artificial Sequence
  Description of Artificial Sequence: Synthetic oligonucleotide
caccuacauugaguucaau

SEQ ID NO: 2427089 - RNA, 19 nt, Artificial Sequence
  Description of Artificial Sequence: Synthetic oligonucleotide
cggcggaauuuagcaucug

SEQ ID NO: 2427090 - RNA, 19 nt, Artificial Sequence
  Description of Artificial Sequence: Synthetic oligonucleotide
gcauggccauggugaccuu

SEQ ID NO: 2427091 - RNA, 19 nt, Artificial Sequence
  Description of Artificial Sequence: Synthetic oligonucleotide
uucuagaaaacacugaggg

SEQ ID NO: 2427092 - RNA, 19 nt, Artificial Sequence
  Description of Artificial Sequence: Synthetic oligonucleotide
uuuaauucaaguuucagaa

SEQ ID NO: 2427093 - RNA, 19 nt, Artificial Sequence
  Description of Artificial Sequence: Synthetic oligonucleotide
auugauuagaaaugucugc

SEQ ID NO: 2427094 - RNA, 19 nt, Artificial Sequence
  Description of Artificial Sequence: Synthetic oligonucleotide
uguagaacauucuagaaaa

SEQ ID NO: 2427095 - RNA, 19 nt, Artificial Sequence
  Description of Artificial Sequence: Synthetic oligonucleotide
uaaucugauguccagguug

SEQ ID NO: 2427096 - RNA, 19 nt, Artificial Sequence
  Description of Artificial Sequence: Synthetic oligonucleotide
ugaggaacuggccauaugc

SEQ ID NO: 2427097 - RNA, 19 nt, Artificial Sequence
  Description of Artificial Sequence: Synthetic oligonucleotide
uuaggaaugucauagugcu

SEQ ID NO: 2427098 - RNA, 19 nt, Artificial Sequence
  Description of Artificial Sequence: Synthetic oligonucleotide
aagacagaugcugaaacgg

SEQ ID NO: 2427099 - RNA, 19 nt, Artificial Sequence
  Description of Artificial Sequence: Synthetic oligonucleotide
gacuuuaggaaugucauag

SEQ ID NO: 2427100 - RNA, 19 nt, Artificial Sequence
  Description of Artificial Sequence: Synthetic oligonucleotide
aauucaaguuucagaaagc

SEQ ID NO: 2427101 - RNA, 19 nt, Artificial Sequence
  Description of Artificial Sequence: Synthetic oligonucleotide
ugucauagugcucugugag

SEQ ID NO: 2427102 - RNA, 19 nt, Artificial Sequence
  Description of Artificial Sequence: Synthetic oligonucleotide
cauucuagaaaacacugag

SEQ ID NO: 2427103 - RNA, 19 nt, Artificial Sequence
  Description of Artificial Sequence: Synthetic oligonucleotide
ucuguggugguccacaggc

SEQ ID NO: 2427104 - RNA, 19 nt, Artificial Sequence
  Description of Artificial Sequence: Synthetic oligonucleotide
aucauugagaacugaauug

SEQ ID NO: 2427105 - RNA, 19 nt, Artificial Sequence
  Description of Artificial Sequence: Synthetic oligonucleotide
aaccaaaacucagugaaag

SEQ ID NO: 2427106 - RNA, 19 nt, Artificial Sequence
  Description of Artificial Sequence: Synthetic oligonucleotide
aaaaggagcagcacugugg

SEQ ID NO: 2427107 - RNA, 19 nt, Artificial Sequence
  Description of Artificial Sequence: Synthetic oligonucleotide
aacauucuagaaaacacug

SEQ ID NO: 2427108 - RNA, 19 nt, Artificial Sequence
  Description of Artificial Sequence: Synthetic oligonucleotide
gucaauucacaacaucucg

SEQ ID NO: 2427109 - RNA, 19 nt, Artificial Sequence
  Description of Artificial Sequence: Synthetic oligonucleotide
aaucugauguccagguugc

SEQ ID NO: 2427110 - RNA, 19 nt, Artificial Sequence
  Description of Artificial Sequence: Synthetic oligonucleotide
gaagacagaugcugaaacg

SEQ ID NO: 2427111 - RNA, 19 nt, Artificial Sequence
  Description of Artificial Sequence: Synthetic oligonucleotide
ugaagacagaugcugaaac

SEQ ID NO: 2427112 - RNA, 19 nt, Artificial Sequence
  Description of Artificial Sequence: Synthetic oligonucleotide
uccugcaucuucucgaagg

SEQ ID NO: 2427113 - RNA, 19 nt, Artificial Sequence
  Description of Artificial Sequence: Synthetic oligonucleotide
aguuucagaaagccugggc

SEQ ID NO: 2427114 - RNA, 19 nt, Artificial Sequence
  Description of Artificial Sequence: Synthetic oligonucleotide
agauguagaacauucuaga

SEQ ID NO: 2427115 - RNA, 19 nt, Artificial Sequence
  Description of Artificial Sequence: Synthetic oligonucleotide
auaggaaaugguacuaccc

SEQ ID NO: 2427116 - RNA, 19 nt, Artificial Sequence
  Description of Artificial Sequence: Synthetic oligonucleotide
aaagccugggcucagcaga

SEQ ID NO: 2427117 - RNA, 19 nt, Artificial Sequence
  Description of Artificial Sequence: Synthetic oligonucleotide
uguaaucugauguccaggu

SEQ ID NO: 2427118 - RNA, 19 nt, Artificial Sequence
  Description of Artificial Sequence: Synthetic oligonucleotide
ugacuuuaauucaaguuuc

SEQ ID NO: 2427119 - RNA, 19 nt, Artificial Sequence
  Description of Artificial Sequence: Synthetic oligonucleotide
ucucacccagaaaugaucc

SEQ ID NO: 2427120 - RNA, 19 nt, Artificial Sequence
  Description of Artificial Sequence: Synthetic oligonucleotide
uaggaaaugguacuaccca

SEQ ID NO: 2427121 - RNA, 19 nt, Artificial Sequence
  Description of Artificial Sequence: Synthetic oligonucleotide
aaugaucccagccugucaa

SEQ ID NO: 2427122 - RNA, 19 nt, Artificial Sequence
  Description of Artificial Sequence: Synthetic oligonucleotide
uugauuagaaaugucugca

SEQ ID NO: 2427123 - RNA, 19 nt, Artificial Sequence
  Description of Artificial Sequence: Synthetic oligonucleotide
ucaauucacaacaucucgu

SEQ ID NO: 2427124 - RNA, 19 nt, Artificial Sequence
  Description of Artificial Sequence: Synthetic oligonucleotide
acucagugaaaggacagcc

SEQ ID NO: 2427125 - RNA, 19 nt, Artificial Sequence
  Description of Artificial Sequence: Synthetic oligonucleotide
gaaaugucugcaauggccc

SEQ ID NO: 2427126 - RNA, 19 nt, Artificial Sequence
  Description of Artificial Sequence: Synthetic oligonucleotide
ugagaacugaauugauuag

SEQ ID NO: 2427127 - RNA, 19 nt, Artificial Sequence
  Description of Artificial Sequence: Synthetic oligonucleotide
cagauguagaacauucuag

SEQ ID NO: 2427128 - RNA, 19 nt, Artificial Sequence
  Description of Artificial Sequence: Synthetic oligonucleotide
acuacccagaaaccaaaac

SEQ ID NO: 2427129 - RNA, 19 nt, Artificial Sequence
  Description of Artificial Sequence: Synthetic oligonucleotide
aacaucucguccaaauagg

SEQ ID NO: 2427130 - RNA, 19 nt, Artificial Sequence
  Description of Artificial Sequence: Synthetic oligonucleotide
ucauugagaacugaauuga

SEQ ID NO: 2427131 - RNA, 19 nt, Artificial Sequence
  Description of Artificial Sequence: Synthetic oligonucleotide
gauguaaucugauguccag

SEQ ID NO: 2427132 - RNA, 19 nt, Artificial Sequence
  Description of Artificial Sequence: Synthetic oligonucleotide
acugaauugauuagaaaug

SEQ ID NO: 2427133 - RNA, 19 nt, Artificial Sequence
  Description of Artificial Sequence: Synthetic oligonucleotide
auggcucucacccagaaau

SEQ ID NO: 2427134 - RNA, 19 nt, Artificial Sequence
  Description of Artificial Sequence: Synthetic oligonucleotide
caaaacucagugaaaggac

SEQ ID NO: 2427135 - RNA, 19 nt, Artificial Sequence
  Description of Artificial Sequence: Synthetic oligonucleotide
agcaauacauuuugcacca

SEQ ID NO: 2427136 - RNA, 19 nt, Artificial Sequence
  Description of Artificial Sequence: Synthetic oligonucleotide
uugauguaaucugaugucc

SEQ ID NO: 2427137 - RNA, 19 nt, Artificial Sequence
  Description of Artificial Sequence: Synthetic oligonucleotide
aggaacuggccauaugccg

SEQ ID NO: 2427138 - RNA, 19 nt, Artificial Sequence
  Description of Artificial Sequence: Synthetic oligonucleotide
ucuguugaaguccuccacu

SEQ ID NO: 2427139 - RNA, 19 nt, Artificial Sequence
  Description of Artificial Sequence: Synthetic oligonucleotide
gagggagcaauacauuuug

SEQ ID NO: 2427140 - RNA, 19 nt, Artificial Sequence
  Description of Artificial Sequence: Synthetic oligonucleotide
ucguccaaauaggaaaugg

SEQ ID NO: 2427141 - RNA, 19 nt, Artificial Sequence
  Description of Artificial Sequence: Synthetic oligonucleotide
uucuugcucguccccaugg

SEQ ID NO: 2427142 - RNA, 19 nt, Artificial Sequence
  Description of Artificial Sequence: Synthetic oligonucleotide
acaggguggacugaggaac

SEQ ID NO: 2427143 - RNA, 19 nt, Artificial Sequence
  Description of Artificial Sequence: Synthetic oligonucleotide
accaaaacucagugaaagg

SEQ ID NO: 2427144 - RNA, 19 nt, Artificial Sequence
  Description of Artificial Sequence: Synthetic oligonucleotide
ucuagaaaacacugaggga

SEQ ID NO: 2427145 - RNA, 19 nt, Artificial Sequence
  Description of Artificial Sequence: Synthetic oligonucleotide
uagaaaacacugagggagc

SEQ ID NO: 2427146 - RNA, 19 nt, Artificial Sequence
  Description of Artificial Sequence: Synthetic oligonucleotide
caaguuucagaaagccugg

SEQ ID NO: 2427147 - RNA, 19 nt, Artificial Sequence
  Description of Artificial Sequence: Synthetic oligonucleotide
agccugucaauucacaaca

SEQ ID NO: 2427148 - RNA, 19 nt, Artificial Sequence
  Description of Artificial Sequence: Synthetic oligonucleotide
ggcauugugguacagauga

SEQ ID NO: 2427149 - RNA, 19 nt, Artificial Sequence
  Description of Artificial Sequence: Synthetic oligonucleotide
ugaauugauuagaaauguc

SEQ ID NO: 2427150 - RNA, 19 nt, Artificial Sequence
  Description of Artificial Sequence: Synthetic oligonucleotide
gaauugauuagaaaugucu

SEQ ID NO: 2427151 - RNA, 19 nt, Artificial Sequence
  Description of Artificial Sequence: Synthetic oligonucleotide
acauaccauaugcuuagag

SEQ ID NO: 2427152 - RNA, 19 nt, Artificial Sequence
  Description of Artificial Sequence: Synthetic oligonucleotide
aacgggguugggaagguac

SEQ ID NO: 2427153 - RNA, 19 nt, Artificial Sequence
  Description of Artificial Sequence: Synthetic oligonucleotide
auaugcuuagagucccagg

SEQ ID NO: 2427154 - RNA, 19 nt, Artificial Sequence
  Description of Artificial Sequence: Synthetic oligonucleotide
uuaauucaaguuucagaaa

SEQ ID NO: 2427155 - RNA, 19 nt, Artificial Sequence
  Description of Artificial Sequence: Synthetic oligonucleotide
aaaacacugagggagcaau

SEQ ID NO: 2427156 - RNA, 19 nt, Artificial Sequence
  Description of Artificial Sequence: Synthetic oligonucleotide
gacagaugcugaaacgggg

SEQ ID NO: 2427157 - RNA, 19 nt, Artificial Sequence
  Description of Artificial Sequence: Synthetic oligonucleotide
uucuggaccugcucguacg

SEQ ID NO: 2427158 - RNA, 19 nt, Artificial Sequence
  Description of Artificial Sequence: Synthetic oligonucleotide
ucugcuuauggguuuugga

SEQ ID NO: 2427159 - RNA, 19 nt, Artificial Sequence
  Description of Artificial Sequence: Synthetic oligonucleotide
caauucacaacaucucguc

SEQ ID NO: 2427160 - RNA, 19 nt, Artificial Sequence
  Description of Artificial Sequence: Synthetic oligonucleotide
aaaugaucccagccuguca

SEQ ID NO: 2427161 - RNA, 19 nt, Artificial Sequence
  Description of Artificial Sequence: Synthetic oligonucleotide
uugugguacagaugaagac

SEQ ID NO: 2427162 - RNA, 19 nt, Artificial Sequence
  Description of Artificial Sequence: Synthetic oligonucleotide
gauguagaacauucuagaa

SEQ ID NO: 2427163 - RNA, 19 nt, Artificial Sequence
  Description of Artificial Sequence: Synthetic oligonucleotide
cagaugaagacagaugcug

SEQ ID NO: 2427164 - RNA, 19 nt, Artificial Sequence
  Description of Artificial Sequence: Synthetic oligonucleotide
uccgcgacgccuuucagcu

SEQ ID NO: 2427165 - RNA, 19 nt, Artificial Sequence
  Description of Artificial Sequence: Synthetic oligonucleotide
ugauuagaaaugucugcaa

SEQ ID NO: 2427166 - RNA, 19 nt, Artificial Sequence
  Description of Artificial Sequence: Synthetic oligonucleotide
gugguacagaugaagacag

SEQ ID NO: 2427167 - RNA, 19 nt, Artificial Sequence
  Description of Artificial Sequence: Synthetic oligonucleotide
ggagcaauacauuuugcac

SEQ ID NO: 2427168 - RNA, 19 nt, Artificial Sequence
  Description of Artificial Sequence: Synthetic oligonucleotide
cauugugguacagaugaag

SEQ ID NO: 2427169 - RNA, 19 nt, Artificial Sequence
  Description of Artificial Sequence: Synthetic oligonucleotide
ugguccagcugacuuuagg

SEQ ID NO: 2427170 - RNA, 19 nt, Artificial Sequence
  Description of Artificial Sequence: Synthetic oligonucleotide
aggauucuuuccauuuugc

SEQ ID NO: 2427171 - RNA, 19 nt, Artificial Sequence
  Description of Artificial Sequence: Synthetic oligonucleotide
acagccugacuuuaauuca

SEQ ID NO: 2427172 - RNA, 19 nt, Artificial Sequence
  Description of Artificial Sequence: Synthetic oligonucleotide
ucucguccaaauaggaaau

SEQ ID NO: 2427173 - RNA, 19 nt, Artificial Sequence
  Description of Artificial Sequence: Synthetic oligonucleotide
aaguuucagaaagccuggg

SEQ ID NO: 2427174 - RNA, 19 nt, Artificial Sequence
  Description of Artificial Sequence: Synthetic oligonucleotide
cauuuugccguuucuccug

SEQ ID NO: 2427175 - RNA, 19 nt, Artificial Sequence
  Description of Artificial Sequence: Synthetic oligonucleotide
uugcccaaaaggagcagca

SEQ ID NO: 2427176 - RNA, 19 nt, Artificial Sequence
  Description of Artificial Sequence: Synthetic oligonucleotide
ugguacuacccagaaacca

SEQ ID NO: 2427177 - RNA, 19 nt, Artificial Sequence
  Description of Artificial Sequence: Synthetic oligonucleotide
ugugggaacuucuguggug

SEQ ID NO: 2427178 - RNA, 19 nt, Artificial Sequence
  Description of Artificial Sequence: Synthetic oligonucleotide
ugcuucagguggcuguugc

SEQ ID NO: 2427179 - RNA, 19 nt, Artificial Sequence
  Description of Artificial Sequence: Synthetic oligonucleotide
uccagcugacuuuaggaau

SEQ ID NO: 2427180 - RNA, 19 nt, Artificial Sequence
  Description of Artificial Sequence: Synthetic oligonucleotide
gcuuauggguuuuggaugc

SEQ ID NO: 2427181 - RNA, 19 nt, Artificial Sequence
  Description of Artificial Sequence: Synthetic oligonucleotide
ucugugaguguguccaggu

SEQ ID NO: 2427182 - RNA, 19 nt, Artificial Sequence
  Description of Artificial Sequence: Synthetic oligonucleotide
ugagggagcaauacauuuu

SEQ ID NO: 2427183 - RNA, 19 nt, Artificial Sequence
  Description of Artificial Sequence: Synthetic oligonucleotide
ucgaaggccgccugcgccg

SEQ ID NO: 2427184 - RNA, 19 nt, Artificial Sequence
  Description of Artificial Sequence: Synthetic oligonucleotide
agacagaugcugaaacggg

SEQ ID NO: 2427185 - RNA, 19 nt, Artificial Sequence
  Description of Artificial Sequence: Synthetic oligonucleotide
ugggaagguacccuccuuc

SEQ ID NO: 2427186 - RNA, 19 nt, Artificial Sequence
  Description of Artificial Sequence: Synthetic oligonucleotide
acauuuugcaccaggggca

SEQ ID NO: 2427187 - RNA, 19 nt, Artificial Sequence
  Description of Artificial Sequence: Synthetic oligonucleotide
uugcucguccccauggccu

SEQ ID NO: 2427188 - RNA, 19 nt, Artificial Sequence
  Description of Artificial Sequence: Synthetic oligonucleotide
gauuagaaaugucugcaau

SEQ ID NO: 2427189 - RNA, 19 nt, Artificial Sequence
  Description of Artificial Sequence: Synthetic oligonucleotide
uacuugguccagcugacuu

SEQ ID NO: 2427190 - RNA, 19 nt, Artificial Sequence
  Description of Artificial Sequence: Synthetic oligonucleotide
ucuggaccugcucguacgc

SEQ ID NO: 2427191 - RNA, 19 nt, Artificial Sequence
  Description of Artificial Sequence: Synthetic oligonucleotide
uuuugcaccaggggcaggu

SEQ ID NO: 2427192 - RNA, 19 nt, Artificial Sequence
  Description of Artificial Sequence: Synthetic oligonucleotide
cauaccauaugcuuagagu

SEQ ID NO: 2427193 - RNA, 19 nt, Artificial Sequence
  Description of Artificial Sequence: Synthetic oligonucleotide
cagccugucaauucacaac

SEQ ID NO: 2427194 - RNA, 19 nt, Artificial Sequence
  Description of Artificial Sequence: Synthetic oligonucleotide
ggaacuggccauaugccgg

SEQ ID NO: 2427195 - RNA, 19 nt, Artificial Sequence
  Description of Artificial Sequence: Synthetic oligonucleotide
caaaaggagcagcacugug

SEQ ID NO: 2427196 - RNA, 19 nt, Artificial Sequence
  Description of Artificial Sequence: Synthetic oligonucleotide
gaacugaauugauuagaaa

SEQ ID NO: 2427197 - RNA, 19 nt, Artificial Sequence
  Description of Artificial Sequence: Synthetic oligonucleotide
cuuccgcuuggucacgccg

SEQ ID NO: 2427198 - RNA, 19 nt, Artificial Sequence
  Description of Artificial Sequence: Synthetic oligonucleotide
agugcucugugaguguguc

SEQ ID NO: 2427199 - RNA, 19 nt, Artificial Sequence
  Description of Artificial Sequence: Synthetic oligonucleotide
agaaagccugggcucagca

SEQ ID NO: 2427200 - RNA, 19 nt, Artificial Sequence
  Description of Artificial Sequence: Synthetic oligonucleotide
aggcaggagcuuccugucc

SEQ ID NO: 2427201 - RNA, 19 nt, Artificial Sequence
  Description of Artificial Sequence: Synthetic oligonucleotide
ggaacuucugugguggucc

SEQ ID NO: 2427202 - RNA, 19 nt, Artificial Sequence
  Description of Artificial Sequence: Synthetic oligonucleotide
ucuucucgaaggccgccug

SEQ ID NO: 2427203 - RNA, 19 nt, Artificial Sequence
  Description of Artificial Sequence: Synthetic oligonucleotide
uuggucacgccgagcuccg

SEQ ID NO: 2427204 - RNA, 19 nt, Artificial Sequence
  Description of Artificial Sequence: Synthetic oligonucleotide
gaucccagccugucaauuc

SEQ ID NO: 2427205 - RNA, 19 nt, Artificial Sequence
  Description of Artificial Sequence: Synthetic oligonucleotide
cauaugcuuagagucccag

SEQ ID NO: 2427206 - RNA, 19 nt, Artificial Sequence
  Description of Artificial Sequence: Synthetic oligonucleotide
uauggguuuuggaugccuu

SEQ ID NO: 2427207 - RNA, 19 nt, Artificial Sequence
  Description of Artificial Sequence: Synthetic oligonucleotide
uggaccugcucguacgccu

SEQ ID NO: 2427208 - RNA, 19 nt, Artificial Sequence
  Description of Artificial Sequence: Synthetic oligonucleotide
agaugcugaaacgggguug

SEQ ID NO: 2427209 - RNA, 19 nt, Artificial Sequence
  Description of Artificial Sequence: Synthetic oligonucleotide
cugaaacgggguugggaag

SEQ ID NO: 2427210 - RNA, 19 nt, Artificial Sequence
  Description of Artificial Sequence: Synthetic oligonucleotide
uacuacccagaaaccaaaa

SEQ ID NO: 2427211 - RNA, 19 nt, Artificial Sequence
  Description of Artificial Sequence: Synthetic oligonucleotide
uuccuguccuggcauugug

SEQ ID NO: 2427212 - RNA, 19 nt, Artificial Sequence
  Description of Artificial Sequence: Synthetic oligonucleotide
aaaccaaaacucagugaaa

SEQ ID NO: 2427213 - RNA, 19 nt, Artificial Sequence
  Description of Artificial Sequence: Synthetic oligonucleotide
guugcccaaaaggagcagc

SEQ ID NO: 2427214 - RNA, 19 nt, Artificial Sequence
  Description of Artificial Sequence: Synthetic oligonucleotide
ugacuuuaggaaugucaua

SEQ ID NO: 2427215 - RNA, 19 nt, Artificial Sequence
  Description of Artificial Sequence: Synthetic oligonucleotide
agggagcaauacauuuugc

SEQ ID NO: 2427216 - RNA, 19 nt, Artificial Sequence
  Description of Artificial Sequence: Synthetic oligonucleotide
uggcucucacccagaaaug

SEQ ID NO: 2427217 - RNA, 19 nt, Artificial Sequence
  Description of Artificial Sequence: Synthetic oligonucleotide
uuauggguuuuggaugccu

SEQ ID NO: 2427218 - RNA, 19 nt, Artificial Sequence
  Description of Artificial Sequence: Synthetic oligonucleotide
ugcugaaacgggguuggga

SEQ ID NO: 2427219 - RNA, 19 nt, Artificial Sequence
  Description of Artificial Sequence: Synthetic oligonucleotide
cucauccuugcuucaggug

SEQ ID NO: 2427220 - RNA, 19 nt, Artificial Sequence
  Description of Artificial Sequence: Synthetic oligonucleotide
gucuguugaaguccuccac

SEQ ID NO: 2427221 - RNA, 19 nt, Artificial Sequence
  Description of Artificial Sequence: Synthetic oligonucleotide
gguccagcugacuuuagga

SEQ ID NO: 2427222 - RNA, 19 nt, Artificial Sequence
  Description of Artificial Sequence: Synthetic oligonucleotide
acagaugcugaaacggggu

SEQ ID NO: 2427223 - RNA, 19 nt, Artificial Sequence
  Description of Artificial Sequence: Synthetic oligonucleotide
gaacuggccauaugccgga

SEQ ID NO: 2427224 - RNA, 19 nt, Artificial Sequence
  Description of Artificial Sequence: Synthetic oligonucleotide
acgggguugggaagguacc

SEQ ID NO: 2427225 - RNA, 19 nt, Artificial Sequence
  Description of Artificial Sequence: Synthetic oligonucleotide
cugaauugauuagaaaugu

SEQ ID NO: 2427226 - RNA, 19 nt, Artificial Sequence
  Description of Artificial Sequence: Synthetic oligonucleotide
uccgcuuggucacgccgag

SEQ ID NO: 2427227 - RNA, 19 nt, Artificial Sequence
  Description of Artificial Sequence: Synthetic oligonucleotide
aaaggacagccugacuuua

SEQ ID NO: 2427228 - RNA, 19 nt, Artificial Sequence
  Description of Artificial Sequence: Synthetic oligonucleotide
uaggaaugucauagugcuc

SEQ ID NO: 2427229 - RNA, 19 nt, Artificial Sequence
  Description of Artificial Sequence: Synthetic oligonucleotide
ucucgaaggccgccugcgc

SEQ ID NO: 2427230 - RNA, 19 nt, Artificial Sequence
  Description of Artificial Sequence: Synthetic oligonucleotide
gcugacuuuaggaauguca

SEQ ID NO: 2427231 - RNA, 19 nt, Artificial Sequence
  Description of Artificial Sequence: Synthetic oligonucleotide
acaucucguccaaauagga

SEQ ID NO: 2427232 - RNA, 19 nt, Artificial Sequence
  Description of Artificial Sequence: Synthetic oligonucleotide
gcugaaacgggguugggaa

SEQ ID NO: 2427233 - RNA, 19 nt, Artificial Sequence
  Description of Artificial Sequence: Synthetic oligonucleotide
augaagacagaugcugaaa

SEQ ID NO: 2427234 - RNA, 19 nt, Artificial Sequence
  Description of Artificial Sequence: Synthetic oligonucleotide
ggggcagguuacuuggucc

SEQ ID NO: 2427235 - RNA, 19 nt, Artificial Sequence
  Description of Artificial Sequence: Synthetic oligonucleotide
aggacagccugacuuuaau

SEQ ID NO: 2427236 - RNA, 19 nt, Artificial Sequence
  Description of Artificial Sequence: Synthetic oligonucleotide
uuagagucccaggugccau

SEQ ID NO: 2427237 - RNA, 19 nt, Artificial Sequence
  Description of Artificial Sequence: Synthetic oligonucleotide
agcagaugcaccaggcaga

SEQ ID NO: 2427238 - RNA, 19 nt, Artificial Sequence
  Description of Artificial Sequence: Synthetic oligonucleotide
guccagcugacuuuaggaa

SEQ ID NO: 2427239 - RNA, 19 nt, Artificial Sequence
  Description of Artificial Sequence: Synthetic oligonucleotide
gggaagguacccuccuucc

SEQ ID NO: 2427240 - RNA, 19 nt, Artificial Sequence
  Description of Artificial Sequence: Synthetic oligonucleotide
cuucucgaaggccgccugc

SEQ ID NO: 2427241 - RNA, 19 nt, Artificial Sequence
  Description of Artificial Sequence: Synthetic oligonucleotide
aucugauguccagguugcc

SEQ ID NO: 2427242 - RNA, 19 nt, Artificial Sequence
  Description of Artificial Sequence: Synthetic oligonucleotide
uagugcucugugagugugu

SEQ ID NO: 2427243 - RNA, 19 nt, Artificial Sequence
  Description of Artificial Sequence: Synthetic oligonucleotide
agguuacuugguccagcug

SEQ ID NO: 2427244 - RNA, 19 nt, Artificial Sequence
  Description of Artificial Sequence: Synthetic oligonucleotide
gguuuuggaugccuucuuc

SEQ ID NO: 2427245 - RNA, 19 nt, Artificial Sequence
  Description of Artificial Sequence: Synthetic oligonucleotide
ggccauaugccggaggccc

SEQ ID NO: 2427246 - RNA, 19 nt, Artificial Sequence
  Description of Artificial Sequence: Synthetic oligonucleotide
cagugaaaggacagccuga

SEQ ID NO: 2427247 - RNA, 19 nt, Artificial Sequence
  Description of Artificial Sequence: Synthetic oligonucleotide
cuuauggguuuuggaugcc

SEQ ID NO: 2427248 - RNA, 19 nt, Artificial Sequence
  Description of Artificial Sequence: Synthetic oligonucleotide
uugguccagcugacuuuag

SEQ ID NO: 2427249 - RNA, 19 nt, Artificial Sequence
  Description of Artificial Sequence: Synthetic oligonucleotide
cacugagggagcaauacau

SEQ ID NO: 2427250 - RNA, 19 nt, Artificial Sequence
  Description of Artificial Sequence: Synthetic oligonucleotide
aaggccgccugcgccggcg

SEQ ID NO: 2427251 - RNA, 19 nt, Artificial Sequence
  Description of Artificial Sequence: Synthetic oligonucleotide
ggucacgccgagcuccgcg

SEQ ID NO: 2427252 - RNA, 19 nt, Artificial Sequence
  Description of Artificial Sequence: Synthetic oligonucleotide
ggaggcccgugucucaucc

SEQ ID NO: 2427253 - RNA, 19 nt, Artificial Sequence
  Description of Artificial Sequence: Synthetic oligonucleotide
uuuugccguuucuccugca

SEQ ID NO: 2427254 - RNA, 19 nt, Artificial Sequence
  Description of Artificial Sequence: Synthetic oligonucleotide
agccugacuuuaauucaag

SEQ ID NO: 2427255 - RNA, 19 nt, Artificial Sequence
  Description of Artificial Sequence: Synthetic oligonucleotide
cucguccaaauaggaaaug

SEQ ID NO: 2427256 - RNA, 19 nt, Artificial Sequence
  Description of Artificial Sequence: Synthetic oligonucleotide
uucuuccgcuuggucacgc

SEQ ID NO: 2427257 - RNA, 19 nt, Artificial Sequence
  Description of Artificial Sequence: Synthetic oligonucleotide
uugggaagguacccuccuu

SEQ ID NO: 2427258 - RNA, 19 nt, Artificial Sequence
  Description of Artificial Sequence: Synthetic oligonucleotide
uagagucccaggugccauc

SEQ ID NO: 2427259 - RNA, 19 nt, Artificial Sequence
  Description of Artificial Sequence: Synthetic oligonucleotide
guggacugaggaacuggcc

SEQ ID NO: 2427260 - RNA, 19 nt, Artificial Sequence
  Description of Artificial Sequence: Synthetic oligonucleotide
ugaucccagccugucaauu

SEQ ID NO: 2427261 - RNA, 19 nt, Artificial Sequence
  Description of Artificial Sequence: Synthetic oligonucleotide
agcugacuuuaggaauguc

SEQ ID NO: 2427262 - RNA, 19 nt, Artificial Sequence
  Description of Artificial Sequence: Synthetic oligonucleotide
ugcucguccccauggccuc

SEQ ID NO: 2427263 - RNA, 19 nt, Artificial Sequence
  Description of Artificial Sequence: Synthetic oligonucleotide
guacuacccagaaaccaaa

SEQ ID NO: 2427264 - RNA, 19 nt, Artificial Sequence
  Description of Artificial Sequence: Synthetic oligonucleotide
guacccuccuuccauggcu

SEQ ID NO: 2427265 - RNA, 19 nt, Artificial Sequence
  Description of Artificial Sequence: Synthetic oligonucleotide
auaugccggaggcccgugu

SEQ ID NO: 2427266 - RNA, 19 nt, Artificial Sequence
  Description of Artificial Sequence: Synthetic oligonucleotide
ccccuucuggaccugcucg

SEQ ID NO: 2427267 - RNA, 19 nt, Artificial Sequence
  Description of Artificial Sequence: Synthetic oligonucleotide
ugccaucauugagaacuga

SEQ ID NO: 2427268 - RNA, 19 nt, Artificial Sequence
  Description of Artificial Sequence: Synthetic oligonucleotide
auuuugcaccaggggcagg

SEQ ID NO: 2427269 - RNA, 19 nt, Artificial Sequence
  Description of Artificial Sequence: Synthetic oligonucleotide
cugagggagcaauacauuu

SEQ ID NO: 2427270 - RNA, 19 nt, Artificial Sequence
  Description of Artificial Sequence: Synthetic oligonucleotide
ggguggacugaggaacugg

SEQ ID NO: 2427271 - RNA, 19 nt, Artificial Sequence
  Description of Artificial Sequence: Synthetic oligonucleotide
augccggaggcccgugucu

SEQ ID NO: 2427272 - RNA, 19 nt, Artificial Sequence
  Description of Artificial Sequence: Synthetic oligonucleotide
acugagggagcaauacauu

SEQ ID NO: 2427273 - RNA, 19 nt, Artificial Sequence
  Description of Artificial Sequence: Synthetic oligonucleotide
augaucccagccugucaau

SEQ ID NO: 2427274 - RNA, 19 nt, Artificial Sequence
  Description of Artificial Sequence: Synthetic oligonucleotide
acugaggaacuggccauau

SEQ ID NO: 2427275 - RNA, 19 nt, Artificial Sequence
  Description of Artificial Sequence: Synthetic oligonucleotide
ucacgccgagcuccgcgac

SEQ ID NO: 2427276 - RNA, 19 nt, Artificial Sequence
  Description of Artificial Sequence: Synthetic oligonucleotide
cacgccgagcuccgcgacg

SEQ ID NO: 2427277 - RNA, 19 nt, Artificial Sequence
  Description of Artificial Sequence: Synthetic oligonucleotide
guugggaagguacccuccu

SEQ ID NO: 2427278 - RNA, 19 nt, Artificial Sequence
  Description of Artificial Sequence: Synthetic oligonucleotide
uccuugcuucagguggcug

SEQ ID NO: 2427279 - RNA, 19 nt, Artificial Sequence
  Description of Artificial Sequence: Synthetic oligonucleotide
gguugggaagguacccucc

SEQ ID NO: 2427280 - RNA, 19 nt, Artificial Sequence
  Description of Artificial Sequence: Synthetic oligonucleotide
cuucuuccgcuuggucacg

SEQ ID NO: 2427281 - RNA, 19 nt, Artificial Sequence
  Description of Artificial Sequence: Synthetic oligonucleotide
aggcccgugucucauccuu

SEQ ID NO: 2427282 - RNA, 19 nt, Artificial Sequence
  Description of Artificial Sequence: Synthetic oligonucleotide
cauugagaacugaauugau

SEQ ID NO: 2427283 - RNA, 19 nt, Artificial Sequence
  Description of Artificial Sequence: Synthetic oligonucleotide
cuggaccugcucguacgcc

SEQ ID NO: 2427284 - RNA, 19 nt, Artificial Sequence
  Description of Artificial Sequence: Synthetic oligonucleotide
gugccaucauugagaacug

SEQ ID NO: 2427285 - RNA, 19 nt, Artificial Sequence
  Description of Artificial Sequence: Synthetic oligonucleotide
ggaagguacccuccuucca

SEQ ID NO: 2427286 - RNA, 19 nt, Artificial Sequence
  Description of Artificial Sequence: Synthetic oligonucleotide
gggcagguuacuuggucca

SEQ ID NO: 2427287 - RNA, 19 nt, Artificial Sequence
  Description of Artificial Sequence: Synthetic oligonucleotide
gucacgccgagcuccgcga

SEQ ID NO: 2427288 - RNA, 19 nt, Artificial Sequence
  Description of Artificial Sequence: Synthetic oligonucleotide
ccagaaaugaucccagccu

SEQ ID NO: 2427289 - RNA, 19 nt, Artificial Sequence
  Description of Artificial Sequence: Synthetic oligonucleotide
cagguuacuugguccagcu

SEQ ID NO: 2427290 - RNA, 19 nt, Artificial Sequence
  Description of Artificial Sequence: Synthetic oligonucleotide
cagaaagccugggcucagc

SEQ ID NO: 2427291 - RNA, 19 nt, Artificial Sequence
  Description of Artificial Sequence: Synthetic oligonucleotide
ggcucucacccagaaauga

SEQ ID NO: 2427292 - RNA, 19 nt, Artificial Sequence
  Description of Artificial Sequence: Synthetic oligonucleotide
aggguggacugaggaacug

SEQ ID NO: 2427293 - RNA, 19 nt, Artificial Sequence
  Description of Artificial Sequence: Synthetic oligonucleotide
cgugcgcuuguccaggcag

SEQ ID NO: 2427294 - RNA, 19 nt, Artificial Sequence
  Description of Artificial Sequence: Synthetic oligonucleotide
ccugacuuuaauucaaguu

SEQ ID NO: 2427295 - RNA, 19 nt, Artificial Sequence
  Description of Artificial Sequence: Synthetic oligonucleotide
gccaucauugagaacugaa

SEQ ID NO: 2427296 - RNA, 19 nt, Artificial Sequence
  Description of Artificial Sequence: Synthetic oligonucleotide
gcccgugucucauccuugc

SEQ ID NO: 2427297 - RNA, 19 nt, Artificial Sequence
  Description of Artificial Sequence: Synthetic oligonucleotide
aaacgggguugggaaggua

SEQ ID NO: 2427298 - RNA, 19 nt, Artificial Sequence
  Description of Artificial Sequence: Synthetic oligonucleotide
guaaucugauguccagguu

SEQ ID NO: 2427299 - RNA, 19 nt, Artificial Sequence
  Description of Artificial Sequence: Synthetic oligonucleotide
cuccuuccauggcucucac

SEQ ID NO: 2427300 - RNA, 19 nt, Artificial Sequence
  Description of Artificial Sequence: Synthetic oligonucleotide
ugccggaggcccgugucuc

SEQ ID NO: 2427301 - RNA, 19 nt, Artificial Sequence
  Description of Artificial Sequence: Synthetic oligonucleotide
cacucucugcuuauggguu

SEQ ID NO: 2427302 - RNA, 19 nt, Artificial Sequence
  Description of Artificial Sequence: Synthetic oligonucleotide
ucguccccauggccuccag

SEQ ID NO: 2427303 - RNA, 19 nt, Artificial Sequence
  Description of Artificial Sequence: Synthetic oligonucleotide
gacugaggaacuggccaua

SEQ ID NO: 2427304 - RNA, 19 nt, Artificial Sequence
  Description of Artificial Sequence: Synthetic oligonucleotide
cugugggaacuucuguggu

SEQ ID NO: 2427305 - RNA, 19 nt, Artificial Sequence
  Description of Artificial Sequence: Synthetic oligonucleotide
gcucugugaguguguccag

SEQ ID NO: 2427306 - RNA, 19 nt, Artificial Sequence
  Description of Artificial Sequence: Synthetic oligonucleotide
gugaaaggacagccugacu

SEQ ID NO: 2427307 - RNA, 19 nt, Artificial Sequence
  Description of Artificial Sequence: Synthetic oligonucleotide
cauaugccggaggcccgug

SEQ ID NO: 2427308 - RNA, 19 nt, Artificial Sequence
  Description of Artificial Sequence: Synthetic oligonucleotide
gaaacgggguugggaaggu

SEQ ID NO: 2427309 - RNA, 19 nt, Artificial Sequence
  Description of Artificial Sequence: Synthetic oligonucleotide
gccauaugccggaggcccg

SEQ ID NO: 2427310 - RNA, 19 nt, Artificial Sequence
  Description of Artificial Sequence: Synthetic oligonucleotide
ccagccugucaauucacaa

SEQ ID NO: 2427311 - RNA, 19 nt, Artificial Sequence
  Description of Artificial Sequence: Synthetic oligonucleotide
gccggcgugcgcuugucca

SEQ ID NO: 2427312 - RNA, 19 nt, Artificial Sequence
  Description of Artificial Sequence: Synthetic oligonucleotide
caggguggacugaggaacu

SEQ ID NO: 2427313 - RNA, 19 nt, Artificial Sequence
  Description of Artificial Sequence: Synthetic oligonucleotide
cgcgacgccuuucagcuuc

SEQ ID NO: 2427314 - RNA, 19 nt, Artificial Sequence
  Description of Artificial Sequence: Synthetic oligonucleotide
ccauuuugccguuucuccu

SEQ ID NO: 2427315 - RNA, 19 nt, Artificial Sequence
  Description of Artificial Sequence: Synthetic oligonucleotide
ggcgugcgcuuguccaggc

SEQ ID NO: 2427316 - RNA, 19 nt, Artificial Sequence
  Description of Artificial Sequence: Synthetic oligonucleotide
cagaugcugaaacgggguu

SEQ ID NO: 2427317 - RNA, 19 nt, Artificial Sequence
  Description of Artificial Sequence: Synthetic oligonucleotide
ggacagccugacuuuaauu

SEQ ID NO: 2427318 - RNA, 19 nt, Artificial Sequence
  Description of Artificial Sequence: Synthetic oligonucleotide
ccggcgugcgcuuguccag

SEQ ID NO: 2427319 - RNA, 19 nt, Artificial Sequence
  Description of Artificial Sequence: Synthetic oligonucleotide
uggucacgccgagcuccgc

SEQ ID NO: 2427320 - RNA, 19 nt, Artificial Sequence
  Description of Artificial Sequence: Synthetic oligonucleotide
cagaugcaccaggcagaug

SEQ ID NO: 2427321 - RNA, 19 nt, Artificial Sequence
  Description of Artificial Sequence: Synthetic oligonucleotide
gcagcacugugggaacuuc

SEQ ID NO: 2427322 - RNA, 19 nt, Artificial Sequence
  Description of Artificial Sequence: Synthetic oligonucleotide
gcuccgcgacgccuuucag

SEQ ID NO: 2427323 - RNA, 19 nt, Artificial Sequence
  Description of Artificial Sequence: Synthetic oligonucleotide
ggcccgugucucauccuug

SEQ ID NO: 2427324 - RNA, 19 nt, Artificial Sequence
  Description of Artificial Sequence: Synthetic oligonucleotide
ccauaugcuuagaguccca

SEQ ID NO: 2427325 - RNA, 19 nt, Artificial Sequence
  Description of Artificial Sequence: Synthetic oligonucleotide
ggaccugcucguacgccuc

SEQ ID NO: 2427326 - RNA, 19 nt, Artificial Sequence
  Description of Artificial Sequence: Synthetic oligonucleotide
gccccuucuggaccugcuc

SEQ ID NO: 2427327 - RNA, 19 nt, Artificial Sequence
  Description of Artificial Sequence: Synthetic oligonucleotide
aggccgccugcgccggcgu

SEQ ID NO: 2427328 - RNA, 19 nt, Artificial Sequence
  Description of Artificial Sequence: Synthetic oligonucleotide
ggugucuguugaaguccuc

SEQ ID NO: 2427329 - RNA, 19 nt, Artificial Sequence
  Description of Artificial Sequence: Synthetic oligonucleotide
gagcuccgcgacgccuuuc

SEQ ID NO: 2427330 - RNA, 19 nt, Artificial Sequence
  Description of Artificial Sequence: Synthetic oligonucleotide
gggguugggaagguacccu

SEQ ID NO: 2427331 - RNA, 19 nt, Artificial Sequence
  Description of Artificial Sequence: Synthetic oligonucleotide
ggguuuuggaugccuucuu

SEQ ID NO: 2427332 - RNA, 19 nt, Artificial Sequence
  Description of Artificial Sequence: Synthetic oligonucleotide
gcauugugguacagaugaa

SEQ ID NO: 2427333 - RNA, 19 nt, Artificial Sequence
  Description of Artificial Sequence: Synthetic oligonucleotide
cgcuuggucacgccgagcu

SEQ ID NO: 2427334 - RNA, 19 nt, Artificial Sequence
  Description of Artificial Sequence: Synthetic oligonucleotide
gcagaugcaccaggcagau

SEQ ID NO: 2427335 - RNA, 19 nt, Artificial Sequence
  Description of Artificial Sequence: Synthetic oligonucleotide
gcucucacccagaaaugau

SEQ ID NO: 2427336 - RNA, 19 nt, Artificial Sequence
  Description of Artificial Sequence: Synthetic oligonucleotide
gcgcuuguccaggcagcgc

SEQ ID NO: 2427337 - RNA, 19 nt, Artificial Sequence
  Description of Artificial Sequence: Synthetic oligonucleotide
gagucccaggugccaucau

SEQ ID NO: 2427338 - RNA, 19 nt, Artificial Sequence
  Description of Artificial Sequence: Synthetic oligonucleotide
gcucguccccauggccucc

SEQ ID NO: 2427339 - RNA, 19 nt, Artificial Sequence
  Description of Artificial Sequence: Synthetic oligonucleotide
gccggaggcccgugucuca

SEQ ID NO: 2427340 - RNA, 19 nt, Artificial Sequence
  Description of Artificial Sequence: Synthetic oligonucleotide
gggccccuucuggaccugc

SEQ ID NO: 2427341 - RNA, 19 nt, Artificial Sequence
  Description of Artificial Sequence: Synthetic oligonucleotide
cggcgugcgcuuguccagg

SEQ ID NO: 2427342 - RNA, 19 nt, Artificial Sequence
  Description of Artificial Sequence: Synthetic oligonucleotide
cugcgccggcgugcgcuug

SEQ ID NO: 2427343 - RNA, 19 nt, Artificial Sequence
  Description of Artificial Sequence: Synthetic oligonucleotide
gccugucaauucacaacau

SEQ ID NO: 2427344 - RNA, 19 nt, Artificial Sequence
  Description of Artificial Sequence: Synthetic oligonucleotide
cagguggcuguugcuugau

SEQ ID NO: 2427345 - RNA, 19 nt, Artificial Sequence
  Description of Artificial Sequence: Synthetic oligonucleotide
gcgacgccuuucagcuuca

SEQ ID NO: 2427346 - RNA, 19 nt, Artificial Sequence
  Description of Artificial Sequence: Synthetic oligonucleotide
ccuccucgcucuucuugcu

SEQ ID NO: 2427347 - RNA, 19 nt, Artificial Sequence
  Description of Artificial Sequence: Synthetic oligonucleotide
caccaggggcagguuacuu

SEQ ID NO: 2427348 - RNA, 19 nt, Artificial Sequence
  Description of Artificial Sequence: Synthetic oligonucleotide
cgccggcgugcgcuugucc

SEQ ID NO: 2427349 - RNA, 19 nt, Artificial Sequence
  Description of Artificial Sequence: Synthetic oligonucleotide
ccauaugccggaggcccgu

SEQ ID NO: 2427350 - RNA, 19 nt, Artificial Sequence
  Description of Artificial Sequence: Synthetic oligonucleotide
cccgugucucauccuugcu

SEQ ID NO: 2427351 - RNA, 19 nt, Artificial Sequence
  Description of Artificial Sequence: Synthetic oligonucleotide
cgacgccuuucagcuucag

SEQ ID NO: 2427352 - RNA, 19 nt, Artificial Sequence
  Description of Artificial Sequence: Synthetic oligonucleotide
cgccgagcuccgcgacgcc

SEQ ID NO: 2427353 - RNA, 19 nt, Artificial Sequence
  Description of Artificial Sequence: Synthetic oligonucleotide
gcgccggcgugcgcuuguc

SEQ ID NO: 2427354 - RNA, 19 nt, Artificial Sequence
  Description of Artificial Sequence: Synthetic oligonucleotide
ccggaggcccgugucucau

SEQ ID NO: 2427355 - RNA, 19 nt, Artificial Sequence
  Description of Artificial Sequence: Synthetic oligonucleotide
ccgcgacgccuuucagcuu

SEQ ID NO: 2427356 - RNA, 19 nt, Artificial Sequence
  Description of Artificial Sequence: Synthetic oligonucleotide
cgagcuccgcgacgccuuu

SEQ ID NO: 2427357 - RNA, 19 nt, Artificial Sequence
  Description of Artificial Sequence: Synthetic oligonucleotide
aagugcaucauuuagcuac

SEQ ID NO: 2427358 - RNA, 19 nt, Artificial Sequence
  Description of Artificial Sequence: Synthetic oligonucleotide
uuuacuucugcuuugaaac

SEQ ID NO: 2427359 - RNA, 19 nt, Artificial Sequence
  Description of Artificial Sequence: Synthetic oligonucleotide
acuucuacuagcuugccgc

SEQ ID NO: 2427360 - RNA, 19 nt, Artificial Sequence
  Description of Artificial Sequence: Synthetic oligonucleotide
uuugacaaaaugcugggag

SEQ ID NO: 2427361 - RNA, 19 nt, Artificial Sequence
  Description of Artificial Sequence: Synthetic oligonucleotide
aaugucugugucccgagcc

SEQ ID NO: 2427362 - RNA, 19 nt, Artificial Sequence
  Description of Artificial Sequence: Synthetic oligonucleotide
aaaaccuuauaauucacgu

SEQ ID NO: 2427363 - RNA, 19 nt, Artificial Sequence
  Description of Artificial Sequence: Synthetic oligonucleotide
aaugcugggagccaacuuc

SEQ ID NO: 2427364 - RNA, 19 nt, Artificial Sequence
  Description of Artificial Sequence: Synthetic oligonucleotide
uuuucuugauaucuguggg

SEQ ID NO: 2427365 - RNA, 19 nt, Artificial Sequence
  Description of Artificial Sequence: Synthetic oligonucleotide
aaccuuauaauucacguaa

SEQ ID NO: 2427366 - RNA, 19 nt, Artificial Sequence
  Description of Artificial Sequence: Synthetic oligonucleotide
auuuucuugauaucugugg

SEQ ID NO: 2427367 - RNA, 19 nt, Artificial Sequence
  Description of Artificial Sequence: Synthetic oligonucleotide
uaaaaccuuauaauucacg

SEQ ID NO: 2427368 - RNA, 19 nt, Artificial Sequence
  Description of Artificial Sequence: Synthetic oligonucleotide
ucuugcaggacauucaggc

SEQ ID NO: 2427369 - RNA, 19 nt, Artificial Sequence
  Description of Artificial Sequence: Synthetic oligonucleotide
guuaaauucuugaauaccc

SEQ ID NO: 2427370 - RNA, 19 nt, Artificial Sequence
  Description of Artificial Sequence: Synthetic oligonucleotide
aauucuugaauacccacau

SEQ ID NO: 2427371 - RNA, 19 nt, Artificial Sequence
  Description of Artificial Sequence: Synthetic oligonucleotide
aagcgauguacuuccagac

SEQ ID NO: 2427372 - RNA, 19 nt, Artificial Sequence
  Description of Artificial Sequence: Synthetic oligonucleotide
gaagcauucuucuuuuggc

SEQ ID NO: 2427373 - RNA, 19 nt, Artificial Sequence
  Description of Artificial Sequence: Synthetic oligonucleotide
aaagcgauguacuuccaga

SEQ ID NO: 2427374 - RNA, 19 nt, Artificial Sequence
  Description of Artificial Sequence: Synthetic oligonucleotide
uuuugggaggcuuagcccc

SEQ ID NO: 2427375 - RNA, 19 nt, Artificial Sequence
  Description of Artificial Sequence: Synthetic oligonucleotide
uuaaauucuugaauaccca

SEQ ID NO: 2427376 - RNA, 19 nt, Artificial Sequence
  Description of Artificial Sequence: Synthetic oligonucleotide
aaagcuggaagcauucuuc

SEQ ID NO: 2427377 - RNA, 19 nt, Artificial Sequence
  Description of Artificial Sequence: Synthetic oligonucleotide
uucuucaggggagagagcg

SEQ ID NO: 2427378 - RNA, 19 nt, Artificial Sequence
  Description of Artificial Sequence: Synthetic oligonucleotide
agguuaaauucuugaauac

SEQ ID NO: 2427379 - RNA, 19 nt, Artificial Sequence
  Description of Artificial Sequence: Synthetic oligonucleotide
ucugcuuugaaacgcgacc

SEQ ID NO: 2427380 - RNA, 19 nt, Artificial Sequence
  Description of Artificial Sequence: Synthetic oligonucleotide
uagguuaaauucuugaaua

SEQ ID NO: 2427381 - RNA, 19 nt, Artificial Sequence
  Description of Artificial Sequence: Synthetic oligonucleotide
acaaagugcaucauuuagc

SEQ ID NO: 2427382 - RNA, 19 nt, Artificial Sequence
  Description of Artificial Sequence: Synthetic oligonucleotide
aaaugucugugucccgagc

SEQ ID NO: 2427383 - RNA, 19 nt, Artificial Sequence
  Description of Artificial Sequence: Synthetic oligonucleotide
cauuuagcuacccuggaag

SEQ ID NO: 2427384 - RNA, 19 nt, Artificial Sequence
  Description of Artificial Sequence: Synthetic oligonucleotide
uuguuuuauucuuugugug

SEQ ID NO: 2427385 - RNA, 19 nt, Artificial Sequence
  Description of Artificial Sequence: Synthetic oligonucleotide
caucauuuagcuacccugg

SEQ ID NO: 2427386 - RNA, 19 nt, Artificial Sequence
  Description of Artificial Sequence: Synthetic oligonucleotide
ucucucuuuuccuuugccg

SEQ ID NO: 2427387 - RNA, 19 nt, Artificial Sequence
  Description of Artificial Sequence: Synthetic oligonucleotide
cauuugacaaaaugcuggg

SEQ ID NO: 2427388 - RNA, 19 nt, Artificial Sequence
  Description of Artificial Sequence: Synthetic oligonucleotide
uaaauucuugaauacccac

SEQ ID NO: 2427389 - RNA, 19 nt, Artificial Sequence
  Description of Artificial Sequence: Synthetic oligonucleotide
uuucugauccuuuuaggcu

SEQ ID NO: 2427390 - RNA, 19 nt, Artificial Sequence
  Description of Artificial Sequence: Synthetic oligonucleotide
uucuagguuaaauucuuga

SEQ ID NO: 2427391 - RNA, 19 nt, Artificial Sequence
  Description of Artificial Sequence: Synthetic oligonucleotide
uuuccuuugccguagccug

SEQ ID NO: 2427392 - RNA, 19 nt, Artificial Sequence
  Description of Artificial Sequence: Synthetic oligonucleotide
uccauuugacaaaaugcug

SEQ ID NO: 2427393 - RNA, 19 nt, Artificial Sequence
  Description of Artificial Sequence: Synthetic oligonucleotide
aacuuguccaacucgucca

SEQ ID NO: 2427394 - RNA, 19 nt, Artificial Sequence
  Description of Artificial Sequence: Synthetic oligonucleotide
uuuucuugaaaaugucugu

SEQ ID NO: 2427395 - RNA, 19 nt, Artificial Sequence
  Description of Artificial Sequence: Synthetic oligonucleotide
aggacauucaggcagggga

SEQ ID NO: 2427396 - RNA, 19 nt, Artificial Sequence
  Description of Artificial Sequence: Synthetic oligonucleotide
ucguccauuugacaaaaug

SEQ ID NO: 2427397 - RNA, 19 nt, Artificial Sequence
  Description of Artificial Sequence: Synthetic oligonucleotide
ucuugaaaaugucuguguc

SEQ ID NO: 2427398 - RNA, 19 nt, Artificial Sequence
  Description of Artificial Sequence: Synthetic oligonucleotide
uuacuucugcuuugaaacg

SEQ ID NO: 2427399 - RNA, 19 nt, Artificial Sequence
  Description of Artificial Sequence: Synthetic oligonucleotide
agaaucaaugucccauuuc

SEQ ID NO: 2427400 - RNA, 19 nt, Artificial Sequence
  Description of Artificial Sequence: Synthetic oligonucleotide
uccuuuuaggcucuguuuc

SEQ ID NO: 2427401 - RNA, 19 nt, Artificial Sequence
  Description of Artificial Sequence: Synthetic oligonucleotide
agcaugauagcccgcuccc

SEQ ID NO: 2427402 - RNA, 19 nt, Artificial Sequence
  Description of Artificial Sequence: Synthetic oligonucleotide
ucugcuauugucuccucgc

SEQ ID NO: 2427403 - RNA, 19 nt, Artificial Sequence
  Description of Artificial Sequence: Synthetic oligonucleotide
ucuagguuaaauucuugaa

SEQ ID NO: 2427404 - RNA, 19 nt, Artificial Sequence
  Description of Artificial Sequence: Synthetic oligonucleotide
aaaaugucugugucccgag

SEQ ID NO: 2427405 - RNA, 19 nt, Artificial Sequence
  Description of Artificial Sequence: Synthetic oligonucleotide
uuccaacuuguccaacucg

SEQ ID NO: 2427406 - RNA, 19 nt, Artificial Sequence
  Description of Artificial Sequence: Synthetic oligonucleotide
cauuucugaauuuuccaac

SEQ ID NO: 2427407 - RNA, 19 nt, Artificial Sequence
  Description of Artificial Sequence: Synthetic oligonucleotide
aacgcgaccacuucuacua

SEQ ID NO: 2427408 - RNA, 19 nt, Artificial Sequence
  Description of Artificial Sequence: Synthetic oligonucleotide
ccauuugacaaaaugcugg

SEQ ID NO: 2427409 - RNA, 19 nt, Artificial Sequence
  Description of Artificial Sequence: Synthetic oligonucleotide
uuuaggcucuguuucaccu

SEQ ID NO: 2427410 - RNA, 19 nt, Artificial Sequence
  Description of Artificial Sequence: Synthetic oligonucleotide
cucuguuucaccuucuguc

SEQ ID NO: 2427411 - RNA, 19 nt, Artificial Sequence
  Description of Artificial Sequence: Synthetic oligonucleotide
uuuucuagguuaaauucuu

SEQ ID NO: 2427412 - RNA, 19 nt, Artificial Sequence
  Description of Artificial Sequence: Synthetic oligonucleotide
cugggagccaacuucuugg

SEQ ID NO: 2427413 - RNA, 19 nt, Artificial Sequence
  Description of Artificial Sequence: Synthetic oligonucleotide
uugaauacccacaucuuuu

SEQ ID NO: 2427414 - RNA, 19 nt, Artificial Sequence
  Description of Artificial Sequence: Synthetic oligonucleotide
uucugauccuuuuaggcuc

SEQ ID NO: 2427415 - RNA, 19 nt, Artificial Sequence
  Description of Artificial Sequence: Synthetic oligonucleotide
uccaacuuguccaacucgu

SEQ ID NO: 2427416 - RNA, 19 nt, Artificial Sequence
  Description of Artificial Sequence: Synthetic oligonucleotide
gaaucaaugucccauuucu

SEQ ID NO: 2427417 - RNA, 19 nt, Artificial Sequence
  Description of Artificial Sequence: Synthetic oligonucleotide
ugauuuguuccuguaaaac

SEQ ID NO: 2427418 - RNA, 19 nt, Artificial Sequence
  Description of Artificial Sequence: Synthetic oligonucleotide
ucuguuucaccuucugucu

SEQ ID NO: 2427419 - RNA, 19 nt, Artificial Sequence
  Description of Artificial Sequence: Synthetic oligonucleotide
aaaccuuauaauucacgua

SEQ ID NO: 2427420 - RNA, 19 nt, Artificial Sequence
  Description of Artificial Sequence: Synthetic oligonucleotide
auaucuguggggcuuagaa

SEQ ID NO: 2427421 - RNA, 19 nt, Artificial Sequence
  Description of Artificial Sequence: Synthetic oligonucleotide
uuuauucuuugugugcuca

SEQ ID NO: 2427422 - RNA, 19 nt, Artificial Sequence
  Description of Artificial Sequence: Synthetic oligonucleotide
uucuugaaaaugucugugu

SEQ ID NO: 2427423 - RNA, 19 nt, Artificial Sequence
  Description of Artificial Sequence: Synthetic oligonucleotide
agcaggagcagagugcagc

SEQ ID NO: 2427424 - RNA, 19 nt, Artificial Sequence
  Description of Artificial Sequence: Synthetic oligonucleotide
auguacuuccagacgagcc

SEQ ID NO: 2427425 - RNA, 19 nt, Artificial Sequence
  Description of Artificial Sequence: Synthetic oligonucleotide
ggaagcauucuucuuuugg

SEQ ID NO: 2427426 - RNA, 19 nt, Artificial Sequence
  Description of Artificial Sequence: Synthetic oligonucleotide
uagaggguccucagcacgg

SEQ ID NO: 2427427 - RNA, 19 nt, Artificial Sequence
  Description of Artificial Sequence: Synthetic oligonucleotide
guagcagggacuucugaag

SEQ ID NO: 2427428 - RNA, 19 nt, Artificial Sequence
  Description of Artificial Sequence: Synthetic oligonucleotide
ucuacuagcuugccgcugu

SEQ ID NO: 2427429 - RNA, 19 nt, Artificial Sequence
  Description of Artificial Sequence: Synthetic oligonucleotide
accacuucuacuagcuugc

SEQ ID NO: 2427430 - RNA, 19 nt, Artificial Sequence
  Description of Artificial Sequence: Synthetic oligonucleotide
ugugaucccaaagcgaugu

SEQ ID NO: 2427431 - RNA, 19 nt, Artificial Sequence
  Description of Artificial Sequence: Synthetic oligonucleotide
ucaucuugaucugacuuug

SEQ ID NO: 2427432 - RNA, 19 nt, Artificial Sequence
  Description of Artificial Sequence: Synthetic oligonucleotide
uuucuagguuaaauucuug

SEQ ID NO: 2427433 - RNA, 19 nt, Artificial Sequence
  Description of Artificial Sequence: Synthetic oligonucleotide
ugucucaucugcuauuguc

SEQ ID NO: 2427434 - RNA, 19 nt, Artificial Sequence
  Description of Artificial Sequence: Synthetic oligonucleotide
guagaggguccucagcacg

SEQ ID NO: 2427435 - RNA, 19 nt, Artificial Sequence
  Description of Artificial Sequence: Synthetic oligonucleotide
agagcgauacugcaguagu

SEQ ID NO: 2427436 - RNA, 19 nt, Artificial Sequence
  Description of Artificial Sequence: Synthetic oligonucleotide
uugaaacgcgaccacuucu

SEQ ID NO: 2427437 - RNA, 19 nt, Artificial Sequence
  Description of Artificial Sequence: Synthetic oligonucleotide
auuuagcuacccuggaaga

SEQ ID NO: 2427438 - RNA, 19 nt, Artificial Sequence
  Description of Artificial Sequence: Synthetic oligonucleotide
ugaaaaugucugugucccg

SEQ ID NO: 2427439 - RNA, 19 nt, Artificial Sequence
  Description of Artificial Sequence: Synthetic oligonucleotide
uaauucacguaacuauuuu

SEQ ID NO: 2427440 - RNA, 19 nt, Artificial Sequence
  Description of Artificial Sequence: Synthetic oligonucleotide
acuagcuugccgcuguucu

SEQ ID NO: 2427441 - RNA, 19 nt, Artificial Sequence
  Description of Artificial Sequence: Synthetic oligonucleotide
cagacgagccuuuucuagg

SEQ ID NO: 2427442 - RNA, 19 nt, Artificial Sequence
  Description of Artificial Sequence: Synthetic oligonucleotide
uuugaaacgcgaccacuuc

SEQ ID NO: 2427443 - RNA, 19 nt, Artificial Sequence
  Description of Artificial Sequence: Synthetic oligonucleotide
uacuucugcuuugaaacgc

SEQ ID NO: 2427444 - RNA, 19 nt, Artificial Sequence
  Description of Artificial Sequence: Synthetic oligonucleotide
uccaacucguccauuugac

SEQ ID NO: 2427445 - RNA, 19 nt, Artificial Sequence
  Description of Artificial Sequence: Synthetic oligonucleotide
uuuccaacuuguccaacuc

SEQ ID NO: 2427446 - RNA, 19 nt, Artificial Sequence
  Description of Artificial Sequence: Synthetic oligonucleotide
uuuuccuuugccguagccu

SEQ ID NO: 2427447 - RNA, 19 nt, Artificial Sequence
  Description of Artificial Sequence: Synthetic oligonucleotide
uggggcuuagaaucaaugu

SEQ ID NO: 2427448 - RNA, 19 nt, Artificial Sequence
  Description of Artificial Sequence: Synthetic oligonucleotide
agcgauacugcaguaguag

SEQ ID NO: 2427449 - RNA, 19 nt, Artificial Sequence
  Description of Artificial Sequence: Synthetic oligonucleotide
ugucucugagccagcaggc

SEQ ID NO: 2427450 - RNA, 19 nt, Artificial Sequence
  Description of Artificial Sequence: Synthetic oligonucleotide
aucugcuauugucuccucg

SEQ ID NO: 2427451 - RNA, 19 nt, Artificial Sequence
  Description of Artificial Sequence: Synthetic oligonucleotide
uugauuuguuccuguaaaa

SEQ ID NO: 2427452 - RNA, 19 nt, Artificial Sequence
  Description of Artificial Sequence: Synthetic oligonucleotide
gcaucauuuagcuacccug

SEQ ID NO: 2427453 - RNA, 19 nt, Artificial Sequence
  Description of Artificial Sequence: Synthetic oligonucleotide
aaacgcgaccacuucuacu

SEQ ID NO: 2427454 - RNA, 19 nt, Artificial Sequence
  Description of Artificial Sequence: Synthetic oligonucleotide
aacucguccauuugacaaa

SEQ ID NO: 2427455 - RNA, 19 nt, Artificial Sequence
  Description of Artificial Sequence: Synthetic oligonucleotide
aggagugucucugagccag

SEQ ID NO: 2427456 - RNA, 19 nt, Artificial Sequence
  Description of Artificial Sequence: Synthetic oligonucleotide
gguuaaauucuugaauacc

SEQ ID NO: 2427457 - RNA, 19 nt, Artificial Sequence
  Description of Artificial Sequence: Synthetic oligonucleotide
ucuguggggcuuagaauca

SEQ ID NO: 2427458 - RNA, 19 nt, Artificial Sequence
  Description of Artificial Sequence: Synthetic oligonucleotide
auacugcaguaguagcagg

SEQ ID NO: 2427459 - RNA, 19 nt, Artificial Sequence
  Description of Artificial Sequence: Synthetic oligonucleotide
gaaaaugucugugucccga

SEQ ID NO: 2427460 - RNA, 19 nt, Artificial Sequence
  Description of Artificial Sequence: Synthetic oligonucleotide
agugcaucauuuagcuacc

SEQ ID NO: 2427461 - RNA, 19 nt, Artificial Sequence
  Description of Artificial Sequence: Synthetic oligonucleotide
uuagaaucaaugucccauu

SEQ ID NO: 2427462 - RNA, 19 nt, Artificial Sequence
  Description of Artificial Sequence: Synthetic oligonucleotide
ugaaacgcgaccacuucua

SEQ ID NO: 2427463 - RNA, 19 nt, Artificial Sequence
  Description of Artificial Sequence: Synthetic oligonucleotide
cuugccgcuguucuucagg

SEQ ID NO: 2427464 - RNA, 19 nt, Artificial Sequence
  Description of Artificial Sequence: Synthetic oligonucleotide
ccuggaagaauuuauuuuc

SEQ ID NO: 2427465 - RNA, 19 nt, Artificial Sequence
  Description of Artificial Sequence: Synthetic oligonucleotide
aaucaaugucccauuucug

SEQ ID NO: 2427466 - RNA, 19 nt, Artificial Sequence
  Description of Artificial Sequence: Synthetic oligonucleotide
uggaucuccugucuuccug

SEQ ID NO: 2427467 - RNA, 19 nt, Artificial Sequence
  Description of Artificial Sequence: Synthetic oligonucleotide
uucugcuuugaaacgcgac

SEQ ID NO: 2427468 - RNA, 19 nt, Artificial Sequence
  Description of Artificial Sequence: Synthetic oligonucleotide
ugcuuugaguuccuugaaa

SEQ ID NO: 2427469 - RNA, 19 nt, Artificial Sequence
  Description of Artificial Sequence: Synthetic oligonucleotide
guagccugugaucccaaag

SEQ ID NO: 2427470 - RNA, 19 nt, Artificial Sequence
  Description of Artificial Sequence: Synthetic oligonucleotide
cguccauuugacaaaaugc

SEQ ID NO: 2427471 - RNA, 19 nt, Artificial Sequence
  Description of Artificial Sequence: Synthetic oligonucleotide
cuuugugugcucaucuuga

SEQ ID NO: 2427472 - RNA, 19 nt, Artificial Sequence
  Description of Artificial Sequence: Synthetic oligonucleotide
uuugccguagccugugauc

SEQ ID NO: 2427473 - RNA, 19 nt, Artificial Sequence
  Description of Artificial Sequence: Synthetic oligonucleotide
ucuugaauacccacaucuu

SEQ ID NO: 2427474 - RNA, 19 nt, Artificial Sequence
  Description of Artificial Sequence: Synthetic oligonucleotide
ucaggggagagagcgauac

SEQ ID NO: 2427475 - RNA, 19 nt, Artificial Sequence
  Description of Artificial Sequence: Synthetic oligonucleotide
uuuguuccuguaaaaccuu

SEQ ID NO: 2427476 - RNA, 19 nt, Artificial Sequence
  Description of Artificial Sequence: Synthetic oligonucleotide
uguuccuguaaaaccuuau

SEQ ID NO: 2427477 - RNA, 19 nt, Artificial Sequence
  Description of Artificial Sequence: Synthetic oligonucleotide
uuuuauucuuugugugcuc

SEQ ID NO: 2427478 - RNA, 19 nt, Artificial Sequence
  Description of Artificial Sequence: Synthetic oligonucleotide
ugcuauugucuccucgccu

SEQ ID NO: 2427479 - RNA, 19 nt, Artificial Sequence
  Description of Artificial Sequence: Synthetic oligonucleotide
cuuauaauucacguaacua

SEQ ID NO: 2427480 - RNA, 19 nt, Artificial Sequence
  Description of Artificial Sequence: Synthetic oligonucleotide
gggcuuagaaucaaugucc

SEQ ID NO: 2427481 - RNA, 19 nt, Artificial Sequence
  Description of Artificial Sequence: Synthetic oligonucleotide
caaagcgauguacuuccag

SEQ ID NO: 2427482 - RNA, 19 nt, Artificial Sequence
  Description of Artificial Sequence: Synthetic oligonucleotide
ugaucccaaagcgauguac

SEQ ID NO: 2427483 - RNA, 19 nt, Artificial Sequence
  Description of Artificial Sequence: Synthetic oligonucleotide
uuagcuacccuggaagaau

SEQ ID NO: 2427484 - RNA, 19 nt, Artificial Sequence
  Description of Artificial Sequence: Synthetic oligonucleotide
acuucugcuuugaaacgcg

SEQ ID NO: 2427485 - RNA, 19 nt, Artificial Sequence
  Description of Artificial Sequence: Synthetic oligonucleotide
ucugauccuuuuaggcucu

SEQ ID NO: 2427486 - RNA, 19 nt, Artificial Sequence
  Description of Artificial Sequence: Synthetic oligonucleotide
cucaucugcuauugucucc

SEQ ID NO: 2427487 - RNA, 19 nt, Artificial Sequence
  Description of Artificial Sequence: Synthetic oligonucleotide
cccaaagcgauguacuucc

SEQ ID NO: 2427488 - RNA, 19 nt, Artificial Sequence
  Description of Artificial Sequence: Synthetic oligonucleotide
accuuauaauucacguaac

SEQ ID NO: 2427489 - RNA, 19 nt, Artificial Sequence
  Description of Artificial Sequence: Synthetic oligonucleotide
gacagcaggagcagagugc

SEQ ID NO: 2427490 - RNA, 19 nt, Artificial Sequence
  Description of Artificial Sequence: Synthetic oligonucleotide
uccaggagugucucugagc

SEQ ID NO: 2427491 - RNA, 19 nt, Artificial Sequence
  Description of Artificial Sequence: Synthetic oligonucleotide
uuuagcuacccuggaagaa

SEQ ID NO: 2427492 - RNA, 19 nt, Artificial Sequence
  Description of Artificial Sequence: Synthetic oligonucleotide
gacucucucuuuuccuuug

SEQ ID NO: 2427493 - RNA, 19 nt, Artificial Sequence
  Description of Artificial Sequence: Synthetic oligonucleotide
caacucguccauuugacaa

SEQ ID NO: 2427494 - RNA, 19 nt, Artificial Sequence
  Description of Artificial Sequence: Synthetic oligonucleotide
uagaaucaaugucccauuu

SEQ ID NO: 2427495 - RNA, 19 nt, Artificial Sequence
  Description of Artificial Sequence: Synthetic oligonucleotide
ucucugagccagcaggcuc

SEQ ID NO: 2427496 - RNA, 19 nt, Artificial Sequence
  Description of Artificial Sequence: Synthetic oligonucleotide
cacuucuacuagcuugccg

SEQ ID NO: 2427497 - RNA, 19 nt, Artificial Sequence
  Description of Artificial Sequence: Synthetic oligonucleotide
aaagugcaucauuuagcua

SEQ ID NO: 2427498 - RNA, 19 nt, Artificial Sequence
  Description of Artificial Sequence: Synthetic oligonucleotide
aucauuuagcuacccugga

SEQ ID NO: 2427499 - RNA, 19 nt, Artificial Sequence
  Description of Artificial Sequence: Synthetic oligonucleotide
gagagcgauacugcaguag

SEQ ID NO: 2427500 - RNA, 19 nt, Artificial Sequence
  Description of Artificial Sequence: Synthetic oligonucleotide
cagcaugauagcccgcucc

SEQ ID NO: 2427501 - RNA, 19 nt, Artificial Sequence
  Description of Artificial Sequence: Synthetic oligonucleotide
agacgagccuuuucuaggu

SEQ ID NO: 2427502 - RNA, 19 nt, Artificial Sequence
  Description of Artificial Sequence: Synthetic oligonucleotide
ugacaaagugcaucauuua

SEQ ID NO: 2427503 - RNA, 19 nt, Artificial Sequence
  Description of Artificial Sequence: Synthetic oligonucleotide
ugcuuugaaacgcgaccac

SEQ ID NO: 2427504 - RNA, 19 nt, Artificial Sequence
  Description of Artificial Sequence: Synthetic oligonucleotide
gagagagcgauacugcagu

SEQ ID NO: 2427505 - RNA, 19 nt, Artificial Sequence
  Description of Artificial Sequence: Synthetic oligonucleotide
ucucucccaggucguagag

SEQ ID NO: 2427506 - RNA, 19 nt, Artificial Sequence
  Description of Artificial Sequence: Synthetic oligonucleotide
guaaaaccuuauaauucac

SEQ ID NO: 2427507 - RNA, 19 nt, Artificial Sequence
  Description of Artificial Sequence: Synthetic oligonucleotide
uccucagcacggcauccag

SEQ ID NO: 2427508 - RNA, 19 nt, Artificial Sequence
  Description of Artificial Sequence: Synthetic oligonucleotide
ggagccaacuucuuggauc

SEQ ID NO: 2427509 - RNA, 19 nt, Artificial Sequence
  Description of Artificial Sequence: Synthetic oligonucleotide
ggggcuuagaaucaauguc

SEQ ID NO: 2427510 - RNA, 19 nt, Artificial Sequence
  Description of Artificial Sequence: Synthetic oligonucleotide
ucaaaggccuuuguuuuau

SEQ ID NO: 2427511 - RNA, 19 nt, Artificial Sequence
  Description of Artificial Sequence: Synthetic oligonucleotide
auccuuuuaggcucuguuu

SEQ ID NO: 2427512 - RNA, 19 nt, Artificial Sequence
  Description of Artificial Sequence: Synthetic oligonucleotide
cuuuuccuuugccguagcc

SEQ ID NO: 2427513 - RNA, 19 nt, Artificial Sequence
  Description of Artificial Sequence: Synthetic oligonucleotide
cucagcacggcauccagga

SEQ ID NO: 2427514 - RNA, 19 nt, Artificial Sequence
  Description of Artificial Sequence: Synthetic oligonucleotide
ucuuuuccuuugccguagc

SEQ ID NO: 2427515 - RNA, 19 nt, Artificial Sequence
  Description of Artificial Sequence: Synthetic oligonucleotide
agugucucugagccagcag

SEQ ID NO: 2427516 - RNA, 19 nt, Artificial Sequence
  Description of Artificial Sequence: Synthetic oligonucleotide
auaauucacguaacuauuu

SEQ ID NO: 2427517 - RNA, 19 nt, Artificial Sequence
  Description of Artificial Sequence: Synthetic oligonucleotide
cuagguuaaauucuugaau

SEQ ID NO: 2427518 - RNA, 19 nt, Artificial Sequence
  Description of Artificial Sequence: Synthetic oligonucleotide
gaaacgcgaccacuucuac

SEQ ID NO: 2427519 - RNA, 19 nt, Artificial Sequence
  Description of Artificial Sequence: Synthetic oligonucleotide
uacccuggaagaauuuauu

SEQ ID NO: 2427520 - RNA, 19 nt, Artificial Sequence
  Description of Artificial Sequence: Synthetic oligonucleotide
uuugugugcucaucuugau

SEQ ID NO: 2427521 - RNA, 19 nt, Artificial Sequence
  Description of Artificial Sequence: Synthetic oligonucleotide
gugcugacaaagugcauca

SEQ ID NO: 2427522 - RNA, 19 nt, Artificial Sequence
  Description of Artificial Sequence: Synthetic oligonucleotide
cuuuuaggcucuguuucac

SEQ ID NO: 2427523 - RNA, 19 nt, Artificial Sequence
  Description of Artificial Sequence: Synthetic oligonucleotide
gacauucaggcaggggaag

SEQ ID NO: 2427524 - RNA, 19 nt, Artificial Sequence
  Description of Artificial Sequence: Synthetic oligonucleotide
ucucuuuuccuuugccgua

SEQ ID NO: 2427525 - RNA, 19 nt, Artificial Sequence
  Description of Artificial Sequence: Synthetic oligonucleotide
ucuucaggggagagagcga

SEQ ID NO: 2427526 - RNA, 19 nt, Artificial Sequence
  Description of Artificial Sequence: Synthetic oligonucleotide
cuuagaaucaaugucccau

SEQ ID NO: 2427527 - RNA, 19 nt, Artificial Sequence
  Description of Artificial Sequence: Synthetic oligonucleotide
gagccaacuucuuggaucu

SEQ ID NO: 2427528 - RNA, 19 nt, Artificial Sequence
  Description of Artificial Sequence: Synthetic oligonucleotide
cugcuauugucuccucgcc

SEQ ID NO: 2427529 - RNA, 19 nt, Artificial Sequence
  Description of Artificial Sequence: Synthetic oligonucleotide
gcuuugaguuccuugaaaa

SEQ ID NO: 2427530 - RNA, 19 nt, Artificial Sequence
  Description of Artificial Sequence: Synthetic oligonucleotide
auuugacaaaaugcuggga

SEQ ID NO: 2427531 - RNA, 19 nt, Artificial Sequence
  Description of Artificial Sequence: Synthetic oligonucleotide
uugaucugacuuugguuuu

SEQ ID NO: 2427532 - RNA, 19 nt, Artificial Sequence
  Description of Artificial Sequence: Synthetic oligonucleotide
cucuuuuccuuugccguag

SEQ ID NO: 2427533 - RNA, 19 nt, Artificial Sequence
  Description of Artificial Sequence: Synthetic oligonucleotide
cugcaguaguagcagggac

SEQ ID NO: 2427534 - RNA, 19 nt, Artificial Sequence
  Description of Artificial Sequence: Synthetic oligonucleotide
ugcucaucuugaucugacu

SEQ ID NO: 2427535 - RNA, 19 nt, Artificial Sequence
  Description of Artificial Sequence: Synthetic oligonucleotide
uggaagcauucuucuuuug

SEQ ID NO: 2427536 - RNA, 19 nt, Artificial Sequence
  Description of Artificial Sequence: Synthetic oligonucleotide
augucugugucccgagcca

SEQ ID NO: 2427537 - RNA, 19 nt, Artificial Sequence
  Description of Artificial Sequence: Synthetic oligonucleotide
ugauagcccgcucccguuc

SEQ ID NO: 2427538 - RNA, 19 nt, Artificial Sequence
  Description of Artificial Sequence: Synthetic oligonucleotide
ugggagccaacuucuugga

SEQ ID NO: 2427539 - RNA, 19 nt, Artificial Sequence
  Description of Artificial Sequence: Synthetic oligonucleotide
ucccguuccaggacucucu

SEQ ID NO: 2427540 - RNA, 19 nt, Artificial Sequence
  Description of Artificial Sequence: Synthetic oligonucleotide
ucccaaagcgauguacuuc

SEQ ID NO: 2427541 - RNA, 19 nt, Artificial Sequence
  Description of Artificial Sequence: Synthetic oligonucleotide
gcuauugucuccucgccuc

SEQ ID NO: 2427542 - RNA, 19 nt, Artificial Sequence
  Description of Artificial Sequence: Synthetic oligonucleotide
ggugcugacaaagugcauc

SEQ ID NO: 2427543 - RNA, 19 nt, Artificial Sequence
  Description of Artificial Sequence: Synthetic oligonucleotide
guuccuguaaaaccuuaua

SEQ ID NO: 2427544 - RNA, 19 nt, Artificial Sequence
  Description of Artificial Sequence: Synthetic oligonucleotide
guccaacucguccauuuga

SEQ ID NO: 2427545 - RNA, 19 nt, Artificial Sequence
  Description of Artificial Sequence: Synthetic oligonucleotide
uguggggcuuagaaucaau

SEQ ID NO: 2427546 - RNA, 19 nt, Artificial Sequence
  Description of Artificial Sequence: Synthetic oligonucleotide
acgagccuuuucuagguua

SEQ ID NO: 2427547 - RNA, 19 nt, Artificial Sequence
  Description of Artificial Sequence: Synthetic oligonucleotide
guggggcuuagaaucaaug

SEQ ID NO: 2427548 - RNA, 19 nt, Artificial Sequence
  Description of Artificial Sequence: Synthetic oligonucleotide
cuguuucaccuucugucuc

SEQ ID NO: 2427549 - RNA, 19 nt, Artificial Sequence
  Description of Artificial Sequence: Synthetic oligonucleotide
acugcaguaguagcaggga

SEQ ID NO: 2427550 - RNA, 19 nt, Artificial Sequence
  Description of Artificial Sequence: Synthetic oligonucleotide
gaucccaaagcgauguacu

SEQ ID NO: 2427551 - RNA, 19 nt, Artificial Sequence
  Description of Artificial Sequence: Synthetic oligonucleotide
cuugcaggacauucaggca

SEQ ID NO: 2427552 - RNA, 19 nt, Artificial Sequence
  Description of Artificial Sequence: Synthetic oligonucleotide
ggcuuagaaucaauguccc

SEQ ID NO: 2427553 - RNA, 19 nt, Artificial Sequence
  Description of Artificial Sequence: Synthetic oligonucleotide
gacaaaaugcugggagcca

SEQ ID NO: 2427554 - RNA, 19 nt, Artificial Sequence
  Description of Artificial Sequence: Synthetic oligonucleotide
uuccuuugccguagccugu

SEQ ID NO: 2427555 - RNA, 19 nt, Artificial Sequence
  Description of Artificial Sequence: Synthetic oligonucleotide
uucuacuagcuugccgcug

SEQ ID NO: 2427556 - RNA, 19 nt, Artificial Sequence
  Description of Artificial Sequence: Synthetic oligonucleotide
ugaucugacuuugguuuuc

SEQ ID NO: 2427557 - RNA, 19 nt, Artificial Sequence
  Description of Artificial Sequence: Synthetic oligonucleotide
cagggacuucugaagggac

SEQ ID NO: 2427558 - RNA, 19 nt, Artificial Sequence
  Description of Artificial Sequence: Synthetic oligonucleotide
cugcuuugaaacgcgacca

SEQ ID NO: 2427559 - RNA, 19 nt, Artificial Sequence
  Description of Artificial Sequence: Synthetic oligonucleotide
uagcuugccgcuguucuuc

SEQ ID NO: 2427560 - RNA, 19 nt, Artificial Sequence
  Description of Artificial Sequence: Synthetic oligonucleotide
ccagacgagccuuuucuag

SEQ ID NO: 2427561 - RNA, 19 nt, Artificial Sequence
  Description of Artificial Sequence: Synthetic oligonucleotide
ggagagagcgauacugcag

SEQ ID NO: 2427562 - RNA, 19 nt, Artificial Sequence
  Description of Artificial Sequence: Synthetic oligonucleotide
agccuuuucuagguuaaau

SEQ ID NO: 2427563 - RNA, 19 nt, Artificial Sequence
  Description of Artificial Sequence: Synthetic oligonucleotide
aucccaaagcgauguacuu

SEQ ID NO: 2427564 - RNA, 19 nt, Artificial Sequence
  Description of Artificial Sequence: Synthetic oligonucleotide
cuggaagaauuuauuuucu

SEQ ID NO: 2427565 - RNA, 19 nt, Artificial Sequence
  Description of Artificial Sequence: Synthetic oligonucleotide
ugucugugucccgagccac

SEQ ID NO: 2427566 - RNA, 19 nt, Artificial Sequence
  Description of Artificial Sequence: Synthetic oligonucleotide
cugugaucccaaagcgaug

SEQ ID NO: 2427567 - RNA, 19 nt, Artificial Sequence
  Description of Artificial Sequence: Synthetic oligonucleotide
ugauaucuguggggcuuag

SEQ ID NO: 2427568 - RNA, 19 nt, Artificial Sequence
  Description of Artificial Sequence: Synthetic oligonucleotide
uuccuguccuuuccucuuc

SEQ ID NO: 2427569 - RNA, 19 nt, Artificial Sequence
  Description of Artificial Sequence: Synthetic oligonucleotide
uccagacgagccuuuucua

SEQ ID NO: 2427570 - RNA, 19 nt, Artificial Sequence
  Description of Artificial Sequence: Synthetic oligonucleotide
aaggggcucugcugucuca

SEQ ID NO: 2427571 - RNA, 19 nt, Artificial Sequence
  Description of Artificial Sequence: Synthetic oligonucleotide
gcgauacugcaguaguagc

SEQ ID NO: 2427572 - RNA, 19 nt, Artificial Sequence
  Description of Artificial Sequence: Synthetic oligonucleotide
uccuuugccguagccugug

SEQ ID NO: 2427573 - RNA, 19 nt, Artificial Sequence
  Description of Artificial Sequence: Synthetic oligonucleotide
cuugaauacccacaucuuu

SEQ ID NO: 2427574 - RNA, 19 nt, Artificial Sequence
  Description of Artificial Sequence: Synthetic oligonucleotide
gaucuccugucuuccuguc

SEQ ID NO: 2427575 - RNA, 19 nt, Artificial Sequence
  Description of Artificial Sequence: Synthetic oligonucleotide
cuuccagacgagccuuuuc

SEQ ID NO: 2427576 - RNA, 19 nt, Artificial Sequence
  Description of Artificial Sequence: Synthetic oligonucleotide
gaaggggcucugcugucuc

SEQ ID NO: 2427577 - RNA, 19 nt, Artificial Sequence
  Description of Artificial Sequence: Synthetic oligonucleotide
agagugcagcucugcuuug

SEQ ID NO: 2427578 - RNA, 19 nt, Artificial Sequence
  Description of Artificial Sequence: Synthetic oligonucleotide
acucguccauuugacaaaa

SEQ ID NO: 2427579 - RNA, 19 nt, Artificial Sequence
  Description of Artificial Sequence: Synthetic oligonucleotide
cucucccaggucguagagg

SEQ ID NO: 2427580 - RNA, 19 nt, Artificial Sequence
  Description of Artificial Sequence: Synthetic oligonucleotide
cuuugaaacgcgaccacuu

SEQ ID NO: 2427581 - RNA, 19 nt, Artificial Sequence
  Description of Artificial Sequence: Synthetic oligonucleotide
uugauaucuguggggcuua

SEQ ID NO: 2427582 - RNA, 19 nt, Artificial Sequence
  Description of Artificial Sequence: Synthetic oligonucleotide
guaguagcagggacuucug

SEQ ID NO: 2427583 - RNA, 19 nt, Artificial Sequence
  Description of Artificial Sequence: Synthetic oligonucleotide
acgcgaccacuucuacuag

SEQ ID NO: 2427584 - RNA, 19 nt, Artificial Sequence
  Description of Artificial Sequence: Synthetic oligonucleotide
caggacauucaggcagggg

SEQ ID NO: 2427585 - RNA, 19 nt, Artificial Sequence
  Description of Artificial Sequence: Synthetic oligonucleotide
gccaacuucuuggaucucc

SEQ ID NO: 2427586 - RNA, 19 nt, Artificial Sequence
  Description of Artificial Sequence: Synthetic oligonucleotide
ugccguagccugugauccc

SEQ ID NO: 2427587 - RNA, 19 nt, Artificial Sequence
  Description of Artificial Sequence: Synthetic oligonucleotide
gcugggagccaacuucuug

SEQ ID NO: 2427588 - RNA, 19 nt, Artificial Sequence
  Description of Artificial Sequence: Synthetic oligonucleotide
ugucccgagccacucucuu

SEQ ID NO: 2427589 - RNA, 19 nt, Artificial Sequence
  Description of Artificial Sequence: Synthetic oligonucleotide
ugucuccucgccucucuuu

SEQ ID NO: 2427590 - RNA, 19 nt, Artificial Sequence
  Description of Artificial Sequence: Synthetic oligonucleotide
augcugggagccaacuucu

SEQ ID NO: 2427591 - RNA, 19 nt, Artificial Sequence
  Description of Artificial Sequence: Synthetic oligonucleotide
ccauuucugaauuuuccaa

SEQ ID NO: 2427592 - RNA, 19 nt, Artificial Sequence
  Description of Artificial Sequence: Synthetic oligonucleotide
gucucucccaggucguaga

SEQ ID NO: 2427593 - RNA, 19 nt, Artificial Sequence
  Description of Artificial Sequence: Synthetic oligonucleotide
gucccauuucugaauuuuc

SEQ ID NO: 2427594 - RNA, 19 nt, Artificial Sequence
  Description of Artificial Sequence: Synthetic oligonucleotide
augauagcccgcucccguu

SEQ ID NO: 2427595 - RNA, 19 nt, Artificial Sequence
  Description of Artificial Sequence: Synthetic oligonucleotide
agagagcgauacugcagua

SEQ ID NO: 2427596 - RNA, 19 nt, Artificial Sequence
  Description of Artificial Sequence: Synthetic oligonucleotide
cucaucuugaucugacuuu

SEQ ID NO: 2427597 - RNA, 19 nt, Artificial Sequence
  Description of Artificial Sequence: Synthetic oligonucleotide
cuacccuggaagaauuuau

SEQ ID NO: 2427598 - RNA, 19 nt, Artificial Sequence
  Description of Artificial Sequence: Synthetic oligonucleotide
uauugucuccucgccucuc

SEQ ID NO: 2427599 - RNA, 19 nt, Artificial Sequence
  Description of Artificial Sequence: Synthetic oligonucleotide
gauaucuguggggcuuaga

SEQ ID NO: 2427600 - RNA, 19 nt, Artificial Sequence
  Description of Artificial Sequence: Synthetic oligonucleotide
ggggagagagcgauacugc

SEQ ID NO: 2427601 - RNA, 19 nt, Artificial Sequence
  Description of Artificial Sequence: Synthetic oligonucleotide
agcuugccgcuguucuuca

SEQ ID NO: 2427602 - RNA, 19 nt, Artificial Sequence
  Description of Artificial Sequence: Synthetic oligonucleotide
acggcauccaggagugucu

SEQ ID NO: 2427603 - RNA, 19 nt, Artificial Sequence
  Description of Artificial Sequence: Synthetic oligonucleotide
uacuuccagacgagccuuu

SEQ ID NO: 2427604 - RNA, 19 nt, Artificial Sequence
  Description of Artificial Sequence: Synthetic oligonucleotide
uacuagcuugccgcuguuc

SEQ ID NO: 2427605 - RNA, 19 nt, Artificial Sequence
  Description of Artificial Sequence: Synthetic oligonucleotide
augucccauuucugaauuu

SEQ ID NO: 2427606 - RNA, 19 nt, Artificial Sequence
  Description of Artificial Sequence: Synthetic oligonucleotide
caugauagcccgcucccgu

SEQ ID NO: 2427607 - RNA, 19 nt, Artificial Sequence
  Description of Artificial Sequence: Synthetic oligonucleotide
uggugcugacaaagugcau

SEQ ID NO: 2427608 - RNA, 19 nt, Artificial Sequence
  Description of Artificial Sequence: Synthetic oligonucleotide
gcuuagaaucaauguccca

SEQ ID NO: 2427609 - RNA, 19 nt, Artificial Sequence
  Description of Artificial Sequence: Synthetic oligonucleotide
uugucuccucgccucucuu

SEQ ID NO: 2427610 - RNA, 19 nt, Artificial Sequence
  Description of Artificial Sequence: Synthetic oligonucleotide
gagugcagcucugcuuuga

SEQ ID NO: 2427611 - RNA, 19 nt, Artificial Sequence
  Description of Artificial Sequence: Synthetic oligonucleotide
cgauacugcaguaguagca

SEQ ID NO: 2427612 - RNA, 19 nt, Artificial Sequence
  Description of Artificial Sequence: Synthetic oligonucleotide
gugcaucauuuagcuaccc

SEQ ID NO: 2427613 - RNA, 19 nt, Artificial Sequence
  Description of Artificial Sequence: Synthetic oligonucleotide
ccuuuuaggcucuguuuca

SEQ ID NO: 2427614 - RNA, 19 nt, Artificial Sequence
  Description of Artificial Sequence: Synthetic oligonucleotide
cuugauaucuguggggcuu

SEQ ID NO: 2427615 - RNA, 19 nt, Artificial Sequence
  Description of Artificial Sequence: Synthetic oligonucleotide
cuucuuggaucuccugucu

SEQ ID NO: 2427616 - RNA, 19 nt, Artificial Sequence
  Description of Artificial Sequence: Synthetic oligonucleotide
caucugcuauugucuccuc

SEQ ID NO: 2427617 - RNA, 19 nt, Artificial Sequence
  Description of Artificial Sequence: Synthetic oligonucleotide
auagcccgcucccguucca

SEQ ID NO: 2427618 - RNA, 19 nt, Artificial Sequence
  Description of Artificial Sequence: Synthetic oligonucleotide
gccuuuucuagguuaaauu

SEQ ID NO: 2427619 - RNA, 19 nt, Artificial Sequence
  Description of Artificial Sequence: Synthetic oligonucleotide
cuucuacuagcuugccgcu

SEQ ID NO: 2427620 - RNA, 19 nt, Artificial Sequence
  Description of Artificial Sequence: Synthetic oligonucleotide
ccuuauaauucacguaacu

SEQ ID NO: 2427621 - RNA, 19 nt, Artificial Sequence
  Description of Artificial Sequence: Synthetic oligonucleotide
cuggaagcauucuucuuuu

SEQ ID NO: 2427622 - RNA, 19 nt, Artificial Sequence
  Description of Artificial Sequence: Synthetic oligonucleotide
ccugugaucccaaagcgau

SEQ ID NO: 2427623 - RNA, 19 nt, Artificial Sequence
  Description of Artificial Sequence: Synthetic oligonucleotide
gagcgauacugcaguagua

SEQ ID NO: 2427624 - RNA, 19 nt, Artificial Sequence
  Description of Artificial Sequence: Synthetic oligonucleotide
ggacauucaggcaggggaa

SEQ ID NO: 2427625 - RNA, 19 nt, Artificial Sequence
  Description of Artificial Sequence: Synthetic oligonucleotide
ggaucuccugucuuccugu

SEQ ID NO: 2427626 - RNA, 19 nt, Artificial Sequence
  Description of Artificial Sequence: Synthetic oligonucleotide
cucccguuccaggacucuc

SEQ ID NO: 2427627 - RNA, 19 nt, Artificial Sequence
  Description of Artificial Sequence: Synthetic oligonucleotide
acuuccagacgagccuuuu

SEQ ID NO: 2427628 - RNA, 19 nt, Artificial Sequence
  Description of Artificial Sequence: Synthetic oligonucleotide
agccaacuucuuggaucuc

SEQ ID NO: 2427629 - RNA, 19 nt, Artificial Sequence
  Description of Artificial Sequence: Synthetic oligonucleotide
ccaacucguccauuugaca

SEQ ID NO: 2427630 - RNA, 19 nt, Artificial Sequence
  Description of Artificial Sequence: Synthetic oligonucleotide
gcugacaaagugcaucauu

SEQ ID NO: 2427631 - RNA, 19 nt, Artificial Sequence
  Description of Artificial Sequence: Synthetic oligonucleotide
cguagaggguccucagcac

SEQ ID NO: 2427632 - RNA, 19 nt, Artificial Sequence
  Description of Artificial Sequence: Synthetic oligonucleotide
cuauugucuccucgccucu

SEQ ID NO: 2427633 - RNA, 19 nt, Artificial Sequence
  Description of Artificial Sequence: Synthetic oligonucleotide
ggagcagagugcagcucug

SEQ ID NO: 2427634 - RNA, 19 nt, Artificial Sequence
  Description of Artificial Sequence: Synthetic oligonucleotide
cuuccuguccuuuccucuu

SEQ ID NO: 2427635 - RNA, 19 nt, Artificial Sequence
  Description of Artificial Sequence: Synthetic oligonucleotide
cuuugccguagccugugau

SEQ ID NO: 2427636 - RNA, 19 nt, Artificial Sequence
  Description of Artificial Sequence: Synthetic oligonucleotide
gucuccucgccucucuuuu

SEQ ID NO: 2427637 - RNA, 19 nt, Artificial Sequence
  Description of Artificial Sequence: Synthetic oligonucleotide
gccugugaucccaaagcga

SEQ ID NO: 2427638 - RNA, 19 nt, Artificial Sequence
  Description of Artificial Sequence: Synthetic oligonucleotide
cuguccuuuccucuucuuu

SEQ ID NO: 2427639 - RNA, 19 nt, Artificial Sequence
  Description of Artificial Sequence: Synthetic oligonucleotide
cgcgaccacuucuacuagc

SEQ ID NO: 2427640 - RNA, 19 nt, Artificial Sequence
  Description of Artificial Sequence: Synthetic oligonucleotide
gcuuugaaacgcgaccacu

SEQ ID NO: 2427641 - RNA, 19 nt, Artificial Sequence
  Description of Artificial Sequence: Synthetic oligonucleotide
agcucugcuuugaguuccu

SEQ ID NO: 2427642 - RNA, 19 nt, Artificial Sequence
  Description of Artificial Sequence: Synthetic oligonucleotide
gcuugccgcuguucuucag

SEQ ID NO: 2427643 - RNA, 19 nt, Artificial Sequence
  Description of Artificial Sequence: Synthetic oligonucleotide
gugaucccaaagcgaugua

SEQ ID NO: 2427644 - RNA, 19 nt, Artificial Sequence
  Description of Artificial Sequence: Synthetic oligonucleotide
caguaguagcagggacuuc

SEQ ID NO: 2427645 - RNA, 19 nt, Artificial Sequence
  Description of Artificial Sequence: Synthetic oligonucleotide
gacgagccuuuucuagguu

SEQ ID NO: 2427646 - RNA, 19 nt, Artificial Sequence
  Description of Artificial Sequence: Synthetic oligonucleotide
gcgaccacuucuacuagcu

SEQ ID NO: 2427647 - RNA, 19 nt, Artificial Sequence
  Description of Artificial Sequence: Synthetic oligonucleotide
cuagcuugccgcuguucuu

SEQ ID NO: 2427648 - RNA, 19 nt, Artificial Sequence
  Description of Artificial Sequence: Synthetic oligonucleotide
gggaaggggcucugcuguc

SEQ ID NO: 2427649 - RNA, 19 nt, Artificial Sequence
  Description of Artificial Sequence: Synthetic oligonucleotide
cuguggggcuuagaaucaa

SEQ ID NO: 2427650 - RNA, 19 nt, Artificial Sequence
  Description of Artificial Sequence: Synthetic oligonucleotide
gcagagugcagcucugcuu

SEQ ID NO: 2427651 - RNA, 19 nt, Artificial Sequence
  Description of Artificial Sequence: Synthetic oligonucleotide
ccagcaugauagcccgcuc

SEQ ID NO: 2427652 - RNA, 19 nt, Artificial Sequence
  Description of Artificial Sequence: Synthetic oligonucleotide
ggacucucucuuuuccuuu

SEQ ID NO: 2427653 - RNA, 19 nt, Artificial Sequence
  Description of Artificial Sequence: Synthetic oligonucleotide
ccacuucuacuagcuugcc

SEQ ID NO: 2427654 - RNA, 19 nt, Artificial Sequence
  Description of Artificial Sequence: Synthetic oligonucleotide
cugucucaucugcuauugu

SEQ ID NO: 2427655 - RNA, 19 nt, Artificial Sequence
  Description of Artificial Sequence: Synthetic oligonucleotide
cccguuccaggacucucuc

SEQ ID NO: 2427656 - RNA, 19 nt, Artificial Sequence
  Description of Artificial Sequence: Synthetic oligonucleotide
uggcuucuugcaggacauu

SEQ ID NO: 2427657 - RNA, 19 nt, Artificial Sequence
  Description of Artificial Sequence: Synthetic oligonucleotide
cccgcucccguuccaggac

SEQ ID NO: 2427658 - RNA, 19 nt, Artificial Sequence
  Description of Artificial Sequence: Synthetic oligonucleotide
ccaaagcgauguacuucca

SEQ ID NO: 2427659 - RNA, 19 nt, Artificial Sequence
  Description of Artificial Sequence: Synthetic oligonucleotide
ggggcucugcugucucauc

SEQ ID NO: 2427660 - RNA, 19 nt, Artificial Sequence
  Description of Artificial Sequence: Synthetic oligonucleotide
gucugugucccgagccacu

SEQ ID NO: 2427661 - RNA, 19 nt, Artificial Sequence
  Description of Artificial Sequence: Synthetic oligonucleotide
ggaaggggcucugcugucu

SEQ ID NO: 2427662 - RNA, 19 nt, Artificial Sequence
  Description of Artificial Sequence: Synthetic oligonucleotide
cucguccauuugacaaaau

SEQ ID NO: 2427663 - RNA, 19 nt, Artificial Sequence
  Description of Artificial Sequence: Synthetic oligonucleotide
cugugucccgagccacucu

SEQ ID NO: 2427664 - RNA, 19 nt, Artificial Sequence
  Description of Artificial Sequence: Synthetic oligonucleotide
caggggagagagcgauacu

SEQ ID NO: 2427665 - RNA, 19 nt, Artificial Sequence
  Description of Artificial Sequence: Synthetic oligonucleotide
gggagccaacuucuuggau

SEQ ID NO: 2427666 - RNA, 19 nt, Artificial Sequence
  Description of Artificial Sequence: Synthetic oligonucleotide
cguuccaggacucucucuu

SEQ ID NO: 2427667 - RNA, 19 nt, Artificial Sequence
  Description of Artificial Sequence: Synthetic oligonucleotide
ccccagcaugauagcccgc

SEQ ID NO: 2427668 - RNA, 19 nt, Artificial Sequence
  Description of Artificial Sequence: Synthetic oligonucleotide
cucccaggucguagagggu

SEQ ID NO: 2427669 - RNA, 19 nt, Artificial Sequence
  Description of Artificial Sequence: Synthetic oligonucleotide
gccacucucuuuucuucuu

SEQ ID NO: 2427670 - RNA, 19 nt, Artificial Sequence
  Description of Artificial Sequence: Synthetic oligonucleotide
gugucccgagccacucucu

SEQ ID NO: 2427671 - RNA, 19 nt, Artificial Sequence
  Description of Artificial Sequence: Synthetic oligonucleotide
cccagcaugauagcccgcu

SEQ ID NO: 2427672 - RNA, 19 nt, Artificial Sequence
  Description of Artificial Sequence: Synthetic oligonucleotide
cuuguccaacucguccauu

SEQ ID NO: 2427673 - RNA, 19 nt, Artificial Sequence
  Description of Artificial Sequence: Synthetic oligonucleotide
cuacuagcuugccgcuguu

SEQ ID NO: 2427674 - RNA, 19 nt, Artificial Sequence
  Description of Artificial Sequence: Synthetic oligonucleotide
ccuuugccguagccuguga

SEQ ID NO: 2427675 - RNA, 19 nt, Artificial Sequence
  Description of Artificial Sequence: Synthetic oligonucleotide
ccacuccucucuggugcug

SEQ ID NO: 2427676 - RNA, 19 nt, Artificial Sequence
  Description of Artificial Sequence: Synthetic oligonucleotide
ccgagccacucucuuuucu

SEQ ID NO: 2427677 - RNA, 19 nt, Artificial Sequence
  Description of Artificial Sequence: Synthetic oligonucleotide
cguagccugugaucccaaa

SEQ ID NO: 2427678 - RNA, 19 nt, Artificial Sequence
  Description of Artificial Sequence: Synthetic oligonucleotide
ccguagccugugaucccaa

SEQ ID NO: 2427679 - RNA, 19 nt, Artificial Sequence
  Description of Artificial Sequence: Synthetic oligonucleotide
ccguuccaggacucucucu

SEQ ID NO: 2427680 - RNA, 19 nt, Artificial Sequence
  Description of Artificial Sequence: Synthetic oligonucleotide
ccgcucccguuccaggacu

SEQ ID NO: 2427681 - RNA, 19 nt, Artificial Sequence
  Description of Artificial Sequence: Synthetic oligonucleotide
ccaggucguagaggguccu

SEQ ID NO: 2427682 - RNA, 19 nt, Artificial Sequence
  Description of Artificial Sequence: Synthetic oligonucleotide
gcucugcuuugaguuccuu

SEQ ID NO: 2427683 - RNA, 19 nt, Artificial Sequence
  Description of Artificial Sequence: Synthetic oligonucleotide
agcauuuaccacuagaugg

SEQ ID NO: 2427684 - RNA, 19 nt, Artificial Sequence
  Description of Artificial Sequence: Synthetic oligonucleotide
aaccugauuaccuucagag

SEQ ID NO: 2427685 - RNA, 19 nt, Artificial Sequence
  Description of Artificial Sequence: Synthetic oligonucleotide
acuaacauugguuacaucu

SEQ ID NO: 2427686 - RNA, 19 nt, Artificial Sequence
  Description of Artificial Sequence: Synthetic oligonucleotide
aaagcugacuccaagaguc

SEQ ID NO: 2427687 - RNA, 19 nt, Artificial Sequence
  Description of Artificial Sequence: Synthetic oligonucleotide
agaucuaacagagugggcc

SEQ ID NO: 2427688 - RNA, 19 nt, Artificial Sequence
  Description of Artificial Sequence: Synthetic oligonucleotide
uuugguccaaacaagaacu

SEQ ID NO: 2427689 - RNA, 19 nt, Artificial Sequence
  Description of Artificial Sequence: Synthetic oligonucleotide
agaaacacgagacaaaccu

SEQ ID NO: 2427690 - RNA, 19 nt, Artificial Sequence
  Description of Artificial Sequence: Synthetic oligonucleotide
cuucauuugauccagcgcc

SEQ ID NO: 2427691 - RNA, 19 nt, Artificial Sequence
  Description of Artificial Sequence: Synthetic oligonucleotide
ugucuuagauccaugaagc

SEQ ID NO: 2427692 - RNA, 19 nt, Artificial Sequence
  Description of Artificial Sequence: Synthetic oligonucleotide
agacaaaccuuuuagaacu

SEQ ID NO: 2427693 - RNA, 19 nt, Artificial Sequence
  Description of Artificial Sequence: Synthetic oligonucleotide
uugacugcagaucuaacag

SEQ ID NO: 2427694 - RNA, 19 nt, Artificial Sequence
  Description of Artificial Sequence: Synthetic oligonucleotide
aacuguggcagcuagaaau

SEQ ID NO: 2427695 - RNA, 19 nt, Artificial Sequence
  Description of Artificial Sequence: Synthetic oligonucleotide
caagaugucagguuggggc

SEQ ID NO: 2427696 - RNA, 19 nt, Artificial Sequence
  Description of Artificial Sequence: Synthetic oligonucleotide
uugguuacaucuugaaagg

SEQ ID NO: 2427697 - RNA, 19 nt, Artificial Sequence
  Description of Artificial Sequence: Synthetic oligonucleotide
uagaaaucuggggagaugg

SEQ ID NO: 2427698 - RNA, 19 nt, Artificial Sequence
  Description of Artificial Sequence: Synthetic oligonucleotide
ucugauaaccugauuaccu

SEQ ID NO: 2427699 - RNA, 19 nt, Artificial Sequence
  Description of Artificial Sequence: Synthetic oligonucleotide
uguuguuuccaaacugugg

SEQ ID NO: 2427700 - RNA, 19 nt, Artificial Sequence
  Description of Artificial Sequence: Synthetic oligonucleotide
caggaaaacacagagagag

SEQ ID NO: 2427701 - RNA, 19 nt, Artificial Sequence
  Description of Artificial Sequence: Synthetic oligonucleotide
agauccaugaagccacucc

SEQ ID NO: 2427702 - RNA, 19 nt, Artificial Sequence
  Description of Artificial Sequence: Synthetic oligonucleotide
cuuagauccaugaagccac

SEQ ID NO: 2427703 - RNA, 19 nt, Artificial Sequence
  Description of Artificial Sequence: Synthetic oligonucleotide
uaaaagagcagguuugacu

SEQ ID NO: 2427704 - RNA, 19 nt, Artificial Sequence
  Description of Artificial Sequence: Synthetic oligonucleotide
ugaaagggcauuuuagugu

SEQ ID NO: 2427705 - RNA, 19 nt, Artificial Sequence
  Description of Artificial Sequence: Synthetic oligonucleotide
ugauaccaagcaaucaucc

SEQ ID NO: 2427706 - RNA, 19 nt, Artificial Sequence
  Description of Artificial Sequence: Synthetic oligonucleotide
aaccuuuuagaacuagugu

SEQ ID NO: 2427707 - RNA, 19 nt, Artificial Sequence
  Description of Artificial Sequence: Synthetic oligonucleotide
agacaucguagucaaagac

SEQ ID NO: 2427708 - RNA, 19 nt, Artificial Sequence
  Description of Artificial Sequence: Synthetic oligonucleotide
uuugacugcagaucuaaca

SEQ ID NO: 2427709 - RNA, 19 nt, Artificial Sequence
  Description of Artificial Sequence: Synthetic oligonucleotide
uagaacuagugucugauaa

SEQ ID NO: 2427710 - RNA, 19 nt, Artificial Sequence
  Description of Artificial Sequence: Synthetic oligonucleotide
gacaucguagucaaagacg

SEQ ID NO: 2427711 - RNA, 19 nt, Artificial Sequence
  Description of Artificial Sequence: Synthetic oligonucleotide
uugauuacuaacauugguu

SEQ ID NO: 2427712 - RNA, 19 nt, Artificial Sequence
  Description of Artificial Sequence: Synthetic oligonucleotide
uuuaccacuagauggucug

SEQ ID NO: 2427713 - RNA, 19 nt, Artificial Sequence
  Description of Artificial Sequence: Synthetic oligonucleotide
ugcagaucuaacagagugg

SEQ ID NO: 2427714 - RNA, 19 nt, Artificial Sequence
  Description of Artificial Sequence: Synthetic oligonucleotide
  modified_base (4)..(4): a, c, u, g, unknown or other
ucunuacccagcccaaccc

SEQ ID NO: 2427715 - RNA, 19 nt, Artificial Sequence
  Description of Artificial Sequence: Synthetic oligonucleotide
ugauuacuaacauugguua

SEQ ID NO: 2427716 - RNA, 19 nt, Artificial Sequence
  Description of Artificial Sequence: Synthetic oligonucleotide
uggccucucacuuaaaccc

SEQ ID NO: 2427717 - RNA, 19 nt, Artificial Sequence
  Description of Artificial Sequence: Synthetic oligonucleotide
aaaccuuuuagaacuagug

SEQ ID NO: 2427718 - RNA, 19 nt, Artificial Sequence
  Description of Artificial Sequence: Synthetic oligonucleotide
agaacuagugucugauaac

SEQ ID NO: 2427719 - RNA, 19 nt, Artificial Sequence
  Description of Artificial Sequence: Synthetic oligonucleotide
ugauccagcgcccaucaag

SEQ ID NO: 2427720 - RNA, 19 nt, Artificial Sequence
  Description of Artificial Sequence: Synthetic oligonucleotide
aaaagcugacuccaagagu

SEQ ID NO: 2427721 - RNA, 19 nt, Artificial Sequence
  Description of Artificial Sequence: Synthetic oligonucleotide
caggacucgaacuuguagg

SEQ ID NO: 2427722 - RNA, 19 nt, Artificial Sequence
  Description of Artificial Sequence: Synthetic oligonucleotide
ucaaagacgguguuguuuc

SEQ ID NO: 2427723 - RNA, 19 nt, Artificial Sequence
  Description of Artificial Sequence: Synthetic oligonucleotide
ugaaaagcugacuccaaga

SEQ ID NO: 2427724 - RNA, 19 nt, Artificial Sequence
  Description of Artificial Sequence: Synthetic oligonucleotide
acaucguagucaaagacgg

SEQ ID NO: 2427725 - RNA, 19 nt, Artificial Sequence
  Description of Artificial Sequence: Synthetic oligonucleotide
uagguuugaagaugcacag

SEQ ID NO: 2427726 - RNA, 19 nt, Artificial Sequence
  Description of Artificial Sequence: Synthetic oligonucleotide
uaacauugguuacaucuug

SEQ ID NO: 2427727 - RNA, 19 nt, Artificial Sequence
  Description of Artificial Sequence: Synthetic oligonucleotide
gauccaugaagccacuccc

SEQ ID NO: 2427728 - RNA, 19 nt, Artificial Sequence
  Description of Artificial Sequence: Synthetic oligonucleotide
ggcauuuuaguguuguggg

SEQ ID NO: 2427729 - RNA, 19 nt, Artificial Sequence
  Description of Artificial Sequence: Synthetic oligonucleotide
ugccgcuucaagaaacacg

SEQ ID NO: 2427730 - RNA, 19 nt, Artificial Sequence
  Description of Artificial Sequence: Synthetic oligonucleotide
uggggcaaagacaucguag

SEQ ID NO: 2427731 - RNA, 19 nt, Artificial Sequence
  Description of Artificial Sequence: Synthetic oligonucleotide
ucuuagauccaugaagcca

SEQ ID NO: 2427732 - RNA, 19 nt, Artificial Sequence
  Description of Artificial Sequence: Synthetic oligonucleotide
ugucugauaaccugauuac

SEQ ID NO: 2427733 - RNA, 19 nt, Artificial Sequence
  Description of Artificial Sequence: Synthetic oligonucleotide
aaguggccaaaggugauac

SEQ ID NO: 2427734 - RNA, 19 nt, Artificial Sequence
  Description of Artificial Sequence: Synthetic oligonucleotide
aacccuacuuuccuccauc

SEQ ID NO: 2427735 - RNA, 19 nt, Artificial Sequence
  Description of Artificial Sequence: Synthetic oligonucleotide
cugcagaucuaacagagug

SEQ ID NO: 2427736 - RNA, 19 nt, Artificial Sequence
  Description of Artificial Sequence: Synthetic oligonucleotide
ucugacgugacuucccaug

SEQ ID NO: 2427737 - RNA, 19 nt, Artificial Sequence
  Description of Artificial Sequence: Synthetic oligonucleotide
  modified_base (16)..(16): a, c, u, g, unknown or other
cuuaaacccuccucunuac

SEQ ID NO: 2427738 - RNA, 19 nt, Artificial Sequence
  Description of Artificial Sequence: Synthetic oligonucleotide
ugagcuugagggcugucag

SEQ ID NO: 2427739 - RNA, 19 nt, Artificial Sequence
  Description of Artificial Sequence: Synthetic oligonucleotide
gauuacuaacauugguuac

SEQ ID NO: 2427740 - RNA, 19 nt, Artificial Sequence
  Description of Artificial Sequence: Synthetic oligonucleotide
cacgagacaaaccuuuuag

SEQ ID NO: 2427741 - RNA, 19 nt, Artificial Sequence
  Description of Artificial Sequence: Synthetic oligonucleotide
guugaaguggccaaaggug

SEQ ID NO: 2427742 - RNA, 19 nt, Artificial Sequence
  Description of Artificial Sequence: Synthetic oligonucleotide
gaucuaacagagugggccc

SEQ ID NO: 2427743 - RNA, 19 nt, Artificial Sequence
  Description of Artificial Sequence: Synthetic oligonucleotide
uuuuccuacuccaggacuc

SEQ ID NO: 2427744 - RNA, 19 nt, Artificial Sequence
  Description of Artificial Sequence: Synthetic oligonucleotide
auuacuaacauugguuaca

SEQ ID NO: 2427745 - RNA, 19 nt, Artificial Sequence
  Description of Artificial Sequence: Synthetic oligonucleotide
uuccuguuuuccuuggcag

SEQ ID NO: 2427746 - RNA, 19 nt, Artificial Sequence
  Description of Artificial Sequence: Synthetic oligonucleotide
cauugucccaggaaaacac

SEQ ID NO: 2427747 - RNA, 19 nt, Artificial Sequence
  Description of Artificial Sequence: Synthetic oligonucleotide
uuuagaacuagugucugau

SEQ ID NO: 2427748 - RNA, 19 nt, Artificial Sequence
  Description of Artificial Sequence: Synthetic oligonucleotide
uccaaacuguggcagcuag

SEQ ID NO: 2427749 - RNA, 19 nt, Artificial Sequence
  Description of Artificial Sequence: Synthetic oligonucleotide
aaggugauaccaagcaauc

SEQ ID NO: 2427750 - RNA, 19 nt, Artificial Sequence
  Description of Artificial Sequence: Synthetic oligonucleotide
uggguaaaagagcagguuu

SEQ ID NO: 2427751 - RNA, 19 nt, Artificial Sequence
  Description of Artificial Sequence: Synthetic oligonucleotide
uuaccuucagaguccuggg

SEQ ID NO: 2427752 - RNA, 19 nt, Artificial Sequence
  Description of Artificial Sequence: Synthetic oligonucleotide
  modified_base (15)..(15): a, c, u, g, unknown or other
uuaaacccuccucunuacc

SEQ ID NO: 2427753 - RNA, 19 nt, Artificial Sequence
  Description of Artificial Sequence: Synthetic oligonucleotide
gaaaucuggggagauggag

SEQ ID NO: 2427754 - RNA, 19 nt, Artificial Sequence
  Description of Artificial Sequence: Synthetic oligonucleotide
caagccuugauuacuaaca

SEQ ID NO: 2427755 - RNA, 19 nt, Artificial Sequence
  Description of Artificial Sequence: Synthetic oligonucleotide
uucauuugauccagcgccc

SEQ ID NO: 2427756 - RNA, 19 nt, Artificial Sequence
  Description of Artificial Sequence: Synthetic oligonucleotide
uguccaaggucugacagca

SEQ ID NO: 2427757 - RNA, 19 nt, Artificial Sequence
  Description of Artificial Sequence: Synthetic oligonucleotide
uuucauugucccaggaaaa

SEQ ID NO: 2427758 - RNA, 19 nt, Artificial Sequence
  Description of Artificial Sequence: Synthetic oligonucleotide
aacugcuucaugccaugug

SEQ ID NO: 2427759 - RNA, 19 nt, Artificial Sequence
  Description of Artificial Sequence: Synthetic oligonucleotide
uggacaguuugucuuagau

SEQ ID NO: 2427760 - RNA, 19 nt, Artificial Sequence
  Description of Artificial Sequence: Synthetic oligonucleotide
uccaaguacuggguaaagg

SEQ ID NO: 2427761 - RNA, 19 nt, Artificial Sequence
  Description of Artificial Sequence: Synthetic oligonucleotide
gacgguguuguuuccaaac

SEQ ID NO: 2427762 - RNA, 19 nt, Artificial Sequence
  Description of Artificial Sequence: Synthetic oligonucleotide
uguagguuugaagaugcac

SEQ ID NO: 2427763 - RNA, 19 nt, Artificial Sequence
  Description of Artificial Sequence: Synthetic oligonucleotide
ucauuccuuucauuguccc

SEQ ID NO: 2427764 - RNA, 19 nt, Artificial Sequence
  Description of Artificial Sequence: Synthetic oligonucleotide
acagagugggcccaucuug

SEQ ID NO: 2427765 - RNA, 19 nt, Artificial Sequence
  Description of Artificial Sequence: Synthetic oligonucleotide
gccuugauuacuaacauug

SEQ ID NO: 2427766 - RNA, 19 nt, Artificial Sequence
  Description of Artificial Sequence: Synthetic oligonucleotide
gaguugaaguggccaaagg

SEQ ID NO: 2427767 - RNA, 19 nt, Artificial Sequence
  Description of Artificial Sequence: Synthetic oligonucleotide
caggaaacugccccaagcc

SEQ ID NO: 2427768 - RNA, 19 nt, Artificial Sequence
  Description of Artificial Sequence: Synthetic oligonucleotide
cuuucauugucccaggaaa

SEQ ID NO: 2427769 - RNA, 19 nt, Artificial Sequence
  Description of Artificial Sequence: Synthetic oligonucleotide
ugauaaccugauuaccuuc

SEQ ID NO: 2427770 - RNA, 19 nt, Artificial Sequence
  Description of Artificial Sequence: Synthetic oligonucleotide
  modified_base (5)..(5): a, c, u, g, unknown or other
cucunuacccagcccaacc

SEQ ID NO: 2427771 - RNA, 19 nt, Artificial Sequence
  Description of Artificial Sequence: Synthetic oligonucleotide
uguggcagcuagaaaucug

SEQ ID NO: 2427772 - RNA, 19 nt, Artificial Sequence
  Description of Artificial Sequence: Synthetic oligonucleotide
gugucugauaaccugauua

SEQ ID NO: 2427773 - RNA, 19 nt, Artificial Sequence
  Description of Artificial Sequence: Synthetic oligonucleotide
gugaaaagcugacuccaag

SEQ ID NO: 2427774 - RNA, 19 nt, Artificial Sequence
  Description of Artificial Sequence: Synthetic oligonucleotide
ugaagccacucccuuuucc

SEQ ID NO: 2427775 - RNA, 19 nt, Artificial Sequence
  Description of Artificial Sequence: Synthetic oligonucleotide
guuugucuuagauccauga

SEQ ID NO: 2427776 - RNA, 19 nt, Artificial Sequence
  Description of Artificial Sequence: Synthetic oligonucleotide
accacuagauggucugacg

SEQ ID NO: 2427777 - RNA, 19 nt, Artificial Sequence
  Description of Artificial Sequence: Synthetic oligonucleotide
gguuggggcaaagacaucg

SEQ ID NO: 2427778 - RNA, 19 nt, Artificial Sequence
  Description of Artificial Sequence: Synthetic oligonucleotide
acucccuuuuccuccuggc

SEQ ID NO: 2427779 - RNA, 19 nt, Artificial Sequence
  Description of Artificial Sequence: Synthetic oligonucleotide
guuacaucuugaaagggca

SEQ ID NO: 2427780 - RNA, 19 nt, Artificial Sequence
  Description of Artificial Sequence: Synthetic oligonucleotide
ucucacuuaaacccuccuc

SEQ ID NO: 2427781 - RNA, 19 nt, Artificial Sequence
  Description of Artificial Sequence: Synthetic oligonucleotide
ugguuacaucuugaaaggg

SEQ ID NO: 2427782 - RNA, 19 nt, Artificial Sequence
  Description of Artificial Sequence: Synthetic oligonucleotide
ugggaauccucugugaaaa

SEQ ID NO: 2427783 - RNA, 19 nt, Artificial Sequence
  Description of Artificial Sequence: Synthetic oligonucleotide
guggcagcuagaaaucugg

SEQ ID NO: 2427784 - RNA, 19 nt, Artificial Sequence
  Description of Artificial Sequence: Synthetic oligonucleotide
gcagaucuaacagaguggg

SEQ ID NO: 2427785 - RNA, 19 nt, Artificial Sequence
  Description of Artificial Sequence: Synthetic oligonucleotide
aaacacgagacaaaccuuu

SEQ ID NO: 2427786 - RNA, 19 nt, Artificial Sequence
  Description of Artificial Sequence: Synthetic oligonucleotide
ucauugucccaggaaaaca

SEQ ID NO: 2427787 - RNA, 19 nt, Artificial Sequence
  Description of Artificial Sequence: Synthetic oligonucleotide
ucagaguccuggguaaaag

SEQ ID NO: 2427788 - RNA, 19 nt, Artificial Sequence
  Description of Artificial Sequence: Synthetic oligonucleotide
aagggcauuuuaguguugu

SEQ ID NO: 2427789 - RNA, 19 nt, Artificial Sequence
  Description of Artificial Sequence: Synthetic oligonucleotide
ugcuucaugccauguggcc

SEQ ID NO: 2427790 - RNA, 19 nt, Artificial Sequence
  Description of Artificial Sequence: Synthetic oligonucleotide
auaaccugauuaccuucag

SEQ ID NO: 2427791 - RNA, 19 nt, Artificial Sequence
  Description of Artificial Sequence: Synthetic oligonucleotide
cagagugggcccaucuugg

SEQ ID NO: 2427792 - RNA, 19 nt, Artificial Sequence
  Description of Artificial Sequence: Synthetic oligonucleotide
aggacucgaacuuguaggu

SEQ ID NO: 2427793 - RNA, 19 nt, Artificial Sequence
  Description of Artificial Sequence: Synthetic oligonucleotide
agaugcacaggagccuucc

SEQ ID NO: 2427794 - RNA, 19 nt, Artificial Sequence
  Description of Artificial Sequence: Synthetic oligonucleotide
agagugggcccaucuuggc

SEQ ID NO: 2427795 - RNA, 19 nt, Artificial Sequence
  Description of Artificial Sequence: Synthetic oligonucleotide
cagcuagaaaucuggggag

SEQ ID NO: 2427796 - RNA, 19 nt, Artificial Sequence
  Description of Artificial Sequence: Synthetic oligonucleotide
ugucugcaggaguugaagu

SEQ ID NO: 2427797 - RNA, 19 nt, Artificial Sequence
  Description of Artificial Sequence: Synthetic oligonucleotide
gaaaacacagagagaggac

SEQ ID NO: 2427798 - RNA, 19 nt, Artificial Sequence
  Description of Artificial Sequence: Synthetic oligonucleotide
  modified_base (12)..(12): a, c, u, g, unknown or other
aacccuccucunuacccag

SEQ ID NO: 2427799 - RNA, 19 nt, Artificial Sequence
  Description of Artificial Sequence: Synthetic oligonucleotide
uuuccuacuccaggacucg

SEQ ID NO: 2427800 - RNA, 19 nt, Artificial Sequence
  Description of Artificial Sequence: Synthetic oligonucleotide
auuugauccagcgcccauc

SEQ ID NO: 2427801 - RNA, 19 nt, Artificial Sequence
  Description of Artificial Sequence: Synthetic oligonucleotide
aguccuggguaaaagagca

SEQ ID NO: 2427802 - RNA, 19 nt, Artificial Sequence
  Description of Artificial Sequence: Synthetic oligonucleotide
auggucugacgugacuucc

SEQ ID NO: 2427803 - RNA, 19 nt, Artificial Sequence
  Description of Artificial Sequence: Synthetic oligonucleotide
uaacagagugggcccaucu

SEQ ID NO: 2427804 - RNA, 19 nt, Artificial Sequence
  Description of Artificial Sequence: Synthetic oligonucleotide
aagagcagguuugacugca

SEQ ID NO: 2427805 - RNA, 19 nt, Artificial Sequence
  Description of Artificial Sequence: Synthetic oligonucleotide
aagacgguguuguuuccaa

SEQ ID NO: 2427806 - RNA, 19 nt, Artificial Sequence
  Description of Artificial Sequence: Synthetic oligonucleotide
acuagauggucugacguga

SEQ ID NO: 2427807 - RNA, 19 nt, Artificial Sequence
  Description of Artificial Sequence: Synthetic oligonucleotide
ggcuucauuugauccagcg

SEQ ID NO: 2427808 - RNA, 19 nt, Artificial Sequence
  Description of Artificial Sequence: Synthetic oligonucleotide
gcuucaagaaacacgagac

SEQ ID NO: 2427809 - RNA, 19 nt, Artificial Sequence
  Description of Artificial Sequence: Synthetic oligonucleotide
aucaagaugucagguuggg

SEQ ID NO: 2427810 - RNA, 19 nt, Artificial Sequence
  Description of Artificial Sequence: Synthetic oligonucleotide
gcugucaggaaacugcccc

SEQ ID NO: 2427811 - RNA, 19 nt, Artificial Sequence
  Description of Artificial Sequence: Synthetic oligonucleotide
ucugccgcuucaagaaaca

SEQ ID NO: 2427812 - RNA, 19 nt, Artificial Sequence
  Description of Artificial Sequence: Synthetic oligonucleotide
gguuacaucuugaaagggc

SEQ ID NO: 2427813 - RNA, 19 nt, Artificial Sequence
  Description of Artificial Sequence: Synthetic oligonucleotide
uuccuuucauugucccagg

SEQ ID NO: 2427814 - RNA, 19 nt, Artificial Sequence
  Description of Artificial Sequence: Synthetic oligonucleotide
ugugaaaagcugacuccaa

SEQ ID NO: 2427815 - RNA, 19 nt, Artificial Sequence
  Description of Artificial Sequence: Synthetic oligonucleotide
ggcagcuagaaaucugggg

SEQ ID NO: 2427816 - RNA, 19 nt, Artificial Sequence
  Description of Artificial Sequence: Synthetic oligonucleotide
auuuuaguguugugggcaa

SEQ ID NO: 2427817 - RNA, 19 nt, Artificial Sequence
  Description of Artificial Sequence: Synthetic oligonucleotide
aggaaacugccccaagccu

SEQ ID NO: 2427818 - RNA, 19 nt, Artificial Sequence
  Description of Artificial Sequence: Synthetic oligonucleotide
gucuuagauccaugaagcc

SEQ ID NO: 2427819 - RNA, 19 nt, Artificial Sequence
  Description of Artificial Sequence: Synthetic oligonucleotide
aaagacgguguuguuucca

SEQ ID NO: 2427820 - RNA, 19 nt, Artificial Sequence
  Description of Artificial Sequence: Synthetic oligonucleotide
acauugguuacaucuugaa

SEQ ID NO: 2427821 - RNA, 19 nt, Artificial Sequence
  Description of Artificial Sequence: Synthetic oligonucleotide
cagcauuuaccacuagaug

SEQ ID NO: 2427822 - RNA, 19 nt, Artificial Sequence
  Description of Artificial Sequence: Synthetic oligonucleotide
gggagauggagagagaaug

SEQ ID NO: 2427823 - RNA, 19 nt, Artificial Sequence
  Description of Artificial Sequence: Synthetic oligonucleotide
guccaaacaagaacuuucc

SEQ ID NO: 2427824 - RNA, 19 nt, Artificial Sequence
  Description of Artificial Sequence: Synthetic oligonucleotide
augcacaggagccuuccug

SEQ ID NO: 2427825 - RNA, 19 nt, Artificial Sequence
  Description of Artificial Sequence: Synthetic oligonucleotide
  modified_base (7)..(7): a, c, u, g, unknown or other
uccucunuacccagcccaa

SEQ ID NO: 2427826 - RNA, 19 nt, Artificial Sequence
  Description of Artificial Sequence: Synthetic oligonucleotide
cacuagauggucugacgug

SEQ ID NO: 2427827 - RNA, 19 nt, Artificial Sequence
  Description of Artificial Sequence: Synthetic oligonucleotide
uugggaauccucugugaaa

SEQ ID NO: 2427828 - RNA, 19 nt, Artificial Sequence
  Description of Artificial Sequence: Synthetic oligonucleotide
augaccuucuggccuuggg

SEQ ID NO: 2427829 - RNA, 19 nt, Artificial Sequence
  Description of Artificial Sequence: Synthetic oligonucleotide
uuuccaaguacuggguaaa

SEQ ID NO: 2427830 - RNA, 19 nt, Artificial Sequence
  Description of Artificial Sequence: Synthetic oligonucleotide
cucuuugguccaaacaaga

SEQ ID NO: 2427831 - RNA, 19 nt, Artificial Sequence
  Description of Artificial Sequence: Synthetic oligonucleotide
  modified_base (2)..(2): a, c, u, g, unknown or other
unuacccagcccaacccua

SEQ ID NO: 2427832 - RNA, 19 nt, Artificial Sequence
  Description of Artificial Sequence: Synthetic oligonucleotide
acgguguuguuuccaaacu

SEQ ID NO: 2427833 - RNA, 19 nt, Artificial Sequence
  Description of Artificial Sequence: Synthetic oligonucleotide
caagagucccugucauucc

SEQ ID NO: 2427834 - RNA, 19 nt, Artificial Sequence
  Description of Artificial Sequence: Synthetic oligonucleotide
ugacgugacuucccaugcc

SEQ ID NO: 2427835 - RNA, 19 nt, Artificial Sequence
  Description of Artificial Sequence: Synthetic oligonucleotide
accugauuaccuucagagu

SEQ ID NO: 2427836 - RNA, 19 nt, Artificial Sequence
  Description of Artificial Sequence: Synthetic oligonucleotide
gacuccaagagucccuguc

SEQ ID NO: 2427837 - RNA, 19 nt, Artificial Sequence
  Description of Artificial Sequence: Synthetic oligonucleotide
gaaacugccccaagccuug

SEQ ID NO: 2427838 - RNA, 19 nt, Artificial Sequence
  Description of Artificial Sequence: Synthetic oligonucleotide
ccaucaagaugucagguug

SEQ ID NO: 2427839 - RNA, 19 nt, Artificial Sequence
  Description of Artificial Sequence: Synthetic oligonucleotide
  modified_base (19)..(19): a, c, u, g, unknown or other
ucacuuaaacccuccucun

SEQ ID NO: 2427840 - RNA, 19 nt, Artificial Sequence
  Description of Artificial Sequence: Synthetic oligonucleotide
cucugccgcuucaagaaac

SEQ ID NO: 2427841 - RNA, 19 nt, Artificial Sequence
  Description of Artificial Sequence: Synthetic oligonucleotide
aacagagugggcccaucuu

SEQ ID NO: 2427842 - RNA, 19 nt, Artificial Sequence
  Description of Artificial Sequence: Synthetic oligonucleotide
cugcuucaugccauguggc

SEQ ID NO: 2427843 - RNA, 19 nt, Artificial Sequence
  Description of Artificial Sequence: Synthetic oligonucleotide
gucugauaaccugauuacc

SEQ ID NO: 2427844 - RNA, 19 nt, Artificial Sequence
  Description of Artificial Sequence: Synthetic oligonucleotide
uggucugacgugacuuccc

SEQ ID NO: 2427845 - RNA, 19 nt, Artificial Sequence
  Description of Artificial Sequence: Synthetic oligonucleotide
cuuuccaaguacuggguaa

SEQ ID NO: 2427846 - RNA, 19 nt, Artificial Sequence
  Description of Artificial Sequence: Synthetic oligonucleotide
aaacuguggcagcuagaaa

SEQ ID NO: 2427847 - RNA, 19 nt, Artificial Sequence
  Description of Artificial Sequence: Synthetic oligonucleotide
cuugauuacuaacauuggu

SEQ ID NO: 2427848 - RNA, 19 nt, Artificial Sequence
  Description of Artificial Sequence: Synthetic oligonucleotide
uagauggucugacgugacu

SEQ ID NO: 2427849 - RNA, 19 nt, Artificial Sequence
  Description of Artificial Sequence: Synthetic oligonucleotide
gaccuucuggccuugggaa

SEQ ID NO: 2427850 - RNA, 19 nt, Artificial Sequence
  Description of Artificial Sequence: Synthetic oligonucleotide
aggaaaacacagagagagg

SEQ ID NO: 2427851 - RNA, 19 nt, Artificial Sequence
  Description of Artificial Sequence: Synthetic oligonucleotide
cuucaagaaacacgagaca

SEQ ID NO: 2427852 - RNA, 19 nt, Artificial Sequence
  Description of Artificial Sequence: Synthetic oligonucleotide
  modified_base (8)..(8): a, c, u, g, unknown or other
cuccucunuacccagccca

SEQ ID NO: 2427853 - RNA, 19 nt, Artificial Sequence
  Description of Artificial Sequence: Synthetic oligonucleotide
gaaagggcauuuuaguguu

SEQ ID NO: 2427854 - RNA, 19 nt, Artificial Sequence
  Description of Artificial Sequence: Synthetic oligonucleotide
uuagauccaugaagccacu

SEQ ID NO: 2427855 - RNA, 19 nt, Artificial Sequence
  Description of Artificial Sequence: Synthetic oligonucleotide
ccuugauuacuaacauugg

SEQ ID NO: 2427856 - RNA, 19 nt, Artificial Sequence
  Description of Artificial Sequence: Synthetic oligonucleotide
ugcaggaguugaaguggcc

SEQ ID NO: 2427857 - RNA, 19 nt, Artificial Sequence
  Description of Artificial Sequence: Synthetic oligonucleotide
ugauuaccuucagaguccu

SEQ ID NO: 2427858 - RNA, 19 nt, Artificial Sequence
  Description of Artificial Sequence: Synthetic oligonucleotide
ccaaguacuggguaaagga

SEQ ID NO: 2427859 - RNA, 19 nt, Artificial Sequence
  Description of Artificial Sequence: Synthetic oligonucleotide
gguccaaacaagaacuuuc

SEQ ID NO: 2427860 - RNA, 19 nt, Artificial Sequence
  Description of Artificial Sequence: Synthetic oligonucleotide
ggguaaaagagcagguuug

SEQ ID NO: 2427861 - RNA, 19 nt, Artificial Sequence
  Description of Artificial Sequence: Synthetic oligonucleotide
gcuucauuugauccagcgc

SEQ ID NO: 2427862 - RNA, 19 nt, Artificial Sequence
  Description of Artificial Sequence: Synthetic oligonucleotide
uacaucuugaaagggcauu

SEQ ID NO: 2427863 - RNA, 19 nt, Artificial Sequence
  Description of Artificial Sequence: Synthetic oligonucleotide
caaagacgguguuguuucc

SEQ ID NO: 2427864 - RNA, 19 nt, Artificial Sequence
  Description of Artificial Sequence: Synthetic oligonucleotide
cuagauggucugacgugac

SEQ ID NO: 2427865 - RNA, 19 nt, Artificial Sequence
  Description of Artificial Sequence: Synthetic oligonucleotide
uuccaaguacuggguaaag

SEQ ID NO: 2427866 - RNA, 19 nt, Artificial Sequence
  Description of Artificial Sequence: Synthetic oligonucleotide
guguuguuuccaaacugug

SEQ ID NO: 2427867 - RNA, 19 nt, Artificial Sequence
  Description of Artificial Sequence: Synthetic oligonucleotide
aagaugcacaggagccuuc

SEQ ID NO: 2427868 - RNA, 19 nt, Artificial Sequence
  Description of Artificial Sequence: Synthetic oligonucleotide
ucauuugauccagcgccca

SEQ ID NO: 2427869 - RNA, 19 nt, Artificial Sequence
  Description of Artificial Sequence: Synthetic oligonucleotide
augaagccacucccuuuuc

SEQ ID NO: 2427870 - RNA, 19 nt, Artificial Sequence
  Description of Artificial Sequence: Synthetic oligonucleotide
cagcccaacccuacuuucc

SEQ ID NO: 2427871 - RNA, 19 nt, Artificial Sequence
  Description of Artificial Sequence: Synthetic oligonucleotide
ggcaaagacaucguaguca

SEQ ID NO: 2427872 - RNA, 19 nt, Artificial Sequence
  Description of Artificial Sequence: Synthetic oligonucleotide
cagaucuaacagagugggc

SEQ ID NO: 2427873 - RNA, 19 nt, Artificial Sequence
  Description of Artificial Sequence: Synthetic oligonucleotide
caaacuguggcagcuagaa

SEQ ID NO: 2427874 - RNA, 19 nt, Artificial Sequence
  Description of Artificial Sequence: Synthetic oligonucleotide
agcccaacccuacuuuccu

SEQ ID NO: 2427875 - RNA, 19 nt, Artificial Sequence
  Description of Artificial Sequence: Synthetic oligonucleotide
gcauuuuaguguugugggc

SEQ ID NO: 2427876 - RNA, 19 nt, Artificial Sequence
  Description of Artificial Sequence: Synthetic oligonucleotide
uccuacuccaggacucgaa

SEQ ID NO: 2427877 - RNA, 19 nt, Artificial Sequence
  Description of Artificial Sequence: Synthetic oligonucleotide
gugauaccaagcaaucauc

SEQ ID NO: 2427878 - RNA, 19 nt, Artificial Sequence
  Description of Artificial Sequence: Synthetic oligonucleotide
caugccuggacaguuuguc

SEQ ID NO: 2427879 - RNA, 19 nt, Artificial Sequence
  Description of Artificial Sequence: Synthetic oligonucleotide
cuagaaaucuggggagaug

SEQ ID NO: 2427880 - RNA, 19 nt, Artificial Sequence
  Description of Artificial Sequence: Synthetic oligonucleotide
caucucugccgcuucaaga

SEQ ID NO: 2427881 - RNA, 19 nt, Artificial Sequence
  Description of Artificial Sequence: Synthetic oligonucleotide
cugugaaaagcugacucca

SEQ ID NO: 2427882 - RNA, 19 nt, Artificial Sequence
  Description of Artificial Sequence: Synthetic oligonucleotide
cuugggaauccucugugaa

SEQ ID NO: 2427883 - RNA, 19 nt, Artificial Sequence
  Description of Artificial Sequence: Synthetic oligonucleotide
cgaacuuguagguuugaag

SEQ ID NO: 2427884 - RNA, 19 nt, Artificial Sequence
  Description of Artificial Sequence: Synthetic oligonucleotide
gacucgaacuuguagguuu

SEQ ID NO: 2427885 - RNA, 19 nt, Artificial Sequence
  Description of Artificial Sequence: Synthetic oligonucleotide
uaccacuagauggucugac

SEQ ID NO: 2427886 - RNA, 19 nt, Artificial Sequence
  Description of Artificial Sequence: Synthetic oligonucleotide
ggugauaccaagcaaucau

SEQ ID NO: 2427887 - RNA, 19 nt, Artificial Sequence
  Description of Artificial Sequence: Synthetic oligonucleotide
ugacagcauuuaccacuag

SEQ ID NO: 2427888 - RNA, 19 nt, Artificial Sequence
  Description of Artificial Sequence: Synthetic oligonucleotide
gccgcuucaagaaacacga

SEQ ID NO: 2427889 - RNA, 19 nt, Artificial Sequence
  Description of Artificial Sequence: Synthetic oligonucleotide
gacgugacuucccaugccu

SEQ ID NO: 2427890 - RNA, 19 nt, Artificial Sequence
  Description of Artificial Sequence: Synthetic oligonucleotide
agccagggaggcuucauuu

SEQ ID NO: 2427891 - RNA, 19 nt, Artificial Sequence
  Description of Artificial Sequence: Synthetic oligonucleotide
acccuacuuuccuccaucu

SEQ ID NO: 2427892 - RNA, 19 nt, Artificial Sequence
  Description of Artificial Sequence: Synthetic oligonucleotide
acacgagacaaaccuuuua

SEQ ID NO: 2427893 - RNA, 19 nt, Artificial Sequence
  Description of Artificial Sequence: Synthetic oligonucleotide
cacucccuuuuccuccugg

SEQ ID NO: 2427894 - RNA, 19 nt, Artificial Sequence
  Description of Artificial Sequence: Synthetic oligonucleotide
ucgaacuuguagguuugaa

SEQ ID NO: 2427895 - RNA, 19 nt, Artificial Sequence
  Description of Artificial Sequence: Synthetic oligonucleotide
aggugauaccaagcaauca

SEQ ID NO: 2427896 - RNA, 19 nt, Artificial Sequence
  Description of Artificial Sequence: Synthetic oligonucleotide
cauguggccucucacuuaa

SEQ ID NO: 2427897 - RNA, 19 nt, Artificial Sequence
  Description of Artificial Sequence: Synthetic oligonucleotide
agcuagaaaucuggggaga

SEQ ID NO: 2427898 - RNA, 19 nt, Artificial Sequence
  Description of Artificial Sequence: Synthetic oligonucleotide
agagagaggacaagggcuu

SEQ ID NO: 2427899 - RNA, 19 nt, Artificial Sequence
  Description of Artificial Sequence: Synthetic oligonucleotide
ugccccaagccuugauuac

SEQ ID NO: 2427900 - RNA, 19 nt, Artificial Sequence
  Description of Artificial Sequence: Synthetic oligonucleotide
agccuugauuacuaacauu

SEQ ID NO: 2427901 - RNA, 19 nt, Artificial Sequence
  Description of Artificial Sequence: Synthetic oligonucleotide
uuaccacuagauggucuga

SEQ ID NO: 2427902 - RNA, 19 nt, Artificial Sequence
  Description of Artificial Sequence: Synthetic oligonucleotide
gacuucccaugccuggaca

SEQ ID NO: 2427903 - RNA, 19 nt, Artificial Sequence
  Description of Artificial Sequence: Synthetic oligonucleotide
cauuuaccacuagaugguc

SEQ ID NO: 2427904 - RNA, 19 nt, Artificial Sequence
  Description of Artificial Sequence: Synthetic oligonucleotide
caaaccuuuuagaacuagu

SEQ ID NO: 2427905 - RNA, 19 nt, Artificial Sequence
  Description of Artificial Sequence: Synthetic oligonucleotide
cccaacccuacuuuccucc

SEQ ID NO: 2427906 - RNA, 19 nt, Artificial Sequence
  Description of Artificial Sequence: Synthetic oligonucleotide
aguuugucuuagauccaug

SEQ ID NO: 2427907 - RNA, 19 nt, Artificial Sequence
  Description of Artificial Sequence: Synthetic oligonucleotide
aaagggcauuuuaguguug

SEQ ID NO: 2427908 - RNA, 19 nt, Artificial Sequence
  Description of Artificial Sequence: Synthetic oligonucleotide
acuccaggacucgaacuug

SEQ ID NO: 2427909 - RNA, 19 nt, Artificial Sequence
  Description of Artificial Sequence: Synthetic oligonucleotide
ugguccaaacaagaacuuu

SEQ ID NO: 2427910 - RNA, 19 nt, Artificial Sequence
  Description of Artificial Sequence: Synthetic oligonucleotide
ccaagagucccugucauuc

SEQ ID NO: 2427911 - RNA, 19 nt, Artificial Sequence
  Description of Artificial Sequence: Synthetic oligonucleotide
acucgaacuuguagguuug

SEQ ID NO: 2427912 - RNA, 19 nt, Artificial Sequence
  Description of Artificial Sequence: Synthetic oligonucleotide
aacacgagacaaaccuuuu

SEQ ID NO: 2427913 - RNA, 19 nt, Artificial Sequence
  Description of Artificial Sequence: Synthetic oligonucleotide
cuaacauugguuacaucuu

SEQ ID NO: 2427914 - RNA, 19 nt, Artificial Sequence
  Description of Artificial Sequence: Synthetic oligonucleotide
gucugacagcauuuaccac

SEQ ID NO: 2427915 - RNA, 19 nt, Artificial Sequence
  Description of Artificial Sequence: Synthetic oligonucleotide
cugacagcauuuaccacua

SEQ ID NO: 2427916 - RNA, 19 nt, Artificial Sequence
  Description of Artificial Sequence: Synthetic oligonucleotide
gguaaaagagcagguuuga

SEQ ID NO: 2427917 - RNA, 19 nt, Artificial Sequence
  Description of Artificial Sequence: Synthetic oligonucleotide
ccaagccuugauuacuaac

SEQ ID NO: 2427918 - RNA, 19 nt, Artificial Sequence
  Description of Artificial Sequence: Synthetic oligonucleotide
agugucugauaaccugauu

SEQ ID NO: 2427919 - RNA, 19 nt, Artificial Sequence
  Description of Artificial Sequence: Synthetic oligonucleotide
ugugggcaaugaccuucug

SEQ ID NO: 2427920 - RNA, 19 nt, Artificial Sequence
  Description of Artificial Sequence: Synthetic oligonucleotide
uccuuggcaggccccuuuc

SEQ ID NO: 2427921 - RNA, 19 nt, Artificial Sequence
  Description of Artificial Sequence: Synthetic oligonucleotide
uuuuaguguugugggcaau

SEQ ID NO: 2427922 - RNA, 19 nt, Artificial Sequence
  Description of Artificial Sequence: Synthetic oligonucleotide
gcgcccaucaagaugucag

SEQ ID NO: 2427923 - RNA, 19 nt, Artificial Sequence
  Description of Artificial Sequence: Synthetic oligonucleotide
aucuaacagagugggccca

SEQ ID NO: 2427924 - RNA, 19 nt, Artificial Sequence
  Description of Artificial Sequence: Synthetic oligonucleotide
cugucaggaaacugcccca

SEQ ID NO: 2427925 - RNA, 19 nt, Artificial Sequence
  Description of Artificial Sequence: Synthetic oligonucleotide
aacugccccaagccuugau

SEQ ID NO: 2427926 - RNA, 19 nt, Artificial Sequence
  Description of Artificial Sequence: Synthetic oligonucleotide
ggcaaugaccuucuggccu

SEQ ID NO: 2427927 - RNA, 19 nt, Artificial Sequence
  Description of Artificial Sequence: Synthetic oligonucleotide
ucuaacagagugggcccau

SEQ ID NO: 2427928 - RNA, 19 nt, Artificial Sequence
  Description of Artificial Sequence: Synthetic oligonucleotide
guuugacugcagaucuaac

SEQ ID NO: 2427929 - RNA, 19 nt, Artificial Sequence
  Description of Artificial Sequence: Synthetic oligonucleotide
gcagguuugacugcagauc

SEQ ID NO: 2427930 - RNA, 19 nt, Artificial Sequence
  Description of Artificial Sequence: Synthetic oligonucleotide
agacgguguuguuuccaaa

SEQ ID NO: 2427931 - RNA, 19 nt, Artificial Sequence
  Description of Artificial Sequence: Synthetic oligonucleotide
ggggcaaagacaucguagu

SEQ ID NO: 2427932 - RNA, 19 nt, Artificial Sequence
  Description of Artificial Sequence: Synthetic oligonucleotide
gguuugacugcagaucuaa

SEQ ID NO: 2427933 - RNA, 19 nt, Artificial Sequence
  Description of Artificial Sequence: Synthetic oligonucleotide
cagcuuuguccaaggucug

SEQ ID NO: 2427934 - RNA, 19 nt, Artificial Sequence
  Description of Artificial Sequence: Synthetic oligonucleotide
gaugucugcaggaguugaa

SEQ ID NO: 2427935 - RNA, 19 nt, Artificial Sequence
  Description of Artificial Sequence: Synthetic oligonucleotide
gggaauccucugugaaaag

SEQ ID NO: 2427936 - RNA, 19 nt, Artificial Sequence
  Description of Artificial Sequence: Synthetic oligonucleotide
ccuacuccaggacucgaac

SEQ ID NO: 2427937 - RNA, 19 nt, Artificial Sequence
  Description of Artificial Sequence: Synthetic oligonucleotide
aggcuucauuugauccagc

SEQ ID NO: 2427938 - RNA, 19 nt, Artificial Sequence
  Description of Artificial Sequence: Synthetic oligonucleotide
gaaguggccaaaggugaua

SEQ ID NO: 2427939 - RNA, 19 nt, Artificial Sequence
  Description of Artificial Sequence: Synthetic oligonucleotide
  modified_base (3)..(3): a, c, u, g, unknown or other
cunuacccagcccaacccu

SEQ ID NO: 2427940 - RNA, 19 nt, Artificial Sequence
  Description of Artificial Sequence: Synthetic oligonucleotide
gauuaccuucagaguccug

SEQ ID NO: 2427941 - RNA, 19 nt, Artificial Sequence
  Description of Artificial Sequence: Synthetic oligonucleotide
caugaagccacucccuuuu

SEQ ID NO: 2427942 - RNA, 19 nt, Artificial Sequence
  Description of Artificial Sequence: Synthetic oligonucleotide
gcaggaguugaaguggcca

SEQ ID NO: 2427943 - RNA, 19 nt, Artificial Sequence
  Description of Artificial Sequence: Synthetic oligonucleotide
ggucugacgugacuuccca

SEQ ID NO: 2427944 - RNA, 19 nt, Artificial Sequence
  Description of Artificial Sequence: Synthetic oligonucleotide
acgugacuucccaugccug

SEQ ID NO: 2427945 - RNA, 19 nt, Artificial Sequence
  Description of Artificial Sequence: Synthetic oligonucleotide
ucccaugccuggacaguuu

SEQ ID NO: 2427946 - RNA, 19 nt, Artificial Sequence
  Description of Artificial Sequence: Synthetic oligonucleotide
gggcaaagacaucguaguc

SEQ ID NO: 2427947 - RNA, 19 nt, Artificial Sequence
  Description of Artificial Sequence: Synthetic oligonucleotide
gaagaugcacaggagccuu

SEQ ID NO: 2427948 - RNA, 19 nt, Artificial Sequence
  Description of Artificial Sequence: Synthetic oligonucleotide
ccagcgcccaucaagaugu

SEQ ID NO: 2427949 - RNA, 19 nt, Artificial Sequence
  Description of Artificial Sequence: Synthetic oligonucleotide
gcauuuaccacuagauggu

SEQ ID NO: 2427950 - RNA, 19 nt, Artificial Sequence
  Description of Artificial Sequence: Synthetic oligonucleotide
uccuggccucucuuugguc

SEQ ID NO: 2427951 - RNA, 19 nt, Artificial Sequence
  Description of Artificial Sequence: Synthetic oligonucleotide
cugccgcuucaagaaacac

SEQ ID NO: 2427952 - RNA, 19 nt, Artificial Sequence
  Description of Artificial Sequence: Synthetic oligonucleotide
gugacuucccaugccugga

SEQ ID NO: 2427953 - RNA, 19 nt, Artificial Sequence
  Description of Artificial Sequence: Synthetic oligonucleotide
cuaacagagugggcccauc

SEQ ID NO: 2427954 - RNA, 19 nt, Artificial Sequence
  Description of Artificial Sequence: Synthetic oligonucleotide
cgcuucaagaaacacgaga

SEQ ID NO: 2427955 - RNA, 19 nt, Artificial Sequence
  Description of Artificial Sequence: Synthetic oligonucleotide
augucagguuggggcaaag

SEQ ID NO: 2427956 - RNA, 19 nt, Artificial Sequence
  Description of Artificial Sequence: Synthetic oligonucleotide
acugagcuugagggcuguc

SEQ ID NO: 2427957 - RNA, 19 nt, Artificial Sequence
  Description of Artificial Sequence: Synthetic oligonucleotide
auccagcgcccaucaagau

SEQ ID NO: 2427958 - RNA, 19 nt, Artificial Sequence
  Description of Artificial Sequence: Synthetic oligonucleotide
gaugucagguuggggcaaa

SEQ ID NO: 2427959 - RNA, 19 nt, Artificial Sequence
  Description of Artificial Sequence: Synthetic oligonucleotide
ggcccaucuuggcacugag

SEQ ID NO: 2427960 - RNA, 19 nt, Artificial Sequence
  Description of Artificial Sequence: Synthetic oligonucleotide
cuggacaguuugucuuaga

SEQ ID NO: 2427961 - RNA, 19 nt, Artificial Sequence
  Description of Artificial Sequence: Synthetic oligonucleotide
uucaugccauguggccucu

SEQ ID NO: 2427962 - RNA, 19 nt, Artificial Sequence
  Description of Artificial Sequence: Synthetic oligonucleotide
  modified_base (18)..(18): a, c, u, g, unknown or other
cacuuaaacccuccucunu

SEQ ID NO: 2427963 - RNA, 19 nt, Artificial Sequence
  Description of Artificial Sequence: Synthetic oligonucleotide
agcgcccaucaagauguca

SEQ ID NO: 2427964 - RNA, 19 nt, Artificial Sequence
  Description of Artificial Sequence: Synthetic oligonucleotide
ccaucucugccgcuucaag

SEQ ID NO: 2427965 - RNA, 19 nt, Artificial Sequence
  Description of Artificial Sequence: Synthetic oligonucleotide
ggcacugagcuugagggcu

SEQ ID NO: 2427966 - RNA, 19 nt, Artificial Sequence
  Description of Artificial Sequence: Synthetic oligonucleotide
guucagcuuuguccaaggu

SEQ ID NO: 2427967 - RNA, 19 nt, Artificial Sequence
  Description of Artificial Sequence: Synthetic oligonucleotide
  modified_base (9)..(9): a, c, u, g, unknown or other
ccuccucunuacccagccc

SEQ ID NO: 2427968 - RNA, 19 nt, Artificial Sequence
  Description of Artificial Sequence: Synthetic oligonucleotide
cccaugccuggacaguuug

SEQ ID NO: 2427969 - RNA, 19 nt, Artificial Sequence
  Description of Artificial Sequence: Synthetic oligonucleotide
ccaggaaaacacagagaga

SEQ ID NO: 2427970 - RNA, 19 nt, Artificial Sequence
  Description of Artificial Sequence: Synthetic oligonucleotide
ccagggaggcuucauuuga

SEQ ID NO: 2427971 - RNA, 19 nt, Artificial Sequence
  Description of Artificial Sequence: Synthetic oligonucleotide
gccccuuucccuccaguuc

SEQ ID NO: 2427972 - RNA, 19 nt, Artificial Sequence
  Description of Artificial Sequence: Synthetic oligonucleotide
ggagauggagagagaaugu

SEQ ID NO: 2427973 - RNA, 19 nt, Artificial Sequence
  Description of Artificial Sequence: Synthetic oligonucleotide
ugucaccaacauggguuuu

SEQ ID NO: 2427974 - RNA, 19 nt, Artificial Sequence
  Description of Artificial Sequence: Synthetic oligonucleotide
ugggcccaucuuggcacug

SEQ ID NO: 2427975 - RNA, 19 nt, Artificial Sequence
  Description of Artificial Sequence: Synthetic oligonucleotide
ccuggacaguuugucuuag

SEQ ID NO: 2427976 - RNA, 19 nt, Artificial Sequence
  Description of Artificial Sequence: Synthetic oligonucleotide
cucucacuuaaacccuccu

SEQ ID NO: 2427977 - RNA, 19 nt, Artificial Sequence
  Description of Artificial Sequence: Synthetic oligonucleotide
ccacuagauggucugacgu

SEQ ID NO: 2427978 - RNA, 19 nt, Artificial Sequence
  Description of Artificial Sequence: Synthetic oligonucleotide
agagucccugucauuccuu

SEQ ID NO: 2427979 - RNA, 19 nt, Artificial Sequence
  Description of Artificial Sequence: Synthetic oligonucleotide
uucuggccuugggaauccu

SEQ ID NO: 2427980 - RNA, 19 nt, Artificial Sequence
  Description of Artificial Sequence: Synthetic oligonucleotide
caguuugucuuagauccau

SEQ ID NO: 2427981 - RNA, 19 nt, Artificial Sequence
  Description of Artificial Sequence: Synthetic oligonucleotide
gcuucaugccauguggccu

SEQ ID NO: 2427982 - RNA, 19 nt, Artificial Sequence
  Description of Artificial Sequence: Synthetic oligonucleotide
cucgaacuuguagguuuga

SEQ ID NO: 2427983 - RNA, 19 nt, Artificial Sequence
  Description of Artificial Sequence: Synthetic oligonucleotide
caucguagucaaagacggu

SEQ ID NO: 2427984 - RNA, 19 nt, Artificial Sequence
  Description of Artificial Sequence: Synthetic oligonucleotide
guacuggguaaaggaggaa

SEQ ID NO: 2427985 - RNA, 19 nt, Artificial Sequence
  Description of Artificial Sequence: Synthetic oligonucleotide
agguuugacugcagaucua

SEQ ID NO: 2427986 - RNA, 19 nt, Artificial Sequence
  Description of Artificial Sequence: Synthetic oligonucleotide
cauuugauccagcgcccau

SEQ ID NO: 2427987 - RNA, 19 nt, Artificial Sequence
  Description of Artificial Sequence: Synthetic oligonucleotide
ccgcuucaagaaacacgag

SEQ ID NO: 2427988 - RNA, 19 nt, Artificial Sequence
  Description of Artificial Sequence: Synthetic oligonucleotide
cagggaggcuucauuugau

SEQ ID NO: 2427989 - RNA, 19 nt, Artificial Sequence
  Description of Artificial Sequence: Synthetic oligonucleotide
ggccuugggaauccucugu

SEQ ID NO: 2427990 - RNA, 19 nt, Artificial Sequence
  Description of Artificial Sequence: Synthetic oligonucleotide
cuccuggccucucuuuggu

SEQ ID NO: 2427991 - RNA, 19 nt, Artificial Sequence
  Description of Artificial Sequence: Synthetic oligonucleotide
ccaacccuacuuuccucca

SEQ ID NO: 2427992 - RNA, 19 nt, Artificial Sequence
  Description of Artificial Sequence: Synthetic oligonucleotide
gccucucacuuaaacccuc

SEQ ID NO: 2427993 - RNA, 19 nt, Artificial Sequence
  Description of Artificial Sequence: Synthetic oligonucleotide
  modified_base (6)..(6): a, c, u, g, unknown or other
ccucunuacccagcccaac

SEQ ID NO: 2427994 - RNA, 19 nt, Artificial Sequence
  Description of Artificial Sequence: Synthetic oligonucleotide
gcccaacccuacuuuccuc

SEQ ID NO: 2427995 - RNA, 19 nt, Artificial Sequence
  Description of Artificial Sequence: Synthetic oligonucleotide
gcuagaaaucuggggagau

SEQ ID NO: 2427996 - RNA, 19 nt, Artificial Sequence
  Description of Artificial Sequence: Synthetic oligonucleotide
ucaugccauguggccucuc

SEQ ID NO: 2427997 - RNA, 19 nt, Artificial Sequence
  Description of Artificial Sequence: Synthetic oligonucleotide
gucugacgugacuucccau

SEQ ID NO: 2427998 - RNA, 19 nt, Artificial Sequence
  Description of Artificial Sequence: Synthetic oligonucleotide
gcccaucuuggcacugagc

SEQ ID NO: 2427999 - RNA, 19 nt, Artificial Sequence
  Description of Artificial Sequence: Synthetic oligonucleotide
cacaggagccuuccuguuu

SEQ ID NO: 2428000 - RNA, 19 nt, Artificial Sequence
  Description of Artificial Sequence: Synthetic oligonucleotide
gcuugagggcugucaggaa

SEQ ID NO: 2428001 - RNA, 19 nt, Artificial Sequence
  Description of Artificial Sequence: Synthetic oligonucleotide
caacccuacuuuccuccau

SEQ ID NO: 2428002 - RNA, 19 nt, Artificial Sequence
  Description of Artificial Sequence: Synthetic oligonucleotide
cagcgcccaucaagauguc

SEQ ID NO: 2428003 - RNA, 19 nt, Artificial Sequence
  Description of Artificial Sequence: Synthetic oligonucleotide
gcccaucaagaugucaggu

SEQ ID NO: 2428004 - RNA, 19 nt, Artificial Sequence
  Description of Artificial Sequence: Synthetic oligonucleotide
gcugacuccaagagucccu

SEQ ID NO: 2428005 - RNA, 19 nt, Artificial Sequence
  Description of Artificial Sequence: Synthetic oligonucleotide
ggccucucacuuaaacccu

SEQ ID NO: 2428006 - RNA, 19 nt, Artificial Sequence
  Description of Artificial Sequence: Synthetic oligonucleotide
cccaucaagaugucagguu

SEQ ID NO: 2428007 - RNA, 19 nt, Artificial Sequence
  Description of Artificial Sequence: Synthetic oligonucleotide
cccaagccuugauuacuaa

SEQ ID NO: 2428008 - RNA, 19 nt, Artificial Sequence
  Description of Artificial Sequence: Synthetic oligonucleotide
ggacucgaacuuguagguu

SEQ ID NO: 2428009 - RNA, 19 nt, Artificial Sequence
  Description of Artificial Sequence: Synthetic oligonucleotide
ccaugccuggacaguuugu

SEQ ID NO: 2428010 - RNA, 19 nt, Artificial Sequence
  Description of Artificial Sequence: Synthetic oligonucleotide
cguagucaaagacgguguu

SEQ ID NO: 2428011 - RNA, 19 nt, Artificial Sequence
  Description of Artificial Sequence: Synthetic oligonucleotide
guccaaggucugacagcau

SEQ ID NO: 2428012 - RNA, 19 nt, Artificial Sequence
  Description of Artificial Sequence: Synthetic oligonucleotide
cccagcccaacccuacuuu

SEQ ID NO: 2428013 - RNA, 19 nt, Artificial Sequence
  Description of Artificial Sequence: Synthetic oligonucleotide
  modified_base (1)..(1): a, c, u, g, unknown or other
nuacccagcccaacccuac

SEQ ID NO: 2428014 - RNA, 19 nt, Artificial Sequence
  Description of Artificial Sequence: Synthetic oligonucleotide
aauucuuucacauaagucg

SEQ ID NO: 2428015 - RNA, 19 nt, Artificial Sequence
  Description of Artificial Sequence: Synthetic oligonucleotide
uguaugaucaacuauguag

SEQ ID NO: 2428016 - RNA, 19 nt, Artificial Sequence
  Description of Artificial Sequence: Synthetic oligonucleotide
aauaaaucaauacccauug

SEQ ID NO: 2428017 - RNA, 19 nt, Artificial Sequence
  Description of Artificial Sequence: Synthetic oligonucleotide
uguacguuaaaguauauag

SEQ ID NO: 2428018 - RNA, 19 nt, Artificial Sequence
  Description of Artificial Sequence: Synthetic oligonucleotide
aaucaauacccauuggccc

SEQ ID NO: 2428019 - RNA, 19 nt, Artificial Sequence
  Description of Artificial Sequence: Synthetic oligonucleotide
aaaccaacgaguuugggag

SEQ ID NO: 2428020 - RNA, 19 nt, Artificial Sequence
  Description of Artificial Sequence: Synthetic oligonucleotide
aauugaaccagcuauuucu

SEQ ID NO: 2428021 - RNA, 19 nt, Artificial Sequence
  Description of Artificial Sequence: Synthetic oligonucleotide
uauuguaugaucaacuaug

SEQ ID NO: 2428022 - RNA, 19 nt, Artificial Sequence
  Description of Artificial Sequence: Synthetic oligonucleotide
ucauguggaaugaugaucg

SEQ ID NO: 2428023 - RNA, 19 nt, Artificial Sequence
  Description of Artificial Sequence: Synthetic oligonucleotide
uacguuaaaguauauagag

SEQ ID NO: 2428024 - RNA, 19 nt, Artificial Sequence
  Description of Artificial Sequence: Synthetic oligonucleotide
aaaucaauacccauuggcc

SEQ ID NO: 2428025 - RNA, 19 nt, Artificial Sequence
  Description of Artificial Sequence: Synthetic oligonucleotide
uucacauaagucgagaugg

SEQ ID NO: 2428026 - RNA, 19 nt, Artificial Sequence
  Description of Artificial Sequence: Synthetic oligonucleotide
uaaaucaauacccauuggc

SEQ ID NO: 2428027 - RNA, 19 nt, Artificial Sequence
  Description of Artificial Sequence: Synthetic oligonucleotide
uuuugugccagucaaacca

SEQ ID NO: 2428028 - RNA, 19 nt, Artificial Sequence
  Description of Artificial Sequence: Synthetic oligonucleotide
ucuucaacaagacaguucu

SEQ ID NO: 2428029 - RNA, 19 nt, Artificial Sequence
  Description of Artificial Sequence: Synthetic oligonucleotide
uuaaauuuggcagggacgg

SEQ ID NO: 2428030 - RNA, 19 nt, Artificial Sequence
  Description of Artificial Sequence: Synthetic oligonucleotide
uauaauagacucuguaugc

SEQ ID NO: 2428031 - RNA, 19 nt, Artificial Sequence
  Description of Artificial Sequence: Synthetic oligonucleotide
aguuaaauuuggcagggac

SEQ ID NO: 2428032 - RNA, 19 nt, Artificial Sequence
  Description of Artificial Sequence: Synthetic oligonucleotide
aagagcuagcuccaguggc

SEQ ID NO: 2428033 - RNA, 19 nt, Artificial Sequence
  Description of Artificial Sequence: Synthetic oligonucleotide
uauuauuguaugaucaacu

SEQ ID NO: 2428034 - RNA, 19 nt, Artificial Sequence
  Description of Artificial Sequence: Synthetic oligonucleotide
uuuugugucccuuucuggg

SEQ ID NO: 2428035 - RNA, 19 nt, Artificial Sequence
  Description of Artificial Sequence: Synthetic oligonucleotide
uauauagaggcuccucugg

SEQ ID NO: 2428036 - RNA, 19 nt, Artificial Sequence
  Description of Artificial Sequence: Synthetic oligonucleotide
agccaaaauaaaucaauac

SEQ ID NO: 2428037 - RNA, 19 nt, Artificial Sequence
  Description of Artificial Sequence: Synthetic oligonucleotide
aguacauuauuauuguaug

SEQ ID NO: 2428038 - RNA, 19 nt, Artificial Sequence
  Description of Artificial Sequence: Synthetic oligonucleotide
aaugagugaagccaaaaua

SEQ ID NO: 2428039 - RNA, 19 nt, Artificial Sequence
  Description of Artificial Sequence: Synthetic oligonucleotide
aaugaugaucgguauggag

SEQ ID NO: 2428040 - RNA, 19 nt, Artificial Sequence
  Description of Artificial Sequence: Synthetic oligonucleotide
cuauaauagacucuguaug

SEQ ID NO: 2428041 - RNA, 19 nt, Artificial Sequence
  Description of Artificial Sequence: Synthetic oligonucleotide
aaauucuuucacauaaguc

SEQ ID NO: 2428042 - RNA, 19 nt, Artificial Sequence
  Description of Artificial Sequence: Synthetic oligonucleotide
uggaguuaaauuuggcagg

SEQ ID NO: 2428043 - RNA, 19 nt, Artificial Sequence
  Description of Artificial Sequence: Synthetic oligonucleotide
guggaguuaaauuuggcag

SEQ ID NO: 2428044 - RNA, 19 nt, Artificial Sequence
  Description of Artificial Sequence: Synthetic oligonucleotide
uacccauuggcccagguag

SEQ ID NO: 2428045 - RNA, 19 nt, Artificial Sequence
  Description of Artificial Sequence: Synthetic oligonucleotide
ugaucaacuauguaguccu

SEQ ID NO: 2428046 - RNA, 19 nt, Artificial Sequence
  Description of Artificial Sequence: Synthetic oligonucleotide
accaaaacaaagcugggug

SEQ ID NO: 2428047 - RNA, 19 nt, Artificial Sequence
  Description of Artificial Sequence: Synthetic oligonucleotide
aggucaacaucucaugugg

SEQ ID NO: 2428048 - RNA, 19 nt, Artificial Sequence
  Description of Artificial Sequence: Synthetic oligonucleotide
aaaaguggaguuaaauuug

SEQ ID NO: 2428049 - RNA, 19 nt, Artificial Sequence
  Description of Artificial Sequence: Synthetic oligonucleotide
uccucugggagacaaagcc

SEQ ID NO: 2428050 - RNA, 19 nt, Artificial Sequence
  Description of Artificial Sequence: Synthetic oligonucleotide
aaugcuucgaugucuuugu

SEQ ID NO: 2428051 - RNA, 19 nt, Artificial Sequence
  Description of Artificial Sequence: Synthetic oligonucleotide
aaguaauccagaaacccuc

SEQ ID NO: 2428052 - RNA, 19 nt, Artificial Sequence
  Description of Artificial Sequence: Synthetic oligonucleotide
aaccagcuauuucugcugc

SEQ ID NO: 2428053 - RNA, 19 nt, Artificial Sequence
  Description of Artificial Sequence: Synthetic oligonucleotide
uuucacauaagucgagaug

SEQ ID NO: 2428054 - RNA, 19 nt, Artificial Sequence
  Description of Artificial Sequence: Synthetic oligonucleotide
uuaaaguauauagaggcuc

SEQ ID NO: 2428055 - RNA, 19 nt, Artificial Sequence
  Description of Artificial Sequence: Synthetic oligonucleotide
ugaguugugagggaaaaug

SEQ ID NO: 2428056 - RNA, 19 nt, Artificial Sequence
  Description of Artificial Sequence: Synthetic oligonucleotide
uuuggacucuccaucauga

SEQ ID NO: 2428057 - RNA, 19 nt, Artificial Sequence
  Description of Artificial Sequence: Synthetic oligonucleotide
augaucaacuauguagucc

SEQ ID NO: 2428058 - RNA, 19 nt, Artificial Sequence
  Description of Artificial Sequence: Synthetic oligonucleotide
augaugaucgguauggagg

SEQ ID NO: 2428059 - RNA, 19 nt, Artificial Sequence
  Description of Artificial Sequence: Synthetic oligonucleotide
aaggucaacaucucaugug

SEQ ID NO: 2428060 - RNA, 19 nt, Artificial Sequence
  Description of Artificial Sequence: Synthetic oligonucleotide
aaaguggaguuaaauuugg

SEQ ID NO: 2428061 - RNA, 19 nt, Artificial Sequence
  Description of Artificial Sequence: Synthetic oligonucleotide
ugaaaaguggaguuaaauu

SEQ ID NO: 2428062 - RNA, 19 nt, Artificial Sequence
  Description of Artificial Sequence: Synthetic oligonucleotide
aaaugguccuccuaguaaa

SEQ ID NO: 2428063 - RNA, 19 nt, Artificial Sequence
  Description of Artificial Sequence: Synthetic oligonucleotide
guuaaauuuggcagggacg

SEQ ID NO: 2428064 - RNA, 19 nt, Artificial Sequence
  Description of Artificial Sequence: Synthetic oligonucleotide
aguauauagaggcuccucu

SEQ ID NO: 2428065 - RNA, 19 nt, Artificial Sequence
  Description of Artificial Sequence: Synthetic oligonucleotide
uuugggagaaaauucuuuc

SEQ ID NO: 2428066 - RNA, 19 nt, Artificial Sequence
  Description of Artificial Sequence: Synthetic oligonucleotide
gauucucuugaguucgagg

SEQ ID NO: 2428067 - RNA, 19 nt, Artificial Sequence
  Description of Artificial Sequence: Synthetic oligonucleotide
cguuaaaguauauagaggc

SEQ ID NO: 2428068 - RNA, 19 nt, Artificial Sequence
  Description of Artificial Sequence: Synthetic oligonucleotide
aaacaaagcuggguggugg

SEQ ID NO: 2428069 - RNA, 19 nt, Artificial Sequence
  Description of Artificial Sequence: Synthetic oligonucleotide
uuuggccaaaguaauccag

SEQ ID NO: 2428070 - RNA, 19 nt, Artificial Sequence
  Description of Artificial Sequence: Synthetic oligonucleotide
uguggaaugaugaucggua

SEQ ID NO: 2428071 - RNA, 19 nt, Artificial Sequence
  Description of Artificial Sequence: Synthetic oligonucleotide
gaaacccuccaucuggucc

SEQ ID NO: 2428072 - RNA, 19 nt, Artificial Sequence
  Description of Artificial Sequence: Synthetic oligonucleotide
ugggagaaaauucuuucac

SEQ ID NO: 2428073 - RNA, 19 nt, Artificial Sequence
  Description of Artificial Sequence: Synthetic oligonucleotide
uucaugugugaccucaugu

SEQ ID NO: 2428074 - RNA, 19 nt, Artificial Sequence
  Description of Artificial Sequence: Synthetic oligonucleotide
aaauaaaucaauacccauu

SEQ ID NO: 2428075 - RNA, 19 nt, Artificial Sequence
  Description of Artificial Sequence: Synthetic oligonucleotide
gaaaaguggaguuaaauuu

SEQ ID NO: 2428076 - RNA, 19 nt, Artificial Sequence
  Description of Artificial Sequence: Synthetic oligonucleotide
auaaaucaauacccauugg

SEQ ID NO: 2428077 - RNA, 19 nt, Artificial Sequence
  Description of Artificial Sequence: Synthetic oligonucleotide
aaaguaauccagaaacccu

SEQ ID NO: 2428078 - RNA, 19 nt, Artificial Sequence
  Description of Artificial Sequence: Synthetic oligonucleotide
auauagaggcuccucuggg

SEQ ID NO: 2428079 - RNA, 19 nt, Artificial Sequence
  Description of Artificial Sequence: Synthetic oligonucleotide
ugugcagcaauugaaccag

SEQ ID NO: 2428080 - RNA, 19 nt, Artificial Sequence
  Description of Artificial Sequence: Synthetic oligonucleotide
uuauuauuguaugaucaac

SEQ ID NO: 2428081 - RNA, 19 nt, Artificial Sequence
  Description of Artificial Sequence: Synthetic oligonucleotide
uucaacaagacaguucugu

SEQ ID NO: 2428082 - RNA, 19 nt, Artificial Sequence
  Description of Artificial Sequence: Synthetic oligonucleotide
ggaaugaugaucgguaugg

SEQ ID NO: 2428083 - RNA, 19 nt, Artificial Sequence
  Description of Artificial Sequence: Synthetic oligonucleotide
ugccagucaaaccaacgag

SEQ ID NO: 2428084 - RNA, 19 nt, Artificial Sequence
  Description of Artificial Sequence: Synthetic oligonucleotide
auuauuguaugaucaacua

SEQ ID NO: 2428085 - RNA, 19 nt, Artificial Sequence
  Description of Artificial Sequence: Synthetic oligonucleotide
gaguugugagggaaaaugg

SEQ ID NO: 2428086 - RNA, 19 nt, Artificial Sequence
  Description of Artificial Sequence: Synthetic oligonucleotide
aucgguauggaggccaugc

SEQ ID NO: 2428087 - RNA, 19 nt, Artificial Sequence
  Description of Artificial Sequence: Synthetic oligonucleotide
caauggugaugaaaagugg

SEQ ID NO: 2428088 - RNA, 19 nt, Artificial Sequence
  Description of Artificial Sequence: Synthetic oligonucleotide
aaacccuccaucuggucca

SEQ ID NO: 2428089 - RNA, 19 nt, Artificial Sequence
  Description of Artificial Sequence: Synthetic oligonucleotide
agacaaagccuucuccuuc

SEQ ID NO: 2428090 - RNA, 19 nt, Artificial Sequence
  Description of Artificial Sequence: Synthetic oligonucleotide
aaguauauagaggcuccuc

SEQ ID NO: 2428091 - RNA, 19 nt, Artificial Sequence
  Description of Artificial Sequence: Synthetic oligonucleotide
ucuuuugugccagucaaac

SEQ ID NO: 2428092 - RNA, 19 nt, Artificial Sequence
  Description of Artificial Sequence: Synthetic oligonucleotide
cauaagucgagauggcuuc

SEQ ID NO: 2428093 - RNA, 19 nt, Artificial Sequence
  Description of Artificial Sequence: Synthetic oligonucleotide
aucaauacccauuggccca

SEQ ID NO: 2428094 - RNA, 19 nt, Artificial Sequence
  Description of Artificial Sequence: Synthetic oligonucleotide
uugggagaaaauucuuuca

SEQ ID NO: 2428095 - RNA, 19 nt, Artificial Sequence
  Description of Artificial Sequence: Synthetic oligonucleotide
acggaauacugucuauuuc

SEQ ID NO: 2428096 - RNA, 19 nt, Artificial Sequence
  Description of Artificial Sequence: Synthetic oligonucleotide
gggaaaaugguccuccuag

SEQ ID NO: 2428097 - RNA, 19 nt, Artificial Sequence
  Description of Artificial Sequence: Synthetic oligonucleotide
agggcuauaauagacucug

SEQ ID NO: 2428098 - RNA, 19 nt, Artificial Sequence
  Description of Artificial Sequence: Synthetic oligonucleotide
agacucuguaugcucuggc

SEQ ID NO: 2428099 - RNA, 19 nt, Artificial Sequence
  Description of Artificial Sequence: Synthetic oligonucleotide
aaguggaguuaaauuuggc

SEQ ID NO: 2428100 - RNA, 19 nt, Artificial Sequence
  Description of Artificial Sequence: Synthetic oligonucleotide
ucuuuguuucuccagcuuu

SEQ ID NO: 2428101 - RNA, 19 nt, Artificial Sequence
  Description of Artificial Sequence: Synthetic oligonucleotide
uuuggcugagcccaagguc

SEQ ID NO: 2428102 - RNA, 19 nt, Artificial Sequence
  Description of Artificial Sequence: Synthetic oligonucleotide
aguaauccagaaacccucc

SEQ ID NO: 2428103 - RNA, 19 nt, Artificial Sequence
  Description of Artificial Sequence: Synthetic oligonucleotide
uggaaugaugaucgguaug

SEQ ID NO: 2428104 - RNA, 19 nt, Artificial Sequence
  Description of Artificial Sequence: Synthetic oligonucleotide
auggcuucuuuuguguccc

SEQ ID NO: 2428105 - RNA, 19 nt, Artificial Sequence
  Description of Artificial Sequence: Synthetic oligonucleotide
ugcuguacguuaaaguaua

SEQ ID NO: 2428106 - RNA, 19 nt, Artificial Sequence
  Description of Artificial Sequence: Synthetic oligonucleotide
acguuaaaguauauagagg

SEQ ID NO: 2428107 - RNA, 19 nt, Artificial Sequence
  Description of Artificial Sequence: Synthetic oligonucleotide
guauauagaggcuccucug

SEQ ID NO: 2428108 - RNA, 19 nt, Artificial Sequence
  Description of Artificial Sequence: Synthetic oligonucleotide
uuuuggccaaaguaaucca

SEQ ID NO: 2428109 - RNA, 19 nt, Artificial Sequence
  Description of Artificial Sequence: Synthetic oligonucleotide
uucuuucacauaagucgag

SEQ ID NO: 2428110 - RNA, 19 nt, Artificial Sequence
  Description of Artificial Sequence: Synthetic oligonucleotide
ucccuuucugggucaaugg

SEQ ID NO: 2428111 - RNA, 19 nt, Artificial Sequence
  Description of Artificial Sequence: Synthetic oligonucleotide
uccuaguaaaggcuuucca

SEQ ID NO: 2428112 - RNA, 19 nt, Artificial Sequence
  Description of Artificial Sequence: Synthetic oligonucleotide
gaaccagcuauuucugcug

SEQ ID NO: 2428113 - RNA, 19 nt, Artificial Sequence
  Description of Artificial Sequence: Synthetic oligonucleotide
gguccaaucaaguacauua

SEQ ID NO: 2428114 - RNA, 19 nt, Artificial Sequence
  Description of Artificial Sequence: Synthetic oligonucleotide
aaauuuggcagggacggaa

SEQ ID NO: 2428115 - RNA, 19 nt, Artificial Sequence
  Description of Artificial Sequence: Synthetic oligonucleotide
uaguccuugucaguuuugg

SEQ ID NO: 2428116 - RNA, 19 nt, Artificial Sequence
  Description of Artificial Sequence: Synthetic oligonucleotide
gucgagauggcuucuuuug

SEQ ID NO: 2428117 - RNA, 19 nt, Artificial Sequence
  Description of Artificial Sequence: Synthetic oligonucleotide
aaccaaaacaaagcugggu

SEQ ID NO: 2428118 - RNA, 19 nt, Artificial Sequence
  Description of Artificial Sequence: Synthetic oligonucleotide
uucuucaugugugaccuca

SEQ ID NO: 2428119 - RNA, 19 nt, Artificial Sequence
  Description of Artificial Sequence: Synthetic oligonucleotide
cuauguaguccucaucuuc

SEQ ID NO: 2428120 - RNA, 19 nt, Artificial Sequence
  Description of Artificial Sequence: Synthetic oligonucleotide
uggacucuccaucaugagu

SEQ ID NO: 2428121 - RNA, 19 nt, Artificial Sequence
  Description of Artificial Sequence: Synthetic oligonucleotide
caugcuguacguuaaagua

SEQ ID NO: 2428122 - RNA, 19 nt, Artificial Sequence
  Description of Artificial Sequence: Synthetic oligonucleotide
uauagaggcuccucuggga

SEQ ID NO: 2428123 - RNA, 19 nt, Artificial Sequence
  Description of Artificial Sequence: Synthetic oligonucleotide
ucuggacagauaucagggc

SEQ ID NO: 2428124 - RNA, 19 nt, Artificial Sequence
  Description of Artificial Sequence: Synthetic oligonucleotide
ucaacuauguaguccucau

SEQ ID NO: 2428125 - RNA, 19 nt, Artificial Sequence
  Description of Artificial Sequence: Synthetic oligonucleotide
aacaaagcugggugguggu

SEQ ID NO: 2428126 - RNA, 19 nt, Artificial Sequence
  Description of Artificial Sequence: Synthetic oligonucleotide
acucuguaugcucuggcca

SEQ ID NO: 2428127 - RNA, 19 nt, Artificial Sequence
  Description of Artificial Sequence: Synthetic oligonucleotide
guacauuauuauuguauga

SEQ ID NO: 2428128 - RNA, 19 nt, Artificial Sequence
  Description of Artificial Sequence: Synthetic oligonucleotide
augugugcagcaauugaac

SEQ ID NO: 2428129 - RNA, 19 nt, Artificial Sequence
  Description of Artificial Sequence: Synthetic oligonucleotide
auaauagacucuguaugcu

SEQ ID NO: 2428130 - RNA, 19 nt, Artificial Sequence
  Description of Artificial Sequence: Synthetic oligonucleotide
ucacauaagucgagauggc

SEQ ID NO: 2428131 - RNA, 19 nt, Artificial Sequence
  Description of Artificial Sequence: Synthetic oligonucleotide
auucuuucacauaagucga

SEQ ID NO: 2428132 - RNA, 19 nt, Artificial Sequence
  Description of Artificial Sequence: Synthetic oligonucleotide
caaaccaacgaguuuggga

SEQ ID NO: 2428133 - RNA, 19 nt, Artificial Sequence
  Description of Artificial Sequence: Synthetic oligonucleotide
ugucuuuguuucuccagcu

SEQ ID NO: 2428134 - RNA, 19 nt, Artificial Sequence
  Description of Artificial Sequence: Synthetic oligonucleotide
uggacagauaucagggcaa

SEQ ID NO: 2428135 - RNA, 19 nt, Artificial Sequence
  Description of Artificial Sequence: Synthetic oligonucleotide
uaugaucaacuauguaguc

SEQ ID NO: 2428136 - RNA, 19 nt, Artificial Sequence
  Description of Artificial Sequence: Synthetic oligonucleotide
ugugaccucaugugugcag

SEQ ID NO: 2428137 - RNA, 19 nt, Artificial Sequence
  Description of Artificial Sequence: Synthetic oligonucleotide
aaaguauauagaggcuccu

SEQ ID NO: 2428138 - RNA, 19 nt, Artificial Sequence
  Description of Artificial Sequence: Synthetic oligonucleotide
ucuuucacauaagucgaga

SEQ ID NO: 2428139 - RNA, 19 nt, Artificial Sequence
  Description of Artificial Sequence: Synthetic oligonucleotide
uuugugucccuuucugggu

SEQ ID NO: 2428140 - RNA, 19 nt, Artificial Sequence
  Description of Artificial Sequence: Synthetic oligonucleotide
uccaguggcagacuggguu

SEQ ID NO: 2428141 - RNA, 19 nt, Artificial Sequence
  Description of Artificial Sequence: Synthetic oligonucleotide
ugcagcaauugaaccagcu

SEQ ID NO: 2428142 - RNA, 19 nt, Artificial Sequence
  Description of Artificial Sequence: Synthetic oligonucleotide
ucauccuuagggccagggc

SEQ ID NO: 2428143 - RNA, 19 nt, Artificial Sequence
  Description of Artificial Sequence: Synthetic oligonucleotide
uuuccaaugcuucgauguc

SEQ ID NO: 2428144 - RNA, 19 nt, Artificial Sequence
  Description of Artificial Sequence: Synthetic oligonucleotide
caagagcuagcuccagugg

SEQ ID NO: 2428145 - RNA, 19 nt, Artificial Sequence
  Description of Artificial Sequence: Synthetic oligonucleotide
uuugugccagucaaaccaa

SEQ ID NO: 2428146 - RNA, 19 nt, Artificial Sequence
  Description of Artificial Sequence: Synthetic oligonucleotide
cuuuccaaugcuucgaugu

SEQ ID NO: 2428147 - RNA, 19 nt, Artificial Sequence
  Description of Artificial Sequence: Synthetic oligonucleotide
ucgaugucuuuguuucucc

SEQ ID NO: 2428148 - RNA, 19 nt, Artificial Sequence
  Description of Artificial Sequence: Synthetic oligonucleotide
auuguaugaucaacuaugu

SEQ ID NO: 2428149 - RNA, 19 nt, Artificial Sequence
  Description of Artificial Sequence: Synthetic oligonucleotide
auacugucuauuucaucca

SEQ ID NO: 2428150 - RNA, 19 nt, Artificial Sequence
  Description of Artificial Sequence: Synthetic oligonucleotide
ugugucuggugacaccacu

SEQ ID NO: 2428151 - RNA, 19 nt, Artificial Sequence
  Description of Artificial Sequence: Synthetic oligonucleotide
ucgagauggcuucuuuugu

SEQ ID NO: 2428152 - RNA, 19 nt, Artificial Sequence
  Description of Artificial Sequence: Synthetic oligonucleotide
ggaguuaaauuuggcaggg

SEQ ID NO: 2428153 - RNA, 19 nt, Artificial Sequence
  Description of Artificial Sequence: Synthetic oligonucleotide
accagcuauuucugcugcc

SEQ ID NO: 2428154 - RNA, 19 nt, Artificial Sequence
  Description of Artificial Sequence: Synthetic oligonucleotide
ucaacaucucauguggaau

SEQ ID NO: 2428155 - RNA, 19 nt, Artificial Sequence
  Description of Artificial Sequence: Synthetic oligonucleotide
gcagauucucuugaguucg

SEQ ID NO: 2428156 - RNA, 19 nt, Artificial Sequence
  Description of Artificial Sequence: Synthetic oligonucleotide
gcuucgaugucuuuguuuc

SEQ ID NO: 2428157 - RNA, 19 nt, Artificial Sequence
  Description of Artificial Sequence: Synthetic oligonucleotide
cuauuucauccacaacuug

SEQ ID NO: 2428158 - RNA, 19 nt, Artificial Sequence
  Description of Artificial Sequence: Synthetic oligonucleotide
cucuguaugcucuggccac

SEQ ID NO: 2428159 - RNA, 19 nt, Artificial Sequence
  Description of Artificial Sequence: Synthetic oligonucleotide
ccagaaacccuccaucugg

SEQ ID NO: 2428160 - RNA, 19 nt, Artificial Sequence
  Description of Artificial Sequence: Synthetic oligonucleotide
uuuggcagggacggaauac

SEQ ID NO: 2428161 - RNA, 19 nt, Artificial Sequence
  Description of Artificial Sequence: Synthetic oligonucleotide
gaaaaugguccuccuagua

SEQ ID NO: 2428162 - RNA, 19 nt, Artificial Sequence
  Description of Artificial Sequence: Synthetic oligonucleotide
guugugagggaaaaugguc

SEQ ID NO: 2428163 - RNA, 19 nt, Artificial Sequence
  Description of Artificial Sequence: Synthetic oligonucleotide
auagacucuguaugcucug

SEQ ID NO: 2428164 - RNA, 19 nt, Artificial Sequence
  Description of Artificial Sequence: Synthetic oligonucleotide
ucaaaccaacgaguuuggg

SEQ ID NO: 2428165 - RNA, 19 nt, Artificial Sequence
  Description of Artificial Sequence: Synthetic oligonucleotide
guacguuaaaguauauaga

SEQ ID NO: 2428166 - RNA, 19 nt, Artificial Sequence
  Description of Artificial Sequence: Synthetic oligonucleotide
ugucaguuuuggacucucc

SEQ ID NO: 2428167 - RNA, 19 nt, Artificial Sequence
  Description of Artificial Sequence: Synthetic oligonucleotide
gugugcagcaauugaacca

SEQ ID NO: 2428168 - RNA, 19 nt, Artificial Sequence
  Description of Artificial Sequence: Synthetic oligonucleotide
aauacccauuggcccaggu

SEQ ID NO: 2428169 - RNA, 19 nt, Artificial Sequence
  Description of Artificial Sequence: Synthetic oligonucleotide
auugaaccagcuauuucug

SEQ ID NO: 2428170 - RNA, 19 nt, Artificial Sequence
  Description of Artificial Sequence: Synthetic oligonucleotide
caugugugcagcaauugaa

SEQ ID NO: 2428171 - RNA, 19 nt, Artificial Sequence
  Description of Artificial Sequence: Synthetic oligonucleotide
cuggacagauaucagggca

SEQ ID NO: 2428172 - RNA, 19 nt, Artificial Sequence
  Description of Artificial Sequence: Synthetic oligonucleotide
aaccaacgaguuugggaga

SEQ ID NO: 2428173 - RNA, 19 nt, Artificial Sequence
  Description of Artificial Sequence: Synthetic oligonucleotide
aguugugagggaaaauggu

SEQ ID NO: 2428174 - RNA, 19 nt, Artificial Sequence
  Description of Artificial Sequence: Synthetic oligonucleotide
acgaguuugggagaaaauu

SEQ ID NO: 2428175 - RNA, 19 nt, Artificial Sequence
  Description of Artificial Sequence: Synthetic oligonucleotide
cauguggaaugaugaucgg

SEQ ID NO: 2428176 - RNA, 19 nt, Artificial Sequence
  Description of Artificial Sequence: Synthetic oligonucleotide
ucaauacccauuggcccag

SEQ ID NO: 2428177 - RNA, 19 nt, Artificial Sequence
  Description of Artificial Sequence: Synthetic oligonucleotide
uugugucccuuucuggguc

SEQ ID NO: 2428178 - RNA, 19 nt, Artificial Sequence
  Description of Artificial Sequence: Synthetic oligonucleotide
ucuccaucaugaguuguga

SEQ ID NO: 2428179 - RNA, 19 nt, Artificial Sequence
  Description of Artificial Sequence: Synthetic oligonucleotide
uaugcucuggccacuccau

SEQ ID NO: 2428180 - RNA, 19 nt, Artificial Sequence
  Description of Artificial Sequence: Synthetic oligonucleotide
uguaugcucuggccacucc

SEQ ID NO: 2428181 - RNA, 19 nt, Artificial Sequence
  Description of Artificial Sequence: Synthetic oligonucleotide
aucaacuauguaguccuca

SEQ ID NO: 2428182 - RNA, 19 nt, Artificial Sequence
  Description of Artificial Sequence: Synthetic oligonucleotide
cuccaucaugaguugugag

SEQ ID NO: 2428183 - RNA, 19 nt, Artificial Sequence
  Description of Artificial Sequence: Synthetic oligonucleotide
ugggagacaaagccuucuc

SEQ ID NO: 2428184 - RNA, 19 nt, Artificial Sequence
  Description of Artificial Sequence: Synthetic oligonucleotide
uagcuccaguggcagacug

SEQ ID NO: 2428185 - RNA, 19 nt, Artificial Sequence
  Description of Artificial Sequence: Synthetic oligonucleotide
ugcuucgaugucuuuguuu

SEQ ID NO: 2428186 - RNA, 19 nt, Artificial Sequence
  Description of Artificial Sequence: Synthetic oligonucleotide
gucaacaucucauguggaa

SEQ ID NO: 2428187 - RNA, 19 nt, Artificial Sequence
  Description of Artificial Sequence: Synthetic oligonucleotide
gugccagucaaaccaacga

SEQ ID NO: 2428188 - RNA, 19 nt, Artificial Sequence
  Description of Artificial Sequence: Synthetic oligonucleotide
acauaagucgagauggcuu

SEQ ID NO: 2428189 - RNA, 19 nt, Artificial Sequence
  Description of Artificial Sequence: Synthetic oligonucleotide
gaggccaugcuguacguua

SEQ ID NO: 2428190 - RNA, 19 nt, Artificial Sequence
  Description of Artificial Sequence: Synthetic oligonucleotide
augaucgguauggaggcca

SEQ ID NO: 2428191 - RNA, 19 nt, Artificial Sequence
  Description of Artificial Sequence: Synthetic oligonucleotide
ggucaauggugaugaaaag

SEQ ID NO: 2428192 - RNA, 19 nt, Artificial Sequence
  Description of Artificial Sequence: Synthetic oligonucleotide
ugggucaauggugaugaaa

SEQ ID NO: 2428193 - RNA, 19 nt, Artificial Sequence
  Description of Artificial Sequence: Synthetic oligonucleotide
cuucaugugugaccucaug

SEQ ID NO: 2428194 - RNA, 19 nt, Artificial Sequence
  Description of Artificial Sequence: Synthetic oligonucleotide
acuauguaguccucaucuu

SEQ ID NO: 2428195 - RNA, 19 nt, Artificial Sequence
  Description of Artificial Sequence: Synthetic oligonucleotide
gagcccaaggucaacaucu

SEQ ID NO: 2428196 - RNA, 19 nt, Artificial Sequence
  Description of Artificial Sequence: Synthetic oligonucleotide
aagucgagauggcuucuuu

SEQ ID NO: 2428197 - RNA, 19 nt, Artificial Sequence
  Description of Artificial Sequence: Synthetic oligonucleotide
aauuuggcagggacggaau

SEQ ID NO: 2428198 - RNA, 19 nt, Artificial Sequence
  Description of Artificial Sequence: Synthetic oligonucleotide
guaugcucuggccacucca

SEQ ID NO: 2428199 - RNA, 19 nt, Artificial Sequence
  Description of Artificial Sequence: Synthetic oligonucleotide
agauucucuugaguucgag

SEQ ID NO: 2428200 - RNA, 19 nt, Artificial Sequence
  Description of Artificial Sequence: Synthetic oligonucleotide
agggacggaauacugucua

SEQ ID NO: 2428201 - RNA, 19 nt, Artificial Sequence
  Description of Artificial Sequence: Synthetic oligonucleotide
ucgguauggaggccaugcu

SEQ ID NO: 2428202 - RNA, 19 nt, Artificial Sequence
  Description of Artificial Sequence: Synthetic oligonucleotide
cucaugugugcagcaauug

SEQ ID NO: 2428203 - RNA, 19 nt, Artificial Sequence
  Description of Artificial Sequence: Synthetic oligonucleotide
gguuuggcugagcccaagg

SEQ ID NO: 2428204 - RNA, 19 nt, Artificial Sequence
  Description of Artificial Sequence: Synthetic oligonucleotide
ugaccucaugugugcagca

SEQ ID NO: 2428205 - RNA, 19 nt, Artificial Sequence
  Description of Artificial Sequence: Synthetic oligonucleotide
cuccuaguaaaggcuuucc

SEQ ID NO: 2428206 - RNA, 19 nt, Artificial Sequence
  Description of Artificial Sequence: Synthetic oligonucleotide
aacgaguuugggagaaaau

SEQ ID NO: 2428207 - RNA, 19 nt, Artificial Sequence
  Description of Artificial Sequence: Synthetic oligonucleotide
gugaccucaugugugcagc

SEQ ID NO: 2428208 - RNA, 19 nt, Artificial Sequence
  Description of Artificial Sequence: Synthetic oligonucleotide
gucaauggugaugaaaagu

SEQ ID NO: 2428209 - RNA, 19 nt, Artificial Sequence
  Description of Artificial Sequence: Synthetic oligonucleotide
agucgagauggcuucuuuu

SEQ ID NO: 2428210 - RNA, 19 nt, Artificial Sequence
  Description of Artificial Sequence: Synthetic oligonucleotide
cagcaauugaaccagcuau

SEQ ID NO: 2428211 - RNA, 19 nt, Artificial Sequence
  Description of Artificial Sequence: Synthetic oligonucleotide
cgaguuugggagaaaauuc

SEQ ID NO: 2428212 - RNA, 19 nt, Artificial Sequence
  Description of Artificial Sequence: Synthetic oligonucleotide
gcuauaauagacucuguau

SEQ ID NO: 2428213 - RNA, 19 nt, Artificial Sequence
  Description of Artificial Sequence: Synthetic oligonucleotide
guuaaaguauauagaggcu

SEQ ID NO: 2428214 - RNA, 19 nt, Artificial Sequence
  Description of Artificial Sequence: Synthetic oligonucleotide
cauccuuagggccagggcu

SEQ ID NO: 2428215 - RNA, 19 nt, Artificial Sequence
  Description of Artificial Sequence: Synthetic oligonucleotide
augcuguacguuaaaguau

SEQ ID NO: 2428216 - RNA, 19 nt, Artificial Sequence
  Description of Artificial Sequence: Synthetic oligonucleotide
uaaauuuggcagggacgga

SEQ ID NO: 2428217 - RNA, 19 nt, Artificial Sequence
  Description of Artificial Sequence: Synthetic oligonucleotide
uauggaggccaugcuguac

SEQ ID NO: 2428218 - RNA, 19 nt, Artificial Sequence
  Description of Artificial Sequence: Synthetic oligonucleotide
ggcagauucucuugaguuc

SEQ ID NO: 2428219 - RNA, 19 nt, Artificial Sequence
  Description of Artificial Sequence: Synthetic oligonucleotide
gaugaucgguauggaggcc

SEQ ID NO: 2428220 - RNA, 19 nt, Artificial Sequence
  Description of Artificial Sequence: Synthetic oligonucleotide
auacccauuggcccaggua

SEQ ID NO: 2428221 - RNA, 19 nt, Artificial Sequence
  Description of Artificial Sequence: Synthetic oligonucleotide
agagcuagcuccaguggca

SEQ ID NO: 2428222 - RNA, 19 nt, Artificial Sequence
  Description of Artificial Sequence: Synthetic oligonucleotide
ggcuauaauagacucugua

SEQ ID NO: 2428223 - RNA, 19 nt, Artificial Sequence
  Description of Artificial Sequence: Synthetic oligonucleotide
gaaugaugaucgguaugga

SEQ ID NO: 2428224 - RNA, 19 nt, Artificial Sequence
  Description of Artificial Sequence: Synthetic oligonucleotide
caguucugugucuggugac

SEQ ID NO: 2428225 - RNA, 19 nt, Artificial Sequence
  Description of Artificial Sequence: Synthetic oligonucleotide
gacggaauacugucuauuu

SEQ ID NO: 2428226 - RNA, 19 nt, Artificial Sequence
  Description of Artificial Sequence: Synthetic oligonucleotide
ugaucgguauggaggccau

SEQ ID NO: 2428227 - RNA, 19 nt, Artificial Sequence
  Description of Artificial Sequence: Synthetic oligonucleotide
gcagggacggaauacuguc

SEQ ID NO: 2428228 - RNA, 19 nt, Artificial Sequence
  Description of Artificial Sequence: Synthetic oligonucleotide
auuuggcagggacggaaua

SEQ ID NO: 2428229 - RNA, 19 nt, Artificial Sequence
  Description of Artificial Sequence: Synthetic oligonucleotide
uggccacuccaucaaucuc

SEQ ID NO: 2428230 - RNA, 19 nt, Artificial Sequence
  Description of Artificial Sequence: Synthetic oligonucleotide
ucuguaugcucuggccacu

SEQ ID NO: 2428231 - RNA, 19 nt, Artificial Sequence
  Description of Artificial Sequence: Synthetic oligonucleotide
uccuccuaguaaaggcuuu

SEQ ID NO: 2428232 - RNA, 19 nt, Artificial Sequence
  Description of Artificial Sequence: Synthetic oligonucleotide
cggaauacugucuauuuca

SEQ ID NO: 2428233 - RNA, 19 nt, Artificial Sequence
  Description of Artificial Sequence: Synthetic oligonucleotide
agcaauugaaccagcuauu

SEQ ID NO: 2428234 - RNA, 19 nt, Artificial Sequence
  Description of Artificial Sequence: Synthetic oligonucleotide
uugucaguuuuggacucuc

SEQ ID NO: 2428235 - RNA, 19 nt, Artificial Sequence
  Description of Artificial Sequence: Synthetic oligonucleotide
ggugaugaaaaguggaguu

SEQ ID NO: 2428236 - RNA, 19 nt, Artificial Sequence
  Description of Artificial Sequence: Synthetic oligonucleotide
caugugugaccucaugugu

SEQ ID NO: 2428237 - RNA, 19 nt, Artificial Sequence
  Description of Artificial Sequence: Synthetic oligonucleotide
cuuucacauaagucgagau

SEQ ID NO: 2428238 - RNA, 19 nt, Artificial Sequence
  Description of Artificial Sequence: Synthetic oligonucleotide
auaagucgagauggcuucu

SEQ ID NO: 2428239 - RNA, 19 nt, Artificial Sequence
  Description of Artificial Sequence: Synthetic oligonucleotide
uuagggccagggcuauaau

SEQ ID NO: 2428240 - RNA, 19 nt, Artificial Sequence
  Description of Artificial Sequence: Synthetic oligonucleotide
guucugugucuggugacac

SEQ ID NO: 2428241 - RNA, 19 nt, Artificial Sequence
  Description of Artificial Sequence: Synthetic oligonucleotide
accaacgaguuugggagaa

SEQ ID NO: 2428242 - RNA, 19 nt, Artificial Sequence
  Description of Artificial Sequence: Synthetic oligonucleotide
caugaguugugagggaaaa

SEQ ID NO: 2428243 - RNA, 19 nt, Artificial Sequence
  Description of Artificial Sequence: Synthetic oligonucleotide
gugaugaaaaguggaguua

SEQ ID NO: 2428244 - RNA, 19 nt, Artificial Sequence
  Description of Artificial Sequence: Synthetic oligonucleotide
acaaagcugggugguggug

SEQ ID NO: 2428245 - RNA, 19 nt, Artificial Sequence
  Description of Artificial Sequence: Synthetic oligonucleotide
caaugagugaagccaaaau

SEQ ID NO: 2428246 - RNA, 19 nt, Artificial Sequence
  Description of Artificial Sequence: Synthetic oligonucleotide
uggugacaccacucuggcu

SEQ ID NO: 2428247 - RNA, 19 nt, Artificial Sequence
  Description of Artificial Sequence: Synthetic oligonucleotide
uggaggccaugcuguacgu

SEQ ID NO: 2428248 - RNA, 19 nt, Artificial Sequence
  Description of Artificial Sequence: Synthetic oligonucleotide
guaguccuugucaguuuug

SEQ ID NO: 2428249 - RNA, 19 nt, Artificial Sequence
  Description of Artificial Sequence: Synthetic oligonucleotide
gcuagcuccaguggcagac

SEQ ID NO: 2428250 - RNA, 19 nt, Artificial Sequence
  Description of Artificial Sequence: Synthetic oligonucleotide
gcuuuccaaugcuucgaug

SEQ ID NO: 2428251 - RNA, 19 nt, Artificial Sequence
  Description of Artificial Sequence: Synthetic oligonucleotide
uggcugagcccaaggucaa

SEQ ID NO: 2428252 - RNA, 19 nt, Artificial Sequence
  Description of Artificial Sequence: Synthetic oligonucleotide
gaucaacuauguaguccuc

SEQ ID NO: 2428253 - RNA, 19 nt, Artificial Sequence
  Description of Artificial Sequence: Synthetic oligonucleotide
caacgaguuugggagaaaa

SEQ ID NO: 2428254 - RNA, 19 nt, Artificial Sequence
  Description of Artificial Sequence: Synthetic oligonucleotide
gguauggaggccaugcugu

SEQ ID NO: 2428255 - RNA, 19 nt, Artificial Sequence
  Description of Artificial Sequence: Synthetic oligonucleotide
augaguugugagggaaaau

SEQ ID NO: 2428256 - RNA, 19 nt, Artificial Sequence
  Description of Artificial Sequence: Synthetic oligonucleotide
cauuggcccagguaguccu

SEQ ID NO: 2428257 - RNA, 19 nt, Artificial Sequence
  Description of Artificial Sequence: Synthetic oligonucleotide
gccaugcuguacguuaaag

SEQ ID NO: 2428258 - RNA, 19 nt, Artificial Sequence
  Description of Artificial Sequence: Synthetic oligonucleotide
cgagauggcuucuuuugug

SEQ ID NO: 2428259 - RNA, 19 nt, Artificial Sequence
  Description of Artificial Sequence: Synthetic oligonucleotide
cuggccacuccaucaaucu

SEQ ID NO: 2428260 - RNA, 19 nt, Artificial Sequence
  Description of Artificial Sequence: Synthetic oligonucleotide
acaucucauguggaaugau

SEQ ID NO: 2428261 - RNA, 19 nt, Artificial Sequence
  Description of Artificial Sequence: Synthetic oligonucleotide
agacuggguuuggcugagc

SEQ ID NO: 2428262 - RNA, 19 nt, Artificial Sequence
  Description of Artificial Sequence: Synthetic oligonucleotide
guggaaugaugaucgguau

SEQ ID NO: 2428263 - RNA, 19 nt, Artificial Sequence
  Description of Artificial Sequence: Synthetic oligonucleotide
cuguacguuaaaguauaua

SEQ ID NO: 2428264 - RNA, 19 nt, Artificial Sequence
  Description of Artificial Sequence: Synthetic oligonucleotide
uggguuuggcugagcccaa

SEQ ID NO: 2428265 - RNA, 19 nt, Artificial Sequence
  Description of Artificial Sequence: Synthetic oligonucleotide
ggaaaaugguccuccuagu

SEQ ID NO: 2428266 - RNA, 19 nt, Artificial Sequence
  Description of Artificial Sequence: Synthetic oligonucleotide
gagggaaaaugguccuccu

SEQ ID NO: 2428267 - RNA, 19 nt, Artificial Sequence
  Description of Artificial Sequence: Synthetic oligonucleotide
ugguccaaucaaguacauu

SEQ ID NO: 2428268 - RNA, 19 nt, Artificial Sequence
  Description of Artificial Sequence: Synthetic oligonucleotide
gaucgguauggaggccaug

SEQ ID NO: 2428269 - RNA, 19 nt, Artificial Sequence
  Description of Artificial Sequence: Synthetic oligonucleotide
ggccaaaguaauccagaaa

SEQ ID NO: 2428270 - RNA, 19 nt, Artificial Sequence
  Description of Artificial Sequence: Synthetic oligonucleotide
guggcagacuggguuuggc

SEQ ID NO: 2428271 - RNA, 19 nt, Artificial Sequence
  Description of Artificial Sequence: Synthetic oligonucleotide
uggcccagguaguccuugu

SEQ ID NO: 2428272 - RNA, 19 nt, Artificial Sequence
  Description of Artificial Sequence: Synthetic oligonucleotide
auccuuagggccagggcua

SEQ ID NO: 2428273 - RNA, 19 nt, Artificial Sequence
  Description of Artificial Sequence: Synthetic oligonucleotide
gcagcaauugaaccagcua

SEQ ID NO: 2428274 - RNA, 19 nt, Artificial Sequence
  Description of Artificial Sequence: Synthetic oligonucleotide
cuguaugcucuggccacuc

SEQ ID NO: 2428275 - RNA, 19 nt, Artificial Sequence
  Description of Artificial Sequence: Synthetic oligonucleotide
cacauaagucgagauggcu

SEQ ID NO: 2428276 - RNA, 19 nt, Artificial Sequence
  Description of Artificial Sequence: Synthetic oligonucleotide
augcuucgaugucuuuguu

SEQ ID NO: 2428277 - RNA, 19 nt, Artificial Sequence
  Description of Artificial Sequence: Synthetic oligonucleotide
cagaaacccuccaucuggu

SEQ ID NO: 2428278 - RNA, 19 nt, Artificial Sequence
  Description of Artificial Sequence: Synthetic oligonucleotide
caauacccauuggcccagg

SEQ ID NO: 2428279 - RNA, 19 nt, Artificial Sequence
  Description of Artificial Sequence: Synthetic oligonucleotide
cagggcuauaauagacucu

SEQ ID NO: 2428280 - RNA, 19 nt, Artificial Sequence
  Description of Artificial Sequence: Synthetic oligonucleotide
gaccucaugugugcagcaa

SEQ ID NO: 2428281 - RNA, 19 nt, Artificial Sequence
  Description of Artificial Sequence: Synthetic oligonucleotide
cccuccaucugguccaauc

SEQ ID NO: 2428282 - RNA, 19 nt, Artificial Sequence
  Description of Artificial Sequence: Synthetic oligonucleotide
uggcuucuuuugugucccu

SEQ ID NO: 2428283 - RNA, 19 nt, Artificial Sequence
  Description of Artificial Sequence: Synthetic oligonucleotide
ccaugcuguacguuaaagu

SEQ ID NO: 2428284 - RNA, 19 nt, Artificial Sequence
  Description of Artificial Sequence: Synthetic oligonucleotide
ggucaacaucucaugugga

SEQ ID NO: 2428285 - RNA, 19 nt, Artificial Sequence
  Description of Artificial Sequence: Synthetic oligonucleotide
cuucgaugucuuuguuucu

SEQ ID NO: 2428286 - RNA, 19 nt, Artificial Sequence
  Description of Artificial Sequence: Synthetic oligonucleotide
gccagucaaaccaacgagu

SEQ ID NO: 2428287 - RNA, 19 nt, Artificial Sequence
  Description of Artificial Sequence: Synthetic oligonucleotide
gguccuccuaguaaaggcu

SEQ ID NO: 2428288 - RNA, 19 nt, Artificial Sequence
  Description of Artificial Sequence: Synthetic oligonucleotide
gugugaccucaugugugca

SEQ ID NO: 2428289 - RNA, 19 nt, Artificial Sequence
  Description of Artificial Sequence: Synthetic oligonucleotide
gcuauuucugcugccuucu

SEQ ID NO: 2428290 - RNA, 19 nt, Artificial Sequence
  Description of Artificial Sequence: Synthetic oligonucleotide
cagggacggaauacugucu

SEQ ID NO: 2428291 - RNA, 19 nt, Artificial Sequence
  Description of Artificial Sequence: Synthetic oligonucleotide
ggaauacugucuauuucau

SEQ ID NO: 2428292 - RNA, 19 nt, Artificial Sequence
  Description of Artificial Sequence: Synthetic oligonucleotide
cagguaguccuugucaguu

SEQ ID NO: 2428293 - RNA, 19 nt, Artificial Sequence
  Description of Artificial Sequence: Synthetic oligonucleotide
ccaucugguccaaucaagu

SEQ ID NO: 2428294 - RNA, 19 nt, Artificial Sequence
  Description of Artificial Sequence: Synthetic oligonucleotide
ccuccuaguaaaggcuuuc

SEQ ID NO: 2428295 - RNA, 19 nt, Artificial Sequence
  Description of Artificial Sequence: Synthetic oligonucleotide
ugucccuuucugggucaau

SEQ ID NO: 2428296 - RNA, 19 nt, Artificial Sequence
  Description of Artificial Sequence: Synthetic oligonucleotide
ccagucaaaccaacgaguu

SEQ ID NO: 2428297 - RNA, 19 nt, Artificial Sequence
  Description of Artificial Sequence: Synthetic oligonucleotide
gcaauugaaccagcuauuu

SEQ ID NO: 2428298 - RNA, 19 nt, Artificial Sequence
  Description of Artificial Sequence: Synthetic oligonucleotide
cagucaaaccaacgaguuu

SEQ ID NO: 2428299 - RNA, 19 nt, Artificial Sequence
  Description of Artificial Sequence: Synthetic oligonucleotide
guccuccuaguaaaggcuu

SEQ ID NO: 2428300 - RNA, 19 nt, Artificial Sequence
  Description of Artificial Sequence: Synthetic oligonucleotide
ggguuuggcugagcccaag

SEQ ID NO: 2428301 - RNA, 19 nt, Artificial Sequence
  Description of Artificial Sequence: Synthetic oligonucleotide
ggcuuuccaaugcuucgau

SEQ ID NO: 2428302 - RNA, 19 nt, Artificial Sequence
  Description of Artificial Sequence: Synthetic oligonucleotide
cccauuggcccagguaguc

SEQ ID NO: 2428303 - RNA, 19 nt, Artificial Sequence
  Description of Artificial Sequence: Synthetic oligonucleotide
cugguccaaucaaguacau

SEQ ID NO: 2428304 - RNA, 19 nt, Artificial Sequence
  Description of Artificial Sequence: Synthetic oligonucleotide
ggacggaauacugucuauu

SEQ ID NO: 2428305 - RNA, 19 nt, Artificial Sequence
  Description of Artificial Sequence: Synthetic oligonucleotide
ggccaugcuguacguuaaa

SEQ ID NO: 2428306 - RNA, 19 nt, Artificial Sequence
  Description of Artificial Sequence: Synthetic oligonucleotide
cagcuauuucugcugccuu

SEQ ID NO: 2428307 - RNA, 19 nt, Artificial Sequence
  Description of Artificial Sequence: Synthetic oligonucleotide
ggacagauaucagggcaau

SEQ ID NO: 2428308 - RNA, 19 nt, Artificial Sequence
  Description of Artificial Sequence: Synthetic oligonucleotide
cccuuucugggucaauggu

SEQ ID NO: 2428309 - RNA, 19 nt, Artificial Sequence
  Description of Artificial Sequence: Synthetic oligonucleotide
cuagcuccaguggcagacu

SEQ ID NO: 2428310 - RNA, 19 nt, Artificial Sequence
  Description of Artificial Sequence: Synthetic oligonucleotide
cuccaguggcagacugggu

SEQ ID NO: 2428311 - RNA, 19 nt, Artificial Sequence
  Description of Artificial Sequence: Synthetic oligonucleotide
cucuggccacuccaucaau

SEQ ID NO: 2428312 - RNA, 19 nt, Artificial Sequence
  Description of Artificial Sequence: Synthetic oligonucleotide
ccagguaguccuugucagu

SEQ ID NO: 2428313 - RNA, 19 nt, Artificial Sequence
  Description of Artificial Sequence: Synthetic oligonucleotide
gcuguacguuaaaguauau

SEQ ID NO: 2428314 - RNA, 19 nt, Artificial Sequence
  Description of Artificial Sequence: Synthetic oligonucleotide
ccucuucaacaagacaguu

SEQ ID NO: 2428315 - RNA, 19 nt, Artificial Sequence
  Description of Artificial Sequence: Synthetic oligonucleotide
ggcuccucugggagacaaa

SEQ ID NO: 2428316 - RNA, 19 nt, Artificial Sequence
  Description of Artificial Sequence: Synthetic oligonucleotide
ccaacgaguuugggagaaa

SEQ ID NO: 2428317 - RNA, 19 nt, Artificial Sequence
  Description of Artificial Sequence: Synthetic oligonucleotide
uuuaguaaaagacgaacgg

SEQ ID NO: 2428318 - RNA, 19 nt, Artificial Sequence
  Description of Artificial Sequence: Synthetic oligonucleotide
cauaauuuacauuuguagg

SEQ ID NO: 2428319 - RNA, 19 nt, Artificial Sequence
  Description of Artificial Sequence: Synthetic oligonucleotide
aauggaugaaagcuuugcc

SEQ ID NO: 2428320 - RNA, 19 nt, Artificial Sequence
  Description of Artificial Sequence: Synthetic oligonucleotide
uugagcaauacuuaaaggc

SEQ ID NO: 2428321 - RNA, 19 nt, Artificial Sequence
  Description of Artificial Sequence: Synthetic oligonucleotide
aagguuugagguuugauug

SEQ ID NO: 2428322 - RNA, 19 nt, Artificial Sequence
  Description of Artificial Sequence: Synthetic oligonucleotide
uuugagguuugauugaacg

SEQ ID NO: 2428323 - RNA, 19 nt, Artificial Sequence
  Description of Artificial Sequence: Synthetic oligonucleotide
auuuguaggauuucugggc

SEQ ID NO: 2428324 - RNA, 19 nt, Artificial Sequence
  Description of Artificial Sequence: Synthetic oligonucleotide
agugguuaaagcuucugcc

SEQ ID NO: 2428325 - RNA, 19 nt, Artificial Sequence
  Description of Artificial Sequence: Synthetic oligonucleotide
aaggcuugcacacugagug

SEQ ID NO: 2428326 - RNA, 19 nt, Artificial Sequence
  Description of Artificial Sequence: Synthetic oligonucleotide
uuugauugaacguugaguc

SEQ ID NO: 2428327 - RNA, 19 nt, Artificial Sequence
  Description of Artificial Sequence: Synthetic oligonucleotide
ucugguuuuacuuaugugu

SEQ ID NO: 2428328 - RNA, 19 nt, Artificial Sequence
  Description of Artificial Sequence: Synthetic oligonucleotide
uguaacuugagcaauacuu

SEQ ID NO: 2428329 - RNA, 19 nt, Artificial Sequence
  Description of Artificial Sequence: Synthetic oligonucleotide
ugaacguugagucacaauc

SEQ ID NO: 2428330 - RNA, 19 nt, Artificial Sequence
  Description of Artificial Sequence: Synthetic oligonucleotide
uguguaguaagguuugagg

SEQ ID NO: 2428331 - RNA, 19 nt, Artificial Sequence
  Description of Artificial Sequence: Synthetic oligonucleotide
acuguuugcacuuguaggg

SEQ ID NO: 2428332 - RNA, 19 nt, Artificial Sequence
  Description of Artificial Sequence: Synthetic oligonucleotide
acucuuuacacuuguaagg

SEQ ID NO: 2428333 - RNA, 19 nt, Artificial Sequence
  Description of Artificial Sequence: Synthetic oligonucleotide
uugaacacugacuaaagca

SEQ ID NO: 2428334 - RNA, 19 nt, Artificial Sequence
  Description of Artificial Sequence: Synthetic oligonucleotide
uaaaggauuuuccacauaa

SEQ ID NO: 2428335 - RNA, 19 nt, Artificial Sequence
  Description of Artificial Sequence: Synthetic oligonucleotide
acauuuguaggauuucugg

SEQ ID NO: 2428336 - RNA, 19 nt, Artificial Sequence
  Description of Artificial Sequence: Synthetic oligonucleotide
ugagcaauacuuaaaggcu

SEQ ID NO: 2428337 - RNA, 19 nt, Artificial Sequence
  Description of Artificial Sequence: Synthetic oligonucleotide
acuugagcaauacuuaaag

SEQ ID NO: 2428338 - RNA, 19 nt, Artificial Sequence
  Description of Artificial Sequence: Synthetic oligonucleotide
uuccacauaauuuacauuu

SEQ ID NO: 2428339 - RNA, 19 nt, Artificial Sequence
  Description of Artificial Sequence: Synthetic oligonucleotide
uuuauguguaguaagguuu

SEQ ID NO: 2428340 - RNA, 19 nt, Artificial Sequence
  Description of Artificial Sequence: Synthetic oligonucleotide
uguuucugagguuugaaca

SEQ ID NO: 2428341 - RNA, 19 nt, Artificial Sequence
  Description of Artificial Sequence: Synthetic oligonucleotide
aguuuucacauuuguaggg

SEQ ID NO: 2428342 - RNA, 19 nt, Artificial Sequence
  Description of Artificial Sequence: Synthetic oligonucleotide
uuuucuaaggcuugcacac

SEQ ID NO: 2428343 - RNA, 19 nt, Artificial Sequence
  Description of Artificial Sequence: Synthetic oligonucleotide
ugugcaauggaugaaagcu

SEQ ID NO: 2428344 - RNA, 19 nt, Artificial Sequence
  Description of Artificial Sequence: Synthetic oligonucleotide
uuaugugugaagucucugg

SEQ ID NO: 2428345 - RNA, 19 nt, Artificial Sequence
  Description of Artificial Sequence: Synthetic oligonucleotide
ugagcuuuggguaaaggcu

SEQ ID NO: 2428346 - RNA, 19 nt, Artificial Sequence
  Description of Artificial Sequence: Synthetic oligonucleotide
cuaguuaaaggccuugccg

SEQ ID NO: 2428347 - RNA, 19 nt, Artificial Sequence
  Description of Artificial Sequence: Synthetic oligonucleotide
aacuaugcuguguuuagug

SEQ ID NO: 2428348 - RNA, 19 nt, Artificial Sequence
  Description of Artificial Sequence: Synthetic oligonucleotide
gaacggucuaguuaaaggc

SEQ ID NO: 2428349 - RNA, 19 nt, Artificial Sequence
  Description of Artificial Sequence: Synthetic oligonucleotide
guuuaguaaaagacgaacg

SEQ ID NO: 2428350 - RNA, 19 nt, Artificial Sequence
  Description of Artificial Sequence: Synthetic oligonucleotide
uguguuuaguguaacuuga

SEQ ID NO: 2428351 - RNA, 19 nt, Artificial Sequence
  Description of Artificial Sequence: Synthetic oligonucleotide
uuuuaaggcuuguacacug

SEQ ID NO: 2428352 - RNA, 19 nt, Artificial Sequence
  Description of Artificial Sequence: Synthetic oligonucleotide
acuguucacauuuguaagg

SEQ ID NO: 2428353 - RNA, 19 nt, Artificial Sequence
  Description of Artificial Sequence: Synthetic oligonucleotide
uaguuaaaggccuugccgc

SEQ ID NO: 2428354 - RNA, 19 nt, Artificial Sequence
  Description of Artificial Sequence: Synthetic oligonucleotide
aacggucuaguuaaaggcc

SEQ ID NO: 2428355 - RNA, 19 nt, Artificial Sequence
  Description of Artificial Sequence: Synthetic oligonucleotide
guuuaguguaacuugagca

SEQ ID NO: 2428356 - RNA, 19 nt, Artificial Sequence
  Description of Artificial Sequence: Synthetic oligonucleotide
uuuaguguaacuugagcaa

SEQ ID NO: 2428357 - RNA, 19 nt, Artificial Sequence
  Description of Artificial Sequence: Synthetic oligonucleotide
uguuuaguguaacuugagc

SEQ ID NO: 2428358 - RNA, 19 nt, Artificial Sequence
  Description of Artificial Sequence: Synthetic oligonucleotide
uuuuacuuaugugugaagu

SEQ ID NO: 2428359 - RNA, 19 nt, Artificial Sequence
  Description of Artificial Sequence: Synthetic oligonucleotide
uuauguguaguaagguuug

SEQ ID NO: 2428360 - RNA, 19 nt, Artificial Sequence
  Description of Artificial Sequence: Synthetic oligonucleotide
gaguuuuauguguaguaag

SEQ ID NO: 2428361 - RNA, 19 nt, Artificial Sequence
  Description of Artificial Sequence: Synthetic oligonucleotide
ugaacacugacuaaagcau

SEQ ID NO: 2428362 - RNA, 19 nt, Artificial Sequence
  Description of Artificial Sequence: Synthetic oligonucleotide
uaaagcuucugccacacuc

SEQ ID NO: 2428363 - RNA, 19 nt, Artificial Sequence
  Description of Artificial Sequence: Synthetic oligonucleotide
gauuucugggcauacugag

SEQ ID NO: 2428364 - RNA, 19 nt, Artificial Sequence
  Description of Artificial Sequence: Synthetic oligonucleotide
uuuguaggauuucugggca

SEQ ID NO: 2428365 - RNA, 19 nt, Artificial Sequence
  Description of Artificial Sequence: Synthetic oligonucleotide
gcaguuuucacauuuguag

SEQ ID NO: 2428366 - RNA, 19 nt, Artificial Sequence
  Description of Artificial Sequence: Synthetic oligonucleotide
cauuuguaggauuucuggg

SEQ ID NO: 2428367 - RNA, 19 nt, Artificial Sequence
  Description of Artificial Sequence: Synthetic oligonucleotide
uuugaacacugacuaaagc

SEQ ID NO: 2428368 - RNA, 19 nt, Artificial Sequence
  Description of Artificial Sequence: Synthetic oligonucleotide
acacucgucacauuuguag

SEQ ID NO: 2428369 - RNA, 19 nt, Artificial Sequence
  Description of Artificial Sequence: Synthetic oligonucleotide
cagguguuuaguaaaagac

SEQ ID NO: 2428370 - RNA, 19 nt, Artificial Sequence
  Description of Artificial Sequence: Synthetic oligonucleotide
uguuuaguaaaagacgaac

SEQ ID NO: 2428371 - RNA, 19 nt, Artificial Sequence
  Description of Artificial Sequence: Synthetic oligonucleotide
uugagcuuuggguaaaggc

SEQ ID NO: 2428372 - RNA, 19 nt, Artificial Sequence
  Description of Artificial Sequence: Synthetic oligonucleotide
uuaaggcuuguacacuggg

SEQ ID NO: 2428373 - RNA, 19 nt, Artificial Sequence
  Description of Artificial Sequence: Synthetic oligonucleotide
ugagguuugaacacugacu

SEQ ID NO: 2428374 - RNA, 19 nt, Artificial Sequence
  Description of Artificial Sequence: Synthetic oligonucleotide
cugacuaagaauugagcag

SEQ ID NO: 2428375 - RNA, 19 nt, Artificial Sequence
  Description of Artificial Sequence: Synthetic oligonucleotide
uguugcguaagguuugugc

SEQ ID NO: 2428376 - RNA, 19 nt, Artificial Sequence
  Description of Artificial Sequence: Synthetic oligonucleotide
aguuuuauguguaguaagg

SEQ ID NO: 2428377 - RNA, 19 nt, Artificial Sequence
  Description of Artificial Sequence: Synthetic oligonucleotide
aauugagcagugguuaaag

SEQ ID NO: 2428378 - RNA, 19 nt, Artificial Sequence
  Description of Artificial Sequence: Synthetic oligonucleotide
uugagcagugguuaaagcu

SEQ ID NO: 2428379 - RNA, 19 nt, Artificial Sequence
  Description of Artificial Sequence: Synthetic oligonucleotide
ucuaguuaaaggccuugcc

SEQ ID NO: 2428380 - RNA, 19 nt, Artificial Sequence
  Description of Artificial Sequence: Synthetic oligonucleotide
uuuaaggcuuguacacugg

SEQ ID NO: 2428381 - RNA, 19 nt, Artificial Sequence
  Description of Artificial Sequence: Synthetic oligonucleotide
uggaugaaagcuuugccac

SEQ ID NO: 2428382 - RNA, 19 nt, Artificial Sequence
  Description of Artificial Sequence: Synthetic oligonucleotide
uuuggguaaaggcuuugcc

SEQ ID NO: 2428383 - RNA, 19 nt, Artificial Sequence
  Description of Artificial Sequence: Synthetic oligonucleotide
cuugagcaauacuuaaagg

SEQ ID NO: 2428384 - RNA, 19 nt, Artificial Sequence
  Description of Artificial Sequence: Synthetic oligonucleotide
caguuuucacauuuguagg

SEQ ID NO: 2428385 - RNA, 19 nt, Artificial Sequence
  Description of Artificial Sequence: Synthetic oligonucleotide
ucagguguuuaguaaaaga

SEQ ID NO: 2428386 - RNA, 19 nt, Artificial Sequence
  Description of Artificial Sequence: Synthetic oligonucleotide
uguuuucugaggcuugagc

SEQ ID NO: 2428387 - RNA, 19 nt, Artificial Sequence
  Description of Artificial Sequence: Synthetic oligonucleotide
uuugugcaauggaugaaag

SEQ ID NO: 2428388 - RNA, 19 nt, Artificial Sequence
  Description of Artificial Sequence: Synthetic oligonucleotide
uuacuuaugugugaagucu

SEQ ID NO: 2428389 - RNA, 19 nt, Artificial Sequence
  Description of Artificial Sequence: Synthetic oligonucleotide
uaagguuugugcaauggau

SEQ ID NO: 2428390 - RNA, 19 nt, Artificial Sequence
  Description of Artificial Sequence: Synthetic oligonucleotide
cacuguuugcacuuguagg

SEQ ID NO: 2428391 - RNA, 19 nt, Artificial Sequence
  Description of Artificial Sequence: Synthetic oligonucleotide
uuguacacuggguaaagga

SEQ ID NO: 2428392 - RNA, 19 nt, Artificial Sequence
  Description of Artificial Sequence: Synthetic oligonucleotide
uaaaagacgaacggucuag

SEQ ID NO: 2428393 - RNA, 19 nt, Artificial Sequence
  Description of Artificial Sequence: Synthetic oligonucleotide
agugaaggauuucccacac

SEQ ID NO: 2428394 - RNA, 19 nt, Artificial Sequence
  Description of Artificial Sequence: Synthetic oligonucleotide
uuaguaaaagacgaacggu

SEQ ID NO: 2428395 - RNA, 19 nt, Artificial Sequence
  Description of Artificial Sequence: Synthetic oligonucleotide
ucucugguguuucugaggu

SEQ ID NO: 2428396 - RNA, 19 nt, Artificial Sequence
  Description of Artificial Sequence: Synthetic oligonucleotide
cacucuuuacacuuguaag

SEQ ID NO: 2428397 - RNA, 19 nt, Artificial Sequence
  Description of Artificial Sequence: Synthetic oligonucleotide
uuuacuuaugugugaaguc

SEQ ID NO: 2428398 - RNA, 19 nt, Artificial Sequence
  Description of Artificial Sequence: Synthetic oligonucleotide
uaugugugaagucucuggu

SEQ ID NO: 2428399 - RNA, 19 nt, Artificial Sequence
  Description of Artificial Sequence: Synthetic oligonucleotide
ucugguguucacuaagugu

SEQ ID NO: 2428400 - RNA, 19 nt, Artificial Sequence
  Description of Artificial Sequence: Synthetic oligonucleotide
cuaaguguugagcuuuggg

SEQ ID NO: 2428401 - RNA, 19 nt, Artificial Sequence
  Description of Artificial Sequence: Synthetic oligonucleotide
uuuuauguguaguaagguu

SEQ ID NO: 2428402 - RNA, 19 nt, Artificial Sequence
  Description of Artificial Sequence: Synthetic oligonucleotide
agguguuuaguaaaagacg

SEQ ID NO: 2428403 - RNA, 19 nt, Artificial Sequence
  Description of Artificial Sequence: Synthetic oligonucleotide
aagacgaacggucuaguua

SEQ ID NO: 2428404 - RNA, 19 nt, Artificial Sequence
  Description of Artificial Sequence: Synthetic oligonucleotide
ugacuaagaauugagcagu

SEQ ID NO: 2428405 - RNA, 19 nt, Artificial Sequence
  Description of Artificial Sequence: Synthetic oligonucleotide
ucccguauggauucucugg

SEQ ID NO: 2428406 - RNA, 19 nt, Artificial Sequence
  Description of Artificial Sequence: Synthetic oligonucleotide
ucccgugugaacuaugcug

SEQ ID NO: 2428407 - RNA, 19 nt, Artificial Sequence
  Description of Artificial Sequence: Synthetic oligonucleotide
cugguuuuacuuaugugug

SEQ ID NO: 2428408 - RNA, 19 nt, Artificial Sequence
  Description of Artificial Sequence: Synthetic oligonucleotide
uguuuucuaaggcuugcac

SEQ ID NO: 2428409 - RNA, 19 nt, Artificial Sequence
  Description of Artificial Sequence: Synthetic oligonucleotide
uguacacuggguaaaggau

SEQ ID NO: 2428410 - RNA, 19 nt, Artificial Sequence
  Description of Artificial Sequence: Synthetic oligonucleotide
ugauugaacguugagucac

SEQ ID NO: 2428411 - RNA, 19 nt, Artificial Sequence
  Description of Artificial Sequence: Synthetic oligonucleotide
acucgucacauuuguaggg

SEQ ID NO: 2428412 - RNA, 19 nt, Artificial Sequence
  Description of Artificial Sequence: Synthetic oligonucleotide
aaggcuuguacacugggua

SEQ ID NO: 2428413 - RNA, 19 nt, Artificial Sequence
  Description of Artificial Sequence: Synthetic oligonucleotide
accucguguuuucuaaggc

SEQ ID NO: 2428414 - RNA, 19 nt, Artificial Sequence
  Description of Artificial Sequence: Synthetic oligonucleotide
uuucugggcauacugaguu

SEQ ID NO: 2428415 - RNA, 19 nt, Artificial Sequence
  Description of Artificial Sequence: Synthetic oligonucleotide
aggauuucugggcauacug

SEQ ID NO: 2428416 - RNA, 19 nt, Artificial Sequence
  Description of Artificial Sequence: Synthetic oligonucleotide
auucugcacaccuguaggg

SEQ ID NO: 2428417 - RNA, 19 nt, Artificial Sequence
  Description of Artificial Sequence: Synthetic oligonucleotide
uaagguuugagguuugauu

SEQ ID NO: 2428418 - RNA, 19 nt, Artificial Sequence
  Description of Artificial Sequence: Synthetic oligonucleotide
uucuaaggcuugcacacug

SEQ ID NO: 2428419 - RNA, 19 nt, Artificial Sequence
  Description of Artificial Sequence: Synthetic oligonucleotide
gagguuugaacacugacua

SEQ ID NO: 2428420 - RNA, 19 nt, Artificial Sequence
  Description of Artificial Sequence: Synthetic oligonucleotide
uaagaauugagcagugguu

SEQ ID NO: 2428421 - RNA, 19 nt, Artificial Sequence
  Description of Artificial Sequence: Synthetic oligonucleotide
ugcugacuaagaauugagc

SEQ ID NO: 2428422 - RNA, 19 nt, Artificial Sequence
  Description of Artificial Sequence: Synthetic oligonucleotide
ugagcagugguuaaagcuu

SEQ ID NO: 2428423 - RNA, 19 nt, Artificial Sequence
  Description of Artificial Sequence: Synthetic oligonucleotide
agacgaacggucuaguuaa

SEQ ID NO: 2428424 - RNA, 19 nt, Artificial Sequence
  Description of Artificial Sequence: Synthetic oligonucleotide
ugucugguuuuacuuaugu

SEQ ID NO: 2428425 - RNA, 19 nt, Artificial Sequence
  Description of Artificial Sequence: Synthetic oligonucleotide
ugguuaaagcuucugccac

SEQ ID NO: 2428426 - RNA, 19 nt, Artificial Sequence
  Description of Artificial Sequence: Synthetic oligonucleotide
cuguguuuaguguaacuug

SEQ ID NO: 2428427 - RNA, 19 nt, Artificial Sequence
  Description of Artificial Sequence: Synthetic oligonucleotide
aagaauugagcagugguua

SEQ ID NO: 2428428 - RNA, 19 nt, Artificial Sequence
  Description of Artificial Sequence: Synthetic oligonucleotide
acacuguuugcacuuguag

SEQ ID NO: 2428429 - RNA, 19 nt, Artificial Sequence
  Description of Artificial Sequence: Synthetic oligonucleotide
uuuucugaggcuugagcac

SEQ ID NO: 2428430 - RNA, 19 nt, Artificial Sequence
  Description of Artificial Sequence: Synthetic oligonucleotide
aguguaacuugagcaauac

SEQ ID NO: 2428431 - RNA, 19 nt, Artificial Sequence
  Description of Artificial Sequence: Synthetic oligonucleotide
uccacauaauuuacauuug

SEQ ID NO: 2428432 - RNA, 19 nt, Artificial Sequence
  Description of Artificial Sequence: Synthetic oligonucleotide
acauucugcacaccuguag

SEQ ID NO: 2428433 - RNA, 19 nt, Artificial Sequence
  Description of Artificial Sequence: Synthetic oligonucleotide
uguucacuaaguguugagc

SEQ ID NO: 2428434 - RNA, 19 nt, Artificial Sequence
  Description of Artificial Sequence: Synthetic oligonucleotide
uaccucguguuuucuaagg

SEQ ID NO: 2428435 - RNA, 19 nt, Artificial Sequence
  Description of Artificial Sequence: Synthetic oligonucleotide
aagguuugugcaauggaug

SEQ ID NO: 2428436 - RNA, 19 nt, Artificial Sequence
  Description of Artificial Sequence: Synthetic oligonucleotide
gaggcuugagcacugggug

SEQ ID NO: 2428437 - RNA, 19 nt, Artificial Sequence
  Description of Artificial Sequence: Synthetic oligonucleotide
guuucugagguuugaacac

SEQ ID NO: 2428438 - RNA, 19 nt, Artificial Sequence
  Description of Artificial Sequence: Synthetic oligonucleotide
cacuguucacauuuguaag

SEQ ID NO: 2428439 - RNA, 19 nt, Artificial Sequence
  Description of Artificial Sequence: Synthetic oligonucleotide
uaugcuguguuuaguguaa

SEQ ID NO: 2428440 - RNA, 19 nt, Artificial Sequence
  Description of Artificial Sequence: Synthetic oligonucleotide
uuugucugguuuuacuuau

SEQ ID NO: 2428441 - RNA, 19 nt, Artificial Sequence
  Description of Artificial Sequence: Synthetic oligonucleotide
uguaguaagguuugagguu

SEQ ID NO: 2428442 - RNA, 19 nt, Artificial Sequence
  Description of Artificial Sequence: Synthetic oligonucleotide
uccucugguguucacuaag

SEQ ID NO: 2428443 - RNA, 19 nt, Artificial Sequence
  Description of Artificial Sequence: Synthetic oligonucleotide
uuuugucugguuuuacuua

SEQ ID NO: 2428444 - RNA, 19 nt, Artificial Sequence
  Description of Artificial Sequence: Synthetic oligonucleotide
uaacuugagcaauacuuaa

SEQ ID NO: 2428445 - RNA, 19 nt, Artificial Sequence
  Description of Artificial Sequence: Synthetic oligonucleotide
cacucgucacauuuguagg

SEQ ID NO: 2428446 - RNA, 19 nt, Artificial Sequence
  Description of Artificial Sequence: Synthetic oligonucleotide
uugagguuugauugaacgu

SEQ ID NO: 2428447 - RNA, 19 nt, Artificial Sequence
  Description of Artificial Sequence: Synthetic oligonucleotide
agguuugugcaauggauga

SEQ ID NO: 2428448 - RNA, 19 nt, Artificial Sequence
  Description of Artificial Sequence: Synthetic oligonucleotide
ugaguuuuauguguaguaa

SEQ ID NO: 2428449 - RNA, 19 nt, Artificial Sequence
  Description of Artificial Sequence: Synthetic oligonucleotide
aagucucugguguuucuga

SEQ ID NO: 2428450 - RNA, 19 nt, Artificial Sequence
  Description of Artificial Sequence: Synthetic oligonucleotide
auuaccucguguuuucuaa

SEQ ID NO: 2428451 - RNA, 19 nt, Artificial Sequence
  Description of Artificial Sequence: Synthetic oligonucleotide
guugcguaagguuugugca

SEQ ID NO: 2428452 - RNA, 19 nt, Artificial Sequence
  Description of Artificial Sequence: Synthetic oligonucleotide
uugauugaacguugaguca

SEQ ID NO: 2428453 - RNA, 19 nt, Artificial Sequence
  Description of Artificial Sequence: Synthetic oligonucleotide
ugaggcuugagcacugggu

SEQ ID NO: 2428454 - RNA, 19 nt, Artificial Sequence
  Description of Artificial Sequence: Synthetic oligonucleotide
ucuggugcugacuaagaau

SEQ ID NO: 2428455 - RNA, 19 nt, Artificial Sequence
  Description of Artificial Sequence: Synthetic oligonucleotide
uugugcaauggaugaaagc

SEQ ID NO: 2428456 - RNA, 19 nt, Artificial Sequence
  Description of Artificial Sequence: Synthetic oligonucleotide
ugagguuugauugaacguu

SEQ ID NO: 2428457 - RNA, 19 nt, Artificial Sequence
  Description of Artificial Sequence: Synthetic oligonucleotide
ugcaauggaugaaagcuuu

SEQ ID NO: 2428458 - RNA, 19 nt, Artificial Sequence
  Description of Artificial Sequence: Synthetic oligonucleotide
uucugagguuugaacacug

SEQ ID NO: 2428459 - RNA, 19 nt, Artificial Sequence
  Description of Artificial Sequence: Synthetic oligonucleotide
ucucccgugugaacuaugc

SEQ ID NO: 2428460 - RNA, 19 nt, Artificial Sequence
  Description of Artificial Sequence: Synthetic oligonucleotide
gcugacuaagaauugagca

SEQ ID NO: 2428461 - RNA, 19 nt, Artificial Sequence
  Description of Artificial Sequence: Synthetic oligonucleotide
acuaugcuguguuuagugu

SEQ ID NO: 2428462 - RNA, 19 nt, Artificial Sequence
  Description of Artificial Sequence: Synthetic oligonucleotide
uacuuaugugugaagucuc

SEQ ID NO: 2428463 - RNA, 19 nt, Artificial Sequence
  Description of Artificial Sequence: Synthetic oligonucleotide
aacguugagucacaaucua

SEQ ID NO: 2428464 - RNA, 19 nt, Artificial Sequence
  Description of Artificial Sequence: Synthetic oligonucleotide
cacugacuaaagcauuucc

SEQ ID NO: 2428465 - RNA, 19 nt, Artificial Sequence
  Description of Artificial Sequence: Synthetic oligonucleotide
caauggaugaaagcuuugc

SEQ ID NO: 2428466 - RNA, 19 nt, Artificial Sequence
  Description of Artificial Sequence: Synthetic oligonucleotide
acuaagaauugagcagugg

SEQ ID NO: 2428467 - RNA, 19 nt, Artificial Sequence
  Description of Artificial Sequence: Synthetic oligonucleotide
uucucuccgguguggaucc

SEQ ID NO: 2428468 - RNA, 19 nt, Artificial Sequence
  Description of Artificial Sequence: Synthetic oligonucleotide
aaagcuucugccacacucu

SEQ ID NO: 2428469 - RNA, 19 nt, Artificial Sequence
  Description of Artificial Sequence: Synthetic oligonucleotide
cucugguguuuucugaggc

SEQ ID NO: 2428470 - RNA, 19 nt, Artificial Sequence
  Description of Artificial Sequence: Synthetic oligonucleotide
aguaaaagacgaacggucu

SEQ ID NO: 2428471 - RNA, 19 nt, Artificial Sequence
  Description of Artificial Sequence: Synthetic oligonucleotide
guuuuacuuaugugugaag

SEQ ID NO: 2428472 - RNA, 19 nt, Artificial Sequence
  Description of Artificial Sequence: Synthetic oligonucleotide
gguguuuaguaaaagacga

SEQ ID NO: 2428473 - RNA, 19 nt, Artificial Sequence
  Description of Artificial Sequence: Synthetic oligonucleotide
ggauuuuccacauaauuua

SEQ ID NO: 2428474 - RNA, 19 nt, Artificial Sequence
  Description of Artificial Sequence: Synthetic oligonucleotide
uuaccucguguuuucuaag

SEQ ID NO: 2428475 - RNA, 19 nt, Artificial Sequence
  Description of Artificial Sequence: Synthetic oligonucleotide
uaaggcuuguacacugggu

SEQ ID NO: 2428476 - RNA, 19 nt, Artificial Sequence
  Description of Artificial Sequence: Synthetic oligonucleotide
ucugguguugcguaagguu

SEQ ID NO: 2428477 - RNA, 19 nt, Artificial Sequence
  Description of Artificial Sequence: Synthetic oligonucleotide
uguuugcacuuguagggcu

SEQ ID NO: 2428478 - RNA, 19 nt, Artificial Sequence
  Description of Artificial Sequence: Synthetic oligonucleotide
ugguuuuacuuauguguga

SEQ ID NO: 2428479 - RNA, 19 nt, Artificial Sequence
  Description of Artificial Sequence: Synthetic oligonucleotide
guuugaacacugacuaaag

SEQ ID NO: 2428480 - RNA, 19 nt, Artificial Sequence
  Description of Artificial Sequence: Synthetic oligonucleotide
uccucagguguuuaguaaa

SEQ ID NO: 2428481 - RNA, 19 nt, Artificial Sequence
  Description of Artificial Sequence: Synthetic oligonucleotide
ugguguugcguaagguuug

SEQ ID NO: 2428482 - RNA, 19 nt, Artificial Sequence
  Description of Artificial Sequence: Synthetic oligonucleotide
ucguguuuucuaaggcuug

SEQ ID NO: 2428483 - RNA, 19 nt, Artificial Sequence
  Description of Artificial Sequence: Synthetic oligonucleotide
cacugagugaaggauuucc

SEQ ID NO: 2428484 - RNA, 19 nt, Artificial Sequence
  Description of Artificial Sequence: Synthetic oligonucleotide
aguguugagcuuuggguaa

SEQ ID NO: 2428485 - RNA, 19 nt, Artificial Sequence
  Description of Artificial Sequence: Synthetic oligonucleotide
ucugcacaccuguagggcu

SEQ ID NO: 2428486 - RNA, 19 nt, Artificial Sequence
  Description of Artificial Sequence: Synthetic oligonucleotide
aguuaaaggccuugccgca

SEQ ID NO: 2428487 - RNA, 19 nt, Artificial Sequence
  Description of Artificial Sequence: Synthetic oligonucleotide
aaggccuugccgcaguuuu

SEQ ID NO: 2428488 - RNA, 19 nt, Artificial Sequence
  Description of Artificial Sequence: Synthetic oligonucleotide
uuaguguaacuugagcaau

SEQ ID NO: 2428489 - RNA, 19 nt, Artificial Sequence
  Description of Artificial Sequence: Synthetic oligonucleotide
ugggugaaggacuucccac

SEQ ID NO: 2428490 - RNA, 19 nt, Artificial Sequence
  Description of Artificial Sequence: Synthetic oligonucleotide
gugguuaaagcuucugcca

SEQ ID NO: 2428491 - RNA, 19 nt, Artificial Sequence
  Description of Artificial Sequence: Synthetic oligonucleotide
uaaggcuugcacacugagu

SEQ ID NO: 2428492 - RNA, 19 nt, Artificial Sequence
  Description of Artificial Sequence: Synthetic oligonucleotide
ucugguguuucugagguuu

SEQ ID NO: 2428493 - RNA, 19 nt, Artificial Sequence
  Description of Artificial Sequence: Synthetic oligonucleotide
aaagacgaacggucuaguu

SEQ ID NO: 2428494 - RNA, 19 nt, Artificial Sequence
  Description of Artificial Sequence: Synthetic oligonucleotide
guguaguaagguuugaggu

SEQ ID NO: 2428495 - RNA, 19 nt, Artificial Sequence
  Description of Artificial Sequence: Synthetic oligonucleotide
guucacuaaguguugagcu

SEQ ID NO: 2428496 - RNA, 19 nt, Artificial Sequence
  Description of Artificial Sequence: Synthetic oligonucleotide
ucuaaggcuugcacacuga

SEQ ID NO: 2428497 - RNA, 19 nt, Artificial Sequence
  Description of Artificial Sequence: Synthetic oligonucleotide
gagguuugauugaacguug

SEQ ID NO: 2428498 - RNA, 19 nt, Artificial Sequence
  Description of Artificial Sequence: Synthetic oligonucleotide
agucucugguguuucugag

SEQ ID NO: 2428499 - RNA, 19 nt, Artificial Sequence
  Description of Artificial Sequence: Synthetic oligonucleotide
uuucugaggcuugagcacu

SEQ ID NO: 2428500 - RNA, 19 nt, Artificial Sequence
  Description of Artificial Sequence: Synthetic oligonucleotide
gucucugguguuucugagg

SEQ ID NO: 2428501 - RNA, 19 nt, Artificial Sequence
  Description of Artificial Sequence: Synthetic oligonucleotide
ucugagguuugaacacuga

SEQ ID NO: 2428502 - RNA, 19 nt, Artificial Sequence
  Description of Artificial Sequence: Synthetic oligonucleotide
aaaagacgaacggucuagu

SEQ ID NO: 2428503 - RNA, 19 nt, Artificial Sequence
  Description of Artificial Sequence: Synthetic oligonucleotide
guaagguuugugcaaugga

SEQ ID NO: 2428504 - RNA, 19 nt, Artificial Sequence
  Description of Artificial Sequence: Synthetic oligonucleotide
cuaagaauugagcaguggu

SEQ ID NO: 2428505 - RNA, 19 nt, Artificial Sequence
  Description of Artificial Sequence: Synthetic oligonucleotide
aguguggauuaccucgugu

SEQ ID NO: 2428506 - RNA, 19 nt, Artificial Sequence
  Description of Artificial Sequence: Synthetic oligonucleotide
uugagcacugggugaagga

SEQ ID NO: 2428507 - RNA, 19 nt, Artificial Sequence
  Description of Artificial Sequence: Synthetic oligonucleotide
ugguguucacuaaguguug

SEQ ID NO: 2428508 - RNA, 19 nt, Artificial Sequence
  Description of Artificial Sequence: Synthetic oligonucleotide
uguggauuaccucguguuu

SEQ ID NO: 2428509 - RNA, 19 nt, Artificial Sequence
  Description of Artificial Sequence: Synthetic oligonucleotide
guguuucugagguuugaac

SEQ ID NO: 2428510 - RNA, 19 nt, Artificial Sequence
  Description of Artificial Sequence: Synthetic oligonucleotide
uucacuaaguguugagcuu

SEQ ID NO: 2428511 - RNA, 19 nt, Artificial Sequence
  Description of Artificial Sequence: Synthetic oligonucleotide
acauuuugucugguuuuac

SEQ ID NO: 2428512 - RNA, 19 nt, Artificial Sequence
  Description of Artificial Sequence: Synthetic oligonucleotide
agaauugagcagugguuaa

SEQ ID NO: 2428513 - RNA, 19 nt, Artificial Sequence
  Description of Artificial Sequence: Synthetic oligonucleotide
uuucugagguuugaacacu

SEQ ID NO: 2428514 - RNA, 19 nt, Artificial Sequence
  Description of Artificial Sequence: Synthetic oligonucleotide
uucugcacaccuguagggc

SEQ ID NO: 2428515 - RNA, 19 nt, Artificial Sequence
  Description of Artificial Sequence: Synthetic oligonucleotide
aacuugagcaauacuuaaa

SEQ ID NO: 2428516 - RNA, 19 nt, Artificial Sequence
  Description of Artificial Sequence: Synthetic oligonucleotide
cuuguacacuggguaaagg

SEQ ID NO: 2428517 - RNA, 19 nt, Artificial Sequence
  Description of Artificial Sequence: Synthetic oligonucleotide
gucugguuuuacuuaugug

SEQ ID NO: 2428518 - RNA, 19 nt, Artificial Sequence
  Description of Artificial Sequence: Synthetic oligonucleotide
aacacugacuaaagcauuu

SEQ ID NO: 2428519 - RNA, 19 nt, Artificial Sequence
  Description of Artificial Sequence: Synthetic oligonucleotide
cuugagcacugggugaagg

SEQ ID NO: 2428520 - RNA, 19 nt, Artificial Sequence
  Description of Artificial Sequence: Synthetic oligonucleotide
uggauuaccucguguuuuc

SEQ ID NO: 2428521 - RNA, 19 nt, Artificial Sequence
  Description of Artificial Sequence: Synthetic oligonucleotide
uggauccucagguguuuag

SEQ ID NO: 2428522 - RNA, 19 nt, Artificial Sequence
  Description of Artificial Sequence: Synthetic oligonucleotide
uggauucucugguguugcg

SEQ ID NO: 2428523 - RNA, 19 nt, Artificial Sequence
  Description of Artificial Sequence: Synthetic oligonucleotide
ucacuaaguguugagcuuu

SEQ ID NO: 2428524 - RNA, 19 nt, Artificial Sequence
  Description of Artificial Sequence: Synthetic oligonucleotide
guuaaagcuucugccacac

SEQ ID NO: 2428525 - RNA, 19 nt, Artificial Sequence
  Description of Artificial Sequence: Synthetic oligonucleotide
agguuugagguuugauuga

SEQ ID NO: 2428526 - RNA, 19 nt, Artificial Sequence
  Description of Artificial Sequence: Synthetic oligonucleotide
uggugcugacuaagaauug

SEQ ID NO: 2428527 - RNA, 19 nt, Artificial Sequence
  Description of Artificial Sequence: Synthetic oligonucleotide
ugcacacugagugaaggau

SEQ ID NO: 2428528 - RNA, 19 nt, Artificial Sequence
  Description of Artificial Sequence: Synthetic oligonucleotide
aggcuuugccacauucugc

SEQ ID NO: 2428529 - RNA, 19 nt, Artificial Sequence
  Description of Artificial Sequence: Synthetic oligonucleotide
guguucacuaaguguugag

SEQ ID NO: 2428530 - RNA, 19 nt, Artificial Sequence
  Description of Artificial Sequence: Synthetic oligonucleotide
uugcacacugagugaagga

SEQ ID NO: 2428531 - RNA, 19 nt, Artificial Sequence
  Description of Artificial Sequence: Synthetic oligonucleotide
gaagucucugguguuucug

SEQ ID NO: 2428532 - RNA, 19 nt, Artificial Sequence
  Description of Artificial Sequence: Synthetic oligonucleotide
ugcuguguuuaguguaacu

SEQ ID NO: 2428533 - RNA, 19 nt, Artificial Sequence
  Description of Artificial Sequence: Synthetic oligonucleotide
acacugacuaaagcauuuc

SEQ ID NO: 2428534 - RNA, 19 nt, Artificial Sequence
  Description of Artificial Sequence: Synthetic oligonucleotide
cuuuggguaaaggcuuugc

SEQ ID NO: 2428535 - RNA, 19 nt, Artificial Sequence
  Description of Artificial Sequence: Synthetic oligonucleotide
uugcguaagguuugugcaa

SEQ ID NO: 2428536 - RNA, 19 nt, Artificial Sequence
  Description of Artificial Sequence: Synthetic oligonucleotide
gguuugauugaacguugag

SEQ ID NO: 2428537 - RNA, 19 nt, Artificial Sequence
  Description of Artificial Sequence: Synthetic oligonucleotide
gcauacugaguuuuaugug

SEQ ID NO: 2428538 - RNA, 19 nt, Artificial Sequence
  Description of Artificial Sequence: Synthetic oligonucleotide
guuugauugaacguugagu

SEQ ID NO: 2428539 - RNA, 19 nt, Artificial Sequence
  Description of Artificial Sequence: Synthetic oligonucleotide
ucuccgguguggauccuca

SEQ ID NO: 2428540 - RNA, 19 nt, Artificial Sequence
  Description of Artificial Sequence: Synthetic oligonucleotide
guaacuugagcaauacuua

SEQ ID NO: 2428541 - RNA, 19 nt, Artificial Sequence
  Description of Artificial Sequence: Synthetic oligonucleotide
gauccucugguguucacua

SEQ ID NO: 2428542 - RNA, 19 nt, Artificial Sequence
  Description of Artificial Sequence: Synthetic oligonucleotide
gugcugacuaagaauugag

SEQ ID NO: 2428543 - RNA, 19 nt, Artificial Sequence
  Description of Artificial Sequence: Synthetic oligonucleotide
guugagcuuuggguaaagg

SEQ ID NO: 2428544 - RNA, 19 nt, Artificial Sequence
  Description of Artificial Sequence: Synthetic oligonucleotide
cacugggugaaggacuucc

SEQ ID NO: 2428545 - RNA, 19 nt, Artificial Sequence
  Description of Artificial Sequence: Synthetic oligonucleotide
cugaguuuuauguguagua

SEQ ID NO: 2428546 - RNA, 19 nt, Artificial Sequence
  Description of Artificial Sequence: Synthetic oligonucleotide
cuuaugugugaagucucug

SEQ ID NO: 2428547 - RNA, 19 nt, Artificial Sequence
  Description of Artificial Sequence: Synthetic oligonucleotide
ggcauacugaguuuuaugu

SEQ ID NO: 2428548 - RNA, 19 nt, Artificial Sequence
  Description of Artificial Sequence: Synthetic oligonucleotide
cuguuugcacuuguagggc

SEQ ID NO: 2428549 - RNA, 19 nt, Artificial Sequence
  Description of Artificial Sequence: Synthetic oligonucleotide
cgaacggucuaguuaaagg

SEQ ID NO: 2428550 - RNA, 19 nt, Artificial Sequence
  Description of Artificial Sequence: Synthetic oligonucleotide
gcuucugccacacucuuca

SEQ ID NO: 2428551 - RNA, 19 nt, Artificial Sequence
  Description of Artificial Sequence: Synthetic oligonucleotide
ugccgcaguuuucacauuu

SEQ ID NO: 2428552 - RNA, 19 nt, Artificial Sequence
  Description of Artificial Sequence: Synthetic oligonucleotide
gauccucagguguuuagua

SEQ ID NO: 2428553 - RNA, 19 nt, Artificial Sequence
  Description of Artificial Sequence: Synthetic oligonucleotide
uucugaggcuugagcacug

SEQ ID NO: 2428554 - RNA, 19 nt, Artificial Sequence
  Description of Artificial Sequence: Synthetic oligonucleotide
cucugguguucacuaagug

SEQ ID NO: 2428555 - RNA, 19 nt, Artificial Sequence
  Description of Artificial Sequence: Synthetic oligonucleotide
acuaaguguugagcuuugg

SEQ ID NO: 2428556 - RNA, 19 nt, Artificial Sequence
  Description of Artificial Sequence: Synthetic oligonucleotide
cucagguguuuaguaaaag

SEQ ID NO: 2428557 - RNA, 19 nt, Artificial Sequence
  Description of Artificial Sequence: Synthetic oligonucleotide
auccucagguguuuaguaa

SEQ ID NO: 2428558 - RNA, 19 nt, Artificial Sequence
  Description of Artificial Sequence: Synthetic oligonucleotide
ugaagucucugguguuucu

SEQ ID NO: 2428559 - RNA, 19 nt, Artificial Sequence
  Description of Artificial Sequence: Synthetic oligonucleotide
cuaugcuguguuuagugua

SEQ ID NO: 2428560 - RNA, 19 nt, Artificial Sequence
  Description of Artificial Sequence: Synthetic oligonucleotide
guuaaaggccuugccgcag

SEQ ID NO: 2428561 - RNA, 19 nt, Artificial Sequence
  Description of Artificial Sequence: Synthetic oligonucleotide
guguuuaguguaacuugag

SEQ ID NO: 2428562 - RNA, 19 nt, Artificial Sequence
  Description of Artificial Sequence: Synthetic oligonucleotide
guuugugcaauggaugaaa

SEQ ID NO: 2428563 - RNA, 19 nt, Artificial Sequence
  Description of Artificial Sequence: Synthetic oligonucleotide
guaaaagacgaacggucua

SEQ ID NO: 2428564 - RNA, 19 nt, Artificial Sequence
  Description of Artificial Sequence: Synthetic oligonucleotide
gucuaguuaaaggccuugc

SEQ ID NO: 2428565 - RNA, 19 nt, Artificial Sequence
  Description of Artificial Sequence: Synthetic oligonucleotide
uauguguaguaagguuuga

SEQ ID NO: 2428566 - RNA, 19 nt, Artificial Sequence
  Description of Artificial Sequence: Synthetic oligonucleotide
uguugagcuuuggguaaag

SEQ ID NO: 2428567 - RNA, 19 nt, Artificial Sequence
  Description of Artificial Sequence: Synthetic oligonucleotide
gguuugaacacugacuaaa

SEQ ID NO: 2428568 - RNA, 19 nt, Artificial Sequence
  Description of Artificial Sequence: Synthetic oligonucleotide
gauuaccucguguuuucua

SEQ ID NO: 2428569 - RNA, 19 nt, Artificial Sequence
  Description of Artificial Sequence: Synthetic oligonucleotide
uugaacguugagucacaau

SEQ ID NO: 2428570 - RNA, 19 nt, Artificial Sequence
  Description of Artificial Sequence: Synthetic oligonucleotide
acgaacggucuaguuaaag

SEQ ID NO: 2428571 - RNA, 19 nt, Artificial Sequence
  Description of Artificial Sequence: Synthetic oligonucleotide
cugaggcuugagcacuggg

SEQ ID NO: 2428572 - RNA, 19 nt, Artificial Sequence
  Description of Artificial Sequence: Synthetic oligonucleotide
ucugggcauacugaguuuu

SEQ ID NO: 2428573 - RNA, 19 nt, Artificial Sequence
  Description of Artificial Sequence: Synthetic oligonucleotide
uauggauccucugguguuc

SEQ ID NO: 2428574 - RNA, 19 nt, Artificial Sequence
  Description of Artificial Sequence: Synthetic oligonucleotide
ugcguaagguuugugcaau

SEQ ID NO: 2428575 - RNA, 19 nt, Artificial Sequence
  Description of Artificial Sequence: Synthetic oligonucleotide
uguucacauuuguaagguu

SEQ ID NO: 2428576 - RNA, 19 nt, Artificial Sequence
  Description of Artificial Sequence: Synthetic oligonucleotide
uguaggauuucugggcaua

SEQ ID NO: 2428577 - RNA, 19 nt, Artificial Sequence
  Description of Artificial Sequence: Synthetic oligonucleotide
ucugaggcuugagcacugg

SEQ ID NO: 2428578 - RNA, 19 nt, Artificial Sequence
  Description of Artificial Sequence: Synthetic oligonucleotide
acuuaugugugaagucucu

SEQ ID NO: 2428579 - RNA, 19 nt, Artificial Sequence
  Description of Artificial Sequence: Synthetic oligonucleotide
uuucuaaggcuugcacacu

SEQ ID NO: 2428580 - RNA, 19 nt, Artificial Sequence
  Description of Artificial Sequence: Synthetic oligonucleotide
aggcuuguacacuggguaa

SEQ ID NO: 2428581 - RNA, 19 nt, Artificial Sequence
  Description of Artificial Sequence: Synthetic oligonucleotide
acggucuaguuaaaggccu

SEQ ID NO: 2428582 - RNA, 19 nt, Artificial Sequence
  Description of Artificial Sequence: Synthetic oligonucleotide
guuuuauguguaguaaggu

SEQ ID NO: 2428583 - RNA, 19 nt, Artificial Sequence
  Description of Artificial Sequence: Synthetic oligonucleotide
cacuaaguguugagcuuug

SEQ ID NO: 2428584 - RNA, 19 nt, Artificial Sequence
  Description of Artificial Sequence: Synthetic oligonucleotide
gaacguugagucacaaucu

SEQ ID NO: 2428585 - RNA, 19 nt, Artificial Sequence
  Description of Artificial Sequence: Synthetic oligonucleotide
gagcagugguuaaagcuuc

SEQ ID NO: 2428586 - RNA, 19 nt, Artificial Sequence
  Description of Artificial Sequence: Synthetic oligonucleotide
aggcuugagcacuggguga

SEQ ID NO: 2428587 - RNA, 19 nt, Artificial Sequence
  Description of Artificial Sequence: Synthetic oligonucleotide
cuggugcugacuaagaauu

SEQ ID NO: 2428588 - RNA, 19 nt, Artificial Sequence
  Description of Artificial Sequence: Synthetic oligonucleotide
augcuguguuuaguguaac

SEQ ID NO: 2428589 - RNA, 19 nt, Artificial Sequence
  Description of Artificial Sequence: Synthetic oligonucleotide
cuugccgcaguuuucacau

SEQ ID NO: 2428590 - RNA, 19 nt, Artificial Sequence
  Description of Artificial Sequence: Synthetic oligonucleotide
cauuuugucugguuuuacu

SEQ ID NO: 2428591 - RNA, 19 nt, Artificial Sequence
  Description of Artificial Sequence: Synthetic oligonucleotide
gggcauacugaguuuuaug

SEQ ID NO: 2428592 - RNA, 19 nt, Artificial Sequence
  Description of Artificial Sequence: Synthetic oligonucleotide
ggugaaggacuucccacac

SEQ ID NO: 2428593 - RNA, 19 nt, Artificial Sequence
  Description of Artificial Sequence: Synthetic oligonucleotide
auuucugggcauacugagu

SEQ ID NO: 2428594 - RNA, 19 nt, Artificial Sequence
  Description of Artificial Sequence: Synthetic oligonucleotide
agguuugaacacugacuaa

SEQ ID NO: 2428595 - RNA, 19 nt, Artificial Sequence
  Description of Artificial Sequence: Synthetic oligonucleotide
gauugaacguugagucaca

SEQ ID NO: 2428596 - RNA, 19 nt, Artificial Sequence
  Description of Artificial Sequence: Synthetic oligonucleotide
cugguguuucugagguuug

SEQ ID NO: 2428597 - RNA, 19 nt, Artificial Sequence
  Description of Artificial Sequence: Synthetic oligonucleotide
uaggauuucugggcauacu

SEQ ID NO: 2428598 - RNA, 19 nt, Artificial Sequence
  Description of Artificial Sequence: Synthetic oligonucleotide
gguuaaagcuucugccaca

SEQ ID NO: 2428599 - RNA, 19 nt, Artificial Sequence
  Description of Artificial Sequence: Synthetic oligonucleotide
guaggauuucugggcauac

SEQ ID NO: 2428600 - RNA, 19 nt, Artificial Sequence
  Description of Artificial Sequence: Synthetic oligonucleotide
guaguaagguuugagguuu

SEQ ID NO: 2428601 - RNA, 19 nt, Artificial Sequence
  Description of Artificial Sequence: Synthetic oligonucleotide
agcaauacuuaaaggcuuu

SEQ ID NO: 2428602 - RNA, 19 nt, Artificial Sequence
  Description of Artificial Sequence: Synthetic oligonucleotide
ugguguuucugagguuuga

SEQ ID NO: 2428603 - RNA, 19 nt, Artificial Sequence
  Description of Artificial Sequence: Synthetic oligonucleotide
aguaagguuugagguuuga

SEQ ID NO: 2428604 - RNA, 19 nt, Artificial Sequence
  Description of Artificial Sequence: Synthetic oligonucleotide
ugggcauacugaguuuuau

SEQ ID NO: 2428605 - RNA, 19 nt, Artificial Sequence
  Description of Artificial Sequence: Synthetic oligonucleotide
guuugagguuugauugaac

SEQ ID NO: 2428606 - RNA, 19 nt, Artificial Sequence
  Description of Artificial Sequence: Synthetic oligonucleotide
acacugagugaaggauuuc

SEQ ID NO: 2428607 - RNA, 19 nt, Artificial Sequence
  Description of Artificial Sequence: Synthetic oligonucleotide
auugaacguugagucacaa

SEQ ID NO: 2428608 - RNA, 19 nt, Artificial Sequence
  Description of Artificial Sequence: Synthetic oligonucleotide
ggugcugacuaagaauuga

SEQ ID NO: 2428609 - RNA, 19 nt, Artificial Sequence
  Description of Artificial Sequence: Synthetic oligonucleotide
guguuuucugaggcuugag

SEQ ID NO: 2428610 - RNA, 19 nt, Artificial Sequence
  Description of Artificial Sequence: Synthetic oligonucleotide
guguuuaguaaaagacgaa

SEQ ID NO: 2428611 - RNA, 19 nt, Artificial Sequence
  Description of Artificial Sequence: Synthetic oligonucleotide
agguuugauugaacguuga

SEQ ID NO: 2428612 - RNA, 19 nt, Artificial Sequence
  Description of Artificial Sequence: Synthetic oligonucleotide
cucguguuuucuaaggcuu

SEQ ID NO: 2428613 - RNA, 19 nt, Artificial Sequence
  Description of Artificial Sequence: Synthetic oligonucleotide
uucugggcauacugaguuu

SEQ ID NO: 2428614 - RNA, 19 nt, Artificial Sequence
  Description of Artificial Sequence: Synthetic oligonucleotide
cguaagguuugugcaaugg

SEQ ID NO: 2428615 - RNA, 19 nt, Artificial Sequence
  Description of Artificial Sequence: Synthetic oligonucleotide
gcuuguacacuggguaaag

SEQ ID NO: 2428616 - RNA, 19 nt, Artificial Sequence
  Description of Artificial Sequence: Synthetic oligonucleotide
ggauuucugggcauacuga

SEQ ID NO: 2428617 - RNA, 19 nt, Artificial Sequence
  Description of Artificial Sequence: Synthetic oligonucleotide
cugguguugcguaagguuu

SEQ ID NO: 2428618 - RNA, 19 nt, Artificial Sequence
  Description of Artificial Sequence: Synthetic oligonucleotide
agcuucugccacacucuuc

SEQ ID NO: 2428619 - RNA, 19 nt, Artificial Sequence
  Description of Artificial Sequence: Synthetic oligonucleotide
uguggauccucagguguuu

SEQ ID NO: 2428620 - RNA, 19 nt, Artificial Sequence
  Description of Artificial Sequence: Synthetic oligonucleotide
gagcaauacuuaaaggcuu

SEQ ID NO: 2428621 - RNA, 19 nt, Artificial Sequence
  Description of Artificial Sequence: Synthetic oligonucleotide
guguggauuaccucguguu

SEQ ID NO: 2428622 - RNA, 19 nt, Artificial Sequence
  Description of Artificial Sequence: Synthetic oligonucleotide
ggucuaguuaaaggccuug

SEQ ID NO: 2428623 - RNA, 19 nt, Artificial Sequence
  Description of Artificial Sequence: Synthetic oligonucleotide
cuguucacauuuguaaggu

SEQ ID NO: 2428624 - RNA, 19 nt, Artificial Sequence
  Description of Artificial Sequence: Synthetic oligonucleotide
acguugagucacaaucuau

SEQ ID NO: 2428625 - RNA, 19 nt, Artificial Sequence
  Description of Artificial Sequence: Synthetic oligonucleotide
guguuuucuaaggcuugca

SEQ ID NO: 2428626 - RNA, 19 nt, Artificial Sequence
  Description of Artificial Sequence: Synthetic oligonucleotide
gcaauacuuaaaggcuuug

SEQ ID NO: 2428627 - RNA, 19 nt, Artificial Sequence
  Description of Artificial Sequence: Synthetic oligonucleotide
cucucccgugugaacuaug

SEQ ID NO: 2428628 - RNA, 19 nt, Artificial Sequence
  Description of Artificial Sequence: Synthetic oligonucleotide
gguguucacuaaguguuga

SEQ ID NO: 2428629 - RNA, 19 nt, Artificial Sequence
  Description of Artificial Sequence: Synthetic oligonucleotide
gagcuuuggguaaaggcuu

SEQ ID NO: 2428630 - RNA, 19 nt, Artificial Sequence
  Description of Artificial Sequence: Synthetic oligonucleotide
auccucugguguucacuaa

SEQ ID NO: 2428631 - RNA, 19 nt, Artificial Sequence
  Description of Artificial Sequence: Synthetic oligonucleotide
guguaacuugagcaauacu

SEQ ID NO: 2428632 - RNA, 19 nt, Artificial Sequence
  Description of Artificial Sequence: Synthetic oligonucleotide
cacacugagugaaggauuu

SEQ ID NO: 2428633 - RNA, 19 nt, Artificial Sequence
  Description of Artificial Sequence: Synthetic oligonucleotide
guauggauccucugguguu

SEQ ID NO: 2428634 - RNA, 19 nt, Artificial Sequence
  Description of Artificial Sequence: Synthetic oligonucleotide
gaacuaugcuguguuuagu

SEQ ID NO: 2428635 - RNA, 19 nt, Artificial Sequence
  Description of Artificial Sequence: Synthetic oligonucleotide
gguuugagguuugauugaa

SEQ ID NO: 2428636 - RNA, 19 nt, Artificial Sequence
  Description of Artificial Sequence: Synthetic oligonucleotide
cuccgguauggauccucug

SEQ ID NO: 2428637 - RNA, 19 nt, Artificial Sequence
  Description of Artificial Sequence: Synthetic oligonucleotide
gaacacugacuaaagcauu

SEQ ID NO: 2428638 - RNA, 19 nt, Artificial Sequence
  Description of Artificial Sequence: Synthetic oligonucleotide
uggauccucugguguucac

SEQ ID NO: 2428639 - RNA, 19 nt, Artificial Sequence
  Description of Artificial Sequence: Synthetic oligonucleotide
guacacuggguaaaggauu

SEQ ID NO: 2428640 - RNA, 19 nt, Artificial Sequence
  Description of Artificial Sequence: Synthetic oligonucleotide
gcaauggaugaaagcuuug

SEQ ID NO: 2428641 - RNA, 19 nt, Artificial Sequence
  Description of Artificial Sequence: Synthetic oligonucleotide
cuccgguguggauccucag

SEQ ID NO: 2428642 - RNA, 19 nt, Artificial Sequence
  Description of Artificial Sequence: Synthetic oligonucleotide
ucucucccgugugaacuau

SEQ ID NO: 2428643 - RNA, 19 nt, Artificial Sequence
  Description of Artificial Sequence: Synthetic oligonucleotide
gguguuuucugaggcuuga

SEQ ID NO: 2428644 - RNA, 19 nt, Artificial Sequence
  Description of Artificial Sequence: Synthetic oligonucleotide
ugcacaccuguagggcuuc

SEQ ID NO: 2428645 - RNA, 19 nt, Artificial Sequence
  Description of Artificial Sequence: Synthetic oligonucleotide
aggccuugccgcaguuuuc

SEQ ID NO: 2428646 - RNA, 19 nt, Artificial Sequence
  Description of Artificial Sequence: Synthetic oligonucleotide
cguugagucacaaucuaua

SEQ ID NO: 2428647 - RNA, 19 nt, Artificial Sequence
  Description of Artificial Sequence: Synthetic oligonucleotide
guggauuaccucguguuuu

SEQ ID NO: 2428648 - RNA, 19 nt, Artificial Sequence
  Description of Artificial Sequence: Synthetic oligonucleotide
guaagguuugagguuugau

SEQ ID NO: 2428649 - RNA, 19 nt, Artificial Sequence
  Description of Artificial Sequence: Synthetic oligonucleotide
gguguuucugagguuugaa

SEQ ID NO: 2428650 - RNA, 19 nt, Artificial Sequence
  Description of Artificial Sequence: Synthetic oligonucleotide
ccguauggauucucuggug

SEQ ID NO: 2428651 - RNA, 19 nt, Artificial Sequence
  Description of Artificial Sequence: Synthetic oligonucleotide
cacauucugcacaccugua

SEQ ID NO: 2428652 - RNA, 19 nt, Artificial Sequence
  Description of Artificial Sequence: Synthetic oligonucleotide
cguguuuucuaaggcuugc

SEQ ID NO: 2428653 - RNA, 19 nt, Artificial Sequence
  Description of Artificial Sequence: Synthetic oligonucleotide
gcguaagguuugugcaaug

SEQ ID NO: 2428654 - RNA, 19 nt, Artificial Sequence
  Description of Artificial Sequence: Synthetic oligonucleotide
gcuguguuuaguguaacuu

SEQ ID NO: 2428655 - RNA, 19 nt, Artificial Sequence
  Description of Artificial Sequence: Synthetic oligonucleotide
guguugcguaagguuugug

SEQ ID NO: 2428656 - RNA, 19 nt, Artificial Sequence
  Description of Artificial Sequence: Synthetic oligonucleotide
ggcuugcacacugagugaa

SEQ ID NO: 2428657 - RNA, 19 nt, Artificial Sequence
  Description of Artificial Sequence: Synthetic oligonucleotide
cucgucacauuuguagggu

SEQ ID NO: 2428658 - RNA, 19 nt, Artificial Sequence
  Description of Artificial Sequence: Synthetic oligonucleotide
gcuugcacacugagugaag

SEQ ID NO: 2428659 - RNA, 19 nt, Artificial Sequence
  Description of Artificial Sequence: Synthetic oligonucleotide
agcuuuggguaaaggcuuu

SEQ ID NO: 2428660 - RNA, 19 nt, Artificial Sequence
  Description of Artificial Sequence: Synthetic oligonucleotide
cccgugugaacuaugcugu

SEQ ID NO: 2428661 - RNA, 19 nt, Artificial Sequence
  Description of Artificial Sequence: Synthetic oligonucleotide
cacacucgucacauuugua

SEQ ID NO: 2428662 - RNA, 19 nt, Artificial Sequence
  Description of Artificial Sequence: Synthetic oligonucleotide
gguuugugcaauggaugaa

SEQ ID NO: 2428663 - RNA, 19 nt, Artificial Sequence
  Description of Artificial Sequence: Synthetic oligonucleotide
cugggcauacugaguuuua

SEQ ID NO: 2428664 - RNA, 19 nt, Artificial Sequence
  Description of Artificial Sequence: Synthetic oligonucleotide
ggcuuguacacuggguaaa

SEQ ID NO: 2428665 - RNA, 19 nt, Artificial Sequence
  Description of Artificial Sequence: Synthetic oligonucleotide
gugcaauggaugaaagcuu

SEQ ID NO: 2428666 - RNA, 19 nt, Artificial Sequence
  Description of Artificial Sequence: Synthetic oligonucleotide
ggccuugccgcaguuuuca

SEQ ID NO: 2428667 - RNA, 19 nt, Artificial Sequence
  Description of Artificial Sequence: Synthetic oligonucleotide
guguugagcuuuggguaaa

SEQ ID NO: 2428668 - RNA, 19 nt, Artificial Sequence
  Description of Artificial Sequence: Synthetic oligonucleotide
ccuugccgcaguuuucaca

SEQ ID NO: 2428669 - RNA, 19 nt, Artificial Sequence
  Description of Artificial Sequence: Synthetic oligonucleotide
gccgcaguuuucacauuug

SEQ ID NO: 2428670 - RNA, 19 nt, Artificial Sequence
  Description of Artificial Sequence: Synthetic oligonucleotide
ggcuugagcacugggugaa

SEQ ID NO: 2428671 - RNA, 19 nt, Artificial Sequence
  Description of Artificial Sequence: Synthetic oligonucleotide
ccucguguuuucuaaggcu

SEQ ID NO: 2428672 - RNA, 19 nt, Artificial Sequence
  Description of Artificial Sequence: Synthetic oligonucleotide
ccucagguguuuaguaaaa

SEQ ID NO: 2428673 - RNA, 19 nt, Artificial Sequence
  Description of Artificial Sequence: Synthetic oligonucleotide
cugguguuuucugaggcuu

SEQ ID NO: 2428674 - RNA, 19 nt, Artificial Sequence
  Description of Artificial Sequence: Synthetic oligonucleotide
gacgaacggucuaguuaaa

SEQ ID NO: 2428675 - RNA, 19 nt, Artificial Sequence
  Description of Artificial Sequence: Synthetic oligonucleotide
uugccgcaguuuucacauu

SEQ ID NO: 2428676 - RNA, 19 nt, Artificial Sequence
  Description of Artificial Sequence: Synthetic oligonucleotide
acacuggguaaaggauuuu

SEQ ID NO: 2428677 - RNA, 19 nt, Artificial Sequence
  Description of Artificial Sequence: Synthetic oligonucleotide
ggauccucagguguuuagu

SEQ ID NO: 2428678 - RNA, 19 nt, Artificial Sequence
  Description of Artificial Sequence: Synthetic oligonucleotide
ccgugugaacuaugcugug

SEQ ID NO: 2428679 - RNA, 19 nt, Artificial Sequence
  Description of Artificial Sequence: Synthetic oligonucleotide
gcuugagcacugggugaag

SEQ ID NO: 2428680 - RNA, 19 nt, Artificial Sequence
  Description of Artificial Sequence: Synthetic oligonucleotide
cucccgugugaacuaugcu

SEQ ID NO: 2428681 - RNA, 19 nt, Artificial Sequence
  Description of Artificial Sequence: Synthetic oligonucleotide
cucugguguugcguaaggu

SEQ ID NO: 2428682 - RNA, 19 nt, Artificial Sequence
  Description of Artificial Sequence: Synthetic oligonucleotide
ggauccucugguguucacu

SEQ ID NO: 2428683 - RNA, 19 nt, Artificial Sequence
  Description of Artificial Sequence: Synthetic oligonucleotide
cccguauggauucucuggu

SEQ ID NO: 2428684 - RNA, 19 nt, Artificial Sequence
  Description of Artificial Sequence: Synthetic oligonucleotide
cgcaguuuucacauuugua

SEQ ID NO: 2428685 - RNA, 19 nt, Artificial Sequence
  Description of Artificial Sequence: Synthetic oligonucleotide
guggauccucagguguuua

SEQ ID NO: 2428686 - RNA, 19 nt, Artificial Sequence
  Description of Artificial Sequence: Synthetic oligonucleotide
cugcacaccuguagggcuu

SEQ ID NO: 2428687 - RNA, 19 nt, Artificial Sequence
  Description of Artificial Sequence: Synthetic oligonucleotide
ccacacucgucacauuugu

SEQ ID NO: 2428688 - RNA, 19 nt, Artificial Sequence
  Description of Artificial Sequence: Synthetic oligonucleotide
ccgguauggauccucuggu

SEQ ID NO: 2428689 - RNA, 19 nt, Artificial Sequence
  Description of Artificial Sequence: Synthetic oligonucleotide
gccuugccgcaguuuucac

SEQ ID NO: 2428690 - RNA, 19 nt, Artificial Sequence
  Description of Artificial Sequence: Synthetic oligonucleotide
gguguugcguaagguuugu

SEQ ID NO: 2428691 - RNA, 19 nt, Artificial Sequence
  Description of Artificial Sequence: Synthetic oligonucleotide
ggauuaccucguguuuucu

SEQ ID NO: 2428692 - RNA, 19 nt, Artificial Sequence
  Description of Artificial Sequence: Synthetic oligonucleotide
ccgcaguuuucacauuugu

SEQ ID NO: 2428693 - RNA, 19 nt, Artificial Sequence
  Description of Artificial Sequence: Synthetic oligonucleotide
cucugguguuucugagguu

SEQ ID NO: 2428694 - RNA, 19 nt, Artificial Sequence
  Description of Artificial Sequence: Synthetic oligonucleotide
gcacugggugaaggacuuc

SEQ ID NO: 2428695 - RNA, 19 nt, Artificial Sequence
  Description of Artificial Sequence: Synthetic oligonucleotide
cgugugaacuaugcugugu

SEQ ID NO: 2428696 - RNA, 19 nt, Artificial Sequence
  Description of Artificial Sequence: Synthetic oligonucleotide
cggucuaguuaaaggccuu

SEQ ID NO: 2428697 - RNA, 19 nt, Artificial Sequence
  Description of Artificial Sequence: Synthetic oligonucleotide
aaugucuucauauggaguc

SEQ ID NO: 2428698 - RNA, 19 nt, Artificial Sequence
  Description of Artificial Sequence: Synthetic oligonucleotide
aagaaguucacccaauaac

SEQ ID NO: 2428699 - RNA, 19 nt, Artificial Sequence
  Description of Artificial Sequence: Synthetic oligonucleotide
aauggaaaaguacugcugg

SEQ ID NO: 2428700 - RNA, 19 nt, Artificial Sequence
  Description of Artificial Sequence: Synthetic oligonucleotide
aggacuucuagucagagcc

SEQ ID NO: 2428701 - RNA, 19 nt, Artificial Sequence
  Description of Artificial Sequence: Synthetic oligonucleotide
aaagauaguaaauguugcc

SEQ ID NO: 2428702 - RNA, 19 nt, Artificial Sequence
  Description of Artificial Sequence: Synthetic oligonucleotide
aauaauggaaaaguacugc

SEQ ID NO: 2428703 - RNA, 19 nt, Artificial Sequence
  Description of Artificial Sequence: Synthetic oligonucleotide
cauauugcaagccacaugg

SEQ ID NO: 2428704 - RNA, 19 nt, Artificial Sequence
  Description of Artificial Sequence: Synthetic oligonucleotide
augacugucagcuuguuag

SEQ ID NO: 2428705 - RNA, 19 nt, Artificial Sequence
  Description of Artificial Sequence: Synthetic oligonucleotide
uaaagauaguaaauguugc

SEQ ID NO: 2428706 - RNA, 19 nt, Artificial Sequence
  Description of Artificial Sequence: Synthetic oligonucleotide
ucauguugcagcuuguagg

SEQ ID NO: 2428707 - RNA, 19 nt, Artificial Sequence
  Description of Artificial Sequence: Synthetic oligonucleotide
gaauucaucagccuuuugc

SEQ ID NO: 2428708 - RNA, 19 nt, Artificial Sequence
  Description of Artificial Sequence: Synthetic oligonucleotide
uguuaguagcauuugcucg

SEQ ID NO: 2428709 - RNA, 19 nt, Artificial Sequence
  Description of Artificial Sequence: Synthetic oligonucleotide
agaaauaauggaaaaguac

SEQ ID NO: 2428710 - RNA, 19 nt, Artificial Sequence
  Description of Artificial Sequence: Synthetic oligonucleotide
aauucaucagccuuuugca

SEQ ID NO: 2428711 - RNA, 19 nt, Artificial Sequence
  Description of Artificial Sequence: Synthetic oligonucleotide
uccaugacaagucauguug

SEQ ID NO: 2428712 - RNA, 19 nt, Artificial Sequence
  Description of Artificial Sequence: Synthetic oligonucleotide
aguucugugauuccucgcc

SEQ ID NO: 2428713 - RNA, 19 nt, Artificial Sequence
  Description of Artificial Sequence: Synthetic oligonucleotide
uacucagugagucaguccc

SEQ ID NO: 2428714 - RNA, 19 nt, Artificial Sequence
  Description of Artificial Sequence: Synthetic oligonucleotide
uccucuggagaaauaaugg

SEQ ID NO: 2428715 - RNA, 19 nt, Artificial Sequence
  Description of Artificial Sequence: Synthetic oligonucleotide
ucuccuuccaagaaguuca

SEQ ID NO: 2428716 - RNA, 19 nt, Artificial Sequence
  Description of Artificial Sequence: Synthetic oligonucleotide
guaaagauaguaaauguug

SEQ ID NO: 2428717 - RNA, 19 nt, Artificial Sequence
  Description of Artificial Sequence: Synthetic oligonucleotide
agaaguucacccaauaacg

SEQ ID NO: 2428718 - RNA, 19 nt, Artificial Sequence
  Description of Artificial Sequence: Synthetic oligonucleotide
ucuacacccaccauggucu

SEQ ID NO: 2428719 - RNA, 19 nt, Artificial Sequence
  Description of Artificial Sequence: Synthetic oligonucleotide
agauaguaaauguugccag

SEQ ID NO: 2428720 - RNA, 19 nt, Artificial Sequence
  Description of Artificial Sequence: Synthetic oligonucleotide
guuaguagcauuugcucgg

SEQ ID NO: 2428721 - RNA, 19 nt, Artificial Sequence
  Description of Artificial Sequence: Synthetic oligonucleotide
auugcaagccacauggugc

SEQ ID NO: 2428722 - RNA, 19 nt, Artificial Sequence
  Description of Artificial Sequence: Synthetic oligonucleotide
augacagcccuucagcccc

SEQ ID NO: 2428723 - RNA, 19 nt, Artificial Sequence
  Description of Artificial Sequence: Synthetic oligonucleotide
uccaucaugccaauuuuag

SEQ ID NO: 2428724 - RNA, 19 nt, Artificial Sequence
  Description of Artificial Sequence: Synthetic oligonucleotide
aagauaguaaauguugcca

SEQ ID NO: 2428725 - RNA, 19 nt, Artificial Sequence
  Description of Artificial Sequence: Synthetic oligonucleotide
ugacaagucauguugcagc

SEQ ID NO: 2428726 - RNA, 19 nt, Artificial Sequence
  Description of Artificial Sequence: Synthetic oligonucleotide
ucuggagaaauaauggaaa

SEQ ID NO: 2428727 - RNA, 19 nt, Artificial Sequence
  Description of Artificial Sequence: Synthetic oligonucleotide
aaauaauggaaaaguacug

SEQ ID NO: 2428728 - RNA, 19 nt, Artificial Sequence
  Description of Artificial Sequence: Synthetic oligonucleotide
gaagagaauguggacaagg

SEQ ID NO: 2428729 - RNA, 19 nt, Artificial Sequence
  Description of Artificial Sequence: Synthetic oligonucleotide
ucuagucagagccauacuc

SEQ ID NO: 2428730 - RNA, 19 nt, Artificial Sequence
  Description of Artificial Sequence: Synthetic oligonucleotide
ucuaaaggguccccgaccc

SEQ ID NO: 2428731 - RNA, 19 nt, Artificial Sequence
  Description of Artificial Sequence: Synthetic oligonucleotide
auaauggaaaaguacugcu

SEQ ID NO: 2428732 - RNA, 19 nt, Artificial Sequence
  Description of Artificial Sequence: Synthetic oligonucleotide
ucgagcaucuuccaguacc

SEQ ID NO: 2428733 - RNA, 19 nt, Artificial Sequence
  Description of Artificial Sequence: Synthetic oligonucleotide
caacugacagcaaacacag

SEQ ID NO: 2428734 - RNA, 19 nt, Artificial Sequence
  Description of Artificial Sequence: Synthetic oligonucleotide
aaggagguaguggucaggc

SEQ ID NO: 2428735 - RNA, 19 nt, Artificial Sequence
  Description of Artificial Sequence: Synthetic oligonucleotide
ucggaugaauucaucagcc

SEQ ID NO: 2428736 - RNA, 19 nt, Artificial Sequence
  Description of Artificial Sequence: Synthetic oligonucleotide
aguacugcuggccacuuuc

SEQ ID NO: 2428737 - RNA, 19 nt, Artificial Sequence
  Description of Artificial Sequence: Synthetic oligonucleotide
uauugcaagccacauggug

SEQ ID NO: 2428738 - RNA, 19 nt, Artificial Sequence
  Description of Artificial Sequence: Synthetic oligonucleotide
gaaauaauggaaaaguacu

SEQ ID NO: 2428739 - RNA, 19 nt, Artificial Sequence
  Description of Artificial Sequence: Synthetic oligonucleotide
cauguugcagcuuguaggc

SEQ ID NO: 2428740 - RNA, 19 nt, Artificial Sequence
  Description of Artificial Sequence: Synthetic oligonucleotide
ucggcaaugacugucagcu

SEQ ID NO: 2428741 - RNA, 19 nt, Artificial Sequence
  Description of Artificial Sequence: Synthetic oligonucleotide
aaguucacccaauaacgca

SEQ ID NO: 2428742 - RNA, 19 nt, Artificial Sequence
  Description of Artificial Sequence: Synthetic oligonucleotide
uggacaaggagguaguggu

SEQ ID NO: 2428743 - RNA, 19 nt, Artificial Sequence
  Description of Artificial Sequence: Synthetic oligonucleotide
auggaaaaguacugcuggc

SEQ ID NO: 2428744 - RNA, 19 nt, Artificial Sequence
  Description of Artificial Sequence: Synthetic oligonucleotide
aggaagaucccacaggagu

SEQ ID NO: 2428745 - RNA, 19 nt, Artificial Sequence
  Description of Artificial Sequence: Synthetic oligonucleotide
aucuacacccaccaugguc

SEQ ID NO: 2428746 - RNA, 19 nt, Artificial Sequence
  Description of Artificial Sequence: Synthetic oligonucleotide
auucaucagccuuuugcac

SEQ ID NO: 2428747 - RNA, 19 nt, Artificial Sequence
  Description of Artificial Sequence: Synthetic oligonucleotide
uuuuccaacgggccgggag

SEQ ID NO: 2428748 - RNA, 19 nt, Artificial Sequence
  Description of Artificial Sequence: Synthetic oligonucleotide
agcaucuacacccaccaug

SEQ ID NO: 2428749 - RNA, 19 nt, Artificial Sequence
  Description of Artificial Sequence: Synthetic oligonucleotide
agccuuuugcaccugcucg

SEQ ID NO: 2428750 - RNA, 19 nt, Artificial Sequence
  Description of Artificial Sequence: Synthetic oligonucleotide
gucagagccauacucagug

SEQ ID NO: 2428751 - RNA, 19 nt, Artificial Sequence
  Description of Artificial Sequence: Synthetic oligonucleotide
caugaggacuucuagucag

SEQ ID NO: 2428752 - RNA, 19 nt, Artificial Sequence
  Description of Artificial Sequence: Synthetic oligonucleotide
agugggcccaggaagaucc

SEQ ID NO: 2428753 - RNA, 19 nt, Artificial Sequence
  Description of Artificial Sequence: Synthetic oligonucleotide
uccaugacagcccuucagc

SEQ ID NO: 2428754 - RNA, 19 nt, Artificial Sequence
  Description of Artificial Sequence: Synthetic oligonucleotide
uugucaugaggacuucuag

SEQ ID NO: 2428755 - RNA, 19 nt, Artificial Sequence
  Description of Artificial Sequence: Synthetic oligonucleotide
cugguaaagauaguaaaug

SEQ ID NO: 2428756 - RNA, 19 nt, Artificial Sequence
  Description of Artificial Sequence: Synthetic oligonucleotide
ugguucagcagcuugucca

SEQ ID NO: 2428757 - RNA, 19 nt, Artificial Sequence
  Description of Artificial Sequence: Synthetic oligonucleotide
auacucagugagucagucc

SEQ ID NO: 2428758 - RNA, 19 nt, Artificial Sequence
  Description of Artificial Sequence: Synthetic oligonucleotide
uauggaguccaugacaagu

SEQ ID NO: 2428759 - RNA, 19 nt, Artificial Sequence
  Description of Artificial Sequence: Synthetic oligonucleotide
aguucacccaauaacgcac

SEQ ID NO: 2428760 - RNA, 19 nt, Artificial Sequence
  Description of Artificial Sequence: Synthetic oligonucleotide
aguagcauuugcucggaug

SEQ ID NO: 2428761 - RNA, 19 nt, Artificial Sequence
  Description of Artificial Sequence: Synthetic oligonucleotide
aaggccaugggcugguuca

SEQ ID NO: 2428762 - RNA, 19 nt, Artificial Sequence
  Description of Artificial Sequence: Synthetic oligonucleotide
aaugcuggauuugcucggc

SEQ ID NO: 2428763 - RNA, 19 nt, Artificial Sequence
  Description of Artificial Sequence: Synthetic oligonucleotide
uuguuaguagcauuugcuc

SEQ ID NO: 2428764 - RNA, 19 nt, Artificial Sequence
  Description of Artificial Sequence: Synthetic oligonucleotide
cacccaauaacgcacaguc

SEQ ID NO: 2428765 - RNA, 19 nt, Artificial Sequence
  Description of Artificial Sequence: Synthetic oligonucleotide
ucgccaucccaacugacag

SEQ ID NO: 2428766 - RNA, 19 nt, Artificial Sequence
  Description of Artificial Sequence: Synthetic oligonucleotide
uaacgcacaguccucguga

SEQ ID NO: 2428767 - RNA, 19 nt, Artificial Sequence
  Description of Artificial Sequence: Synthetic oligonucleotide
auuugcucggcaaugacug

SEQ ID NO: 2428768 - RNA, 19 nt, Artificial Sequence
  Description of Artificial Sequence: Synthetic oligonucleotide
guagcauuugcucggauga

SEQ ID NO: 2428769 - RNA, 19 nt, Artificial Sequence
  Description of Artificial Sequence: Synthetic oligonucleotide
cucggaugaauucaucagc

SEQ ID NO: 2428770 - RNA, 19 nt, Artificial Sequence
  Description of Artificial Sequence: Synthetic oligonucleotide
uucauauggaguccaugac

SEQ ID NO: 2428771 - RNA, 19 nt, Artificial Sequence
  Description of Artificial Sequence: Synthetic oligonucleotide
cuucauauggaguccauga

SEQ ID NO: 2428772 - RNA, 19 nt, Artificial Sequence
  Description of Artificial Sequence: Synthetic oligonucleotide
ugcucggaugaauucauca

SEQ ID NO: 2428773 - RNA, 19 nt, Artificial Sequence
  Description of Artificial Sequence: Synthetic oligonucleotide
aucaaggaagagaaugugg

SEQ ID NO: 2428774 - RNA, 19 nt, Artificial Sequence
  Description of Artificial Sequence: Synthetic oligonucleotide
uuuucaccauauugcaagc

SEQ ID NO: 2428775 - RNA, 19 nt, Artificial Sequence
  Description of Artificial Sequence: Synthetic oligonucleotide
ucaugaggacuucuaguca

SEQ ID NO: 2428776 - RNA, 19 nt, Artificial Sequence
  Description of Artificial Sequence: Synthetic oligonucleotide
acagcaucuacacccacca

SEQ ID NO: 2428777 - RNA, 19 nt, Artificial Sequence
  Description of Artificial Sequence: Synthetic oligonucleotide
gaaguucacccaauaacgc

SEQ ID NO: 2428778 - RNA, 19 nt, Artificial Sequence
  Description of Artificial Sequence: Synthetic oligonucleotide
caccaaggaagucaugggg

SEQ ID NO: 2428779 - RNA, 19 nt, Artificial Sequence
  Description of Artificial Sequence: Synthetic oligonucleotide
uggaaaaguacugcuggcc

SEQ ID NO: 2428780 - RNA, 19 nt, Artificial Sequence
  Description of Artificial Sequence: Synthetic oligonucleotide
ucaggccuuugucaugagg

SEQ ID NO: 2428781 - RNA, 19 nt, Artificial Sequence
  Description of Artificial Sequence: Synthetic oligonucleotide
ccuuccaagaaguucaccc

SEQ ID NO: 2428782 - RNA, 19 nt, Artificial Sequence
  Description of Artificial Sequence: Synthetic oligonucleotide
uuuugcaccugcucggcga

SEQ ID NO: 2428783 - RNA, 19 nt, Artificial Sequence
  Description of Artificial Sequence: Synthetic oligonucleotide
gaaaaguacugcuggccac

SEQ ID NO: 2428784 - RNA, 19 nt, Artificial Sequence
  Description of Artificial Sequence: Synthetic oligonucleotide
uuugucaugaggacuucua

SEQ ID NO: 2428785 - RNA, 19 nt, Artificial Sequence
  Description of Artificial Sequence: Synthetic oligonucleotide
ugugguaggggcucaccag

SEQ ID NO: 2428786 - RNA, 19 nt, Artificial Sequence
  Description of Artificial Sequence: Synthetic oligonucleotide
guaggggcucaccagagcc

SEQ ID NO: 2428787 - RNA, 19 nt, Artificial Sequence
  Description of Artificial Sequence: Synthetic oligonucleotide
aaaaguacugcuggccacu

SEQ ID NO: 2428788 - RNA, 19 nt, Artificial Sequence
  Description of Artificial Sequence: Synthetic oligonucleotide
agcgccacgaggucuaaag

SEQ ID NO: 2428789 - RNA, 19 nt, Artificial Sequence
  Description of Artificial Sequence: Synthetic oligonucleotide
auuuuagcaucuugcuucu

SEQ ID NO: 2428790 - RNA, 19 nt, Artificial Sequence
  Description of Artificial Sequence: Synthetic oligonucleotide
ucuugcaaaugcuggauuu

SEQ ID NO: 2428791 - RNA, 19 nt, Artificial Sequence
  Description of Artificial Sequence: Synthetic oligonucleotide
aauaacgcacaguccucgu

SEQ ID NO: 2428792 - RNA, 19 nt, Artificial Sequence
  Description of Artificial Sequence: Synthetic oligonucleotide
ugccaauuuuagcaucuug

SEQ ID NO: 2428793 - RNA, 19 nt, Artificial Sequence
  Description of Artificial Sequence: Synthetic oligonucleotide
ucuugcuucucaaugucuu

SEQ ID NO: 2428794 - RNA, 19 nt, Artificial Sequence
  Description of Artificial Sequence: Synthetic oligonucleotide
uuuccaacgggccgggagu

SEQ ID NO: 2428795 - RNA, 19 nt, Artificial Sequence
  Description of Artificial Sequence: Synthetic oligonucleotide
acaggaguucugugauucc

SEQ ID NO: 2428796 - RNA, 19 nt, Artificial Sequence
  Description of Artificial Sequence: Synthetic oligonucleotide
ucaucagccuuuugcaccu

SEQ ID NO: 2428797 - RNA, 19 nt, Artificial Sequence
  Description of Artificial Sequence: Synthetic oligonucleotide
caugacagcccuucagccc

SEQ ID NO: 2428798 - RNA, 19 nt, Artificial Sequence
  Description of Artificial Sequence: Synthetic oligonucleotide
aagagaauguggacaagga

SEQ ID NO: 2428799 - RNA, 19 nt, Artificial Sequence
  Description of Artificial Sequence: Synthetic oligonucleotide
gucauguugcagcuuguag

SEQ ID NO: 2428800 - RNA, 19 nt, Artificial Sequence
  Description of Artificial Sequence: Synthetic oligonucleotide
cuucuagucagagccauac

SEQ ID NO: 2428801 - RNA, 19 nt, Artificial Sequence
  Description of Artificial Sequence: Synthetic oligonucleotide
uuccucgccaucccaacug

SEQ ID NO: 2428802 - RNA, 19 nt, Artificial Sequence
  Description of Artificial Sequence: Synthetic oligonucleotide
caauaacgcacaguccucg

SEQ ID NO: 2428803 - RNA, 19 nt, Artificial Sequence
  Description of Artificial Sequence: Synthetic oligonucleotide
cuagucagagccauacuca

SEQ ID NO: 2428804 - RNA, 19 nt, Artificial Sequence
  Description of Artificial Sequence: Synthetic oligonucleotide
uuagcaucuugcuucucaa

SEQ ID NO: 2428805 - RNA, 19 nt, Artificial Sequence
  Description of Artificial Sequence: Synthetic oligonucleotide
ggcaccaaggaagucaugg

SEQ ID NO: 2428806 - RNA, 19 nt, Artificial Sequence
  Description of Artificial Sequence: Synthetic oligonucleotide
ggcaaugacugucagcuug

SEQ ID NO: 2428807 - RNA, 19 nt, Artificial Sequence
  Description of Artificial Sequence: Synthetic oligonucleotide
caugggcugguucagcagc

SEQ ID NO: 2428808 - RNA, 19 nt, Artificial Sequence
  Description of Artificial Sequence: Synthetic oligonucleotide
ugcaaaugcuggauuugcu

SEQ ID NO: 2428809 - RNA, 19 nt, Artificial Sequence
  Description of Artificial Sequence: Synthetic oligonucleotide
uuugcaccugcucggcgag

SEQ ID NO: 2428810 - RNA, 19 nt, Artificial Sequence
  Description of Artificial Sequence: Synthetic oligonucleotide
uggaguccaugacaaguca

SEQ ID NO: 2428811 - RNA, 19 nt, Artificial Sequence
  Description of Artificial Sequence: Synthetic oligonucleotide
auuugcucggaugaauuca

SEQ ID NO: 2428812 - RNA, 19 nt, Artificial Sequence
  Description of Artificial Sequence: Synthetic oligonucleotide
aggccuuugucaugaggac

SEQ ID NO: 2428813 - RNA, 19 nt, Artificial Sequence
  Description of Artificial Sequence: Synthetic oligonucleotide
caaacacagcaucuacacc

SEQ ID NO: 2428814 - RNA, 19 nt, Artificial Sequence
  Description of Artificial Sequence: Synthetic oligonucleotide
uaccccaucaaggaagaga

SEQ ID NO: 2428815 - RNA, 19 nt, Artificial Sequence
  Description of Artificial Sequence: Synthetic oligonucleotide
cuuccaguaccuuccuagc

SEQ ID NO: 2428816 - RNA, 19 nt, Artificial Sequence
  Description of Artificial Sequence: Synthetic oligonucleotide
cagagccauacucagugag

SEQ ID NO: 2428817 - RNA, 19 nt, Artificial Sequence
  Description of Artificial Sequence: Synthetic oligonucleotide
aucaugccaauuuuagcau

SEQ ID NO: 2428818 - RNA, 19 nt, Artificial Sequence
  Description of Artificial Sequence: Synthetic oligonucleotide
ucggcgagcgccacgaggu

SEQ ID NO: 2428819 - RNA, 19 nt, Artificial Sequence
  Description of Artificial Sequence: Synthetic oligonucleotide
aaugacugucagcuuguua

SEQ ID NO: 2428820 - RNA, 19 nt, Artificial Sequence
  Description of Artificial Sequence: Synthetic oligonucleotide
ugcucuugcaaaugcugga

SEQ ID NO: 2428821 - RNA, 19 nt, Artificial Sequence
  Description of Artificial Sequence: Synthetic oligonucleotide
ucuucauauggaguccaug

SEQ ID NO: 2428822 - RNA, 19 nt, Artificial Sequence
  Description of Artificial Sequence: Synthetic oligonucleotide
cacagcaucuacacccacc

SEQ ID NO: 2428823 - RNA, 19 nt, Artificial Sequence
  Description of Artificial Sequence: Synthetic oligonucleotide
gccaauuuuagcaucuugc

SEQ ID NO: 2428824 - RNA, 19 nt, Artificial Sequence
  Description of Artificial Sequence: Synthetic oligonucleotide
cacgaggucuaaagggucc

SEQ ID NO: 2428825 - RNA, 19 nt, Artificial Sequence
  Description of Artificial Sequence: Synthetic oligonucleotide
uuccaguaccuuccuagcu

SEQ ID NO: 2428826 - RNA, 19 nt, Artificial Sequence
  Description of Artificial Sequence: Synthetic oligonucleotide
ucagugagucagucccugg

SEQ ID NO: 2428827 - RNA, 19 nt, Artificial Sequence
  Description of Artificial Sequence: Synthetic oligonucleotide
uucacccaauaacgcacag

SEQ ID NO: 2428828 - RNA, 19 nt, Artificial Sequence
  Description of Artificial Sequence: Synthetic oligonucleotide
gaguccaugacaagucaug

SEQ ID NO: 2428829 - RNA, 19 nt, Artificial Sequence
  Description of Artificial Sequence: Synthetic oligonucleotide
auaacgcacaguccucgug

SEQ ID NO: 2428830 - RNA, 19 nt, Artificial Sequence
  Description of Artificial Sequence: Synthetic oligonucleotide
gaggacuucuagucagagc

SEQ ID NO: 2428831 - RNA, 19 nt, Artificial Sequence
  Description of Artificial Sequence: Synthetic oligonucleotide
ucaugccaauuuuagcauc

SEQ ID NO: 2428832 - RNA, 19 nt, Artificial Sequence
  Description of Artificial Sequence: Synthetic oligonucleotide
augacaagucauguugcag

SEQ ID NO: 2428833 - RNA, 19 nt, Artificial Sequence
  Description of Artificial Sequence: Synthetic oligonucleotide
gaggucuaaaggguccccg

SEQ ID NO: 2428834 - RNA, 19 nt, Artificial Sequence
  Description of Artificial Sequence: Synthetic oligonucleotide
gucuaaaggguccccgacc

SEQ ID NO: 2428835 - RNA, 19 nt, Artificial Sequence
  Description of Artificial Sequence: Synthetic oligonucleotide
guggacaaggagguagugg

SEQ ID NO: 2428836 - RNA, 19 nt, Artificial Sequence
  Description of Artificial Sequence: Synthetic oligonucleotide
ugauuccucgccaucccaa

SEQ ID NO: 2428837 - RNA, 19 nt, Artificial Sequence
  Description of Artificial Sequence: Synthetic oligonucleotide
caucucuucgagcaucuuc

SEQ ID NO: 2428838 - RNA, 19 nt, Artificial Sequence
  Description of Artificial Sequence: Synthetic oligonucleotide
cauuugcucggaugaauuc

SEQ ID NO: 2428839 - RNA, 19 nt, Artificial Sequence
  Description of Artificial Sequence: Synthetic oligonucleotide
aucccaacugacagcaaac

SEQ ID NO: 2428840 - RNA, 19 nt, Artificial Sequence
  Description of Artificial Sequence: Synthetic oligonucleotide
ggagaaauaauggaaaagu

SEQ ID NO: 2428841 - RNA, 19 nt, Artificial Sequence
  Description of Artificial Sequence: Synthetic oligonucleotide
acaaggagguaguggucag

SEQ ID NO: 2428842 - RNA, 19 nt, Artificial Sequence
  Description of Artificial Sequence: Synthetic oligonucleotide
ugcucggcaaugacuguca

SEQ ID NO: 2428843 - RNA, 19 nt, Artificial Sequence
  Description of Artificial Sequence: Synthetic oligonucleotide
acugcuggccacuuucccu

SEQ ID NO: 2428844 - RNA, 19 nt, Artificial Sequence
  Description of Artificial Sequence: Synthetic oligonucleotide
ugucuucauauggagucca

SEQ ID NO: 2428845 - RNA, 19 nt, Artificial Sequence
  Description of Artificial Sequence: Synthetic oligonucleotide
caucaaggaagagaaugug

SEQ ID NO: 2428846 - RNA, 19 nt, Artificial Sequence
  Description of Artificial Sequence: Synthetic oligonucleotide
guaggcaccaaggaaguca

SEQ ID NO: 2428847 - RNA, 19 nt, Artificial Sequence
  Description of Artificial Sequence: Synthetic oligonucleotide
ugguaggggcucaccagag

SEQ ID NO: 2428848 - RNA, 19 nt, Artificial Sequence
  Description of Artificial Sequence: Synthetic oligonucleotide
cuuccaagaaguucaccca

SEQ ID NO: 2428849 - RNA, 19 nt, Artificial Sequence
  Description of Artificial Sequence: Synthetic oligonucleotide
acgaggucuaaaggguccc

SEQ ID NO: 2428850 - RNA, 19 nt, Artificial Sequence
  Description of Artificial Sequence: Synthetic oligonucleotide
cacaggaguucugugauuc

SEQ ID NO: 2428851 - RNA, 19 nt, Artificial Sequence
  Description of Artificial Sequence: Synthetic oligonucleotide
uaggcaccaaggaagucau

SEQ ID NO: 2428852 - RNA, 19 nt, Artificial Sequence
  Description of Artificial Sequence: Synthetic oligonucleotide
ugcaccugcucggcgagcg

SEQ ID NO: 2428853 - RNA, 19 nt, Artificial Sequence
  Description of Artificial Sequence: Synthetic oligonucleotide
gcagguucggugcaugggg

SEQ ID NO: 2428854 - RNA, 19 nt, Artificial Sequence
  Description of Artificial Sequence: Synthetic oligonucleotide
cuugcaaaugcuggauuug

SEQ ID NO: 2428855 - RNA, 19 nt, Artificial Sequence
  Description of Artificial Sequence: Synthetic oligonucleotide
gagccauacucagugaguc

SEQ ID NO: 2428856 - RNA, 19 nt, Artificial Sequence
  Description of Artificial Sequence: Synthetic oligonucleotide
gauuccucgccaucccaac

SEQ ID NO: 2428857 - RNA, 19 nt, Artificial Sequence
  Description of Artificial Sequence: Synthetic oligonucleotide
uccaagaaguucacccaau

SEQ ID NO: 2428858 - RNA, 19 nt, Artificial Sequence
  Description of Artificial Sequence: Synthetic oligonucleotide
caagucagcaucucuucga

SEQ ID NO: 2428859 - RNA, 19 nt, Artificial Sequence
  Description of Artificial Sequence: Synthetic oligonucleotide
uucuagucagagccauacu

SEQ ID NO: 2428860 - RNA, 19 nt, Artificial Sequence
  Description of Artificial Sequence: Synthetic oligonucleotide
gaguucugugauuccucgc

SEQ ID NO: 2428861 - RNA, 19 nt, Artificial Sequence
  Description of Artificial Sequence: Synthetic oligonucleotide
acccaauaacgcacagucc

SEQ ID NO: 2428862 - RNA, 19 nt, Artificial Sequence
  Description of Artificial Sequence: Synthetic oligonucleotide
aguccaugacaagucaugu

SEQ ID NO: 2428863 - RNA, 19 nt, Artificial Sequence
  Description of Artificial Sequence: Synthetic oligonucleotide
ugacugucagcuuguuagu

SEQ ID NO: 2428864 - RNA, 19 nt, Artificial Sequence
  Description of Artificial Sequence: Synthetic oligonucleotide
acccuguuggugugguagg

SEQ ID NO: 2428865 - RNA, 19 nt, Artificial Sequence
  Description of Artificial Sequence: Synthetic oligonucleotide
uaguggucaggccuuuguc

SEQ ID NO: 2428866 - RNA, 19 nt, Artificial Sequence
  Description of Artificial Sequence: Synthetic oligonucleotide
cuuuugcaccugcucggcg

SEQ ID NO: 2428867 - RNA, 19 nt, Artificial Sequence
  Description of Artificial Sequence: Synthetic oligonucleotide
gcaagucagcaucucuucg

SEQ ID NO: 2428868 - RNA, 19 nt, Artificial Sequence
  Description of Artificial Sequence: Synthetic oligonucleotide
accccaucaaggaagagaa

SEQ ID NO: 2428869 - RNA, 19 nt, Artificial Sequence
  Description of Artificial Sequence: Synthetic oligonucleotide
uccuagcuugcucuugcaa

SEQ ID NO: 2428870 - RNA, 19 nt, Artificial Sequence
  Description of Artificial Sequence: Synthetic oligonucleotide
ccaacugacagcaaacaca

SEQ ID NO: 2428871 - RNA, 19 nt, Artificial Sequence
  Description of Artificial Sequence: Synthetic oligonucleotide
gucccuggaaggcagguuc

SEQ ID NO: 2428872 - RNA, 19 nt, Artificial Sequence
  Description of Artificial Sequence: Synthetic oligonucleotide
cccaucaaggaagagaaug

SEQ ID NO: 2428873 - RNA, 19 nt, Artificial Sequence
  Description of Artificial Sequence: Synthetic oligonucleotide
ucagagccauacucaguga

SEQ ID NO: 2428874 - RNA, 19 nt, Artificial Sequence
  Description of Artificial Sequence: Synthetic oligonucleotide
uuaguagcauuugcucgga

SEQ ID NO: 2428875 - RNA, 19 nt, Artificial Sequence
  Description of Artificial Sequence: Synthetic oligonucleotide
uccccgacccuguuggugu

SEQ ID NO: 2428876 - RNA, 19 nt, Artificial Sequence
  Description of Artificial Sequence: Synthetic oligonucleotide
gacaagucauguugcagcu

SEQ ID NO: 2428877 - RNA, 19 nt, Artificial Sequence
  Description of Artificial Sequence: Synthetic oligonucleotide
ucccaacugacagcaaaca

SEQ ID NO: 2428878 - RNA, 19 nt, Artificial Sequence
  Description of Artificial Sequence: Synthetic oligonucleotide
caugacaagucauguugca

SEQ ID NO: 2428879 - RNA, 19 nt, Artificial Sequence
  Description of Artificial Sequence: Synthetic oligonucleotide
ugcuggauuugcucggcaa

SEQ ID NO: 2428880 - RNA, 19 nt, Artificial Sequence
  Description of Artificial Sequence: Synthetic oligonucleotide
cucggcaaugacugucagc

SEQ ID NO: 2428881 - RNA, 19 nt, Artificial Sequence
  Description of Artificial Sequence: Synthetic oligonucleotide
caagaaguucacccaauaa

SEQ ID NO: 2428882 - RNA, 19 nt, Artificial Sequence
  Description of Artificial Sequence: Synthetic oligonucleotide
aggaguucugugauuccuc

SEQ ID NO: 2428883 - RNA, 19 nt, Artificial Sequence
  Description of Artificial Sequence: Synthetic oligonucleotide
cucuucgagcaucuuccag

SEQ ID NO: 2428884 - RNA, 19 nt, Artificial Sequence
  Description of Artificial Sequence: Synthetic oligonucleotide
gaagaucccacaggaguuc

SEQ ID NO: 2428885 - RNA, 19 nt, Artificial Sequence
  Description of Artificial Sequence: Synthetic oligonucleotide
gucggggugagcuccacca

SEQ ID NO: 2428886 - RNA, 19 nt, Artificial Sequence
  Description of Artificial Sequence: Synthetic oligonucleotide
uaggggcucaccagagcca

SEQ ID NO: 2428887 - RNA, 19 nt, Artificial Sequence
  Description of Artificial Sequence: Synthetic oligonucleotide
ccaugacaagucauguugc

SEQ ID NO: 2428888 - RNA, 19 nt, Artificial Sequence
  Description of Artificial Sequence: Synthetic oligonucleotide
gccauacucagugagucag

SEQ ID NO: 2428889 - RNA, 19 nt, Artificial Sequence
  Description of Artificial Sequence: Synthetic oligonucleotide
caggaagaucccacaggag

SEQ ID NO: 2428890 - RNA, 19 nt, Artificial Sequence
  Description of Artificial Sequence: Synthetic oligonucleotide
aggucuaaaggguccccga

SEQ ID NO: 2428891 - RNA, 19 nt, Artificial Sequence
  Description of Artificial Sequence: Synthetic oligonucleotide
uccuccaugacagcccuuc

SEQ ID NO: 2428892 - RNA, 19 nt, Artificial Sequence
  Description of Artificial Sequence: Synthetic oligonucleotide
gccuuuugcaccugcucgg

SEQ ID NO: 2428893 - RNA, 19 nt, Artificial Sequence
  Description of Artificial Sequence: Synthetic oligonucleotide
uucugugauuccucgccau

SEQ ID NO: 2428894 - RNA, 19 nt, Artificial Sequence
  Description of Artificial Sequence: Synthetic oligonucleotide
gcaccaaggaagucauggg

SEQ ID NO: 2428895 - RNA, 19 nt, Artificial Sequence
  Description of Artificial Sequence: Synthetic oligonucleotide
cugcuggccacuuucccuc

SEQ ID NO: 2428896 - RNA, 19 nt, Artificial Sequence
  Description of Artificial Sequence: Synthetic oligonucleotide
uccucgccaucccaacuga

SEQ ID NO: 2428897 - RNA, 19 nt, Artificial Sequence
  Description of Artificial Sequence: Synthetic oligonucleotide
agcuuguccaucaugccaa

SEQ ID NO: 2428898 - RNA, 19 nt, Artificial Sequence
  Description of Artificial Sequence: Synthetic oligonucleotide
aggcagguucggugcaugg

SEQ ID NO: 2428899 - RNA, 19 nt, Artificial Sequence
  Description of Artificial Sequence: Synthetic oligonucleotide
cauuccucuggagaaauaa

SEQ ID NO: 2428900 - RNA, 19 nt, Artificial Sequence
  Description of Artificial Sequence: Synthetic oligonucleotide
cugguucagcagcuugucc

SEQ ID NO: 2428901 - RNA, 19 nt, Artificial Sequence
  Description of Artificial Sequence: Synthetic oligonucleotide
gccacuuucccucugguaa

SEQ ID NO: 2428902 - RNA, 19 nt, Artificial Sequence
  Description of Artificial Sequence: Synthetic oligonucleotide
cuggccacuuucccucugg

SEQ ID NO: 2428903 - RNA, 19 nt, Artificial Sequence
  Description of Artificial Sequence: Synthetic oligonucleotide
cucggcgagcgccacgagg

SEQ ID NO: 2428904 - RNA, 19 nt, Artificial Sequence
  Description of Artificial Sequence: Synthetic oligonucleotide
uguggacaaggagguagug

SEQ ID NO: 2428905 - RNA, 19 nt, Artificial Sequence
  Description of Artificial Sequence: Synthetic oligonucleotide
ggguccccgacccuguugg

SEQ ID NO: 2428906 - RNA, 19 nt, Artificial Sequence
  Description of Artificial Sequence: Synthetic oligonucleotide
ucggggugagcuccaccag

SEQ ID NO: 2428907 - RNA, 19 nt, Artificial Sequence
  Description of Artificial Sequence: Synthetic oligonucleotide
guaccuuccuagcuugcuc

SEQ ID NO: 2428908 - RNA, 19 nt, Artificial Sequence
  Description of Artificial Sequence: Synthetic oligonucleotide
acauggugcaagucagcau

SEQ ID NO: 2428909 - RNA, 19 nt, Artificial Sequence
  Description of Artificial Sequence: Synthetic oligonucleotide
uuugcucggcaaugacugu

SEQ ID NO: 2428910 - RNA, 19 nt, Artificial Sequence
  Description of Artificial Sequence: Synthetic oligonucleotide
aguaccuuccuagcuugcu

SEQ ID NO: 2428911 - RNA, 19 nt, Artificial Sequence
  Description of Artificial Sequence: Synthetic oligonucleotide
ucacccaauaacgcacagu

SEQ ID NO: 2428912 - RNA, 19 nt, Artificial Sequence
  Description of Artificial Sequence: Synthetic oligonucleotide
agcuuguuaguagcauuug

SEQ ID NO: 2428913 - RNA, 19 nt, Artificial Sequence
  Description of Artificial Sequence: Synthetic oligonucleotide
gauuugcucggcaaugacu

SEQ ID NO: 2428914 - RNA, 19 nt, Artificial Sequence
  Description of Artificial Sequence: Synthetic oligonucleotide
cacccuaccccaucaagga

SEQ ID NO: 2428915 - RNA, 19 nt, Artificial Sequence
  Description of Artificial Sequence: Synthetic oligonucleotide
cccuaccccaucaaggaag

SEQ ID NO: 2428916 - RNA, 19 nt, Artificial Sequence
  Description of Artificial Sequence: Synthetic oligonucleotide
agccauacucagugaguca

SEQ ID NO: 2428917 - RNA, 19 nt, Artificial Sequence
  Description of Artificial Sequence: Synthetic oligonucleotide
caugccaauuuuagcaucu

SEQ ID NO: 2428918 - RNA, 19 nt, Artificial Sequence
  Description of Artificial Sequence: Synthetic oligonucleotide
gugguaggggcucaccaga

SEQ ID NO: 2428919 - RNA, 19 nt, Artificial Sequence
  Description of Artificial Sequence: Synthetic oligonucleotide
guucugugauuccucgcca

SEQ ID NO: 2428920 - RNA, 19 nt, Artificial Sequence
  Description of Artificial Sequence: Synthetic oligonucleotide
caucccaacugacagcaaa

SEQ ID NO: 2428921 - RNA, 19 nt, Artificial Sequence
  Description of Artificial Sequence: Synthetic oligonucleotide
accauauugcaagccacau

SEQ ID NO: 2428922 - RNA, 19 nt, Artificial Sequence
  Description of Artificial Sequence: Synthetic oligonucleotide
acgcacaguccucgugaac

SEQ ID NO: 2428923 - RNA, 19 nt, Artificial Sequence
  Description of Artificial Sequence: Synthetic oligonucleotide
guugcagcuuguaggcacc

SEQ ID NO: 2428924 - RNA, 19 nt, Artificial Sequence
  Description of Artificial Sequence: Synthetic oligonucleotide
aacgggccgggagucgccg

SEQ ID NO: 2428925 - RNA, 19 nt, Artificial Sequence
  Description of Artificial Sequence: Synthetic oligonucleotide
agagccauacucagugagu

SEQ ID NO: 2428926 - RNA, 19 nt, Artificial Sequence
  Description of Artificial Sequence: Synthetic oligonucleotide
uugcucggcaaugacuguc

SEQ ID NO: 2428927 - RNA, 19 nt, Artificial Sequence
  Description of Artificial Sequence: Synthetic oligonucleotide
caaggagguaguggucagg

SEQ ID NO: 2428928 - RNA, 19 nt, Artificial Sequence
  Description of Artificial Sequence: Synthetic oligonucleotide
cucgccaucccaacugaca

SEQ ID NO: 2428929 - RNA, 19 nt, Artificial Sequence
  Description of Artificial Sequence: Synthetic oligonucleotide
uucgagcaucuuccaguac

SEQ ID NO: 2428930 - RNA, 19 nt, Artificial Sequence
  Description of Artificial Sequence: Synthetic oligonucleotide
agcauuugcucggaugaau

SEQ ID NO: 2428931 - RNA, 19 nt, Artificial Sequence
  Description of Artificial Sequence: Synthetic oligonucleotide
gugugguaggggcucacca

SEQ ID NO: 2428932 - RNA, 19 nt, Artificial Sequence
  Description of Artificial Sequence: Synthetic oligonucleotide
cacauggugcaagucagca

SEQ ID NO: 2428933 - RNA, 19 nt, Artificial Sequence
  Description of Artificial Sequence: Synthetic oligonucleotide
uggucaggccuuugucaug

SEQ ID NO: 2428934 - RNA, 19 nt, Artificial Sequence
  Description of Artificial Sequence: Synthetic oligonucleotide
cucagugagucagucccug

SEQ ID NO: 2428935 - RNA, 19 nt, Artificial Sequence
  Description of Artificial Sequence: Synthetic oligonucleotide
aucuugcuucucaaugucu

SEQ ID NO: 2428936 - RNA, 19 nt, Artificial Sequence
  Description of Artificial Sequence: Synthetic oligonucleotide
cgccacgaggucuaaaggg

SEQ ID NO: 2428937 - RNA, 19 nt, Artificial Sequence
  Description of Artificial Sequence: Synthetic oligonucleotide
ugcucggcgagcgccacga

SEQ ID NO: 2428938 - RNA, 19 nt, Artificial Sequence
  Description of Artificial Sequence: Synthetic oligonucleotide
cugcuccccauuccucugg

SEQ ID NO: 2428939 - RNA, 19 nt, Artificial Sequence
  Description of Artificial Sequence: Synthetic oligonucleotide
ugagcuccaccagggcucc

SEQ ID NO: 2428940 - RNA, 19 nt, Artificial Sequence
  Description of Artificial Sequence: Synthetic oligonucleotide
ugcuccccauuccucugga

SEQ ID NO: 2428941 - RNA, 19 nt, Artificial Sequence
  Description of Artificial Sequence: Synthetic oligonucleotide
uugcucggaugaauucauc

SEQ ID NO: 2428942 - RNA, 19 nt, Artificial Sequence
  Description of Artificial Sequence: Synthetic oligonucleotide
ggucuaaaggguccccgac

SEQ ID NO: 2428943 - RNA, 19 nt, Artificial Sequence
  Description of Artificial Sequence: Synthetic oligonucleotide
agucagucccuggaaggca

SEQ ID NO: 2428944 - RNA, 19 nt, Artificial Sequence
  Description of Artificial Sequence: Synthetic oligonucleotide
auuccucuggagaaauaau

SEQ ID NO: 2428945 - RNA, 19 nt, Artificial Sequence
  Description of Artificial Sequence: Synthetic oligonucleotide
cuucgagcaucuuccagua

SEQ ID NO: 2428946 - RNA, 19 nt, Artificial Sequence
  Description of Artificial Sequence: Synthetic oligonucleotide
ccaguaccuuccuagcuug

SEQ ID NO: 2428947 - RNA, 19 nt, Artificial Sequence
  Description of Artificial Sequence: Synthetic oligonucleotide
caguaccuuccuagcuugc

SEQ ID NO: 2428948 - RNA, 19 nt, Artificial Sequence
  Description of Artificial Sequence: Synthetic oligonucleotide
aagucauguugcagcuugu

SEQ ID NO: 2428949 - RNA, 19 nt, Artificial Sequence
  Description of Artificial Sequence: Synthetic oligonucleotide
cagugagucagucccugga

SEQ ID NO: 2428950 - RNA, 19 nt, Artificial Sequence
  Description of Artificial Sequence: Synthetic oligonucleotide
cagccuuuugcaccugcuc

SEQ ID NO: 2428951 - RNA, 19 nt, Artificial Sequence
  Description of Artificial Sequence: Synthetic oligonucleotide
ggauuugcucggcaaugac

SEQ ID NO: 2428952 - RNA, 19 nt, Artificial Sequence
  Description of Artificial Sequence: Synthetic oligonucleotide
aaguacugcuggccacuuu

SEQ ID NO: 2428953 - RNA, 19 nt, Artificial Sequence
  Description of Artificial Sequence: Synthetic oligonucleotide
uggccacuuucccucuggu

SEQ ID NO: 2428954 - RNA, 19 nt, Artificial Sequence
  Description of Artificial Sequence: Synthetic oligonucleotide
uccaacgggccgggagucg

SEQ ID NO: 2428955 - RNA, 19 nt, Artificial Sequence
  Description of Artificial Sequence: Synthetic oligonucleotide
ggggugagcuccaccaggg

SEQ ID NO: 2428956 - RNA, 19 nt, Artificial Sequence
  Description of Artificial Sequence: Synthetic oligonucleotide
gguaaagauaguaaauguu

SEQ ID NO: 2428957 - RNA, 19 nt, Artificial Sequence
  Description of Artificial Sequence: Synthetic oligonucleotide
gccggguccuccaugacag

SEQ ID NO: 2428958 - RNA, 19 nt, Artificial Sequence
  Description of Artificial Sequence: Synthetic oligonucleotide
cgcacaguccucgugaacc

SEQ ID NO: 2428959 - RNA, 19 nt, Artificial Sequence
  Description of Artificial Sequence: Synthetic oligonucleotide
agcaucucuucgagcaucu

SEQ ID NO: 2428960 - RNA, 19 nt, Artificial Sequence
  Description of Artificial Sequence: Synthetic oligonucleotide
cccaauaacgcacaguccu

SEQ ID NO: 2428961 - RNA, 19 nt, Artificial Sequence
  Description of Artificial Sequence: Synthetic oligonucleotide
gugauuccucgccauccca

SEQ ID NO: 2428962 - RNA, 19 nt, Artificial Sequence
  Description of Artificial Sequence: Synthetic oligonucleotide
ccauauugcaagccacaug

SEQ ID NO: 2428963 - RNA, 19 nt, Artificial Sequence
  Description of Artificial Sequence: Synthetic oligonucleotide
caauuuuagcaucuugcuu

SEQ ID NO: 2428964 - RNA, 19 nt, Artificial Sequence
  Description of Artificial Sequence: Synthetic oligonucleotide
caaggccaugggcugguuc

SEQ ID NO: 2428965 - RNA, 19 nt, Artificial Sequence
  Description of Artificial Sequence: Synthetic oligonucleotide
gucgccggguccuccauga

SEQ ID NO: 2428966 - RNA, 19 nt, Artificial Sequence
  Description of Artificial Sequence: Synthetic oligonucleotide
guaguggucaggccuuugu

SEQ ID NO: 2428967 - RNA, 19 nt, Artificial Sequence
  Description of Artificial Sequence: Synthetic oligonucleotide
auauugcaagccacauggu

SEQ ID NO: 2428968 - RNA, 19 nt, Artificial Sequence
  Description of Artificial Sequence: Synthetic oligonucleotide
uaguagcauuugcucggau

SEQ ID NO: 2428969 - RNA, 19 nt, Artificial Sequence
  Description of Artificial Sequence: Synthetic oligonucleotide
cacaguccucgugaacccc

SEQ ID NO: 2428970 - RNA, 19 nt, Artificial Sequence
  Description of Artificial Sequence: Synthetic oligonucleotide
uguaggcaccaaggaaguc

SEQ ID NO: 2428971 - RNA, 19 nt, Artificial Sequence
  Description of Artificial Sequence: Synthetic oligonucleotide
cagcaucucuucgagcauc

SEQ ID NO: 2428972 - RNA, 19 nt, Artificial Sequence
  Description of Artificial Sequence: Synthetic oligonucleotide
uagcauuugcucggaugaa

SEQ ID NO: 2428973 - RNA, 19 nt, Artificial Sequence
  Description of Artificial Sequence: Synthetic oligonucleotide
ggcagguucggugcauggg

SEQ ID NO: 2428974 - RNA, 19 nt, Artificial Sequence
  Description of Artificial Sequence: Synthetic oligonucleotide
gguaggggcucaccagagc

SEQ ID NO: 2428975 - RNA, 19 nt, Artificial Sequence
  Description of Artificial Sequence: Synthetic oligonucleotide
ccaauaacgcacaguccuc

SEQ ID NO: 2428976 - RNA, 19 nt, Artificial Sequence
  Description of Artificial Sequence: Synthetic oligonucleotide
gcacaguccucgugaaccc

SEQ ID NO: 2428977 - RNA, 19 nt, Artificial Sequence
  Description of Artificial Sequence: Synthetic oligonucleotide
caccugcucggcgagcgcc

SEQ ID NO: 2428978 - RNA, 19 nt, Artificial Sequence
  Description of Artificial Sequence: Synthetic oligonucleotide
ccaauuuuagcaucuugcu

SEQ ID NO: 2428979 - RNA, 19 nt, Artificial Sequence
  Description of Artificial Sequence: Synthetic oligonucleotide
ccuagcuugcucuugcaaa

SEQ ID NO: 2428980 - RNA, 19 nt, Artificial Sequence
  Description of Artificial Sequence: Synthetic oligonucleotide
uacacccaccauggucucc

SEQ ID NO: 2428981 - RNA, 19 nt, Artificial Sequence
  Description of Artificial Sequence: Synthetic oligonucleotide
agucgccggguccuccaug

SEQ ID NO: 2428982 - RNA, 19 nt, Artificial Sequence
  Description of Artificial Sequence: Synthetic oligonucleotide
ucccucugguaaagauagu

SEQ ID NO: 2428983 - RNA, 19 nt, Artificial Sequence
  Description of Artificial Sequence: Synthetic oligonucleotide
agucauguugcagcuugua

SEQ ID NO: 2428984 - RNA, 19 nt, Artificial Sequence
  Description of Artificial Sequence: Synthetic oligonucleotide
ggucaggccuuugucauga

SEQ ID NO: 2428985 - RNA, 19 nt, Artificial Sequence
  Description of Artificial Sequence: Synthetic oligonucleotide
gcaagccacauggugcaag

SEQ ID NO: 2428986 - RNA, 19 nt, Artificial Sequence
  Description of Artificial Sequence: Synthetic oligonucleotide
acuuucccucugguaaaga

SEQ ID NO: 2428987 - RNA, 19 nt, Artificial Sequence
  Description of Artificial Sequence: Synthetic oligonucleotide
gacuucuagucagagccau

SEQ ID NO: 2428988 - RNA, 19 nt, Artificial Sequence
  Description of Artificial Sequence: Synthetic oligonucleotide
cuacacccaccauggucuc

SEQ ID NO: 2428989 - RNA, 19 nt, Artificial Sequence
  Description of Artificial Sequence: Synthetic oligonucleotide
acccgccgccugcugcacc

SEQ ID NO: 2428990 - RNA, 19 nt, Artificial Sequence
  Description of Artificial Sequence: Synthetic oligonucleotide
uuccaacgggccgggaguc

SEQ ID NO: 2428991 - RNA, 19 nt, Artificial Sequence
  Description of Artificial Sequence: Synthetic oligonucleotide
auguugcagcuuguaggca

SEQ ID NO: 2428992 - RNA, 19 nt, Artificial Sequence
  Description of Artificial Sequence: Synthetic oligonucleotide
uuggugugguaggggcuca

SEQ ID NO: 2428993 - RNA, 19 nt, Artificial Sequence
  Description of Artificial Sequence: Synthetic oligonucleotide
aucuuccaguaccuuccua

SEQ ID NO: 2428994 - RNA, 19 nt, Artificial Sequence
  Description of Artificial Sequence: Synthetic oligonucleotide
cagcuuguuaguagcauuu

SEQ ID NO: 2428995 - RNA, 19 nt, Artificial Sequence
  Description of Artificial Sequence: Synthetic oligonucleotide
caagccacauggugcaagu

SEQ ID NO: 2428996 - RNA, 19 nt, Artificial Sequence
  Description of Artificial Sequence: Synthetic oligonucleotide
ggugcaagucagcaucucu

SEQ ID NO: 2428997 - RNA, 19 nt, Artificial Sequence
  Description of Artificial Sequence: Synthetic oligonucleotide
caacgggccgggagucgcc

SEQ ID NO: 2428998 - RNA, 19 nt, Artificial Sequence
  Description of Artificial Sequence: Synthetic oligonucleotide
acucagugagucagucccu

SEQ ID NO: 2428999 - RNA, 19 nt, Artificial Sequence
  Description of Artificial Sequence: Synthetic oligonucleotide
augggcugguucagcagcu

SEQ ID NO: 2429000 - RNA, 19 nt, Artificial Sequence
  Description of Artificial Sequence: Synthetic oligonucleotide
uggugcaagucagcaucuc

SEQ ID NO: 2429001 - RNA, 19 nt, Artificial Sequence
  Description of Artificial Sequence: Synthetic oligonucleotide
caccagggcuccuccagga

SEQ ID NO: 2429002 - RNA, 19 nt, Artificial Sequence
  Description of Artificial Sequence: Synthetic oligonucleotide
guccccgacccuguuggug

SEQ ID NO: 2429003 - RNA, 19 nt, Artificial Sequence
  Description of Artificial Sequence: Synthetic oligonucleotide
gucaggccuuugucaugag

SEQ ID NO: 2429004 - RNA, 19 nt, Artificial Sequence
  Description of Artificial Sequence: Synthetic oligonucleotide
gccaugggcugguucagca

SEQ ID NO: 2429005 - RNA, 19 nt, Artificial Sequence
  Description of Artificial Sequence: Synthetic oligonucleotide
ccacgaggucuaaaggguc

SEQ ID NO: 2429006 - RNA, 19 nt, Artificial Sequence
  Description of Artificial Sequence: Synthetic oligonucleotide
agaucccacaggaguucug

SEQ ID NO: 2429007 - RNA, 19 nt, Artificial Sequence
  Description of Artificial Sequence: Synthetic oligonucleotide
aaggguccccgacccuguu

SEQ ID NO: 2429008 - RNA, 19 nt, Artificial Sequence
  Description of Artificial Sequence: Synthetic oligonucleotide
aggccaugggcugguucag

SEQ ID NO: 2429009 - RNA, 19 nt, Artificial Sequence
  Description of Artificial Sequence: Synthetic oligonucleotide
ccacauggugcaagucagc

SEQ ID NO: 2429010 - RNA, 19 nt, Artificial Sequence
  Description of Artificial Sequence: Synthetic oligonucleotide
ccaugggcugguucagcag

SEQ ID NO: 2429011 - RNA, 19 nt, Artificial Sequence
  Description of Artificial Sequence: Synthetic oligonucleotide
cccacccuaccccaucaag

SEQ ID NO: 2429012 - RNA, 19 nt, Artificial Sequence
  Description of Artificial Sequence: Synthetic oligonucleotide
gcucggcaaugacugucag

SEQ ID NO: 2429013 - RNA, 19 nt, Artificial Sequence
  Description of Artificial Sequence: Synthetic oligonucleotide
ggugugguaggggcucacc

SEQ ID NO: 2429014 - RNA, 19 nt, Artificial Sequence
  Description of Artificial Sequence: Synthetic oligonucleotide
ccaccagggcuccuccagg

SEQ ID NO: 2429015 - RNA, 19 nt, Artificial Sequence
  Description of Artificial Sequence: Synthetic oligonucleotide
gugcaagucagcaucucuu

SEQ ID NO: 2429016 - RNA, 19 nt, Artificial Sequence
  Description of Artificial Sequence: Synthetic oligonucleotide
gcucaccagagccaggccu

SEQ ID NO: 2429017 - RNA, 19 nt, Artificial Sequence
  Description of Artificial Sequence: Synthetic oligonucleotide
augccaauuuuagcaucuu

SEQ ID NO: 2429018 - RNA, 19 nt, Artificial Sequence
  Description of Artificial Sequence: Synthetic oligonucleotide
cugcucggcgagcgccacg

SEQ ID NO: 2429019 - RNA, 19 nt, Artificial Sequence
  Description of Artificial Sequence: Synthetic oligonucleotide
cuuugucaugaggacuucu

SEQ ID NO: 2429020 - RNA, 19 nt, Artificial Sequence
  Description of Artificial Sequence: Synthetic oligonucleotide
gucagcuuguuaguagcau

SEQ ID NO: 2429021 - RNA, 19 nt, Artificial Sequence
  Description of Artificial Sequence: Synthetic oligonucleotide
ucgccggguccuccaugac

SEQ ID NO: 2429022 - RNA, 19 nt, Artificial Sequence
  Description of Artificial Sequence: Synthetic oligonucleotide
uggugugguaggggcucac

SEQ ID NO: 2429023 - RNA, 19 nt, Artificial Sequence
  Description of Artificial Sequence: Synthetic oligonucleotide
ggucggggugagcuccacc

SEQ ID NO: 2429024 - RNA, 19 nt, Artificial Sequence
  Description of Artificial Sequence: Synthetic oligonucleotide
gggugagcuccaccagggc

SEQ ID NO: 2429025 - RNA, 19 nt, Artificial Sequence
  Description of Artificial Sequence: Synthetic oligonucleotide
caccagagccaggccuccg

SEQ ID NO: 2429026 - RNA, 19 nt, Artificial Sequence
  Description of Artificial Sequence: Synthetic oligonucleotide
cggggugagcuccaccagg

SEQ ID NO: 2429027 - RNA, 19 nt, Artificial Sequence
  Description of Artificial Sequence: Synthetic oligonucleotide
ggcccaggaagaucccaca

SEQ ID NO: 2429028 - RNA, 19 nt, Artificial Sequence
  Description of Artificial Sequence: Synthetic oligonucleotide
acuucuagucagagccaua

SEQ ID NO: 2429029 - RNA, 19 nt, Artificial Sequence
  Description of Artificial Sequence: Synthetic oligonucleotide
ggaagaucccacaggaguu

SEQ ID NO: 2429030 - RNA, 19 nt, Artificial Sequence
  Description of Artificial Sequence: Synthetic oligonucleotide
ccaagaaguucacccaaua

SEQ ID NO: 2429031 - RNA, 19 nt, Artificial Sequence
  Description of Artificial Sequence: Synthetic oligonucleotide
cucuugcaaaugcuggauu

SEQ ID NO: 2429032 - RNA, 19 nt, Artificial Sequence
  Description of Artificial Sequence: Synthetic oligonucleotide
gguaguggucaggccuuug

SEQ ID NO: 2429033 - RNA, 19 nt, Artificial Sequence
  Description of Artificial Sequence: Synthetic oligonucleotide
caccauggucuccuuccaa

SEQ ID NO: 2429034 - RNA, 19 nt, Artificial Sequence
  Description of Artificial Sequence: Synthetic oligonucleotide
gggcccaggaagaucccac

SEQ ID NO: 2429035 - RNA, 19 nt, Artificial Sequence
  Description of Artificial Sequence: Synthetic oligonucleotide
ggagucgccggguccucca

SEQ ID NO: 2429036 - RNA, 19 nt, Artificial Sequence
  Description of Artificial Sequence: Synthetic oligonucleotide
gccacgaggucuaaagggu

SEQ ID NO: 2429037 - RNA, 19 nt, Artificial Sequence
  Description of Artificial Sequence: Synthetic oligonucleotide
ccaacgggccgggagucgc

SEQ ID NO: 2429038 - RNA, 19 nt, Artificial Sequence
  Description of Artificial Sequence: Synthetic oligonucleotide
gccgggagucgccgggucc

SEQ ID NO: 2429039 - RNA, 19 nt, Artificial Sequence
  Description of Artificial Sequence: Synthetic oligonucleotide
ggacccgccgccugcugca

SEQ ID NO: 2429040 - RNA, 19 nt, Artificial Sequence
  Description of Artificial Sequence: Synthetic oligonucleotide
gcaaugacugucagcuugu

SEQ ID NO: 2429041 - RNA, 19 nt, Artificial Sequence
  Description of Artificial Sequence: Synthetic oligonucleotide
cggguccuccaugacagcc

SEQ ID NO: 2429042 - RNA, 19 nt, Artificial Sequence
  Description of Artificial Sequence: Synthetic oligonucleotide
caucagccuuuugcaccug

SEQ ID NO: 2429043 - RNA, 19 nt, Artificial Sequence
  Description of Artificial Sequence: Synthetic oligonucleotide
gccuuugucaugaggacuu

SEQ ID NO: 2429044 - RNA, 19 nt, Artificial Sequence
  Description of Artificial Sequence: Synthetic oligonucleotide
cagccugcuccccauuccu

SEQ ID NO: 2429045 - RNA, 19 nt, Artificial Sequence
  Description of Artificial Sequence: Synthetic oligonucleotide
ccucgccaucccaacugac

SEQ ID NO: 2429046 - RNA, 19 nt, Artificial Sequence
  Description of Artificial Sequence: Synthetic oligonucleotide
ggccuuugucaugaggacu

SEQ ID NO: 2429047 - RNA, 19 nt, Artificial Sequence
  Description of Artificial Sequence: Synthetic oligonucleotide
cgccaucccaacugacagc

SEQ ID NO: 2429048 - RNA, 19 nt, Artificial Sequence
  Description of Artificial Sequence: Synthetic oligonucleotide
gaaggcagguucggugcau

SEQ ID NO: 2429049 - RNA, 19 nt, Artificial Sequence
  Description of Artificial Sequence: Synthetic oligonucleotide
gugggcccaggaagauccc

SEQ ID NO: 2429050 - RNA, 19 nt, Artificial Sequence
  Description of Artificial Sequence: Synthetic oligonucleotide
gcauuugcucggaugaauu

SEQ ID NO: 2429051 - RNA, 19 nt, Artificial Sequence
  Description of Artificial Sequence: Synthetic oligonucleotide
gcuugcucuugcaaaugcu

SEQ ID NO: 2429052 - RNA, 19 nt, Artificial Sequence
  Description of Artificial Sequence: Synthetic oligonucleotide
ggccacuuucccucuggua

SEQ ID NO: 2429053 - RNA, 19 nt, Artificial Sequence
  Description of Artificial Sequence: Synthetic oligonucleotide
agguaguggucaggccuuu

SEQ ID NO: 2429054 - RNA, 19 nt, Artificial Sequence
  Description of Artificial Sequence: Synthetic oligonucleotide
ggaguccaugacaagucau

SEQ ID NO: 2429055 - RNA, 19 nt, Artificial Sequence
  Description of Artificial Sequence: Synthetic oligonucleotide
ggccaugggcugguucagc

SEQ ID NO: 2429056 - RNA, 19 nt, Artificial Sequence
  Description of Artificial Sequence: Synthetic oligonucleotide
gcucuugcaaaugcuggau

SEQ ID NO: 2429057 - RNA, 19 nt, Artificial Sequence
  Description of Artificial Sequence: Synthetic oligonucleotide
cccacaggaguucugugau

SEQ ID NO: 2429058 - RNA, 19 nt, Artificial Sequence
  Description of Artificial Sequence: Synthetic oligonucleotide
cgaggucuaaagggucccc

SEQ ID NO: 2429059 - RNA, 19 nt, Artificial Sequence
  Description of Artificial Sequence: Synthetic oligonucleotide
gcaccugcucggcgagcgc

SEQ ID NO: 2429060 - RNA, 19 nt, Artificial Sequence
  Description of Artificial Sequence: Synthetic oligonucleotide
ggggcucaccagagccagg

SEQ ID NO: 2429061 - RNA, 19 nt, Artificial Sequence
  Description of Artificial Sequence: Synthetic oligonucleotide
gggagucgccggguccucc

SEQ ID NO: 2429062 - RNA, 19 nt, Artificial Sequence
  Description of Artificial Sequence: Synthetic oligonucleotide
gacccgccgccugcugcac

SEQ ID NO: 2429063 - RNA, 19 nt, Artificial Sequence
  Description of Artificial Sequence: Synthetic oligonucleotide
gagcgccacgaggucuaaa

SEQ ID NO: 2429064 - RNA, 19 nt, Artificial Sequence
  Description of Artificial Sequence: Synthetic oligonucleotide
gagucgccggguccuccau

SEQ ID NO: 2429065 - RNA, 19 nt, Artificial Sequence
  Description of Artificial Sequence: Synthetic oligonucleotide
cccgacccuguuggugugg

SEQ ID NO: 2429066 - RNA, 19 nt, Artificial Sequence
  Description of Artificial Sequence: Synthetic oligonucleotide
cuuguccaucaugccaauu

SEQ ID NO: 2429067 - RNA, 19 nt, Artificial Sequence
  Description of Artificial Sequence: Synthetic oligonucleotide
ccauuccucuggagaaaua

SEQ ID NO: 2429068 - RNA, 19 nt, Artificial Sequence
  Description of Artificial Sequence: Synthetic oligonucleotide
gcucggcgagcgccacgag

SEQ ID NO: 2429069 - RNA, 19 nt, Artificial Sequence
  Description of Artificial Sequence: Synthetic oligonucleotide
gggcuccuccaggacccgc

SEQ ID NO: 2429070 - RNA, 19 nt, Artificial Sequence
  Description of Artificial Sequence: Synthetic oligonucleotide
ggccgggagucgccggguc

SEQ ID NO: 2429071 - RNA, 19 nt, Artificial Sequence
  Description of Artificial Sequence: Synthetic oligonucleotide
ggcgagcgccacgaggucu

SEQ ID NO: 2429072 - RNA, 19 nt, Artificial Sequence
  Description of Artificial Sequence: Synthetic oligonucleotide
cggaugaauucaucagccu

SEQ ID NO: 2429073 - RNA, 19 nt, Artificial Sequence
  Description of Artificial Sequence: Synthetic oligonucleotide
ccccgacccuguuggugug

SEQ ID NO: 2429074 - RNA, 19 nt, Artificial Sequence
  Description of Artificial Sequence: Synthetic oligonucleotide
gcgagcgccacgaggucua

SEQ ID NO: 2429075 - RNA, 19 nt, Artificial Sequence
  Description of Artificial Sequence: Synthetic oligonucleotide
caaugacugucagcuuguu

SEQ ID NO: 2429076 - RNA, 19 nt, Artificial Sequence
  Description of Artificial Sequence: Synthetic oligonucleotide
cgccggguccuccaugaca

SEQ ID NO: 2429077 - RNA, 19 nt, Artificial Sequence
  Description of Artificial Sequence: Synthetic oligonucleotide
gggucggggugagcuccac

SEQ ID NO: 2429078 - RNA, 19 nt, Artificial Sequence
  Description of Artificial Sequence: Synthetic oligonucleotide
ggggucggggugagcucca

SEQ ID NO: 2429079 - RNA, 19 nt, Artificial Sequence
  Description of Artificial Sequence: Synthetic oligonucleotide
ccuggaaggcagguucggu

SEQ ID NO: 2429080 - RNA, 19 nt, Artificial Sequence
  Description of Artificial Sequence: Synthetic oligonucleotide
gguccccgacccuguuggu

SEQ ID NO: 2429081 - RNA, 19 nt, Artificial Sequence
  Description of Artificial Sequence: Synthetic oligonucleotide
ccacaggaguucugugauu

SEQ ID NO: 2429082 - RNA, 19 nt, Artificial Sequence
  Description of Artificial Sequence: Synthetic oligonucleotide
ccccacccuaccccaucaa

SEQ ID NO: 2429083 - RNA, 19 nt, Artificial Sequence
  Description of Artificial Sequence: Synthetic oligonucleotide
cggcgagcgccacgagguc

SEQ ID NO: 2429084 - RNA, 19 nt, Artificial Sequence
  Description of Artificial Sequence: Synthetic oligonucleotide
ccggacuugccgugccuuu

SEQ ID NO: 2429085 - RNA, 19 nt, Artificial Sequence
  Description of Artificial Sequence: Synthetic oligonucleotide
ccgacccuguugguguggu

SEQ ID NO: 2429086 - RNA, 19 nt, Artificial Sequence
  Description of Artificial Sequence: Synthetic oligonucleotide
gcaucucuucgagcaucuu

SEQ ID NO: 2429087 - RNA, 19 nt, Artificial Sequence
  Description of Artificial Sequence: Synthetic oligonucleotide
gggcagccugcuccccauu

SEQ ID NO: 2429088 - RNA, 19 nt, Artificial Sequence
  Description of Artificial Sequence: Synthetic oligonucleotide
cccggacuugccgugccuu

SEQ ID NO: 2429089 - RNA, 19 nt, Artificial Sequence
  Description of Artificial Sequence: Synthetic oligonucleotide
ccccggacuugccgugccu

SEQ ID NO: 2429090 - RNA, 19 nt, Artificial Sequence
  Description of Artificial Sequence: Synthetic oligonucleotide
cgggagucgccggguccuc

SEQ ID NO: 2429091 - RNA, 19 nt, Artificial Sequence
  Description of Artificial Sequence: Synthetic oligonucleotide
gcaaggccaugggcugguu

SEQ ID NO: 2429092 - RNA, 19 nt, Artificial Sequence
  Description of Artificial Sequence: Synthetic oligonucleotide
cggcaaugacugucagcuu

SEQ ID NO: 2429093 - RNA, 19 nt, Artificial Sequence
  Description of Artificial Sequence: Synthetic oligonucleotide
cggacuugccgugccuuuu

SEQ ID NO: 2429094 - RNA, 19 nt, Artificial Sequence
  Description of Artificial Sequence: Synthetic oligonucleotide
cgagcgccacgaggucuaa

SEQ ID NO: 2429095 - RNA, 19 nt, Artificial Sequence
  Description of Artificial Sequence: Synthetic oligonucleotide
aaaaugaggagucugaguc

SEQ ID NO: 2429096 - RNA, 19 nt, Artificial Sequence
  Description of Artificial Sequence: Synthetic oligonucleotide
uaaagaaacccucagucgc

SEQ ID NO: 2429097 - RNA, 19 nt, Artificial Sequence
  Description of Artificial Sequence: Synthetic oligonucleotide
ucaaacaaggauucaaugc

SEQ ID NO: 2429098 - RNA, 19 nt, Artificial Sequence
  Description of Artificial Sequence: Synthetic oligonucleotide
uaguguaucuaauagacga

SEQ ID NO: 2429099 - RNA, 19 nt, Artificial Sequence
  Description of Artificial Sequence: Synthetic oligonucleotide
uucaugacgugacacaagg

SEQ ID NO: 2429100 - RNA, 19 nt, Artificial Sequence
  Description of Artificial Sequence: Synthetic oligonucleotide
ucugucauagaugacaucc

SEQ ID NO: 2429101 - RNA, 19 nt, Artificial Sequence
  Description of Artificial Sequence: Synthetic oligonucleotide
uagacgaucccuuucaucc

SEQ ID NO: 2429102 - RNA, 19 nt, Artificial Sequence
  Description of Artificial Sequence: Synthetic oligonucleotide
caaacaaggauucaaugcc

SEQ ID NO: 2429103 - RNA, 19 nt, Artificial Sequence
  Description of Artificial Sequence: Synthetic oligonucleotide
  modified_base (10)..(10): a, c, u, g, unknown or other
guuaguuccncuuccagug

SEQ ID NO: 2429104 - RNA, 19 nt, Artificial Sequence
  Description of Artificial Sequence: Synthetic oligonucleotide
uaccuuuucauccaaggcc

SEQ ID NO: 2429105 - RNA, 19 nt, Artificial Sequence
  Description of Artificial Sequence: Synthetic oligonucleotide
ucuuugcugggcaagagag

SEQ ID NO: 2429106 - RNA, 19 nt, Artificial Sequence
  Description of Artificial Sequence: Synthetic oligonucleotide
caauggaucacugacaacc

SEQ ID NO: 2429107 - RNA, 19 nt, Artificial Sequence
  Description of Artificial Sequence: Synthetic oligonucleotide
uguaucuaauagacgaucc

SEQ ID NO: 2429108 - RNA, 19 nt, Artificial Sequence
  Description of Artificial Sequence: Synthetic oligonucleotide
cauauugaccaucaguugc

SEQ ID NO: 2429109 - RNA, 19 nt, Artificial Sequence
  Description of Artificial Sequence: Synthetic oligonucleotide
uccaguaacagucuugugu

SEQ ID NO: 2429110 - RNA, 19 nt, Artificial Sequence
  Description of Artificial Sequence: Synthetic oligonucleotide
auuccgguggaucagcccc

SEQ ID NO: 2429111 - RNA, 19 nt, Artificial Sequence
  Description of Artificial Sequence: Synthetic oligonucleotide
  modified_base (14)..(14): a, c, u, g, unknown or other
uguuguuaguuccncuucc

SEQ ID NO: 2429112 - RNA, 19 nt, Artificial Sequence
  Description of Artificial Sequence: Synthetic oligonucleotide
aaaugaggagucugagucg

SEQ ID NO: 2429113 - RNA, 19 nt, Artificial Sequence
  Description of Artificial Sequence: Synthetic oligonucleotide
gaaucucugucauagauga

SEQ ID NO: 2429114 - RNA, 19 nt, Artificial Sequence
  Description of Artificial Sequence: Synthetic oligonucleotide
uuuucuagaaguuguuccc

SEQ ID NO: 2429115 - RNA, 19 nt, Artificial Sequence
  Description of Artificial Sequence: Synthetic oligonucleotide
aacagucuuguguuguuuc

SEQ ID NO: 2429116 - RNA, 19 nt, Artificial Sequence
  Description of Artificial Sequence: Synthetic oligonucleotide
aagugcuccaguaacaguc

SEQ ID NO: 2429117 - RNA, 19 nt, Artificial Sequence
  Description of Artificial Sequence: Synthetic oligonucleotide
uucuuagugaccuuucaug

SEQ ID NO: 2429118 - RNA, 19 nt, Artificial Sequence
  Description of Artificial Sequence: Synthetic oligonucleotide
aacgggaggagaaaagggc

SEQ ID NO: 2429119 - RNA, 19 nt, Artificial Sequence
  Description of Artificial Sequence: Synthetic oligonucleotide
ucuuagugaccuuucauga

SEQ ID NO: 2429120 - RNA, 19 nt, Artificial Sequence
  Description of Artificial Sequence: Synthetic oligonucleotide
uaauagacgaucccuuuca

SEQ ID NO: 2429121 - RNA, 19 nt, Artificial Sequence
  Description of Artificial Sequence: Synthetic oligonucleotide
aucacugacaaccgcaguc

SEQ ID NO: 2429122 - RNA, 19 nt, Artificial Sequence
  Description of Artificial Sequence: Synthetic oligonucleotide
uucaauggaucacugacaa

SEQ ID NO: 2429123 - RNA, 19 nt, Artificial Sequence
  Description of Artificial Sequence: Synthetic oligonucleotide
aauuccgguggaucagccc

SEQ ID NO: 2429124 - RNA, 19 nt, Artificial Sequence
  Description of Artificial Sequence: Synthetic oligonucleotide
uucaaacaaggauucaaug

SEQ ID NO: 2429125 - RNA, 19 nt, Artificial Sequence
  Description of Artificial Sequence: Synthetic oligonucleotide
ugaaucucugucauagaug

SEQ ID NO: 2429126 - RNA, 19 nt, Artificial Sequence
  Description of Artificial Sequence: Synthetic oligonucleotide
gagugaaucucugucauag

SEQ ID NO: 2429127 - RNA, 19 nt, Artificial Sequence
  Description of Artificial Sequence: Synthetic oligonucleotide
uuuguuguuguuguuguug

SEQ ID NO: 2429128 - RNA, 19 nt, Artificial Sequence
  Description of Artificial Sequence: Synthetic oligonucleotide
uuaaucgugggcaucacuu

SEQ ID NO: 2429129 - RNA, 19 nt, Artificial Sequence
  Description of Artificial Sequence: Synthetic oligonucleotide
agucagugcagcaaauucc

SEQ ID NO: 2429130 - RNA, 19 nt, Artificial Sequence
  Description of Artificial Sequence: Synthetic oligonucleotide
cucguaguguaucuaauag

SEQ ID NO: 2429131 - RNA, 19 nt, Artificial Sequence
  Description of Artificial Sequence: Synthetic oligonucleotide
uuguuguuguuguuguuag

SEQ ID NO: 2429132 - RNA, 19 nt, Artificial Sequence
  Description of Artificial Sequence: Synthetic oligonucleotide
gaaguuguucccugcaagc

SEQ ID NO: 2429133 - RNA, 19 nt, Artificial Sequence
  Description of Artificial Sequence: Synthetic oligonucleotide
gauucaaugccuugaggac

SEQ ID NO: 2429134 - RNA, 19 nt, Artificial Sequence
  Description of Artificial Sequence: Synthetic oligonucleotide
uccucauuaaucgugggca

SEQ ID NO: 2429135 - RNA, 19 nt, Artificial Sequence
  Description of Artificial Sequence: Synthetic oligonucleotide
aagcauucaguucuuuagu

SEQ ID NO: 2429136 - RNA, 19 nt, Artificial Sequence
  Description of Artificial Sequence: Synthetic oligonucleotide
uaucuaauagacgaucccu

SEQ ID NO: 2429137 - RNA, 19 nt, Artificial Sequence
  Description of Artificial Sequence: Synthetic oligonucleotide
aauggaucacugacaaccg

SEQ ID NO: 2429138 - RNA, 19 nt, Artificial Sequence
  Description of Artificial Sequence: Synthetic oligonucleotide
  modified_base (11)..(11): a, c, u, g, unknown or other
uguuaguuccncuuccagu

SEQ ID NO: 2429139 - RNA, 19 nt, Artificial Sequence
  Description of Artificial Sequence: Synthetic oligonucleotide
agagacuccucucuaaaga

SEQ ID NO: 2429140 - RNA, 19 nt, Artificial Sequence
  Description of Artificial Sequence: Synthetic oligonucleotide
ugaccuuucaugacgugac

SEQ ID NO: 2429141 - RNA, 19 nt, Artificial Sequence
  Description of Artificial Sequence: Synthetic oligonucleotide
cuugugguguucaaacaag

SEQ ID NO: 2429142 - RNA, 19 nt, Artificial Sequence
  Description of Artificial Sequence: Synthetic oligonucleotide
aaucgugggcaucacuuca

SEQ ID NO: 2429143 - RNA, 19 nt, Artificial Sequence
  Description of Artificial Sequence: Synthetic oligonucleotide
aguugcucaaaaugaggag

SEQ ID NO: 2429144 - RNA, 19 nt, Artificial Sequence
  Description of Artificial Sequence: Synthetic oligonucleotide
ucaaaaugaggagucugag

SEQ ID NO: 2429145 - RNA, 19 nt, Artificial Sequence
  Description of Artificial Sequence: Synthetic oligonucleotide
  modified_base (12)..(12): a, c, u, g, unknown or other
uuguuaguuccncuuccag

SEQ ID NO: 2429146 - RNA, 19 nt, Artificial Sequence
  Description of Artificial Sequence: Synthetic oligonucleotide
agcaaauuccgguggauca

SEQ ID NO: 2429147 - RNA, 19 nt, Artificial Sequence
  Description of Artificial Sequence: Synthetic oligonucleotide
auagacgaucccuuucauc

SEQ ID NO: 2429148 - RNA, 19 nt, Artificial Sequence
  Description of Artificial Sequence: Synthetic oligonucleotide
uagucagugcagcaaauuc

SEQ ID NO: 2429149 - RNA, 19 nt, Artificial Sequence
  Description of Artificial Sequence: Synthetic oligonucleotide
gaccauuucccuagcaacg

SEQ ID NO: 2429150 - RNA, 19 nt, Artificial Sequence
  Description of Artificial Sequence: Synthetic oligonucleotide
ucauuaaucgugggcauca

SEQ ID NO: 2429151 - RNA, 19 nt, Artificial Sequence
  Description of Artificial Sequence: Synthetic oligonucleotide
ugagguagggcugaauuga

SEQ ID NO: 2429152 - RNA, 19 nt, Artificial Sequence
  Description of Artificial Sequence: Synthetic oligonucleotide
ucguaguguaucuaauaga

SEQ ID NO: 2429153 - RNA, 19 nt, Artificial Sequence
  Description of Artificial Sequence: Synthetic oligonucleotide
caucaguugcucaaaauga

SEQ ID NO: 2429154 - RNA, 19 nt, Artificial Sequence
  Description of Artificial Sequence: Synthetic oligonucleotide
aaauuccgguggaucagcc

SEQ ID NO: 2429155 - RNA, 19 nt, Artificial Sequence
  Description of Artificial Sequence: Synthetic oligonucleotide
auggaucacugacaaccgc

SEQ ID NO: 2429156 - RNA, 19 nt, Artificial Sequence
  Description of Artificial Sequence: Synthetic oligonucleotide
caacgggaggagaaaaggg

SEQ ID NO: 2429157 - RNA, 19 nt, Artificial Sequence
  Description of Artificial Sequence: Synthetic oligonucleotide
gucagugcagcaaauuccg

SEQ ID NO: 2429158 - RNA, 19 nt, Artificial Sequence
  Description of Artificial Sequence: Synthetic oligonucleotide
agcauauugaccaucaguu

SEQ ID NO: 2429159 - RNA, 19 nt, Artificial Sequence
  Description of Artificial Sequence: Synthetic oligonucleotide
uuagacacccgcgagcccc

SEQ ID NO: 2429160 - RNA, 19 nt, Artificial Sequence
  Description of Artificial Sequence: Synthetic oligonucleotide
caugacgugacacaaggca

SEQ ID NO: 2429161 - RNA, 19 nt, Artificial Sequence
  Description of Artificial Sequence: Synthetic oligonucleotide
cuaccuuuucauccaaggc

SEQ ID NO: 2429162 - RNA, 19 nt, Artificial Sequence
  Description of Artificial Sequence: Synthetic oligonucleotide
uuguuguuguuguuguugu

SEQ ID NO: 2429163 - RNA, 19 nt, Artificial Sequence
  Description of Artificial Sequence: Synthetic oligonucleotide
uugaccaucaguugcucaa

SEQ ID NO: 2429164 - RNA, 19 nt, Artificial Sequence
  Description of Artificial Sequence: Synthetic oligonucleotide
  modified_base (9)..(9): a, c, u, g, unknown or other
uuaguuccncuuccagugc

SEQ ID NO: 2429165 - RNA, 19 nt, Artificial Sequence
  Description of Artificial Sequence: Synthetic oligonucleotide
agugcagagacuccucucu

SEQ ID NO: 2429166 - RNA, 19 nt, Artificial Sequence
  Description of Artificial Sequence: Synthetic oligonucleotide
aggauucaaugccuugagg

SEQ ID NO: 2429167 - RNA, 19 nt, Artificial Sequence
  Description of Artificial Sequence: Synthetic oligonucleotide
ugcuuagacacccgcgagc

SEQ ID NO: 2429168 - RNA, 19 nt, Artificial Sequence
  Description of Artificial Sequence: Synthetic oligonucleotide
ugggcaucacuucacacau

SEQ ID NO: 2429169 - RNA, 19 nt, Artificial Sequence
  Description of Artificial Sequence: Synthetic oligonucleotide
acacccagcaguccuggac

SEQ ID NO: 2429170 - RNA, 19 nt, Artificial Sequence
  Description of Artificial Sequence: Synthetic oligonucleotide
gaaaagggcugcuuagaca

SEQ ID NO: 2429171 - RNA, 19 nt, Artificial Sequence
  Description of Artificial Sequence: Synthetic oligonucleotide
uguuagggauucgaugucc

SEQ ID NO: 2429172 - RNA, 19 nt, Artificial Sequence
  Description of Artificial Sequence: Synthetic oligonucleotide
ucuuauuucaggucccguu

SEQ ID NO: 2429173 - RNA, 19 nt, Artificial Sequence
  Description of Artificial Sequence: Synthetic oligonucleotide
gggguguccucauuaaucg

SEQ ID NO: 2429174 - RNA, 19 nt, Artificial Sequence
  Description of Artificial Sequence: Synthetic oligonucleotide
aaacaaggauucaaugccu

SEQ ID NO: 2429175 - RNA, 19 nt, Artificial Sequence
  Description of Artificial Sequence: Synthetic oligonucleotide
cuuagugaccuuucaugac

SEQ ID NO: 2429176 - RNA, 19 nt, Artificial Sequence
  Description of Artificial Sequence: Synthetic oligonucleotide
ugacgugacacaaggcacu

SEQ ID NO: 2429177 - RNA, 19 nt, Artificial Sequence
  Description of Artificial Sequence: Synthetic oligonucleotide
guaguguaucuaauagacg

SEQ ID NO: 2429178 - RNA, 19 nt, Artificial Sequence
  Description of Artificial Sequence: Synthetic oligonucleotide
uggagugaaucucugucau

SEQ ID NO: 2429179 - RNA, 19 nt, Artificial Sequence
  Description of Artificial Sequence: Synthetic oligonucleotide
cuaauagacgaucccuuuc

SEQ ID NO: 2429180 - RNA, 19 nt, Artificial Sequence
  Description of Artificial Sequence: Synthetic oligonucleotide
cguaguguaucuaauagac

SEQ ID NO: 2429181 - RNA, 19 nt, Artificial Sequence
  Description of Artificial Sequence: Synthetic oligonucleotide
  modified_base (15)..(15): a, c, u, g, unknown or other
uuguuguuaguuccncuuc

SEQ ID NO: 2429182 - RNA, 19 nt, Artificial Sequence
  Description of Artificial Sequence: Synthetic oligonucleotide
acaaccgcagucucggcug

SEQ ID NO: 2429183 - RNA, 19 nt, Artificial Sequence
  Description of Artificial Sequence: Synthetic oligonucleotide
uucccuagcaacgggagga

SEQ ID NO: 2429184 - RNA, 19 nt, Artificial Sequence
  Description of Artificial Sequence: Synthetic oligonucleotide
cugacaaccgcagucucgg

SEQ ID NO: 2429185 - RNA, 19 nt, Artificial Sequence
  Description of Artificial Sequence: Synthetic oligonucleotide
aauagacgaucccuuucau

SEQ ID NO: 2429186 - RNA, 19 nt, Artificial Sequence
  Description of Artificial Sequence: Synthetic oligonucleotide
ucagugcagcaaauuccgg

SEQ ID NO: 2429187 - RNA, 19 nt, Artificial Sequence
  Description of Artificial Sequence: Synthetic oligonucleotide
ugggcuugccgcuucacca

SEQ ID NO: 2429188 - RNA, 19 nt, Artificial Sequence
  Description of Artificial Sequence: Synthetic oligonucleotide
aagaaacccucagucgcuc

SEQ ID NO: 2429189 - RNA, 19 nt, Artificial Sequence
  Description of Artificial Sequence: Synthetic oligonucleotide
ucucucguaguguaucuaa

SEQ ID NO: 2429190 - RNA, 19 nt, Artificial Sequence
  Description of Artificial Sequence: Synthetic oligonucleotide
ucuaauagacgaucccuuu

SEQ ID NO: 2429191 - RNA, 19 nt, Artificial Sequence
  Description of Artificial Sequence: Synthetic oligonucleotide
auucgauguccugagguag

SEQ ID NO: 2429192 - RNA, 19 nt, Artificial Sequence
  Description of Artificial Sequence: Synthetic oligonucleotide
ucucuuauuucaggucccg

SEQ ID NO: 2429193 - RNA, 19 nt, Artificial Sequence
  Description of Artificial Sequence: Synthetic oligonucleotide
gacgaucccuuucauccag

SEQ ID NO: 2429194 - RNA, 19 nt, Artificial Sequence
  Description of Artificial Sequence: Synthetic oligonucleotide
aucaguugcucaaaaugag

SEQ ID NO: 2429195 - RNA, 19 nt, Artificial Sequence
  Description of Artificial Sequence: Synthetic oligonucleotide
ugccgcuucaccacuguca

SEQ ID NO: 2429196 - RNA, 19 nt, Artificial Sequence
  Description of Artificial Sequence: Synthetic oligonucleotide
  modified_base (5)..(5): a, c, u, g, unknown or other
uuccncuuccagugcagag

SEQ ID NO: 2429197 - RNA, 19 nt, Artificial Sequence
  Description of Artificial Sequence: Synthetic oligonucleotide
ucacuucacacaucaucgc

SEQ ID NO: 2429198 - RNA, 19 nt, Artificial Sequence
  Description of Artificial Sequence: Synthetic oligonucleotide
cucaaaaugaggagucuga

SEQ ID NO: 2429199 - RNA, 19 nt, Artificial Sequence
  Description of Artificial Sequence: Synthetic oligonucleotide
aaagaaacccucagucgcu

SEQ ID NO: 2429200 - RNA, 19 nt, Artificial Sequence
  Description of Artificial Sequence: Synthetic oligonucleotide
cauagaugacauccuggag

SEQ ID NO: 2429201 - RNA, 19 nt, Artificial Sequence
  Description of Artificial Sequence: Synthetic oligonucleotide
acacccgcgagccccagcg

SEQ ID NO: 2429202 - RNA, 19 nt, Artificial Sequence
  Description of Artificial Sequence: Synthetic oligonucleotide
ucauucuuagugaccuuuc

SEQ ID NO: 2429203 - RNA, 19 nt, Artificial Sequence
  Description of Artificial Sequence: Synthetic oligonucleotide
  modified_base (8)..(8): a, c, u, g, unknown or other
uaguuccncuuccagugca

SEQ ID NO: 2429204 - RNA, 19 nt, Artificial Sequence
  Description of Artificial Sequence: Synthetic oligonucleotide
ucccguuucuucaauggau

SEQ ID NO: 2429205 - RNA, 19 nt, Artificial Sequence
  Description of Artificial Sequence: Synthetic oligonucleotide
cauccuggagucuuugcug

SEQ ID NO: 2429206 - RNA, 19 nt, Artificial Sequence
  Description of Artificial Sequence: Synthetic oligonucleotide
ugcuccaguaacagucuug

SEQ ID NO: 2429207 - RNA, 19 nt, Artificial Sequence
  Description of Artificial Sequence: Synthetic oligonucleotide
  modified_base (17)..(17): a, c, u, g, unknown or other
uguuguuguuaguuccncu

SEQ ID NO: 2429208 - RNA, 19 nt, Artificial Sequence
  Description of Artificial Sequence: Synthetic oligonucleotide
uguccucauuaaucguggg

SEQ ID NO: 2429209 - RNA, 19 nt, Artificial Sequence
  Description of Artificial Sequence: Synthetic oligonucleotide
ucaugacgugacacaaggc

SEQ ID NO: 2429210 - RNA, 19 nt, Artificial Sequence
  Description of Artificial Sequence: Synthetic oligonucleotide
auuaaucgugggcaucacu

SEQ ID NO: 2429211 - RNA, 19 nt, Artificial Sequence
  Description of Artificial Sequence: Synthetic oligonucleotide
accauuucccuagcaacgg

SEQ ID NO: 2429212 - RNA, 19 nt, Artificial Sequence
  Description of Artificial Sequence: Synthetic oligonucleotide
cugagguagggcugaauug

SEQ ID NO: 2429213 - RNA, 19 nt, Artificial Sequence
  Description of Artificial Sequence: Synthetic oligonucleotide
uuuagucagugcagcaaau

SEQ ID NO: 2429214 - RNA, 19 nt, Artificial Sequence
  Description of Artificial Sequence: Synthetic oligonucleotide
  modified_base (4)..(4): a, c, u, g, unknown or other
uccncuuccagugcagaga

SEQ ID NO: 2429215 - RNA, 19 nt, Artificial Sequence
  Description of Artificial Sequence: Synthetic oligonucleotide
agaggcuuuuccugggucu

SEQ ID NO: 2429216 - RNA, 19 nt, Artificial Sequence
  Description of Artificial Sequence: Synthetic oligonucleotide
ucucguaguguaucuaaua

SEQ ID NO: 2429217 - RNA, 19 nt, Artificial Sequence
  Description of Artificial Sequence: Synthetic oligonucleotide
guucuuuagucagugcagc

SEQ ID NO: 2429218 - RNA, 19 nt, Artificial Sequence
  Description of Artificial Sequence: Synthetic oligonucleotide
cugaauugagcugucgcug

SEQ ID NO: 2429219 - RNA, 19 nt, Artificial Sequence
  Description of Artificial Sequence: Synthetic oligonucleotide
ggagccacugcuuugggac

SEQ ID NO: 2429220 - RNA, 19 nt, Artificial Sequence
  Description of Artificial Sequence: Synthetic oligonucleotide
accuuuucauccaaggccu

SEQ ID NO: 2429221 - RNA, 19 nt, Artificial Sequence
  Description of Artificial Sequence: Synthetic oligonucleotide
ccuaccuuuucauccaagg

SEQ ID NO: 2429222 - RNA, 19 nt, Artificial Sequence
  Description of Artificial Sequence: Synthetic oligonucleotide
cuccaagugcuccaguaac

SEQ ID NO: 2429223 - RNA, 19 nt, Artificial Sequence
  Description of Artificial Sequence: Synthetic oligonucleotide
ggucccguuucuucaaugg

SEQ ID NO: 2429224 - RNA, 19 nt, Artificial Sequence
  Description of Artificial Sequence: Synthetic oligonucleotide
ccuuucauccagcauauug

SEQ ID NO: 2429225 - RNA, 19 nt, Artificial Sequence
  Description of Artificial Sequence: Synthetic oligonucleotide
cuucaauggaucacugaca

SEQ ID NO: 2429226 - RNA, 19 nt, Artificial Sequence
  Description of Artificial Sequence: Synthetic oligonucleotide
gagacuccucucuaaagaa

SEQ ID NO: 2429227 - RNA, 19 nt, Artificial Sequence
  Description of Artificial Sequence: Synthetic oligonucleotide
guccucauuaaucgugggc

SEQ ID NO: 2429228 - RNA, 19 nt, Artificial Sequence
  Description of Artificial Sequence: Synthetic oligonucleotide
aggagaaaagggcugcuua

SEQ ID NO: 2429229 - RNA, 19 nt, Artificial Sequence
  Description of Artificial Sequence: Synthetic oligonucleotide
aguuguucccugcaagcau

SEQ ID NO: 2429230 - RNA, 19 nt, Artificial Sequence
  Description of Artificial Sequence: Synthetic oligonucleotide
gugcagcaaauuccggugg

SEQ ID NO: 2429231 - RNA, 19 nt, Artificial Sequence
  Description of Artificial Sequence: Synthetic oligonucleotide
accuccacuucacuggaca

SEQ ID NO: 2429232 - RNA, 19 nt, Artificial Sequence
  Description of Artificial Sequence: Synthetic oligonucleotide
gcucccuaccuuuucaucc

SEQ ID NO: 2429233 - RNA, 19 nt, Artificial Sequence
  Description of Artificial Sequence: Synthetic oligonucleotide
cucucuaaagaaacccuca

SEQ ID NO: 2429234 - RNA, 19 nt, Artificial Sequence
  Description of Artificial Sequence: Synthetic oligonucleotide
uaaucgugggcaucacuuc

SEQ ID NO: 2429235 - RNA, 19 nt, Artificial Sequence
  Description of Artificial Sequence: Synthetic oligonucleotide
cuggacacuccugagggag

SEQ ID NO: 2429236 - RNA, 19 nt, Artificial Sequence
  Description of Artificial Sequence: Synthetic oligonucleotide
cagucagcccuccuguuag

SEQ ID NO: 2429237 - RNA, 19 nt, Artificial Sequence
  Description of Artificial Sequence: Synthetic oligonucleotide
auugaccaucaguugcuca

SEQ ID NO: 2429238 - RNA, 19 nt, Artificial Sequence
  Description of Artificial Sequence: Synthetic oligonucleotide
gugggcaucacuucacaca

SEQ ID NO: 2429239 - RNA, 19 nt, Artificial Sequence
  Description of Artificial Sequence: Synthetic oligonucleotide
gauucgauguccugaggua

SEQ ID NO: 2429240 - RNA, 19 nt, Artificial Sequence
  Description of Artificial Sequence: Synthetic oligonucleotide
  modified_base (16)..(16): a, c, u, g, unknown or other
guuguuguuaguuccncuu

SEQ ID NO: 2429241 - RNA, 19 nt, Artificial Sequence
  Description of Artificial Sequence: Synthetic oligonucleotide
ucggcuggaggagagguga

SEQ ID NO: 2429242 - RNA, 19 nt, Artificial Sequence
  Description of Artificial Sequence: Synthetic oligonucleotide
acugacaaccgcagucucg

SEQ ID NO: 2429243 - RNA, 19 nt, Artificial Sequence
  Description of Artificial Sequence: Synthetic oligonucleotide
auuucccuagcaacgggag

SEQ ID NO: 2429244 - RNA, 19 nt, Artificial Sequence
  Description of Artificial Sequence: Synthetic oligonucleotide
guguaucuaauagacgauc

SEQ ID NO: 2429245 - RNA, 19 nt, Artificial Sequence
  Description of Artificial Sequence: Synthetic oligonucleotide
cuugaggaccuccacuuca

SEQ ID NO: 2429246 - RNA, 19 nt, Artificial Sequence
  Description of Artificial Sequence: Synthetic oligonucleotide
guagggcugaauugagcug

SEQ ID NO: 2429247 - RNA, 19 nt, Artificial Sequence
  Description of Artificial Sequence: Synthetic oligonucleotide
acacuccugagggagacug

SEQ ID NO: 2429248 - RNA, 19 nt, Artificial Sequence
  Description of Artificial Sequence: Synthetic oligonucleotide
caaauuccgguggaucagc

SEQ ID NO: 2429249 - RNA, 19 nt, Artificial Sequence
  Description of Artificial Sequence: Synthetic oligonucleotide
  modified_base (18)..(18): a, c, u, g, unknown or other
uuguuguuguuaguuccnc

SEQ ID NO: 2429250 - RNA, 19 nt, Artificial Sequence
  Description of Artificial Sequence: Synthetic oligonucleotide
ggcugaauugagcugucgc

SEQ ID NO: 2429251 - RNA, 19 nt, Artificial Sequence
  Description of Artificial Sequence: Synthetic oligonucleotide
gcaacgggaggagaaaagg

SEQ ID NO: 2429252 - RNA, 19 nt, Artificial Sequence
  Description of Artificial Sequence: Synthetic oligonucleotide
cuggagugaaucucuguca

SEQ ID NO: 2429253 - RNA, 19 nt, Artificial Sequence
  Description of Artificial Sequence: Synthetic oligonucleotide
aacaaggauucaaugccuu

SEQ ID NO: 2429254 - RNA, 19 nt, Artificial Sequence
  Description of Artificial Sequence: Synthetic oligonucleotide
gucggagccacugcuuugg

SEQ ID NO: 2429255 - RNA, 19 nt, Artificial Sequence
  Description of Artificial Sequence: Synthetic oligonucleotide
cauuucccuagcaacggga

SEQ ID NO: 2429256 - RNA, 19 nt, Artificial Sequence
  Description of Artificial Sequence: Synthetic oligonucleotide
guuguuguuguuguuguua

SEQ ID NO: 2429257 - RNA, 19 nt, Artificial Sequence
  Description of Artificial Sequence: Synthetic oligonucleotide
ccagcguucuccuggaaag

SEQ ID NO: 2429258 - RNA, 19 nt, Artificial Sequence
  Description of Artificial Sequence: Synthetic oligonucleotide
gcauauugaccaucaguug

SEQ ID NO: 2429259 - RNA, 19 nt, Artificial Sequence
  Description of Artificial Sequence: Synthetic oligonucleotide
gagaaaagggcugcuuaga

SEQ ID NO: 2429260 - RNA, 19 nt, Artificial Sequence
  Description of Artificial Sequence: Synthetic oligonucleotide
agucgcucccuaccuuuuc

SEQ ID NO: 2429261 - RNA, 19 nt, Artificial Sequence
  Description of Artificial Sequence: Synthetic oligonucleotide
ucagucgcucccuaccuuu

SEQ ID NO: 2429262 - RNA, 19 nt, Artificial Sequence
  Description of Artificial Sequence: Synthetic oligonucleotide
ucagcccuccuguuaggga

SEQ ID NO: 2429263 - RNA, 19 nt, Artificial Sequence
  Description of Artificial Sequence: Synthetic oligonucleotide
agcuuucagcucugagauc

SEQ ID NO: 2429264 - RNA, 19 nt, Artificial Sequence
  Description of Artificial Sequence: Synthetic oligonucleotide
cuucacacaucaucgcuaa

SEQ ID NO: 2429265 - RNA, 19 nt, Artificial Sequence
  Description of Artificial Sequence: Synthetic oligonucleotide
uccuggaaagugccccggc

SEQ ID NO: 2429266 - RNA, 19 nt, Artificial Sequence
  Description of Artificial Sequence: Synthetic oligonucleotide
ucgugggcaucacuucaca

SEQ ID NO: 2429267 - RNA, 19 nt, Artificial Sequence
  Description of Artificial Sequence: Synthetic oligonucleotide
  modified_base (19)..(19): a, c, u, g, unknown or other
guuguuguuguuaguuccn

SEQ ID NO: 2429268 - RNA, 19 nt, Artificial Sequence
  Description of Artificial Sequence: Synthetic oligonucleotide
agcucugagaucucuucuu

SEQ ID NO: 2429269 - RNA, 19 nt, Artificial Sequence
  Description of Artificial Sequence: Synthetic oligonucleotide
gugaaucucugucauagau

SEQ ID NO: 2429270 - RNA, 19 nt, Artificial Sequence
  Description of Artificial Sequence: Synthetic oligonucleotide
ggccuugugguguucaaac

SEQ ID NO: 2429271 - RNA, 19 nt, Artificial Sequence
  Description of Artificial Sequence: Synthetic oligonucleotide
gugguguucaaacaaggau

SEQ ID NO: 2429272 - RNA, 19 nt, Artificial Sequence
  Description of Artificial Sequence: Synthetic oligonucleotide
cauucuuagugaccuuuca

SEQ ID NO: 2429273 - RNA, 19 nt, Artificial Sequence
  Description of Artificial Sequence: Synthetic oligonucleotide
gguagggcugaauugagcu

SEQ ID NO: 2429274 - RNA, 19 nt, Artificial Sequence
  Description of Artificial Sequence: Synthetic oligonucleotide
uuuuguuguuguuguuguu

SEQ ID NO: 2429275 - RNA, 19 nt, Artificial Sequence
  Description of Artificial Sequence: Synthetic oligonucleotide
agacgaucccuuucaucca

SEQ ID NO: 2429276 - RNA, 19 nt, Artificial Sequence
  Description of Artificial Sequence: Synthetic oligonucleotide
  modified_base (7)..(7): a, c, u, g, unknown or other
aguuccncuuccagugcag

SEQ ID NO: 2429277 - RNA, 19 nt, Artificial Sequence
  Description of Artificial Sequence: Synthetic oligonucleotide
cugcuuagacacccgcgag

SEQ ID NO: 2429278 - RNA, 19 nt, Artificial Sequence
  Description of Artificial Sequence: Synthetic oligonucleotide
agcaacgggaggagaaaag

SEQ ID NO: 2429279 - RNA, 19 nt, Artificial Sequence
  Description of Artificial Sequence: Synthetic oligonucleotide
aguguaucuaauagacgau

SEQ ID NO: 2429280 - RNA, 19 nt, Artificial Sequence
  Description of Artificial Sequence: Synthetic oligonucleotide
agcguucuccuggaaagug

SEQ ID NO: 2429281 - RNA, 19 nt, Artificial Sequence
  Description of Artificial Sequence: Synthetic oligonucleotide
ugucgcuggagugaaucuc

SEQ ID NO: 2429282 - RNA, 19 nt, Artificial Sequence
  Description of Artificial Sequence: Synthetic oligonucleotide
gagucugagucggagccac

SEQ ID NO: 2429283 - RNA, 19 nt, Artificial Sequence
  Description of Artificial Sequence: Synthetic oligonucleotide
uugggguguccucauuaau

SEQ ID NO: 2429284 - RNA, 19 nt, Artificial Sequence
  Description of Artificial Sequence: Synthetic oligonucleotide
ugcucaaaaugaggagucu

SEQ ID NO: 2429285 - RNA, 19 nt, Artificial Sequence
  Description of Artificial Sequence: Synthetic oligonucleotide
aucuaauagacgaucccuu

SEQ ID NO: 2429286 - RNA, 19 nt, Artificial Sequence
  Description of Artificial Sequence: Synthetic oligonucleotide
ucggagccacugcuuuggg

SEQ ID NO: 2429287 - RNA, 19 nt, Artificial Sequence
  Description of Artificial Sequence: Synthetic oligonucleotide
gcuuagacacccgcgagcc

SEQ ID NO: 2429288 - RNA, 19 nt, Artificial Sequence
  Description of Artificial Sequence: Synthetic oligonucleotide
  modified_base (13)..(13): a, c, u, g, unknown or other
guuguuaguuccncuucca

SEQ ID NO: 2429289 - RNA, 19 nt, Artificial Sequence
  Description of Artificial Sequence: Synthetic oligonucleotide
acaaggcacuccaagugcu

SEQ ID NO: 2429290 - RNA, 19 nt, Artificial Sequence
  Description of Artificial Sequence: Synthetic oligonucleotide
agucagcccuccuguuagg

SEQ ID NO: 2429291 - RNA, 19 nt, Artificial Sequence
  Description of Artificial Sequence: Synthetic oligonucleotide
agucuuugcugggcaagag

SEQ ID NO: 2429292 - RNA, 19 nt, Artificial Sequence
  Description of Artificial Sequence: Synthetic oligonucleotide
aggucccguuucuucaaug

SEQ ID NO: 2429293 - RNA, 19 nt, Artificial Sequence
  Description of Artificial Sequence: Synthetic oligonucleotide
aaacccucagucgcucccu

SEQ ID NO: 2429294 - RNA, 19 nt, Artificial Sequence
  Description of Artificial Sequence: Synthetic oligonucleotide
uccagugcagagacuccuc

SEQ ID NO: 2429295 - RNA, 19 nt, Artificial Sequence
  Description of Artificial Sequence: Synthetic oligonucleotide
agucggagccacugcuuug

SEQ ID NO: 2429296 - RNA, 19 nt, Artificial Sequence
  Description of Artificial Sequence: Synthetic oligonucleotide
ucgcuggagugaaucucug

SEQ ID NO: 2429297 - RNA, 19 nt, Artificial Sequence
  Description of Artificial Sequence: Synthetic oligonucleotide
cugggcuugccgcuucacc

SEQ ID NO: 2429298 - RNA, 19 nt, Artificial Sequence
  Description of Artificial Sequence: Synthetic oligonucleotide
caaaaugaggagucugagu

SEQ ID NO: 2429299 - RNA, 19 nt, Artificial Sequence
  Description of Artificial Sequence: Synthetic oligonucleotide
gggagacugggcuugccgc

SEQ ID NO: 2429300 - RNA, 19 nt, Artificial Sequence
  Description of Artificial Sequence: Synthetic oligonucleotide
acgugacacaaggcacucc

SEQ ID NO: 2429301 - RNA, 19 nt, Artificial Sequence
  Description of Artificial Sequence: Synthetic oligonucleotide
cucauuaaucgugggcauc

SEQ ID NO: 2429302 - RNA, 19 nt, Artificial Sequence
  Description of Artificial Sequence: Synthetic oligonucleotide
agacugggcuugccgcuuc

SEQ ID NO: 2429303 - RNA, 19 nt, Artificial Sequence
  Description of Artificial Sequence: Synthetic oligonucleotide
uguuguuguuguuguuguu

SEQ ID NO: 2429304 - RNA, 19 nt, Artificial Sequence
  Description of Artificial Sequence: Synthetic oligonucleotide
gcucaaaaugaggagucug

SEQ ID NO: 2429305 - RNA, 19 nt, Artificial Sequence
  Description of Artificial Sequence: Synthetic oligonucleotide
acuucacacaucaucgcua

SEQ ID NO: 2429306 - RNA, 19 nt, Artificial Sequence
  Description of Artificial Sequence: Synthetic oligonucleotide
ccucucuaaagaaacccuc

SEQ ID NO: 2429307 - RNA, 19 nt, Artificial Sequence
  Description of Artificial Sequence: Synthetic oligonucleotide
cuuagacacccgcgagccc

SEQ ID NO: 2429308 - RNA, 19 nt, Artificial Sequence
  Description of Artificial Sequence: Synthetic oligonucleotide
uagcaacgggaggagaaaa

SEQ ID NO: 2429309 - RNA, 19 nt, Artificial Sequence
  Description of Artificial Sequence: Synthetic oligonucleotide
ggauucgauguccugaggu

SEQ ID NO: 2429310 - RNA, 19 nt, Artificial Sequence
  Description of Artificial Sequence: Synthetic oligonucleotide
acgaucccuuucauccagc

SEQ ID NO: 2429311 - RNA, 19 nt, Artificial Sequence
  Description of Artificial Sequence: Synthetic oligonucleotide
gacaaccgcagucucggcu

SEQ ID NO: 2429312 - RNA, 19 nt, Artificial Sequence
  Description of Artificial Sequence: Synthetic oligonucleotide
gcugcuuagacacccgcga

SEQ ID NO: 2429313 - RNA, 19 nt, Artificial Sequence
  Description of Artificial Sequence: Synthetic oligonucleotide
uaacagucuuguguuguuu

SEQ ID NO: 2429314 - RNA, 19 nt, Artificial Sequence
  Description of Artificial Sequence: Synthetic oligonucleotide
agugcuccaguaacagucu

SEQ ID NO: 2429315 - RNA, 19 nt, Artificial Sequence
  Description of Artificial Sequence: Synthetic oligonucleotide
gaccuuucaugacgugaca

SEQ ID NO: 2429316 - RNA, 19 nt, Artificial Sequence
  Description of Artificial Sequence: Synthetic oligonucleotide
ccuuagaaccagucagccc

SEQ ID NO: 2429317 - RNA, 19 nt, Artificial Sequence
  Description of Artificial Sequence: Synthetic oligonucleotide
acuggacacuccugaggga

SEQ ID NO: 2429318 - RNA, 19 nt, Artificial Sequence
  Description of Artificial Sequence: Synthetic oligonucleotide
cagcaaauuccgguggauc

SEQ ID NO: 2429319 - RNA, 19 nt, Artificial Sequence
  Description of Artificial Sequence: Synthetic oligonucleotide
cucccuaccuuuucaucca

SEQ ID NO: 2429320 - RNA, 19 nt, Artificial Sequence
  Description of Artificial Sequence: Synthetic oligonucleotide
ugaccaucaguugcucaaa

SEQ ID NO: 2429321 - RNA, 19 nt, Artificial Sequence
  Description of Artificial Sequence: Synthetic oligonucleotide
gucccguuucuucaaugga

SEQ ID NO: 2429322 - RNA, 19 nt, Artificial Sequence
  Description of Artificial Sequence: Synthetic oligonucleotide
uggcucauugggguguccu

SEQ ID NO: 2429323 - RNA, 19 nt, Artificial Sequence
  Description of Artificial Sequence: Synthetic oligonucleotide
cuuauuucaggucccguuu

SEQ ID NO: 2429324 - RNA, 19 nt, Artificial Sequence
  Description of Artificial Sequence: Synthetic oligonucleotide
cauugggguguccucauua

SEQ ID NO: 2429325 - RNA, 19 nt, Artificial Sequence
  Description of Artificial Sequence: Synthetic oligonucleotide
gcaaauuccgguggaucag

SEQ ID NO: 2429326 - RNA, 19 nt, Artificial Sequence
  Description of Artificial Sequence: Synthetic oligonucleotide
ucccuagcaacgggaggag

SEQ ID NO: 2429327 - RNA, 19 nt, Artificial Sequence
  Description of Artificial Sequence: Synthetic oligonucleotide
uucacacaucaucgcuaaa

SEQ ID NO: 2429328 - RNA, 19 nt, Artificial Sequence
  Description of Artificial Sequence: Synthetic oligonucleotide
guucaaacaaggauucaau

SEQ ID NO: 2429329 - RNA, 19 nt, Artificial Sequence
  Description of Artificial Sequence: Synthetic oligonucleotide
uagacacccgcgagcccca

SEQ ID NO: 2429330 - RNA, 19 nt, Artificial Sequence
  Description of Artificial Sequence: Synthetic oligonucleotide
gacgugacacaaggcacuc

SEQ ID NO: 2429331 - RNA, 19 nt, Artificial Sequence
  Description of Artificial Sequence: Synthetic oligonucleotide
ucccuaccuuuucauccaa

SEQ ID NO: 2429332 - RNA, 19 nt, Artificial Sequence
  Description of Artificial Sequence: Synthetic oligonucleotide
gaggcuuuuccugggucuc

SEQ ID NO: 2429333 - RNA, 19 nt, Artificial Sequence
  Description of Artificial Sequence: Synthetic oligonucleotide
gucgcucccuaccuuuuca

SEQ ID NO: 2429334 - RNA, 19 nt, Artificial Sequence
  Description of Artificial Sequence: Synthetic oligonucleotide
cccguuucuucaauggauc

SEQ ID NO: 2429335 - RNA, 19 nt, Artificial Sequence
  Description of Artificial Sequence: Synthetic oligonucleotide
ugacaaccgcagucucggc

SEQ ID NO: 2429336 - RNA, 19 nt, Artificial Sequence
  Description of Artificial Sequence: Synthetic oligonucleotide
uguucccugcaagcauuca

SEQ ID NO: 2429337 - RNA, 19 nt, Artificial Sequence
  Description of Artificial Sequence: Synthetic oligonucleotide
cauuaaucgugggcaucac

SEQ ID NO: 2429338 - RNA, 19 nt, Artificial Sequence
  Description of Artificial Sequence: Synthetic oligonucleotide
cuggagucuuugcugggca

SEQ ID NO: 2429339 - RNA, 19 nt, Artificial Sequence
  Description of Artificial Sequence: Synthetic oligonucleotide
ccccuuagaaccagucagc

SEQ ID NO: 2429340 - RNA, 19 nt, Artificial Sequence
  Description of Artificial Sequence: Synthetic oligonucleotide
cuccaguaacagucuugug

SEQ ID NO: 2429341 - RNA, 19 nt, Artificial Sequence
  Description of Artificial Sequence: Synthetic oligonucleotide
cuccuggaaagugccccgg

SEQ ID NO: 2429342 - RNA, 19 nt, Artificial Sequence
  Description of Artificial Sequence: Synthetic oligonucleotide
cucggcuggaggagaggug

SEQ ID NO: 2429343 - RNA, 19 nt, Artificial Sequence
  Description of Artificial Sequence: Synthetic oligonucleotide
ucgcucccuaccuuuucau

SEQ ID NO: 2429344 - RNA, 19 nt, Artificial Sequence
  Description of Artificial Sequence: Synthetic oligonucleotide
gggauucgauguccugagg

SEQ ID NO: 2429345 - RNA, 19 nt, Artificial Sequence
  Description of Artificial Sequence: Synthetic oligonucleotide
cacuucacacaucaucgcu

SEQ ID NO: 2429346 - RNA, 19 nt, Artificial Sequence
  Description of Artificial Sequence: Synthetic oligonucleotide
uugccgcuucaccacuguc

SEQ ID NO: 2429347 - RNA, 19 nt, Artificial Sequence
  Description of Artificial Sequence: Synthetic oligonucleotide
cacugacaaccgcagucuc

SEQ ID NO: 2429348 - RNA, 19 nt, Artificial Sequence
  Description of Artificial Sequence: Synthetic oligonucleotide
acugggcuugccgcuucac

SEQ ID NO: 2429349 - RNA, 19 nt, Artificial Sequence
  Description of Artificial Sequence: Synthetic oligonucleotide
cgcuucaccacugucauuc

SEQ ID NO: 2429350 - RNA, 19 nt, Artificial Sequence
  Description of Artificial Sequence: Synthetic oligonucleotide
uccaaggccuugugguguu

SEQ ID NO: 2429351 - RNA, 19 nt, Artificial Sequence
  Description of Artificial Sequence: Synthetic oligonucleotide
ccuugugguguucaaacaa

SEQ ID NO: 2429352 - RNA, 19 nt, Artificial Sequence
  Description of Artificial Sequence: Synthetic oligonucleotide
cugucauagaugacauccu

SEQ ID NO: 2429353 - RNA, 19 nt, Artificial Sequence
  Description of Artificial Sequence: Synthetic oligonucleotide
aacccucagucgcucccua

SEQ ID NO: 2429354 - RNA, 19 nt, Artificial Sequence
  Description of Artificial Sequence: Synthetic oligonucleotide
  modified_base (6)..(6): a, c, u, g, unknown or other
guuccncuuccagugcaga

SEQ ID NO: 2429355 - RNA, 19 nt, Artificial Sequence
  Description of Artificial Sequence: Synthetic oligonucleotide
gcugucgcuggagugaauc

SEQ ID NO: 2429356 - RNA, 19 nt, Artificial Sequence
  Description of Artificial Sequence: Synthetic oligonucleotide
guuagggauucgauguccu

SEQ ID NO: 2429357 - RNA, 19 nt, Artificial Sequence
  Description of Artificial Sequence: Synthetic oligonucleotide
cccucagucgcucccuacc

SEQ ID NO: 2429358 - RNA, 19 nt, Artificial Sequence
  Description of Artificial Sequence: Synthetic oligonucleotide
ccuagcaacgggaggagaa

SEQ ID NO: 2429359 - RNA, 19 nt, Artificial Sequence
  Description of Artificial Sequence: Synthetic oligonucleotide
ccccguuggcucauugggg

SEQ ID NO: 2429360 - RNA, 19 nt, Artificial Sequence
  Description of Artificial Sequence: Synthetic oligonucleotide
agggcugcuuagacacccg

SEQ ID NO: 2429361 - RNA, 19 nt, Artificial Sequence
  Description of Artificial Sequence: Synthetic oligonucleotide
cuagcaacgggaggagaaa

SEQ ID NO: 2429362 - RNA, 19 nt, Artificial Sequence
  Description of Artificial Sequence: Synthetic oligonucleotide
gaucccuuucauccagcau

SEQ ID NO: 2429363 - RNA, 19 nt, Artificial Sequence
  Description of Artificial Sequence: Synthetic oligonucleotide
gacacccgcgagccccagc

SEQ ID NO: 2429364 - RNA, 19 nt, Artificial Sequence
  Description of Artificial Sequence: Synthetic oligonucleotide
gaggugaggcucacaccca

SEQ ID NO: 2429365 - RNA, 19 nt, Artificial Sequence
  Description of Artificial Sequence: Synthetic oligonucleotide
cugagucggagccacugcu

SEQ ID NO: 2429366 - RNA, 19 nt, Artificial Sequence
  Description of Artificial Sequence: Synthetic oligonucleotide
gggcugcuuagacacccgc

SEQ ID NO: 2429367 - RNA, 19 nt, Artificial Sequence
  Description of Artificial Sequence: Synthetic oligonucleotide
gcguucuccuggaaagugc

SEQ ID NO: 2429368 - RNA, 19 nt, Artificial Sequence
  Description of Artificial Sequence: Synthetic oligonucleotide
ccuccacuucacuggacac

SEQ ID NO: 2429369 - RNA, 19 nt, Artificial Sequence
  Description of Artificial Sequence: Synthetic oligonucleotide
gucgcuggagugaaucucu

SEQ ID NO: 2429370 - RNA, 19 nt, Artificial Sequence
  Description of Artificial Sequence: Synthetic oligonucleotide
gagucggagccacugcuuu

SEQ ID NO: 2429371 - RNA, 19 nt, Artificial Sequence
  Description of Artificial Sequence: Synthetic oligonucleotide
gccuugugguguucaaaca

SEQ ID NO: 2429372 - RNA, 19 nt, Artificial Sequence
  Description of Artificial Sequence: Synthetic oligonucleotide
uuggcucauuggggugucc

SEQ ID NO: 2429373 - RNA, 19 nt, Artificial Sequence
  Description of Artificial Sequence: Synthetic oligonucleotide
gcagucucggcuggaggag

SEQ ID NO: 2429374 - RNA, 19 nt, Artificial Sequence
  Description of Artificial Sequence: Synthetic oligonucleotide
gacugggcuugccgcuuca

SEQ ID NO: 2429375 - RNA, 19 nt, Artificial Sequence
  Description of Artificial Sequence: Synthetic oligonucleotide
gggucucucguaguguauc

SEQ ID NO: 2429376 - RNA, 19 nt, Artificial Sequence
  Description of Artificial Sequence: Synthetic oligonucleotide
gggcugaauugagcugucg

SEQ ID NO: 2429377 - RNA, 19 nt, Artificial Sequence
  Description of Artificial Sequence: Synthetic oligonucleotide
gcuccaguaacagucuugu

SEQ ID NO: 2429378 - RNA, 19 nt, Artificial Sequence
  Description of Artificial Sequence: Synthetic oligonucleotide
cucucguaguguaucuaau

SEQ ID NO: 2429379 - RNA, 19 nt, Artificial Sequence
  Description of Artificial Sequence: Synthetic oligonucleotide
guuguucccugcaagcauu

SEQ ID NO: 2429380 - RNA, 19 nt, Artificial Sequence
  Description of Artificial Sequence: Synthetic oligonucleotide
cccuaccuuuucauccaag

SEQ ID NO: 2429381 - RNA, 19 nt, Artificial Sequence
  Description of Artificial Sequence: Synthetic oligonucleotide
aggccuugugguguucaaa

SEQ ID NO: 2429382 - RNA, 19 nt, Artificial Sequence
  Description of Artificial Sequence: Synthetic oligonucleotide
ccguuucuucaauggauca

SEQ ID NO: 2429383 - RNA, 19 nt, Artificial Sequence
  Description of Artificial Sequence: Synthetic oligonucleotide
gagcugucgcuggagugaa

SEQ ID NO: 2429384 - RNA, 19 nt, Artificial Sequence
  Description of Artificial Sequence: Synthetic oligonucleotide
cagcccuccuguuagggau

SEQ ID NO: 2429385 - RNA, 19 nt, Artificial Sequence
  Description of Artificial Sequence: Synthetic oligonucleotide
guuggcucauugggguguc

SEQ ID NO: 2429386 - RNA, 19 nt, Artificial Sequence
  Description of Artificial Sequence: Synthetic oligonucleotide
gaccuccacuucacuggac

SEQ ID NO: 2429387 - RNA, 19 nt, Artificial Sequence
  Description of Artificial Sequence: Synthetic oligonucleotide
cugucgcuggagugaaucu

SEQ ID NO: 2429388 - RNA, 19 nt, Artificial Sequence
  Description of Artificial Sequence: Synthetic oligonucleotide
ggagugaaucucugucaua

SEQ ID NO: 2429389 - RNA, 19 nt, Artificial Sequence
  Description of Artificial Sequence: Synthetic oligonucleotide
guguuguuucuuucagcuu

SEQ ID NO: 2429390 - RNA, 19 nt, Artificial Sequence
  Description of Artificial Sequence: Synthetic oligonucleotide
cuccuguuagggauucgau

SEQ ID NO: 2429391 - RNA, 19 nt, Artificial Sequence
  Description of Artificial Sequence: Synthetic oligonucleotide
gucucucguaguguaucua

SEQ ID NO: 2429392 - RNA, 19 nt, Artificial Sequence
  Description of Artificial Sequence: Synthetic oligonucleotide
gcgagccccagcguucucc

SEQ ID NO: 2429393 - RNA, 19 nt, Artificial Sequence
  Description of Artificial Sequence: Synthetic oligonucleotide
ccgcagucucggcuggagg

SEQ ID NO: 2429394 - RNA, 19 nt, Artificial Sequence
  Description of Artificial Sequence: Synthetic oligonucleotide
ccuccuguuagggauucga

SEQ ID NO: 2429395 - RNA, 19 nt, Artificial Sequence
  Description of Artificial Sequence: Synthetic oligonucleotide
cuugccgcuucaccacugu

SEQ ID NO: 2429396 - RNA, 19 nt, Artificial Sequence
  Description of Artificial Sequence: Synthetic oligonucleotide
cauccagcauauugaccau

SEQ ID NO: 2429397 - RNA, 19 nt, Artificial Sequence
  Description of Artificial Sequence: Synthetic oligonucleotide
cgcagucucggcuggagga

SEQ ID NO: 2429398 - RNA, 19 nt, Artificial Sequence
  Description of Artificial Sequence: Synthetic oligonucleotide
cagucucggcuggaggaga

SEQ ID NO: 2429399 - RNA, 19 nt, Artificial Sequence
  Description of Artificial Sequence: Synthetic oligonucleotide
cucuuauuucaggucccgu

SEQ ID NO: 2429400 - RNA, 19 nt, Artificial Sequence
  Description of Artificial Sequence: Synthetic oligonucleotide
agucugagucggagccacu

SEQ ID NO: 2429401 - RNA, 19 nt, Artificial Sequence
  Description of Artificial Sequence: Synthetic oligonucleotide
gccgcuucaccacugucau

SEQ ID NO: 2429402 - RNA, 19 nt, Artificial Sequence
  Description of Artificial Sequence: Synthetic oligonucleotide
gcuugccgcuucaccacug

SEQ ID NO: 2429403 - RNA, 19 nt, Artificial Sequence
  Description of Artificial Sequence: Synthetic oligonucleotide
cuucaccacugucauucuu

SEQ ID NO: 2429404 - RNA, 19 nt, Artificial Sequence
  Description of Artificial Sequence: Synthetic oligonucleotide
cccagcguucuccuggaaa

SEQ ID NO: 2429405 - RNA, 19 nt, Artificial Sequence
  Description of Artificial Sequence: Synthetic oligonucleotide
agacacccgcgagccccag

SEQ ID NO: 2429406 - RNA, 19 nt, Artificial Sequence
  Description of Artificial Sequence: Synthetic oligonucleotide
gacacuccugagggagacu

SEQ ID NO: 2429407 - RNA, 19 nt, Artificial Sequence
  Description of Artificial Sequence: Synthetic oligonucleotide
cgcucccuaccuuuucauc

SEQ ID NO: 2429408 - RNA, 19 nt, Artificial Sequence
  Description of Artificial Sequence: Synthetic oligonucleotide
cccgcgagccccagcguuc

SEQ ID NO: 2429409 - RNA, 19 nt, Artificial Sequence
  Description of Artificial Sequence: Synthetic oligonucleotide
  modified_base (2)..(2): a, c, u, g, unknown or other
cncuuccagugcagagacu

SEQ ID NO: 2429410 - RNA, 19 nt, Artificial Sequence
  Description of Artificial Sequence: Synthetic oligonucleotide
cagcaguccuggaccauuu

SEQ ID NO: 2429411 - RNA, 19 nt, Artificial Sequence
  Description of Artificial Sequence: Synthetic oligonucleotide
ccucauuaaucgugggcau

SEQ ID NO: 2429412 - RNA, 19 nt, Artificial Sequence
  Description of Artificial Sequence: Synthetic oligonucleotide
cucagucgcucccuaccuu

SEQ ID NO: 2429413 - RNA, 19 nt, Artificial Sequence
  Description of Artificial Sequence: Synthetic oligonucleotide
gccccagcguucuccugga

SEQ ID NO: 2429414 - RNA, 19 nt, Artificial Sequence
  Description of Artificial Sequence: Synthetic oligonucleotide
ggcuugccgcuucaccacu

SEQ ID NO: 2429415 - RNA, 19 nt, Artificial Sequence
  Description of Artificial Sequence: Synthetic oligonucleotide
cagcguucuccuggaaagu

SEQ ID NO: 2429416 - RNA, 19 nt, Artificial Sequence
  Description of Artificial Sequence: Synthetic oligonucleotide
gggcaucacuucacacauc

SEQ ID NO: 2429417 - RNA, 19 nt, Artificial Sequence
  Description of Artificial Sequence: Synthetic oligonucleotide
ccucagucgcucccuaccu

SEQ ID NO: 2429418 - RNA, 19 nt, Artificial Sequence
  Description of Artificial Sequence: Synthetic oligonucleotide
caggucccguuucuucaau

SEQ ID NO: 2429419 - RNA, 19 nt, Artificial Sequence
  Description of Artificial Sequence: Synthetic oligonucleotide
cagucgcucccuaccuuuu

SEQ ID NO: 2429420 - RNA, 19 nt, Artificial Sequence
  Description of Artificial Sequence: Synthetic oligonucleotide
cccuagcaacgggaggaga

SEQ ID NO: 2429421 - RNA, 19 nt, Artificial Sequence
  Description of Artificial Sequence: Synthetic oligonucleotide
cgcuggagugaaucucugu

SEQ ID NO: 2429422 - RNA, 19 nt, Artificial Sequence
  Description of Artificial Sequence: Synthetic oligonucleotide
cacccgcgagccccagcgu

SEQ ID NO: 2429423 - RNA, 19 nt, Artificial Sequence
  Description of Artificial Sequence: Synthetic oligonucleotide
ccagcaguccuggaccauu

SEQ ID NO: 2429424 - RNA, 19 nt, Artificial Sequence
  Description of Artificial Sequence: Synthetic oligonucleotide
ccccagcguucuccuggaa

SEQ ID NO: 2429425 - RNA, 19 nt, Artificial Sequence
  Description of Artificial Sequence: Synthetic oligonucleotide
cgcgagccccagcguucuc

SEQ ID NO: 2429426 - RNA, 19 nt, Artificial Sequence
  Description of Artificial Sequence: Synthetic oligonucleotide
ccgcgagccccagcguucu

SEQ ID NO: 2429427 - RNA, 19 nt, Artificial Sequence
  Description of Artificial Sequence: Synthetic oligonucleotide
ccgcuucaccacugucauu

SEQ ID NO: 2429428 - RNA, 19 nt, Artificial Sequence
  Description of Artificial Sequence: Synthetic oligonucleotide
cccuuucauccagcauauu

SEQ ID NO: 2429429 - RNA, 19 nt, Artificial Sequence
  Description of Artificial Sequence: Synthetic oligonucleotide
aaggugacuauccacaucc

SEQ ID NO: 2429430 - RNA, 19 nt, Artificial Sequence
  Description of Artificial Sequence: Synthetic oligonucleotide
gaaacaaaccaucauagag

SEQ ID NO: 2429431 - RNA, 19 nt, Artificial Sequence
  Description of Artificial Sequence: Synthetic oligonucleotide
ucuggaaacaguuucacag

SEQ ID NO: 2429432 - RNA, 19 nt, Artificial Sequence
  Description of Artificial Sequence: Synthetic oligonucleotide
aaugcccaugaacaaaacc

SEQ ID NO: 2429433 - RNA, 19 nt, Artificial Sequence
  Description of Artificial Sequence: Synthetic oligonucleotide
acagugaucagcauuaugc

SEQ ID NO: 2429434 - RNA, 19 nt, Artificial Sequence
  Description of Artificial Sequence: Synthetic oligonucleotide
aaacaaaccaucauagagg

SEQ ID NO: 2429435 - RNA, 19 nt, Artificial Sequence
  Description of Artificial Sequence: Synthetic oligonucleotide
aacaaaccaucauagagga

SEQ ID NO: 2429436 - RNA, 19 nt, Artificial Sequence
  Description of Artificial Sequence: Synthetic oligonucleotide
agagguaucagccagggga

SEQ ID NO: 2429437 - RNA, 19 nt, Artificial Sequence
  Description of Artificial Sequence: Synthetic oligonucleotide
acuguucggggucaaaucc

SEQ ID NO: 2429438 - RNA, 19 nt, Artificial Sequence
  Description of Artificial Sequence: Synthetic oligonucleotide
aaauccacguuccagcuca

SEQ ID NO: 2429439 - RNA, 19 nt, Artificial Sequence
  Description of Artificial Sequence: Synthetic oligonucleotide
aucauagaggaccuacugc

SEQ ID NO: 2429440 - RNA, 19 nt, Artificial Sequence
  Description of Artificial Sequence: Synthetic oligonucleotide
agugaucagcauuaugccc

SEQ ID NO: 2429441 - RNA, 19 nt, Artificial Sequence
  Description of Artificial Sequence: Synthetic oligonucleotide
aguaaagaagaccucagga

SEQ ID NO: 2429442 - RNA, 19 nt, Artificial Sequence
  Description of Artificial Sequence: Synthetic oligonucleotide
agcauuaugcccaaugccc

SEQ ID NO: 2429443 - RNA, 19 nt, Artificial Sequence
  Description of Artificial Sequence: Synthetic oligonucleotide
aaccagaaggaaccugugc

SEQ ID NO: 2429444 - RNA, 19 nt, Artificial Sequence
  Description of Artificial Sequence: Synthetic oligonucleotide
acuauccacauccaucugg

SEQ ID NO: 2429445 - RNA, 19 nt, Artificial Sequence
  Description of Artificial Sequence: Synthetic oligonucleotide
uucacagacacacccugcg

SEQ ID NO: 2429446 - RNA, 19 nt, Artificial Sequence
  Description of Artificial Sequence: Synthetic oligonucleotide
aggagaggcauccugcagc

SEQ ID NO: 2429447 - RNA, 19 nt, Artificial Sequence
  Description of Artificial Sequence: Synthetic oligonucleotide
ucagcauuaugcccaaugc

SEQ ID NO: 2429448 - RNA, 19 nt, Artificial Sequence
  Description of Artificial Sequence: Synthetic oligonucleotide
ugcccaaugcccaugaaca

SEQ ID NO: 2429449 - RNA, 19 nt, Artificial Sequence
  Description of Artificial Sequence: Synthetic oligonucleotide
ugacuauccacauccaucu

SEQ ID NO: 2429450 - RNA, 19 nt, Artificial Sequence
  Description of Artificial Sequence: Synthetic oligonucleotide
auuccauacccaguuaagc

SEQ ID NO: 2429451 - RNA, 19 nt, Artificial Sequence
  Description of Artificial Sequence: Synthetic oligonucleotide
ucaguuaaucucuggaaac

SEQ ID NO: 2429452 - RNA, 19 nt, Artificial Sequence
  Description of Artificial Sequence: Synthetic oligonucleotide
uucucaguuaaucucugga

SEQ ID NO: 2429453 - RNA, 19 nt, Artificial Sequence
  Description of Artificial Sequence: Synthetic oligonucleotide
aauggcugacuguucgggg

SEQ ID NO: 2429454 - RNA, 19 nt, Artificial Sequence
  Description of Artificial Sequence: Synthetic oligonucleotide
augaaacaaaccaucauag

SEQ ID NO: 2429455 - RNA, 19 nt, Artificial Sequence
  Description of Artificial Sequence: Synthetic oligonucleotide
aaaggcguccaggaaaagg

SEQ ID NO: 2429456 - RNA, 19 nt, Artificial Sequence
  Description of Artificial Sequence: Synthetic oligonucleotide
cuauccacauccaucuggg

SEQ ID NO: 2429457 - RNA, 19 nt, Artificial Sequence
  Description of Artificial Sequence: Synthetic oligonucleotide
uuccaagagaaaccagggg

SEQ ID NO: 2429458 - RNA, 19 nt, Artificial Sequence
  Description of Artificial Sequence: Synthetic oligonucleotide
aguaggugacuccagggag

SEQ ID NO: 2429459 - RNA, 19 nt, Artificial Sequence
  Description of Artificial Sequence: Synthetic oligonucleotide
ucuuacugccuuccaagag

SEQ ID NO: 2429460 - RNA, 19 nt, Artificial Sequence
  Description of Artificial Sequence: Synthetic oligonucleotide
ugcagcucaccacacgacg

SEQ ID NO: 2429461 - RNA, 19 nt, Artificial Sequence
  Description of Artificial Sequence: Synthetic oligonucleotide
gacaaugaaacaaaccauc

SEQ ID NO: 2429462 - RNA, 19 nt, Artificial Sequence
  Description of Artificial Sequence: Synthetic oligonucleotide
uccauacccaguuaagcug

SEQ ID NO: 2429463 - RNA, 19 nt, Artificial Sequence
  Description of Artificial Sequence: Synthetic oligonucleotide
ugcccaugaacaaaaccag

SEQ ID NO: 2429464 - RNA, 19 nt, Artificial Sequence
  Description of Artificial Sequence: Synthetic oligonucleotide
uggaaacaguuucacagac

SEQ ID NO: 2429465 - RNA, 19 nt, Artificial Sequence
  Description of Artificial Sequence: Synthetic oligonucleotide
uaggugauuccauacccag

SEQ ID NO: 2429466 - RNA, 19 nt, Artificial Sequence
  Description of Artificial Sequence: Synthetic oligonucleotide
caguuucacagacacaccc

SEQ ID NO: 2429467 - RNA, 19 nt, Artificial Sequence
  Description of Artificial Sequence: Synthetic oligonucleotide
aucagcauuaugcccaaug

SEQ ID NO: 2429468 - RNA, 19 nt, Artificial Sequence
  Description of Artificial Sequence: Synthetic oligonucleotide
ugauuccauacccaguuaa

SEQ ID NO: 2429469 - RNA, 19 nt, Artificial Sequence
  Description of Artificial Sequence: Synthetic oligonucleotide
agacacacacucuugggug

SEQ ID NO: 2429470 - RNA, 19 nt, Artificial Sequence
  Description of Artificial Sequence: Synthetic oligonucleotide
gguaagaguuuccagagac

SEQ ID NO: 2429471 - RNA, 19 nt, Artificial Sequence
  Description of Artificial Sequence: Synthetic oligonucleotide
uacccaguuaagcugacaa

SEQ ID NO: 2429472 - RNA, 19 nt, Artificial Sequence
  Description of Artificial Sequence: Synthetic oligonucleotide
aguagaaucuggugcagga

SEQ ID NO: 2429473 - RNA, 19 nt, Artificial Sequence
  Description of Artificial Sequence: Synthetic oligonucleotide
ucaaaugccuucuggcaca

SEQ ID NO: 2429474 - RNA, 19 nt, Artificial Sequence
  Description of Artificial Sequence: Synthetic oligonucleotide
accaucauagaggaccuac

SEQ ID NO: 2429475 - RNA, 19 nt, Artificial Sequence
  Description of Artificial Sequence: Synthetic oligonucleotide
cauucaaggugguucuucc

SEQ ID NO: 2429476 - RNA, 19 nt, Artificial Sequence
  Description of Artificial Sequence: Synthetic oligonucleotide
cugagcaaggugacuaucc

SEQ ID NO: 2429477 - RNA, 19 nt, Artificial Sequence
  Description of Artificial Sequence: Synthetic oligonucleotide
guggacuaugcacagacac

SEQ ID NO: 2429478 - RNA, 19 nt, Artificial Sequence
  Description of Artificial Sequence: Synthetic oligonucleotide
accgguaagaguuuccaga

SEQ ID NO: 2429479 - RNA, 19 nt, Artificial Sequence
  Description of Artificial Sequence: Synthetic oligonucleotide
uccuaggugauuccauacc

SEQ ID NO: 2429480 - RNA, 19 nt, Artificial Sequence
  Description of Artificial Sequence: Synthetic oligonucleotide
ucucaguuaaucucuggaa

SEQ ID NO: 2429481 - RNA, 19 nt, Artificial Sequence
  Description of Artificial Sequence: Synthetic oligonucleotide
acgcagguggacuaugcac

SEQ ID NO: 2429482 - RNA, 19 nt, Artificial Sequence
  Description of Artificial Sequence: Synthetic oligonucleotide
agucccguggaacaaccgg

SEQ ID NO: 2429483 - RNA, 19 nt, Artificial Sequence
  Description of Artificial Sequence: Synthetic oligonucleotide
acgaagacacgucucagca

SEQ ID NO: 2429484 - RNA, 19 nt, Artificial Sequence
  Description of Artificial Sequence: Synthetic oligonucleotide
uccuuucucaguuaaucuc

SEQ ID NO: 2429485 - RNA, 19 nt, Artificial Sequence
  Description of Artificial Sequence: Synthetic oligonucleotide
aguuuccagagacaccaag

SEQ ID NO: 2429486 - RNA, 19 nt, Artificial Sequence
  Description of Artificial Sequence: Synthetic oligonucleotide
aggacaugcucucaggggu

SEQ ID NO: 2429487 - RNA, 19 nt, Artificial Sequence
  Description of Artificial Sequence: Synthetic oligonucleotide
cagugaucagcauuaugcc

SEQ ID NO: 2429488 - RNA, 19 nt, Artificial Sequence
  Description of Artificial Sequence: Synthetic oligonucleotide
ugagcaaggugacuaucca

SEQ ID NO: 2429489 - RNA, 19 nt, Artificial Sequence
  Description of Artificial Sequence: Synthetic oligonucleotide
uuccagagacaccaagggc

SEQ ID NO: 2429490 - RNA, 19 nt, Artificial Sequence
  Description of Artificial Sequence: Synthetic oligonucleotide
uucggggucaaauccacgu

SEQ ID NO: 2429491 - RNA, 19 nt, Artificial Sequence
  Description of Artificial Sequence: Synthetic oligonucleotide
uccacacgaagacacgucu

SEQ ID NO: 2429492 - RNA, 19 nt, Artificial Sequence
  Description of Artificial Sequence: Synthetic oligonucleotide
uggacuaugcacagacaca

SEQ ID NO: 2429493 - RNA, 19 nt, Artificial Sequence
  Description of Artificial Sequence: Synthetic oligonucleotide
ucacagacacacccugcgg

SEQ ID NO: 2429494 - RNA, 19 nt, Artificial Sequence
  Description of Artificial Sequence: Synthetic oligonucleotide
aacaaccgguaagaguuuc

SEQ ID NO: 2429495 - RNA, 19 nt, Artificial Sequence
  Description of Artificial Sequence: Synthetic oligonucleotide
auagaggaccuacugcugu

SEQ ID NO: 2429496 - RNA, 19 nt, Artificial Sequence
  Description of Artificial Sequence: Synthetic oligonucleotide
aaccgguaagaguuuccag

SEQ ID NO: 2429497 - RNA, 19 nt, Artificial Sequence
  Description of Artificial Sequence: Synthetic oligonucleotide
uccacguuccagcucacac

SEQ ID NO: 2429498 - RNA, 19 nt, Artificial Sequence
  Description of Artificial Sequence: Synthetic oligonucleotide
uggaacaaccgguaagagu

SEQ ID NO: 2429499 - RNA, 19 nt, Artificial Sequence
  Description of Artificial Sequence: Synthetic oligonucleotide
uacgcuggaaggaggagac

SEQ ID NO: 2429500 - RNA, 19 nt, Artificial Sequence
  Description of Artificial Sequence: Synthetic oligonucleotide
caucauagaggaccuacug

SEQ ID NO: 2429501 - RNA, 19 nt, Artificial Sequence
  Description of Artificial Sequence: Synthetic oligonucleotide
aaaaggucuuggaucccac

SEQ ID NO: 2429502 - RNA, 19 nt, Artificial Sequence
  Description of Artificial Sequence: Synthetic oligonucleotide
caggagucugaguagaauc

SEQ ID NO: 2429503 - RNA, 19 nt, Artificial Sequence
  Description of Artificial Sequence: Synthetic oligonucleotide
uuacugccuuccaagagaa

SEQ ID NO: 2429504 - RNA, 19 nt, Artificial Sequence
  Description of Artificial Sequence: Synthetic oligonucleotide
aggaccuacugcugucugc

SEQ ID NO: 2429505 - RNA, 19 nt, Artificial Sequence
  Description of Artificial Sequence: Synthetic oligonucleotide
cugccuuccaagagaaacc

SEQ ID NO: 2429506 - RNA, 19 nt, Artificial Sequence
  Description of Artificial Sequence: Synthetic oligonucleotide
uuaugcccaaugcccauga

SEQ ID NO: 2429507 - RNA, 19 nt, Artificial Sequence
  Description of Artificial Sequence: Synthetic oligonucleotide
cauguacgcuggaaggagg

SEQ ID NO: 2429508 - RNA, 19 nt, Artificial Sequence
  Description of Artificial Sequence: Synthetic oligonucleotide
cuuacugccuuccaagaga

SEQ ID NO: 2429509 - RNA, 19 nt, Artificial Sequence
  Description of Artificial Sequence: Synthetic oligonucleotide
caaugggcagcucagcaac

SEQ ID NO: 2429510 - RNA, 19 nt, Artificial Sequence
  Description of Artificial Sequence: Synthetic oligonucleotide
aaaggucuuggaucccaca

SEQ ID NO: 2429511 - RNA, 19 nt, Artificial Sequence
  Description of Artificial Sequence: Synthetic oligonucleotide
cacacgacgucuuccgugc

SEQ ID NO: 2429512 - RNA, 19 nt, Artificial Sequence
  Description of Artificial Sequence: Synthetic oligonucleotide
ccaagagaaaccaggggcg

SEQ ID NO: 2429513 - RNA, 19 nt, Artificial Sequence
  Description of Artificial Sequence: Synthetic oligonucleotide
ggcaauggcugacuguucg

SEQ ID NO: 2429514 - RNA, 19 nt, Artificial Sequence
  Description of Artificial Sequence: Synthetic oligonucleotide
uggcacaaugggcagcuca

SEQ ID NO: 2429515 - RNA, 19 nt, Artificial Sequence
  Description of Artificial Sequence: Synthetic oligonucleotide
ucccacaguaaagaagacc

SEQ ID NO: 2429516 - RNA, 19 nt, Artificial Sequence
  Description of Artificial Sequence: Synthetic oligonucleotide
acugcuccgcagcagagca

SEQ ID NO: 2429517 - RNA, 19 nt, Artificial Sequence
  Description of Artificial Sequence: Synthetic oligonucleotide
uguucggggucaaauccac

SEQ ID NO: 2429518 - RNA, 19 nt, Artificial Sequence
  Description of Artificial Sequence: Synthetic oligonucleotide
cugucagcauguacgcugg

SEQ ID NO: 2429519 - RNA, 19 nt, Artificial Sequence
  Description of Artificial Sequence: Synthetic oligonucleotide
cacguuccagcucacacug

SEQ ID NO: 2429520 - RNA, 19 nt, Artificial Sequence
  Description of Artificial Sequence: Synthetic oligonucleotide
uccaggaaaaggucuugga

SEQ ID NO: 2429521 - RNA, 19 nt, Artificial Sequence
  Description of Artificial Sequence: Synthetic oligonucleotide
aacgcagguggacuaugca

SEQ ID NO: 2429522 - RNA, 19 nt, Artificial Sequence
  Description of Artificial Sequence: Synthetic oligonucleotide
aggugguucuuccuuucuc

SEQ ID NO: 2429523 - RNA, 19 nt, Artificial Sequence
  Description of Artificial Sequence: Synthetic oligonucleotide
ucuuccgugcuuucagcca

SEQ ID NO: 2429524 - RNA, 19 nt, Artificial Sequence
  Description of Artificial Sequence: Synthetic oligonucleotide
aaaccaucauagaggaccu

SEQ ID NO: 2429525 - RNA, 19 nt, Artificial Sequence
  Description of Artificial Sequence: Synthetic oligonucleotide
acaguaaagaagaccucag

SEQ ID NO: 2429526 - RNA, 19 nt, Artificial Sequence
  Description of Artificial Sequence: Synthetic oligonucleotide
caagagguaucagccaggg

SEQ ID NO: 2429527 - RNA, 19 nt, Artificial Sequence
  Description of Artificial Sequence: Synthetic oligonucleotide
gacaggagaggcauccugc

SEQ ID NO: 2429528 - RNA, 19 nt, Artificial Sequence
  Description of Artificial Sequence: Synthetic oligonucleotide
gaguaggugacuccaggga

SEQ ID NO: 2429529 - RNA, 19 nt, Artificial Sequence
  Description of Artificial Sequence: Synthetic oligonucleotide
gaguagaaucuggugcagg

SEQ ID NO: 2429530 - RNA, 19 nt, Artificial Sequence
  Description of Artificial Sequence: Synthetic oligonucleotide
acgucuuccgugcuuucag

SEQ ID NO: 2429531 - RNA, 19 nt, Artificial Sequence
  Description of Artificial Sequence: Synthetic oligonucleotide
agcugacaaugaaacaaac

SEQ ID NO: 2429532 - RNA, 19 nt, Artificial Sequence
  Description of Artificial Sequence: Synthetic oligonucleotide
cucaguuaaucucuggaaa

SEQ ID NO: 2429533 - RNA, 19 nt, Artificial Sequence
  Description of Artificial Sequence: Synthetic oligonucleotide
aagcacugagcaaggugac

SEQ ID NO: 2429534 - RNA, 19 nt, Artificial Sequence
  Description of Artificial Sequence: Synthetic oligonucleotide
ucagcaacgcagguggacu

SEQ ID NO: 2429535 - RNA, 19 nt, Artificial Sequence
  Description of Artificial Sequence: Synthetic oligonucleotide
caccacacgacgucuuccg

SEQ ID NO: 2429536 - RNA, 19 nt, Artificial Sequence
  Description of Artificial Sequence: Synthetic oligonucleotide
ugccuuccaagagaaacca

SEQ ID NO: 2429537 - RNA, 19 nt, Artificial Sequence
  Description of Artificial Sequence: Synthetic oligonucleotide
acaaccgguaagaguuucc

SEQ ID NO: 2429538 - RNA, 19 nt, Artificial Sequence
  Description of Artificial Sequence: Synthetic oligonucleotide
cauagaggaccuacugcug

SEQ ID NO: 2429539 - RNA, 19 nt, Artificial Sequence
  Description of Artificial Sequence: Synthetic oligonucleotide
aguuaagcugacaaugaaa

SEQ ID NO: 2429540 - RNA, 19 nt, Artificial Sequence
  Description of Artificial Sequence: Synthetic oligonucleotide
gcucuuacugccuuccaag

SEQ ID NO: 2429541 - RNA, 19 nt, Artificial Sequence
  Description of Artificial Sequence: Synthetic oligonucleotide
ucccugucagcauguacgc

SEQ ID NO: 2429542 - RNA, 19 nt, Artificial Sequence
  Description of Artificial Sequence: Synthetic oligonucleotide
agcagucacaucccuguca

SEQ ID NO: 2429543 - RNA, 19 nt, Artificial Sequence
  Description of Artificial Sequence: Synthetic oligonucleotide
caagagaaaccaggggcgg

SEQ ID NO: 2429544 - RNA, 19 nt, Artificial Sequence
  Description of Artificial Sequence: Synthetic oligonucleotide
gacuguucggggucaaauc

SEQ ID NO: 2429545 - RNA, 19 nt, Artificial Sequence
  Description of Artificial Sequence: Synthetic oligonucleotide
gucuuccgugcuuucagcc

SEQ ID NO: 2429546 - RNA, 19 nt, Artificial Sequence
  Description of Artificial Sequence: Synthetic oligonucleotide
gugacuauccacauccauc

SEQ ID NO: 2429547 - RNA, 19 nt, Artificial Sequence
  Description of Artificial Sequence: Synthetic oligonucleotide
cagguguccacacgaagac

SEQ ID NO: 2429548 - RNA, 19 nt, Artificial Sequence
  Description of Artificial Sequence: Synthetic oligonucleotide
ugaguagaaucuggugcag

SEQ ID NO: 2429549 - RNA, 19 nt, Artificial Sequence
  Description of Artificial Sequence: Synthetic oligonucleotide
ccuaggugauuccauaccc

SEQ ID NO: 2429550 - RNA, 19 nt, Artificial Sequence
  Description of Artificial Sequence: Synthetic oligonucleotide
ggaaaaggcguccaggaaa

SEQ ID NO: 2429551 - RNA, 19 nt, Artificial Sequence
  Description of Artificial Sequence: Synthetic oligonucleotide
gaaaaggcguccaggaaaa

SEQ ID NO: 2429552 - RNA, 19 nt, Artificial Sequence
  Description of Artificial Sequence: Synthetic oligonucleotide
cuccuaggugauuccauac

SEQ ID NO: 2429553 - RNA, 19 nt, Artificial Sequence
  Description of Artificial Sequence: Synthetic oligonucleotide
uccagggagccuccagucc

SEQ ID NO: 2429554 - RNA, 19 nt, Artificial Sequence
  Description of Artificial Sequence: Synthetic oligonucleotide
uguccacacgaagacacgu

SEQ ID NO: 2429555 - RNA, 19 nt, Artificial Sequence
  Description of Artificial Sequence: Synthetic oligonucleotide
augggcagcucagcaacgc

SEQ ID NO: 2429556 - RNA, 19 nt, Artificial Sequence
  Description of Artificial Sequence: Synthetic oligonucleotide
ugcuuucagccaagcacug

SEQ ID NO: 2429557 - RNA, 19 nt, Artificial Sequence
  Description of Artificial Sequence: Synthetic oligonucleotide
ucaaggugguucuuccuuu

SEQ ID NO: 2429558 - RNA, 19 nt, Artificial Sequence
  Description of Artificial Sequence: Synthetic oligonucleotide
aaaccagaaggaaccugug

SEQ ID NO: 2429559 - RNA, 19 nt, Artificial Sequence
  Description of Artificial Sequence: Synthetic oligonucleotide
ggacuaugcacagacacac

SEQ ID NO: 2429560 - RNA, 19 nt, Artificial Sequence
  Description of Artificial Sequence: Synthetic oligonucleotide
acacacacucuugggugcc

SEQ ID NO: 2429561 - RNA, 19 nt, Artificial Sequence
  Description of Artificial Sequence: Synthetic oligonucleotide
acaagagguaucagccagg

SEQ ID NO: 2429562 - RNA, 19 nt, Artificial Sequence
  Description of Artificial Sequence: Synthetic oligonucleotide
uugggugccaggagucuga

SEQ ID NO: 2429563 - RNA, 19 nt, Artificial Sequence
  Description of Artificial Sequence: Synthetic oligonucleotide
aggagucugaguagaaucu

SEQ ID NO: 2429564 - RNA, 19 nt, Artificial Sequence
  Description of Artificial Sequence: Synthetic oligonucleotide
cuggaaacaguuucacaga

SEQ ID NO: 2429565 - RNA, 19 nt, Artificial Sequence
  Description of Artificial Sequence: Synthetic oligonucleotide
gcaggacaugcucucaggg

SEQ ID NO: 2429566 - RNA, 19 nt, Artificial Sequence
  Description of Artificial Sequence: Synthetic oligonucleotide
ugcggucugucuccuaggu

SEQ ID NO: 2429567 - RNA, 19 nt, Artificial Sequence
  Description of Artificial Sequence: Synthetic oligonucleotide
acugagcaaggugacuauc

SEQ ID NO: 2429568 - RNA, 19 nt, Artificial Sequence
  Description of Artificial Sequence: Synthetic oligonucleotide
uaccauccacauucaaggu

SEQ ID NO: 2429569 - RNA, 19 nt, Artificial Sequence
  Description of Artificial Sequence: Synthetic oligonucleotide
ugguucuuccuuucucagu

SEQ ID NO: 2429570 - RNA, 19 nt, Artificial Sequence
  Description of Artificial Sequence: Synthetic oligonucleotide
caacgcagguggacuaugc

SEQ ID NO: 2429571 - RNA, 19 nt, Artificial Sequence
  Description of Artificial Sequence: Synthetic oligonucleotide
cuucuggcacaaugggcag

SEQ ID NO: 2429572 - RNA, 19 nt, Artificial Sequence
  Description of Artificial Sequence: Synthetic oligonucleotide
cuaggugauuccauaccca

SEQ ID NO: 2429573 - RNA, 19 nt, Artificial Sequence
  Description of Artificial Sequence: Synthetic oligonucleotide
cagggcucgcucuuacugc

SEQ ID NO: 2429574 - RNA, 19 nt, Artificial Sequence
  Description of Artificial Sequence: Synthetic oligonucleotide
guaggugacuccagggagc

SEQ ID NO: 2429575 - RNA, 19 nt, Artificial Sequence
  Description of Artificial Sequence: Synthetic oligonucleotide
accacagugaucagcauua

SEQ ID NO: 2429576 - RNA, 19 nt, Artificial Sequence
  Description of Artificial Sequence: Synthetic oligonucleotide
cucaggagccacagugggc

SEQ ID NO: 2429577 - RNA, 19 nt, Artificial Sequence
  Description of Artificial Sequence: Synthetic oligonucleotide
ggucaaauccacguuccag

SEQ ID NO: 2429578 - RNA, 19 nt, Artificial Sequence
  Description of Artificial Sequence: Synthetic oligonucleotide
ggaacaaccgguaagaguu

SEQ ID NO: 2429579 - RNA, 19 nt, Artificial Sequence
  Description of Artificial Sequence: Synthetic oligonucleotide
aagacacgucucagcaguc

SEQ ID NO: 2429580 - RNA, 19 nt, Artificial Sequence
  Description of Artificial Sequence: Synthetic oligonucleotide
ugacuguucggggucaaau

SEQ ID NO: 2429581 - RNA, 19 nt, Artificial Sequence
  Description of Artificial Sequence: Synthetic oligonucleotide
cacagugaucagcauuaug

SEQ ID NO: 2429582 - RNA, 19 nt, Artificial Sequence
  Description of Artificial Sequence: Synthetic oligonucleotide
uguacgcuggaaggaggag

SEQ ID NO: 2429583 - RNA, 19 nt, Artificial Sequence
  Description of Artificial Sequence: Synthetic oligonucleotide
cacacgaagacacgucuca

SEQ ID NO: 2429584 - RNA, 19 nt, Artificial Sequence
  Description of Artificial Sequence: Synthetic oligonucleotide
aaaaggcguccaggaaaag

SEQ ID NO: 2429585 - RNA, 19 nt, Artificial Sequence
  Description of Artificial Sequence: Synthetic oligonucleotide
agguggaaaaggcguccag

SEQ ID NO: 2429586 - RNA, 19 nt, Artificial Sequence
  Description of Artificial Sequence: Synthetic oligonucleotide
ucaccacacgacgucuucc

SEQ ID NO: 2429587 - RNA, 19 nt, Artificial Sequence
  Description of Artificial Sequence: Synthetic oligonucleotide
cccaguuaagcugacaaug

SEQ ID NO: 2429588 - RNA, 19 nt, Artificial Sequence
  Description of Artificial Sequence: Synthetic oligonucleotide
ugucuccuaggugauucca

SEQ ID NO: 2429589 - RNA, 19 nt, Artificial Sequence
  Description of Artificial Sequence: Synthetic oligonucleotide
ugaucagcauuaugcccaa

SEQ ID NO: 2429590 - RNA, 19 nt, Artificial Sequence
  Description of Artificial Sequence: Synthetic oligonucleotide
ccgguaagaguuuccagag

SEQ ID NO: 2429591 - RNA, 19 nt, Artificial Sequence
  Description of Artificial Sequence: Synthetic oligonucleotide
cucuugggugccaggaguc

SEQ ID NO: 2429592 - RNA, 19 nt, Artificial Sequence
  Description of Artificial Sequence: Synthetic oligonucleotide
gacuauccacauccaucug

SEQ ID NO: 2429593 - RNA, 19 nt, Artificial Sequence
  Description of Artificial Sequence: Synthetic oligonucleotide
gaggaccuacugcugucug

SEQ ID NO: 2429594 - RNA, 19 nt, Artificial Sequence
  Description of Artificial Sequence: Synthetic oligonucleotide
caguuaaucucuggaaaca

SEQ ID NO: 2429595 - RNA, 19 nt, Artificial Sequence
  Description of Artificial Sequence: Synthetic oligonucleotide
cucgcucuuacugccuucc

SEQ ID NO: 2429596 - RNA, 19 nt, Artificial Sequence
  Description of Artificial Sequence: Synthetic oligonucleotide
caaggugguucuuccuuuc

SEQ ID NO: 2429597 - RNA, 19 nt, Artificial Sequence
  Description of Artificial Sequence: Synthetic oligonucleotide
aaaccaggggcggcaguug

SEQ ID NO: 2429598 - RNA, 19 nt, Artificial Sequence
  Description of Artificial Sequence: Synthetic oligonucleotide
cucuuacugccuuccaaga

SEQ ID NO: 2429599 - RNA, 19 nt, Artificial Sequence
  Description of Artificial Sequence: Synthetic oligonucleotide
acaaaccaucauagaggac

SEQ ID NO: 2429600 - RNA, 19 nt, Artificial Sequence
  Description of Artificial Sequence: Synthetic oligonucleotide
caaggugacuauccacauc

SEQ ID NO: 2429601 - RNA, 19 nt, Artificial Sequence
  Description of Artificial Sequence: Synthetic oligonucleotide
uuccgugcuuucagccaag

SEQ ID NO: 2429602 - RNA, 19 nt, Artificial Sequence
  Description of Artificial Sequence: Synthetic oligonucleotide
ggaaccugugcucaggugu

SEQ ID NO: 2429603 - RNA, 19 nt, Artificial Sequence
  Description of Artificial Sequence: Synthetic oligonucleotide
gggaaaagcaggcaguggu

SEQ ID NO: 2429604 - RNA, 19 nt, Artificial Sequence
  Description of Artificial Sequence: Synthetic oligonucleotide
agacacacccugcggucug

SEQ ID NO: 2429605 - RNA, 19 nt, Artificial Sequence
  Description of Artificial Sequence: Synthetic oligonucleotide
agaaucuggugcaggacau

SEQ ID NO: 2429606 - RNA, 19 nt, Artificial Sequence
  Description of Artificial Sequence: Synthetic oligonucleotide
gcaauggcugacuguucgg

SEQ ID NO: 2429607 - RNA, 19 nt, Artificial Sequence
  Description of Artificial Sequence: Synthetic oligonucleotide
guggaacaaccgguaagag

SEQ ID NO: 2429608 - RNA, 19 nt, Artificial Sequence
  Description of Artificial Sequence: Synthetic oligonucleotide
cuguucggggucaaaucca

SEQ ID NO: 2429609 - RNA, 19 nt, Artificial Sequence
  Description of Artificial Sequence: Synthetic oligonucleotide
aauccacguuccagcucac

SEQ ID NO: 2429610 - RNA, 19 nt, Artificial Sequence
  Description of Artificial Sequence: Synthetic oligonucleotide
ucccguggaacaaccggua

SEQ ID NO: 2429611 - RNA, 19 nt, Artificial Sequence
  Description of Artificial Sequence: Synthetic oligonucleotide
ggaaaagcaggcaguggug

SEQ ID NO: 2429612 - RNA, 19 nt, Artificial Sequence
  Description of Artificial Sequence: Synthetic oligonucleotide
gagaaaccaggggcggcag

SEQ ID NO: 2429613 - RNA, 19 nt, Artificial Sequence
  Description of Artificial Sequence: Synthetic oligonucleotide
caguuaagcugacaaugaa

SEQ ID NO: 2429614 - RNA, 19 nt, Artificial Sequence
  Description of Artificial Sequence: Synthetic oligonucleotide
ugacuccuggcugggaaaa

SEQ ID NO: 2429615 - RNA, 19 nt, Artificial Sequence
  Description of Artificial Sequence: Synthetic oligonucleotide
cucagcaacgcagguggac

SEQ ID NO: 2429616 - RNA, 19 nt, Artificial Sequence
  Description of Artificial Sequence: Synthetic oligonucleotide
guacgcuggaaggaggaga

SEQ ID NO: 2429617 - RNA, 19 nt, Artificial Sequence
  Description of Artificial Sequence: Synthetic oligonucleotide
ggcacaaugggcagcucag

SEQ ID NO: 2429618 - RNA, 19 nt, Artificial Sequence
  Description of Artificial Sequence: Synthetic oligonucleotide
gcauguacgcuggaaggag

SEQ ID NO: 2429619 - RNA, 19 nt, Artificial Sequence
  Description of Artificial Sequence: Synthetic oligonucleotide
ccaagcacugagcaaggug

SEQ ID NO: 2429620 - RNA, 19 nt, Artificial Sequence
  Description of Artificial Sequence: Synthetic oligonucleotide
auguacgcuggaaggagga

SEQ ID NO: 2429621 - RNA, 19 nt, Artificial Sequence
  Description of Artificial Sequence: Synthetic oligonucleotide
cuugggugccaggagucug

SEQ ID NO: 2429622 - RNA, 19 nt, Artificial Sequence
  Description of Artificial Sequence: Synthetic oligonucleotide
agaggaccuacugcugucu

SEQ ID NO: 2429623 - RNA, 19 nt, Artificial Sequence
  Description of Artificial Sequence: Synthetic oligonucleotide
ggugauuccauacccaguu

SEQ ID NO: 2429624 - RNA, 19 nt, Artificial Sequence
  Description of Artificial Sequence: Synthetic oligonucleotide
cacacugcuccgcagcaga

SEQ ID NO: 2429625 - RNA, 19 nt, Artificial Sequence
  Description of Artificial Sequence: Synthetic oligonucleotide
cuuccgugcuuucagccaa

SEQ ID NO: 2429626 - RNA, 19 nt, Artificial Sequence
  Description of Artificial Sequence: Synthetic oligonucleotide
guucggggucaaauccacg

SEQ ID NO: 2429627 - RNA, 19 nt, Artificial Sequence
  Description of Artificial Sequence: Synthetic oligonucleotide
agaaaccaggggcggcagu

SEQ ID NO: 2429628 - RNA, 19 nt, Artificial Sequence
  Description of Artificial Sequence: Synthetic oligonucleotide
ggucuuggaucccacagua

SEQ ID NO: 2429629 - RNA, 19 nt, Artificial Sequence
  Description of Artificial Sequence: Synthetic oligonucleotide
cucaccacacgacgucuuc

SEQ ID NO: 2429630 - RNA, 19 nt, Artificial Sequence
  Description of Artificial Sequence: Synthetic oligonucleotide
gugcuuucagccaagcacu

SEQ ID NO: 2429631 - RNA, 19 nt, Artificial Sequence
  Description of Artificial Sequence: Synthetic oligonucleotide
agacacgucucagcaguca

SEQ ID NO: 2429632 - RNA, 19 nt, Artificial Sequence
  Description of Artificial Sequence: Synthetic oligonucleotide
ccaguuaagcugacaauga

SEQ ID NO: 2429633 - RNA, 19 nt, Artificial Sequence
  Description of Artificial Sequence: Synthetic oligonucleotide
ggugacuccagggagccuc

SEQ ID NO: 2429634 - RNA, 19 nt, Artificial Sequence
  Description of Artificial Sequence: Synthetic oligonucleotide
caaccgguaagaguuucca

SEQ ID NO: 2429635 - RNA, 19 nt, Artificial Sequence
  Description of Artificial Sequence: Synthetic oligonucleotide
aggcguccaggaaaagguc

SEQ ID NO: 2429636 - RNA, 19 nt, Artificial Sequence
  Description of Artificial Sequence: Synthetic oligonucleotide
ucgcucuuacugccuucca

SEQ ID NO: 2429637 - RNA, 19 nt, Artificial Sequence
  Description of Artificial Sequence: Synthetic oligonucleotide
uggcaauggcugacuguuc

SEQ ID NO: 2429638 - RNA, 19 nt, Artificial Sequence
  Description of Artificial Sequence: Synthetic oligonucleotide
agguaucagccaggggauc

SEQ ID NO: 2429639 - RNA, 19 nt, Artificial Sequence
  Description of Artificial Sequence: Synthetic oligonucleotide
agcgugggaucaaaugccu

SEQ ID NO: 2429640 - RNA, 19 nt, Artificial Sequence
  Description of Artificial Sequence: Synthetic oligonucleotide
cagcucaccacacgacguc

SEQ ID NO: 2429641 - RNA, 19 nt, Artificial Sequence
  Description of Artificial Sequence: Synthetic oligonucleotide
accacacgacgucuuccgu

SEQ ID NO: 2429642 - RNA, 19 nt, Artificial Sequence
  Description of Artificial Sequence: Synthetic oligonucleotide
ccugcggucugucuccuag

SEQ ID NO: 2429643 - RNA, 19 nt, Artificial Sequence
  Description of Artificial Sequence: Synthetic oligonucleotide
gaagaccucaggagccaca

SEQ ID NO: 2429644 - RNA, 19 nt, Artificial Sequence
  Description of Artificial Sequence: Synthetic oligonucleotide
agcucaccacacgacgucu

SEQ ID NO: 2429645 - RNA, 19 nt, Artificial Sequence
  Description of Artificial Sequence: Synthetic oligonucleotide
ccauacccaguuaagcuga

SEQ ID NO: 2429646 - RNA, 19 nt, Artificial Sequence
  Description of Artificial Sequence: Synthetic oligonucleotide
acagugggcucugggucag

SEQ ID NO: 2429647 - RNA, 19 nt, Artificial Sequence
  Description of Artificial Sequence: Synthetic oligonucleotide
gggccugaggagcacaaga

SEQ ID NO: 2429648 - RNA, 19 nt, Artificial Sequence
  Description of Artificial Sequence: Synthetic oligonucleotide
aggugauuccauacccagu

SEQ ID NO: 2429649 - RNA, 19 nt, Artificial Sequence
  Description of Artificial Sequence: Synthetic oligonucleotide
ccguggaacaaccgguaag

SEQ ID NO: 2429650 - RNA, 19 nt, Artificial Sequence
  Description of Artificial Sequence: Synthetic oligonucleotide
ccagucccguggaacaacc

SEQ ID NO: 2429651 - RNA, 19 nt, Artificial Sequence
  Description of Artificial Sequence: Synthetic oligonucleotide
cacugcuccgcagcagagc

SEQ ID NO: 2429652 - RNA, 19 nt, Artificial Sequence
  Description of Artificial Sequence: Synthetic oligonucleotide
gcauuaugcccaaugccca

SEQ ID NO: 2429653 - RNA, 19 nt, Artificial Sequence
  Description of Artificial Sequence: Synthetic oligonucleotide
ugucugcaccacagugauc

SEQ ID NO: 2429654 - RNA, 19 nt, Artificial Sequence
  Description of Artificial Sequence: Synthetic oligonucleotide
ggaaacaguuucacagaca

SEQ ID NO: 2429655 - RNA, 19 nt, Artificial Sequence
  Description of Artificial Sequence: Synthetic oligonucleotide
ggaccuacugcugucugca

SEQ ID NO: 2429656 - RNA, 19 nt, Artificial Sequence
  Description of Artificial Sequence: Synthetic oligonucleotide
auacccaguuaagcugaca

SEQ ID NO: 2429657 - RNA, 19 nt, Artificial Sequence
  Description of Artificial Sequence: Synthetic oligonucleotide
ccacacgacgucuuccgug

SEQ ID NO: 2429658 - RNA, 19 nt, Artificial Sequence
  Description of Artificial Sequence: Synthetic oligonucleotide
gaggcauccugcagcucac

SEQ ID NO: 2429659 - RNA, 19 nt, Artificial Sequence
  Description of Artificial Sequence: Synthetic oligonucleotide
gcacaagagguaucagcca

SEQ ID NO: 2429660 - RNA, 19 nt, Artificial Sequence
  Description of Artificial Sequence: Synthetic oligonucleotide
acgacgucuuccgugcuuu

SEQ ID NO: 2429661 - RNA, 19 nt, Artificial Sequence
  Description of Artificial Sequence: Synthetic oligonucleotide
acacgucucagcagucaca

SEQ ID NO: 2429662 - RNA, 19 nt, Artificial Sequence
  Description of Artificial Sequence: Synthetic oligonucleotide
gagguaucagccaggggau

SEQ ID NO: 2429663 - RNA, 19 nt, Artificial Sequence
  Description of Artificial Sequence: Synthetic oligonucleotide
guggcaauggcugacuguu

SEQ ID NO: 2429664 - RNA, 19 nt, Artificial Sequence
  Description of Artificial Sequence: Synthetic oligonucleotide
acacugcuccgcagcagag

SEQ ID NO: 2429665 - RNA, 19 nt, Artificial Sequence
  Description of Artificial Sequence: Synthetic oligonucleotide
gugauuccauacccaguua

SEQ ID NO: 2429666 - RNA, 19 nt, Artificial Sequence
  Description of Artificial Sequence: Synthetic oligonucleotide
cugcuccgcagcagagcag

SEQ ID NO: 2429667 - RNA, 19 nt, Artificial Sequence
  Description of Artificial Sequence: Synthetic oligonucleotide
ggaaaaggucuuggauccc

SEQ ID NO: 2429668 - RNA, 19 nt, Artificial Sequence
  Description of Artificial Sequence: Synthetic oligonucleotide
aucuggugcaggacaugcu

SEQ ID NO: 2429669 - RNA, 19 nt, Artificial Sequence
  Description of Artificial Sequence: Synthetic oligonucleotide
ggacaugcucucaggggug

SEQ ID NO: 2429670 - RNA, 19 nt, Artificial Sequence
  Description of Artificial Sequence: Synthetic oligonucleotide
ccacaguaaagaagaccuc

SEQ ID NO: 2429671 - RNA, 19 nt, Artificial Sequence
  Description of Artificial Sequence: Synthetic oligonucleotide
acacacccugcggucuguc

SEQ ID NO: 2429672 - RNA, 19 nt, Artificial Sequence
  Description of Artificial Sequence: Synthetic oligonucleotide
agcaacgcagguggacuau

SEQ ID NO: 2429673 - RNA, 19 nt, Artificial Sequence
  Description of Artificial Sequence: Synthetic oligonucleotide
acacgacgucuuccgugcu

SEQ ID NO: 2429674 - RNA, 19 nt, Artificial Sequence
  Description of Artificial Sequence: Synthetic oligonucleotide
cgcagguggacuaugcaca

SEQ ID NO: 2429675 - RNA, 19 nt, Artificial Sequence
  Description of Artificial Sequence: Synthetic oligonucleotide
aaccaucauagaggaccua

SEQ ID NO: 2429676 - RNA, 19 nt, Artificial Sequence
  Description of Artificial Sequence: Synthetic oligonucleotide
cagugguggcaauggcuga

SEQ ID NO: 2429677 - RNA, 19 nt, Artificial Sequence
  Description of Artificial Sequence: Synthetic oligonucleotide
ccacacgaagacacgucuc

SEQ ID NO: 2429678 - RNA, 19 nt, Artificial Sequence
  Description of Artificial Sequence: Synthetic oligonucleotide
cauuaugcccaaugcccau

SEQ ID NO: 2429679 - RNA, 19 nt, Artificial Sequence
  Description of Artificial Sequence: Synthetic oligonucleotide
gcagugacuccuggcuggg

SEQ ID NO: 2429680 - RNA, 19 nt, Artificial Sequence
  Description of Artificial Sequence: Synthetic oligonucleotide
ggugacuauccacauccau

SEQ ID NO: 2429681 - RNA, 19 nt, Artificial Sequence
  Description of Artificial Sequence: Synthetic oligonucleotide
ccaggggcggcaguugggg

SEQ ID NO: 2429682 - RNA, 19 nt, Artificial Sequence
  Description of Artificial Sequence: Synthetic oligonucleotide
aaaugccuucuggcacaau

SEQ ID NO: 2429683 - RNA, 19 nt, Artificial Sequence
  Description of Artificial Sequence: Synthetic oligonucleotide
gggucaaauccacguucca

SEQ ID NO: 2429684 - RNA, 19 nt, Artificial Sequence
  Description of Artificial Sequence: Synthetic oligonucleotide
gucccguggaacaaccggu

SEQ ID NO: 2429685 - RNA, 19 nt, Artificial Sequence
  Description of Artificial Sequence: Synthetic oligonucleotide
cguggaacaaccgguaaga

SEQ ID NO: 2429686 - RNA, 19 nt, Artificial Sequence
  Description of Artificial Sequence: Synthetic oligonucleotide
auccacguuccagcucaca

SEQ ID NO: 2429687 - RNA, 19 nt, Artificial Sequence
  Description of Artificial Sequence: Synthetic oligonucleotide
auccacauucaaggugguu

SEQ ID NO: 2429688 - RNA, 19 nt, Artificial Sequence
  Description of Artificial Sequence: Synthetic oligonucleotide
cacgucucagcagucacau

SEQ ID NO: 2429689 - RNA, 19 nt, Artificial Sequence
  Description of Artificial Sequence: Synthetic oligonucleotide
gucuuggaucccacaguaa

SEQ ID NO: 2429690 - RNA, 19 nt, Artificial Sequence
  Description of Artificial Sequence: Synthetic oligonucleotide
cagcaacgcagguggacua

SEQ ID NO: 2429691 - RNA, 19 nt, Artificial Sequence
  Description of Artificial Sequence: Synthetic oligonucleotide
gcaacgcagguggacuaug

SEQ ID NO: 2429692 - RNA, 19 nt, Artificial Sequence
  Description of Artificial Sequence: Synthetic oligonucleotide
cgucuuccgugcuuucagc

SEQ ID NO: 2429693 - RNA, 19 nt, Artificial Sequence
  Description of Artificial Sequence: Synthetic oligonucleotide
gguggacuaugcacagaca

SEQ ID NO: 2429694 - RNA, 19 nt, Artificial Sequence
  Description of Artificial Sequence: Synthetic oligonucleotide
caaaugccuucuggcacaa

SEQ ID NO: 2429695 - RNA, 19 nt, Artificial Sequence
  Description of Artificial Sequence: Synthetic oligonucleotide
ggugcaggacaugcucuca

SEQ ID NO: 2429696 - RNA, 19 nt, Artificial Sequence
  Description of Artificial Sequence: Synthetic oligonucleotide
ggcguccaggaaaaggucu

SEQ ID NO: 2429697 - RNA, 19 nt, Artificial Sequence
  Description of Artificial Sequence: Synthetic oligonucleotide
gagacaggagaggcauccu

SEQ ID NO: 2429698 - RNA, 19 nt, Artificial Sequence
  Description of Artificial Sequence: Synthetic oligonucleotide
gcccaaugcccaugaacaa

SEQ ID NO: 2429699 - RNA, 19 nt, Artificial Sequence
  Description of Artificial Sequence: Synthetic oligonucleotide
cacugagcaaggugacuau

SEQ ID NO: 2429700 - RNA, 19 nt, Artificial Sequence
  Description of Artificial Sequence: Synthetic oligonucleotide
gcuuucagccaagcacuga

SEQ ID NO: 2429701 - RNA, 19 nt, Artificial Sequence
  Description of Artificial Sequence: Synthetic oligonucleotide
acgcuggaaggaggagaca

SEQ ID NO: 2429702 - RNA, 19 nt, Artificial Sequence
  Description of Artificial Sequence: Synthetic oligonucleotide
gaacaaccgguaagaguuu

SEQ ID NO: 2429703 - RNA, 19 nt, Artificial Sequence
  Description of Artificial Sequence: Synthetic oligonucleotide
gucuccuaggugauuccau

SEQ ID NO: 2429704 - RNA, 19 nt, Artificial Sequence
  Description of Artificial Sequence: Synthetic oligonucleotide
ccaucauagaggaccuacu

SEQ ID NO: 2429705 - RNA, 19 nt, Artificial Sequence
  Description of Artificial Sequence: Synthetic oligonucleotide
cauccacauucaagguggu

SEQ ID NO: 2429706 - RNA, 19 nt, Artificial Sequence
  Description of Artificial Sequence: Synthetic oligonucleotide
acaucccugucagcaugua

SEQ ID NO: 2429707 - RNA, 19 nt, Artificial Sequence
  Description of Artificial Sequence: Synthetic oligonucleotide
agccuccagucccguggaa

SEQ ID NO: 2429708 - RNA, 19 nt, Artificial Sequence
  Description of Artificial Sequence: Synthetic oligonucleotide
cauccaucugggccagcgu

SEQ ID NO: 2429709 - RNA, 19 nt, Artificial Sequence
  Description of Artificial Sequence: Synthetic oligonucleotide
cacacacucuugggugcca

SEQ ID NO: 2429710 - RNA, 19 nt, Artificial Sequence
  Description of Artificial Sequence: Synthetic oligonucleotide
ggggccugaggagcacaag

SEQ ID NO: 2429711 - RNA, 19 nt, Artificial Sequence
  Description of Artificial Sequence: Synthetic oligonucleotide
caucugggccagcguggga

SEQ ID NO: 2429712 - RNA, 19 nt, Artificial Sequence
  Description of Artificial Sequence: Synthetic oligonucleotide
ccacguuccagcucacacu

SEQ ID NO: 2429713 - RNA, 19 nt, Artificial Sequence
  Description of Artificial Sequence: Synthetic oligonucleotide
cacacccugcggucugucu

SEQ ID NO: 2429714 - RNA, 19 nt, Artificial Sequence
  Description of Artificial Sequence: Synthetic oligonucleotide
gacacacccugcggucugu

SEQ ID NO: 2429715 - RNA, 19 nt, Artificial Sequence
  Description of Artificial Sequence: Synthetic oligonucleotide
cugacuguucggggucaaa

SEQ ID NO: 2429716 - RNA, 19 nt, Artificial Sequence
  Description of Artificial Sequence: Synthetic oligonucleotide
cuggcacaaugggcagcuc

SEQ ID NO: 2429717 - RNA, 19 nt, Artificial Sequence
  Description of Artificial Sequence: Synthetic oligonucleotide
ccgugcuuucagccaagca

SEQ ID NO: 2429718 - RNA, 19 nt, Artificial Sequence
  Description of Artificial Sequence: Synthetic oligonucleotide
cgguaagaguuuccagaga

SEQ ID NO: 2429719 - RNA, 19 nt, Artificial Sequence
  Description of Artificial Sequence: Synthetic oligonucleotide
cacgacgucuuccgugcuu

SEQ ID NO: 2429720 - RNA, 19 nt, Artificial Sequence
  Description of Artificial Sequence: Synthetic oligonucleotide
cccguggaacaaccgguaa

SEQ ID NO: 2429721 - RNA, 19 nt, Artificial Sequence
  Description of Artificial Sequence: Synthetic oligonucleotide
agcccagggcucgcucuua

SEQ ID NO: 2429722 - RNA, 19 nt, Artificial Sequence
  Description of Artificial Sequence: Synthetic oligonucleotide
ggcucgcucuuacugccuu

SEQ ID NO: 2429723 - RNA, 19 nt, Artificial Sequence
  Description of Artificial Sequence: Synthetic oligonucleotide
ggucugucuccuaggugau

SEQ ID NO: 2429724 - RNA, 19 nt, Artificial Sequence
  Description of Artificial Sequence: Synthetic oligonucleotide
gcugacuguucggggucaa

SEQ ID NO: 2429725 - RNA, 19 nt, Artificial Sequence
  Description of Artificial Sequence: Synthetic oligonucleotide
gggccagcgugggaucaaa

SEQ ID NO: 2429726 - RNA, 19 nt, Artificial Sequence
  Description of Artificial Sequence: Synthetic oligonucleotide
cgacgucuuccgugcuuuc

SEQ ID NO: 2429727 - RNA, 19 nt, Artificial Sequence
  Description of Artificial Sequence: Synthetic oligonucleotide
gcucaccacacgacgucuu

SEQ ID NO: 2429728 - RNA, 19 nt, Artificial Sequence
  Description of Artificial Sequence: Synthetic oligonucleotide
gcgugggaucaaaugccuu

SEQ ID NO: 2429729 - RNA, 19 nt, Artificial Sequence
  Description of Artificial Sequence: Synthetic oligonucleotide
ggccagcgugggaucaaau

SEQ ID NO: 2429730 - RNA, 19 nt, Artificial Sequence
  Description of Artificial Sequence: Synthetic oligonucleotide
cccugcggucugucuccua

SEQ ID NO: 2429731 - RNA, 19 nt, Artificial Sequence
  Description of Artificial Sequence: Synthetic oligonucleotide
aacaccaucaguuagagcu

SEQ ID NO: 2429732 - RNA, 19 nt, Artificial Sequence
  Description of Artificial Sequence: Synthetic oligonucleotide
acuuauacaauauauuuac

SEQ ID NO: 2429733 - RNA, 19 nt, Artificial Sequence
  Description of Artificial Sequence: Synthetic oligonucleotide
uauaagauggcauacaggc

SEQ ID NO: 2429734 - RNA, 19 nt, Artificial Sequence
  Description of Artificial Sequence: Synthetic oligonucleotide
uuaauguucacauauaaga

SEQ ID NO: 2429735 - RNA, 19 nt, Artificial Sequence
  Description of Artificial Sequence: Synthetic oligonucleotide
aguaucgacauauuuauac

SEQ ID NO: 2429736 - RNA, 19 nt, Artificial Sequence
  Description of Artificial Sequence: Synthetic oligonucleotide
aaaaccuuuugcuaauuac

SEQ ID NO: 2429737 - RNA, 19 nt, Artificial Sequence
  Description of Artificial Sequence: Synthetic oligonucleotide
gaaugcuugggacagaucg

SEQ ID NO: 2429738 - RNA, 19 nt, Artificial Sequence
  Description of Artificial Sequence: Synthetic oligonucleotide
uuuacagacauacaaauau

SEQ ID NO: 2429739 - RNA, 19 nt, Artificial Sequence
  Description of Artificial Sequence: Synthetic oligonucleotide
aaauaacauacacaguauc

SEQ ID NO: 2429740 - RNA, 19 nt, Artificial Sequence
  Description of Artificial Sequence: Synthetic oligonucleotide
aauaacauacacaguaucg

SEQ ID NO: 2429741 - RNA, 19 nt, Artificial Sequence
  Description of Artificial Sequence: Synthetic oligonucleotide
aauauguuugcguaguuga

SEQ ID NO: 2429742 - RNA, 19 nt, Artificial Sequence
  Description of Artificial Sequence: Synthetic oligonucleotide
aacauaauugcuccugagg

SEQ ID NO: 2429743 - RNA, 19 nt, Artificial Sequence
  Description of Artificial Sequence: Synthetic oligonucleotide
uucuaaaaugugcagaggc

SEQ ID NO: 2429744 - RNA, 19 nt, Artificial Sequence
  Description of Artificial Sequence: Synthetic oligonucleotide
uuaauuuaggcacggcugg

SEQ ID NO: 2429745 - RNA, 19 nt, Artificial Sequence
  Description of Artificial Sequence: Synthetic oligonucleotide
uucuauuaauuucagcucc

SEQ ID NO: 2429746 - RNA, 19 nt, Artificial Sequence
  Description of Artificial Sequence: Synthetic oligonucleotide
uuuaauguucacauauaag

SEQ ID NO: 2429747 - RNA, 19 nt, Artificial Sequence
  Description of Artificial Sequence: Synthetic oligonucleotide
gauucuauuaauuucagcu

SEQ ID NO: 2429748 - RNA, 19 nt, Artificial Sequence
  Description of Artificial Sequence: Synthetic oligonucleotide
caaguuguuuauuacaugc

SEQ ID NO: 2429749 - RNA, 19 nt, Artificial Sequence
  Description of Artificial Sequence: Synthetic oligonucleotide
agucaaaucugcuguaacc

SEQ ID NO: 2429750 - RNA, 19 nt, Artificial Sequence
  Description of Artificial Sequence: Synthetic oligonucleotide
aguugauucuauuaauuuc

SEQ ID NO: 2429751 - RNA, 19 nt, Artificial Sequence
  Description of Artificial Sequence: Synthetic oligonucleotide
uuauacucagaacuuauac

SEQ ID NO: 2429752 - RNA, 19 nt, Artificial Sequence
  Description of Artificial Sequence: Synthetic oligonucleotide
aggaaaagaauaugcaggg

SEQ ID NO: 2429753 - RNA, 19 nt, Artificial Sequence
  Description of Artificial Sequence: Synthetic oligonucleotide
aaaaggaagcugucagggc

SEQ ID NO: 2429754 - RNA, 19 nt, Artificial Sequence
  Description of Artificial Sequence: Synthetic oligonucleotide
aauauaggacaauguuuac

SEQ ID NO: 2429755 - RNA, 19 nt, Artificial Sequence
  Description of Artificial Sequence: Synthetic oligonucleotide
auucuauuaauuucagcuc

SEQ ID NO: 2429756 - RNA, 19 nt, Artificial Sequence
  Description of Artificial Sequence: Synthetic oligonucleotide
gaaaagaauaugcagggga

SEQ ID NO: 2429757 - RNA, 19 nt, Artificial Sequence
  Description of Artificial Sequence: Synthetic oligonucleotide
agcuuuaguagucucugcc

SEQ ID NO: 2429758 - RNA, 19 nt, Artificial Sequence
  Description of Artificial Sequence: Synthetic oligonucleotide
uuuauuacaugcuacugaa

SEQ ID NO: 2429759 - RNA, 19 nt, Artificial Sequence
  Description of Artificial Sequence: Synthetic oligonucleotide
uguuaauuuaggcacggcu

SEQ ID NO: 2429760 - RNA, 19 nt, Artificial Sequence
  Description of Artificial Sequence: Synthetic oligonucleotide
ugaggugacauuaacucug

SEQ ID NO: 2429761 - RNA, 19 nt, Artificial Sequence
  Description of Artificial Sequence: Synthetic oligonucleotide
cuugaggugacauuaacuc

SEQ ID NO: 2429762 - RNA, 19 nt, Artificial Sequence
  Description of Artificial Sequence: Synthetic oligonucleotide
acaugauuggccaaguggc

SEQ ID NO: 2429763 - RNA, 19 nt, Artificial Sequence
  Description of Artificial Sequence: Synthetic oligonucleotide
aaauauaggacaauguuua

SEQ ID NO: 2429764 - RNA, 19 nt, Artificial Sequence
  Description of Artificial Sequence: Synthetic oligonucleotide
aagaucacagggcagagau

SEQ ID NO: 2429765 - RNA, 19 nt, Artificial Sequence
  Description of Artificial Sequence: Synthetic oligonucleotide
aagucaaaucugcuguaac

SEQ ID NO: 2429766 - RNA, 19 nt, Artificial Sequence
  Description of Artificial Sequence: Synthetic oligonucleotide
ugugcagaggcaaacauaa

SEQ ID NO: 2429767 - RNA, 19 nt, Artificial Sequence
  Description of Artificial Sequence: Synthetic oligonucleotide
aaaaugugcagaggcaaac

SEQ ID NO: 2429768 - RNA, 19 nt, Artificial Sequence
  Description of Artificial Sequence: Synthetic oligonucleotide
aacauuugcaaguuguuua

SEQ ID NO: 2429769 - RNA, 19 nt, Artificial Sequence
  Description of Artificial Sequence: Synthetic oligonucleotide
auaauugcuccugagguac

SEQ ID NO: 2429770 - RNA, 19 nt, Artificial Sequence
  Description of Artificial Sequence: Synthetic oligonucleotide
acauaauugcuccugaggu

SEQ ID NO: 2429771 - RNA, 19 nt, Artificial Sequence
  Description of Artificial Sequence: Synthetic oligonucleotide
ucugucguaggaaagcuug

SEQ ID NO: 2429772 - RNA, 19 nt, Artificial Sequence
  Description of Artificial Sequence: Synthetic oligonucleotide
uuaaccgguacucaauaug

SEQ ID NO: 2429773 - RNA, 19 nt, Artificial Sequence
  Description of Artificial Sequence: Synthetic oligonucleotide
auguuugcguaguugauuc

SEQ ID NO: 2429774 - RNA, 19 nt, Artificial Sequence
  Description of Artificial Sequence: Synthetic oligonucleotide
ucuaaaaugugcagaggca

SEQ ID NO: 2429775 - RNA, 19 nt, Artificial Sequence
  Description of Artificial Sequence: Synthetic oligonucleotide
uguaacauuucagaaguca

SEQ ID NO: 2429776 - RNA, 19 nt, Artificial Sequence
  Description of Artificial Sequence: Synthetic oligonucleotide
cagacauacaaauauagga

SEQ ID NO: 2429777 - RNA, 19 nt, Artificial Sequence
  Description of Artificial Sequence: Synthetic oligonucleotide
gacauacaaauauaggaca

SEQ ID NO: 2429778 - RNA, 19 nt, Artificial Sequence
  Description of Artificial Sequence: Synthetic oligonucleotide
aaacauaauugcuccugag

SEQ ID NO: 2429779 - RNA, 19 nt, Artificial Sequence
  Description of Artificial Sequence: Synthetic oligonucleotide
agauacuuuuaaccgguac

SEQ ID NO: 2429780 - RNA, 19 nt, Artificial Sequence
  Description of Artificial Sequence: Synthetic oligonucleotide
ucguaggaaagcuugaggu

SEQ ID NO: 2429781 - RNA, 19 nt, Artificial Sequence
  Description of Artificial Sequence: Synthetic oligonucleotide
uaggacaauguuuacaaaa

SEQ ID NO: 2429782 - RNA, 19 nt, Artificial Sequence
  Description of Artificial Sequence: Synthetic oligonucleotide
ucuuguuacaggaucugca

SEQ ID NO: 2429783 - RNA, 19 nt, Artificial Sequence
  Description of Artificial Sequence: Synthetic oligonucleotide
uuaauuucagcuccucuuc

SEQ ID NO: 2429784 - RNA, 19 nt, Artificial Sequence
  Description of Artificial Sequence: Synthetic oligonucleotide
acaguaucgacauauuuau

SEQ ID NO: 2429785 - RNA, 19 nt, Artificial Sequence
  Description of Artificial Sequence: Synthetic oligonucleotide
ugcauuuugccauuguuaa

SEQ ID NO: 2429786 - RNA, 19 nt, Artificial Sequence
  Description of Artificial Sequence: Synthetic oligonucleotide
uaaccgguacucaauaugu

SEQ ID NO: 2429787 - RNA, 19 nt, Artificial Sequence
  Description of Artificial Sequence: Synthetic oligonucleotide
uguuacaggaucugcaggu

SEQ ID NO: 2429788 - RNA, 19 nt, Artificial Sequence
  Description of Artificial Sequence: Synthetic oligonucleotide
uucacauauaagauggcau

SEQ ID NO: 2429789 - RNA, 19 nt, Artificial Sequence
  Description of Artificial Sequence: Synthetic oligonucleotide
ugcuguaaccaccucacug

SEQ ID NO: 2429790 - RNA, 19 nt, Artificial Sequence
  Description of Artificial Sequence: Synthetic oligonucleotide
aagcuuuaguagucucugc

SEQ ID NO: 2429791 - RNA, 19 nt, Artificial Sequence
  Description of Artificial Sequence: Synthetic oligonucleotide
auuaauuucagcuccucuu

SEQ ID NO: 2429792 - RNA, 19 nt, Artificial Sequence
  Description of Artificial Sequence: Synthetic oligonucleotide
ugaggcacaagcuuuagua

SEQ ID NO: 2429793 - RNA, 19 nt, Artificial Sequence
  Description of Artificial Sequence: Synthetic oligonucleotide
aagaauaugcaggggaaug

SEQ ID NO: 2429794 - RNA, 19 nt, Artificial Sequence
  Description of Artificial Sequence: Synthetic oligonucleotide
auacuuuuaaccgguacuc

SEQ ID NO: 2429795 - RNA, 19 nt, Artificial Sequence
  Description of Artificial Sequence: Synthetic oligonucleotide
aaaccuuuugcuaauuaca

SEQ ID NO: 2429796 - RNA, 19 nt, Artificial Sequence
  Description of Artificial Sequence: Synthetic oligonucleotide
ucugucuuguuacaggauc

SEQ ID NO: 2429797 - RNA, 19 nt, Artificial Sequence
  Description of Artificial Sequence: Synthetic oligonucleotide
ucgaggccgaacaugauug

SEQ ID NO: 2429798 - RNA, 19 nt, Artificial Sequence
  Description of Artificial Sequence: Synthetic oligonucleotide
ugauggacugucucugucg

SEQ ID NO: 2429799 - RNA, 19 nt, Artificial Sequence
  Description of Artificial Sequence: Synthetic oligonucleotide
uauuaauuucagcuccucu

SEQ ID NO: 2429800 - RNA, 19 nt, Artificial Sequence
  Description of Artificial Sequence: Synthetic oligonucleotide
uugauucuauuaauuucag

SEQ ID NO: 2429801 - RNA, 19 nt, Artificial Sequence
  Description of Artificial Sequence: Synthetic oligonucleotide
uuugcaaguuguuuauuac

SEQ ID NO: 2429802 - RNA, 19 nt, Artificial Sequence
  Description of Artificial Sequence: Synthetic oligonucleotide
cauuguuaauuuaggcacg

SEQ ID NO: 2429803 - RNA, 19 nt, Artificial Sequence
  Description of Artificial Sequence: Synthetic oligonucleotide
guuaauuuaggcacggcug

SEQ ID NO: 2429804 - RNA, 19 nt, Artificial Sequence
  Description of Artificial Sequence: Synthetic oligonucleotide
accgcaaccuggcucaacc

SEQ ID NO: 2429805 - RNA, 19 nt, Artificial Sequence
  Description of Artificial Sequence: Synthetic oligonucleotide
aaguacaacaccaucaguu

SEQ ID NO: 2429806 - RNA, 19 nt, Artificial Sequence
  Description of Artificial Sequence: Synthetic oligonucleotide
guugauucuauuaauuuca

SEQ ID NO: 2429807 - RNA, 19 nt, Artificial Sequence
  Description of Artificial Sequence: Synthetic oligonucleotide
aaagcuugaggugacauua

SEQ ID NO: 2429808 - RNA, 19 nt, Artificial Sequence
  Description of Artificial Sequence: Synthetic oligonucleotide
aggacaauguuuacaaaac

SEQ ID NO: 2429809 - RNA, 19 nt, Artificial Sequence
  Description of Artificial Sequence: Synthetic oligonucleotide
uaucgacauauuuauacuc

SEQ ID NO: 2429810 - RNA, 19 nt, Artificial Sequence
  Description of Artificial Sequence: Synthetic oligonucleotide
auuucgccugcauuuugcc

SEQ ID NO: 2429811 - RNA, 19 nt, Artificial Sequence
  Description of Artificial Sequence: Synthetic oligonucleotide
ucgacauauuuauacucag

SEQ ID NO: 2429812 - RNA, 19 nt, Artificial Sequence
  Description of Artificial Sequence: Synthetic oligonucleotide
uacaacaccaucaguuaga

SEQ ID NO: 2429813 - RNA, 19 nt, Artificial Sequence
  Description of Artificial Sequence: Synthetic oligonucleotide
guuuauuacaugcuacuga

SEQ ID NO: 2429814 - RNA, 19 nt, Artificial Sequence
  Description of Artificial Sequence: Synthetic oligonucleotide
caaaucugcuguaaccacc

SEQ ID NO: 2429815 - RNA, 19 nt, Artificial Sequence
  Description of Artificial Sequence: Synthetic oligonucleotide
ucacauauaagauggcaua

SEQ ID NO: 2429816 - RNA, 19 nt, Artificial Sequence
  Description of Artificial Sequence: Synthetic oligonucleotide
uugcaaguuguuuauuaca

SEQ ID NO: 2429817 - RNA, 19 nt, Artificial Sequence
  Description of Artificial Sequence: Synthetic oligonucleotide
gaacuuauacaauauauuu

SEQ ID NO: 2429818 - RNA, 19 nt, Artificial Sequence
  Description of Artificial Sequence: Synthetic oligonucleotide
ucuauuaauuucagcuccu

SEQ ID NO: 2429819 - RNA, 19 nt, Artificial Sequence
  Description of Artificial Sequence: Synthetic oligonucleotide
auaacauacacaguaucga

SEQ ID NO: 2429820 - RNA, 19 nt, Artificial Sequence
  Description of Artificial Sequence: Synthetic oligonucleotide
ccauuguuaauuuaggcac

SEQ ID NO: 2429821 - RNA, 19 nt, Artificial Sequence
  Description of Artificial Sequence: Synthetic oligonucleotide
uguuuauuacaugcuacug

SEQ ID NO: 2429822 - RNA, 19 nt, Artificial Sequence
  Description of Artificial Sequence: Synthetic oligonucleotide
uacucaauauguuugcgua

SEQ ID NO: 2429823 - RNA, 19 nt, Artificial Sequence
  Description of Artificial Sequence: Synthetic oligonucleotide
uuauuacaugcuacugaag

SEQ ID NO: 2429824 - RNA, 19 nt, Artificial Sequence
  Description of Artificial Sequence: Synthetic oligonucleotide
auuguuaauuuaggcacgg

SEQ ID NO: 2429825 - RNA, 19 nt, Artificial Sequence
  Description of Artificial Sequence: Synthetic oligonucleotide
uuacaggaucugcaggucc

SEQ ID NO: 2429826 - RNA, 19 nt, Artificial Sequence
  Description of Artificial Sequence: Synthetic oligonucleotide
ugauucuauuaauuucagc

SEQ ID NO: 2429827 - RNA, 19 nt, Artificial Sequence
  Description of Artificial Sequence: Synthetic oligonucleotide
uuuuaaccgguacucaaua

SEQ ID NO: 2429828 - RNA, 19 nt, Artificial Sequence
  Description of Artificial Sequence: Synthetic oligonucleotide
ucucugucuuguuacagga

SEQ ID NO: 2429829 - RNA, 19 nt, Artificial Sequence
  Description of Artificial Sequence: Synthetic oligonucleotide
ugcuccaagaucacagggc

SEQ ID NO: 2429830 - RNA, 19 nt, Artificial Sequence
  Description of Artificial Sequence: Synthetic oligonucleotide
caucaguuagagcugcucc

SEQ ID NO: 2429831 - RNA, 19 nt, Artificial Sequence
  Description of Artificial Sequence: Synthetic oligonucleotide
aaaagaauaugcaggggaa

SEQ ID NO: 2429832 - RNA, 19 nt, Artificial Sequence
  Description of Artificial Sequence: Synthetic oligonucleotide
gauacuuuuaaccgguacu

SEQ ID NO: 2429833 - RNA, 19 nt, Artificial Sequence
  Description of Artificial Sequence: Synthetic oligonucleotide
gaggcacaagcuuuaguag

SEQ ID NO: 2429834 - RNA, 19 nt, Artificial Sequence
  Description of Artificial Sequence: Synthetic oligonucleotide
aguauuggcuuuuauuuua

SEQ ID NO: 2429835 - RNA, 19 nt, Artificial Sequence
  Description of Artificial Sequence: Synthetic oligonucleotide
ugcccuaacagcagcucgg

SEQ ID NO: 2429836 - RNA, 19 nt, Artificial Sequence
  Description of Artificial Sequence: Synthetic oligonucleotide
uaguugauucuauuaauuu

SEQ ID NO: 2429837 - RNA, 19 nt, Artificial Sequence
  Description of Artificial Sequence: Synthetic oligonucleotide
uuccagagggccuggacag

SEQ ID NO: 2429838 - RNA, 19 nt, Artificial Sequence
  Description of Artificial Sequence: Synthetic oligonucleotide
uuuauacucagaacuuaua

SEQ ID NO: 2429839 - RNA, 19 nt, Artificial Sequence
  Description of Artificial Sequence: Synthetic oligonucleotide
uugggacagaucgaggccg

SEQ ID NO: 2429840 - RNA, 19 nt, Artificial Sequence
  Description of Artificial Sequence: Synthetic oligonucleotide
acucaauauguuugcguag

SEQ ID NO: 2429841 - RNA, 19 nt, Artificial Sequence
  Description of Artificial Sequence: Synthetic oligonucleotide
aauugcuccugagguacac

SEQ ID NO: 2429842 - RNA, 19 nt, Artificial Sequence
  Description of Artificial Sequence: Synthetic oligonucleotide
aauuuaggcacggcuggag

SEQ ID NO: 2429843 - RNA, 19 nt, Artificial Sequence
  Description of Artificial Sequence: Synthetic oligonucleotide
aguuguuuauuacaugcua

SEQ ID NO: 2429844 - RNA, 19 nt, Artificial Sequence
  Description of Artificial Sequence: Synthetic oligonucleotide
cuaauuacauguaacauuu

SEQ ID NO: 2429845 - RNA, 19 nt, Artificial Sequence
  Description of Artificial Sequence: Synthetic oligonucleotide
gaugggacaugaaugcuug

SEQ ID NO: 2429846 - RNA, 19 nt, Artificial Sequence
  Description of Artificial Sequence: Synthetic oligonucleotide
agcuugaggugacauuaac

SEQ ID NO: 2429847 - RNA, 19 nt, Artificial Sequence
  Description of Artificial Sequence: Synthetic oligonucleotide
aaaucugcuguaaccaccu

SEQ ID NO: 2429848 - RNA, 19 nt, Artificial Sequence
  Description of Artificial Sequence: Synthetic oligonucleotide
gaaugauggacugucucug

SEQ ID NO: 2429849 - RNA, 19 nt, Artificial Sequence
  Description of Artificial Sequence: Synthetic oligonucleotide
acaugaaugcuugggacag

SEQ ID NO: 2429850 - RNA, 19 nt, Artificial Sequence
  Description of Artificial Sequence: Synthetic oligonucleotide
gacagaucgaggccgaaca

SEQ ID NO: 2429851 - RNA, 19 nt, Artificial Sequence
  Description of Artificial Sequence: Synthetic oligonucleotide
guacaacaccaucaguuag

SEQ ID NO: 2429852 - RNA, 19 nt, Artificial Sequence
  Description of Artificial Sequence: Synthetic oligonucleotide
ggggcgaaguuccagaggg

SEQ ID NO: 2429853 - RNA, 19 nt, Artificial Sequence
  Description of Artificial Sequence: Synthetic oligonucleotide
aguuagagcugcuccaaga

SEQ ID NO: 2429854 - RNA, 19 nt, Artificial Sequence
  Description of Artificial Sequence: Synthetic oligonucleotide
cauuucgccugcauuuugc

SEQ ID NO: 2429855 - RNA, 19 nt, Artificial Sequence
  Description of Artificial Sequence: Synthetic oligonucleotide
ugcaggggaaugauggacu

SEQ ID NO: 2429856 - RNA, 19 nt, Artificial Sequence
  Description of Artificial Sequence: Synthetic oligonucleotide
aaccccuucucuucuaaaa

SEQ ID NO: 2429857 - RNA, 19 nt, Artificial Sequence
  Description of Artificial Sequence: Synthetic oligonucleotide
acuuuuaaccgguacucaa

SEQ ID NO: 2429858 - RNA, 19 nt, Artificial Sequence
  Description of Artificial Sequence: Synthetic oligonucleotide
uccaagaucacagggcaga

SEQ ID NO: 2429859 - RNA, 19 nt, Artificial Sequence
  Description of Artificial Sequence: Synthetic oligonucleotide
uauuuauacucagaacuua

SEQ ID NO: 2429860 - RNA, 19 nt, Artificial Sequence
  Description of Artificial Sequence: Synthetic oligonucleotide
aguacaacaccaucaguua

SEQ ID NO: 2429861 - RNA, 19 nt, Artificial Sequence
  Description of Artificial Sequence: Synthetic oligonucleotide
aucaguuagagcugcucca

SEQ ID NO: 2429862 - RNA, 19 nt, Artificial Sequence
  Description of Artificial Sequence: Synthetic oligonucleotide
ggaaaaggaagcugucagg

SEQ ID NO: 2429863 - RNA, 19 nt, Artificial Sequence
  Description of Artificial Sequence: Synthetic oligonucleotide
aaaugugcagaggcaaaca

SEQ ID NO: 2429864 - RNA, 19 nt, Artificial Sequence
  Description of Artificial Sequence: Synthetic oligonucleotide
ugcguaguugauucuauua

SEQ ID NO: 2429865 - RNA, 19 nt, Artificial Sequence
  Description of Artificial Sequence: Synthetic oligonucleotide
aaguuguuuauuacaugcu

SEQ ID NO: 2429866 - RNA, 19 nt, Artificial Sequence
  Description of Artificial Sequence: Synthetic oligonucleotide
aaagaauaugcaggggaau

SEQ ID NO: 2429867 - RNA, 19 nt, Artificial Sequence
  Description of Artificial Sequence: Synthetic oligonucleotide
aggcacaagcuuuaguagu

SEQ ID NO: 2429868 - RNA, 19 nt, Artificial Sequence
  Description of Artificial Sequence: Synthetic oligonucleotide
aggccgaacaugauuggcc

SEQ ID NO: 2429869 - RNA, 19 nt, Artificial Sequence
  Description of Artificial Sequence: Synthetic oligonucleotide
aguagucucugcccuaaca

SEQ ID NO: 2429870 - RNA, 19 nt, Artificial Sequence
  Description of Artificial Sequence: Synthetic oligonucleotide
agcagcucggaaaaggaag

SEQ ID NO: 2429871 - RNA, 19 nt, Artificial Sequence
  Description of Artificial Sequence: Synthetic oligonucleotide
cuugggacagaucgaggcc

SEQ ID NO: 2429872 - RNA, 19 nt, Artificial Sequence
  Description of Artificial Sequence: Synthetic oligonucleotide
ggacaauguuuacaaaacc

SEQ ID NO: 2429873 - RNA, 19 nt, Artificial Sequence
  Description of Artificial Sequence: Synthetic oligonucleotide
agaacuuauacaauauauu

SEQ ID NO: 2429874 - RNA, 19 nt, Artificial Sequence
  Description of Artificial Sequence: Synthetic oligonucleotide
uuuaaccgguacucaauau

SEQ ID NO: 2429875 - RNA, 19 nt, Artificial Sequence
  Description of Artificial Sequence: Synthetic oligonucleotide
cacaguaucgacauauuua

SEQ ID NO: 2429876 - RNA, 19 nt, Artificial Sequence
  Description of Artificial Sequence: Synthetic oligonucleotide
cacauauaagauggcauac

SEQ ID NO: 2429877 - RNA, 19 nt, Artificial Sequence
  Description of Artificial Sequence: Synthetic oligonucleotide
agggccuggacagucaccg

SEQ ID NO: 2429878 - RNA, 19 nt, Artificial Sequence
  Description of Artificial Sequence: Synthetic oligonucleotide
aucgacauauuuauacuca

SEQ ID NO: 2429879 - RNA, 19 nt, Artificial Sequence
  Description of Artificial Sequence: Synthetic oligonucleotide
caagcuuuaguagucucug

SEQ ID NO: 2429880 - RNA, 19 nt, Artificial Sequence
  Description of Artificial Sequence: Synthetic oligonucleotide
ugucguaggaaagcuugag

SEQ ID NO: 2429881 - RNA, 19 nt, Artificial Sequence
  Description of Artificial Sequence: Synthetic oligonucleotide
uucuccacauuucgccugc

SEQ ID NO: 2429882 - RNA, 19 nt, Artificial Sequence
  Description of Artificial Sequence: Synthetic oligonucleotide
caauauguuugcguaguug

SEQ ID NO: 2429883 - RNA, 19 nt, Artificial Sequence
  Description of Artificial Sequence: Synthetic oligonucleotide
uuuaggcacggcuggagau

SEQ ID NO: 2429884 - RNA, 19 nt, Artificial Sequence
  Description of Artificial Sequence: Synthetic oligonucleotide
augcaggggaaugauggac

SEQ ID NO: 2429885 - RNA, 19 nt, Artificial Sequence
  Description of Artificial Sequence: Synthetic oligonucleotide
aaucugcuguaaccaccuc

SEQ ID NO: 2429886 - RNA, 19 nt, Artificial Sequence
  Description of Artificial Sequence: Synthetic oligonucleotide
agaauaugcaggggaauga

SEQ ID NO: 2429887 - RNA, 19 nt, Artificial Sequence
  Description of Artificial Sequence: Synthetic oligonucleotide
cuucuaaaaugugcagagg

SEQ ID NO: 2429888 - RNA, 19 nt, Artificial Sequence
  Description of Artificial Sequence: Synthetic oligonucleotide
gcagaggcaaacauaauug

SEQ ID NO: 2429889 - RNA, 19 nt, Artificial Sequence
  Description of Artificial Sequence: Synthetic oligonucleotide
uccaguugcaggugcagaa

SEQ ID NO: 2429890 - RNA, 19 nt, Artificial Sequence
  Description of Artificial Sequence: Synthetic oligonucleotide
auuuauacucagaacuuau

SEQ ID NO: 2429891 - RNA, 19 nt, Artificial Sequence
  Description of Artificial Sequence: Synthetic oligonucleotide
acauauaagauggcauaca

SEQ ID NO: 2429892 - RNA, 19 nt, Artificial Sequence
  Description of Artificial Sequence: Synthetic oligonucleotide
gaacaugauuggccaagug

SEQ ID NO: 2429893 - RNA, 19 nt, Artificial Sequence
  Description of Artificial Sequence: Synthetic oligonucleotide
agcaggaaaagaauaugca

SEQ ID NO: 2429894 - RNA, 19 nt, Artificial Sequence
  Description of Artificial Sequence: Synthetic oligonucleotide
ugcuugggacagaucgagg

SEQ ID NO: 2429895 - RNA, 19 nt, Artificial Sequence
  Description of Artificial Sequence: Synthetic oligonucleotide
uggggcgaaguuccagagg

SEQ ID NO: 2429896 - RNA, 19 nt, Artificial Sequence
  Description of Artificial Sequence: Synthetic oligonucleotide
ucucucugucuuguuacag

SEQ ID NO: 2429897 - RNA, 19 nt, Artificial Sequence
  Description of Artificial Sequence: Synthetic oligonucleotide
uccacauuucgccugcauu

SEQ ID NO: 2429898 - RNA, 19 nt, Artificial Sequence
  Description of Artificial Sequence: Synthetic oligonucleotide
cagaacuuauacaauauau

SEQ ID NO: 2429899 - RNA, 19 nt, Artificial Sequence
  Description of Artificial Sequence: Synthetic oligonucleotide
guucacauauaagauggca

SEQ ID NO: 2429900 - RNA, 19 nt, Artificial Sequence
  Description of Artificial Sequence: Synthetic oligonucleotide
auggcauacaggcaacuua

SEQ ID NO: 2429901 - RNA, 19 nt, Artificial Sequence
  Description of Artificial Sequence: Synthetic oligonucleotide
auugcuccugagguacacc

SEQ ID NO: 2429902 - RNA, 19 nt, Artificial Sequence
  Description of Artificial Sequence: Synthetic oligonucleotide
ucggaaaaggaagcuguca

SEQ ID NO: 2429903 - RNA, 19 nt, Artificial Sequence
  Description of Artificial Sequence: Synthetic oligonucleotide
acauacaaauauaggacaa

SEQ ID NO: 2429904 - RNA, 19 nt, Artificial Sequence
  Description of Artificial Sequence: Synthetic oligonucleotide
uacuuuuaaccgguacuca

SEQ ID NO: 2429905 - RNA, 19 nt, Artificial Sequence
  Description of Artificial Sequence: Synthetic oligonucleotide
aaugcuugggacagaucga

SEQ ID NO: 2429906 - RNA, 19 nt, Artificial Sequence
  Description of Artificial Sequence: Synthetic oligonucleotide
uuucgccugcauuuugcca

SEQ ID NO: 2429907 - RNA, 19 nt, Artificial Sequence
  Description of Artificial Sequence: Synthetic oligonucleotide
aguugcaggugcagaagac

SEQ ID NO: 2429908 - RNA, 19 nt, Artificial Sequence
  Description of Artificial Sequence: Synthetic oligonucleotide
uaggaaagcuugaggugac

SEQ ID NO: 2429909 - RNA, 19 nt, Artificial Sequence
  Description of Artificial Sequence: Synthetic oligonucleotide
agaucgaggccgaacauga

SEQ ID NO: 2429910 - RNA, 19 nt, Artificial Sequence
  Description of Artificial Sequence: Synthetic oligonucleotide
accgguacucaauauguuu

SEQ ID NO: 2429911 - RNA, 19 nt, Artificial Sequence
  Description of Artificial Sequence: Synthetic oligonucleotide
ggcucauuucucugggugg

SEQ ID NO: 2429912 - RNA, 19 nt, Artificial Sequence
  Description of Artificial Sequence: Synthetic oligonucleotide
cugcccuaacagcagcucg

SEQ ID NO: 2429913 - RNA, 19 nt, Artificial Sequence
  Description of Artificial Sequence: Synthetic oligonucleotide
uuuaguagucucugcccua

SEQ ID NO: 2429914 - RNA, 19 nt, Artificial Sequence
  Description of Artificial Sequence: Synthetic oligonucleotide
guuccagagggccuggaca

SEQ ID NO: 2429915 - RNA, 19 nt, Artificial Sequence
  Description of Artificial Sequence: Synthetic oligonucleotide
ggacaugaaugcuugggac

SEQ ID NO: 2429916 - RNA, 19 nt, Artificial Sequence
  Description of Artificial Sequence: Synthetic oligonucleotide
gauuggccaaguggcaaag

SEQ ID NO: 2429917 - RNA, 19 nt, Artificial Sequence
  Description of Artificial Sequence: Synthetic oligonucleotide
uccugagguacaccaauuu

SEQ ID NO: 2429918 - RNA, 19 nt, Artificial Sequence
  Description of Artificial Sequence: Synthetic oligonucleotide
ucaauauguuugcguaguu

SEQ ID NO: 2429919 - RNA, 19 nt, Artificial Sequence
  Description of Artificial Sequence: Synthetic oligonucleotide
ggaaaagaauaugcagggg

SEQ ID NO: 2429920 - RNA, 19 nt, Artificial Sequence
  Description of Artificial Sequence: Synthetic oligonucleotide
gucaccgcaaccuggcuca

SEQ ID NO: 2429921 - RNA, 19 nt, Artificial Sequence
  Description of Artificial Sequence: Synthetic oligonucleotide
uuaggcacggcuggagaug

SEQ ID NO: 2429922 - RNA, 19 nt, Artificial Sequence
  Description of Artificial Sequence: Synthetic oligonucleotide
uuaguagucucugcccuaa

SEQ ID NO: 2429923 - RNA, 19 nt, Artificial Sequence
  Description of Artificial Sequence: Synthetic oligonucleotide
guaucgacauauuuauacu

SEQ ID NO: 2429924 - RNA, 19 nt, Artificial Sequence
  Description of Artificial Sequence: Synthetic oligonucleotide
uucucucugucuuguuaca

SEQ ID NO: 2429925 - RNA, 19 nt, Artificial Sequence
  Description of Artificial Sequence: Synthetic oligonucleotide
acauuucgccugcauuuug

SEQ ID NO: 2429926 - RNA, 19 nt, Artificial Sequence
  Description of Artificial Sequence: Synthetic oligonucleotide
gguacucaauauguuugcg

SEQ ID NO: 2429927 - RNA, 19 nt, Artificial Sequence
  Description of Artificial Sequence: Synthetic oligonucleotide
ucaaccccuucucuucuaa

SEQ ID NO: 2429928 - RNA, 19 nt, Artificial Sequence
  Description of Artificial Sequence: Synthetic oligonucleotide
gucucugucguaggaaagc

SEQ ID NO: 2429929 - RNA, 19 nt, Artificial Sequence
  Description of Artificial Sequence: Synthetic oligonucleotide
uacaugcuacugaaguauu

SEQ ID NO: 2429930 - RNA, 19 nt, Artificial Sequence
  Description of Artificial Sequence: Synthetic oligonucleotide
uaauugcuccugagguaca

SEQ ID NO: 2429931 - RNA, 19 nt, Artificial Sequence
  Description of Artificial Sequence: Synthetic oligonucleotide
ccuuuugcuaauuacaugu

SEQ ID NO: 2429932 - RNA, 19 nt, Artificial Sequence
  Description of Artificial Sequence: Synthetic oligonucleotide
uguuugcguaguugauucu

SEQ ID NO: 2429933 - RNA, 19 nt, Artificial Sequence
  Description of Artificial Sequence: Synthetic oligonucleotide
uuguuaauuuaggcacggc

SEQ ID NO: 2429934 - RNA, 19 nt, Artificial Sequence
  Description of Artificial Sequence: Synthetic oligonucleotide
ucacagggcagagauacuu

SEQ ID NO: 2429935 - RNA, 19 nt, Artificial Sequence
  Description of Artificial Sequence: Synthetic oligonucleotide
auuuuaauguucacauaua

SEQ ID NO: 2429936 - RNA, 19 nt, Artificial Sequence
  Description of Artificial Sequence: Synthetic oligonucleotide
aucgaggccgaacaugauu

SEQ ID NO: 2429937 - RNA, 19 nt, Artificial Sequence
  Description of Artificial Sequence: Synthetic oligonucleotide
cacaagcuuuaguagucuc

SEQ ID NO: 2429938 - RNA, 19 nt, Artificial Sequence
  Description of Artificial Sequence: Synthetic oligonucleotide
ucacugcaauggcugcugc

SEQ ID NO: 2429939 - RNA, 19 nt, Artificial Sequence
  Description of Artificial Sequence: Synthetic oligonucleotide
cuauuaauuucagcuccuc

SEQ ID NO: 2429940 - RNA, 19 nt, Artificial Sequence
  Description of Artificial Sequence: Synthetic oligonucleotide
guacucaauauguuugcgu

SEQ ID NO: 2429941 - RNA, 19 nt, Artificial Sequence
  Description of Artificial Sequence: Synthetic oligonucleotide
gaagucaaaucugcuguaa

SEQ ID NO: 2429942 - RNA, 19 nt, Artificial Sequence
  Description of Artificial Sequence: Synthetic oligonucleotide
ccgguacucaauauguuug

SEQ ID NO: 2429943 - RNA, 19 nt, Artificial Sequence
  Description of Artificial Sequence: Synthetic oligonucleotide
uacacaguaucgacauauu

SEQ ID NO: 2429944 - RNA, 19 nt, Artificial Sequence
  Description of Artificial Sequence: Synthetic oligonucleotide
gucuuguuacaggaucugc

SEQ ID NO: 2429945 - RNA, 19 nt, Artificial Sequence
  Description of Artificial Sequence: Synthetic oligonucleotide
agcucggaaaaggaagcug

SEQ ID NO: 2429946 - RNA, 19 nt, Artificial Sequence
  Description of Artificial Sequence: Synthetic oligonucleotide
ggcaaaguacaacaccauc

SEQ ID NO: 2429947 - RNA, 19 nt, Artificial Sequence
  Description of Artificial Sequence: Synthetic oligonucleotide
acaugcuacugaaguauug

SEQ ID NO: 2429948 - RNA, 19 nt, Artificial Sequence
  Description of Artificial Sequence: Synthetic oligonucleotide
gauggacugucucugucgu

SEQ ID NO: 2429949 - RNA, 19 nt, Artificial Sequence
  Description of Artificial Sequence: Synthetic oligonucleotide
cuuuaguagucucugcccu

SEQ ID NO: 2429950 - RNA, 19 nt, Artificial Sequence
  Description of Artificial Sequence: Synthetic oligonucleotide
caugauuggccaaguggca

SEQ ID NO: 2429951 - RNA, 19 nt, Artificial Sequence
  Description of Artificial Sequence: Synthetic oligonucleotide
cucggaaaaggaagcuguc

SEQ ID NO: 2429952 - RNA, 19 nt, Artificial Sequence
  Description of Artificial Sequence: Synthetic oligonucleotide
cuccaagaucacagggcag

SEQ ID NO: 2429953 - RNA, 19 nt, Artificial Sequence
  Description of Artificial Sequence: Synthetic oligonucleotide
gggcucauuucucugggug

SEQ ID NO: 2429954 - RNA, 19 nt, Artificial Sequence
  Description of Artificial Sequence: Synthetic oligonucleotide
cagaucgaggccgaacaug

SEQ ID NO: 2429955 - RNA, 19 nt, Artificial Sequence
  Description of Artificial Sequence: Synthetic oligonucleotide
auguaacauuucagaaguc

SEQ ID NO: 2429956 - RNA, 19 nt, Artificial Sequence
  Description of Artificial Sequence: Synthetic oligonucleotide
caauguuuacaaaaccuuu

SEQ ID NO: 2429957 - RNA, 19 nt, Artificial Sequence
  Description of Artificial Sequence: Synthetic oligonucleotide
ugggacagaucgaggccga

SEQ ID NO: 2429958 - RNA, 19 nt, Artificial Sequence
  Description of Artificial Sequence: Synthetic oligonucleotide
cauuuugccauuguuaauu

SEQ ID NO: 2429959 - RNA, 19 nt, Artificial Sequence
  Description of Artificial Sequence: Synthetic oligonucleotide
caccaucaguuagagcugc

SEQ ID NO: 2429960 - RNA, 19 nt, Artificial Sequence
  Description of Artificial Sequence: Synthetic oligonucleotide
cuggguggcagcaggaaaa

SEQ ID NO: 2429961 - RNA, 19 nt, Artificial Sequence
  Description of Artificial Sequence: Synthetic oligonucleotide
caguuagagcugcuccaag

SEQ ID NO: 2429962 - RNA, 19 nt, Artificial Sequence
  Description of Artificial Sequence: Synthetic oligonucleotide
caacaccaucaguuagagc

SEQ ID NO: 2429963 - RNA, 19 nt, Artificial Sequence
  Description of Artificial Sequence: Synthetic oligonucleotide
guuagagcugcuccaagau

SEQ ID NO: 2429964 - RNA, 19 nt, Artificial Sequence
  Description of Artificial Sequence: Synthetic oligonucleotide
gggacaugaaugcuuggga

SEQ ID NO: 2429965 - RNA, 19 nt, Artificial Sequence
  Description of Artificial Sequence: Synthetic oligonucleotide
cggaaaaggaagcugucag

SEQ ID NO: 2429966 - RNA, 19 nt, Artificial Sequence
  Description of Artificial Sequence: Synthetic oligonucleotide
acagaucgaggccgaacau

SEQ ID NO: 2429967 - RNA, 19 nt, Artificial Sequence
  Description of Artificial Sequence: Synthetic oligonucleotide
gcguaguugauucuauuaa

SEQ ID NO: 2429968 - RNA, 19 nt, Artificial Sequence
  Description of Artificial Sequence: Synthetic oligonucleotide
ggaaugauggacugucucu

SEQ ID NO: 2429969 - RNA, 19 nt, Artificial Sequence
  Description of Artificial Sequence: Synthetic oligonucleotide
caaaaccuuuugcuaauua

SEQ ID NO: 2429970 - RNA, 19 nt, Artificial Sequence
  Description of Artificial Sequence: Synthetic oligonucleotide
uugcguaguugauucuauu

SEQ ID NO: 2429971 - RNA, 19 nt, Artificial Sequence
  Description of Artificial Sequence: Synthetic oligonucleotide
cuuuuaaccgguacucaau

SEQ ID NO: 2429972 - RNA, 19 nt, Artificial Sequence
  Description of Artificial Sequence: Synthetic oligonucleotide
auauguuugcguaguugau

SEQ ID NO: 2429973 - RNA, 19 nt, Artificial Sequence
  Description of Artificial Sequence: Synthetic oligonucleotide
uggcugcugcugcugcugc

SEQ ID NO: 2429974 - RNA, 19 nt, Artificial Sequence
  Description of Artificial Sequence: Synthetic oligonucleotide
guaguugauucuauuaauu

SEQ ID NO: 2429975 - RNA, 19 nt, Artificial Sequence
  Description of Artificial Sequence: Synthetic oligonucleotide
guuugcguaguugauucua

SEQ ID NO: 2429976 - RNA, 19 nt, Artificial Sequence
  Description of Artificial Sequence: Synthetic oligonucleotide
guuacaggaucugcagguc

SEQ ID NO: 2429977 - RNA, 19 nt, Artificial Sequence
  Description of Artificial Sequence: Synthetic oligonucleotide
cucaauauguuugcguagu

SEQ ID NO: 2429978 - RNA, 19 nt, Artificial Sequence
  Description of Artificial Sequence: Synthetic oligonucleotide
gcaggugcagaagacagca

SEQ ID NO: 2429979 - RNA, 19 nt, Artificial Sequence
  Description of Artificial Sequence: Synthetic oligonucleotide
cugucuuguuacaggaucu

SEQ ID NO: 2429980 - RNA, 19 nt, Artificial Sequence
  Description of Artificial Sequence: Synthetic oligonucleotide
gucucugcccuaacagcag

SEQ ID NO: 2429981 - RNA, 19 nt, Artificial Sequence
  Description of Artificial Sequence: Synthetic oligonucleotide
ugcuugguggggcgaaguu

SEQ ID NO: 2429982 - RNA, 19 nt, Artificial Sequence
  Description of Artificial Sequence: Synthetic oligonucleotide
uaguagucucugcccuaac

SEQ ID NO: 2429983 - RNA, 19 nt, Artificial Sequence
  Description of Artificial Sequence: Synthetic oligonucleotide
ugguggggcgaaguuccag

SEQ ID NO: 2429984 - RNA, 19 nt, Artificial Sequence
  Description of Artificial Sequence: Synthetic oligonucleotide
agauggcauacaggcaacu

SEQ ID NO: 2429985 - RNA, 19 nt, Artificial Sequence
  Description of Artificial Sequence: Synthetic oligonucleotide
cuggagaugggacaugaau

SEQ ID NO: 2429986 - RNA, 19 nt, Artificial Sequence
  Description of Artificial Sequence: Synthetic oligonucleotide
cacggcuggagaugggaca

SEQ ID NO: 2429987 - RNA, 19 nt, Artificial Sequence
  Description of Artificial Sequence: Synthetic oligonucleotide
gcucauuucucuggguggc

SEQ ID NO: 2429988 - RNA, 19 nt, Artificial Sequence
  Description of Artificial Sequence: Synthetic oligonucleotide
gcaagcauccaggaaguuc

SEQ ID NO: 2429989 - RNA, 19 nt, Artificial Sequence
  Description of Artificial Sequence: Synthetic oligonucleotide
ggcacaagcuuuaguaguc

SEQ ID NO: 2429990 - RNA, 19 nt, Artificial Sequence
  Description of Artificial Sequence: Synthetic oligonucleotide
cugucguaggaaagcuuga

SEQ ID NO: 2429991 - RNA, 19 nt, Artificial Sequence
  Description of Artificial Sequence: Synthetic oligonucleotide
ggcucaaccccuucucuuc

SEQ ID NO: 2429992 - RNA, 19 nt, Artificial Sequence
  Description of Artificial Sequence: Synthetic oligonucleotide
aaccgguacucaauauguu

SEQ ID NO: 2429993 - RNA, 19 nt, Artificial Sequence
  Description of Artificial Sequence: Synthetic oligonucleotide
acaaaaccuuuugcuaauu

SEQ ID NO: 2429994 - RNA, 19 nt, Artificial Sequence
  Description of Artificial Sequence: Synthetic oligonucleotide
uugguggggcgaaguucca

SEQ ID NO: 2429995 - RNA, 19 nt, Artificial Sequence
  Description of Artificial Sequence: Synthetic oligonucleotide
cugcugcugcugcugcugc

SEQ ID NO: 2429996 - RNA, 19 nt, Artificial Sequence
  Description of Artificial Sequence: Synthetic oligonucleotide
ccgaacaugauuggccaag

SEQ ID NO: 2429997 - RNA, 19 nt, Artificial Sequence
  Description of Artificial Sequence: Synthetic oligonucleotide
cgguacucaauauguuugc

SEQ ID NO: 2429998 - RNA, 19 nt, Artificial Sequence
  Description of Artificial Sequence: Synthetic oligonucleotide
acugaaguauuggcuuuua

SEQ ID NO: 2429999 - RNA, 19 nt, Artificial Sequence
  Description of Artificial Sequence: Synthetic oligonucleotide
ugcugcugcugcugcugcu

SEQ ID NO: 2430000 - RNA, 19 nt, Artificial Sequence
  Description of Artificial Sequence: Synthetic oligonucleotide
gcuggggcucauuucucug

SEQ ID NO: 2430001 - RNA, 19 nt, Artificial Sequence
  Description of Artificial Sequence: Synthetic oligonucleotide
ggugaggcacaagcuuuag

SEQ ID NO: 2430002 - RNA, 19 nt, Artificial Sequence
  Description of Artificial Sequence: Synthetic oligonucleotide
cugcugcugcugcugcuug

SEQ ID NO: 2430003 - RNA, 19 nt, Artificial Sequence
  Description of Artificial Sequence: Synthetic oligonucleotide
caguaucgacauauuuaua

SEQ ID NO: 2430004 - RNA, 19 nt, Artificial Sequence
  Description of Artificial Sequence: Synthetic oligonucleotide
gagauacuuuuaaccggua

SEQ ID NO: 2430005 - RNA, 19 nt, Artificial Sequence
  Description of Artificial Sequence: Synthetic oligonucleotide
ugcugcuugguggggcgaa

SEQ ID NO: 2430006 - RNA, 19 nt, Artificial Sequence
  Description of Artificial Sequence: Synthetic oligonucleotide
gauggcauacaggcaacuu

SEQ ID NO: 2430007 - RNA, 19 nt, Artificial Sequence
  Description of Artificial Sequence: Synthetic oligonucleotide
gcucggaaaaggaagcugu

SEQ ID NO: 2430008 - RNA, 19 nt, Artificial Sequence
  Description of Artificial Sequence: Synthetic oligonucleotide
ucuccacauuucgccugca

SEQ ID NO: 2430009 - RNA, 19 nt, Artificial Sequence
  Description of Artificial Sequence: Synthetic oligonucleotide
gcuugaggugacauuaacu

SEQ ID NO: 2430010 - RNA, 19 nt, Artificial Sequence
  Description of Artificial Sequence: Synthetic oligonucleotide
ggacagaucgaggccgaac

SEQ ID NO: 2430011 - RNA, 19 nt, Artificial Sequence
  Description of Artificial Sequence: Synthetic oligonucleotide
ccaagaucacagggcagag

SEQ ID NO: 2430012 - RNA, 19 nt, Artificial Sequence
  Description of Artificial Sequence: Synthetic oligonucleotide
gugaggcacaagcuuuagu

SEQ ID NO: 2430013 - RNA, 19 nt, Artificial Sequence
  Description of Artificial Sequence: Synthetic oligonucleotide
guggcagcaggaaaagaau

SEQ ID NO: 2430014 - RNA, 19 nt, Artificial Sequence
  Description of Artificial Sequence: Synthetic oligonucleotide
aucacagggcagagauacu

SEQ ID NO: 2430015 - RNA, 19 nt, Artificial Sequence
  Description of Artificial Sequence: Synthetic oligonucleotide
gcugcugcugcugcugcug

SEQ ID NO: 2430016 - RNA, 19 nt, Artificial Sequence
  Description of Artificial Sequence: Synthetic oligonucleotide
cgacauauuuauacucaga

SEQ ID NO: 2430017 - RNA, 19 nt, Artificial Sequence
  Description of Artificial Sequence: Synthetic oligonucleotide
ccaucaguuagagcugcuc

SEQ ID NO: 2430018 - RNA, 19 nt, Artificial Sequence
  Description of Artificial Sequence: Synthetic oligonucleotide
cucauuucucuggguggca

SEQ ID NO: 2430019 - RNA, 19 nt, Artificial Sequence
  Description of Artificial Sequence: Synthetic oligonucleotide
accaucaguuagagcugcu

SEQ ID NO: 2430020 - RNA, 19 nt, Artificial Sequence
  Description of Artificial Sequence: Synthetic oligonucleotide
ugcaagcauccaggaaguu

SEQ ID NO: 2430021 - RNA, 19 nt, Artificial Sequence
  Description of Artificial Sequence: Synthetic oligonucleotide
caugaaugcuugggacaga

SEQ ID NO: 2430022 - RNA, 19 nt, Artificial Sequence
  Description of Artificial Sequence: Synthetic oligonucleotide
cgaggccgaacaugauugg

SEQ ID NO: 2430023 - RNA, 19 nt, Artificial Sequence
  Description of Artificial Sequence: Synthetic oligonucleotide
agaucacagggcagagaua

SEQ ID NO: 2430024 - RNA, 19 nt, Artificial Sequence
  Description of Artificial Sequence: Synthetic oligonucleotide
ggaaagcuugaggugacau

SEQ ID NO: 2430025 - RNA, 19 nt, Artificial Sequence
  Description of Artificial Sequence: Synthetic oligonucleotide
cuggcucaaccccuucucu

SEQ ID NO: 2430026 - RNA, 19 nt, Artificial Sequence
  Description of Artificial Sequence: Synthetic oligonucleotide
ccgcaaccuggcucaaccc

SEQ ID NO: 2430027 - RNA, 19 nt, Artificial Sequence
  Description of Artificial Sequence: Synthetic oligonucleotide
ggcacggcuggagauggga

SEQ ID NO: 2430028 - RNA, 19 nt, Artificial Sequence
  Description of Artificial Sequence: Synthetic oligonucleotide
cacugcaauggcugcugcu

SEQ ID NO: 2430029 - RNA, 19 nt, Artificial Sequence
  Description of Artificial Sequence: Synthetic oligonucleotide
cucaaccccuucucuucua

SEQ ID NO: 2430030 - RNA, 19 nt, Artificial Sequence
  Description of Artificial Sequence: Synthetic oligonucleotide
cguaguugauucuauuaau

SEQ ID NO: 2430031 - RNA, 19 nt, Artificial Sequence
  Description of Artificial Sequence: Synthetic oligonucleotide
gcauuuugccauuguuaau

SEQ ID NO: 2430032 - RNA, 19 nt, Artificial Sequence
  Description of Artificial Sequence: Synthetic oligonucleotide
cuccugagguacaccaauu

SEQ ID NO: 2430033 - RNA, 19 nt, Artificial Sequence
  Description of Artificial Sequence: Synthetic oligonucleotide
cucugucguaggaaagcuu

SEQ ID NO: 2430034 - RNA, 19 nt, Artificial Sequence
  Description of Artificial Sequence: Synthetic oligonucleotide
gcacggcuggagaugggac

SEQ ID NO: 2430035 - RNA, 19 nt, Artificial Sequence
  Description of Artificial Sequence: Synthetic oligonucleotide
gggcgaaguuccagagggc

SEQ ID NO: 2430036 - RNA, 19 nt, Artificial Sequence
  Description of Artificial Sequence: Synthetic oligonucleotide
aggcacggcuggagauggg

SEQ ID NO: 2430037 - RNA, 19 nt, Artificial Sequence
  Description of Artificial Sequence: Synthetic oligonucleotide
caccgcaaccuggcucaac

SEQ ID NO: 2430038 - RNA, 19 nt, Artificial Sequence
  Description of Artificial Sequence: Synthetic oligonucleotide
ucaccgcaaccuggcucaa

SEQ ID NO: 2430039 - RNA, 19 nt, Artificial Sequence
  Description of Artificial Sequence: Synthetic oligonucleotide
ccugagguacaccaauuuu

SEQ ID NO: 2430040 - RNA, 19 nt, Artificial Sequence
  Description of Artificial Sequence: Synthetic oligonucleotide
gcacaagcuuuaguagucu

SEQ ID NO: 2430041 - RNA, 19 nt, Artificial Sequence
  Description of Artificial Sequence: Synthetic oligonucleotide
gaucgaggccgaacaugau

SEQ ID NO: 2430042 - RNA, 19 nt, Artificial Sequence
  Description of Artificial Sequence: Synthetic oligonucleotide
ggggugaggcacaagcuuu

SEQ ID NO: 2430043 - RNA, 19 nt, Artificial Sequence
  Description of Artificial Sequence: Synthetic oligonucleotide
gggugaggcacaagcuuua

SEQ ID NO: 2430044 - RNA, 19 nt, Artificial Sequence
  Description of Artificial Sequence: Synthetic oligonucleotide
ggaagcugucagggcgcug

SEQ ID NO: 2430045 - RNA, 19 nt, Artificial Sequence
  Description of Artificial Sequence: Synthetic oligonucleotide
ggguggcagcaggaaaaga

SEQ ID NO: 2430046 - RNA, 19 nt, Artificial Sequence
  Description of Artificial Sequence: Synthetic oligonucleotide
ccaccucacugcaauggcu

SEQ ID NO: 2430047 - RNA, 19 nt, Artificial Sequence
  Description of Artificial Sequence: Synthetic oligonucleotide
caaccuggcucaaccccuu

SEQ ID NO: 2430048 - RNA, 19 nt, Artificial Sequence
  Description of Artificial Sequence: Synthetic oligonucleotide
gcgaaguuccagagggccu

SEQ ID NO: 2430049 - RNA, 19 nt, Artificial Sequence
  Description of Artificial Sequence: Synthetic oligonucleotide
cugcuugguggggcgaagu

SEQ ID NO: 2430050 - RNA, 19 nt, Artificial Sequence
  Description of Artificial Sequence: Synthetic oligonucleotide
ggggcucauuucucugggu

SEQ ID NO: 2430051 - RNA, 19 nt, Artificial Sequence
  Description of Artificial Sequence: Synthetic oligonucleotide
gugcagaggcaaacauaau

SEQ ID NO: 2430052 - RNA, 19 nt, Artificial Sequence
  Description of Artificial Sequence: Synthetic oligonucleotide
ggcugcugcugcugcugcu

SEQ ID NO: 2430053 - RNA, 19 nt, Artificial Sequence
  Description of Artificial Sequence: Synthetic oligonucleotide
cagcaggggugaggcacaa

SEQ ID NO: 2430054 - RNA, 19 nt, Artificial Sequence
  Description of Artificial Sequence: Synthetic oligonucleotide
gggacagaucgaggccgaa

SEQ ID NO: 2430055 - RNA, 19 nt, Artificial Sequence
  Description of Artificial Sequence: Synthetic oligonucleotide
gcugcugcugcugcugcuu

SEQ ID NO: 2430056 - RNA, 19 nt, Artificial Sequence
  Description of Artificial Sequence: Synthetic oligonucleotide
cgaacaugauuggccaagu

SEQ ID NO: 2430057 - RNA, 19 nt, Artificial Sequence
  Description of Artificial Sequence: Synthetic oligonucleotide
cgcuggggcucauuucucu

SEQ ID NO: 2430058 - RNA, 19 nt, Artificial Sequence
  Description of Artificial Sequence: Synthetic oligonucleotide
cgccugcauuuugccauug

SEQ ID NO: 2430059 - RNA, 19 nt, Artificial Sequence
  Description of Artificial Sequence: Synthetic oligonucleotide
cagggcgcuggggcucauu

SEQ ID NO: 2430060 - RNA, 19 nt, Artificial Sequence
  Description of Artificial Sequence: Synthetic oligonucleotide
ugaucaaacuucuugaggg

SEQ ID NO: 2430061 - RNA, 19 nt, Artificial Sequence
  Description of Artificial Sequence: Synthetic oligonucleotide
aauaccagucgucucaugg

SEQ ID NO: 2430062 - RNA, 19 nt, Artificial Sequence
  Description of Artificial Sequence: Synthetic oligonucleotide
ucaguaaaagagaagagga

SEQ ID NO: 2430063 - RNA, 19 nt, Artificial Sequence
  Description of Artificial Sequence: Synthetic oligonucleotide
aaggccauugagcacaugg

SEQ ID NO: 2430064 - RNA, 19 nt, Artificial Sequence
  Description of Artificial Sequence: Synthetic oligonucleotide
agucccagaacucaaagcg

SEQ ID NO: 2430065 - RNA, 19 nt, Artificial Sequence
  Description of Artificial Sequence: Synthetic oligonucleotide
acuggucaaacuuggagcc

SEQ ID NO: 2430066 - RNA, 19 nt, Artificial Sequence
  Description of Artificial Sequence: Synthetic oligonucleotide
aaacuuggagccaaugacc

SEQ ID NO: 2430067 - RNA, 19 nt, Artificial Sequence
  Description of Artificial Sequence: Synthetic oligonucleotide
ucugcaaggccauugagca

SEQ ID NO: 2430068 - RNA, 19 nt, Artificial Sequence
  Description of Artificial Sequence: Synthetic oligonucleotide
ucaaagcggaacaugacca

SEQ ID NO: 2430069 - RNA, 19 nt, Artificial Sequence
  Description of Artificial Sequence: Synthetic oligonucleotide
uacuggucaaacuuggagc

SEQ ID NO: 2430070 - RNA, 19 nt, Artificial Sequence
  Description of Artificial Sequence: Synthetic oligonucleotide
ucucaugccagucugggac

SEQ ID NO: 2430071 - RNA, 19 nt, Artificial Sequence
  Description of Artificial Sequence: Synthetic oligonucleotide
ucaaacuucuugagggcgg

SEQ ID NO: 2430072 - RNA, 19 nt, Artificial Sequence
  Description of Artificial Sequence: Synthetic oligonucleotide
cagucugggacaaucaccg

SEQ ID NO: 2430073 - RNA, 19 nt, Artificial Sequence
  Description of Artificial Sequence: Synthetic oligonucleotide
uucccggacacgaagaucu

SEQ ID NO: 2430074 - RNA, 19 nt, Artificial Sequence
  Description of Artificial Sequence: Synthetic oligonucleotide
uuugacgaccccaggagcc

SEQ ID NO: 2430075 - RNA, 19 nt, Artificial Sequence
  Description of Artificial Sequence: Synthetic oligonucleotide
aaugaccauuuugacgacc

SEQ ID NO: 2430076 - RNA, 19 nt, Artificial Sequence
  Description of Artificial Sequence: Synthetic oligonucleotide
gaugccgucacccuucagc

SEQ ID NO: 2430077 - RNA, 19 nt, Artificial Sequence
  Description of Artificial Sequence: Synthetic oligonucleotide
ucacccuucagccaggggu

SEQ ID NO: 2430078 - RNA, 19 nt, Artificial Sequence
  Description of Artificial Sequence: Synthetic oligonucleotide
caaacuuggagccaaugac

SEQ ID NO: 2430079 - RNA, 19 nt, Artificial Sequence
  Description of Artificial Sequence: Synthetic oligonucleotide
uggcugaacacgcagugag

SEQ ID NO: 2430080 - RNA, 19 nt, Artificial Sequence
  Description of Artificial Sequence: Synthetic oligonucleotide
augccgucacccuucagcc

SEQ ID NO: 2430081 - RNA, 19 nt, Artificial Sequence
  Description of Artificial Sequence: Synthetic oligonucleotide
uggccaaaacaccacagug

SEQ ID NO: 2430082 - RNA, 19 nt, Artificial Sequence
  Description of Artificial Sequence: Synthetic oligonucleotide
aggucuucgaaggaggcgc

SEQ ID NO: 2430083 - RNA, 19 nt, Artificial Sequence
  Description of Artificial Sequence: Synthetic oligonucleotide
ucucauggugcacuacagg

SEQ ID NO: 2430084 - RNA, 19 nt, Artificial Sequence
  Description of Artificial Sequence: Synthetic oligonucleotide
augugaucaaacuucuuga

SEQ ID NO: 2430085 - RNA, 19 nt, Artificial Sequence
  Description of Artificial Sequence: Synthetic oligonucleotide
ugaacacgcagugagguug

SEQ ID NO: 2430086 - RNA, 19 nt, Artificial Sequence
  Description of Artificial Sequence: Synthetic oligonucleotide
ucucuuugcaagccggcag

SEQ ID NO: 2430087 - RNA, 19 nt, Artificial Sequence
  Description of Artificial Sequence: Synthetic oligonucleotide
aacccaaacucccgccggc

SEQ ID NO: 2430088 - RNA, 19 nt, Artificial Sequence
  Description of Artificial Sequence: Synthetic oligonucleotide
augaccauuuugacgaccc

SEQ ID NO: 2430089 - RNA, 19 nt, Artificial Sequence
  Description of Artificial Sequence: Synthetic oligonucleotide
uuuugacgaccccaggagc

SEQ ID NO: 2430090 - RNA, 19 nt, Artificial Sequence
  Description of Artificial Sequence: Synthetic oligonucleotide
aaucaccgaaccgugcacg

SEQ ID NO: 2430091 - RNA, 19 nt, Artificial Sequence
  Description of Artificial Sequence: Synthetic oligonucleotide
gaacaugaccacacggucg

SEQ ID NO: 2430092 - RNA, 19 nt, Artificial Sequence
  Description of Artificial Sequence: Synthetic oligonucleotide
aggcuaaguacuccuugcc

SEQ ID NO: 2430093 - RNA, 19 nt, Artificial Sequence
  Description of Artificial Sequence: Synthetic oligonucleotide
uucucuggggaacugggga

SEQ ID NO: 2430094 - RNA, 19 nt, Artificial Sequence
  Description of Artificial Sequence: Synthetic oligonucleotide
ugggacaaucaccgaaccg

SEQ ID NO: 2430095 - RNA, 19 nt, Artificial Sequence
  Description of Artificial Sequence: Synthetic oligonucleotide
gacacgaagaucuuguagu

SEQ ID NO: 2430096 - RNA, 19 nt, Artificial Sequence
  Description of Artificial Sequence: Synthetic oligonucleotide
aagaggaacaggaaggcau

SEQ ID NO: 2430097 - RNA, 19 nt, Artificial Sequence
  Description of Artificial Sequence: Synthetic oligonucleotide
ugcaaggccauugagcaca

SEQ ID NO: 2430098 - RNA, 19 nt, Artificial Sequence
  Description of Artificial Sequence: Synthetic oligonucleotide
agcaacccaaacucccgcc

SEQ ID NO: 2430099 - RNA, 19 nt, Artificial Sequence
  Description of Artificial Sequence: Synthetic oligonucleotide
ccaaugaccauuuugacga

SEQ ID NO: 2430100 - RNA, 19 nt, Artificial Sequence
  Description of Artificial Sequence: Synthetic oligonucleotide
guaaaagagaagaggaaca

SEQ ID NO: 2430101 - RNA, 19 nt, Artificial Sequence
  Description of Artificial Sequence: Synthetic oligonucleotide
uggucugaauaccagucgu

SEQ ID NO: 2430102 - RNA, 19 nt, Artificial Sequence
  Description of Artificial Sequence: Synthetic oligonucleotide
acaaucaccgaaccgugca

SEQ ID NO: 2430103 - RNA, 19 nt, Artificial Sequence
  Description of Artificial Sequence: Synthetic oligonucleotide
aagcggaacaugaccacac

SEQ ID NO: 2430104 - RNA, 19 nt, Artificial Sequence
  Description of Artificial Sequence: Synthetic oligonucleotide
aacuuggagccaaugacca

SEQ ID NO: 2430105 - RNA, 19 nt, Artificial Sequence
  Description of Artificial Sequence: Synthetic oligonucleotide
cauggugcacuacaggaac

SEQ ID NO: 2430106 - RNA, 19 nt, Artificial Sequence
  Description of Artificial Sequence: Synthetic oligonucleotide
ggaacuggggagcaggccg

SEQ ID NO: 2430107 - RNA, 19 nt, Artificial Sequence
  Description of Artificial Sequence: Synthetic oligonucleotide
acagucccagaacucaaag

SEQ ID NO: 2430108 - RNA, 19 nt, Artificial Sequence
  Description of Artificial Sequence: Synthetic oligonucleotide
uaccagucgucucauggug

SEQ ID NO: 2430109 - RNA, 19 nt, Artificial Sequence
  Description of Artificial Sequence: Synthetic oligonucleotide
gccaaugaccauuuugacg

SEQ ID NO: 2430110 - RNA, 19 nt, Artificial Sequence
  Description of Artificial Sequence: Synthetic oligonucleotide
agcaagggcaguucccagg

SEQ ID NO: 2430111 - RNA, 19 nt, Artificial Sequence
  Description of Artificial Sequence: Synthetic oligonucleotide
aaggucuucgaaggaggcg

SEQ ID NO: 2430112 - RNA, 19 nt, Artificial Sequence
  Description of Artificial Sequence: Synthetic oligonucleotide
cuuguaguuggcuguauca

SEQ ID NO: 2430113 - RNA, 19 nt, Artificial Sequence
  Description of Artificial Sequence: Synthetic oligonucleotide
caguguacgcccaucugcc

SEQ ID NO: 2430114 - RNA, 19 nt, Artificial Sequence
  Description of Artificial Sequence: Synthetic oligonucleotide
ccugguacacucuucaccc

SEQ ID NO: 2430115 - RNA, 19 nt, Artificial Sequence
  Description of Artificial Sequence: Synthetic oligonucleotide
ucauggugcacuacaggaa

SEQ ID NO: 2430116 - RNA, 19 nt, Artificial Sequence
  Description of Artificial Sequence: Synthetic oligonucleotide
guugggauggggcagaaua

SEQ ID NO: 2430117 - RNA, 19 nt, Artificial Sequence
  Description of Artificial Sequence: Synthetic oligonucleotide
uguaguuggcuguaucaau

SEQ ID NO: 2430118 - RNA, 19 nt, Artificial Sequence
  Description of Artificial Sequence: Synthetic oligonucleotide
gucgcuggcccuuagcuug

SEQ ID NO: 2430119 - RNA, 19 nt, Artificial Sequence
  Description of Artificial Sequence: Synthetic oligonucleotide
gggucaacuguccaggaag

SEQ ID NO: 2430120 - RNA, 19 nt, Artificial Sequence
  Description of Artificial Sequence: Synthetic oligonucleotide
cucuucacccgcagcaagg

SEQ ID NO: 2430121 - RNA, 19 nt, Artificial Sequence
  Description of Artificial Sequence: Synthetic oligonucleotide
ucuucacccgcagcaaggg

SEQ ID NO: 2430122 - RNA, 19 nt, Artificial Sequence
  Description of Artificial Sequence: Synthetic oligonucleotide
cugaauaccagucgucuca

SEQ ID NO: 2430123 - RNA, 19 nt, Artificial Sequence
  Description of Artificial Sequence: Synthetic oligonucleotide
ggaacaggaaggcaucugc

SEQ ID NO: 2430124 - RNA, 19 nt, Artificial Sequence
  Description of Artificial Sequence: Synthetic oligonucleotide
aucaccgaaccgugcacgg

SEQ ID NO: 2430125 - RNA, 19 nt, Artificial Sequence
  Description of Artificial Sequence: Synthetic oligonucleotide
uguacuggucaaacuugga

SEQ ID NO: 2430126 - RNA, 19 nt, Artificial Sequence
  Description of Artificial Sequence: Synthetic oligonucleotide
acucgggaugccgucaccc

SEQ ID NO: 2430127 - RNA, 19 nt, Artificial Sequence
  Description of Artificial Sequence: Synthetic oligonucleotide
agcacaugggcaaugucag

SEQ ID NO: 2430128 - RNA, 19 nt, Artificial Sequence
  Description of Artificial Sequence: Synthetic oligonucleotide
gagcacaugggcaauguca

SEQ ID NO: 2430129 - RNA, 19 nt, Artificial Sequence
  Description of Artificial Sequence: Synthetic oligonucleotide
cucuuugcaagccggcagc

SEQ ID NO: 2430130 - RNA, 19 nt, Artificial Sequence
  Description of Artificial Sequence: Synthetic oligonucleotide
caaaacaccacaguggucu

SEQ ID NO: 2430131 - RNA, 19 nt, Artificial Sequence
  Description of Artificial Sequence: Synthetic oligonucleotide
ggcgcggucaguaaaagag

SEQ ID NO: 2430132 - RNA, 19 nt, Artificial Sequence
  Description of Artificial Sequence: Synthetic oligonucleotide
acucuucccggacacgaag

SEQ ID NO: 2430133 - RNA, 19 nt, Artificial Sequence
  Description of Artificial Sequence: Synthetic oligonucleotide
cauggcugaacacgcagug

SEQ ID NO: 2430134 - RNA, 19 nt, Artificial Sequence
  Description of Artificial Sequence: Synthetic oligonucleotide
ggagccaaugaccauuuug

SEQ ID NO: 2430135 - RNA, 19 nt, Artificial Sequence
  Description of Artificial Sequence: Synthetic oligonucleotide
ucaacuguccaggaagguc

SEQ ID NO: 2430136 - RNA, 19 nt, Artificial Sequence
  Description of Artificial Sequence: Synthetic oligonucleotide
aagccggcagcaugugauc

SEQ ID NO: 2430137 - RNA, 19 nt, Artificial Sequence
  Description of Artificial Sequence: Synthetic oligonucleotide
ucugaauaccagucgucuc

SEQ ID NO: 2430138 - RNA, 19 nt, Artificial Sequence
  Description of Artificial Sequence: Synthetic oligonucleotide
aggaaggucuucgaaggag

SEQ ID NO: 2430139 - RNA, 19 nt, Artificial Sequence
  Description of Artificial Sequence: Synthetic oligonucleotide
gaugcaggcuaaguacucc

SEQ ID NO: 2430140 - RNA, 19 nt, Artificial Sequence
  Description of Artificial Sequence: Synthetic oligonucleotide
ucgccacagucccagaacu

SEQ ID NO: 2430141 - RNA, 19 nt, Artificial Sequence
  Description of Artificial Sequence: Synthetic oligonucleotide
auaccagucgucucauggu

SEQ ID NO: 2430142 - RNA, 19 nt, Artificial Sequence
  Description of Artificial Sequence: Synthetic oligonucleotide
cauuuugacgaccccagga

SEQ ID NO: 2430143 - RNA, 19 nt, Artificial Sequence
  Description of Artificial Sequence: Synthetic oligonucleotide
cagucccagaacucaaagc

SEQ ID NO: 2430144 - RNA, 19 nt, Artificial Sequence
  Description of Artificial Sequence: Synthetic oligonucleotide
cacaauuguucugcaaggc

SEQ ID NO: 2430145 - RNA, 19 nt, Artificial Sequence
  Description of Artificial Sequence: Synthetic oligonucleotide
aguaccggccguuccagca

SEQ ID NO: 2430146 - RNA, 19 nt, Artificial Sequence
  Description of Artificial Sequence: Synthetic oligonucleotide
cuaaguacuccuugcccuc

SEQ ID NO: 2430147 - RNA, 19 nt, Artificial Sequence
  Description of Artificial Sequence: Synthetic oligonucleotide
aaugccgucuugccccaca

SEQ ID NO: 2430148 - RNA, 19 nt, Artificial Sequence
  Description of Artificial Sequence: Synthetic oligonucleotide
ggugccacaauuguucugc

SEQ ID NO: 2430149 - RNA, 19 nt, Artificial Sequence
  Description of Artificial Sequence: Synthetic oligonucleotide
uuguucugcaaggccauug

SEQ ID NO: 2430150 - RNA, 19 nt, Artificial Sequence
  Description of Artificial Sequence: Synthetic oligonucleotide
agcggaacaugaccacacg

SEQ ID NO: 2430151 - RNA, 19 nt, Artificial Sequence
  Description of Artificial Sequence: Synthetic oligonucleotide
agaggaacaggaaggcauc

SEQ ID NO: 2430152 - RNA, 19 nt, Artificial Sequence
  Description of Artificial Sequence: Synthetic oligonucleotide
ugccggaaggcugugaggu

SEQ ID NO: 2430153 - RNA, 19 nt, Artificial Sequence
  Description of Artificial Sequence: Synthetic oligonucleotide
accgucucaugccagucug

SEQ ID NO: 2430154 - RNA, 19 nt, Artificial Sequence
  Description of Artificial Sequence: Synthetic oligonucleotide
acucuucacccgcagcaag

SEQ ID NO: 2430155 - RNA, 19 nt, Artificial Sequence
  Description of Artificial Sequence: Synthetic oligonucleotide
acucaaagcggaacaugac

SEQ ID NO: 2430156 - RNA, 19 nt, Artificial Sequence
  Description of Artificial Sequence: Synthetic oligonucleotide
cagaacucaaagcggaaca

SEQ ID NO: 2430157 - RNA, 19 nt, Artificial Sequence
  Description of Artificial Sequence: Synthetic oligonucleotide
caaagcggaacaugaccac

SEQ ID NO: 2430158 - RNA, 19 nt, Artificial Sequence
  Description of Artificial Sequence: Synthetic oligonucleotide
cucgggucaacuguccagg

SEQ ID NO: 2430159 - RNA, 19 nt, Artificial Sequence
  Description of Artificial Sequence: Synthetic oligonucleotide
uugcgcaggaugcaggcua

SEQ ID NO: 2430160 - RNA, 19 nt, Artificial Sequence
  Description of Artificial Sequence: Synthetic oligonucleotide
gaacacgcagugagguugg

SEQ ID NO: 2430161 - RNA, 19 nt, Artificial Sequence
  Description of Artificial Sequence: Synthetic oligonucleotide
cuggcccuuagcuuggcug

SEQ ID NO: 2430162 - RNA, 19 nt, Artificial Sequence
  Description of Artificial Sequence: Synthetic oligonucleotide
ugaccauuuugacgacccc

SEQ ID NO: 2430163 - RNA, 19 nt, Artificial Sequence
  Description of Artificial Sequence: Synthetic oligonucleotide
accagucgucucauggugc

SEQ ID NO: 2430164 - RNA, 19 nt, Artificial Sequence
  Description of Artificial Sequence: Synthetic oligonucleotide
cucuugcgcaggaugcagg

SEQ ID NO: 2430165 - RNA, 19 nt, Artificial Sequence
  Description of Artificial Sequence: Synthetic oligonucleotide
caacccaaacucccgccgg

SEQ ID NO: 2430166 - RNA, 19 nt, Artificial Sequence
  Description of Artificial Sequence: Synthetic oligonucleotide
augcaggcuaaguacuccu

SEQ ID NO: 2430167 - RNA, 19 nt, Artificial Sequence
  Description of Artificial Sequence: Synthetic oligonucleotide
ggcuaaguacuccuugccc

SEQ ID NO: 2430168 - RNA, 19 nt, Artificial Sequence
  Description of Artificial Sequence: Synthetic oligonucleotide
caugggcaaugucagccag

SEQ ID NO: 2430169 - RNA, 19 nt, Artificial Sequence
  Description of Artificial Sequence: Synthetic oligonucleotide
cugggacaaucaccgaacc

SEQ ID NO: 2430170 - RNA, 19 nt, Artificial Sequence
  Description of Artificial Sequence: Synthetic oligonucleotide
uacucgggucaacugucca

SEQ ID NO: 2430171 - RNA, 19 nt, Artificial Sequence
  Description of Artificial Sequence: Synthetic oligonucleotide
uucucuuugcaagccggca

SEQ ID NO: 2430172 - RNA, 19 nt, Artificial Sequence
  Description of Artificial Sequence: Synthetic oligonucleotide
gaacuggggagcaggccgg

SEQ ID NO: 2430173 - RNA, 19 nt, Artificial Sequence
  Description of Artificial Sequence: Synthetic oligonucleotide
aggcugugaggucucgcuc

SEQ ID NO: 2430174 - RNA, 19 nt, Artificial Sequence
  Description of Artificial Sequence: Synthetic oligonucleotide
ucuucccggacacgaagau

SEQ ID NO: 2430175 - RNA, 19 nt, Artificial Sequence
  Description of Artificial Sequence: Synthetic oligonucleotide
agggguauucucuggggaa

SEQ ID NO: 2430176 - RNA, 19 nt, Artificial Sequence
  Description of Artificial Sequence: Synthetic oligonucleotide
uucgaaggaggcgcgguca

SEQ ID NO: 2430177 - RNA, 19 nt, Artificial Sequence
  Description of Artificial Sequence: Synthetic oligonucleotide
cuacucgggucaacugucc

SEQ ID NO: 2430178 - RNA, 19 nt, Artificial Sequence
  Description of Artificial Sequence: Synthetic oligonucleotide
acacgaagaucuuguaguu

SEQ ID NO: 2430179 - RNA, 19 nt, Artificial Sequence
  Description of Artificial Sequence: Synthetic oligonucleotide
ggccauugagcacaugggc

SEQ ID NO: 2430180 - RNA, 19 nt, Artificial Sequence
  Description of Artificial Sequence: Synthetic oligonucleotide
agcaugugaucaaacuucu

SEQ ID NO: 2430181 - RNA, 19 nt, Artificial Sequence
  Description of Artificial Sequence: Synthetic oligonucleotide
uugagggcggccucgccac

SEQ ID NO: 2430182 - RNA, 19 nt, Artificial Sequence
  Description of Artificial Sequence: Synthetic oligonucleotide
ggucaguaaaagagaagag

SEQ ID NO: 2430183 - RNA, 19 nt, Artificial Sequence
  Description of Artificial Sequence: Synthetic oligonucleotide
gcggaacaugaccacacgg

SEQ ID NO: 2430184 - RNA, 19 nt, Artificial Sequence
  Description of Artificial Sequence: Synthetic oligonucleotide
gcauucucuuugcaagccg

SEQ ID NO: 2430185 - RNA, 19 nt, Artificial Sequence
  Description of Artificial Sequence: Synthetic oligonucleotide
caaacuucuugagggcggc

SEQ ID NO: 2430186 - RNA, 19 nt, Artificial Sequence
  Description of Artificial Sequence: Synthetic oligonucleotide
ccaguguacgcccaucugc

SEQ ID NO: 2430187 - RNA, 19 nt, Artificial Sequence
  Description of Artificial Sequence: Synthetic oligonucleotide
augccgucuugccccacac

SEQ ID NO: 2430188 - RNA, 19 nt, Artificial Sequence
  Description of Artificial Sequence: Synthetic oligonucleotide
gacaaucaccgaaccgugc

SEQ ID NO: 2430189 - RNA, 19 nt, Artificial Sequence
  Description of Artificial Sequence: Synthetic oligonucleotide
aaccgugcacgggaggucu

SEQ ID NO: 2430190 - RNA, 19 nt, Artificial Sequence
  Description of Artificial Sequence: Synthetic oligonucleotide
aacuggggagcaggccggc

SEQ ID NO: 2430191 - RNA, 19 nt, Artificial Sequence
  Description of Artificial Sequence: Synthetic oligonucleotide
gugagguugggauggggca

SEQ ID NO: 2430192 - RNA, 19 nt, Artificial Sequence
  Description of Artificial Sequence: Synthetic oligonucleotide
gccgucuugccccacaccc

SEQ ID NO: 2430193 - RNA, 19 nt, Artificial Sequence
  Description of Artificial Sequence: Synthetic oligonucleotide
gcaacccaaacucccgccg

SEQ ID NO: 2430194 - RNA, 19 nt, Artificial Sequence
  Description of Artificial Sequence: Synthetic oligonucleotide
cacgucugugugcauguac

SEQ ID NO: 2430195 - RNA, 19 nt, Artificial Sequence
  Description of Artificial Sequence: Synthetic oligonucleotide
ccagucugggacaaucacc

SEQ ID NO: 2430196 - RNA, 19 nt, Artificial Sequence
  Description of Artificial Sequence: Synthetic oligonucleotide
gucucauggugcacuacag

SEQ ID NO: 2430197 - RNA, 19 nt, Artificial Sequence
  Description of Artificial Sequence: Synthetic oligonucleotide
acggucgcuggcccuuagc

SEQ ID NO: 2430198 - RNA, 19 nt, Artificial Sequence
  Description of Artificial Sequence: Synthetic oligonucleotide
caaucaccgaaccgugcac

SEQ ID NO: 2430199 - RNA, 19 nt, Artificial Sequence
  Description of Artificial Sequence: Synthetic oligonucleotide
gaauaccagucgucucaug

SEQ ID NO: 2430200 - RNA, 19 nt, Artificial Sequence
  Description of Artificial Sequence: Synthetic oligonucleotide
ugaauaccagucgucucau

SEQ ID NO: 2430201 - RNA, 19 nt, Artificial Sequence
  Description of Artificial Sequence: Synthetic oligonucleotide
ucuucgaaggaggcgcggu

SEQ ID NO: 2430202 - RNA, 19 nt, Artificial Sequence
  Description of Artificial Sequence: Synthetic oligonucleotide
cagcaacccaaacucccgc

SEQ ID NO: 2430203 - RNA, 19 nt, Artificial Sequence
  Description of Artificial Sequence: Synthetic oligonucleotide
acgucugugugcauguacu

SEQ ID NO: 2430204 - RNA, 19 nt, Artificial Sequence
  Description of Artificial Sequence: Synthetic oligonucleotide
ucaccgaaccgugcacggg

SEQ ID NO: 2430205 - RNA, 19 nt, Artificial Sequence
  Description of Artificial Sequence: Synthetic oligonucleotide
agucgucucauggugcacu

SEQ ID NO: 2430206 - RNA, 19 nt, Artificial Sequence
  Description of Artificial Sequence: Synthetic oligonucleotide
guacacucuucacccgcag

SEQ ID NO: 2430207 - RNA, 19 nt, Artificial Sequence
  Description of Artificial Sequence: Synthetic oligonucleotide
aaacaccacaguggucuga

SEQ ID NO: 2430208 - RNA, 19 nt, Artificial Sequence
  Description of Artificial Sequence: Synthetic oligonucleotide
uuagcuuggcuggccaaaa

SEQ ID NO: 2430209 - RNA, 19 nt, Artificial Sequence
  Description of Artificial Sequence: Synthetic oligonucleotide
uggcuacucgggucaacug

SEQ ID NO: 2430210 - RNA, 19 nt, Artificial Sequence
  Description of Artificial Sequence: Synthetic oligonucleotide
gcaagggcaguucccaggc

SEQ ID NO: 2430211 - RNA, 19 nt, Artificial Sequence
  Description of Artificial Sequence: Synthetic oligonucleotide
caguucccaggccugccgg

SEQ ID NO: 2430212 - RNA, 19 nt, Artificial Sequence
  Description of Artificial Sequence: Synthetic oligonucleotide
uucccaggccugccggaag

SEQ ID NO: 2430213 - RNA, 19 nt, Artificial Sequence
  Description of Artificial Sequence: Synthetic oligonucleotide
acgcagugagguugggaug

SEQ ID NO: 2430214 - RNA, 19 nt, Artificial Sequence
  Description of Artificial Sequence: Synthetic oligonucleotide
uucagccagggguauucuc

SEQ ID NO: 2430215 - RNA, 19 nt, Artificial Sequence
  Description of Artificial Sequence: Synthetic oligonucleotide
uggcacgucugugugcaug

SEQ ID NO: 2430216 - RNA, 19 nt, Artificial Sequence
  Description of Artificial Sequence: Synthetic oligonucleotide
gcaggcuaaguacuccuug

SEQ ID NO: 2430217 - RNA, 19 nt, Artificial Sequence
  Description of Artificial Sequence: Synthetic oligonucleotide
gccagggguauucucuggg

SEQ ID NO: 2430218 - RNA, 19 nt, Artificial Sequence
  Description of Artificial Sequence: Synthetic oligonucleotide
ugccacaauuguucugcaa

SEQ ID NO: 2430219 - RNA, 19 nt, Artificial Sequence
  Description of Artificial Sequence: Synthetic oligonucleotide
aguguacgcccaucugcca

SEQ ID NO: 2430220 - RNA, 19 nt, Artificial Sequence
  Description of Artificial Sequence: Synthetic oligonucleotide
aaggaggcgcggucaguaa

SEQ ID NO: 2430221 - RNA, 19 nt, Artificial Sequence
  Description of Artificial Sequence: Synthetic oligonucleotide
caaugaccauuuugacgac

SEQ ID NO: 2430222 - RNA, 19 nt, Artificial Sequence
  Description of Artificial Sequence: Synthetic oligonucleotide
ucuugagggcggccucgcc

SEQ ID NO: 2430223 - RNA, 19 nt, Artificial Sequence
  Description of Artificial Sequence: Synthetic oligonucleotide
cccugguacacucuucacc

SEQ ID NO: 2430224 - RNA, 19 nt, Artificial Sequence
  Description of Artificial Sequence: Synthetic oligonucleotide
cuucacccgcagcaagggc

SEQ ID NO: 2430225 - RNA, 19 nt, Artificial Sequence
  Description of Artificial Sequence: Synthetic oligonucleotide
cugccggaaggcugugagg

SEQ ID NO: 2430226 - RNA, 19 nt, Artificial Sequence
  Description of Artificial Sequence: Synthetic oligonucleotide
gcuaaguacuccuugcccu

SEQ ID NO: 2430227 - RNA, 19 nt, Artificial Sequence
  Description of Artificial Sequence: Synthetic oligonucleotide
cuugagggcggccucgcca

SEQ ID NO: 2430228 - RNA, 19 nt, Artificial Sequence
  Description of Artificial Sequence: Synthetic oligonucleotide
cuacucgggaugccgucac

SEQ ID NO: 2430229 - RNA, 19 nt, Artificial Sequence
  Description of Artificial Sequence: Synthetic oligonucleotide
cuucgaaggaggcgcgguc

SEQ ID NO: 2430230 - RNA, 19 nt, Artificial Sequence
  Description of Artificial Sequence: Synthetic oligonucleotide
gcgacucuugcgcaggaug

SEQ ID NO: 2430231 - RNA, 19 nt, Artificial Sequence
  Description of Artificial Sequence: Synthetic oligonucleotide
gaggucuggccauggcuga

SEQ ID NO: 2430232 - RNA, 19 nt, Artificial Sequence
  Description of Artificial Sequence: Synthetic oligonucleotide
ucgggucaacuguccagga

SEQ ID NO: 2430233 - RNA, 19 nt, Artificial Sequence
  Description of Artificial Sequence: Synthetic oligonucleotide
uacucgggaugccgucacc

SEQ ID NO: 2430234 - RNA, 19 nt, Artificial Sequence
  Description of Artificial Sequence: Synthetic oligonucleotide
ucgcccguccaguguacgc

SEQ ID NO: 2430235 - RNA, 19 nt, Artificial Sequence
  Description of Artificial Sequence: Synthetic oligonucleotide
uugacgaccccaggagccu

SEQ ID NO: 2430236 - RNA, 19 nt, Artificial Sequence
  Description of Artificial Sequence: Synthetic oligonucleotide
cucgaccgucucaugccag

SEQ ID NO: 2430237 - RNA, 19 nt, Artificial Sequence
  Description of Artificial Sequence: Synthetic oligonucleotide
ugccgucuugccccacacc

SEQ ID NO: 2430238 - RNA, 19 nt, Artificial Sequence
  Description of Artificial Sequence: Synthetic oligonucleotide
gaggcgcggucaguaaaag

SEQ ID NO: 2430239 - RNA, 19 nt, Artificial Sequence
  Description of Artificial Sequence: Synthetic oligonucleotide
ugccccacacccacucuuc

SEQ ID NO: 2430240 - RNA, 19 nt, Artificial Sequence
  Description of Artificial Sequence: Synthetic oligonucleotide
uaccggccguuccagcaac

SEQ ID NO: 2430241 - RNA, 19 nt, Artificial Sequence
  Description of Artificial Sequence: Synthetic oligonucleotide
gcuuggcuggccaaaacac

SEQ ID NO: 2430242 - RNA, 19 nt, Artificial Sequence
  Description of Artificial Sequence: Synthetic oligonucleotide
gugugcauguacuggucaa

SEQ ID NO: 2430243 - RNA, 19 nt, Artificial Sequence
  Description of Artificial Sequence: Synthetic oligonucleotide
acccaaacucccgccggcg

SEQ ID NO: 2430244 - RNA, 19 nt, Artificial Sequence
  Description of Artificial Sequence: Synthetic oligonucleotide
aggaggcgcggucaguaaa

SEQ ID NO: 2430245 - RNA, 19 nt, Artificial Sequence
  Description of Artificial Sequence: Synthetic oligonucleotide
gucugaauaccagucgucu

SEQ ID NO: 2430246 - RNA, 19 nt, Artificial Sequence
  Description of Artificial Sequence: Synthetic oligonucleotide
uggugcacuacaggaacuu

SEQ ID NO: 2430247 - RNA, 19 nt, Artificial Sequence
  Description of Artificial Sequence: Synthetic oligonucleotide
ucgggaugccgucacccuu

SEQ ID NO: 2430248 - RNA, 19 nt, Artificial Sequence
  Description of Artificial Sequence: Synthetic oligonucleotide
cacgcagugagguugggau

SEQ ID NO: 2430249 - RNA, 19 nt, Artificial Sequence
  Description of Artificial Sequence: Synthetic oligonucleotide
uugcccucgaccgucucau

SEQ ID NO: 2430250 - RNA, 19 nt, Artificial Sequence
  Description of Artificial Sequence: Synthetic oligonucleotide
uucuugagggcggccucgc

SEQ ID NO: 2430251 - RNA, 19 nt, Artificial Sequence
  Description of Artificial Sequence: Synthetic oligonucleotide
ccagggguauucucugggg

SEQ ID NO: 2430252 - RNA, 19 nt, Artificial Sequence
  Description of Artificial Sequence: Synthetic oligonucleotide
aggcgcggucaguaaaaga

SEQ ID NO: 2430253 - RNA, 19 nt, Artificial Sequence
  Description of Artificial Sequence: Synthetic oligonucleotide
cucaugccagucugggaca

SEQ ID NO: 2430254 - RNA, 19 nt, Artificial Sequence
  Description of Artificial Sequence: Synthetic oligonucleotide
gcaguucccaggccugccg

SEQ ID NO: 2430255 - RNA, 19 nt, Artificial Sequence
  Description of Artificial Sequence: Synthetic oligonucleotide
cugcaaggccauugagcac

SEQ ID NO: 2430256 - RNA, 19 nt, Artificial Sequence
  Description of Artificial Sequence: Synthetic oligonucleotide
ggacaaucaccgaaccgug

SEQ ID NO: 2430257 - RNA, 19 nt, Artificial Sequence
  Description of Artificial Sequence: Synthetic oligonucleotide
acuggcuacucgggucaac

SEQ ID NO: 2430258 - RNA, 19 nt, Artificial Sequence
  Description of Artificial Sequence: Synthetic oligonucleotide
gaucuuguaguuggcugua

SEQ ID NO: 2430259 - RNA, 19 nt, Artificial Sequence
  Description of Artificial Sequence: Synthetic oligonucleotide
auggcugaacacgcaguga

SEQ ID NO: 2430260 - RNA, 19 nt, Artificial Sequence
  Description of Artificial Sequence: Synthetic oligonucleotide
gucacccuucagccagggg

SEQ ID NO: 2430261 - RNA, 19 nt, Artificial Sequence
  Description of Artificial Sequence: Synthetic oligonucleotide
agcucgcccguccagugua

SEQ ID NO: 2430262 - RNA, 19 nt, Artificial Sequence
  Description of Artificial Sequence: Synthetic oligonucleotide
gucuucgaaggaggcgcgg

SEQ ID NO: 2430263 - RNA, 19 nt, Artificial Sequence
  Description of Artificial Sequence: Synthetic oligonucleotide
gcaggaugcaggcuaagua

SEQ ID NO: 2430264 - RNA, 19 nt, Artificial Sequence
  Description of Artificial Sequence: Synthetic oligonucleotide
gacucuugcgcaggaugca

SEQ ID NO: 2430265 - RNA, 19 nt, Artificial Sequence
  Description of Artificial Sequence: Synthetic oligonucleotide
cgacucuugcgcaggaugc

SEQ ID NO: 2430266 - RNA, 19 nt, Artificial Sequence
  Description of Artificial Sequence: Synthetic oligonucleotide
caagccggcagcaugugau

SEQ ID NO: 2430267 - RNA, 19 nt, Artificial Sequence
  Description of Artificial Sequence: Synthetic oligonucleotide
cggucaguaaaagagaaga

SEQ ID NO: 2430268 - RNA, 19 nt, Artificial Sequence
  Description of Artificial Sequence: Synthetic oligonucleotide
gcacuacaggaacuuccag

SEQ ID NO: 2430269 - RNA, 19 nt, Artificial Sequence
  Description of Artificial Sequence: Synthetic oligonucleotide
ggcugaacacgcagugagg

SEQ ID NO: 2430270 - RNA, 19 nt, Artificial Sequence
  Description of Artificial Sequence: Synthetic oligonucleotide
gcccucgaccgucucaugc

SEQ ID NO: 2430271 - RNA, 19 nt, Artificial Sequence
  Description of Artificial Sequence: Synthetic oligonucleotide
ccauuuugacgaccccagg

SEQ ID NO: 2430272 - RNA, 19 nt, Artificial Sequence
  Description of Artificial Sequence: Synthetic oligonucleotide
ccagaacucaaagcggaac

SEQ ID NO: 2430273 - RNA, 19 nt, Artificial Sequence
  Description of Artificial Sequence: Synthetic oligonucleotide
gguauucucuggggaacug

SEQ ID NO: 2430274 - RNA, 19 nt, Artificial Sequence
  Description of Artificial Sequence: Synthetic oligonucleotide
uccuugcccucgaccgucu

SEQ ID NO: 2430275 - RNA, 19 nt, Artificial Sequence
  Description of Artificial Sequence: Synthetic oligonucleotide
cccucgaccgucucaugcc

SEQ ID NO: 2430276 - RNA, 19 nt, Artificial Sequence
  Description of Artificial Sequence: Synthetic oligonucleotide
gcggccucgccacaguccc

SEQ ID NO: 2430277 - RNA, 19 nt, Artificial Sequence
  Description of Artificial Sequence: Synthetic oligonucleotide
cuuagcuuggcuggccaaa

SEQ ID NO: 2430278 - RNA, 19 nt, Artificial Sequence
  Description of Artificial Sequence: Synthetic oligonucleotide
agccggcagcaugugauca

SEQ ID NO: 2430279 - RNA, 19 nt, Artificial Sequence
  Description of Artificial Sequence: Synthetic oligonucleotide
cuugcccucgaccgucuca

SEQ ID NO: 2430280 - RNA, 19 nt, Artificial Sequence
  Description of Artificial Sequence: Synthetic oligonucleotide
caguaccggccguuccagc

SEQ ID NO: 2430281 - RNA, 19 nt, Artificial Sequence
  Description of Artificial Sequence: Synthetic oligonucleotide
ggcaguaccggccguucca

SEQ ID NO: 2430282 - RNA, 19 nt, Artificial Sequence
  Description of Artificial Sequence: Synthetic oligonucleotide
cuggccaaaacaccacagu

SEQ ID NO: 2430283 - RNA, 19 nt, Artificial Sequence
  Description of Artificial Sequence: Synthetic oligonucleotide
gggguauucucuggggaac

SEQ ID NO: 2430284 - RNA, 19 nt, Artificial Sequence
  Description of Artificial Sequence: Synthetic oligonucleotide
ugccaccaaugccgucuug

SEQ ID NO: 2430285 - RNA, 19 nt, Artificial Sequence
  Description of Artificial Sequence: Synthetic oligonucleotide
ggucugaauaccagucguc

SEQ ID NO: 2430286 - RNA, 19 nt, Artificial Sequence
  Description of Artificial Sequence: Synthetic oligonucleotide
acacgcagugagguuggga

SEQ ID NO: 2430287 - RNA, 19 nt, Artificial Sequence
  Description of Artificial Sequence: Synthetic oligonucleotide
acgggaggucuggccaugg

SEQ ID NO: 2430288 - RNA, 19 nt, Artificial Sequence
  Description of Artificial Sequence: Synthetic oligonucleotide
caucugcauucucuuugca

SEQ ID NO: 2430289 - RNA, 19 nt, Artificial Sequence
  Description of Artificial Sequence: Synthetic oligonucleotide
cuccuugcccucgaccguc

SEQ ID NO: 2430290 - RNA, 19 nt, Artificial Sequence
  Description of Artificial Sequence: Synthetic oligonucleotide
cugccagccgccgcccugg

SEQ ID NO: 2430291 - RNA, 19 nt, Artificial Sequence
  Description of Artificial Sequence: Synthetic oligonucleotide
accgaaccgugcacgggag

SEQ ID NO: 2430292 - RNA, 19 nt, Artificial Sequence
  Description of Artificial Sequence: Synthetic oligonucleotide
gaaccgugcacgggagguc

SEQ ID NO: 2430293 - RNA, 19 nt, Artificial Sequence
  Description of Artificial Sequence: Synthetic oligonucleotide
guccuggugccacaauugu

SEQ ID NO: 2430294 - RNA, 19 nt, Artificial Sequence
  Description of Artificial Sequence: Synthetic oligonucleotide
gaccgucucaugccagucu

SEQ ID NO: 2430295 - RNA, 19 nt, Artificial Sequence
  Description of Artificial Sequence: Synthetic oligonucleotide
gcuacucgggucaacuguc

SEQ ID NO: 2430296 - RNA, 19 nt, Artificial Sequence
  Description of Artificial Sequence: Synthetic oligonucleotide
cuuggagccaaugaccauu

SEQ ID NO: 2430297 - RNA, 19 nt, Artificial Sequence
  Description of Artificial Sequence: Synthetic oligonucleotide
gcggucaguaaaagagaag

SEQ ID NO: 2430298 - RNA, 19 nt, Artificial Sequence
  Description of Artificial Sequence: Synthetic oligonucleotide
ucgucucauggugcacuac

SEQ ID NO: 2430299 - RNA, 19 nt, Artificial Sequence
  Description of Artificial Sequence: Synthetic oligonucleotide
caguggucugaauaccagu

SEQ ID NO: 2430300 - RNA, 19 nt, Artificial Sequence
  Description of Artificial Sequence: Synthetic oligonucleotide
cucgcccguccaguguacg

SEQ ID NO: 2430301 - RNA, 19 nt, Artificial Sequence
  Description of Artificial Sequence: Synthetic oligonucleotide
ggcuacucgggucaacugu

SEQ ID NO: 2430302 - RNA, 19 nt, Artificial Sequence
  Description of Artificial Sequence: Synthetic oligonucleotide
accggccguuccagcaacc

SEQ ID NO: 2430303 - RNA, 19 nt, Artificial Sequence
  Description of Artificial Sequence: Synthetic oligonucleotide
guacgcccaucugccagcc

SEQ ID NO: 2430304 - RNA, 19 nt, Artificial Sequence
  Description of Artificial Sequence: Synthetic oligonucleotide
guaccggccguuccagcaa

SEQ ID NO: 2430305 - RNA, 19 nt, Artificial Sequence
  Description of Artificial Sequence: Synthetic oligonucleotide
gcugaacacgcagugaggu

SEQ ID NO: 2430306 - RNA, 19 nt, Artificial Sequence
  Description of Artificial Sequence: Synthetic oligonucleotide
aucuuguaguuggcuguau

SEQ ID NO: 2430307 - RNA, 19 nt, Artificial Sequence
  Description of Artificial Sequence: Synthetic oligonucleotide
ugagggcggccucgccaca

SEQ ID NO: 2430308 - RNA, 19 nt, Artificial Sequence
  Description of Artificial Sequence: Synthetic oligonucleotide
  modified_base (19)..(19): a, c, u, g, unknown or other
gcuguaucaauggccacun

SEQ ID NO: 2430309 - RNA, 19 nt, Artificial Sequence
  Description of Artificial Sequence: Synthetic oligonucleotide
agcaggccggccaccaccu

SEQ ID NO: 2430310 - RNA, 19 nt, Artificial Sequence
  Description of Artificial Sequence: Synthetic oligonucleotide
acgaccccaggagccucac

SEQ ID NO: 2430311 - RNA, 19 nt, Artificial Sequence
  Description of Artificial Sequence: Synthetic oligonucleotide
ccaaacucccgccggcgac

SEQ ID NO: 2430312 - RNA, 19 nt, Artificial Sequence
  Description of Artificial Sequence: Synthetic oligonucleotide
ucccgccggcgacucuugc

SEQ ID NO: 2430313 - RNA, 19 nt, Artificial Sequence
  Description of Artificial Sequence: Synthetic oligonucleotide
ugacgaccccaggagccuc

SEQ ID NO: 2430314 - RNA, 19 nt, Artificial Sequence
  Description of Artificial Sequence: Synthetic oligonucleotide
gguacacucuucacccgca

SEQ ID NO: 2430315 - RNA, 19 nt, Artificial Sequence
  Description of Artificial Sequence: Synthetic oligonucleotide
caucugccagccgccgccc

SEQ ID NO: 2430316 - RNA, 19 nt, Artificial Sequence
  Description of Artificial Sequence: Synthetic oligonucleotide
gucgucucauggugcacua

SEQ ID NO: 2430317 - RNA, 19 nt, Artificial Sequence
  Description of Artificial Sequence: Synthetic oligonucleotide
ccuucagccagggguauuc

SEQ ID NO: 2430318 - RNA, 19 nt, Artificial Sequence
  Description of Artificial Sequence: Synthetic oligonucleotide
gcaguaccggccguuccag

SEQ ID NO: 2430319 - RNA, 19 nt, Artificial Sequence
  Description of Artificial Sequence: Synthetic oligonucleotide
caccugguccuggugccac

SEQ ID NO: 2430320 - RNA, 19 nt, Artificial Sequence
  Description of Artificial Sequence: Synthetic oligonucleotide
ccgccggcgacucuugcgc

SEQ ID NO: 2430321 - RNA, 19 nt, Artificial Sequence
  Description of Artificial Sequence: Synthetic oligonucleotide
ccacacccacucuucccgg

SEQ ID NO: 2430322 - RNA, 19 nt, Artificial Sequence
  Description of Artificial Sequence: Synthetic oligonucleotide
ugcccucgaccgucucaug

SEQ ID NO: 2430323 - RNA, 19 nt, Artificial Sequence
  Description of Artificial Sequence: Synthetic oligonucleotide
gggaacuggggagcaggcc

SEQ ID NO: 2430324 - RNA, 19 nt, Artificial Sequence
  Description of Artificial Sequence: Synthetic oligonucleotide
ccgucucaugccagucugg

SEQ ID NO: 2430325 - RNA, 19 nt, Artificial Sequence
  Description of Artificial Sequence: Synthetic oligonucleotide
ccagucgucucauggugca

SEQ ID NO: 2430326 - RNA, 19 nt, Artificial Sequence
  Description of Artificial Sequence: Synthetic oligonucleotide
gcccguccaguguacgccc

SEQ ID NO: 2430327 - RNA, 19 nt, Artificial Sequence
  Description of Artificial Sequence: Synthetic oligonucleotide
ggcuguaucaauggccacu

SEQ ID NO: 2430328 - RNA, 19 nt, Artificial Sequence
  Description of Artificial Sequence: Synthetic oligonucleotide
aggucucgcucuggcacgu

SEQ ID NO: 2430329 - RNA, 19 nt, Artificial Sequence
  Description of Artificial Sequence: Synthetic oligonucleotide
gacgaccccaggagccuca

SEQ ID NO: 2430330 - RNA, 19 nt, Artificial Sequence
  Description of Artificial Sequence: Synthetic oligonucleotide
gggaggucuggccauggcu

SEQ ID NO: 2430331 - RNA, 19 nt, Artificial Sequence
  Description of Artificial Sequence: Synthetic oligonucleotide
cuggcuacucgggucaacu

SEQ ID NO: 2430332 - RNA, 19 nt, Artificial Sequence
  Description of Artificial Sequence: Synthetic oligonucleotide
acucccgccggcgacucuu

SEQ ID NO: 2430333 - RNA, 19 nt, Artificial Sequence
  Description of Artificial Sequence: Synthetic oligonucleotide
aucugccagccgccgcccu

SEQ ID NO: 2430334 - RNA, 19 nt, Artificial Sequence
  Description of Artificial Sequence: Synthetic oligonucleotide
cccgccggcgacucuugcg

SEQ ID NO: 2430335 - RNA, 19 nt, Artificial Sequence
  Description of Artificial Sequence: Synthetic oligonucleotide
cgucucauggugcacuaca

SEQ ID NO: 2430336 - RNA, 19 nt, Artificial Sequence
  Description of Artificial Sequence: Synthetic oligonucleotide
gccggcgacucuugcgcag

SEQ ID NO: 2430337 - RNA, 19 nt, Artificial Sequence
  Description of Artificial Sequence: Synthetic oligonucleotide
ccgcagcaagggcaguucc

SEQ ID NO: 2430338 - RNA, 19 nt, Artificial Sequence
  Description of Artificial Sequence: Synthetic oligonucleotide
  modified_base (18)..(18): a, c, u, g, unknown or other
cuguaucaauggccacuna

SEQ ID NO: 2430339 - RNA, 19 nt, Artificial Sequence
  Description of Artificial Sequence: Synthetic oligonucleotide
cacggucgcuggcccuuag

SEQ ID NO: 2430340 - RNA, 19 nt, Artificial Sequence
  Description of Artificial Sequence: Synthetic oligonucleotide
ggaggcgcggucaguaaaa

SEQ ID NO: 2430341 - RNA, 19 nt, Artificial Sequence
  Description of Artificial Sequence: Synthetic oligonucleotide
cucccgccggcgacucuug

SEQ ID NO: 2430342 - RNA, 19 nt, Artificial Sequence
  Description of Artificial Sequence: Synthetic oligonucleotide
gcaagccggcagcauguga

SEQ ID NO: 2430343 - RNA, 19 nt, Artificial Sequence
  Description of Artificial Sequence: Synthetic oligonucleotide
ccgaaccgugcacgggagg

SEQ ID NO: 2430344 - RNA, 19 nt, Artificial Sequence
  Description of Artificial Sequence: Synthetic oligonucleotide
ggagccucacuggcuacuc

SEQ ID NO: 2430345 - RNA, 19 nt, Artificial Sequence
  Description of Artificial Sequence: Synthetic oligonucleotide
cucgggaugccgucacccu

SEQ ID NO: 2430346 - RNA, 19 nt, Artificial Sequence
  Description of Artificial Sequence: Synthetic oligonucleotide
gcgcggucaguaaaagaga

SEQ ID NO: 2430347 - RNA, 19 nt, Artificial Sequence
  Description of Artificial Sequence: Synthetic oligonucleotide
ccacucuucccggacacga

SEQ ID NO: 2430348 - RNA, 19 nt, Artificial Sequence
  Description of Artificial Sequence: Synthetic oligonucleotide
gcccugguacacucuucac

SEQ ID NO: 2430349 - RNA, 19 nt, Artificial Sequence
  Description of Artificial Sequence: Synthetic oligonucleotide
cugaacacgcagugagguu

SEQ ID NO: 2430350 - RNA, 19 nt, Artificial Sequence
  Description of Artificial Sequence: Synthetic oligonucleotide
aggucuggccauggcugaa

SEQ ID NO: 2430351 - RNA, 19 nt, Artificial Sequence
  Description of Artificial Sequence: Synthetic oligonucleotide
ggaugccgucacccuucag

SEQ ID NO: 2430352 - RNA, 19 nt, Artificial Sequence
  Description of Artificial Sequence: Synthetic oligonucleotide
cgggaugccgucacccuuc

SEQ ID NO: 2430353 - RNA, 19 nt, Artificial Sequence
  Description of Artificial Sequence: Synthetic oligonucleotide
cccggacacgaagaucuug

SEQ ID NO: 2430354 - RNA, 19 nt, Artificial Sequence
  Description of Artificial Sequence: Synthetic oligonucleotide
caaggccauugagcacaug

SEQ ID NO: 2430355 - RNA, 19 nt, Artificial Sequence
  Description of Artificial Sequence: Synthetic oligonucleotide
ggcccuuagcuuggcuggc

SEQ ID NO: 2430356 - RNA, 19 nt, Artificial Sequence
  Description of Artificial Sequence: Synthetic oligonucleotide
gggcaguucccaggccugc

SEQ ID NO: 2430357 - RNA, 19 nt, Artificial Sequence
  Description of Artificial Sequence: Synthetic oligonucleotide
ccggcgacucuugcgcagg

SEQ ID NO: 2430358 - RNA, 19 nt, Artificial Sequence
  Description of Artificial Sequence: Synthetic oligonucleotide
accgugcacgggaggucug

SEQ ID NO: 2430359 - RNA, 19 nt, Artificial Sequence
  Description of Artificial Sequence: Synthetic oligonucleotide
ccucgaccgucucaugcca

SEQ ID NO: 2430360 - RNA, 19 nt, Artificial Sequence
  Description of Artificial Sequence: Synthetic oligonucleotide
gcccuuagcuuggcuggcc

SEQ ID NO: 2430361 - RNA, 19 nt, Artificial Sequence
  Description of Artificial Sequence: Synthetic oligonucleotide
gcccaucugccagccgccg

SEQ ID NO: 2430362 - RNA, 19 nt, Artificial Sequence
  Description of Artificial Sequence: Synthetic oligonucleotide
ccggccguuccagcaaccc

SEQ ID NO: 2430363 - RNA, 19 nt, Artificial Sequence
  Description of Artificial Sequence: Synthetic oligonucleotide
cuugccccacacccacucu

SEQ ID NO: 2430364 - RNA, 19 nt, Artificial Sequence
  Description of Artificial Sequence: Synthetic oligonucleotide
cccuuagcuuggcuggcca

SEQ ID NO: 2430365 - RNA, 19 nt, Artificial Sequence
  Description of Artificial Sequence: Synthetic oligonucleotide
gccggaaggcugugagguc

SEQ ID NO: 2430366 - RNA, 19 nt, Artificial Sequence
  Description of Artificial Sequence: Synthetic oligonucleotide
ccgugcacgggaggucugg

SEQ ID NO: 2430367 - RNA, 19 nt, Artificial Sequence
  Description of Artificial Sequence: Synthetic oligonucleotide
cauugagcacaugggcaau

SEQ ID NO: 2430368 - RNA, 19 nt, Artificial Sequence
  Description of Artificial Sequence: Synthetic oligonucleotide
gccggcagcaugugaucaa

SEQ ID NO: 2430369 - RNA, 19 nt, Artificial Sequence
  Description of Artificial Sequence: Synthetic oligonucleotide
cgcccguccaguguacgcc

SEQ ID NO: 2430370 - RNA, 19 nt, Artificial Sequence
  Description of Artificial Sequence: Synthetic oligonucleotide
cccacucuucccggacacg

SEQ ID NO: 2430371 - RNA, 19 nt, Artificial Sequence
  Description of Artificial Sequence: Synthetic oligonucleotide
caaugccgucuugccccac

SEQ ID NO: 2430372 - RNA, 19 nt, Artificial Sequence
  Description of Artificial Sequence: Synthetic oligonucleotide
cgcccugguacacucuuca

SEQ ID NO: 2430373 - RNA, 19 nt, Artificial Sequence
  Description of Artificial Sequence: Synthetic oligonucleotide
gccugccagcuuugccacc

SEQ ID NO: 2430374 - RNA, 19 nt, Artificial Sequence
  Description of Artificial Sequence: Synthetic oligonucleotide
cuucagccagggguauucu

SEQ ID NO: 2430375 - RNA, 19 nt, Artificial Sequence
  Description of Artificial Sequence: Synthetic oligonucleotide
ccgucuugccccacaccca

SEQ ID NO: 2430376 - RNA, 19 nt, Artificial Sequence
  Description of Artificial Sequence: Synthetic oligonucleotide
cuuugcaagccggcagcau

SEQ ID NO: 2430377 - RNA, 19 nt, Artificial Sequence
  Description of Artificial Sequence: Synthetic oligonucleotide
ccaaugccgucuugcccca

SEQ ID NO: 2430378 - RNA, 19 nt, Artificial Sequence
  Description of Artificial Sequence: Synthetic oligonucleotide
cccaaacucccgccggcga

SEQ ID NO: 2430379 - RNA, 19 nt, Artificial Sequence
  Description of Artificial Sequence: Synthetic oligonucleotide
gggcggccucgccacaguc

SEQ ID NO: 2430380 - RNA, 19 nt, Artificial Sequence
  Description of Artificial Sequence: Synthetic oligonucleotide
ggucgcuggcccuuagcuu

SEQ ID NO: 2430381 - RNA, 19 nt, Artificial Sequence
  Description of Artificial Sequence: Synthetic oligonucleotide
ccggaaggcugugaggucu

SEQ ID NO: 2430382 - RNA, 19 nt, Artificial Sequence
  Description of Artificial Sequence: Synthetic oligonucleotide
ccgccgcccugguacacuc

SEQ ID NO: 2430383 - RNA, 19 nt, Artificial Sequence
  Description of Artificial Sequence: Synthetic oligonucleotide
gcgcaggaugcaggcuaag

SEQ ID NO: 2430384 - RNA, 19 nt, Artificial Sequence
  Description of Artificial Sequence: Synthetic oligonucleotide
acacggucgcuggcccuua

SEQ ID NO: 2430385 - RNA, 19 nt, Artificial Sequence
  Description of Artificial Sequence: Synthetic oligonucleotide
ccgcccugguacacucuuc

SEQ ID NO: 2430386 - RNA, 19 nt, Artificial Sequence
  Description of Artificial Sequence: Synthetic oligonucleotide
cgggaggucuggccauggc

SEQ ID NO: 2430387 - RNA, 19 nt, Artificial Sequence
  Description of Artificial Sequence: Synthetic oligonucleotide
cagcucgcccguccagugu

SEQ ID NO: 2430388 - RNA, 19 nt, Artificial Sequence
  Description of Artificial Sequence: Synthetic oligonucleotide
cgugcacgggaggucuggc

SEQ ID NO: 2430389 - RNA, 19 nt, Artificial Sequence
  Description of Artificial Sequence: Synthetic oligonucleotide
ccggcagcaugugaucaaa

SEQ ID NO: 2430390 - RNA, 19 nt, Artificial Sequence
  Description of Artificial Sequence: Synthetic oligonucleotide
gcucgcccguccaguguac

SEQ ID NO: 2430391 - RNA, 19 nt, Artificial Sequence
  Description of Artificial Sequence: Synthetic oligonucleotide
cgaccgucucaugccaguc

SEQ ID NO: 2430392 - RNA, 19 nt, Artificial Sequence
  Description of Artificial Sequence: Synthetic oligonucleotide
ccuugcccucgaccgucuc

SEQ ID NO: 2430393 - RNA, 19 nt, Artificial Sequence
  Description of Artificial Sequence: Synthetic oligonucleotide
cacacggucgcuggcccuu

SEQ ID NO: 2430394 - RNA, 19 nt, Artificial Sequence
  Description of Artificial Sequence: Synthetic oligonucleotide
gcuggcccuuagcuuggcu

SEQ ID NO: 2430395 - RNA, 19 nt, Artificial Sequence
  Description of Artificial Sequence: Synthetic oligonucleotide
cgaaccgugcacgggaggu

SEQ ID NO: 2430396 - RNA, 19 nt, Artificial Sequence
  Description of Artificial Sequence: Synthetic oligonucleotide
gccugccggaaggcuguga

SEQ ID NO: 2430397 - RNA, 19 nt, Artificial Sequence
  Description of Artificial Sequence: Synthetic oligonucleotide
gcacgucugugugcaugua

SEQ ID NO: 2430398 - RNA, 19 nt, Artificial Sequence
  Description of Artificial Sequence: Synthetic oligonucleotide
cuggcacgucugugugcau

SEQ ID NO: 2430399 - RNA, 19 nt, Artificial Sequence
  Description of Artificial Sequence: Synthetic oligonucleotide
ggcgacucuugcgcaggau

SEQ ID NO: 2430400 - RNA, 19 nt, Artificial Sequence
  Description of Artificial Sequence: Synthetic oligonucleotide
gccagcccagcucgcccgu

SEQ ID NO: 2430401 - RNA, 19 nt, Artificial Sequence
  Description of Artificial Sequence: Synthetic oligonucleotide
cccagcucgcccguccagu

SEQ ID NO: 2430402 - RNA, 19 nt, Artificial Sequence
  Description of Artificial Sequence: Synthetic oligonucleotide
ccacacggucgcuggcccu

SEQ ID NO: 2430403 - RNA, 19 nt, Artificial Sequence
  Description of Artificial Sequence: Synthetic oligonucleotide
cgccggcgacucuugcgca

SEQ ID NO: 2430404 - RNA, 19 nt, Artificial Sequence
  Description of Artificial Sequence: Synthetic oligonucleotide
cggcgacucuugcgcagga

SEQ ID NO: 2430405 - RNA, 19 nt, Artificial Sequence
  Description of Artificial Sequence: Synthetic oligonucleotide
ccguccaguguacgcccau

SEQ ID NO: 2430406 - RNA, 19 nt, Artificial Sequence
  Description of Artificial Sequence: Synthetic oligonucleotide
cgccgcccugguacacucu

SEQ ID NO: 2430407 - RNA, 19 nt, Artificial Sequence
  Description of Artificial Sequence: Synthetic oligonucleotide
auuaaguuuccauugagac

SEQ ID NO: 2430408 - RNA, 19 nt, Artificial Sequence
  Description of Artificial Sequence: Synthetic oligonucleotide
ugugauaugauucugaaua

SEQ ID NO: 2430409 - RNA, 19 nt, Artificial Sequence
  Description of Artificial Sequence: Synthetic oligonucleotide
uuuucaaagaccuuggccu

SEQ ID NO: 2430410 - RNA, 19 nt, Artificial Sequence
  Description of Artificial Sequence: Synthetic oligonucleotide
agucugauaacugugaggc

SEQ ID NO: 2430411 - RNA, 19 nt, Artificial Sequence
  Description of Artificial Sequence: Synthetic oligonucleotide
uuuccauugagacaaaucu

SEQ ID NO: 2430412 - RNA, 19 nt, Artificial Sequence
  Description of Artificial Sequence: Synthetic oligonucleotide
cugaauaagccauaaaugc

SEQ ID NO: 2430413 - RNA, 19 nt, Artificial Sequence
  Description of Artificial Sequence: Synthetic oligonucleotide
uccaauaucagugaucugg

SEQ ID NO: 2430414 - RNA, 19 nt, Artificial Sequence
  Description of Artificial Sequence: Synthetic oligonucleotide
aauauugucagaguggugu

SEQ ID NO: 2430415 - RNA, 19 nt, Artificial Sequence
  Description of Artificial Sequence: Synthetic oligonucleotide
aucugauugccccacaucc

SEQ ID NO: 2430416 - RNA, 19 nt, Artificial Sequence
  Description of Artificial Sequence: Synthetic oligonucleotide
guuguuguuguccagaucc

SEQ ID NO: 2430417 - RNA, 19 nt, Artificial Sequence
  Description of Artificial Sequence: Synthetic oligonucleotide
uuuuaaggagcaaagacuc

SEQ ID NO: 2430418 - RNA, 19 nt, Artificial Sequence
  Description of Artificial Sequence: Synthetic oligonucleotide
auugauuaaguuuccauug

SEQ ID NO: 2430419 - RNA, 19 nt, Artificial Sequence
  Description of Artificial Sequence: Synthetic oligonucleotide
aucugauugacgcugaguc

SEQ ID NO: 2430420 - RNA, 19 nt, Artificial Sequence
  Description of Artificial Sequence: Synthetic oligonucleotide
uucugaauaagccauaaau

SEQ ID NO: 2430421 - RNA, 19 nt, Artificial Sequence
  Description of Artificial Sequence: Synthetic oligonucleotide
ugugucagugaucugauug

SEQ ID NO: 2430422 - RNA, 19 nt, Artificial Sequence
  Description of Artificial Sequence: Synthetic oligonucleotide
ugaauaagccauaaaugcc

SEQ ID NO: 2430423 - RNA, 19 nt, Artificial Sequence
  Description of Artificial Sequence: Synthetic oligonucleotide
acaauuuuguacuugguca

SEQ ID NO: 2430424 - RNA, 19 nt, Artificial Sequence
  Description of Artificial Sequence: Synthetic oligonucleotide
ucagugaucugauugacgc

SEQ ID NO: 2430425 - RNA, 19 nt, Artificial Sequence
  Description of Artificial Sequence: Synthetic oligonucleotide
aggaauggccaucagaaac

SEQ ID NO: 2430426 - RNA, 19 nt, Artificial Sequence
  Description of Artificial Sequence: Synthetic oligonucleotide
acaucaacgauggaggugc

SEQ ID NO: 2430427 - RNA, 19 nt, Artificial Sequence
  Description of Artificial Sequence: Synthetic oligonucleotide
ucugauaacugugaggcgg

SEQ ID NO: 2430428 - RNA, 19 nt, Artificial Sequence
  Description of Artificial Sequence: Synthetic oligonucleotide
auuugggccacauacuugg

SEQ ID NO: 2430429 - RNA, 19 nt, Artificial Sequence
  Description of Artificial Sequence: Synthetic oligonucleotide
caaaucucuguuauggugg

SEQ ID NO: 2430430 - RNA, 19 nt, Artificial Sequence
  Description of Artificial Sequence: Synthetic oligonucleotide
auaugauucugaauaagcc

SEQ ID NO: 2430431 - RNA, 19 nt, Artificial Sequence
  Description of Artificial Sequence: Synthetic oligonucleotide
uauaaacccaggaauguca

SEQ ID NO: 2430432 - RNA, 19 nt, Artificial Sequence
  Description of Artificial Sequence: Synthetic oligonucleotide
aaagaccuuggccuccucc

SEQ ID NO: 2430433 - RNA, 19 nt, Artificial Sequence
  Description of Artificial Sequence: Synthetic oligonucleotide
agacaaaucucuguuaugg

SEQ ID NO: 2430434 - RNA, 19 nt, Artificial Sequence
  Description of Artificial Sequence: Synthetic oligonucleotide
uccauugagacaaaucucu

SEQ ID NO: 2430435 - RNA, 19 nt, Artificial Sequence
  Description of Artificial Sequence: Synthetic oligonucleotide
uccugauugauuaaguuuc

SEQ ID NO: 2430436 - RNA, 19 nt, Artificial Sequence
  Description of Artificial Sequence: Synthetic oligonucleotide
aguuuaaggugcgugaggc

SEQ ID NO: 2430437 - RNA, 19 nt, Artificial Sequence
  Description of Artificial Sequence: Synthetic oligonucleotide
ucugcauucauccaggauu

SEQ ID NO: 2430438 - RNA, 19 nt, Artificial Sequence
  Description of Artificial Sequence: Synthetic oligonucleotide
uuguauaaacccaggaaug

SEQ ID NO: 2430439 - RNA, 19 nt, Artificial Sequence
  Description of Artificial Sequence: Synthetic oligonucleotide
gauaugauucugaauaagc

SEQ ID NO: 2430440 - RNA, 19 nt, Artificial Sequence
  Description of Artificial Sequence: Synthetic oligonucleotide
cugguuguuguauaaaccc

SEQ ID NO: 2430441 - RNA, 19 nt, Artificial Sequence
  Description of Artificial Sequence: Synthetic oligonucleotide
uguuguauaaacccaggaa

SEQ ID NO: 2430442 - RNA, 19 nt, Artificial Sequence
  Description of Artificial Sequence: Synthetic oligonucleotide
aucagaaacagaugauacg

SEQ ID NO: 2430443 - RNA, 19 nt, Artificial Sequence
  Description of Artificial Sequence: Synthetic oligonucleotide
acagaugauacgcuucucg

SEQ ID NO: 2430444 - RNA, 19 nt, Artificial Sequence
  Description of Artificial Sequence: Synthetic oligonucleotide
ugauuaaguuuccauugag

SEQ ID NO: 2430445 - RNA, 19 nt, Artificial Sequence
  Description of Artificial Sequence: Synthetic oligonucleotide
ucugguuguuguauaaacc

SEQ ID NO: 2430446 - RNA, 19 nt, Artificial Sequence
  Description of Artificial Sequence: Synthetic oligonucleotide
gaaugucacaauuuuguac

SEQ ID NO: 2430447 - RNA, 19 nt, Artificial Sequence
  Description of Artificial Sequence: Synthetic oligonucleotide
cuugacugugauaugauuc

SEQ ID NO: 2430448 - RNA, 19 nt, Artificial Sequence
  Description of Artificial Sequence: Synthetic oligonucleotide
agagccacacacuuucccc

SEQ ID NO: 2430449 - RNA, 19 nt, Artificial Sequence
  Description of Artificial Sequence: Synthetic oligonucleotide
uucauccccgaucugauug

SEQ ID NO: 2430450 - RNA, 19 nt, Artificial Sequence
  Description of Artificial Sequence: Synthetic oligonucleotide
uuuucccaguuuaaggugc

SEQ ID NO: 2430451 - RNA, 19 nt, Artificial Sequence
  Description of Artificial Sequence: Synthetic oligonucleotide
uuaaggagcaaagacucag

SEQ ID NO: 2430452 - RNA, 19 nt, Artificial Sequence
  Description of Artificial Sequence: Synthetic oligonucleotide
uugacgcugagucugauaa

SEQ ID NO: 2430453 - RNA, 19 nt, Artificial Sequence
  Description of Artificial Sequence: Synthetic oligonucleotide
uuaaguuuccauugagaca

SEQ ID NO: 2430454 - RNA, 19 nt, Artificial Sequence
  Description of Artificial Sequence: Synthetic oligonucleotide
ucuguuaugguggaguucu

SEQ ID NO: 2430455 - RNA, 19 nt, Artificial Sequence
  Description of Artificial Sequence: Synthetic oligonucleotide
uagucauugagguuguugu

SEQ ID NO: 2430456 - RNA, 19 nt, Artificial Sequence
  Description of Artificial Sequence: Synthetic oligonucleotide
auaucagugaucugguugu

SEQ ID NO: 2430457 - RNA, 19 nt, Artificial Sequence
  Description of Artificial Sequence: Synthetic oligonucleotide
caggauuugggccacauac

SEQ ID NO: 2430458 - RNA, 19 nt, Artificial Sequence
  Description of Artificial Sequence: Synthetic oligonucleotide
ugagacaaaucucuguuau

SEQ ID NO: 2430459 - RNA, 19 nt, Artificial Sequence
  Description of Artificial Sequence: Synthetic oligonucleotide
gaaacaaggcugaagcucc

SEQ ID NO: 2430460 - RNA, 19 nt, Artificial Sequence
  Description of Artificial Sequence: Synthetic oligonucleotide
ucguuuucaaagaccuugg

SEQ ID NO: 2430461 - RNA, 19 nt, Artificial Sequence
  Description of Artificial Sequence: Synthetic oligonucleotide
ugaggcggcugaaacaagg

SEQ ID NO: 2430462 - RNA, 19 nt, Artificial Sequence
  Description of Artificial Sequence: Synthetic oligonucleotide
ugggcuguccccuugacug

SEQ ID NO: 2430463 - RNA, 19 nt, Artificial Sequence
  Description of Artificial Sequence: Synthetic oligonucleotide
acuccauagucauugaggu

SEQ ID NO: 2430464 - RNA, 19 nt, Artificial Sequence
  Description of Artificial Sequence: Synthetic oligonucleotide
acugugaggcggcugaaac

SEQ ID NO: 2430465 - RNA, 19 nt, Artificial Sequence
  Description of Artificial Sequence: Synthetic oligonucleotide
uugauuaaguuuccauuga

SEQ ID NO: 2430466 - RNA, 19 nt, Artificial Sequence
  Description of Artificial Sequence: Synthetic oligonucleotide
uugacugugauaugauucu

SEQ ID NO: 2430467 - RNA, 19 nt, Artificial Sequence
  Description of Artificial Sequence: Synthetic oligonucleotide
acaaggcugaagcuccugc

SEQ ID NO: 2430468 - RNA, 19 nt, Artificial Sequence
  Description of Artificial Sequence: Synthetic oligonucleotide
ugagucugauaacugugag

SEQ ID NO: 2430469 - RNA, 19 nt, Artificial Sequence
  Description of Artificial Sequence: Synthetic oligonucleotide
gagucugauaacugugagg

SEQ ID NO: 2430470 - RNA, 19 nt, Artificial Sequence
  Description of Artificial Sequence: Synthetic oligonucleotide
aauaagccauaaaugccuc

SEQ ID NO: 2430471 - RNA, 19 nt, Artificial Sequence
  Description of Artificial Sequence: Synthetic oligonucleotide
uaagccauaaaugccucag

SEQ ID NO: 2430472 - RNA, 19 nt, Artificial Sequence
  Description of Artificial Sequence: Synthetic oligonucleotide
uuuaaggugcgugaggccu

SEQ ID NO: 2430473 - RNA, 19 nt, Artificial Sequence
  Description of Artificial Sequence: Synthetic oligonucleotide
uuguuguauaaacccagga

SEQ ID NO: 2430474 - RNA, 19 nt, Artificial Sequence
  Description of Artificial Sequence: Synthetic oligonucleotide
ucagugaucugguuguugu

SEQ ID NO: 2430475 - RNA, 19 nt, Artificial Sequence
  Description of Artificial Sequence: Synthetic oligonucleotide
ucaccuguuauucuguuuu

SEQ ID NO: 2430476 - RNA, 19 nt, Artificial Sequence
  Description of Artificial Sequence: Synthetic oligonucleotide
uugucagccagaauauugu

SEQ ID NO: 2430477 - RNA, 19 nt, Artificial Sequence
  Description of Artificial Sequence: Synthetic oligonucleotide
ugaaacaaggcugaagcuc

SEQ ID NO: 2430478 - RNA, 19 nt, Artificial Sequence
  Description of Artificial Sequence: Synthetic oligonucleotide
ugauaugauucugaauaag

SEQ ID NO: 2430479 - RNA, 19 nt, Artificial Sequence
  Description of Artificial Sequence: Synthetic oligonucleotide
ugauugauuaaguuuccau

SEQ ID NO: 2430480 - RNA, 19 nt, Artificial Sequence
  Description of Artificial Sequence: Synthetic oligonucleotide
ccaacaucaacgauggagg

SEQ ID NO: 2430481 - RNA, 19 nt, Artificial Sequence
  Description of Artificial Sequence: Synthetic oligonucleotide
uguauaaacccaggaaugu

SEQ ID NO: 2430482 - RNA, 19 nt, Artificial Sequence
  Description of Artificial Sequence: Synthetic oligonucleotide
auaacugugaggcggcuga

SEQ ID NO: 2430483 - RNA, 19 nt, Artificial Sequence
  Description of Artificial Sequence: Synthetic oligonucleotide
ucaucauuaaguucauuuu

SEQ ID NO: 2430484 - RNA, 19 nt, Artificial Sequence
  Description of Artificial Sequence: Synthetic oligonucleotide
uucagcaucucagcgaagc

SEQ ID NO: 2430485 - RNA, 19 nt, Artificial Sequence
  Description of Artificial Sequence: Synthetic oligonucleotide
acauacuuggcuccaauau

SEQ ID NO: 2430486 - RNA, 19 nt, Artificial Sequence
  Description of Artificial Sequence: Synthetic oligonucleotide
ugguuguuguauaaaccca

SEQ ID NO: 2430487 - RNA, 19 nt, Artificial Sequence
  Description of Artificial Sequence: Synthetic oligonucleotide
cuucucguuuucaaagacc

SEQ ID NO: 2430488 - RNA, 19 nt, Artificial Sequence
  Description of Artificial Sequence: Synthetic oligonucleotide
aaacccaggaaugucacaa

SEQ ID NO: 2430489 - RNA, 19 nt, Artificial Sequence
  Description of Artificial Sequence: Synthetic oligonucleotide
aggaaugucacaauuuugu

SEQ ID NO: 2430490 - RNA, 19 nt, Artificial Sequence
  Description of Artificial Sequence: Synthetic oligonucleotide
aaaucucuguuauggugga

SEQ ID NO: 2430491 - RNA, 19 nt, Artificial Sequence
  Description of Artificial Sequence: Synthetic oligonucleotide
agugaucugauugacgcug

SEQ ID NO: 2430492 - RNA, 19 nt, Artificial Sequence
  Description of Artificial Sequence: Synthetic oligonucleotide
uuucccaguuuaaggugcg

SEQ ID NO: 2430493 - RNA, 19 nt, Artificial Sequence
  Description of Artificial Sequence: Synthetic oligonucleotide
uuuaaggagcaaagacuca

SEQ ID NO: 2430494 - RNA, 19 nt, Artificial Sequence
  Description of Artificial Sequence: Synthetic oligonucleotide
auugaaugcaagacugagg

SEQ ID NO: 2430495 - RNA, 19 nt, Artificial Sequence
  Description of Artificial Sequence: Synthetic oligonucleotide
guuguauaaacccaggaau

SEQ ID NO: 2430496 - RNA, 19 nt, Artificial Sequence
  Description of Artificial Sequence: Synthetic oligonucleotide
uaaggagcaaagacucagc

SEQ ID NO: 2430497 - RNA, 19 nt, Artificial Sequence
  Description of Artificial Sequence: Synthetic oligonucleotide
acgcuucucguuuucaaag

SEQ ID NO: 2430498 - RNA, 19 nt, Artificial Sequence
  Description of Artificial Sequence: Synthetic oligonucleotide
aaugccucggcgaaggccu

SEQ ID NO: 2430499 - RNA, 19 nt, Artificial Sequence
  Description of Artificial Sequence: Synthetic oligonucleotide
ucaacgauggaggugcugu

SEQ ID NO: 2430500 - RNA, 19 nt, Artificial Sequence
  Description of Artificial Sequence: Synthetic oligonucleotide
ucugauugccccacauccc

SEQ ID NO: 2430501 - RNA, 19 nt, Artificial Sequence
  Description of Artificial Sequence: Synthetic oligonucleotide
acuuucagcaucucagcga

SEQ ID NO: 2430502 - RNA, 19 nt, Artificial Sequence
  Description of Artificial Sequence: Synthetic oligonucleotide
aguucuucugcagugccuc

SEQ ID NO: 2430503 - RNA, 19 nt, Artificial Sequence
  Description of Artificial Sequence: Synthetic oligonucleotide
ucggcgaaggccuuugccc

SEQ ID NO: 2430504 - RNA, 19 nt, Artificial Sequence
  Description of Artificial Sequence: Synthetic oligonucleotide
aucccaacaucaacgaugg

SEQ ID NO: 2430505 - RNA, 19 nt, Artificial Sequence
  Description of Artificial Sequence: Synthetic oligonucleotide
uuccauugagacaaaucuc

SEQ ID NO: 2430506 - RNA, 19 nt, Artificial Sequence
  Description of Artificial Sequence: Synthetic oligonucleotide
uuaugguggaguucuucug

SEQ ID NO: 2430507 - RNA, 19 nt, Artificial Sequence
  Description of Artificial Sequence: Synthetic oligonucleotide
ugacuuucagcaucucagc

SEQ ID NO: 2430508 - RNA, 19 nt, Artificial Sequence
  Description of Artificial Sequence: Synthetic oligonucleotide
ugcggccucaucauuaagu

SEQ ID NO: 2430509 - RNA, 19 nt, Artificial Sequence
  Description of Artificial Sequence: Synthetic oligonucleotide
gauuaaguuuccauugaga

SEQ ID NO: 2430510 - RNA, 19 nt, Artificial Sequence
  Description of Artificial Sequence: Synthetic oligonucleotide
auaaacccaggaaugucac

SEQ ID NO: 2430511 - RNA, 19 nt, Artificial Sequence
  Description of Artificial Sequence: Synthetic oligonucleotide
ggggagaugccauugaaug

SEQ ID NO: 2430512 - RNA, 19 nt, Artificial Sequence
  Description of Artificial Sequence: Synthetic oligonucleotide
agcaccuucaccccugugu

SEQ ID NO: 2430513 - RNA, 19 nt, Artificial Sequence
  Description of Artificial Sequence: Synthetic oligonucleotide
agaaacagaugauacgcuu

SEQ ID NO: 2430514 - RNA, 19 nt, Artificial Sequence
  Description of Artificial Sequence: Synthetic oligonucleotide
aacaucaacgauggaggug

SEQ ID NO: 2430515 - RNA, 19 nt, Artificial Sequence
  Description of Artificial Sequence: Synthetic oligonucleotide
agacugagguuggacaggc

SEQ ID NO: 2430516 - RNA, 19 nt, Artificial Sequence
  Description of Artificial Sequence: Synthetic oligonucleotide
aagacugagguuggacagg

SEQ ID NO: 2430517 - RNA, 19 nt, Artificial Sequence
  Description of Artificial Sequence: Synthetic oligonucleotide
gaauaagccauaaaugccu

SEQ ID NO: 2430518 - RNA, 19 nt, Artificial Sequence
  Description of Artificial Sequence: Synthetic oligonucleotide
auacuuggcuccaauauca

SEQ ID NO: 2430519 - RNA, 19 nt, Artificial Sequence
  Description of Artificial Sequence: Synthetic oligonucleotide
acugugauaugauucugaa

SEQ ID NO: 2430520 - RNA, 19 nt, Artificial Sequence
  Description of Artificial Sequence: Synthetic oligonucleotide
cugauugacgcugagucug

SEQ ID NO: 2430521 - RNA, 19 nt, Artificial Sequence
  Description of Artificial Sequence: Synthetic oligonucleotide
ugugaggcggcugaaacaa

SEQ ID NO: 2430522 - RNA, 19 nt, Artificial Sequence
  Description of Artificial Sequence: Synthetic oligonucleotide
gauugauuaaguuuccauu

SEQ ID NO: 2430523 - RNA, 19 nt, Artificial Sequence
  Description of Artificial Sequence: Synthetic oligonucleotide
aucucagcgaagcacucug

SEQ ID NO: 2430524 - RNA, 19 nt, Artificial Sequence
  Description of Artificial Sequence: Synthetic oligonucleotide
guuguuguauaaacccagg

SEQ ID NO: 2430525 - RNA, 19 nt, Artificial Sequence
  Description of Artificial Sequence: Synthetic oligonucleotide
ucugauugacgcugagucu

SEQ ID NO: 2430526 - RNA, 19 nt, Artificial Sequence
  Description of Artificial Sequence: Synthetic oligonucleotide
aagcuccugcacuccauag

SEQ ID NO: 2430527 - RNA, 19 nt, Artificial Sequence
  Description of Artificial Sequence: Synthetic oligonucleotide
uccccgaucugauugcccc

SEQ ID NO: 2430528 - RNA, 19 nt, Artificial Sequence
  Description of Artificial Sequence: Synthetic oligonucleotide
gagacaaaucucuguuaug

SEQ ID NO: 2430529 - RNA, 19 nt, Artificial Sequence
  Description of Artificial Sequence: Synthetic oligonucleotide
cugauaacugugaggcggc

SEQ ID NO: 2430530 - RNA, 19 nt, Artificial Sequence
  Description of Artificial Sequence: Synthetic oligonucleotide
uguuguccagauccagggc

SEQ ID NO: 2430531 - RNA, 19 nt, Artificial Sequence
  Description of Artificial Sequence: Synthetic oligonucleotide
ugguugacuuucagcaucu

SEQ ID NO: 2430532 - RNA, 19 nt, Artificial Sequence
  Description of Artificial Sequence: Synthetic oligonucleotide
ucacaauuuuguacuuggu

SEQ ID NO: 2430533 - RNA, 19 nt, Artificial Sequence
  Description of Artificial Sequence: Synthetic oligonucleotide
auuuuguacuuggucagcu

SEQ ID NO: 2430534 - RNA, 19 nt, Artificial Sequence
  Description of Artificial Sequence: Synthetic oligonucleotide
aggccuuugccccuucauc

SEQ ID NO: 2430535 - RNA, 19 nt, Artificial Sequence
  Description of Artificial Sequence: Synthetic oligonucleotide
uacuuggucagcuccucac

SEQ ID NO: 2430536 - RNA, 19 nt, Artificial Sequence
  Description of Artificial Sequence: Synthetic oligonucleotide
ugggccacauacuuggcuc

SEQ ID NO: 2430537 - RNA, 19 nt, Artificial Sequence
  Description of Artificial Sequence: Synthetic oligonucleotide
auaaaugccucagcgucug

SEQ ID NO: 2430538 - RNA, 19 nt, Artificial Sequence
  Description of Artificial Sequence: Synthetic oligonucleotide
uccuccugauugauuaagu

SEQ ID NO: 2430539 - RNA, 19 nt, Artificial Sequence
  Description of Artificial Sequence: Synthetic oligonucleotide
ugaucugauugacgcugag

SEQ ID NO: 2430540 - RNA, 19 nt, Artificial Sequence
  Description of Artificial Sequence: Synthetic oligonucleotide
aacagaugauacgcuucuc

SEQ ID NO: 2430541 - RNA, 19 nt, Artificial Sequence
  Description of Artificial Sequence: Synthetic oligonucleotide
caguuuaaggugcgugagg

SEQ ID NO: 2430542 - RNA, 19 nt, Artificial Sequence
  Description of Artificial Sequence: Synthetic oligonucleotide
aucucuguuaugguggagu

SEQ ID NO: 2430543 - RNA, 19 nt, Artificial Sequence
  Description of Artificial Sequence: Synthetic oligonucleotide
aggugcgugaggccucugc

SEQ ID NO: 2430544 - RNA, 19 nt, Artificial Sequence
  Description of Artificial Sequence: Synthetic oligonucleotide
gguuguuguauaaacccag

SEQ ID NO: 2430545 - RNA, 19 nt, Artificial Sequence
  Description of Artificial Sequence: Synthetic oligonucleotide
ucagcaucucagcgaagca

SEQ ID NO: 2430546 - RNA, 19 nt, Artificial Sequence
  Description of Artificial Sequence: Synthetic oligonucleotide
cugcacuccauagucauug

SEQ ID NO: 2430547 - RNA, 19 nt, Artificial Sequence
  Description of Artificial Sequence: Synthetic oligonucleotide
guugacuuucagcaucuca

SEQ ID NO: 2430548 - RNA, 19 nt, Artificial Sequence
  Description of Artificial Sequence: Synthetic oligonucleotide
ccauaaaugccucagcguc

SEQ ID NO: 2430549 - RNA, 19 nt, Artificial Sequence
  Description of Artificial Sequence: Synthetic oligonucleotide
gauuugggccacauacuug

SEQ ID NO: 2430550 - RNA, 19 nt, Artificial Sequence
  Description of Artificial Sequence: Synthetic oligonucleotide
ucuggggagaugccauuga

SEQ ID NO: 2430551 - RNA, 19 nt, Artificial Sequence
  Description of Artificial Sequence: Synthetic oligonucleotide
uugggccacauacuuggcu

SEQ ID NO: 2430552 - RNA, 19 nt, Artificial Sequence
  Description of Artificial Sequence: Synthetic oligonucleotide
ucauccccgaucugauugc

SEQ ID NO: 2430553 - RNA, 19 nt, Artificial Sequence
  Description of Artificial Sequence: Synthetic oligonucleotide
auaagccauaaaugccuca

SEQ ID NO: 2430554 - RNA, 19 nt, Artificial Sequence
  Description of Artificial Sequence: Synthetic oligonucleotide
cccaacaucaacgauggag

SEQ ID NO: 2430555 - RNA, 19 nt, Artificial Sequence
  Description of Artificial Sequence: Synthetic oligonucleotide
acgauggaggugcuguucu

SEQ ID NO: 2430556 - RNA, 19 nt, Artificial Sequence
  Description of Artificial Sequence: Synthetic oligonucleotide
ggccaucagaaacagauga

SEQ ID NO: 2430557 - RNA, 19 nt, Artificial Sequence
  Description of Artificial Sequence: Synthetic oligonucleotide
ugauucugaauaagccaua

SEQ ID NO: 2430558 - RNA, 19 nt, Artificial Sequence
  Description of Artificial Sequence: Synthetic oligonucleotide
gaucugauugccccacauc

SEQ ID NO: 2430559 - RNA, 19 nt, Artificial Sequence
  Description of Artificial Sequence: Synthetic oligonucleotide
agguuggacaggcuggggu

SEQ ID NO: 2430560 - RNA, 19 nt, Artificial Sequence
  Description of Artificial Sequence: Synthetic oligonucleotide
guuuaaggugcgugaggcc

SEQ ID NO: 2430561 - RNA, 19 nt, Artificial Sequence
  Description of Artificial Sequence: Synthetic oligonucleotide
gucagugaucugauugacg

SEQ ID NO: 2430562 - RNA, 19 nt, Artificial Sequence
  Description of Artificial Sequence: Synthetic oligonucleotide
ugauugacgcugagucuga

SEQ ID NO: 2430563 - RNA, 19 nt, Artificial Sequence
  Description of Artificial Sequence: Synthetic oligonucleotide
uccugcacuccauagucau

SEQ ID NO: 2430564 - RNA, 19 nt, Artificial Sequence
  Description of Artificial Sequence: Synthetic oligonucleotide
ggccucaucauuaaguuca

SEQ ID NO: 2430565 - RNA, 19 nt, Artificial Sequence
  Description of Artificial Sequence: Synthetic oligonucleotide
gauucugaauaagccauaa

SEQ ID NO: 2430566 - RNA, 19 nt, Artificial Sequence
  Description of Artificial Sequence: Synthetic oligonucleotide
guuuccauugagacaaauc

SEQ ID NO: 2430567 - RNA, 19 nt, Artificial Sequence
  Description of Artificial Sequence: Synthetic oligonucleotide
uaaacccaggaaugucaca

SEQ ID NO: 2430568 - RNA, 19 nt, Artificial Sequence
  Description of Artificial Sequence: Synthetic oligonucleotide
aggugcuguucuucacagc

SEQ ID NO: 2430569 - RNA, 19 nt, Artificial Sequence
  Description of Artificial Sequence: Synthetic oligonucleotide
cuuugccccuucauccccg

SEQ ID NO: 2430570 - RNA, 19 nt, Artificial Sequence
  Description of Artificial Sequence: Synthetic oligonucleotide
guuaugguggaguucuucu

SEQ ID NO: 2430571 - RNA, 19 nt, Artificial Sequence
  Description of Artificial Sequence: Synthetic oligonucleotide
gucugauaacugugaggcg

SEQ ID NO: 2430572 - RNA, 19 nt, Artificial Sequence
  Description of Artificial Sequence: Synthetic oligonucleotide
gugucagugaucugauuga

SEQ ID NO: 2430573 - RNA, 19 nt, Artificial Sequence
  Description of Artificial Sequence: Synthetic oligonucleotide
accccugugucagugaucu

SEQ ID NO: 2430574 - RNA, 19 nt, Artificial Sequence
  Description of Artificial Sequence: Synthetic oligonucleotide
ggccuuugccccuucaucc

SEQ ID NO: 2430575 - RNA, 19 nt, Artificial Sequence
  Description of Artificial Sequence: Synthetic oligonucleotide
cagagugguguucugcuuc

SEQ ID NO: 2430576 - RNA, 19 nt, Artificial Sequence
  Description of Artificial Sequence: Synthetic oligonucleotide
gauaacugugaggcggcug

SEQ ID NO: 2430577 - RNA, 19 nt, Artificial Sequence
  Description of Artificial Sequence: Synthetic oligonucleotide
cagagccacacacuuuccc

SEQ ID NO: 2430578 - RNA, 19 nt, Artificial Sequence
  Description of Artificial Sequence: Synthetic oligonucleotide
ucccucaaugccucggcga

SEQ ID NO: 2430579 - RNA, 19 nt, Artificial Sequence
  Description of Artificial Sequence: Synthetic oligonucleotide
gugauaugauucugaauaa

SEQ ID NO: 2430580 - RNA, 19 nt, Artificial Sequence
  Description of Artificial Sequence: Synthetic oligonucleotide
ucccaguuuaaggugcgug

SEQ ID NO: 2430581 - RNA, 19 nt, Artificial Sequence
  Description of Artificial Sequence: Synthetic oligonucleotide
uguuaugguggaguucuuc

SEQ ID NO: 2430582 - RNA, 19 nt, Artificial Sequence
  Description of Artificial Sequence: Synthetic oligonucleotide
uggggagaugccauugaau

SEQ ID NO: 2430583 - RNA, 19 nt, Artificial Sequence
  Description of Artificial Sequence: Synthetic oligonucleotide
uuaaggugcgugaggccuc

SEQ ID NO: 2430584 - RNA, 19 nt, Artificial Sequence
  Description of Artificial Sequence: Synthetic oligonucleotide
uaaaugccucagcgucugg

SEQ ID NO: 2430585 - RNA, 19 nt, Artificial Sequence
  Description of Artificial Sequence: Synthetic oligonucleotide
ugucagugaucugauugac

SEQ ID NO: 2430586 - RNA, 19 nt, Artificial Sequence
  Description of Artificial Sequence: Synthetic oligonucleotide
gauugccccacaucccaac

SEQ ID NO: 2430587 - RNA, 19 nt, Artificial Sequence
  Description of Artificial Sequence: Synthetic oligonucleotide
gacugugauaugauucuga

SEQ ID NO: 2430588 - RNA, 19 nt, Artificial Sequence
  Description of Artificial Sequence: Synthetic oligonucleotide
ugcaagacugagguuggac

SEQ ID NO: 2430589 - RNA, 19 nt, Artificial Sequence
  Description of Artificial Sequence: Synthetic oligonucleotide
guauaaacccaggaauguc

SEQ ID NO: 2430590 - RNA, 19 nt, Artificial Sequence
  Description of Artificial Sequence: Synthetic oligonucleotide
aaggccuuugccccuucau

SEQ ID NO: 2430591 - RNA, 19 nt, Artificial Sequence
  Description of Artificial Sequence: Synthetic oligonucleotide
cugagucugauaacuguga

SEQ ID NO: 2430592 - RNA, 19 nt, Artificial Sequence
  Description of Artificial Sequence: Synthetic oligonucleotide
agcaucucagcgaagcacu

SEQ ID NO: 2430593 - RNA, 19 nt, Artificial Sequence
  Description of Artificial Sequence: Synthetic oligonucleotide
auucugaauaagccauaaa

SEQ ID NO: 2430594 - RNA, 19 nt, Artificial Sequence
  Description of Artificial Sequence: Synthetic oligonucleotide
acuuggucagcuccucaca

SEQ ID NO: 2430595 - RNA, 19 nt, Artificial Sequence
  Description of Artificial Sequence: Synthetic oligonucleotide
ugacugugauaugauucug

SEQ ID NO: 2430596 - RNA, 19 nt, Artificial Sequence
  Description of Artificial Sequence: Synthetic oligonucleotide
ggagaugccauugaaugca

SEQ ID NO: 2430597 - RNA, 19 nt, Artificial Sequence
  Description of Artificial Sequence: Synthetic oligonucleotide
gcauucauccaggauuugg

SEQ ID NO: 2430598 - RNA, 19 nt, Artificial Sequence
  Description of Artificial Sequence: Synthetic oligonucleotide
aaucucuguuaugguggag

SEQ ID NO: 2430599 - RNA, 19 nt, Artificial Sequence
  Description of Artificial Sequence: Synthetic oligonucleotide
ugccucagcgucugguuga

SEQ ID NO: 2430600 - RNA, 19 nt, Artificial Sequence
  Description of Artificial Sequence: Synthetic oligonucleotide
ugccccacaucccaacauc

SEQ ID NO: 2430601 - RNA, 19 nt, Artificial Sequence
  Description of Artificial Sequence: Synthetic oligonucleotide
gaauauugucagaguggug

SEQ ID NO: 2430602 - RNA, 19 nt, Artificial Sequence
  Description of Artificial Sequence: Synthetic oligonucleotide
ugauacgcuucucguuuuc

SEQ ID NO: 2430603 - RNA, 19 nt, Artificial Sequence
  Description of Artificial Sequence: Synthetic oligonucleotide
auauugucagagugguguu

SEQ ID NO: 2430604 - RNA, 19 nt, Artificial Sequence
  Description of Artificial Sequence: Synthetic oligonucleotide
aacccaggaaugucacaau

SEQ ID NO: 2430605 - RNA, 19 nt, Artificial Sequence
  Description of Artificial Sequence: Synthetic oligonucleotide
ugccccuucauccccgauc

SEQ ID NO: 2430606 - RNA, 19 nt, Artificial Sequence
  Description of Artificial Sequence: Synthetic oligonucleotide
ugcgcaaggcucuucccuc

SEQ ID NO: 2430607 - RNA, 19 nt, Artificial Sequence
  Description of Artificial Sequence: Synthetic oligonucleotide
auacgcuucucguuuucaa

SEQ ID NO: 2430608 - RNA, 19 nt, Artificial Sequence
  Description of Artificial Sequence: Synthetic oligonucleotide
agcaaagacucagcccagg

SEQ ID NO: 2430609 - RNA, 19 nt, Artificial Sequence
  Description of Artificial Sequence: Synthetic oligonucleotide
augccucagcgucugguug

SEQ ID NO: 2430610 - RNA, 19 nt, Artificial Sequence
  Description of Artificial Sequence: Synthetic oligonucleotide
auugccccacaucccaaca

SEQ ID NO: 2430611 - RNA, 19 nt, Artificial Sequence
  Description of Artificial Sequence: Synthetic oligonucleotide
uauugucagagugguguuc

SEQ ID NO: 2430612 - RNA, 19 nt, Artificial Sequence
  Description of Artificial Sequence: Synthetic oligonucleotide
aacaaggcugaagcuccug

SEQ ID NO: 2430613 - RNA, 19 nt, Artificial Sequence
  Description of Artificial Sequence: Synthetic oligonucleotide
cucggcgaaggccuuugcc

SEQ ID NO: 2430614 - RNA, 19 nt, Artificial Sequence
  Description of Artificial Sequence: Synthetic oligonucleotide
agcuccugcacuccauagu

SEQ ID NO: 2430615 - RNA, 19 nt, Artificial Sequence
  Description of Artificial Sequence: Synthetic oligonucleotide
gguuggacaggcuggggug

SEQ ID NO: 2430616 - RNA, 19 nt, Artificial Sequence
  Description of Artificial Sequence: Synthetic oligonucleotide
ugcgugaggccucugcauu

SEQ ID NO: 2430617 - RNA, 19 nt, Artificial Sequence
  Description of Artificial Sequence: Synthetic oligonucleotide
gacgcugagucugauaacu

SEQ ID NO: 2430618 - RNA, 19 nt, Artificial Sequence
  Description of Artificial Sequence: Synthetic oligonucleotide
cugauugccccacauccca

SEQ ID NO: 2430619 - RNA, 19 nt, Artificial Sequence
  Description of Artificial Sequence: Synthetic oligonucleotide
ucaccccugugucagugau

SEQ ID NO: 2430620 - RNA, 19 nt, Artificial Sequence
  Description of Artificial Sequence: Synthetic oligonucleotide
ucugcggccucaucauuaa

SEQ ID NO: 2430621 - RNA, 19 nt, Artificial Sequence
  Description of Artificial Sequence: Synthetic oligonucleotide
ugccucagccagcugggcu

SEQ ID NO: 2430622 - RNA, 19 nt, Artificial Sequence
  Description of Artificial Sequence: Synthetic oligonucleotide
caaugccucggcgaaggcc

SEQ ID NO: 2430623 - RNA, 19 nt, Artificial Sequence
  Description of Artificial Sequence: Synthetic oligonucleotide
ugaagcuccugcacuccau

SEQ ID NO: 2430624 - RNA, 19 nt, Artificial Sequence
  Description of Artificial Sequence: Synthetic oligonucleotide
aggcggcugaaacaaggcu

SEQ ID NO: 2430625 - RNA, 19 nt, Artificial Sequence
  Description of Artificial Sequence: Synthetic oligonucleotide
aucagugaucugguuguug

SEQ ID NO: 2430626 - RNA, 19 nt, Artificial Sequence
  Description of Artificial Sequence: Synthetic oligonucleotide
ggccucugcauucauccag

SEQ ID NO: 2430627 - RNA, 19 nt, Artificial Sequence
  Description of Artificial Sequence: Synthetic oligonucleotide
gucccucaaugccucggcg

SEQ ID NO: 2430628 - RNA, 19 nt, Artificial Sequence
  Description of Artificial Sequence: Synthetic oligonucleotide
ugaggccucugcauucauc

SEQ ID NO: 2430629 - RNA, 19 nt, Artificial Sequence
  Description of Artificial Sequence: Synthetic oligonucleotide
uggucccucaaugccucgg

SEQ ID NO: 2430630 - RNA, 19 nt, Artificial Sequence
  Description of Artificial Sequence: Synthetic oligonucleotide
ucaaugccucggcgaaggc

SEQ ID NO: 2430631 - RNA, 19 nt, Artificial Sequence
  Description of Artificial Sequence: Synthetic oligonucleotide
ccugauugauuaaguuucc

SEQ ID NO: 2430632 - RNA, 19 nt, Artificial Sequence
  Description of Artificial Sequence: Synthetic oligonucleotide
gauacgcuucucguuuuca

SEQ ID NO: 2430633 - RNA, 19 nt, Artificial Sequence
  Description of Artificial Sequence: Synthetic oligonucleotide
acccaggaaugucacaauu

SEQ ID NO: 2430634 - RNA, 19 nt, Artificial Sequence
  Description of Artificial Sequence: Synthetic oligonucleotide
ugaaugcaagacugagguu

SEQ ID NO: 2430635 - RNA, 19 nt, Artificial Sequence
  Description of Artificial Sequence: Synthetic oligonucleotide
ugauugccccacaucccaa

SEQ ID NO: 2430636 - RNA, 19 nt, Artificial Sequence
  Description of Artificial Sequence: Synthetic oligonucleotide
ggcggcugaaacaaggcug

SEQ ID NO: 2430637 - RNA, 19 nt, Artificial Sequence
  Description of Artificial Sequence: Synthetic oligonucleotide
gcuucucguuuucaaagac

SEQ ID NO: 2430638 - RNA, 19 nt, Artificial Sequence
  Description of Artificial Sequence: Synthetic oligonucleotide
gcugagucugauaacugug

SEQ ID NO: 2430639 - RNA, 19 nt, Artificial Sequence
  Description of Artificial Sequence: Synthetic oligonucleotide
uugucagagugguguucug

SEQ ID NO: 2430640 - RNA, 19 nt, Artificial Sequence
  Description of Artificial Sequence: Synthetic oligonucleotide
ugacgcugagucugauaac

SEQ ID NO: 2430641 - RNA, 19 nt, Artificial Sequence
  Description of Artificial Sequence: Synthetic oligonucleotide
uugccccacaucccaacau

SEQ ID NO: 2430642 - RNA, 19 nt, Artificial Sequence
  Description of Artificial Sequence: Synthetic oligonucleotide
caaggcugaagcuccugca

SEQ ID NO: 2430643 - RNA, 19 nt, Artificial Sequence
  Description of Artificial Sequence: Synthetic oligonucleotide
guccccuugacugugauau

SEQ ID NO: 2430644 - RNA, 19 nt, Artificial Sequence
  Description of Artificial Sequence: Synthetic oligonucleotide
uuuugucagccagaauauu

SEQ ID NO: 2430645 - RNA, 19 nt, Artificial Sequence
  Description of Artificial Sequence: Synthetic oligonucleotide
uggcuccaauaucagugau

SEQ ID NO: 2430646 - RNA, 19 nt, Artificial Sequence
  Description of Artificial Sequence: Synthetic oligonucleotide
auugacgcugagucugaua

SEQ ID NO: 2430647 - RNA, 19 nt, Artificial Sequence
  Description of Artificial Sequence: Synthetic oligonucleotide
uucaccccugugucaguga

SEQ ID NO: 2430648 - RNA, 19 nt, Artificial Sequence
  Description of Artificial Sequence: Synthetic oligonucleotide
cauaaaugccucagcgucu

SEQ ID NO: 2430649 - RNA, 19 nt, Artificial Sequence
  Description of Artificial Sequence: Synthetic oligonucleotide
gaucugguuguuguauaaa

SEQ ID NO: 2430650 - RNA, 19 nt, Artificial Sequence
  Description of Artificial Sequence: Synthetic oligonucleotide
ucucguuuucaaagaccuu

SEQ ID NO: 2430651 - RNA, 19 nt, Artificial Sequence
  Description of Artificial Sequence: Synthetic oligonucleotide
acacagcaccuucaccccu

SEQ ID NO: 2430652 - RNA, 19 nt, Artificial Sequence
  Description of Artificial Sequence: Synthetic oligonucleotide
gcuccaauaucagugaucu

SEQ ID NO: 2430653 - RNA, 19 nt, Artificial Sequence
  Description of Artificial Sequence: Synthetic oligonucleotide
augucacaauuuuguacuu

SEQ ID NO: 2430654 - RNA, 19 nt, Artificial Sequence
  Description of Artificial Sequence: Synthetic oligonucleotide
aauggccaucagaaacaga

SEQ ID NO: 2430655 - RNA, 19 nt, Artificial Sequence
  Description of Artificial Sequence: Synthetic oligonucleotide
auccccgaucugauugccc

SEQ ID NO: 2430656 - RNA, 19 nt, Artificial Sequence
  Description of Artificial Sequence: Synthetic oligonucleotide
augauacgcuucucguuuu

SEQ ID NO: 2430657 - RNA, 19 nt, Artificial Sequence
  Description of Artificial Sequence: Synthetic oligonucleotide
agcacucugcggccucauc

SEQ ID NO: 2430658 - RNA, 19 nt, Artificial Sequence
  Description of Artificial Sequence: Synthetic oligonucleotide
cagaugauacgcuucucgu

SEQ ID NO: 2430659 - RNA, 19 nt, Artificial Sequence
  Description of Artificial Sequence: Synthetic oligonucleotide
aguuuccauugagacaaau

SEQ ID NO: 2430660 - RNA, 19 nt, Artificial Sequence
  Description of Artificial Sequence: Synthetic oligonucleotide
gaagcuccugcacuccaua

SEQ ID NO: 2430661 - RNA, 19 nt, Artificial Sequence
  Description of Artificial Sequence: Synthetic oligonucleotide
cauugagguuguuguuguc

SEQ ID NO: 2430662 - RNA, 19 nt, Artificial Sequence
  Description of Artificial Sequence: Synthetic oligonucleotide
ggaaugucacaauuuugua

SEQ ID NO: 2430663 - RNA, 19 nt, Artificial Sequence
  Description of Artificial Sequence: Synthetic oligonucleotide
ggaggugcuguucuucaca

SEQ ID NO: 2430664 - RNA, 19 nt, Artificial Sequence
  Description of Artificial Sequence: Synthetic oligonucleotide
cuccugauugauuaaguuu

SEQ ID NO: 2430665 - RNA, 19 nt, Artificial Sequence
  Description of Artificial Sequence: Synthetic oligonucleotide
cuucaccccugugucagug

SEQ ID NO: 2430666 - RNA, 19 nt, Artificial Sequence
  Description of Artificial Sequence: Synthetic oligonucleotide
uuugccccuucauccccga

SEQ ID NO: 2430667 - RNA, 19 nt, Artificial Sequence
  Description of Artificial Sequence: Synthetic oligonucleotide
agaugccauugaaugcaag

SEQ ID NO: 2430668 - RNA, 19 nt, Artificial Sequence
  Description of Artificial Sequence: Synthetic oligonucleotide
cugugaggcggcugaaaca

SEQ ID NO: 2430669 - RNA, 19 nt, Artificial Sequence
  Description of Artificial Sequence: Synthetic oligonucleotide
gagguuggacaggcugggg

SEQ ID NO: 2430670 - RNA, 19 nt, Artificial Sequence
  Description of Artificial Sequence: Synthetic oligonucleotide
ccauugagacaaaucucug

SEQ ID NO: 2430671 - RNA, 19 nt, Artificial Sequence
  Description of Artificial Sequence: Synthetic oligonucleotide
ggcugaaacaaggcugaag

SEQ ID NO: 2430672 - RNA, 19 nt, Artificial Sequence
  Description of Artificial Sequence: Synthetic oligonucleotide
ugauaacugugaggcggcu

SEQ ID NO: 2430673 - RNA, 19 nt, Artificial Sequence
  Description of Artificial Sequence: Synthetic oligonucleotide
cugauugauuaaguuucca

SEQ ID NO: 2430674 - RNA, 19 nt, Artificial Sequence
  Description of Artificial Sequence: Synthetic oligonucleotide
gugaucugguuguuguaua

SEQ ID NO: 2430675 - RNA, 19 nt, Artificial Sequence
  Description of Artificial Sequence: Synthetic oligonucleotide
uaaggugcgugaggccucu

SEQ ID NO: 2430676 - RNA, 19 nt, Artificial Sequence
  Description of Artificial Sequence: Synthetic oligonucleotide
cacauacuuggcuccaaua

SEQ ID NO: 2430677 - RNA, 19 nt, Artificial Sequence
  Description of Artificial Sequence: Synthetic oligonucleotide
ucagcccaggaauggccau

SEQ ID NO: 2430678 - RNA, 19 nt, Artificial Sequence
  Description of Artificial Sequence: Synthetic oligonucleotide
gcacucugcggccucauca

SEQ ID NO: 2430679 - RNA, 19 nt, Artificial Sequence
  Description of Artificial Sequence: Synthetic oligonucleotide
ccaguuuaaggugcgugag

SEQ ID NO: 2430680 - RNA, 19 nt, Artificial Sequence
  Description of Artificial Sequence: Synthetic oligonucleotide
cagaaacagaugauacgcu

SEQ ID NO: 2430681 - RNA, 19 nt, Artificial Sequence
  Description of Artificial Sequence: Synthetic oligonucleotide
gcucuucccucccucuggg

SEQ ID NO: 2430682 - RNA, 19 nt, Artificial Sequence
  Description of Artificial Sequence: Synthetic oligonucleotide
aucaacgauggaggugcug

SEQ ID NO: 2430683 - RNA, 19 nt, Artificial Sequence
  Description of Artificial Sequence: Synthetic oligonucleotide
cucuguuaugguggaguuc

SEQ ID NO: 2430684 - RNA, 19 nt, Artificial Sequence
  Description of Artificial Sequence: Synthetic oligonucleotide
cagggccugcgcaaggcuc

SEQ ID NO: 2430685 - RNA, 19 nt, Artificial Sequence
  Description of Artificial Sequence: Synthetic oligonucleotide
uccccuugacugugauaug

SEQ ID NO: 2430686 - RNA, 19 nt, Artificial Sequence
  Description of Artificial Sequence: Synthetic oligonucleotide
cuccaauaucagugaucug

SEQ ID NO: 2430687 - RNA, 19 nt, Artificial Sequence
  Description of Artificial Sequence: Synthetic oligonucleotide
ugcauucauccaggauuug

SEQ ID NO: 2430688 - RNA, 19 nt, Artificial Sequence
  Description of Artificial Sequence: Synthetic oligonucleotide
cauccccgaucugauugcc

SEQ ID NO: 2430689 - RNA, 19 nt, Artificial Sequence
  Description of Artificial Sequence: Synthetic oligonucleotide
gcaaagacucagcccagga

SEQ ID NO: 2430690 - RNA, 19 nt, Artificial Sequence
  Description of Artificial Sequence: Synthetic oligonucleotide
gggccacauacuuggcucc

SEQ ID NO: 2430691 - RNA, 19 nt, Artificial Sequence
  Description of Artificial Sequence: Synthetic oligonucleotide
cucugcggccucaucauua

SEQ ID NO: 2430692 - RNA, 19 nt, Artificial Sequence
  Description of Artificial Sequence: Synthetic oligonucleotide
gaaggccuuugccccuuca

SEQ ID NO: 2430693 - RNA, 19 nt, Artificial Sequence
  Description of Artificial Sequence: Synthetic oligonucleotide
ggugcgugaggccucugca

SEQ ID NO: 2430694 - RNA, 19 nt, Artificial Sequence
  Description of Artificial Sequence: Synthetic oligonucleotide
aggccucugcauucaucca

SEQ ID NO: 2430695 - RNA, 19 nt, Artificial Sequence
  Description of Artificial Sequence: Synthetic oligonucleotide
gccuuugccccuucauccc

SEQ ID NO: 2430696 - RNA, 19 nt, Artificial Sequence
  Description of Artificial Sequence: Synthetic oligonucleotide
uguccccuugacugugaua

SEQ ID NO: 2430697 - RNA, 19 nt, Artificial Sequence
  Description of Artificial Sequence: Synthetic oligonucleotide
acgcugagucugauaacug

SEQ ID NO: 2430698 - RNA, 19 nt, Artificial Sequence
  Description of Artificial Sequence: Synthetic oligonucleotide
cucccucuggggagaugcc

SEQ ID NO: 2430699 - RNA, 19 nt, Artificial Sequence
  Description of Artificial Sequence: Synthetic oligonucleotide
cuccugcacuccauaguca

SEQ ID NO: 2430700 - RNA, 19 nt, Artificial Sequence
  Description of Artificial Sequence: Synthetic oligonucleotide
cugcauucauccaggauuu

SEQ ID NO: 2430701 - RNA, 19 nt, Artificial Sequence
  Description of Artificial Sequence: Synthetic oligonucleotide
cugcagugccucagccagc

SEQ ID NO: 2430702 - RNA, 19 nt, Artificial Sequence
  Description of Artificial Sequence: Synthetic oligonucleotide
cagcgucugguugacuuuc

SEQ ID NO: 2430703 - RNA, 19 nt, Artificial Sequence
  Description of Artificial Sequence: Synthetic oligonucleotide
gguuguuguuguccagauc

SEQ ID NO: 2430704 - RNA, 19 nt, Artificial Sequence
  Description of Artificial Sequence: Synthetic oligonucleotide
cccaguuuaaggugcguga

SEQ ID NO: 2430705 - RNA, 19 nt, Artificial Sequence
  Description of Artificial Sequence: Synthetic oligonucleotide
caacaucaacgauggaggu

SEQ ID NO: 2430706 - RNA, 19 nt, Artificial Sequence
  Description of Artificial Sequence: Synthetic oligonucleotide
gccugcgcaaggcucuucc

SEQ ID NO: 2430707 - RNA, 19 nt, Artificial Sequence
  Description of Artificial Sequence: Synthetic oligonucleotide
gagaugccauugaaugcaa

SEQ ID NO: 2430708 - RNA, 19 nt, Artificial Sequence
  Description of Artificial Sequence: Synthetic oligonucleotide
cguuuucaaagaccuuggc

SEQ ID NO: 2430709 - RNA, 19 nt, Artificial Sequence
  Description of Artificial Sequence: Synthetic oligonucleotide
gugaucugauugacgcuga

SEQ ID NO: 2430710 - RNA, 19 nt, Artificial Sequence
  Description of Artificial Sequence: Synthetic oligonucleotide
cuggggagaugccauugaa

SEQ ID NO: 2430711 - RNA, 19 nt, Artificial Sequence
  Description of Artificial Sequence: Synthetic oligonucleotide
ccccucaccuguuauucug

SEQ ID NO: 2430712 - RNA, 19 nt, Artificial Sequence
  Description of Artificial Sequence: Synthetic oligonucleotide
cauccaggauuugggccac

SEQ ID NO: 2430713 - RNA, 19 nt, Artificial Sequence
  Description of Artificial Sequence: Synthetic oligonucleotide
ucccaacaucaacgaugga

SEQ ID NO: 2430714 - RNA, 19 nt, Artificial Sequence
  Description of Artificial Sequence: Synthetic oligonucleotide
ccuuugccccuucaucccc

SEQ ID NO: 2430715 - RNA, 19 nt, Artificial Sequence
  Description of Artificial Sequence: Synthetic oligonucleotide
gaagcacucugcggccuca

SEQ ID NO: 2430716 - RNA, 19 nt, Artificial Sequence
  Description of Artificial Sequence: Synthetic oligonucleotide
uaucagugaucugguuguu

SEQ ID NO: 2430717 - RNA, 19 nt, Artificial Sequence
  Description of Artificial Sequence: Synthetic oligonucleotide
gccauaaaugccucagcgu

SEQ ID NO: 2430718 - RNA, 19 nt, Artificial Sequence
  Description of Artificial Sequence: Synthetic oligonucleotide
uucccucccucuggggaga

SEQ ID NO: 2430719 - RNA, 19 nt, Artificial Sequence
  Description of Artificial Sequence: Synthetic oligonucleotide
ggcuccaauaucagugauc

SEQ ID NO: 2430720 - RNA, 19 nt, Artificial Sequence
  Description of Artificial Sequence: Synthetic oligonucleotide
cugcggccucaucauuaag

SEQ ID NO: 2430721 - RNA, 19 nt, Artificial Sequence
  Description of Artificial Sequence: Synthetic oligonucleotide
agggccugcgcaaggcucu

SEQ ID NO: 2430722 - RNA, 19 nt, Artificial Sequence
  Description of Artificial Sequence: Synthetic oligonucleotide
cugugauaugauucugaau

SEQ ID NO: 2430723 - RNA, 19 nt, Artificial Sequence
  Description of Artificial Sequence: Synthetic oligonucleotide
gcgucugguugacuuucag

SEQ ID NO: 2430724 - RNA, 19 nt, Artificial Sequence
  Description of Artificial Sequence: Synthetic oligonucleotide
ccauugaaugcaagacuga

SEQ ID NO: 2430725 - RNA, 19 nt, Artificial Sequence
  Description of Artificial Sequence: Synthetic oligonucleotide
acucugcggccucaucauu

SEQ ID NO: 2430726 - RNA, 19 nt, Artificial Sequence
  Description of Artificial Sequence: Synthetic oligonucleotide
gcggcugaaacaaggcuga

SEQ ID NO: 2430727 - RNA, 19 nt, Artificial Sequence
  Description of Artificial Sequence: Synthetic oligonucleotide
caccccugugucagugauc

SEQ ID NO: 2430728 - RNA, 19 nt, Artificial Sequence
  Description of Artificial Sequence: Synthetic oligonucleotide
ccaauaucagugaucuggu

SEQ ID NO: 2430729 - RNA, 19 nt, Artificial Sequence
  Description of Artificial Sequence: Synthetic oligonucleotide
gugaggcggcugaaacaag

SEQ ID NO: 2430730 - RNA, 19 nt, Artificial Sequence
  Description of Artificial Sequence: Synthetic oligonucleotide
aaguuuccauugagacaaa

SEQ ID NO: 2430731 - RNA, 19 nt, Artificial Sequence
  Description of Artificial Sequence: Synthetic oligonucleotide
gguggucccucaaugccuc

SEQ ID NO: 2430732 - RNA, 19 nt, Artificial Sequence
  Description of Artificial Sequence: Synthetic oligonucleotide
ccagagccacacacuuucc

SEQ ID NO: 2430733 - RNA, 19 nt, Artificial Sequence
  Description of Artificial Sequence: Synthetic oligonucleotide
gcgcaaggcucuucccucc

SEQ ID NO: 2430734 - RNA, 19 nt, Artificial Sequence
  Description of Artificial Sequence: Synthetic oligonucleotide
cagugaucugauugacgcu

SEQ ID NO: 2430735 - RNA, 19 nt, Artificial Sequence
  Description of Artificial Sequence: Synthetic oligonucleotide
aagcacucugcggccucau

SEQ ID NO: 2430736 - RNA, 19 nt, Artificial Sequence
  Description of Artificial Sequence: Synthetic oligonucleotide
augcaagacugagguugga

SEQ ID NO: 2430737 - RNA, 19 nt, Artificial Sequence
  Description of Artificial Sequence: Synthetic oligonucleotide
caaagaccuuggccuccuc

SEQ ID NO: 2430738 - RNA, 19 nt, Artificial Sequence
  Description of Artificial Sequence: Synthetic oligonucleotide
agcgucugguugacuuuca

SEQ ID NO: 2430739 - RNA, 19 nt, Artificial Sequence
  Description of Artificial Sequence: Synthetic oligonucleotide
acaggcugggguggucccu

SEQ ID NO: 2430740 - RNA, 19 nt, Artificial Sequence
  Description of Artificial Sequence: Synthetic oligonucleotide
gccccuucauccccgaucu

SEQ ID NO: 2430741 - RNA, 19 nt, Artificial Sequence
  Description of Artificial Sequence: Synthetic oligonucleotide
cagcccaggaauggccauc

SEQ ID NO: 2430742 - RNA, 19 nt, Artificial Sequence
  Description of Artificial Sequence: Synthetic oligonucleotide
gcgugaggccucugcauuc

SEQ ID NO: 2430743 - RNA, 19 nt, Artificial Sequence
  Description of Artificial Sequence: Synthetic oligonucleotide
ccccuugacugugauauga

SEQ ID NO: 2430744 - RNA, 19 nt, Artificial Sequence
  Description of Artificial Sequence: Synthetic oligonucleotide
cccuucauccccgaucuga

SEQ ID NO: 2430745 - RNA, 19 nt, Artificial Sequence
  Description of Artificial Sequence: Synthetic oligonucleotide
ccaggaaugucacaauuuu

SEQ ID NO: 2430746 - RNA, 19 nt, Artificial Sequence
  Description of Artificial Sequence: Synthetic oligonucleotide
ggcuguccccuugacugug

SEQ ID NO: 2430747 - RNA, 19 nt, Artificial Sequence
  Description of Artificial Sequence: Synthetic oligonucleotide
aaggugcgugaggccucug

SEQ ID NO: 2430748 - RNA, 19 nt, Artificial Sequence
  Description of Artificial Sequence: Synthetic oligonucleotide
cucaccuguuauucuguuu

SEQ ID NO: 2430749 - RNA, 19 nt, Artificial Sequence
  Description of Artificial Sequence: Synthetic oligonucleotide
cacucugcggccucaucau

SEQ ID NO: 2430750 - RNA, 19 nt, Artificial Sequence
  Description of Artificial Sequence: Synthetic oligonucleotide
cucugcauucauccaggau

SEQ ID NO: 2430751 - RNA, 19 nt, Artificial Sequence
  Description of Artificial Sequence: Synthetic oligonucleotide
aggcugggguggucccuca

SEQ ID NO: 2430752 - RNA, 19 nt, Artificial Sequence
  Description of Artificial Sequence: Synthetic oligonucleotide
gccccacaucccaacauca

SEQ ID NO: 2430753 - RNA, 19 nt, Artificial Sequence
  Description of Artificial Sequence: Synthetic oligonucleotide
gugcgugaggccucugcau

SEQ ID NO: 2430754 - RNA, 19 nt, Artificial Sequence
  Description of Artificial Sequence: Synthetic oligonucleotide
caucucagcgaagcacucu

SEQ ID NO: 2430755 - RNA, 19 nt, Artificial Sequence
  Description of Artificial Sequence: Synthetic oligonucleotide
cgcuucucguuuucaaaga

SEQ ID NO: 2430756 - RNA, 19 nt, Artificial Sequence
  Description of Artificial Sequence: Synthetic oligonucleotide
guguucugcuucagggccu

SEQ ID NO: 2430757 - RNA, 19 nt, Artificial Sequence
  Description of Artificial Sequence: Synthetic oligonucleotide
gcggccucaucauuaaguu

SEQ ID NO: 2430758 - RNA, 19 nt, Artificial Sequence
  Description of Artificial Sequence: Synthetic oligonucleotide
gauugacgcugagucugau

SEQ ID NO: 2430759 - RNA, 19 nt, Artificial Sequence
  Description of Artificial Sequence: Synthetic oligonucleotide
cccgaucugauugccccac

SEQ ID NO: 2430760 - RNA, 19 nt, Artificial Sequence
  Description of Artificial Sequence: Synthetic oligonucleotide
cugggcuguccccuugacu

SEQ ID NO: 2430761 - RNA, 19 nt, Artificial Sequence
  Description of Artificial Sequence: Synthetic oligonucleotide
gcugggcuguccccuugac

SEQ ID NO: 2430762 - RNA, 19 nt, Artificial Sequence
  Description of Artificial Sequence: Synthetic oligonucleotide
gguugacuuucagcaucuc

SEQ ID NO: 2430763 - RNA, 19 nt, Artificial Sequence
  Description of Artificial Sequence: Synthetic oligonucleotide
ccuccugauugauuaaguu

SEQ ID NO: 2430764 - RNA, 19 nt, Artificial Sequence
  Description of Artificial Sequence: Synthetic oligonucleotide
cuucauccccgaucugauu

SEQ ID NO: 2430765 - RNA, 19 nt, Artificial Sequence
  Description of Artificial Sequence: Synthetic oligonucleotide
cccaggaaugucacaauuu

SEQ ID NO: 2430766 - RNA, 19 nt, Artificial Sequence
  Description of Artificial Sequence: Synthetic oligonucleotide
ggguggucccucaaugccu

SEQ ID NO: 2430767 - RNA, 19 nt, Artificial Sequence
  Description of Artificial Sequence: Synthetic oligonucleotide
caucaacgauggaggugcu

SEQ ID NO: 2430768 - RNA, 19 nt, Artificial Sequence
  Description of Artificial Sequence: Synthetic oligonucleotide
gccucggcgaaggccuuug

SEQ ID NO: 2430769 - RNA, 19 nt, Artificial Sequence
  Description of Artificial Sequence: Synthetic oligonucleotide
caacgauggaggugcuguu

SEQ ID NO: 2430770 - RNA, 19 nt, Artificial Sequence
  Description of Artificial Sequence: Synthetic oligonucleotide
gcuguucuucacagccaga

SEQ ID NO: 2430771 - RNA, 19 nt, Artificial Sequence
  Description of Artificial Sequence: Synthetic oligonucleotide
ccauagucauugagguugu

SEQ ID NO: 2430772 - RNA, 19 nt, Artificial Sequence
  Description of Artificial Sequence: Synthetic oligonucleotide
gcccaggaauggccaucag

SEQ ID NO: 2430773 - RNA, 19 nt, Artificial Sequence
  Description of Artificial Sequence: Synthetic oligonucleotide
ccugugucagugaucugau

SEQ ID NO: 2430774 - RNA, 19 nt, Artificial Sequence
  Description of Artificial Sequence: Synthetic oligonucleotide
ugccucggcgaaggccuuu

SEQ ID NO: 2430775 - RNA, 19 nt, Artificial Sequence
  Description of Artificial Sequence: Synthetic oligonucleotide
ccuucauccccgaucugau

SEQ ID NO: 2430776 - RNA, 19 nt, Artificial Sequence
  Description of Artificial Sequence: Synthetic oligonucleotide
ccuugacugugauaugauu

SEQ ID NO: 2430777 - RNA, 19 nt, Artificial Sequence
  Description of Artificial Sequence: Synthetic oligonucleotide
ccucggcgaaggccuuugc

SEQ ID NO: 2430778 - RNA, 19 nt, Artificial Sequence
  Description of Artificial Sequence: Synthetic oligonucleotide
gccucagcgucugguugac

SEQ ID NO: 2430779 - RNA, 19 nt, Artificial Sequence
  Description of Artificial Sequence: Synthetic oligonucleotide
ggcgaaggccuuugccccu

SEQ ID NO: 2430780 - RNA, 19 nt, Artificial Sequence
  Description of Artificial Sequence: Synthetic oligonucleotide
cugugucagugaucugauu

SEQ ID NO: 2430781 - RNA, 19 nt, Artificial Sequence
  Description of Artificial Sequence: Synthetic oligonucleotide
ccuccuccugauugauuaa

SEQ ID NO: 2430782 - RNA, 19 nt, Artificial Sequence
  Description of Artificial Sequence: Synthetic oligonucleotide
gugaggccucugcauucau

SEQ ID NO: 2430783 - RNA, 19 nt, Artificial Sequence
  Description of Artificial Sequence: Synthetic oligonucleotide
cuguccccuugacugugau

SEQ ID NO: 2430784 - RNA, 19 nt, Artificial Sequence
  Description of Artificial Sequence: Synthetic oligonucleotide
gggcuguccccuugacugu

SEQ ID NO: 2430785 - RNA, 19 nt, Artificial Sequence
  Description of Artificial Sequence: Synthetic oligonucleotide
cuguuaugguggaguucuu

SEQ ID NO: 2430786 - RNA, 19 nt, Artificial Sequence
  Description of Artificial Sequence: Synthetic oligonucleotide
ccccgaucugauugcccca

SEQ ID NO: 2430787 - RNA, 19 nt, Artificial Sequence
  Description of Artificial Sequence: Synthetic oligonucleotide
cccuugacugugauaugau

SEQ ID NO: 2430788 - RNA, 19 nt, Artificial Sequence
  Description of Artificial Sequence: Synthetic oligonucleotide
ccaggauuugggccacaua

SEQ ID NO: 2430789 - RNA, 19 nt, Artificial Sequence
  Description of Artificial Sequence: Synthetic oligonucleotide
cgugaggccucugcauuca

SEQ ID NO: 2430790 - RNA, 19 nt, Artificial Sequence
  Description of Artificial Sequence: Synthetic oligonucleotide
augccucggcgaaggccuu

SEQ ID NO: 2430791 - RNA, 19 nt, Artificial Sequence
  Description of Artificial Sequence: Synthetic oligonucleotide
cauagucauugagguuguu

SEQ ID NO: 2430792 - RNA, 19 nt, Artificial Sequence
  Description of Artificial Sequence: Synthetic oligonucleotide
ccccugugucagugaucug

SEQ ID NO: 2430793 - RNA, 19 nt, Artificial Sequence
  Description of Artificial Sequence: Synthetic oligonucleotide
cgaucugauugccccacau

SEQ ID NO: 2430794 - RNA, 19 nt, Artificial Sequence
  Description of Artificial Sequence: Synthetic oligonucleotide
ccucaccuguuauucuguu

SEQ ID NO: 2430795 - RNA, 19 nt, Artificial Sequence
  Description of Artificial Sequence: Synthetic oligonucleotide
ggccugcgcaaggcucuuc

SEQ ID NO: 2430796 - RNA, 19 nt, Artificial Sequence
  Description of Artificial Sequence: Synthetic oligonucleotide
ccugcacuccauagucauu

SEQ ID NO: 2430797 - RNA, 19 nt, Artificial Sequence
  Description of Artificial Sequence: Synthetic oligonucleotide
ccuucaccccugugucagu

SEQ ID NO: 2430798 - RNA, 19 nt, Artificial Sequence
  Description of Artificial Sequence: Synthetic oligonucleotide
gcgaaggccuuugccccuu

SEQ ID NO: 2430799 - RNA, 19 nt, Artificial Sequence
  Description of Artificial Sequence: Synthetic oligonucleotide
ccucaucauuaaguucauu

SEQ ID NO: 2430800 - RNA, 19 nt, Artificial Sequence
  Description of Artificial Sequence: Synthetic oligonucleotide
cgauggaggugcuguucuu

SEQ ID NO: 2430801 - RNA, 19 nt, Artificial Sequence
  Description of Artificial Sequence: Synthetic oligonucleotide
ccuuggccuccuccugauu

SEQ ID NO: 2430802 - RNA, 19 nt, Artificial Sequence
  Description of Artificial Sequence: Synthetic oligonucleotide
ccucagcgucugguugacu

SEQ ID NO: 2430803 - RNA, 19 nt, Artificial Sequence
  Description of Artificial Sequence: Synthetic oligonucleotide
gggccugcgcaaggcucuu

SEQ ID NO: 2430804 - RNA, 19 nt, Artificial Sequence
  Description of Artificial Sequence: Synthetic oligonucleotide
uuaaguauuuuauuguugg

SEQ ID NO: 2430805 - RNA, 19 nt, Artificial Sequence
  Description of Artificial Sequence: Synthetic oligonucleotide
auugguauccaccacgugc

SEQ ID NO: 2430806 - RNA, 19 nt, Artificial Sequence
  Description of Artificial Sequence: Synthetic oligonucleotide
aguauuuuauuguuggauc

SEQ ID NO: 2430807 - RNA, 19 nt, Artificial Sequence
  Description of Artificial Sequence: Synthetic oligonucleotide
aacuucaaggcuccguggc

SEQ ID NO: 2430808 - RNA, 19 nt, Artificial Sequence
  Description of Artificial Sequence: Synthetic oligonucleotide
uggacuagcaucaaaggca

SEQ ID NO: 2430809 - RNA, 19 nt, Artificial Sequence
  Description of Artificial Sequence: Synthetic oligonucleotide
auggacuagcaucaaaggc

SEQ ID NO: 2430810 - RNA, 19 nt, Artificial Sequence
  Description of Artificial Sequence: Synthetic oligonucleotide
aauuaaguauuuuauuguu

SEQ ID NO: 2430811 - RNA, 19 nt, Artificial Sequence
  Description of Artificial Sequence: Synthetic oligonucleotide
auaggacagagccuuagac

SEQ ID NO: 2430812 - RNA, 19 nt, Artificial Sequence
  Description of Artificial Sequence: Synthetic oligonucleotide
ccuucaguagaauagaugg

SEQ ID NO: 2430813 - RNA, 19 nt, Artificial Sequence
  Description of Artificial Sequence: Synthetic oligonucleotide
uagggaguggcccugauug

SEQ ID NO: 2430814 - RNA, 19 nt, Artificial Sequence
  Description of Artificial Sequence: Synthetic oligonucleotide
aauagauggccaaugcuuc

SEQ ID NO: 2430815 - RNA, 19 nt, Artificial Sequence
  Description of Artificial Sequence: Synthetic oligonucleotide
uguuggaucuuucuucucc

SEQ ID NO: 2430816 - RNA, 19 nt, Artificial Sequence
  Description of Artificial Sequence: Synthetic oligonucleotide
uucaguagaauagauggcc

SEQ ID NO: 2430817 - RNA, 19 nt, Artificial Sequence
  Description of Artificial Sequence: Synthetic oligonucleotide
aaguaggacgccuucagca

SEQ ID NO: 2430818 - RNA, 19 nt, Artificial Sequence
  Description of Artificial Sequence: Synthetic oligonucleotide
cuuggggccacucugauac

SEQ ID NO: 2430819 - RNA, 19 nt, Artificial Sequence
  Description of Artificial Sequence: Synthetic oligonucleotide
ugauaagagggccagugcu

SEQ ID NO: 2430820 - RNA, 19 nt, Artificial Sequence
  Description of Artificial Sequence: Synthetic oligonucleotide
accacuucacaauuuggac

SEQ ID NO: 2430821 - RNA, 19 nt, Artificial Sequence
  Description of Artificial Sequence: Synthetic oligonucleotide
cugcccauaagucacaaag

SEQ ID NO: 2430822 - RNA, 19 nt, Artificial Sequence
  Description of Artificial Sequence: Synthetic oligonucleotide
acaauuuggacgcaugcca

SEQ ID NO: 2430823 - RNA, 19 nt, Artificial Sequence
  Description of Artificial Sequence: Synthetic oligonucleotide
uuuccauugguauccacca

SEQ ID NO: 2430824 - RNA, 19 nt, Artificial Sequence
  Description of Artificial Sequence: Synthetic oligonucleotide
uagaauagauggccaaugc

SEQ ID NO: 2430825 - RNA, 19 nt, Artificial Sequence
  Description of Artificial Sequence: Synthetic oligonucleotide
aacguguggccacucugcc

SEQ ID NO: 2430826 - RNA, 19 nt, Artificial Sequence
  Description of Artificial Sequence: Synthetic oligonucleotide
gaauguaccauggacuagc

SEQ ID NO: 2430827 - RNA, 19 nt, Artificial Sequence
  Description of Artificial Sequence: Synthetic oligonucleotide
accuguagggagcaggaac

SEQ ID NO: 2430828 - RNA, 19 nt, Artificial Sequence
  Description of Artificial Sequence: Synthetic oligonucleotide
aacaccaccacuucacaau

SEQ ID NO: 2430829 - RNA, 19 nt, Artificial Sequence
  Description of Artificial Sequence: Synthetic oligonucleotide
cauaagucacaaaggcucg

SEQ ID NO: 2430830 - RNA, 19 nt, Artificial Sequence
  Description of Artificial Sequence: Synthetic oligonucleotide
ucacaauuuggacgcaugc

SEQ ID NO: 2430831 - RNA, 19 nt, Artificial Sequence
  Description of Artificial Sequence: Synthetic oligonucleotide
gaagucccaacuucaaggc

SEQ ID NO: 2430832 - RNA, 19 nt, Artificial Sequence
  Description of Artificial Sequence: Synthetic oligonucleotide
aaggagagagggcuuucgg

SEQ ID NO: 2430833 - RNA, 19 nt, Artificial Sequence
  Description of Artificial Sequence: Synthetic oligonucleotide
ugauuggcccugauaagag

SEQ ID NO: 2430834 - RNA, 19 nt, Artificial Sequence
  Description of Artificial Sequence: Synthetic oligonucleotide
uugguauccaccacgugcu

SEQ ID NO: 2430835 - RNA, 19 nt, Artificial Sequence
  Description of Artificial Sequence: Synthetic oligonucleotide
cauggacuagcaucaaagg

SEQ ID NO: 2430836 - RNA, 19 nt, Artificial Sequence
  Description of Artificial Sequence: Synthetic oligonucleotide
aggaucaccccguuggcgg

SEQ ID NO: 2430837 - RNA, 19 nt, Artificial Sequence
  Description of Artificial Sequence: Synthetic oligonucleotide
uggagucaggaucaccccg

SEQ ID NO: 2430838 - RNA, 19 nt, Artificial Sequence
  Description of Artificial Sequence: Synthetic oligonucleotide
ugacaagcccuucaguaga

SEQ ID NO: 2430839 - RNA, 19 nt, Artificial Sequence
  Description of Artificial Sequence: Synthetic oligonucleotide
agggcuuucgggucggucg

SEQ ID NO: 2430840 - RNA, 19 nt, Artificial Sequence
  Description of Artificial Sequence: Synthetic oligonucleotide
aagcccuucaguagaauag

SEQ ID NO: 2430841 - RNA, 19 nt, Artificial Sequence
  Description of Artificial Sequence: Synthetic oligonucleotide
uuauuguuggaucuuucuu

SEQ ID NO: 2430842 - RNA, 19 nt, Artificial Sequence
  Description of Artificial Sequence: Synthetic oligonucleotide
aucaaugaacaccaccacu

SEQ ID NO: 2430843 - RNA, 19 nt, Artificial Sequence
  Description of Artificial Sequence: Synthetic oligonucleotide
gaaguacuugggaaguagg

SEQ ID NO: 2430844 - RNA, 19 nt, Artificial Sequence
  Description of Artificial Sequence: Synthetic oligonucleotide
uucacaauuuggacgcaug

SEQ ID NO: 2430845 - RNA, 19 nt, Artificial Sequence
  Description of Artificial Sequence: Synthetic oligonucleotide
cacaucucgguccuguucc

SEQ ID NO: 2430846 - RNA, 19 nt, Artificial Sequence
  Description of Artificial Sequence: Synthetic oligonucleotide
uggcguagggcauaggaca

SEQ ID NO: 2430847 - RNA, 19 nt, Artificial Sequence
  Description of Artificial Sequence: Synthetic oligonucleotide
auuggcccugauaagaggg

SEQ ID NO: 2430848 - RNA, 19 nt, Artificial Sequence
  Description of Artificial Sequence: Synthetic oligonucleotide
aacugagguagcugcagca

SEQ ID NO: 2430849 - RNA, 19 nt, Artificial Sequence
  Description of Artificial Sequence: Synthetic oligonucleotide
ugcucuacguccuccacug

SEQ ID NO: 2430850 - RNA, 19 nt, Artificial Sequence
  Description of Artificial Sequence: Synthetic oligonucleotide
uguggugucuccaggggca

SEQ ID NO: 2430851 - RNA, 19 nt, Artificial Sequence
  Description of Artificial Sequence: Synthetic oligonucleotide
cuucaguagaauagauggc

SEQ ID NO: 2430852 - RNA, 19 nt, Artificial Sequence
  Description of Artificial Sequence: Synthetic oligonucleotide
uucaggggcacaaagccau

SEQ ID NO: 2430853 - RNA, 19 nt, Artificial Sequence
  Description of Artificial Sequence: Synthetic oligonucleotide
ccauaagucacaaaggcuc

SEQ ID NO: 2430854 - RNA, 19 nt, Artificial Sequence
  Description of Artificial Sequence: Synthetic oligonucleotide
uaagucacaaaggcucggg

SEQ ID NO: 2430855 - RNA, 19 nt, Artificial Sequence
  Description of Artificial Sequence: Synthetic oligonucleotide
auaagagggccagugcugg

SEQ ID NO: 2430856 - RNA, 19 nt, Artificial Sequence
  Description of Artificial Sequence: Synthetic oligonucleotide
agucccaacuucaaggcuc

SEQ ID NO: 2430857 - RNA, 19 nt, Artificial Sequence
  Description of Artificial Sequence: Synthetic oligonucleotide
aggggauuccaucugccag

SEQ ID NO: 2430858 - RNA, 19 nt, Artificial Sequence
  Description of Artificial Sequence: Synthetic oligonucleotide
gcacaaagccaucagcucg

SEQ ID NO: 2430859 - RNA, 19 nt, Artificial Sequence
  Description of Artificial Sequence: Synthetic oligonucleotide
ucuaugggcccuucuaccu

SEQ ID NO: 2430860 - RNA, 19 nt, Artificial Sequence
  Description of Artificial Sequence: Synthetic oligonucleotide
ucuacguccuccacugaga

SEQ ID NO: 2430861 - RNA, 19 nt, Artificial Sequence
  Description of Artificial Sequence: Synthetic oligonucleotide
uuucaggggcacaaagcca

SEQ ID NO: 2430862 - RNA, 19 nt, Artificial Sequence
  Description of Artificial Sequence: Synthetic oligonucleotide
guuggaucuuucuucuccc

SEQ ID NO: 2430863 - RNA, 19 nt, Artificial Sequence
  Description of Artificial Sequence: Synthetic oligonucleotide
acuucaaggcuccguggcg

SEQ ID NO: 2430864 - RNA, 19 nt, Artificial Sequence
  Description of Artificial Sequence: Synthetic oligonucleotide
agagagggcuuucgggucg

SEQ ID NO: 2430865 - RNA, 19 nt, Artificial Sequence
  Description of Artificial Sequence: Synthetic oligonucleotide
ucagguacuuguagggagu

SEQ ID NO: 2430866 - RNA, 19 nt, Artificial Sequence
  Description of Artificial Sequence: Synthetic oligonucleotide
gauacuccgucucuugauc

SEQ ID NO: 2430867 - RNA, 19 nt, Artificial Sequence
  Description of Artificial Sequence: Synthetic oligonucleotide
gauaagagggccagugcug

SEQ ID NO: 2430868 - RNA, 19 nt, Artificial Sequence
  Description of Artificial Sequence: Synthetic oligonucleotide
guagaauagauggccaaug

SEQ ID NO: 2430869 - RNA, 19 nt, Artificial Sequence
  Description of Artificial Sequence: Synthetic oligonucleotide
agcaggaacguguggccac

SEQ ID NO: 2430870 - RNA, 19 nt, Artificial Sequence
  Description of Artificial Sequence: Synthetic oligonucleotide
caauuuggacgcaugccac

SEQ ID NO: 2430871 - RNA, 19 nt, Artificial Sequence
  Description of Artificial Sequence: Synthetic oligonucleotide
aaggggauuccaucugcca

SEQ ID NO: 2430872 - RNA, 19 nt, Artificial Sequence
  Description of Artificial Sequence: Synthetic oligonucleotide
aacccugaggccaagugga

SEQ ID NO: 2430873 - RNA, 19 nt, Artificial Sequence
  Description of Artificial Sequence: Synthetic oligonucleotide
uguucccggggucuauggg

SEQ ID NO: 2430874 - RNA, 19 nt, Artificial Sequence
  Description of Artificial Sequence: Synthetic oligonucleotide
ccacuucacaauuuggacg

SEQ ID NO: 2430875 - RNA, 19 nt, Artificial Sequence
  Description of Artificial Sequence: Synthetic oligonucleotide
aaguacuugggaaguagga

SEQ ID NO: 2430876 - RNA, 19 nt, Artificial Sequence
  Description of Artificial Sequence: Synthetic oligonucleotide
aagucccaacuucaaggcu

SEQ ID NO: 2430877 - RNA, 19 nt, Artificial Sequence
  Description of Artificial Sequence: Synthetic oligonucleotide
ccauggacuagcaucaaag

SEQ ID NO: 2430878 - RNA, 19 nt, Artificial Sequence
  Description of Artificial Sequence: Synthetic oligonucleotide
cacaauuuggacgcaugcc

SEQ ID NO: 2430879 - RNA, 19 nt, Artificial Sequence
  Description of Artificial Sequence: Synthetic oligonucleotide
ccuggagucaggaucaccc

SEQ ID NO: 2430880 - RNA, 19 nt, Artificial Sequence
  Description of Artificial Sequence: Synthetic oligonucleotide
cucgccuggcuguagggcg

SEQ ID NO: 2430881 - RNA, 19 nt, Artificial Sequence
  Description of Artificial Sequence: Synthetic oligonucleotide
uccaccacgugcucuacgu

SEQ ID NO: 2430882 - RNA, 19 nt, Artificial Sequence
  Description of Artificial Sequence: Synthetic oligonucleotide
gcccauaagucacaaaggc

SEQ ID NO: 2430883 - RNA, 19 nt, Artificial Sequence
  Description of Artificial Sequence: Synthetic oligonucleotide
ggaucuuucuucucccucc

SEQ ID NO: 2430884 - RNA, 19 nt, Artificial Sequence
  Description of Artificial Sequence: Synthetic oligonucleotide
ccuguagggagcaggaacg

SEQ ID NO: 2430885 - RNA, 19 nt, Artificial Sequence
  Description of Artificial Sequence: Synthetic oligonucleotide
cucuacguccuccacugag

SEQ ID NO: 2430886 - RNA, 19 nt, Artificial Sequence
  Description of Artificial Sequence: Synthetic oligonucleotide
auaagucacaaaggcucgg

SEQ ID NO: 2430887 - RNA, 19 nt, Artificial Sequence
  Description of Artificial Sequence: Synthetic oligonucleotide
uucccggggucuaugggcc

SEQ ID NO: 2430888 - RNA, 19 nt, Artificial Sequence
  Description of Artificial Sequence: Synthetic oligonucleotide
aaguggaugugugcccuuc

SEQ ID NO: 2430889 - RNA, 19 nt, Artificial Sequence
  Description of Artificial Sequence: Synthetic oligonucleotide
guaacccugaggccaagug

SEQ ID NO: 2430890 - RNA, 19 nt, Artificial Sequence
  Description of Artificial Sequence: Synthetic oligonucleotide
auacuccgucucuugauca

SEQ ID NO: 2430891 - RNA, 19 nt, Artificial Sequence
  Description of Artificial Sequence: Synthetic oligonucleotide
caacuucaaggcuccgugg

SEQ ID NO: 2430892 - RNA, 19 nt, Artificial Sequence
  Description of Artificial Sequence: Synthetic oligonucleotide
guucccggggucuaugggc

SEQ ID NO: 2430893 - RNA, 19 nt, Artificial Sequence
  Description of Artificial Sequence: Synthetic oligonucleotide
uggcggagcggaagaaggg

SEQ ID NO: 2430894 - RNA, 19 nt, Artificial Sequence
  Description of Artificial Sequence: Synthetic oligonucleotide
uggaucuuucuucucccuc

SEQ ID NO: 2430895 - RNA, 19 nt, Artificial Sequence
  Description of Artificial Sequence: Synthetic oligonucleotide
ugauacuccgucucuugau

SEQ ID NO: 2430896 - RNA, 19 nt, Artificial Sequence
  Description of Artificial Sequence: Synthetic oligonucleotide
acguguggccacucugccc

SEQ ID NO: 2430897 - RNA, 19 nt, Artificial Sequence
  Description of Artificial Sequence: Synthetic oligonucleotide
acuuguagggaguggcccu

SEQ ID NO: 2430898 - RNA, 19 nt, Artificial Sequence
  Description of Artificial Sequence: Synthetic oligonucleotide
aguugcagggccuccuuga

SEQ ID NO: 2430899 - RNA, 19 nt, Artificial Sequence
  Description of Artificial Sequence: Synthetic oligonucleotide
acuccgucucuugaucacc

SEQ ID NO: 2430900 - RNA, 19 nt, Artificial Sequence
  Description of Artificial Sequence: Synthetic oligonucleotide
gaacguguggccacucugc

SEQ ID NO: 2430901 - RNA, 19 nt, Artificial Sequence
  Description of Artificial Sequence: Synthetic oligonucleotide
cuagcaucaaaggcagggc

SEQ ID NO: 2430902 - RNA, 19 nt, Artificial Sequence
  Description of Artificial Sequence: Synthetic oligonucleotide
uggcaugacaagcccuuca

SEQ ID NO: 2430903 - RNA, 19 nt, Artificial Sequence
  Description of Artificial Sequence: Synthetic oligonucleotide
caugccacugaugacacca

SEQ ID NO: 2430904 - RNA, 19 nt, Artificial Sequence
  Description of Artificial Sequence: Synthetic oligonucleotide
ggaugugugcccuuccuug

SEQ ID NO: 2430905 - RNA, 19 nt, Artificial Sequence
  Description of Artificial Sequence: Synthetic oligonucleotide
caccacuucacaauuugga

SEQ ID NO: 2430906 - RNA, 19 nt, Artificial Sequence
  Description of Artificial Sequence: Synthetic oligonucleotide
uguagggcgagccgcugcu

SEQ ID NO: 2430907 - RNA, 19 nt, Artificial Sequence
  Description of Artificial Sequence: Synthetic oligonucleotide
ggggauuccaucugccagg

SEQ ID NO: 2430908 - RNA, 19 nt, Artificial Sequence
  Description of Artificial Sequence: Synthetic oligonucleotide
ugugugcccuuccuuggca

SEQ ID NO: 2430909 - RNA, 19 nt, Artificial Sequence
  Description of Artificial Sequence: Synthetic oligonucleotide
ggguccaucaaugaacacc

SEQ ID NO: 2430910 - RNA, 19 nt, Artificial Sequence
  Description of Artificial Sequence: Synthetic oligonucleotide
gucggucguaguugcaggg

SEQ ID NO: 2430911 - RNA, 19 nt, Artificial Sequence
  Description of Artificial Sequence: Synthetic oligonucleotide
uggaacugagguagcugca

SEQ ID NO: 2430912 - RNA, 19 nt, Artificial Sequence
  Description of Artificial Sequence: Synthetic oligonucleotide
guaccauggacuagcauca

SEQ ID NO: 2430913 - RNA, 19 nt, Artificial Sequence
  Description of Artificial Sequence: Synthetic oligonucleotide
acgccuucagcauucccug

SEQ ID NO: 2430914 - RNA, 19 nt, Artificial Sequence
  Description of Artificial Sequence: Synthetic oligonucleotide
uuuggacgcaugccacuga

SEQ ID NO: 2430915 - RNA, 19 nt, Artificial Sequence
  Description of Artificial Sequence: Synthetic oligonucleotide
ggacgcaugccacugauga

SEQ ID NO: 2430916 - RNA, 19 nt, Artificial Sequence
  Description of Artificial Sequence: Synthetic oligonucleotide
agcggaagaaggggauucc

SEQ ID NO: 2430917 - RNA, 19 nt, Artificial Sequence
  Description of Artificial Sequence: Synthetic oligonucleotide
aguagaauagauggccaau

SEQ ID NO: 2430918 - RNA, 19 nt, Artificial Sequence
  Description of Artificial Sequence: Synthetic oligonucleotide
cacugaugacaccaggguc

SEQ ID NO: 2430919 - RNA, 19 nt, Artificial Sequence
  Description of Artificial Sequence: Synthetic oligonucleotide
acgcaugccacugaugaca

SEQ ID NO: 2430920 - RNA, 19 nt, Artificial Sequence
  Description of Artificial Sequence: Synthetic oligonucleotide
ccccagguaacccugaggc

SEQ ID NO: 2430921 - RNA, 19 nt, Artificial Sequence
  Description of Artificial Sequence: Synthetic oligonucleotide
cacucugauacuccgucuc

SEQ ID NO: 2430922 - RNA, 19 nt, Artificial Sequence
  Description of Artificial Sequence: Synthetic oligonucleotide
uaggacgccuucagcauuc

SEQ ID NO: 2430923 - RNA, 19 nt, Artificial Sequence
  Description of Artificial Sequence: Synthetic oligonucleotide
cacugagaagcuguggaac

SEQ ID NO: 2430924 - RNA, 19 nt, Artificial Sequence
  Description of Artificial Sequence: Synthetic oligonucleotide
cagaauguaccauggacua

SEQ ID NO: 2430925 - RNA, 19 nt, Artificial Sequence
  Description of Artificial Sequence: Synthetic oligonucleotide
uucgggucggucguaguug

SEQ ID NO: 2430926 - RNA, 19 nt, Artificial Sequence
  Description of Artificial Sequence: Synthetic oligonucleotide
agaauguaccauggacuag

SEQ ID NO: 2430927 - RNA, 19 nt, Artificial Sequence
  Description of Artificial Sequence: Synthetic oligonucleotide
uccaacucagguacuugua

SEQ ID NO: 2430928 - RNA, 19 nt, Artificial Sequence
  Description of Artificial Sequence: Synthetic oligonucleotide
aauguaccauggacuagca

SEQ ID NO: 2430929 - RNA, 19 nt, Artificial Sequence
  Description of Artificial Sequence: Synthetic oligonucleotide
acucugauacuccgucucu

SEQ ID NO: 2430930 - RNA, 19 nt, Artificial Sequence
  Description of Artificial Sequence: Synthetic oligonucleotide
uaugggcccuucuaccuuc

SEQ ID NO: 2430931 - RNA, 19 nt, Artificial Sequence
  Description of Artificial Sequence: Synthetic oligonucleotide
uuucgggucggucguaguu

SEQ ID NO: 2430932 - RNA, 19 nt, Artificial Sequence
  Description of Artificial Sequence: Synthetic oligonucleotide
ggacuagcaucaaaggcag

SEQ ID NO: 2430933 - RNA, 19 nt, Artificial Sequence
  Description of Artificial Sequence: Synthetic oligonucleotide
aggggcacaaagccaucag

SEQ ID NO: 2430934 - RNA, 19 nt, Artificial Sequence
  Description of Artificial Sequence: Synthetic oligonucleotide
ggcaugacaagcccuucag

SEQ ID NO: 2430935 - RNA, 19 nt, Artificial Sequence
  Description of Artificial Sequence: Synthetic oligonucleotide
uucauggccaagaccugua

SEQ ID NO: 2430936 - RNA, 19 nt, Artificial Sequence
  Description of Artificial Sequence: Synthetic oligonucleotide
caaggagagagggcuuucg

SEQ ID NO: 2430937 - RNA, 19 nt, Artificial Sequence
  Description of Artificial Sequence: Synthetic oligonucleotide
uuggacgcaugccacugau

SEQ ID NO: 2430938 - RNA, 19 nt, Artificial Sequence
  Description of Artificial Sequence: Synthetic oligonucleotide
agccuuagacagcugcaca

SEQ ID NO: 2430939 - RNA, 19 nt, Artificial Sequence
  Description of Artificial Sequence: Synthetic oligonucleotide
ucgggucggucguaguugc

SEQ ID NO: 2430940 - RNA, 19 nt, Artificial Sequence
  Description of Artificial Sequence: Synthetic oligonucleotide
agggaguggcccugauugg

SEQ ID NO: 2430941 - RNA, 19 nt, Artificial Sequence
  Description of Artificial Sequence: Synthetic oligonucleotide
cugauuggcccugauaaga

SEQ ID NO: 2430942 - RNA, 19 nt, Artificial Sequence
  Description of Artificial Sequence: Synthetic oligonucleotide
gagagagggcuuucggguc

SEQ ID NO: 2430943 - RNA, 19 nt, Artificial Sequence
  Description of Artificial Sequence: Synthetic oligonucleotide
ugggaagucccaacuucaa

SEQ ID NO: 2430944 - RNA, 19 nt, Artificial Sequence
  Description of Artificial Sequence: Synthetic oligonucleotide
uacuccgucucuugaucac

SEQ ID NO: 2430945 - RNA, 19 nt, Artificial Sequence
  Description of Artificial Sequence: Synthetic oligonucleotide
ugugcccuuccuuggcaug

SEQ ID NO: 2430946 - RNA, 19 nt, Artificial Sequence
  Description of Artificial Sequence: Synthetic oligonucleotide
cgucucuugaucaccagcc

SEQ ID NO: 2430947 - RNA, 19 nt, Artificial Sequence
  Description of Artificial Sequence: Synthetic oligonucleotide
ggccaagaccuguagggag

SEQ ID NO: 2430948 - RNA, 19 nt, Artificial Sequence
  Description of Artificial Sequence: Synthetic oligonucleotide
gagccgcugcuuuccauug

SEQ ID NO: 2430949 - RNA, 19 nt, Artificial Sequence
  Description of Artificial Sequence: Synthetic oligonucleotide
ggucggucguaguugcagg

SEQ ID NO: 2430950 - RNA, 19 nt, Artificial Sequence
  Description of Artificial Sequence: Synthetic oligonucleotide
uugggaaguaggacgccuu

SEQ ID NO: 2430951 - RNA, 19 nt, Artificial Sequence
  Description of Artificial Sequence: Synthetic oligonucleotide
augggaagucccaacuuca

SEQ ID NO: 2430952 - RNA, 19 nt, Artificial Sequence
  Description of Artificial Sequence: Synthetic oligonucleotide
agguagcugcagcagggcu

SEQ ID NO: 2430953 - RNA, 19 nt, Artificial Sequence
  Description of Artificial Sequence: Synthetic oligonucleotide
gggaagucccaacuucaag

SEQ ID NO: 2430954 - RNA, 19 nt, Artificial Sequence
  Description of Artificial Sequence: Synthetic oligonucleotide
uggacgcaugccacugaug

SEQ ID NO: 2430955 - RNA, 19 nt, Artificial Sequence
  Description of Artificial Sequence: Synthetic oligonucleotide
uggaugugugcccuuccuu

SEQ ID NO: 2430956 - RNA, 19 nt, Artificial Sequence
  Description of Artificial Sequence: Synthetic oligonucleotide
ggaacguguggccacucug

SEQ ID NO: 2430957 - RNA, 19 nt, Artificial Sequence
  Description of Artificial Sequence: Synthetic oligonucleotide
agucaggaucaccccguug

SEQ ID NO: 2430958 - RNA, 19 nt, Artificial Sequence
  Description of Artificial Sequence: Synthetic oligonucleotide
gacgcaugccacugaugac

SEQ ID NO: 2430959 - RNA, 19 nt, Artificial Sequence
  Description of Artificial Sequence: Synthetic oligonucleotide
guuggcggagcggaagaag

SEQ ID NO: 2430960 - RNA, 19 nt, Artificial Sequence
  Description of Artificial Sequence: Synthetic oligonucleotide
agcucgcaugggaaguccc

SEQ ID NO: 2430961 - RNA, 19 nt, Artificial Sequence
  Description of Artificial Sequence: Synthetic oligonucleotide
ucuaccuuccugccuccuu

SEQ ID NO: 2430962 - RNA, 19 nt, Artificial Sequence
  Description of Artificial Sequence: Synthetic oligonucleotide
cuccuugaaguacuuggga

SEQ ID NO: 2430963 - RNA, 19 nt, Artificial Sequence
  Description of Artificial Sequence: Synthetic oligonucleotide
agggguccaucaaugaaca

SEQ ID NO: 2430964 - RNA, 19 nt, Artificial Sequence
  Description of Artificial Sequence: Synthetic oligonucleotide
gagcggaagaaggggauuc

SEQ ID NO: 2430965 - RNA, 19 nt, Artificial Sequence
  Description of Artificial Sequence: Synthetic oligonucleotide
ucggucguaguugcagggc

SEQ ID NO: 2430966 - RNA, 19 nt, Artificial Sequence
  Description of Artificial Sequence: Synthetic oligonucleotide
gcugcuuuccauugguauc

SEQ ID NO: 2430967 - RNA, 19 nt, Artificial Sequence
  Description of Artificial Sequence: Synthetic oligonucleotide
aucagcucgcaugggaagu

SEQ ID NO: 2430968 - RNA, 19 nt, Artificial Sequence
  Description of Artificial Sequence: Synthetic oligonucleotide
cuucuaccuuccugccucc

SEQ ID NO: 2430969 - RNA, 19 nt, Artificial Sequence
  Description of Artificial Sequence: Synthetic oligonucleotide
accauggacuagcaucaaa

SEQ ID NO: 2430970 - RNA, 19 nt, Artificial Sequence
  Description of Artificial Sequence: Synthetic oligonucleotide
caguagaauagauggccaa

SEQ ID NO: 2430971 - RNA, 19 nt, Artificial Sequence
  Description of Artificial Sequence: Synthetic oligonucleotide
cuagggguccaucaaugaa

SEQ ID NO: 2430972 - RNA, 19 nt, Artificial Sequence
  Description of Artificial Sequence: Synthetic oligonucleotide
ggaacugagguagcugcag

SEQ ID NO: 2430973 - RNA, 19 nt, Artificial Sequence
  Description of Artificial Sequence: Synthetic oligonucleotide
gacgccuucagcauucccu

SEQ ID NO: 2430974 - RNA, 19 nt, Artificial Sequence
  Description of Artificial Sequence: Synthetic oligonucleotide
ucgcaugggaagucccaac

SEQ ID NO: 2430975 - RNA, 19 nt, Artificial Sequence
  Description of Artificial Sequence: Synthetic oligonucleotide
agggccagugcugggcucg

SEQ ID NO: 2430976 - RNA, 19 nt, Artificial Sequence
  Description of Artificial Sequence: Synthetic oligonucleotide
caucugccagggcuagggg

SEQ ID NO: 2430977 - RNA, 19 nt, Artificial Sequence
  Description of Artificial Sequence: Synthetic oligonucleotide
agccgcugcuuuccauugg

SEQ ID NO: 2430978 - RNA, 19 nt, Artificial Sequence
  Description of Artificial Sequence: Synthetic oligonucleotide
agacagcugcacaucucgg

SEQ ID NO: 2430979 - RNA, 19 nt, Artificial Sequence
  Description of Artificial Sequence: Synthetic oligonucleotide
ggggcacaaagccaucagc

SEQ ID NO: 2430980 - RNA, 19 nt, Artificial Sequence
  Description of Artificial Sequence: Synthetic oligonucleotide
cugauacuccgucucuuga

SEQ ID NO: 2430981 - RNA, 19 nt, Artificial Sequence
  Description of Artificial Sequence: Synthetic oligonucleotide
ugaggccaaguggaugugu

SEQ ID NO: 2430982 - RNA, 19 nt, Artificial Sequence
  Description of Artificial Sequence: Synthetic oligonucleotide
ggccaaguggaugugugcc

SEQ ID NO: 2430983 - RNA, 19 nt, Artificial Sequence
  Description of Artificial Sequence: Synthetic oligonucleotide
ucaccccguuggcggagcg

SEQ ID NO: 2430984 - RNA, 19 nt, Artificial Sequence
  Description of Artificial Sequence: Synthetic oligonucleotide
cauugguauccaccacgug

SEQ ID NO: 2430985 - RNA, 19 nt, Artificial Sequence
  Description of Artificial Sequence: Synthetic oligonucleotide
caaggcuccguggcguagg

SEQ ID NO: 2430986 - RNA, 19 nt, Artificial Sequence
  Description of Artificial Sequence: Synthetic oligonucleotide
cuguagggcgagccgcugc

SEQ ID NO: 2430987 - RNA, 19 nt, Artificial Sequence
  Description of Artificial Sequence: Synthetic oligonucleotide
aggaacguguggccacucu

SEQ ID NO: 2430988 - RNA, 19 nt, Artificial Sequence
  Description of Artificial Sequence: Synthetic oligonucleotide
ucaaggcuccguggcguag

SEQ ID NO: 2430989 - RNA, 19 nt, Artificial Sequence
  Description of Artificial Sequence: Synthetic oligonucleotide
cuuguagggaguggcccug

SEQ ID NO: 2430990 - RNA, 19 nt, Artificial Sequence
  Description of Artificial Sequence: Synthetic oligonucleotide
ccaccacuucacaauuugg

SEQ ID NO: 2430991 - RNA, 19 nt, Artificial Sequence
  Description of Artificial Sequence: Synthetic oligonucleotide
ggcguucauggccaagacc

SEQ ID NO: 2430992 - RNA, 19 nt, Artificial Sequence
  Description of Artificial Sequence: Synthetic oligonucleotide
guggcguagggcauaggac

SEQ ID NO: 2430993 - RNA, 19 nt, Artificial Sequence
  Description of Artificial Sequence: Synthetic oligonucleotide
guagggagcaggaacgugu

SEQ ID NO: 2430994 - RNA, 19 nt, Artificial Sequence
  Description of Artificial Sequence: Synthetic oligonucleotide
agggcuagggguccaucaa

SEQ ID NO: 2430995 - RNA, 19 nt, Artificial Sequence
  Description of Artificial Sequence: Synthetic oligonucleotide
gcguucauggccaagaccu

SEQ ID NO: 2430996 - RNA, 19 nt, Artificial Sequence
  Description of Artificial Sequence: Synthetic oligonucleotide
cagugcugggcucgccugg

SEQ ID NO: 2430997 - RNA, 19 nt, Artificial Sequence
  Description of Artificial Sequence: Synthetic oligonucleotide
ucgccuggcuguagggcga

SEQ ID NO: 2430998 - RNA, 19 nt, Artificial Sequence
  Description of Artificial Sequence: Synthetic oligonucleotide
cccugauuggcccugauaa

SEQ ID NO: 2430999 - RNA, 19 nt, Artificial Sequence
  Description of Artificial Sequence: Synthetic oligonucleotide
agggcuuucaggggcacaa

SEQ ID NO: 2431000 - RNA, 19 nt, Artificial Sequence
  Description of Artificial Sequence: Synthetic oligonucleotide
gcaucaaaggcagggcuug

SEQ ID NO: 2431001 - RNA, 19 nt, Artificial Sequence
  Description of Artificial Sequence: Synthetic oligonucleotide
ucgguccuguucccggggu

SEQ ID NO: 2431002 - RNA, 19 nt, Artificial Sequence
  Description of Artificial Sequence: Synthetic oligonucleotide
ggcggagcggaagaagggg

SEQ ID NO: 2431003 - RNA, 19 nt, Artificial Sequence
  Description of Artificial Sequence: Synthetic oligonucleotide
acgugcucuacguccucca

SEQ ID NO: 2431004 - RNA, 19 nt, Artificial Sequence
  Description of Artificial Sequence: Synthetic oligonucleotide
ugcuuggggccacucugau

SEQ ID NO: 2431005 - RNA, 19 nt, Artificial Sequence
  Description of Artificial Sequence: Synthetic oligonucleotide
auguaccauggacuagcau

SEQ ID NO: 2431006 - RNA, 19 nt, Artificial Sequence
  Description of Artificial Sequence: Synthetic oligonucleotide
cagguacuuguagggagug

SEQ ID NO: 2431007 - RNA, 19 nt, Artificial Sequence
  Description of Artificial Sequence: Synthetic oligonucleotide
ucagcucgcaugggaaguc

SEQ ID NO: 2431008 - RNA, 19 nt, Artificial Sequence
  Description of Artificial Sequence: Synthetic oligonucleotide
uguagggaguggcccugau

SEQ ID NO: 2431009 - RNA, 19 nt, Artificial Sequence
  Description of Artificial Sequence: Synthetic oligonucleotide
aucaccccguuggcggagc

SEQ ID NO: 2431010 - RNA, 19 nt, Artificial Sequence
  Description of Artificial Sequence: Synthetic oligonucleotide
agcaucaaaggcagggcuu

SEQ ID NO: 2431011 - RNA, 19 nt, Artificial Sequence
  Description of Artificial Sequence: Synthetic oligonucleotide
cuacguccuccacugagaa

SEQ ID NO: 2431012 - RNA, 19 nt, Artificial Sequence
  Description of Artificial Sequence: Synthetic oligonucleotide
ccugauuggcccugauaag

SEQ ID NO: 2431013 - RNA, 19 nt, Artificial Sequence
  Description of Artificial Sequence: Synthetic oligonucleotide
uccguggcguagggcauag

SEQ ID NO: 2431014 - RNA, 19 nt, Artificial Sequence
  Description of Artificial Sequence: Synthetic oligonucleotide
uucaaggcuccguggcgua

SEQ ID NO: 2431015 - RNA, 19 nt, Artificial Sequence
  Description of Artificial Sequence: Synthetic oligonucleotide
cagggcuagggguccauca

SEQ ID NO: 2431016 - RNA, 19 nt, Artificial Sequence
  Description of Artificial Sequence: Synthetic oligonucleotide
gcauaggacagagccuuag

SEQ ID NO: 2431017 - RNA, 19 nt, Artificial Sequence
  Description of Artificial Sequence: Synthetic oligonucleotide
cacgugcucuacguccucc

SEQ ID NO: 2431018 - RNA, 19 nt, Artificial Sequence
  Description of Artificial Sequence: Synthetic oligonucleotide
ggcuagggguccaucaaug

SEQ ID NO: 2431019 - RNA, 19 nt, Artificial Sequence
  Description of Artificial Sequence: Synthetic oligonucleotide
gaucaccccguuggcggag

SEQ ID NO: 2431020 - RNA, 19 nt, Artificial Sequence
  Description of Artificial Sequence: Synthetic oligonucleotide
ucguaguugcagggccucc

SEQ ID NO: 2431021 - RNA, 19 nt, Artificial Sequence
  Description of Artificial Sequence: Synthetic oligonucleotide
cuccaacucagguacuugu

SEQ ID NO: 2431022 - RNA, 19 nt, Artificial Sequence
  Description of Artificial Sequence: Synthetic oligonucleotide
agggcauaggacagagccu

SEQ ID NO: 2431023 - RNA, 19 nt, Artificial Sequence
  Description of Artificial Sequence: Synthetic oligonucleotide
ggcguagggcauaggacag

SEQ ID NO: 2431024 - RNA, 19 nt, Artificial Sequence
  Description of Artificial Sequence: Synthetic oligonucleotide
auuccaucugccagggcua

SEQ ID NO: 2431025 - RNA, 19 nt, Artificial Sequence
  Description of Artificial Sequence: Synthetic oligonucleotide
augggcccuucuaccuucc

SEQ ID NO: 2431026 - RNA, 19 nt, Artificial Sequence
  Description of Artificial Sequence: Synthetic oligonucleotide
gggucggucguaguugcag

SEQ ID NO: 2431027 - RNA, 19 nt, Artificial Sequence
  Description of Artificial Sequence: Synthetic oligonucleotide
cuuggcaugacaagcccuu

SEQ ID NO: 2431028 - RNA, 19 nt, Artificial Sequence
  Description of Artificial Sequence: Synthetic oligonucleotide
ccgucucuugaucaccagc

SEQ ID NO: 2431029 - RNA, 19 nt, Artificial Sequence
  Description of Artificial Sequence: Synthetic oligonucleotide
accccguuggcggagcgga

SEQ ID NO: 2431030 - RNA, 19 nt, Artificial Sequence
  Description of Artificial Sequence: Synthetic oligonucleotide
caggguccccagguaaccc

SEQ ID NO: 2431031 - RNA, 19 nt, Artificial Sequence
  Description of Artificial Sequence: Synthetic oligonucleotide
gggaguggcccugauuggc

SEQ ID NO: 2431032 - RNA, 19 nt, Artificial Sequence
  Description of Artificial Sequence: Synthetic oligonucleotide
guugcagggccuccuugaa

SEQ ID NO: 2431033 - RNA, 19 nt, Artificial Sequence
  Description of Artificial Sequence: Synthetic oligonucleotide
uuggcaugacaagcccuuc

SEQ ID NO: 2431034 - RNA, 19 nt, Artificial Sequence
  Description of Artificial Sequence: Synthetic oligonucleotide
cagcucgcaugggaagucc

SEQ ID NO: 2431035 - RNA, 19 nt, Artificial Sequence
  Description of Artificial Sequence: Synthetic oligonucleotide
gggcuuguggugucuccag

SEQ ID NO: 2431036 - RNA, 19 nt, Artificial Sequence
  Description of Artificial Sequence: Synthetic oligonucleotide
uuguagggaguggcccuga

SEQ ID NO: 2431037 - RNA, 19 nt, Artificial Sequence
  Description of Artificial Sequence: Synthetic oligonucleotide
guagggcauaggacagagc

SEQ ID NO: 2431038 - RNA, 19 nt, Artificial Sequence
  Description of Artificial Sequence: Synthetic oligonucleotide
agcauucccuggagucagg

SEQ ID NO: 2431039 - RNA, 19 nt, Artificial Sequence
  Description of Artificial Sequence: Synthetic oligonucleotide
gucguaguugcagggccuc

SEQ ID NO: 2431040 - RNA, 19 nt, Artificial Sequence
  Description of Artificial Sequence: Synthetic oligonucleotide
uucuaccuuccugccuccu

SEQ ID NO: 2431041 - RNA, 19 nt, Artificial Sequence
  Description of Artificial Sequence: Synthetic oligonucleotide
ggccacucugcccauaagu

SEQ ID NO: 2431042 - RNA, 19 nt, Artificial Sequence
  Description of Artificial Sequence: Synthetic oligonucleotide
ugggcccuucuaccuuccu

SEQ ID NO: 2431043 - RNA, 19 nt, Artificial Sequence
  Description of Artificial Sequence: Synthetic oligonucleotide
uuggggccacucugauacu

SEQ ID NO: 2431044 - RNA, 19 nt, Artificial Sequence
  Description of Artificial Sequence: Synthetic oligonucleotide
gggcucgccuggcuguagg

SEQ ID NO: 2431045 - RNA, 19 nt, Artificial Sequence
  Description of Artificial Sequence: Synthetic oligonucleotide
cagguaacccugaggccaa

SEQ ID NO: 2431046 - RNA, 19 nt, Artificial Sequence
  Description of Artificial Sequence: Synthetic oligonucleotide
cguagggcauaggacagag

SEQ ID NO: 2431047 - RNA, 19 nt, Artificial Sequence
  Description of Artificial Sequence: Synthetic oligonucleotide
cuugggaaguaggacgccu

SEQ ID NO: 2431048 - RNA, 19 nt, Artificial Sequence
  Description of Artificial Sequence: Synthetic oligonucleotide
cugccagggcuaggggucc

SEQ ID NO: 2431049 - RNA, 19 nt, Artificial Sequence
  Description of Artificial Sequence: Synthetic oligonucleotide
caagaccuguagggagcag

SEQ ID NO: 2431050 - RNA, 19 nt, Artificial Sequence
  Description of Artificial Sequence: Synthetic oligonucleotide
gcuuucgggucggucguag

SEQ ID NO: 2431051 - RNA, 19 nt, Artificial Sequence
  Description of Artificial Sequence: Synthetic oligonucleotide
acucugcccauaagucaca

SEQ ID NO: 2431052 - RNA, 19 nt, Artificial Sequence
  Description of Artificial Sequence: Synthetic oligonucleotide
cuucaaggcuccguggcgu

SEQ ID NO: 2431053 - RNA, 19 nt, Artificial Sequence
  Description of Artificial Sequence: Synthetic oligonucleotide
cggucguaguugcagggcc

SEQ ID NO: 2431054 - RNA, 19 nt, Artificial Sequence
  Description of Artificial Sequence: Synthetic oligonucleotide
ccuuagacagcugcacauc

SEQ ID NO: 2431055 - RNA, 19 nt, Artificial Sequence
  Description of Artificial Sequence: Synthetic oligonucleotide
caggggcacaaagccauca

SEQ ID NO: 2431056 - RNA, 19 nt, Artificial Sequence
  Description of Artificial Sequence: Synthetic oligonucleotide
cccauaagucacaaaggcu

SEQ ID NO: 2431057 - RNA, 19 nt, Artificial Sequence
  Description of Artificial Sequence: Synthetic oligonucleotide
gggaaguaggacgccuuca

SEQ ID NO: 2431058 - RNA, 19 nt, Artificial Sequence
  Description of Artificial Sequence: Synthetic oligonucleotide
guccuccacugagaagcug

SEQ ID NO: 2431059 - RNA, 19 nt, Artificial Sequence
  Description of Artificial Sequence: Synthetic oligonucleotide
ugggcucgccuggcuguag

SEQ ID NO: 2431060 - RNA, 19 nt, Artificial Sequence
  Description of Artificial Sequence: Synthetic oligonucleotide
cucgcaugggaagucccaa

SEQ ID NO: 2431061 - RNA, 19 nt, Artificial Sequence
  Description of Artificial Sequence: Synthetic oligonucleotide
gggcguucauggccaagac

SEQ ID NO: 2431062 - RNA, 19 nt, Artificial Sequence
  Description of Artificial Sequence: Synthetic oligonucleotide
ccaucagcucgcaugggaa

SEQ ID NO: 2431063 - RNA, 19 nt, Artificial Sequence
  Description of Artificial Sequence: Synthetic oligonucleotide
guaggacgccuucagcauu

SEQ ID NO: 2431064 - RNA, 19 nt, Artificial Sequence
  Description of Artificial Sequence: Synthetic oligonucleotide
cguggcguagggcauagga

SEQ ID NO: 2431065 - RNA, 19 nt, Artificial Sequence
  Description of Artificial Sequence: Synthetic oligonucleotide
gccuuagacagcugcacau

SEQ ID NO: 2431066 - RNA, 19 nt, Artificial Sequence
  Description of Artificial Sequence: Synthetic oligonucleotide
caccccguuggcggagcgg

SEQ ID NO: 2431067 - RNA, 19 nt, Artificial Sequence
  Description of Artificial Sequence: Synthetic oligonucleotide
cgcaugccacugaugacac

SEQ ID NO: 2431068 - RNA, 19 nt, Artificial Sequence
  Description of Artificial Sequence: Synthetic oligonucleotide
ggaucaccccguuggcgga

SEQ ID NO: 2431069 - RNA, 19 nt, Artificial Sequence
  Description of Artificial Sequence: Synthetic oligonucleotide
aggggcguucauggccaag

SEQ ID NO: 2431070 - RNA, 19 nt, Artificial Sequence
  Description of Artificial Sequence: Synthetic oligonucleotide
agguaacccugaggccaag

SEQ ID NO: 2431071 - RNA, 19 nt, Artificial Sequence
  Description of Artificial Sequence: Synthetic oligonucleotide
gcuguggaacugagguagc

SEQ ID NO: 2431072 - RNA, 19 nt, Artificial Sequence
  Description of Artificial Sequence: Synthetic oligonucleotide
ggauuccaucugccagggc

SEQ ID NO: 2431073 - RNA, 19 nt, Artificial Sequence
  Description of Artificial Sequence: Synthetic oligonucleotide
gcucgccuggcuguagggc

SEQ ID NO: 2431074 - RNA, 19 nt, Artificial Sequence
  Description of Artificial Sequence: Synthetic oligonucleotide
gggguccaucaaugaacac

SEQ ID NO: 2431075 - RNA, 19 nt, Artificial Sequence
  Description of Artificial Sequence: Synthetic oligonucleotide
uccuguucccggggucuau

SEQ ID NO: 2431076 - RNA, 19 nt, Artificial Sequence
  Description of Artificial Sequence: Synthetic oligonucleotide
cuuccuccaggggcguuca

SEQ ID NO: 2431077 - RNA, 19 nt, Artificial Sequence
  Description of Artificial Sequence: Synthetic oligonucleotide
guagcugcagcagggcuuu

SEQ ID NO: 2431078 - RNA, 19 nt, Artificial Sequence
  Description of Artificial Sequence: Synthetic oligonucleotide
ggagucaggaucaccccgu

SEQ ID NO: 2431079 - RNA, 19 nt, Artificial Sequence
  Description of Artificial Sequence: Synthetic oligonucleotide
uguggccacucugcccaua

SEQ ID NO: 2431080 - RNA, 19 nt, Artificial Sequence
  Description of Artificial Sequence: Synthetic oligonucleotide
gccaaugcuuccagaaugu

SEQ ID NO: 2431081 - RNA, 19 nt, Artificial Sequence
  Description of Artificial Sequence: Synthetic oligonucleotide
gcaugacaagcccuucagu

SEQ ID NO: 2431082 - RNA, 19 nt, Artificial Sequence
  Description of Artificial Sequence: Synthetic oligonucleotide
gcauucccuggagucagga

SEQ ID NO: 2431083 - RNA, 19 nt, Artificial Sequence
  Description of Artificial Sequence: Synthetic oligonucleotide
gcggaagaaggggauucca

SEQ ID NO: 2431084 - RNA, 19 nt, Artificial Sequence
  Description of Artificial Sequence: Synthetic oligonucleotide
guaguugcagggccuccuu

SEQ ID NO: 2431085 - RNA, 19 nt, Artificial Sequence
  Description of Artificial Sequence: Synthetic oligonucleotide
cguucauggccaagaccug

SEQ ID NO: 2431086 - RNA, 19 nt, Artificial Sequence
  Description of Artificial Sequence: Synthetic oligonucleotide
ccacugaugacaccagggu

SEQ ID NO: 2431087 - RNA, 19 nt, Artificial Sequence
  Description of Artificial Sequence: Synthetic oligonucleotide
cauucccuggagucaggau

SEQ ID NO: 2431088 - RNA, 19 nt, Artificial Sequence
  Description of Artificial Sequence: Synthetic oligonucleotide
cuguggaacugagguagcu

SEQ ID NO: 2431089 - RNA, 19 nt, Artificial Sequence
  Description of Artificial Sequence: Synthetic oligonucleotide
caggaacguguggccacuc

SEQ ID NO: 2431090 - RNA, 19 nt, Artificial Sequence
  Description of Artificial Sequence: Synthetic oligonucleotide
cugcacaucucgguccugu

SEQ ID NO: 2431091 - RNA, 19 nt, Artificial Sequence
  Description of Artificial Sequence: Synthetic oligonucleotide
gcggagcggaagaagggga

SEQ ID NO: 2431092 - RNA, 19 nt, Artificial Sequence
  Description of Artificial Sequence: Synthetic oligonucleotide
gggcgagccgcugcuuucc

SEQ ID NO: 2431093 - RNA, 19 nt, Artificial Sequence
  Description of Artificial Sequence: Synthetic oligonucleotide
cuaugggcccuucuaccuu

SEQ ID NO: 2431094 - RNA, 19 nt, Artificial Sequence
  Description of Artificial Sequence: Synthetic oligonucleotide
cuuucgggucggucguagu

SEQ ID NO: 2431095 - RNA, 19 nt, Artificial Sequence
  Description of Artificial Sequence: Synthetic oligonucleotide
gagucaggaucaccccguu

SEQ ID NO: 2431096 - RNA, 19 nt, Artificial Sequence
  Description of Artificial Sequence: Synthetic oligonucleotide
cccguuggcggagcggaag

SEQ ID NO: 2431097 - RNA, 19 nt, Artificial Sequence
  Description of Artificial Sequence: Synthetic oligonucleotide
gcucgcaugggaaguccca

SEQ ID NO: 2431098 - RNA, 19 nt, Artificial Sequence
  Description of Artificial Sequence: Synthetic oligonucleotide
gccgcugcuuuccauuggu

SEQ ID NO: 2431099 - RNA, 19 nt, Artificial Sequence
  Description of Artificial Sequence: Synthetic oligonucleotide
cuguagggagcaggaacgu

SEQ ID NO: 2431100 - RNA, 19 nt, Artificial Sequence
  Description of Artificial Sequence: Synthetic oligonucleotide
ccaagaccuguagggagca

SEQ ID NO: 2431101 - RNA, 19 nt, Artificial Sequence
  Description of Artificial Sequence: Synthetic oligonucleotide
acccugaggccaaguggau

SEQ ID NO: 2431102 - RNA, 19 nt, Artificial Sequence
  Description of Artificial Sequence: Synthetic oligonucleotide
gcaugggaagucccaacuu

SEQ ID NO: 2431103 - RNA, 19 nt, Artificial Sequence
  Description of Artificial Sequence: Synthetic oligonucleotide
cccuggagucaggaucacc

SEQ ID NO: 2431104 - RNA, 19 nt, Artificial Sequence
  Description of Artificial Sequence: Synthetic oligonucleotide
cucugauacuccgucucuu

SEQ ID NO: 2431105 - RNA, 19 nt, Artificial Sequence
  Description of Artificial Sequence: Synthetic oligonucleotide
cgugcucuacguccuccac

SEQ ID NO: 2431106 - RNA, 19 nt, Artificial Sequence
  Description of Artificial Sequence: Synthetic oligonucleotide
gggcuuucgggucggucgu

SEQ ID NO: 2431107 - RNA, 19 nt, Artificial Sequence
  Description of Artificial Sequence: Synthetic oligonucleotide
ggucguaguugcagggccu

SEQ ID NO: 2431108 - RNA, 19 nt, Artificial Sequence
  Description of Artificial Sequence: Synthetic oligonucleotide
gcuuggggccacucugaua

SEQ ID NO: 2431109 - RNA, 19 nt, Artificial Sequence
  Description of Artificial Sequence: Synthetic oligonucleotide
caucaaaggcagggcuugu

SEQ ID NO: 2431110 - RNA, 19 nt, Artificial Sequence
  Description of Artificial Sequence: Synthetic oligonucleotide
caccaccacuucacaauuu

SEQ ID NO: 2431111 - RNA, 19 nt, Artificial Sequence
  Description of Artificial Sequence: Synthetic oligonucleotide
caaagccaucagcucgcau

SEQ ID NO: 2431112 - RNA, 19 nt, Artificial Sequence
  Description of Artificial Sequence: Synthetic oligonucleotide
cagggcuuucaggggcaca

SEQ ID NO: 2431113 - RNA, 19 nt, Artificial Sequence
  Description of Artificial Sequence: Synthetic oligonucleotide
ccguuggcggagcggaaga

SEQ ID NO: 2431114 - RNA, 19 nt, Artificial Sequence
  Description of Artificial Sequence: Synthetic oligonucleotide
gcccuuccuuggcaugaca

SEQ ID NO: 2431115 - RNA, 19 nt, Artificial Sequence
  Description of Artificial Sequence: Synthetic oligonucleotide
gcucuacguccuccacuga

SEQ ID NO: 2431116 - RNA, 19 nt, Artificial Sequence
  Description of Artificial Sequence: Synthetic oligonucleotide
gguaacccugaggccaagu

SEQ ID NO: 2431117 - RNA, 19 nt, Artificial Sequence
  Description of Artificial Sequence: Synthetic oligonucleotide
ggcgagccgcugcuuucca

SEQ ID NO: 2431118 - RNA, 19 nt, Artificial Sequence
  Description of Artificial Sequence: Synthetic oligonucleotide
gcguagggcauaggacaga

SEQ ID NO: 2431119 - RNA, 19 nt, Artificial Sequence
  Description of Artificial Sequence: Synthetic oligonucleotide
ccaaugcuuccagaaugua

SEQ ID NO: 2431120 - RNA, 19 nt, Artificial Sequence
  Description of Artificial Sequence: Synthetic oligonucleotide
cuccguggcguagggcaua

SEQ ID NO: 2431121 - RNA, 19 nt, Artificial Sequence
  Description of Artificial Sequence: Synthetic oligonucleotide
ccacgugcucuacguccuc

SEQ ID NO: 2431122 - RNA, 19 nt, Artificial Sequence
  Description of Artificial Sequence: Synthetic oligonucleotide
caggggcguucauggccaa

SEQ ID NO: 2431123 - RNA, 19 nt, Artificial Sequence
  Description of Artificial Sequence: Synthetic oligonucleotide
ggcauaggacagagccuua

SEQ ID NO: 2431124 - RNA, 19 nt, Artificial Sequence
  Description of Artificial Sequence: Synthetic oligonucleotide
gcccuucaguagaauagau

SEQ ID NO: 2431125 - RNA, 19 nt, Artificial Sequence
  Description of Artificial Sequence: Synthetic oligonucleotide
cucccuccucuggagcugu

SEQ ID NO: 2431126 - RNA, 19 nt, Artificial Sequence
  Description of Artificial Sequence: Synthetic oligonucleotide
gcaggaacguguggccacu

SEQ ID NO: 2431127 - RNA, 19 nt, Artificial Sequence
  Description of Artificial Sequence: Synthetic oligonucleotide
ggagcggaagaaggggauu

SEQ ID NO: 2431128 - RNA, 19 nt, Artificial Sequence
  Description of Artificial Sequence: Synthetic oligonucleotide
cggaagaaggggauuccau

SEQ ID NO: 2431129 - RNA, 19 nt, Artificial Sequence
  Description of Artificial Sequence: Synthetic oligonucleotide
cccaacuucaaggcuccgu

SEQ ID NO: 2431130 - RNA, 19 nt, Artificial Sequence
  Description of Artificial Sequence: Synthetic oligonucleotide
gggccagugcugggcucgc

SEQ ID NO: 2431131 - RNA, 19 nt, Artificial Sequence
  Description of Artificial Sequence: Synthetic oligonucleotide
gggcuuucaggggcacaaa

SEQ ID NO: 2431132 - RNA, 19 nt, Artificial Sequence
  Description of Artificial Sequence: Synthetic oligonucleotide
cugggcucgccuggcugua

SEQ ID NO: 2431133 - RNA, 19 nt, Artificial Sequence
  Description of Artificial Sequence: Synthetic oligonucleotide
cccuucuaccuuccugccu

SEQ ID NO: 2431134 - RNA, 19 nt, Artificial Sequence
  Description of Artificial Sequence: Synthetic oligonucleotide
cgguccuguucccgggguc

SEQ ID NO: 2431135 - RNA, 19 nt, Artificial Sequence
  Description of Artificial Sequence: Synthetic oligonucleotide
guguggccacucugcccau

SEQ ID NO: 2431136 - RNA, 19 nt, Artificial Sequence
  Description of Artificial Sequence: Synthetic oligonucleotide
ccgcugcuuuccauuggua

SEQ ID NO: 2431137 - RNA, 19 nt, Artificial Sequence
  Description of Artificial Sequence: Synthetic oligonucleotide
guagggcgagccgcugcuu

SEQ ID NO: 2431138 - RNA, 19 nt, Artificial Sequence
  Description of Artificial Sequence: Synthetic oligonucleotide
cgagccgcugcuuuccauu

SEQ ID NO: 2431139 - RNA, 19 nt, Artificial Sequence
  Description of Artificial Sequence: Synthetic oligonucleotide
cguaguugcagggccuccu

SEQ ID NO: 2431140 - RNA, 19 nt, Artificial Sequence
  Description of Artificial Sequence: Synthetic oligonucleotide
ccguggcguagggcauagg

SEQ ID NO: 2431141 - RNA, 19 nt, Artificial Sequence
  Description of Artificial Sequence: Synthetic oligonucleotide
ggcuuucgggucggucgua

SEQ ID NO: 2431142 - RNA, 19 nt, Artificial Sequence
  Description of Artificial Sequence: Synthetic oligonucleotide
gcgagccgcugcuuuccau

SEQ ID NO: 2431143 - RNA, 19 nt, Artificial Sequence
  Description of Artificial Sequence: Synthetic oligonucleotide
cggagcggaagaaggggau

SEQ ID NO: 2431144 - RNA, 19 nt, Artificial Sequence
  Description of Artificial Sequence: Synthetic oligonucleotide
gcuccguggcguagggcau

SEQ ID NO: 2431145 - RNA, 19 nt, Artificial Sequence
  Description of Artificial Sequence: Synthetic oligonucleotide
cguuggcggagcggaagaa

SEQ ID NO: 2431146 - RNA, 19 nt, Artificial Sequence
  Description of Artificial Sequence: Synthetic oligonucleotide
ggcccugauuggcccugau

SEQ ID NO: 2431147 - RNA, 19 nt, Artificial Sequence
  Description of Artificial Sequence: Synthetic oligonucleotide
cgggucggucguaguugca

SEQ ID NO: 2431148 - RNA, 19 nt, Artificial Sequence
  Description of Artificial Sequence: Synthetic oligonucleotide
ccccguuggcggagcggaa

SEQ ID NO: 2431149 - RNA, 19 nt, Artificial Sequence
  Description of Artificial Sequence: Synthetic oligonucleotide
cggggucuaugggcccuuc

SEQ ID NO: 2431150 - RNA, 19 nt, Artificial Sequence
  Description of Artificial Sequence: Synthetic oligonucleotide
cccggggucuaugggcccu

SEQ ID NO: 2431151 - RNA, 19 nt, Artificial Sequence
  Description of Artificial Sequence: Synthetic oligonucleotide
gccagggcuagggguccau

SEQ ID NO: 2431152 - RNA, 19 nt, Artificial Sequence
  Description of Artificial Sequence: Synthetic oligonucleotide
ccggggucuaugggcccuu

SEQ ID NO: 2431153 - RNA, 19 nt, Artificial Sequence
  Description of Artificial Sequence: Synthetic oligonucleotide
ugaaaagcgaacacagugg

SEQ ID NO: 2431154 - RNA, 19 nt, Artificial Sequence
  Description of Artificial Sequence: Synthetic oligonucleotide
cauaacugugaucagacgg

SEQ ID NO: 2431155 - RNA, 19 nt, Artificial Sequence
  Description of Artificial Sequence: Synthetic oligonucleotide
aauggaaaccgguggaagg

SEQ ID NO: 2431156 - RNA, 19 nt, Artificial Sequence
  Description of Artificial Sequence: Synthetic oligonucleotide
agagccgaaaaccacuucc

SEQ ID NO: 2431157 - RNA, 19 nt, Artificial Sequence
  Description of Artificial Sequence: Synthetic oligonucleotide
aagggcauaacugugauca

SEQ ID NO: 2431158 - RNA, 19 nt, Artificial Sequence
  Description of Artificial Sequence: Synthetic oligonucleotide
uuuuccuucagugugaaga

SEQ ID NO: 2431159 - RNA, 19 nt, Artificial Sequence
  Description of Artificial Sequence: Synthetic oligonucleotide
gaaaagcgaacacaguggg

SEQ ID NO: 2431160 - RNA, 19 nt, Artificial Sequence
  Description of Artificial Sequence: Synthetic oligonucleotide
aaagcgaacacagugggca

SEQ ID NO: 2431161 - RNA, 19 nt, Artificial Sequence
  Description of Artificial Sequence: Synthetic oligonucleotide
guauccaaguccaaaaggg

SEQ ID NO: 2431162 - RNA, 19 nt, Artificial Sequence
  Description of Artificial Sequence: Synthetic oligonucleotide
aagugcucagagcagauga

SEQ ID NO: 2431163 - RNA, 19 nt, Artificial Sequence
  Description of Artificial Sequence: Synthetic oligonucleotide
cugaaaagcgaacacagug

SEQ ID NO: 2431164 - RNA, 19 nt, Artificial Sequence
  Description of Artificial Sequence: Synthetic oligonucleotide
cuuuucaacaccguggggc

SEQ ID NO: 2431165 - RNA, 19 nt, Artificial Sequence
  Description of Artificial Sequence: Synthetic oligonucleotide
uucggcaucgcggagaccg

SEQ ID NO: 2431166 - RNA, 19 nt, Artificial Sequence
  Description of Artificial Sequence: Synthetic oligonucleotide
auaacugugaucagacggc

SEQ ID NO: 2431167 - RNA, 19 nt, Artificial Sequence
  Description of Artificial Sequence: Synthetic oligonucleotide
ucuguaggcucgcaggagg

SEQ ID NO: 2431168 - RNA, 19 nt, Artificial Sequence
  Description of Artificial Sequence: Synthetic oligonucleotide
uauuaguggggaaugugca

SEQ ID NO: 2431169 - RNA, 19 nt, Artificial Sequence
  Description of Artificial Sequence: Synthetic oligonucleotide
uauccaaguccaaaagggc

SEQ ID NO: 2431170 - RNA, 19 nt, Artificial Sequence
  Description of Artificial Sequence: Synthetic oligonucleotide
ugugcuugagguucuugcg

SEQ ID NO: 2431171 - RNA, 19 nt, Artificial Sequence
  Description of Artificial Sequence: Synthetic oligonucleotide
uucaggguauccaagucca

SEQ ID NO: 2431172 - RNA, 19 nt, Artificial Sequence
  Description of Artificial Sequence: Synthetic oligonucleotide
aagcacucgggucugaagu

SEQ ID NO: 2431173 - RNA, 19 nt, Artificial Sequence
  Description of Artificial Sequence: Synthetic oligonucleotide
auuaguggggaaugugcac

SEQ ID NO: 2431174 - RNA, 19 nt, Artificial Sequence
  Description of Artificial Sequence: Synthetic oligonucleotide
uguucucucugguagggcc

SEQ ID NO: 2431175 - RNA, 19 nt, Artificial Sequence
  Description of Artificial Sequence: Synthetic oligonucleotide
aucccauccugccaguccc

SEQ ID NO: 2431176 - RNA, 19 nt, Artificial Sequence
  Description of Artificial Sequence: Synthetic oligonucleotide
uuaguauuaguggggaaug

SEQ ID NO: 2431177 - RNA, 19 nt, Artificial Sequence
  Description of Artificial Sequence: Synthetic oligonucleotide
aaaagggcauaacugugau

SEQ ID NO: 2431178 - RNA, 19 nt, Artificial Sequence
  Description of Artificial Sequence: Synthetic oligonucleotide
gguauccaaguccaaaagg

SEQ ID NO: 2431179 - RNA, 19 nt, Artificial Sequence
  Description of Artificial Sequence: Synthetic oligonucleotide
cuugaaguuggcccggccg

SEQ ID NO: 2431180 - RNA, 19 nt, Artificial Sequence
  Description of Artificial Sequence: Synthetic oligonucleotide
aaaagcgaacacagugggc

SEQ ID NO: 2431181 - RNA, 19 nt, Artificial Sequence
  Description of Artificial Sequence: Synthetic oligonucleotide
aaagggcauaacugugauc

SEQ ID NO: 2431182 - RNA, 19 nt, Artificial Sequence
  Description of Artificial Sequence: Synthetic oligonucleotide
gucugaagugcucagagca

SEQ ID NO: 2431183 - RNA, 19 nt, Artificial Sequence
  Description of Artificial Sequence: Synthetic oligonucleotide
cauccugccagucccaagg

SEQ ID NO: 2431184 - RNA, 19 nt, Artificial Sequence
  Description of Artificial Sequence: Synthetic oligonucleotide
acugugaucagacggcugu

SEQ ID NO: 2431185 - RNA, 19 nt, Artificial Sequence
  Description of Artificial Sequence: Synthetic oligonucleotide
agacggcugucccagaagg

SEQ ID NO: 2431186 - RNA, 19 nt, Artificial Sequence
  Description of Artificial Sequence: Synthetic oligonucleotide
auuaguauuaguggggaau

SEQ ID NO: 2431187 - RNA, 19 nt, Artificial Sequence
  Description of Artificial Sequence: Synthetic oligonucleotide
aagcgaacacagugggcac

SEQ ID NO: 2431188 - RNA, 19 nt, Artificial Sequence
  Description of Artificial Sequence: Synthetic oligonucleotide
guauuaguggggaaugugc

SEQ ID NO: 2431189 - RNA, 19 nt, Artificial Sequence
  Description of Artificial Sequence: Synthetic oligonucleotide
agcauuaguauuagugggg

SEQ ID NO: 2431190 - RNA, 19 nt, Artificial Sequence
  Description of Artificial Sequence: Synthetic oligonucleotide
cacgacuucggcaucgcgg

SEQ ID NO: 2431191 - RNA, 19 nt, Artificial Sequence
  Description of Artificial Sequence: Synthetic oligonucleotide
aaggggccuuuucaacacc

SEQ ID NO: 2431192 - RNA, 19 nt, Artificial Sequence
  Description of Artificial Sequence: Synthetic oligonucleotide
agaaggggccuuuucaaca

SEQ ID NO: 2431193 - RNA, 19 nt, Artificial Sequence
  Description of Artificial Sequence: Synthetic oligonucleotide
acaucccagaacuugcuca

SEQ ID NO: 2431194 - RNA, 19 nt, Artificial Sequence
  Description of Artificial Sequence: Synthetic oligonucleotide
gauguugagcacccacucc

SEQ ID NO: 2431195 - RNA, 19 nt, Artificial Sequence
  Description of Artificial Sequence: Synthetic oligonucleotide
caggguguugccaccaucc

SEQ ID NO: 2431196 - RNA, 19 nt, Artificial Sequence
  Description of Artificial Sequence: Synthetic oligonucleotide
aaaccgguggaaggugagc

SEQ ID NO: 2431197 - RNA, 19 nt, Artificial Sequence
  Description of Artificial Sequence: Synthetic oligonucleotide
uuguuuuccuucaguguga

SEQ ID NO: 2431198 - RNA, 19 nt, Artificial Sequence
  Description of Artificial Sequence: Synthetic oligonucleotide
ugggguucugaaaagcgaa

SEQ ID NO: 2431199 - RNA, 19 nt, Artificial Sequence
  Description of Artificial Sequence: Synthetic oligonucleotide
uggcaucccauccugccag

SEQ ID NO: 2431200 - RNA, 19 nt, Artificial Sequence
  Description of Artificial Sequence: Synthetic oligonucleotide
gaauggaaaccgguggaag

SEQ ID NO: 2431201 - RNA, 19 nt, Artificial Sequence
  Description of Artificial Sequence: Synthetic oligonucleotide
ugagcacccacuccuucag

SEQ ID NO: 2431202 - RNA, 19 nt, Artificial Sequence
  Description of Artificial Sequence: Synthetic oligonucleotide
acuucggcaucgcggagac

SEQ ID NO: 2431203 - RNA, 19 nt, Artificial Sequence
  Description of Artificial Sequence: Synthetic oligonucleotide
ugacgacugccugucaugg

SEQ ID NO: 2431204 - RNA, 19 nt, Artificial Sequence
  Description of Artificial Sequence: Synthetic oligonucleotide
uucaacaccguggggcugg

SEQ ID NO: 2431205 - RNA, 19 nt, Artificial Sequence
  Description of Artificial Sequence: Synthetic oligonucleotide
ugucauggcaucccauccu

SEQ ID NO: 2431206 - RNA, 19 nt, Artificial Sequence
  Description of Artificial Sequence: Synthetic oligonucleotide
uucuugcgguucccgaagg

SEQ ID NO: 2431207 - RNA, 19 nt, Artificial Sequence
  Description of Artificial Sequence: Synthetic oligonucleotide
gaucagacggcugucccag

SEQ ID NO: 2431208 - RNA, 19 nt, Artificial Sequence
  Description of Artificial Sequence: Synthetic oligonucleotide
uugcgguucccgaaggcgc

SEQ ID NO: 2431209 - RNA, 19 nt, Artificial Sequence
  Description of Artificial Sequence: Synthetic oligonucleotide
agcgguugcagcauugccg

SEQ ID NO: 2431210 - RNA, 19 nt, Artificial Sequence
  Description of Artificial Sequence: Synthetic oligonucleotide
uguagcgguugcagcauug

SEQ ID NO: 2431211 - RNA, 19 nt, Artificial Sequence
  Description of Artificial Sequence: Synthetic oligonucleotide
acgacugccugucauggca

SEQ ID NO: 2431212 - RNA, 19 nt, Artificial Sequence
  Description of Artificial Sequence: Synthetic oligonucleotide
aggguguugccaccauccc

SEQ ID NO: 2431213 - RNA, 19 nt, Artificial Sequence
  Description of Artificial Sequence: Synthetic oligonucleotide
cugucauggcaucccaucc

SEQ ID NO: 2431214 - RNA, 19 nt, Artificial Sequence
  Description of Artificial Sequence: Synthetic oligonucleotide
ggcuacauguccuucuaag

SEQ ID NO: 2431215 - RNA, 19 nt, Artificial Sequence
  Description of Artificial Sequence: Synthetic oligonucleotide
cuuccugccaggguguugc

SEQ ID NO: 2431216 - RNA, 19 nt, Artificial Sequence
  Description of Artificial Sequence: Synthetic oligonucleotide
caaaagggcauaacuguga

SEQ ID NO: 2431217 - RNA, 19 nt, Artificial Sequence
  Description of Artificial Sequence: Synthetic oligonucleotide
cuugcgguucccgaaggcg

SEQ ID NO: 2431218 - RNA, 19 nt, Artificial Sequence
  Description of Artificial Sequence: Synthetic oligonucleotide
gaagcacucgggucugaag

SEQ ID NO: 2431219 - RNA, 19 nt, Artificial Sequence
  Description of Artificial Sequence: Synthetic oligonucleotide
ccuucagcaguucugggcg

SEQ ID NO: 2431220 - RNA, 19 nt, Artificial Sequence
  Description of Artificial Sequence: Synthetic oligonucleotide
gccuuuucaacaccguggg

SEQ ID NO: 2431221 - RNA, 19 nt, Artificial Sequence
  Description of Artificial Sequence: Synthetic oligonucleotide
uaguggggaaugugcacag

SEQ ID NO: 2431222 - RNA, 19 nt, Artificial Sequence
  Description of Artificial Sequence: Synthetic oligonucleotide
acgacuucggcaucgcgga

SEQ ID NO: 2431223 - RNA, 19 nt, Artificial Sequence
  Description of Artificial Sequence: Synthetic oligonucleotide
ccgaaaaccacuuccugcc

SEQ ID NO: 2431224 - RNA, 19 nt, Artificial Sequence
  Description of Artificial Sequence: Synthetic oligonucleotide
aaguuggcccggccgaugu

SEQ ID NO: 2431225 - RNA, 19 nt, Artificial Sequence
  Description of Artificial Sequence: Synthetic oligonucleotide
uucagugucuggagacuca

SEQ ID NO: 2431226 - RNA, 19 nt, Artificial Sequence
  Description of Artificial Sequence: Synthetic oligonucleotide
ugaucagacggcuguccca

SEQ ID NO: 2431227 - RNA, 19 nt, Artificial Sequence
  Description of Artificial Sequence: Synthetic oligonucleotide
gaaggugagcugcuuccug

SEQ ID NO: 2431228 - RNA, 19 nt, Artificial Sequence
  Description of Artificial Sequence: Synthetic oligonucleotide
cagaacuugggucccuccc

SEQ ID NO: 2431229 - RNA, 19 nt, Artificial Sequence
  Description of Artificial Sequence: Synthetic oligonucleotide
acggcugucccagaagggg

SEQ ID NO: 2431230 - RNA, 19 nt, Artificial Sequence
  Description of Artificial Sequence: Synthetic oligonucleotide
gcuacauguccuucuaagc

SEQ ID NO: 2431231 - RNA, 19 nt, Artificial Sequence
  Description of Artificial Sequence: Synthetic oligonucleotide
ucuugcgguucccgaaggc

SEQ ID NO: 2431232 - RNA, 19 nt, Artificial Sequence
  Description of Artificial Sequence: Synthetic oligonucleotide
auugccgggccgcacacga

SEQ ID NO: 2431233 - RNA, 19 nt, Artificial Sequence
  Description of Artificial Sequence: Synthetic oligonucleotide
gguucugaaaagcgaacac

SEQ ID NO: 2431234 - RNA, 19 nt, Artificial Sequence
  Description of Artificial Sequence: Synthetic oligonucleotide
gucauggcaucccauccug

SEQ ID NO: 2431235 - RNA, 19 nt, Artificial Sequence
  Description of Artificial Sequence: Synthetic oligonucleotide
ugaauggaaaccgguggaa

SEQ ID NO: 2431236 - RNA, 19 nt, Artificial Sequence
  Description of Artificial Sequence: Synthetic oligonucleotide
agacucagacucuuccagu

SEQ ID NO: 2431237 - RNA, 19 nt, Artificial Sequence
  Description of Artificial Sequence: Synthetic oligonucleotide
agcugcgcugugcuggccg

SEQ ID NO: 2431238 - RNA, 19 nt, Artificial Sequence
  Description of Artificial Sequence: Synthetic oligonucleotide
gcgguugcagcauugccgg

SEQ ID NO: 2431239 - RNA, 19 nt, Artificial Sequence
  Description of Artificial Sequence: Synthetic oligonucleotide
ugcgugggguucugaaaag

SEQ ID NO: 2431240 - RNA, 19 nt, Artificial Sequence
  Description of Artificial Sequence: Synthetic oligonucleotide
agcacucgggucugaagug

SEQ ID NO: 2431241 - RNA, 19 nt, Artificial Sequence
  Description of Artificial Sequence: Synthetic oligonucleotide
ucauggcaucccauccugc

SEQ ID NO: 2431242 - RNA, 19 nt, Artificial Sequence
  Description of Artificial Sequence: Synthetic oligonucleotide
acaccguggggcuggcugg

SEQ ID NO: 2431243 - RNA, 19 nt, Artificial Sequence
  Description of Artificial Sequence: Synthetic oligonucleotide
ucagacggcugucccagaa

SEQ ID NO: 2431244 - RNA, 19 nt, Artificial Sequence
  Description of Artificial Sequence: Synthetic oligonucleotide
auggaaaccgguggaaggu

SEQ ID NO: 2431245 - RNA, 19 nt, Artificial Sequence
  Description of Artificial Sequence: Synthetic oligonucleotide
caucccauccugccagucc

SEQ ID NO: 2431246 - RNA, 19 nt, Artificial Sequence
  Description of Artificial Sequence: Synthetic oligonucleotide
gccgaaaaccacuuccugc

SEQ ID NO: 2431247 - RNA, 19 nt, Artificial Sequence
  Description of Artificial Sequence: Synthetic oligonucleotide
uaacugugaucagacggcu

SEQ ID NO: 2431248 - RNA, 19 nt, Artificial Sequence
  Description of Artificial Sequence: Synthetic oligonucleotide
gaaaccgguggaaggugag

SEQ ID NO: 2431249 - RNA, 19 nt, Artificial Sequence
  Description of Artificial Sequence: Synthetic oligonucleotide
cagaaggggccuuuucaac

SEQ ID NO: 2431250 - RNA, 19 nt, Artificial Sequence
  Description of Artificial Sequence: Synthetic oligonucleotide
cugaauggaaaccggugga

SEQ ID NO: 2431251 - RNA, 19 nt, Artificial Sequence
  Description of Artificial Sequence: Synthetic oligonucleotide
ugggcggcugaauggaaac

SEQ ID NO: 2431252 - RNA, 19 nt, Artificial Sequence
  Description of Artificial Sequence: Synthetic oligonucleotide
ggcauaacugugaucagac

SEQ ID NO: 2431253 - RNA, 19 nt, Artificial Sequence
  Description of Artificial Sequence: Synthetic oligonucleotide
uaguauuaguggggaaugu

SEQ ID NO: 2431254 - RNA, 19 nt, Artificial Sequence
  Description of Artificial Sequence: Synthetic oligonucleotide
cugacgacugccugucaug

SEQ ID NO: 2431255 - RNA, 19 nt, Artificial Sequence
  Description of Artificial Sequence: Synthetic oligonucleotide
gaaggcgcugaagcacucg

SEQ ID NO: 2431256 - RNA, 19 nt, Artificial Sequence
  Description of Artificial Sequence: Synthetic oligonucleotide
guccuucuaagcagcagcc

SEQ ID NO: 2431257 - RNA, 19 nt, Artificial Sequence
  Description of Artificial Sequence: Synthetic oligonucleotide
ugcagcauugccgggccgc

SEQ ID NO: 2431258 - RNA, 19 nt, Artificial Sequence
  Description of Artificial Sequence: Synthetic oligonucleotide
uucugggcggcugaaugga

SEQ ID NO: 2431259 - RNA, 19 nt, Artificial Sequence
  Description of Artificial Sequence: Synthetic oligonucleotide
ccaaaagggcauaacugug

SEQ ID NO: 2431260 - RNA, 19 nt, Artificial Sequence
  Description of Artificial Sequence: Synthetic oligonucleotide
aacuugggucccuccccug

SEQ ID NO: 2431261 - RNA, 19 nt, Artificial Sequence
  Description of Artificial Sequence: Synthetic oligonucleotide
ggcggcugaauggaaaccg

SEQ ID NO: 2431262 - RNA, 19 nt, Artificial Sequence
  Description of Artificial Sequence: Synthetic oligonucleotide
aggggccuuuucaacaccg

SEQ ID NO: 2431263 - RNA, 19 nt, Artificial Sequence
  Description of Artificial Sequence: Synthetic oligonucleotide
agcgaacacagugggcacg

SEQ ID NO: 2431264 - RNA, 19 nt, Artificial Sequence
  Description of Artificial Sequence: Synthetic oligonucleotide
uggaaaccgguggaaggug

SEQ ID NO: 2431265 - RNA, 19 nt, Artificial Sequence
  Description of Artificial Sequence: Synthetic oligonucleotide
gcauaacugugaucagacg

SEQ ID NO: 2431266 - RNA, 19 nt, Artificial Sequence
  Description of Artificial Sequence: Synthetic oligonucleotide
acacgacuucggcaucgcg

SEQ ID NO: 2431267 - RNA, 19 nt, Artificial Sequence
  Description of Artificial Sequence: Synthetic oligonucleotide
gggccuguuucacagggcc

SEQ ID NO: 2431268 - RNA, 19 nt, Artificial Sequence
  Description of Artificial Sequence: Synthetic oligonucleotide
aacugugaucagacggcug

SEQ ID NO: 2431269 - RNA, 19 nt, Artificial Sequence
  Description of Artificial Sequence: Synthetic oligonucleotide
gagaccggcccgcugcccc

SEQ ID NO: 2431270 - RNA, 19 nt, Artificial Sequence
  Description of Artificial Sequence: Synthetic oligonucleotide
agacucuuccagugugcug

SEQ ID NO: 2431271 - RNA, 19 nt, Artificial Sequence
  Description of Artificial Sequence: Synthetic oligonucleotide
acuugggucccuccccuga

SEQ ID NO: 2431272 - RNA, 19 nt, Artificial Sequence
  Description of Artificial Sequence: Synthetic oligonucleotide
ucagcugcgcugugcuggc

SEQ ID NO: 2431273 - RNA, 19 nt, Artificial Sequence
  Description of Artificial Sequence: Synthetic oligonucleotide
cucgcaggaggcuacaugu

SEQ ID NO: 2431274 - RNA, 19 nt, Artificial Sequence
  Description of Artificial Sequence: Synthetic oligonucleotide
guagggccuguuucacagg

SEQ ID NO: 2431275 - RNA, 19 nt, Artificial Sequence
  Description of Artificial Sequence: Synthetic oligonucleotide
ugccgggccgcacacgacu

SEQ ID NO: 2431276 - RNA, 19 nt, Artificial Sequence
  Description of Artificial Sequence: Synthetic oligonucleotide
gacggcugucccagaaggg

SEQ ID NO: 2431277 - RNA, 19 nt, Artificial Sequence
  Description of Artificial Sequence: Synthetic oligonucleotide
agggcauaacugugaucag

SEQ ID NO: 2431278 - RNA, 19 nt, Artificial Sequence
  Description of Artificial Sequence: Synthetic oligonucleotide
cuucagugucuggagacuc

SEQ ID NO: 2431279 - RNA, 19 nt, Artificial Sequence
  Description of Artificial Sequence: Synthetic oligonucleotide
uugcggagccucuuguuuu

SEQ ID NO: 2431280 - RNA, 19 nt, Artificial Sequence
  Description of Artificial Sequence: Synthetic oligonucleotide
uucagcaguucugggcggc

SEQ ID NO: 2431281 - RNA, 19 nt, Artificial Sequence
  Description of Artificial Sequence: Synthetic oligonucleotide
gcagaugacugugugcugc

SEQ ID NO: 2431282 - RNA, 19 nt, Artificial Sequence
  Description of Artificial Sequence: Synthetic oligonucleotide
acucuuccagugugcuguc

SEQ ID NO: 2431283 - RNA, 19 nt, Artificial Sequence
  Description of Artificial Sequence: Synthetic oligonucleotide
uaggcucgcaggaggcuac

SEQ ID NO: 2431284 - RNA, 19 nt, Artificial Sequence
  Description of Artificial Sequence: Synthetic oligonucleotide
gacgacugccugucauggc

SEQ ID NO: 2431285 - RNA, 19 nt, Artificial Sequence
  Description of Artificial Sequence: Synthetic oligonucleotide
accauccccacaucccaga

SEQ ID NO: 2431286 - RNA, 19 nt, Artificial Sequence
  Description of Artificial Sequence: Synthetic oligonucleotide
caggacagaccugcguggg

SEQ ID NO: 2431287 - RNA, 19 nt, Artificial Sequence
  Description of Artificial Sequence: Synthetic oligonucleotide
ggucugaagugcucagagc

SEQ ID NO: 2431288 - RNA, 19 nt, Artificial Sequence
  Description of Artificial Sequence: Synthetic oligonucleotide
cccacaucccagaacuugc

SEQ ID NO: 2431289 - RNA, 19 nt, Artificial Sequence
  Description of Artificial Sequence: Synthetic oligonucleotide
uccccugacgacugccugu

SEQ ID NO: 2431290 - RNA, 19 nt, Artificial Sequence
  Description of Artificial Sequence: Synthetic oligonucleotide
guagcgguugcagcauugc

SEQ ID NO: 2431291 - RNA, 19 nt, Artificial Sequence
  Description of Artificial Sequence: Synthetic oligonucleotide
ccuucuaagcagcagccuc

SEQ ID NO: 2431292 - RNA, 19 nt, Artificial Sequence
  Description of Artificial Sequence: Synthetic oligonucleotide
uguccgcuguccccaccag

SEQ ID NO: 2431293 - RNA, 19 nt, Artificial Sequence
  Description of Artificial Sequence: Synthetic oligonucleotide
uccuucuaagcagcagccu

SEQ ID NO: 2431294 - RNA, 19 nt, Artificial Sequence
  Description of Artificial Sequence: Synthetic oligonucleotide
cugcgugggguucugaaaa

SEQ ID NO: 2431295 - RNA, 19 nt, Artificial Sequence
  Description of Artificial Sequence: Synthetic oligonucleotide
aggaggcuacauguccuuc

SEQ ID NO: 2431296 - RNA, 19 nt, Artificial Sequence
  Description of Artificial Sequence: Synthetic oligonucleotide
ugcggagccucuuguuuuc

SEQ ID NO: 2431297 - RNA, 19 nt, Artificial Sequence
  Description of Artificial Sequence: Synthetic oligonucleotide
gugggcacggcauugugcu

SEQ ID NO: 2431298 - RNA, 19 nt, Artificial Sequence
  Description of Artificial Sequence: Synthetic oligonucleotide
cagacggcugucccagaag

SEQ ID NO: 2431299 - RNA, 19 nt, Artificial Sequence
  Description of Artificial Sequence: Synthetic oligonucleotide
guuggcccggccgauguug

SEQ ID NO: 2431300 - RNA, 19 nt, Artificial Sequence
  Description of Artificial Sequence: Synthetic oligonucleotide
ucucugguagggccuguuu

SEQ ID NO: 2431301 - RNA, 19 nt, Artificial Sequence
  Description of Artificial Sequence: Synthetic oligonucleotide
ucaggguauccaaguccaa

SEQ ID NO: 2431302 - RNA, 19 nt, Artificial Sequence
  Description of Artificial Sequence: Synthetic oligonucleotide
ugugugcugcuugggcuug

SEQ ID NO: 2431303 - RNA, 19 nt, Artificial Sequence
  Description of Artificial Sequence: Synthetic oligonucleotide
uuggcccggccgauguuga

SEQ ID NO: 2431304 - RNA, 19 nt, Artificial Sequence
  Description of Artificial Sequence: Synthetic oligonucleotide
caucgcggagaccggcccg

SEQ ID NO: 2431305 - RNA, 19 nt, Artificial Sequence
  Description of Artificial Sequence: Synthetic oligonucleotide
cauuaguauuaguggggaa

SEQ ID NO: 2431306 - RNA, 19 nt, Artificial Sequence
  Description of Artificial Sequence: Synthetic oligonucleotide
cauccccacaucccagaac

SEQ ID NO: 2431307 - RNA, 19 nt, Artificial Sequence
  Description of Artificial Sequence: Synthetic oligonucleotide
acagaccugcgugggguuc

SEQ ID NO: 2431308 - RNA, 19 nt, Artificial Sequence
  Description of Artificial Sequence: Synthetic oligonucleotide
caccauccccacaucccag

SEQ ID NO: 2431309 - RNA, 19 nt, Artificial Sequence
  Description of Artificial Sequence: Synthetic oligonucleotide
cugcuugggcuugaaguug

SEQ ID NO: 2431310 - RNA, 19 nt, Artificial Sequence
  Description of Artificial Sequence: Synthetic oligonucleotide
ggguguugccaccaucccc

SEQ ID NO: 2431311 - RNA, 19 nt, Artificial Sequence
  Description of Artificial Sequence: Synthetic oligonucleotide
aggcucagcugcgcugugc

SEQ ID NO: 2431312 - RNA, 19 nt, Artificial Sequence
  Description of Artificial Sequence: Synthetic oligonucleotide
gcauuaguauuagugggga

SEQ ID NO: 2431313 - RNA, 19 nt, Artificial Sequence
  Description of Artificial Sequence: Synthetic oligonucleotide
ggugagcugcuuccugcgg

SEQ ID NO: 2431314 - RNA, 19 nt, Artificial Sequence
  Description of Artificial Sequence: Synthetic oligonucleotide
cuugggucccuccccugac

SEQ ID NO: 2431315 - RNA, 19 nt, Artificial Sequence
  Description of Artificial Sequence: Synthetic oligonucleotide
ucgcaggaggcuacauguc

SEQ ID NO: 2431316 - RNA, 19 nt, Artificial Sequence
  Description of Artificial Sequence: Synthetic oligonucleotide
ggcugaauggaaaccggug

SEQ ID NO: 2431317 - RNA, 19 nt, Artificial Sequence
  Description of Artificial Sequence: Synthetic oligonucleotide
gucccucucuguaggcucg

SEQ ID NO: 2431318 - RNA, 19 nt, Artificial Sequence
  Description of Artificial Sequence: Synthetic oligonucleotide
gaggcuacauguccuucua

SEQ ID NO: 2431319 - RNA, 19 nt, Artificial Sequence
  Description of Artificial Sequence: Synthetic oligonucleotide
cucuguaggcucgcaggag

SEQ ID NO: 2431320 - RNA, 19 nt, Artificial Sequence
  Description of Artificial Sequence: Synthetic oligonucleotide
agggccuguuucacagggc

SEQ ID NO: 2431321 - RNA, 19 nt, Artificial Sequence
  Description of Artificial Sequence: Synthetic oligonucleotide
gugggguucugaaaagcga

SEQ ID NO: 2431322 - RNA, 19 nt, Artificial Sequence
  Description of Artificial Sequence: Synthetic oligonucleotide
ucugggcggcugaauggaa

SEQ ID NO: 2431323 - RNA, 19 nt, Artificial Sequence
  Description of Artificial Sequence: Synthetic oligonucleotide
gaaguuggcccggccgaug

SEQ ID NO: 2431324 - RNA, 19 nt, Artificial Sequence
  Description of Artificial Sequence: Synthetic oligonucleotide
accugcgugggguucugaa

SEQ ID NO: 2431325 - RNA, 19 nt, Artificial Sequence
  Description of Artificial Sequence: Synthetic oligonucleotide
uccccgcugucccucucug

SEQ ID NO: 2431326 - RNA, 19 nt, Artificial Sequence
  Description of Artificial Sequence: Synthetic oligonucleotide
cugugcuggccgucuggcc

SEQ ID NO: 2431327 - RNA, 19 nt, Artificial Sequence
  Description of Artificial Sequence: Synthetic oligonucleotide
ggguucugaaaagcgaaca

SEQ ID NO: 2431328 - RNA, 19 nt, Artificial Sequence
  Description of Artificial Sequence: Synthetic oligonucleotide
gcgaacacagugggcacgg

SEQ ID NO: 2431329 - RNA, 19 nt, Artificial Sequence
  Description of Artificial Sequence: Synthetic oligonucleotide
gacugccugucauggcauc

SEQ ID NO: 2431330 - RNA, 19 nt, Artificial Sequence
  Description of Artificial Sequence: Synthetic oligonucleotide
gccgauguugagcacccac

SEQ ID NO: 2431331 - RNA, 19 nt, Artificial Sequence
  Description of Artificial Sequence: Synthetic oligonucleotide
ugcucaggcucagcugcgc

SEQ ID NO: 2431332 - RNA, 19 nt, Artificial Sequence
  Description of Artificial Sequence: Synthetic oligonucleotide
cugguagggccuguuucac

SEQ ID NO: 2431333 - RNA, 19 nt, Artificial Sequence
  Description of Artificial Sequence: Synthetic oligonucleotide
guuucacagggccuucagu

SEQ ID NO: 2431334 - RNA, 19 nt, Artificial Sequence
  Description of Artificial Sequence: Synthetic oligonucleotide
gguucuugcgguucccgaa

SEQ ID NO: 2431335 - RNA, 19 nt, Artificial Sequence
  Description of Artificial Sequence: Synthetic oligonucleotide
gugcugcuugggcuugaag

SEQ ID NO: 2431336 - RNA, 19 nt, Artificial Sequence
  Description of Artificial Sequence: Synthetic oligonucleotide
aggcgcugaagcacucggg

SEQ ID NO: 2431337 - RNA, 19 nt, Artificial Sequence
  Description of Artificial Sequence: Synthetic oligonucleotide
gcacacgacuucggcaucg

SEQ ID NO: 2431338 - RNA, 19 nt, Artificial Sequence
  Description of Artificial Sequence: Synthetic oligonucleotide
ugcgcugugcuggccgucu

SEQ ID NO: 2431339 - RNA, 19 nt, Artificial Sequence
  Description of Artificial Sequence: Synthetic oligonucleotide
cugccaggguguugccacc

SEQ ID NO: 2431340 - RNA, 19 nt, Artificial Sequence
  Description of Artificial Sequence: Synthetic oligonucleotide
gugucuggagacucagacu

SEQ ID NO: 2431341 - RNA, 19 nt, Artificial Sequence
  Description of Artificial Sequence: Synthetic oligonucleotide
gagccgaaaaccacuuccu

SEQ ID NO: 2431342 - RNA, 19 nt, Artificial Sequence
  Description of Artificial Sequence: Synthetic oligonucleotide
gcucgcaggaggcuacaug

SEQ ID NO: 2431343 - RNA, 19 nt, Artificial Sequence
  Description of Artificial Sequence: Synthetic oligonucleotide
cagagccgaaaaccacuuc

SEQ ID NO: 2431344 - RNA, 19 nt, Artificial Sequence
  Description of Artificial Sequence: Synthetic oligonucleotide
cucgggucugaagugcuca

SEQ ID NO: 2431345 - RNA, 19 nt, Artificial Sequence
  Description of Artificial Sequence: Synthetic oligonucleotide
ccuuuucaacaccgugggg

SEQ ID NO: 2431346 - RNA, 19 nt, Artificial Sequence
  Description of Artificial Sequence: Synthetic oligonucleotide
cagugggcacggcauugug

SEQ ID NO: 2431347 - RNA, 19 nt, Artificial Sequence
  Description of Artificial Sequence: Synthetic oligonucleotide
cacacgacuucggcaucgc

SEQ ID NO: 2431348 - RNA, 19 nt, Artificial Sequence
  Description of Artificial Sequence: Synthetic oligonucleotide
gcggcugaauggaaaccgg

SEQ ID NO: 2431349 - RNA, 19 nt, Artificial Sequence
  Description of Artificial Sequence: Synthetic oligonucleotide
gggcauaacugugaucaga

SEQ ID NO: 2431350 - RNA, 19 nt, Artificial Sequence
  Description of Artificial Sequence: Synthetic oligonucleotide
acuuccugccaggguguug

SEQ ID NO: 2431351 - RNA, 19 nt, Artificial Sequence
  Description of Artificial Sequence: Synthetic oligonucleotide
ccgguggaaggugagcugc

SEQ ID NO: 2431352 - RNA, 19 nt, Artificial Sequence
  Description of Artificial Sequence: Synthetic oligonucleotide
cugggcggcugaauggaaa

SEQ ID NO: 2431353 - RNA, 19 nt, Artificial Sequence
  Description of Artificial Sequence: Synthetic oligonucleotide
cagugugcuguccgcuguc

SEQ ID NO: 2431354 - RNA, 19 nt, Artificial Sequence
  Description of Artificial Sequence: Synthetic oligonucleotide
cugugaucagacggcuguc

SEQ ID NO: 2431355 - RNA, 19 nt, Artificial Sequence
  Description of Artificial Sequence: Synthetic oligonucleotide
ggaaaccgguggaagguga

SEQ ID NO: 2431356 - RNA, 19 nt, Artificial Sequence
  Description of Artificial Sequence: Synthetic oligonucleotide
cauugccgggccgcacacg

SEQ ID NO: 2431357 - RNA, 19 nt, Artificial Sequence
  Description of Artificial Sequence: Synthetic oligonucleotide
ggaggcuacauguccuucu

SEQ ID NO: 2431358 - RNA, 19 nt, Artificial Sequence
  Description of Artificial Sequence: Synthetic oligonucleotide
ucaacaccguggggcuggc

SEQ ID NO: 2431359 - RNA, 19 nt, Artificial Sequence
  Description of Artificial Sequence: Synthetic oligonucleotide
gcugucccucucuguaggc

SEQ ID NO: 2431360 - RNA, 19 nt, Artificial Sequence
  Description of Artificial Sequence: Synthetic oligonucleotide
gggguucugaaaagcgaac

SEQ ID NO: 2431361 - RNA, 19 nt, Artificial Sequence
  Description of Artificial Sequence: Synthetic oligonucleotide
uggcccggccgauguugag

SEQ ID NO: 2431362 - RNA, 19 nt, Artificial Sequence
  Description of Artificial Sequence: Synthetic oligonucleotide
gcacucgggucugaagugc

SEQ ID NO: 2431363 - RNA, 19 nt, Artificial Sequence
  Description of Artificial Sequence: Synthetic oligonucleotide
cgauguugagcacccacuc

SEQ ID NO: 2431364 - RNA, 19 nt, Artificial Sequence
  Description of Artificial Sequence: Synthetic oligonucleotide
aucagacggcugucccaga

SEQ ID NO: 2431365 - RNA, 19 nt, Artificial Sequence
  Description of Artificial Sequence: Synthetic oligonucleotide
gcaucgcggagaccggccc

SEQ ID NO: 2431366 - RNA, 19 nt, Artificial Sequence
  Description of Artificial Sequence: Synthetic oligonucleotide
caaguccaaaagggcauaa

SEQ ID NO: 2431367 - RNA, 19 nt, Artificial Sequence
  Description of Artificial Sequence: Synthetic oligonucleotide
uugccgggccgcacacgac

SEQ ID NO: 2431368 - RNA, 19 nt, Artificial Sequence
  Description of Artificial Sequence: Synthetic oligonucleotide
guaggcucgcaggaggcua

SEQ ID NO: 2431369 - RNA, 19 nt, Artificial Sequence
  Description of Artificial Sequence: Synthetic oligonucleotide
gugcucagagcagaugacu

SEQ ID NO: 2431370 - RNA, 19 nt, Artificial Sequence
  Description of Artificial Sequence: Synthetic oligonucleotide
uccccacaucccagaacuu

SEQ ID NO: 2431371 - RNA, 19 nt, Artificial Sequence
  Description of Artificial Sequence: Synthetic oligonucleotide
ggccgcacacgacuucggc

SEQ ID NO: 2431372 - RNA, 19 nt, Artificial Sequence
  Description of Artificial Sequence: Synthetic oligonucleotide
agaccggcccgcugccccu

SEQ ID NO: 2431373 - RNA, 19 nt, Artificial Sequence
  Description of Artificial Sequence: Synthetic oligonucleotide
gugcuguccgcugucccca

SEQ ID NO: 2431374 - RNA, 19 nt, Artificial Sequence
  Description of Artificial Sequence: Synthetic oligonucleotide
gcgugggguucugaaaagc

SEQ ID NO: 2431375 - RNA, 19 nt, Artificial Sequence
  Description of Artificial Sequence: Synthetic oligonucleotide
ucccuccccugacgacugc

SEQ ID NO: 2431376 - RNA, 19 nt, Artificial Sequence
  Description of Artificial Sequence: Synthetic oligonucleotide
gccgucuggcccguggucc

SEQ ID NO: 2431377 - RNA, 19 nt, Artificial Sequence
  Description of Artificial Sequence: Synthetic oligonucleotide
cccucaggcgcuugcggag

SEQ ID NO: 2431378 - RNA, 19 nt, Artificial Sequence
  Description of Artificial Sequence: Synthetic oligonucleotide
cccgaaggcgcugaagcac

SEQ ID NO: 2431379 - RNA, 19 nt, Artificial Sequence
  Description of Artificial Sequence: Synthetic oligonucleotide
gcugcuugggcuugaaguu

SEQ ID NO: 2431380 - RNA, 19 nt, Artificial Sequence
  Description of Artificial Sequence: Synthetic oligonucleotide
cccugcagcauuaguauua

SEQ ID NO: 2431381 - RNA, 19 nt, Artificial Sequence
  Description of Artificial Sequence: Synthetic oligonucleotide
gucuggcccgugguccccg

SEQ ID NO: 2431382 - RNA, 19 nt, Artificial Sequence
  Description of Artificial Sequence: Synthetic oligonucleotide
gugugaagaagaguuucuu

SEQ ID NO: 2431383 - RNA, 19 nt, Artificial Sequence
  Description of Artificial Sequence: Synthetic oligonucleotide
ccuccauugcuucuguucu

SEQ ID NO: 2431384 - RNA, 19 nt, Artificial Sequence
  Description of Artificial Sequence: Synthetic oligonucleotide
gcccggccgauguugagca

SEQ ID NO: 2431385 - RNA, 19 nt, Artificial Sequence
  Description of Artificial Sequence: Synthetic oligonucleotide
gggcuugaaguuggcccgg

SEQ ID NO: 2431386 - RNA, 19 nt, Artificial Sequence
  Description of Artificial Sequence: Synthetic oligonucleotide
gcucagagcagaugacugu

SEQ ID NO: 2431387 - RNA, 19 nt, Artificial Sequence
  Description of Artificial Sequence: Synthetic oligonucleotide
ggcaucgcggagaccggcc

SEQ ID NO: 2431388 - RNA, 19 nt, Artificial Sequence
  Description of Artificial Sequence: Synthetic oligonucleotide
agaugacugugugcugcuu

SEQ ID NO: 2431389 - RNA, 19 nt, Artificial Sequence
  Description of Artificial Sequence: Synthetic oligonucleotide
gugcacagcagagccgaaa

SEQ ID NO: 2431390 - RNA, 19 nt, Artificial Sequence
  Description of Artificial Sequence: Synthetic oligonucleotide
caggcgcuugcggagccuc

SEQ ID NO: 2431391 - RNA, 19 nt, Artificial Sequence
  Description of Artificial Sequence: Synthetic oligonucleotide
aguuggcccggccgauguu

SEQ ID NO: 2431392 - RNA, 19 nt, Artificial Sequence
  Description of Artificial Sequence: Synthetic oligonucleotide
gggcggcugaauggaaacc

SEQ ID NO: 2431393 - RNA, 19 nt, Artificial Sequence
  Description of Artificial Sequence: Synthetic oligonucleotide
ggcccggccgauguugagc

SEQ ID NO: 2431394 - RNA, 19 nt, Artificial Sequence
  Description of Artificial Sequence: Synthetic oligonucleotide
caccguggggcuggcuggc

SEQ ID NO: 2431395 - RNA, 19 nt, Artificial Sequence
  Description of Artificial Sequence: Synthetic oligonucleotide
cagacucuuccagugugcu

SEQ ID NO: 2431396 - RNA, 19 nt, Artificial Sequence
  Description of Artificial Sequence: Synthetic oligonucleotide
gcauugccgggccgcacac

SEQ ID NO: 2431397 - RNA, 19 nt, Artificial Sequence
  Description of Artificial Sequence: Synthetic oligonucleotide
ugggcacggcauugugcuu

SEQ ID NO: 2431398 - RNA, 19 nt, Artificial Sequence
  Description of Artificial Sequence: Synthetic oligonucleotide
agaccugcgugggguucug

SEQ ID NO: 2431399 - RNA, 19 nt, Artificial Sequence
  Description of Artificial Sequence: Synthetic oligonucleotide
ggcucagcugcgcugugcu

SEQ ID NO: 2431400 - RNA, 19 nt, Artificial Sequence
  Description of Artificial Sequence: Synthetic oligonucleotide
ccccaccucaggacagacc

SEQ ID NO: 2431401 - RNA, 19 nt, Artificial Sequence
  Description of Artificial Sequence: Synthetic oligonucleotide
gacagaccugcgugggguu

SEQ ID NO: 2431402 - RNA, 19 nt, Artificial Sequence
  Description of Artificial Sequence: Synthetic oligonucleotide
ccgucuggcccgugguccc

SEQ ID NO: 2431403 - RNA, 19 nt, Artificial Sequence
  Description of Artificial Sequence: Synthetic oligonucleotide
gcgcuugcggagccucuug

SEQ ID NO: 2431404 - RNA, 19 nt, Artificial Sequence
  Description of Artificial Sequence: Synthetic oligonucleotide
cuucggcaucgcggagacc

SEQ ID NO: 2431405 - RNA, 19 nt, Artificial Sequence
  Description of Artificial Sequence: Synthetic oligonucleotide
ccgauguugagcacccacu

SEQ ID NO: 2431406 - RNA, 19 nt, Artificial Sequence
  Description of Artificial Sequence: Synthetic oligonucleotide
ccguggggcuggcuggcgg

SEQ ID NO: 2431407 - RNA, 19 nt, Artificial Sequence
  Description of Artificial Sequence: Synthetic oligonucleotide
ggucccuccccugacgacu

SEQ ID NO: 2431408 - RNA, 19 nt, Artificial Sequence
  Description of Artificial Sequence: Synthetic oligonucleotide
ggcccgcugccccuaacaa

SEQ ID NO: 2431409 - RNA, 19 nt, Artificial Sequence
  Description of Artificial Sequence: Synthetic oligonucleotide
cucugggcccucaggcgcu

SEQ ID NO: 2431410 - RNA, 19 nt, Artificial Sequence
  Description of Artificial Sequence: Synthetic oligonucleotide
cgggccgcacacgacuucg

SEQ ID NO: 2431411 - RNA, 19 nt, Artificial Sequence
  Description of Artificial Sequence: Synthetic oligonucleotide
ccuguuucacagggccuuc

SEQ ID NO: 2431412 - RNA, 19 nt, Artificial Sequence
  Description of Artificial Sequence: Synthetic oligonucleotide
gcccgcugccccuaacaaa

SEQ ID NO: 2431413 - RNA, 19 nt, Artificial Sequence
  Description of Artificial Sequence: Synthetic oligonucleotide
ggccgucuggcccgugguc

SEQ ID NO: 2431414 - RNA, 19 nt, Artificial Sequence
  Description of Artificial Sequence: Synthetic oligonucleotide
ccgcacacgacuucggcau

SEQ ID NO: 2431415 - RNA, 19 nt, Artificial Sequence
  Description of Artificial Sequence: Synthetic oligonucleotide
gaccugcgugggguucuga

SEQ ID NO: 2431416 - RNA, 19 nt, Artificial Sequence
  Description of Artificial Sequence: Synthetic oligonucleotide
ccccugacgacugccuguc

SEQ ID NO: 2431417 - RNA, 19 nt, Artificial Sequence
  Description of Artificial Sequence: Synthetic oligonucleotide
ccgaaggcgcugaagcacu

SEQ ID NO: 2431418 - RNA, 19 nt, Artificial Sequence
  Description of Artificial Sequence: Synthetic oligonucleotide
ggagaccggcccgcugccc

SEQ ID NO: 2431419 - RNA, 19 nt, Artificial Sequence
  Description of Artificial Sequence: Synthetic oligonucleotide
ugcuggccgucuggcccgu

SEQ ID NO: 2431420 - RNA, 19 nt, Artificial Sequence
  Description of Artificial Sequence: Synthetic oligonucleotide
cagaccugcgugggguucu

SEQ ID NO: 2431421 - RNA, 19 nt, Artificial Sequence
  Description of Artificial Sequence: Synthetic oligonucleotide
gcucaggcucagcugcgcu

SEQ ID NO: 2431422 - RNA, 19 nt, Artificial Sequence
  Description of Artificial Sequence: Synthetic oligonucleotide
ccugacgacugccugucau

SEQ ID NO: 2431423 - RNA, 19 nt, Artificial Sequence
  Description of Artificial Sequence: Synthetic oligonucleotide
gccuguuucacagggccuu

SEQ ID NO: 2431424 - RNA, 19 nt, Artificial Sequence
  Description of Artificial Sequence: Synthetic oligonucleotide
gcagagccgaaaaccacuu

SEQ ID NO: 2431425 - RNA, 19 nt, Artificial Sequence
  Description of Artificial Sequence: Synthetic oligonucleotide
gcgcugugcuggccgucug

SEQ ID NO: 2431426 - RNA, 19 nt, Artificial Sequence
  Description of Artificial Sequence: Synthetic oligonucleotide
gcuguagcgguugcagcau

SEQ ID NO: 2431427 - RNA, 19 nt, Artificial Sequence
  Description of Artificial Sequence: Synthetic oligonucleotide
accggcccgcugccccuaa

SEQ ID NO: 2431428 - RNA, 19 nt, Artificial Sequence
  Description of Artificial Sequence: Synthetic oligonucleotide
cuguagcgguugcagcauu

SEQ ID NO: 2431429 - RNA, 19 nt, Artificial Sequence
  Description of Artificial Sequence: Synthetic oligonucleotide
cccacuccuucagcaguuc

SEQ ID NO: 2431430 - RNA, 19 nt, Artificial Sequence
  Description of Artificial Sequence: Synthetic oligonucleotide
ccagugugcuguccgcugu

SEQ ID NO: 2431431 - RNA, 19 nt, Artificial Sequence
  Description of Artificial Sequence: Synthetic oligonucleotide
cggagaccggcccgcugcc

SEQ ID NO: 2431432 - RNA, 19 nt, Artificial Sequence
  Description of Artificial Sequence: Synthetic oligonucleotide
cgacuucggcaucgcggag

SEQ ID NO: 2431433 - RNA, 19 nt, Artificial Sequence
  Description of Artificial Sequence: Synthetic oligonucleotide
gcugcgcugugcuggccgu

SEQ ID NO: 2431434 - RNA, 19 nt, Artificial Sequence
  Description of Artificial Sequence: Synthetic oligonucleotide
ggccuguuucacagggccu

SEQ ID NO: 2431435 - RNA, 19 nt, Artificial Sequence
  Description of Artificial Sequence: Synthetic oligonucleotide
ggggccuuuucaacaccgu

SEQ ID NO: 2431436 - RNA, 19 nt, Artificial Sequence
  Description of Artificial Sequence: Synthetic oligonucleotide
gggccuccauugcuucugu

SEQ ID NO: 2431437 - RNA, 19 nt, Artificial Sequence
  Description of Artificial Sequence: Synthetic oligonucleotide
cgaacacagugggcacggc

SEQ ID NO: 2431438 - RNA, 19 nt, Artificial Sequence
  Description of Artificial Sequence: Synthetic oligonucleotide
gcacggcauugugcuugag

SEQ ID NO: 2431439 - RNA, 19 nt, Artificial Sequence
  Description of Artificial Sequence: Synthetic oligonucleotide
cgcacacgacuucggcauc

SEQ ID NO: 2431440 - RNA, 19 nt, Artificial Sequence
  Description of Artificial Sequence: Synthetic oligonucleotide
cggcugaauggaaaccggu

SEQ ID NO: 2431441 - RNA, 19 nt, Artificial Sequence
  Description of Artificial Sequence: Synthetic oligonucleotide
cccggccgauguugagcac

SEQ ID NO: 2431442 - RNA, 19 nt, Artificial Sequence
  Description of Artificial Sequence: Synthetic oligonucleotide
ccgggccgcacacgacuuc

SEQ ID NO: 2431443 - RNA, 19 nt, Artificial Sequence
  Description of Artificial Sequence: Synthetic oligonucleotide
caguucugggcggcugaau

SEQ ID NO: 2431444 - RNA, 19 nt, Artificial Sequence
  Description of Artificial Sequence: Synthetic oligonucleotide
cucucugguagggccuguu

SEQ ID NO: 2431445 - RNA, 19 nt, Artificial Sequence
  Description of Artificial Sequence: Synthetic oligonucleotide
gaccggcccgcugccccua

SEQ ID NO: 2431446 - RNA, 19 nt, Artificial Sequence
  Description of Artificial Sequence: Synthetic oligonucleotide
gucccagaaggggccuuuu

SEQ ID NO: 2431447 - RNA, 19 nt, Artificial Sequence
  Description of Artificial Sequence: Synthetic oligonucleotide
cggcccgcugccccuaaca

SEQ ID NO: 2431448 - RNA, 19 nt, Artificial Sequence
  Description of Artificial Sequence: Synthetic oligonucleotide
cgucuggcccguggucccc

SEQ ID NO: 2431449 - RNA, 19 nt, Artificial Sequence
  Description of Artificial Sequence: Synthetic oligonucleotide
cuggcccgugguccccgcu

SEQ ID NO: 2431450 - RNA, 19 nt, Artificial Sequence
  Description of Artificial Sequence: Synthetic oligonucleotide
cccauccugccagucccaa

SEQ ID NO: 2431451 - RNA, 19 nt, Artificial Sequence
  Description of Artificial Sequence: Synthetic oligonucleotide
cgcggagaccggcccgcug

SEQ ID NO: 2431452 - RNA, 19 nt, Artificial Sequence
  Description of Artificial Sequence: Synthetic oligonucleotide
gccugucauggcaucccau

SEQ ID NO: 2431453 - RNA, 19 nt, Artificial Sequence
  Description of Artificial Sequence: Synthetic oligonucleotide
cccugacgacugccuguca

SEQ ID NO: 2431454 - RNA, 19 nt, Artificial Sequence
  Description of Artificial Sequence: Synthetic oligonucleotide
ggccuccauugcuucuguu

SEQ ID NO: 2431455 - RNA, 19 nt, Artificial Sequence
  Description of Artificial Sequence: Synthetic oligonucleotide
ggcgcuugcggagccucuu

SEQ ID NO: 2431456 - RNA, 19 nt, Artificial Sequence
  Description of Artificial Sequence: Synthetic oligonucleotide
ccggcccgcugccccuaac

SEQ ID NO: 2431457 - RNA, 19 nt, Artificial Sequence
  Description of Artificial Sequence: Synthetic oligonucleotide
caacaccguggggcuggcu

SEQ ID NO: 2431458 - RNA, 19 nt, Artificial Sequence
  Description of Artificial Sequence: Synthetic oligonucleotide
ggcucgcaggaggcuacau

SEQ ID NO: 2431459 - RNA, 19 nt, Artificial Sequence
  Description of Artificial Sequence: Synthetic oligonucleotide
gcuggccgucuggcccgug

SEQ ID NO: 2431460 - RNA, 19 nt, Artificial Sequence
  Description of Artificial Sequence: Synthetic oligonucleotide
ccccgcugucccucucugu

SEQ ID NO: 2431461 - RNA, 19 nt, Artificial Sequence
  Description of Artificial Sequence: Synthetic oligonucleotide
gccgggccgcacacgacuu

SEQ ID NO: 2431462 - RNA, 19 nt, Artificial Sequence
  Description of Artificial Sequence: Synthetic oligonucleotide
aaucauuugggccagaagg

SEQ ID NO: 2431463 - RNA, 19 nt, Artificial Sequence
  Description of Artificial Sequence: Synthetic oligonucleotide
aaucacauaauuuagucag

SEQ ID NO: 2431464 - RNA, 19 nt, Artificial Sequence
  Description of Artificial Sequence: Synthetic oligonucleotide
aaugaugggauucugaucu

SEQ ID NO: 2431465 - RNA, 19 nt, Artificial Sequence
  Description of Artificial Sequence: Synthetic oligonucleotide
gacaucuagacuuugagag

SEQ ID NO: 2431466 - RNA, 19 nt, Artificial Sequence
  Description of Artificial Sequence: Synthetic oligonucleotide
aauuuagucagaugauguc

SEQ ID NO: 2431467 - RNA, 19 nt, Artificial Sequence
  Description of Artificial Sequence: Synthetic oligonucleotide
guuaaugaacugcaaaagg

SEQ ID NO: 2431468 - RNA, 19 nt, Artificial Sequence
  Description of Artificial Sequence: Synthetic oligonucleotide
uccaacaaguucaugauga

SEQ ID NO: 2431469 - RNA, 19 nt, Artificial Sequence
  Description of Artificial Sequence: Synthetic oligonucleotide
ucagaugauguccugaaug

SEQ ID NO: 2431470 - RNA, 19 nt, Artificial Sequence
  Description of Artificial Sequence: Synthetic oligonucleotide
auuuagucagaugaugucc

SEQ ID NO: 2431471 - RNA, 19 nt, Artificial Sequence
  Description of Artificial Sequence: Synthetic oligonucleotide
aaccauaaauuaaaauacc

SEQ ID NO: 2431472 - RNA, 19 nt, Artificial Sequence
  Description of Artificial Sequence: Synthetic oligonucleotide
gaaccauaaauuaaaauac

SEQ ID NO: 2431473 - RNA, 19 nt, Artificial Sequence
  Description of Artificial Sequence: Synthetic oligonucleotide
uaauuuagucagaugaugu

SEQ ID NO: 2431474 - RNA, 19 nt, Artificial Sequence
  Description of Artificial Sequence: Synthetic oligonucleotide
acauaguugauguuaauga

SEQ ID NO: 2431475 - RNA, 19 nt, Artificial Sequence
  Description of Artificial Sequence: Synthetic oligonucleotide
acacuaacacauuuccucc

SEQ ID NO: 2431476 - RNA, 19 nt, Artificial Sequence
  Description of Artificial Sequence: Synthetic oligonucleotide
ucugacaucacuuccucag

SEQ ID NO: 2431477 - RNA, 19 nt, Artificial Sequence
  Description of Artificial Sequence: Synthetic oligonucleotide
uaguugauguuaaugaacu

SEQ ID NO: 2431478 - RNA, 19 nt, Artificial Sequence
  Description of Artificial Sequence: Synthetic oligonucleotide
uuaaaauaccugagaagcc

SEQ ID NO: 2431479 - RNA, 19 nt, Artificial Sequence
  Description of Artificial Sequence: Synthetic oligonucleotide
aacaaguucaugaugagaa

SEQ ID NO: 2431480 - RNA, 19 nt, Artificial Sequence
  Description of Artificial Sequence: Synthetic oligonucleotide
uccuccuauauuuuaaggc

SEQ ID NO: 2431481 - RNA, 19 nt, Artificial Sequence
  Description of Artificial Sequence: Synthetic oligonucleotide
uguuaaugaacugcaaaag

SEQ ID NO: 2431482 - RNA, 19 nt, Artificial Sequence
  Description of Artificial Sequence: Synthetic oligonucleotide
acugacaucuuuccccucc

SEQ ID NO: 2431483 - RNA, 19 nt, Artificial Sequence
  Description of Artificial Sequence: Synthetic oligonucleotide
ugacaaagaaccauaaauu

SEQ ID NO: 2431484 - RNA, 19 nt, Artificial Sequence
  Description of Artificial Sequence: Synthetic oligonucleotide
uuuagucagaugauguccu

SEQ ID NO: 2431485 - RNA, 19 nt, Artificial Sequence
  Description of Artificial Sequence: Synthetic oligonucleotide
auaguugauguuaaugaac

SEQ ID NO: 2431486 - RNA, 19 nt, Artificial Sequence
  Description of Artificial Sequence: Synthetic oligonucleotide
uaggcauaccagaacagag

SEQ ID NO: 2431487 - RNA, 19 nt, Artificial Sequence
  Description of Artificial Sequence: Synthetic oligonucleotide
uguuucuucucaaucauuu

SEQ ID NO: 2431488 - RNA, 19 nt, Artificial Sequence
  Description of Artificial Sequence: Synthetic oligonucleotide
ugaucucuccugcuggugg

SEQ ID NO: 2431489 - RNA, 19 nt, Artificial Sequence
  Description of Artificial Sequence: Synthetic oligonucleotide
uucugaucucuccugcugg

SEQ ID NO: 2431490 - RNA, 19 nt, Artificial Sequence
  Description of Artificial Sequence: Synthetic oligonucleotide
uugaaucacauaauuuagu

SEQ ID NO: 2431491 - RNA, 19 nt, Artificial Sequence
  Description of Artificial Sequence: Synthetic oligonucleotide
aaugaacugcaaaaggugu

SEQ ID NO: 2431492 - RNA, 19 nt, Artificial Sequence
  Description of Artificial Sequence: Synthetic oligonucleotide
auaauuuagucagaugaug

SEQ ID NO: 2431493 - RNA, 19 nt, Artificial Sequence
  Description of Artificial Sequence: Synthetic oligonucleotide
uuccuccuauauuuuaagg

SEQ ID NO: 2431494 - RNA, 19 nt, Artificial Sequence
  Description of Artificial Sequence: Synthetic oligonucleotide
ugacaucacuuccucagag

SEQ ID NO: 2431495 - RNA, 19 nt, Artificial Sequence
  Description of Artificial Sequence: Synthetic oligonucleotide
augggauucugaucucucc

SEQ ID NO: 2431496 - RNA, 19 nt, Artificial Sequence
  Description of Artificial Sequence: Synthetic oligonucleotide
uuuccuccuauauuuuaag

SEQ ID NO: 2431497 - RNA, 19 nt, Artificial Sequence
  Description of Artificial Sequence: Synthetic oligonucleotide
uucugagcggcuccgggcg

SEQ ID NO: 2431498 - RNA, 19 nt, Artificial Sequence
  Description of Artificial Sequence: Synthetic oligonucleotide
ucugacacuaacacauuuc

SEQ ID NO: 2431499 - RNA, 19 nt, Artificial Sequence
  Description of Artificial Sequence: Synthetic oligonucleotide
gaagccacuccucaucuug

SEQ ID NO: 2431500 - RNA, 19 nt, Artificial Sequence
  Description of Artificial Sequence: Synthetic oligonucleotide
uuuggugaacacgggauag

SEQ ID NO: 2431501 - RNA, 19 nt, Artificial Sequence
  Description of Artificial Sequence: Synthetic oligonucleotide
gagcaggcgauccauagug

SEQ ID NO: 2431502 - RNA, 19 nt, Artificial Sequence
  Description of Artificial Sequence: Synthetic oligonucleotide
caaaaugccacugcugacc

SEQ ID NO: 2431503 - RNA, 19 nt, Artificial Sequence
  Description of Artificial Sequence: Synthetic oligonucleotide
ugacaucuagacuuugaga

SEQ ID NO: 2431504 - RNA, 19 nt, Artificial Sequence
  Description of Artificial Sequence: Synthetic oligonucleotide
aaugccacugcugaccgcu

SEQ ID NO: 2431505 - RNA, 19 nt, Artificial Sequence
  Description of Artificial Sequence: Synthetic oligonucleotide
accgcuuuggugaacacgg

SEQ ID NO: 2431506 - RNA, 19 nt, Artificial Sequence
  Description of Artificial Sequence: Synthetic oligonucleotide
cauagugacucagugggcc

SEQ ID NO: 2431507 - RNA, 19 nt, Artificial Sequence
  Description of Artificial Sequence: Synthetic oligonucleotide
agguaggcauaccagaaca

SEQ ID NO: 2431508 - RNA, 19 nt, Artificial Sequence
  Description of Artificial Sequence: Synthetic oligonucleotide
accauaaauuaaaauaccu

SEQ ID NO: 2431509 - RNA, 19 nt, Artificial Sequence
  Description of Artificial Sequence: Synthetic oligonucleotide
cugacaucuagacuuugag

SEQ ID NO: 2431510 - RNA, 19 nt, Artificial Sequence
  Description of Artificial Sequence: Synthetic oligonucleotide
aaagagcacccggaacugc

SEQ ID NO: 2431511 - RNA, 19 nt, Artificial Sequence
  Description of Artificial Sequence: Synthetic oligonucleotide
uucauuugcagugcaggcc

SEQ ID NO: 2431512 - RNA, 19 nt, Artificial Sequence
  Description of Artificial Sequence: Synthetic oligonucleotide
auuugggccagaagguugc

SEQ ID NO: 2431513 - RNA, 19 nt, Artificial Sequence
  Description of Artificial Sequence: Synthetic oligonucleotide
agcgaaggcacugacaucu

SEQ ID NO: 2431514 - RNA, 19 nt, Artificial Sequence
  Description of Artificial Sequence: Synthetic oligonucleotide
acggcugacaaaaugccac

SEQ ID NO: 2431515 - RNA, 19 nt, Artificial Sequence
  Description of Artificial Sequence: Synthetic oligonucleotide
agggagcucgcauuccgcc

SEQ ID NO: 2431516 - RNA, 19 nt, Artificial Sequence
  Description of Artificial Sequence: Synthetic oligonucleotide
auaccugagaagcccacug

SEQ ID NO: 2431517 - RNA, 19 nt, Artificial Sequence
  Description of Artificial Sequence: Synthetic oligonucleotide
aaauaccugagaagcccac

SEQ ID NO: 2431518 - RNA, 19 nt, Artificial Sequence
  Description of Artificial Sequence: Synthetic oligonucleotide
aaaugccacugcugaccgc

SEQ ID NO: 2431519 - RNA, 19 nt, Artificial Sequence
  Description of Artificial Sequence: Synthetic oligonucleotide
aggcgauccauagugacuc

SEQ ID NO: 2431520 - RNA, 19 nt, Artificial Sequence
  Description of Artificial Sequence: Synthetic oligonucleotide
acauuuccugcccuaccac

SEQ ID NO: 2431521 - RNA, 19 nt, Artificial Sequence
  Description of Artificial Sequence: Synthetic oligonucleotide
aggcauaccagaacagagc

SEQ ID NO: 2431522 - RNA, 19 nt, Artificial Sequence
  Description of Artificial Sequence: Synthetic oligonucleotide
acggccugacauuuccugc

SEQ ID NO: 2431523 - RNA, 19 nt, Artificial Sequence
  Description of Artificial Sequence: Synthetic oligonucleotide
gacucagugggccugugac

SEQ ID NO: 2431524 - RNA, 19 nt, Artificial Sequence
  Description of Artificial Sequence: Synthetic oligonucleotide
ugggauucugaucucuccu

SEQ ID NO: 2431525 - RNA, 19 nt, Artificial Sequence
  Description of Artificial Sequence: Synthetic oligonucleotide
uccuauauuuuaaggcauc

SEQ ID NO: 2431526 - RNA, 19 nt, Artificial Sequence
  Description of Artificial Sequence: Synthetic oligonucleotide
gggccugugacaaagaacc

SEQ ID NO: 2431527 - RNA, 19 nt, Artificial Sequence
  Description of Artificial Sequence: Synthetic oligonucleotide
caacggcugacaaaaugcc

SEQ ID NO: 2431528 - RNA, 19 nt, Artificial Sequence
  Description of Artificial Sequence: Synthetic oligonucleotide
aucuuggaagcgaaggcac

SEQ ID NO: 2431529 - RNA, 19 nt, Artificial Sequence
  Description of Artificial Sequence: Synthetic oligonucleotide
aguugauguuaaugaacug

SEQ ID NO: 2431530 - RNA, 19 nt, Artificial Sequence
  Description of Artificial Sequence: Synthetic oligonucleotide
caucuagacuuugagaguc

SEQ ID NO: 2431531 - RNA, 19 nt, Artificial Sequence
  Description of Artificial Sequence: Synthetic oligonucleotide
gagacggccugacauuucc

SEQ ID NO: 2431532 - RNA, 19 nt, Artificial Sequence
  Description of Artificial Sequence: Synthetic oligonucleotide
acauucugacacuaacaca

SEQ ID NO: 2431533 - RNA, 19 nt, Artificial Sequence
  Description of Artificial Sequence: Synthetic oligonucleotide
gaaugaugggauucugauc

SEQ ID NO: 2431534 - RNA, 19 nt, Artificial Sequence
  Description of Artificial Sequence: Synthetic oligonucleotide
cauuugggccagaagguug

SEQ ID NO: 2431535 - RNA, 19 nt, Artificial Sequence
  Description of Artificial Sequence: Synthetic oligonucleotide
ucacauaauuuagucagau

SEQ ID NO: 2431536 - RNA, 19 nt, Artificial Sequence
  Description of Artificial Sequence: Synthetic oligonucleotide
uugccaacggcugacaaaa

SEQ ID NO: 2431537 - RNA, 19 nt, Artificial Sequence
  Description of Artificial Sequence: Synthetic oligonucleotide
ucgcauuccgcccgcagcc

SEQ ID NO: 2431538 - RNA, 19 nt, Artificial Sequence
  Description of Artificial Sequence: Synthetic oligonucleotide
cauccuccaguucauuugc

SEQ ID NO: 2431539 - RNA, 19 nt, Artificial Sequence
  Description of Artificial Sequence: Synthetic oligonucleotide
uggugaacacgggauagag

SEQ ID NO: 2431540 - RNA, 19 nt, Artificial Sequence
  Description of Artificial Sequence: Synthetic oligonucleotide
cacauaauuuagucagaug

SEQ ID NO: 2431541 - RNA, 19 nt, Artificial Sequence
  Description of Artificial Sequence: Synthetic oligonucleotide
caucacuuccucagagagg

SEQ ID NO: 2431542 - RNA, 19 nt, Artificial Sequence
  Description of Artificial Sequence: Synthetic oligonucleotide
ugagaaagaacagcagcaa

SEQ ID NO: 2431543 - RNA, 19 nt, Artificial Sequence
  Description of Artificial Sequence: Synthetic oligonucleotide
auguuggcaaagagcaccc

SEQ ID NO: 2431544 - RNA, 19 nt, Artificial Sequence
  Description of Artificial Sequence: Synthetic oligonucleotide
ccuaccacagcccucagag

SEQ ID NO: 2431545 - RNA, 19 nt, Artificial Sequence
  Description of Artificial Sequence: Synthetic oligonucleotide
gauguccugaaugauggga

SEQ ID NO: 2431546 - RNA, 19 nt, Artificial Sequence
  Description of Artificial Sequence: Synthetic oligonucleotide
acaucuagacuuugagagu

SEQ ID NO: 2431547 - RNA, 19 nt, Artificial Sequence
  Description of Artificial Sequence: Synthetic oligonucleotide
augaacugcaaaagguguc

SEQ ID NO: 2431548 - RNA, 19 nt, Artificial Sequence
  Description of Artificial Sequence: Synthetic oligonucleotide
gaagcccacugacaucuag

SEQ ID NO: 2431549 - RNA, 19 nt, Artificial Sequence
  Description of Artificial Sequence: Synthetic oligonucleotide
cucuaaacacacauucuga

SEQ ID NO: 2431550 - RNA, 19 nt, Artificial Sequence
  Description of Artificial Sequence: Synthetic oligonucleotide
auagagcuucaggagcagc

SEQ ID NO: 2431551 - RNA, 19 nt, Artificial Sequence
  Description of Artificial Sequence: Synthetic oligonucleotide
guccacauccuccaguuca

SEQ ID NO: 2431552 - RNA, 19 nt, Artificial Sequence
  Description of Artificial Sequence: Synthetic oligonucleotide
uuagucagaugauguccug

SEQ ID NO: 2431553 - RNA, 19 nt, Artificial Sequence
  Description of Artificial Sequence: Synthetic oligonucleotide
aagggagcucgcauuccgc

SEQ ID NO: 2431554 - RNA, 19 nt, Artificial Sequence
  Description of Artificial Sequence: Synthetic oligonucleotide
gacggccugacauuuccug

SEQ ID NO: 2431555 - RNA, 19 nt, Artificial Sequence
  Description of Artificial Sequence: Synthetic oligonucleotide
aauaccugagaagcccacu

SEQ ID NO: 2431556 - RNA, 19 nt, Artificial Sequence
  Description of Artificial Sequence: Synthetic oligonucleotide
gccguuccaguucugagcg

SEQ ID NO: 2431557 - RNA, 19 nt, Artificial Sequence
  Description of Artificial Sequence: Synthetic oligonucleotide
ugggccugugacaaagaac

SEQ ID NO: 2431558 - RNA, 19 nt, Artificial Sequence
  Description of Artificial Sequence: Synthetic oligonucleotide
ucuuggaagcgaaggcacu

SEQ ID NO: 2431559 - RNA, 19 nt, Artificial Sequence
  Description of Artificial Sequence: Synthetic oligonucleotide
gaacacgggauagagcuuc

SEQ ID NO: 2431560 - RNA, 19 nt, Artificial Sequence
  Description of Artificial Sequence: Synthetic oligonucleotide
agcaaguacugggcgagcg

SEQ ID NO: 2431561 - RNA, 19 nt, Artificial Sequence
  Description of Artificial Sequence: Synthetic oligonucleotide
caaucauuugggccagaag

SEQ ID NO: 2431562 - RNA, 19 nt, Artificial Sequence
  Description of Artificial Sequence: Synthetic oligonucleotide
uggguagauuccccaagac

SEQ ID NO: 2431563 - RNA, 19 nt, Artificial Sequence
  Description of Artificial Sequence: Synthetic oligonucleotide
agugcaggccagaagccac

SEQ ID NO: 2431564 - RNA, 19 nt, Artificial Sequence
  Description of Artificial Sequence: Synthetic oligonucleotide
ugggccagaagguugccaa

SEQ ID NO: 2431565 - RNA, 19 nt, Artificial Sequence
  Description of Artificial Sequence: Synthetic oligonucleotide
ugcaaaagguguccacauc

SEQ ID NO: 2431566 - RNA, 19 nt, Artificial Sequence
  Description of Artificial Sequence: Synthetic oligonucleotide
gaccgcuuuggugaacacg

SEQ ID NO: 2431567 - RNA, 19 nt, Artificial Sequence
  Description of Artificial Sequence: Synthetic oligonucleotide
ggguagauuccccaagacc

SEQ ID NO: 2431568 - RNA, 19 nt, Artificial Sequence
  Description of Artificial Sequence: Synthetic oligonucleotide
acacauuuccuccuauauu

SEQ ID NO: 2431569 - RNA, 19 nt, Artificial Sequence
  Description of Artificial Sequence: Synthetic oligonucleotide
aguacugggcgagcgcucg

SEQ ID NO: 2431570 - RNA, 19 nt, Artificial Sequence
  Description of Artificial Sequence: Synthetic oligonucleotide
aguguaucugacaucacuu

SEQ ID NO: 2431571 - RNA, 19 nt, Artificial Sequence
  Description of Artificial Sequence: Synthetic oligonucleotide
aacacacauucugacacua

SEQ ID NO: 2431572 - RNA, 19 nt, Artificial Sequence
  Description of Artificial Sequence: Synthetic oligonucleotide
ucuagacuuugagagucgu

SEQ ID NO: 2431573 - RNA, 19 nt, Artificial Sequence
  Description of Artificial Sequence: Synthetic oligonucleotide
gacgcggcaggugccaucg

SEQ ID NO: 2431574 - RNA, 19 nt, Artificial Sequence
  Description of Artificial Sequence: Synthetic oligonucleotide
ucugaucucuccugcuggu

SEQ ID NO: 2431575 - RNA, 19 nt, Artificial Sequence
  Description of Artificial Sequence: Synthetic oligonucleotide
auagugacucagugggccu

SEQ ID NO: 2431576 - RNA, 19 nt, Artificial Sequence
  Description of Artificial Sequence: Synthetic oligonucleotide
uaacacauuuccuccuaua

SEQ ID NO: 2431577 - RNA, 19 nt, Artificial Sequence
  Description of Artificial Sequence: Synthetic oligonucleotide
aagaccucauccacagugu

SEQ ID NO: 2431578 - RNA, 19 nt, Artificial Sequence
  Description of Artificial Sequence: Synthetic oligonucleotide
uagucagaugauguccuga

SEQ ID NO: 2431579 - RNA, 19 nt, Artificial Sequence
  Description of Artificial Sequence: Synthetic oligonucleotide
ucaaucauuugggccagaa

SEQ ID NO: 2431580 - RNA, 19 nt, Artificial Sequence
  Description of Artificial Sequence: Synthetic oligonucleotide
acuaacacauuuccuccua

SEQ ID NO: 2431581 - RNA, 19 nt, Artificial Sequence
  Description of Artificial Sequence: Synthetic oligonucleotide
acacauucugacacuaaca

SEQ ID NO: 2431582 - RNA, 19 nt, Artificial Sequence
  Description of Artificial Sequence: Synthetic oligonucleotide
gagaagcccacugacaucu

SEQ ID NO: 2431583 - RNA, 19 nt, Artificial Sequence
  Description of Artificial Sequence: Synthetic oligonucleotide
augaugggauucugaucuc

SEQ ID NO: 2431584 - RNA, 19 nt, Artificial Sequence
  Description of Artificial Sequence: Synthetic oligonucleotide
cuuggaagcgaaggcacug

SEQ ID NO: 2431585 - RNA, 19 nt, Artificial Sequence
  Description of Artificial Sequence: Synthetic oligonucleotide
aacggcugacaaaaugcca

SEQ ID NO: 2431586 - RNA, 19 nt, Artificial Sequence
  Description of Artificial Sequence: Synthetic oligonucleotide
aagcgaagggagcucgcau

SEQ ID NO: 2431587 - RNA, 19 nt, Artificial Sequence
  Description of Artificial Sequence: Synthetic oligonucleotide
agaagguugccaacggcug

SEQ ID NO: 2431588 - RNA, 19 nt, Artificial Sequence
  Description of Artificial Sequence: Synthetic oligonucleotide
uccugaaugaugggauucu

SEQ ID NO: 2431589 - RNA, 19 nt, Artificial Sequence
  Description of Artificial Sequence: Synthetic oligonucleotide
ccuccuauauuuuaaggca

SEQ ID NO: 2431590 - RNA, 19 nt, Artificial Sequence
  Description of Artificial Sequence: Synthetic oligonucleotide
uagauuccccaagaccuca

SEQ ID NO: 2431591 - RNA, 19 nt, Artificial Sequence
  Description of Artificial Sequence: Synthetic oligonucleotide
gauagagcuucaggagcag

SEQ ID NO: 2431592 - RNA, 19 nt, Artificial Sequence
  Description of Artificial Sequence: Synthetic oligonucleotide
ggauucugaucucuccugc

SEQ ID NO: 2431593 - RNA, 19 nt, Artificial Sequence
  Description of Artificial Sequence: Synthetic oligonucleotide
cucgcauuccgcccgcagc

SEQ ID NO: 2431594 - RNA, 19 nt, Artificial Sequence
  Description of Artificial Sequence: Synthetic oligonucleotide
cauaauuuagucagaugau

SEQ ID NO: 2431595 - RNA, 19 nt, Artificial Sequence
  Description of Artificial Sequence: Synthetic oligonucleotide
ucgccguuccaguucugag

SEQ ID NO: 2431596 - RNA, 19 nt, Artificial Sequence
  Description of Artificial Sequence: Synthetic oligonucleotide
uguuggcaaagagcacccg

SEQ ID NO: 2431597 - RNA, 19 nt, Artificial Sequence
  Description of Artificial Sequence: Synthetic oligonucleotide
agagcaggcgauccauagu

SEQ ID NO: 2431598 - RNA, 19 nt, Artificial Sequence
  Description of Artificial Sequence: Synthetic oligonucleotide
gaccccgucacgcgcgccg

SEQ ID NO: 2431599 - RNA, 19 nt, Artificial Sequence
  Description of Artificial Sequence: Synthetic oligonucleotide
gguggguagauuccccaag

SEQ ID NO: 2431600 - RNA, 19 nt, Artificial Sequence
  Description of Artificial Sequence: Synthetic oligonucleotide
ggagcucgcauuccgcccg

SEQ ID NO: 2431601 - RNA, 19 nt, Artificial Sequence
  Description of Artificial Sequence: Synthetic oligonucleotide
ugagaagcccacugacauc

SEQ ID NO: 2431602 - RNA, 19 nt, Artificial Sequence
  Description of Artificial Sequence: Synthetic oligonucleotide
guaggcauaccagaacaga

SEQ ID NO: 2431603 - RNA, 19 nt, Artificial Sequence
  Description of Artificial Sequence: Synthetic oligonucleotide
aagcccacugacaucuaga

SEQ ID NO: 2431604 - RNA, 19 nt, Artificial Sequence
  Description of Artificial Sequence: Synthetic oligonucleotide
caucuuggaagcgaaggca

SEQ ID NO: 2431605 - RNA, 19 nt, Artificial Sequence
  Description of Artificial Sequence: Synthetic oligonucleotide
cagguaggcauaccagaac

SEQ ID NO: 2431606 - RNA, 19 nt, Artificial Sequence
  Description of Artificial Sequence: Synthetic oligonucleotide
ccacuccucaucuuggaag

SEQ ID NO: 2431607 - RNA, 19 nt, Artificial Sequence
  Description of Artificial Sequence: Synthetic oligonucleotide
cauuuccugcccuaccaca

SEQ ID NO: 2431608 - RNA, 19 nt, Artificial Sequence
  Description of Artificial Sequence: Synthetic oligonucleotide
uuaaggcaucuugaaucac

SEQ ID NO: 2431609 - RNA, 19 nt, Artificial Sequence
  Description of Artificial Sequence: Synthetic oligonucleotide
cucgccgcggaagcgaagg

SEQ ID NO: 2431610 - RNA, 19 nt, Artificial Sequence
  Description of Artificial Sequence: Synthetic oligonucleotide
aaguacugggcgagcgcuc

SEQ ID NO: 2431611 - RNA, 19 nt, Artificial Sequence
  Description of Artificial Sequence: Synthetic oligonucleotide
acugacaucuagacuuuga

SEQ ID NO: 2431612 - RNA, 19 nt, Artificial Sequence
  Description of Artificial Sequence: Synthetic oligonucleotide
guggguagauuccccaaga

SEQ ID NO: 2431613 - RNA, 19 nt, Artificial Sequence
  Description of Artificial Sequence: Synthetic oligonucleotide
uguccugaaugaugggauu

SEQ ID NO: 2431614 - RNA, 19 nt, Artificial Sequence
  Description of Artificial Sequence: Synthetic oligonucleotide
gggauucugaucucuccug

SEQ ID NO: 2431615 - RNA, 19 nt, Artificial Sequence
  Description of Artificial Sequence: Synthetic oligonucleotide
ucauuugggccagaagguu

SEQ ID NO: 2431616 - RNA, 19 nt, Artificial Sequence
  Description of Artificial Sequence: Synthetic oligonucleotide
caacagcuggccagucggg

SEQ ID NO: 2431617 - RNA, 19 nt, Artificial Sequence
  Description of Artificial Sequence: Synthetic oligonucleotide
caaagagcacccggaacug

SEQ ID NO: 2431618 - RNA, 19 nt, Artificial Sequence
  Description of Artificial Sequence: Synthetic oligonucleotide
acugggcgagcgcucgccg

SEQ ID NO: 2431619 - RNA, 19 nt, Artificial Sequence
  Description of Artificial Sequence: Synthetic oligonucleotide
gauuccccaagaccucauc

SEQ ID NO: 2431620 - RNA, 19 nt, Artificial Sequence
  Description of Artificial Sequence: Synthetic oligonucleotide
cagucgggcauccggcccg

SEQ ID NO: 2431621 - RNA, 19 nt, Artificial Sequence
  Description of Artificial Sequence: Synthetic oligonucleotide
cagugggccugugacaaag

SEQ ID NO: 2431622 - RNA, 19 nt, Artificial Sequence
  Description of Artificial Sequence: Synthetic oligonucleotide
agcgaagggagcucgcauu

SEQ ID NO: 2431623 - RNA, 19 nt, Artificial Sequence
  Description of Artificial Sequence: Synthetic oligonucleotide
cugacaaaaugccacugcu

SEQ ID NO: 2431624 - RNA, 19 nt, Artificial Sequence
  Description of Artificial Sequence: Synthetic oligonucleotide
gccaacggcugacaaaaug

SEQ ID NO: 2431625 - RNA, 19 nt, Artificial Sequence
  Description of Artificial Sequence: Synthetic oligonucleotide
cugacauuuccugcccuac

SEQ ID NO: 2431626 - RNA, 19 nt, Artificial Sequence
  Description of Artificial Sequence: Synthetic oligonucleotide
ugguggguagauuccccaa

SEQ ID NO: 2431627 - RNA, 19 nt, Artificial Sequence
  Description of Artificial Sequence: Synthetic oligonucleotide
cauuugcagugcaggccag

SEQ ID NO: 2431628 - RNA, 19 nt, Artificial Sequence
  Description of Artificial Sequence: Synthetic oligonucleotide
gguaggcauaccagaacag

SEQ ID NO: 2431629 - RNA, 19 nt, Artificial Sequence
  Description of Artificial Sequence: Synthetic oligonucleotide
gccagaagguugccaacgg

SEQ ID NO: 2431630 - RNA, 19 nt, Artificial Sequence
  Description of Artificial Sequence: Synthetic oligonucleotide
ggcauaccagaacagagcu

SEQ ID NO: 2431631 - RNA, 19 nt, Artificial Sequence
  Description of Artificial Sequence: Synthetic oligonucleotide
cauccggcccgggacaccg

SEQ ID NO: 2431632 - RNA, 19 nt, Artificial Sequence
  Description of Artificial Sequence: Synthetic oligonucleotide
agaugauguccugaaugau

SEQ ID NO: 2431633 - RNA, 19 nt, Artificial Sequence
  Description of Artificial Sequence: Synthetic oligonucleotide
ucugagcggcuccgggcgc

SEQ ID NO: 2431634 - RNA, 19 nt, Artificial Sequence
  Description of Artificial Sequence: Synthetic oligonucleotide
gcgcccacccaacagcugg

SEQ ID NO: 2431635 - RNA, 19 nt, Artificial Sequence
  Description of Artificial Sequence: Synthetic oligonucleotide
ucgccgcggaagcgaaggg

SEQ ID NO: 2431636 - RNA, 19 nt, Artificial Sequence
  Description of Artificial Sequence: Synthetic oligonucleotide
ccaacaaguucaugaugag

SEQ ID NO: 2431637 - RNA, 19 nt, Artificial Sequence
  Description of Artificial Sequence: Synthetic oligonucleotide
gaagcgaagggagcucgca

SEQ ID NO: 2431638 - RNA, 19 nt, Artificial Sequence
  Description of Artificial Sequence: Synthetic oligonucleotide
caucuugaaucacauaauu

SEQ ID NO: 2431639 - RNA, 19 nt, Artificial Sequence
  Description of Artificial Sequence: Synthetic oligonucleotide
cuuuggugaacacgggaua

SEQ ID NO: 2431640 - RNA, 19 nt, Artificial Sequence
  Description of Artificial Sequence: Synthetic oligonucleotide
caguguaucugacaucacu

SEQ ID NO: 2431641 - RNA, 19 nt, Artificial Sequence
  Description of Artificial Sequence: Synthetic oligonucleotide
cucucuaaacacacauucu

SEQ ID NO: 2431642 - RNA, 19 nt, Artificial Sequence
  Description of Artificial Sequence: Synthetic oligonucleotide
gccuugacgcggcaggugc

SEQ ID NO: 2431643 - RNA, 19 nt, Artificial Sequence
  Description of Artificial Sequence: Synthetic oligonucleotide
ucacuuccucagagaggcc

SEQ ID NO: 2431644 - RNA, 19 nt, Artificial Sequence
  Description of Artificial Sequence: Synthetic oligonucleotide
guagauuccccaagaccuc

SEQ ID NO: 2431645 - RNA, 19 nt, Artificial Sequence
  Description of Artificial Sequence: Synthetic oligonucleotide
cucagugggccugugacaa

SEQ ID NO: 2431646 - RNA, 19 nt, Artificial Sequence
  Description of Artificial Sequence: Synthetic oligonucleotide
acgaccccgucacgcgcgc

SEQ ID NO: 2431647 - RNA, 19 nt, Artificial Sequence
  Description of Artificial Sequence: Synthetic oligonucleotide
uuccucagagaggccaggu

SEQ ID NO: 2431648 - RNA, 19 nt, Artificial Sequence
  Description of Artificial Sequence: Synthetic oligonucleotide
cauuccgcccgcagccuug

SEQ ID NO: 2431649 - RNA, 19 nt, Artificial Sequence
  Description of Artificial Sequence: Synthetic oligonucleotide
gagcgcucgccgcggaagc

SEQ ID NO: 2431650 - RNA, 19 nt, Artificial Sequence
  Description of Artificial Sequence: Synthetic oligonucleotide
agccacuccucaucuugga

SEQ ID NO: 2431651 - RNA, 19 nt, Artificial Sequence
  Description of Artificial Sequence: Synthetic oligonucleotide
cugacaucacuuccucaga

SEQ ID NO: 2431652 - RNA, 19 nt, Artificial Sequence
  Description of Artificial Sequence: Synthetic oligonucleotide
cuccuauauuuuaaggcau

SEQ ID NO: 2431653 - RNA, 19 nt, Artificial Sequence
  Description of Artificial Sequence: Synthetic oligonucleotide
ucgggcauccggcccggga

SEQ ID NO: 2431654 - RNA, 19 nt, Artificial Sequence
  Description of Artificial Sequence: Synthetic oligonucleotide
gcaaguacugggcgagcgc

SEQ ID NO: 2431655 - RNA, 19 nt, Artificial Sequence
  Description of Artificial Sequence: Synthetic oligonucleotide
ucagagcgcccggacgacc

SEQ ID NO: 2431656 - RNA, 19 nt, Artificial Sequence
  Description of Artificial Sequence: Synthetic oligonucleotide
aacacgggauagagcuuca

SEQ ID NO: 2431657 - RNA, 19 nt, Artificial Sequence
  Description of Artificial Sequence: Synthetic oligonucleotide
aucgccguuccaguucuga

SEQ ID NO: 2431658 - RNA, 19 nt, Artificial Sequence
  Description of Artificial Sequence: Synthetic oligonucleotide
ccagaagguugccaacggc

SEQ ID NO: 2431659 - RNA, 19 nt, Artificial Sequence
  Description of Artificial Sequence: Synthetic oligonucleotide
cugggcgagcgcucgccgc

SEQ ID NO: 2431660 - RNA, 19 nt, Artificial Sequence
  Description of Artificial Sequence: Synthetic oligonucleotide
cugaccgcuuuggugaaca

SEQ ID NO: 2431661 - RNA, 19 nt, Artificial Sequence
  Description of Artificial Sequence: Synthetic oligonucleotide
ugaccgcuuuggugaacac

SEQ ID NO: 2431662 - RNA, 19 nt, Artificial Sequence
  Description of Artificial Sequence: Synthetic oligonucleotide
cugacaucuuuccccucca

SEQ ID NO: 2431663 - RNA, 19 nt, Artificial Sequence
  Description of Artificial Sequence: Synthetic oligonucleotide
gacaccgggcacagggcac

SEQ ID NO: 2431664 - RNA, 19 nt, Artificial Sequence
  Description of Artificial Sequence: Synthetic oligonucleotide
ugcugaccgcuuuggugaa

SEQ ID NO: 2431665 - RNA, 19 nt, Artificial Sequence
  Description of Artificial Sequence: Synthetic oligonucleotide
gggagcucgcauuccgccc

SEQ ID NO: 2431666 - RNA, 19 nt, Artificial Sequence
  Description of Artificial Sequence: Synthetic oligonucleotide
cagaacagagcugccaugu

SEQ ID NO: 2431667 - RNA, 19 nt, Artificial Sequence
  Description of Artificial Sequence: Synthetic oligonucleotide
acacgggauagagcuucag

SEQ ID NO: 2431668 - RNA, 19 nt, Artificial Sequence
  Description of Artificial Sequence: Synthetic oligonucleotide
ccauagugacucagugggc

SEQ ID NO: 2431669 - RNA, 19 nt, Artificial Sequence
  Description of Artificial Sequence: Synthetic oligonucleotide
ggcacauaguugauguuaa

SEQ ID NO: 2431670 - RNA, 19 nt, Artificial Sequence
  Description of Artificial Sequence: Synthetic oligonucleotide
gccgcggaagcgaagggag

SEQ ID NO: 2431671 - RNA, 19 nt, Artificial Sequence
  Description of Artificial Sequence: Synthetic oligonucleotide
cacuaacacauuuccuccu

SEQ ID NO: 2431672 - RNA, 19 nt, Artificial Sequence
  Description of Artificial Sequence: Synthetic oligonucleotide
uccgggcgcccacccaaca

SEQ ID NO: 2431673 - RNA, 19 nt, Artificial Sequence
  Description of Artificial Sequence: Synthetic oligonucleotide
cacugacaucuagacuuug

SEQ ID NO: 2431674 - RNA, 19 nt, Artificial Sequence
  Description of Artificial Sequence: Synthetic oligonucleotide
ucagugggccugugacaaa

SEQ ID NO: 2431675 - RNA, 19 nt, Artificial Sequence
  Description of Artificial Sequence: Synthetic oligonucleotide
cugcaaaagguguccacau

SEQ ID NO: 2431676 - RNA, 19 nt, Artificial Sequence
  Description of Artificial Sequence: Synthetic oligonucleotide
gggcacauaguugauguua

SEQ ID NO: 2431677 - RNA, 19 nt, Artificial Sequence
  Description of Artificial Sequence: Synthetic oligonucleotide
gagcucgcauuccgcccgc

SEQ ID NO: 2431678 - RNA, 19 nt, Artificial Sequence
  Description of Artificial Sequence: Synthetic oligonucleotide
cccaacagcuggccagucg

SEQ ID NO: 2431679 - RNA, 19 nt, Artificial Sequence
  Description of Artificial Sequence: Synthetic oligonucleotide
aggcaucuugaaucacaua

SEQ ID NO: 2431680 - RNA, 19 nt, Artificial Sequence
  Description of Artificial Sequence: Synthetic oligonucleotide
ggacaccgggcacagggca

SEQ ID NO: 2431681 - RNA, 19 nt, Artificial Sequence
  Description of Artificial Sequence: Synthetic oligonucleotide
ugccaucgccguuccaguu

SEQ ID NO: 2431682 - RNA, 19 nt, Artificial Sequence
  Description of Artificial Sequence: Synthetic oligonucleotide
agcaggcgauccauaguga

SEQ ID NO: 2431683 - RNA, 19 nt, Artificial Sequence
  Description of Artificial Sequence: Synthetic oligonucleotide
caaguacugggcgagcgcu

SEQ ID NO: 2431684 - RNA, 19 nt, Artificial Sequence
  Description of Artificial Sequence: Synthetic oligonucleotide
agcgcucgccgcggaagcg

SEQ ID NO: 2431685 - RNA, 19 nt, Artificial Sequence
  Description of Artificial Sequence: Synthetic oligonucleotide
gcgauccauagugacucag

SEQ ID NO: 2431686 - RNA, 19 nt, Artificial Sequence
  Description of Artificial Sequence: Synthetic oligonucleotide
ugcaggccagaagccacuc

SEQ ID NO: 2431687 - RNA, 19 nt, Artificial Sequence
  Description of Artificial Sequence: Synthetic oligonucleotide
accccgucacgcgcgccgc

SEQ ID NO: 2431688 - RNA, 19 nt, Artificial Sequence
  Description of Artificial Sequence: Synthetic oligonucleotide
ugacgcggcaggugccauc

SEQ ID NO: 2431689 - RNA, 19 nt, Artificial Sequence
  Description of Artificial Sequence: Synthetic oligonucleotide
ggacgaccccgucacgcgc

SEQ ID NO: 2431690 - RNA, 19 nt, Artificial Sequence
  Description of Artificial Sequence: Synthetic oligonucleotide
cuaacacauuuccuccuau

SEQ ID NO: 2431691 - RNA, 19 nt, Artificial Sequence
  Description of Artificial Sequence: Synthetic oligonucleotide
cgccguuccaguucugagc

SEQ ID NO: 2431692 - RNA, 19 nt, Artificial Sequence
  Description of Artificial Sequence: Synthetic oligonucleotide
caggcgauccauagugacu

SEQ ID NO: 2431693 - RNA, 19 nt, Artificial Sequence
  Description of Artificial Sequence: Synthetic oligonucleotide
ccagguaggcauaccagaa

SEQ ID NO: 2431694 - RNA, 19 nt, Artificial Sequence
  Description of Artificial Sequence: Synthetic oligonucleotide
gugcaaagagcaggcgauc

SEQ ID NO: 2431695 - RNA, 19 nt, Artificial Sequence
  Description of Artificial Sequence: Synthetic oligonucleotide
cuugacgcggcaggugcca

SEQ ID NO: 2431696 - RNA, 19 nt, Artificial Sequence
  Description of Artificial Sequence: Synthetic oligonucleotide
gcauaccagaacagagcug

SEQ ID NO: 2431697 - RNA, 19 nt, Artificial Sequence
  Description of Artificial Sequence: Synthetic oligonucleotide
cagugcaggccagaagcca

SEQ ID NO: 2431698 - RNA, 19 nt, Artificial Sequence
  Description of Artificial Sequence: Synthetic oligonucleotide
gcagugcaggccagaagcc

SEQ ID NO: 2431699 - RNA, 19 nt, Artificial Sequence
  Description of Artificial Sequence: Synthetic oligonucleotide
gccaucgccguuccaguuc

SEQ ID NO: 2431700 - RNA, 19 nt, Artificial Sequence
  Description of Artificial Sequence: Synthetic oligonucleotide
ggugcaaagagcaggcgau

SEQ ID NO: 2431701 - RNA, 19 nt, Artificial Sequence
  Description of Artificial Sequence: Synthetic oligonucleotide
cccucagagcgcccggacg

SEQ ID NO: 2431702 - RNA, 19 nt, Artificial Sequence
  Description of Artificial Sequence: Synthetic oligonucleotide
cugagcggcuccgggcgcc

SEQ ID NO: 2431703 - RNA, 19 nt, Artificial Sequence
  Description of Artificial Sequence: Synthetic oligonucleotide
ccaguucugagcggcuccg

SEQ ID NO: 2431704 - RNA, 19 nt, Artificial Sequence
  Description of Artificial Sequence: Synthetic oligonucleotide
cagcccucagagcgcccgg

SEQ ID NO: 2431705 - RNA, 19 nt, Artificial Sequence
  Description of Artificial Sequence: Synthetic oligonucleotide
cacauccuccaguucauuu

SEQ ID NO: 2431706 - RNA, 19 nt, Artificial Sequence
  Description of Artificial Sequence: Synthetic oligonucleotide
cagcaaguacugggcgagc

SEQ ID NO: 2431707 - RNA, 19 nt, Artificial Sequence
  Description of Artificial Sequence: Synthetic oligonucleotide
ggcggagacggccugacau

SEQ ID NO: 2431708 - RNA, 19 nt, Artificial Sequence
  Description of Artificial Sequence: Synthetic oligonucleotide
agugggccugugacaaaga

SEQ ID NO: 2431709 - RNA, 19 nt, Artificial Sequence
  Description of Artificial Sequence: Synthetic oligonucleotide
gcaggugccaucgccguuc

SEQ ID NO: 2431710 - RNA, 19 nt, Artificial Sequence
  Description of Artificial Sequence: Synthetic oligonucleotide
cucagagcgcccggacgac

SEQ ID NO: 2431711 - RNA, 19 nt, Artificial Sequence
  Description of Artificial Sequence: Synthetic oligonucleotide
gccagucgggcauccggcc

SEQ ID NO: 2431712 - RNA, 19 nt, Artificial Sequence
  Description of Artificial Sequence: Synthetic oligonucleotide
ccucagagcgcccggacga

SEQ ID NO: 2431713 - RNA, 19 nt, Artificial Sequence
  Description of Artificial Sequence: Synthetic oligonucleotide
gcaggccagaagccacucc

SEQ ID NO: 2431714 - RNA, 19 nt, Artificial Sequence
  Description of Artificial Sequence: Synthetic oligonucleotide
cugcccuaccacagcccuc

SEQ ID NO: 2431715 - RNA, 19 nt, Artificial Sequence
  Description of Artificial Sequence: Synthetic oligonucleotide
gcucgcauuccgcccgcag

SEQ ID NO: 2431716 - RNA, 19 nt, Artificial Sequence
  Description of Artificial Sequence: Synthetic oligonucleotide
acccggaacugcaggggca

SEQ ID NO: 2431717 - RNA, 19 nt, Artificial Sequence
  Description of Artificial Sequence: Synthetic oligonucleotide
agacggccugacauuuccu

SEQ ID NO: 2431718 - RNA, 19 nt, Artificial Sequence
  Description of Artificial Sequence: Synthetic oligonucleotide
ggccagucgggcauccggc

SEQ ID NO: 2431719 - RNA, 19 nt, Artificial Sequence
  Description of Artificial Sequence: Synthetic oligonucleotide
gcuuuggugaacacgggau

SEQ ID NO: 2431720 - RNA, 19 nt, Artificial Sequence
  Description of Artificial Sequence: Synthetic oligonucleotide
ggaagcgaagggagcucgc

SEQ ID NO: 2431721 - RNA, 19 nt, Artificial Sequence
  Description of Artificial Sequence: Synthetic oligonucleotide
auuccgcccgcagccuuga

SEQ ID NO: 2431722 - RNA, 19 nt, Artificial Sequence
  Description of Artificial Sequence: Synthetic oligonucleotide
ccggacgaccccgucacgc

SEQ ID NO: 2431723 - RNA, 19 nt, Artificial Sequence
  Description of Artificial Sequence: Synthetic oligonucleotide
cuagacuuugagagucguu

SEQ ID NO: 2431724 - RNA, 19 nt, Artificial Sequence
  Description of Artificial Sequence: Synthetic oligonucleotide
ccgcuuuggugaacacggg

SEQ ID NO: 2431725 - RNA, 19 nt, Artificial Sequence
  Description of Artificial Sequence: Synthetic oligonucleotide
gcccgcagccuugacgcgg

SEQ ID NO: 2431726 - RNA, 19 nt, Artificial Sequence
  Description of Artificial Sequence: Synthetic oligonucleotide
cuccgggcgcccacccaac

SEQ ID NO: 2431727 - RNA, 19 nt, Artificial Sequence
  Description of Artificial Sequence: Synthetic oligonucleotide
cggaagcgaagggagcucg

SEQ ID NO: 2431728 - RNA, 19 nt, Artificial Sequence
  Description of Artificial Sequence: Synthetic oligonucleotide
cuggccagucgggcauccg

SEQ ID NO: 2431729 - RNA, 19 nt, Artificial Sequence
  Description of Artificial Sequence: Synthetic oligonucleotide
uugacgcggcaggugccau

SEQ ID NO: 2431730 - RNA, 19 nt, Artificial Sequence
  Description of Artificial Sequence: Synthetic oligonucleotide
gugccaucgccguuccagu

SEQ ID NO: 2431731 - RNA, 19 nt, Artificial Sequence
  Description of Artificial Sequence: Synthetic oligonucleotide
cggacgaccccgucacgcg

SEQ ID NO: 2431732 - RNA, 19 nt, Artificial Sequence
  Description of Artificial Sequence: Synthetic oligonucleotide
caucgccguuccaguucug

SEQ ID NO: 2431733 - RNA, 19 nt, Artificial Sequence
  Description of Artificial Sequence: Synthetic oligonucleotide
gggacaccgggcacagggc

SEQ ID NO: 2431734 - RNA, 19 nt, Artificial Sequence
  Description of Artificial Sequence: Synthetic oligonucleotide
cccgcagccuugacgcggc

SEQ ID NO: 2431735 - RNA, 19 nt, Artificial Sequence
  Description of Artificial Sequence: Synthetic oligonucleotide
ccacagcccucagagcgcc

SEQ ID NO: 2431736 - RNA, 19 nt, Artificial Sequence
  Description of Artificial Sequence: Synthetic oligonucleotide
agcccucagagcgcccgga

SEQ ID NO: 2431737 - RNA, 19 nt, Artificial Sequence
  Description of Artificial Sequence: Synthetic oligonucleotide
ggcgauccauagugacuca

SEQ ID NO: 2431738 - RNA, 19 nt, Artificial Sequence
  Description of Artificial Sequence: Synthetic oligonucleotide
ccugacauuuccugcccua

SEQ ID NO: 2431739 - RNA, 19 nt, Artificial Sequence
  Description of Artificial Sequence: Synthetic oligonucleotide
cgggcgcccacccaacagc

SEQ ID NO: 2431740 - RNA, 19 nt, Artificial Sequence
  Description of Artificial Sequence: Synthetic oligonucleotide
cgcuuuggugaacacggga

SEQ ID NO: 2431741 - RNA, 19 nt, Artificial Sequence
  Description of Artificial Sequence: Synthetic oligonucleotide
gggcauccggcccgggaca

SEQ ID NO: 2431742 - RNA, 19 nt, Artificial Sequence
  Description of Artificial Sequence: Synthetic oligonucleotide
ccgggcgcccacccaacag

SEQ ID NO: 2431743 - RNA, 19 nt, Artificial Sequence
  Description of Artificial Sequence: Synthetic oligonucleotide
cgggcauccggcccgggac

SEQ ID NO: 2431744 - RNA, 19 nt, Artificial Sequence
  Description of Artificial Sequence: Synthetic oligonucleotide
ggagacggccugacauuuc

SEQ ID NO: 2431745 - RNA, 19 nt, Artificial Sequence
  Description of Artificial Sequence: Synthetic oligonucleotide
cacugcugaccgcuuuggu

SEQ ID NO: 2431746 - RNA, 19 nt, Artificial Sequence
  Description of Artificial Sequence: Synthetic oligonucleotide
gcccucagagcgcccggac

SEQ ID NO: 2431747 - RNA, 19 nt, Artificial Sequence
  Description of Artificial Sequence: Synthetic oligonucleotide
gcccacugacaucuagacu

SEQ ID NO: 2431748 - RNA, 19 nt, Artificial Sequence
  Description of Artificial Sequence: Synthetic oligonucleotide
gcuggccagucgggcaucc

SEQ ID NO: 2431749 - RNA, 19 nt, Artificial Sequence
  Description of Artificial Sequence: Synthetic oligonucleotide
auccggcccgggacaccgg

SEQ ID NO: 2431750 - RNA, 19 nt, Artificial Sequence
  Description of Artificial Sequence: Synthetic oligonucleotide
ggcauccggcccgggacac

SEQ ID NO: 2431751 - RNA, 19 nt, Artificial Sequence
  Description of Artificial Sequence: Synthetic oligonucleotide
gcacauaguugauguuaau

SEQ ID NO: 2431752 - RNA, 19 nt, Artificial Sequence
  Description of Artificial Sequence: Synthetic oligonucleotide
agcucgcauuccgcccgca

SEQ ID NO: 2431753 - RNA, 19 nt, Artificial Sequence
  Description of Artificial Sequence: Synthetic oligonucleotide
gcggaagcgaagggagcuc

SEQ ID NO: 2431754 - RNA, 19 nt, Artificial Sequence
  Description of Artificial Sequence: Synthetic oligonucleotide
cacccaacagcuggccagu

SEQ ID NO: 2431755 - RNA, 19 nt, Artificial Sequence
  Description of Artificial Sequence: Synthetic oligonucleotide
ccaucgccguuccaguucu

SEQ ID NO: 2431756 - RNA, 19 nt, Artificial Sequence
  Description of Artificial Sequence: Synthetic oligonucleotide
agcgcccggacgaccccgu

SEQ ID NO: 2431757 - RNA, 19 nt, Artificial Sequence
  Description of Artificial Sequence: Synthetic oligonucleotide
cgauccauagugacucagu

SEQ ID NO: 2431758 - RNA, 19 nt, Artificial Sequence
  Description of Artificial Sequence: Synthetic oligonucleotide
gccugacauuuccugcccu

SEQ ID NO: 2431759 - RNA, 19 nt, Artificial Sequence
  Description of Artificial Sequence: Synthetic oligonucleotide
gcugaccgcuuuggugaac

SEQ ID NO: 2431760 - RNA, 19 nt, Artificial Sequence
  Description of Artificial Sequence: Synthetic oligonucleotide
cagggcggagacggccuga

SEQ ID NO: 2431761 - RNA, 19 nt, Artificial Sequence
  Description of Artificial Sequence: Synthetic oligonucleotide
cccuaccacagcccucaga

SEQ ID NO: 2431762 - RNA, 19 nt, Artificial Sequence
  Description of Artificial Sequence: Synthetic oligonucleotide
cccggacgaccccgucacg

SEQ ID NO: 2431763 - RNA, 19 nt, Artificial Sequence
  Description of Artificial Sequence: Synthetic oligonucleotide
gcccuaccacagcccucag

SEQ ID NO: 2431764 - RNA, 19 nt, Artificial Sequence
  Description of Artificial Sequence: Synthetic oligonucleotide
gcggagacggccugacauu

SEQ ID NO: 2431765 - RNA, 19 nt, Artificial Sequence
  Description of Artificial Sequence: Synthetic oligonucleotide
gggcggagacggccugaca

SEQ ID NO: 2431766 - RNA, 19 nt, Artificial Sequence
  Description of Artificial Sequence: Synthetic oligonucleotide
gcauccggcccgggacacc

SEQ ID NO: 2431767 - RNA, 19 nt, Artificial Sequence
  Description of Artificial Sequence: Synthetic oligonucleotide
gcucgccgcggaagcgaag

SEQ ID NO: 2431768 - RNA, 19 nt, Artificial Sequence
  Description of Artificial Sequence: Synthetic oligonucleotide
gcgcucgccgcggaagcga

SEQ ID NO: 2431769 - RNA, 19 nt, Artificial Sequence
  Description of Artificial Sequence: Synthetic oligonucleotide
gggcgcccacccaacagcu

SEQ ID NO: 2431770 - RNA, 19 nt, Artificial Sequence
  Description of Artificial Sequence: Synthetic oligonucleotide
ggcgagcgcucgccgcgga

SEQ ID NO: 2431771 - RNA, 19 nt, Artificial Sequence
  Description of Artificial Sequence: Synthetic oligonucleotide
ccccgucacgcgcgccgcc

SEQ ID NO: 2431772 - RNA, 19 nt, Artificial Sequence
  Description of Artificial Sequence: Synthetic oligonucleotide
gcauuccgcccgcagccuu

SEQ ID NO: 2431773 - RNA, 19 nt, Artificial Sequence
  Description of Artificial Sequence: Synthetic oligonucleotide
cgcggaagcgaagggagcu

SEQ ID NO: 2431774 - RNA, 19 nt, Artificial Sequence
  Description of Artificial Sequence: Synthetic oligonucleotide
ggcaggugccaucgccguu

SEQ ID NO: 2431775 - RNA, 19 nt, Artificial Sequence
  Description of Artificial Sequence: Synthetic oligonucleotide
gcaggggcacauaguugau

SEQ ID NO: 2431776 - RNA, 19 nt, Artificial Sequence
  Description of Artificial Sequence: Synthetic oligonucleotide
gcgcccggacgaccccguc

SEQ ID NO: 2431777 - RNA, 19 nt, Artificial Sequence
  Description of Artificial Sequence: Synthetic oligonucleotide
cgcucgccgcggaagcgaa

SEQ ID NO: 2431778 - RNA, 19 nt, Artificial Sequence
  Description of Artificial Sequence: Synthetic oligonucleotide
gcgaaggcacugacaucuu

SEQ ID NO: 2431779 - RNA, 19 nt, Artificial Sequence
  Description of Artificial Sequence: Synthetic oligonucleotide
cggagacggccugacauuu

SEQ ID NO: 2431780 - RNA, 19 nt, Artificial Sequence
  Description of Artificial Sequence: Synthetic oligonucleotide
ccgcagccuugacgcggca

SEQ ID NO: 2431781 - RNA, 19 nt, Artificial Sequence
  Description of Artificial Sequence: Synthetic oligonucleotide
uuuauuacaaacauuggag

SEQ ID NO: 2431782 - RNA, 19 nt, Artificial Sequence
  Description of Artificial Sequence: Synthetic oligonucleotide
aauuaagauccucauuucc

SEQ ID NO: 2431783 - RNA, 19 nt, Artificial Sequence
  Description of Artificial Sequence: Synthetic oligonucleotide
ucuacauuaaauccaauag

SEQ ID NO: 2431784 - RNA, 19 nt, Artificial Sequence
  Description of Artificial Sequence: Synthetic oligonucleotide
uuuuauauuuauuacaaac

SEQ ID NO: 2431785 - RNA, 19 nt, Artificial Sequence
  Description of Artificial Sequence: Synthetic oligonucleotide
aaaauuguuguuuucccag

SEQ ID NO: 2431786 - RNA, 19 nt, Artificial Sequence
  Description of Artificial Sequence: Synthetic oligonucleotide
aaauauuugccacuuucgg

SEQ ID NO: 2431787 - RNA, 19 nt, Artificial Sequence
  Description of Artificial Sequence: Synthetic oligonucleotide
uguuugaauaguaacaucu

SEQ ID NO: 2431788 - RNA, 19 nt, Artificial Sequence
  Description of Artificial Sequence: Synthetic oligonucleotide
cauuaaauccaauaguggg

SEQ ID NO: 2431789 - RNA, 19 nt, Artificial Sequence
  Description of Artificial Sequence: Synthetic oligonucleotide
ucaacuaaccauuccaugg

SEQ ID NO: 2431790 - RNA, 19 nt, Artificial Sequence
  Description of Artificial Sequence: Synthetic oligonucleotide
uguaaucuguacaaaauug

SEQ ID NO: 2431791 - RNA, 19 nt, Artificial Sequence
  Description of Artificial Sequence: Synthetic oligonucleotide
auauuugccacuuucgguc

SEQ ID NO: 2431792 - RNA, 19 nt, Artificial Sequence
  Description of Artificial Sequence: Synthetic oligonucleotide
uuauauuuauuacaaacau

SEQ ID NO: 2431793 - RNA, 19 nt, Artificial Sequence
  Description of Artificial Sequence: Synthetic oligonucleotide
auuuauuacaaacauugga

SEQ ID NO: 2431794 - RNA, 19 nt, Artificial Sequence
  Description of Artificial Sequence: Synthetic oligonucleotide
uuaaauauuugccacuuuc

SEQ ID NO: 2431795 - RNA, 19 nt, Artificial Sequence
  Description of Artificial Sequence: Synthetic oligonucleotide
uuugaauaguaacaucucc

SEQ ID NO: 2431796 - RNA, 19 nt, Artificial Sequence
  Description of Artificial Sequence: Synthetic oligonucleotide
aaauuaagauccucauuuc

SEQ ID NO: 2431797 - RNA, 19 nt, Artificial Sequence
  Description of Artificial Sequence: Synthetic oligonucleotide
uuugcaaacaccacuaaaa

SEQ ID NO: 2431798 - RNA, 19 nt, Artificial Sequence
  Description of Artificial Sequence: Synthetic oligonucleotide
aauaguaguaacaaccucu

SEQ ID NO: 2431799 - RNA, 19 nt, Artificial Sequence
  Description of Artificial Sequence: Synthetic oligonucleotide
auuggagucaguucuguac

SEQ ID NO: 2431800 - RNA, 19 nt, Artificial Sequence
  Description of Artificial Sequence: Synthetic oligonucleotide
aacuacauagaugacugcg

SEQ ID NO: 2431801 - RNA, 19 nt, Artificial Sequence
  Description of Artificial Sequence: Synthetic oligonucleotide
auuaagauccucauuuccc

SEQ ID NO: 2431802 - RNA, 19 nt, Artificial Sequence
  Description of Artificial Sequence: Synthetic oligonucleotide
aauauuugccacuuucggu

SEQ ID NO: 2431803 - RNA, 19 nt, Artificial Sequence
  Description of Artificial Sequence: Synthetic oligonucleotide
ugaauaguaacaucuccag

SEQ ID NO: 2431804 - RNA, 19 nt, Artificial Sequence
  Description of Artificial Sequence: Synthetic oligonucleotide
cuuggaaaugccaauucgg

SEQ ID NO: 2431805 - RNA, 19 nt, Artificial Sequence
  Description of Artificial Sequence: Synthetic oligonucleotide
uucuaacagucacagaagc

SEQ ID NO: 2431806 - RNA, 19 nt, Artificial Sequence
  Description of Artificial Sequence: Synthetic oligonucleotide
uacugucugcuuuucagcg

SEQ ID NO: 2431807 - RNA, 19 nt, Artificial Sequence
  Description of Artificial Sequence: Synthetic oligonucleotide
acggucucuacauuaaauc

SEQ ID NO: 2431808 - RNA, 19 nt, Artificial Sequence
  Description of Artificial Sequence: Synthetic oligonucleotide
uccaacauugcaacuaacu

SEQ ID NO: 2431809 - RNA, 19 nt, Artificial Sequence
  Description of Artificial Sequence: Synthetic oligonucleotide
aauccaauagugggaauag

SEQ ID NO: 2431810 - RNA, 19 nt, Artificial Sequence
  Description of Artificial Sequence: Synthetic oligonucleotide
uuugccauuucugagggug

SEQ ID NO: 2431811 - RNA, 19 nt, Artificial Sequence
  Description of Artificial Sequence: Synthetic oligonucleotide
aacaccacuaaaauggccu

SEQ ID NO: 2431812 - RNA, 19 nt, Artificial Sequence
  Description of Artificial Sequence: Synthetic oligonucleotide
auugcaacuaacucugacu

SEQ ID NO: 2431813 - RNA, 19 nt, Artificial Sequence
  Description of Artificial Sequence: Synthetic oligonucleotide
uuaagauccucauuucccu

SEQ ID NO: 2431814 - RNA, 19 nt, Artificial Sequence
  Description of Artificial Sequence: Synthetic oligonucleotide
guuucaacuaaccauucca

SEQ ID NO: 2431815 - RNA, 19 nt, Artificial Sequence
  Description of Artificial Sequence: Synthetic oligonucleotide
auuguuguuuucccagcac

SEQ ID NO: 2431816 - RNA, 19 nt, Artificial Sequence
  Description of Artificial Sequence: Synthetic oligonucleotide
uucaucaagaccagugccu

SEQ ID NO: 2431817 - RNA, 19 nt, Artificial Sequence
  Description of Artificial Sequence: Synthetic oligonucleotide
uuggaaaugccaauucggu

SEQ ID NO: 2431818 - RNA, 19 nt, Artificial Sequence
  Description of Artificial Sequence: Synthetic oligonucleotide
ugcauuugccauuucugag

SEQ ID NO: 2431819 - RNA, 19 nt, Artificial Sequence
  Description of Artificial Sequence: Synthetic oligonucleotide
guagcauuugcuucacagg

SEQ ID NO: 2431820 - RNA, 19 nt, Artificial Sequence
  Description of Artificial Sequence: Synthetic oligonucleotide
uccaauagugggaauagua

SEQ ID NO: 2431821 - RNA, 19 nt, Artificial Sequence
  Description of Artificial Sequence: Synthetic oligonucleotide
uuuucagcguuucaacuaa

SEQ ID NO: 2431822 - RNA, 19 nt, Artificial Sequence
  Description of Artificial Sequence: Synthetic oligonucleotide
uuggagucaguucuguaca

SEQ ID NO: 2431823 - RNA, 19 nt, Artificial Sequence
  Description of Artificial Sequence: Synthetic oligonucleotide
gggaauaguaguaacaacc

SEQ ID NO: 2431824 - RNA, 19 nt, Artificial Sequence
  Description of Artificial Sequence: Synthetic oligonucleotide
ucuccaaccuguaaucugu

SEQ ID NO: 2431825 - RNA, 19 nt, Artificial Sequence
  Description of Artificial Sequence: Synthetic oligonucleotide
uguguuugaauaguaacau

SEQ ID NO: 2431826 - RNA, 19 nt, Artificial Sequence
  Description of Artificial Sequence: Synthetic oligonucleotide
acuaacucugacuuggaaa

SEQ ID NO: 2431827 - RNA, 19 nt, Artificial Sequence
  Description of Artificial Sequence: Synthetic oligonucleotide
uuuuguaugucacggucuc

SEQ ID NO: 2431828 - RNA, 19 nt, Artificial Sequence
  Description of Artificial Sequence: Synthetic oligonucleotide
cauuugccauuucugaggg

SEQ ID NO: 2431829 - RNA, 19 nt, Artificial Sequence
  Description of Artificial Sequence: Synthetic oligonucleotide
uucaacuaaccauuccaug

SEQ ID NO: 2431830 - RNA, 19 nt, Artificial Sequence
  Description of Artificial Sequence: Synthetic oligonucleotide
uucggucucggucacaacu

SEQ ID NO: 2431831 - RNA, 19 nt, Artificial Sequence
  Description of Artificial Sequence: Synthetic oligonucleotide
aacccaagugcauuugcca

SEQ ID NO: 2431832 - RNA, 19 nt, Artificial Sequence
  Description of Artificial Sequence: Synthetic oligonucleotide
uucagcguuucaacuaacc

SEQ ID NO: 2431833 - RNA, 19 nt, Artificial Sequence
  Description of Artificial Sequence: Synthetic oligonucleotide
uaacccaagugcauuugcc

SEQ ID NO: 2431834 - RNA, 19 nt, Artificial Sequence
  Description of Artificial Sequence: Synthetic oligonucleotide
uaugucacggucucuacau

SEQ ID NO: 2431835 - RNA, 19 nt, Artificial Sequence
  Description of Artificial Sequence: Synthetic oligonucleotide
auuaaauccaauaguggga

SEQ ID NO: 2431836 - RNA, 19 nt, Artificial Sequence
  Description of Artificial Sequence: Synthetic oligonucleotide
agcgacuccuagcugggcc

SEQ ID NO: 2431837 - RNA, 19 nt, Artificial Sequence
  Description of Artificial Sequence: Synthetic oligonucleotide
guugcagugaguguguggc

SEQ ID NO: 2431838 - RNA, 19 nt, Artificial Sequence
  Description of Artificial Sequence: Synthetic oligonucleotide
aacuaaccauuccauggcu

SEQ ID NO: 2431839 - RNA, 19 nt, Artificial Sequence
  Description of Artificial Sequence: Synthetic oligonucleotide
cuuucgguccuucagagca

SEQ ID NO: 2431840 - RNA, 19 nt, Artificial Sequence
  Description of Artificial Sequence: Synthetic oligonucleotide
ugauacuugucuguccucc

SEQ ID NO: 2431841 - RNA, 19 nt, Artificial Sequence
  Description of Artificial Sequence: Synthetic oligonucleotide
auaguaguaacaaccucuc

SEQ ID NO: 2431842 - RNA, 19 nt, Artificial Sequence
  Description of Artificial Sequence: Synthetic oligonucleotide
aaauccaauagugggaaua

SEQ ID NO: 2431843 - RNA, 19 nt, Artificial Sequence
  Description of Artificial Sequence: Synthetic oligonucleotide
aauagugggaauaguagua

SEQ ID NO: 2431844 - RNA, 19 nt, Artificial Sequence
  Description of Artificial Sequence: Synthetic oligonucleotide
uuuuaaauauuugccacuu

SEQ ID NO: 2431845 - RNA, 19 nt, Artificial Sequence
  Description of Artificial Sequence: Synthetic oligonucleotide
caacuaaccauuccauggc

SEQ ID NO: 2431846 - RNA, 19 nt, Artificial Sequence
  Description of Artificial Sequence: Synthetic oligonucleotide
uccuagcugggccugggcg

SEQ ID NO: 2431847 - RNA, 19 nt, Artificial Sequence
  Description of Artificial Sequence: Synthetic oligonucleotide
aagccacccaugauggacc

SEQ ID NO: 2431848 - RNA, 19 nt, Artificial Sequence
  Description of Artificial Sequence: Synthetic oligonucleotide
aaugccaauucggucucgg

SEQ ID NO: 2431849 - RNA, 19 nt, Artificial Sequence
  Description of Artificial Sequence: Synthetic oligonucleotide
cuauccucggacucgggcc

SEQ ID NO: 2431850 - RNA, 19 nt, Artificial Sequence
  Description of Artificial Sequence: Synthetic oligonucleotide
cuuccuccaacauugcaac

SEQ ID NO: 2431851 - RNA, 19 nt, Artificial Sequence
  Description of Artificial Sequence: Synthetic oligonucleotide
agccgggucagccagcaac

SEQ ID NO: 2431852 - RNA, 19 nt, Artificial Sequence
  Description of Artificial Sequence: Synthetic oligonucleotide
uacaugccagcaaucacac

SEQ ID NO: 2431853 - RNA, 19 nt, Artificial Sequence
  Description of Artificial Sequence: Synthetic oligonucleotide
cuguguuugaauaguaaca

SEQ ID NO: 2431854 - RNA, 19 nt, Artificial Sequence
  Description of Artificial Sequence: Synthetic oligonucleotide
gaauaguaguaacaaccuc

SEQ ID NO: 2431855 - RNA, 19 nt, Artificial Sequence
  Description of Artificial Sequence: Synthetic oligonucleotide
gcaacuaacucugacuugg

SEQ ID NO: 2431856 - RNA, 19 nt, Artificial Sequence
  Description of Artificial Sequence: Synthetic oligonucleotide
accucuccaaccuguaauc

SEQ ID NO: 2431857 - RNA, 19 nt, Artificial Sequence
  Description of Artificial Sequence: Synthetic oligonucleotide
auaguaacaucuccaguau

SEQ ID NO: 2431858 - RNA, 19 nt, Artificial Sequence
  Description of Artificial Sequence: Synthetic oligonucleotide
uucugagggugucauggcc

SEQ ID NO: 2431859 - RNA, 19 nt, Artificial Sequence
  Description of Artificial Sequence: Synthetic oligonucleotide
gcauuugccauuucugagg

SEQ ID NO: 2431860 - RNA, 19 nt, Artificial Sequence
  Description of Artificial Sequence: Synthetic oligonucleotide
uauuugccacuuucggucc

SEQ ID NO: 2431861 - RNA, 19 nt, Artificial Sequence
  Description of Artificial Sequence: Synthetic oligonucleotide
uguguggcguagcauuugc

SEQ ID NO: 2431862 - RNA, 19 nt, Artificial Sequence
  Description of Artificial Sequence: Synthetic oligonucleotide
cuaaccauuccauggcuuc

SEQ ID NO: 2431863 - RNA, 19 nt, Artificial Sequence
  Description of Artificial Sequence: Synthetic oligonucleotide
ugcgucuguguuugaauag

SEQ ID NO: 2431864 - RNA, 19 nt, Artificial Sequence
  Description of Artificial Sequence: Synthetic oligonucleotide
aagucccaaacuuggaauu

SEQ ID NO: 2431865 - RNA, 19 nt, Artificial Sequence
  Description of Artificial Sequence: Synthetic oligonucleotide
acuuucgguccuucagagc

SEQ ID NO: 2431866 - RNA, 19 nt, Artificial Sequence
  Description of Artificial Sequence: Synthetic oligonucleotide
auuugcaaacaccacuaaa

SEQ ID NO: 2431867 - RNA, 19 nt, Artificial Sequence
  Description of Artificial Sequence: Synthetic oligonucleotide
ugccuuugguugcugaugu

SEQ ID NO: 2431868 - RNA, 19 nt, Artificial Sequence
  Description of Artificial Sequence: Synthetic oligonucleotide
uccaagccgggucagccag

SEQ ID NO: 2431869 - RNA, 19 nt, Artificial Sequence
  Description of Artificial Sequence: Synthetic oligonucleotide
cagaagcacaucuggcugg

SEQ ID NO: 2431870 - RNA, 19 nt, Artificial Sequence
  Description of Artificial Sequence: Synthetic oligonucleotide
caucuaaucccaaaauuaa

SEQ ID NO: 2431871 - RNA, 19 nt, Artificial Sequence
  Description of Artificial Sequence: Synthetic oligonucleotide
cuuauuugcaaacaccacu

SEQ ID NO: 2431872 - RNA, 19 nt, Artificial Sequence
  Description of Artificial Sequence: Synthetic oligonucleotide
ucaagaccagugccuuugg

SEQ ID NO: 2431873 - RNA, 19 nt, Artificial Sequence
  Description of Artificial Sequence: Synthetic oligonucleotide
ccaauagugggaauaguag

SEQ ID NO: 2431874 - RNA, 19 nt, Artificial Sequence
  Description of Artificial Sequence: Synthetic oligonucleotide
gauacuugucuguccuccc

SEQ ID NO: 2431875 - RNA, 19 nt, Artificial Sequence
  Description of Artificial Sequence: Synthetic oligonucleotide
aacuaacucugacuuggaa

SEQ ID NO: 2431876 - RNA, 19 nt, Artificial Sequence
  Description of Artificial Sequence: Synthetic oligonucleotide
aucuaaucccaaaauuaag

SEQ ID NO: 2431877 - RNA, 19 nt, Artificial Sequence
  Description of Artificial Sequence: Synthetic oligonucleotide
guaguaacaaccucuccaa

SEQ ID NO: 2431878 - RNA, 19 nt, Artificial Sequence
  Description of Artificial Sequence: Synthetic oligonucleotide
uggaaaugccaauucgguc

SEQ ID NO: 2431879 - RNA, 19 nt, Artificial Sequence
  Description of Artificial Sequence: Synthetic oligonucleotide
uaguaguaacaaccucucc

SEQ ID NO: 2431880 - RNA, 19 nt, Artificial Sequence
  Description of Artificial Sequence: Synthetic oligonucleotide
agugcauuugccauuucug

SEQ ID NO: 2431881 - RNA, 19 nt, Artificial Sequence
  Description of Artificial Sequence: Synthetic oligonucleotide
accuguaaucuguacaaaa

SEQ ID NO: 2431882 - RNA, 19 nt, Artificial Sequence
  Description of Artificial Sequence: Synthetic oligonucleotide
caaaauuguuguuuuccca

SEQ ID NO: 2431883 - RNA, 19 nt, Artificial Sequence
  Description of Artificial Sequence: Synthetic oligonucleotide
acaaacauuggagucaguu

SEQ ID NO: 2431884 - RNA, 19 nt, Artificial Sequence
  Description of Artificial Sequence: Synthetic oligonucleotide
cauugcaacuaacucugac

SEQ ID NO: 2431885 - RNA, 19 nt, Artificial Sequence
  Description of Artificial Sequence: Synthetic oligonucleotide
aacuuggaauuuaagguuu

SEQ ID NO: 2431886 - RNA, 19 nt, Artificial Sequence
  Description of Artificial Sequence: Synthetic oligonucleotide
ucggucucggucacaacug

SEQ ID NO: 2431887 - RNA, 19 nt, Artificial Sequence
  Description of Artificial Sequence: Synthetic oligonucleotide
aauucggucucggucacaa

SEQ ID NO: 2431888 - RNA, 19 nt, Artificial Sequence
  Description of Artificial Sequence: Synthetic oligonucleotide
guucuaacagucacagaag

SEQ ID NO: 2431889 - RNA, 19 nt, Artificial Sequence
  Description of Artificial Sequence: Synthetic oligonucleotide
agucaguucuguacaugcc

SEQ ID NO: 2431890 - RNA, 19 nt, Artificial Sequence
  Description of Artificial Sequence: Synthetic oligonucleotide
guaacccaagugcauuugc

SEQ ID NO: 2431891 - RNA, 19 nt, Artificial Sequence
  Description of Artificial Sequence: Synthetic oligonucleotide
acugucaacuacauagaug

SEQ ID NO: 2431892 - RNA, 19 nt, Artificial Sequence
  Description of Artificial Sequence: Synthetic oligonucleotide
ugcaacuaacucugacuug

SEQ ID NO: 2431893 - RNA, 19 nt, Artificial Sequence
  Description of Artificial Sequence: Synthetic oligonucleotide
gucaguucuguacaugcca

SEQ ID NO: 2431894 - RNA, 19 nt, Artificial Sequence
  Description of Artificial Sequence: Synthetic oligonucleotide
aucaagaccagugccuuug

SEQ ID NO: 2431895 - RNA, 19 nt, Artificial Sequence
  Description of Artificial Sequence: Synthetic oligonucleotide
ugcuucacaggaccugaug

SEQ ID NO: 2431896 - RNA, 19 nt, Artificial Sequence
  Description of Artificial Sequence: Synthetic oligonucleotide
caacauugcaacuaacucu

SEQ ID NO: 2431897 - RNA, 19 nt, Artificial Sequence
  Description of Artificial Sequence: Synthetic oligonucleotide
uggcguagcauuugcuuca

SEQ ID NO: 2431898 - RNA, 19 nt, Artificial Sequence
  Description of Artificial Sequence: Synthetic oligonucleotide
ggaaaugccaauucggucu

SEQ ID NO: 2431899 - RNA, 19 nt, Artificial Sequence
  Description of Artificial Sequence: Synthetic oligonucleotide
accggcagcgacuccuagc

SEQ ID NO: 2431900 - RNA, 19 nt, Artificial Sequence
  Description of Artificial Sequence: Synthetic oligonucleotide
ugucacggucucuacauua

SEQ ID NO: 2431901 - RNA, 19 nt, Artificial Sequence
  Description of Artificial Sequence: Synthetic oligonucleotide
guaacaaccucuccaaccu

SEQ ID NO: 2431902 - RNA, 19 nt, Artificial Sequence
  Description of Artificial Sequence: Synthetic oligonucleotide
gaaaugccaauucggucuc

SEQ ID NO: 2431903 - RNA, 19 nt, Artificial Sequence
  Description of Artificial Sequence: Synthetic oligonucleotide
uuucucagcucuucuuccu

SEQ ID NO: 2431904 - RNA, 19 nt, Artificial Sequence
  Description of Artificial Sequence: Synthetic oligonucleotide
aguucuguacaugccagca

SEQ ID NO: 2431905 - RNA, 19 nt, Artificial Sequence
  Description of Artificial Sequence: Synthetic oligonucleotide
uagugggaauaguaguaac

SEQ ID NO: 2431906 - RNA, 19 nt, Artificial Sequence
  Description of Artificial Sequence: Synthetic oligonucleotide
acucugacuuggaaaugcc

SEQ ID NO: 2431907 - RNA, 19 nt, Artificial Sequence
  Description of Artificial Sequence: Synthetic oligonucleotide
gcauuugcuucacaggacc

SEQ ID NO: 2431908 - RNA, 19 nt, Artificial Sequence
  Description of Artificial Sequence: Synthetic oligonucleotide
uuucugagggugucauggc

SEQ ID NO: 2431909 - RNA, 19 nt, Artificial Sequence
  Description of Artificial Sequence: Synthetic oligonucleotide
cuacauuaaauccaauagu

SEQ ID NO: 2431910 - RNA, 19 nt, Artificial Sequence
  Description of Artificial Sequence: Synthetic oligonucleotide
ugggcuuacugucugcuuu

SEQ ID NO: 2431911 - RNA, 19 nt, Artificial Sequence
  Description of Artificial Sequence: Synthetic oligonucleotide
caaccuguaaucuguacaa

SEQ ID NO: 2431912 - RNA, 19 nt, Artificial Sequence
  Description of Artificial Sequence: Synthetic oligonucleotide
acccaugauggaccgccgc

SEQ ID NO: 2431913 - RNA, 19 nt, Artificial Sequence
  Description of Artificial Sequence: Synthetic oligonucleotide
uaacaaccucuccaaccug

SEQ ID NO: 2431914 - RNA, 19 nt, Artificial Sequence
  Description of Artificial Sequence: Synthetic oligonucleotide
gucacaacugucaacuaca

SEQ ID NO: 2431915 - RNA, 19 nt, Artificial Sequence
  Description of Artificial Sequence: Synthetic oligonucleotide
agcauuugcuucacaggac

SEQ ID NO: 2431916 - RNA, 19 nt, Artificial Sequence
  Description of Artificial Sequence: Synthetic oligonucleotide
aacauuggagucaguucug

SEQ ID NO: 2431917 - RNA, 19 nt, Artificial Sequence
  Description of Artificial Sequence: Synthetic oligonucleotide
cucuccaaccuguaaucug

SEQ ID NO: 2431918 - RNA, 19 nt, Artificial Sequence
  Description of Artificial Sequence: Synthetic oligonucleotide
uaguaacaaccucuccaac

SEQ ID NO: 2431919 - RNA, 19 nt, Artificial Sequence
  Description of Artificial Sequence: Synthetic oligonucleotide
uguaugucacggucucuac

SEQ ID NO: 2431920 - RNA, 19 nt, Artificial Sequence
  Description of Artificial Sequence: Synthetic oligonucleotide
acuacauagaugacugcgu

SEQ ID NO: 2431921 - RNA, 19 nt, Artificial Sequence
  Description of Artificial Sequence: Synthetic oligonucleotide
cuuuucagcguuucaacua

SEQ ID NO: 2431922 - RNA, 19 nt, Artificial Sequence
  Description of Artificial Sequence: Synthetic oligonucleotide
uccuucagagcagguaacc

SEQ ID NO: 2431923 - RNA, 19 nt, Artificial Sequence
  Description of Artificial Sequence: Synthetic oligonucleotide
uuguaugucacggucucua

SEQ ID NO: 2431924 - RNA, 19 nt, Artificial Sequence
  Description of Artificial Sequence: Synthetic oligonucleotide
uugcagugaguguguggcg

SEQ ID NO: 2431925 - RNA, 19 nt, Artificial Sequence
  Description of Artificial Sequence: Synthetic oligonucleotide
auacuugucuguccuccca

SEQ ID NO: 2431926 - RNA, 19 nt, Artificial Sequence
  Description of Artificial Sequence: Synthetic oligonucleotide
ccaacauugcaacuaacuc

SEQ ID NO: 2431927 - RNA, 19 nt, Artificial Sequence
  Description of Artificial Sequence: Synthetic oligonucleotide
auagugggaauaguaguaa

SEQ ID NO: 2431928 - RNA, 19 nt, Artificial Sequence
  Description of Artificial Sequence: Synthetic oligonucleotide
uccuccaacauugcaacua

SEQ ID NO: 2431929 - RNA, 19 nt, Artificial Sequence
  Description of Artificial Sequence: Synthetic oligonucleotide
ucucggucacaacugucaa

SEQ ID NO: 2431930 - RNA, 19 nt, Artificial Sequence
  Description of Artificial Sequence: Synthetic oligonucleotide
cuaaucccaaaauuaagau

SEQ ID NO: 2431931 - RNA, 19 nt, Artificial Sequence
  Description of Artificial Sequence: Synthetic oligonucleotide
cugguuccaaagagacugg

SEQ ID NO: 2431932 - RNA, 19 nt, Artificial Sequence
  Description of Artificial Sequence: Synthetic oligonucleotide
gaaugggcuuacugucugc

SEQ ID NO: 2431933 - RNA, 19 nt, Artificial Sequence
  Description of Artificial Sequence: Synthetic oligonucleotide
ucggacucgggccgggacc

SEQ ID NO: 2431934 - RNA, 19 nt, Artificial Sequence
  Description of Artificial Sequence: Synthetic oligonucleotide
aaaugccaauucggucucg

SEQ ID NO: 2431935 - RNA, 19 nt, Artificial Sequence
  Description of Artificial Sequence: Synthetic oligonucleotide
uccaaccuguaaucuguac

SEQ ID NO: 2431936 - RNA, 19 nt, Artificial Sequence
  Description of Artificial Sequence: Synthetic oligonucleotide
ugucaacuacauagaugac

SEQ ID NO: 2431937 - RNA, 19 nt, Artificial Sequence
  Description of Artificial Sequence: Synthetic oligonucleotide
uuugguugcugauguuuua

SEQ ID NO: 2431938 - RNA, 19 nt, Artificial Sequence
  Description of Artificial Sequence: Synthetic oligonucleotide
caauagugggaauaguagu

SEQ ID NO: 2431939 - RNA, 19 nt, Artificial Sequence
  Description of Artificial Sequence: Synthetic oligonucleotide
uuucagcguuucaacuaac

SEQ ID NO: 2431940 - RNA, 19 nt, Artificial Sequence
  Description of Artificial Sequence: Synthetic oligonucleotide
uugguugcugauguuuuaa

SEQ ID NO: 2431941 - RNA, 19 nt, Artificial Sequence
  Description of Artificial Sequence: Synthetic oligonucleotide
ucgccuauccucggacucg

SEQ ID NO: 2431942 - RNA, 19 nt, Artificial Sequence
  Description of Artificial Sequence: Synthetic oligonucleotide
acugcgucuguguuugaau

SEQ ID NO: 2431943 - RNA, 19 nt, Artificial Sequence
  Description of Artificial Sequence: Synthetic oligonucleotide
caguucuguacaugccagc

SEQ ID NO: 2431944 - RNA, 19 nt, Artificial Sequence
  Description of Artificial Sequence: Synthetic oligonucleotide
gaggcgggcuccuccaagc

SEQ ID NO: 2431945 - RNA, 19 nt, Artificial Sequence
  Description of Artificial Sequence: Synthetic oligonucleotide
ugguugcugauguuuuaaa

SEQ ID NO: 2431946 - RNA, 19 nt, Artificial Sequence
  Description of Artificial Sequence: Synthetic oligonucleotide
gucaacuacauagaugacu

SEQ ID NO: 2431947 - RNA, 19 nt, Artificial Sequence
  Description of Artificial Sequence: Synthetic oligonucleotide
caacugucaacuacauaga

SEQ ID NO: 2431948 - RNA, 19 nt, Artificial Sequence
  Description of Artificial Sequence: Synthetic oligonucleotide
agauccucauuucccuggu

SEQ ID NO: 2431949 - RNA, 19 nt, Artificial Sequence
  Description of Artificial Sequence: Synthetic oligonucleotide
aggcgggcuccuccaagcc

SEQ ID NO: 2431950 - RNA, 19 nt, Artificial Sequence
  Description of Artificial Sequence: Synthetic oligonucleotide
gccaauucggucucgguca

SEQ ID NO: 2431951 - RNA, 19 nt, Artificial Sequence
  Description of Artificial Sequence: Synthetic oligonucleotide
agccacccaugauggaccg

SEQ ID NO: 2431952 - RNA, 19 nt, Artificial Sequence
  Description of Artificial Sequence: Synthetic oligonucleotide
uccucccaagucccaaacu

SEQ ID NO: 2431953 - RNA, 19 nt, Artificial Sequence
  Description of Artificial Sequence: Synthetic oligonucleotide
ucacggucucuacauuaaa

SEQ ID NO: 2431954 - RNA, 19 nt, Artificial Sequence
  Description of Artificial Sequence: Synthetic oligonucleotide
augauggaccgccgccgcg

SEQ ID NO: 2431955 - RNA, 19 nt, Artificial Sequence
  Description of Artificial Sequence: Synthetic oligonucleotide
agugccuuugguugcugau

SEQ ID NO: 2431956 - RNA, 19 nt, Artificial Sequence
  Description of Artificial Sequence: Synthetic oligonucleotide
ugauggaccgccgccgcgc

SEQ ID NO: 2431957 - RNA, 19 nt, Artificial Sequence
  Description of Artificial Sequence: Synthetic oligonucleotide
gguugcagugagugugugg

SEQ ID NO: 2431958 - RNA, 19 nt, Artificial Sequence
  Description of Artificial Sequence: Synthetic oligonucleotide
ccaucuaaucccaaaauua

SEQ ID NO: 2431959 - RNA, 19 nt, Artificial Sequence
  Description of Artificial Sequence: Synthetic oligonucleotide
ucauuucccugguuccaaa

SEQ ID NO: 2431960 - RNA, 19 nt, Artificial Sequence
  Description of Artificial Sequence: Synthetic oligonucleotide
cugagggugucauggccug

SEQ ID NO: 2431961 - RNA, 19 nt, Artificial Sequence
  Description of Artificial Sequence: Synthetic oligonucleotide
cucggucacaacugucaac

SEQ ID NO: 2431962 - RNA, 19 nt, Artificial Sequence
  Description of Artificial Sequence: Synthetic oligonucleotide
uuuguaugucacggucucu

SEQ ID NO: 2431963 - RNA, 19 nt, Artificial Sequence
  Description of Artificial Sequence: Synthetic oligonucleotide
aaccuguaaucuguacaaa

SEQ ID NO: 2431964 - RNA, 19 nt, Artificial Sequence
  Description of Artificial Sequence: Synthetic oligonucleotide
aaccauuccauggcuucau

SEQ ID NO: 2431965 - RNA, 19 nt, Artificial Sequence
  Description of Artificial Sequence: Synthetic oligonucleotide
agguaacccaagugcauuu

SEQ ID NO: 2431966 - RNA, 19 nt, Artificial Sequence
  Description of Artificial Sequence: Synthetic oligonucleotide
cauuucugagggugucaug

SEQ ID NO: 2431967 - RNA, 19 nt, Artificial Sequence
  Description of Artificial Sequence: Synthetic oligonucleotide
uggagucaguucuguacau

SEQ ID NO: 2431968 - RNA, 19 nt, Artificial Sequence
  Description of Artificial Sequence: Synthetic oligonucleotide
gaguguguggcguagcauu

SEQ ID NO: 2431969 - RNA, 19 nt, Artificial Sequence
  Description of Artificial Sequence: Synthetic oligonucleotide
cucgccuauccucggacuc

SEQ ID NO: 2431970 - RNA, 19 nt, Artificial Sequence
  Description of Artificial Sequence: Synthetic oligonucleotide
uuccuccaacauugcaacu

SEQ ID NO: 2431971 - RNA, 19 nt, Artificial Sequence
  Description of Artificial Sequence: Synthetic oligonucleotide
gugaguguguggcguagca

SEQ ID NO: 2431972 - RNA, 19 nt, Artificial Sequence
  Description of Artificial Sequence: Synthetic oligonucleotide
cugauacuugucuguccuc

SEQ ID NO: 2431973 - RNA, 19 nt, Artificial Sequence
  Description of Artificial Sequence: Synthetic oligonucleotide
ggaauaguaguaacaaccu

SEQ ID NO: 2431974 - RNA, 19 nt, Artificial Sequence
  Description of Artificial Sequence: Synthetic oligonucleotide
uguccucccaagucccaaa

SEQ ID NO: 2431975 - RNA, 19 nt, Artificial Sequence
  Description of Artificial Sequence: Synthetic oligonucleotide
ccuuucucagcucuucuuc

SEQ ID NO: 2431976 - RNA, 19 nt, Artificial Sequence
  Description of Artificial Sequence: Synthetic oligonucleotide
cuguaaucuguacaaaauu

SEQ ID NO: 2431977 - RNA, 19 nt, Artificial Sequence
  Description of Artificial Sequence: Synthetic oligonucleotide
cagcguuucaacuaaccau

SEQ ID NO: 2431978 - RNA, 19 nt, Artificial Sequence
  Description of Artificial Sequence: Synthetic oligonucleotide
ccaaccuguaaucuguaca

SEQ ID NO: 2431979 - RNA, 19 nt, Artificial Sequence
  Description of Artificial Sequence: Synthetic oligonucleotide
ugaguguguggcguagcau

SEQ ID NO: 2431980 - RNA, 19 nt, Artificial Sequence
  Description of Artificial Sequence: Synthetic oligonucleotide
uggcgaggcgggcuccucc

SEQ ID NO: 2431981 - RNA, 19 nt, Artificial Sequence
  Description of Artificial Sequence: Synthetic oligonucleotide
uacaaacauuggagucagu

SEQ ID NO: 2431982 - RNA, 19 nt, Artificial Sequence
  Description of Artificial Sequence: Synthetic oligonucleotide
augccaauucggucucggu

SEQ ID NO: 2431983 - RNA, 19 nt, Artificial Sequence
  Description of Artificial Sequence: Synthetic oligonucleotide
ccuauccucggacucgggc

SEQ ID NO: 2431984 - RNA, 19 nt, Artificial Sequence
  Description of Artificial Sequence: Synthetic oligonucleotide
cugcgucuguguuugaaua

SEQ ID NO: 2431985 - RNA, 19 nt, Artificial Sequence
  Description of Artificial Sequence: Synthetic oligonucleotide
auccaauagugggaauagu

SEQ ID NO: 2431986 - RNA, 19 nt, Artificial Sequence
  Description of Artificial Sequence: Synthetic oligonucleotide
gcuucacaggaccugaugu

SEQ ID NO: 2431987 - RNA, 19 nt, Artificial Sequence
  Description of Artificial Sequence: Synthetic oligonucleotide
gucuguguuugaauaguaa

SEQ ID NO: 2431988 - RNA, 19 nt, Artificial Sequence
  Description of Artificial Sequence: Synthetic oligonucleotide
acuaaccauuccauggcuu

SEQ ID NO: 2431989 - RNA, 19 nt, Artificial Sequence
  Description of Artificial Sequence: Synthetic oligonucleotide
ccuagcugggccugggcgc

SEQ ID NO: 2431990 - RNA, 19 nt, Artificial Sequence
  Description of Artificial Sequence: Synthetic oligonucleotide
cacccaugauggaccgccg

SEQ ID NO: 2431991 - RNA, 19 nt, Artificial Sequence
  Description of Artificial Sequence: Synthetic oligonucleotide
cugaugugaaugggcuuac

SEQ ID NO: 2431992 - RNA, 19 nt, Artificial Sequence
  Description of Artificial Sequence: Synthetic oligonucleotide
ugaugugaaugggcuuacu

SEQ ID NO: 2431993 - RNA, 19 nt, Artificial Sequence
  Description of Artificial Sequence: Synthetic oligonucleotide
acuccuagcugggccuggg

SEQ ID NO: 2431994 - RNA, 19 nt, Artificial Sequence
  Description of Artificial Sequence: Synthetic oligonucleotide
gguaacccaagugcauuug

SEQ ID NO: 2431995 - RNA, 19 nt, Artificial Sequence
  Description of Artificial Sequence: Synthetic oligonucleotide
ccacccaugauggaccgcc

SEQ ID NO: 2431996 - RNA, 19 nt, Artificial Sequence
  Description of Artificial Sequence: Synthetic oligonucleotide
cguuucaacuaaccauucc

SEQ ID NO: 2431997 - RNA, 19 nt, Artificial Sequence
  Description of Artificial Sequence: Synthetic oligonucleotide
ugguugcagugagugugug

SEQ ID NO: 2431998 - RNA, 19 nt, Artificial Sequence
  Description of Artificial Sequence: Synthetic oligonucleotide
gccugauacuugucugucc

SEQ ID NO: 2431999 - RNA, 19 nt, Artificial Sequence
  Description of Artificial Sequence: Synthetic oligonucleotide
caacuaacucugacuugga

SEQ ID NO: 2432000 - RNA, 19 nt, Artificial Sequence
  Description of Artificial Sequence: Synthetic oligonucleotide
cagugaguguguggcguag

SEQ ID NO: 2432001 - RNA, 19 nt, Artificial Sequence
  Description of Artificial Sequence: Synthetic oligonucleotide
ggcgggcuccuccaagccg

SEQ ID NO: 2432002 - RNA, 19 nt, Artificial Sequence
  Description of Artificial Sequence: Synthetic oligonucleotide
cuuugguugcugauguuuu

SEQ ID NO: 2432003 - RNA, 19 nt, Artificial Sequence
  Description of Artificial Sequence: Synthetic oligonucleotide
uggccuuucucagcucuuc

SEQ ID NO: 2432004 - RNA, 19 nt, Artificial Sequence
  Description of Artificial Sequence: Synthetic oligonucleotide
acaugccagcaaucacaca

SEQ ID NO: 2432005 - RNA, 19 nt, Artificial Sequence
  Description of Artificial Sequence: Synthetic oligonucleotide
gcuuuucagcguuucaacu

SEQ ID NO: 2432006 - RNA, 19 nt, Artificial Sequence
  Description of Artificial Sequence: Synthetic oligonucleotide
acuuggaauuuaagguuuu

SEQ ID NO: 2432007 - RNA, 19 nt, Artificial Sequence
  Description of Artificial Sequence: Synthetic oligonucleotide
gguugcugauguuuuaaau

SEQ ID NO: 2432008 - RNA, 19 nt, Artificial Sequence
  Description of Artificial Sequence: Synthetic oligonucleotide
ucgguccuucagagcaggu

SEQ ID NO: 2432009 - RNA, 19 nt, Artificial Sequence
  Description of Artificial Sequence: Synthetic oligonucleotide
gaccggcagcgacuccuag

SEQ ID NO: 2432010 - RNA, 19 nt, Artificial Sequence
  Description of Artificial Sequence: Synthetic oligonucleotide
cauuugcuucacaggaccu

SEQ ID NO: 2432011 - RNA, 19 nt, Artificial Sequence
  Description of Artificial Sequence: Synthetic oligonucleotide
ccaugauggaccgccgccg

SEQ ID NO: 2432012 - RNA, 19 nt, Artificial Sequence
  Description of Artificial Sequence: Synthetic oligonucleotide
gucacggucucuacauuaa

SEQ ID NO: 2432013 - RNA, 19 nt, Artificial Sequence
  Description of Artificial Sequence: Synthetic oligonucleotide
gcgggcuccuccaagccgg

SEQ ID NO: 2432014 - RNA, 19 nt, Artificial Sequence
  Description of Artificial Sequence: Synthetic oligonucleotide
uggaccgccgccgcgcccu

SEQ ID NO: 2432015 - RNA, 19 nt, Artificial Sequence
  Description of Artificial Sequence: Synthetic oligonucleotide
guguguggcguagcauuug

SEQ ID NO: 2432016 - RNA, 19 nt, Artificial Sequence
  Description of Artificial Sequence: Synthetic oligonucleotide
aguguguggcguagcauuu

SEQ ID NO: 2432017 - RNA, 19 nt, Artificial Sequence
  Description of Artificial Sequence: Synthetic oligonucleotide
gacugcgucuguguuugaa

SEQ ID NO: 2432018 - RNA, 19 nt, Artificial Sequence
  Description of Artificial Sequence: Synthetic oligonucleotide
cacggucucuacauuaaau

SEQ ID NO: 2432019 - RNA, 19 nt, Artificial Sequence
  Description of Artificial Sequence: Synthetic oligonucleotide
cuccuagcugggccugggc

SEQ ID NO: 2432020 - RNA, 19 nt, Artificial Sequence
  Description of Artificial Sequence: Synthetic oligonucleotide
cauuggagucaguucugua

SEQ ID NO: 2432021 - RNA, 19 nt, Artificial Sequence
  Description of Artificial Sequence: Synthetic oligonucleotide
ccuguaaucuguacaaaau

SEQ ID NO: 2432022 - RNA, 19 nt, Artificial Sequence
  Description of Artificial Sequence: Synthetic oligonucleotide
ggcuccuccaagccggguc

SEQ ID NO: 2432023 - RNA, 19 nt, Artificial Sequence
  Description of Artificial Sequence: Synthetic oligonucleotide
caccaucuaaucccaaaau

SEQ ID NO: 2432024 - RNA, 19 nt, Artificial Sequence
  Description of Artificial Sequence: Synthetic oligonucleotide
gugaaugggcuuacugucu

SEQ ID NO: 2432025 - RNA, 19 nt, Artificial Sequence
  Description of Artificial Sequence: Synthetic oligonucleotide
gcuuacugucugcuuuuca

SEQ ID NO: 2432026 - RNA, 19 nt, Artificial Sequence
  Description of Artificial Sequence: Synthetic oligonucleotide
caguucuaacagucacaga

SEQ ID NO: 2432027 - RNA, 19 nt, Artificial Sequence
  Description of Artificial Sequence: Synthetic oligonucleotide
gcagcgacuccuagcuggg

SEQ ID NO: 2432028 - RNA, 19 nt, Artificial Sequence
  Description of Artificial Sequence: Synthetic oligonucleotide
ccugauacuugucuguccu

SEQ ID NO: 2432029 - RNA, 19 nt, Artificial Sequence
  Description of Artificial Sequence: Synthetic oligonucleotide
acauugcaacuaacucuga

SEQ ID NO: 2432030 - RNA, 19 nt, Artificial Sequence
  Description of Artificial Sequence: Synthetic oligonucleotide
ucgggccgggaccggcagc

SEQ ID NO: 2432031 - RNA, 19 nt, Artificial Sequence
  Description of Artificial Sequence: Synthetic oligonucleotide
gcuccuccaagccggguca

SEQ ID NO: 2432032 - RNA, 19 nt, Artificial Sequence
  Description of Artificial Sequence: Synthetic oligonucleotide
gacucgggccgggaccggc

SEQ ID NO: 2432033 - RNA, 19 nt, Artificial Sequence
  Description of Artificial Sequence: Synthetic oligonucleotide
caaccucuccaaccuguaa

SEQ ID NO: 2432034 - RNA, 19 nt, Artificial Sequence
  Description of Artificial Sequence: Synthetic oligonucleotide
cucgggccgggaccggcag

SEQ ID NO: 2432035 - RNA, 19 nt, Artificial Sequence
  Description of Artificial Sequence: Synthetic oligonucleotide
ccacuuucgguccuucaga

SEQ ID NO: 2432036 - RNA, 19 nt, Artificial Sequence
  Description of Artificial Sequence: Synthetic oligonucleotide
ccuccgguggcgaggcggg

SEQ ID NO: 2432037 - RNA, 19 nt, Artificial Sequence
  Description of Artificial Sequence: Synthetic oligonucleotide
auccucggacucgggccgg

SEQ ID NO: 2432038 - RNA, 19 nt, Artificial Sequence
  Description of Artificial Sequence: Synthetic oligonucleotide
gccuccgguggcgaggcgg

SEQ ID NO: 2432039 - RNA, 19 nt, Artificial Sequence
  Description of Artificial Sequence: Synthetic oligonucleotide
acaaccucuccaaccugua

SEQ ID NO: 2432040 - RNA, 19 nt, Artificial Sequence
  Description of Artificial Sequence: Synthetic oligonucleotide
cugcugccggccuccggug

SEQ ID NO: 2432041 - RNA, 19 nt, Artificial Sequence
  Description of Artificial Sequence: Synthetic oligonucleotide
gcgcccucgccuauccucg

SEQ ID NO: 2432042 - RNA, 19 nt, Artificial Sequence
  Description of Artificial Sequence: Synthetic oligonucleotide
caagccgggucagccagca

SEQ ID NO: 2432043 - RNA, 19 nt, Artificial Sequence
  Description of Artificial Sequence: Synthetic oligonucleotide
ccaauucggucucggucac

SEQ ID NO: 2432044 - RNA, 19 nt, Artificial Sequence
  Description of Artificial Sequence: Synthetic oligonucleotide
ugggcgccgccaccuccgc

SEQ ID NO: 2432045 - RNA, 19 nt, Artificial Sequence
  Description of Artificial Sequence: Synthetic oligonucleotide
guauggccugauacuuguc

SEQ ID NO: 2432046 - RNA, 19 nt, Artificial Sequence
  Description of Artificial Sequence: Synthetic oligonucleotide
cuccaaccuguaaucugua

SEQ ID NO: 2432047 - RNA, 19 nt, Artificial Sequence
  Description of Artificial Sequence: Synthetic oligonucleotide
ccuccaacauugcaacuaa

SEQ ID NO: 2432048 - RNA, 19 nt, Artificial Sequence
  Description of Artificial Sequence: Synthetic oligonucleotide
caagaccagugccuuuggu

SEQ ID NO: 2432049 - RNA, 19 nt, Artificial Sequence
  Description of Artificial Sequence: Synthetic oligonucleotide
cagcaaucacacaguucua

SEQ ID NO: 2432050 - RNA, 19 nt, Artificial Sequence
  Description of Artificial Sequence: Synthetic oligonucleotide
gcguuucaacuaaccauuc

SEQ ID NO: 2432051 - RNA, 19 nt, Artificial Sequence
  Description of Artificial Sequence: Synthetic oligonucleotide
ggucucggucacaacuguc

SEQ ID NO: 2432052 - RNA, 19 nt, Artificial Sequence
  Description of Artificial Sequence: Synthetic oligonucleotide
ccaccuccgcugcugccgg

SEQ ID NO: 2432053 - RNA, 19 nt, Artificial Sequence
  Description of Artificial Sequence: Synthetic oligonucleotide
cagcgacuccuagcugggc

SEQ ID NO: 2432054 - RNA, 19 nt, Artificial Sequence
  Description of Artificial Sequence: Synthetic oligonucleotide
cccucgccuauccucggac

SEQ ID NO: 2432055 - RNA, 19 nt, Artificial Sequence
  Description of Artificial Sequence: Synthetic oligonucleotide
gccauuucugaggguguca

SEQ ID NO: 2432056 - RNA, 19 nt, Artificial Sequence
  Description of Artificial Sequence: Synthetic oligonucleotide
ggcguagcauuugcuucac

SEQ ID NO: 2432057 - RNA, 19 nt, Artificial Sequence
  Description of Artificial Sequence: Synthetic oligonucleotide
cagguaacccaagugcauu

SEQ ID NO: 2432058 - RNA, 19 nt, Artificial Sequence
  Description of Artificial Sequence: Synthetic oligonucleotide
auggccuuucucagcucuu

SEQ ID NO: 2432059 - RNA, 19 nt, Artificial Sequence
  Description of Artificial Sequence: Synthetic oligonucleotide
ccaagccgggucagccagc

SEQ ID NO: 2432060 - RNA, 19 nt, Artificial Sequence
  Description of Artificial Sequence: Synthetic oligonucleotide
gcgucuguguuugaauagu

SEQ ID NO: 2432061 - RNA, 19 nt, Artificial Sequence
  Description of Artificial Sequence: Synthetic oligonucleotide
ggcuuacugucugcuuuuc

SEQ ID NO: 2432062 - RNA, 19 nt, Artificial Sequence
  Description of Artificial Sequence: Synthetic oligonucleotide
caccuccgcugcugccggc

SEQ ID NO: 2432063 - RNA, 19 nt, Artificial Sequence
  Description of Artificial Sequence: Synthetic oligonucleotide
gccgcgcccucgccuaucc

SEQ ID NO: 2432064 - RNA, 19 nt, Artificial Sequence
  Description of Artificial Sequence: Synthetic oligonucleotide
gcgacuccuagcugggccu

SEQ ID NO: 2432065 - RNA, 19 nt, Artificial Sequence
  Description of Artificial Sequence: Synthetic oligonucleotide
caauucggucucggucaca

SEQ ID NO: 2432066 - RNA, 19 nt, Artificial Sequence
  Description of Artificial Sequence: Synthetic oligonucleotide
cggacucgggccgggaccg

SEQ ID NO: 2432067 - RNA, 19 nt, Artificial Sequence
  Description of Artificial Sequence: Synthetic oligonucleotide
cgcgcccucgccuauccuc

SEQ ID NO: 2432068 - RNA, 19 nt, Artificial Sequence
  Description of Artificial Sequence: Synthetic oligonucleotide
guguggcguagcauuugcu

SEQ ID NO: 2432069 - RNA, 19 nt, Artificial Sequence
  Description of Artificial Sequence: Synthetic oligonucleotide
ugccggccuccgguggcga

SEQ ID NO: 2432070 - RNA, 19 nt, Artificial Sequence
  Description of Artificial Sequence: Synthetic oligonucleotide
cuccgguggcgaggcgggc

SEQ ID NO: 2432071 - RNA, 19 nt, Artificial Sequence
  Description of Artificial Sequence: Synthetic oligonucleotide
gcagguaacccaagugcau

SEQ ID NO: 2432072 - RNA, 19 nt, Artificial Sequence
  Description of Artificial Sequence: Synthetic oligonucleotide
gcguagcauuugcuucaca

SEQ ID NO: 2432073 - RNA, 19 nt, Artificial Sequence
  Description of Artificial Sequence: Synthetic oligonucleotide
ccggccuccgguggcgagg

SEQ ID NO: 2432074 - RNA, 19 nt, Artificial Sequence
  Description of Artificial Sequence: Synthetic oligonucleotide
ccgccaccuccgcugcugc

SEQ ID NO: 2432075 - RNA, 19 nt, Artificial Sequence
  Description of Artificial Sequence: Synthetic oligonucleotide
gccgggucagccagcaacu

SEQ ID NO: 2432076 - RNA, 19 nt, Artificial Sequence
  Description of Artificial Sequence: Synthetic oligonucleotide
ccaagugcauuugccauuu

SEQ ID NO: 2432077 - RNA, 19 nt, Artificial Sequence
  Description of Artificial Sequence: Synthetic oligonucleotide
gccacccaugauggaccgc

SEQ ID NO: 2432078 - RNA, 19 nt, Artificial Sequence
  Description of Artificial Sequence: Synthetic oligonucleotide
ggacucgggccgggaccgg

SEQ ID NO: 2432079 - RNA, 19 nt, Artificial Sequence
  Description of Artificial Sequence: Synthetic oligonucleotide
gcccucgccuauccucgga

SEQ ID NO: 2432080 - RNA, 19 nt, Artificial Sequence
  Description of Artificial Sequence: Synthetic oligonucleotide
ccgggaccggcagcgacuc

SEQ ID NO: 2432081 - RNA, 19 nt, Artificial Sequence
  Description of Artificial Sequence: Synthetic oligonucleotide
gaagcacaucuggcugguu

SEQ ID NO: 2432082 - RNA, 19 nt, Artificial Sequence
  Description of Artificial Sequence: Synthetic oligonucleotide
ggccuccgguggcgaggcg

SEQ ID NO: 2432083 - RNA, 19 nt, Artificial Sequence
  Description of Artificial Sequence: Synthetic oligonucleotide
ccucgccuauccucggacu

SEQ ID NO: 2432084 - RNA, 19 nt, Artificial Sequence
  Description of Artificial Sequence: Synthetic oligonucleotide
gccgggaccggcagcgacu

SEQ ID NO: 2432085 - RNA, 19 nt, Artificial Sequence
  Description of Artificial Sequence: Synthetic oligonucleotide
gccuuugguugcugauguu

SEQ ID NO: 2432086 - RNA, 19 nt, Artificial Sequence
  Description of Artificial Sequence: Synthetic oligonucleotide
cggcagcgacuccuagcug

SEQ ID NO: 2432087 - RNA, 19 nt, Artificial Sequence
  Description of Artificial Sequence: Synthetic oligonucleotide
ggccugggcgccgccaccu

SEQ ID NO: 2432088 - RNA, 19 nt, Artificial Sequence
  Description of Artificial Sequence: Synthetic oligonucleotide
cggucucggucacaacugu

SEQ ID NO: 2432089 - RNA, 19 nt, Artificial Sequence
  Description of Artificial Sequence: Synthetic oligonucleotide
ggaccgccgccgcgcccuc

SEQ ID NO: 2432090 - RNA, 19 nt, Artificial Sequence
  Description of Artificial Sequence: Synthetic oligonucleotide
gggccgggaccggcagcga

SEQ ID NO: 2432091 - RNA, 19 nt, Artificial Sequence
  Description of Artificial Sequence: Synthetic oligonucleotide
ccuccgcugcugccggccu

SEQ ID NO: 2432092 - RNA, 19 nt, Artificial Sequence
  Description of Artificial Sequence: Synthetic oligonucleotide
cgccgcgcccucgccuauc

SEQ ID NO: 2432093 - RNA, 19 nt, Artificial Sequence
  Description of Artificial Sequence: Synthetic oligonucleotide
ccgcgcccucgccuauccu

SEQ ID NO: 2432094 - RNA, 19 nt, Artificial Sequence
  Description of Artificial Sequence: Synthetic oligonucleotide
aauuagaacagauuucccg

SEQ ID NO: 2432095 - RNA, 19 nt, Artificial Sequence
  Description of Artificial Sequence: Synthetic oligonucleotide
aacuaaauggggucgaggc

SEQ ID NO: 2432096 - RNA, 19 nt, Artificial Sequence
  Description of Artificial Sequence: Synthetic oligonucleotide
ucaagagaaacuaaauggg

SEQ ID NO: 2432097 - RNA, 19 nt, Artificial Sequence
  Description of Artificial Sequence: Synthetic oligonucleotide
uuaauuagaacagauuucc

SEQ ID NO: 2432098 - RNA, 19 nt, Artificial Sequence
  Description of Artificial Sequence: Synthetic oligonucleotide
ucuucgaugaugcugacca

SEQ ID NO: 2432099 - RNA, 19 nt, Artificial Sequence
  Description of Artificial Sequence: Synthetic oligonucleotide
cacaagauuaauuagaaca

SEQ ID NO: 2432100 - RNA, 19 nt, Artificial Sequence
  Description of Artificial Sequence: Synthetic oligonucleotide
agauuucccguugagaccc

SEQ ID NO: 2432101 - RNA, 19 nt, Artificial Sequence
  Description of Artificial Sequence: Synthetic oligonucleotide
caagagaaacuaaaugggg

SEQ ID NO: 2432102 - RNA, 19 nt, Artificial Sequence
  Description of Artificial Sequence: Synthetic oligonucleotide
acuaaauggggucgaggcc

SEQ ID NO: 2432103 - RNA, 19 nt, Artificial Sequence
  Description of Artificial Sequence: Synthetic oligonucleotide
acucgcacaaaacacccac

SEQ ID NO: 2432104 - RNA, 19 nt, Artificial Sequence
  Description of Artificial Sequence: Synthetic oligonucleotide
cucgauguaauucuccagc

SEQ ID NO: 2432105 - RNA, 19 nt, Artificial Sequence
  Description of Artificial Sequence: Synthetic oligonucleotide
gagaaacuaaauggggucg

SEQ ID NO: 2432106 - RNA, 19 nt, Artificial Sequence
  Description of Artificial Sequence: Synthetic oligonucleotide
uguaguugggaaaggggug

SEQ ID NO: 2432107 - RNA, 19 nt, Artificial Sequence
  Description of Artificial Sequence: Synthetic oligonucleotide
aagagaaacuaaauggggu

SEQ ID NO: 2432108 - RNA, 19 nt, Artificial Sequence
  Description of Artificial Sequence: Synthetic oligonucleotide
aguccggcaacucaucccg

SEQ ID NO: 2432109 - RNA, 19 nt, Artificial Sequence
  Description of Artificial Sequence: Synthetic oligonucleotide
cuaaauggggucgaggccc

SEQ ID NO: 2432110 - RNA, 19 nt, Artificial Sequence
  Description of Artificial Sequence: Synthetic oligonucleotide
uaauuagaacagauuuccc

SEQ ID NO: 2432111 - RNA, 19 nt, Artificial Sequence
  Description of Artificial Sequence: Synthetic oligonucleotide
aagauuaauuagaacagau

SEQ ID NO: 2432112 - RNA, 19 nt, Artificial Sequence
  Description of Artificial Sequence: Synthetic oligonucleotide
aaacuaaauggggucgagg

SEQ ID NO: 2432113 - RNA, 19 nt, Artificial Sequence
  Description of Artificial Sequence: Synthetic oligonucleotide
ucgcacaaaacacccaccc

SEQ ID NO: 2432114 - RNA, 19 nt, Artificial Sequence
  Description of Artificial Sequence: Synthetic oligonucleotide
agacagacacuucacaaga

SEQ ID NO: 2432115 - RNA, 19 nt, Artificial Sequence
  Description of Artificial Sequence: Synthetic oligonucleotide
gaugcugaccacgucgucg

SEQ ID NO: 2432116 - RNA, 19 nt, Artificial Sequence
  Description of Artificial Sequence: Synthetic oligonucleotide
gacaagucugacgacaggc

SEQ ID NO: 2432117 - RNA, 19 nt, Artificial Sequence
  Description of Artificial Sequence: Synthetic oligonucleotide
uguaaggggacucgcacaa

SEQ ID NO: 2432118 - RNA, 19 nt, Artificial Sequence
  Description of Artificial Sequence: Synthetic oligonucleotide
guugggaaaggggugauag

SEQ ID NO: 2432119 - RNA, 19 nt, Artificial Sequence
  Description of Artificial Sequence: Synthetic oligonucleotide
aagucugacgacaggcccg

SEQ ID NO: 2432120 - RNA, 19 nt, Artificial Sequence
  Description of Artificial Sequence: Synthetic oligonucleotide
ucgauguaauucuccagcu

SEQ ID NO: 2432121 - RNA, 19 nt, Artificial Sequence
  Description of Artificial Sequence: Synthetic oligonucleotide
augcugaccacgucgucgg

SEQ ID NO: 2432122 - RNA, 19 nt, Artificial Sequence
  Description of Artificial Sequence: Synthetic oligonucleotide
uaaggggacucgcacaaaa

SEQ ID NO: 2432123 - RNA, 19 nt, Artificial Sequence
  Description of Artificial Sequence: Synthetic oligonucleotide
ucacaagauuaauuagaac

SEQ ID NO: 2432124 - RNA, 19 nt, Artificial Sequence
  Description of Artificial Sequence: Synthetic oligonucleotide
caagucugacgacaggccc

SEQ ID NO: 2432125 - RNA, 19 nt, Artificial Sequence
  Description of Artificial Sequence: Synthetic oligonucleotide
agcagcacgugcucgaugu

SEQ ID NO: 2432126 - RNA, 19 nt, Artificial Sequence
  Description of Artificial Sequence: Synthetic oligonucleotide
cacuucacaagauuaauua

SEQ ID NO: 2432127 - RNA, 19 nt, Artificial Sequence
  Description of Artificial Sequence: Synthetic oligonucleotide
ggugggagcacuucguucc

SEQ ID NO: 2432128 - RNA, 19 nt, Artificial Sequence
  Description of Artificial Sequence: Synthetic oligonucleotide
agacccggaagucucaaga

SEQ ID NO: 2432129 - RNA, 19 nt, Artificial Sequence
  Description of Artificial Sequence: Synthetic oligonucleotide
gaacagauuucccguugag

SEQ ID NO: 2432130 - RNA, 19 nt, Artificial Sequence
  Description of Artificial Sequence: Synthetic oligonucleotide
gaagucucaagagaaacua

SEQ ID NO: 2432131 - RNA, 19 nt, Artificial Sequence
  Description of Artificial Sequence: Synthetic oligonucleotide
cacugagggaggaggagcg

SEQ ID NO: 2432132 - RNA, 19 nt, Artificial Sequence
  Description of Artificial Sequence: Synthetic oligonucleotide
uucuggacugcagacccgg

SEQ ID NO: 2432133 - RNA, 19 nt, Artificial Sequence
  Description of Artificial Sequence: Synthetic oligonucleotide
aggggacucgcacaaaaca

SEQ ID NO: 2432134 - RNA, 19 nt, Artificial Sequence
  Description of Artificial Sequence: Synthetic oligonucleotide
agaacagauuucccguuga

SEQ ID NO: 2432135 - RNA, 19 nt, Artificial Sequence
  Description of Artificial Sequence: Synthetic oligonucleotide
ggaaaggggugauagggcc

SEQ ID NO: 2432136 - RNA, 19 nt, Artificial Sequence
  Description of Artificial Sequence: Synthetic oligonucleotide
ucugacgacaggcccgggc

SEQ ID NO: 2432137 - RNA, 19 nt, Artificial Sequence
  Description of Artificial Sequence: Synthetic oligonucleotide
aacgcgugguggaagugac

SEQ ID NO: 2432138 - RNA, 19 nt, Artificial Sequence
  Description of Artificial Sequence: Synthetic oligonucleotide
cagauuucccguugagacc

SEQ ID NO: 2432139 - RNA, 19 nt, Artificial Sequence
  Description of Artificial Sequence: Synthetic oligonucleotide
aaggggacucgcacaaaac

SEQ ID NO: 2432140 - RNA, 19 nt, Artificial Sequence
  Description of Artificial Sequence: Synthetic oligonucleotide
gacccggaagucucaagag

SEQ ID NO: 2432141 - RNA, 19 nt, Artificial Sequence
  Description of Artificial Sequence: Synthetic oligonucleotide
acgugcucgauguaauucu

SEQ ID NO: 2432142 - RNA, 19 nt, Artificial Sequence
  Description of Artificial Sequence: Synthetic oligonucleotide
gaaacuaaauggggucgag

SEQ ID NO: 2432143 - RNA, 19 nt, Artificial Sequence
  Description of Artificial Sequence: Synthetic oligonucleotide
aaaggggugauagggcccu

SEQ ID NO: 2432144 - RNA, 19 nt, Artificial Sequence
  Description of Artificial Sequence: Synthetic oligonucleotide
cugacgacaggcccgggcc

SEQ ID NO: 2432145 - RNA, 19 nt, Artificial Sequence
  Description of Artificial Sequence: Synthetic oligonucleotide
uguucgcggccgaauguag

SEQ ID NO: 2432146 - RNA, 19 nt, Artificial Sequence
  Description of Artificial Sequence: Synthetic oligonucleotide
ucccguugagacccggaag

SEQ ID NO: 2432147 - RNA, 19 nt, Artificial Sequence
  Description of Artificial Sequence: Synthetic oligonucleotide
uaaauggggucgaggcccc

SEQ ID NO: 2432148 - RNA, 19 nt, Artificial Sequence
  Description of Artificial Sequence: Synthetic oligonucleotide
uccggcaacucaucccggg

SEQ ID NO: 2432149 - RNA, 19 nt, Artificial Sequence
  Description of Artificial Sequence: Synthetic oligonucleotide
acagacacuucacaagauu

SEQ ID NO: 2432150 - RNA, 19 nt, Artificial Sequence
  Description of Artificial Sequence: Synthetic oligonucleotide
ggcgcaugcaaacacugag

SEQ ID NO: 2432151 - RNA, 19 nt, Artificial Sequence
  Description of Artificial Sequence: Synthetic oligonucleotide
gaugcggguggcugcagug

SEQ ID NO: 2432152 - RNA, 19 nt, Artificial Sequence
  Description of Artificial Sequence: Synthetic oligonucleotide
ucguucuuccggcuuuccc

SEQ ID NO: 2432153 - RNA, 19 nt, Artificial Sequence
  Description of Artificial Sequence: Synthetic oligonucleotide
agauuaauuagaacagauu

SEQ ID NO: 2432154 - RNA, 19 nt, Artificial Sequence
  Description of Artificial Sequence: Synthetic oligonucleotide
aggcccgggccccacaugg

SEQ ID NO: 2432155 - RNA, 19 nt, Artificial Sequence
  Description of Artificial Sequence: Synthetic oligonucleotide
agucucaagagaaacuaaa

SEQ ID NO: 2432156 - RNA, 19 nt, Artificial Sequence
  Description of Artificial Sequence: Synthetic oligonucleotide
accucuucgaugaugcuga

SEQ ID NO: 2432157 - RNA, 19 nt, Artificial Sequence
  Description of Artificial Sequence: Synthetic oligonucleotide
gaaaggggugauagggccc

SEQ ID NO: 2432158 - RNA, 19 nt, Artificial Sequence
  Description of Artificial Sequence: Synthetic oligonucleotide
agaaacuaaauggggucga

SEQ ID NO: 2432159 - RNA, 19 nt, Artificial Sequence
  Description of Artificial Sequence: Synthetic oligonucleotide
cucgcacaaaacacccacc

SEQ ID NO: 2432160 - RNA, 19 nt, Artificial Sequence
  Description of Artificial Sequence: Synthetic oligonucleotide
uuccaguccggcaacucau

SEQ ID NO: 2432161 - RNA, 19 nt, Artificial Sequence
  Description of Artificial Sequence: Synthetic oligonucleotide
uccaggucgggaugguggc

SEQ ID NO: 2432162 - RNA, 19 nt, Artificial Sequence
  Description of Artificial Sequence: Synthetic oligonucleotide
cacgucgucggcuggcagg

SEQ ID NO: 2432163 - RNA, 19 nt, Artificial Sequence
  Description of Artificial Sequence: Synthetic oligonucleotide
uggaagugacggcggcgcg

SEQ ID NO: 2432164 - RNA, 19 nt, Artificial Sequence
  Description of Artificial Sequence: Synthetic oligonucleotide
caagauuaauuagaacaga

SEQ ID NO: 2432165 - RNA, 19 nt, Artificial Sequence
  Description of Artificial Sequence: Synthetic oligonucleotide
gaagugacggcggcgcgag

SEQ ID NO: 2432166 - RNA, 19 nt, Artificial Sequence
  Description of Artificial Sequence: Synthetic oligonucleotide
ucuggacugcagacccggg

SEQ ID NO: 2432167 - RNA, 19 nt, Artificial Sequence
  Description of Artificial Sequence: Synthetic oligonucleotide
aguguucgcggccgaaugu

SEQ ID NO: 2432168 - RNA, 19 nt, Artificial Sequence
  Description of Artificial Sequence: Synthetic oligonucleotide
uucccguugagacccggaa

SEQ ID NO: 2432169 - RNA, 19 nt, Artificial Sequence
  Description of Artificial Sequence: Synthetic oligonucleotide
acuucguuccaguccggca

SEQ ID NO: 2432170 - RNA, 19 nt, Artificial Sequence
  Description of Artificial Sequence: Synthetic oligonucleotide
gguguaaggggacucgcac

SEQ ID NO: 2432171 - RNA, 19 nt, Artificial Sequence
  Description of Artificial Sequence: Synthetic oligonucleotide
agucugacgacaggcccgg

SEQ ID NO: 2432172 - RNA, 19 nt, Artificial Sequence
  Description of Artificial Sequence: Synthetic oligonucleotide
cugaccacgucgucggcug

SEQ ID NO: 2432173 - RNA, 19 nt, Artificial Sequence
  Description of Artificial Sequence: Synthetic oligonucleotide
ggggcguucguucuuccgg

SEQ ID NO: 2432174 - RNA, 19 nt, Artificial Sequence
  Description of Artificial Sequence: Synthetic oligonucleotide
caguccggcaacucauccc

SEQ ID NO: 2432175 - RNA, 19 nt, Artificial Sequence
  Description of Artificial Sequence: Synthetic oligonucleotide
auggggucgaggccccugg

SEQ ID NO: 2432176 - RNA, 19 nt, Artificial Sequence
  Description of Artificial Sequence: Synthetic oligonucleotide
guugagacccggaagucuc

SEQ ID NO: 2432177 - RNA, 19 nt, Artificial Sequence
  Description of Artificial Sequence: Synthetic oligonucleotide
acccgggacaagucugacg

SEQ ID NO: 2432178 - RNA, 19 nt, Artificial Sequence
  Description of Artificial Sequence: Synthetic oligonucleotide
uucguuccaguccggcaac

SEQ ID NO: 2432179 - RNA, 19 nt, Artificial Sequence
  Description of Artificial Sequence: Synthetic oligonucleotide
acaaaacacccacccgccu

SEQ ID NO: 2432180 - RNA, 19 nt, Artificial Sequence
  Description of Artificial Sequence: Synthetic oligonucleotide
uuucccguugagacccgga

SEQ ID NO: 2432181 - RNA, 19 nt, Artificial Sequence
  Description of Artificial Sequence: Synthetic oligonucleotide
uugagacccggaagucuca

SEQ ID NO: 2432182 - RNA, 19 nt, Artificial Sequence
  Description of Artificial Sequence: Synthetic oligonucleotide
cguucuuccggcuuucccg

SEQ ID NO: 2432183 - RNA, 19 nt, Artificial Sequence
  Description of Artificial Sequence: Synthetic oligonucleotide
ggcaacucaucccgggccg

SEQ ID NO: 2432184 - RNA, 19 nt, Artificial Sequence
  Description of Artificial Sequence: Synthetic oligonucleotide
ucggggcggggucacgagg

SEQ ID NO: 2432185 - RNA, 19 nt, Artificial Sequence
  Description of Artificial Sequence: Synthetic oligonucleotide
ucccgguuucuccuccacc

SEQ ID NO: 2432186 - RNA, 19 nt, Artificial Sequence
  Description of Artificial Sequence: Synthetic oligonucleotide
cagacccgggacaagucug

SEQ ID NO: 2432187 - RNA, 19 nt, Artificial Sequence
  Description of Artificial Sequence: Synthetic oligonucleotide
agccggggcgcaugcaaac

SEQ ID NO: 2432188 - RNA, 19 nt, Artificial Sequence
  Description of Artificial Sequence: Synthetic oligonucleotide
caccucuucgaugaugcug

SEQ ID NO: 2432189 - RNA, 19 nt, Artificial Sequence
  Description of Artificial Sequence: Synthetic oligonucleotide
guggaagugacggcggcgc

SEQ ID NO: 2432190 - RNA, 19 nt, Artificial Sequence
  Description of Artificial Sequence: Synthetic oligonucleotide
ugacgacaggcccgggccc

SEQ ID NO: 2432191 - RNA, 19 nt, Artificial Sequence
  Description of Artificial Sequence: Synthetic oligonucleotide
cuucguuccaguccggcaa

SEQ ID NO: 2432192 - RNA, 19 nt, Artificial Sequence
  Description of Artificial Sequence: Synthetic oligonucleotide
gucacgagggguggggccg

SEQ ID NO: 2432193 - RNA, 19 nt, Artificial Sequence
  Description of Artificial Sequence: Synthetic oligonucleotide
gggucgaggccccuggagg

SEQ ID NO: 2432194 - RNA, 19 nt, Artificial Sequence
  Description of Artificial Sequence: Synthetic oligonucleotide
gagacccggaagucucaag

SEQ ID NO: 2432195 - RNA, 19 nt, Artificial Sequence
  Description of Artificial Sequence: Synthetic oligonucleotide
agacacuucacaagauuaa

SEQ ID NO: 2432196 - RNA, 19 nt, Artificial Sequence
  Description of Artificial Sequence: Synthetic oligonucleotide
ccgaauguaguugggaaag

SEQ ID NO: 2432197 - RNA, 19 nt, Artificial Sequence
  Description of Artificial Sequence: Synthetic oligonucleotide
aauggggucgaggccccug

SEQ ID NO: 2432198 - RNA, 19 nt, Artificial Sequence
  Description of Artificial Sequence: Synthetic oligonucleotide
aggggcguucguucuuccg

SEQ ID NO: 2432199 - RNA, 19 nt, Artificial Sequence
  Description of Artificial Sequence: Synthetic oligonucleotide
guguaaggggacucgcaca

SEQ ID NO: 2432200 - RNA, 19 nt, Artificial Sequence
  Description of Artificial Sequence: Synthetic oligonucleotide
cacgugcucgauguaauuc

SEQ ID NO: 2432201 - RNA, 19 nt, Artificial Sequence
  Description of Artificial Sequence: Synthetic oligonucleotide
cauccggcgcuccuccgcg

SEQ ID NO: 2432202 - RNA, 19 nt, Artificial Sequence
  Description of Artificial Sequence: Synthetic oligonucleotide
uucgcggccgaauguaguu

SEQ ID NO: 2432203 - RNA, 19 nt, Artificial Sequence
  Description of Artificial Sequence: Synthetic oligonucleotide
gauggccccgggauggccc

SEQ ID NO: 2432204 - RNA, 19 nt, Artificial Sequence
  Description of Artificial Sequence: Synthetic oligonucleotide
ggacucgcacaaaacaccc

SEQ ID NO: 2432205 - RNA, 19 nt, Artificial Sequence
  Description of Artificial Sequence: Synthetic oligonucleotide
caguguucgcggccgaaug

SEQ ID NO: 2432206 - RNA, 19 nt, Artificial Sequence
  Description of Artificial Sequence: Synthetic oligonucleotide
uccugcgcgcgccuggccu

SEQ ID NO: 2432207 - RNA, 19 nt, Artificial Sequence
  Description of Artificial Sequence: Synthetic oligonucleotide
agugacggcggcgcgagga

SEQ ID NO: 2432208 - RNA, 19 nt, Artificial Sequence
  Description of Artificial Sequence: Synthetic oligonucleotide
cugggcuccgggaggggcg

SEQ ID NO: 2432209 - RNA, 19 nt, Artificial Sequence
  Description of Artificial Sequence: Synthetic oligonucleotide
ggcgcgaggaugcgggugg

SEQ ID NO: 2432210 - RNA, 19 nt, Artificial Sequence
  Description of Artificial Sequence: Synthetic oligonucleotide
acacuucacaagauuaauu

SEQ ID NO: 2432211 - RNA, 19 nt, Artificial Sequence
  Description of Artificial Sequence: Synthetic oligonucleotide
ugcagacccgggacaaguc

SEQ ID NO: 2432212 - RNA, 19 nt, Artificial Sequence
  Description of Artificial Sequence: Synthetic oligonucleotide
aaacacccacccgccuggg

SEQ ID NO: 2432213 - RNA, 19 nt, Artificial Sequence
  Description of Artificial Sequence: Synthetic oligonucleotide
gacggcggcgcgaggaugc

SEQ ID NO: 2432214 - RNA, 19 nt, Artificial Sequence
  Description of Artificial Sequence: Synthetic oligonucleotide
uuucccgguuucuccucca

SEQ ID NO: 2432215 - RNA, 19 nt, Artificial Sequence
  Description of Artificial Sequence: Synthetic oligonucleotide
gagggaggaggagcgacac

SEQ ID NO: 2432216 - RNA, 19 nt, Artificial Sequence
  Description of Artificial Sequence: Synthetic oligonucleotide
uccaguccggcaacucauc

SEQ ID NO: 2432217 - RNA, 19 nt, Artificial Sequence
  Description of Artificial Sequence: Synthetic oligonucleotide
gggugauagggcccugggg

SEQ ID NO: 2432218 - RNA, 19 nt, Artificial Sequence
  Description of Artificial Sequence: Synthetic oligonucleotide
cucuucgaugaugcugacc

SEQ ID NO: 2432219 - RNA, 19 nt, Artificial Sequence
  Description of Artificial Sequence: Synthetic oligonucleotide
cugagggaggaggagcgac

SEQ ID NO: 2432220 - RNA, 19 nt, Artificial Sequence
  Description of Artificial Sequence: Synthetic oligonucleotide
gggaaacaccuccuccucc

SEQ ID NO: 2432221 - RNA, 19 nt, Artificial Sequence
  Description of Artificial Sequence: Synthetic oligonucleotide
aacacccacccgccuggga

SEQ ID NO: 2432222 - RNA, 19 nt, Artificial Sequence
  Description of Artificial Sequence: Synthetic oligonucleotide
caggucgggaugguggcgc

SEQ ID NO: 2432223 - RNA, 19 nt, Artificial Sequence
  Description of Artificial Sequence: Synthetic oligonucleotide
auggcccgugagcuugggg

SEQ ID NO: 2432224 - RNA, 19 nt, Artificial Sequence
  Description of Artificial Sequence: Synthetic oligonucleotide
auggccccgggauggcccg

SEQ ID NO: 2432225 - RNA, 19 nt, Artificial Sequence
  Description of Artificial Sequence: Synthetic oligonucleotide
ugcauccggcgcuccuccg

SEQ ID NO: 2432226 - RNA, 19 nt, Artificial Sequence
  Description of Artificial Sequence: Synthetic oligonucleotide
gggacaagucugacgacag

SEQ ID NO: 2432227 - RNA, 19 nt, Artificial Sequence
  Description of Artificial Sequence: Synthetic oligonucleotide
cugcauccggcgcuccucc

SEQ ID NO: 2432228 - RNA, 19 nt, Artificial Sequence
  Description of Artificial Sequence: Synthetic oligonucleotide
ggggacucgcacaaaacac

SEQ ID NO: 2432229 - RNA, 19 nt, Artificial Sequence
  Description of Artificial Sequence: Synthetic oligonucleotide
uucccgguuucuccuccac

SEQ ID NO: 2432230 - RNA, 19 nt, Artificial Sequence
  Description of Artificial Sequence: Synthetic oligonucleotide
gauuucccguugagacccg

SEQ ID NO: 2432231 - RNA, 19 nt, Artificial Sequence
  Description of Artificial Sequence: Synthetic oligonucleotide
ugcggggagcggacgugag

SEQ ID NO: 2432232 - RNA, 19 nt, Artificial Sequence
  Description of Artificial Sequence: Synthetic oligonucleotide
ucuuccggcuuucccgguu

SEQ ID NO: 2432233 - RNA, 19 nt, Artificial Sequence
  Description of Artificial Sequence: Synthetic oligonucleotide
augguggcgcgcagguggc

SEQ ID NO: 2432234 - RNA, 19 nt, Artificial Sequence
  Description of Artificial Sequence: Synthetic oligonucleotide
aggucgggaugguggcgcg

SEQ ID NO: 2432235 - RNA, 19 nt, Artificial Sequence
  Description of Artificial Sequence: Synthetic oligonucleotide
gacacuucacaagauuaau

SEQ ID NO: 2432236 - RNA, 19 nt, Artificial Sequence
  Description of Artificial Sequence: Synthetic oligonucleotide
aagugacggcggcgcgagg

SEQ ID NO: 2432237 - RNA, 19 nt, Artificial Sequence
  Description of Artificial Sequence: Synthetic oligonucleotide
ggggugauagggcccuggg

SEQ ID NO: 2432238 - RNA, 19 nt, Artificial Sequence
  Description of Artificial Sequence: Synthetic oligonucleotide
cucccgaucccaggguggg

SEQ ID NO: 2432239 - RNA, 19 nt, Artificial Sequence
  Description of Artificial Sequence: Synthetic oligonucleotide
uggcgcgcccggcuugggg

SEQ ID NO: 2432240 - RNA, 19 nt, Artificial Sequence
  Description of Artificial Sequence: Synthetic oligonucleotide
cacuucguuccaguccggc

SEQ ID NO: 2432241 - RNA, 19 nt, Artificial Sequence
  Description of Artificial Sequence: Synthetic oligonucleotide
guucuggacugcagacccg

SEQ ID NO: 2432242 - RNA, 19 nt, Artificial Sequence
  Description of Artificial Sequence: Synthetic oligonucleotide
gguggaagugacggcggcg

SEQ ID NO: 2432243 - RNA, 19 nt, Artificial Sequence
  Description of Artificial Sequence: Synthetic oligonucleotide
uggcaacgcgugguggaag

SEQ ID NO: 2432244 - RNA, 19 nt, Artificial Sequence
  Description of Artificial Sequence: Synthetic oligonucleotide
cuuggggcgggcgcgcggg

SEQ ID NO: 2432245 - RNA, 19 nt, Artificial Sequence
  Description of Artificial Sequence: Synthetic oligonucleotide
ccccacauggcucggggcg

SEQ ID NO: 2432246 - RNA, 19 nt, Artificial Sequence
  Description of Artificial Sequence: Synthetic oligonucleotide
ucgcggccgaauguaguug

SEQ ID NO: 2432247 - RNA, 19 nt, Artificial Sequence
  Description of Artificial Sequence: Synthetic oligonucleotide
uucguucuuccggcuuucc

SEQ ID NO: 2432248 - RNA, 19 nt, Artificial Sequence
  Description of Artificial Sequence: Synthetic oligonucleotide
gacgacaggcccgggcccc

SEQ ID NO: 2432249 - RNA, 19 nt, Artificial Sequence
  Description of Artificial Sequence: Synthetic oligonucleotide
ugggagcacuucguuccag

SEQ ID NO: 2432250 - RNA, 19 nt, Artificial Sequence
  Description of Artificial Sequence: Synthetic oligonucleotide
uuggggaguucuggacugc

SEQ ID NO: 2432251 - RNA, 19 nt, Artificial Sequence
  Description of Artificial Sequence: Synthetic oligonucleotide
ugagacccggaagucucaa

SEQ ID NO: 2432252 - RNA, 19 nt, Artificial Sequence
  Description of Artificial Sequence: Synthetic oligonucleotide
cugggauggccccgggaug

SEQ ID NO: 2432253 - RNA, 19 nt, Artificial Sequence
  Description of Artificial Sequence: Synthetic oligonucleotide
gaggggcguucguucuucc

SEQ ID NO: 2432254 - RNA, 19 nt, Artificial Sequence
  Description of Artificial Sequence: Synthetic oligonucleotide
ggccgaauguaguugggaa

SEQ ID NO: 2432255 - RNA, 19 nt, Artificial Sequence
  Description of Artificial Sequence: Synthetic oligonucleotide
gguggcaacgcguggugga

SEQ ID NO: 2432256 - RNA, 19 nt, Artificial Sequence
  Description of Artificial Sequence: Synthetic oligonucleotide
ucacgagggguggggccgg

SEQ ID NO: 2432257 - RNA, 19 nt, Artificial Sequence
  Description of Artificial Sequence: Synthetic oligonucleotide
ggagcacuucguuccaguc

SEQ ID NO: 2432258 - RNA, 19 nt, Artificial Sequence
  Description of Artificial Sequence: Synthetic oligonucleotide
cucaucccgggccgcgcgg

SEQ ID NO: 2432259 - RNA, 19 nt, Artificial Sequence
  Description of Artificial Sequence: Synthetic oligonucleotide
gucucaagagaaacuaaau

SEQ ID NO: 2432260 - RNA, 19 nt, Artificial Sequence
  Description of Artificial Sequence: Synthetic oligonucleotide
ugcugaccacgucgucggc

SEQ ID NO: 2432261 - RNA, 19 nt, Artificial Sequence
  Description of Artificial Sequence: Synthetic oligonucleotide
cauggcucggggcgggguc

SEQ ID NO: 2432262 - RNA, 19 nt, Artificial Sequence
  Description of Artificial Sequence: Synthetic oligonucleotide
gggauggcccgugagcuug

SEQ ID NO: 2432263 - RNA, 19 nt, Artificial Sequence
  Description of Artificial Sequence: Synthetic oligonucleotide
gacucgcacaaaacaccca

SEQ ID NO: 2432264 - RNA, 19 nt, Artificial Sequence
  Description of Artificial Sequence: Synthetic oligonucleotide
gauggcccgugagcuuggg

SEQ ID NO: 2432265 - RNA, 19 nt, Artificial Sequence
  Description of Artificial Sequence: Synthetic oligonucleotide
gacugcagacccgggacaa

SEQ ID NO: 2432266 - RNA, 19 nt, Artificial Sequence
  Description of Artificial Sequence: Synthetic oligonucleotide
ccuccucccgaucccaggg

SEQ ID NO: 2432267 - RNA, 19 nt, Artificial Sequence
  Description of Artificial Sequence: Synthetic oligonucleotide
cacccacccgccugggaug

SEQ ID NO: 2432268 - RNA, 19 nt, Artificial Sequence
  Description of Artificial Sequence: Synthetic oligonucleotide
cgcgugguggaagugacgg

SEQ ID NO: 2432269 - RNA, 19 nt, Artificial Sequence
  Description of Artificial Sequence: Synthetic oligonucleotide
acgucgucggcuggcaggu

SEQ ID NO: 2432270 - RNA, 19 nt, Artificial Sequence
  Description of Artificial Sequence: Synthetic oligonucleotide
acccacccgccugggaugg

SEQ ID NO: 2432271 - RNA, 19 nt, Artificial Sequence
  Description of Artificial Sequence: Synthetic oligonucleotide
ccaguccggcaacucaucc

SEQ ID NO: 2432272 - RNA, 19 nt, Artificial Sequence
  Description of Artificial Sequence: Synthetic oligonucleotide
ggccccacauggcucgggg

SEQ ID NO: 2432273 - RNA, 19 nt, Artificial Sequence
  Description of Artificial Sequence: Synthetic oligonucleotide
ggcggcgcgaggaugcggg

SEQ ID NO: 2432274 - RNA, 19 nt, Artificial Sequence
  Description of Artificial Sequence: Synthetic oligonucleotide
gcagccgaggggcggagcc

SEQ ID NO: 2432275 - RNA, 19 nt, Artificial Sequence
  Description of Artificial Sequence: Synthetic oligonucleotide
acugcagacccgggacaag

SEQ ID NO: 2432276 - RNA, 19 nt, Artificial Sequence
  Description of Artificial Sequence: Synthetic oligonucleotide
cccggaagucucaagagaa

SEQ ID NO: 2432277 - RNA, 19 nt, Artificial Sequence
  Description of Artificial Sequence: Synthetic oligonucleotide
uaguugggaaaggggugau

SEQ ID NO: 2432278 - RNA, 19 nt, Artificial Sequence
  Description of Artificial Sequence: Synthetic oligonucleotide
uucuuccggcuuucccggu

SEQ ID NO: 2432279 - RNA, 19 nt, Artificial Sequence
  Description of Artificial Sequence: Synthetic oligonucleotide
gccgaauguaguugggaaa

SEQ ID NO: 2432280 - RNA, 19 nt, Artificial Sequence
  Description of Artificial Sequence: Synthetic oligonucleotide
ggucgaggccccuggagga

SEQ ID NO: 2432281 - RNA, 19 nt, Artificial Sequence
  Description of Artificial Sequence: Synthetic oligonucleotide
gaucccagggugggagcac

SEQ ID NO: 2432282 - RNA, 19 nt, Artificial Sequence
  Description of Artificial Sequence: Synthetic oligonucleotide
ggggaaacaccuccuccuc

SEQ ID NO: 2432283 - RNA, 19 nt, Artificial Sequence
  Description of Artificial Sequence: Synthetic oligonucleotide
agacccgggacaagucuga

SEQ ID NO: 2432284 - RNA, 19 nt, Artificial Sequence
  Description of Artificial Sequence: Synthetic oligonucleotide
cggaagucucaagagaaac

SEQ ID NO: 2432285 - RNA, 19 nt, Artificial Sequence
  Description of Artificial Sequence: Synthetic oligonucleotide
uuccggcuuucccgguuuc

SEQ ID NO: 2432286 - RNA, 19 nt, Artificial Sequence
  Description of Artificial Sequence: Synthetic oligonucleotide
cucggggcggggucacgag

SEQ ID NO: 2432287 - RNA, 19 nt, Artificial Sequence
  Description of Artificial Sequence: Synthetic oligonucleotide
ggagcggacgugagugggg

SEQ ID NO: 2432288 - RNA, 19 nt, Artificial Sequence
  Description of Artificial Sequence: Synthetic oligonucleotide
ggcgcgcccggcuuggggc

SEQ ID NO: 2432289 - RNA, 19 nt, Artificial Sequence
  Description of Artificial Sequence: Synthetic oligonucleotide
ggggcgcaugcaaacacug

SEQ ID NO: 2432290 - RNA, 19 nt, Artificial Sequence
  Description of Artificial Sequence: Synthetic oligonucleotide
uccggcuuucccgguuucu

SEQ ID NO: 2432291 - RNA, 19 nt, Artificial Sequence
  Description of Artificial Sequence: Synthetic oligonucleotide
gggugggagcacuucguuc

SEQ ID NO: 2432292 - RNA, 19 nt, Artificial Sequence
  Description of Artificial Sequence: Synthetic oligonucleotide
acugagggaggaggagcga

SEQ ID NO: 2432293 - RNA, 19 nt, Artificial Sequence
  Description of Artificial Sequence: Synthetic oligonucleotide
cgcggccgaauguaguugg

SEQ ID NO: 2432294 - RNA, 19 nt, Artificial Sequence
  Description of Artificial Sequence: Synthetic oligonucleotide
ggggucacgaggggugggg

SEQ ID NO: 2432295 - RNA, 19 nt, Artificial Sequence
  Description of Artificial Sequence: Synthetic oligonucleotide
gacagacacuucacaagau

SEQ ID NO: 2432296 - RNA, 19 nt, Artificial Sequence
  Description of Artificial Sequence: Synthetic oligonucleotide
gugggagcacuucguucca

SEQ ID NO: 2432297 - RNA, 19 nt, Artificial Sequence
  Description of Artificial Sequence: Synthetic oligonucleotide
acgcgugguggaagugacg

SEQ ID NO: 2432298 - RNA, 19 nt, Artificial Sequence
  Description of Artificial Sequence: Synthetic oligonucleotide
gucgggaugguggcgcgca

SEQ ID NO: 2432299 - RNA, 19 nt, Artificial Sequence
  Description of Artificial Sequence: Synthetic oligonucleotide
aguugggaaaggggugaua

SEQ ID NO: 2432300 - RNA, 19 nt, Artificial Sequence
  Description of Artificial Sequence: Synthetic oligonucleotide
guccggcaacucaucccgg

SEQ ID NO: 2432301 - RNA, 19 nt, Artificial Sequence
  Description of Artificial Sequence: Synthetic oligonucleotide
cgauguaauucuccagcuc

SEQ ID NO: 2432302 - RNA, 19 nt, Artificial Sequence
  Description of Artificial Sequence: Synthetic oligonucleotide
gggguguaaggggacucgc

SEQ ID NO: 2432303 - RNA, 19 nt, Artificial Sequence
  Description of Artificial Sequence: Synthetic oligonucleotide
uccgggaggggcguucguu

SEQ ID NO: 2432304 - RNA, 19 nt, Artificial Sequence
  Description of Artificial Sequence: Synthetic oligonucleotide
cccgggauggcccgugagc

SEQ ID NO: 2432305 - RNA, 19 nt, Artificial Sequence
  Description of Artificial Sequence: Synthetic oligonucleotide
gacccgggacaagucugac

SEQ ID NO: 2432306 - RNA, 19 nt, Artificial Sequence
  Description of Artificial Sequence: Synthetic oligonucleotide
gcgaggaugcggguggcug

SEQ ID NO: 2432307 - RNA, 19 nt, Artificial Sequence
  Description of Artificial Sequence: Synthetic oligonucleotide
caucccgggccgcgcgggg

SEQ ID NO: 2432308 - RNA, 19 nt, Artificial Sequence
  Description of Artificial Sequence: Synthetic oligonucleotide
ccgggccccacauggcucg

SEQ ID NO: 2432309 - RNA, 19 nt, Artificial Sequence
  Description of Artificial Sequence: Synthetic oligonucleotide
guguucgcggccgaaugua

SEQ ID NO: 2432310 - RNA, 19 nt, Artificial Sequence
  Description of Artificial Sequence: Synthetic oligonucleotide
accacgucgucggcuggca

SEQ ID NO: 2432311 - RNA, 19 nt, Artificial Sequence
  Description of Artificial Sequence: Synthetic oligonucleotide
cagccgaggggcggagccg

SEQ ID NO: 2432312 - RNA, 19 nt, Artificial Sequence
  Description of Artificial Sequence: Synthetic oligonucleotide
ggcgugguggcgcgcccgg

SEQ ID NO: 2432313 - RNA, 19 nt, Artificial Sequence
  Description of Artificial Sequence: Synthetic oligonucleotide
guggcgcgcagguggcaac

SEQ ID NO: 2432314 - RNA, 19 nt, Artificial Sequence
  Description of Artificial Sequence: Synthetic oligonucleotide
ggagccggggcgcaugcaa

SEQ ID NO: 2432315 - RNA, 19 nt, Artificial Sequence
  Description of Artificial Sequence: Synthetic oligonucleotide
acauggcucggggcggggu

SEQ ID NO: 2432316 - RNA, 19 nt, Artificial Sequence
  Description of Artificial Sequence: Synthetic oligonucleotide
cccgaucccagggugggag

SEQ ID NO: 2432317 - RNA, 19 nt, Artificial Sequence
  Description of Artificial Sequence: Synthetic oligonucleotide
ugggcuccgggaggggcgu

SEQ ID NO: 2432318 - RNA, 19 nt, Artificial Sequence
  Description of Artificial Sequence: Synthetic oligonucleotide
ggaagugacggcggcgcga

SEQ ID NO: 2432319 - RNA, 19 nt, Artificial Sequence
  Description of Artificial Sequence: Synthetic oligonucleotide
gcgugguggaagugacggc

SEQ ID NO: 2432320 - RNA, 19 nt, Artificial Sequence
  Description of Artificial Sequence: Synthetic oligonucleotide
cggggcggggucacgaggg

SEQ ID NO: 2432321 - RNA, 19 nt, Artificial Sequence
  Description of Artificial Sequence: Synthetic oligonucleotide
cgugcucgauguaauucuc

SEQ ID NO: 2432322 - RNA, 19 nt, Artificial Sequence
  Description of Artificial Sequence: Synthetic oligonucleotide
cacauggcucggggcgggg

SEQ ID NO: 2432323 - RNA, 19 nt, Artificial Sequence
  Description of Artificial Sequence: Synthetic oligonucleotide
cccguugagacccggaagu

SEQ ID NO: 2432324 - RNA, 19 nt, Artificial Sequence
  Description of Artificial Sequence: Synthetic oligonucleotide
cagggugggagcacuucgu

SEQ ID NO: 2432325 - RNA, 19 nt, Artificial Sequence
  Description of Artificial Sequence: Synthetic oligonucleotide
ggggcggggucacgagggg

SEQ ID NO: 2432326 - RNA, 19 nt, Artificial Sequence
  Description of Artificial Sequence: Synthetic oligonucleotide
ccggggcgcaugcaaacac

SEQ ID NO: 2432327 - RNA, 19 nt, Artificial Sequence
  Description of Artificial Sequence: Synthetic oligonucleotide
gacaggcccgggccccaca

SEQ ID NO: 2432328 - RNA, 19 nt, Artificial Sequence
  Description of Artificial Sequence: Synthetic oligonucleotide
gcagacccgggacaagucu

SEQ ID NO: 2432329 - RNA, 19 nt, Artificial Sequence
  Description of Artificial Sequence: Synthetic oligonucleotide
ggcaacgcgugguggaagu

SEQ ID NO: 2432330 - RNA, 19 nt, Artificial Sequence
  Description of Artificial Sequence: Synthetic oligonucleotide
aggaugcggguggcugcag

SEQ ID NO: 2432331 - RNA, 19 nt, Artificial Sequence
  Description of Artificial Sequence: Synthetic oligonucleotide
gguggcgcgcccggcuugg

SEQ ID NO: 2432332 - RNA, 19 nt, Artificial Sequence
  Description of Artificial Sequence: Synthetic oligonucleotide
ucccgaucccaggguggga

SEQ ID NO: 2432333 - RNA, 19 nt, Artificial Sequence
  Description of Artificial Sequence: Synthetic oligonucleotide
ggauggcccgugagcuugg

SEQ ID NO: 2432334 - RNA, 19 nt, Artificial Sequence
  Description of Artificial Sequence: Synthetic oligonucleotide
ggguguaaggggacucgca

SEQ ID NO: 2432335 - RNA, 19 nt, Artificial Sequence
  Description of Artificial Sequence: Synthetic oligonucleotide
acggcggcgcgaggaugcg

SEQ ID NO: 2432336 - RNA, 19 nt, Artificial Sequence
  Description of Artificial Sequence: Synthetic oligonucleotide
guggcaacgcgugguggaa

SEQ ID NO: 2432337 - RNA, 19 nt, Artificial Sequence
  Description of Artificial Sequence: Synthetic oligonucleotide
cggggagcggacgugagug

SEQ ID NO: 2432338 - RNA, 19 nt, Artificial Sequence
  Description of Artificial Sequence: Synthetic oligonucleotide
cccacauggcucggggcgg

SEQ ID NO: 2432339 - RNA, 19 nt, Artificial Sequence
  Description of Artificial Sequence: Synthetic oligonucleotide
guaaggggacucgcacaaa

SEQ ID NO: 2432340 - RNA, 19 nt, Artificial Sequence
  Description of Artificial Sequence: Synthetic oligonucleotide
gcuuggggcgggcgcgcgg

SEQ ID NO: 2432341 - RNA, 19 nt, Artificial Sequence
  Description of Artificial Sequence: Synthetic oligonucleotide
cugcagacccgggacaagu

SEQ ID NO: 2432342 - RNA, 19 nt, Artificial Sequence
  Description of Artificial Sequence: Synthetic oligonucleotide
auccggcgcuccuccgcgu

SEQ ID NO: 2432343 - RNA, 19 nt, Artificial Sequence
  Description of Artificial Sequence: Synthetic oligonucleotide
gggccggucacgggcggcg

SEQ ID NO: 2432344 - RNA, 19 nt, Artificial Sequence
  Description of Artificial Sequence: Synthetic oligonucleotide
gccccacauggcucggggc

SEQ ID NO: 2432345 - RNA, 19 nt, Artificial Sequence
  Description of Artificial Sequence: Synthetic oligonucleotide
gcaacucaucccgggccgc

SEQ ID NO: 2432346 - RNA, 19 nt, Artificial Sequence
  Description of Artificial Sequence: Synthetic oligonucleotide
cccgguuucuccuccaccu

SEQ ID NO: 2432347 - RNA, 19 nt, Artificial Sequence
  Description of Artificial Sequence: Synthetic oligonucleotide
gcggccgaauguaguuggg

SEQ ID NO: 2432348 - RNA, 19 nt, Artificial Sequence
  Description of Artificial Sequence: Synthetic oligonucleotide
gcgcagguggcaacgcgug

SEQ ID NO: 2432349 - RNA, 19 nt, Artificial Sequence
  Description of Artificial Sequence: Synthetic oligonucleotide
guucgcggccgaauguagu

SEQ ID NO: 2432350 - RNA, 19 nt, Artificial Sequence
  Description of Artificial Sequence: Synthetic oligonucleotide
ccgaucccagggugggagc

SEQ ID NO: 2432351 - RNA, 19 nt, Artificial Sequence
  Description of Artificial Sequence: Synthetic oligonucleotide
gggucacgagggguggggc

SEQ ID NO: 2432352 - RNA, 19 nt, Artificial Sequence
  Description of Artificial Sequence: Synthetic oligonucleotide
gcuccgggaggggcguucg

SEQ ID NO: 2432353 - RNA, 19 nt, Artificial Sequence
  Description of Artificial Sequence: Synthetic oligonucleotide
cugcgcgcgccuggccugg

SEQ ID NO: 2432354 - RNA, 19 nt, Artificial Sequence
  Description of Artificial Sequence: Synthetic oligonucleotide
ugguggcgcgcagguggca

SEQ ID NO: 2432355 - RNA, 19 nt, Artificial Sequence
  Description of Artificial Sequence: Synthetic oligonucleotide
gcaacgcgugguggaagug

SEQ ID NO: 2432356 - RNA, 19 nt, Artificial Sequence
  Description of Artificial Sequence: Synthetic oligonucleotide
caggcccgggccccacaug

SEQ ID NO: 2432357 - RNA, 19 nt, Artificial Sequence
  Description of Artificial Sequence: Synthetic oligonucleotide
cacugggcuccgggagggg

SEQ ID NO: 2432358 - RNA, 19 nt, Artificial Sequence
  Description of Artificial Sequence: Synthetic oligonucleotide
gcggggucacgaggggugg

SEQ ID NO: 2432359 - RNA, 19 nt, Artificial Sequence
  Description of Artificial Sequence: Synthetic oligonucleotide
gucugacgacaggcccggg

SEQ ID NO: 2432360 - RNA, 19 nt, Artificial Sequence
  Description of Artificial Sequence: Synthetic oligonucleotide
cugcggggagcggacguga

SEQ ID NO: 2432361 - RNA, 19 nt, Artificial Sequence
  Description of Artificial Sequence: Synthetic oligonucleotide
ccggaagucucaagagaaa

SEQ ID NO: 2432362 - RNA, 19 nt, Artificial Sequence
  Description of Artificial Sequence: Synthetic oligonucleotide
cgggcggcgcagcagcacg

SEQ ID NO: 2432363 - RNA, 19 nt, Artificial Sequence
  Description of Artificial Sequence: Synthetic oligonucleotide
cccggcuuggggcgggcgc

SEQ ID NO: 2432364 - RNA, 19 nt, Artificial Sequence
  Description of Artificial Sequence: Synthetic oligonucleotide
ccgguuucuccuccaccuc

SEQ ID NO: 2432365 - RNA, 19 nt, Artificial Sequence
  Description of Artificial Sequence: Synthetic oligonucleotide
ccggcuuggggcgggcgcg

SEQ ID NO: 2432366 - RNA, 19 nt, Artificial Sequence
  Description of Artificial Sequence: Synthetic oligonucleotide
gcacuucguuccaguccgg

SEQ ID NO: 2432367 - RNA, 19 nt, Artificial Sequence
  Description of Artificial Sequence: Synthetic oligonucleotide
gggcgcaugcaaacacuga

SEQ ID NO: 2432368 - RNA, 19 nt, Artificial Sequence
  Description of Artificial Sequence: Synthetic oligonucleotide
gcugcggggagcggacgug

SEQ ID NO: 2432369 - RNA, 19 nt, Artificial Sequence
  Description of Artificial Sequence: Synthetic oligonucleotide
ccggcuuucccgguuucuc

SEQ ID NO: 2432370 - RNA, 19 nt, Artificial Sequence
  Description of Artificial Sequence: Synthetic oligonucleotide
gcggcacugggcuccggga

SEQ ID NO: 2432371 - RNA, 19 nt, Artificial Sequence
  Description of Artificial Sequence: Synthetic oligonucleotide
ccugcgcgcgccuggccug

SEQ ID NO: 2432372 - RNA, 19 nt, Artificial Sequence
  Description of Artificial Sequence: Synthetic oligonucleotide
ccacccgccugggauggcc

SEQ ID NO: 2432373 - RNA, 19 nt, Artificial Sequence
  Description of Artificial Sequence: Synthetic oligonucleotide
ccgggacaagucugacgac

SEQ ID NO: 2432374 - RNA, 19 nt, Artificial Sequence
  Description of Artificial Sequence: Synthetic oligonucleotide
cuuccggcuuucccgguuu

SEQ ID NO: 2432375 - RNA, 19 nt, Artificial Sequence
  Description of Artificial Sequence: Synthetic oligonucleotide
ggucgggaugguggcgcgc

SEQ ID NO: 2432376 - RNA, 19 nt, Artificial Sequence
  Description of Artificial Sequence: Synthetic oligonucleotide
ccugggauggccccgggau

SEQ ID NO: 2432377 - RNA, 19 nt, Artificial Sequence
  Description of Artificial Sequence: Synthetic oligonucleotide
cugcaguguucgcggccga

SEQ ID NO: 2432378 - RNA, 19 nt, Artificial Sequence
  Description of Artificial Sequence: Synthetic oligonucleotide
ccguugagacccggaaguc

SEQ ID NO: 2432379 - RNA, 19 nt, Artificial Sequence
  Description of Artificial Sequence: Synthetic oligonucleotide
gguggcgcgcagguggcaa

SEQ ID NO: 2432380 - RNA, 19 nt, Artificial Sequence
  Description of Artificial Sequence: Synthetic oligonucleotide
ggaugcggguggcugcagu

SEQ ID NO: 2432381 - RNA, 19 nt, Artificial Sequence
  Description of Artificial Sequence: Synthetic oligonucleotide
ggcggcgcagcagcacgug

SEQ ID NO: 2432382 - RNA, 19 nt, Artificial Sequence
  Description of Artificial Sequence: Synthetic oligonucleotide
ggcggagccggggcgcaug

SEQ ID NO: 2432383 - RNA, 19 nt, Artificial Sequence
  Description of Artificial Sequence: Synthetic oligonucleotide
gcugaccacgucgucggcu

SEQ ID NO: 2432384 - RNA, 19 nt, Artificial Sequence
  Description of Artificial Sequence: Synthetic oligonucleotide
ggggcgugguggcgcgccc

SEQ ID NO: 2432385 - RNA, 19 nt, Artificial Sequence
  Description of Artificial Sequence: Synthetic oligonucleotide
guggcgcgcccggcuuggg

SEQ ID NO: 2432386 - RNA, 19 nt, Artificial Sequence
  Description of Artificial Sequence: Synthetic oligonucleotide
cgcgcgccuggccugggcc

SEQ ID NO: 2432387 - RNA, 19 nt, Artificial Sequence
  Description of Artificial Sequence: Synthetic oligonucleotide
gggccccacauggcucggg

SEQ ID NO: 2432388 - RNA, 19 nt, Artificial Sequence
  Description of Artificial Sequence: Synthetic oligonucleotide
ggcguucguucuuccggcu

SEQ ID NO: 2432389 - RNA, 19 nt, Artificial Sequence
  Description of Artificial Sequence: Synthetic oligonucleotide
ccggucacgggcggcgcag

SEQ ID NO: 2432390 - RNA, 19 nt, Artificial Sequence
  Description of Artificial Sequence: Synthetic oligonucleotide
ccccgggauggcccgugag

SEQ ID NO: 2432391 - RNA, 19 nt, Artificial Sequence
  Description of Artificial Sequence: Synthetic oligonucleotide
gcucggggcggggucacga

SEQ ID NO: 2432392 - RNA, 19 nt, Artificial Sequence
  Description of Artificial Sequence: Synthetic oligonucleotide
cguuccaguccggcaacuc

SEQ ID NO: 2432393 - RNA, 19 nt, Artificial Sequence
  Description of Artificial Sequence: Synthetic oligonucleotide
ggggcggcacugggcuccg

SEQ ID NO: 2432394 - RNA, 19 nt, Artificial Sequence
  Description of Artificial Sequence: Synthetic oligonucleotide
gugguggcgcgcccggcuu

SEQ ID NO: 2432395 - RNA, 19 nt, Artificial Sequence
  Description of Artificial Sequence: Synthetic oligonucleotide
ccgccugggauggccccgg

SEQ ID NO: 2432396 - RNA, 19 nt, Artificial Sequence
  Description of Artificial Sequence: Synthetic oligonucleotide
gcacgugcucgauguaauu

SEQ ID NO: 2432397 - RNA, 19 nt, Artificial Sequence
  Description of Artificial Sequence: Synthetic oligonucleotide
ggcuccgggaggggcguuc

SEQ ID NO: 2432398 - RNA, 19 nt, Artificial Sequence
  Description of Artificial Sequence: Synthetic oligonucleotide
ccgggauggcccgugagcu

SEQ ID NO: 2432399 - RNA, 19 nt, Artificial Sequence
  Description of Artificial Sequence: Synthetic oligonucleotide
uggccccgggauggcccgu

SEQ ID NO: 2432400 - RNA, 19 nt, Artificial Sequence
  Description of Artificial Sequence: Synthetic oligonucleotide
gcaguguucgcggccgaau

SEQ ID NO: 2432401 - RNA, 19 nt, Artificial Sequence
  Description of Artificial Sequence: Synthetic oligonucleotide
gccggucacgggcggcgca

SEQ ID NO: 2432402 - RNA, 19 nt, Artificial Sequence
  Description of Artificial Sequence: Synthetic oligonucleotide
ggcucggggcggggucacg

SEQ ID NO: 2432403 - RNA, 19 nt, Artificial Sequence
  Description of Artificial Sequence: Synthetic oligonucleotide
gcguucguucuuccggcuu

SEQ ID NO: 2432404 - RNA, 19 nt, Artificial Sequence
  Description of Artificial Sequence: Synthetic oligonucleotide
ggccggucacgggcggcgc

SEQ ID NO: 2432405 - RNA, 19 nt, Artificial Sequence
  Description of Artificial Sequence: Synthetic oligonucleotide
ggggccggucacgggcggc

SEQ ID NO: 2432406 - RNA, 19 nt, Artificial Sequence
  Description of Artificial Sequence: Synthetic oligonucleotide
cguugagacccggaagucu

SEQ ID NO: 2432407 - RNA, 19 nt, Artificial Sequence
  Description of Artificial Sequence: Synthetic oligonucleotide
gcgcgaggaugcggguggc

SEQ ID NO: 2432408 - RNA, 19 nt, Artificial Sequence
  Description of Artificial Sequence: Synthetic oligonucleotide
cggccgaauguaguuggga

SEQ ID NO: 2432409 - RNA, 19 nt, Artificial Sequence
  Description of Artificial Sequence: Synthetic oligonucleotide
gcgcgcgccuggccugggc

SEQ ID NO: 2432410 - RNA, 19 nt, Artificial Sequence
  Description of Artificial Sequence: Synthetic oligonucleotide
cggggucacgagggguggg

SEQ ID NO: 2432411 - RNA, 19 nt, Artificial Sequence
  Description of Artificial Sequence: Synthetic oligonucleotide
cguucguucuuccggcuuu

SEQ ID NO: 2432412 - RNA, 19 nt, Artificial Sequence
  Description of Artificial Sequence: Synthetic oligonucleotide
cgugagcuuggggaguucu

SEQ ID NO: 2432413 - RNA, 19 nt, Artificial Sequence
  Description of Artificial Sequence: Synthetic oligonucleotide
gcgugguggcgcgcccggc

SEQ ID NO: 2432414 - RNA, 19 nt, Artificial Sequence
  Description of Artificial Sequence: Synthetic oligonucleotide
cggcgcgaggaugcgggug

SEQ ID NO: 2432415 - RNA, 19 nt, Artificial Sequence
  Description of Artificial Sequence: Synthetic oligonucleotide
cuccgggaggggcguucgu

SEQ ID NO: 2432416 - RNA, 19 nt, Artificial Sequence
  Description of Artificial Sequence: Synthetic oligonucleotide
gccccgggauggcccguga

SEQ ID NO: 2432417 - RNA, 19 nt, Artificial Sequence
  Description of Artificial Sequence: Synthetic oligonucleotide
ccaccucuucgaugaugcu

SEQ ID NO: 2432418 - RNA, 19 nt, Artificial Sequence
  Description of Artificial Sequence: Synthetic oligonucleotide
cggggcgcaugcaaacacu

SEQ ID NO: 2432419 - RNA, 19 nt, Artificial Sequence
  Description of Artificial Sequence: Synthetic oligonucleotide
ccgugagcuuggggaguuc

SEQ ID NO: 2432420 - RNA, 19 nt, Artificial Sequence
  Description of Artificial Sequence: Synthetic oligonucleotide
gcccgugagcuuggggagu

SEQ ID NO: 2432421 - RNA, 19 nt, Artificial Sequence
  Description of Artificial Sequence: Synthetic oligonucleotide
gggcggcacugggcuccgg

SEQ ID NO: 2432422 - RNA, 19 nt, Artificial Sequence
  Description of Artificial Sequence: Synthetic oligonucleotide
cggcggcgcgaggaugcgg

SEQ ID NO: 2432423 - RNA, 19 nt, Artificial Sequence
  Description of Artificial Sequence: Synthetic oligonucleotide
cgugguggcgcgcccggcu

SEQ ID NO: 2432424 - RNA, 19 nt, Artificial Sequence
  Description of Artificial Sequence: Synthetic oligonucleotide
gggcggcgcagcagcacgu

SEQ ID NO: 2432425 - RNA, 19 nt, Artificial Sequence
  Description of Artificial Sequence: Synthetic oligonucleotide
cccacccgccugggauggc

SEQ ID NO: 2432426 - RNA, 19 nt, Artificial Sequence
  Description of Artificial Sequence: Synthetic oligonucleotide
gcggcgcgaggaugcgggu

SEQ ID NO: 2432427 - RNA, 19 nt, Artificial Sequence
  Description of Artificial Sequence: Synthetic oligonucleotide
cgcgcccggcuuggggcgg

SEQ ID NO: 2432428 - RNA, 19 nt, Artificial Sequence
  Description of Artificial Sequence: Synthetic oligonucleotide
cgggccccacauggcucgg

SEQ ID NO: 2432429 - RNA, 19 nt, Artificial Sequence
  Description of Artificial Sequence: Synthetic oligonucleotide
cccgugagcuuggggaguu

SEQ ID NO: 2432430 - RNA, 19 nt, Artificial Sequence
  Description of Artificial Sequence: Synthetic oligonucleotide
cgggauggcccgugagcuu

SEQ ID NO: 2432431 - RNA, 19 nt, Artificial Sequence
  Description of Artificial Sequence: Synthetic oligonucleotide
cgcgaggaugcggguggcu

SEQ ID NO: 2432432 - RNA, 19 nt, Artificial Sequence
  Description of Artificial Sequence: Synthetic oligonucleotide
aaugugcucucccacagcc

SEQ ID NO: 2432433 - RNA, 19 nt, Artificial Sequence
  Description of Artificial Sequence: Synthetic oligonucleotide
aagggauaguucuagggcg

SEQ ID NO: 2432434 - RNA, 19 nt, Artificial Sequence
  Description of Artificial Sequence: Synthetic oligonucleotide
cucguagaagccaagaccg

SEQ ID NO: 2432435 - RNA, 19 nt, Artificial Sequence
  Description of Artificial Sequence: Synthetic oligonucleotide
agaaguuucgggcacauug

SEQ ID NO: 2432436 - RNA, 19 nt, Artificial Sequence
  Description of Artificial Sequence: Synthetic oligonucleotide
gcaaucaugguccagaggg

SEQ ID NO: 2432437 - RNA, 19 nt, Artificial Sequence
  Description of Artificial Sequence: Synthetic oligonucleotide
ucacaggucaguuucauca

SEQ ID NO: 2432438 - RNA, 19 nt, Artificial Sequence
  Description of Artificial Sequence: Synthetic oligonucleotide
caaagcuucaucuucacuc

SEQ ID NO: 2432439 - RNA, 19 nt, Artificial Sequence
  Description of Artificial Sequence: Synthetic oligonucleotide
aaagcgaucacuggagggg

SEQ ID NO: 2432440 - RNA, 19 nt, Artificial Sequence
  Description of Artificial Sequence: Synthetic oligonucleotide
agaugugagggccacaguc

SEQ ID NO: 2432441 - RNA, 19 nt, Artificial Sequence
  Description of Artificial Sequence: Synthetic oligonucleotide
uuugucucugcaauccagg

SEQ ID NO: 2432442 - RNA, 19 nt, Artificial Sequence
  Description of Artificial Sequence: Synthetic oligonucleotide
uauuggugaaaaucuugcg

SEQ ID NO: 2432443 - RNA, 19 nt, Artificial Sequence
  Description of Artificial Sequence: Synthetic oligonucleotide
acacuuauuggugaaaauc

SEQ ID NO: 2432444 - RNA, 19 nt, Artificial Sequence
  Description of Artificial Sequence: Synthetic oligonucleotide
gaagcagaaggcaaggucc

SEQ ID NO: 2432445 - RNA, 19 nt, Artificial Sequence
  Description of Artificial Sequence: Synthetic oligonucleotide
ugugcucucccacagcccg

SEQ ID NO: 2432446 - RNA, 19 nt, Artificial Sequence
  Description of Artificial Sequence: Synthetic oligonucleotide
gaacguucacacuuauugg

SEQ ID NO: 2432447 - RNA, 19 nt, Artificial Sequence
  Description of Artificial Sequence: Synthetic oligonucleotide
auuggugaaaaucuugcgu

SEQ ID NO: 2432448 - RNA, 19 nt, Artificial Sequence
  Description of Artificial Sequence: Synthetic oligonucleotide
cuuauuggugaaaaucuug

SEQ ID NO: 2432449 - RNA, 19 nt, Artificial Sequence
  Description of Artificial Sequence: Synthetic oligonucleotide
caagcuacggcucugcgcc

SEQ ID NO: 2432450 - RNA, 19 nt, Artificial Sequence
  Description of Artificial Sequence: Synthetic oligonucleotide
ugcaaagcgaucacuggag

SEQ ID NO: 2432451 - RNA, 19 nt, Artificial Sequence
  Description of Artificial Sequence: Synthetic oligonucleotide
ucugcaaagcgaucacugg

SEQ ID NO: 2432452 - RNA, 19 nt, Artificial Sequence
  Description of Artificial Sequence: Synthetic oligonucleotide
ucaaugugcucucccacag

SEQ ID NO: 2432453 - RNA, 19 nt, Artificial Sequence
  Description of Artificial Sequence: Synthetic oligonucleotide
uuugguaagcugauccaca

SEQ ID NO: 2432454 - RNA, 19 nt, Artificial Sequence
  Description of Artificial Sequence: Synthetic oligonucleotide
uaccuggauauccuuuugg

SEQ ID NO: 2432455 - RNA, 19 nt, Artificial Sequence
  Description of Artificial Sequence: Synthetic oligonucleotide
ucugcgcagaaaaugccag

SEQ ID NO: 2432456 - RNA, 19 nt, Artificial Sequence
  Description of Artificial Sequence: Synthetic oligonucleotide
uggucugcgcagaaaaugc

SEQ ID NO: 2432457 - RNA, 19 nt, Artificial Sequence
  Description of Artificial Sequence: Synthetic oligonucleotide
ugugccaacgccaagucuu

SEQ ID NO: 2432458 - RNA, 19 nt, Artificial Sequence
  Description of Artificial Sequence: Synthetic oligonucleotide
uuggugaaaaucuugcguu

SEQ ID NO: 2432459 - RNA, 19 nt, Artificial Sequence
  Description of Artificial Sequence: Synthetic oligonucleotide
aguuggacggcuucaagcu

SEQ ID NO: 2432460 - RNA, 19 nt, Artificial Sequence
  Description of Artificial Sequence: Synthetic oligonucleotide
uacccuggagaugugaggg

SEQ ID NO: 2432461 - RNA, 19 nt, Artificial Sequence
  Description of Artificial Sequence: Synthetic oligonucleotide
ugugcucuggagauagcag

SEQ ID NO: 2432462 - RNA, 19 nt, Artificial Sequence
  Description of Artificial Sequence: Synthetic oligonucleotide
aaugggauguggcucugcu

SEQ ID NO: 2432463 - RNA, 19 nt, Artificial Sequence
  Description of Artificial Sequence: Synthetic oligonucleotide
guuucgggcacauugguca

SEQ ID NO: 2432464 - RNA, 19 nt, Artificial Sequence
  Description of Artificial Sequence: Synthetic oligonucleotide
ucugucaaugugcucuccc

SEQ ID NO: 2432465 - RNA, 19 nt, Artificial Sequence
  Description of Artificial Sequence: Synthetic oligonucleotide
cugggcguaggccacaugg

SEQ ID NO: 2432466 - RNA, 19 nt, Artificial Sequence
  Description of Artificial Sequence: Synthetic oligonucleotide
uggauauccuuuugguaag

SEQ ID NO: 2432467 - RNA, 19 nt, Artificial Sequence
  Description of Artificial Sequence: Synthetic oligonucleotide
caaagcgaucacuggaggg

SEQ ID NO: 2432468 - RNA, 19 nt, Artificial Sequence
  Description of Artificial Sequence: Synthetic oligonucleotide
cuccccagugcaaucaugg

SEQ ID NO: 2432469 - RNA, 19 nt, Artificial Sequence
  Description of Artificial Sequence: Synthetic oligonucleotide
uaagcugauccacagugau

SEQ ID NO: 2432470 - RNA, 19 nt, Artificial Sequence
  Description of Artificial Sequence: Synthetic oligonucleotide
auauccuuuugguaagcug

SEQ ID NO: 2432471 - RNA, 19 nt, Artificial Sequence
  Description of Artificial Sequence: Synthetic oligonucleotide
ugguacucugccucgcugg

SEQ ID NO: 2432472 - RNA, 19 nt, Artificial Sequence
  Description of Artificial Sequence: Synthetic oligonucleotide
cuugaugcagaaguuucgg

SEQ ID NO: 2432473 - RNA, 19 nt, Artificial Sequence
  Description of Artificial Sequence: Synthetic oligonucleotide
uguccgggucggaaaaugg

SEQ ID NO: 2432474 - RNA, 19 nt, Artificial Sequence
  Description of Artificial Sequence: Synthetic oligonucleotide
cuucacucaagccauucug

SEQ ID NO: 2432475 - RNA, 19 nt, Artificial Sequence
  Description of Artificial Sequence: Synthetic oligonucleotide
caguuggacggcuucaagc

SEQ ID NO: 2432476 - RNA, 19 nt, Artificial Sequence
  Description of Artificial Sequence: Synthetic oligonucleotide
ugcaaucaugguccagagg

SEQ ID NO: 2432477 - RNA, 19 nt, Artificial Sequence
  Description of Artificial Sequence: Synthetic oligonucleotide
caagguccgacuuggacug

SEQ ID NO: 2432478 - RNA, 19 nt, Artificial Sequence
  Description of Artificial Sequence: Synthetic oligonucleotide
uuuugguaagcugauccac

SEQ ID NO: 2432479 - RNA, 19 nt, Artificial Sequence
  Description of Artificial Sequence: Synthetic oligonucleotide
uccuguuugucucugcaau

SEQ ID NO: 2432480 - RNA, 19 nt, Artificial Sequence
  Description of Artificial Sequence: Synthetic oligonucleotide
agaagccaagaccgugugc

SEQ ID NO: 2432481 - RNA, 19 nt, Artificial Sequence
  Description of Artificial Sequence: Synthetic oligonucleotide
uuggacuggggacagugcu

SEQ ID NO: 2432482 - RNA, 19 nt, Artificial Sequence
  Description of Artificial Sequence: Synthetic oligonucleotide
ucaagcuacggcucugcgc

SEQ ID NO: 2432483 - RNA, 19 nt, Artificial Sequence
  Description of Artificial Sequence: Synthetic oligonucleotide
uuggacggcuucaagcuac

SEQ ID NO: 2432484 - RNA, 19 nt, Artificial Sequence
  Description of Artificial Sequence: Synthetic oligonucleotide
uagcagcuagcccugcccg

SEQ ID NO: 2432485 - RNA, 19 nt, Artificial Sequence
  Description of Artificial Sequence: Synthetic oligonucleotide
aacgccaagucuucuuccu

SEQ ID NO: 2432486 - RNA, 19 nt, Artificial Sequence
  Description of Artificial Sequence: Synthetic oligonucleotide
gacggcuucaagcuacggc

SEQ ID NO: 2432487 - RNA, 19 nt, Artificial Sequence
  Description of Artificial Sequence: Synthetic oligonucleotide
agagcgacagucucuguca

SEQ ID NO: 2432488 - RNA, 19 nt, Artificial Sequence
  Description of Artificial Sequence: Synthetic oligonucleotide
aauccaggcuucucugugu

SEQ ID NO: 2432489 - RNA, 19 nt, Artificial Sequence
  Description of Artificial Sequence: Synthetic oligonucleotide
ucuagggcgcguugcaaag

SEQ ID NO: 2432490 - RNA, 19 nt, Artificial Sequence
  Description of Artificial Sequence: Synthetic oligonucleotide
ugcaagggauaguucuagg

SEQ ID NO: 2432491 - RNA, 19 nt, Artificial Sequence
  Description of Artificial Sequence: Synthetic oligonucleotide
ucuggagauagcagcuagc

SEQ ID NO: 2432492 - RNA, 19 nt, Artificial Sequence
  Description of Artificial Sequence: Synthetic oligonucleotide
ugucaaugugcucucccac

SEQ ID NO: 2432493 - RNA, 19 nt, Artificial Sequence
  Description of Artificial Sequence: Synthetic oligonucleotide
uucaagcuacggcucugcg

SEQ ID NO: 2432494 - RNA, 19 nt, Artificial Sequence
  Description of Artificial Sequence: Synthetic oligonucleotide
cccagugcaaucauggucc

SEQ ID NO: 2432495 - RNA, 19 nt, Artificial Sequence
  Description of Artificial Sequence: Synthetic oligonucleotide
agugcaaucaugguccaga

SEQ ID NO: 2432496 - RNA, 19 nt, Artificial Sequence
  Description of Artificial Sequence: Synthetic oligonucleotide
uggagauagcagcuagccc

SEQ ID NO: 2432497 - RNA, 19 nt, Artificial Sequence
  Description of Artificial Sequence: Synthetic oligonucleotide
cuguuugucucugcaaucc

SEQ ID NO: 2432498 - RNA, 19 nt, Artificial Sequence
  Description of Artificial Sequence: Synthetic oligonucleotide
acauggucugcgcagaaaa

SEQ ID NO: 2432499 - RNA, 19 nt, Artificial Sequence
  Description of Artificial Sequence: Synthetic oligonucleotide
cuggagauagcagcuagcc

SEQ ID NO: 2432500 - RNA, 19 nt, Artificial Sequence
  Description of Artificial Sequence: Synthetic oligonucleotide
augcagaaguuucgggcac

SEQ ID NO: 2432501 - RNA, 19 nt, Artificial Sequence
  Description of Artificial Sequence: Synthetic oligonucleotide
ugcucguagaagccaagac

SEQ ID NO: 2432502 - RNA, 19 nt, Artificial Sequence
  Description of Artificial Sequence: Synthetic oligonucleotide
uugucucugcaauccaggc

SEQ ID NO: 2432503 - RNA, 19 nt, Artificial Sequence
  Description of Artificial Sequence: Synthetic oligonucleotide
uguuugucucugcaaucca

SEQ ID NO: 2432504 - RNA, 19 nt, Artificial Sequence
  Description of Artificial Sequence: Synthetic oligonucleotide
uccgggucggaaaauggga

SEQ ID NO: 2432505 - RNA, 19 nt, Artificial Sequence
  Description of Artificial Sequence: Synthetic oligonucleotide
gaaggcaagguccgacuug

SEQ ID NO: 2432506 - RNA, 19 nt, Artificial Sequence
  Description of Artificial Sequence: Synthetic oligonucleotide
guuuccuuucccuggguac

SEQ ID NO: 2432507 - RNA, 19 nt, Artificial Sequence
  Description of Artificial Sequence: Synthetic oligonucleotide
agggauaguucuagggcgc

SEQ ID NO: 2432508 - RNA, 19 nt, Artificial Sequence
  Description of Artificial Sequence: Synthetic oligonucleotide
agccagaacguucacacuu

SEQ ID NO: 2432509 - RNA, 19 nt, Artificial Sequence
  Description of Artificial Sequence: Synthetic oligonucleotide
gcucguagaagccaagacc

SEQ ID NO: 2432510 - RNA, 19 nt, Artificial Sequence
  Description of Artificial Sequence: Synthetic oligonucleotide
uccgacuuggacuggggac

SEQ ID NO: 2432511 - RNA, 19 nt, Artificial Sequence
  Description of Artificial Sequence: Synthetic oligonucleotide
ugggguuuagcuucugcaa

SEQ ID NO: 2432512 - RNA, 19 nt, Artificial Sequence
  Description of Artificial Sequence: Synthetic oligonucleotide
uuccuccugagaacuuggg

SEQ ID NO: 2432513 - RNA, 19 nt, Artificial Sequence
  Description of Artificial Sequence: Synthetic oligonucleotide
ggagauagcagcuagcccu

SEQ ID NO: 2432514 - RNA, 19 nt, Artificial Sequence
  Description of Artificial Sequence: Synthetic oligonucleotide
ggacagugcucguagaagc

SEQ ID NO: 2432515 - RNA, 19 nt, Artificial Sequence
  Description of Artificial Sequence: Synthetic oligonucleotide
aucaugguccagagggugc

SEQ ID NO: 2432516 - RNA, 19 nt, Artificial Sequence
  Description of Artificial Sequence: Synthetic oligonucleotide
gucggaaaaugggaugugg

SEQ ID NO: 2432517 - RNA, 19 nt, Artificial Sequence
  Description of Artificial Sequence: Synthetic oligonucleotide
guacccuggagaugugagg

SEQ ID NO: 2432518 - RNA, 19 nt, Artificial Sequence
  Description of Artificial Sequence: Synthetic oligonucleotide
auggucugcgcagaaaaug

SEQ ID NO: 2432519 - RNA, 19 nt, Artificial Sequence
  Description of Artificial Sequence: Synthetic oligonucleotide
cucgcuggcugacagugcc

SEQ ID NO: 2432520 - RNA, 19 nt, Artificial Sequence
  Description of Artificial Sequence: Synthetic oligonucleotide
ucaggugagccucccuccc

SEQ ID NO: 2432521 - RNA, 19 nt, Artificial Sequence
  Description of Artificial Sequence: Synthetic oligonucleotide
gaagccaagaccgugugcu

SEQ ID NO: 2432522 - RNA, 19 nt, Artificial Sequence
  Description of Artificial Sequence: Synthetic oligonucleotide
ggucaguuucaucaucucc

SEQ ID NO: 2432523 - RNA, 19 nt, Artificial Sequence
  Description of Artificial Sequence: Synthetic oligonucleotide
uguuuccuuucccugggua

SEQ ID NO: 2432524 - RNA, 19 nt, Artificial Sequence
  Description of Artificial Sequence: Synthetic oligonucleotide
guuugucucugcaauccag

SEQ ID NO: 2432525 - RNA, 19 nt, Artificial Sequence
  Description of Artificial Sequence: Synthetic oligonucleotide
uagggcgcguugcaaagcu

SEQ ID NO: 2432526 - RNA, 19 nt, Artificial Sequence
  Description of Artificial Sequence: Synthetic oligonucleotide
aucagagcgacagucucug

SEQ ID NO: 2432527 - RNA, 19 nt, Artificial Sequence
  Description of Artificial Sequence: Synthetic oligonucleotide
agaccgugugcucuggaga

SEQ ID NO: 2432528 - RNA, 19 nt, Artificial Sequence
  Description of Artificial Sequence: Synthetic oligonucleotide
cucaggugagccucccucc

SEQ ID NO: 2432529 - RNA, 19 nt, Artificial Sequence
  Description of Artificial Sequence: Synthetic oligonucleotide
cacaugacccuccccagug

SEQ ID NO: 2432530 - RNA, 19 nt, Artificial Sequence
  Description of Artificial Sequence: Synthetic oligonucleotide
ucaugguccagagggugcc

SEQ ID NO: 2432531 - RNA, 19 nt, Artificial Sequence
  Description of Artificial Sequence: Synthetic oligonucleotide
gacagugcucguagaagcc

SEQ ID NO: 2432532 - RNA, 19 nt, Artificial Sequence
  Description of Artificial Sequence: Synthetic oligonucleotide
auaguucuagggcgcguug

SEQ ID NO: 2432533 - RNA, 19 nt, Artificial Sequence
  Description of Artificial Sequence: Synthetic oligonucleotide
gggguuuagcuucugcaag

SEQ ID NO: 2432534 - RNA, 19 nt, Artificial Sequence
  Description of Artificial Sequence: Synthetic oligonucleotide
uggacggcuucaagcuacg

SEQ ID NO: 2432535 - RNA, 19 nt, Artificial Sequence
  Description of Artificial Sequence: Synthetic oligonucleotide
cuggggacagugcucguag

SEQ ID NO: 2432536 - RNA, 19 nt, Artificial Sequence
  Description of Artificial Sequence: Synthetic oligonucleotide
cucaagccauucugcaaag

SEQ ID NO: 2432537 - RNA, 19 nt, Artificial Sequence
  Description of Artificial Sequence: Synthetic oligonucleotide
uucacuccuguuugucucu

SEQ ID NO: 2432538 - RNA, 19 nt, Artificial Sequence
  Description of Artificial Sequence: Synthetic oligonucleotide
ucacaugacccuccccagu

SEQ ID NO: 2432539 - RNA, 19 nt, Artificial Sequence
  Description of Artificial Sequence: Synthetic oligonucleotide
gugcaaucaugguccagag

SEQ ID NO: 2432540 - RNA, 19 nt, Artificial Sequence
  Description of Artificial Sequence: Synthetic oligonucleotide
auccacagugaugcugggc

SEQ ID NO: 2432541 - RNA, 19 nt, Artificial Sequence
  Description of Artificial Sequence: Synthetic oligonucleotide
uggugaaaaucuugcguuu

SEQ ID NO: 2432542 - RNA, 19 nt, Artificial Sequence
  Description of Artificial Sequence: Synthetic oligonucleotide
cugggguuuagcuucugca

SEQ ID NO: 2432543 - RNA, 19 nt, Artificial Sequence
  Description of Artificial Sequence: Synthetic oligonucleotide
ggaaaaugggauguggcuc

SEQ ID NO: 2432544 - RNA, 19 nt, Artificial Sequence
  Description of Artificial Sequence: Synthetic oligonucleotide
cagagcgacagucucuguc

SEQ ID NO: 2432545 - RNA, 19 nt, Artificial Sequence
  Description of Artificial Sequence: Synthetic oligonucleotide
uucccuggguacccuggag

SEQ ID NO: 2432546 - RNA, 19 nt, Artificial Sequence
  Description of Artificial Sequence: Synthetic oligonucleotide
gcaaagcgaucacuggagg

SEQ ID NO: 2432547 - RNA, 19 nt, Artificial Sequence
  Description of Artificial Sequence: Synthetic oligonucleotide
uuugcugcgcgggaucaga

SEQ ID NO: 2432548 - RNA, 19 nt, Artificial Sequence
  Description of Artificial Sequence: Synthetic oligonucleotide
agcagcuagcccugcccgg

SEQ ID NO: 2432549 - RNA, 19 nt, Artificial Sequence
  Description of Artificial Sequence: Synthetic oligonucleotide
aaaaugggauguggcucug

SEQ ID NO: 2432550 - RNA, 19 nt, Artificial Sequence
  Description of Artificial Sequence: Synthetic oligonucleotide
aagcgaucacuggagggga

SEQ ID NO: 2432551 - RNA, 19 nt, Artificial Sequence
  Description of Artificial Sequence: Synthetic oligonucleotide
aagcugauccacagugaug

SEQ ID NO: 2432552 - RNA, 19 nt, Artificial Sequence
  Description of Artificial Sequence: Synthetic oligonucleotide
uugcugcgcgggaucagag

SEQ ID NO: 2432553 - RNA, 19 nt, Artificial Sequence
  Description of Artificial Sequence: Synthetic oligonucleotide
acguucacacuuauuggug

SEQ ID NO: 2432554 - RNA, 19 nt, Artificial Sequence
  Description of Artificial Sequence: Synthetic oligonucleotide
ucguagaagccaagaccgu

SEQ ID NO: 2432555 - RNA, 19 nt, Artificial Sequence
  Description of Artificial Sequence: Synthetic oligonucleotide
uuucgggcacauuggucac

SEQ ID NO: 2432556 - RNA, 19 nt, Artificial Sequence
  Description of Artificial Sequence: Synthetic oligonucleotide
uggccaccggcacaggcac

SEQ ID NO: 2432557 - RNA, 19 nt, Artificial Sequence
  Description of Artificial Sequence: Synthetic oligonucleotide
agaaggcaagguccgacuu

SEQ ID NO: 2432558 - RNA, 19 nt, Artificial Sequence
  Description of Artificial Sequence: Synthetic oligonucleotide
guaccuggauauccuuuug

SEQ ID NO: 2432559 - RNA, 19 nt, Artificial Sequence
  Description of Artificial Sequence: Synthetic oligonucleotide
guccgggucggaaaauggg

SEQ ID NO: 2432560 - RNA, 19 nt, Artificial Sequence
  Description of Artificial Sequence: Synthetic oligonucleotide
gcuugaugcagaaguuucg

SEQ ID NO: 2432561 - RNA, 19 nt, Artificial Sequence
  Description of Artificial Sequence: Synthetic oligonucleotide
augggauguggcucugcug

SEQ ID NO: 2432562 - RNA, 19 nt, Artificial Sequence
  Description of Artificial Sequence: Synthetic oligonucleotide
cuucaagcuacggcucugc

SEQ ID NO: 2432563 - RNA, 19 nt, Artificial Sequence
  Description of Artificial Sequence: Synthetic oligonucleotide
ugggcguaggccacauggu

SEQ ID NO: 2432564 - RNA, 19 nt, Artificial Sequence
  Description of Artificial Sequence: Synthetic oligonucleotide
uguugguacucugccucgc

SEQ ID NO: 2432565 - RNA, 19 nt, Artificial Sequence
  Description of Artificial Sequence: Synthetic oligonucleotide
auucugcaaagcgaucacu

SEQ ID NO: 2432566 - RNA, 19 nt, Artificial Sequence
  Description of Artificial Sequence: Synthetic oligonucleotide
ucccucugccggcagccag

SEQ ID NO: 2432567 - RNA, 19 nt, Artificial Sequence
  Description of Artificial Sequence: Synthetic oligonucleotide
caaugugcucucccacagc

SEQ ID NO: 2432568 - RNA, 19 nt, Artificial Sequence
  Description of Artificial Sequence: Synthetic oligonucleotide
acuuauuggugaaaaucuu

SEQ ID NO: 2432569 - RNA, 19 nt, Artificial Sequence
  Description of Artificial Sequence: Synthetic oligonucleotide
acagugcucguagaagcca

SEQ ID NO: 2432570 - RNA, 19 nt, Artificial Sequence
  Description of Artificial Sequence: Synthetic oligonucleotide
accggcacaggcacauuac

SEQ ID NO: 2432571 - RNA, 19 nt, Artificial Sequence
  Description of Artificial Sequence: Synthetic oligonucleotide
cacaguccucaggugagcc

SEQ ID NO: 2432572 - RNA, 19 nt, Artificial Sequence
  Description of Artificial Sequence: Synthetic oligonucleotide
acagguaccuggauauccu

SEQ ID NO: 2432573 - RNA, 19 nt, Artificial Sequence
  Description of Artificial Sequence: Synthetic oligonucleotide
acauuggucacaggucagu

SEQ ID NO: 2432574 - RNA, 19 nt, Artificial Sequence
  Description of Artificial Sequence: Synthetic oligonucleotide
ugcugcgcgggaucagagc

SEQ ID NO: 2432575 - RNA, 19 nt, Artificial Sequence
  Description of Artificial Sequence: Synthetic oligonucleotide
gguacccuggagaugugag

SEQ ID NO: 2432576 - RNA, 19 nt, Artificial Sequence
  Description of Artificial Sequence: Synthetic oligonucleotide
ggaucagagcgacagucuc

SEQ ID NO: 2432577 - RNA, 19 nt, Artificial Sequence
  Description of Artificial Sequence: Synthetic oligonucleotide
gcgacagucucugucaaug

SEQ ID NO: 2432578 - RNA, 19 nt, Artificial Sequence
  Description of Artificial Sequence: Synthetic oligonucleotide
ugcagaaguuucgggcaca

SEQ ID NO: 2432579 - RNA, 19 nt, Artificial Sequence
  Description of Artificial Sequence: Synthetic oligonucleotide
uuuugcugcgcgggaucag

SEQ ID NO: 2432580 - RNA, 19 nt, Artificial Sequence
  Description of Artificial Sequence: Synthetic oligonucleotide
uacggcucugcgccugcug

SEQ ID NO: 2432581 - RNA, 19 nt, Artificial Sequence
  Description of Artificial Sequence: Synthetic oligonucleotide
auguccgggucggaaaaug

SEQ ID NO: 2432582 - RNA, 19 nt, Artificial Sequence
  Description of Artificial Sequence: Synthetic oligonucleotide
guaagcugauccacaguga

SEQ ID NO: 2432583 - RNA, 19 nt, Artificial Sequence
  Description of Artificial Sequence: Synthetic oligonucleotide
gugugcucuggagauagca

SEQ ID NO: 2432584 - RNA, 19 nt, Artificial Sequence
  Description of Artificial Sequence: Synthetic oligonucleotide
agcccugcccggcugguca

SEQ ID NO: 2432585 - RNA, 19 nt, Artificial Sequence
  Description of Artificial Sequence: Synthetic oligonucleotide
uccccagugcaaucauggu

SEQ ID NO: 2432586 - RNA, 19 nt, Artificial Sequence
  Description of Artificial Sequence: Synthetic oligonucleotide
gauauccuuuugguaagcu

SEQ ID NO: 2432587 - RNA, 19 nt, Artificial Sequence
  Description of Artificial Sequence: Synthetic oligonucleotide
ggcaagguccgacuuggac

SEQ ID NO: 2432588 - RNA, 19 nt, Artificial Sequence
  Description of Artificial Sequence: Synthetic oligonucleotide
gugaugcugggcguaggcc

SEQ ID NO: 2432589 - RNA, 19 nt, Artificial Sequence
  Description of Artificial Sequence: Synthetic oligonucleotide
agguccgacuuggacuggg

SEQ ID NO: 2432590 - RNA, 19 nt, Artificial Sequence
  Description of Artificial Sequence: Synthetic oligonucleotide
agccaagaccgugugcucu

SEQ ID NO: 2432591 - RNA, 19 nt, Artificial Sequence
  Description of Artificial Sequence: Synthetic oligonucleotide
cagugccugugccaacgcc

SEQ ID NO: 2432592 - RNA, 19 nt, Artificial Sequence
  Description of Artificial Sequence: Synthetic oligonucleotide
gcaagguccgacuuggacu

SEQ ID NO: 2432593 - RNA, 19 nt, Artificial Sequence
  Description of Artificial Sequence: Synthetic oligonucleotide
gucacaggucaguuucauc

SEQ ID NO: 2432594 - RNA, 19 nt, Artificial Sequence
  Description of Artificial Sequence: Synthetic oligonucleotide
caugacccuccccagugca

SEQ ID NO: 2432595 - RNA, 19 nt, Artificial Sequence
  Description of Artificial Sequence: Synthetic oligonucleotide
ugcgcgggaucagagcgac

SEQ ID NO: 2432596 - RNA, 19 nt, Artificial Sequence
  Description of Artificial Sequence: Synthetic oligonucleotide
ggaggcuccccucuggcca

SEQ ID NO: 2432597 - RNA, 19 nt, Artificial Sequence
  Description of Artificial Sequence: Synthetic oligonucleotide
gacccuagcacaggcugca

SEQ ID NO: 2432598 - RNA, 19 nt, Artificial Sequence
  Description of Artificial Sequence: Synthetic oligonucleotide
cuagggcgcguugcaaagc

SEQ ID NO: 2432599 - RNA, 19 nt, Artificial Sequence
  Description of Artificial Sequence: Synthetic oligonucleotide
cacuucacuccuguuuguc

SEQ ID NO: 2432600 - RNA, 19 nt, Artificial Sequence
  Description of Artificial Sequence: Synthetic oligonucleotide
uggggacagugcucguaga

SEQ ID NO: 2432601 - RNA, 19 nt, Artificial Sequence
  Description of Artificial Sequence: Synthetic oligonucleotide
ugacccuccccagugcaau

SEQ ID NO: 2432602 - RNA, 19 nt, Artificial Sequence
  Description of Artificial Sequence: Synthetic oligonucleotide
aagguccgacuuggacugg

SEQ ID NO: 2432603 - RNA, 19 nt, Artificial Sequence
  Description of Artificial Sequence: Synthetic oligonucleotide
guagaagccaagaccgugu

SEQ ID NO: 2432604 - RNA, 19 nt, Artificial Sequence
  Description of Artificial Sequence: Synthetic oligonucleotide
cuggguacccuggagaugu

SEQ ID NO: 2432605 - RNA, 19 nt, Artificial Sequence
  Description of Artificial Sequence: Synthetic oligonucleotide
uccuuuugguaagcugauc

SEQ ID NO: 2432606 - RNA, 19 nt, Artificial Sequence
  Description of Artificial Sequence: Synthetic oligonucleotide
gucaggaggcuccccucug

SEQ ID NO: 2432607 - RNA, 19 nt, Artificial Sequence
  Description of Artificial Sequence: Synthetic oligonucleotide
gggugccggugcuugaugc

SEQ ID NO: 2432608 - RNA, 19 nt, Artificial Sequence
  Description of Artificial Sequence: Synthetic oligonucleotide
ucugcgccugcugcuguug

SEQ ID NO: 2432609 - RNA, 19 nt, Artificial Sequence
  Description of Artificial Sequence: Synthetic oligonucleotide
gaccgugugcucuggagau

SEQ ID NO: 2432610 - RNA, 19 nt, Artificial Sequence
  Description of Artificial Sequence: Synthetic oligonucleotide
gggcacauuggucacaggu

SEQ ID NO: 2432611 - RNA, 19 nt, Artificial Sequence
  Description of Artificial Sequence: Synthetic oligonucleotide
gcguaggccacauggucug

SEQ ID NO: 2432612 - RNA, 19 nt, Artificial Sequence
  Description of Artificial Sequence: Synthetic oligonucleotide
aagcuacggcucugcgccu

SEQ ID NO: 2432613 - RNA, 19 nt, Artificial Sequence
  Description of Artificial Sequence: Synthetic oligonucleotide
gggauaguucuagggcgcg

SEQ ID NO: 2432614 - RNA, 19 nt, Artificial Sequence
  Description of Artificial Sequence: Synthetic oligonucleotide
cugcgccugcugcuguugg

SEQ ID NO: 2432615 - RNA, 19 nt, Artificial Sequence
  Description of Artificial Sequence: Synthetic oligonucleotide
gaggcuccccucuggccac

SEQ ID NO: 2432616 - RNA, 19 nt, Artificial Sequence
  Description of Artificial Sequence: Synthetic oligonucleotide
agggugccggugcuugaug

SEQ ID NO: 2432617 - RNA, 19 nt, Artificial Sequence
  Description of Artificial Sequence: Synthetic oligonucleotide
cuugggaccugggguuuag

SEQ ID NO: 2432618 - RNA, 19 nt, Artificial Sequence
  Description of Artificial Sequence: Synthetic oligonucleotide
ugagggccacaguccucag

SEQ ID NO: 2432619 - RNA, 19 nt, Artificial Sequence
  Description of Artificial Sequence: Synthetic oligonucleotide
gaucagagcgacagucucu

SEQ ID NO: 2432620 - RNA, 19 nt, Artificial Sequence
  Description of Artificial Sequence: Synthetic oligonucleotide
ucagagcgacagucucugu

SEQ ID NO: 2432621 - RNA, 19 nt, Artificial Sequence
  Description of Artificial Sequence: Synthetic oligonucleotide
ggucugcgcagaaaaugcc

SEQ ID NO: 2432622 - RNA, 19 nt, Artificial Sequence
  Description of Artificial Sequence: Synthetic oligonucleotide
guccgacuuggacugggga

SEQ ID NO: 2432623 - RNA, 19 nt, Artificial Sequence
  Description of Artificial Sequence: Synthetic oligonucleotide
caugguccagagggugccg

SEQ ID NO: 2432624 - RNA, 19 nt, Artificial Sequence
  Description of Artificial Sequence: Synthetic oligonucleotide
ggauauccuuuugguaagc

SEQ ID NO: 2432625 - RNA, 19 nt, Artificial Sequence
  Description of Artificial Sequence: Synthetic oligonucleotide
gcgcagaaaaugccagagc

SEQ ID NO: 2432626 - RNA, 19 nt, Artificial Sequence
  Description of Artificial Sequence: Synthetic oligonucleotide
ucgcuggcugacagugccu

SEQ ID NO: 2432627 - RNA, 19 nt, Artificial Sequence
  Description of Artificial Sequence: Synthetic oligonucleotide
ccaacgccaagucuucuuc

SEQ ID NO: 2432628 - RNA, 19 nt, Artificial Sequence
  Description of Artificial Sequence: Synthetic oligonucleotide
cauggagucuccuccacuu

SEQ ID NO: 2432629 - RNA, 19 nt, Artificial Sequence
  Description of Artificial Sequence: Synthetic oligonucleotide
agcgacagucucugucaau

SEQ ID NO: 2432630 - RNA, 19 nt, Artificial Sequence
  Description of Artificial Sequence: Synthetic oligonucleotide
uucgggcacauuggucaca

SEQ ID NO: 2432631 - RNA, 19 nt, Artificial Sequence
  Description of Artificial Sequence: Synthetic oligonucleotide
ugcgccugcugcuguuggu

SEQ ID NO: 2432632 - RNA, 19 nt, Artificial Sequence
  Description of Artificial Sequence: Synthetic oligonucleotide
gagcgacagucucugucaa

SEQ ID NO: 2432633 - RNA, 19 nt, Artificial Sequence
  Description of Artificial Sequence: Synthetic oligonucleotide
ugcucucccacagcccggu

SEQ ID NO: 2432634 - RNA, 19 nt, Artificial Sequence
  Description of Artificial Sequence: Synthetic oligonucleotide
gauaguucuagggcgcguu

SEQ ID NO: 2432635 - RNA, 19 nt, Artificial Sequence
  Description of Artificial Sequence: Synthetic oligonucleotide
cagugcucguagaagccaa

SEQ ID NO: 2432636 - RNA, 19 nt, Artificial Sequence
  Description of Artificial Sequence: Synthetic oligonucleotide
guuggacggcuucaagcua

SEQ ID NO: 2432637 - RNA, 19 nt, Artificial Sequence
  Description of Artificial Sequence: Synthetic oligonucleotide
gcugcaguuggacggcuuc

SEQ ID NO: 2432638 - RNA, 19 nt, Artificial Sequence
  Description of Artificial Sequence: Synthetic oligonucleotide
gccaagaccgugugcucug

SEQ ID NO: 2432639 - RNA, 19 nt, Artificial Sequence
  Description of Artificial Sequence: Synthetic oligonucleotide
uggguacccuggagaugug

SEQ ID NO: 2432640 - RNA, 19 nt, Artificial Sequence
  Description of Artificial Sequence: Synthetic oligonucleotide
ccucaggugagccucccuc

SEQ ID NO: 2432641 - RNA, 19 nt, Artificial Sequence
  Description of Artificial Sequence: Synthetic oligonucleotide
ggauguccgggucggaaaa

SEQ ID NO: 2432642 - RNA, 19 nt, Artificial Sequence
  Description of Artificial Sequence: Synthetic oligonucleotide
agguaccuggauauccuuu

SEQ ID NO: 2432643 - RNA, 19 nt, Artificial Sequence
  Description of Artificial Sequence: Synthetic oligonucleotide
caaucaugguccagagggu

SEQ ID NO: 2432644 - RNA, 19 nt, Artificial Sequence
  Description of Artificial Sequence: Synthetic oligonucleotide
gggcguaggccacaugguc

SEQ ID NO: 2432645 - RNA, 19 nt, Artificial Sequence
  Description of Artificial Sequence: Synthetic oligonucleotide
gacccuccccagugcaauc

SEQ ID NO: 2432646 - RNA, 19 nt, Artificial Sequence
  Description of Artificial Sequence: Synthetic oligonucleotide
gcagaaggcaagguccgac

SEQ ID NO: 2432647 - RNA, 19 nt, Artificial Sequence
  Description of Artificial Sequence: Synthetic oligonucleotide
gccucgcuggcugacagug

SEQ ID NO: 2432648 - RNA, 19 nt, Artificial Sequence
  Description of Artificial Sequence: Synthetic oligonucleotide
agcuacggcucugcgccug

SEQ ID NO: 2432649 - RNA, 19 nt, Artificial Sequence
  Description of Artificial Sequence: Synthetic oligonucleotide
cagaaggcaagguccgacu

SEQ ID NO: 2432650 - RNA, 19 nt, Artificial Sequence
  Description of Artificial Sequence: Synthetic oligonucleotide
guugguacucugccucgcu

SEQ ID NO: 2432651 - RNA, 19 nt, Artificial Sequence
  Description of Artificial Sequence: Synthetic oligonucleotide
agcagaaggcaagguccga

SEQ ID NO: 2432652 - RNA, 19 nt, Artificial Sequence
  Description of Artificial Sequence: Synthetic oligonucleotide
agcuucugcaagggauagu

SEQ ID NO: 2432653 - RNA, 19 nt, Artificial Sequence
  Description of Artificial Sequence: Synthetic oligonucleotide
cagugcaaucaugguccag

SEQ ID NO: 2432654 - RNA, 19 nt, Artificial Sequence
  Description of Artificial Sequence: Synthetic oligonucleotide
ugccaacgccaagucuucu

SEQ ID NO: 2432655 - RNA, 19 nt, Artificial Sequence
  Description of Artificial Sequence: Synthetic oligonucleotide
gguaccuggauauccuuuu

SEQ ID NO: 2432656 - RNA, 19 nt, Artificial Sequence
  Description of Artificial Sequence: Synthetic oligonucleotide
ggggacagugcucguagaa

SEQ ID NO: 2432657 - RNA, 19 nt, Artificial Sequence
  Description of Artificial Sequence: Synthetic oligonucleotide
gcuggucacaugacccucc

SEQ ID NO: 2432658 - RNA, 19 nt, Artificial Sequence
  Description of Artificial Sequence: Synthetic oligonucleotide
acuggggacagugcucgua

SEQ ID NO: 2432659 - RNA, 19 nt, Artificial Sequence
  Description of Artificial Sequence: Synthetic oligonucleotide
cguucacacuuauugguga

SEQ ID NO: 2432660 - RNA, 19 nt, Artificial Sequence
  Description of Artificial Sequence: Synthetic oligonucleotide
cguagaagccaagaccgug

SEQ ID NO: 2432661 - RNA, 19 nt, Artificial Sequence
  Description of Artificial Sequence: Synthetic oligonucleotide
ggucggaaaaugggaugug

SEQ ID NO: 2432662 - RNA, 19 nt, Artificial Sequence
  Description of Artificial Sequence: Synthetic oligonucleotide
ggacccuagcacaggcugc

SEQ ID NO: 2432663 - RNA, 19 nt, Artificial Sequence
  Description of Artificial Sequence: Synthetic oligonucleotide
gguccgacuuggacugggg

SEQ ID NO: 2432664 - RNA, 19 nt, Artificial Sequence
  Description of Artificial Sequence: Synthetic oligonucleotide
gggauguccgggucggaaa

SEQ ID NO: 2432665 - RNA, 19 nt, Artificial Sequence
  Description of Artificial Sequence: Synthetic oligonucleotide
ggugccggugcuugaugca

SEQ ID NO: 2432666 - RNA, 19 nt, Artificial Sequence
  Description of Artificial Sequence: Synthetic oligonucleotide
gggcgcguugcaaagcuuc

SEQ ID NO: 2432667 - RNA, 19 nt, Artificial Sequence
  Description of Artificial Sequence: Synthetic oligonucleotide
gugccaacgccaagucuuc

SEQ ID NO: 2432668 - RNA, 19 nt, Artificial Sequence
  Description of Artificial Sequence: Synthetic oligonucleotide
gcuucugcaagggauaguu

SEQ ID NO: 2432669 - RNA, 19 nt, Artificial Sequence
  Description of Artificial Sequence: Synthetic oligonucleotide
gcagcuagcccugcccggc

SEQ ID NO: 2432670 - RNA, 19 nt, Artificial Sequence
  Description of Artificial Sequence: Synthetic oligonucleotide
ccggcagccagaacguuca

SEQ ID NO: 2432671 - RNA, 19 nt, Artificial Sequence
  Description of Artificial Sequence: Synthetic oligonucleotide
gggucggaaaaugggaugu

SEQ ID NO: 2432672 - RNA, 19 nt, Artificial Sequence
  Description of Artificial Sequence: Synthetic oligonucleotide
gcuucaagcuacggcucug

SEQ ID NO: 2432673 - RNA, 19 nt, Artificial Sequence
  Description of Artificial Sequence: Synthetic oligonucleotide
cugcgcgggaucagagcga

SEQ ID NO: 2432674 - RNA, 19 nt, Artificial Sequence
  Description of Artificial Sequence: Synthetic oligonucleotide
aggcuccccucuggccacc

SEQ ID NO: 2432675 - RNA, 19 nt, Artificial Sequence
  Description of Artificial Sequence: Synthetic oligonucleotide
cgggucggaaaaugggaug

SEQ ID NO: 2432676 - RNA, 19 nt, Artificial Sequence
  Description of Artificial Sequence: Synthetic oligonucleotide
ccgacuuggacuggggaca

SEQ ID NO: 2432677 - RNA, 19 nt, Artificial Sequence
  Description of Artificial Sequence: Synthetic oligonucleotide
gugcuugaugcagaaguuu

SEQ ID NO: 2432678 - RNA, 19 nt, Artificial Sequence
  Description of Artificial Sequence: Synthetic oligonucleotide
cacagugaugcugggcgua

SEQ ID NO: 2432679 - RNA, 19 nt, Artificial Sequence
  Description of Artificial Sequence: Synthetic oligonucleotide
cggugcuugaugcagaagu

SEQ ID NO: 2432680 - RNA, 19 nt, Artificial Sequence
  Description of Artificial Sequence: Synthetic oligonucleotide
cacauggucugcgcagaaa

SEQ ID NO: 2432681 - RNA, 19 nt, Artificial Sequence
  Description of Artificial Sequence: Synthetic oligonucleotide
ggcguaggccacauggucu

SEQ ID NO: 2432682 - RNA, 19 nt, Artificial Sequence
  Description of Artificial Sequence: Synthetic oligonucleotide
ggauguggcucugcuggga

SEQ ID NO: 2432683 - RNA, 19 nt, Artificial Sequence
  Description of Artificial Sequence: Synthetic oligonucleotide
ggcuucaagcuacggcucu

SEQ ID NO: 2432684 - RNA, 19 nt, Artificial Sequence
  Description of Artificial Sequence: Synthetic oligonucleotide
gcuacggcucugcgccugc

SEQ ID NO: 2432685 - RNA, 19 nt, Artificial Sequence
  Description of Artificial Sequence: Synthetic oligonucleotide
ggugaaaaucuugcguuuu

SEQ ID NO: 2432686 - RNA, 19 nt, Artificial Sequence
  Description of Artificial Sequence: Synthetic oligonucleotide
gcccaggacccuagcacag

SEQ ID NO: 2432687 - RNA, 19 nt, Artificial Sequence
  Description of Artificial Sequence: Synthetic oligonucleotide
ccaagaccgugugcucugg

SEQ ID NO: 2432688 - RNA, 19 nt, Artificial Sequence
  Description of Artificial Sequence: Synthetic oligonucleotide
acuugggaccugggguuua

SEQ ID NO: 2432689 - RNA, 19 nt, Artificial Sequence
  Description of Artificial Sequence: Synthetic oligonucleotide
ggucaggaggcuccccucu

SEQ ID NO: 2432690 - RNA, 19 nt, Artificial Sequence
  Description of Artificial Sequence: Synthetic oligonucleotide
cugccggcagccagaacgu

SEQ ID NO: 2432691 - RNA, 19 nt, Artificial Sequence
  Description of Artificial Sequence: Synthetic oligonucleotide
gauguccgggucggaaaau

SEQ ID NO: 2432692 - RNA, 19 nt, Artificial Sequence
  Description of Artificial Sequence: Synthetic oligonucleotide
ccucgcuggcugacagugc

SEQ ID NO: 2432693 - RNA, 19 nt, Artificial Sequence
  Description of Artificial Sequence: Synthetic oligonucleotide
cauuggucacaggucaguu

SEQ ID NO: 2432694 - RNA, 19 nt, Artificial Sequence
  Description of Artificial Sequence: Synthetic oligonucleotide
cggaaaaugggauguggcu

SEQ ID NO: 2432695 - RNA, 19 nt, Artificial Sequence
  Description of Artificial Sequence: Synthetic oligonucleotide
ggcgcguugcaaagcuuca

SEQ ID NO: 2432696 - RNA, 19 nt, Artificial Sequence
  Description of Artificial Sequence: Synthetic oligonucleotide
gccggcagccagaacguuc

SEQ ID NO: 2432697 - RNA, 19 nt, Artificial Sequence
  Description of Artificial Sequence: Synthetic oligonucleotide
accugggguuuagcuucug

SEQ ID NO: 2432698 - RNA, 19 nt, Artificial Sequence
  Description of Artificial Sequence: Synthetic oligonucleotide
accgugugcucuggagaua

SEQ ID NO: 2432699 - RNA, 19 nt, Artificial Sequence
  Description of Artificial Sequence: Synthetic oligonucleotide
gccagaacguucacacuua

SEQ ID NO: 2432700 - RNA, 19 nt, Artificial Sequence
  Description of Artificial Sequence: Synthetic oligonucleotide
ccggcacaggcacauuaca

SEQ ID NO: 2432701 - RNA, 19 nt, Artificial Sequence
  Description of Artificial Sequence: Synthetic oligonucleotide
gccauucugcaaagcgauc

SEQ ID NO: 2432702 - RNA, 19 nt, Artificial Sequence
  Description of Artificial Sequence: Synthetic oligonucleotide
cagguaccuggauauccuu

SEQ ID NO: 2432703 - RNA, 19 nt, Artificial Sequence
  Description of Artificial Sequence: Synthetic oligonucleotide
ggggauguccgggucggaa

SEQ ID NO: 2432704 - RNA, 19 nt, Artificial Sequence
  Description of Artificial Sequence: Synthetic oligonucleotide
cucugccggcagccagaac

SEQ ID NO: 2432705 - RNA, 19 nt, Artificial Sequence
  Description of Artificial Sequence: Synthetic oligonucleotide
uagcccugcccggcugguc

SEQ ID NO: 2432706 - RNA, 19 nt, Artificial Sequence
  Description of Artificial Sequence: Synthetic oligonucleotide
gaccugggguuuagcuucu

SEQ ID NO: 2432707 - RNA, 19 nt, Artificial Sequence
  Description of Artificial Sequence: Synthetic oligonucleotide
ugccggcagccagaacguu

SEQ ID NO: 2432708 - RNA, 19 nt, Artificial Sequence
  Description of Artificial Sequence: Synthetic oligonucleotide
gcugggcguaggccacaug

SEQ ID NO: 2432709 - RNA, 19 nt, Artificial Sequence
  Description of Artificial Sequence: Synthetic oligonucleotide
cgugugcucuggagauagc

SEQ ID NO: 2432710 - RNA, 19 nt, Artificial Sequence
  Description of Artificial Sequence: Synthetic oligonucleotide
cgacuuggacuggggacag

SEQ ID NO: 2432711 - RNA, 19 nt, Artificial Sequence
  Description of Artificial Sequence: Synthetic oligonucleotide
cgcuggcugacagugccug

SEQ ID NO: 2432712 - RNA, 19 nt, Artificial Sequence
  Description of Artificial Sequence: Synthetic oligonucleotide
aggggauguccgggucgga

SEQ ID NO: 2432713 - RNA, 19 nt, Artificial Sequence
  Description of Artificial Sequence: Synthetic oligonucleotide
ggcuccccucuggccaccg

SEQ ID NO: 2432714 - RNA, 19 nt, Artificial Sequence
  Description of Artificial Sequence: Synthetic oligonucleotide
ggauaguucuagggcgcgu

SEQ ID NO: 2432715 - RNA, 19 nt, Artificial Sequence
  Description of Artificial Sequence: Synthetic oligonucleotide
agggcgcguugcaaagcuu

SEQ ID NO: 2432716 - RNA, 19 nt, Artificial Sequence
  Description of Artificial Sequence: Synthetic oligonucleotide
gccaacgccaagucuucuu

SEQ ID NO: 2432717 - RNA, 19 nt, Artificial Sequence
  Description of Artificial Sequence: Synthetic oligonucleotide
ccgggucggaaaaugggau

SEQ ID NO: 2432718 - RNA, 19 nt, Artificial Sequence
  Description of Artificial Sequence: Synthetic oligonucleotide
gcagaaguuucgggcacau

SEQ ID NO: 2432719 - RNA, 19 nt, Artificial Sequence
  Description of Artificial Sequence: Synthetic oligonucleotide
cccuggguacccuggagau

SEQ ID NO: 2432720 - RNA, 19 nt, Artificial Sequence
  Description of Artificial Sequence: Synthetic oligonucleotide
cucccucugccggcagcca

SEQ ID NO: 2432721 - RNA, 19 nt, Artificial Sequence
  Description of Artificial Sequence: Synthetic oligonucleotide
cguugcaaagcuucaucuu

SEQ ID NO: 2432722 - RNA, 19 nt, Artificial Sequence
  Description of Artificial Sequence: Synthetic oligonucleotide
ccagaacguucacacuuau

SEQ ID NO: 2432723 - RNA, 19 nt, Artificial Sequence
  Description of Artificial Sequence: Synthetic oligonucleotide
cgggcacauuggucacagg

SEQ ID NO: 2432724 - RNA, 19 nt, Artificial Sequence
  Description of Artificial Sequence: Synthetic oligonucleotide
cagcuagcccugcccggcu

SEQ ID NO: 2432725 - RNA, 19 nt, Artificial Sequence
  Description of Artificial Sequence: Synthetic oligonucleotide
ccacagugaugcugggcgu

SEQ ID NO: 2432726 - RNA, 19 nt, Artificial Sequence
  Description of Artificial Sequence: Synthetic oligonucleotide
ccggucaggaggcuccccu

SEQ ID NO: 2432727 - RNA, 19 nt, Artificial Sequence
  Description of Artificial Sequence: Synthetic oligonucleotide
cucugcgccugcugcuguu

SEQ ID NO: 2432728 - RNA, 19 nt, Artificial Sequence
  Description of Artificial Sequence: Synthetic oligonucleotide
gcgggaucagagcgacagu

SEQ ID NO: 2432729 - RNA, 19 nt, Artificial Sequence
  Description of Artificial Sequence: Synthetic oligonucleotide
gcccggucaggaggcuccc

SEQ ID NO: 2432730 - RNA, 19 nt, Artificial Sequence
  Description of Artificial Sequence: Synthetic oligonucleotide
cuagcccugcccggcuggu

SEQ ID NO: 2432731 - RNA, 19 nt, Artificial Sequence
  Description of Artificial Sequence: Synthetic oligonucleotide
cagaaguuucgggcacauu

SEQ ID NO: 2432732 - RNA, 19 nt, Artificial Sequence
  Description of Artificial Sequence: Synthetic oligonucleotide
cgaucacuggaggggaugu

SEQ ID NO: 2432733 - RNA, 19 nt, Artificial Sequence
  Description of Artificial Sequence: Synthetic oligonucleotide
gcgcguugcaaagcuucau

SEQ ID NO: 2432734 - RNA, 19 nt, Artificial Sequence
  Description of Artificial Sequence: Synthetic oligonucleotide
ccucugccggcagccagaa

SEQ ID NO: 2432735 - RNA, 19 nt, Artificial Sequence
  Description of Artificial Sequence: Synthetic oligonucleotide
ccccaagcccaggacccua

SEQ ID NO: 2432736 - RNA, 19 nt, Artificial Sequence
  Description of Artificial Sequence: Synthetic oligonucleotide
gcgcgggaucagagcgaca

SEQ ID NO: 2432737 - RNA, 19 nt, Artificial Sequence
  Description of Artificial Sequence: Synthetic oligonucleotide
aaaacaagggaguggaggg

SEQ ID NO: 2432738 - RNA, 19 nt, Artificial Sequence
  Description of Artificial Sequence: Synthetic oligonucleotide
cauaugguaaccccgaucg

SEQ ID NO: 2432739 - RNA, 19 nt, Artificial Sequence
  Description of Artificial Sequence: Synthetic oligonucleotide
uuccacuugcagaagaacg

SEQ ID NO: 2432740 - RNA, 19 nt, Artificial Sequence
  Description of Artificial Sequence: Synthetic oligonucleotide
cagaagaacgccuuggucc

SEQ ID NO: 2432741 - RNA, 19 nt, Artificial Sequence
  Description of Artificial Sequence: Synthetic oligonucleotide
uguagaucuguccuggggc

SEQ ID NO: 2432742 - RNA, 19 nt, Artificial Sequence
  Description of Artificial Sequence: Synthetic oligonucleotide
agaagaacgccuugguccc

SEQ ID NO: 2432743 - RNA, 19 nt, Artificial Sequence
  Description of Artificial Sequence: Synthetic oligonucleotide
aagucuucuaccucgagau

SEQ ID NO: 2432744 - RNA, 19 nt, Artificial Sequence
  Description of Artificial Sequence: Synthetic oligonucleotide
ucuaccucgagaucaugcg

SEQ ID NO: 2432745 - RNA, 19 nt, Artificial Sequence
  Description of Artificial Sequence: Synthetic oligonucleotide
ucacaaucgaucuuguacu

SEQ ID NO: 2432746 - RNA, 19 nt, Artificial Sequence
  Description of Artificial Sequence: Synthetic oligonucleotide
aucuuguacucgcagggcc

SEQ ID NO: 2432747 - RNA, 19 nt, Artificial Sequence
  Description of Artificial Sequence: Synthetic oligonucleotide
cucacaaucgaucuuguac

SEQ ID NO: 2432748 - RNA, 19 nt, Artificial Sequence
  Description of Artificial Sequence: Synthetic oligonucleotide
ugcgagucgagaaagggca

SEQ ID NO: 2432749 - RNA, 19 nt, Artificial Sequence
  Description of Artificial Sequence: Synthetic oligonucleotide
aggaaaguuagcaccaccc

SEQ ID NO: 2432750 - RNA, 19 nt, Artificial Sequence
  Description of Artificial Sequence: Synthetic oligonucleotide
uccacuugcagaagaacgc

SEQ ID NO: 2432751 - RNA, 19 nt, Artificial Sequence
  Description of Artificial Sequence: Synthetic oligonucleotide
aguacauaugguaaccccg

SEQ ID NO: 2432752 - RNA, 19 nt, Artificial Sequence
  Description of Artificial Sequence: Synthetic oligonucleotide
gauguagcaguuguucugg

SEQ ID NO: 2432753 - RNA, 19 nt, Artificial Sequence
  Description of Artificial Sequence: Synthetic oligonucleotide
ucuuguacucgcagggccg

SEQ ID NO: 2432754 - RNA, 19 nt, Artificial Sequence
  Description of Artificial Sequence: Synthetic oligonucleotide
uucagcucuacuuucuucu

SEQ ID NO: 2432755 - RNA, 19 nt, Artificial Sequence
  Description of Artificial Sequence: Synthetic oligonucleotide
ucaagcaguacauauggua

SEQ ID NO: 2432756 - RNA, 19 nt, Artificial Sequence
  Description of Artificial Sequence: Synthetic oligonucleotide
cuuaccaggacccacccac

SEQ ID NO: 2432757 - RNA, 19 nt, Artificial Sequence
  Description of Artificial Sequence: Synthetic oligonucleotide
aaguguagaucuguccugg

SEQ ID NO: 2432758 - RNA, 19 nt, Artificial Sequence
  Description of Artificial Sequence: Synthetic oligonucleotide
aaggccacccuccuucuuc

SEQ ID NO: 2432759 - RNA, 19 nt, Artificial Sequence
  Description of Artificial Sequence: Synthetic oligonucleotide
aaguuagcaccacccaaag

SEQ ID NO: 2432760 - RNA, 19 nt, Artificial Sequence
  Description of Artificial Sequence: Synthetic oligonucleotide
gugagggugauguaggcag

SEQ ID NO: 2432761 - RNA, 19 nt, Artificial Sequence
  Description of Artificial Sequence: Synthetic oligonucleotide
uucuaccucgagaucaugc

SEQ ID NO: 2432762 - RNA, 19 nt, Artificial Sequence
  Description of Artificial Sequence: Synthetic oligonucleotide
agcaguacauaugguaacc

SEQ ID NO: 2432763 - RNA, 19 nt, Artificial Sequence
  Description of Artificial Sequence: Synthetic oligonucleotide
guuguucugggccacgccg

SEQ ID NO: 2432764 - RNA, 19 nt, Artificial Sequence
  Description of Artificial Sequence: Synthetic oligonucleotide
aagugccgaagacagaggu

SEQ ID NO: 2432765 - RNA, 19 nt, Artificial Sequence
  Description of Artificial Sequence: Synthetic oligonucleotide
gacccacccacccacaggg

SEQ ID NO: 2432766 - RNA, 19 nt, Artificial Sequence
  Description of Artificial Sequence: Synthetic oligonucleotide
ucgaucuuguacucgcagg

SEQ ID NO: 2432767 - RNA, 19 nt, Artificial Sequence
  Description of Artificial Sequence: Synthetic oligonucleotide
ucuccauccagauguagca

SEQ ID NO: 2432768 - RNA, 19 nt, Artificial Sequence
  Description of Artificial Sequence: Synthetic oligonucleotide
caaucgaucuuguacucgc

SEQ ID NO: 2432769 - RNA, 19 nt, Artificial Sequence
  Description of Artificial Sequence: Synthetic oligonucleotide
ucgcagucaucacagaaca

SEQ ID NO: 2432770 - RNA, 19 nt, Artificial Sequence
  Description of Artificial Sequence: Synthetic oligonucleotide
cuaagugagggugauguag

SEQ ID NO: 2432771 - RNA, 19 nt, Artificial Sequence
  Description of Artificial Sequence: Synthetic oligonucleotide
aacgccuugguccccuccg

SEQ ID NO: 2432772 - RNA, 19 nt, Artificial Sequence
  Description of Artificial Sequence: Synthetic oligonucleotide
agacagagguggcaacucc

SEQ ID NO: 2432773 - RNA, 19 nt, Artificial Sequence
  Description of Artificial Sequence: Synthetic oligonucleotide
ugucucggcacacagcaga

SEQ ID NO: 2432774 - RNA, 19 nt, Artificial Sequence
  Description of Artificial Sequence: Synthetic oligonucleotide
cagaacagcaacugguccc

SEQ ID NO: 2432775 - RNA, 19 nt, Artificial Sequence
  Description of Artificial Sequence: Synthetic oligonucleotide
agaacagcaacuggucccc

SEQ ID NO: 2432776 - RNA, 19 nt, Artificial Sequence
  Description of Artificial Sequence: Synthetic oligonucleotide
acauaugguaaccccgauc

SEQ ID NO: 2432777 - RNA, 19 nt, Artificial Sequence
  Description of Artificial Sequence: Synthetic oligonucleotide
aucaugcggaaacuccagc

SEQ ID NO: 2432778 - RNA, 19 nt, Artificial Sequence
  Description of Artificial Sequence: Synthetic oligonucleotide
uaaguguagaucuguccug

SEQ ID NO: 2432779 - RNA, 19 nt, Artificial Sequence
  Description of Artificial Sequence: Synthetic oligonucleotide
ucugcgagucgagaaaggg

SEQ ID NO: 2432780 - RNA, 19 nt, Artificial Sequence
  Description of Artificial Sequence: Synthetic oligonucleotide
ucuuccuucagcucuacuu

SEQ ID NO: 2432781 - RNA, 19 nt, Artificial Sequence
  Description of Artificial Sequence: Synthetic oligonucleotide
cucgagaucaugcggaaac

SEQ ID NO: 2432782 - RNA, 19 nt, Artificial Sequence
  Description of Artificial Sequence: Synthetic oligonucleotide
uaugguaaccccgaucgca

SEQ ID NO: 2432783 - RNA, 19 nt, Artificial Sequence
  Description of Artificial Sequence: Synthetic oligonucleotide
ucaugcggaaacuccagca

SEQ ID NO: 2432784 - RNA, 19 nt, Artificial Sequence
  Description of Artificial Sequence: Synthetic oligonucleotide
ucuuucaagugccgaagac

SEQ ID NO: 2432785 - RNA, 19 nt, Artificial Sequence
  Description of Artificial Sequence: Synthetic oligonucleotide
gugccgaagacagaggugg

SEQ ID NO: 2432786 - RNA, 19 nt, Artificial Sequence
  Description of Artificial Sequence: Synthetic oligonucleotide
uugagucuccguuucuucc

SEQ ID NO: 2432787 - RNA, 19 nt, Artificial Sequence
  Description of Artificial Sequence: Synthetic oligonucleotide
augcggaaacuccagcaac

SEQ ID NO: 2432788 - RNA, 19 nt, Artificial Sequence
  Description of Artificial Sequence: Synthetic oligonucleotide
gguaacauuccacuugcag

SEQ ID NO: 2432789 - RNA, 19 nt, Artificial Sequence
  Description of Artificial Sequence: Synthetic oligonucleotide
caguacauaugguaacccc

SEQ ID NO: 2432790 - RNA, 19 nt, Artificial Sequence
  Description of Artificial Sequence: Synthetic oligonucleotide
aaacaagggaguggagggg

SEQ ID NO: 2432791 - RNA, 19 nt, Artificial Sequence
  Description of Artificial Sequence: Synthetic oligonucleotide
aaaguuagcaccacccaaa

SEQ ID NO: 2432792 - RNA, 19 nt, Artificial Sequence
  Description of Artificial Sequence: Synthetic oligonucleotide
uaccucgagaucaugcgga

SEQ ID NO: 2432793 - RNA, 19 nt, Artificial Sequence
  Description of Artificial Sequence: Synthetic oligonucleotide
guagcugcggcagugcucg

SEQ ID NO: 2432794 - RNA, 19 nt, Artificial Sequence
  Description of Artificial Sequence: Synthetic oligonucleotide
caugggaggguucaagcag

SEQ ID NO: 2432795 - RNA, 19 nt, Artificial Sequence
  Description of Artificial Sequence: Synthetic oligonucleotide
aaagggcaggcgcaggcug

SEQ ID NO: 2432796 - RNA, 19 nt, Artificial Sequence
  Description of Artificial Sequence: Synthetic oligonucleotide
cucggcacacagcagagcc

SEQ ID NO: 2432797 - RNA, 19 nt, Artificial Sequence
  Description of Artificial Sequence: Synthetic oligonucleotide
auaugguaaccccgaucgc

SEQ ID NO: 2432798 - RNA, 19 nt, Artificial Sequence
  Description of Artificial Sequence: Synthetic oligonucleotide
uuguucugggccacgccgg

SEQ ID NO: 2432799 - RNA, 19 nt, Artificial Sequence
  Description of Artificial Sequence: Synthetic oligonucleotide
gagaucaugcggaaacucc

SEQ ID NO: 2432800 - RNA, 19 nt, Artificial Sequence
  Description of Artificial Sequence: Synthetic oligonucleotide
uaccucacaaucgaucuug

SEQ ID NO: 2432801 - RNA, 19 nt, Artificial Sequence
  Description of Artificial Sequence: Synthetic oligonucleotide
aguuguucugggccacgcc

SEQ ID NO: 2432802 - RNA, 19 nt, Artificial Sequence
  Description of Artificial Sequence: Synthetic oligonucleotide
aucgcagucaucacagaac

SEQ ID NO: 2432803 - RNA, 19 nt, Artificial Sequence
  Description of Artificial Sequence: Synthetic oligonucleotide
gaaaguuagcaccacccaa

SEQ ID NO: 2432804 - RNA, 19 nt, Artificial Sequence
  Description of Artificial Sequence: Synthetic oligonucleotide
ucucuuucaagugccgaag

SEQ ID NO: 2432805 - RNA, 19 nt, Artificial Sequence
  Description of Artificial Sequence: Synthetic oligonucleotide
gucgagaaagggcaggcgc

SEQ ID NO: 2432806 - RNA, 19 nt, Artificial Sequence
  Description of Artificial Sequence: Synthetic oligonucleotide
uguagcaguuguucugggc

SEQ ID NO: 2432807 - RNA, 19 nt, Artificial Sequence
  Description of Artificial Sequence: Synthetic oligonucleotide
aucgaucuuguacucgcag

SEQ ID NO: 2432808 - RNA, 19 nt, Artificial Sequence
  Description of Artificial Sequence: Synthetic oligonucleotide
auccagauguagcaguugu

SEQ ID NO: 2432809 - RNA, 19 nt, Artificial Sequence
  Description of Artificial Sequence: Synthetic oligonucleotide
ucgagaaagggcaggcgca

SEQ ID NO: 2432810 - RNA, 19 nt, Artificial Sequence
  Description of Artificial Sequence: Synthetic oligonucleotide
guaaguguagaucuguccu

SEQ ID NO: 2432811 - RNA, 19 nt, Artificial Sequence
  Description of Artificial Sequence: Synthetic oligonucleotide
guguagaucuguccugggg

SEQ ID NO: 2432812 - RNA, 19 nt, Artificial Sequence
  Description of Artificial Sequence: Synthetic oligonucleotide
uccguuucuuccuccaaca

SEQ ID NO: 2432813 - RNA, 19 nt, Artificial Sequence
  Description of Artificial Sequence: Synthetic oligonucleotide
ugcggaaacuccagcaacu

SEQ ID NO: 2432814 - RNA, 19 nt, Artificial Sequence
  Description of Artificial Sequence: Synthetic oligonucleotide
uugcagaagaacgccuugg

SEQ ID NO: 2432815 - RNA, 19 nt, Artificial Sequence
  Description of Artificial Sequence: Synthetic oligonucleotide
agguggcaacuccagcucc

SEQ ID NO: 2432816 - RNA, 19 nt, Artificial Sequence
  Description of Artificial Sequence: Synthetic oligonucleotide
uccgcugugcuccaccggc

SEQ ID NO: 2432817 - RNA, 19 nt, Artificial Sequence
  Description of Artificial Sequence: Synthetic oligonucleotide
caagcaguacauaugguaa

SEQ ID NO: 2432818 - RNA, 19 nt, Artificial Sequence
  Description of Artificial Sequence: Synthetic oligonucleotide
uagcaccacccaaaggucc

SEQ ID NO: 2432819 - RNA, 19 nt, Artificial Sequence
  Description of Artificial Sequence: Synthetic oligonucleotide
uuagcaccacccaaagguc

SEQ ID NO: 2432820 - RNA, 19 nt, Artificial Sequence
  Description of Artificial Sequence: Synthetic oligonucleotide
guagaucuguccuggggcc

SEQ ID NO: 2432821 - RNA, 19 nt, Artificial Sequence
  Description of Artificial Sequence: Synthetic oligonucleotide
uccauccagauguagcagu

SEQ ID NO: 2432822 - RNA, 19 nt, Artificial Sequence
  Description of Artificial Sequence: Synthetic oligonucleotide
auuccacuugcagaagaac

SEQ ID NO: 2432823 - RNA, 19 nt, Artificial Sequence
  Description of Artificial Sequence: Synthetic oligonucleotide
aaagguccuggagaagcag

SEQ ID NO: 2432824 - RNA, 19 nt, Artificial Sequence
  Description of Artificial Sequence: Synthetic oligonucleotide
uucucuuucaagugccgaa

SEQ ID NO: 2432825 - RNA, 19 nt, Artificial Sequence
  Description of Artificial Sequence: Synthetic oligonucleotide
gaggcaggaaaguuagcac

SEQ ID NO: 2432826 - RNA, 19 nt, Artificial Sequence
  Description of Artificial Sequence: Synthetic oligonucleotide
caggguaacauuccacuug

SEQ ID NO: 2432827 - RNA, 19 nt, Artificial Sequence
  Description of Artificial Sequence: Synthetic oligonucleotide
acaaucgaucuuguacucg

SEQ ID NO: 2432828 - RNA, 19 nt, Artificial Sequence
  Description of Artificial Sequence: Synthetic oligonucleotide
cuaccucgagaucaugcgg

SEQ ID NO: 2432829 - RNA, 19 nt, Artificial Sequence
  Description of Artificial Sequence: Synthetic oligonucleotide
ugggucuucuccauccaga

SEQ ID NO: 2432830 - RNA, 19 nt, Artificial Sequence
  Description of Artificial Sequence: Synthetic oligonucleotide
ugcagaagaacgccuuggu

SEQ ID NO: 2432831 - RNA, 19 nt, Artificial Sequence
  Description of Artificial Sequence: Synthetic oligonucleotide
aaacuccagcaacugcuga

SEQ ID NO: 2432832 - RNA, 19 nt, Artificial Sequence
  Description of Artificial Sequence: Synthetic oligonucleotide
cagggguaccucacaaucg

SEQ ID NO: 2432833 - RNA, 19 nt, Artificial Sequence
  Description of Artificial Sequence: Synthetic oligonucleotide
acauuccacuugcagaaga

SEQ ID NO: 2432834 - RNA, 19 nt, Artificial Sequence
  Description of Artificial Sequence: Synthetic oligonucleotide
uuucuuccuccaacagcgg

SEQ ID NO: 2432835 - RNA, 19 nt, Artificial Sequence
  Description of Artificial Sequence: Synthetic oligonucleotide
aacagcaacugguccccug

SEQ ID NO: 2432836 - RNA, 19 nt, Artificial Sequence
  Description of Artificial Sequence: Synthetic oligonucleotide
acaccgggugggaagagcc

SEQ ID NO: 2432837 - RNA, 19 nt, Artificial Sequence
  Description of Artificial Sequence: Synthetic oligonucleotide
cacagaacagcaacugguc

SEQ ID NO: 2432838 - RNA, 19 nt, Artificial Sequence
  Description of Artificial Sequence: Synthetic oligonucleotide
aggauguugagucuccguu

SEQ ID NO: 2432839 - RNA, 19 nt, Artificial Sequence
  Description of Artificial Sequence: Synthetic oligonucleotide
agggguaccucacaaucga

SEQ ID NO: 2432840 - RNA, 19 nt, Artificial Sequence
  Description of Artificial Sequence: Synthetic oligonucleotide
aguguagaucuguccuggg

SEQ ID NO: 2432841 - RNA, 19 nt, Artificial Sequence
  Description of Artificial Sequence: Synthetic oligonucleotide
cugcgagucgagaaagggc

SEQ ID NO: 2432842 - RNA, 19 nt, Artificial Sequence
  Description of Artificial Sequence: Synthetic oligonucleotide
aggcgcgcguuguagcugc

SEQ ID NO: 2432843 - RNA, 19 nt, Artificial Sequence
  Description of Artificial Sequence: Synthetic oligonucleotide
gacuggcccuucuggaagg

SEQ ID NO: 2432844 - RNA, 19 nt, Artificial Sequence
  Description of Artificial Sequence: Synthetic oligonucleotide
gaucaugcggaaacuccag

SEQ ID NO: 2432845 - RNA, 19 nt, Artificial Sequence
  Description of Artificial Sequence: Synthetic oligonucleotide
acugcugacaguccaugau

SEQ ID NO: 2432846 - RNA, 19 nt, Artificial Sequence
  Description of Artificial Sequence: Synthetic oligonucleotide
uucuucucuccugucucgg

SEQ ID NO: 2432847 - RNA, 19 nt, Artificial Sequence
  Description of Artificial Sequence: Synthetic oligonucleotide
cugcugacaguccaugaug

SEQ ID NO: 2432848 - RNA, 19 nt, Artificial Sequence
  Description of Artificial Sequence: Synthetic oligonucleotide
agucuucuaccucgagauc

SEQ ID NO: 2432849 - RNA, 19 nt, Artificial Sequence
  Description of Artificial Sequence: Synthetic oligonucleotide
aacauuccacuugcagaag

SEQ ID NO: 2432850 - RNA, 19 nt, Artificial Sequence
  Description of Artificial Sequence: Synthetic oligonucleotide
gaggagccuuaccaggacc

SEQ ID NO: 2432851 - RNA, 19 nt, Artificial Sequence
  Description of Artificial Sequence: Synthetic oligonucleotide
ggaggguucaagcaguaca

SEQ ID NO: 2432852 - RNA, 19 nt, Artificial Sequence
  Description of Artificial Sequence: Synthetic oligonucleotide
aagggcaggcgcaggcugc

SEQ ID NO: 2432853 - RNA, 19 nt, Artificial Sequence
  Description of Artificial Sequence: Synthetic oligonucleotide
acagcaacugguccccugu

SEQ ID NO: 2432854 - RNA, 19 nt, Artificial Sequence
  Description of Artificial Sequence: Synthetic oligonucleotide
agccuuaccaggacccacc

SEQ ID NO: 2432855 - RNA, 19 nt, Artificial Sequence
  Description of Artificial Sequence: Synthetic oligonucleotide
ucuucuaccucgagaucau

SEQ ID NO: 2432856 - RNA, 19 nt, Artificial Sequence
  Description of Artificial Sequence: Synthetic oligonucleotide
cuugcagaagaacgccuug

SEQ ID NO: 2432857 - RNA, 19 nt, Artificial Sequence
  Description of Artificial Sequence: Synthetic oligonucleotide
uuaccaggacccacccacc

SEQ ID NO: 2432858 - RNA, 19 nt, Artificial Sequence
  Description of Artificial Sequence: Synthetic oligonucleotide
gaucuuguacucgcagggc

SEQ ID NO: 2432859 - RNA, 19 nt, Artificial Sequence
  Description of Artificial Sequence: Synthetic oligonucleotide
caagugccgaagacagagg

SEQ ID NO: 2432860 - RNA, 19 nt, Artificial Sequence
  Description of Artificial Sequence: Synthetic oligonucleotide
agaucaugcggaaacucca

SEQ ID NO: 2432861 - RNA, 19 nt, Artificial Sequence
  Description of Artificial Sequence: Synthetic oligonucleotide
cacccacaggguaacauuc

SEQ ID NO: 2432862 - RNA, 19 nt, Artificial Sequence
  Description of Artificial Sequence: Synthetic oligonucleotide
accccgaucgcagucauca

SEQ ID NO: 2432863 - RNA, 19 nt, Artificial Sequence
  Description of Artificial Sequence: Synthetic oligonucleotide
cugacaguccaugaugguc

SEQ ID NO: 2432864 - RNA, 19 nt, Artificial Sequence
  Description of Artificial Sequence: Synthetic oligonucleotide
caagucuucuaccucgaga

SEQ ID NO: 2432865 - RNA, 19 nt, Artificial Sequence
  Description of Artificial Sequence: Synthetic oligonucleotide
uggggccagaccaggcccg

SEQ ID NO: 2432866 - RNA, 19 nt, Artificial Sequence
  Description of Artificial Sequence: Synthetic oligonucleotide
acccaaagguccuggagaa

SEQ ID NO: 2432867 - RNA, 19 nt, Artificial Sequence
  Description of Artificial Sequence: Synthetic oligonucleotide
uuguagcugcggcagugcu

SEQ ID NO: 2432868 - RNA, 19 nt, Artificial Sequence
  Description of Artificial Sequence: Synthetic oligonucleotide
gagucgagaaagggcaggc

SEQ ID NO: 2432869 - RNA, 19 nt, Artificial Sequence
  Description of Artificial Sequence: Synthetic oligonucleotide
ugagggugauguaggcaga

SEQ ID NO: 2432870 - RNA, 19 nt, Artificial Sequence
  Description of Artificial Sequence: Synthetic oligonucleotide
guugagucuccguuucuuc

SEQ ID NO: 2432871 - RNA, 19 nt, Artificial Sequence
  Description of Artificial Sequence: Synthetic oligonucleotide
uucaagugccgaagacaga

SEQ ID NO: 2432872 - RNA, 19 nt, Artificial Sequence
  Description of Artificial Sequence: Synthetic oligonucleotide
cacaaucgaucuuguacuc

SEQ ID NO: 2432873 - RNA, 19 nt, Artificial Sequence
  Description of Artificial Sequence: Synthetic oligonucleotide
augguaaccccgaucgcag

SEQ ID NO: 2432874 - RNA, 19 nt, Artificial Sequence
  Description of Artificial Sequence: Synthetic oligonucleotide
gguucaagcaguacauaug

SEQ ID NO: 2432875 - RNA, 19 nt, Artificial Sequence
  Description of Artificial Sequence: Synthetic oligonucleotide
agggccgcagccugggguc

SEQ ID NO: 2432876 - RNA, 19 nt, Artificial Sequence
  Description of Artificial Sequence: Synthetic oligonucleotide
uacauaugguaaccccgau

SEQ ID NO: 2432877 - RNA, 19 nt, Artificial Sequence
  Description of Artificial Sequence: Synthetic oligonucleotide
ucgaggacuggcccuucug

SEQ ID NO: 2432878 - RNA, 19 nt, Artificial Sequence
  Description of Artificial Sequence: Synthetic oligonucleotide
acccacaggguaacauucc

SEQ ID NO: 2432879 - RNA, 19 nt, Artificial Sequence
  Description of Artificial Sequence: Synthetic oligonucleotide
guacauaugguaaccccga

SEQ ID NO: 2432880 - RNA, 19 nt, Artificial Sequence
  Description of Artificial Sequence: Synthetic oligonucleotide
aagguccuggagaagcaga

SEQ ID NO: 2432881 - RNA, 19 nt, Artificial Sequence
  Description of Artificial Sequence: Synthetic oligonucleotide
cacccaaagguccuggaga

SEQ ID NO: 2432882 - RNA, 19 nt, Artificial Sequence
  Description of Artificial Sequence: Synthetic oligonucleotide
ugcuccaccggccucccuc

SEQ ID NO: 2432883 - RNA, 19 nt, Artificial Sequence
  Description of Artificial Sequence: Synthetic oligonucleotide
uccugucucggcacacagc

SEQ ID NO: 2432884 - RNA, 19 nt, Artificial Sequence
  Description of Artificial Sequence: Synthetic oligonucleotide
cugcgcucggcgcacaggc

SEQ ID NO: 2432885 - RNA, 19 nt, Artificial Sequence
  Description of Artificial Sequence: Synthetic oligonucleotide
agucgagaaagggcaggcg

SEQ ID NO: 2432886 - RNA, 19 nt, Artificial Sequence
  Description of Artificial Sequence: Synthetic oligonucleotide
ccacccuccuucuucaggg

SEQ ID NO: 2432887 - RNA, 19 nt, Artificial Sequence
  Description of Artificial Sequence: Synthetic oligonucleotide
cuucuggaaggccacccuc

SEQ ID NO: 2432888 - RNA, 19 nt, Artificial Sequence
  Description of Artificial Sequence: Synthetic oligonucleotide
gagccucgaggacuggccc

SEQ ID NO: 2432889 - RNA, 19 nt, Artificial Sequence
  Description of Artificial Sequence: Synthetic oligonucleotide
uacucgcagggccgcagcc

SEQ ID NO: 2432890 - RNA, 19 nt, Artificial Sequence
  Description of Artificial Sequence: Synthetic oligonucleotide
uccagcaacugcugacagu

SEQ ID NO: 2432891 - RNA, 19 nt, Artificial Sequence
  Description of Artificial Sequence: Synthetic oligonucleotide
ggaaaguuagcaccaccca

SEQ ID NO: 2432892 - RNA, 19 nt, Artificial Sequence
  Description of Artificial Sequence: Synthetic oligonucleotide
uucagggguaccucacaau

SEQ ID NO: 2432893 - RNA, 19 nt, Artificial Sequence
  Description of Artificial Sequence: Synthetic oligonucleotide
aaucgaucuuguacucgca

SEQ ID NO: 2432894 - RNA, 19 nt, Artificial Sequence
  Description of Artificial Sequence: Synthetic oligonucleotide
ccgaucgcagucaucacag

SEQ ID NO: 2432895 - RNA, 19 nt, Artificial Sequence
  Description of Artificial Sequence: Synthetic oligonucleotide
uguacucgcagggccgcag

SEQ ID NO: 2432896 - RNA, 19 nt, Artificial Sequence
  Description of Artificial Sequence: Synthetic oligonucleotide
gguaccucacaaucgaucu

SEQ ID NO: 2432897 - RNA, 19 nt, Artificial Sequence
  Description of Artificial Sequence: Synthetic oligonucleotide
cgaucuuguacucgcaggg

SEQ ID NO: 2432898 - RNA, 19 nt, Artificial Sequence
  Description of Artificial Sequence: Synthetic oligonucleotide
agugagggugauguaggca

SEQ ID NO: 2432899 - RNA, 19 nt, Artificial Sequence
  Description of Artificial Sequence: Synthetic oligonucleotide
uguugagucuccguuucuu

SEQ ID NO: 2432900 - RNA, 19 nt, Artificial Sequence
  Description of Artificial Sequence: Synthetic oligonucleotide
cugggaaugucuuccucca

SEQ ID NO: 2432901 - RNA, 19 nt, Artificial Sequence
  Description of Artificial Sequence: Synthetic oligonucleotide
ucgagaucaugcggaaacu

SEQ ID NO: 2432902 - RNA, 19 nt, Artificial Sequence
  Description of Artificial Sequence: Synthetic oligonucleotide
uccgccaugggaggguuca

SEQ ID NO: 2432903 - RNA, 19 nt, Artificial Sequence
  Description of Artificial Sequence: Synthetic oligonucleotide
uccagauguagcaguuguu

SEQ ID NO: 2432904 - RNA, 19 nt, Artificial Sequence
  Description of Artificial Sequence: Synthetic oligonucleotide
ucucuccugucucggcaca

SEQ ID NO: 2432905 - RNA, 19 nt, Artificial Sequence
  Description of Artificial Sequence: Synthetic oligonucleotide
cuuguacucgcagggccgc

SEQ ID NO: 2432906 - RNA, 19 nt, Artificial Sequence
  Description of Artificial Sequence: Synthetic oligonucleotide
cacaggguaacauuccacu

SEQ ID NO: 2432907 - RNA, 19 nt, Artificial Sequence
  Description of Artificial Sequence: Synthetic oligonucleotide
uguucugggccacgccggu

SEQ ID NO: 2432908 - RNA, 19 nt, Artificial Sequence
  Description of Artificial Sequence: Synthetic oligonucleotide
acaguccaugauggucucc

SEQ ID NO: 2432909 - RNA, 19 nt, Artificial Sequence
  Description of Artificial Sequence: Synthetic oligonucleotide
ucggcacacagcagagccu

SEQ ID NO: 2432910 - RNA, 19 nt, Artificial Sequence
  Description of Artificial Sequence: Synthetic oligonucleotide
cuccagcaacugcugacag

SEQ ID NO: 2432911 - RNA, 19 nt, Artificial Sequence
  Description of Artificial Sequence: Synthetic oligonucleotide
uccaacagcgggcggggua

SEQ ID NO: 2432912 - RNA, 19 nt, Artificial Sequence
  Description of Artificial Sequence: Synthetic oligonucleotide
ugccgaagacagagguggc

SEQ ID NO: 2432913 - RNA, 19 nt, Artificial Sequence
  Description of Artificial Sequence: Synthetic oligonucleotide
cagagguggcaacuccagc

SEQ ID NO: 2432914 - RNA, 19 nt, Artificial Sequence
  Description of Artificial Sequence: Synthetic oligonucleotide
cagagccaggccuaaguga

SEQ ID NO: 2432915 - RNA, 19 nt, Artificial Sequence
  Description of Artificial Sequence: Synthetic oligonucleotide
uccccuguucuuccuccug

SEQ ID NO: 2432916 - RNA, 19 nt, Artificial Sequence
  Description of Artificial Sequence: Synthetic oligonucleotide
cacacagcagagccucgag

SEQ ID NO: 2432917 - RNA, 19 nt, Artificial Sequence
  Description of Artificial Sequence: Synthetic oligonucleotide
uccugggaaugucuuccuc

SEQ ID NO: 2432918 - RNA, 19 nt, Artificial Sequence
  Description of Artificial Sequence: Synthetic oligonucleotide
ugggccacgccggucugcg

SEQ ID NO: 2432919 - RNA, 19 nt, Artificial Sequence
  Description of Artificial Sequence: Synthetic oligonucleotide
guccccuccgcugugcucc

SEQ ID NO: 2432920 - RNA, 19 nt, Artificial Sequence
  Description of Artificial Sequence: Synthetic oligonucleotide
ucgaggcaggaaaguuagc

SEQ ID NO: 2432921 - RNA, 19 nt, Artificial Sequence
  Description of Artificial Sequence: Synthetic oligonucleotide
ucuucuccauccagaugua

SEQ ID NO: 2432922 - RNA, 19 nt, Artificial Sequence
  Description of Artificial Sequence: Synthetic oligonucleotide
caugcggaaacuccagcaa

SEQ ID NO: 2432923 - RNA, 19 nt, Artificial Sequence
  Description of Artificial Sequence: Synthetic oligonucleotide
guuguagcugcggcagugc

SEQ ID NO: 2432924 - RNA, 19 nt, Artificial Sequence
  Description of Artificial Sequence: Synthetic oligonucleotide
ggaaacuccagcaacugcu

SEQ ID NO: 2432925 - RNA, 19 nt, Artificial Sequence
  Description of Artificial Sequence: Synthetic oligonucleotide
gagucuccguuucuuccuc

SEQ ID NO: 2432926 - RNA, 19 nt, Artificial Sequence
  Description of Artificial Sequence: Synthetic oligonucleotide
auguugagucuccguuucu

SEQ ID NO: 2432927 - RNA, 19 nt, Artificial Sequence
  Description of Artificial Sequence: Synthetic oligonucleotide
cucuuucaagugccgaaga

SEQ ID NO: 2432928 - RNA, 19 nt, Artificial Sequence
  Description of Artificial Sequence: Synthetic oligonucleotide
accgggugggaagagccag

SEQ ID NO: 2432929 - RNA, 19 nt, Artificial Sequence
  Description of Artificial Sequence: Synthetic oligonucleotide
uuccuccugggaaugucuu

SEQ ID NO: 2432930 - RNA, 19 nt, Artificial Sequence
  Description of Artificial Sequence: Synthetic oligonucleotide
cuccagcucccuuccgggg

SEQ ID NO: 2432931 - RNA, 19 nt, Artificial Sequence
  Description of Artificial Sequence: Synthetic oligonucleotide
gacaguccaugauggucuc

SEQ ID NO: 2432932 - RNA, 19 nt, Artificial Sequence
  Description of Artificial Sequence: Synthetic oligonucleotide
agugcucgauggccucccg

SEQ ID NO: 2432933 - RNA, 19 nt, Artificial Sequence
  Description of Artificial Sequence: Synthetic oligonucleotide
agugccgaagacagaggug

SEQ ID NO: 2432934 - RNA, 19 nt, Artificial Sequence
  Description of Artificial Sequence: Synthetic oligonucleotide
ggucugcgagucgagaaag

SEQ ID NO: 2432935 - RNA, 19 nt, Artificial Sequence
  Description of Artificial Sequence: Synthetic oligonucleotide
gcaguacauaugguaaccc

SEQ ID NO: 2432936 - RNA, 19 nt, Artificial Sequence
  Description of Artificial Sequence: Synthetic oligonucleotide
ugggaaugucuuccuccaa

SEQ ID NO: 2432937 - RNA, 19 nt, Artificial Sequence
  Description of Artificial Sequence: Synthetic oligonucleotide
caacugcugacaguccaug

SEQ ID NO: 2432938 - RNA, 19 nt, Artificial Sequence
  Description of Artificial Sequence: Synthetic oligonucleotide
augggaggguucaagcagu

SEQ ID NO: 2432939 - RNA, 19 nt, Artificial Sequence
  Description of Artificial Sequence: Synthetic oligonucleotide
ccugucucggcacacagca

SEQ ID NO: 2432940 - RNA, 19 nt, Artificial Sequence
  Description of Artificial Sequence: Synthetic oligonucleotide
uuccuccaacagcgggcgg

SEQ ID NO: 2432941 - RNA, 19 nt, Artificial Sequence
  Description of Artificial Sequence: Synthetic oligonucleotide
acagcgggcgggguaagug

SEQ ID NO: 2432942 - RNA, 19 nt, Artificial Sequence
  Description of Artificial Sequence: Synthetic oligonucleotide
gacaccgggugggaagagc

SEQ ID NO: 2432943 - RNA, 19 nt, Artificial Sequence
  Description of Artificial Sequence: Synthetic oligonucleotide
uccaccggccucccucccc

SEQ ID NO: 2432944 - RNA, 19 nt, Artificial Sequence
  Description of Artificial Sequence: Synthetic oligonucleotide
gucugcgagucgagaaagg

SEQ ID NO: 2432945 - RNA, 19 nt, Artificial Sequence
  Description of Artificial Sequence: Synthetic oligonucleotide
cauccagauguagcaguug

SEQ ID NO: 2432946 - RNA, 19 nt, Artificial Sequence
  Description of Artificial Sequence: Synthetic oligonucleotide
cacccuccuucuucagggg

SEQ ID NO: 2432947 - RNA, 19 nt, Artificial Sequence
  Description of Artificial Sequence: Synthetic oligonucleotide
cuucagggguaccucacaa

SEQ ID NO: 2432948 - RNA, 19 nt, Artificial Sequence
  Description of Artificial Sequence: Synthetic oligonucleotide
ugguaaccccgaucgcagu

SEQ ID NO: 2432949 - RNA, 19 nt, Artificial Sequence
  Description of Artificial Sequence: Synthetic oligonucleotide
cucgcagggccgcagccug

SEQ ID NO: 2432950 - RNA, 19 nt, Artificial Sequence
  Description of Artificial Sequence: Synthetic oligonucleotide
uaaccccgaucgcagucau

SEQ ID NO: 2432951 - RNA, 19 nt, Artificial Sequence
  Description of Artificial Sequence: Synthetic oligonucleotide
acuugcagaagaacgccuu

SEQ ID NO: 2432952 - RNA, 19 nt, Artificial Sequence
  Description of Artificial Sequence: Synthetic oligonucleotide
caguuguucugggccacgc

SEQ ID NO: 2432953 - RNA, 19 nt, Artificial Sequence
  Description of Artificial Sequence: Synthetic oligonucleotide
uccucgaggcaggaaaguu

SEQ ID NO: 2432954 - RNA, 19 nt, Artificial Sequence
  Description of Artificial Sequence: Synthetic oligonucleotide
gguccccuguucuuccucc

SEQ ID NO: 2432955 - RNA, 19 nt, Artificial Sequence
  Description of Artificial Sequence: Synthetic oligonucleotide
ucucggcacacagcagagc

SEQ ID NO: 2432956 - RNA, 19 nt, Artificial Sequence
  Description of Artificial Sequence: Synthetic oligonucleotide
gguaaccccgaucgcaguc

SEQ ID NO: 2432957 - RNA, 19 nt, Artificial Sequence
  Description of Artificial Sequence: Synthetic oligonucleotide
gcagaagaacgccuugguc

SEQ ID NO: 2432958 - RNA, 19 nt, Artificial Sequence
  Description of Artificial Sequence: Synthetic oligonucleotide
ccuccugggaaugucuucc

SEQ ID NO: 2432959 - RNA, 19 nt, Artificial Sequence
  Description of Artificial Sequence: Synthetic oligonucleotide
guacucgcagggccgcagc

SEQ ID NO: 2432960 - RNA, 19 nt, Artificial Sequence
  Description of Artificial Sequence: Synthetic oligonucleotide
guaaccccgaucgcaguca

SEQ ID NO: 2432961 - RNA, 19 nt, Artificial Sequence
  Description of Artificial Sequence: Synthetic oligonucleotide
cuucucuuucaagugccga

SEQ ID NO: 2432962 - RNA, 19 nt, Artificial Sequence
  Description of Artificial Sequence: Synthetic oligonucleotide
gaggguucaagcaguacau

SEQ ID NO: 2432963 - RNA, 19 nt, Artificial Sequence
  Description of Artificial Sequence: Synthetic oligonucleotide
ccuucucuuucaagugccg

SEQ ID NO: 2432964 - RNA, 19 nt, Artificial Sequence
  Description of Artificial Sequence: Synthetic oligonucleotide
aucuguccuggggccagac

SEQ ID NO: 2432965 - RNA, 19 nt, Artificial Sequence
  Description of Artificial Sequence: Synthetic oligonucleotide
ugggaggguucaagcagua

SEQ ID NO: 2432966 - RNA, 19 nt, Artificial Sequence
  Description of Artificial Sequence: Synthetic oligonucleotide
aagcagagccaggccuaag

SEQ ID NO: 2432967 - RNA, 19 nt, Artificial Sequence
  Description of Artificial Sequence: Synthetic oligonucleotide
ggcaggaaaguuagcacca

SEQ ID NO: 2432968 - RNA, 19 nt, Artificial Sequence
  Description of Artificial Sequence: Synthetic oligonucleotide
accucgagaucaugcggaa

SEQ ID NO: 2432969 - RNA, 19 nt, Artificial Sequence
  Description of Artificial Sequence: Synthetic oligonucleotide
agcaccacccaaagguccu

SEQ ID NO: 2432970 - RNA, 19 nt, Artificial Sequence
  Description of Artificial Sequence: Synthetic oligonucleotide
gagccuuaccaggacccac

SEQ ID NO: 2432971 - RNA, 19 nt, Artificial Sequence
  Description of Artificial Sequence: Synthetic oligonucleotide
cugucucggcacacagcag

SEQ ID NO: 2432972 - RNA, 19 nt, Artificial Sequence
  Description of Artificial Sequence: Synthetic oligonucleotide
caggccuaagugaggguga

SEQ ID NO: 2432973 - RNA, 19 nt, Artificial Sequence
  Description of Artificial Sequence: Synthetic oligonucleotide
gcgggguaaguguagaucu

SEQ ID NO: 2432974 - RNA, 19 nt, Artificial Sequence
  Description of Artificial Sequence: Synthetic oligonucleotide
ugguccccuguucuuccuc

SEQ ID NO: 2432975 - RNA, 19 nt, Artificial Sequence
  Description of Artificial Sequence: Synthetic oligonucleotide
agaagcagagccaggccua

SEQ ID NO: 2432976 - RNA, 19 nt, Artificial Sequence
  Description of Artificial Sequence: Synthetic oligonucleotide
ggccacgccggucugcgag

SEQ ID NO: 2432977 - RNA, 19 nt, Artificial Sequence
  Description of Artificial Sequence: Synthetic oligonucleotide
cagagccucgaggacuggc

SEQ ID NO: 2432978 - RNA, 19 nt, Artificial Sequence
  Description of Artificial Sequence: Synthetic oligonucleotide
caccacccaaagguccugg

SEQ ID NO: 2432979 - RNA, 19 nt, Artificial Sequence
  Description of Artificial Sequence: Synthetic oligonucleotide
ccacuugcagaagaacgcc

SEQ ID NO: 2432980 - RNA, 19 nt, Artificial Sequence
  Description of Artificial Sequence: Synthetic oligonucleotide
ggccagaccaggcccgcgg

SEQ ID NO: 2432981 - RNA, 19 nt, Artificial Sequence
  Description of Artificial Sequence: Synthetic oligonucleotide
ggguucaagcaguacauau

SEQ ID NO: 2432982 - RNA, 19 nt, Artificial Sequence
  Description of Artificial Sequence: Synthetic oligonucleotide
ccacaggguaacauuccac

SEQ ID NO: 2432983 - RNA, 19 nt, Artificial Sequence
  Description of Artificial Sequence: Synthetic oligonucleotide
gccuaagugagggugaugu

SEQ ID NO: 2432984 - RNA, 19 nt, Artificial Sequence
  Description of Artificial Sequence: Synthetic oligonucleotide
ccaggccuaagugagggug

SEQ ID NO: 2432985 - RNA, 19 nt, Artificial Sequence
  Description of Artificial Sequence: Synthetic oligonucleotide
cuccgcugugcuccaccgg

SEQ ID NO: 2432986 - RNA, 19 nt, Artificial Sequence
  Description of Artificial Sequence: Synthetic oligonucleotide
gcugcggcagugcucgaug

SEQ ID NO: 2432987 - RNA, 19 nt, Artificial Sequence
  Description of Artificial Sequence: Synthetic oligonucleotide
aacagcgggcgggguaagu

SEQ ID NO: 2432988 - RNA, 19 nt, Artificial Sequence
  Description of Artificial Sequence: Synthetic oligonucleotide
ggguaccucacaaucgauc

SEQ ID NO: 2432989 - RNA, 19 nt, Artificial Sequence
  Description of Artificial Sequence: Synthetic oligonucleotide
cuucuaccucgagaucaug

SEQ ID NO: 2432990 - RNA, 19 nt, Artificial Sequence
  Description of Artificial Sequence: Synthetic oligonucleotide
aaccccgaucgcagucauc

SEQ ID NO: 2432991 - RNA, 19 nt, Artificial Sequence
  Description of Artificial Sequence: Synthetic oligonucleotide
agggcaggcgcaggcugcg

SEQ ID NO: 2432992 - RNA, 19 nt, Artificial Sequence
  Description of Artificial Sequence: Synthetic oligonucleotide
ggaggagccuuaccaggac

SEQ ID NO: 2432993 - RNA, 19 nt, Artificial Sequence
  Description of Artificial Sequence: Synthetic oligonucleotide
ccacccaaagguccuggag

SEQ ID NO: 2432994 - RNA, 19 nt, Artificial Sequence
  Description of Artificial Sequence: Synthetic oligonucleotide
cccgcggugggucuucucc

SEQ ID NO: 2432995 - RNA, 19 nt, Artificial Sequence
  Description of Artificial Sequence: Synthetic oligonucleotide
cccuguucuuccuccuggg

SEQ ID NO: 2432996 - RNA, 19 nt, Artificial Sequence
  Description of Artificial Sequence: Synthetic oligonucleotide
cagugcucgauggccuccc

SEQ ID NO: 2432997 - RNA, 19 nt, Artificial Sequence
  Description of Artificial Sequence: Synthetic oligonucleotide
ggggcuccgccaugggagg

SEQ ID NO: 2432998 - RNA, 19 nt, Artificial Sequence
  Description of Artificial Sequence: Synthetic oligonucleotide
gcaacugguccccuguucu

SEQ ID NO: 2432999 - RNA, 19 nt, Artificial Sequence
  Description of Artificial Sequence: Synthetic oligonucleotide
cacuugcagaagaacgccu

SEQ ID NO: 2433000 - RNA, 19 nt, Artificial Sequence
  Description of Artificial Sequence: Synthetic oligonucleotide
gaagcagagccaggccuaa

SEQ ID NO: 2433001 - RNA, 19 nt, Artificial Sequence
  Description of Artificial Sequence: Synthetic oligonucleotide
ggcgggguaaguguagauc

SEQ ID NO: 2433002 - RNA, 19 nt, Artificial Sequence
  Description of Artificial Sequence: Synthetic oligonucleotide
gccuuaccaggacccaccc

SEQ ID NO: 2433003 - RNA, 19 nt, Artificial Sequence
  Description of Artificial Sequence: Synthetic oligonucleotide
gcggcagugcucgauggcc

SEQ ID NO: 2433004 - RNA, 19 nt, Artificial Sequence
  Description of Artificial Sequence: Synthetic oligonucleotide
cggugggucuucuccaucc

SEQ ID NO: 2433005 - RNA, 19 nt, Artificial Sequence
  Description of Artificial Sequence: Synthetic oligonucleotide
acgccggucugcgagucga

SEQ ID NO: 2433006 - RNA, 19 nt, Artificial Sequence
  Description of Artificial Sequence: Synthetic oligonucleotide
accucacaaucgaucuugu

SEQ ID NO: 2433007 - RNA, 19 nt, Artificial Sequence
  Description of Artificial Sequence: Synthetic oligonucleotide
acucgcagggccgcagccu

SEQ ID NO: 2433008 - RNA, 19 nt, Artificial Sequence
  Description of Artificial Sequence: Synthetic oligonucleotide
ccuccgcugugcuccaccg

SEQ ID NO: 2433009 - RNA, 19 nt, Artificial Sequence
  Description of Artificial Sequence: Synthetic oligonucleotide
ugggaagagccaggagcuc

SEQ ID NO: 2433010 - RNA, 19 nt, Artificial Sequence
  Description of Artificial Sequence: Synthetic oligonucleotide
gcgcucggcgcacaggcgc

SEQ ID NO: 2433011 - RNA, 19 nt, Artificial Sequence
  Description of Artificial Sequence: Synthetic oligonucleotide
ccguuucuuccuccaacag

SEQ ID NO: 2433012 - RNA, 19 nt, Artificial Sequence
  Description of Artificial Sequence: Synthetic oligonucleotide
uuguacucgcagggccgca

SEQ ID NO: 2433013 - RNA, 19 nt, Artificial Sequence
  Description of Artificial Sequence: Synthetic oligonucleotide
gcggaaacuccagcaacug

SEQ ID NO: 2433014 - RNA, 19 nt, Artificial Sequence
  Description of Artificial Sequence: Synthetic oligonucleotide
ggguaaguguagaucuguc

SEQ ID NO: 2433015 - RNA, 19 nt, Artificial Sequence
  Description of Artificial Sequence: Synthetic oligonucleotide
gguccuggagaagcagagc

SEQ ID NO: 2433016 - RNA, 19 nt, Artificial Sequence
  Description of Artificial Sequence: Synthetic oligonucleotide
uggcaacuccagcucccuu

SEQ ID NO: 2433017 - RNA, 19 nt, Artificial Sequence
  Description of Artificial Sequence: Synthetic oligonucleotide
aggguucaagcaguacaua

SEQ ID NO: 2433018 - RNA, 19 nt, Artificial Sequence
  Description of Artificial Sequence: Synthetic oligonucleotide
cacgccggucugcgagucg

SEQ ID NO: 2433019 - RNA, 19 nt, Artificial Sequence
  Description of Artificial Sequence: Synthetic oligonucleotide
caguccaugauggucuccu

SEQ ID NO: 2433020 - RNA, 19 nt, Artificial Sequence
  Description of Artificial Sequence: Synthetic oligonucleotide
cggaaacuccagcaacugc

SEQ ID NO: 2433021 - RNA, 19 nt, Artificial Sequence
  Description of Artificial Sequence: Synthetic oligonucleotide
gccuugguccccuccgcug

SEQ ID NO: 2433022 - RNA, 19 nt, Artificial Sequence
  Description of Artificial Sequence: Synthetic oligonucleotide
ccaagucuucuaccucgag

SEQ ID NO: 2433023 - RNA, 19 nt, Artificial Sequence
  Description of Artificial Sequence: Synthetic oligonucleotide
aggccuaagugagggugau

SEQ ID NO: 2433024 - RNA, 19 nt, Artificial Sequence
  Description of Artificial Sequence: Synthetic oligonucleotide
gcuccaccggccucccucc

SEQ ID NO: 2433025 - RNA, 19 nt, Artificial Sequence
  Description of Artificial Sequence: Synthetic oligonucleotide
ccaggauguugagucuccg

SEQ ID NO: 2433026 - RNA, 19 nt, Artificial Sequence
  Description of Artificial Sequence: Synthetic oligonucleotide
cagcucuacuuucuucucu

SEQ ID NO: 2433027 - RNA, 19 nt, Artificial Sequence
  Description of Artificial Sequence: Synthetic oligonucleotide
cacccacccacaggguaac

SEQ ID NO: 2433028 - RNA, 19 nt, Artificial Sequence
  Description of Artificial Sequence: Synthetic oligonucleotide
gcaguuguucugggccacg

SEQ ID NO: 2433029 - RNA, 19 nt, Artificial Sequence
  Description of Artificial Sequence: Synthetic oligonucleotide
gcgcaggcugcgcucggcg

SEQ ID NO: 2433030 - RNA, 19 nt, Artificial Sequence
  Description of Artificial Sequence: Synthetic oligonucleotide
cgagucgagaaagggcagg

SEQ ID NO: 2433031 - RNA, 19 nt, Artificial Sequence
  Description of Artificial Sequence: Synthetic oligonucleotide
cucggcgcacaggcgcgcg

SEQ ID NO: 2433032 - RNA, 19 nt, Artificial Sequence
  Description of Artificial Sequence: Synthetic oligonucleotide
gcacaggcgcgcguuguag

SEQ ID NO: 2433033 - RNA, 19 nt, Artificial Sequence
  Description of Artificial Sequence: Synthetic oligonucleotide
cgcguuguagcugcggcag

SEQ ID NO: 2433034 - RNA, 19 nt, Artificial Sequence
  Description of Artificial Sequence: Synthetic oligonucleotide
ggcagugcucgauggccuc

SEQ ID NO: 2433035 - RNA, 19 nt, Artificial Sequence
  Description of Artificial Sequence: Synthetic oligonucleotide
cccgaucgcagucaucaca

SEQ ID NO: 2433036 - RNA, 19 nt, Artificial Sequence
  Description of Artificial Sequence: Synthetic oligonucleotide
caggcgcgcguuguagcug

SEQ ID NO: 2433037 - RNA, 19 nt, Artificial Sequence
  Description of Artificial Sequence: Synthetic oligonucleotide
ccgggugggaagagccagg

SEQ ID NO: 2433038 - RNA, 19 nt, Artificial Sequence
  Description of Artificial Sequence: Synthetic oligonucleotide
caccgggugggaagagcca

SEQ ID NO: 2433039 - RNA, 19 nt, Artificial Sequence
  Description of Artificial Sequence: Synthetic oligonucleotide
gcgagucgagaaagggcag

SEQ ID NO: 2433040 - RNA, 19 nt, Artificial Sequence
  Description of Artificial Sequence: Synthetic oligonucleotide
gggguaaguguagaucugu

SEQ ID NO: 2433041 - RNA, 19 nt, Artificial Sequence
  Description of Artificial Sequence: Synthetic oligonucleotide
cccacaggguaacauucca

SEQ ID NO: 2433042 - RNA, 19 nt, Artificial Sequence
  Description of Artificial Sequence: Synthetic oligonucleotide
ccucgaggcaggaaaguua

SEQ ID NO: 2433043 - RNA, 19 nt, Artificial Sequence
  Description of Artificial Sequence: Synthetic oligonucleotide
cgagaucaugcggaaacuc

SEQ ID NO: 2433044 - RNA, 19 nt, Artificial Sequence
  Description of Artificial Sequence: Synthetic oligonucleotide
cgcgcguuguagcugcggc

SEQ ID NO: 2433045 - RNA, 19 nt, Artificial Sequence
  Description of Artificial Sequence: Synthetic oligonucleotide
guaccucacaaucgaucuu

SEQ ID NO: 2433046 - RNA, 19 nt, Artificial Sequence
  Description of Artificial Sequence: Synthetic oligonucleotide
agcugcggcagugcucgau

SEQ ID NO: 2433047 - RNA, 19 nt, Artificial Sequence
  Description of Artificial Sequence: Synthetic oligonucleotide
uccccuccgcugugcucca

SEQ ID NO: 2433048 - RNA, 19 nt, Artificial Sequence
  Description of Artificial Sequence: Synthetic oligonucleotide
cuccaccggccucccuccc

SEQ ID NO: 2433049 - RNA, 19 nt, Artificial Sequence
  Description of Artificial Sequence: Synthetic oligonucleotide
gaucuguccuggggccaga

SEQ ID NO: 2433050 - RNA, 19 nt, Artificial Sequence
  Description of Artificial Sequence: Synthetic oligonucleotide
gcagugcucgauggccucc

SEQ ID NO: 2433051 - RNA, 19 nt, Artificial Sequence
  Description of Artificial Sequence: Synthetic oligonucleotide
gccgaagacagagguggca

SEQ ID NO: 2433052 - RNA, 19 nt, Artificial Sequence
  Description of Artificial Sequence: Synthetic oligonucleotide
cugggccacgccggucugc

SEQ ID NO: 2433053 - RNA, 19 nt, Artificial Sequence
  Description of Artificial Sequence: Synthetic oligonucleotide
caacagcgggcgggguaag

SEQ ID NO: 2433054 - RNA, 19 nt, Artificial Sequence
  Description of Artificial Sequence: Synthetic oligonucleotide
gcugcgcucggcgcacagg

SEQ ID NO: 2433055 - RNA, 19 nt, Artificial Sequence
  Description of Artificial Sequence: Synthetic oligonucleotide
gggaggguucaagcaguac

SEQ ID NO: 2433056 - RNA, 19 nt, Artificial Sequence
  Description of Artificial Sequence: Synthetic oligonucleotide
agcgggcgggguaagugua

SEQ ID NO: 2433057 - RNA, 19 nt, Artificial Sequence
  Description of Artificial Sequence: Synthetic oligonucleotide
cuccgccaugggaggguuc

SEQ ID NO: 2433058 - RNA, 19 nt, Artificial Sequence
  Description of Artificial Sequence: Synthetic oligonucleotide
cgggguaaguguagaucug

SEQ ID NO: 2433059 - RNA, 19 nt, Artificial Sequence
  Description of Artificial Sequence: Synthetic oligonucleotide
ggagccuuaccaggaccca

SEQ ID NO: 2433060 - RNA, 19 nt, Artificial Sequence
  Description of Artificial Sequence: Synthetic oligonucleotide
gcgcguuguagcugcggca

SEQ ID NO: 2433061 - RNA, 19 nt, Artificial Sequence
  Description of Artificial Sequence: Synthetic oligonucleotide
cccuccgcugugcuccacc

SEQ ID NO: 2433062 - RNA, 19 nt, Artificial Sequence
  Description of Artificial Sequence: Synthetic oligonucleotide
ccgaagacagagguggcaa

SEQ ID NO: 2433063 - RNA, 19 nt, Artificial Sequence
  Description of Artificial Sequence: Synthetic oligonucleotide
guucugggccacgccgguc

SEQ ID NO: 2433064 - RNA, 19 nt, Artificial Sequence
  Description of Artificial Sequence: Synthetic oligonucleotide
aggcccgcggugggucuuc

SEQ ID NO: 2433065 - RNA, 19 nt, Artificial Sequence
  Description of Artificial Sequence: Synthetic oligonucleotide
ggcgcacaggcgcgcguug

SEQ ID NO: 2433066 - RNA, 19 nt, Artificial Sequence
  Description of Artificial Sequence: Synthetic oligonucleotide
cuccugggaaugucuuccu

SEQ ID NO: 2433067 - RNA, 19 nt, Artificial Sequence
  Description of Artificial Sequence: Synthetic oligonucleotide
cagcgggcgggguaagugu

SEQ ID NO: 2433068 - RNA, 19 nt, Artificial Sequence
  Description of Artificial Sequence: Synthetic oligonucleotide
gcacacagcagagccucga

SEQ ID NO: 2433069 - RNA, 19 nt, Artificial Sequence
  Description of Artificial Sequence: Synthetic oligonucleotide
gcugacaguccaugauggu

SEQ ID NO: 2433070 - RNA, 19 nt, Artificial Sequence
  Description of Artificial Sequence: Synthetic oligonucleotide
ccgcugugcuccaccggcc

SEQ ID NO: 2433071 - RNA, 19 nt, Artificial Sequence
  Description of Artificial Sequence: Synthetic oligonucleotide
ggcugcgcucggcgcacag

SEQ ID NO: 2433072 - RNA, 19 nt, Artificial Sequence
  Description of Artificial Sequence: Synthetic oligonucleotide
ccggucugcgagucgagaa

SEQ ID NO: 2433073 - RNA, 19 nt, Artificial Sequence
  Description of Artificial Sequence: Synthetic oligonucleotide
gcugugcuccaccggccuc

SEQ ID NO: 2433074 - RNA, 19 nt, Artificial Sequence
  Description of Artificial Sequence: Synthetic oligonucleotide
cccaaagguccuggagaag

SEQ ID NO: 2433075 - RNA, 19 nt, Artificial Sequence
  Description of Artificial Sequence: Synthetic oligonucleotide
ggccuaagugagggugaug

SEQ ID NO: 2433076 - RNA, 19 nt, Artificial Sequence
  Description of Artificial Sequence: Synthetic oligonucleotide
uagcugcggcagugcucga

SEQ ID NO: 2433077 - RNA, 19 nt, Artificial Sequence
  Description of Artificial Sequence: Synthetic oligonucleotide
ggaaggccacccuccuucu

SEQ ID NO: 2433078 - RNA, 19 nt, Artificial Sequence
  Description of Artificial Sequence: Synthetic oligonucleotide
guccccuguucuuccuccu

SEQ ID NO: 2433079 - RNA, 19 nt, Artificial Sequence
  Description of Artificial Sequence: Synthetic oligonucleotide
gggcuccgccaugggaggg

SEQ ID NO: 2433080 - RNA, 19 nt, Artificial Sequence
  Description of Artificial Sequence: Synthetic oligonucleotide
cgcucggcgcacaggcgcg

SEQ ID NO: 2433081 - RNA, 19 nt, Artificial Sequence
  Description of Artificial Sequence: Synthetic oligonucleotide
guggcaacuccagcucccu

SEQ ID NO: 2433082 - RNA, 19 nt, Artificial Sequence
  Description of Artificial Sequence: Synthetic oligonucleotide
ccuaagugagggugaugua

SEQ ID NO: 2433083 - RNA, 19 nt, Artificial Sequence
  Description of Artificial Sequence: Synthetic oligonucleotide
gcgggcgggguaaguguag

SEQ ID NO: 2433084 - RNA, 19 nt, Artificial Sequence
  Description of Artificial Sequence: Synthetic oligonucleotide
cucuuccuucagcucuacu

SEQ ID NO: 2433085 - RNA, 19 nt, Artificial Sequence
  Description of Artificial Sequence: Synthetic oligonucleotide
gcaccacccaaagguccug

SEQ ID NO: 2433086 - RNA, 19 nt, Artificial Sequence
  Description of Artificial Sequence: Synthetic oligonucleotide
caacugguccccuguucuu

SEQ ID NO: 2433087 - RNA, 19 nt, Artificial Sequence
  Description of Artificial Sequence: Synthetic oligonucleotide
gcggugggucuucuccauc

SEQ ID NO: 2433088 - RNA, 19 nt, Artificial Sequence
  Description of Artificial Sequence: Synthetic oligonucleotide
ccaacagcgggcgggguaa

SEQ ID NO: 2433089 - RNA, 19 nt, Artificial Sequence
  Description of Artificial Sequence: Synthetic oligonucleotide
gcgcgcguuguagcugcgg

SEQ ID NO: 2433090 - RNA, 19 nt, Artificial Sequence
  Description of Artificial Sequence: Synthetic oligonucleotide
acccacccacaggguaaca

SEQ ID NO: 2433091 - RNA, 19 nt, Artificial Sequence
  Description of Artificial Sequence: Synthetic oligonucleotide
cuccucgaggcaggaaagu

SEQ ID NO: 2433092 - RNA, 19 nt, Artificial Sequence
  Description of Artificial Sequence: Synthetic oligonucleotide
ccuuaccaggacccaccca

SEQ ID NO: 2433093 - RNA, 19 nt, Artificial Sequence
  Description of Artificial Sequence: Synthetic oligonucleotide
gcagagccucgaggacugg

SEQ ID NO: 2433094 - RNA, 19 nt, Artificial Sequence
  Description of Artificial Sequence: Synthetic oligonucleotide
ccucacaaucgaucuugua

SEQ ID NO: 2433095 - RNA, 19 nt, Artificial Sequence
  Description of Artificial Sequence: Synthetic oligonucleotide
gggccagaccaggcccgcg

SEQ ID NO: 2433096 - RNA, 19 nt, Artificial Sequence
  Description of Artificial Sequence: Synthetic oligonucleotide
cugguccccuguucuuccu

SEQ ID NO: 2433097 - RNA, 19 nt, Artificial Sequence
  Description of Artificial Sequence: Synthetic oligonucleotide
ccccgaucgcagucaucac

SEQ ID NO: 2433098 - RNA, 19 nt, Artificial Sequence
  Description of Artificial Sequence: Synthetic oligonucleotide
ccgcggugggucuucucca

SEQ ID NO: 2433099 - RNA, 19 nt, Artificial Sequence
  Description of Artificial Sequence: Synthetic oligonucleotide
ggcgcgcguuguagcugcg

SEQ ID NO: 2433100 - RNA, 19 nt, Artificial Sequence
  Description of Artificial Sequence: Synthetic oligonucleotide
gccggucugcgagucgaga

SEQ ID NO: 2433101 - RNA, 19 nt, Artificial Sequence
  Description of Artificial Sequence: Synthetic oligonucleotide
cggucugcgagucgagaaa

SEQ ID NO: 2433102 - RNA, 19 nt, Artificial Sequence
  Description of Artificial Sequence: Synthetic oligonucleotide
gcucggcgcacaggcgcgc

SEQ ID NO: 2433103 - RNA, 19 nt, Artificial Sequence
  Description of Artificial Sequence: Synthetic oligonucleotide
gaccaggcccgcggugggu

SEQ ID NO: 2433104 - RNA, 19 nt, Artificial Sequence
  Description of Artificial Sequence: Synthetic oligonucleotide
gggcgggguaaguguagau

SEQ ID NO: 2433105 - RNA, 19 nt, Artificial Sequence
  Description of Artificial Sequence: Synthetic oligonucleotide
aggcugcgcucggcgcaca

SEQ ID NO: 2433106 - RNA, 19 nt, Artificial Sequence
  Description of Artificial Sequence: Synthetic oligonucleotide
cgaucgcagucaucacaga

SEQ ID NO: 2433107 - RNA, 19 nt, Artificial Sequence
  Description of Artificial Sequence: Synthetic oligonucleotide
ccucgagaucaugcggaaa

SEQ ID NO: 2433108 - RNA, 19 nt, Artificial Sequence
  Description of Artificial Sequence: Synthetic oligonucleotide
gccaggccuaagugagggu

SEQ ID NO: 2433109 - RNA, 19 nt, Artificial Sequence
  Description of Artificial Sequence: Synthetic oligonucleotide
gggguaccucacaaucgau

SEQ ID NO: 2433110 - RNA, 19 nt, Artificial Sequence
  Description of Artificial Sequence: Synthetic oligonucleotide
ccacgccggucugcgaguc

SEQ ID NO: 2433111 - RNA, 19 nt, Artificial Sequence
  Description of Artificial Sequence: Synthetic oligonucleotide
gcguuguagcugcggcagu

SEQ ID NO: 2433112 - RNA, 19 nt, Artificial Sequence
  Description of Artificial Sequence: Synthetic oligonucleotide
gccacgccggucugcgagu

SEQ ID NO: 2433113 - RNA, 19 nt, Artificial Sequence
  Description of Artificial Sequence: Synthetic oligonucleotide
cgccggucugcgagucgag

SEQ ID NO: 2433114 - RNA, 19 nt, Artificial Sequence
  Description of Artificial Sequence: Synthetic oligonucleotide
ggcuccgccaugggagggu

SEQ ID NO: 2433115 - RNA, 19 nt, Artificial Sequence
  Description of Artificial Sequence: Synthetic oligonucleotide
ccucgaggacuggcccuuc

SEQ ID NO: 2433116 - RNA, 19 nt, Artificial Sequence
  Description of Artificial Sequence: Synthetic oligonucleotide
gggccacgccggucugcga

SEQ ID NO: 2433117 - RNA, 19 nt, Artificial Sequence
  Description of Artificial Sequence: Synthetic oligonucleotide
cuccaacagcgggcggggu

SEQ ID NO: 2433118 - RNA, 19 nt, Artificial Sequence
  Description of Artificial Sequence: Synthetic oligonucleotide
gcccgcggugggucuucuc

SEQ ID NO: 2433119 - RNA, 19 nt, Artificial Sequence
  Description of Artificial Sequence: Synthetic oligonucleotide
gugcuccaccggccucccu

SEQ ID NO: 2433120 - RNA, 19 nt, Artificial Sequence
  Description of Artificial Sequence: Synthetic oligonucleotide
cgggcgggguaaguguaga

SEQ ID NO: 2433121 - RNA, 19 nt, Artificial Sequence
  Description of Artificial Sequence: Synthetic oligonucleotide
gccgcagccugggguccuc

SEQ ID NO: 2433122 - RNA, 19 nt, Artificial Sequence
  Description of Artificial Sequence: Synthetic oligonucleotide
cgcugugcuccaccggccu

SEQ ID NO: 2433123 - RNA, 19 nt, Artificial Sequence
  Description of Artificial Sequence: Synthetic oligonucleotide
ccaggcccgcggugggucu

SEQ ID NO: 2433124 - RNA, 19 nt, Artificial Sequence
  Description of Artificial Sequence: Synthetic oligonucleotide
gcuccgccaugggaggguu

SEQ ID NO: 2433125 - RNA, 19 nt, Artificial Sequence
  Description of Artificial Sequence: Synthetic oligonucleotide
cgccuugguccccuccgcu

SEQ ID NO: 2433126 - RNA, 19 nt, Artificial Sequence
  Description of Artificial Sequence: Synthetic oligonucleotide
cgcggugggucuucuccau

SEQ ID NO: 2433127 - RNA, 19 nt, Artificial Sequence
  Description of Artificial Sequence: Synthetic oligonucleotide
ggccgcagccugggguccu

SEQ ID NO: 2433128 - RNA, 19 nt, Artificial Sequence
  Description of Artificial Sequence: Synthetic oligonucleotide
ccccuccgcugugcuccac

SEQ ID NO: 2433129 - RNA, 19 nt, Artificial Sequence
  Description of Artificial Sequence: Synthetic oligonucleotide
caggcccgcggugggucuu

SEQ ID NO: 2433130 - RNA, 19 nt, Artificial Sequence
  Description of Artificial Sequence: Synthetic oligonucleotide
ccgccaugggaggguucaa

SEQ ID NO: 2433131 - RNA, 19 nt, Artificial Sequence
  Description of Artificial Sequence: Synthetic oligonucleotide
ggcccgcggugggucuucu

SEQ ID NO: 2433132 - RNA, 19 nt, Artificial Sequence
  Description of Artificial Sequence: Synthetic oligonucleotide
cggcgcacaggcgcgcguu

SEQ ID NO: 2433133 - RNA, 19 nt, Artificial Sequence
  Description of Artificial Sequence: Synthetic oligonucleotide
aauauugucuuguaagauc

SEQ ID NO: 2433134 - RNA, 19 nt, Artificial Sequence
  Description of Artificial Sequence: Synthetic oligonucleotide
uuuccaacauauuugaccg

SEQ ID NO: 2433135 - RNA, 19 nt, Artificial Sequence
  Description of Artificial Sequence: Synthetic oligonucleotide
aacacaguuacucagucag

SEQ ID NO: 2433136 - RNA, 19 nt, Artificial Sequence
  Description of Artificial Sequence: Synthetic oligonucleotide
aaagcaaggauguaggugu

SEQ ID NO: 2433137 - RNA, 19 nt, Artificial Sequence
  Description of Artificial Sequence: Synthetic oligonucleotide
aaugauucaccaaagcagc

SEQ ID NO: 2433138 - RNA, 19 nt, Artificial Sequence
  Description of Artificial Sequence: Synthetic oligonucleotide
uggauuaaaauauuuaagu

SEQ ID NO: 2433139 - RNA, 19 nt, Artificial Sequence
  Description of Artificial Sequence: Synthetic oligonucleotide
uguaagaucuuuaucaggu

SEQ ID NO: 2433140 - RNA, 19 nt, Artificial Sequence
  Description of Artificial Sequence: Synthetic oligonucleotide
uuuuaaaagauuccggacu

SEQ ID NO: 2433141 - RNA, 19 nt, Artificial Sequence
  Description of Artificial Sequence: Synthetic oligonucleotide
uuuaaguuagcacagguua

SEQ ID NO: 2433142 - RNA, 19 nt, Artificial Sequence
  Description of Artificial Sequence: Synthetic oligonucleotide
ugugucuuuucacaaauag

SEQ ID NO: 2433143 - RNA, 19 nt, Artificial Sequence
  Description of Artificial Sequence: Synthetic oligonucleotide
aaauuuuaaaagauuccgg

SEQ ID NO: 2433144 - RNA, 19 nt, Artificial Sequence
  Description of Artificial Sequence: Synthetic oligonucleotide
aaaacacaguuacucaguc

SEQ ID NO: 2433145 - RNA, 19 nt, Artificial Sequence
  Description of Artificial Sequence: Synthetic oligonucleotide
gucaauauugucuuguaag

SEQ ID NO: 2433146 - RNA, 19 nt, Artificial Sequence
  Description of Artificial Sequence: Synthetic oligonucleotide
caaugauucaccaaagcag

SEQ ID NO: 2433147 - RNA, 19 nt, Artificial Sequence
  Description of Artificial Sequence: Synthetic oligonucleotide
aggcauuuagcacagugcc

SEQ ID NO: 2433148 - RNA, 19 nt, Artificial Sequence
  Description of Artificial Sequence: Synthetic oligonucleotide
aauagggauacauuucugu

SEQ ID NO: 2433149 - RNA, 19 nt, Artificial Sequence
  Description of Artificial Sequence: Synthetic oligonucleotide
ugaaaacacaguuacucag

SEQ ID NO: 2433150 - RNA, 19 nt, Artificial Sequence
  Description of Artificial Sequence: Synthetic oligonucleotide
aaagauuccggacuauuca

SEQ ID NO: 2433151 - RNA, 19 nt, Artificial Sequence
  Description of Artificial Sequence: Synthetic oligonucleotide
ucuggauucaugauuugag

SEQ ID NO: 2433152 - RNA, 19 nt, Artificial Sequence
  Description of Artificial Sequence: Synthetic oligonucleotide
ucaauauugucuuguaaga

SEQ ID NO: 2433153 - RNA, 19 nt, Artificial Sequence
  Description of Artificial Sequence: Synthetic oligonucleotide
aaugcuaccgcaaaacaug

SEQ ID NO: 2433154 - RNA, 19 nt, Artificial Sequence
  Description of Artificial Sequence: Synthetic oligonucleotide
ucugaaaacacaguuacuc

SEQ ID NO: 2433155 - RNA, 19 nt, Artificial Sequence
  Description of Artificial Sequence: Synthetic oligonucleotide
aaagcagcgccuccagacc

SEQ ID NO: 2433156 - RNA, 19 nt, Artificial Sequence
  Description of Artificial Sequence: Synthetic oligonucleotide
ucugauucagagccaaugc

SEQ ID NO: 2433157 - RNA, 19 nt, Artificial Sequence
  Description of Artificial Sequence: Synthetic oligonucleotide
aagauuccggacuauucag

SEQ ID NO: 2433158 - RNA, 19 nt, Artificial Sequence
  Description of Artificial Sequence: Synthetic oligonucleotide
uuuaucagguuuuccaaca

SEQ ID NO: 2433159 - RNA, 19 nt, Artificial Sequence
  Description of Artificial Sequence: Synthetic oligonucleotide
uauuuaaguuagcacaggu

SEQ ID NO: 2433160 - RNA, 19 nt, Artificial Sequence
  Description of Artificial Sequence: Synthetic oligonucleotide
auagggauacauuucuguc

SEQ ID NO: 2433161 - RNA, 19 nt, Artificial Sequence
  Description of Artificial Sequence: Synthetic oligonucleotide
aaaagauuccggacuauuc

SEQ ID NO: 2433162 - RNA, 19 nt, Artificial Sequence
  Description of Artificial Sequence: Synthetic oligonucleotide
aaaagcaaggauguaggug

SEQ ID NO: 2433163 - RNA, 19 nt, Artificial Sequence
  Description of Artificial Sequence: Synthetic oligonucleotide
aagccaaugauucaccaaa

SEQ ID NO: 2433164 - RNA, 19 nt, Artificial Sequence
  Description of Artificial Sequence: Synthetic oligonucleotide
guuagcacagguuacacuc

SEQ ID NO: 2433165 - RNA, 19 nt, Artificial Sequence
  Description of Artificial Sequence: Synthetic oligonucleotide
uuguaagaucuuuaucagg

SEQ ID NO: 2433166 - RNA, 19 nt, Artificial Sequence
  Description of Artificial Sequence: Synthetic oligonucleotide
aaauuuggcucugagggug

SEQ ID NO: 2433167 - RNA, 19 nt, Artificial Sequence
  Description of Artificial Sequence: Synthetic oligonucleotide
cuaccgcaaaacaugaugc

SEQ ID NO: 2433168 - RNA, 19 nt, Artificial Sequence
  Description of Artificial Sequence: Synthetic oligonucleotide
ucagucuguagcaaacugc

SEQ ID NO: 2433169 - RNA, 19 nt, Artificial Sequence
  Description of Artificial Sequence: Synthetic oligonucleotide
ugggagucugaaaacacag

SEQ ID NO: 2433170 - RNA, 19 nt, Artificial Sequence
  Description of Artificial Sequence: Synthetic oligonucleotide
ugaucagcaagucaccacu

SEQ ID NO: 2433171 - RNA, 19 nt, Artificial Sequence
  Description of Artificial Sequence: Synthetic oligonucleotide
cauauuugaccggacaugg

SEQ ID NO: 2433172 - RNA, 19 nt, Artificial Sequence
  Description of Artificial Sequence: Synthetic oligonucleotide
uguguuggguuucuugucc

SEQ ID NO: 2433173 - RNA, 19 nt, Artificial Sequence
  Description of Artificial Sequence: Synthetic oligonucleotide
ucagcaagucaccacucgg

SEQ ID NO: 2433174 - RNA, 19 nt, Artificial Sequence
  Description of Artificial Sequence: Synthetic oligonucleotide
uucagagccaaugcuaccg

SEQ ID NO: 2433175 - RNA, 19 nt, Artificial Sequence
  Description of Artificial Sequence: Synthetic oligonucleotide
agagcauagcauccaaagg

SEQ ID NO: 2433176 - RNA, 19 nt, Artificial Sequence
  Description of Artificial Sequence: Synthetic oligonucleotide
gauucaccaaagcagcgcc

SEQ ID NO: 2433177 - RNA, 19 nt, Artificial Sequence
  Description of Artificial Sequence: Synthetic oligonucleotide
uuaaguuagcacagguuac

SEQ ID NO: 2433178 - RNA, 19 nt, Artificial Sequence
  Description of Artificial Sequence: Synthetic oligonucleotide
uuaauuagggcuucuucuc

SEQ ID NO: 2433179 - RNA, 19 nt, Artificial Sequence
  Description of Artificial Sequence: Synthetic oligonucleotide
uauuugaccggacauggau

SEQ ID NO: 2433180 - RNA, 19 nt, Artificial Sequence
  Description of Artificial Sequence: Synthetic oligonucleotide
uucucuuaaaguuguacaa

SEQ ID NO: 2433181 - RNA, 19 nt, Artificial Sequence
  Description of Artificial Sequence: Synthetic oligonucleotide
uggagcggcugacagaggg

SEQ ID NO: 2433182 - RNA, 19 nt, Artificial Sequence
  Description of Artificial Sequence: Synthetic oligonucleotide
gaugucucccuuaauuagg

SEQ ID NO: 2433183 - RNA, 19 nt, Artificial Sequence
  Description of Artificial Sequence: Synthetic oligonucleotide
ugagagguuguaagguccg

SEQ ID NO: 2433184 - RNA, 19 nt, Artificial Sequence
  Description of Artificial Sequence: Synthetic oligonucleotide
cauggauuaaaauauuuaa

SEQ ID NO: 2433185 - RNA, 19 nt, Artificial Sequence
  Description of Artificial Sequence: Synthetic oligonucleotide
acagguuacacucucugga

SEQ ID NO: 2433186 - RNA, 19 nt, Artificial Sequence
  Description of Artificial Sequence: Synthetic oligonucleotide
cagagcauagcauccaaag

SEQ ID NO: 2433187 - RNA, 19 nt, Artificial Sequence
  Description of Artificial Sequence: Synthetic oligonucleotide
uggauucaugauuugagaa

SEQ ID NO: 2433188 - RNA, 19 nt, Artificial Sequence
  Description of Artificial Sequence: Synthetic oligonucleotide
ucuguagcaaacugcaaaa

SEQ ID NO: 2433189 - RNA, 19 nt, Artificial Sequence
  Description of Artificial Sequence: Synthetic oligonucleotide
ucuggagcggcugacagag

SEQ ID NO: 2433190 - RNA, 19 nt, Artificial Sequence
  Description of Artificial Sequence: Synthetic oligonucleotide
agaccaggcauuuagcaca

SEQ ID NO: 2433191 - RNA, 19 nt, Artificial Sequence
  Description of Artificial Sequence: Synthetic oligonucleotide
acugaggugagaugccugg

SEQ ID NO: 2433192 - RNA, 19 nt, Artificial Sequence
  Description of Artificial Sequence: Synthetic oligonucleotide
agcacagugccacugaggu

SEQ ID NO: 2433193 - RNA, 19 nt, Artificial Sequence
  Description of Artificial Sequence: Synthetic oligonucleotide
uccaaagggcaaaugguga

SEQ ID NO: 2433194 - RNA, 19 nt, Artificial Sequence
  Description of Artificial Sequence: Synthetic oligonucleotide
auauugucuuguaagaucu

SEQ ID NO: 2433195 - RNA, 19 nt, Artificial Sequence
  Description of Artificial Sequence: Synthetic oligonucleotide
acaaauagggauacauuuc

SEQ ID NO: 2433196 - RNA, 19 nt, Artificial Sequence
  Description of Artificial Sequence: Synthetic oligonucleotide
aaguuagcacagguuacac

SEQ ID NO: 2433197 - RNA, 19 nt, Artificial Sequence
  Description of Artificial Sequence: Synthetic oligonucleotide
uucacaaauagggauacau

SEQ ID NO: 2433198 - RNA, 19 nt, Artificial Sequence
  Description of Artificial Sequence: Synthetic oligonucleotide
ugauucagagccaaugcua

SEQ ID NO: 2433199 - RNA, 19 nt, Artificial Sequence
  Description of Artificial Sequence: Synthetic oligonucleotide
gcaaauggugacuuggccg

SEQ ID NO: 2433200 - RNA, 19 nt, Artificial Sequence
  Description of Artificial Sequence: Synthetic oligonucleotide
uacucagucagcagggacu

SEQ ID NO: 2433201 - RNA, 19 nt, Artificial Sequence
  Description of Artificial Sequence: Synthetic oligonucleotide
gacuauucagucuguagca

SEQ ID NO: 2433202 - RNA, 19 nt, Artificial Sequence
  Description of Artificial Sequence: Synthetic oligonucleotide
cugagagguuguaaggucc

SEQ ID NO: 2433203 - RNA, 19 nt, Artificial Sequence
  Description of Artificial Sequence: Synthetic oligonucleotide
uuuucacaaauagggauac

SEQ ID NO: 2433204 - RNA, 19 nt, Artificial Sequence
  Description of Artificial Sequence: Synthetic oligonucleotide
gcauccaaagggcaaaugg

SEQ ID NO: 2433205 - RNA, 19 nt, Artificial Sequence
  Description of Artificial Sequence: Synthetic oligonucleotide
ugagaugccuggcaucuug

SEQ ID NO: 2433206 - RNA, 19 nt, Artificial Sequence
  Description of Artificial Sequence: Synthetic oligonucleotide
ggacuauucagucuguagc

SEQ ID NO: 2433207 - RNA, 19 nt, Artificial Sequence
  Description of Artificial Sequence: Synthetic oligonucleotide
aaacacaguuacucaguca

SEQ ID NO: 2433208 - RNA, 19 nt, Artificial Sequence
  Description of Artificial Sequence: Synthetic oligonucleotide
agaccugggagucugaaaa

SEQ ID NO: 2433209 - RNA, 19 nt, Artificial Sequence
  Description of Artificial Sequence: Synthetic oligonucleotide
uaauuagggcuucuucucu

SEQ ID NO: 2433210 - RNA, 19 nt, Artificial Sequence
  Description of Artificial Sequence: Synthetic oligonucleotide
accugguucugauucagag

SEQ ID NO: 2433211 - RNA, 19 nt, Artificial Sequence
  Description of Artificial Sequence: Synthetic oligonucleotide
acggagaccaggcauuuag

SEQ ID NO: 2433212 - RNA, 19 nt, Artificial Sequence
  Description of Artificial Sequence: Synthetic oligonucleotide
uguaagguccguuggcuga

SEQ ID NO: 2433213 - RNA, 19 nt, Artificial Sequence
  Description of Artificial Sequence: Synthetic oligonucleotide
uuuagcacagugccacuga

SEQ ID NO: 2433214 - RNA, 19 nt, Artificial Sequence
  Description of Artificial Sequence: Synthetic oligonucleotide
caaagcagcgccuccagac

SEQ ID NO: 2433215 - RNA, 19 nt, Artificial Sequence
  Description of Artificial Sequence: Synthetic oligonucleotide
uuagcacagugccacugag

SEQ ID NO: 2433216 - RNA, 19 nt, Artificial Sequence
  Description of Artificial Sequence: Synthetic oligonucleotide
auauuuaaguuagcacagg

SEQ ID NO: 2433217 - RNA, 19 nt, Artificial Sequence
  Description of Artificial Sequence: Synthetic oligonucleotide
caggcauuuagcacagugc

SEQ ID NO: 2433218 - RNA, 19 nt, Artificial Sequence
  Description of Artificial Sequence: Synthetic oligonucleotide
uccaacauauuugaccgga

SEQ ID NO: 2433219 - RNA, 19 nt, Artificial Sequence
  Description of Artificial Sequence: Synthetic oligonucleotide
ugucuuguaagaucuuuau

SEQ ID NO: 2433220 - RNA, 19 nt, Artificial Sequence
  Description of Artificial Sequence: Synthetic oligonucleotide
agguuguaagguccguugg

SEQ ID NO: 2433221 - RNA, 19 nt, Artificial Sequence
  Description of Artificial Sequence: Synthetic oligonucleotide
ucuuaaaguuguacaaauu

SEQ ID NO: 2433222 - RNA, 19 nt, Artificial Sequence
  Description of Artificial Sequence: Synthetic oligonucleotide
uaaguuagcacagguuaca

SEQ ID NO: 2433223 - RNA, 19 nt, Artificial Sequence
  Description of Artificial Sequence: Synthetic oligonucleotide
gauuccggacuauucaguc

SEQ ID NO: 2433224 - RNA, 19 nt, Artificial Sequence
  Description of Artificial Sequence: Synthetic oligonucleotide
cacucggggaacuuggggc

SEQ ID NO: 2433225 - RNA, 19 nt, Artificial Sequence
  Description of Artificial Sequence: Synthetic oligonucleotide
uuugaccggacauggauua

SEQ ID NO: 2433226 - RNA, 19 nt, Artificial Sequence
  Description of Artificial Sequence: Synthetic oligonucleotide
ugauucaccaaagcagcgc

SEQ ID NO: 2433227 - RNA, 19 nt, Artificial Sequence
  Description of Artificial Sequence: Synthetic oligonucleotide
gagaccaggcauuuagcac

SEQ ID NO: 2433228 - RNA, 19 nt, Artificial Sequence
  Description of Artificial Sequence: Synthetic oligonucleotide
uuacucagucagcagggac

SEQ ID NO: 2433229 - RNA, 19 nt, Artificial Sequence
  Description of Artificial Sequence: Synthetic oligonucleotide
agggauacauuucugucaa

SEQ ID NO: 2433230 - RNA, 19 nt, Artificial Sequence
  Description of Artificial Sequence: Synthetic oligonucleotide
uugagcuagcucuucacau

SEQ ID NO: 2433231 - RNA, 19 nt, Artificial Sequence
  Description of Artificial Sequence: Synthetic oligonucleotide
acuuggggcuuacggagac

SEQ ID NO: 2433232 - RNA, 19 nt, Artificial Sequence
  Description of Artificial Sequence: Synthetic oligonucleotide
caauguguuggguuucuug

SEQ ID NO: 2433233 - RNA, 19 nt, Artificial Sequence
  Description of Artificial Sequence: Synthetic oligonucleotide
cagcaagucaccacucggg

SEQ ID NO: 2433234 - RNA, 19 nt, Artificial Sequence
  Description of Artificial Sequence: Synthetic oligonucleotide
aaauagggauacauuucug

SEQ ID NO: 2433235 - RNA, 19 nt, Artificial Sequence
  Description of Artificial Sequence: Synthetic oligonucleotide
aagguccguuggcugaccg

SEQ ID NO: 2433236 - RNA, 19 nt, Artificial Sequence
  Description of Artificial Sequence: Synthetic oligonucleotide
gggaacuuggggcuuacgg

SEQ ID NO: 2433237 - RNA, 19 nt, Artificial Sequence
  Description of Artificial Sequence: Synthetic oligonucleotide
gaugugcagcuucccauag

SEQ ID NO: 2433238 - RNA, 19 nt, Artificial Sequence
  Description of Artificial Sequence: Synthetic oligonucleotide
uugucuuguaagaucuuua

SEQ ID NO: 2433239 - RNA, 19 nt, Artificial Sequence
  Description of Artificial Sequence: Synthetic oligonucleotide
ucugugguaacggugcuuc

SEQ ID NO: 2433240 - RNA, 19 nt, Artificial Sequence
  Description of Artificial Sequence: Synthetic oligonucleotide
acaguuacucagucagcag

SEQ ID NO: 2433241 - RNA, 19 nt, Artificial Sequence
  Description of Artificial Sequence: Synthetic oligonucleotide
agaagccaaugauucacca

SEQ ID NO: 2433242 - RNA, 19 nt, Artificial Sequence
  Description of Artificial Sequence: Synthetic oligonucleotide
agaucuuuaucagguuuuc

SEQ ID NO: 2433243 - RNA, 19 nt, Artificial Sequence
  Description of Artificial Sequence: Synthetic oligonucleotide
uuagcacagguuacacucu

SEQ ID NO: 2433244 - RNA, 19 nt, Artificial Sequence
  Description of Artificial Sequence: Synthetic oligonucleotide
uucacaucucucugaucag

SEQ ID NO: 2433245 - RNA, 19 nt, Artificial Sequence
  Description of Artificial Sequence: Synthetic oligonucleotide
aauuuggcucugagggugg

SEQ ID NO: 2433246 - RNA, 19 nt, Artificial Sequence
  Description of Artificial Sequence: Synthetic oligonucleotide
ugccuuucugugguaacgg

SEQ ID NO: 2433247 - RNA, 19 nt, Artificial Sequence
  Description of Artificial Sequence: Synthetic oligonucleotide
ucccauagaccucaucaaa

SEQ ID NO: 2433248 - RNA, 19 nt, Artificial Sequence
  Description of Artificial Sequence: Synthetic oligonucleotide
ggaugucucccuuaauuag

SEQ ID NO: 2433249 - RNA, 19 nt, Artificial Sequence
  Description of Artificial Sequence: Synthetic oligonucleotide
gcuaccgcaaaacaugaug

SEQ ID NO: 2433250 - RNA, 19 nt, Artificial Sequence
  Description of Artificial Sequence: Synthetic oligonucleotide
uuccaacauauuugaccgg

SEQ ID NO: 2433251 - RNA, 19 nt, Artificial Sequence
  Description of Artificial Sequence: Synthetic oligonucleotide
ugugguaacggugcuuccc

SEQ ID NO: 2433252 - RNA, 19 nt, Artificial Sequence
  Description of Artificial Sequence: Synthetic oligonucleotide
cuucccuugcuugagcuag

SEQ ID NO: 2433253 - RNA, 19 nt, Artificial Sequence
  Description of Artificial Sequence: Synthetic oligonucleotide
gacuuggccguugaugugc

SEQ ID NO: 2433254 - RNA, 19 nt, Artificial Sequence
  Description of Artificial Sequence: Synthetic oligonucleotide
ugagcuagcucuucacauc

SEQ ID NO: 2433255 - RNA, 19 nt, Artificial Sequence
  Description of Artificial Sequence: Synthetic oligonucleotide
cuucuuuagcagcaaugug

SEQ ID NO: 2433256 - RNA, 19 nt, Artificial Sequence
  Description of Artificial Sequence: Synthetic oligonucleotide
cacagugccacugagguga

SEQ ID NO: 2433257 - RNA, 19 nt, Artificial Sequence
  Description of Artificial Sequence: Synthetic oligonucleotide
aguuagcacagguuacacu

SEQ ID NO: 2433258 - RNA, 19 nt, Artificial Sequence
  Description of Artificial Sequence: Synthetic oligonucleotide
aagcagcgccuccagaccu

SEQ ID NO: 2433259 - RNA, 19 nt, Artificial Sequence
  Description of Artificial Sequence: Synthetic oligonucleotide
cagucuguagcaaacugca

SEQ ID NO: 2433260 - RNA, 19 nt, Artificial Sequence
  Description of Artificial Sequence: Synthetic oligonucleotide
acucuggagcggcugacag

SEQ ID NO: 2433261 - RNA, 19 nt, Artificial Sequence
  Description of Artificial Sequence: Synthetic oligonucleotide
uaucagguuuuccaacaua

SEQ ID NO: 2433262 - RNA, 19 nt, Artificial Sequence
  Description of Artificial Sequence: Synthetic oligonucleotide
auccaaagggcaaauggug

SEQ ID NO: 2433263 - RNA, 19 nt, Artificial Sequence
  Description of Artificial Sequence: Synthetic oligonucleotide
acucucuggauucaugauu

SEQ ID NO: 2433264 - RNA, 19 nt, Artificial Sequence
  Description of Artificial Sequence: Synthetic oligonucleotide
guaacggugcuucccuugc

SEQ ID NO: 2433265 - RNA, 19 nt, Artificial Sequence
  Description of Artificial Sequence: Synthetic oligonucleotide
caaauagggauacauuucu

SEQ ID NO: 2433266 - RNA, 19 nt, Artificial Sequence
  Description of Artificial Sequence: Synthetic oligonucleotide
ugcuugagcuagcucuuca

SEQ ID NO: 2433267 - RNA, 19 nt, Artificial Sequence
  Description of Artificial Sequence: Synthetic oligonucleotide
aaagggcaaauggugacuu

SEQ ID NO: 2433268 - RNA, 19 nt, Artificial Sequence
  Description of Artificial Sequence: Synthetic oligonucleotide
cucugaucagcaagucacc

SEQ ID NO: 2433269 - RNA, 19 nt, Artificial Sequence
  Description of Artificial Sequence: Synthetic oligonucleotide
auuuagcacagugccacug

SEQ ID NO: 2433270 - RNA, 19 nt, Artificial Sequence
  Description of Artificial Sequence: Synthetic oligonucleotide
caaaacaugaugcucuccu

SEQ ID NO: 2433271 - RNA, 19 nt, Artificial Sequence
  Description of Artificial Sequence: Synthetic oligonucleotide
uuggccguugaugugcagc

SEQ ID NO: 2433272 - RNA, 19 nt, Artificial Sequence
  Description of Artificial Sequence: Synthetic oligonucleotide
acauggauuaaaauauuua

SEQ ID NO: 2433273 - RNA, 19 nt, Artificial Sequence
  Description of Artificial Sequence: Synthetic oligonucleotide
auuccggacuauucagucu

SEQ ID NO: 2433274 - RNA, 19 nt, Artificial Sequence
  Description of Artificial Sequence: Synthetic oligonucleotide
gguuacacucucuggauuc

SEQ ID NO: 2433275 - RNA, 19 nt, Artificial Sequence
  Description of Artificial Sequence: Synthetic oligonucleotide
gagaagccaaugauucacc

SEQ ID NO: 2433276 - RNA, 19 nt, Artificial Sequence
  Description of Artificial Sequence: Synthetic oligonucleotide
augauucaccaaagcagcg

SEQ ID NO: 2433277 - RNA, 19 nt, Artificial Sequence
  Description of Artificial Sequence: Synthetic oligonucleotide
guugaugugcagcuuccca

SEQ ID NO: 2433278 - RNA, 19 nt, Artificial Sequence
  Description of Artificial Sequence: Synthetic oligonucleotide
gucuuguaagaucuuuauc

SEQ ID NO: 2433279 - RNA, 19 nt, Artificial Sequence
  Description of Artificial Sequence: Synthetic oligonucleotide
gaagccaaugauucaccaa

SEQ ID NO: 2433280 - RNA, 19 nt, Artificial Sequence
  Description of Artificial Sequence: Synthetic oligonucleotide
uggccguugaugugcagcu

SEQ ID NO: 2433281 - RNA, 19 nt, Artificial Sequence
  Description of Artificial Sequence: Synthetic oligonucleotide
ucaccaaagcagcgccucc

SEQ ID NO: 2433282 - RNA, 19 nt, Artificial Sequence
  Description of Artificial Sequence: Synthetic oligonucleotide
caacauauuugaccggaca

SEQ ID NO: 2433283 - RNA, 19 nt, Artificial Sequence
  Description of Artificial Sequence: Synthetic oligonucleotide
agugccacugaggugagau

SEQ ID NO: 2433284 - RNA, 19 nt, Artificial Sequence
  Description of Artificial Sequence: Synthetic oligonucleotide
auuuaaguuagcacagguu

SEQ ID NO: 2433285 - RNA, 19 nt, Artificial Sequence
  Description of Artificial Sequence: Synthetic oligonucleotide
gagaugccuggcaucuugg

SEQ ID NO: 2433286 - RNA, 19 nt, Artificial Sequence
  Description of Artificial Sequence: Synthetic oligonucleotide
ggagaagccaaugauucac

SEQ ID NO: 2433287 - RNA, 19 nt, Artificial Sequence
  Description of Artificial Sequence: Synthetic oligonucleotide
ugaugcucuccuggggagg

SEQ ID NO: 2433288 - RNA, 19 nt, Artificial Sequence
  Description of Artificial Sequence: Synthetic oligonucleotide
acacaguuacucagucagc

SEQ ID NO: 2433289 - RNA, 19 nt, Artificial Sequence
  Description of Artificial Sequence: Synthetic oligonucleotide
cauagcauccaaagggcaa

SEQ ID NO: 2433290 - RNA, 19 nt, Artificial Sequence
  Description of Artificial Sequence: Synthetic oligonucleotide
guguuggguuucuuguccc

SEQ ID NO: 2433291 - RNA, 19 nt, Artificial Sequence
  Description of Artificial Sequence: Synthetic oligonucleotide
uagcacagguuacacucuc

SEQ ID NO: 2433292 - RNA, 19 nt, Artificial Sequence
  Description of Artificial Sequence: Synthetic oligonucleotide
cacaguuacucagucagca

SEQ ID NO: 2433293 - RNA, 19 nt, Artificial Sequence
  Description of Artificial Sequence: Synthetic oligonucleotide
uucaccaaagcagcgccuc

SEQ ID NO: 2433294 - RNA, 19 nt, Artificial Sequence
  Description of Artificial Sequence: Synthetic oligonucleotide
ggcaaauggugacuuggcc

SEQ ID NO: 2433295 - RNA, 19 nt, Artificial Sequence
  Description of Artificial Sequence: Synthetic oligonucleotide
uguuggguuucuugucccu

SEQ ID NO: 2433296 - RNA, 19 nt, Artificial Sequence
  Description of Artificial Sequence: Synthetic oligonucleotide
agaccucaucaaauuuggc

SEQ ID NO: 2433297 - RNA, 19 nt, Artificial Sequence
  Description of Artificial Sequence: Synthetic oligonucleotide
ucacaucuugguuuucauu

SEQ ID NO: 2433298 - RNA, 19 nt, Artificial Sequence
  Description of Artificial Sequence: Synthetic oligonucleotide
gucucccuuaauuagggcu

SEQ ID NO: 2433299 - RNA, 19 nt, Artificial Sequence
  Description of Artificial Sequence: Synthetic oligonucleotide
cuugagcuagcucuucaca

SEQ ID NO: 2433300 - RNA, 19 nt, Artificial Sequence
  Description of Artificial Sequence: Synthetic oligonucleotide
caaauggugacuuggccgu

SEQ ID NO: 2433301 - RNA, 19 nt, Artificial Sequence
  Description of Artificial Sequence: Synthetic oligonucleotide
cuauucagucuguagcaaa

SEQ ID NO: 2433302 - RNA, 19 nt, Artificial Sequence
  Description of Artificial Sequence: Synthetic oligonucleotide
cucuuaaaguuguacaaau

SEQ ID NO: 2433303 - RNA, 19 nt, Artificial Sequence
  Description of Artificial Sequence: Synthetic oligonucleotide
cuuuagcagcaauguguug

SEQ ID NO: 2433304 - RNA, 19 nt, Artificial Sequence
  Description of Artificial Sequence: Synthetic oligonucleotide
cauccaaagggcaaauggu

SEQ ID NO: 2433305 - RNA, 19 nt, Artificial Sequence
  Description of Artificial Sequence: Synthetic oligonucleotide
ugacuuggccguugaugug

SEQ ID NO: 2433306 - RNA, 19 nt, Artificial Sequence
  Description of Artificial Sequence: Synthetic oligonucleotide
auuagggcuucuucucuua

SEQ ID NO: 2433307 - RNA, 19 nt, Artificial Sequence
  Description of Artificial Sequence: Synthetic oligonucleotide
ugucccugggcacguggca

SEQ ID NO: 2433308 - RNA, 19 nt, Artificial Sequence
  Description of Artificial Sequence: Synthetic oligonucleotide
uuggcugaccguccucuuc

SEQ ID NO: 2433309 - RNA, 19 nt, Artificial Sequence
  Description of Artificial Sequence: Synthetic oligonucleotide
gguaacggugcuucccuug

SEQ ID NO: 2433310 - RNA, 19 nt, Artificial Sequence
  Description of Artificial Sequence: Synthetic oligonucleotide
agaggggaagcugccuuuc

SEQ ID NO: 2433311 - RNA, 19 nt, Artificial Sequence
  Description of Artificial Sequence: Synthetic oligonucleotide
cugggcacguggcagagca

SEQ ID NO: 2433312 - RNA, 19 nt, Artificial Sequence
  Description of Artificial Sequence: Synthetic oligonucleotide
acuauucagucuguagcaa

SEQ ID NO: 2433313 - RNA, 19 nt, Artificial Sequence
  Description of Artificial Sequence: Synthetic oligonucleotide
accggacauggauuaaaau

SEQ ID NO: 2433314 - RNA, 19 nt, Artificial Sequence
  Description of Artificial Sequence: Synthetic oligonucleotide
cacguggcagagcauagca

SEQ ID NO: 2433315 - RNA, 19 nt, Artificial Sequence
  Description of Artificial Sequence: Synthetic oligonucleotide
ugaccggacauggauuaaa

SEQ ID NO: 2433316 - RNA, 19 nt, Artificial Sequence
  Description of Artificial Sequence: Synthetic oligonucleotide
agauuccggacuauucagu

SEQ ID NO: 2433317 - RNA, 19 nt, Artificial Sequence
  Description of Artificial Sequence: Synthetic oligonucleotide
aacuuggggcuuacggaga

SEQ ID NO: 2433318 - RNA, 19 nt, Artificial Sequence
  Description of Artificial Sequence: Synthetic oligonucleotide
ccuuucugugguaacggug

SEQ ID NO: 2433319 - RNA, 19 nt, Artificial Sequence
  Description of Artificial Sequence: Synthetic oligonucleotide
ggggcuuacggagaccagg

SEQ ID NO: 2433320 - RNA, 19 nt, Artificial Sequence
  Description of Artificial Sequence: Synthetic oligonucleotide
auuugaccggacauggauu

SEQ ID NO: 2433321 - RNA, 19 nt, Artificial Sequence
  Description of Artificial Sequence: Synthetic oligonucleotide
gagccaaugcuaccgcaaa

SEQ ID NO: 2433322 - RNA, 19 nt, Artificial Sequence
  Description of Artificial Sequence: Synthetic oligonucleotide
ccggacauggauuaaaaua

SEQ ID NO: 2433323 - RNA, 19 nt, Artificial Sequence
  Description of Artificial Sequence: Synthetic oligonucleotide
ggauacauuucugucaaua

SEQ ID NO: 2433324 - RNA, 19 nt, Artificial Sequence
  Description of Artificial Sequence: Synthetic oligonucleotide
caaugcuaccgcaaaacau

SEQ ID NO: 2433325 - RNA, 19 nt, Artificial Sequence
  Description of Artificial Sequence: Synthetic oligonucleotide
auggugacuuggccguuga

SEQ ID NO: 2433326 - RNA, 19 nt, Artificial Sequence
  Description of Artificial Sequence: Synthetic oligonucleotide
gcugagagguuguaagguc

SEQ ID NO: 2433327 - RNA, 19 nt, Artificial Sequence
  Description of Artificial Sequence: Synthetic oligonucleotide
cucuggauucaugauuuga

SEQ ID NO: 2433328 - RNA, 19 nt, Artificial Sequence
  Description of Artificial Sequence: Synthetic oligonucleotide
cugauucagagccaaugcu

SEQ ID NO: 2433329 - RNA, 19 nt, Artificial Sequence
  Description of Artificial Sequence: Synthetic oligonucleotide
gaugcucuccuggggagga

SEQ ID NO: 2433330 - RNA, 19 nt, Artificial Sequence
  Description of Artificial Sequence: Synthetic oligonucleotide
augcuaccgcaaaacauga

SEQ ID NO: 2433331 - RNA, 19 nt, Artificial Sequence
  Description of Artificial Sequence: Synthetic oligonucleotide
ggagucugaaaacacaguu

SEQ ID NO: 2433332 - RNA, 19 nt, Artificial Sequence
  Description of Artificial Sequence: Synthetic oligonucleotide
gaccguccucuucuuuagc

SEQ ID NO: 2433333 - RNA, 19 nt, Artificial Sequence
  Description of Artificial Sequence: Synthetic oligonucleotide
ugcuaccgcaaaacaugau

SEQ ID NO: 2433334 - RNA, 19 nt, Artificial Sequence
  Description of Artificial Sequence: Synthetic oligonucleotide
uggggcuuacggagaccag

SEQ ID NO: 2433335 - RNA, 19 nt, Artificial Sequence
  Description of Artificial Sequence: Synthetic oligonucleotide
agcauccaaagggcaaaug

SEQ ID NO: 2433336 - RNA, 19 nt, Artificial Sequence
  Description of Artificial Sequence: Synthetic oligonucleotide
agccaaugcuaccgcaaaa

SEQ ID NO: 2433337 - RNA, 19 nt, Artificial Sequence
  Description of Artificial Sequence: Synthetic oligonucleotide
gccaaugcuaccgcaaaac

SEQ ID NO: 2433338 - RNA, 19 nt, Artificial Sequence
  Description of Artificial Sequence: Synthetic oligonucleotide
gggacuggcugagagguug

SEQ ID NO: 2433339 - RNA, 19 nt, Artificial Sequence
  Description of Artificial Sequence: Synthetic oligonucleotide
uuacucuggagcggcugac

SEQ ID NO: 2433340 - RNA, 19 nt, Artificial Sequence
  Description of Artificial Sequence: Synthetic oligonucleotide
ccugggagucugaaaacac

SEQ ID NO: 2433341 - RNA, 19 nt, Artificial Sequence
  Description of Artificial Sequence: Synthetic oligonucleotide
agcaauguguuggguuucu

SEQ ID NO: 2433342 - RNA, 19 nt, Artificial Sequence
  Description of Artificial Sequence: Synthetic oligonucleotide
agagccaaugcuaccgcaa

SEQ ID NO: 2433343 - RNA, 19 nt, Artificial Sequence
  Description of Artificial Sequence: Synthetic oligonucleotide
uacucuggagcggcugaca

SEQ ID NO: 2433344 - RNA, 19 nt, Artificial Sequence
  Description of Artificial Sequence: Synthetic oligonucleotide
guaagguccguuggcugac

SEQ ID NO: 2433345 - RNA, 19 nt, Artificial Sequence
  Description of Artificial Sequence: Synthetic oligonucleotide
auauuugaccggacaugga

SEQ ID NO: 2433346 - RNA, 19 nt, Artificial Sequence
  Description of Artificial Sequence: Synthetic oligonucleotide
uuacacucucuggauucau

SEQ ID NO: 2433347 - RNA, 19 nt, Artificial Sequence
  Description of Artificial Sequence: Synthetic oligonucleotide
cugaggugagaugccuggc

SEQ ID NO: 2433348 - RNA, 19 nt, Artificial Sequence
  Description of Artificial Sequence: Synthetic oligonucleotide
agagguuguaagguccguu

SEQ ID NO: 2433349 - RNA, 19 nt, Artificial Sequence
  Description of Artificial Sequence: Synthetic oligonucleotide
gaccggacauggauuaaaa

SEQ ID NO: 2433350 - RNA, 19 nt, Artificial Sequence
  Description of Artificial Sequence: Synthetic oligonucleotide
cuuacggagaccaggcauu

SEQ ID NO: 2433351 - RNA, 19 nt, Artificial Sequence
  Description of Artificial Sequence: Synthetic oligonucleotide
uaagguccguuggcugacc

SEQ ID NO: 2433352 - RNA, 19 nt, Artificial Sequence
  Description of Artificial Sequence: Synthetic oligonucleotide
uuacggagaccaggcauuu

SEQ ID NO: 2433353 - RNA, 19 nt, Artificial Sequence
  Description of Artificial Sequence: Synthetic oligonucleotide
cauagaccucaucaaauuu

SEQ ID NO: 2433354 - RNA, 19 nt, Artificial Sequence
  Description of Artificial Sequence: Synthetic oligonucleotide
gucccugggcacguggcag

SEQ ID NO: 2433355 - RNA, 19 nt, Artificial Sequence
  Description of Artificial Sequence: Synthetic oligonucleotide
gugguaacggugcuucccu

SEQ ID NO: 2433356 - RNA, 19 nt, Artificial Sequence
  Description of Artificial Sequence: Synthetic oligonucleotide
agguccguuggcugaccgu

SEQ ID NO: 2433357 - RNA, 19 nt, Artificial Sequence
  Description of Artificial Sequence: Synthetic oligonucleotide
ucccuugcuugagcuagcu

SEQ ID NO: 2433358 - RNA, 19 nt, Artificial Sequence
  Description of Artificial Sequence: Synthetic oligonucleotide
guuacucagucagcaggga

SEQ ID NO: 2433359 - RNA, 19 nt, Artificial Sequence
  Description of Artificial Sequence: Synthetic oligonucleotide
cggacuauucagucuguag

SEQ ID NO: 2433360 - RNA, 19 nt, Artificial Sequence
  Description of Artificial Sequence: Synthetic oligonucleotide
gggcuuacggagaccaggc

SEQ ID NO: 2433361 - RNA, 19 nt, Artificial Sequence
  Description of Artificial Sequence: Synthetic oligonucleotide
cagagccaaugcuaccgca

SEQ ID NO: 2433362 - RNA, 19 nt, Artificial Sequence
  Description of Artificial Sequence: Synthetic oligonucleotide
agcuagcucuucacaucuc

SEQ ID NO: 2433363 - RNA, 19 nt, Artificial Sequence
  Description of Artificial Sequence: Synthetic oligonucleotide
cuuggggcuuacggagacc

SEQ ID NO: 2433364 - RNA, 19 nt, Artificial Sequence
  Description of Artificial Sequence: Synthetic oligonucleotide
gcaaaacaugaugcucucc

SEQ ID NO: 2433365 - RNA, 19 nt, Artificial Sequence
  Description of Artificial Sequence: Synthetic oligonucleotide
ccguugaugugcagcuucc

SEQ ID NO: 2433366 - RNA, 19 nt, Artificial Sequence
  Description of Artificial Sequence: Synthetic oligonucleotide
ucccucacuuuggccagca

SEQ ID NO: 2433367 - RNA, 19 nt, Artificial Sequence
  Description of Artificial Sequence: Synthetic oligonucleotide
cucccuuaauuagggcuuc

SEQ ID NO: 2433368 - RNA, 19 nt, Artificial Sequence
  Description of Artificial Sequence: Synthetic oligonucleotide
ucccuuaauuagggcuucu

SEQ ID NO: 2433369 - RNA, 19 nt, Artificial Sequence
  Description of Artificial Sequence: Synthetic oligonucleotide
cacuuccucugagaacaug

SEQ ID NO: 2433370 - RNA, 19 nt, Artificial Sequence
  Description of Artificial Sequence: Synthetic oligonucleotide
ccacucggggaacuugggg

SEQ ID NO: 2433371 - RNA, 19 nt, Artificial Sequence
  Description of Artificial Sequence: Synthetic oligonucleotide
ccaaugcuaccgcaaaaca

SEQ ID NO: 2433372 - RNA, 19 nt, Artificial Sequence
  Description of Artificial Sequence: Synthetic oligonucleotide
gguccguuggcugaccguc

SEQ ID NO: 2433373 - RNA, 19 nt, Artificial Sequence
  Description of Artificial Sequence: Synthetic oligonucleotide
gggcaaauggugacuuggc

SEQ ID NO: 2433374 - RNA, 19 nt, Artificial Sequence
  Description of Artificial Sequence: Synthetic oligonucleotide
cuuggccguugaugugcag

SEQ ID NO: 2433375 - RNA, 19 nt, Artificial Sequence
  Description of Artificial Sequence: Synthetic oligonucleotide
ugguaacggugcuucccuu

SEQ ID NO: 2433376 - RNA, 19 nt, Artificial Sequence
  Description of Artificial Sequence: Synthetic oligonucleotide
uugaccggacauggauuaa

SEQ ID NO: 2433377 - RNA, 19 nt, Artificial Sequence
  Description of Artificial Sequence: Synthetic oligonucleotide
cggacauggauuaaaauau

SEQ ID NO: 2433378 - RNA, 19 nt, Artificial Sequence
  Description of Artificial Sequence: Synthetic oligonucleotide
cagggacuggcugagaggu

SEQ ID NO: 2433379 - RNA, 19 nt, Artificial Sequence
  Description of Artificial Sequence: Synthetic oligonucleotide
agcugccuuucugugguaa

SEQ ID NO: 2433380 - RNA, 19 nt, Artificial Sequence
  Description of Artificial Sequence: Synthetic oligonucleotide
ggugagaugccuggcaucu

SEQ ID NO: 2433381 - RNA, 19 nt, Artificial Sequence
  Description of Artificial Sequence: Synthetic oligonucleotide
uggugacuuggccguugau

SEQ ID NO: 2433382 - RNA, 19 nt, Artificial Sequence
  Description of Artificial Sequence: Synthetic oligonucleotide
cucuggagcggcugacaga

SEQ ID NO: 2433383 - RNA, 19 nt, Artificial Sequence
  Description of Artificial Sequence: Synthetic oligonucleotide
gggaggaugucucccuuaa

SEQ ID NO: 2433384 - RNA, 19 nt, Artificial Sequence
  Description of Artificial Sequence: Synthetic oligonucleotide
cuggagcggcugacagagg

SEQ ID NO: 2433385 - RNA, 19 nt, Artificial Sequence
  Description of Artificial Sequence: Synthetic oligonucleotide
gcugccuuucugugguaac

SEQ ID NO: 2433386 - RNA, 19 nt, Artificial Sequence
  Description of Artificial Sequence: Synthetic oligonucleotide
acuuggccguugaugugca

SEQ ID NO: 2433387 - RNA, 19 nt, Artificial Sequence
  Description of Artificial Sequence: Synthetic oligonucleotide
gcggcugacagaggggaag

SEQ ID NO: 2433388 - RNA, 19 nt, Artificial Sequence
  Description of Artificial Sequence: Synthetic oligonucleotide
ggcauuuagcacagugcca

SEQ ID NO: 2433389 - RNA, 19 nt, Artificial Sequence
  Description of Artificial Sequence: Synthetic oligonucleotide
cagguuacacucucuggau

SEQ ID NO: 2433390 - RNA, 19 nt, Artificial Sequence
  Description of Artificial Sequence: Synthetic oligonucleotide
augugucuuuucacaaaua

SEQ ID NO: 2433391 - RNA, 19 nt, Artificial Sequence
  Description of Artificial Sequence: Synthetic oligonucleotide
gcuuacggagaccaggcau

SEQ ID NO: 2433392 - RNA, 19 nt, Artificial Sequence
  Description of Artificial Sequence: Synthetic oligonucleotide
ccgcaaaacaugaugcucu

SEQ ID NO: 2433393 - RNA, 19 nt, Artificial Sequence
  Description of Artificial Sequence: Synthetic oligonucleotide
gcauagcauccaaagggca

SEQ ID NO: 2433394 - RNA, 19 nt, Artificial Sequence
  Description of Artificial Sequence: Synthetic oligonucleotide
aggugucuuuggugaacuu

SEQ ID NO: 2433395 - RNA, 19 nt, Artificial Sequence
  Description of Artificial Sequence: Synthetic oligonucleotide
ccagcacuuccucugagaa

SEQ ID NO: 2433396 - RNA, 19 nt, Artificial Sequence
  Description of Artificial Sequence: Synthetic oligonucleotide
uucccucacuuuggccagc

SEQ ID NO: 2433397 - RNA, 19 nt, Artificial Sequence
  Description of Artificial Sequence: Synthetic oligonucleotide
caccaaagcagcgccucca

SEQ ID NO: 2433398 - RNA, 19 nt, Artificial Sequence
  Description of Artificial Sequence: Synthetic oligonucleotide
caaagggcaaauggugacu

SEQ ID NO: 2433399 - RNA, 19 nt, Artificial Sequence
  Description of Artificial Sequence: Synthetic oligonucleotide
aagcugccuuucuguggua

SEQ ID NO: 2433400 - RNA, 19 nt, Artificial Sequence
  Description of Artificial Sequence: Synthetic oligonucleotide
guccguuggcugaccgucc

SEQ ID NO: 2433401 - RNA, 19 nt, Artificial Sequence
  Description of Artificial Sequence: Synthetic oligonucleotide
acguggcagagcauagcau

SEQ ID NO: 2433402 - RNA, 19 nt, Artificial Sequence
  Description of Artificial Sequence: Synthetic oligonucleotide
ggcugagagguuguaaggu

SEQ ID NO: 2433403 - RNA, 19 nt, Artificial Sequence
  Description of Artificial Sequence: Synthetic oligonucleotide
ggccagcacuuccucugag

SEQ ID NO: 2433404 - RNA, 19 nt, Artificial Sequence
  Description of Artificial Sequence: Synthetic oligonucleotide
agcagcgccuccagaccug

SEQ ID NO: 2433405 - RNA, 19 nt, Artificial Sequence
  Description of Artificial Sequence: Synthetic oligonucleotide
gacagaggggaagcugccu

SEQ ID NO: 2433406 - RNA, 19 nt, Artificial Sequence
  Description of Artificial Sequence: Synthetic oligonucleotide
uacggagaccaggcauuua

SEQ ID NO: 2433407 - RNA, 19 nt, Artificial Sequence
  Description of Artificial Sequence: Synthetic oligonucleotide
cggagaccaggcauuuagc

SEQ ID NO: 2433408 - RNA, 19 nt, Artificial Sequence
  Description of Artificial Sequence: Synthetic oligonucleotide
cgcaaaacaugaugcucuc

SEQ ID NO: 2433409 - RNA, 19 nt, Artificial Sequence
  Description of Artificial Sequence: Synthetic oligonucleotide
ucggggaacuuggggcuua

SEQ ID NO: 2433410 - RNA, 19 nt, Artificial Sequence
  Description of Artificial Sequence: Synthetic oligonucleotide
ggcuuacggagaccaggca

SEQ ID NO: 2433411 - RNA, 19 nt, Artificial Sequence
  Description of Artificial Sequence: Synthetic oligonucleotide
cacucucuggauucaugau

SEQ ID NO: 2433412 - RNA, 19 nt, Artificial Sequence
  Description of Artificial Sequence: Synthetic oligonucleotide
cccauagaccucaucaaau

SEQ ID NO: 2433413 - RNA, 19 nt, Artificial Sequence
  Description of Artificial Sequence: Synthetic oligonucleotide
gcacguggcagagcauagc

SEQ ID NO: 2433414 - RNA, 19 nt, Artificial Sequence
  Description of Artificial Sequence: Synthetic oligonucleotide
gagagguuguaagguccgu

SEQ ID NO: 2433415 - RNA, 19 nt, Artificial Sequence
  Description of Artificial Sequence: Synthetic oligonucleotide
caaggauguaggugucuuu

SEQ ID NO: 2433416 - RNA, 19 nt, Artificial Sequence
  Description of Artificial Sequence: Synthetic oligonucleotide
cucuccuggggaggauguc

SEQ ID NO: 2433417 - RNA, 19 nt, Artificial Sequence
  Description of Artificial Sequence: Synthetic oligonucleotide
ccauagaccucaucaaauu

SEQ ID NO: 2433418 - RNA, 19 nt, Artificial Sequence
  Description of Artificial Sequence: Synthetic oligonucleotide
gggcacguggcagagcaua

SEQ ID NO: 2433419 - RNA, 19 nt, Artificial Sequence
  Description of Artificial Sequence: Synthetic oligonucleotide
ggggaggaugucucccuua

SEQ ID NO: 2433420 - RNA, 19 nt, Artificial Sequence
  Description of Artificial Sequence: Synthetic oligonucleotide
cguugaugugcagcuuccc

SEQ ID NO: 2433421 - RNA, 19 nt, Artificial Sequence
  Description of Artificial Sequence: Synthetic oligonucleotide
gccuuucugugguaacggu

SEQ ID NO: 2433422 - RNA, 19 nt, Artificial Sequence
  Description of Artificial Sequence: Synthetic oligonucleotide
cugcaaaagcaaggaugua

SEQ ID NO: 2433423 - RNA, 19 nt, Artificial Sequence
  Description of Artificial Sequence: Synthetic oligonucleotide
cagaggggaagcugccuuu

SEQ ID NO: 2433424 - RNA, 19 nt, Artificial Sequence
  Description of Artificial Sequence: Synthetic oligonucleotide
cccuugcuugagcuagcuc

SEQ ID NO: 2433425 - RNA, 19 nt, Artificial Sequence
  Description of Artificial Sequence: Synthetic oligonucleotide
guuggcugaccguccucuu

SEQ ID NO: 2433426 - RNA, 19 nt, Artificial Sequence
  Description of Artificial Sequence: Synthetic oligonucleotide
cucugaggguggggcuguc

SEQ ID NO: 2433427 - RNA, 19 nt, Artificial Sequence
  Description of Artificial Sequence: Synthetic oligonucleotide
gucaccacucggggaacuu

SEQ ID NO: 2433428 - RNA, 19 nt, Artificial Sequence
  Description of Artificial Sequence: Synthetic oligonucleotide
ccugggcacguggcagagc

SEQ ID NO: 2433429 - RNA, 19 nt, Artificial Sequence
  Description of Artificial Sequence: Synthetic oligonucleotide
ccguuggcugaccguccuc

SEQ ID NO: 2433430 - RNA, 19 nt, Artificial Sequence
  Description of Artificial Sequence: Synthetic oligonucleotide
ggcugacagaggggaagcu

SEQ ID NO: 2433431 - RNA, 19 nt, Artificial Sequence
  Description of Artificial Sequence: Synthetic oligonucleotide
cagugccacugaggugaga

SEQ ID NO: 2433432 - RNA, 19 nt, Artificial Sequence
  Description of Artificial Sequence: Synthetic oligonucleotide
gcugaccguccucuucuuu

SEQ ID NO: 2433433 - RNA, 19 nt, Artificial Sequence
  Description of Artificial Sequence: Synthetic oligonucleotide
gugagaugccuggcaucuu

SEQ ID NO: 2433434 - RNA, 19 nt, Artificial Sequence
  Description of Artificial Sequence: Synthetic oligonucleotide
ccggacuauucagucugua

SEQ ID NO: 2433435 - RNA, 19 nt, Artificial Sequence
  Description of Artificial Sequence: Synthetic oligonucleotide
cucggggaacuuggggcuu

SEQ ID NO: 2433436 - RNA, 19 nt, Artificial Sequence
  Description of Artificial Sequence: Synthetic oligonucleotide
gcaauguguuggguuucuu

SEQ ID NO: 2433437 - RNA, 19 nt, Artificial Sequence
  Description of Artificial Sequence: Synthetic oligonucleotide
ggcugaccguccucuucuu

SEQ ID NO: 2433438 - RNA, 19 nt, Artificial Sequence
  Description of Artificial Sequence: Synthetic oligonucleotide
ggccguugaugugcagcuu

SEQ ID NO: 2433439 - RNA, 19 nt, Artificial Sequence
  Description of Artificial Sequence: Synthetic oligonucleotide
aagacaagcaacugaaagc

SEQ ID NO: 2433440 - RNA, 19 nt, Artificial Sequence
  Description of Artificial Sequence: Synthetic oligonucleotide
aaauggauuaauaaagagc

SEQ ID NO: 2433441 - RNA, 19 nt, Artificial Sequence
  Description of Artificial Sequence: Synthetic oligonucleotide
aaaauaccaaaagacaagc

SEQ ID NO: 2433442 - RNA, 19 nt, Artificial Sequence
  Description of Artificial Sequence: Synthetic oligonucleotide
aauggauuaauaaagagca

SEQ ID NO: 2433443 - RNA, 19 nt, Artificial Sequence
  Description of Artificial Sequence: Synthetic oligonucleotide
aaaacuguaguacauauau

SEQ ID NO: 2433444 - RNA, 19 nt, Artificial Sequence
  Description of Artificial Sequence: Synthetic oligonucleotide
ugucuaauaagaaaguacc

SEQ ID NO: 2433445 - RNA, 19 nt, Artificial Sequence
  Description of Artificial Sequence: Synthetic oligonucleotide
auaaaauacacugacagag

SEQ ID NO: 2433446 - RNA, 19 nt, Artificial Sequence
  Description of Artificial Sequence: Synthetic oligonucleotide
uaaauuuuauugcaugucc

SEQ ID NO: 2433447 - RNA, 19 nt, Artificial Sequence
  Description of Artificial Sequence: Synthetic oligonucleotide
augacuaauggcuaaugcc

SEQ ID NO: 2433448 - RNA, 19 nt, Artificial Sequence
  Description of Artificial Sequence: Synthetic oligonucleotide
aacuguaguacauauauau

SEQ ID NO: 2433449 - RNA, 19 nt, Artificial Sequence
  Description of Artificial Sequence: Synthetic oligonucleotide
aaaaguaugaugucuaaua

SEQ ID NO: 2433450 - RNA, 19 nt, Artificial Sequence
  Description of Artificial Sequence: Synthetic oligonucleotide
ucucaaacaaaaucaagag

SEQ ID NO: 2433451 - RNA, 19 nt, Artificial Sequence
  Description of Artificial Sequence: Synthetic oligonucleotide
uuguaauagucacagagug

SEQ ID NO: 2433452 - RNA, 19 nt, Artificial Sequence
  Description of Artificial Sequence: Synthetic oligonucleotide
uaacauaaaauacacugac

SEQ ID NO: 2433453 - RNA, 19 nt, Artificial Sequence
  Description of Artificial Sequence: Synthetic oligonucleotide
aaaucaagagagguugucc

SEQ ID NO: 2433454 - RNA, 19 nt, Artificial Sequence
  Description of Artificial Sequence: Synthetic oligonucleotide
auagauuugccucuggcuc

SEQ ID NO: 2433455 - RNA, 19 nt, Artificial Sequence
  Description of Artificial Sequence: Synthetic oligonucleotide
uaaauggauuaauaaagag

SEQ ID NO: 2433456 - RNA, 19 nt, Artificial Sequence
  Description of Artificial Sequence: Synthetic oligonucleotide
aauaagaaaguaccuuuug

SEQ ID NO: 2433457 - RNA, 19 nt, Artificial Sequence
  Description of Artificial Sequence: Synthetic oligonucleotide
uuugcuuaguuuaucaaga

SEQ ID NO: 2433458 - RNA, 19 nt, Artificial Sequence
  Description of Artificial Sequence: Synthetic oligonucleotide
aaaaucgucggauacagua

SEQ ID NO: 2433459 - RNA, 19 nt, Artificial Sequence
  Description of Artificial Sequence: Synthetic oligonucleotide
aaacauuugacauuugcuu

SEQ ID NO: 2433460 - RNA, 19 nt, Artificial Sequence
  Description of Artificial Sequence: Synthetic oligonucleotide
aaguaugaugucuaauaag

SEQ ID NO: 2433461 - RNA, 19 nt, Artificial Sequence
  Description of Artificial Sequence: Synthetic oligonucleotide
gacuuuaccucauaguaag

SEQ ID NO: 2433462 - RNA, 19 nt, Artificial Sequence
  Description of Artificial Sequence: Synthetic oligonucleotide
acucacaacacccaggaag

SEQ ID NO: 2433463 - RNA, 19 nt, Artificial Sequence
  Description of Artificial Sequence: Synthetic oligonucleotide
acagaaauuucugaguccc

SEQ ID NO: 2433464 - RNA, 19 nt, Artificial Sequence
  Description of Artificial Sequence: Synthetic oligonucleotide
ugacuaauggcuaaugcca

SEQ ID NO: 2433465 - RNA, 19 nt, Artificial Sequence
  Description of Artificial Sequence: Synthetic oligonucleotide
uauccugcuuacuucaucg

SEQ ID NO: 2433466 - RNA, 19 nt, Artificial Sequence
  Description of Artificial Sequence: Synthetic oligonucleotide
aaucagcccaaauacucac

SEQ ID NO: 2433467 - RNA, 19 nt, Artificial Sequence
  Description of Artificial Sequence: Synthetic oligonucleotide
aauucugcuuguaauaguc

SEQ ID NO: 2433468 - RNA, 19 nt, Artificial Sequence
  Description of Artificial Sequence: Synthetic oligonucleotide
aagaaaguaccuuuugaga

SEQ ID NO: 2433469 - RNA, 19 nt, Artificial Sequence
  Description of Artificial Sequence: Synthetic oligonucleotide
auuugcuuaguuuaucaag

SEQ ID NO: 2433470 - RNA, 19 nt, Artificial Sequence
  Description of Artificial Sequence: Synthetic oligonucleotide
aaagaaaucccguucucca

SEQ ID NO: 2433471 - RNA, 19 nt, Artificial Sequence
  Description of Artificial Sequence: Synthetic oligonucleotide
uuaacagguugcuaaauca

SEQ ID NO: 2433472 - RNA, 19 nt, Artificial Sequence
  Description of Artificial Sequence: Synthetic oligonucleotide
acagagaaaacuguaguac

SEQ ID NO: 2433473 - RNA, 19 nt, Artificial Sequence
  Description of Artificial Sequence: Synthetic oligonucleotide
ucggauacaguacagaaau

SEQ ID NO: 2433474 - RNA, 19 nt, Artificial Sequence
  Description of Artificial Sequence: Synthetic oligonucleotide
uaaaucagcccaaauacuc

SEQ ID NO: 2433475 - RNA, 19 nt, Artificial Sequence
  Description of Artificial Sequence: Synthetic oligonucleotide
uuaacugcauuccucauuc

SEQ ID NO: 2433476 - RNA, 19 nt, Artificial Sequence
  Description of Artificial Sequence: Synthetic oligonucleotide
aaaguaugaugucuaauaa

SEQ ID NO: 2433477 - RNA, 19 nt, Artificial Sequence
  Description of Artificial Sequence: Synthetic oligonucleotide
aaauacucacaacacccag

SEQ ID NO: 2433478 - RNA, 19 nt, Artificial Sequence
  Description of Artificial Sequence: Synthetic oligonucleotide
acaaaaucaagagagguug

SEQ ID NO: 2433479 - RNA, 19 nt, Artificial Sequence
  Description of Artificial Sequence: Synthetic oligonucleotide
aaucaagagagguuguccu

SEQ ID NO: 2433480 - RNA, 19 nt, Artificial Sequence
  Description of Artificial Sequence: Synthetic oligonucleotide
aaaguaauaauaaaacauu

SEQ ID NO: 2433481 - RNA, 19 nt, Artificial Sequence
  Description of Artificial Sequence: Synthetic oligonucleotide
uaugacuaauggcuaaugc

SEQ ID NO: 2433482 - RNA, 19 nt, Artificial Sequence
  Description of Artificial Sequence: Synthetic oligonucleotide
auaaagagcaucuugcuuu

SEQ ID NO: 2433483 - RNA, 19 nt, Artificial Sequence
  Description of Artificial Sequence: Synthetic oligonucleotide
agugaacaagccuaacugg

SEQ ID NO: 2433484 - RNA, 19 nt, Artificial Sequence
  Description of Artificial Sequence: Synthetic oligonucleotide
aauuucugagucccuagug

SEQ ID NO: 2433485 - RNA, 19 nt, Artificial Sequence
  Description of Artificial Sequence: Synthetic oligonucleotide
auaguaagcaaugguaaac

SEQ ID NO: 2433486 - RNA, 19 nt, Artificial Sequence
  Description of Artificial Sequence: Synthetic oligonucleotide
aacugugccuaucuaugac

SEQ ID NO: 2433487 - RNA, 19 nt, Artificial Sequence
  Description of Artificial Sequence: Synthetic oligonucleotide
uguccuuuccuauagugug

SEQ ID NO: 2433488 - RNA, 19 nt, Artificial Sequence
  Description of Artificial Sequence: Synthetic oligonucleotide
uuugucuuaccugaccugg

SEQ ID NO: 2433489 - RNA, 19 nt, Artificial Sequence
  Description of Artificial Sequence: Synthetic oligonucleotide
aacagguugcuaaaucagc

SEQ ID NO: 2433490 - RNA, 19 nt, Artificial Sequence
  Description of Artificial Sequence: Synthetic oligonucleotide
augucuaauaagaaaguac

SEQ ID NO: 2433491 - RNA, 19 nt, Artificial Sequence
  Description of Artificial Sequence: Synthetic oligonucleotide
aguaugaugucuaauaaga

SEQ ID NO: 2433492 - RNA, 19 nt, Artificial Sequence
  Description of Artificial Sequence: Synthetic oligonucleotide
uuauagauuugccucuggc

SEQ ID NO: 2433493 - RNA, 19 nt, Artificial Sequence
  Description of Artificial Sequence: Synthetic oligonucleotide
cuuaguuuaucaagaaaac

SEQ ID NO: 2433494 - RNA, 19 nt, Artificial Sequence
  Description of Artificial Sequence: Synthetic oligonucleotide
aguaagcaaugguaaacac

SEQ ID NO: 2433495 - RNA, 19 nt, Artificial Sequence
  Description of Artificial Sequence: Synthetic oligonucleotide
uacuucaucgccaagcaaa

SEQ ID NO: 2433496 - RNA, 19 nt, Artificial Sequence
  Description of Artificial Sequence: Synthetic oligonucleotide
uaacagguugcuaaaucag

SEQ ID NO: 2433497 - RNA, 19 nt, Artificial Sequence
  Description of Artificial Sequence: Synthetic oligonucleotide
gaaauucugcuuguaauag

SEQ ID NO: 2433498 - RNA, 19 nt, Artificial Sequence
  Description of Artificial Sequence: Synthetic oligonucleotide
ugguaaacacacuggaugc

SEQ ID NO: 2433499 - RNA, 19 nt, Artificial Sequence
  Description of Artificial Sequence: Synthetic oligonucleotide
aacaagccuaacuggaaug

SEQ ID NO: 2433500 - RNA, 19 nt, Artificial Sequence
  Description of Artificial Sequence: Synthetic oligonucleotide
uuuuauugcauguccuggc

SEQ ID NO: 2433501 - RNA, 19 nt, Artificial Sequence
  Description of Artificial Sequence: Synthetic oligonucleotide
auaagaaaguaccuuuuga

SEQ ID NO: 2433502 - RNA, 19 nt, Artificial Sequence
  Description of Artificial Sequence: Synthetic oligonucleotide
aaucccguucuccagugag

SEQ ID NO: 2433503 - RNA, 19 nt, Artificial Sequence
  Description of Artificial Sequence: Synthetic oligonucleotide
agcccaaauacucacaaca

SEQ ID NO: 2433504 - RNA, 19 nt, Artificial Sequence
  Description of Artificial Sequence: Synthetic oligonucleotide
cuaucuaugacuaauggcu

SEQ ID NO: 2433505 - RNA, 19 nt, Artificial Sequence
  Description of Artificial Sequence: Synthetic oligonucleotide
uccucauucucaaacaaaa

SEQ ID NO: 2433506 - RNA, 19 nt, Artificial Sequence
  Description of Artificial Sequence: Synthetic oligonucleotide
aguacagaaauuucugagu

SEQ ID NO: 2433507 - RNA, 19 nt, Artificial Sequence
  Description of Artificial Sequence: Synthetic oligonucleotide
uauauacagacuuuaccuc

SEQ ID NO: 2433508 - RNA, 19 nt, Artificial Sequence
  Description of Artificial Sequence: Synthetic oligonucleotide
uucaucgccaagcaaagaa

SEQ ID NO: 2433509 - RNA, 19 nt, Artificial Sequence
  Description of Artificial Sequence: Synthetic oligonucleotide
aauacucacaacacccagg

SEQ ID NO: 2433510 - RNA, 19 nt, Artificial Sequence
  Description of Artificial Sequence: Synthetic oligonucleotide
cuaacuggaaugaacacca

SEQ ID NO: 2433511 - RNA, 19 nt, Artificial Sequence
  Description of Artificial Sequence: Synthetic oligonucleotide
auuuuauugcauguccugg

SEQ ID NO: 2433512 - RNA, 19 nt, Artificial Sequence
  Description of Artificial Sequence: Synthetic oligonucleotide
ugcuaaaucagcccaaaua

SEQ ID NO: 2433513 - RNA, 19 nt, Artificial Sequence
  Description of Artificial Sequence: Synthetic oligonucleotide
acaccaguaacauaaaaua

SEQ ID NO: 2433514 - RNA, 19 nt, Artificial Sequence
  Description of Artificial Sequence: Synthetic oligonucleotide
aaaucgucggauacaguac

SEQ ID NO: 2433515 - RNA, 19 nt, Artificial Sequence
  Description of Artificial Sequence: Synthetic oligonucleotide
uacauagugcugaaaugcc

SEQ ID NO: 2433516 - RNA, 19 nt, Artificial Sequence
  Description of Artificial Sequence: Synthetic oligonucleotide
gcuaaaucagcccaaauac

SEQ ID NO: 2433517 - RNA, 19 nt, Artificial Sequence
  Description of Artificial Sequence: Synthetic oligonucleotide
agucacagagugaacaagc

SEQ ID NO: 2433518 - RNA, 19 nt, Artificial Sequence
  Description of Artificial Sequence: Synthetic oligonucleotide
aaucgucggauacaguaca

SEQ ID NO: 2433519 - RNA, 19 nt, Artificial Sequence
  Description of Artificial Sequence: Synthetic oligonucleotide
cucacaacacccaggaagc

SEQ ID NO: 2433520 - RNA, 19 nt, Artificial Sequence
  Description of Artificial Sequence: Synthetic oligonucleotide
acaaaagcuaaauggauua

SEQ ID NO: 2433521 - RNA, 19 nt, Artificial Sequence
  Description of Artificial Sequence: Synthetic oligonucleotide
uuucugagucccuagugcc

SEQ ID NO: 2433522 - RNA, 19 nt, Artificial Sequence
  Description of Artificial Sequence: Synthetic oligonucleotide
acagguugcuaaaucagcc

SEQ ID NO: 2433523 - RNA, 19 nt, Artificial Sequence
  Description of Artificial Sequence: Synthetic oligonucleotide
uguaauagucacagaguga

SEQ ID NO: 2433524 - RNA, 19 nt, Artificial Sequence
  Description of Artificial Sequence: Synthetic oligonucleotide
uuuauugcauguccuggca

SEQ ID NO: 2433525 - RNA, 19 nt, Artificial Sequence
  Description of Artificial Sequence: Synthetic oligonucleotide
uaauaaagagcaucuugcu

SEQ ID NO: 2433526 - RNA, 19 nt, Artificial Sequence
  Description of Artificial Sequence: Synthetic oligonucleotide
ugaaauucugcuuguaaua

SEQ ID NO: 2433527 - RNA, 19 nt, Artificial Sequence
  Description of Artificial Sequence: Synthetic oligonucleotide
uggauuaauaaagagcauc

SEQ ID NO: 2433528 - RNA, 19 nt, Artificial Sequence
  Description of Artificial Sequence: Synthetic oligonucleotide
ucgccaagcaaagaaaucc

SEQ ID NO: 2433529 - RNA, 19 nt, Artificial Sequence
  Description of Artificial Sequence: Synthetic oligonucleotide
gcuaaugccaaaaucgucg

SEQ ID NO: 2433530 - RNA, 19 nt, Artificial Sequence
  Description of Artificial Sequence: Synthetic oligonucleotide
ccaaauacucacaacaccc

SEQ ID NO: 2433531 - RNA, 19 nt, Artificial Sequence
  Description of Artificial Sequence: Synthetic oligonucleotide
aaugccaaaaucgucggau

SEQ ID NO: 2433532 - RNA, 19 nt, Artificial Sequence
  Description of Artificial Sequence: Synthetic oligonucleotide
aaauuuuauugcauguccu

SEQ ID NO: 2433533 - RNA, 19 nt, Artificial Sequence
  Description of Artificial Sequence: Synthetic oligonucleotide
ugaugucuaauaagaaagu

SEQ ID NO: 2433534 - RNA, 19 nt, Artificial Sequence
  Description of Artificial Sequence: Synthetic oligonucleotide
agaaaacuguaguacauau

SEQ ID NO: 2433535 - RNA, 19 nt, Artificial Sequence
  Description of Artificial Sequence: Synthetic oligonucleotide
guacagaaauuucugaguc

SEQ ID NO: 2433536 - RNA, 19 nt, Artificial Sequence
  Description of Artificial Sequence: Synthetic oligonucleotide
uggcuuauagauuugccuc

SEQ ID NO: 2433537 - RNA, 19 nt, Artificial Sequence
  Description of Artificial Sequence: Synthetic oligonucleotide
aacaugaaauucugcuugu

SEQ ID NO: 2433538 - RNA, 19 nt, Artificial Sequence
  Description of Artificial Sequence: Synthetic oligonucleotide
cuaaugccaaaaucgucgg

SEQ ID NO: 2433539 - RNA, 19 nt, Artificial Sequence
  Description of Artificial Sequence: Synthetic oligonucleotide
uuugacauuugcuuaguuu

SEQ ID NO: 2433540 - RNA, 19 nt, Artificial Sequence
  Description of Artificial Sequence: Synthetic oligonucleotide
agacaagcaacugaaagcu

SEQ ID NO: 2433541 - RNA, 19 nt, Artificial Sequence
  Description of Artificial Sequence: Synthetic oligonucleotide
agagugaacaagccuaacu

SEQ ID NO: 2433542 - RNA, 19 nt, Artificial Sequence
  Description of Artificial Sequence: Synthetic oligonucleotide
auacucacaacacccagga

SEQ ID NO: 2433543 - RNA, 19 nt, Artificial Sequence
  Description of Artificial Sequence: Synthetic oligonucleotide
cugacagagaaaacuguag

SEQ ID NO: 2433544 - RNA, 19 nt, Artificial Sequence
  Description of Artificial Sequence: Synthetic oligonucleotide
auggcuuauagauuugccu

SEQ ID NO: 2433545 - RNA, 19 nt, Artificial Sequence
  Description of Artificial Sequence: Synthetic oligonucleotide
uuuaccucauaguaagcaa

SEQ ID NO: 2433546 - RNA, 19 nt, Artificial Sequence
  Description of Artificial Sequence: Synthetic oligonucleotide
uucugcuuguaauagucac

SEQ ID NO: 2433547 - RNA, 19 nt, Artificial Sequence
  Description of Artificial Sequence: Synthetic oligonucleotide
uaauaagaaaguaccuuuu

SEQ ID NO: 2433548 - RNA, 19 nt, Artificial Sequence
  Description of Artificial Sequence: Synthetic oligonucleotide
aagccuaacuggaaugaac

SEQ ID NO: 2433549 - RNA, 19 nt, Artificial Sequence
  Description of Artificial Sequence: Synthetic oligonucleotide
uucuauccugcuuacuuca

SEQ ID NO: 2433550 - RNA, 19 nt, Artificial Sequence
  Description of Artificial Sequence: Synthetic oligonucleotide
accuacauagugcugaaau

SEQ ID NO: 2433551 - RNA, 19 nt, Artificial Sequence
  Description of Artificial Sequence: Synthetic oligonucleotide
aaaagcuaaauggauuaau

SEQ ID NO: 2433552 - RNA, 19 nt, Artificial Sequence
  Description of Artificial Sequence: Synthetic oligonucleotide
gacaaagugaacaugaaau

SEQ ID NO: 2433553 - RNA, 19 nt, Artificial Sequence
  Description of Artificial Sequence: Synthetic oligonucleotide
accaguaacauaaaauaca

SEQ ID NO: 2433554 - RNA, 19 nt, Artificial Sequence
  Description of Artificial Sequence: Synthetic oligonucleotide
caccaguaacauaaaauac

SEQ ID NO: 2433555 - RNA, 19 nt, Artificial Sequence
  Description of Artificial Sequence: Synthetic oligonucleotide
guaauagucacagagugaa

SEQ ID NO: 2433556 - RNA, 19 nt, Artificial Sequence
  Description of Artificial Sequence: Synthetic oligonucleotide
uaguaagcaaugguaaaca

SEQ ID NO: 2433557 - RNA, 19 nt, Artificial Sequence
  Description of Artificial Sequence: Synthetic oligonucleotide
cuuaacagguugcuaaauc

SEQ ID NO: 2433558 - RNA, 19 nt, Artificial Sequence
  Description of Artificial Sequence: Synthetic oligonucleotide
uucuuaauguauuuucauu

SEQ ID NO: 2433559 - RNA, 19 nt, Artificial Sequence
  Description of Artificial Sequence: Synthetic oligonucleotide
uuaccucauaguaagcaau

SEQ ID NO: 2433560 - RNA, 19 nt, Artificial Sequence
  Description of Artificial Sequence: Synthetic oligonucleotide
agcuuaacugcauuccuca

SEQ ID NO: 2433561 - RNA, 19 nt, Artificial Sequence
  Description of Artificial Sequence: Synthetic oligonucleotide
aacaaaagcuaaauggauu

SEQ ID NO: 2433562 - RNA, 19 nt, Artificial Sequence
  Description of Artificial Sequence: Synthetic oligonucleotide
acaguacagaaauuucuga

SEQ ID NO: 2433563 - RNA, 19 nt, Artificial Sequence
  Description of Artificial Sequence: Synthetic oligonucleotide
cauagugcugaaaugccuc

SEQ ID NO: 2433564 - RNA, 19 nt, Artificial Sequence
  Description of Artificial Sequence: Synthetic oligonucleotide
agugaacaugaaauucugc

SEQ ID NO: 2433565 - RNA, 19 nt, Artificial Sequence
  Description of Artificial Sequence: Synthetic oligonucleotide
agucccuagugccaccuac

SEQ ID NO: 2433566 - RNA, 19 nt, Artificial Sequence
  Description of Artificial Sequence: Synthetic oligonucleotide
ugucuuaccugaccuggcc

SEQ ID NO: 2433567 - RNA, 19 nt, Artificial Sequence
  Description of Artificial Sequence: Synthetic oligonucleotide
aaaguaccuuuugagaaaa

SEQ ID NO: 2433568 - RNA, 19 nt, Artificial Sequence
  Description of Artificial Sequence: Synthetic oligonucleotide
uuaacacuggugugaggag

SEQ ID NO: 2433569 - RNA, 19 nt, Artificial Sequence
  Description of Artificial Sequence: Synthetic oligonucleotide
ugcuuaguuuaucaagaaa

SEQ ID NO: 2433570 - RNA, 19 nt, Artificial Sequence
  Description of Artificial Sequence: Synthetic oligonucleotide
uggcuaaugccaaaaucgu

SEQ ID NO: 2433571 - RNA, 19 nt, Artificial Sequence
  Description of Artificial Sequence: Synthetic oligonucleotide
uuucuauccugcuuacuuc

SEQ ID NO: 2433572 - RNA, 19 nt, Artificial Sequence
  Description of Artificial Sequence: Synthetic oligonucleotide
aaaucagcccaaauacuca

SEQ ID NO: 2433573 - RNA, 19 nt, Artificial Sequence
  Description of Artificial Sequence: Synthetic oligonucleotide
gaaaguaccuuuugagaaa

SEQ ID NO: 2433574 - RNA, 19 nt, Artificial Sequence
  Description of Artificial Sequence: Synthetic oligonucleotide
cacacuuuaacacuggugu

SEQ ID NO: 2433575 - RNA, 19 nt, Artificial Sequence
  Description of Artificial Sequence: Synthetic oligonucleotide
uaucuaugacuaauggcua

SEQ ID NO: 2433576 - RNA, 19 nt, Artificial Sequence
  Description of Artificial Sequence: Synthetic oligonucleotide
ugccaaaaucgucggauac

SEQ ID NO: 2433577 - RNA, 19 nt, Artificial Sequence
  Description of Artificial Sequence: Synthetic oligonucleotide
ugccuaucuaugacuaaug

SEQ ID NO: 2433578 - RNA, 19 nt, Artificial Sequence
  Description of Artificial Sequence: Synthetic oligonucleotide
uagauuugccucuggcuca

SEQ ID NO: 2433579 - RNA, 19 nt, Artificial Sequence
  Description of Artificial Sequence: Synthetic oligonucleotide
uauugcauguccuggcaaa

SEQ ID NO: 2433580 - RNA, 19 nt, Artificial Sequence
  Description of Artificial Sequence: Synthetic oligonucleotide
cuuuccuauagugugugac

SEQ ID NO: 2433581 - RNA, 19 nt, Artificial Sequence
  Description of Artificial Sequence: Synthetic oligonucleotide
cucaccauagccuguaaca

SEQ ID NO: 2433582 - RNA, 19 nt, Artificial Sequence
  Description of Artificial Sequence: Synthetic oligonucleotide
agaggaacugugccuaucu

SEQ ID NO: 2433583 - RNA, 19 nt, Artificial Sequence
  Description of Artificial Sequence: Synthetic oligonucleotide
auuugucuuaccugaccug

SEQ ID NO: 2433584 - RNA, 19 nt, Artificial Sequence
  Description of Artificial Sequence: Synthetic oligonucleotide
acugugccuaucuaugacu

SEQ ID NO: 2433585 - RNA, 19 nt, Artificial Sequence
  Description of Artificial Sequence: Synthetic oligonucleotide
uauacagacuuuaccucau

SEQ ID NO: 2433586 - RNA, 19 nt, Artificial Sequence
  Description of Artificial Sequence: Synthetic oligonucleotide
gacagagaaaacuguagua

SEQ ID NO: 2433587 - RNA, 19 nt, Artificial Sequence
  Description of Artificial Sequence: Synthetic oligonucleotide
cuuauagauuugccucugg

SEQ ID NO: 2433588 - RNA, 19 nt, Artificial Sequence
  Description of Artificial Sequence: Synthetic oligonucleotide
uuauugcauguccuggcaa

SEQ ID NO: 2433589 - RNA, 19 nt, Artificial Sequence
  Description of Artificial Sequence: Synthetic oligonucleotide
aaugguaaacacacuggau

SEQ ID NO: 2433590 - RNA, 19 nt, Artificial Sequence
  Description of Artificial Sequence: Synthetic oligonucleotide
auagucacagagugaacaa

SEQ ID NO: 2433591 - RNA, 19 nt, Artificial Sequence
  Description of Artificial Sequence: Synthetic oligonucleotide
uaaagagcaucuugcuuuc

SEQ ID NO: 2433592 - RNA, 19 nt, Artificial Sequence
  Description of Artificial Sequence: Synthetic oligonucleotide
gcuuaguuuaucaagaaaa

SEQ ID NO: 2433593 - RNA, 19 nt, Artificial Sequence
  Description of Artificial Sequence: Synthetic oligonucleotide
gugcugaaaugccucagag

SEQ ID NO: 2433594 - RNA, 19 nt, Artificial Sequence
  Description of Artificial Sequence: Synthetic oligonucleotide
agcaacugaaagcuguaaa

SEQ ID NO: 2433595 - RNA, 19 nt, Artificial Sequence
  Description of Artificial Sequence: Synthetic oligonucleotide
ccuaucuaugacuaauggc

SEQ ID NO: 2433596 - RNA, 19 nt, Artificial Sequence
  Description of Artificial Sequence: Synthetic oligonucleotide
cagagaaaacuguaguaca

SEQ ID NO: 2433597 - RNA, 19 nt, Artificial Sequence
  Description of Artificial Sequence: Synthetic oligonucleotide
acacuuuaacacuggugug

SEQ ID NO: 2433598 - RNA, 19 nt, Artificial Sequence
  Description of Artificial Sequence: Synthetic oligonucleotide
cacagcuuaacugcauucc

SEQ ID NO: 2433599 - RNA, 19 nt, Artificial Sequence
  Description of Artificial Sequence: Synthetic oligonucleotide
ugacauuugcuuaguuuau

SEQ ID NO: 2433600 - RNA, 19 nt, Artificial Sequence
  Description of Artificial Sequence: Synthetic oligonucleotide
auugcauguccuggcaaac

SEQ ID NO: 2433601 - RNA, 19 nt, Artificial Sequence
  Description of Artificial Sequence: Synthetic oligonucleotide
uggugugaggagaggaacu

SEQ ID NO: 2433602 - RNA, 19 nt, Artificial Sequence
  Description of Artificial Sequence: Synthetic oligonucleotide
ucaccauagccuguaacac

SEQ ID NO: 2433603 - RNA, 19 nt, Artificial Sequence
  Description of Artificial Sequence: Synthetic oligonucleotide
aggaacugugccuaucuau

SEQ ID NO: 2433604 - RNA, 19 nt, Artificial Sequence
  Description of Artificial Sequence: Synthetic oligonucleotide
guaagcaaugguaaacaca

SEQ ID NO: 2433605 - RNA, 19 nt, Artificial Sequence
  Description of Artificial Sequence: Synthetic oligonucleotide
ugcugaaaugccucagagu

SEQ ID NO: 2433606 - RNA, 19 nt, Artificial Sequence
  Description of Artificial Sequence: Synthetic oligonucleotide
cuuuaccucauaguaagca

SEQ ID NO: 2433607 - RNA, 19 nt, Artificial Sequence
  Description of Artificial Sequence: Synthetic oligonucleotide
uaauggcuaaugccaaaau

SEQ ID NO: 2433608 - RNA, 19 nt, Artificial Sequence
  Description of Artificial Sequence: Synthetic oligonucleotide
aaaauggcuuauagauuug

SEQ ID NO: 2433609 - RNA, 19 nt, Artificial Sequence
  Description of Artificial Sequence: Synthetic oligonucleotide
ucuuaccugaccuggccaa

SEQ ID NO: 2433610 - RNA, 19 nt, Artificial Sequence
  Description of Artificial Sequence: Synthetic oligonucleotide
gccuaucuaugacuaaugg

SEQ ID NO: 2433611 - RNA, 19 nt, Artificial Sequence
  Description of Artificial Sequence: Synthetic oligonucleotide
cuaauaagaaaguaccuuu

SEQ ID NO: 2433612 - RNA, 19 nt, Artificial Sequence
  Description of Artificial Sequence: Synthetic oligonucleotide
uugcuuaguuuaucaagaa

SEQ ID NO: 2433613 - RNA, 19 nt, Artificial Sequence
  Description of Artificial Sequence: Synthetic oligonucleotide
uuccccgcagcccuggcug

SEQ ID NO: 2433614 - RNA, 19 nt, Artificial Sequence
  Description of Artificial Sequence: Synthetic oligonucleotide
agccuaacuggaaugaaca

SEQ ID NO: 2433615 - RNA, 19 nt, Artificial Sequence
  Description of Artificial Sequence: Synthetic oligonucleotide
uaauagucacagagugaac

SEQ ID NO: 2433616 - RNA, 19 nt, Artificial Sequence
  Description of Artificial Sequence: Synthetic oligonucleotide
ucccguucuccagugagag

SEQ ID NO: 2433617 - RNA, 19 nt, Artificial Sequence
  Description of Artificial Sequence: Synthetic oligonucleotide
acuuuaccucauaguaagc

SEQ ID NO: 2433618 - RNA, 19 nt, Artificial Sequence
  Description of Artificial Sequence: Synthetic oligonucleotide
agagcaucuugcuuucuau

SEQ ID NO: 2433619 - RNA, 19 nt, Artificial Sequence
  Description of Artificial Sequence: Synthetic oligonucleotide
uugucuuaccugaccuggc

SEQ ID NO: 2433620 - RNA, 19 nt, Artificial Sequence
  Description of Artificial Sequence: Synthetic oligonucleotide
aucuaugacuaauggcuaa

SEQ ID NO: 2433621 - RNA, 19 nt, Artificial Sequence
  Description of Artificial Sequence: Synthetic oligonucleotide
cauguccuggcaaacaaaa

SEQ ID NO: 2433622 - RNA, 19 nt, Artificial Sequence
  Description of Artificial Sequence: Synthetic oligonucleotide
gaacugugccuaucuauga

SEQ ID NO: 2433623 - RNA, 19 nt, Artificial Sequence
  Description of Artificial Sequence: Synthetic oligonucleotide
ccuauagugugugacaaag

SEQ ID NO: 2433624 - RNA, 19 nt, Artificial Sequence
  Description of Artificial Sequence: Synthetic oligonucleotide
cauuccucauucucaaaca

SEQ ID NO: 2433625 - RNA, 19 nt, Artificial Sequence
  Description of Artificial Sequence: Synthetic oligonucleotide
agagguuguccuuuccuau

SEQ ID NO: 2433626 - RNA, 19 nt, Artificial Sequence
  Description of Artificial Sequence: Synthetic oligonucleotide
cauaguaagcaaugguaaa

SEQ ID NO: 2433627 - RNA, 19 nt, Artificial Sequence
  Description of Artificial Sequence: Synthetic oligonucleotide
aagacacagcuuaacugca

SEQ ID NO: 2433628 - RNA, 19 nt, Artificial Sequence
  Description of Artificial Sequence: Synthetic oligonucleotide
acuucaucgccaagcaaag

SEQ ID NO: 2433629 - RNA, 19 nt, Artificial Sequence
  Description of Artificial Sequence: Synthetic oligonucleotide
ucuaugacuaauggcuaau

SEQ ID NO: 2433630 - RNA, 19 nt, Artificial Sequence
  Description of Artificial Sequence: Synthetic oligonucleotide
acaagccuaacuggaauga

SEQ ID NO: 2433631 - RNA, 19 nt, Artificial Sequence
  Description of Artificial Sequence: Synthetic oligonucleotide
auuugccucuggcucacca

SEQ ID NO: 2433632 - RNA, 19 nt, Artificial Sequence
  Description of Artificial Sequence: Synthetic oligonucleotide
agagaaaacuguaguacau

SEQ ID NO: 2433633 - RNA, 19 nt, Artificial Sequence
  Description of Artificial Sequence: Synthetic oligonucleotide
cuggccaagacacagcuua

SEQ ID NO: 2433634 - RNA, 19 nt, Artificial Sequence
  Description of Artificial Sequence: Synthetic oligonucleotide
gugaacaagccuaacugga

SEQ ID NO: 2433635 - RNA, 19 nt, Artificial Sequence
  Description of Artificial Sequence: Synthetic oligonucleotide
caugcucuuccccgcagcc

SEQ ID NO: 2433636 - RNA, 19 nt, Artificial Sequence
  Description of Artificial Sequence: Synthetic oligonucleotide
ggaacugugccuaucuaug

SEQ ID NO: 2433637 - RNA, 19 nt, Artificial Sequence
  Description of Artificial Sequence: Synthetic oligonucleotide
cuaugacuaauggcuaaug

SEQ ID NO: 2433638 - RNA, 19 nt, Artificial Sequence
  Description of Artificial Sequence: Synthetic oligonucleotide
ucuccagugagaggagggc

SEQ ID NO: 2433639 - RNA, 19 nt, Artificial Sequence
  Description of Artificial Sequence: Synthetic oligonucleotide
aucgccaagcaaagaaauc

SEQ ID NO: 2433640 - RNA, 19 nt, Artificial Sequence
  Description of Artificial Sequence: Synthetic oligonucleotide
ucaagagagguuguccuuu

SEQ ID NO: 2433641 - RNA, 19 nt, Artificial Sequence
  Description of Artificial Sequence: Synthetic oligonucleotide
agauuugccucuggcucac

SEQ ID NO: 2433642 - RNA, 19 nt, Artificial Sequence
  Description of Artificial Sequence: Synthetic oligonucleotide
acuaauggcuaaugccaaa

SEQ ID NO: 2433643 - RNA, 19 nt, Artificial Sequence
  Description of Artificial Sequence: Synthetic oligonucleotide
aaaucccguucuccaguga

SEQ ID NO: 2433644 - RNA, 19 nt, Artificial Sequence
  Description of Artificial Sequence: Synthetic oligonucleotide
cccaaauacucacaacacc

SEQ ID NO: 2433645 - RNA, 19 nt, Artificial Sequence
  Description of Artificial Sequence: Synthetic oligonucleotide
gcaacugaaagcuguaaaa

SEQ ID NO: 2433646 - RNA, 19 nt, Artificial Sequence
  Description of Artificial Sequence: Synthetic oligonucleotide
cagcuuaacugcauuccuc

SEQ ID NO: 2433647 - RNA, 19 nt, Artificial Sequence
  Description of Artificial Sequence: Synthetic oligonucleotide
uccaugcucuuccccgcag

SEQ ID NO: 2433648 - RNA, 19 nt, Artificial Sequence
  Description of Artificial Sequence: Synthetic oligonucleotide
cauagccuguaacacaaaa

SEQ ID NO: 2433649 - RNA, 19 nt, Artificial Sequence
  Description of Artificial Sequence: Synthetic oligonucleotide
ugcuuucuauccugcuuac

SEQ ID NO: 2433650 - RNA, 19 nt, Artificial Sequence
  Description of Artificial Sequence: Synthetic oligonucleotide
ccaaaaucgucggauacag

SEQ ID NO: 2433651 - RNA, 19 nt, Artificial Sequence
  Description of Artificial Sequence: Synthetic oligonucleotide
uugcuaaaucagcccaaau

SEQ ID NO: 2433652 - RNA, 19 nt, Artificial Sequence
  Description of Artificial Sequence: Synthetic oligonucleotide
accuuaacagguugcuaaa

SEQ ID NO: 2433653 - RNA, 19 nt, Artificial Sequence
  Description of Artificial Sequence: Synthetic oligonucleotide
agccaccuuaacagguugc

SEQ ID NO: 2433654 - RNA, 19 nt, Artificial Sequence
  Description of Artificial Sequence: Synthetic oligonucleotide
agacuuuaccucauaguaa

SEQ ID NO: 2433655 - RNA, 19 nt, Artificial Sequence
  Description of Artificial Sequence: Synthetic oligonucleotide
cuauccugcuuacuucauc

SEQ ID NO: 2433656 - RNA, 19 nt, Artificial Sequence
  Description of Artificial Sequence: Synthetic oligonucleotide
cauuugcuuaguuuaucaa

SEQ ID NO: 2433657 - RNA, 19 nt, Artificial Sequence
  Description of Artificial Sequence: Synthetic oligonucleotide
cauuugucuuaccugaccu

SEQ ID NO: 2433658 - RNA, 19 nt, Artificial Sequence
  Description of Artificial Sequence: Synthetic oligonucleotide
cuaaaucagcccaaauacu

SEQ ID NO: 2433659 - RNA, 19 nt, Artificial Sequence
  Description of Artificial Sequence: Synthetic oligonucleotide
uugccucuggcucaccaua

SEQ ID NO: 2433660 - RNA, 19 nt, Artificial Sequence
  Description of Artificial Sequence: Synthetic oligonucleotide
ccuacauagugcugaaaug

SEQ ID NO: 2433661 - RNA, 19 nt, Artificial Sequence
  Description of Artificial Sequence: Synthetic oligonucleotide
ggauuaauaaagagcaucu

SEQ ID NO: 2433662 - RNA, 19 nt, Artificial Sequence
  Description of Artificial Sequence: Synthetic oligonucleotide
agugugugacaaagugaac

SEQ ID NO: 2433663 - RNA, 19 nt, Artificial Sequence
  Description of Artificial Sequence: Synthetic oligonucleotide
uaccugaccuggccaagac

SEQ ID NO: 2433664 - RNA, 19 nt, Artificial Sequence
  Description of Artificial Sequence: Synthetic oligonucleotide
uuugccucuggcucaccau

SEQ ID NO: 2433665 - RNA, 19 nt, Artificial Sequence
  Description of Artificial Sequence: Synthetic oligonucleotide
gagaaaacuguaguacaua

SEQ ID NO: 2433666 - RNA, 19 nt, Artificial Sequence
  Description of Artificial Sequence: Synthetic oligonucleotide
gaaaacuguaguacauaua

SEQ ID NO: 2433667 - RNA, 19 nt, Artificial Sequence
  Description of Artificial Sequence: Synthetic oligonucleotide
guucuccagugagaggagg

SEQ ID NO: 2433668 - RNA, 19 nt, Artificial Sequence
  Description of Artificial Sequence: Synthetic oligonucleotide
ugugccuaucuaugacuaa

SEQ ID NO: 2433669 - RNA, 19 nt, Artificial Sequence
  Description of Artificial Sequence: Synthetic oligonucleotide
ucccuagugccaccuacau

SEQ ID NO: 2433670 - RNA, 19 nt, Artificial Sequence
  Description of Artificial Sequence: Synthetic oligonucleotide
cuggugugaggagaggaac

SEQ ID NO: 2433671 - RNA, 19 nt, Artificial Sequence
  Description of Artificial Sequence: Synthetic oligonucleotide
uccuauagugugugacaaa

SEQ ID NO: 2433672 - RNA, 19 nt, Artificial Sequence
  Description of Artificial Sequence: Synthetic oligonucleotide
gaacaagccuaacuggaau

SEQ ID NO: 2433673 - RNA, 19 nt, Artificial Sequence
  Description of Artificial Sequence: Synthetic oligonucleotide
cuaauggcuaaugccaaaa

SEQ ID NO: 2433674 - RNA, 19 nt, Artificial Sequence
  Description of Artificial Sequence: Synthetic oligonucleotide
gacuaauggcuaaugccaa

SEQ ID NO: 2433675 - RNA, 19 nt, Artificial Sequence
  Description of Artificial Sequence: Synthetic oligonucleotide
uuaccugaccuggccaaga

SEQ ID NO: 2433676 - RNA, 19 nt, Artificial Sequence
  Description of Artificial Sequence: Synthetic oligonucleotide
agugagaggagggccagau

SEQ ID NO: 2433677 - RNA, 19 nt, Artificial Sequence
  Description of Artificial Sequence: Synthetic oligonucleotide
gucuuaccugaccuggcca

SEQ ID NO: 2433678 - RNA, 19 nt, Artificial Sequence
  Description of Artificial Sequence: Synthetic oligonucleotide
ucacaacacccaggaagcc

SEQ ID NO: 2433679 - RNA, 19 nt, Artificial Sequence
  Description of Artificial Sequence: Synthetic oligonucleotide
ccauuugucuuaccugacc

SEQ ID NO: 2433680 - RNA, 19 nt, Artificial Sequence
  Description of Artificial Sequence: Synthetic oligonucleotide
aguccccagagccaccuua

SEQ ID NO: 2433681 - RNA, 19 nt, Artificial Sequence
  Description of Artificial Sequence: Synthetic oligonucleotide
cugugccuaucuaugacua

SEQ ID NO: 2433682 - RNA, 19 nt, Artificial Sequence
  Description of Artificial Sequence: Synthetic oligonucleotide
cuuaccugaccuggccaag

SEQ ID NO: 2433683 - RNA, 19 nt, Artificial Sequence
  Description of Artificial Sequence: Synthetic oligonucleotide
uacucacaacacccaggaa

SEQ ID NO: 2433684 - RNA, 19 nt, Artificial Sequence
  Description of Artificial Sequence: Synthetic oligonucleotide
aucgucggauacaguacag

SEQ ID NO: 2433685 - RNA, 19 nt, Artificial Sequence
  Description of Artificial Sequence: Synthetic oligonucleotide
uggccaagacacagcuuaa

SEQ ID NO: 2433686 - RNA, 19 nt, Artificial Sequence
  Description of Artificial Sequence: Synthetic oligonucleotide
caagcaaagaaaucccguu

SEQ ID NO: 2433687 - RNA, 19 nt, Artificial Sequence
  Description of Artificial Sequence: Synthetic oligonucleotide
gagggccagaugccuguug

SEQ ID NO: 2433688 - RNA, 19 nt, Artificial Sequence
  Description of Artificial Sequence: Synthetic oligonucleotide
ugccaccuacauagugcug

SEQ ID NO: 2433689 - RNA, 19 nt, Artificial Sequence
  Description of Artificial Sequence: Synthetic oligonucleotide
auacagacuuuaccucaua

SEQ ID NO: 2433690 - RNA, 19 nt, Artificial Sequence
  Description of Artificial Sequence: Synthetic oligonucleotide
ggauacaguacagaaauuu

SEQ ID NO: 2433691 - RNA, 19 nt, Artificial Sequence
  Description of Artificial Sequence: Synthetic oligonucleotide
caaaaucaagagagguugu

SEQ ID NO: 2433692 - RNA, 19 nt, Artificial Sequence
  Description of Artificial Sequence: Synthetic oligonucleotide
gucggauacaguacagaaa

SEQ ID NO: 2433693 - RNA, 19 nt, Artificial Sequence
  Description of Artificial Sequence: Synthetic oligonucleotide
guugcuaaaucagcccaaa

SEQ ID NO: 2433694 - RNA, 19 nt, Artificial Sequence
  Description of Artificial Sequence: Synthetic oligonucleotide
ccugcuuacuucaucgcca

SEQ ID NO: 2433695 - RNA, 19 nt, Artificial Sequence
  Description of Artificial Sequence: Synthetic oligonucleotide
auggauuaauaaagagcau

SEQ ID NO: 2433696 - RNA, 19 nt, Artificial Sequence
  Description of Artificial Sequence: Synthetic oligonucleotide
gaggagggccagaugccug

SEQ ID NO: 2433697 - RNA, 19 nt, Artificial Sequence
  Description of Artificial Sequence: Synthetic oligonucleotide
caucgccaagcaaagaaau

SEQ ID NO: 2433698 - RNA, 19 nt, Artificial Sequence
  Description of Artificial Sequence: Synthetic oligonucleotide
cuauagugugugacaaagu

SEQ ID NO: 2433699 - RNA, 19 nt, Artificial Sequence
  Description of Artificial Sequence: Synthetic oligonucleotide
gccaccuacauagugcuga

SEQ ID NO: 2433700 - RNA, 19 nt, Artificial Sequence
  Description of Artificial Sequence: Synthetic oligonucleotide
gccuaacuggaaugaacac

SEQ ID NO: 2433701 - RNA, 19 nt, Artificial Sequence
  Description of Artificial Sequence: Synthetic oligonucleotide
caguaacauaaaauacacu

SEQ ID NO: 2433702 - RNA, 19 nt, Artificial Sequence
  Description of Artificial Sequence: Synthetic oligonucleotide
gcuuauagauuugccucug

SEQ ID NO: 2433703 - RNA, 19 nt, Artificial Sequence
  Description of Artificial Sequence: Synthetic oligonucleotide
aucagcccaaauacucaca

SEQ ID NO: 2433704 - RNA, 19 nt, Artificial Sequence
  Description of Artificial Sequence: Synthetic oligonucleotide
gagaggaacugugccuauc

SEQ ID NO: 2433705 - RNA, 19 nt, Artificial Sequence
  Description of Artificial Sequence: Synthetic oligonucleotide
ggcuuauagauuugccucu

SEQ ID NO: 2433706 - RNA, 19 nt, Artificial Sequence
  Description of Artificial Sequence: Synthetic oligonucleotide
gaggaacugugccuaucua

SEQ ID NO: 2433707 - RNA, 19 nt, Artificial Sequence
  Description of Artificial Sequence: Synthetic oligonucleotide
cgccaagcaaagaaauccc

SEQ ID NO: 2433708 - RNA, 19 nt, Artificial Sequence
  Description of Artificial Sequence: Synthetic oligonucleotide
gcccaaauacucacaacac

SEQ ID NO: 2433709 - RNA, 19 nt, Artificial Sequence
  Description of Artificial Sequence: Synthetic oligonucleotide
gugacaaagugaacaugaa

SEQ ID NO: 2433710 - RNA, 19 nt, Artificial Sequence
  Description of Artificial Sequence: Synthetic oligonucleotide
gcucaccauagccuguaac

SEQ ID NO: 2433711 - RNA, 19 nt, Artificial Sequence
  Description of Artificial Sequence: Synthetic oligonucleotide
ccguucuccagugagagga

SEQ ID NO: 2433712 - RNA, 19 nt, Artificial Sequence
  Description of Artificial Sequence: Synthetic oligonucleotide
cagagugaacaagccuaac

SEQ ID NO: 2433713 - RNA, 19 nt, Artificial Sequence
  Description of Artificial Sequence: Synthetic oligonucleotide
ggcuaaugccaaaaucguc

SEQ ID NO: 2433714 - RNA, 19 nt, Artificial Sequence
  Description of Artificial Sequence: Synthetic oligonucleotide
gccaaaaucgucggauaca

SEQ ID NO: 2433715 - RNA, 19 nt, Artificial Sequence
  Description of Artificial Sequence: Synthetic oligonucleotide
uggcucaccauagccugua

SEQ ID NO: 2433716 - RNA, 19 nt, Artificial Sequence
  Description of Artificial Sequence: Synthetic oligonucleotide
cagaguccccagagccacc

SEQ ID NO: 2433717 - RNA, 19 nt, Artificial Sequence
  Description of Artificial Sequence: Synthetic oligonucleotide
agacacagcuuaacugcau

SEQ ID NO: 2433718 - RNA, 19 nt, Artificial Sequence
  Description of Artificial Sequence: Synthetic oligonucleotide
gugccuaucuaugacuaau

SEQ ID NO: 2433719 - RNA, 19 nt, Artificial Sequence
  Description of Artificial Sequence: Synthetic oligonucleotide
aucccguucuccagugaga

SEQ ID NO: 2433720 - RNA, 19 nt, Artificial Sequence
  Description of Artificial Sequence: Synthetic oligonucleotide
gcaucuugcuuucuauccu

SEQ ID NO: 2433721 - RNA, 19 nt, Artificial Sequence
  Description of Artificial Sequence: Synthetic oligonucleotide
gucccuagugccaccuaca

SEQ ID NO: 2433722 - RNA, 19 nt, Artificial Sequence
  Description of Artificial Sequence: Synthetic oligonucleotide
caagccuaacuggaaugaa

SEQ ID NO: 2433723 - RNA, 19 nt, Artificial Sequence
  Description of Artificial Sequence: Synthetic oligonucleotide
ggaagccauuugucuuacc

SEQ ID NO: 2433724 - RNA, 19 nt, Artificial Sequence
  Description of Artificial Sequence: Synthetic oligonucleotide
ccaagcaaagaaaucccgu

SEQ ID NO: 2433725 - RNA, 19 nt, Artificial Sequence
  Description of Artificial Sequence: Synthetic oligonucleotide
cuucaucgccaagcaaaga

SEQ ID NO: 2433726 - RNA, 19 nt, Artificial Sequence
  Description of Artificial Sequence: Synthetic oligonucleotide
cagaaauuucugagucccu

SEQ ID NO: 2433727 - RNA, 19 nt, Artificial Sequence
  Description of Artificial Sequence: Synthetic oligonucleotide
gguugcuaaaucagcccaa

SEQ ID NO: 2433728 - RNA, 19 nt, Artificial Sequence
  Description of Artificial Sequence: Synthetic oligonucleotide
ggccaagacacagcuuaac

SEQ ID NO: 2433729 - RNA, 19 nt, Artificial Sequence
  Description of Artificial Sequence: Synthetic oligonucleotide
caaaaucgucggauacagu

SEQ ID NO: 2433730 - RNA, 19 nt, Artificial Sequence
  Description of Artificial Sequence: Synthetic oligonucleotide
cgucggauacaguacagaa

SEQ ID NO: 2433731 - RNA, 19 nt, Artificial Sequence
  Description of Artificial Sequence: Synthetic oligonucleotide
cauuugacauuugcuuagu

SEQ ID NO: 2433732 - RNA, 19 nt, Artificial Sequence
  Description of Artificial Sequence: Synthetic oligonucleotide
gccucuggcucaccauagc

SEQ ID NO: 2433733 - RNA, 19 nt, Artificial Sequence
  Description of Artificial Sequence: Synthetic oligonucleotide
cccguucuccagugagagg

SEQ ID NO: 2433734 - RNA, 19 nt, Artificial Sequence
  Description of Artificial Sequence: Synthetic oligonucleotide
cguucuccagugagaggag

SEQ ID NO: 2433735 - RNA, 19 nt, Artificial Sequence
  Description of Artificial Sequence: Synthetic oligonucleotide
gguuguccuuuccuauagu

SEQ ID NO: 2433736 - RNA, 19 nt, Artificial Sequence
  Description of Artificial Sequence: Synthetic oligonucleotide
gagucccuagugccaccua

SEQ ID NO: 2433737 - RNA, 19 nt, Artificial Sequence
  Description of Artificial Sequence: Synthetic oligonucleotide
gccaccuuaacagguugcu

SEQ ID NO: 2433738 - RNA, 19 nt, Artificial Sequence
  Description of Artificial Sequence: Synthetic oligonucleotide
gcuuaacugcauuccucau

SEQ ID NO: 2433739 - RNA, 19 nt, Artificial Sequence
  Description of Artificial Sequence: Synthetic oligonucleotide
cuggcucaccauagccugu

SEQ ID NO: 2433740 - RNA, 19 nt, Artificial Sequence
  Description of Artificial Sequence: Synthetic oligonucleotide
caccuacauagugcugaaa

SEQ ID NO: 2433741 - RNA, 19 nt, Artificial Sequence
  Description of Artificial Sequence: Synthetic oligonucleotide
ccaccuacauagugcugaa

SEQ ID NO: 2433742 - RNA, 19 nt, Artificial Sequence
  Description of Artificial Sequence: Synthetic oligonucleotide
ggcucaccauagccuguaa

SEQ ID NO: 2433743 - RNA, 19 nt, Artificial Sequence
  Description of Artificial Sequence: Synthetic oligonucleotide
ccauagccuguaacacaaa

SEQ ID NO: 2433744 - RNA, 19 nt, Artificial Sequence
  Description of Artificial Sequence: Synthetic oligonucleotide
ccaccuuaacagguugcua

SEQ ID NO: 2433745 - RNA, 19 nt, Artificial Sequence
  Description of Artificial Sequence: Synthetic oligonucleotide
caacacccaggaagccauu

SEQ ID NO: 2433746 - RNA, 19 nt, Artificial Sequence
  Description of Artificial Sequence: Synthetic oligonucleotide
gccuguuguccaugcucuu

SEQ ID NO: 2433747 - RNA, 19 nt, Artificial Sequence
  Description of Artificial Sequence: Synthetic oligonucleotide
ccgcagcccuggcugcuca

SEQ ID NO: 2433748 - RNA, 19 nt, Artificial Sequence
  Description of Artificial Sequence: Synthetic oligonucleotide
cggauacaguacagaaauu

SEQ ID NO: 2433749 - RNA, 19 nt, Artificial Sequence
  Description of Artificial Sequence: Synthetic oligonucleotide
ggagggccagaugccuguu

SEQ ID NO: 2433750 - RNA, 19 nt, Artificial Sequence
  Description of Artificial Sequence: Synthetic oligonucleotide
ccccgcagcccuggcugcu

SEQ ID NO: 2433751 - RNA, 19 nt, Artificial Sequence
  Description of Artificial Sequence: Synthetic oligonucleotide
auuaagaucacuuauucac

SEQ ID NO: 2433752 - RNA, 19 nt, Artificial Sequence
  Description of Artificial Sequence: Synthetic oligonucleotide
guaagaaucacuuuuauag

SEQ ID NO: 2433753 - RNA, 19 nt, Artificial Sequence
  Description of Artificial Sequence: Synthetic oligonucleotide
uucaggaaaauuaagauca

SEQ ID NO: 2433754 - RNA, 19 nt, Artificial Sequence
  Description of Artificial Sequence: Synthetic oligonucleotide
aaauuaagaucacuuauuc

SEQ ID NO: 2433755 - RNA, 19 nt, Artificial Sequence
  Description of Artificial Sequence: Synthetic oligonucleotide
aaacuucauguacugaacc

SEQ ID NO: 2433756 - RNA, 19 nt, Artificial Sequence
  Description of Artificial Sequence: Synthetic oligonucleotide
augguaaugauguccaucc

SEQ ID NO: 2433757 - RNA, 19 nt, Artificial Sequence
  Description of Artificial Sequence: Synthetic oligonucleotide
aacuucauguacugaaccc

SEQ ID NO: 2433758 - RNA, 19 nt, Artificial Sequence
  Description of Artificial Sequence: Synthetic oligonucleotide
aaugcacacacccaaacca

SEQ ID NO: 2433759 - RNA, 19 nt, Artificial Sequence
  Description of Artificial Sequence: Synthetic oligonucleotide
augaagaucuguuaugcac

SEQ ID NO: 2433760 - RNA, 19 nt, Artificial Sequence
  Description of Artificial Sequence: Synthetic oligonucleotide
uuauagaugcuuuugauua

SEQ ID NO: 2433761 - RNA, 19 nt, Artificial Sequence
  Description of Artificial Sequence: Synthetic oligonucleotide
gaaucacuuuuauagaugc

SEQ ID NO: 2433762 - RNA, 19 nt, Artificial Sequence
  Description of Artificial Sequence: Synthetic oligonucleotide
aguaguuucucucuuuccg

SEQ ID NO: 2433763 - RNA, 19 nt, Artificial Sequence
  Description of Artificial Sequence: Synthetic oligonucleotide
uuugcauaugguaaugaug

SEQ ID NO: 2433764 - RNA, 19 nt, Artificial Sequence
  Description of Artificial Sequence: Synthetic oligonucleotide
ugauuuuccagucuugcca

SEQ ID NO: 2433765 - RNA, 19 nt, Artificial Sequence
  Description of Artificial Sequence: Synthetic oligonucleotide
ugaagaucuguuaugcacc

SEQ ID NO: 2433766 - RNA, 19 nt, Artificial Sequence
  Description of Artificial Sequence: Synthetic oligonucleotide
aaugauguccauccaggag

SEQ ID NO: 2433767 - RNA, 19 nt, Artificial Sequence
  Description of Artificial Sequence: Synthetic oligonucleotide
aauuaagaucacuuauuca

SEQ ID NO: 2433768 - RNA, 19 nt, Artificial Sequence
  Description of Artificial Sequence: Synthetic oligonucleotide
uaugucuugacagaguuca

SEQ ID NO: 2433769 - RNA, 19 nt, Artificial Sequence
  Description of Artificial Sequence: Synthetic oligonucleotide
auagaugccagcaggaagc

SEQ ID NO: 2433770 - RNA, 19 nt, Artificial Sequence
  Description of Artificial Sequence: Synthetic oligonucleotide
caucaaaauggucagcugg

SEQ ID NO: 2433771 - RNA, 19 nt, Artificial Sequence
  Description of Artificial Sequence: Synthetic oligonucleotide
aucuguuaugcaccaaugc

SEQ ID NO: 2433772 - RNA, 19 nt, Artificial Sequence
  Description of Artificial Sequence: Synthetic oligonucleotide
aauccggauccacuugucc

SEQ ID NO: 2433773 - RNA, 19 nt, Artificial Sequence
  Description of Artificial Sequence: Synthetic oligonucleotide
acaugaagaucuguuaugc

SEQ ID NO: 2433774 - RNA, 19 nt, Artificial Sequence
  Description of Artificial Sequence: Synthetic oligonucleotide
aagaaucacuuuuauagau

SEQ ID NO: 2433775 - RNA, 19 nt, Artificial Sequence
  Description of Artificial Sequence: Synthetic oligonucleotide
uaauucuucucguccagcg

SEQ ID NO: 2433776 - RNA, 19 nt, Artificial Sequence
  Description of Artificial Sequence: Synthetic oligonucleotide
aagaagagcuggucuagcg

SEQ ID NO: 2433777 - RNA, 19 nt, Artificial Sequence
  Description of Artificial Sequence: Synthetic oligonucleotide
cuucacguaauucuucucg

SEQ ID NO: 2433778 - RNA, 19 nt, Artificial Sequence
  Description of Artificial Sequence: Synthetic oligonucleotide
auaauugggaagucuaucu

SEQ ID NO: 2433779 - RNA, 19 nt, Artificial Sequence
  Description of Artificial Sequence: Synthetic oligonucleotide
uuaagaucacuuauucaca

SEQ ID NO: 2433780 - RNA, 19 nt, Artificial Sequence
  Description of Artificial Sequence: Synthetic oligonucleotide
uccagucuugccaagaaga

SEQ ID NO: 2433781 - RNA, 19 nt, Artificial Sequence
  Description of Artificial Sequence: Synthetic oligonucleotide
agucuaucuuugcauaugg

SEQ ID NO: 2433782 - RNA, 19 nt, Artificial Sequence
  Description of Artificial Sequence: Synthetic oligonucleotide
uuuguggcuuccaaguaag

SEQ ID NO: 2433783 - RNA, 19 nt, Artificial Sequence
  Description of Artificial Sequence: Synthetic oligonucleotide
aacggugauagaugccagc

SEQ ID NO: 2433784 - RNA, 19 nt, Artificial Sequence
  Description of Artificial Sequence: Synthetic oligonucleotide
uguuaugcaccaaugcaca

SEQ ID NO: 2433785 - RNA, 19 nt, Artificial Sequence
  Description of Artificial Sequence: Synthetic oligonucleotide
gauagaugccagcaggaag

SEQ ID NO: 2433786 - RNA, 19 nt, Artificial Sequence
  Description of Artificial Sequence: Synthetic oligonucleotide
augauguccauccaggagu

SEQ ID NO: 2433787 - RNA, 19 nt, Artificial Sequence
  Description of Artificial Sequence: Synthetic oligonucleotide
aacccgggcaucaaaaugg

SEQ ID NO: 2433788 - RNA, 19 nt, Artificial Sequence
  Description of Artificial Sequence: Synthetic oligonucleotide
uggucuagcgucaagucca

SEQ ID NO: 2433789 - RNA, 19 nt, Artificial Sequence
  Description of Artificial Sequence: Synthetic oligonucleotide
ucuaucuuugcauauggua

SEQ ID NO: 2433790 - RNA, 19 nt, Artificial Sequence
  Description of Artificial Sequence: Synthetic oligonucleotide
uaugcaccaaugcacacac

SEQ ID NO: 2433791 - RNA, 19 nt, Artificial Sequence
  Description of Artificial Sequence: Synthetic oligonucleotide
gacucguccauguaccagg

SEQ ID NO: 2433792 - RNA, 19 nt, Artificial Sequence
  Description of Artificial Sequence: Synthetic oligonucleotide
aaagugcaccgcuaugcuc

SEQ ID NO: 2433793 - RNA, 19 nt, Artificial Sequence
  Description of Artificial Sequence: Synthetic oligonucleotide
ucaaagugcaccgcuaugc

SEQ ID NO: 2433794 - RNA, 19 nt, Artificial Sequence
  Description of Artificial Sequence: Synthetic oligonucleotide
caaguccacauacaaaagc

SEQ ID NO: 2433795 - RNA, 19 nt, Artificial Sequence
  Description of Artificial Sequence: Synthetic oligonucleotide
caaaccagggcuuccauac

SEQ ID NO: 2433796 - RNA, 19 nt, Artificial Sequence
  Description of Artificial Sequence: Synthetic oligonucleotide
aaaauuaagaucacuuauu

SEQ ID NO: 2433797 - RNA, 19 nt, Artificial Sequence
  Description of Artificial Sequence: Synthetic oligonucleotide
acgguguccacacaggcuc

SEQ ID NO: 2433798 - RNA, 19 nt, Artificial Sequence
  Description of Artificial Sequence: Synthetic oligonucleotide
uuguacgguguccacacag

SEQ ID NO: 2433799 - RNA, 19 nt, Artificial Sequence
  Description of Artificial Sequence: Synthetic oligonucleotide
cuguuaugcaccaaugcac

SEQ ID NO: 2433800 - RNA, 19 nt, Artificial Sequence
  Description of Artificial Sequence: Synthetic oligonucleotide
accgcuaugcucuuccuuc

SEQ ID NO: 2433801 - RNA, 19 nt, Artificial Sequence
  Description of Artificial Sequence: Synthetic oligonucleotide
uggaucauucucauacuug

SEQ ID NO: 2433802 - RNA, 19 nt, Artificial Sequence
  Description of Artificial Sequence: Synthetic oligonucleotide
aaguccacauacaaaagca

SEQ ID NO: 2433803 - RNA, 19 nt, Artificial Sequence
  Description of Artificial Sequence: Synthetic oligonucleotide
gacaugaagaucuguuaug

SEQ ID NO: 2433804 - RNA, 19 nt, Artificial Sequence
  Description of Artificial Sequence: Synthetic oligonucleotide
uguacgguguccacacagg

SEQ ID NO: 2433805 - RNA, 19 nt, Artificial Sequence
  Description of Artificial Sequence: Synthetic oligonucleotide
agaucacuuauucacauuu

SEQ ID NO: 2433806 - RNA, 19 nt, Artificial Sequence
  Description of Artificial Sequence: Synthetic oligonucleotide
uuccaaguaagaaucacuu

SEQ ID NO: 2433807 - RNA, 19 nt, Artificial Sequence
  Description of Artificial Sequence: Synthetic oligonucleotide
aggugagcaaccuucccac

SEQ ID NO: 2433808 - RNA, 19 nt, Artificial Sequence
  Description of Artificial Sequence: Synthetic oligonucleotide
acaucgaaguacccacugc

SEQ ID NO: 2433809 - RNA, 19 nt, Artificial Sequence
  Description of Artificial Sequence: Synthetic oligonucleotide
gugaaacggugauagaugc

SEQ ID NO: 2433810 - RNA, 19 nt, Artificial Sequence
  Description of Artificial Sequence: Synthetic oligonucleotide
aggaagcgugaucaugucc

SEQ ID NO: 2433811 - RNA, 19 nt, Artificial Sequence
  Description of Artificial Sequence: Synthetic oligonucleotide
guucaggaaaauuaagauc

SEQ ID NO: 2433812 - RNA, 19 nt, Artificial Sequence
  Description of Artificial Sequence: Synthetic oligonucleotide
agagaggugagcaaccuuc

SEQ ID NO: 2433813 - RNA, 19 nt, Artificial Sequence
  Description of Artificial Sequence: Synthetic oligonucleotide
caaaauggucagcuggacg

SEQ ID NO: 2433814 - RNA, 19 nt, Artificial Sequence
  Description of Artificial Sequence: Synthetic oligonucleotide
cacguaauucuucucgucc

SEQ ID NO: 2433815 - RNA, 19 nt, Artificial Sequence
  Description of Artificial Sequence: Synthetic oligonucleotide
agucuugccaagaagagcu

SEQ ID NO: 2433816 - RNA, 19 nt, Artificial Sequence
  Description of Artificial Sequence: Synthetic oligonucleotide
cuaucuuugcauaugguaa

SEQ ID NO: 2433817 - RNA, 19 nt, Artificial Sequence
  Description of Artificial Sequence: Synthetic oligonucleotide
ucagcuggacgguuguacg

SEQ ID NO: 2433818 - RNA, 19 nt, Artificial Sequence
  Description of Artificial Sequence: Synthetic oligonucleotide
aaguaagaaucacuuuuau

SEQ ID NO: 2433819 - RNA, 19 nt, Artificial Sequence
  Description of Artificial Sequence: Synthetic oligonucleotide
ucugauuuuccagucuugc

SEQ ID NO: 2433820 - RNA, 19 nt, Artificial Sequence
  Description of Artificial Sequence: Synthetic oligonucleotide
gaaacggugauagaugcca

SEQ ID NO: 2433821 - RNA, 19 nt, Artificial Sequence
  Description of Artificial Sequence: Synthetic oligonucleotide
gaugccagcaggaagcgug

SEQ ID NO: 2433822 - RNA, 19 nt, Artificial Sequence
  Description of Artificial Sequence: Synthetic oligonucleotide
cugacaucgaaguacccac

SEQ ID NO: 2433823 - RNA, 19 nt, Artificial Sequence
  Description of Artificial Sequence: Synthetic oligonucleotide
uucucguccagcgugaaac

SEQ ID NO: 2433824 - RNA, 19 nt, Artificial Sequence
  Description of Artificial Sequence: Synthetic oligonucleotide
gguaaugauguccauccag

SEQ ID NO: 2433825 - RNA, 19 nt, Artificial Sequence
  Description of Artificial Sequence: Synthetic oligonucleotide
gaucuucuccucauaauug

SEQ ID NO: 2433826 - RNA, 19 nt, Artificial Sequence
  Description of Artificial Sequence: Synthetic oligonucleotide
ugggaagucuaucuuugca

SEQ ID NO: 2433827 - RNA, 19 nt, Artificial Sequence
  Description of Artificial Sequence: Synthetic oligonucleotide
aauacagcacuccgagcgu

SEQ ID NO: 2433828 - RNA, 19 nt, Artificial Sequence
  Description of Artificial Sequence: Synthetic oligonucleotide
gauguagcggaucuccuca

SEQ ID NO: 2433829 - RNA, 19 nt, Artificial Sequence
  Description of Artificial Sequence: Synthetic oligonucleotide
ucuagcgucaaguccacau

SEQ ID NO: 2433830 - RNA, 19 nt, Artificial Sequence
  Description of Artificial Sequence: Synthetic oligonucleotide
aagugcaccgcuaugcucu

SEQ ID NO: 2433831 - RNA, 19 nt, Artificial Sequence
  Description of Artificial Sequence: Synthetic oligonucleotide
ucucuaugucuugacagag

SEQ ID NO: 2433832 - RNA, 19 nt, Artificial Sequence
  Description of Artificial Sequence: Synthetic oligonucleotide
gaagagcuggucuagcguc

SEQ ID NO: 2433833 - RNA, 19 nt, Artificial Sequence
  Description of Artificial Sequence: Synthetic oligonucleotide
cauguaccaggcuugcacc

SEQ ID NO: 2433834 - RNA, 19 nt, Artificial Sequence
  Description of Artificial Sequence: Synthetic oligonucleotide
ugagcaaccuucccaccag

SEQ ID NO: 2433835 - RNA, 19 nt, Artificial Sequence
  Description of Artificial Sequence: Synthetic oligonucleotide
uugucccugacaucgaagu

SEQ ID NO: 2433836 - RNA, 19 nt, Artificial Sequence
  Description of Artificial Sequence: Synthetic oligonucleotide
cuuuuauagaugcuuuuga

SEQ ID NO: 2433837 - RNA, 19 nt, Artificial Sequence
  Description of Artificial Sequence: Synthetic oligonucleotide
cauacaaaagcagagaggu

SEQ ID NO: 2433838 - RNA, 19 nt, Artificial Sequence
  Description of Artificial Sequence: Synthetic oligonucleotide
uuccauaccucucuauguc

SEQ ID NO: 2433839 - RNA, 19 nt, Artificial Sequence
  Description of Artificial Sequence: Synthetic oligonucleotide
uaucuuugcauaugguaau

SEQ ID NO: 2433840 - RNA, 19 nt, Artificial Sequence
  Description of Artificial Sequence: Synthetic oligonucleotide
ucuugccaagaagagcugg

SEQ ID NO: 2433841 - RNA, 19 nt, Artificial Sequence
  Description of Artificial Sequence: Synthetic oligonucleotide
ucauaauugggaagucuau

SEQ ID NO: 2433842 - RNA, 19 nt, Artificial Sequence
  Description of Artificial Sequence: Synthetic oligonucleotide
aagucuaucuuugcauaug

SEQ ID NO: 2433843 - RNA, 19 nt, Artificial Sequence
  Description of Artificial Sequence: Synthetic oligonucleotide
gacaucgaaguacccacug

SEQ ID NO: 2433844 - RNA, 19 nt, Artificial Sequence
  Description of Artificial Sequence: Synthetic oligonucleotide
aguaagaaucacuuuuaua

SEQ ID NO: 2433845 - RNA, 19 nt, Artificial Sequence
  Description of Artificial Sequence: Synthetic oligonucleotide
uagcgucaaguccacauac

SEQ ID NO: 2433846 - RNA, 19 nt, Artificial Sequence
  Description of Artificial Sequence: Synthetic oligonucleotide
uucacguaauucuucucgu

SEQ ID NO: 2433847 - RNA, 19 nt, Artificial Sequence
  Description of Artificial Sequence: Synthetic oligonucleotide
ucgaaguacccacugcccu

SEQ ID NO: 2433848 - RNA, 19 nt, Artificial Sequence
  Description of Artificial Sequence: Synthetic oligonucleotide
ugaaacggugauagaugcc

SEQ ID NO: 2433849 - RNA, 19 nt, Artificial Sequence
  Description of Artificial Sequence: Synthetic oligonucleotide
ugcaccgcuaugcucuucc

SEQ ID NO: 2433850 - RNA, 19 nt, Artificial Sequence
  Description of Artificial Sequence: Synthetic oligonucleotide
uuccaauacagcacuccga

SEQ ID NO: 2433851 - RNA, 19 nt, Artificial Sequence
  Description of Artificial Sequence: Synthetic oligonucleotide
gaacccgggcaucaaaaug

SEQ ID NO: 2433852 - RNA, 19 nt, Artificial Sequence
  Description of Artificial Sequence: Synthetic oligonucleotide
acagaguucaggaaaauua

SEQ ID NO: 2433853 - RNA, 19 nt, Artificial Sequence
  Description of Artificial Sequence: Synthetic oligonucleotide
gauuuuccagucuugccaa

SEQ ID NO: 2433854 - RNA, 19 nt, Artificial Sequence
  Description of Artificial Sequence: Synthetic oligonucleotide
cauucucauacuugucagc

SEQ ID NO: 2433855 - RNA, 19 nt, Artificial Sequence
  Description of Artificial Sequence: Synthetic oligonucleotide
ucucccacaaacagccgca

SEQ ID NO: 2433856 - RNA, 19 nt, Artificial Sequence
  Description of Artificial Sequence: Synthetic oligonucleotide
agccgcauggccuucacgu

SEQ ID NO: 2433857 - RNA, 19 nt, Artificial Sequence
  Description of Artificial Sequence: Synthetic oligonucleotide
uaauugggaagucuaucuu

SEQ ID NO: 2433858 - RNA, 19 nt, Artificial Sequence
  Description of Artificial Sequence: Synthetic oligonucleotide
acacacccaaaccagggcu

SEQ ID NO: 2433859 - RNA, 19 nt, Artificial Sequence
  Description of Artificial Sequence: Synthetic oligonucleotide
aucgaaguacccacugccc

SEQ ID NO: 2433860 - RNA, 19 nt, Artificial Sequence
  Description of Artificial Sequence: Synthetic oligonucleotide
ucguccauguaccaggcuu

SEQ ID NO: 2433861 - RNA, 19 nt, Artificial Sequence
  Description of Artificial Sequence: Synthetic oligonucleotide
cuggucuagcgucaagucc

SEQ ID NO: 2433862 - RNA, 19 nt, Artificial Sequence
  Description of Artificial Sequence: Synthetic oligonucleotide
auugggaagucuaucuuug

SEQ ID NO: 2433863 - RNA, 19 nt, Artificial Sequence
  Description of Artificial Sequence: Synthetic oligonucleotide
acguaauucuucucgucca

SEQ ID NO: 2433864 - RNA, 19 nt, Artificial Sequence
  Description of Artificial Sequence: Synthetic oligonucleotide
guacccacugcccuccagg

SEQ ID NO: 2433865 - RNA, 19 nt, Artificial Sequence
  Description of Artificial Sequence: Synthetic oligonucleotide
ucucguccagcgugaaacg

SEQ ID NO: 2433866 - RNA, 19 nt, Artificial Sequence
  Description of Artificial Sequence: Synthetic oligonucleotide
ggaagcgugaucauguccc

SEQ ID NO: 2433867 - RNA, 19 nt, Artificial Sequence
  Description of Artificial Sequence: Synthetic oligonucleotide
cagcgugaaacggugauag

SEQ ID NO: 2433868 - RNA, 19 nt, Artificial Sequence
  Description of Artificial Sequence: Synthetic oligonucleotide
uccauaccucucuaugucu

SEQ ID NO: 2433869 - RNA, 19 nt, Artificial Sequence
  Description of Artificial Sequence: Synthetic oligonucleotide
gaggugagcaaccuuccca

SEQ ID NO: 2433870 - RNA, 19 nt, Artificial Sequence
  Description of Artificial Sequence: Synthetic oligonucleotide
cauaauugggaagucuauc

SEQ ID NO: 2433871 - RNA, 19 nt, Artificial Sequence
  Description of Artificial Sequence: Synthetic oligonucleotide
uguggcuuccaaguaagaa

SEQ ID NO: 2433872 - RNA, 19 nt, Artificial Sequence
  Description of Artificial Sequence: Synthetic oligonucleotide
uggaaauccggauccacuu

SEQ ID NO: 2433873 - RNA, 19 nt, Artificial Sequence
  Description of Artificial Sequence: Synthetic oligonucleotide
auccggauccacuuguccu

SEQ ID NO: 2433874 - RNA, 19 nt, Artificial Sequence
  Description of Artificial Sequence: Synthetic oligonucleotide
agaguucaggaaaauuaag

SEQ ID NO: 2433875 - RNA, 19 nt, Artificial Sequence
  Description of Artificial Sequence: Synthetic oligonucleotide
agaugcuccucgaagaaca

SEQ ID NO: 2433876 - RNA, 19 nt, Artificial Sequence
  Description of Artificial Sequence: Synthetic oligonucleotide
cccacaaacagccgcaugg

SEQ ID NO: 2433877 - RNA, 19 nt, Artificial Sequence
  Description of Artificial Sequence: Synthetic oligonucleotide
caggauguagcggaucucc

SEQ ID NO: 2433878 - RNA, 19 nt, Artificial Sequence
  Description of Artificial Sequence: Synthetic oligonucleotide
cucauaauugggaagucua

SEQ ID NO: 2433879 - RNA, 19 nt, Artificial Sequence
  Description of Artificial Sequence: Synthetic oligonucleotide
ucuugacagaguucaggaa

SEQ ID NO: 2433880 - RNA, 19 nt, Artificial Sequence
  Description of Artificial Sequence: Synthetic oligonucleotide
uugggaagucuaucuuugc

SEQ ID NO: 2433881 - RNA, 19 nt, Artificial Sequence
  Description of Artificial Sequence: Synthetic oligonucleotide
aaauccggauccacuuguc

SEQ ID NO: 2433882 - RNA, 19 nt, Artificial Sequence
  Description of Artificial Sequence: Synthetic oligonucleotide
uacgguguccacacaggcu

SEQ ID NO: 2433883 - RNA, 19 nt, Artificial Sequence
  Description of Artificial Sequence: Synthetic oligonucleotide
uccauccaggaguaguuuc

SEQ ID NO: 2433884 - RNA, 19 nt, Artificial Sequence
  Description of Artificial Sequence: Synthetic oligonucleotide
ucguccagcgugaaacggu

SEQ ID NO: 2433885 - RNA, 19 nt, Artificial Sequence
  Description of Artificial Sequence: Synthetic oligonucleotide
gaaguacccacugcccucc

SEQ ID NO: 2433886 - RNA, 19 nt, Artificial Sequence
  Description of Artificial Sequence: Synthetic oligonucleotide
guacgguguccacacaggc

SEQ ID NO: 2433887 - RNA, 19 nt, Artificial Sequence
  Description of Artificial Sequence: Synthetic oligonucleotide
gaagcgugaucaugucccc

SEQ ID NO: 2433888 - RNA, 19 nt, Artificial Sequence
  Description of Artificial Sequence: Synthetic oligonucleotide
cucgaagaacaucuugauc

SEQ ID NO: 2433889 - RNA, 19 nt, Artificial Sequence
  Description of Artificial Sequence: Synthetic oligonucleotide
aaucacuuuuauagaugcu

SEQ ID NO: 2433890 - RNA, 19 nt, Artificial Sequence
  Description of Artificial Sequence: Synthetic oligonucleotide
uagaugccagcaggaagcg

SEQ ID NO: 2433891 - RNA, 19 nt, Artificial Sequence
  Description of Artificial Sequence: Synthetic oligonucleotide
gguuguacgguguccacac

SEQ ID NO: 2433892 - RNA, 19 nt, Artificial Sequence
  Description of Artificial Sequence: Synthetic oligonucleotide
ucacguaauucuucucguc

SEQ ID NO: 2433893 - RNA, 19 nt, Artificial Sequence
  Description of Artificial Sequence: Synthetic oligonucleotide
ugacaucgaaguacccacu

SEQ ID NO: 2433894 - RNA, 19 nt, Artificial Sequence
  Description of Artificial Sequence: Synthetic oligonucleotide
uccaaguaagaaucacuuu

SEQ ID NO: 2433895 - RNA, 19 nt, Artificial Sequence
  Description of Artificial Sequence: Synthetic oligonucleotide
cagcgagagccucacacag

SEQ ID NO: 2433896 - RNA, 19 nt, Artificial Sequence
  Description of Artificial Sequence: Synthetic oligonucleotide
cauguacugaacccgggca

SEQ ID NO: 2433897 - RNA, 19 nt, Artificial Sequence
  Description of Artificial Sequence: Synthetic oligonucleotide
gaaauccggauccacuugu

SEQ ID NO: 2433898 - RNA, 19 nt, Artificial Sequence
  Description of Artificial Sequence: Synthetic oligonucleotide
gucccugacaucgaaguac

SEQ ID NO: 2433899 - RNA, 19 nt, Artificial Sequence
  Description of Artificial Sequence: Synthetic oligonucleotide
cauaccucucuaugucuug

SEQ ID NO: 2433900 - RNA, 19 nt, Artificial Sequence
  Description of Artificial Sequence: Synthetic oligonucleotide
auguacugaacccgggcau

SEQ ID NO: 2433901 - RNA, 19 nt, Artificial Sequence
  Description of Artificial Sequence: Synthetic oligonucleotide
gcuuccauaccucucuaug

SEQ ID NO: 2433902 - RNA, 19 nt, Artificial Sequence
  Description of Artificial Sequence: Synthetic oligonucleotide
uuccggaucuuuuccaguu

SEQ ID NO: 2433903 - RNA, 19 nt, Artificial Sequence
  Description of Artificial Sequence: Synthetic oligonucleotide
guuaugcaccaaugcacac

SEQ ID NO: 2433904 - RNA, 19 nt, Artificial Sequence
  Description of Artificial Sequence: Synthetic oligonucleotide
caguacucuucaaagugca

SEQ ID NO: 2433905 - RNA, 19 nt, Artificial Sequence
  Description of Artificial Sequence: Synthetic oligonucleotide
cagcuggacgguuguacgg

SEQ ID NO: 2433906 - RNA, 19 nt, Artificial Sequence
  Description of Artificial Sequence: Synthetic oligonucleotide
ugauagaugccagcaggaa

SEQ ID NO: 2433907 - RNA, 19 nt, Artificial Sequence
  Description of Artificial Sequence: Synthetic oligonucleotide
acggugauagaugccagca

SEQ ID NO: 2433908 - RNA, 19 nt, Artificial Sequence
  Description of Artificial Sequence: Synthetic oligonucleotide
cucucuaugucuugacaga

SEQ ID NO: 2433909 - RNA, 19 nt, Artificial Sequence
  Description of Artificial Sequence: Synthetic oligonucleotide
gauucugauuuuccagucu
